United States Patent Application Publication US 2015/0232836 A1 - sequence listing, part 38

SEQ ID NO: 1486097 - DNA, 15 bp, Homo sapiens
tcagccttccaaaat

SEQ ID NO: 1486098 - DNA, 15 bp, Homo sapiens
cagccttccaaaatg

SEQ ID NO: 1486099 - DNA, 15 bp, Homo sapiens
agccttccaaaatgc

SEQ ID NO: 1486100 - DNA, 15 bp, Homo sapiens
gccttccaaaatgct

SEQ ID NO: 1486101 - DNA, 15 bp, Homo sapiens
ccttccaaaatgctg

SEQ ID NO: 1486102 - DNA, 15 bp, Homo sapiens
cttccaaaatgctgg

SEQ ID NO: 1486103 - DNA, 15 bp, Homo sapiens
ttccaaaatgctggg

SEQ ID NO: 1486104 - DNA, 15 bp, Homo sapiens
tccaaaatgctggga

SEQ ID NO: 1486105 - DNA, 15 bp, Homo sapiens
ccaccatgcctggcc

SEQ ID NO: 1486106 - DNA, 15 bp, Homo sapiens
accatgcctggccac

SEQ ID NO: 1486107 - DNA, 15 bp, Homo sapiens
ccatgcctggccaca

SEQ ID NO: 1486108 - DNA, 15 bp, Homo sapiens
catgcctggccacat

SEQ ID NO: 1486109 - DNA, 15 bp, Homo sapiens
atgcctggccacatt

SEQ ID NO: 1486110 - DNA, 15 bp, Homo sapiens
tgcctggccacattt

SEQ ID NO: 1486111 - DNA, 15 bp, Homo sapiens
gcctggccacatttt

SEQ ID NO: 1486112 - DNA, 15 bp, Homo sapiens
cctggccacattttt

SEQ ID NO: 1486113 - DNA, 15 bp, Homo sapiens
ctggccacattttta

SEQ ID NO: 1486114 - DNA, 15 bp, Homo sapiens
tggccacatttttaa

SEQ ID NO: 1486115 - DNA, 15 bp, Homo sapiens
ggccacatttttaag

SEQ ID NO: 1486116 - DNA, 15 bp, Homo sapiens
gccacatttttaagt

SEQ ID NO: 1486117 - DNA, 15 bp, Homo sapiens
ccacatttttaagta

SEQ ID NO: 1486118 - DNA, 15 bp, Homo sapiens
cacatttttaagtat

SEQ ID NO: 1486119 - DNA, 15 bp, Homo sapiens
acatttttaagtatt

SEQ ID NO: 1486120 - DNA, 15 bp, Homo sapiens
catttttaagtattt

SEQ ID NO: 1486121 - DNA, 15 bp, Homo sapiens
atttttaagtattta

SEQ ID NO: 1486122 - DNA, 15 bp, Homo sapiens
tttttaagtatttac

SEQ ID NO: 1486123 - DNA, 15 bp, Homo sapiens
ttttaagtatttact

SEQ ID NO: 1486124 - DNA, 15 bp, Homo sapiens
tttaagtatttactt

SEQ ID NO: 1486125 - DNA, 15 bp, Homo sapiens
ttaagtatttacttt

SEQ ID NO: 1486126 - DNA, 15 bp, Homo sapiens
taagtatttactttg

SEQ ID NO: 1486127 - DNA, 15 bp, Homo sapiens
aagtatttactttgt

SEQ ID NO: 1486128 - DNA, 15 bp, Homo sapiens
agtatttactttgtc

SEQ ID NO: 1486129 - DNA, 15 bp, Homo sapiens
gtatttactttgtcc

SEQ ID NO: 1486130 - DNA, 15 bp, Homo sapiens
tatttactttgtccc

SEQ ID NO: 1486131 - DNA, 15 bp, Homo sapiens
atttactttgtccca

SEQ ID NO: 1486132 - DNA, 15 bp, Homo sapiens
tttactttgtcccaa

SEQ ID NO: 1486133 - DNA, 15 bp, Homo sapiens
ttactttgtcccaag

SEQ ID NO: 1486134 - DNA, 15 bp, Homo sapiens
tactttgtcccaaga

SEQ ID NO: 1486135 - DNA, 15 bp, Homo sapiens
actttgtcccaagaa

SEQ ID NO: 1486136 - DNA, 15 bp, Homo sapiens
ctttgtcccaagaac

SEQ ID NO: 1486137 - DNA, 15 bp, Homo sapiens
tttgtcccaagaact

SEQ ID NO: 1486138 - DNA, 15 bp, Homo sapiens
ttgtcccaagaactt

SEQ ID NO: 1486139 - DNA, 15 bp, Homo sapiens
tgtcccaagaacttc

SEQ ID NO: 1486140 - DNA, 15 bp, Homo sapiens
gtcccaagaacttca

SEQ ID NO: 1486141 - DNA, 15 bp, Homo sapiens
tcccaagaacttcag

SEQ ID NO: 1486142 - DNA, 15 bp, Homo sapiens
cccaagaacttcagg

SEQ ID NO: 1486143 - DNA, 15 bp, Homo sapiens
ccaagaacttcaggt

SEQ ID NO: 1486144 - DNA, 15 bp, Homo sapiens
caagaacttcaggtg

SEQ ID NO: 1486145 - DNA, 15 bp, Homo sapiens
aagaacttcaggtgc

SEQ ID NO: 1486146 - DNA, 15 bp, Homo sapiens
agaacttcaggtgct

SEQ ID NO: 1486147 - DNA, 15 bp, Homo sapiens
gaacttcaggtgctt

SEQ ID NO: 1486148 - DNA, 15 bp, Homo sapiens
aacttcaggtgcttg

SEQ ID NO: 1486149 - DNA, 15 bp, Homo sapiens
acttcaggtgcttga

SEQ ID NO: 1486150 - DNA, 15 bp, Homo sapiens
cttcaggtgcttgat

SEQ ID NO: 1486151 - DNA, 15 bp, Homo sapiens
ttcaggtgcttgatt

SEQ ID NO: 1486152 - DNA, 15 bp, Homo sapiens
tcaggtgcttgattt

SEQ ID NO: 1486153 - DNA, 15 bp, Homo sapiens
caggtgcttgattta

SEQ ID NO: 1486154 - DNA, 15 bp, Homo sapiens
aggtgcttgatttag

SEQ ID NO: 1486155 - DNA, 15 bp, Homo sapiens
ggtgcttgatttagg

SEQ ID NO: 1486156 - DNA, 15 bp, Homo sapiens
gtgcttgatttaggt

SEQ ID NO: 1486157 - DNA, 15 bp, Homo sapiens
tgcttgatttaggta

SEQ ID NO: 1486158 - DNA, 15 bp, Homo sapiens
gcttgatttaggtac

SEQ ID NO: 1486159 - DNA, 15 bp, Homo sapiens
cttgatttaggtact

SEQ ID NO: 1486160 - DNA, 15 bp, Homo sapiens
ttgatttaggtactt

SEQ ID NO: 1486161 - DNA, 15 bp, Homo sapiens
tgatttaggtacttt

SEQ ID NO: 1486162 - DNA, 15 bp, Homo sapiens
gatttaggtacttta

SEQ ID NO: 1486163 - DNA, 15 bp, Homo sapiens
atttaggtactttac

SEQ ID NO: 1486164 - DNA, 15 bp, Homo sapiens
tttaggtactttact

SEQ ID NO: 1486165 - DNA, 15 bp, Homo sapiens
ttaggtactttactc

SEQ ID NO: 1486166 - DNA, 15 bp, Homo sapiens
taggtactttactca

SEQ ID NO: 1486167 - DNA, 15 bp, Homo sapiens
aggtactttactcat

SEQ ID NO: 1486168 - DNA, 15 bp, Homo sapiens
ggtactttactcata

SEQ ID NO: 1486169 - DNA, 15 bp, Homo sapiens
gtactttactcatat

SEQ ID NO: 1486170 - DNA, 15 bp, Homo sapiens
tactttactcatatt

SEQ ID NO: 1486171 - DNA, 15 bp, Homo sapiens
actttactcatatta

SEQ ID NO: 1486172 - DNA, 15 bp, Homo sapiens
ctttactcatattat

SEQ ID NO: 1486173 - DNA, 15 bp, Homo sapiens
tttactcatattatc

SEQ ID NO: 1486174 - DNA, 15 bp, Homo sapiens
ttactcatattatct

SEQ ID NO: 1486175 - DNA, 15 bp, Homo sapiens
tactcatattatctc

SEQ ID NO: 1486176 - DNA, 15 bp, Homo sapiens
actcatattatctca

SEQ ID NO: 1486177 - DNA, 15 bp, Homo sapiens
ctcatattatctcat

SEQ ID NO: 1486178 - DNA, 15 bp, Homo sapiens
tcatattatctcatt

SEQ ID NO: 1486179 - DNA, 15 bp, Homo sapiens
catattatctcattt

SEQ ID NO: 1486180 - DNA, 15 bp, Homo sapiens
atattatctcatttt

SEQ ID NO: 1486181 - DNA, 15 bp, Homo sapiens
tattatctcatttta

SEQ ID NO: 1486182 - DNA, 15 bp, Homo sapiens
attatctcattttat

SEQ ID NO: 1486183 - DNA, 15 bp, Homo sapiens
ttatctcattttatc

SEQ ID NO: 1486184 - DNA, 15 bp, Homo sapiens
tatctcattttatct

SEQ ID NO: 1486185 - DNA, 15 bp, Homo sapiens
atctcattttatctt

SEQ ID NO: 1486186 - DNA, 15 bp, Homo sapiens
tctcattttatcttt

SEQ ID NO: 1486187 - DNA, 15 bp, Homo sapiens
ctcattttatcttta

SEQ ID NO: 1486188 - DNA, 15 bp, Homo sapiens
tcattttatctttat

SEQ ID NO: 1486189 - DNA, 15 bp, Homo sapiens
cattttatctttatc

SEQ ID NO: 1486190 - DNA, 15 bp, Homo sapiens
attttatctttatcc

SEQ ID NO: 1486191 - DNA, 15 bp, Homo sapiens
ttttatctttatcca

SEQ ID NO: 1486192 - DNA, 15 bp, Homo sapiens
tttatctttatccag

SEQ ID NO: 1486193 - DNA, 15 bp, Homo sapiens
ttatctttatccaga

SEQ ID NO: 1486194 - DNA, 15 bp, Homo sapiens
tatctttatccagaa

SEQ ID NO: 1486195 - DNA, 15 bp, Homo sapiens
atctttatccagaat

SEQ ID NO: 1486196 - DNA, 15 bp, Homo sapiens
tctttatccagaatt

SEQ ID NO: 1486197 - DNA, 15 bp, Homo sapiens
ctttatccagaatta

SEQ ID NO: 1486198 - DNA, 15 bp, Homo sapiens
tttatccagaattac

SEQ ID NO: 1486199 - DNA, 15 bp, Homo sapiens
ttatccagaattacc

SEQ ID NO: 1486200 - DNA, 15 bp, Homo sapiens
tatccagaattacca

SEQ ID NO: 1486201 - DNA, 15 bp, Homo sapiens
atccagaattaccag

SEQ ID NO: 1486202 - DNA, 15 bp, Homo sapiens
tccagaattaccaga

SEQ ID NO: 1486203 - DNA, 15 bp, Homo sapiens
ccagaattaccagat

SEQ ID NO: 1486204 - DNA, 15 bp, Homo sapiens
cagaattaccagatc

SEQ ID NO: 1486205 - DNA, 15 bp, Homo sapiens
agaattaccagatca

SEQ ID NO: 1486206 - DNA, 15 bp, Homo sapiens
gaattaccagatcag

SEQ ID NO: 1486207 - DNA, 15 bp, Homo sapiens
aattaccagatcagg

SEQ ID NO: 1486208 - DNA, 15 bp, Homo sapiens
attaccagatcaggt

SEQ ID NO: 1486209 - DNA, 15 bp, Homo sapiens
ttaccagatcaggta

SEQ ID NO: 1486210 - DNA, 15 bp, Homo sapiens
taccagatcaggtac

SEQ ID NO: 1486211 - DNA, 15 bp, Homo sapiens
accagatcaggtact

SEQ ID NO: 1486212 - DNA, 15 bp, Homo sapiens
ccagatcaggtactg

SEQ ID NO: 1486213 - DNA, 15 bp, Homo sapiens
cagatcaggtactga

SEQ ID NO: 1486214 - DNA, 15 bp, Homo sapiens
agatcaggtactgat

SEQ ID NO: 1486215 - DNA, 15 bp, Homo sapiens
gatcaggtactgata

SEQ ID NO: 1486216 - DNA, 15 bp, Homo sapiens
atcaggtactgatat

SEQ ID NO: 1486217 - DNA, 15 bp, Homo sapiens
tcaggtactgatatt

SEQ ID NO: 1486218 - DNA, 15 bp, Homo sapiens
caggtactgatatta

SEQ ID NO: 1486219 - DNA, 15 bp, Homo sapiens
aggtactgatattat

SEQ ID NO: 1486220 - DNA, 15 bp, Homo sapiens
ggtactgatattatc

SEQ ID NO: 1486221 - DNA, 15 bp, Homo sapiens
gtactgatattatcc

SEQ ID NO: 1486222 - DNA, 15 bp, Homo sapiens
tactgatattatccc

SEQ ID NO: 1486223 - DNA, 15 bp, Homo sapiens
actgatattatcccc

SEQ ID NO: 1486224 - DNA, 15 bp, Homo sapiens
ctgatattatcccca

SEQ ID NO: 1486225 - DNA, 15 bp, Homo sapiens
tgatattatccccaa

SEQ ID NO: 1486226 - DNA, 15 bp, Homo sapiens
gatattatccccaac

SEQ ID NO: 1486227 - DNA, 15 bp, Homo sapiens
atattatccccaacc

SEQ ID NO: 1486228 - DNA, 15 bp, Homo sapiens
tattatccccaacct

SEQ ID NO: 1486229 - DNA, 15 bp, Homo sapiens
attatccccaaccta

SEQ ID NO: 1486230 - DNA, 15 bp, Homo sapiens
ttatccccaacctac

SEQ ID NO: 1486231 - DNA, 15 bp, Homo sapiens
tatccccaacctaca

SEQ ID NO: 1486232 - DNA, 15 bp, Homo sapiens
atccccaacctacag

SEQ ID NO: 1486233 - DNA, 15 bp, Homo sapiens
tccccaacctacaga

SEQ ID NO: 1486234 - DNA, 15 bp, Homo sapiens
ccccaacctacagat

SEQ ID NO: 1486235 - DNA, 15 bp, Homo sapiens
cccaacctacagatg

SEQ ID NO: 1486236 - DNA, 15 bp, Homo sapiens
ccaacctacagatga

SEQ ID NO: 1486237 - DNA, 15 bp, Homo sapiens
caacctacagatgag

SEQ ID NO: 1486238 - DNA, 15 bp, Homo sapiens
aacctacagatgagg

SEQ ID NO: 1486239 - DNA, 15 bp, Homo sapiens
acctacagatgagga

SEQ ID NO: 1486240 - DNA, 15 bp, Homo sapiens
cctacagatgaggaa

SEQ ID NO: 1486241 - DNA, 15 bp, Homo sapiens
ctacagatgaggaaa

SEQ ID NO: 1486242 - DNA, 15 bp, Homo sapiens
tacagatgaggaaat

SEQ ID NO: 1486243 - DNA, 15 bp, Homo sapiens
acagatgaggaaatg

SEQ ID NO: 1486244 - DNA, 15 bp, Homo sapiens
cagatgaggaaatga

SEQ ID NO: 1486245 - DNA, 15 bp, Homo sapiens
agatgaggaaatgaa

SEQ ID NO: 1486246 - DNA, 15 bp, Homo sapiens
gatgaggaaatgaag

SEQ ID NO: 1486247 - DNA, 15 bp, Homo sapiens
atgaggaaatgaagt

SEQ ID NO: 1486248 - DNA, 15 bp, Homo sapiens
tgaggaaatgaagtt

SEQ ID NO: 1486249 - DNA, 15 bp, Homo sapiens
gaggaaatgaagttc

SEQ ID NO: 1486250 - DNA, 15 bp, Homo sapiens
aggaaatgaagttct

SEQ ID NO: 1486251 - DNA, 15 bp, Homo sapiens
ggaaatgaagttctt

SEQ ID NO: 1486252 - DNA, 15 bp, Homo sapiens
gaaatgaagttcttg

SEQ ID NO: 1486253 - DNA, 15 bp, Homo sapiens
aaatgaagttcttgg

SEQ ID NO: 1486254 - DNA, 15 bp, Homo sapiens
aatgaagttcttgga

SEQ ID NO: 1486255 - DNA, 15 bp, Homo sapiens
atgaagttcttggaa

SEQ ID NO: 1486256 - DNA, 15 bp, Homo sapiens
tgaagttcttggaaa

SEQ ID NO: 1486257 - DNA, 15 bp, Homo sapiens
gaagttcttggaaat

SEQ ID NO: 1486258 - DNA, 15 bp, Homo sapiens
aagttcttggaaatt

SEQ ID NO: 1486259 - DNA, 15 bp, Homo sapiens
agttcttggaaattg

SEQ ID NO: 1486260 - DNA, 15 bp, Homo sapiens
gttcttggaaattgt

SEQ ID NO: 1486261 - DNA, 15 bp, Homo sapiens
ttcttggaaattgta

SEQ ID NO: 1486262 - DNA, 15 bp, Homo sapiens
tcttggaaattgtac

SEQ ID NO: 1486263 - DNA, 15 bp, Homo sapiens
cttggaaattgtact

SEQ ID NO: 1486264 - DNA, 15 bp, Homo sapiens
ttggaaattgtacta

SEQ ID NO: 1486265 - DNA, 15 bp, Homo sapiens
tggaaattgtactag

SEQ ID NO: 1486266 - DNA, 15 bp, Homo sapiens
ggaaattgtactaga

SEQ ID NO: 1486267 - DNA, 15 bp, Homo sapiens
gaaattgtactagat

SEQ ID NO: 1486268 - DNA, 15 bp, Homo sapiens
aattgtactagatgc

SEQ ID NO: 1486269 - DNA, 15 bp, Homo sapiens
attgtactagatgcg

SEQ ID NO: 1486270 - DNA, 15 bp, Homo sapiens
ttgtactagatgcgt

SEQ ID NO: 1486271 - DNA, 15 bp, Homo sapiens
tgtactagatgcgta

SEQ ID NO: 1486272 - DNA, 15 bp, Homo sapiens
gtactagatgcgtaa

SEQ ID NO: 1486273 - DNA, 15 bp, Homo sapiens
tactagatgcgtaat

SEQ ID NO: 1486274 - DNA, 15 bp, Homo sapiens
actagatgcgtaatg

SEQ ID NO: 1486275 - DNA, 15 bp, Homo sapiens
ctagatgcgtaatga

SEQ ID NO: 1486276 - DNA, 15 bp, Homo sapiens
tagatgcgtaatgag

SEQ ID NO: 1486277 - DNA, 15 bp, Homo sapiens
agatgcgtaatgagc

SEQ ID NO: 1486278 - DNA, 15 bp, Homo sapiens
gatgcgtaatgagca

SEQ ID NO: 1486279 - DNA, 15 bp, Homo sapiens
atgcgtaatgagcag

SEQ ID NO: 1486280 - DNA, 15 bp, Homo sapiens
tgcgtaatgagcagc

SEQ ID NO: 1486281 - DNA, 15 bp, Homo sapiens
gcgtaatgagcagca

SEQ ID NO: 1486282 - DNA, 15 bp, Homo sapiens
cgtaatgagcagcag

SEQ ID NO: 1486283 - DNA, 15 bp, Homo sapiens
gtaatgagcagcaga

SEQ ID NO: 1486284 - DNA, 15 bp, Homo sapiens
taatgagcagcagat

SEQ ID NO: 1486285 - DNA, 15 bp, Homo sapiens
aatgagcagcagatg

SEQ ID NO: 1486286 - DNA, 15 bp, Homo sapiens
atgagcagcagatga

SEQ ID NO: 1486287 - DNA, 15 bp, Homo sapiens
tgagcagcagatgaa

SEQ ID NO: 1486288 - DNA, 15 bp, Homo sapiens
gagcagcagatgaag

SEQ ID NO: 1486289 - DNA, 15 bp, Homo sapiens
agcagcagatgaagc

SEQ ID NO: 1486290 - DNA, 15 bp, Homo sapiens
gcagcagatgaagct

SEQ ID NO: 1486291 - DNA, 15 bp, Homo sapiens
cagcagatgaagctt

SEQ ID NO: 1486292 - DNA, 15 bp, Homo sapiens
agcagatgaagcttg

SEQ ID NO: 1486293 - DNA, 15 bp, Homo sapiens
gcagatgaagcttgg

SEQ ID NO: 1486294 - DNA, 15 bp, Homo sapiens
cagatgaagcttgga

SEQ ID NO: 1486295 - DNA, 15 bp, Homo sapiens
agatgaagcttggat

SEQ ID NO: 1486296 - DNA, 15 bp, Homo sapiens
gatgaagcttggata

SEQ ID NO: 1486297 - DNA, 15 bp, Homo sapiens
atgaagcttggatag

SEQ ID NO: 1486298 - DNA, 15 bp, Homo sapiens
tgaagcttggataga

SEQ ID NO: 1486299 - DNA, 15 bp, Homo sapiens
gaagcttggatagaa

SEQ ID NO: 1486300 - DNA, 15 bp, Homo sapiens
aagcttggatagaaa

SEQ ID NO: 1486301 - DNA, 15 bp, Homo sapiens
agcttggatagaaac

SEQ ID NO: 1486302 - DNA, 15 bp, Homo sapiens
gcttggatagaaact

SEQ ID NO: 1486303 - DNA, 15 bp, Homo sapiens
cttggatagaaactc

SEQ ID NO: 1486304 - DNA, 15 bp, Homo sapiens
ttggatagaaactca

SEQ ID NO: 1486305 - DNA, 15 bp, Homo sapiens
tggatagaaactcaa

SEQ ID NO: 1486306 - DNA, 15 bp, Homo sapiens
ggatagaaactcaaa

SEQ ID NO: 1486307 - DNA, 15 bp, Homo sapiens
gatagaaactcaaat

SEQ ID NO: 1486308 - DNA, 15 bp, Homo sapiens
atagaaactcaaatc

SEQ ID NO: 1486309 - DNA, 15 bp, Homo sapiens
tagaaactcaaatct

SEQ ID NO: 1486310 - DNA, 15 bp, Homo sapiens
agaaactcaaatctc

SEQ ID NO: 1486311 - DNA, 15 bp, Homo sapiens
gaaactcaaatctct

SEQ ID NO: 1486312 - DNA, 15 bp, Homo sapiens
aaactcaaatctctc

SEQ ID NO: 1486313 - DNA, 15 bp, Homo sapiens
aactcaaatctctct

SEQ ID NO: 1486314 - DNA, 15 bp, Homo sapiens
actcaaatctctctg

SEQ ID NO: 1486315 - DNA, 15 bp, Homo sapiens
ctcaaatctctctga

SEQ ID NO: 1486316 - DNA, 15 bp, Homo sapiens
tcaaatctctctgac

SEQ ID NO: 1486317 - DNA, 15 bp, Homo sapiens
caaatctctctgact

SEQ ID NO: 1486318 - DNA, 15 bp, Homo sapiens
aaatctctctgactc

SEQ ID NO: 1486319 - DNA, 15 bp, Homo sapiens
aatctctctgactca

SEQ ID NO: 1486320 - DNA, 15 bp, Homo sapiens
atctctctgactcaa

SEQ ID NO: 1486321 - DNA, 15 bp, Homo sapiens
tctctctgactcaag

SEQ ID NO: 1486322 - DNA, 15 bp, Homo sapiens
ctctctgactcaaga

SEQ ID NO: 1486323 - DNA, 15 bp, Homo sapiens
tctctgactcaagat

SEQ ID NO: 1486324 - DNA, 15 bp, Homo sapiens
ctctgactcaagatt

SEQ ID NO: 1486325 - DNA, 15 bp, Homo sapiens
tctgactcaagattt

SEQ ID NO: 1486326 - DNA, 15 bp, Homo sapiens
ctgactcaagattta

SEQ ID NO: 1486327 - DNA, 15 bp, Homo sapiens
tgactcaagatttat

SEQ ID NO: 1486328 - DNA, 15 bp, Homo sapiens
gactcaagatttatg

SEQ ID NO: 1486329 - DNA, 15 bp, Homo sapiens
actcaagatttatgc

SEQ ID NO: 1486330 - DNA, 15 bp, Homo sapiens
ctcaagatttatgct

SEQ ID NO: 1486331 - DNA, 15 bp, Homo sapiens
tcaagatttatgctc

SEQ ID NO: 1486332 - DNA, 15 bp, Homo sapiens
caagatttatgctct

SEQ ID NO: 1486333 - DNA, 15 bp, Homo sapiens
aagatttatgctcta

SEQ ID NO: 1486334 - DNA, 15 bp, Homo sapiens
agatttatgctctaa

SEQ ID NO: 1486335 - DNA, 15 bp, Homo sapiens
gatttatgctctaag

SEQ ID NO: 1486336 - DNA, 15 bp, Homo sapiens
atttatgctctaagt

SEQ ID NO: 1486337 - DNA, 15 bp, Homo sapiens
tttatgctctaagtt

SEQ ID NO: 1486338 - DNA, 15 bp, Homo sapiens
ttatgctctaagtta

SEQ ID NO: 1486339 - DNA, 15 bp, Homo sapiens
tatgctctaagttac

SEQ ID NO: 1486340 - DNA, 15 bp, Homo sapiens
atgctctaagttaca

SEQ ID NO: 1486341 - DNA, 15 bp, Homo sapiens
tgctctaagttacaa

SEQ ID NO: 1486342 - DNA, 15 bp, Homo sapiens
gctctaagttacaat

SEQ ID NO: 1486343 - DNA, 15 bp, Homo sapiens
ctctaagttacaata

SEQ ID NO: 1486344 - DNA, 15 bp, Homo sapiens
tctaagttacaataa

SEQ ID NO: 1486345 - DNA, 15 bp, Homo sapiens
ctaagttacaataaa

SEQ ID NO: 1486346 - DNA, 15 bp, Homo sapiens
taagttacaataaac

SEQ ID NO: 1486347 - DNA, 15 bp, Homo sapiens
aagttacaataaaca

SEQ ID NO: 1486348 - DNA, 15 bp, Homo sapiens
agttacaataaacac

SEQ ID NO: 1486349 - DNA, 15 bp, Homo sapiens
gttacaataaacacc

SEQ ID NO: 1486350 - DNA, 15 bp, Homo sapiens
ttacaataaacaccg

SEQ ID NO: 1486351 - DNA, 15 bp, Homo sapiens
tacaataaacaccgg

SEQ ID NO: 1486352 - DNA, 15 bp, Homo sapiens
acaataaacaccgga

SEQ ID NO: 1486353 - DNA, 15 bp, Homo sapiens
caataaacaccggag

SEQ ID NO: 1486354 - DNA, 15 bp, Homo sapiens
aataaacaccggagt

SEQ ID NO: 1486355 - DNA, 15 bp, Homo sapiens
ataaacaccggagtt

SEQ ID NO: 1486356 - DNA, 15 bp, Homo sapiens
taaacaccggagtta

SEQ ID NO: 1486357 - DNA, 15 bp, Homo sapiens
aaacaccggagttac

SEQ ID NO: 1486358 - DNA, 15 bp, Homo sapiens
aacaccggagttaca

SEQ ID NO: 1486359 - DNA, 15 bp, Homo sapiens
acaccggagttacac

SEQ ID NO: 1486360 - DNA, 15 bp, Homo sapiens
caccggagttacact

SEQ ID NO: 1486361 - DNA, 15 bp, Homo sapiens
accggagttacactt

SEQ ID NO: 1486362 - DNA, 15 bp, Homo sapiens
ccggagttacactta

SEQ ID NO: 1486363 - DNA, 15 bp, Homo sapiens
cggagttacacttaa

SEQ ID NO: 1486364 - DNA, 15 bp, Homo sapiens
ggagttacacttaaa

SEQ ID NO: 1486365 - DNA, 15 bp, Homo sapiens
gagttacacttaaag

SEQ ID NO: 1486366 - DNA, 15 bp, Homo sapiens
agttacacttaaaga

SEQ ID NO: 1486367 - DNA, 15 bp, Homo sapiens
gttacacttaaagag

SEQ ID NO: 1486368 - DNA, 15 bp, Homo sapiens
ttacacttaaagagc

SEQ ID NO: 1486369 - DNA, 15 bp, Homo sapiens
tacacttaaagagct

SEQ ID NO: 1486370 - DNA, 15 bp, Homo sapiens
acacttaaagagctt

SEQ ID NO: 1486371 - DNA, 15 bp, Homo sapiens
cacttaaagagctta

SEQ ID NO: 1486372 - DNA, 15 bp, Homo sapiens
acttaaagagcttat

SEQ ID NO: 1486373 - DNA, 15 bp, Homo sapiens
cttaaagagcttatg

SEQ ID NO: 1486374 - DNA, 15 bp, Homo sapiens
ttaaagagcttatgg

SEQ ID NO: 1486375 - DNA, 15 bp, Homo sapiens
taaagagcttatggt

SEQ ID NO: 1486376 - DNA, 15 bp, Homo sapiens
aaagagcttatggtc

SEQ ID NO: 1486377 - DNA, 15 bp, Homo sapiens
aagagcttatggtct

SEQ ID NO: 1486378 - DNA, 15 bp, Homo sapiens
agagcttatggtcta

SEQ ID NO: 1486379 - DNA, 15 bp, Homo sapiens
gagcttatggtctaa

SEQ ID NO: 1486380 - DNA, 15 bp, Homo sapiens
agcttatggtctaat

SEQ ID NO: 1486381 - DNA, 15 bp, Homo sapiens
gcttatggtctaatt

SEQ ID NO: 1486382 - DNA, 15 bp, Homo sapiens
cttatggtctaattg

SEQ ID NO: 1486383 - DNA, 15 bp, Homo sapiens
ttatggtctaattga

SEQ ID NO: 1486384 - DNA, 15 bp, Homo sapiens
tatggtctaattgag

SEQ ID NO: 1486385 - DNA, 15 bp, Homo sapiens
atggtctaattgaga

SEQ ID NO: 1486386 - DNA, 15 bp, Homo sapiens
tggtctaattgagag

SEQ ID NO: 1486387 - DNA, 15 bp, Homo sapiens
ggtctaattgagagg

SEQ ID NO: 1486388 - DNA, 15 bp, Homo sapiens
gtctaattgagagga

SEQ ID NO: 1486389 - DNA, 15 bp, Homo sapiens
tctaattgagaggac

SEQ ID NO: 1486390 - DNA, 15 bp, Homo sapiens
ctaattgagaggaca

SEQ ID NO: 1486391 - DNA, 15 bp, Homo sapiens
taattgagaggacag

SEQ ID NO: 1486392 - DNA, 15 bp, Homo sapiens
aattgagaggacaga

SEQ ID NO: 1486393 - DNA, 15 bp, Homo sapiens
attgagaggacagaa

SEQ ID NO: 1486394 - DNA, 15 bp, Homo sapiens
ttgagaggacagaaa

SEQ ID NO: 1486395 - DNA, 15 bp, Homo sapiens
tgagaggacagaaaa

SEQ ID NO: 1486396 - DNA, 15 bp, Homo sapiens
gagaggacagaaaat

SEQ ID NO: 1486397 - DNA, 15 bp, Homo sapiens
agaggacagaaaatt

SEQ ID NO: 1486398 - DNA, 15 bp, Homo sapiens
gaggacagaaaattc

SEQ ID NO: 1486399 - DNA, 15 bp, Homo sapiens
aggacagaaaattca

SEQ ID NO: 1486400 - DNA, 15 bp, Homo sapiens
ggacagaaaattcac

SEQ ID NO: 1486401 - DNA, 15 bp, Homo sapiens
gacagaaaattcaca

SEQ ID NO: 1486402 - DNA, 15 bp, Homo sapiens
acagaaaattcacaa

SEQ ID NO: 1486403 - DNA, 15 bp, Homo sapiens
agaaaattcacaaga

SEQ ID NO: 1486404 - DNA, 15 bp, Homo sapiens
gaaaattcacaagaa

SEQ ID NO: 1486405 - DNA, 15 bp, Homo sapiens
aaaattcacaagaaa

SEQ ID NO: 1486406 - DNA, 15 bp, Homo sapiens
aaattcacaagaaag

SEQ ID NO: 1486407 - DNA, 15 bp, Homo sapiens
aattcacaagaaaga

SEQ ID NO: 1486408 - DNA, 15 bp, Homo sapiens
attcacaagaaagaa

SEQ ID NO: 1486409 - DNA, 15 bp, Homo sapiens
ttcacaagaaagaac

SEQ ID NO: 1486410 - DNA, 15 bp, Homo sapiens
tcacaagaaagaacc

SEQ ID NO: 1486411 - DNA, 15 bp, Homo sapiens
cacaagaaagaacct

SEQ ID NO: 1486412 - DNA, 15 bp, Homo sapiens
acaagaaagaacctg

SEQ ID NO: 1486413 - DNA, 15 bp, Homo sapiens
caagaaagaacctgt

SEQ ID NO: 1486414 - DNA, 15 bp, Homo sapiens
aagaaagaacctgtg

SEQ ID NO: 1486415 - DNA, 15 bp, Homo sapiens
agaaagaacctgtga

SEQ ID NO: 1486416 - DNA, 15 bp, Homo sapiens
gaaagaacctgtgaa

SEQ ID NO: 1486417 - DNA, 15 bp, Homo sapiens
aaagaacctgtgaag

SEQ ID NO: 1486418 - DNA, 15 bp, Homo sapiens
aagaacctgtgaaga

SEQ ID NO: 1486419 - DNA, 15 bp, Homo sapiens
agaacctgtgaagag

SEQ ID NO: 1486420 - DNA, 15 bp, Homo sapiens
gaacctgtgaagagt

SEQ ID NO: 1486421 - DNA, 15 bp, Homo sapiens
aacctgtgaagagta

SEQ ID NO: 1486422 - DNA, 15 bp, Homo sapiens
acctgtgaagagtag

SEQ ID NO: 1486423 - DNA, 15 bp, Homo sapiens
cctgtgaagagtagt

SEQ ID NO: 1486424 - DNA, 15 bp, Homo sapiens
ctgtgaagagtagtg

SEQ ID NO: 1486425 - DNA, 15 bp, Homo sapiens
tgtgaagagtagtgg

SEQ ID NO: 1486426 - DNA, 15 bp, Homo sapiens
gtgaagagtagtggt

SEQ ID NO: 1486427 - DNA, 15 bp, Homo sapiens
tgaagagtagtggtt

SEQ ID NO: 1486428 - DNA, 15 bp, Homo sapiens
gaagagtagtggtta

SEQ ID NO: 1486429 - DNA, 15 bp, Homo sapiens
aagagtagtggttat

SEQ ID NO: 1486430 - DNA, 15 bp, Homo sapiens
agagtagtggttatg

SEQ ID NO: 1486431 - DNA, 15 bp, Homo sapiens
gagtagtggttatgt

SEQ ID NO: 1486432 - DNA, 15 bp, Homo sapiens
agtagtggttatgtg

SEQ ID NO: 1486433 - DNA, 15 bp, Homo sapiens
gtagtggttatgtgc

SEQ ID NO: 1486434 - DNA, 15 bp, Homo sapiens
tagtggttatgtgct

SEQ ID NO: 1486435 - DNA, 15 bp, Homo sapiens
agtggttatgtgctt

SEQ ID NO: 1486436 - DNA, 15 bp, Homo sapiens
gtggttatgtgctta

SEQ ID NO: 1486437 - DNA, 15 bp, Homo sapiens
tggttatgtgcttag

SEQ ID NO: 1486438 - DNA, 15 bp, Homo sapiens
ggttatgtgcttagg

SEQ ID NO: 1486439 - DNA, 15 bp, Homo sapiens
gttatgtgcttaggc

SEQ ID NO: 1486440 - DNA, 15 bp, Homo sapiens
ttatgtgcttaggct

SEQ ID NO: 1486441 - DNA, 15 bp, Homo sapiens
tatgtgcttaggctg

SEQ ID NO: 1486442 - DNA, 15 bp, Homo sapiens
atgtgcttaggctgt

SEQ ID NO: 1486443 - DNA, 15 bp, Homo sapiens
tgtgcttaggctgta

SEQ ID NO: 1486444 - DNA, 15 bp, Homo sapiens
gtgcttaggctgtag

SEQ ID NO: 1486445 - DNA, 15 bp, Homo sapiens
tgcttaggctgtaga

SEQ ID NO: 1486446 - DNA, 15 bp, Homo sapiens
gcttaggctgtagac

SEQ ID NO: 1486447 - DNA, 15 bp, Homo sapiens
cttaggctgtagacc

SEQ ID NO: 1486448 - DNA, 15 bp, Homo sapiens
ttaggctgtagacct

SEQ ID NO: 1486449 - DNA, 15 bp, Homo sapiens
taggctgtagacctg

SEQ ID NO: 1486450 - DNA, 15 bp, Homo sapiens
aggctgtagacctga

SEQ ID NO: 1486451 - DNA, 15 bp, Homo sapiens
ggctgtagacctgaa

SEQ ID NO: 1486452 - DNA, 15 bp, Homo sapiens
gctgtagacctgaat

SEQ ID NO: 1486453 - DNA, 15 bp, Homo sapiens
ctgtagacctgaatt

SEQ ID NO: 1486454 - DNA, 15 bp, Homo sapiens
tgtagacctgaattt

SEQ ID NO: 1486455 - DNA, 15 bp, Homo sapiens
gtagacctgaatttg

SEQ ID NO: 1486456 - DNA, 15 bp, Homo sapiens
tagacctgaatttgg

SEQ ID NO: 1486457 - DNA, 15 bp, Homo sapiens
agacctgaatttgga

SEQ ID NO: 1486458 - DNA, 15 bp, Homo sapiens
gacctgaatttggat

SEQ ID NO: 1486459 - DNA, 15 bp, Homo sapiens
acctgaatttggatc

SEQ ID NO: 1486460 - DNA, 15 bp, Homo sapiens
cctgaatttggatcc

SEQ ID NO: 1486461 - DNA, 15 bp, Homo sapiens
ctgaatttggatccc

SEQ ID NO: 1486462 - DNA, 15 bp, Homo sapiens
tgaatttggatccca

SEQ ID NO: 1486463 - DNA, 15 bp, Homo sapiens
gaatttggatcccac

SEQ ID NO: 1486464 - DNA, 15 bp, Homo sapiens
aatttggatcccaca

SEQ ID NO: 1486465 - DNA, 15 bp, Homo sapiens
atttggatcccacat

SEQ ID NO: 1486466 - DNA, 15 bp, Homo sapiens
tttggatcccacatc

SEQ ID NO: 1486467 - DNA, 15 bp, Homo sapiens
ttggatcccacatca

SEQ ID NO: 1486468 - DNA, 15 bp, Homo sapiens
tggatcccacatcac

SEQ ID NO: 1486469 - DNA, 15 bp, Homo sapiens
ggatcccacatcaca

SEQ ID NO: 1486470 - DNA, 15 bp, Homo sapiens
gatcccacatcacac

SEQ ID NO: 1486471 - DNA, 15 bp, Homo sapiens
atcccacatcacact

SEQ ID NO: 1486472 - DNA, 15 bp, Homo sapiens
tcccacatcacacta

SEQ ID NO: 1486473 - DNA, 15 bp, Homo sapiens
cccacatcacactaa

SEQ ID NO: 1486474 - DNA, 15 bp, Homo sapiens
ccacatcacactaac

SEQ ID NO: 1486475 - DNA, 15 bp, Homo sapiens
cacatcacactaact

SEQ ID NO: 1486476 - DNA, 15 bp, Homo sapiens
acatcacactaactt

SEQ ID NO: 1486477 - DNA, 15 bp, Homo sapiens
catcacactaacttt

SEQ ID NO: 1486478 - DNA, 15 bp, Homo sapiens
atcacactaactttc

SEQ ID NO: 1486479 - DNA, 15 bp, Homo sapiens
tcacactaactttct

SEQ ID NO: 1486480 - DNA, 15 bp, Homo sapiens
cacactaactttctg

SEQ ID NO: 1486481 - DNA, 15 bp, Homo sapiens
acactaactttctgt

SEQ ID NO: 1486482 - DNA, 15 bp, Homo sapiens
cactaactttctgtg

SEQ ID NO: 1486483 - DNA, 15 bp, Homo sapiens
actaactttctgtgt

SEQ ID NO: 1486484 - DNA, 15 bp, Homo sapiens
ctaactttctgtgtg

SEQ ID NO: 1486485 - DNA, 15 bp, Homo sapiens
taactttctgtgtgc

SEQ ID NO: 1486486 - DNA, 15 bp, Homo sapiens
aactttctgtgtgcc

SEQ ID NO: 1486487 - DNA, 15 bp, Homo sapiens
actttctgtgtgcct

SEQ ID NO: 1486488 - DNA, 15 bp, Homo sapiens
ctttctgtgtgcctg

SEQ ID NO: 1486489 - DNA, 15 bp, Homo sapiens
tttctgtgtgcctga

SEQ ID NO: 1486490 - DNA, 15 bp, Homo sapiens
ttctgtgtgcctgag

SEQ ID NO: 1486491 - DNA, 15 bp, Homo sapiens
tctgtgtgcctgagc

SEQ ID NO: 1486492 - DNA, 15 bp, Homo sapiens
ctgtgtgcctgagca

SEQ ID NO: 1486493 - DNA, 15 bp, Homo sapiens
tgtgtgcctgagcaa

SEQ ID NO: 1486494 - DNA, 15 bp, Homo sapiens
gtgtgcctgagcaag

SEQ ID NO: 1486495 - DNA, 15 bp, Homo sapiens
tgtgcctgagcaagt

SEQ ID NO: 1486496 - DNA, 15 bp, Homo sapiens
gtgcctgagcaagtt

SEQ ID NO: 1486497 - DNA, 15 bp, Homo sapiens
tgcctgagcaagtta

SEQ ID NO: 1486498 - DNA, 15 bp, Homo sapiens
gcctgagcaagttat

SEQ ID NO: 1486499 - DNA, 15 bp, Homo sapiens
cctgagcaagttatt

SEQ ID NO: 1486500 - DNA, 15 bp, Homo sapiens
ctgagcaagttattt

SEQ ID NO: 1486501 - DNA, 15 bp, Homo sapiens
tgagcaagttatttc

SEQ ID NO: 1486502 - DNA, 15 bp, Homo sapiens
gagcaagttatttca

SEQ ID NO: 1486503 - DNA, 15 bp, Homo sapiens
agcaagttatttcac

SEQ ID NO: 1486504 - DNA, 15 bp, Homo sapiens
gcaagttatttcact

SEQ ID NO: 1486505 - DNA, 15 bp, Homo sapiens
caagttatttcactt

SEQ ID NO: 1486506 - DNA, 15 bp, Homo sapiens
aagttatttcacttt

SEQ ID NO: 1486507 - DNA, 15 bp, Homo sapiens
agttatttcactttt

SEQ ID NO: 1486508 - DNA, 15 bp, Homo sapiens
gttatttcacttttc

SEQ ID NO: 1486509 - DNA, 15 bp, Homo sapiens
ttatttcacttttct

SEQ ID NO: 1486510 - DNA, 15 bp, Homo sapiens
tatttcacttttctg

SEQ ID NO: 1486511 - DNA, 15 bp, Homo sapiens
atttcacttttctga

SEQ ID NO: 1486512 - DNA, 15 bp, Homo sapiens
tttcacttttctgaa

SEQ ID NO: 1486513 - DNA, 15 bp, Homo sapiens
ttcacttttctgaat

SEQ ID NO: 1486514 - DNA, 15 bp, Homo sapiens
tcacttttctgaatt

SEQ ID NO: 1486515 - DNA, 15 bp, Homo sapiens
cacttttctgaattt

SEQ ID NO: 1486516 - DNA, 15 bp, Homo sapiens
acttttctgaatttc

SEQ ID NO: 1486517 - DNA, 15 bp, Homo sapiens
cttttctgaatttcc

SEQ ID NO: 1486518 - DNA, 15 bp, Homo sapiens
ttttctgaatttcca

SEQ ID NO: 1486519 - DNA, 15 bp, Homo sapiens
tttctgaatttccat

SEQ ID NO: 1486520 - DNA, 15 bp, Homo sapiens
ttctgaatttccatt

SEQ ID NO: 1486521 - DNA, 15 bp, Homo sapiens
tctgaatttccattt

SEQ ID NO: 1486522 - DNA, 15 bp, Homo sapiens
ctgaatttccatttt

SEQ ID NO: 1486523 - DNA, 15 bp, Homo sapiens
tgaatttccattttc

SEQ ID NO: 1486524 - DNA, 15 bp, Homo sapiens
gaatttccattttct

SEQ ID NO: 1486525 - DNA, 15 bp, Homo sapiens
aatttccattttctc

SEQ ID NO: 1486526 - DNA, 15 bp, Homo sapiens
atttccattttctca

SEQ ID NO: 1486527 - DNA, 15 bp, Homo sapiens
tttccattttctcat

SEQ ID NO: 1486528 - DNA, 15 bp, Homo sapiens
ttccattttctcatc

SEQ ID NO: 1486529 - DNA, 15 bp, Homo sapiens
tccattttctcatct

SEQ ID NO: 1486530 - DNA, 15 bp, Homo sapiens
ccattttctcatctg

SEQ ID NO: 1486531 - DNA, 15 bp, Homo sapiens
cattttctcatctga

SEQ ID NO: 1486532 - DNA, 15 bp, Homo sapiens
attttctcatctgaa

SEQ ID NO: 1486533 - DNA, 15 bp, Homo sapiens
ttttctcatctgaaa

SEQ ID NO: 1486534 - DNA, 15 bp, Homo sapiens
tttctcatctgaaaa

SEQ ID NO: 1486535 - DNA, 15 bp, Homo sapiens
ttctcatctgaaaaa

SEQ ID NO: 1486536 - DNA, 15 bp, Homo sapiens
tctcatctgaaaaaa

SEQ ID NO: 1486537 - DNA, 15 bp, Homo sapiens
ctcatctgaaaaaat

SEQ ID NO: 1486538 - DNA, 15 bp, Homo sapiens
tcatctgaaaaaata

SEQ ID NO: 1486539 - DNA, 15 bp, Homo sapiens
catctgaaaaaatag

SEQ ID NO: 1486540 - DNA, 15 bp, Homo sapiens
atctgaaaaaataga

SEQ ID NO: 1486541 - DNA, 15 bp, Homo sapiens
tctgaaaaaatagaa

SEQ ID NO: 1486542 - DNA, 15 bp, Homo sapiens
ctgaaaaaatagaat

SEQ ID NO: 1486543 - DNA, 15 bp, Homo sapiens
tgaaaaaatagaata

SEQ ID NO: 1486544 - DNA, 15 bp, Homo sapiens
gaaaaaatagaatac

SEQ ID NO: 1486545 - DNA, 15 bp, Homo sapiens
aaaaaatagaataca

SEQ ID NO: 1486546 - DNA, 15 bp, Homo sapiens
aaaaatagaatacat

SEQ ID NO: 1486547 - DNA, 15 bp, Homo sapiens
aaaatagaatacatc

SEQ ID NO: 1486548 - DNA, 15 bp, Homo sapiens
aaatagaatacatcc

SEQ ID NO: 1486549 - DNA, 15 bp, Homo sapiens
aatagaatacatccc

SEQ ID NO: 1486550 - DNA, 15 bp, Homo sapiens
atagaatacatccct

SEQ ID NO: 1486551 - DNA, 15 bp, Homo sapiens
tagaatacatccctc

SEQ ID NO: 1486552 - DNA, 15 bp, Homo sapiens
agaatacatccctca

SEQ ID NO: 1486553 - DNA, 15 bp, Homo sapiens
gaatacatccctcat

SEQ ID NO: 1486554 - DNA, 15 bp, Homo sapiens
aatacatccctcata

SEQ ID NO: 1486555 - DNA, 15 bp, Homo sapiens
atacatccctcatag

SEQ ID NO: 1486556 - DNA, 15 bp, Homo sapiens
tacatccctcataga

SEQ ID NO: 1486557 - DNA, 15 bp, Homo sapiens
acatccctcatagaa

SEQ ID NO: 1486558 - DNA, 15 bp, Homo sapiens
catccctcatagaat

SEQ ID NO: 1486559 - DNA, 15 bp, Homo sapiens
atccctcatagaatt

SEQ ID NO: 1486560 - DNA, 15 bp, Homo sapiens
tccctcatagaattg

SEQ ID NO: 1486561 - DNA, 15 bp, Homo sapiens
ccctcatagaattgc

SEQ ID NO: 1486562 - DNA, 15 bp, Homo sapiens
cctcatagaattgcc

SEQ ID NO: 1486563 - DNA, 15 bp, Homo sapiens
ctcatagaattgcca

SEQ ID NO: 1486564 - DNA, 15 bp, Homo sapiens
tcatagaattgccag

SEQ ID NO: 1486565 - DNA, 15 bp, Homo sapiens
catagaattgccagg

SEQ ID NO: 1486566 - DNA, 15 bp, Homo sapiens
atagaattgccagga

SEQ ID NO: 1486567 - DNA, 15 bp, Homo sapiens
tagaattgccaggag

SEQ ID NO: 1486568 - DNA, 15 bp, Homo sapiens
agaattgccaggagg

SEQ ID NO: 1486569 - DNA, 15 bp, Homo sapiens
gaattgccaggagga

SEQ ID NO: 1486570 - DNA, 15 bp, Homo sapiens
aattgccaggaggat

SEQ ID NO: 1486571 - DNA, 15 bp, Homo sapiens
attgccaggaggatt

SEQ ID NO: 1486572 - DNA, 15 bp, Homo sapiens
ttgccaggaggatta

SEQ ID NO: 1486573 - DNA, 15 bp, Homo sapiens
tgccaggaggattaa

SEQ ID NO: 1486574 - DNA, 15 bp, Homo sapiens
gccaggaggattaaa

SEQ ID NO: 1486575 - DNA, 15 bp, Homo sapiens
ccaggaggattaaat

SEQ ID NO: 1486576 - DNA, 15 bp, Homo sapiens
caggaggattaaatt

SEQ ID NO: 1486577 - DNA, 15 bp, Homo sapiens
aggaggattaaatta

SEQ ID NO: 1486578 - DNA, 15 bp, Homo sapiens
ggaggattaaattag

SEQ ID NO: 1486579 - DNA, 15 bp, Homo sapiens
gaggattaaattagg

SEQ ID NO: 1486580 - DNA, 15 bp, Homo sapiens
aggattaaattaggt

SEQ ID NO: 1486581 - DNA, 15 bp, Homo sapiens
ggattaaattaggtt

SEQ ID NO: 1486582 - DNA, 15 bp, Homo sapiens
gattaaattaggtta

SEQ ID NO: 1486583 - DNA, 15 bp, Homo sapiens
attaaattaggttac

SEQ ID NO: 1486584 - DNA, 15 bp, Homo sapiens
ttaaattaggttact

SEQ ID NO: 1486585 - DNA, 15 bp, Homo sapiens
taaattaggttactc

SEQ ID NO: 1486586 - DNA, 15 bp, Homo sapiens
aaattaggttactca

SEQ ID NO: 1486587 - DNA, 15 bp, Homo sapiens
aattaggttactcat

SEQ ID NO: 1486588 - DNA, 15 bp, Homo sapiens
attaggttactcatg

SEQ ID NO: 1486589 - DNA, 15 bp, Homo sapiens
ttaggttactcatgt

SEQ ID NO: 1486590 - DNA, 15 bp, Homo sapiens
taggttactcatgta

SEQ ID NO: 1486591 - DNA, 15 bp, Homo sapiens
aggttactcatgtaa

SEQ ID NO: 1486592 - DNA, 15 bp, Homo sapiens
ggttactcatgtaaa

SEQ ID NO: 1486593 - DNA, 15 bp, Homo sapiens
gttactcatgtaaac

SEQ ID NO: 1486594 - DNA, 15 bp, Homo sapiens
ttactcatgtaaaca

SEQ ID NO: 1486595 - DNA, 15 bp, Homo sapiens
tactcatgtaaacag

SEQ ID NO: 1486596 - DNA, 15 bp, Homo sapiens
actcatgtaaacagt

SEQ ID NO: 1486597 - DNA, 15 bp, Homo sapiens
ctcatgtaaacagtg

SEQ ID NO: 1486598 - DNA, 15 bp, Homo sapiens
tcatgtaaacagtgt

SEQ ID NO: 1486599 - DNA, 15 bp, Homo sapiens
catgtaaacagtgtt

SEQ ID NO: 1486600 - DNA, 15 bp, Homo sapiens
atgtaaacagtgttt

SEQ ID NO: 1486601 - DNA, 15 bp, Homo sapiens
taaacagtgttttgt

SEQ ID NO: 1486602 - DNA, 15 bp, Homo sapiens
aaacagtgttttgta

SEQ ID NO: 1486603 - DNA, 15 bp, Homo sapiens
agtgttttgtattta

SEQ ID NO: 1486604 - DNA, 15 bp, Homo sapiens
gtgttttgtatttaa

SEQ ID NO: 1486605 - DNA, 15 bp, Homo sapiens
tgttttgtatttaat

SEQ ID NO: 1486606 - DNA, 15 bp, Homo sapiens
gttttgtatttaata

SEQ ID NO: 1486607 - DNA, 15 bp, Homo sapiens
ttttgtatttaataa

SEQ ID NO: 1486608 - DNA, 15 bp, Homo sapiens
tttgtatttaataag

SEQ ID NO: 1486609 - DNA, 15 bp, Homo sapiens
ttgtatttaataagt

SEQ ID NO: 1486610 - DNA, 15 bp, Homo sapiens
tgtatttaataagtg

SEQ ID NO: 1486611 - DNA, 15 bp, Homo sapiens
gtatttaataagtgc

SEQ ID NO: 1486612 - DNA, 15 bp, Homo sapiens
tatttaataagtgct

SEQ ID NO: 1486613 - DNA, 15 bp, Homo sapiens
atttaataagtgctg

SEQ ID NO: 1486614 - DNA, 15 bp, Homo sapiens
tttaataagtgctgt

SEQ ID NO: 1486615 - DNA, 15 bp, Homo sapiens
ttaataagtgctgtg

SEQ ID NO: 1486616 - DNA, 15 bp, Homo sapiens
taataagtgctgtga

SEQ ID NO: 1486617 - DNA, 15 bp, Homo sapiens
aataagtgctgtgat

SEQ ID NO: 1486618 - DNA, 15 bp, Homo sapiens
ataagtgctgtgatt

SEQ ID NO: 1486619 - DNA, 15 bp, Homo sapiens
taagtgctgtgatta

SEQ ID NO: 1486620 - DNA, 15 bp, Homo sapiens
aagtgctgtgattat

SEQ ID NO: 1486621 - DNA, 15 bp, Homo sapiens
agtgctgtgattatt

SEQ ID NO: 1486622 - DNA, 15 bp, Homo sapiens
gtgctgtgattatta

SEQ ID NO: 1486623 - DNA, 15 bp, Homo sapiens
tgctgtgattattac

SEQ ID NO: 1486624 - DNA, 15 bp, Homo sapiens
gctgtgattattacc

SEQ ID NO: 1486625 - DNA, 15 bp, Homo sapiens
ctgtgattattacca

SEQ ID NO: 1486626 - DNA, 15 bp, Homo sapiens
tgtgattattaccac

SEQ ID NO: 1486627 - DNA, 15 bp, Homo sapiens
gtgattattaccact

SEQ ID NO: 1486628 - DNA, 15 bp, Homo sapiens
tgattattaccactt

SEQ ID NO: 1486629 - DNA, 15 bp, Homo sapiens
gattattaccacttt

SEQ ID NO: 1486630 - DNA, 15 bp, Homo sapiens
attattaccactttt

SEQ ID NO: 1486631 - DNA, 15 bp, Homo sapiens
ttattaccactttta

SEQ ID NO: 1486632 - DNA, 15 bp, Homo sapiens
tattaccacttttat

SEQ ID NO: 1486633 - DNA, 15 bp, Homo sapiens
attaccacttttatc

SEQ ID NO: 1486634 - DNA, 15 bp, Homo sapiens
ttaccacttttatct

SEQ ID NO: 1486635 - DNA, 15 bp, Homo sapiens
taccacttttatctg

SEQ ID NO: 1486636 - DNA, 15 bp, Homo sapiens
accacttttatctgt

SEQ ID NO: 1486637 - DNA, 15 bp, Homo sapiens
ccacttttatctgtt

SEQ ID NO: 1486638 - DNA, 15 bp, Homo sapiens
cacttttatctgttt

SEQ ID NO: 1486639 - DNA, 15 bp, Homo sapiens
acttttatctgtttt

SEQ ID NO: 1486640 - DNA, 15 bp, Homo sapiens
cttttatctgttttc

SEQ ID NO: 1486641 - DNA, 15 bp, Homo sapiens
ttttatctgttttct

SEQ ID NO: 1486642 - DNA, 15 bp, Homo sapiens
tttatctgttttctg

SEQ ID NO: 1486643 - DNA, 15 bp, Homo sapiens
ttatctgttttctgt

SEQ ID NO: 1486644 - DNA, 15 bp, Homo sapiens
tatctgttttctgta

SEQ ID NO: 1486645 - DNA, 15 bp, Homo sapiens
atctgttttctgtaa

SEQ ID NO: 1486646 - DNA, 15 bp, Homo sapiens
tctgttttctgtaac

SEQ ID NO: 1486647 - DNA, 15 bp, Homo sapiens
ctgttttctgtaacg

SEQ ID NO: 1486648 - DNA, 15 bp, Homo sapiens
tgttttctgtaacga

SEQ ID NO: 1486649 - DNA, 15 bp, Homo sapiens
gttttctgtaacgac

SEQ ID NO: 1486650 - DNA, 15 bp, Homo sapiens
ttttctgtaacgacg

SEQ ID NO: 1486651 - DNA, 15 bp, Homo sapiens
tttctgtaacgacga

SEQ ID NO: 1486652 - DNA, 15 bp, Homo sapiens
ttctgtaacgacgac

SEQ ID NO: 1486653 - DNA, 15 bp, Homo sapiens
tctgtaacgacgaca

SEQ ID NO: 1486654 - DNA, 15 bp, Homo sapiens
ctgtaacgacgacag

SEQ ID NO: 1486655 - DNA, 15 bp, Homo sapiens
tgtaacgacgacaga

SEQ ID NO: 1486656 - DNA, 15 bp, Homo sapiens
gtaacgacgacagag

SEQ ID NO: 1486657 - DNA, 15 bp, Homo sapiens
taacgacgacagagg

SEQ ID NO: 1486658 - DNA, 15 bp, Homo sapiens
aacgacgacagaggg

SEQ ID NO: 1486659 - DNA, 15 bp, Homo sapiens
acgacgacagagggt

SEQ ID NO: 1486660 - DNA, 15 bp, Homo sapiens
cgacgacagagggtg

SEQ ID NO: 1486661 - DNA, 15 bp, Homo sapiens
gacgacagagggtgt

SEQ ID NO: 1486662 - DNA, 15 bp, Homo sapiens
acgacagagggtgta

SEQ ID NO: 1486663 - DNA, 15 bp, Homo sapiens
cgacagagggtgtat

SEQ ID NO: 1486664 - DNA, 15 bp, Homo sapiens
gacagagggtgtatt

SEQ ID NO: 1486665 - DNA, 15 bp, Homo sapiens
acagagggtgtatta

SEQ ID NO: 1486666 - DNA, 15 bp, Homo sapiens
cagagggtgtattat

SEQ ID NO: 1486667 - DNA, 15 bp, Homo sapiens
agagggtgtattata

SEQ ID NO: 1486668 - DNA, 15 bp, Homo sapiens
gagggtgtattatat

SEQ ID NO: 1486669 - DNA, 15 bp, Homo sapiens
agggtgtattatatc

SEQ ID NO: 1486670 - DNA, 15 bp, Homo sapiens
gggtgtattatatca

SEQ ID NO: 1486671 - DNA, 15 bp, Homo sapiens
ggtgtattatatcat

SEQ ID NO: 1486672 - DNA, 15 bp, Homo sapiens
gtgtattatatcatg

SEQ ID NO: 1486673 - DNA, 15 bp, Homo sapiens
tgtattatatcatgt

SEQ ID NO: 1486674 - DNA, 15 bp, Homo sapiens
gtattatatcatgta

SEQ ID NO: 1486675 - DNA, 15 bp, Homo sapiens
tattatatcatgtac

SEQ ID NO: 1486676 - DNA, 15 bp, Homo sapiens
attatatcatgtact

SEQ ID NO: 1486677 - DNA, 15 bp, Homo sapiens
ttatatcatgtacta

SEQ ID NO: 1486678 - DNA, 15 bp, Homo sapiens
tatatcatgtactaa

SEQ ID NO: 1486679 - DNA, 15 bp, Homo sapiens
atatcatgtactaaa

SEQ ID NO: 1486680 - DNA, 15 bp, Homo sapiens
tatcatgtactaaag

SEQ ID NO: 1486681 - DNA, 15 bp, Homo sapiens
atcatgtactaaagg

SEQ ID NO: 1486682 - DNA, 15 bp, Homo sapiens
tcatgtactaaaggc

SEQ ID NO: 1486683 - DNA, 15 bp, Homo sapiens
catgtactaaaggca

SEQ ID NO: 1486684 - DNA, 15 bp, Homo sapiens
atgtactaaaggcac

SEQ ID NO: 1486685 - DNA, 15 bp, Homo sapiens
tgtactaaaggcacc

SEQ ID NO: 1486686 - DNA, 15 bp, Homo sapiens
gtactaaaggcacct

SEQ ID NO: 1486687 - DNA, 15 bp, Homo sapiens
tactaaaggcacctt

SEQ ID NO: 1486688 - DNA, 15 bp, Homo sapiens
actaaaggcaccttg

SEQ ID NO: 1486689 - DNA, 15 bp, Homo sapiens
ctaaaggcaccttgc

SEQ ID NO: 1486690 - DNA, 15 bp, Homo sapiens
taaaggcaccttgcc

SEQ ID NO: 1486691 - DNA, 15 bp, Homo sapiens
aaaggcaccttgccc

SEQ ID NO: 1486692 - DNA, 15 bp, Homo sapiens
aaggcaccttgccca

SEQ ID NO: 1486693 - DNA, 15 bp, Homo sapiens
aggcaccttgcccaa

SEQ ID NO: 1486694 - DNA, 15 bp, Homo sapiens
ggcaccttgcccaaa

SEQ ID NO: 1486695 - DNA, 15 bp, Homo sapiens
gcaccttgcccaaac

SEQ ID NO: 1486696 - DNA, 15 bp, Homo sapiens
caccttgcccaaact

SEQ ID NO: 1486697 - DNA, 15 bp, Homo sapiens
accttgcccaaactg

SEQ ID NO: 1486698 - DNA, 15 bp, Homo sapiens
ccttgcccaaactgg

SEQ ID NO: 1486699 - DNA, 15 bp, Homo sapiens
cttgcccaaactgga

SEQ ID NO: 1486700 - DNA, 15 bp, Homo sapiens
ttgcccaaactggag

SEQ ID NO: 1486701 - DNA, 15 bp, Homo sapiens
tgcccaaactggagg

SEQ ID NO: 1486702 - DNA, 15 bp, Homo sapiens
gcccaaactggagga

SEQ ID NO: 1486703 - DNA, 15 bp, Homo sapiens
cccaaactggaggag

SEQ ID NO: 1486704 - DNA, 15 bp, Homo sapiens
ccaaactggaggaga

SEQ ID NO: 1486705 - DNA, 15 bp, Homo sapiens
caaactggaggagaa

SEQ ID NO: 1486706 - DNA, 15 bp, Homo sapiens
aaactggaggagaaa

SEQ ID NO: 1486707 - DNA, 15 bp, Homo sapiens
aactggaggagaaaa

SEQ ID NO: 1486708 - DNA, 15 bp, Homo sapiens
actggaggagaaaaa

SEQ ID NO: 1486709 - DNA, 15 bp, Homo sapiens
ctggaggagaaaaag

SEQ ID NO: 1486710 - DNA, 15 bp, Homo sapiens
tggaggagaaaaagt

SEQ ID NO: 1486711 - DNA, 15 bp, Homo sapiens
ggaggagaaaaagta

SEQ ID NO: 1486712 - DNA, 15 bp, Homo sapiens
gaggagaaaaagtat

SEQ ID NO: 1486713 - DNA, 15 bp, Homo sapiens
aggagaaaaagtatc

SEQ ID NO: 1486714 - DNA, 15 bp, Homo sapiens
ggagaaaaagtatcc

SEQ ID NO: 1486715 - DNA, 15 bp, Homo sapiens
gagaaaaagtatccc

SEQ ID NO: 1486716 - DNA, 15 bp, Homo sapiens
agaaaaagtatccca

SEQ ID NO: 1486717 - DNA, 15 bp, Homo sapiens
gaaaaagtatcccac

SEQ ID NO: 1486718 - DNA, 15 bp, Homo sapiens
aaaaagtatcccacc

SEQ ID NO: 1486719 - DNA, 15 bp, Homo sapiens
aaaagtatcccaccg

SEQ ID NO: 1486720 - DNA, 15 bp, Homo sapiens
aaagtatcccaccgg

SEQ ID NO: 1486721 - DNA, 15 bp, Homo sapiens
aagtatcccaccggt

SEQ ID NO: 1486722 - DNA, 15 bp, Homo sapiens
agtatcccaccggtt

SEQ ID NO: 1486723 - DNA, 15 bp, Homo sapiens
gtatcccaccggttc

SEQ ID NO: 1486724 - DNA, 15 bp, Homo sapiens
tatcccaccggttca

SEQ ID NO: 1486725 - DNA, 15 bp, Homo sapiens
atcccaccggttcaa

SEQ ID NO: 1486726 - DNA, 15 bp, Homo sapiens
tcccaccggttcaag

SEQ ID NO: 1486727 - DNA, 15 bp, Homo sapiens
cccaccggttcaagt

SEQ ID NO: 1486728 - DNA, 15 bp, Homo sapiens
ccaccggttcaagtg

SEQ ID NO: 1486729 - DNA, 15 bp, Homo sapiens
caccggttcaagtgc

SEQ ID NO: 1486730 - DNA, 15 bp, Homo sapiens
accggttcaagtgca

SEQ ID NO: 1486731 - DNA, 15 bp, Homo sapiens
ccggttcaagtgcat

SEQ ID NO: 1486732 - DNA, 15 bp, Homo sapiens
cggttcaagtgcatt

SEQ ID NO: 1486733 - DNA, 15 bp, Homo sapiens
ggttcaagtgcatta

SEQ ID NO: 1486734 - DNA, 15 bp, Homo sapiens
gttcaagtgcattac

SEQ ID NO: 1486735 - DNA, 15 bp, Homo sapiens
ttcaagtgcattact

SEQ ID NO: 1486736 - DNA, 15 bp, Homo sapiens
tcaagtgcattactg

SEQ ID NO: 1486737 - DNA, 15 bp, Homo sapiens
caagtgcattactgg

SEQ ID NO: 1486738 - DNA, 15 bp, Homo sapiens
aagtgcattactggt

SEQ ID NO: 1486739 - DNA, 15 bp, Homo sapiens
agtgcattactggta

SEQ ID NO: 1486740 - DNA, 15 bp, Homo sapiens
gtgcattactggtag

SEQ ID NO: 1486741 - DNA, 15 bp, Homo sapiens
tgcattactggtagc

SEQ ID NO: 1486742 - DNA, 15 bp, Homo sapiens
gcattactggtagca

SEQ ID NO: 1486743 - DNA, 15 bp, Homo sapiens
cattactggtagcag

SEQ ID NO: 1486744 - DNA, 15 bp, Homo sapiens
attactggtagcagg

SEQ ID NO: 1486745 - DNA, 15 bp, Homo sapiens
ttactggtagcaggc

SEQ ID NO: 1486746 - DNA, 15 bp, Homo sapiens
tactggtagcaggcc

SEQ ID NO: 1486747 - DNA, 15 bp, Homo sapiens
actggtagcaggccc

SEQ ID NO: 1486748 - DNA, 15 bp, Homo sapiens
ctggtagcaggcccc

SEQ ID NO: 1486749 - DNA, 15 bp, Homo sapiens
tggtagcaggcccca

SEQ ID NO: 1486750 - DNA, 15 bp, Homo sapiens
ggtagcaggccccag

SEQ ID NO: 1486751 - DNA, 15 bp, Homo sapiens
gtagcaggccccagc

SEQ ID NO: 1486752 - DNA, 15 bp, Homo sapiens
tagcaggccccagct

SEQ ID NO: 1486753 - DNA, 15 bp, Homo sapiens
agcaggccccagctg

SEQ ID NO: 1486754 - DNA, 15 bp, Homo sapiens
gcaggccccagctgg

SEQ ID NO: 1486755 - DNA, 15 bp, Homo sapiens
caggccccagctgga

SEQ ID NO: 1486756 - DNA, 15 bp, Homo sapiens
aggccccagctggat

SEQ ID NO: 1486757 - DNA, 15 bp, Homo sapiens
ggccccagctggatc

SEQ ID NO: 1486758 - DNA, 15 bp, Homo sapiens
gccccagctggatcc

SEQ ID NO: 1486759 - DNA, 15 bp, Homo sapiens
ccccagctggatcca

SEQ ID NO: 1486760 - DNA, 15 bp, Homo sapiens
cccagctggatccag

SEQ ID NO: 1486761 - DNA, 15 bp, Homo sapiens
ccagctggatccagg

SEQ ID NO: 1486762 - DNA, 15 bp, Homo sapiens
cagctggatccagga

SEQ ID NO: 1486763 - DNA, 15 bp, Homo sapiens
agctggatccaggac

SEQ ID NO: 1486764 - DNA, 15 bp, Homo sapiens
gctggatccaggacc

SEQ ID NO: 1486765 - DNA, 15 bp, Homo sapiens
ctggatccaggacca

SEQ ID NO: 1486766 - DNA, 15 bp, Homo sapiens
tggatccaggaccag

SEQ ID NO: 1486767 - DNA, 15 bp, Homo sapiens
ggatccaggaccagg

SEQ ID NO: 1486768 - DNA, 15 bp, Homo sapiens
gatccaggaccagga

SEQ ID NO: 1486769 - DNA, 15 bp, Homo sapiens
atccaggaccaggag

SEQ ID NO: 1486770 - DNA, 15 bp, Homo sapiens
tccaggaccaggagg

SEQ ID NO: 1486771 - DNA, 15 bp, Homo sapiens
ccaggaccaggaggg

SEQ ID NO: 1486772 - DNA, 15 bp, Homo sapiens
caggaccaggagggg

SEQ ID NO: 1486773 - DNA, 15 bp, Homo sapiens
aggaccaggaggggg

SEQ ID NO: 1486774 - DNA, 15 bp, Homo sapiens
ggaccaggagggggt

SEQ ID NO: 1486775 - DNA, 15 bp, Homo sapiens
gaccaggagggggtc

SEQ ID NO: 1486776 - DNA, 15 bp, Homo sapiens
accaggagggggtcg

SEQ ID NO: 1486777 - DNA, 15 bp, Homo sapiens
ccaggagggggtcgt

SEQ ID NO: 1486778 - DNA, 15 bp, Homo sapiens
caggagggggtcgtg

SEQ ID NO: 1486779 - DNA, 15 bp, Homo sapiens
aggagggggtcgtgg

SEQ ID NO: 1486780 - DNA, 15 bp, Homo sapiens
ggagggggtcgtgga

SEQ ID NO: 1486781 - DNA, 15 bp, Homo sapiens
gagggggtcgtggaa

SEQ ID NO: 1486782 - DNA, 15 bp, Homo sapiens
agggggtcgtggaaa

SEQ ID NO: 1486783 - DNA, 15 bp, Homo sapiens
gggggtcgtggaaag

SEQ ID NO: 1486784 - DNA, 15 bp, Homo sapiens
ggggtcgtggaaagc

SEQ ID NO: 1486785 - DNA, 15 bp, Homo sapiens
gggtcgtggaaagca

SEQ ID NO: 1486786 - DNA, 15 bp, Homo sapiens
ggtcgtggaaagcaa

SEQ ID NO: 1486787 - DNA, 15 bp, Homo sapiens
gtcgtggaaagcaag

SEQ ID NO: 1486788 - DNA, 15 bp, Homo sapiens
tcgtggaaagcaagc

SEQ ID NO: 1486789 - DNA, 15 bp, Homo sapiens
cgtggaaagcaagca

SEQ ID NO: 1486790 - DNA, 15 bp, Homo sapiens
gtggaaagcaagcat

SEQ ID NO: 1486791 - DNA, 15 bp, Homo sapiens
tggaaagcaagcatt

SEQ ID NO: 1486792 - DNA, 15 bp, Homo sapiens
ggaaagcaagcattt

SEQ ID NO: 1486793 - DNA, 15 bp, Homo sapiens
gaaagcaagcatttc

SEQ ID NO: 1486794 - DNA, 15 bp, Homo sapiens
aaagcaagcatttct

SEQ ID NO: 1486795 - DNA, 15 bp, Homo sapiens
aagcaagcatttcta

SEQ ID NO: 1486796 - DNA, 15 bp, Homo sapiens
agcaagcatttctat

SEQ ID NO: 1486797 - DNA, 15 bp, Homo sapiens
gcaagcatttctatc

SEQ ID NO: 1486798 - DNA, 15 bp, Homo sapiens
caagcatttctatcg

SEQ ID NO: 1486799 - DNA, 15 bp, Homo sapiens
aagcatttctatcgg

SEQ ID NO: 1486800 - DNA, 15 bp, Homo sapiens
agcatttctatcggc

SEQ ID NO: 1486801 - DNA, 15 bp, Homo sapiens
gcatttctatcggca

SEQ ID NO: 1486802 - DNA, 15 bp, Homo sapiens
catttctatcggcaa

SEQ ID NO: 1486803 - DNA, 15 bp, Homo sapiens
atttctatcggcaaa

SEQ ID NO: 1486804 - DNA, 15 bp, Homo sapiens
tttctatcggcaaat

SEQ ID NO: 1486805 - DNA, 15 bp, Homo sapiens
ttctatcggcaaatg

SEQ ID NO: 1486806 - DNA, 15 bp, Homo sapiens
tctatcggcaaatgt

SEQ ID NO: 1486807 - DNA, 15 bp, Homo sapiens
ctatcggcaaatgtg

SEQ ID NO: 1486808 - DNA, 15 bp, Homo sapiens
tatcggcaaatgtga

SEQ ID NO: 1486809 - DNA, 15 bp, Homo sapiens
atcggcaaatgtgag

SEQ ID NO: 1486810 - DNA, 15 bp, Homo sapiens
tcggcaaatgtgagt

SEQ ID NO: 1486811 - DNA, 15 bp, Homo sapiens
cggcaaatgtgagtg

SEQ ID NO: 1486812 - DNA, 15 bp, Homo sapiens
ggcaaatgtgagtga

SEQ ID NO: 1486813 - DNA, 15 bp, Homo sapiens
gcaaatgtgagtgat

SEQ ID NO: 1486814 - DNA, 15 bp, Homo sapiens
caaatgtgagtgatc

SEQ ID NO: 1486815 - DNA, 15 bp, Homo sapiens
aaatgtgagtgatct

SEQ ID NO: 1486816 - DNA, 15 bp, Homo sapiens
aatgtgagtgatctg

SEQ ID NO: 1486817 - DNA, 15 bp, Homo sapiens
atgtgagtgatctgc

SEQ ID NO: 1486818 - DNA, 15 bp, Homo sapiens
tgtgagtgatctgct

SEQ ID NO: 1486819 - DNA, 15 bp, Homo sapiens
gtgagtgatctgctg

SEQ ID NO: 1486820 - DNA, 15 bp, Homo sapiens
tgagtgatctgctgt

SEQ ID NO: 1486821 - DNA, 15 bp, Homo sapiens
gagtgatctgctgta

SEQ ID NO: 1486822 - DNA, 15 bp, Homo sapiens
agtgatctgctgtag

SEQ ID NO: 1486823 - DNA, 15 bp, Homo sapiens
gtgatctgctgtagc

SEQ ID NO: 1486824 - DNA, 15 bp, Homo sapiens
tgatctgctgtagct

SEQ ID NO: 1486825 - DNA, 15 bp, Homo sapiens
gatctgctgtagctc

SEQ ID NO: 1486826 - DNA, 15 bp, Homo sapiens
atctgctgtagctca

SEQ ID NO: 1486827 - DNA, 15 bp, Homo sapiens
tctgctgtagctcag

SEQ ID NO: 1486828 - DNA, 15 bp, Homo sapiens
ctgctgtagctcaga

SEQ ID NO: 1486829 - DNA, 15 bp, Homo sapiens
tgctgtagctcagat

SEQ ID NO: 1486830 - DNA, 15 bp, Homo sapiens
gctgtagctcagatg

SEQ ID NO: 1486831 - DNA, 15 bp, Homo sapiens
ctgtagctcagatgc

SEQ ID NO: 1486832 - DNA, 15 bp, Homo sapiens
tgtagctcagatgcc

SEQ ID NO: 1486833 - DNA, 15 bp, Homo sapiens
gtagctcagatgcca

SEQ ID NO: 1486834 - DNA, 15 bp, Homo sapiens
tagctcagatgccac

SEQ ID NO: 1486835 - DNA, 15 bp, Homo sapiens
agctcagatgccacc

SEQ ID NO: 1486836 - DNA, 15 bp, Homo sapiens
gctcagatgccaccc

SEQ ID NO: 1486837 - DNA, 15 bp, Homo sapiens
ctcagatgccacccc

SEQ ID NO: 1486838 - DNA, 15 bp, Homo sapiens
tcagatgccacccca

SEQ ID NO: 1486839 - DNA, 15 bp, Homo sapiens
cagatgccaccccaa

SEQ ID NO: 1486840 - DNA, 15 bp, Homo sapiens
agatgccaccccaag

SEQ ID NO: 1486841 - DNA, 15 bp, Homo sapiens
gatgccaccccaagc

SEQ ID NO: 1486842 - DNA, 15 bp, Homo sapiens
atgccaccccaagca

SEQ ID NO: 1486843 - DNA, 15 bp, Homo sapiens
tgccaccccaagcag

SEQ ID NO: 1486844 - DNA, 15 bp, Homo sapiens
gccaccccaagcagc

SEQ ID NO: 1486845 - DNA, 15 bp, Homo sapiens
ccaccccaagcagct

SEQ ID NO: 1486846 - DNA, 15 bp, Homo sapiens
caccccaagcagctt

SEQ ID NO: 1486847 - DNA, 15 bp, Homo sapiens
accccaagcagcttg

SEQ ID NO: 1486848 - DNA, 15 bp, Homo sapiens
ccccaagcagcttgc

SEQ ID NO: 1486849 - DNA, 15 bp, Homo sapiens
cccaagcagcttgcc

SEQ ID NO: 1486850 - DNA, 15 bp, Homo sapiens
ccaagcagcttgcct

SEQ ID NO: 1486851 - DNA, 15 bp, Homo sapiens
caagcagcttgcctt

SEQ ID NO: 1486852 - DNA, 15 bp, Homo sapiens
aagcagcttgccttg

SEQ ID NO: 1486853 - DNA, 15 bp, Homo sapiens
agcagcttgccttgc

SEQ ID NO: 1486854 - DNA, 15 bp, Homo sapiens
gcagcttgccttgcc

SEQ ID NO: 1486855 - DNA, 15 bp, Homo sapiens
cagcttgccttgcca

SEQ ID NO: 1486856 - DNA, 15 bp, Homo sapiens
agcttgccttgccag

SEQ ID NO: 1486857 - DNA, 15 bp, Homo sapiens
gcttgccttgccaga

SEQ ID NO: 1486858 - DNA, 15 bp, Homo sapiens
cttgccttgccagag

SEQ ID NO: 1486859 - DNA, 15 bp, Homo sapiens
ttgccttgccagagg

SEQ ID NO: 1486860 - DNA, 15 bp, Homo sapiens
tgccttgccagaggt

SEQ ID NO: 1486861 - DNA, 15 bp, Homo sapiens
gccttgccagaggtc

SEQ ID NO: 1486862 - DNA, 15 bp, Homo sapiens
ccttgccagaggtct

SEQ ID NO: 1486863 - DNA, 15 bp, Homo sapiens
cttgccagaggtctc

SEQ ID NO: 1486864 - DNA, 15 bp, Homo sapiens
ttgccagaggtctct

SEQ ID NO: 1486865 - DNA, 15 bp, Homo sapiens
tgccagaggtctctg

SEQ ID NO: 1486866 - DNA, 15 bp, Homo sapiens
gccagaggtctctgg

SEQ ID NO: 1486867 - DNA, 15 bp, Homo sapiens
ccagaggtctctggt

SEQ ID NO: 1486868 - DNA, 15 bp, Homo sapiens
cagaggtctctggta

SEQ ID NO: 1486869 - DNA, 15 bp, Homo sapiens
agaggtctctggtaa

SEQ ID NO: 1486870 - DNA, 15 bp, Homo sapiens
gaggtctctggtaaa

SEQ ID NO: 1486871 - DNA, 15 bp, Homo sapiens
aggtctctggtaaag

SEQ ID NO: 1486872 - DNA, 15 bp, Homo sapiens
ggtctctggtaaagg

SEQ ID NO: 1486873 - DNA, 15 bp, Homo sapiens
gtctctggtaaaggg

SEQ ID NO: 1486874 - DNA, 15 bp, Homo sapiens
tctctggtaaagggg

SEQ ID NO: 1486875 - DNA, 15 bp, Homo sapiens
ctctggtaaaggggc

SEQ ID NO: 1486876 - DNA, 15 bp, Homo sapiens
tctggtaaaggggca

SEQ ID NO: 1486877 - DNA, 15 bp, Homo sapiens
ctggtaaaggggcat

SEQ ID NO: 1486878 - DNA, 15 bp, Homo sapiens
tggtaaaggggcatc

SEQ ID NO: 1486879 - DNA, 15 bp, Homo sapiens
ggtaaaggggcatca

SEQ ID NO: 1486880 - DNA, 15 bp, Homo sapiens
gtaaaggggcatcat

SEQ ID NO: 1486881 - DNA, 15 bp, Homo sapiens
taaaggggcatcatt

SEQ ID NO: 1486882 - DNA, 15 bp, Homo sapiens
aaaggggcatcattg

SEQ ID NO: 1486883 - DNA, 15 bp, Homo sapiens
aaggggcatcattgg

SEQ ID NO: 1486884 - DNA, 15 bp, Homo sapiens
aggggcatcattggg

SEQ ID NO: 1486885 - DNA, 15 bp, Homo sapiens
ggggcatcattgggt

SEQ ID NO: 1486886 - DNA, 15 bp, Homo sapiens
gggcatcattgggta

SEQ ID NO: 1486887 - DNA, 15 bp, Homo sapiens
ggcatcattgggtac

SEQ ID NO: 1486888 - DNA, 15 bp, Homo sapiens
gcatcattgggtaca

SEQ ID NO: 1486889 - DNA, 15 bp, Homo sapiens
catcattgggtacaa

SEQ ID NO: 1486890 - DNA, 15 bp, Homo sapiens
atcattgggtacaaa

SEQ ID NO: 1486891 - DNA, 15 bp, Homo sapiens
tcattgggtacaaat

SEQ ID NO: 1486892 - DNA, 15 bp, Homo sapiens
cattgggtacaaatg

SEQ ID NO: 1486893 - DNA, 15 bp, Homo sapiens
attgggtacaaatgt

SEQ ID NO: 1486894 - DNA, 15 bp, Homo sapiens
ttgggtacaaatgtg

SEQ ID NO: 1486895 - DNA, 15 bp, Homo sapiens
tgggtacaaatgtgc

SEQ ID NO: 1486896 - DNA, 15 bp, Homo sapiens
gggtacaaatgtgct

SEQ ID NO: 1486897 - DNA, 15 bp, Homo sapiens
ggtacaaatgtgctg

SEQ ID NO: 1486898 - DNA, 15 bp, Homo sapiens
gtacaaatgtgctgg

SEQ ID NO: 1486899 - DNA, 15 bp, Homo sapiens
tacaaatgtgctggg

SEQ ID NO: 1486900 - DNA, 15 bp, Homo sapiens
acaaatgtgctgggg

SEQ ID NO: 1486901 - DNA, 15 bp, Homo sapiens
caaatgtgctggggc

SEQ ID NO: 1486902 - DNA, 15 bp, Homo sapiens
aaatgtgctggggca

SEQ ID NO: 1486903 - DNA, 15 bp, Homo sapiens
aatgtgctggggcac

SEQ ID NO: 1486904 - DNA, 15 bp, Homo sapiens
atgtgctggggcact

SEQ ID NO: 1486905 - DNA, 15 bp, Homo sapiens
tgtgctggggcactt

SEQ ID NO: 1486906 - DNA, 15 bp, Homo sapiens
gtgctggggcacttc

SEQ ID NO: 1486907 - DNA, 15 bp, Homo sapiens
tgctggggcacttcc

SEQ ID NO: 1486908 - DNA, 15 bp, Homo sapiens
gctggggcacttccc

SEQ ID NO: 1486909 - DNA, 15 bp, Homo sapiens
ctggggcacttccct

SEQ ID NO: 1486910 - DNA, 15 bp, Homo sapiens
tggggcacttccctg

SEQ ID NO: 1486911 - DNA, 15 bp, Homo sapiens
ggggcacttccctgc

SEQ ID NO: 1486912 - DNA, 15 bp, Homo sapiens
gggcacttccctgcc

SEQ ID NO: 1486913 - DNA, 15 bp, Homo sapiens
ggcacttccctgcct

SEQ ID NO: 1486914 - DNA, 15 bp, Homo sapiens
gcacttccctgcctg

SEQ ID NO: 1486915 - DNA, 15 bp, Homo sapiens
cacttccctgcctgg

SEQ ID NO: 1486916 - DNA, 15 bp, Homo sapiens
acttccctgcctgga

SEQ ID NO: 1486917 - DNA, 15 bp, Homo sapiens
cttccctgcctggaa

SEQ ID NO: 1486918 - DNA, 15 bp, Homo sapiens
ttccctgcctggaac

SEQ ID NO: 1486919 - DNA, 15 bp, Homo sapiens
tccctgcctggaaca

SEQ ID NO: 1486920 - DNA, 15 bp, Homo sapiens
ccctgcctggaacaa

SEQ ID NO: 1486921 - DNA, 15 bp, Homo sapiens
cctgcctggaacaag

SEQ ID NO: 1486922 - DNA, 15 bp, Homo sapiens
ctgcctggaacaagg

SEQ ID NO: 1486923 - DNA, 15 bp, Homo sapiens
tgcctggaacaaggg

SEQ ID NO: 1486924 - DNA, 15 bp, Homo sapiens
gcctggaacaaggga

SEQ ID NO: 1486925 - DNA, 15 bp, Homo sapiens
cctggaacaagggac

SEQ ID NO: 1486926 - DNA, 15 bp, Homo sapiens
ctggaacaagggacc

SEQ ID NO: 1486927 - DNA, 15 bp, Homo sapiens
tggaacaagggaccc

SEQ ID NO: 1486928 - DNA, 15 bp, Homo sapiens
ggaacaagggaccct

SEQ ID NO: 1486929 - DNA, 15 bp, Homo sapiens
gaacaagggacccta

SEQ ID NO: 1486930 - DNA, 15 bp, Homo sapiens
aacaagggaccctat

SEQ ID NO: 1486931 - DNA, 15 bp, Homo sapiens
acaagggaccctatg

SEQ ID NO: 1486932 - DNA, 15 bp, Homo sapiens
caagggaccctatgc

SEQ ID NO: 1486933 - DNA, 15 bp, Homo sapiens
aagggaccctatgcc

SEQ ID NO: 1486934 - DNA, 15 bp, Homo sapiens
agggaccctatgcca

SEQ ID NO: 1486935 - DNA, 15 bp, Homo sapiens
gggaccctatgccac

SEQ ID NO: 1486936 - DNA, 15 bp, Homo sapiens
ggaccctatgccacc

SEQ ID NO: 1486937 - DNA, 15 bp, Homo sapiens
gaccctatgccaccc

SEQ ID NO: 1486938 - DNA, 15 bp, Homo sapiens
accctatgccaccct

SEQ ID NO: 1486939 - DNA, 15 bp, Homo sapiens
ccctatgccaccctc

SEQ ID NO: 1486940 - DNA, 15 bp, Homo sapiens
cctatgccaccctct

SEQ ID NO: 1486941 - DNA, 15 bp, Homo sapiens
ctatgccaccctctg

SEQ ID NO: 1486942 - DNA, 15 bp, Homo sapiens
tatgccaccctctgg

SEQ ID NO: 1486943 - DNA, 15 bp, Homo sapiens
atgccaccctctgga

SEQ ID NO: 1486944 - DNA, 15 bp, Homo sapiens
tgccaccctctggat

SEQ ID NO: 1486945 - DNA, 15 bp, Homo sapiens
gccaccctctggatc

SEQ ID NO: 1486946 - DNA, 15 bp, Homo sapiens
ccaccctctggatct

SEQ ID NO: 1486947 - DNA, 15 bp, Homo sapiens
caccctctggatcta

SEQ ID NO: 1486948 - DNA, 15 bp, Homo sapiens
accctctggatctag

SEQ ID NO: 1486949 - DNA, 15 bp, Homo sapiens
ccctctggatctagg

SEQ ID NO: 1486950 - DNA, 15 bp, Homo sapiens
cctctggatctagga

SEQ ID NO: 1486951 - DNA, 15 bp, Homo sapiens
ctctggatctaggac

SEQ ID NO: 1486952 - DNA, 15 bp, Homo sapiens
tctggatctaggact

SEQ ID NO: 1486953 - DNA, 15 bp, Homo sapiens
ctggatctaggactc

SEQ ID NO: 1486954 - DNA, 15 bp, Homo sapiens
tggatctaggactca

SEQ ID NO: 1486955 - DNA, 15 bp, Homo sapiens
ggatctaggactcag

SEQ ID NO: 1486956 - DNA, 15 bp, Homo sapiens
gatctaggactcagt

SEQ ID NO: 1486957 - DNA, 15 bp, Homo sapiens
atctaggactcagtg

SEQ ID NO: 1486958 - DNA, 15 bp, Homo sapiens
tctaggactcagtgg

SEQ ID NO: 1486959 - DNA, 15 bp, Homo sapiens
ctaggactcagtggc

SEQ ID NO: 1486960 - DNA, 15 bp, Homo sapiens
taggactcagtggct

SEQ ID NO: 1486961 - DNA, 15 bp, Homo sapiens
aggactcagtggctc

SEQ ID NO: 1486962 - DNA, 15 bp, Homo sapiens
ggactcagtggctct

SEQ ID NO: 1486963 - DNA, 15 bp, Homo sapiens
gactcagtggctctg

SEQ ID NO: 1486964 - DNA, 15 bp, Homo sapiens
actcagtggctctgg

SEQ ID NO: 1486965 - DNA, 15 bp, Homo sapiens
ctcagtggctctgga

SEQ ID NO: 1486966 - DNA, 15 bp, Homo sapiens
tcagtggctctggac

SEQ ID NO: 1486967 - DNA, 15 bp, Homo sapiens
cagtggctctggacc

SEQ ID NO: 1486968 - DNA, 15 bp, Homo sapiens
agtggctctggaccc

SEQ ID NO: 1486969 - DNA, 15 bp, Homo sapiens
gtggctctggaccca

SEQ ID NO: 1486970 - DNA, 15 bp, Homo sapiens
tggctctggacccac

SEQ ID NO: 1486971 - DNA, 15 bp, Homo sapiens
ggctctggacccaca

SEQ ID NO: 1486972 - DNA, 15 bp, Homo sapiens
gctctggacccacag

SEQ ID NO: 1486973 - DNA, 15 bp, Homo sapiens
ctctggacccacaga

SEQ ID NO: 1486974 - DNA, 15 bp, Homo sapiens
tctggacccacagac

SEQ ID NO: 1486975 - DNA, 15 bp, Homo sapiens
ctggacccacagacc

SEQ ID NO: 1486976 - DNA, 15 bp, Homo sapiens
tggacccacagaccc

SEQ ID NO: 1486977 - DNA, 15 bp, Homo sapiens
ggacccacagaccca

SEQ ID NO: 1486978 - DNA, 15 bp, Homo sapiens
gacccacagacccag

SEQ ID NO: 1486979 - DNA, 15 bp, Homo sapiens
acccacagacccagc

SEQ ID NO: 1486980 - DNA, 15 bp, Homo sapiens
cccacagacccagcc

SEQ ID NO: 1486981 - DNA, 15 bp, Homo sapiens
ccacagacccagcct

SEQ ID NO: 1486982 - DNA, 15 bp, Homo sapiens
cacagacccagcctt

SEQ ID NO: 1486983 - DNA, 15 bp, Homo sapiens
acagacccagccttt

SEQ ID NO: 1486984 - DNA, 15 bp, Homo sapiens
cagacccagcctttc

SEQ ID NO: 1486985 - DNA, 15 bp, Homo sapiens
agacccagcctttcc

SEQ ID NO: 1486986 - DNA, 15 bp, Homo sapiens
gacccagcctttcca

SEQ ID NO: 1486987 - DNA, 15 bp, Homo sapiens
acccagcctttccag

SEQ ID NO: 1486988 - DNA, 15 bp, Homo sapiens
cccagcctttccagc

SEQ ID NO: 1486989 - DNA, 15 bp, Homo sapiens
ccagcctttccagca

SEQ ID NO: 1486990 - DNA, 15 bp, Homo sapiens
cagcctttccagcat

SEQ ID NO: 1486991 - DNA, 15 bp, Homo sapiens
agcctttccagcatt

SEQ ID NO: 1486992 - DNA, 15 bp, Homo sapiens
gcctttccagcattc

SEQ ID NO: 1486993 - DNA, 15 bp, Homo sapiens
cctttccagcattct

SEQ ID NO: 1486994 - DNA, 15 bp, Homo sapiens
ctttccagcattctg

SEQ ID NO: 1486995 - DNA, 15 bp, Homo sapiens
tttccagcattctgc

SEQ ID NO: 1486996 - DNA, 15 bp, Homo sapiens
ttccagcattctgca

SEQ ID NO: 1486997 - DNA, 15 bp, Homo sapiens
tccagcattctgcaa

SEQ ID NO: 1486998 - DNA, 15 bp, Homo sapiens
ccagcattctgcaaa

SEQ ID NO: 1486999 - DNA, 15 bp, Homo sapiens
cagcattctgcaaag

SEQ ID NO: 1487000 - DNA, 15 bp, Homo sapiens
agcattctgcaaagg

SEQ ID NO: 1487001 - DNA, 15 bp, Homo sapiens
gcattctgcaaagga

SEQ ID NO: 1487002 - DNA, 15 bp, Homo sapiens
cattctgcaaaggaa

SEQ ID NO: 1487003 - DNA, 15 bp, Homo sapiens
attctgcaaaggaaa

SEQ ID NO: 1487004 - DNA, 15 bp, Homo sapiens
ttctgcaaaggaaag

SEQ ID NO: 1487005 - DNA, 15 bp, Homo sapiens
tctgcaaaggaaagt

SEQ ID NO: 1487006 - DNA, 15 bp, Homo sapiens
ctgcaaaggaaagtg

SEQ ID NO: 1487007 - DNA, 15 bp, Homo sapiens
tgcaaaggaaagtgc

SEQ ID NO: 1487008 - DNA, 15 bp, Homo sapiens
gcaaaggaaagtgct

SEQ ID NO: 1487009 - DNA, 15 bp, Homo sapiens
caaaggaaagtgctt

SEQ ID NO: 1487010 - DNA, 15 bp, Homo sapiens
aaaggaaagtgcttc

SEQ ID NO: 1487011 - DNA, 15 bp, Homo sapiens
aaggaaagtgcttct

SEQ ID NO: 1487012 - DNA, 15 bp, Homo sapiens
aggaaagtgcttctc

SEQ ID NO: 1487013 - DNA, 15 bp, Homo sapiens
ggaaagtgcttctca

SEQ ID NO: 1487014 - DNA, 15 bp, Homo sapiens
gaaagtgcttctcag

SEQ ID NO: 1487015 - DNA, 15 bp, Homo sapiens
aaagtgcttctcaga

SEQ ID NO: 1487016 - DNA, 15 bp, Homo sapiens
aagtgcttctcagaa

SEQ ID NO: 1487017 - DNA, 15 bp, Homo sapiens
agtgcttctcagaag

SEQ ID NO: 1487018 - DNA, 15 bp, Homo sapiens
gtgcttctcagaagc

SEQ ID NO: 1487019 - DNA, 15 bp, Homo sapiens
tgcttctcagaagcc

SEQ ID NO: 1487020 - DNA, 15 bp, Homo sapiens
gcttctcagaagcca

SEQ ID NO: 1487021 - DNA, 15 bp, Homo sapiens
cttctcagaagccaa

SEQ ID NO: 1487022 - DNA, 15 bp, Homo sapiens
ttctcagaagccaat

SEQ ID NO: 1487023 - DNA, 15 bp, Homo sapiens
tctcagaagccaatg

SEQ ID NO: 1487024 - DNA, 15 bp, Homo sapiens
ctcagaagccaatga

SEQ ID NO: 1487025 - DNA, 15 bp, Homo sapiens
tcagaagccaatgac

SEQ ID NO: 1487026 - DNA, 15 bp, Homo sapiens
cagaagccaatgact

SEQ ID NO: 1487027 - DNA, 15 bp, Homo sapiens
agaagccaatgacta

SEQ ID NO: 1487028 - DNA, 15 bp, Homo sapiens
gaagccaatgactaa

SEQ ID NO: 1487029 - DNA, 15 bp, Homo sapiens
aagccaatgactaag

SEQ ID NO: 1487030 - DNA, 15 bp, Homo sapiens
agccaatgactaagc

SEQ ID NO: 1487031 - DNA, 15 bp, Homo sapiens
gccaatgactaagcc

SEQ ID NO: 1487032 - DNA, 15 bp, Homo sapiens
ccaatgactaagcca

SEQ ID NO: 1487033 - DNA, 15 bp, Homo sapiens
caatgactaagccag

SEQ ID NO: 1487034 - DNA, 15 bp, Homo sapiens
aatgactaagccagc

SEQ ID NO: 1487035 - DNA, 15 bp, Homo sapiens
atgactaagccagcc

SEQ ID NO: 1487036 - DNA, 15 bp, Homo sapiens
tgactaagccagccc

SEQ ID NO: 1487037 - DNA, 15 bp, Homo sapiens
gactaagccagccca

SEQ ID NO: 1487038 - DNA, 15 bp, Homo sapiens
actaagccagcccag

SEQ ID NO: 1487039 - DNA, 15 bp, Homo sapiens
ctaagccagcccagg

SEQ ID NO: 1487040 - DNA, 15 bp, Homo sapiens
taagccagcccaggg

SEQ ID NO: 1487041 - DNA, 15 bp, Homo sapiens
aagccagcccagggg

SEQ ID NO: 1487042 - DNA, 15 bp, Homo sapiens
agccagcccaggggt

SEQ ID NO: 1487043 - DNA, 15 bp, Homo sapiens
gccagcccaggggtt

SEQ ID NO: 1487044 - DNA, 15 bp, Homo sapiens
ccagcccaggggttc

SEQ ID NO: 1487045 - DNA, 15 bp, Homo sapiens
cagcccaggggttcc

SEQ ID NO: 1487046 - DNA, 15 bp, Homo sapiens
agcccaggggttcct

SEQ ID NO: 1487047 - DNA, 15 bp, Homo sapiens
gcccaggggttcctt

SEQ ID NO: 1487048 - DNA, 15 bp, Homo sapiens
cccaggggttccttt

SEQ ID NO: 1487049 - DNA, 15 bp, Homo sapiens
ccaggggttcctttt

SEQ ID NO: 1487050 - DNA, 15 bp, Homo sapiens
caggggttcctttta

SEQ ID NO: 1487051 - DNA, 15 bp, Homo sapiens
aggggttccttttac

SEQ ID NO: 1487052 - DNA, 15 bp, Homo sapiens
ggggttccttttaca

SEQ ID NO: 1487053 - DNA, 15 bp, Homo sapiens
gggttccttttacag

SEQ ID NO: 1487054 - DNA, 15 bp, Homo sapiens
ggttccttttacaga

SEQ ID NO: 1487055 - DNA, 15 bp, Homo sapiens
gttccttttacagag

SEQ ID NO: 1487056 - DNA, 15 bp, Homo sapiens
ttccttttacagaga

SEQ ID NO: 1487057 - DNA, 15 bp, Homo sapiens
tccttttacagagac

SEQ ID NO: 1487058 - DNA, 15 bp, Homo sapiens
ccttttacagagaca

SEQ ID NO: 1487059 - DNA, 15 bp, Homo sapiens
cttttacagagacaa

SEQ ID NO: 1487060 - DNA, 15 bp, Homo sapiens
ttttacagagacaat

SEQ ID NO: 1487061 - DNA, 15 bp, Homo sapiens
tttacagagacaatt

SEQ ID NO: 1487062 - DNA, 15 bp, Homo sapiens
ttacagagacaattg

SEQ ID NO: 1487063 - DNA, 15 bp, Homo sapiens
tacagagacaattgt

SEQ ID NO: 1487064 - DNA, 15 bp, Homo sapiens
acagagacaattgtt

SEQ ID NO: 1487065 - DNA, 15 bp, Homo sapiens
cagagacaattgttg

SEQ ID NO: 1487066 - DNA, 15 bp, Homo sapiens
agagacaattgttgg

SEQ ID NO: 1487067 - DNA, 15 bp, Homo sapiens
gagacaattgttggg

SEQ ID NO: 1487068 - DNA, 15 bp, Homo sapiens
agacaattgttgggt

SEQ ID NO: 1487069 - DNA, 15 bp, Homo sapiens
gacaattgttgggtc

SEQ ID NO: 1487070 - DNA, 15 bp, Homo sapiens
acaattgttgggtca

SEQ ID NO: 1487071 - DNA, 15 bp, Homo sapiens
caattgttgggtcaa

SEQ ID NO: 1487072 - DNA, 15 bp, Homo sapiens
aattgttgggtcaag

SEQ ID NO: 1487073 - DNA, 15 bp, Homo sapiens
attgttgggtcaaga

SEQ ID NO: 1487074 - DNA, 15 bp, Homo sapiens
ttgttgggtcaagaa

SEQ ID NO: 1487075 - DNA, 15 bp, Homo sapiens
tgttgggtcaagaag

SEQ ID NO: 1487076 - DNA, 15 bp, Homo sapiens
gttgggtcaagaagg

SEQ ID NO: 1487077 - DNA, 15 bp, Homo sapiens
ttgggtcaagaagga

SEQ ID NO: 1487078 - DNA, 15 bp, Homo sapiens
tgggtcaagaaggaa

SEQ ID NO: 1487079 - DNA, 15 bp, Homo sapiens
gggtcaagaaggaac

SEQ ID NO: 1487080 - DNA, 15 bp, Homo sapiens
ggtcaagaaggaacc

SEQ ID NO: 1487081 - DNA, 15 bp, Homo sapiens
gtcaagaaggaaccc

SEQ ID NO: 1487082 - DNA, 15 bp, Homo sapiens
tcaagaaggaacccc

SEQ ID NO: 1487083 - DNA, 15 bp, Homo sapiens
caagaaggaacccca

SEQ ID NO: 1487084 - DNA, 15 bp, Homo sapiens
aagaaggaaccccag

SEQ ID NO: 1487085 - DNA, 15 bp, Homo sapiens
agaaggaaccccaga

SEQ ID NO: 1487086 - DNA, 15 bp, Homo sapiens
gaaggaaccccagag

SEQ ID NO: 1487087 - DNA, 15 bp, Homo sapiens
aaggaaccccagagc

SEQ ID NO: 1487088 - DNA, 15 bp, Homo sapiens
aggaaccccagagct

SEQ ID NO: 1487089 - DNA, 15 bp, Homo sapiens
ggaaccccagagctg

SEQ ID NO: 1487090 - DNA, 15 bp, Homo sapiens
gaaccccagagctga

SEQ ID NO: 1487091 - DNA, 15 bp, Homo sapiens
aaccccagagctgag

SEQ ID NO: 1487092 - DNA, 15 bp, Homo sapiens
accccagagctgagc

SEQ ID NO: 1487093 - DNA, 15 bp, Homo sapiens
ccccagagctgagcc

SEQ ID NO: 1487094 - DNA, 15 bp, Homo sapiens
cccagagctgagccc

SEQ ID NO: 1487095 - DNA, 15 bp, Homo sapiens
ccagagctgagcccc

SEQ ID NO: 1487096 - DNA, 15 bp, Homo sapiens
cagagctgagcccca

SEQ ID NO: 1487097 - DNA, 15 bp, Homo sapiens
agagctgagccccac

SEQ ID NO: 1487098 - DNA, 15 bp, Homo sapiens
gagctgagccccaca

SEQ ID NO: 1487099 - DNA, 15 bp, Homo sapiens
agctgagccccacat

SEQ ID NO: 1487100 - DNA, 15 bp, Homo sapiens
gctgagccccacata

SEQ ID NO: 1487101 - DNA, 15 bp, Homo sapiens
ctgagccccacatag

SEQ ID NO: 1487102 - DNA, 15 bp, Homo sapiens
tgagccccacatagg

SEQ ID NO: 1487103 - DNA, 15 bp, Homo sapiens
gagccccacataggg

SEQ ID NO: 1487104 - DNA, 15 bp, Homo sapiens
agccccacatagggc

SEQ ID NO: 1487105 - DNA, 15 bp, Homo sapiens
gccccacatagggct

SEQ ID NO: 1487106 - DNA, 15 bp, Homo sapiens
ccccacatagggcta

SEQ ID NO: 1487107 - DNA, 15 bp, Homo sapiens
cccacatagggctag

SEQ ID NO: 1487108 - DNA, 15 bp, Homo sapiens
ccacatagggctagg

SEQ ID NO: 1487109 - DNA, 15 bp, Homo sapiens
cacatagggctagga

SEQ ID NO: 1487110 - DNA, 15 bp, Homo sapiens
acatagggctaggag

SEQ ID NO: 1487111 - DNA, 15 bp, Homo sapiens
catagggctaggagc

SEQ ID NO: 1487112 - DNA, 15 bp, Homo sapiens
atagggctaggagcc

SEQ ID NO: 1487113 - DNA, 15 bp, Homo sapiens
tagggctaggagccc

SEQ ID NO: 1487114 - DNA, 15 bp, Homo sapiens
agggctaggagccca

SEQ ID NO: 1487115 - DNA, 15 bp, Homo sapiens
gggctaggagcccac

SEQ ID NO: 1487116 - DNA, 15 bp, Homo sapiens
ggctaggagcccacg

SEQ ID NO: 1487117 - DNA, 15 bp, Homo sapiens
gctaggagcccacgc

SEQ ID NO: 1487118 - DNA, 15 bp, Homo sapiens
ctaggagcccacgcc

SEQ ID NO: 1487119 - DNA, 15 bp, Homo sapiens
taggagcccacgcct

SEQ ID NO: 1487120 - DNA, 15 bp, Homo sapiens
aggagcccacgcctc

SEQ ID NO: 1487121 - DNA, 15 bp, Homo sapiens
ggagcccacgcctcc

SEQ ID NO: 1487122 - DNA, 15 bp, Homo sapiens
gagcccacgcctcct

SEQ ID NO: 1487123 - DNA, 15 bp, Homo sapiens
agcccacgcctcctg

SEQ ID NO: 1487124 - DNA, 15 bp, Homo sapiens
gcccacgcctcctgt

SEQ ID NO: 1487125 - DNA, 15 bp, Homo sapiens
cccacgcctcctgtc

SEQ ID NO: 1487126 - DNA, 15 bp, Homo sapiens
ccacgcctcctgtct

SEQ ID NO: 1487127 - DNA, 15 bp, Homo sapiens
cacgcctcctgtctt

SEQ ID NO: 1487128 - DNA, 15 bp, Homo sapiens
acgcctcctgtcttt

SEQ ID NO: 1487129 - DNA, 15 bp, Homo sapiens
cgcctcctgtctttc

SEQ ID NO: 1487130 - DNA, 15 bp, Homo sapiens
gcctcctgtctttct

SEQ ID NO: 1487131 - DNA, 15 bp, Homo sapiens
cctcctgtctttctc

SEQ ID NO: 1487132 - DNA, 15 bp, Homo sapiens
ctcctgtctttctca

SEQ ID NO: 1487133 - DNA, 15 bp, Homo sapiens
tcctgtctttctcac

SEQ ID NO: 1487134 - DNA, 15 bp, Homo sapiens
cctgtctttctcact

SEQ ID NO: 1487135 - DNA, 15 bp, Homo sapiens
ctgtctttctcactt

SEQ ID NO: 1487136 - DNA, 15 bp, Homo sapiens
tgtctttctcacttg

SEQ ID NO: 1487137 - DNA, 15 bp, Homo sapiens
gtctttctcacttgg

SEQ ID NO: 1487138 - DNA, 15 bp, Homo sapiens
tctttctcacttgga

SEQ ID NO: 1487139 - DNA, 15 bp, Homo sapiens
ctttctcacttggaa

SEQ ID NO: 1487140 - DNA, 15 bp, Homo sapiens
tttctcacttggaag

SEQ ID NO: 1487141 - DNA, 15 bp, Homo sapiens
ttctcacttggaagt

SEQ ID NO: 1487142 - DNA, 15 bp, Homo sapiens
tctcacttggaagtc

SEQ ID NO: 1487143 - DNA, 15 bp, Homo sapiens
ctcacttggaagtca

SEQ ID NO: 1487144 - DNA, 15 bp, Homo sapiens
tcacttggaagtcaa

SEQ ID NO: 1487145 - DNA, 15 bp, Homo sapiens
cacttggaagtcaat

SEQ ID NO: 1487146 - DNA, 15 bp, Homo sapiens
acttggaagtcaatt

SEQ ID NO: 1487147 - DNA, 15 bp, Homo sapiens
cttggaagtcaattt

SEQ ID NO: 1487148 - DNA, 15 bp, Homo sapiens
ttggaagtcaatttt

SEQ ID NO: 1487149 - DNA, 15 bp, Homo sapiens
tggaagtcaatttta

SEQ ID NO: 1487150 - DNA, 15 bp, Homo sapiens
ggaagtcaattttac

SEQ ID NO: 1487151 - DNA, 15 bp, Homo sapiens
gaagtcaattttaca

SEQ ID NO: 1487152 - DNA, 15 bp, Homo sapiens
aagtcaattttacat

SEQ ID NO: 1487153 - DNA, 15 bp, Homo sapiens
agtcaattttacata

SEQ ID NO: 1487154 - DNA, 15 bp, Homo sapiens
gtcaattttacatag

SEQ ID NO: 1487155 - DNA, 15 bp, Homo sapiens
tcaattttacatagc

SEQ ID NO: 1487156 - DNA, 15 bp, Homo sapiens
caattttacatagca

SEQ ID NO: 1487157 - DNA, 15 bp, Homo sapiens
aattttacatagcat

SEQ ID NO: 1487158 - DNA, 15 bp, Homo sapiens
attttacatagcatg

SEQ ID NO: 1487159 - DNA, 15 bp, Homo sapiens
ttttacatagcatgg

SEQ ID NO: 1487160 - DNA, 15 bp, Homo sapiens
tttacatagcatggt

SEQ ID NO: 1487161 - DNA, 15 bp, Homo sapiens
ttacatagcatggtc

SEQ ID NO: 1487162 - DNA, 15 bp, Homo sapiens
tacatagcatggtct

SEQ ID NO: 1487163 - DNA, 15 bp, Homo sapiens
acatagcatggtcta

SEQ ID NO: 1487164 - DNA, 15 bp, Homo sapiens
catagcatggtctaa

SEQ ID NO: 1487165 - DNA, 15 bp, Homo sapiens
atagcatggtctaaa

SEQ ID NO: 1487166 - DNA, 15 bp, Homo sapiens
tagcatggtctaaag

SEQ ID NO: 1487167 - DNA, 15 bp, Homo sapiens
agcatggtctaaagc

SEQ ID NO: 1487168 - DNA, 15 bp, Homo sapiens
gcatggtctaaagcc

SEQ ID NO: 1487169 - DNA, 15 bp, Homo sapiens
catggtctaaagcct

SEQ ID NO: 1487170 - DNA, 15 bp, Homo sapiens
atggtctaaagcctc

SEQ ID NO: 1487171 - DNA, 15 bp, Homo sapiens
tggtctaaagcctca

SEQ ID NO: 1487172 - DNA, 15 bp, Homo sapiens
ggtctaaagcctcat

SEQ ID NO: 1487173 - DNA, 15 bp, Homo sapiens
gtctaaagcctcatg

SEQ ID NO: 1487174 - DNA, 15 bp, Homo sapiens
tctaaagcctcatgg

SEQ ID NO: 1487175 - DNA, 15 bp, Homo sapiens
ctaaagcctcatgga

SEQ ID NO: 1487176 - DNA, 15 bp, Homo sapiens
taaagcctcatggac

SEQ ID NO: 1487177 - DNA, 15 bp, Homo sapiens
aaagcctcatggacc

SEQ ID NO: 1487178 - DNA, 15 bp, Homo sapiens
aagcctcatggaccc

SEQ ID NO: 1487179 - DNA, 15 bp, Homo sapiens
agcctcatggacccc

SEQ ID NO: 1487180 - DNA, 15 bp, Homo sapiens
gcctcatggacccca

SEQ ID NO: 1487181 - DNA, 15 bp, Homo sapiens
cctcatggaccccac

SEQ ID NO: 1487182 - DNA, 15 bp, Homo sapiens
ctcatggaccccaca

SEQ ID NO: 1487183 - DNA, 15 bp, Homo sapiens
tcatggaccccacaa

SEQ ID NO: 1487184 - DNA, 15 bp, Homo sapiens
catggaccccacaag

SEQ ID NO: 1487185 - DNA, 15 bp, Homo sapiens
atggaccccacaagt

SEQ ID NO: 1487186 - DNA, 15 bp, Homo sapiens
tggaccccacaagtc

SEQ ID NO: 1487187 - DNA, 15 bp, Homo sapiens
ggaccccacaagtct

SEQ ID NO: 1487188 - DNA, 15 bp, Homo sapiens
gaccccacaagtctt

SEQ ID NO: 1487189 - DNA, 15 bp, Homo sapiens
accccacaagtcttt

SEQ ID NO: 1487190 - DNA, 15 bp, Homo sapiens
ccccacaagtctttt

SEQ ID NO: 1487191 - DNA, 15 bp, Homo sapiens
cccacaagtctttta

SEQ ID NO: 1487192 - DNA, 15 bp, Homo sapiens
ccacaagtcttttaa

SEQ ID NO: 1487193 - DNA, 15 bp, Homo sapiens
cacaagtcttttaaa

SEQ ID NO: 1487194 - DNA, 15 bp, Homo sapiens
acaagtcttttaaat

SEQ ID NO: 1487195 - DNA, 15 bp, Homo sapiens
caagtcttttaaata

SEQ ID NO: 1487196 - DNA, 15 bp, Homo sapiens
aagtcttttaaataa

SEQ ID NO: 1487197 - DNA, 15 bp, Homo sapiens
agtcttttaaataat

SEQ ID NO: 1487198 - DNA, 15 bp, Homo sapiens
gtcttttaaataata

SEQ ID NO: 1487199 - DNA, 15 bp, Homo sapiens
tcttttaaataataa

SEQ ID NO: 1487200 - DNA, 15 bp, Homo sapiens
cttttaaataataac

SEQ ID NO: 1487201 - DNA, 15 bp, Homo sapiens
ttttaaataataact

SEQ ID NO: 1487202 - DNA, 15 bp, Homo sapiens
tttaaataataacta

SEQ ID NO: 1487203 - DNA, 15 bp, Homo sapiens
ttaaataataactaa

SEQ ID NO: 1487204 - DNA, 15 bp, Homo sapiens
taaataataactaac

SEQ ID NO: 1487205 - DNA, 15 bp, Homo sapiens
aaataataactaact

SEQ ID NO: 1487206 - DNA, 15 bp, Homo sapiens
aataataactaactt

SEQ ID NO: 1487207 - DNA, 15 bp, Homo sapiens
ataataactaacttc

SEQ ID NO: 1487208 - DNA, 15 bp, Homo sapiens
taataactaacttct

SEQ ID NO: 1487209 - DNA, 15 bp, Homo sapiens
aataactaacttctc

SEQ ID NO: 1487210 - DNA, 15 bp, Homo sapiens
ataactaacttctct

SEQ ID NO: 1487211 - DNA, 15 bp, Homo sapiens
taactaacttctctt

SEQ ID NO: 1487212 - DNA, 15 bp, Homo sapiens
aactaacttctcttc

SEQ ID NO: 1487213 - DNA, 15 bp, Homo sapiens
actaacttctcttcc

SEQ ID NO: 1487214 - DNA, 15 bp, Homo sapiens
ctaacttctcttccc

SEQ ID NO: 1487215 - DNA, 15 bp, Homo sapiens
taacttctcttccct

SEQ ID NO: 1487216 - DNA, 15 bp, Homo sapiens
aacttctcttccctt

SEQ ID NO: 1487217 - DNA, 15 bp, Homo sapiens
acttctcttcccttg

SEQ ID NO: 1487218 - DNA, 15 bp, Homo sapiens
cttctcttcccttga

SEQ ID NO: 1487219 - DNA, 15 bp, Homo sapiens
ttctcttcccttgaa

SEQ ID NO: 1487220 - DNA, 15 bp, Homo sapiens
tctcttcccttgaat

SEQ ID NO: 1487221 - DNA, 15 bp, Homo sapiens
ctcttcccttgaata

SEQ ID NO: 1487222 - DNA, 15 bp, Homo sapiens
tcttcccttgaataa

SEQ ID NO: 1487223 - DNA, 15 bp, Homo sapiens
cttcccttgaataaa

SEQ ID NO: 1487224 - DNA, 15 bp, Homo sapiens
ttcccttgaataaaa

SEQ ID NO: 1487225 - DNA, 15 bp, Homo sapiens
tcccttgaataaaat

SEQ ID NO: 1487226 - DNA, 15 bp, Homo sapiens
cccttgaataaaata

SEQ ID NO: 1487227 - DNA, 15 bp, Homo sapiens
ccttgaataaaataa

SEQ ID NO: 1487228 - DNA, 15 bp, Homo sapiens
cttgaataaaataat

SEQ ID NO: 1487229 - DNA, 15 bp, Homo sapiens
ttgaataaaataatc

SEQ ID NO: 1487230 - DNA, 15 bp, Homo sapiens
tgaataaaataatca

SEQ ID NO: 1487231 - DNA, 15 bp, Homo sapiens
gaataaaataatcag

SEQ ID NO: 1487232 - DNA, 15 bp, Homo sapiens
aataaaataatcagc

SEQ ID NO: 1487233 - DNA, 15 bp, Homo sapiens
ataaaataatcagca

SEQ ID NO: 1487234 - DNA, 15 bp, Homo sapiens
taaaataatcagcaa

SEQ ID NO: 1487235 - DNA, 15 bp, Homo sapiens
aaaataatcagcaac

SEQ ID NO: 1487236 - DNA, 15 bp, Homo sapiens
aaataatcagcaaca

SEQ ID NO: 1487237 - DNA, 15 bp, Homo sapiens
aataatcagcaacaa

SEQ ID NO: 1487238 - DNA, 15 bp, Homo sapiens
ataatcagcaacaat

SEQ ID NO: 1487239 - DNA, 15 bp, Homo sapiens
taatcagcaacaata

SEQ ID NO: 1487240 - DNA, 15 bp, Homo sapiens
aatcagcaacaatag

SEQ ID NO: 1487241 - DNA, 15 bp, Homo sapiens
atcagcaacaatagg

SEQ ID NO: 1487242 - DNA, 15 bp, Homo sapiens
tcagcaacaatagga

SEQ ID NO: 1487243 - DNA, 15 bp, Homo sapiens
cagcaacaataggag

SEQ ID NO: 1487244 - DNA, 15 bp, Homo sapiens
agcaacaataggaga

SEQ ID NO: 1487245 - DNA, 15 bp, Homo sapiens
gcaacaataggagaa

SEQ ID NO: 1487246 - DNA, 15 bp, Homo sapiens
caacaataggagaag

SEQ ID NO: 1487247 - DNA, 15 bp, Homo sapiens
aacaataggagaagc

SEQ ID NO: 1487248 - DNA, 15 bp, Homo sapiens
acaataggagaagca

SEQ ID NO: 1487249 - DNA, 15 bp, Homo sapiens
caataggagaagcaa

SEQ ID NO: 1487250 - DNA, 15 bp, Homo sapiens
aataggagaagcaaa

SEQ ID NO: 1487251 - DNA, 15 bp, Homo sapiens
ataggagaagcaaag

SEQ ID NO: 1487252 - DNA, 15 bp, Homo sapiens
taggagaagcaaagt

SEQ ID NO: 1487253 - DNA, 15 bp, Homo sapiens
aggagaagcaaagtc

SEQ ID NO: 1487254 - DNA, 15 bp, Homo sapiens
ggagaagcaaagtca

SEQ ID NO: 1487255 - DNA, 15 bp, Homo sapiens
gagaagcaaagtcat

SEQ ID NO: 1487256 - DNA, 15 bp, Homo sapiens
agaagcaaagtcatg

SEQ ID NO: 1487257 - DNA, 15 bp, Homo sapiens
gaagcaaagtcatga

SEQ ID NO: 1487258 - DNA, 15 bp, Homo sapiens
aagcaaagtcatgag

SEQ ID NO: 1487259 - DNA, 15 bp, Homo sapiens
agcaaagtcatgaga

SEQ ID NO: 1487260 - DNA, 15 bp, Homo sapiens
gcaaagtcatgagaa

SEQ ID NO: 1487261 - DNA, 15 bp, Homo sapiens
caaagtcatgagaaa

SEQ ID NO: 1487262 - DNA, 15 bp, Homo sapiens
aaagtcatgagaaac

SEQ ID NO: 1487263 - DNA, 15 bp, Homo sapiens
aagtcatgagaaacg

SEQ ID NO: 1487264 - DNA, 15 bp, Homo sapiens
agtcatgagaaacgg

SEQ ID NO: 1487265 - DNA, 15 bp, Homo sapiens
gtcatgagaaacgga

SEQ ID NO: 1487266 - DNA, 15 bp, Homo sapiens
tcatgagaaacggaa

SEQ ID NO: 1487267 - DNA, 15 bp, Homo sapiens
catgagaaacggaag

SEQ ID NO: 1487268 - DNA, 15 bp, Homo sapiens
atgagaaacggaagg

SEQ ID NO: 1487269 - DNA, 15 bp, Homo sapiens
tgagaaacggaagga

SEQ ID NO: 1487270 - DNA, 15 bp, Homo sapiens
gagaaacggaaggaa

SEQ ID NO: 1487271 - DNA, 15 bp, Homo sapiens
agaaacggaaggaat

SEQ ID NO: 1487272 - DNA, 15 bp, Homo sapiens
gaaacggaaggaatg

SEQ ID NO: 1487273 - DNA, 15 bp, Homo sapiens
aaacggaaggaatgt

SEQ ID NO: 1487274 - DNA, 15 bp, Homo sapiens
aacggaaggaatgta

SEQ ID NO: 1487275 - DNA, 15 bp, Homo sapiens
acggaaggaatgtag

SEQ ID NO: 1487276 - DNA, 15 bp, Homo sapiens
cggaaggaatgtagt

SEQ ID NO: 1487277 - DNA, 15 bp, Homo sapiens
ggaaggaatgtagtc

SEQ ID NO: 1487278 - DNA, 15 bp, Homo sapiens
gaaggaatgtagtcc

SEQ ID NO: 1487279 - DNA, 15 bp, Homo sapiens
aaggaatgtagtccc

SEQ ID NO: 1487280 - DNA, 15 bp, Homo sapiens
aggaatgtagtccct

SEQ ID NO: 1487281 - DNA, 15 bp, Homo sapiens
ggaatgtagtccctc

SEQ ID NO: 1487282 - DNA, 15 bp, Homo sapiens
gaatgtagtccctct

SEQ ID NO: 1487283 - DNA, 15 bp, Homo sapiens
aatgtagtccctctg

SEQ ID NO: 1487284 - DNA, 15 bp, Homo sapiens
atgtagtccctctga

SEQ ID NO: 1487285 - DNA, 15 bp, Homo sapiens
tgtagtccctctgag

SEQ ID NO: 1487286 - DNA, 15 bp, Homo sapiens
gtagtccctctgagg

SEQ ID NO: 1487287 - DNA, 15 bp, Homo sapiens
tagtccctctgagga

SEQ ID NO: 1487288 - DNA, 15 bp, Homo sapiens
agtccctctgaggat

SEQ ID NO: 1487289 - DNA, 15 bp, Homo sapiens
gtccctctgaggatg

SEQ ID NO: 1487290 - DNA, 15 bp, Homo sapiens
tccctctgaggatgg

SEQ ID NO: 1487291 - DNA, 15 bp, Homo sapiens
ccctctgaggatggc

SEQ ID NO: 1487292 - DNA, 15 bp, Homo sapiens
cctctgaggatggct

SEQ ID NO: 1487293 - DNA, 15 bp, Homo sapiens
ctctgaggatggctg

SEQ ID NO: 1487294 - DNA, 15 bp, Homo sapiens
tctgaggatggctgg

SEQ ID NO: 1487295 - DNA, 15 bp, Homo sapiens
ctgaggatggctggt

SEQ ID NO: 1487296 - DNA, 15 bp, Homo sapiens
tgaggatggctggtg

SEQ ID NO: 1487297 - DNA, 15 bp, Homo sapiens
gaggatggctggtga

SEQ ID NO: 1487298 - DNA, 15 bp, Homo sapiens
aggatggctggtgaa

SEQ ID NO: 1487299 - DNA, 15 bp, Homo sapiens
ggatggctggtgaat

SEQ ID NO: 1487300 - DNA, 15 bp, Homo sapiens
gatggctggtgaatt

SEQ ID NO: 1487301 - DNA, 15 bp, Homo sapiens
atggctggtgaattt

SEQ ID NO: 1487302 - DNA, 15 bp, Homo sapiens
tggctggtgaatttg

SEQ ID NO: 1487303 - DNA, 15 bp, Homo sapiens
ggctggtgaatttgc

SEQ ID NO: 1487304 - DNA, 15 bp, Homo sapiens
gctggtgaatttgca

SEQ ID NO: 1487305 - DNA, 15 bp, Homo sapiens
ctggtgaatttgcat

SEQ ID NO: 1487306 - DNA, 15 bp, Homo sapiens
tggtgaatttgcatg

SEQ ID NO: 1487307 - DNA, 15 bp, Homo sapiens
ggtgaatttgcatgc

SEQ ID NO: 1487308 - DNA, 15 bp, Homo sapiens
gtgaatttgcatgct

SEQ ID NO: 1487309 - DNA, 15 bp, Homo sapiens
tgaatttgcatgctg

SEQ ID NO: 1487310 - DNA, 15 bp, Homo sapiens
gaatttgcatgctgg

SEQ ID NO: 1487311 - DNA, 15 bp, Homo sapiens
aatttgcatgctggt

SEQ ID NO: 1487312 - DNA, 15 bp, Homo sapiens
atttgcatgctggtg

SEQ ID NO: 1487313 - DNA, 15 bp, Homo sapiens
tttgcatgctggtgt

SEQ ID NO: 1487314 - DNA, 15 bp, Homo sapiens
ttgcatgctggtgtt

SEQ ID NO: 1487315 - DNA, 15 bp, Homo sapiens
tgcatgctggtgttc

SEQ ID NO: 1487316 - DNA, 15 bp, Homo sapiens
gcatgctggtgttct

SEQ ID NO: 1487317 - DNA, 15 bp, Homo sapiens
catgctggtgttctt

SEQ ID NO: 1487318 - DNA, 15 bp, Homo sapiens
atgctggtgttcttc

SEQ ID NO: 1487319 - DNA, 15 bp, Homo sapiens
tgctggtgttcttcc

SEQ ID NO: 1487320 - DNA, 15 bp, Homo sapiens
gctggtgttcttcct

SEQ ID NO: 1487321 - DNA, 15 bp, Homo sapiens
ctggtgttcttccta

SEQ ID NO: 1487322 - DNA, 15 bp, Homo sapiens
tggtgttcttcctac

SEQ ID NO: 1487323 - DNA, 15 bp, Homo sapiens
ggtgttcttcctaca

SEQ ID NO: 1487324 - DNA, 15 bp, Homo sapiens
gtgttcttcctacac

SEQ ID NO: 1487325 - DNA, 15 bp, Homo sapiens
tgttcttcctacacc

SEQ ID NO: 1487326 - DNA, 15 bp, Homo sapiens
gttcttcctacaccc

SEQ ID NO: 1487327 - DNA, 15 bp, Homo sapiens
ttcttcctacaccca

SEQ ID NO: 1487328 - DNA, 15 bp, Homo sapiens
tcttcctacacccag

SEQ ID NO: 1487329 - DNA, 15 bp, Homo sapiens
cttcctacacccagc

SEQ ID NO: 1487330 - DNA, 15 bp, Homo sapiens
ttcctacacccagcc

SEQ ID NO: 1487331 - DNA, 15 bp, Homo sapiens
tcctacacccagcct

SEQ ID NO: 1487332 - DNA, 15 bp, Homo sapiens
cctacacccagccta

SEQ ID NO: 1487333 - DNA, 15 bp, Homo sapiens
ctacacccagcctat

SEQ ID NO: 1487334 - DNA, 15 bp, Homo sapiens
tacacccagcctatc

SEQ ID NO: 1487335 - DNA, 15 bp, Homo sapiens
acacccagcctatca

SEQ ID NO: 1487336 - DNA, 15 bp, Homo sapiens
cacccagcctatcac

SEQ ID NO: 1487337 - DNA, 15 bp, Homo sapiens
acccagcctatcacc

SEQ ID NO: 1487338 - DNA, 15 bp, Homo sapiens
cccagcctatcacct

SEQ ID NO: 1487339 - DNA, 15 bp, Homo sapiens
ccagcctatcacctc

SEQ ID NO: 1487340 - DNA, 15 bp, Homo sapiens
cagcctatcacctca

SEQ ID NO: 1487341 - DNA, 15 bp, Homo sapiens
agcctatcacctcag

SEQ ID NO: 1487342 - DNA, 15 bp, Homo sapiens
gcctatcacctcagt

SEQ ID NO: 1487343 - DNA, 15 bp, Homo sapiens
cctatcacctcagtt

SEQ ID NO: 1487344 - DNA, 15 bp, Homo sapiens
ctatcacctcagtta

SEQ ID NO: 1487345 - DNA, 15 bp, Homo sapiens
tatcacctcagttaa

SEQ ID NO: 1487346 - DNA, 15 bp, Homo sapiens
atcacctcagttaag

SEQ ID NO: 1487347 - DNA, 15 bp, Homo sapiens
tcacctcagttaagt

SEQ ID NO: 1487348 - DNA, 15 bp, Homo sapiens
cacctcagttaagta

SEQ ID NO: 1487349 - DNA, 15 bp, Homo sapiens
acctcagttaagtac

SEQ ID NO: 1487350 - DNA, 15 bp, Homo sapiens
cctcagttaagtact

SEQ ID NO: 1487351 - DNA, 15 bp, Homo sapiens
ctcagttaagtactt

SEQ ID NO: 1487352 - DNA, 15 bp, Homo sapiens
tcagttaagtactta

SEQ ID NO: 1487353 - DNA, 15 bp, Homo sapiens
cagttaagtacttat

SEQ ID NO: 1487354 - DNA, 15 bp, Homo sapiens
agttaagtacttatt

SEQ ID NO: 1487355 - DNA, 15 bp, Homo sapiens
gttaagtacttattg

SEQ ID NO: 1487356 - DNA, 15 bp, Homo sapiens
ttaagtacttattga

SEQ ID NO: 1487357 - DNA, 15 bp, Homo sapiens
taagtacttattgat

SEQ ID NO: 1487358 - DNA, 15 bp, Homo sapiens
aagtacttattgatg

SEQ ID NO: 1487359 - DNA, 15 bp, Homo sapiens
agtacttattgatga

SEQ ID NO: 1487360 - DNA, 15 bp, Homo sapiens
gtacttattgatgat

SEQ ID NO: 1487361 - DNA, 15 bp, Homo sapiens
tacttattgatgatt

SEQ ID NO: 1487362 - DNA, 15 bp, Homo sapiens
acttattgatgattt

SEQ ID NO: 1487363 - DNA, 15 bp, Homo sapiens
cttattgatgattta

SEQ ID NO: 1487364 - DNA, 15 bp, Homo sapiens
ttattgatgatttat

SEQ ID NO: 1487365 - DNA, 15 bp, Homo sapiens
tattgatgatttatc

SEQ ID NO: 1487366 - DNA, 15 bp, Homo sapiens
attgatgatttatcc

SEQ ID NO: 1487367 - DNA, 15 bp, Homo sapiens
ttgatgatttatccg

SEQ ID NO: 1487368 - DNA, 15 bp, Homo sapiens
tgatgatttatccgt

SEQ ID NO: 1487369 - DNA, 15 bp, Homo sapiens
gatgatttatccgtg

SEQ ID NO: 1487370 - DNA, 15 bp, Homo sapiens
atgatttatccgtgg

SEQ ID NO: 1487371 - DNA, 15 bp, Homo sapiens
tgatttatccgtgga

SEQ ID NO: 1487372 - DNA, 15 bp, Homo sapiens
gatttatccgtggaa

SEQ ID NO: 1487373 - DNA, 15 bp, Homo sapiens
atttatccgtggaaa

SEQ ID NO: 1487374 - DNA, 15 bp, Homo sapiens
tttatccgtggaaag

SEQ ID NO: 1487375 - DNA, 15 bp, Homo sapiens
ttatccgtggaaagt

SEQ ID NO: 1487376 - DNA, 15 bp, Homo sapiens
tatccgtggaaagtt

SEQ ID NO: 1487377 - DNA, 15 bp, Homo sapiens
atccgtggaaagttc

SEQ ID NO: 1487378 - DNA, 15 bp, Homo sapiens
tccgtggaaagttct

SEQ ID NO: 1487379 - DNA, 15 bp, Homo sapiens
ccgtggaaagttctt

SEQ ID NO: 1487380 - DNA, 15 bp, Homo sapiens
cgtggaaagttcttg

SEQ ID NO: 1487381 - DNA, 15 bp, Homo sapiens
gtggaaagttcttga

SEQ ID NO: 1487382 - DNA, 15 bp, Homo sapiens
tggaaagttcttgaa

SEQ ID NO: 1487383 - DNA, 15 bp, Homo sapiens
ggaaagttcttgaac

SEQ ID NO: 1487384 - DNA, 15 bp, Homo sapiens
gaaagttcttgaacg

SEQ ID NO: 1487385 - DNA, 15 bp, Homo sapiens
aaagttcttgaacgc

SEQ ID NO: 1487386 - DNA, 15 bp, Homo sapiens
aagttcttgaacgct

SEQ ID NO: 1487387 - DNA, 15 bp, Homo sapiens
agttcttgaacgcta

SEQ ID NO: 1487388 - DNA, 15 bp, Homo sapiens
gttcttgaacgctag

SEQ ID NO: 1487389 - DNA, 15 bp, Homo sapiens
ttcttgaacgctagc

SEQ ID NO: 1487390 - DNA, 15 bp, Homo sapiens
tcttgaacgctagca

SEQ ID NO: 1487391 - DNA, 15 bp, Homo sapiens
cttgaacgctagcaa

SEQ ID NO: 1487392 - DNA, 15 bp, Homo sapiens
ttgaacgctagcaac

SEQ ID NO: 1487393 - DNA, 15 bp, Homo sapiens
tgaacgctagcaaca

SEQ ID NO: 1487394 - DNA, 15 bp, Homo sapiens
gaacgctagcaacat

SEQ ID NO: 1487395 - DNA, 15 bp, Homo sapiens
aacgctagcaacatg

SEQ ID NO: 1487396 - DNA, 15 bp, Homo sapiens
acgctagcaacatgc

SEQ ID NO: 1487397 - DNA, 15 bp, Homo sapiens
cgctagcaacatgct

SEQ ID NO: 1487398 - DNA, 15 bp, Homo sapiens
gctagcaacatgctc

SEQ ID NO: 1487399 - DNA, 15 bp, Homo sapiens
ctagcaacatgctca

SEQ ID NO: 1487400 - DNA, 15 bp, Homo sapiens
tagcaacatgctcat

SEQ ID NO: 1487401 - DNA, 15 bp, Homo sapiens
agcaacatgctcatt

SEQ ID NO: 1487402 - DNA, 15 bp, Homo sapiens
gcaacatgctcattt

SEQ ID NO: 1487403 - DNA, 15 bp, Homo sapiens
caacatgctcatttc

SEQ ID NO: 1487404 - DNA, 15 bp, Homo sapiens
aacatgctcatttct

SEQ ID NO: 1487405 - DNA, 15 bp, Homo sapiens
acatgctcatttctg

SEQ ID NO: 1487406 - DNA, 15 bp, Homo sapiens
catgctcatttctgt

SEQ ID NO: 1487407 - DNA, 15 bp, Homo sapiens
atgctcatttctgta

SEQ ID NO: 1487408 - DNA, 15 bp, Homo sapiens
tgctcatttctgtaa

SEQ ID NO: 1487409 - DNA, 15 bp, Homo sapiens
gctcatttctgtaaa

SEQ ID NO: 1487410 - DNA, 15 bp, Homo sapiens
ctcatttctgtaaag

SEQ ID NO: 1487411 - DNA, 15 bp, Homo sapiens
tcatttctgtaaaga

SEQ ID NO: 1487412 - DNA, 15 bp, Homo sapiens
catttctgtaaagag

SEQ ID NO: 1487413 - DNA, 15 bp, Homo sapiens
atttctgtaaagagc

SEQ ID NO: 1487414 - DNA, 15 bp, Homo sapiens
tttctgtaaagagct

SEQ ID NO: 1487415 - DNA, 15 bp, Homo sapiens
ttctgtaaagagctt

SEQ ID NO: 1487416 - DNA, 15 bp, Homo sapiens
tctgtaaagagcttg

SEQ ID NO: 1487417 - DNA, 15 bp, Homo sapiens
ctgtaaagagcttga

SEQ ID NO: 1487418 - DNA, 15 bp, Homo sapiens
tgtaaagagcttgaa

SEQ ID NO: 1487419 - DNA, 15 bp, Homo sapiens
gtaaagagcttgaag

SEQ ID NO: 1487420 - DNA, 15 bp, Homo sapiens
taaagagcttgaagt

SEQ ID NO: 1487421 - DNA, 15 bp, Homo sapiens
aaagagcttgaagta

SEQ ID NO: 1487422 - DNA, 15 bp, Homo sapiens
aagagcttgaagtac

SEQ ID NO: 1487423 - DNA, 15 bp, Homo sapiens
agagcttgaagtaca

SEQ ID NO: 1487424 - DNA, 15 bp, Homo sapiens
gagcttgaagtacaa

SEQ ID NO: 1487425 - DNA, 15 bp, Homo sapiens
agcttgaagtacaag

SEQ ID NO: 1487426 - DNA, 15 bp, Homo sapiens
gcttgaagtacaagg

SEQ ID NO: 1487427 - DNA, 15 bp, Homo sapiens
cttgaagtacaagga

SEQ ID NO: 1487428 - DNA, 15 bp, Homo sapiens
ttgaagtacaaggaa

SEQ ID NO: 1487429 - DNA, 15 bp, Homo sapiens
tgaagtacaaggaag

SEQ ID NO: 1487430 - DNA, 15 bp, Homo sapiens
gaagtacaaggaaga

SEQ ID NO: 1487431 - DNA, 15 bp, Homo sapiens
aagtacaaggaagag

SEQ ID NO: 1487432 - DNA, 15 bp, Homo sapiens
agtacaaggaagagt

SEQ ID NO: 1487433 - DNA, 15 bp, Homo sapiens
gtacaaggaagagtt

SEQ ID NO: 1487434 - DNA, 15 bp, Homo sapiens
tacaaggaagagttt

SEQ ID NO: 1487435 - DNA, 15 bp, Homo sapiens
acaaggaagagtttt

SEQ ID NO: 1487436 - DNA, 15 bp, Homo sapiens
caaggaagagtttta

SEQ ID NO: 1487437 - DNA, 15 bp, Homo sapiens
aaggaagagttttaa

SEQ ID NO: 1487438 - DNA, 15 bp, Homo sapiens
aggaagagttttaag

SEQ ID NO: 1487439 - DNA, 15 bp, Homo sapiens
ggaagagttttaagt

SEQ ID NO: 1487440 - DNA, 15 bp, Homo sapiens
gaagagttttaagtt

SEQ ID NO: 1487441 - DNA, 15 bp, Homo sapiens
aagagttttaagttt

SEQ ID NO: 1487442 - DNA, 15 bp, Homo sapiens
agagttttaagttta

SEQ ID NO: 1487443 - DNA, 15 bp, Homo sapiens
gagttttaagtttaa

SEQ ID NO: 1487444 - DNA, 15 bp, Homo sapiens
agttttaagtttaaa

SEQ ID NO: 1487445 - DNA, 15 bp, Homo sapiens
gttttaagtttaaac

SEQ ID NO: 1487446 - DNA, 15 bp, Homo sapiens
ttttaagtttaaact

SEQ ID NO: 1487447 - DNA, 15 bp, Homo sapiens
tttaagtttaaactt

SEQ ID NO: 1487448 - DNA, 15 bp, Homo sapiens
ttaagtttaaacttt

SEQ ID NO: 1487449 - DNA, 15 bp, Homo sapiens
taagtttaaacttta

SEQ ID NO: 1487450 - DNA, 15 bp, Homo sapiens
aagtttaaactttaa

SEQ ID NO: 1487451 - DNA, 15 bp, Homo sapiens
agtttaaactttaaa

SEQ ID NO: 1487452 - DNA, 15 bp, Homo sapiens
gtttaaactttaaaa

SEQ ID NO: 1487453 - DNA, 15 bp, Homo sapiens
tttaaactttaaaaa

SEQ ID NO: 1487454 - DNA, 15 bp, Homo sapiens
ttaaactttaaaaag

SEQ ID NO: 1487455 - DNA, 15 bp, Homo sapiens
taaactttaaaaagt

SEQ ID NO: 1487456 - DNA, 15 bp, Homo sapiens
aaactttaaaaagtt

SEQ ID NO: 1487457 - DNA, 15 bp, Homo sapiens
aactttaaaaagttt

SEQ ID NO: 1487458 - DNA, 15 bp, Homo sapiens
actttaaaaagtttt

SEQ ID NO: 1487459 - DNA, 15 bp, Homo sapiens
ctttaaaaagtttta

SEQ ID NO: 1487460 - DNA, 15 bp, Homo sapiens
tttaaaaagttttaa

SEQ ID NO: 1487461 - DNA, 15 bp, Homo sapiens
ttaaaaagttttaag

SEQ ID NO: 1487462 - DNA, 15 bp, Homo sapiens
taaaaagttttaaga

SEQ ID NO: 1487463 - DNA, 15 bp, Homo sapiens
aaaaagttttaagag

SEQ ID NO: 1487464 - DNA, 15 bp, Homo sapiens
aaaagttttaagagt

SEQ ID NO: 1487465 - DNA, 15 bp, Homo sapiens
aaagttttaagagtt

SEQ ID NO: 1487466 - DNA, 15 bp, Homo sapiens
aagttttaagagttt

SEQ ID NO: 1487467 - DNA, 15 bp, Homo sapiens
agttttaagagttta

SEQ ID NO: 1487468 - DNA, 15 bp, Homo sapiens
gttttaagagtttaa

SEQ ID NO: 1487469 - DNA, 15 bp, Homo sapiens
ttttaagagtttaag

SEQ ID NO: 1487470 - DNA, 15 bp, Homo sapiens
tttaagagtttaagt

SEQ ID NO: 1487471 - DNA, 15 bp, Homo sapiens
ttaagagtttaagta

SEQ ID NO: 1487472 - DNA, 15 bp, Homo sapiens
taagagtttaagtaa

SEQ ID NO: 1487473 - DNA, 15 bp, Homo sapiens
aagagtttaagtaaa

SEQ ID NO: 1487474 - DNA, 15 bp, Homo sapiens
agagtttaagtaaag

SEQ ID NO: 1487475 - DNA, 15 bp, Homo sapiens
gagtttaagtaaaga

SEQ ID NO: 1487476 - DNA, 15 bp, Homo sapiens
agtttaagtaaagag

SEQ ID NO: 1487477 - DNA, 15 bp, Homo sapiens
gtttaagtaaagagc

SEQ ID NO: 1487478 - DNA, 15 bp, Homo sapiens
tttaagtaaagagct

SEQ ID NO: 1487479 - DNA, 15 bp, Homo sapiens
ttaagtaaagagctt

SEQ ID NO: 1487480 - DNA, 15 bp, Homo sapiens
taagtaaagagcttt

SEQ ID NO: 1487481 - DNA, 15 bp, Homo sapiens
aagtaaagagcttta

SEQ ID NO: 1487482 - DNA, 15 bp, Homo sapiens
agtaaagagctttat

SEQ ID NO: 1487483 - DNA, 15 bp, Homo sapiens
gtaaagagctttata

SEQ ID NO: 1487484 - DNA, 15 bp, Homo sapiens
taaagagctttataa

SEQ ID NO: 1487485 - DNA, 15 bp, Homo sapiens
aaagagctttataag

SEQ ID NO: 1487486 - DNA, 15 bp, Homo sapiens
aagagctttataaga

SEQ ID NO: 1487487 - DNA, 15 bp, Homo sapiens
agagctttataagac

SEQ ID NO: 1487488 - DNA, 15 bp, Homo sapiens
gagctttataagaca

SEQ ID NO: 1487489 - DNA, 15 bp, Homo sapiens
agctttataagacac

SEQ ID NO: 1487490 - DNA, 15 bp, Homo sapiens
gctttataagacaca

SEQ ID NO: 1487491 - DNA, 15 bp, Homo sapiens
ctttataagacacac

SEQ ID NO: 1487492 - DNA, 15 bp, Homo sapiens
tttataagacacaca

SEQ ID NO: 1487493 - DNA, 15 bp, Homo sapiens
ttataagacacacat

SEQ ID NO: 1487494 - DNA, 15 bp, Homo sapiens
tataagacacacatg

SEQ ID NO: 1487495 - DNA, 15 bp, Homo sapiens
ataagacacacatga

SEQ ID NO: 1487496 - DNA, 15 bp, Homo sapiens
taagacacacatgaa

SEQ ID NO: 1487497 - DNA, 15 bp, Homo sapiens
aagacacacatgaag

SEQ ID NO: 1487498 - DNA, 15 bp, Homo sapiens
agacacacatgaagt

SEQ ID NO: 1487499 - DNA, 15 bp, Homo sapiens
gacacacatgaagta

SEQ ID NO: 1487500 - DNA, 15 bp, Homo sapiens
acacacatgaagtag

SEQ ID NO: 1487501 - DNA, 15 bp, Homo sapiens
cacacatgaagtagc

SEQ ID NO: 1487502 - DNA, 15 bp, Homo sapiens
acacatgaagtagca

SEQ ID NO: 1487503 - DNA, 15 bp, Homo sapiens
cacatgaagtagcaa

SEQ ID NO: 1487504 - DNA, 15 bp, Homo sapiens
acatgaagtagcaac

SEQ ID NO: 1487505 - DNA, 15 bp, Homo sapiens
catgaagtagcaaca

SEQ ID NO: 1487506 - DNA, 15 bp, Homo sapiens
atgaagtagcaacag

SEQ ID NO: 1487507 - DNA, 15 bp, Homo sapiens
tgaagtagcaacagc

SEQ ID NO: 1487508 - DNA, 15 bp, Homo sapiens
gaagtagcaacagct

SEQ ID NO: 1487509 - DNA, 15 bp, Homo sapiens
aagtagcaacagctc

SEQ ID NO: 1487510 - DNA, 15 bp, Homo sapiens
agtagcaacagctcc

SEQ ID NO: 1487511 - DNA, 15 bp, Homo sapiens
gtagcaacagctcct

SEQ ID NO: 1487512 - DNA, 15 bp, Homo sapiens
tagcaacagctcctc

SEQ ID NO: 1487513 - DNA, 15 bp, Homo sapiens
agcaacagctcctca

SEQ ID NO: 1487514 - DNA, 15 bp, Homo sapiens
gcaacagctcctcat

SEQ ID NO: 1487515 - DNA, 15 bp, Homo sapiens
caacagctcctcatg

SEQ ID NO: 1487516 - DNA, 15 bp, Homo sapiens
aacagctcctcatgt

SEQ ID NO: 1487517 - DNA, 15 bp, Homo sapiens
acagctcctcatgtg

SEQ ID NO: 1487518 - DNA, 15 bp, Homo sapiens
cagctcctcatgtgt

SEQ ID NO: 1487519 - DNA, 15 bp, Homo sapiens
agctcctcatgtgta

SEQ ID NO: 1487520 - DNA, 15 bp, Homo sapiens
gctcctcatgtgtaa

SEQ ID NO: 1487521 - DNA, 15 bp, Homo sapiens
ctcctcatgtgtaac

SEQ ID NO: 1487522 - DNA, 15 bp, Homo sapiens
tcctcatgtgtaaca

SEQ ID NO: 1487523 - DNA, 15 bp, Homo sapiens
cctcatgtgtaacaa

SEQ ID NO: 1487524 - DNA, 15 bp, Homo sapiens
ctcatgtgtaacaag

SEQ ID NO: 1487525 - DNA, 15 bp, Homo sapiens
tcatgtgtaacaagc

SEQ ID NO: 1487526 - DNA, 15 bp, Homo sapiens
catgtgtaacaagct

SEQ ID NO: 1487527 - DNA, 15 bp, Homo sapiens
atgtgtaacaagctg

SEQ ID NO: 1487528 - DNA, 15 bp, Homo sapiens
tgtgtaacaagctgc

SEQ ID NO: 1487529 - DNA, 15 bp, Homo sapiens
gtgtaacaagctgca

SEQ ID NO: 1487530 - DNA, 15 bp, Homo sapiens
tgtaacaagctgcaa

SEQ ID NO: 1487531 - DNA, 15 bp, Homo sapiens
gtaacaagctgcaaa

SEQ ID NO: 1487532 - DNA, 15 bp, Homo sapiens
taacaagctgcaaat

SEQ ID NO: 1487533 - DNA, 15 bp, Homo sapiens
aacaagctgcaaata

SEQ ID NO: 1487534 - DNA, 15 bp, Homo sapiens
acaagctgcaaataa

SEQ ID NO: 1487535 - DNA, 15 bp, Homo sapiens
caagctgcaaataag

SEQ ID NO: 1487536 - DNA, 15 bp, Homo sapiens
aagctgcaaataagt

SEQ ID NO: 1487537 - DNA, 15 bp, Homo sapiens
agctgcaaataagtg

SEQ ID NO: 1487538 - DNA, 15 bp, Homo sapiens
gctgcaaataagtga

SEQ ID NO: 1487539 - DNA, 15 bp, Homo sapiens
ctgcaaataagtgaa

SEQ ID NO: 1487540 - DNA, 15 bp, Homo sapiens
tgcaaataagtgaaa

SEQ ID NO: 1487541 - DNA, 15 bp, Homo sapiens
gcaaataagtgaaat

SEQ ID NO: 1487542 - DNA, 15 bp, Homo sapiens
caaataagtgaaatt

SEQ ID NO: 1487543 - DNA, 15 bp, Homo sapiens
aataagtgaaatttc

SEQ ID NO: 1487544 - DNA, 15 bp, Homo sapiens
ataagtgaaatttct

SEQ ID NO: 1487545 - DNA, 15 bp, Homo sapiens
taagtgaaatttctg

SEQ ID NO: 1487546 - DNA, 15 bp, Homo sapiens
aagtgaaatttctgc

SEQ ID NO: 1487547 - DNA, 15 bp, Homo sapiens
agtgaaatttctgcc

SEQ ID NO: 1487548 - DNA, 15 bp, Homo sapiens
gtgaaatttctgcca

SEQ ID NO: 1487549 - DNA, 15 bp, Homo sapiens
tgaaatttctgccag

SEQ ID NO: 1487550 - DNA, 15 bp, Homo sapiens
gaaatttctgccagc

SEQ ID NO: 1487551 - DNA, 15 bp, Homo sapiens
aaatttctgccagct

SEQ ID NO: 1487552 - DNA, 15 bp, Homo sapiens
aatttctgccagctc

SEQ ID NO: 1487553 - DNA, 15 bp, Homo sapiens
atttctgccagctca

SEQ ID NO: 1487554 - DNA, 15 bp, Homo sapiens
tttctgccagctcag

SEQ ID NO: 1487555 - DNA, 15 bp, Homo sapiens
ttctgccagctcagc

SEQ ID NO: 1487556 - DNA, 15 bp, Homo sapiens
tctgccagctcagca

SEQ ID NO: 1487557 - DNA, 15 bp, Homo sapiens
ctgccagctcagcag

SEQ ID NO: 1487558 - DNA, 15 bp, Homo sapiens
tgccagctcagcagc

SEQ ID NO: 1487559 - DNA, 15 bp, Homo sapiens
gccagctcagcagct

SEQ ID NO: 1487560 - DNA, 15 bp, Homo sapiens
ccagctcagcagctc

SEQ ID NO: 1487561 - DNA, 15 bp, Homo sapiens
cagctcagcagctcc

SEQ ID NO: 1487562 - DNA, 15 bp, Homo sapiens
agctcagcagctcct

SEQ ID NO: 1487563 - DNA, 15 bp, Homo sapiens
gctcagcagctcctc

SEQ ID NO: 1487564 - DNA, 15 bp, Homo sapiens
ctcagcagctcctcg

SEQ ID NO: 1487565 - DNA, 15 bp, Homo sapiens
tcagcagctcctcgc

SEQ ID NO: 1487566 - DNA, 15 bp, Homo sapiens
cagcagctcctcgcc

SEQ ID NO: 1487567 - DNA, 15 bp, Homo sapiens
agcagctcctcgcct

SEQ ID NO: 1487568 - DNA, 15 bp, Homo sapiens
gcagctcctcgcctg

SEQ ID NO: 1487569 - DNA, 15 bp, Homo sapiens
cagctcctcgcctgc

SEQ ID NO: 1487570 - DNA, 15 bp, Homo sapiens
agctcctcgcctgca

SEQ ID NO: 1487571 - DNA, 15 bp, Homo sapiens
gctcctcgcctgcag

SEQ ID NO: 1487572 - DNA, 15 bp, Homo sapiens
ctcctcgcctgcaga

SEQ ID NO: 1487573 - DNA, 15 bp, Homo sapiens
tcctcgcctgcagac

SEQ ID NO: 1487574 - DNA, 15 bp, Homo sapiens
cctcgcctgcagaca

SEQ ID NO: 1487575 - DNA, 15 bp, Homo sapiens
ctcgcctgcagacag

SEQ ID NO: 1487576 - DNA, 15 bp, Homo sapiens
tcgcctgcagacagc

SEQ ID NO: 1487577 - DNA, 15 bp, Homo sapiens
cgcctgcagacagca

SEQ ID NO: 1487578 - DNA, 15 bp, Homo sapiens
gcctgcagacagcag

SEQ ID NO: 1487579 - DNA, 15 bp, Homo sapiens
cctgcagacagcagc

SEQ ID NO: 1487580 - DNA, 15 bp, Homo sapiens
ctgcagacagcagca

SEQ ID NO: 1487581 - DNA, 15 bp, Homo sapiens
tgcagacagcagcag

SEQ ID NO: 1487582 - DNA, 15 bp, Homo sapiens
gcagacagcagcagc

SEQ ID NO: 1487583 - DNA, 15 bp, Homo sapiens
cagacagcagcagcc

SEQ ID NO: 1487584 - DNA, 15 bp, Homo sapiens
agacagcagcagcca

SEQ ID NO: 1487585 - DNA, 15 bp, Homo sapiens
gacagcagcagccac

SEQ ID NO: 1487586 - DNA, 15 bp, Homo sapiens
acagcagcagccaca

SEQ ID NO: 1487587 - DNA, 15 bp, Homo sapiens
cagcagcagccacat

SEQ ID NO: 1487588 - DNA, 15 bp, Homo sapiens
agcagcagccacatc

SEQ ID NO: 1487589 - DNA, 15 bp, Homo sapiens
gcagcagccacatca

SEQ ID NO: 1487590 - DNA, 15 bp, Homo sapiens
cagcagccacatcaa

SEQ ID NO: 1487591 - DNA, 15 bp, Homo sapiens
agcagccacatcaag

SEQ ID NO: 1487592 - DNA, 15 bp, Homo sapiens
gcagccacatcaagt

SEQ ID NO: 1487593 - DNA, 15 bp, Homo sapiens
cagccacatcaagtt

SEQ ID NO: 1487594 - DNA, 15 bp, Homo sapiens
agccacatcaagttg

SEQ ID NO: 1487595 - DNA, 15 bp, Homo sapiens
gccacatcaagttgc

SEQ ID NO: 1487596 - DNA, 15 bp, Homo sapiens
ccacatcaagttgcc

SEQ ID NO: 1487597 - DNA, 15 bp, Homo sapiens
cacatcaagttgccc

SEQ ID NO: 1487598 - DNA, 15 bp, Homo sapiens
acatcaagttgccca

SEQ ID NO: 1487599 - DNA, 15 bp, Homo sapiens
catcaagttgcccag

SEQ ID NO: 1487600 - DNA, 15 bp, Homo sapiens
atcaagttgcccaga

SEQ ID NO: 1487601 - DNA, 15 bp, Homo sapiens
tcaagttgcccagac

SEQ ID NO: 1487602 - DNA, 15 bp, Homo sapiens
caagttgcccagact

SEQ ID NO: 1487603 - DNA, 15 bp, Homo sapiens
aagttgcccagactc

SEQ ID NO: 1487604 - DNA, 15 bp, Homo sapiens
agttgcccagactca

SEQ ID NO: 1487605 - DNA, 15 bp, Homo sapiens
gttgcccagactcat

SEQ ID NO: 1487606 - DNA, 15 bp, Homo sapiens
ttgcccagactcatt

SEQ ID NO: 1487607 - DNA, 15 bp, Homo sapiens
tgcccagactcattc

SEQ ID NO: 1487608 - DNA, 15 bp, Homo sapiens
gcccagactcattcc

SEQ ID NO: 1487609 - DNA, 15 bp, Homo sapiens
cccagactcattcct

SEQ ID NO: 1487610 - DNA, 15 bp, Homo sapiens
ccagactcattcctc

SEQ ID NO: 1487611 - DNA, 15 bp, Homo sapiens
cagactcattcctct

SEQ ID NO: 1487612 - DNA, 15 bp, Homo sapiens
agactcattcctctt

SEQ ID NO: 1487613 - DNA, 15 bp, Homo sapiens
gactcattcctcttg

SEQ ID NO: 1487614 - DNA, 15 bp, Homo sapiens
actcattcctcttgt

SEQ ID NO: 1487615 - DNA, 15 bp, Homo sapiens
ctcattcctcttgtt

SEQ ID NO: 1487616 - DNA, 15 bp, Homo sapiens
tcattcctcttgttt

SEQ ID NO: 1487617 - DNA, 15 bp, Homo sapiens
cattcctcttgtttg

SEQ ID NO: 1487618 - DNA, 15 bp, Homo sapiens
attcctcttgtttgc

SEQ ID NO: 1487619 - DNA, 15 bp, Homo sapiens
ttcctcttgtttgcc

SEQ ID NO: 1487620 - DNA, 15 bp, Homo sapiens
tcctcttgtttgcct

SEQ ID NO: 1487621 - DNA, 15 bp, Homo sapiens
cctcttgtttgcctc

SEQ ID NO: 1487622 - DNA, 15 bp, Homo sapiens
ctcttgtttgcctcc

SEQ ID NO: 1487623 - DNA, 15 bp, Homo sapiens
tcttgtttgcctcct

SEQ ID NO: 1487624 - DNA, 15 bp, Homo sapiens
cttgtttgcctcctc

SEQ ID NO: 1487625 - DNA, 15 bp, Homo sapiens
ttgtttgcctcctcc

SEQ ID NO: 1487626 - DNA, 15 bp, Homo sapiens
tgtttgcctcctccg

SEQ ID NO: 1487627 - DNA, 15 bp, Homo sapiens
gtttgcctcctccgt

SEQ ID NO: 1487628 - DNA, 15 bp, Homo sapiens
tttgcctcctccgtc

SEQ ID NO: 1487629 - DNA, 15 bp, Homo sapiens
ttgcctcctccgtcc

SEQ ID NO: 1487630 - DNA, 15 bp, Homo sapiens
tgcctcctccgtccc

SEQ ID NO: 1487631 - DNA, 15 bp, Homo sapiens
gcctcctccgtccct

SEQ ID NO: 1487632 - DNA, 15 bp, Homo sapiens
cctcctccgtcccta

SEQ ID NO: 1487633 - DNA, 15 bp, Homo sapiens
ctcctccgtccctac

SEQ ID NO: 1487634 - DNA, 15 bp, Homo sapiens
tcctccgtccctact

SEQ ID NO: 1487635 - DNA, 15 bp, Homo sapiens
cctccgtccctactc

SEQ ID NO: 1487636 - DNA, 15 bp, Homo sapiens
ctccgtccctactct

SEQ ID NO: 1487637 - DNA, 15 bp, Homo sapiens
tccgtccctactctg

SEQ ID NO: 1487638 - DNA, 15 bp, Homo sapiens
ccgtccctactctgg

SEQ ID NO: 1487639 - DNA, 15 bp, Homo sapiens
cgtccctactctggt

SEQ ID NO: 1487640 - DNA, 15 bp, Homo sapiens
gtccctactctggtc

SEQ ID NO: 1487641 - DNA, 15 bp, Homo sapiens
tccctactctggtct

SEQ ID NO: 1487642 - DNA, 15 bp, Homo sapiens
ccctactctggtctt

SEQ ID NO: 1487643 - DNA, 15 bp, Homo sapiens
cctactctggtcttc

SEQ ID NO: 1487644 - DNA, 15 bp, Homo sapiens
ctactctggtcttcc

SEQ ID NO: 1487645 - DNA, 15 bp, Homo sapiens
tactctggtcttccc

SEQ ID NO: 1487646 - DNA, 15 bp, Homo sapiens
actctggtcttccca

SEQ ID NO: 1487647 - DNA, 15 bp, Homo sapiens
ctctggtcttcccag

SEQ ID NO: 1487648 - DNA, 15 bp, Homo sapiens
tctggtcttcccaga

SEQ ID NO: 1487649 - DNA, 15 bp, Homo sapiens
ctggtcttcccagag

SEQ ID NO: 1487650 - DNA, 15 bp, Homo sapiens
tggtcttcccagagc

SEQ ID NO: 1487651 - DNA, 15 bp, Homo sapiens
ggtcttcccagagca

SEQ ID NO: 1487652 - DNA, 15 bp, Homo sapiens
gtcttcccagagcaa

SEQ ID NO: 1487653 - DNA, 15 bp, Homo sapiens
tcttcccagagcaat

SEQ ID NO: 1487654 - DNA, 15 bp, Homo sapiens
cttcccagagcaatt

SEQ ID NO: 1487655 - DNA, 15 bp, Homo sapiens
ttcccagagcaattt

SEQ ID NO: 1487656 - DNA, 15 bp, Homo sapiens
tcccagagcaatttg

SEQ ID NO: 1487657 - DNA, 15 bp, Homo sapiens
cccagagcaatttgg

SEQ ID NO: 1487658 - DNA, 15 bp, Homo sapiens
ccagagcaatttgga

SEQ ID NO: 1487659 - DNA, 15 bp, Homo sapiens
cagagcaatttggag

SEQ ID NO: 1487660 - DNA, 15 bp, Homo sapiens
agagcaatttggaga

SEQ ID NO: 1487661 - DNA, 15 bp, Homo sapiens
gagcaatttggagag

SEQ ID NO: 1487662 - DNA, 15 bp, Homo sapiens
agcaatttggagagg

SEQ ID NO: 1487663 - DNA, 15 bp, Homo sapiens
gcaatttggagaggg

SEQ ID NO: 1487664 - DNA, 15 bp, Homo sapiens
caatttggagagggc

SEQ ID NO: 1487665 - DNA, 15 bp, Homo sapiens
aatttggagagggct

SEQ ID NO: 1487666 - DNA, 15 bp, Homo sapiens
atttggagagggctc

SEQ ID NO: 1487667 - DNA, 15 bp, Homo sapiens
tttggagagggctcc

SEQ ID NO: 1487668 - DNA, 15 bp, Homo sapiens
ttggagagggctccc

SEQ ID NO: 1487669 - DNA, 15 bp, Homo sapiens
tggagagggctccct

SEQ ID NO: 1487670 - DNA, 15 bp, Homo sapiens
ggagagggctcccta

SEQ ID NO: 1487671 - DNA, 15 bp, Homo sapiens
gagagggctccctac

SEQ ID NO: 1487672 - DNA, 15 bp, Homo sapiens
agagggctccctact

SEQ ID NO: 1487673 - DNA, 15 bp, Homo sapiens
gagggctccctacta

SEQ ID NO: 1487674 - DNA, 15 bp, Homo sapiens
agggctccctactac

SEQ ID NO: 1487675 - DNA, 15 bp, Homo sapiens
gggctccctactacc

SEQ ID NO: 1487676 - DNA, 15 bp, Homo sapiens
ggctccctactacca

SEQ ID NO: 1487677 - DNA, 15 bp, Homo sapiens
gctccctactaccag

SEQ ID NO: 1487678 - DNA, 15 bp, Homo sapiens
ctccctactaccagt

SEQ ID NO: 1487679 - DNA, 15 bp, Homo sapiens
tccctactaccagtg

SEQ ID NO: 1487680 - DNA, 15 bp, Homo sapiens
ccctactaccagtgg

SEQ ID NO: 1487681 - DNA, 15 bp, Homo sapiens
cctactaccagtggc

SEQ ID NO: 1487682 - DNA, 15 bp, Homo sapiens
ctactaccagtggca

SEQ ID NO: 1487683 - DNA, 15 bp, Homo sapiens
tactaccagtggcat

SEQ ID NO: 1487684 - DNA, 15 bp, Homo sapiens
actaccagtggcatc

SEQ ID NO: 1487685 - DNA, 15 bp, Homo sapiens
ctaccagtggcatca

SEQ ID NO: 1487686 - DNA, 15 bp, Homo sapiens
taccagtggcatcat

SEQ ID NO: 1487687 - DNA, 15 bp, Homo sapiens
accagtggcatcata

SEQ ID NO: 1487688 - DNA, 15 bp, Homo sapiens
ccagtggcatcataa

SEQ ID NO: 1487689 - DNA, 15 bp, Homo sapiens
cagtggcatcataaa

SEQ ID NO: 1487690 - DNA, 15 bp, Homo sapiens
agtggcatcataaaa

SEQ ID NO: 1487691 - DNA, 15 bp, Homo sapiens
gtggcatcataaaaa

SEQ ID NO: 1487692 - DNA, 15 bp, Homo sapiens
tggcatcataaaaat

SEQ ID NO: 1487693 - DNA, 15 bp, Homo sapiens
ggcatcataaaaatg

SEQ ID NO: 1487694 - DNA, 15 bp, Homo sapiens
gcatcataaaaatga

SEQ ID NO: 1487695 - DNA, 15 bp, Homo sapiens
catcataaaaatgac

SEQ ID NO: 1487696 - DNA, 15 bp, Homo sapiens
atcataaaaatgaca

SEQ ID NO: 1487697 - DNA, 15 bp, Homo sapiens
tcataaaaatgacag

SEQ ID NO: 1487698 - DNA, 15 bp, Homo sapiens
cataaaaatgacagt

SEQ ID NO: 1487699 - DNA, 15 bp, Homo sapiens
ataaaaatgacagtg

SEQ ID NO: 1487700 - DNA, 15 bp, Homo sapiens
taaaaatgacagtgt

SEQ ID NO: 1487701 - DNA, 15 bp, Homo sapiens
aaaaatgacagtgta

SEQ ID NO: 1487702 - DNA, 15 bp, Homo sapiens
aaaatgacagtgtac

SEQ ID NO: 1487703 - DNA, 15 bp, Homo sapiens
aaatgacagtgtact

SEQ ID NO: 1487704 - DNA, 15 bp, Homo sapiens
aatgacagtgtactt

SEQ ID NO: 1487705 - DNA, 15 bp, Homo sapiens
atgacagtgtacttg

SEQ ID NO: 1487706 - DNA, 15 bp, Homo sapiens
tgacagtgtacttgc

SEQ ID NO: 1487707 - DNA, 15 bp, Homo sapiens
gacagtgtacttgcc

SEQ ID NO: 1487708 - DNA, 15 bp, Homo sapiens
acagtgtacttgcca

SEQ ID NO: 1487709 - DNA, 15 bp, Homo sapiens
cagtgtacttgccaa

SEQ ID NO: 1487710 - DNA, 15 bp, Homo sapiens
agtgtacttgccaag

SEQ ID NO: 1487711 - DNA, 15 bp, Homo sapiens
gtgtacttgccaagg

SEQ ID NO: 1487712 - DNA, 15 bp, Homo sapiens
tgtacttgccaaggg

SEQ ID NO: 1487713 - DNA, 15 bp, Homo sapiens
gtacttgccaagggc

SEQ ID NO: 1487714 - DNA, 15 bp, Homo sapiens
tacttgccaagggca

SEQ ID NO: 1487715 - DNA, 15 bp, Homo sapiens
acttgccaagggcat

SEQ ID NO: 1487716 - DNA, 15 bp, Homo sapiens
cttgccaagggcatg

SEQ ID NO: 1487717 - DNA, 15 bp, Homo sapiens
ttgccaagggcatgg

SEQ ID NO: 1487718 - DNA, 15 bp, Homo sapiens
tgccaagggcatggt

SEQ ID NO: 1487719 - DNA, 15 bp, Homo sapiens
gccaagggcatggtc

SEQ ID NO: 1487720 - DNA, 15 bp, Homo sapiens
ccaagggcatggtct

SEQ ID NO: 1487721 - DNA, 15 bp, Homo sapiens
caagggcatggtctt

SEQ ID NO: 1487722 - DNA, 15 bp, Homo sapiens
aagggcatggtcttg

SEQ ID NO: 1487723 - DNA, 15 bp, Homo sapiens
agggcatggtcttgg

SEQ ID NO: 1487724 - DNA, 15 bp, Homo sapiens
gggcatggtcttggg

SEQ ID NO: 1487725 - DNA, 15 bp, Homo sapiens
ggcatggtcttgggg

SEQ ID NO: 1487726 - DNA, 15 bp, Homo sapiens
gcatggtcttggggt

SEQ ID NO: 1487727 - DNA, 15 bp, Homo sapiens
catggtcttggggtg

SEQ ID NO: 1487728 - DNA, 15 bp, Homo sapiens
atggtcttggggtgc

SEQ ID NO: 1487729 - DNA, 15 bp, Homo sapiens
tggtcttggggtgct

SEQ ID NO: 1487730 - DNA, 15 bp, Homo sapiens
ggtcttggggtgctc

SEQ ID NO: 1487731 - DNA, 15 bp, Homo sapiens
gtcttggggtgctcc

SEQ ID NO: 1487732 - DNA, 15 bp, Homo sapiens
tcttggggtgctcct

SEQ ID NO: 1487733 - DNA, 15 bp, Homo sapiens
cttggggtgctccta

SEQ ID NO: 1487734 - DNA, 15 bp, Homo sapiens
ttggggtgctcctaa

SEQ ID NO: 1487735 - DNA, 15 bp, Homo sapiens
tggggtgctcctaaa

SEQ ID NO: 1487736 - DNA, 15 bp, Homo sapiens
ggggtgctcctaaag

SEQ ID NO: 1487737 - DNA, 15 bp, Homo sapiens
gggtgctcctaaagc

SEQ ID NO: 1487738 - DNA, 15 bp, Homo sapiens
ggtgctcctaaagct

SEQ ID NO: 1487739 - DNA, 15 bp, Homo sapiens
gtgctcctaaagctg

SEQ ID NO: 1487740 - DNA, 15 bp, Homo sapiens
tgctcctaaagctgt

SEQ ID NO: 1487741 - DNA, 15 bp, Homo sapiens
gctcctaaagctgtt

SEQ ID NO: 1487742 - DNA, 15 bp, Homo sapiens
ctcctaaagctgttg

SEQ ID NO: 1487743 - DNA, 15 bp, Homo sapiens
tcctaaagctgttga

SEQ ID NO: 1487744 - DNA, 15 bp, Homo sapiens
cctaaagctgttgaa

SEQ ID NO: 1487745 - DNA, 15 bp, Homo sapiens
ctaaagctgttgaac

SEQ ID NO: 1487746 - DNA, 15 bp, Homo sapiens
taaagctgttgaact

SEQ ID NO: 1487747 - DNA, 15 bp, Homo sapiens
aaagctgttgaactg

SEQ ID NO: 1487748 - DNA, 15 bp, Homo sapiens
aagctgttgaactgc

SEQ ID NO: 1487749 - DNA, 15 bp, Homo sapiens
agctgttgaactgca

SEQ ID NO: 1487750 - DNA, 15 bp, Homo sapiens
gctgttgaactgcaa

SEQ ID NO: 1487751 - DNA, 15 bp, Homo sapiens
ctgttgaactgcaaa

SEQ ID NO: 1487752 - DNA, 15 bp, Homo sapiens
tgttgaactgcaaaa

SEQ ID NO: 1487753 - DNA, 15 bp, Homo sapiens
gttgaactgcaaaaa

SEQ ID NO: 1487754 - DNA, 15 bp, Homo sapiens
ttgaactgcaaaaag

SEQ ID NO: 1487755 - DNA, 15 bp, Homo sapiens
tgaactgcaaaaagg

SEQ ID NO: 1487756 - DNA, 15 bp, Homo sapiens
gaactgcaaaaaggg

SEQ ID NO: 1487757 - DNA, 15 bp, Homo sapiens
aactgcaaaaagggg

SEQ ID NO: 1487758 - DNA, 15 bp, Homo sapiens
actgcaaaaaggggt

SEQ ID NO: 1487759 - DNA, 15 bp, Homo sapiens
ctgcaaaaaggggtg

SEQ ID NO: 1487760 - DNA, 15 bp, Homo sapiens
tgcaaaaaggggtgc

SEQ ID NO: 1487761 - DNA, 15 bp, Homo sapiens
gcaaaaaggggtgcc

SEQ ID NO: 1487762 - DNA, 15 bp, Homo sapiens
caaaaaggggtgccg

SEQ ID NO: 1487763 - DNA, 15 bp, Homo sapiens
aaaaaggggtgccgt

SEQ ID NO: 1487764 - DNA, 15 bp, Homo sapiens
aaaaggggtgccgtt

SEQ ID NO: 1487765 - DNA, 15 bp, Homo sapiens
aaaggggtgccgttt

SEQ ID NO: 1487766 - DNA, 15 bp, Homo sapiens
aaggggtgccgttta

SEQ ID NO: 1487767 - DNA, 15 bp, Homo sapiens
aggggtgccgtttat

SEQ ID NO: 1487768 - DNA, 15 bp, Homo sapiens
ggggtgccgtttatt

SEQ ID NO: 1487769 - DNA, 15 bp, Homo sapiens
gggtgccgtttattt

SEQ ID NO: 1487770 - DNA, 15 bp, Homo sapiens
ggtgccgtttatttg

SEQ ID NO: 1487771 - DNA, 15 bp, Homo sapiens
gtgccgtttatttgc

SEQ ID NO: 1487772 - DNA, 15 bp, Homo sapiens
tgccgtttatttgca

SEQ ID NO: 1487773 - DNA, 15 bp, Homo sapiens
gccgtttatttgcag

SEQ ID NO: 1487774 - DNA, 15 bp, Homo sapiens
ccgtttatttgcaga

SEQ ID NO: 1487775 - DNA, 15 bp, Homo sapiens
cgtttatttgcagaa

SEQ ID NO: 1487776 - DNA, 15 bp, Homo sapiens
gtttatttgcagaag

SEQ ID NO: 1487777 - DNA, 15 bp, Homo sapiens
tttatttgcagaagc

SEQ ID NO: 1487778 - DNA, 15 bp, Homo sapiens
ttatttgcagaagcc

SEQ ID NO: 1487779 - DNA, 15 bp, Homo sapiens
tatttgcagaagcca

SEQ ID NO: 1487780 - DNA, 15 bp, Homo sapiens
atttgcagaagccac

SEQ ID NO: 1487781 - DNA, 15 bp, Homo sapiens
tttgcagaagccaca

SEQ ID NO: 1487782 - DNA, 15 bp, Homo sapiens
ttgcagaagccacaa

SEQ ID NO: 1487783 - DNA, 15 bp, Homo sapiens
tgcagaagccacaag

SEQ ID NO: 1487784 - DNA, 15 bp, Homo sapiens
gcagaagccacaaga

SEQ ID NO: 1487785 - DNA, 15 bp, Homo sapiens
cagaagccacaagaa

SEQ ID NO: 1487786 - DNA, 15 bp, Homo sapiens
agaagccacaagaat

SEQ ID NO: 1487787 - DNA, 15 bp, Homo sapiens
gaagccacaagaatg

SEQ ID NO: 1487788 - DNA, 15 bp, Homo sapiens
aagccacaagaatgc

SEQ ID NO: 1487789 - DNA, 15 bp, Homo sapiens
agccacaagaatgct

SEQ ID NO: 1487790 - DNA, 15 bp, Homo sapiens
gccacaagaatgctc

SEQ ID NO: 1487791 - DNA, 15 bp, Homo sapiens
ccacaagaatgctct

SEQ ID NO: 1487792 - DNA, 15 bp, Homo sapiens
cacaagaatgctctc

SEQ ID NO: 1487793 - DNA, 15 bp, Homo sapiens
acaagaatgctctcc

SEQ ID NO: 1487794 - DNA, 15 bp, Homo sapiens
caagaatgctctcct

SEQ ID NO: 1487795 - DNA, 15 bp, Homo sapiens
aagaatgctctcctc

SEQ ID NO: 1487796 - DNA, 15 bp, Homo sapiens
agaatgctctcctcc

SEQ ID NO: 1487797 - DNA, 15 bp, Homo sapiens
gaatgctctcctccc

SEQ ID NO: 1487798 - DNA, 15 bp, Homo sapiens
aatgctctcctcccc

SEQ ID NO: 1487799 - DNA, 15 bp, Homo sapiens
atgctctcctcccca

SEQ ID NO: 1487800 - DNA, 15 bp, Homo sapiens
tgctctcctccccaa

SEQ ID NO: 1487801 - DNA, 15 bp, Homo sapiens
gctctcctccccaac

SEQ ID NO: 1487802 - DNA, 15 bp, Homo sapiens
ctctcctccccaact

SEQ ID NO: 1487803 - DNA, 15 bp, Homo sapiens
tctcctccccaactc

SEQ ID NO: 1487804 - DNA, 15 bp, Homo sapiens
ctcctccccaactct

SEQ ID NO: 1487805 - DNA, 15 bp, Homo sapiens
tcctccccaactctg

SEQ ID NO: 1487806 - DNA, 15 bp, Homo sapiens
cctccccaactctgc

SEQ ID NO: 1487807 - DNA, 15 bp, Homo sapiens
ctccccaactctgct

SEQ ID NO: 1487808 - DNA, 15 bp, Homo sapiens
tccccaactctgctc

SEQ ID NO: 1487809 - DNA, 15 bp, Homo sapiens
ccccaactctgctct

SEQ ID NO: 1487810 - DNA, 15 bp, Homo sapiens
cccaactctgctctt

SEQ ID NO: 1487811 - DNA, 15 bp, Homo sapiens
ccaactctgctcttt

SEQ ID NO: 1487812 - DNA, 15 bp, Homo sapiens
caactctgctctttc

SEQ ID NO: 1487813 - DNA, 15 bp, Homo sapiens
aactctgctctttca

SEQ ID NO: 1487814 - DNA, 15 bp, Homo sapiens
actctgctctttcac

SEQ ID NO: 1487815 - DNA, 15 bp, Homo sapiens
ctctgctctttcact

SEQ ID NO: 1487816 - DNA, 15 bp, Homo sapiens
tctgctctttcactt

SEQ ID NO: 1487817 - DNA, 15 bp, Homo sapiens
ctgctctttcacttg

SEQ ID NO: 1487818 - DNA, 15 bp, Homo sapiens
tgctctttcacttgg

SEQ ID NO: 1487819 - DNA, 15 bp, Homo sapiens
gctctttcacttggg

SEQ ID NO: 1487820 - DNA, 15 bp, Homo sapiens
ctctttcacttgggt

SEQ ID NO: 1487821 - DNA, 15 bp, Homo sapiens
tctttcacttgggtc

SEQ ID NO: 1487822 - DNA, 15 bp, Homo sapiens
ctttcacttgggtct

SEQ ID NO: 1487823 - DNA, 15 bp, Homo sapiens
tttcacttgggtctc

SEQ ID NO: 1487824 - DNA, 15 bp, Homo sapiens
ttcacttgggtctca

SEQ ID NO: 1487825 - DNA, 15 bp, Homo sapiens
tcacttgggtctcaa

SEQ ID NO: 1487826 - DNA, 15 bp, Homo sapiens
cacttgggtctcaaa

SEQ ID NO: 1487827 - DNA, 15 bp, Homo sapiens
acttgggtctcaaat

SEQ ID NO: 1487828 - DNA, 15 bp, Homo sapiens
cttgggtctcaaatc

SEQ ID NO: 1487829 - DNA, 15 bp, Homo sapiens
ttgggtctcaaatca

SEQ ID NO: 1487830 - DNA, 15 bp, Homo sapiens
tgggtctcaaatcag

SEQ ID NO: 1487831 - DNA, 15 bp, Homo sapiens
gggtctcaaatcagc

SEQ ID NO: 1487832 - DNA, 15 bp, Homo sapiens
ggtctcaaatcagct

SEQ ID NO: 1487833 - DNA, 15 bp, Homo sapiens
gtctcaaatcagctt

SEQ ID NO: 1487834 - DNA, 15 bp, Homo sapiens
tctcaaatcagcttg

SEQ ID NO: 1487835 - DNA, 15 bp, Homo sapiens
ctcaaatcagcttgt

SEQ ID NO: 1487836 - DNA, 15 bp, Homo sapiens
tcaaatcagcttgtc

SEQ ID NO: 1487837 - DNA, 15 bp, Homo sapiens
caaatcagcttgtct

SEQ ID NO: 1487838 - DNA, 15 bp, Homo sapiens
aaatcagcttgtctg

SEQ ID NO: 1487839 - DNA, 15 bp, Homo sapiens
aatcagcttgtctgg

SEQ ID NO: 1487840 - DNA, 15 bp, Homo sapiens
atcagcttgtctggg

SEQ ID NO: 1487841 - DNA, 15 bp, Homo sapiens
tcagcttgtctgggg

SEQ ID NO: 1487842 - DNA, 15 bp, Homo sapiens
cagcttgtctggggc

SEQ ID NO: 1487843 - DNA, 15 bp, Homo sapiens
agcttgtctggggcc

SEQ ID NO: 1487844 - DNA, 15 bp, Homo sapiens
gcttgtctggggcct

SEQ ID NO: 1487845 - DNA, 15 bp, Homo sapiens
cttgtctggggcctt

SEQ ID NO: 1487846 - DNA, 15 bp, Homo sapiens
ttgtctggggcctta

SEQ ID NO: 1487847 - DNA, 15 bp, Homo sapiens
tgtctggggccttat

SEQ ID NO: 1487848 - DNA, 15 bp, Homo sapiens
gtctggggccttatc

SEQ ID NO: 1487849 - DNA, 15 bp, Homo sapiens
tctggggccttatct

SEQ ID NO: 1487850 - DNA, 15 bp, Homo sapiens
ctggggccttatctc

SEQ ID NO: 1487851 - DNA, 15 bp, Homo sapiens
tggggccttatctcc

SEQ ID NO: 1487852 - DNA, 15 bp, Homo sapiens
ggggccttatctccc

SEQ ID NO: 1487853 - DNA, 15 bp, Homo sapiens
gggccttatctcccc

SEQ ID NO: 1487854 - DNA, 15 bp, Homo sapiens
ggccttatctcccca

SEQ ID NO: 1487855 - DNA, 15 bp, Homo sapiens
gccttatctccccaa

SEQ ID NO: 1487856 - DNA, 15 bp, Homo sapiens
ccttatctccccaaa

SEQ ID NO: 1487857 - DNA, 15 bp, Homo sapiens
cttatctccccaaat

SEQ ID NO: 1487858 - DNA, 15 bp, Homo sapiens
ttatctccccaaatc

SEQ ID NO: 1487859 - DNA, 15 bp, Homo sapiens
tatctccccaaatct

SEQ ID NO: 1487860 - DNA, 15 bp, Homo sapiens
atctccccaaatctt

SEQ ID NO: 1487861 - DNA, 15 bp, Homo sapiens
tctccccaaatcttt

SEQ ID NO: 1487862 - DNA, 15 bp, Homo sapiens
ctccccaaatctttt

SEQ ID NO: 1487863 - DNA, 15 bp, Homo sapiens
tccccaaatctttta

SEQ ID NO: 1487864 - DNA, 15 bp, Homo sapiens
ccccaaatcttttat

SEQ ID NO: 1487865 - DNA, 15 bp, Homo sapiens
cccaaatcttttatt

SEQ ID NO: 1487866 - DNA, 15 bp, Homo sapiens
ccaaatcttttattc

SEQ ID NO: 1487867 - DNA, 15 bp, Homo sapiens
caaatcttttattcc

SEQ ID NO: 1487868 - DNA, 15 bp, Homo sapiens
aaatcttttattcca

SEQ ID NO: 1487869 - DNA, 15 bp, Homo sapiens
aatcttttattccac

SEQ ID NO: 1487870 - DNA, 15 bp, Homo sapiens
atcttttattccact

SEQ ID NO: 1487871 - DNA, 15 bp, Homo sapiens
tcttttattccactt

SEQ ID NO: 1487872 - DNA, 15 bp, Homo sapiens
cttttattccactta

SEQ ID NO: 1487873 - DNA, 15 bp, Homo sapiens
ttttattccacttag

SEQ ID NO: 1487874 - DNA, 15 bp, Homo sapiens
tttattccacttagg

SEQ ID NO: 1487875 - DNA, 15 bp, Homo sapiens
ttattccacttaggg

SEQ ID NO: 1487876 - DNA, 15 bp, Homo sapiens
tattccacttagggg

SEQ ID NO: 1487877 - DNA, 15 bp, Homo sapiens
attccacttaggggc

SEQ ID NO: 1487878 - DNA, 15 bp, Homo sapiens
ttccacttaggggcc

SEQ ID NO: 1487879 - DNA, 15 bp, Homo sapiens
tccacttaggggccc

SEQ ID NO: 1487880 - DNA, 15 bp, Homo sapiens
ccacttaggggccct

SEQ ID NO: 1487881 - DNA, 15 bp, Homo sapiens
cacttaggggccctc

SEQ ID NO: 1487882 - DNA, 15 bp, Homo sapiens
acttaggggccctca

SEQ ID NO: 1487883 - DNA, 15 bp, Homo sapiens
cttaggggccctcac

SEQ ID NO: 1487884 - DNA, 15 bp, Homo sapiens
ttaggggccctcacc

SEQ ID NO: 1487885 - DNA, 15 bp, Homo sapiens
taggggccctcacct

SEQ ID NO: 1487886 - DNA, 15 bp, Homo sapiens
aggggccctcacctc

SEQ ID NO: 1487887 - DNA, 15 bp, Homo sapiens
ggggccctcacctcc

SEQ ID NO: 1487888 - DNA, 15 bp, Homo sapiens
gggccctcacctccc

SEQ ID NO: 1487889 - DNA, 15 bp, Homo sapiens
ggccctcacctccct

SEQ ID NO: 1487890 - DNA, 15 bp, Homo sapiens
gccctcacctccctt

SEQ ID NO: 1487891 - DNA, 15 bp, Homo sapiens
ccctcacctcccttc

SEQ ID NO: 1487892 - DNA, 15 bp, Homo sapiens
cctcacctcccttcc

SEQ ID NO: 1487893 - DNA, 15 bp, Homo sapiens
ctcacctcccttccc

SEQ ID NO: 1487894 - DNA, 15 bp, Homo sapiens
tcacctcccttccct

SEQ ID NO: 1487895 - DNA, 15 bp, Homo sapiens
cacctcccttccctt

SEQ ID NO: 1487896 - DNA, 15 bp, Homo sapiens
acctcccttcccttg

SEQ ID NO: 1487897 - DNA, 15 bp, Homo sapiens
cctcccttcccttgc

SEQ ID NO: 1487898 - DNA, 15 bp, Homo sapiens
ctcccttcccttgcc

SEQ ID NO: 1487899 - DNA, 15 bp, Homo sapiens
tcccttcccttgccc

SEQ ID NO: 1487900 - DNA, 15 bp, Homo sapiens
cccttcccttgccca

SEQ ID NO: 1487901 - DNA, 15 bp, Homo sapiens
ccttcccttgcccat

SEQ ID NO: 1487902 - DNA, 15 bp, Homo sapiens
cttcccttgcccata

SEQ ID NO: 1487903 - DNA, 15 bp, Homo sapiens
ttcccttgcccatat

SEQ ID NO: 1487904 - DNA, 15 bp, Homo sapiens
tcccttgcccatatt

SEQ ID NO: 1487905 - DNA, 15 bp, Homo sapiens
cccttgcccatattg

SEQ ID NO: 1487906 - DNA, 15 bp, Homo sapiens
ccttgcccatattgg

SEQ ID NO: 1487907 - DNA, 15 bp, Homo sapiens
cttgcccatattggc

SEQ ID NO: 1487908 - DNA, 15 bp, Homo sapiens
ttgcccatattggct

SEQ ID NO: 1487909 - DNA, 15 bp, Homo sapiens
tgcccatattggctt

SEQ ID NO: 1487910 - DNA, 15 bp, Homo sapiens
gcccatattggcttt

SEQ ID NO: 1487911 - DNA, 15 bp, Homo sapiens
cccatattggctttt

SEQ ID NO: 1487912 - DNA, 15 bp, Homo sapiens
ccatattggcttttc

SEQ ID NO: 1487913 - DNA, 15 bp, Homo sapiens
catattggcttttca

SEQ ID NO: 1487914 - DNA, 15 bp, Homo sapiens
atattggcttttcaa

SEQ ID NO: 1487915 - DNA, 15 bp, Homo sapiens
tattggcttttcaaa

SEQ ID NO: 1487916 - DNA, 15 bp, Homo sapiens
attggcttttcaaat

SEQ ID NO: 1487917 - DNA, 15 bp, Homo sapiens
ttggcttttcaaatt

SEQ ID NO: 1487918 - DNA, 15 bp, Homo sapiens
tggcttttcaaattc

SEQ ID NO: 1487919 - DNA, 15 bp, Homo sapiens
ggcttttcaaattca

SEQ ID NO: 1487920 - DNA, 15 bp, Homo sapiens
gcttttcaaattcag

SEQ ID NO: 1487921 - DNA, 15 bp, Homo sapiens
cttttcaaattcagc

SEQ ID NO: 1487922 - DNA, 15 bp, Homo sapiens
ttttcaaattcagcc

SEQ ID NO: 1487923 - DNA, 15 bp, Homo sapiens
tttcaaattcagccc

SEQ ID NO: 1487924 - DNA, 15 bp, Homo sapiens
ttcaaattcagccca

SEQ ID NO: 1487925 - DNA, 15 bp, Homo sapiens
tcaaattcagcccag

SEQ ID NO: 1487926 - DNA, 15 bp, Homo sapiens
caaattcagcccagt

SEQ ID NO: 1487927 - DNA, 15 bp, Homo sapiens
aaattcagcccagtg

SEQ ID NO: 1487928 - DNA, 15 bp, Homo sapiens
aattcagcccagtga

SEQ ID NO: 1487929 - DNA, 15 bp, Homo sapiens
attcagcccagtgag

SEQ ID NO: 1487930 - DNA, 15 bp, Homo sapiens
ttcagcccagtgagc

SEQ ID NO: 1487931 - DNA, 15 bp, Homo sapiens
tcagcccagtgagcc

SEQ ID NO: 1487932 - DNA, 15 bp, Homo sapiens
cagcccagtgagcca

SEQ ID NO: 1487933 - DNA, 15 bp, Homo sapiens
agcccagtgagccag

SEQ ID NO: 1487934 - DNA, 15 bp, Homo sapiens
gcccagtgagccaga

SEQ ID NO: 1487935 - DNA, 15 bp, Homo sapiens
cccagtgagccagac

SEQ ID NO: 1487936 - DNA, 15 bp, Homo sapiens
ccagtgagccagaca

SEQ ID NO: 1487937 - DNA, 15 bp, Homo sapiens
cagtgagccagacag

SEQ ID NO: 1487938 - DNA, 15 bp, Homo sapiens
agtgagccagacagg

SEQ ID NO: 1487939 - DNA, 15 bp, Homo sapiens
gtgagccagacaggg

SEQ ID NO: 1487940 - DNA, 15 bp, Homo sapiens
tgagccagacaggga

SEQ ID NO: 1487941 - DNA, 15 bp, Homo sapiens
gagccagacagggaa

SEQ ID NO: 1487942 - DNA, 15 bp, Homo sapiens
agccagacagggaac

SEQ ID NO: 1487943 - DNA, 15 bp, Homo sapiens
gccagacagggaact

SEQ ID NO: 1487944 - DNA, 15 bp, Homo sapiens
ccagacagggaactc

SEQ ID NO: 1487945 - DNA, 15 bp, Homo sapiens
cagacagggaactct

SEQ ID NO: 1487946 - DNA, 15 bp, Homo sapiens
agacagggaactctt

SEQ ID NO: 1487947 - DNA, 15 bp, Homo sapiens
gacagggaactcttc

SEQ ID NO: 1487948 - DNA, 15 bp, Homo sapiens
acagggaactcttct

SEQ ID NO: 1487949 - DNA, 15 bp, Homo sapiens
cagggaactcttctc

SEQ ID NO: 1487950 - DNA, 15 bp, Homo sapiens
agggaactcttctcc

SEQ ID NO: 1487951 - DNA, 15 bp, Homo sapiens
gggaactcttctcct

SEQ ID NO: 1487952 - DNA, 15 bp, Homo sapiens
ggaactcttctcctt

SEQ ID NO: 1487953 - DNA, 15 bp, Homo sapiens
gaactcttctccttc

SEQ ID NO: 1487954 - DNA, 15 bp, Homo sapiens
aactcttctccttca

SEQ ID NO: 1487955 - DNA, 15 bp, Homo sapiens
actcttctccttcat

SEQ ID NO: 1487956 - DNA, 15 bp, Homo sapiens
ctcttctccttcatc

SEQ ID NO: 1487957 - DNA, 15 bp, Homo sapiens
tcttctccttcatct

SEQ ID NO: 1487958 - DNA, 15 bp, Homo sapiens
cttctccttcatctt

SEQ ID NO: 1487959 - DNA, 15 bp, Homo sapiens
ttctccttcatcttc

SEQ ID NO: 1487960 - DNA, 15 bp, Homo sapiens
tctccttcatcttct

SEQ ID NO: 1487961 - DNA, 15 bp, Homo sapiens
ctccttcatcttctc

SEQ ID NO: 1487962 - DNA, 15 bp, Homo sapiens
tccttcatcttctct

SEQ ID NO: 1487963 - DNA, 15 bp, Homo sapiens
ccttcatcttctctc

SEQ ID NO: 1487964 - DNA, 15 bp, Homo sapiens
cttcatcttctctct

SEQ ID NO: 1487965 - DNA, 15 bp, Homo sapiens
ttcatcttctctctc

SEQ ID NO: 1487966 - DNA, 15 bp, Homo sapiens
tcatcttctctctct

SEQ ID NO: 1487967 - DNA, 15 bp, Homo sapiens
catcttctctctctt

SEQ ID NO: 1487968 - DNA, 15 bp, Homo sapiens
atcttctctctcttc

SEQ ID NO: 1487969 - DNA, 15 bp, Homo sapiens
tcttctctctcttca

SEQ ID NO: 1487970 - DNA, 15 bp, Homo sapiens
cttctctctcttcac

SEQ ID NO: 1487971 - DNA, 15 bp, Homo sapiens
ttctctctcttcaca

SEQ ID NO: 1487972 - DNA, 15 bp, Homo sapiens
tctctctcttcacag

SEQ ID NO: 1487973 - DNA, 15 bp, Homo sapiens
ctctctcttcacagc

SEQ ID NO: 1487974 - DNA, 15 bp, Homo sapiens
tctctcttcacagcc

SEQ ID NO: 1487975 - DNA, 15 bp, Homo sapiens
ctctcttcacagccc

SEQ ID NO: 1487976 - DNA, 15 bp, Homo sapiens
tctcttcacagcccc

SEQ ID NO: 1487977 - DNA, 15 bp, Homo sapiens
ctcttcacagccccc

SEQ ID NO: 1487978 - DNA, 15 bp, Homo sapiens
tcttcacagccccca

SEQ ID NO: 1487979 - DNA, 15 bp, Homo sapiens
cttcacagcccccat

SEQ ID NO: 1487980 - DNA, 15 bp, Homo sapiens
ttcacagcccccatg

SEQ ID NO: 1487981 - DNA, 15 bp, Homo sapiens
tcacagcccccatga

SEQ ID NO: 1487982 - DNA, 15 bp, Homo sapiens
cacagcccccatgat

SEQ ID NO: 1487983 - DNA, 15 bp, Homo sapiens
acagcccccatgatc

SEQ ID NO: 1487984 - DNA, 15 bp, Homo sapiens
cagcccccatgatct

SEQ ID NO: 1487985 - DNA, 15 bp, Homo sapiens
agcccccatgatcta

SEQ ID NO: 1487986 - DNA, 15 bp, Homo sapiens
gcccccatgatctat

SEQ ID NO: 1487987 - DNA, 15 bp, Homo sapiens
cccccatgatctatc

SEQ ID NO: 1487988 - DNA, 15 bp, Homo sapiens
ccccatgatctatct

SEQ ID NO: 1487989 - DNA, 15 bp, Homo sapiens
cccatgatctatctc

SEQ ID NO: 1487990 - DNA, 15 bp, Homo sapiens
ccatgatctatctct

SEQ ID NO: 1487991 - DNA, 15 bp, Homo sapiens
catgatctatctctt

SEQ ID NO: 1487992 - DNA, 15 bp, Homo sapiens
atgatctatctcttc

SEQ ID NO: 1487993 - DNA, 15 bp, Homo sapiens
tgatctatctcttct

SEQ ID NO: 1487994 - DNA, 15 bp, Homo sapiens
gatctatctcttctt

SEQ ID NO: 1487995 - DNA, 15 bp, Homo sapiens
atctatctcttcttt

SEQ ID NO: 1487996 - DNA, 15 bp, Homo sapiens
tctatctcttctttt

SEQ ID NO: 1487997 - DNA, 15 bp, Homo sapiens
ctatctcttcttttc

SEQ ID NO: 1487998 - DNA, 15 bp, Homo sapiens
tatctcttcttttct

SEQ ID NO: 1487999 - DNA, 15 bp, Homo sapiens
atctcttcttttctc

SEQ ID NO: 1488000 - DNA, 15 bp, Homo sapiens
tctcttcttttctct

SEQ ID NO: 1488001 - DNA, 15 bp, Homo sapiens
ctcttcttttctcta

SEQ ID NO: 1488002 - DNA, 15 bp, Homo sapiens
tcttcttttctctac

SEQ ID NO: 1488003 - DNA, 15 bp, Homo sapiens
cttcttttctctaca

SEQ ID NO: 1488004 - DNA, 15 bp, Homo sapiens
ttcttttctctacat

SEQ ID NO: 1488005 - DNA, 15 bp, Homo sapiens
tcttttctctacatt

SEQ ID NO: 1488006 - DNA, 15 bp, Homo sapiens
cttttctctacattg

SEQ ID NO: 1488007 - DNA, 15 bp, Homo sapiens
ttttctctacattgt

SEQ ID NO: 1488008 - DNA, 15 bp, Homo sapiens
tttctctacattgta

SEQ ID NO: 1488009 - DNA, 15 bp, Homo sapiens
ttctctacattgtaa

SEQ ID NO: 1488010 - DNA, 15 bp, Homo sapiens
tctctacattgtaat

SEQ ID NO: 1488011 - DNA, 15 bp, Homo sapiens
ctctacattgtaatg

SEQ ID NO: 1488012 - DNA, 15 bp, Homo sapiens
tctacattgtaatgg

SEQ ID NO: 1488013 - DNA, 15 bp, Homo sapiens
ctacattgtaatgga

SEQ ID NO: 1488014 - DNA, 15 bp, Homo sapiens
tacattgtaatggaa

SEQ ID NO: 1488015 - DNA, 15 bp, Homo sapiens
acattgtaatggaaa

SEQ ID NO: 1488016 - DNA, 15 bp, Homo sapiens
cattgtaatggaaaa

SEQ ID NO: 1488017 - DNA, 15 bp, Homo sapiens
attgtaatggaaaaa

SEQ ID NO: 1488018 - DNA, 15 bp, Homo sapiens
ttgtaatggaaaaaa

SEQ ID NO: 1488019 - DNA, 15 bp, Homo sapiens
tgtaatggaaaaaaa

SEQ ID NO: 1488020 - DNA, 15 bp, Homo sapiens
gtaatggaaaaaaag

SEQ ID NO: 1488021 - DNA, 15 bp, Homo sapiens
taatggaaaaaaagc

SEQ ID NO: 1488022 - DNA, 15 bp, Homo sapiens
aatggaaaaaaagct

SEQ ID NO: 1488023 - DNA, 15 bp, Homo sapiens
atggaaaaaaagctt

SEQ ID NO: 1488024 - DNA, 15 bp, Homo sapiens
tggaaaaaaagcttt

SEQ ID NO: 1488025 - DNA, 15 bp, Homo sapiens
ggaaaaaaagctttt

SEQ ID NO: 1488026 - DNA, 15 bp, Homo sapiens
gaaaaaaagcttttt

SEQ ID NO: 1488027 - DNA, 15 bp, Homo sapiens
aaaaaaagctttttg

SEQ ID NO: 1488028 - DNA, 15 bp, Homo sapiens
aaaaaagctttttgt

SEQ ID NO: 1488029 - DNA, 15 bp, Homo sapiens
aaaaagctttttgtc

SEQ ID NO: 1488030 - DNA, 15 bp, Homo sapiens
aaaagctttttgtct

SEQ ID NO: 1488031 - DNA, 15 bp, Homo sapiens
aaagctttttgtcta

SEQ ID NO: 1488032 - DNA, 15 bp, Homo sapiens
aagctttttgtctag

SEQ ID NO: 1488033 - DNA, 15 bp, Homo sapiens
agctttttgtctagc

SEQ ID NO: 1488034 - DNA, 15 bp, Homo sapiens
gctttttgtctagcc

SEQ ID NO: 1488035 - DNA, 15 bp, Homo sapiens
ctttttgtctagcca

SEQ ID NO: 1488036 - DNA, 15 bp, Homo sapiens
tttttgtctagccat

SEQ ID NO: 1488037 - DNA, 15 bp, Homo sapiens
ttttgtctagccatg

SEQ ID NO: 1488038 - DNA, 15 bp, Homo sapiens
tttgtctagccatga

SEQ ID NO: 1488039 - DNA, 15 bp, Homo sapiens
ttgtctagccatgat

SEQ ID NO: 1488040 - DNA, 15 bp, Homo sapiens
tgtctagccatgatt

SEQ ID NO: 1488041 - DNA, 15 bp, Homo sapiens
gtctagccatgattg

SEQ ID NO: 1488042 - DNA, 15 bp, Homo sapiens
tctagccatgattgc

SEQ ID NO: 1488043 - DNA, 15 bp, Homo sapiens
ctagccatgattgca

SEQ ID NO: 1488044 - DNA, 15 bp, Homo sapiens
tagccatgattgcaa

SEQ ID NO: 1488045 - DNA, 15 bp, Homo sapiens
agccatgattgcaaa

SEQ ID NO: 1488046 - DNA, 15 bp, Homo sapiens
gccatgattgcaaat

SEQ ID NO: 1488047 - DNA, 15 bp, Homo sapiens
ccatgattgcaaata

SEQ ID NO: 1488048 - DNA, 15 bp, Homo sapiens
catgattgcaaatag

SEQ ID NO: 1488049 - DNA, 15 bp, Homo sapiens
atgattgcaaataga

SEQ ID NO: 1488050 - DNA, 15 bp, Homo sapiens
tgattgcaaatagaa

SEQ ID NO: 1488051 - DNA, 15 bp, Homo sapiens
gattgcaaatagaag

SEQ ID NO: 1488052 - DNA, 15 bp, Homo sapiens
attgcaaatagaagg

SEQ ID NO: 1488053 - DNA, 15 bp, Homo sapiens
ttgcaaatagaaggg

SEQ ID NO: 1488054 - DNA, 15 bp, Homo sapiens
tgcaaatagaagggg

SEQ ID NO: 1488055 - DNA, 15 bp, Homo sapiens
gcaaatagaaggggg

SEQ ID NO: 1488056 - DNA, 15 bp, Homo sapiens
caaatagaaggggga

SEQ ID NO: 1488057 - DNA, 15 bp, Homo sapiens
aaatagaagggggat

SEQ ID NO: 1488058 - DNA, 15 bp, Homo sapiens
aatagaagggggatg

SEQ ID NO: 1488059 - DNA, 15 bp, Homo sapiens
atagaagggggatgt

SEQ ID NO: 1488060 - DNA, 15 bp, Homo sapiens
tagaagggggatgtg

SEQ ID NO: 1488061 - DNA, 15 bp, Homo sapiens
agaagggggatgtgt

SEQ ID NO: 1488062 - DNA, 15 bp, Homo sapiens
gaagggggatgtgtg

SEQ ID NO: 1488063 - DNA, 15 bp, Homo sapiens
aagggggatgtgtgt

SEQ ID NO: 1488064 - DNA, 15 bp, Homo sapiens
agggggatgtgtgtg

SEQ ID NO: 1488065 - DNA, 15 bp, Homo sapiens
gggggatgtgtgtgt

SEQ ID NO: 1488066 - DNA, 15 bp, Homo sapiens
ggggatgtgtgtgtg

SEQ ID NO: 1488067 - DNA, 15 bp, Homo sapiens
gggatgtgtgtgtgt

SEQ ID NO: 1488068 - DNA, 15 bp, Homo sapiens
ggatgtgtgtgtgtg

SEQ ID NO: 1488069 - DNA, 15 bp, Homo sapiens
gatgtgtgtgtgtgt

SEQ ID NO: 1488070 - DNA, 15 bp, Homo sapiens
tgtgtgtgtgtgcac

SEQ ID NO: 1488071 - DNA, 15 bp, Homo sapiens
gtgtgtgtgtgcaca

SEQ ID NO: 1488072 - DNA, 15 bp, Homo sapiens
gtgtgtgtgcacata

SEQ ID NO: 1488073 - DNA, 15 bp, Homo sapiens
tgtgtgtgcacatat

SEQ ID NO: 1488074 - DNA, 15 bp, Homo sapiens
gtgtgtgcacatatg

SEQ ID NO: 1488075 - DNA, 15 bp, Homo sapiens
tgtgtgcacatatgc

SEQ ID NO: 1488076 - DNA, 15 bp, Homo sapiens
gtgtgcacatatgca

SEQ ID NO: 1488077 - DNA, 15 bp, Homo sapiens
tgtgcacatatgcat

SEQ ID NO: 1488078 - DNA, 15 bp, Homo sapiens
gtgcacatatgcata

SEQ ID NO: 1488079 - DNA, 15 bp, Homo sapiens
tgcacatatgcatac

SEQ ID NO: 1488080 - DNA, 15 bp, Homo sapiens
gcacatatgcatacc

SEQ ID NO: 1488081 - DNA, 15 bp, Homo sapiens
cacatatgcataccc

SEQ ID NO: 1488082 - DNA, 15 bp, Homo sapiens
acatatgcataccca

SEQ ID NO: 1488083 - DNA, 15 bp, Homo sapiens
catatgcatacccaa

SEQ ID NO: 1488084 - DNA, 15 bp, Homo sapiens
atatgcatacccaaa

SEQ ID NO: 1488085 - DNA, 15 bp, Homo sapiens
tatgcatacccaaag

SEQ ID NO: 1488086 - DNA, 15 bp, Homo sapiens
atgcatacccaaagc

SEQ ID NO: 1488087 - DNA, 15 bp, Homo sapiens
tgcatacccaaagca

SEQ ID NO: 1488088 - DNA, 15 bp, Homo sapiens
gcatacccaaagcag

SEQ ID NO: 1488089 - DNA, 15 bp, Homo sapiens
catacccaaagcagt

SEQ ID NO: 1488090 - DNA, 15 bp, Homo sapiens
atacccaaagcagta

SEQ ID NO: 1488091 - DNA, 15 bp, Homo sapiens
tacccaaagcagtat

SEQ ID NO: 1488092 - DNA, 15 bp, Homo sapiens
acccaaagcagtatt

SEQ ID NO: 1488093 - DNA, 15 bp, Homo sapiens
cccaaagcagtattc

SEQ ID NO: 1488094 - DNA, 15 bp, Homo sapiens
ccaaagcagtattct

SEQ ID NO: 1488095 - DNA, 15 bp, Homo sapiens
caaagcagtattctc

SEQ ID NO: 1488096 - DNA, 15 bp, Homo sapiens
aaagcagtattctca

SEQ ID NO: 1488097 - DNA, 15 bp, Homo sapiens
aagcagtattctcac

SEQ ID NO: 1488098 - DNA, 15 bp, Homo sapiens
agcagtattctcacg

SEQ ID NO: 1488099 - DNA, 15 bp, Homo sapiens
gcagtattctcacga

SEQ ID NO: 1488100 - DNA, 15 bp, Homo sapiens
cagtattctcacgag

SEQ ID NO: 1488101 - DNA, 15 bp, Homo sapiens
agtattctcacgagc

SEQ ID NO: 1488102 - DNA, 15 bp, Homo sapiens
gtattctcacgagct

SEQ ID NO: 1488103 - DNA, 15 bp, Homo sapiens
tattctcacgagctg

SEQ ID NO: 1488104 - DNA, 15 bp, Homo sapiens
attctcacgagctgt

SEQ ID NO: 1488105 - DNA, 15 bp, Homo sapiens
ttctcacgagctgtt

SEQ ID NO: 1488106 - DNA, 15 bp, Homo sapiens
tctcacgagctgtta

SEQ ID NO: 1488107 - DNA, 15 bp, Homo sapiens
ctcacgagctgttaa

SEQ ID NO: 1488108 - DNA, 15 bp, Homo sapiens
tcacgagctgttaac

SEQ ID NO: 1488109 - DNA, 15 bp, Homo sapiens
cacgagctgttaaca

SEQ ID NO: 1488110 - DNA, 15 bp, Homo sapiens
acgagctgttaacag

SEQ ID NO: 1488111 - DNA, 15 bp, Homo sapiens
cgagctgttaacagc

SEQ ID NO: 1488112 - DNA, 15 bp, Homo sapiens
gagctgttaacagct

SEQ ID NO: 1488113 - DNA, 15 bp, Homo sapiens
agctgttaacagctc

SEQ ID NO: 1488114 - DNA, 15 bp, Homo sapiens
gctgttaacagctca

SEQ ID NO: 1488115 - DNA, 15 bp, Homo sapiens
ctgttaacagctcaa

SEQ ID NO: 1488116 - DNA, 15 bp, Homo sapiens
tgttaacagctcaaa

SEQ ID NO: 1488117 - DNA, 15 bp, Homo sapiens
gttaacagctcaaag

SEQ ID NO: 1488118 - DNA, 15 bp, Homo sapiens
ttaacagctcaaagg

SEQ ID NO: 1488119 - DNA, 15 bp, Homo sapiens
taacagctcaaagga

SEQ ID NO: 1488120 - DNA, 15 bp, Homo sapiens
aacagctcaaaggag

SEQ ID NO: 1488121 - DNA, 15 bp, Homo sapiens
acagctcaaaggagt

SEQ ID NO: 1488122 - DNA, 15 bp, Homo sapiens
cagctcaaaggagtc

SEQ ID NO: 1488123 - DNA, 15 bp, Homo sapiens
agctcaaaggagtca

SEQ ID NO: 1488124 - DNA, 15 bp, Homo sapiens
gctcaaaggagtcat

SEQ ID NO: 1488125 - DNA, 15 bp, Homo sapiens
ctcaaaggagtcata

SEQ ID NO: 1488126 - DNA, 15 bp, Homo sapiens
tcaaaggagtcatag

SEQ ID NO: 1488127 - DNA, 15 bp, Homo sapiens
caaaggagtcatagg

SEQ ID NO: 1488128 - DNA, 15 bp, Homo sapiens
aaaggagtcataggt

SEQ ID NO: 1488129 - DNA, 15 bp, Homo sapiens
aaggagtcataggtc

SEQ ID NO: 1488130 - DNA, 15 bp, Homo sapiens
aggagtcataggtca

SEQ ID NO: 1488131 - DNA, 15 bp, Homo sapiens
ggagtcataggtcat

SEQ ID NO: 1488132 - DNA, 15 bp, Homo sapiens
gagtcataggtcatc

SEQ ID NO: 1488133 - DNA, 15 bp, Homo sapiens
agtcataggtcatca

SEQ ID NO: 1488134 - DNA, 15 bp, Homo sapiens
gtcataggtcatcat

SEQ ID NO: 1488135 - DNA, 15 bp, Homo sapiens
tcataggtcatcatc

SEQ ID NO: 1488136 - DNA, 15 bp, Homo sapiens
cataggtcatcatca

SEQ ID NO: 1488137 - DNA, 15 bp, Homo sapiens
ataggtcatcatcag

SEQ ID NO: 1488138 - DNA, 15 bp, Homo sapiens
taggtcatcatcaga

SEQ ID NO: 1488139 - DNA, 15 bp, Homo sapiens
aggtcatcatcagaa

SEQ ID NO: 1488140 - DNA, 15 bp, Homo sapiens
ggtcatcatcagaaa

SEQ ID NO: 1488141 - DNA, 15 bp, Homo sapiens
gtcatcatcagaaag

SEQ ID NO: 1488142 - DNA, 15 bp, Homo sapiens
tcatcatcagaaagg

SEQ ID NO: 1488143 - DNA, 15 bp, Homo sapiens
catcatcagaaaggt

SEQ ID NO: 1488144 - DNA, 15 bp, Homo sapiens
atcatcagaaaggtt

SEQ ID NO: 1488145 - DNA, 15 bp, Homo sapiens
tcatcagaaaggttt

SEQ ID NO: 1488146 - DNA, 15 bp, Homo sapiens
catcagaaaggtttc

SEQ ID NO: 1488147 - DNA, 15 bp, Homo sapiens
atcagaaaggtttca

SEQ ID NO: 1488148 - DNA, 15 bp, Homo sapiens
tcagaaaggtttcat

SEQ ID NO: 1488149 - DNA, 15 bp, Homo sapiens
cagaaaggtttcatg

SEQ ID NO: 1488150 - DNA, 15 bp, Homo sapiens
agaaaggtttcatgg

SEQ ID NO: 1488151 - DNA, 15 bp, Homo sapiens
gaaaggtttcatgga

SEQ ID NO: 1488152 - DNA, 15 bp, Homo sapiens
aaaggtttcatggaa

SEQ ID NO: 1488153 - DNA, 15 bp, Homo sapiens
aaggtttcatggaaa

SEQ ID NO: 1488154 - DNA, 15 bp, Homo sapiens
aggtttcatggaaac

SEQ ID NO: 1488155 - DNA, 15 bp, Homo sapiens
ggtttcatggaaaca

SEQ ID NO: 1488156 - DNA, 15 bp, Homo sapiens
gtttcatggaaacag

SEQ ID NO: 1488157 - DNA, 15 bp, Homo sapiens
tttcatggaaacagg

SEQ ID NO: 1488158 - DNA, 15 bp, Homo sapiens
ttcatggaaacagga

SEQ ID NO: 1488159 - DNA, 15 bp, Homo sapiens
tcatggaaacaggaa

SEQ ID NO: 1488160 - DNA, 15 bp, Homo sapiens
catggaaacaggaag

SEQ ID NO: 1488161 - DNA, 15 bp, Homo sapiens
atggaaacaggaagc

SEQ ID NO: 1488162 - DNA, 15 bp, Homo sapiens
tggaaacaggaagct

SEQ ID NO: 1488163 - DNA, 15 bp, Homo sapiens
ggaaacaggaagctc

SEQ ID NO: 1488164 - DNA, 15 bp, Homo sapiens
gaaacaggaagctct

SEQ ID NO: 1488165 - DNA, 15 bp, Homo sapiens
aaacaggaagctctc

SEQ ID NO: 1488166 - DNA, 15 bp, Homo sapiens
aacaggaagctctca

SEQ ID NO: 1488167 - DNA, 15 bp, Homo sapiens
acaggaagctctcag

SEQ ID NO: 1488168 - DNA, 15 bp, Homo sapiens
caggaagctctcagg

SEQ ID NO: 1488169 - DNA, 15 bp, Homo sapiens
aggaagctctcagga

SEQ ID NO: 1488170 - DNA, 15 bp, Homo sapiens
ggaagctctcaggaa

SEQ ID NO: 1488171 - DNA, 15 bp, Homo sapiens
gaagctctcaggaag

SEQ ID NO: 1488172 - DNA, 15 bp, Homo sapiens
aagctctcaggaaga

SEQ ID NO: 1488173 - DNA, 15 bp, Homo sapiens
agctctcaggaagat

SEQ ID NO: 1488174 - DNA, 15 bp, Homo sapiens
gctctcaggaagatc

SEQ ID NO: 1488175 - DNA, 15 bp, Homo sapiens
ctctcaggaagatct

SEQ ID NO: 1488176 - DNA, 15 bp, Homo sapiens
tctcaggaagatctc

SEQ ID NO: 1488177 - DNA, 15 bp, Homo sapiens
ctcaggaagatctca

SEQ ID NO: 1488178 - DNA, 15 bp, Homo sapiens
tcaggaagatctcac

SEQ ID NO: 1488179 - DNA, 15 bp, Homo sapiens
caggaagatctcact

SEQ ID NO: 1488180 - DNA, 15 bp, Homo sapiens
aggaagatctcactt

SEQ ID NO: 1488181 - DNA, 15 bp, Homo sapiens
ggaagatctcactta

SEQ ID NO: 1488182 - DNA, 15 bp, Homo sapiens
gaagatctcacttac

SEQ ID NO: 1488183 - DNA, 15 bp, Homo sapiens
aagatctcacttacc

SEQ ID NO: 1488184 - DNA, 15 bp, Homo sapiens
agatctcacttacct

SEQ ID NO: 1488185 - DNA, 15 bp, Homo sapiens
gatctcacttacctt

SEQ ID NO: 1488186 - DNA, 15 bp, Homo sapiens
atctcacttacctta

SEQ ID NO: 1488187 - DNA, 15 bp, Homo sapiens
tctcacttaccttac

SEQ ID NO: 1488188 - DNA, 15 bp, Homo sapiens
ctcacttaccttaca

SEQ ID NO: 1488189 - DNA, 15 bp, Homo sapiens
tcacttaccttacac

SEQ ID NO: 1488190 - DNA, 15 bp, Homo sapiens
cacttaccttacaca

SEQ ID NO: 1488191 - DNA, 15 bp, Homo sapiens
acttaccttacacaa

SEQ ID NO: 1488192 - DNA, 15 bp, Homo sapiens
cttaccttacacaat

SEQ ID NO: 1488193 - DNA, 15 bp, Homo sapiens
ttaccttacacaatg

SEQ ID NO: 1488194 - DNA, 15 bp, Homo sapiens
taccttacacaatgg

SEQ ID NO: 1488195 - DNA, 15 bp, Homo sapiens
accttacacaatggc

SEQ ID NO: 1488196 - DNA, 15 bp, Homo sapiens
ccttacacaatggca

SEQ ID NO: 1488197 - DNA, 15 bp, Homo sapiens
cttacacaatggcaa

SEQ ID NO: 1488198 - DNA, 15 bp, Homo sapiens
acacaatggcaaaga

SEQ ID NO: 1488199 - DNA, 15 bp, Homo sapiens
cacaatggcaaagat

SEQ ID NO: 1488200 - DNA, 15 bp, Homo sapiens
acaatggcaaagata

SEQ ID NO: 1488201 - DNA, 15 bp, Homo sapiens
caatggcaaagataa

SEQ ID NO: 1488202 - DNA, 15 bp, Homo sapiens
aatggcaaagataat

SEQ ID NO: 1488203 - DNA, 15 bp, Homo sapiens
atggcaaagataatt

SEQ ID NO: 1488204 - DNA, 15 bp, Homo sapiens
tggcaaagataattg

SEQ ID NO: 1488205 - DNA, 15 bp, Homo sapiens
ggcaaagataattgt

SEQ ID NO: 1488206 - DNA, 15 bp, Homo sapiens
gcaaagataattgtg

SEQ ID NO: 1488207 - DNA, 15 bp, Homo sapiens
caaagataattgtgc

SEQ ID NO: 1488208 - DNA, 15 bp, Homo sapiens
aaagataattgtgca

SEQ ID NO: 1488209 - DNA, 15 bp, Homo sapiens
aagataattgtgcat

SEQ ID NO: 1488210 - DNA, 15 bp, Homo sapiens
agataattgtgcatc

SEQ ID NO: 1488211 - DNA, 15 bp, Homo sapiens
gataattgtgcatca

SEQ ID NO: 1488212 - DNA, 15 bp, Homo sapiens
ataattgtgcatcag

SEQ ID NO: 1488213 - DNA, 15 bp, Homo sapiens
taattgtgcatcagg

SEQ ID NO: 1488214 - DNA, 15 bp, Homo sapiens
aattgtgcatcaggg

SEQ ID NO: 1488215 - DNA, 15 bp, Homo sapiens
attgtgcatcagggt

SEQ ID NO: 1488216 - DNA, 15 bp, Homo sapiens
ttgtgcatcagggtg

SEQ ID NO: 1488217 - DNA, 15 bp, Homo sapiens
tgtgcatcagggtga

SEQ ID NO: 1488218 - DNA, 15 bp, Homo sapiens
gtgcatcagggtgaa

SEQ ID NO: 1488219 - DNA, 15 bp, Homo sapiens
tgcatcagggtgaaa

SEQ ID NO: 1488220 - DNA, 15 bp, Homo sapiens
gcatcagggtgaaag

SEQ ID NO: 1488221 - DNA, 15 bp, Homo sapiens
catcagggtgaaaga

SEQ ID NO: 1488222 - DNA, 15 bp, Homo sapiens
atcagggtgaaagag

SEQ ID NO: 1488223 - DNA, 15 bp, Homo sapiens
tcagggtgaaagagt

SEQ ID NO: 1488224 - DNA, 15 bp, Homo sapiens
cagggtgaaagagta

SEQ ID NO: 1488225 - DNA, 15 bp, Homo sapiens
agggtgaaagagtaa

SEQ ID NO: 1488226 - DNA, 15 bp, Homo sapiens
gggtgaaagagtaaa

SEQ ID NO: 1488227 - DNA, 15 bp, Homo sapiens
ggtgaaagagtaaag

SEQ ID NO: 1488228 - DNA, 15 bp, Homo sapiens
gtgaaagagtaaaga

SEQ ID NO: 1488229 - DNA, 15 bp, Homo sapiens
tgaaagagtaaagaa

SEQ ID NO: 1488230 - DNA, 15 bp, Homo sapiens
gaaagagtaaagaaa

SEQ ID NO: 1488231 - DNA, 15 bp, Homo sapiens
aaagagtaaagaaag

SEQ ID NO: 1488232 - DNA, 15 bp, Homo sapiens
aagagtaaagaaagg

SEQ ID NO: 1488233 - DNA, 15 bp, Homo sapiens
agagtaaagaaaggt

SEQ ID NO: 1488234 - DNA, 15 bp, Homo sapiens
gagtaaagaaaggtt

SEQ ID NO: 1488235 - DNA, 15 bp, Homo sapiens
agtaaagaaaggtta

SEQ ID NO: 1488236 - DNA, 15 bp, Homo sapiens
gtaaagaaaggttac

SEQ ID NO: 1488237 - DNA, 15 bp, Homo sapiens
taaagaaaggttact

SEQ ID NO: 1488238 - DNA, 15 bp, Homo sapiens
aaagaaaggttactt

SEQ ID NO: 1488239 - DNA, 15 bp, Homo sapiens
aagaaaggttacttg

SEQ ID NO: 1488240 - DNA, 15 bp, Homo sapiens
agaaaggttacttgc

SEQ ID NO: 1488241 - DNA, 15 bp, Homo sapiens
gaaaggttacttgca

SEQ ID NO: 1488242 - DNA, 15 bp, Homo sapiens
aaaggttacttgcag

SEQ ID NO: 1488243 - DNA, 15 bp, Homo sapiens
aaggttacttgcagc

SEQ ID NO: 1488244 - DNA, 15 bp, Homo sapiens
aggttacttgcagca

SEQ ID NO: 1488245 - DNA, 15 bp, Homo sapiens
ggttacttgcagcaa

SEQ ID NO: 1488246 - DNA, 15 bp, Homo sapiens
gttacttgcagcaaa

SEQ ID NO: 1488247 - DNA, 15 bp, Homo sapiens
ttacttgcagcaaaa

SEQ ID NO: 1488248 - DNA, 15 bp, Homo sapiens
tacttgcagcaaaag

SEQ ID NO: 1488249 - DNA, 15 bp, Homo sapiens
acttgcagcaaaagg

SEQ ID NO: 1488250 - DNA, 15 bp, Homo sapiens
cttgcagcaaaagga

SEQ ID NO: 1488251 - DNA, 15 bp, Homo sapiens
ttgcagcaaaaggaa

SEQ ID NO: 1488252 - DNA, 15 bp, Homo sapiens
tgcagcaaaaggaac

SEQ ID NO: 1488253 - DNA, 15 bp, Homo sapiens
gcagcaaaaggaacc

SEQ ID NO: 1488254 - DNA, 15 bp, Homo sapiens
cagcaaaaggaacca

SEQ ID NO: 1488255 - DNA, 15 bp, Homo sapiens
agcaaaaggaaccac

SEQ ID NO: 1488256 - DNA, 15 bp, Homo sapiens
gcaaaaggaaccaca

SEQ ID NO: 1488257 - DNA, 15 bp, Homo sapiens
caaaaggaaccacaa

SEQ ID NO: 1488258 - DNA, 15 bp, Homo sapiens
aaaaggaaccacaaa

SEQ ID NO: 1488259 - DNA, 15 bp, Homo sapiens
aaaggaaccacaaaa

SEQ ID NO: 1488260 - DNA, 15 bp, Homo sapiens
aggaaccacaaaatt

SEQ ID NO: 1488261 - DNA, 15 bp, Homo sapiens
ggaaccacaaaatta

SEQ ID NO: 1488262 - DNA, 15 bp, Homo sapiens
gaaccacaaaattaa

SEQ ID NO: 1488263 - DNA, 15 bp, Homo sapiens
aaccacaaaattaag

SEQ ID NO: 1488264 - DNA, 15 bp, Homo sapiens
accacaaaattaagg

SEQ ID NO: 1488265 - DNA, 15 bp, Homo sapiens
ccacaaaattaaggc

SEQ ID NO: 1488266 - DNA, 15 bp, Homo sapiens
cacaaaattaaggca

SEQ ID NO: 1488267 - DNA, 15 bp, Homo sapiens
acaaaattaaggcac

SEQ ID NO: 1488268 - DNA, 15 bp, Homo sapiens
caaaattaaggcaca

SEQ ID NO: 1488269 - DNA, 15 bp, Homo sapiens
aattaaggcacagaa

SEQ ID NO: 1488270 - DNA, 15 bp, Homo sapiens
attaaggcacagaag

SEQ ID NO: 1488271 - DNA, 15 bp, Homo sapiens
ttaaggcacagaagc

SEQ ID NO: 1488272 - DNA, 15 bp, Homo sapiens
taaggcacagaagca

SEQ ID NO: 1488273 - DNA, 15 bp, Homo sapiens
aaggcacagaagcat

SEQ ID NO: 1488274 - DNA, 15 bp, Homo sapiens
aggcacagaagcata

SEQ ID NO: 1488275 - DNA, 15 bp, Homo sapiens
ggcacagaagcatac

SEQ ID NO: 1488276 - DNA, 15 bp, Homo sapiens
gcacagaagcatacc

SEQ ID NO: 1488277 - DNA, 15 bp, Homo sapiens
cacagaagcatacct

SEQ ID NO: 1488278 - DNA, 15 bp, Homo sapiens
acagaagcatacctg

SEQ ID NO: 1488279 - DNA, 15 bp, Homo sapiens
cagaagcatacctga

SEQ ID NO: 1488280 - DNA, 15 bp, Homo sapiens
agaagcatacctgag

SEQ ID NO: 1488281 - DNA, 15 bp, Homo sapiens
gaagcatacctgagt

SEQ ID NO: 1488282 - DNA, 15 bp, Homo sapiens
aagcatacctgagta

SEQ ID NO: 1488283 - DNA, 15 bp, Homo sapiens
agcatacctgagtag

SEQ ID NO: 1488284 - DNA, 15 bp, Homo sapiens
gcatacctgagtagg

SEQ ID NO: 1488285 - DNA, 15 bp, Homo sapiens
catacctgagtaggg

SEQ ID NO: 1488286 - DNA, 15 bp, Homo sapiens
atacctgagtagggc

SEQ ID NO: 1488287 - DNA, 15 bp, Homo sapiens
tacctgagtagggct

SEQ ID NO: 1488288 - DNA, 15 bp, Homo sapiens
acctgagtagggctt

SEQ ID NO: 1488289 - DNA, 15 bp, Homo sapiens
cctgagtagggcttg

SEQ ID NO: 1488290 - DNA, 15 bp, Homo sapiens
ctgagtagggcttgt

SEQ ID NO: 1488291 - DNA, 15 bp, Homo sapiens
tgagtagggcttgtc

SEQ ID NO: 1488292 - DNA, 15 bp, Homo sapiens
gagtagggcttgtct

SEQ ID NO: 1488293 - DNA, 15 bp, Homo sapiens
agtagggcttgtcta

SEQ ID NO: 1488294 - DNA, 15 bp, Homo sapiens
gtagggcttgtctag

SEQ ID NO: 1488295 - DNA, 15 bp, Homo sapiens
tagggcttgtctagt

SEQ ID NO: 1488296 - DNA, 15 bp, Homo sapiens
agggcttgtctagtg

SEQ ID NO: 1488297 - DNA, 15 bp, Homo sapiens
gggcttgtctagtgg

SEQ ID NO: 1488298 - DNA, 15 bp, Homo sapiens
ggcttgtctagtgga

SEQ ID NO: 1488299 - DNA, 15 bp, Homo sapiens
gcttgtctagtggag

SEQ ID NO: 1488300 - DNA, 15 bp, Homo sapiens
cttgtctagtggagc

SEQ ID NO: 1488301 - DNA, 15 bp, Homo sapiens
ttgtctagtggagca

SEQ ID NO: 1488302 - DNA, 15 bp, Homo sapiens
tgtctagtggagcag

SEQ ID NO: 1488303 - DNA, 15 bp, Homo sapiens
gtctagtggagcagt

SEQ ID NO: 1488304 - DNA, 15 bp, Homo sapiens
tctagtggagcagtg

SEQ ID NO: 1488305 - DNA, 15 bp, Homo sapiens
ctagtggagcagtga

SEQ ID NO: 1488306 - DNA, 15 bp, Homo sapiens
tagtggagcagtgag

SEQ ID NO: 1488307 - DNA, 15 bp, Homo sapiens
agtggagcagtgaga

SEQ ID NO: 1488308 - DNA, 15 bp, Homo sapiens
gtggagcagtgagaa

SEQ ID NO: 1488309 - DNA, 15 bp, Homo sapiens
tggagcagtgagaat

SEQ ID NO: 1488310 - DNA, 15 bp, Homo sapiens
ggagcagtgagaata

SEQ ID NO: 1488311 - DNA, 15 bp, Homo sapiens
gagcagtgagaatag

SEQ ID NO: 1488312 - DNA, 15 bp, Homo sapiens
agcagtgagaatagt

SEQ ID NO: 1488313 - DNA, 15 bp, Homo sapiens
gcagtgagaatagtt

SEQ ID NO: 1488314 - DNA, 15 bp, Homo sapiens
cagtgagaatagtta

SEQ ID NO: 1488315 - DNA, 15 bp, Homo sapiens
agtgagaatagttag

SEQ ID NO: 1488316 - DNA, 15 bp, Homo sapiens
gtgagaatagttaga

SEQ ID NO: 1488317 - DNA, 15 bp, Homo sapiens
tgagaatagttagaa

SEQ ID NO: 1488318 - DNA, 15 bp, Homo sapiens
gagaatagttagaat

SEQ ID NO: 1488319 - DNA, 15 bp, Homo sapiens
agaatagttagaatt

SEQ ID NO: 1488320 - DNA, 15 bp, Homo sapiens
gaatagttagaattg

SEQ ID NO: 1488321 - DNA, 15 bp, Homo sapiens
aatagttagaattgg

SEQ ID NO: 1488322 - DNA, 15 bp, Homo sapiens
atagttagaattgga

SEQ ID NO: 1488323 - DNA, 15 bp, Homo sapiens
tagttagaattggac

SEQ ID NO: 1488324 - DNA, 15 bp, Homo sapiens
agttagaattggaca

SEQ ID NO: 1488325 - DNA, 15 bp, Homo sapiens
gttagaattggacac

SEQ ID NO: 1488326 - DNA, 15 bp, Homo sapiens
ttagaattggacaca

SEQ ID NO: 1488327 - DNA, 15 bp, Homo sapiens
tagaattggacacaa

SEQ ID NO: 1488328 - DNA, 15 bp, Homo sapiens
agaattggacacaag

SEQ ID NO: 1488329 - DNA, 15 bp, Homo sapiens
gaattggacacaagt

SEQ ID NO: 1488330 - DNA, 15 bp, Homo sapiens
aattggacacaagtt

SEQ ID NO: 1488331 - DNA, 15 bp, Homo sapiens
attggacacaagttg

SEQ ID NO: 1488332 - DNA, 15 bp, Homo sapiens
ttggacacaagttgc

SEQ ID NO: 1488333 - DNA, 15 bp, Homo sapiens
tggacacaagttgca

SEQ ID NO: 1488334 - DNA, 15 bp, Homo sapiens
ggacacaagttgcag

SEQ ID NO: 1488335 - DNA, 15 bp, Homo sapiens
gacacaagttgcagc

SEQ ID NO: 1488336 - DNA, 15 bp, Homo sapiens
acacaagttgcagca

SEQ ID NO: 1488337 - DNA, 15 bp, Homo sapiens
cacaagttgcagcaa

SEQ ID NO: 1488338 - DNA, 15 bp, Homo sapiens
acaagttgcagcaag

SEQ ID NO: 1488339 - DNA, 15 bp, Homo sapiens
caagttgcagcaaga

SEQ ID NO: 1488340 - DNA, 15 bp, Homo sapiens
aagttgcagcaagag

SEQ ID NO: 1488341 - DNA, 15 bp, Homo sapiens
agttgcagcaagagg

SEQ ID NO: 1488342 - DNA, 15 bp, Homo sapiens
gttgcagcaagagga

SEQ ID NO: 1488343 - DNA, 15 bp, Homo sapiens
ttgcagcaagaggaa

SEQ ID NO: 1488344 - DNA, 15 bp, Homo sapiens
tgcagcaagaggaag

SEQ ID NO: 1488345 - DNA, 15 bp, Homo sapiens
gcagcaagaggaagt

SEQ ID NO: 1488346 - DNA, 15 bp, Homo sapiens
cagcaagaggaagtt

SEQ ID NO: 1488347 - DNA, 15 bp, Homo sapiens
agcaagaggaagttg

SEQ ID NO: 1488348 - DNA, 15 bp, Homo sapiens
gcaagaggaagttgt

SEQ ID NO: 1488349 - DNA, 15 bp, Homo sapiens
caagaggaagttgtg

SEQ ID NO: 1488350 - DNA, 15 bp, Homo sapiens
aagaggaagttgtgc

SEQ ID NO: 1488351 - DNA, 15 bp, Homo sapiens
agaggaagttgtgca

SEQ ID NO: 1488352 - DNA, 15 bp, Homo sapiens
gaggaagttgtgcaa

SEQ ID NO: 1488353 - DNA, 15 bp, Homo sapiens
aggaagttgtgcaat

SEQ ID NO: 1488354 - DNA, 15 bp, Homo sapiens
ggaagttgtgcaatg

SEQ ID NO: 1488355 - DNA, 15 bp, Homo sapiens
gaagttgtgcaatgt

SEQ ID NO: 1488356 - DNA, 15 bp, Homo sapiens
aagttgtgcaatgta

SEQ ID NO: 1488357 - DNA, 15 bp, Homo sapiens
agttgtgcaatgtaa

SEQ ID NO: 1488358 - DNA, 15 bp, Homo sapiens
gttgtgcaatgtaag

SEQ ID NO: 1488359 - DNA, 15 bp, Homo sapiens
ttgtgcaatgtaagt

SEQ ID NO: 1488360 - DNA, 15 bp, Homo sapiens
tgtgcaatgtaagtg

SEQ ID NO: 1488361 - DNA, 15 bp, Homo sapiens
gtgcaatgtaagtgt

SEQ ID NO: 1488362 - DNA, 15 bp, Homo sapiens
tgcaatgtaagtgtg

SEQ ID NO: 1488363 - DNA, 15 bp, Homo sapiens
gcaatgtaagtgtgg

SEQ ID NO: 1488364 - DNA, 15 bp, Homo sapiens
caatgtaagtgtggc

SEQ ID NO: 1488365 - DNA, 15 bp, Homo sapiens
aatgtaagtgtggca

SEQ ID NO: 1488366 - DNA, 15 bp, Homo sapiens
atgtaagtgtggcag

SEQ ID NO: 1488367 - DNA, 15 bp, Homo sapiens
tgtaagtgtggcagg

SEQ ID NO: 1488368 - DNA, 15 bp, Homo sapiens
gtaagtgtggcaggt

SEQ ID NO: 1488369 - DNA, 15 bp, Homo sapiens
taagtgtggcaggtg

SEQ ID NO: 1488370 - DNA, 15 bp, Homo sapiens
aagtgtggcaggtgg

SEQ ID NO: 1488371 - DNA, 15 bp, Homo sapiens
agtgtggcaggtggg

SEQ ID NO: 1488372 - DNA, 15 bp, Homo sapiens
gtgtggcaggtggga

SEQ ID NO: 1488373 - DNA, 15 bp, Homo sapiens
tgtggcaggtgggac

SEQ ID NO: 1488374 - DNA, 15 bp, Homo sapiens
gtggcaggtgggaca

SEQ ID NO: 1488375 - DNA, 15 bp, Homo sapiens
tggcaggtgggacaa

SEQ ID NO: 1488376 - DNA, 15 bp, Homo sapiens
ggcaggtgggacaaa

SEQ ID NO: 1488377 - DNA, 15 bp, Homo sapiens
gcaggtgggacaaag

SEQ ID NO: 1488378 - DNA, 15 bp, Homo sapiens
caggtgggacaaaga

SEQ ID NO: 1488379 - DNA, 15 bp, Homo sapiens
aggtgggacaaagat

SEQ ID NO: 1488380 - DNA, 15 bp, Homo sapiens
ggtgggacaaagatg

SEQ ID NO: 1488381 - DNA, 15 bp, Homo sapiens
gtgggacaaagatga

SEQ ID NO: 1488382 - DNA, 15 bp, Homo sapiens
tgggacaaagatgac

SEQ ID NO: 1488383 - DNA, 15 bp, Homo sapiens
gggacaaagatgacc

SEQ ID NO: 1488384 - DNA, 15 bp, Homo sapiens
ggacaaagatgacct

SEQ ID NO: 1488385 - DNA, 15 bp, Homo sapiens
gacaaagatgacctt

SEQ ID NO: 1488386 - DNA, 15 bp, Homo sapiens
acaaagatgaccttt

SEQ ID NO: 1488387 - DNA, 15 bp, Homo sapiens
caaagatgacctttg

SEQ ID NO: 1488388 - DNA, 15 bp, Homo sapiens
aaagatgacctttgg

SEQ ID NO: 1488389 - DNA, 15 bp, Homo sapiens
aagatgacctttgga

SEQ ID NO: 1488390 - DNA, 15 bp, Homo sapiens
agatgacctttggaa

SEQ ID NO: 1488391 - DNA, 15 bp, Homo sapiens
gatgacctttggaag

SEQ ID NO: 1488392 - DNA, 15 bp, Homo sapiens
atgacctttggaaga

SEQ ID NO: 1488393 - DNA, 15 bp, Homo sapiens
tgacctttggaagac

SEQ ID NO: 1488394 - DNA, 15 bp, Homo sapiens
gacctttggaagaca

SEQ ID NO: 1488395 - DNA, 15 bp, Homo sapiens
acctttggaagacaa

SEQ ID NO: 1488396 - DNA, 15 bp, Homo sapiens
cctttggaagacaag

SEQ ID NO: 1488397 - DNA, 15 bp, Homo sapiens
ctttggaagacaagt

SEQ ID NO: 1488398 - DNA, 15 bp, Homo sapiens
tttggaagacaagtg

SEQ ID NO: 1488399 - DNA, 15 bp, Homo sapiens
ttggaagacaagtgg

SEQ ID NO: 1488400 - DNA, 15 bp, Homo sapiens
tggaagacaagtggc

SEQ ID NO: 1488401 - DNA, 15 bp, Homo sapiens
ggaagacaagtggct

SEQ ID NO: 1488402 - DNA, 15 bp, Homo sapiens
gaagacaagtggctg

SEQ ID NO: 1488403 - DNA, 15 bp, Homo sapiens
aagacaagtggctga

SEQ ID NO: 1488404 - DNA, 15 bp, Homo sapiens
agacaagtggctgag

SEQ ID NO: 1488405 - DNA, 15 bp, Homo sapiens
gacaagtggctgaga

SEQ ID NO: 1488406 - DNA, 15 bp, Homo sapiens
acaagtggctgagaa

SEQ ID NO: 1488407 - DNA, 15 bp, Homo sapiens
caagtggctgagaag

SEQ ID NO: 1488408 - DNA, 15 bp, Homo sapiens
aagtggctgagaaga

SEQ ID NO: 1488409 - DNA, 15 bp, Homo sapiens
agtggctgagaagag

SEQ ID NO: 1488410 - DNA, 15 bp, Homo sapiens
gtggctgagaagaga

SEQ ID NO: 1488411 - DNA, 15 bp, Homo sapiens
tggctgagaagagat

SEQ ID NO: 1488412 - DNA, 15 bp, Homo sapiens
ggctgagaagagatt

SEQ ID NO: 1488413 - DNA, 15 bp, Homo sapiens
gctgagaagagattt

SEQ ID NO: 1488414 - DNA, 15 bp, Homo sapiens
ctgagaagagatttg

SEQ ID NO: 1488415 - DNA, 15 bp, Homo sapiens
tgagaagagatttgc

SEQ ID NO: 1488416 - DNA, 15 bp, Homo sapiens
gagaagagatttgct

SEQ ID NO: 1488417 - DNA, 15 bp, Homo sapiens
agaagagatttgctg

SEQ ID NO: 1488418 - DNA, 15 bp, Homo sapiens
gaagagatttgctgt

SEQ ID NO: 1488419 - DNA, 15 bp, Homo sapiens
aagagatttgctgtg

SEQ ID NO: 1488420 - DNA, 15 bp, Homo sapiens
agagatttgctgtgg

SEQ ID NO: 1488421 - DNA, 15 bp, Homo sapiens
gagatttgctgtggt

SEQ ID NO: 1488422 - DNA, 15 bp, Homo sapiens
agatttgctgtggtc

SEQ ID NO: 1488423 - DNA, 15 bp, Homo sapiens
gatttgctgtggtcc

SEQ ID NO: 1488424 - DNA, 15 bp, Homo sapiens
atttgctgtggtcca

SEQ ID NO: 1488425 - DNA, 15 bp, Homo sapiens
tttgctgtggtccat

SEQ ID NO: 1488426 - DNA, 15 bp, Homo sapiens
ttgctgtggtccatc

SEQ ID NO: 1488427 - DNA, 15 bp, Homo sapiens
tgctgtggtccatct

SEQ ID NO: 1488428 - DNA, 15 bp, Homo sapiens
gctgtggtccatctc

SEQ ID NO: 1488429 - DNA, 15 bp, Homo sapiens
ctgtggtccatctct

SEQ ID NO: 1488430 - DNA, 15 bp, Homo sapiens
tgtggtccatctcta

SEQ ID NO: 1488431 - DNA, 15 bp, Homo sapiens
gtggtccatctctag

SEQ ID NO: 1488432 - DNA, 15 bp, Homo sapiens
tggtccatctctagg

SEQ ID NO: 1488433 - DNA, 15 bp, Homo sapiens
ggtccatctctaggg

SEQ ID NO: 1488434 - DNA, 15 bp, Homo sapiens
gtccatctctaggga

SEQ ID NO: 1488435 - DNA, 15 bp, Homo sapiens
tccatctctagggag

SEQ ID NO: 1488436 - DNA, 15 bp, Homo sapiens
ccatctctagggagc

SEQ ID NO: 1488437 - DNA, 15 bp, Homo sapiens
catctctagggagct

SEQ ID NO: 1488438 - DNA, 15 bp, Homo sapiens
atctctagggagctc

SEQ ID NO: 1488439 - DNA, 15 bp, Homo sapiens
tctctagggagctct

SEQ ID NO: 1488440 - DNA, 15 bp, Homo sapiens
ctctagggagctctc

SEQ ID NO: 1488441 - DNA, 15 bp, Homo sapiens
tctagggagctctct

SEQ ID NO: 1488442 - DNA, 15 bp, Homo sapiens
ctagggagctctctg

SEQ ID NO: 1488443 - DNA, 15 bp, Homo sapiens
tagggagctctctga

SEQ ID NO: 1488444 - DNA, 15 bp, Homo sapiens
agggagctctctgag

SEQ ID NO: 1488445 - DNA, 15 bp, Homo sapiens
gggagctctctgagg

SEQ ID NO: 1488446 - DNA, 15 bp, Homo sapiens
ggagctctctgaggt

SEQ ID NO: 1488447 - DNA, 15 bp, Homo sapiens
gagctctctgaggtt

SEQ ID NO: 1488448 - DNA, 15 bp, Homo sapiens
agctctctgaggttt

SEQ ID NO: 1488449 - DNA, 15 bp, Homo sapiens
gctctctgaggtttt

SEQ ID NO: 1488450 - DNA, 15 bp, Homo sapiens
ctctctgaggttttt

SEQ ID NO: 1488451 - DNA, 15 bp, Homo sapiens
tctctgaggtttttg

SEQ ID NO: 1488452 - DNA, 15 bp, Homo sapiens
ctctgaggtttttga

SEQ ID NO: 1488453 - DNA, 15 bp, Homo sapiens
tctgaggtttttgag

SEQ ID NO: 1488454 - DNA, 15 bp, Homo sapiens
ctgaggtttttgagc

SEQ ID NO: 1488455 - DNA, 15 bp, Homo sapiens
tgaggtttttgagca

SEQ ID NO: 1488456 - DNA, 15 bp, Homo sapiens
gaggtttttgagcag

SEQ ID NO: 1488457 - DNA, 15 bp, Homo sapiens
aggtttttgagcaga

SEQ ID NO: 1488458 - DNA, 15 bp, Homo sapiens
ggtttttgagcagat

SEQ ID NO: 1488459 - DNA, 15 bp, Homo sapiens
gtttttgagcagatt

SEQ ID NO: 1488460 - DNA, 15 bp, Homo sapiens
tttttgagcagattg

SEQ ID NO: 1488461 - DNA, 15 bp, Homo sapiens
ttttgagcagattgt

SEQ ID NO: 1488462 - DNA, 15 bp, Homo sapiens
tttgagcagattgtg

SEQ ID NO: 1488463 - DNA, 15 bp, Homo sapiens
ttgagcagattgtgg

SEQ ID NO: 1488464 - DNA, 15 bp, Homo sapiens
tgagcagattgtggc

SEQ ID NO: 1488465 - DNA, 15 bp, Homo sapiens
gagcagattgtggca

SEQ ID NO: 1488466 - DNA, 15 bp, Homo sapiens
agcagattgtggcag

SEQ ID NO: 1488467 - DNA, 15 bp, Homo sapiens
gcagattgtggcagg

SEQ ID NO: 1488468 - DNA, 15 bp, Homo sapiens
cagattgtggcagga

SEQ ID NO: 1488469 - DNA, 15 bp, Homo sapiens
agattgtggcaggat

SEQ ID NO: 1488470 - DNA, 15 bp, Homo sapiens
gattgtggcaggatg

SEQ ID NO: 1488471 - DNA, 15 bp, Homo sapiens
attgtggcaggatga

SEQ ID NO: 1488472 - DNA, 15 bp, Homo sapiens
ttgtggcaggatgac

SEQ ID NO: 1488473 - DNA, 15 bp, Homo sapiens
tgtggcaggatgaca

SEQ ID NO: 1488474 - DNA, 15 bp, Homo sapiens
gtggcaggatgacag

SEQ ID NO: 1488475 - DNA, 15 bp, Homo sapiens
tggcaggatgacagc

SEQ ID NO: 1488476 - DNA, 15 bp, Homo sapiens
ggcaggatgacagca

SEQ ID NO: 1488477 - DNA, 15 bp, Homo sapiens
gcaggatgacagcag

SEQ ID NO: 1488478 - DNA, 15 bp, Homo sapiens
caggatgacagcagt

SEQ ID NO: 1488479 - DNA, 15 bp, Homo sapiens
aggatgacagcagta

SEQ ID NO: 1488480 - DNA, 15 bp, Homo sapiens
ggatgacagcagtat

SEQ ID NO: 1488481 - DNA, 15 bp, Homo sapiens
gatgacagcagtatt

SEQ ID NO: 1488482 - DNA, 15 bp, Homo sapiens
atgacagcagtattc

SEQ ID NO: 1488483 - DNA, 15 bp, Homo sapiens
tgacagcagtattca

SEQ ID NO: 1488484 - DNA, 15 bp, Homo sapiens
gacagcagtattcac

SEQ ID NO: 1488485 - DNA, 15 bp, Homo sapiens
acagcagtattcaca

SEQ ID NO: 1488486 - DNA, 15 bp, Homo sapiens
cagcagtattcacaa

SEQ ID NO: 1488487 - DNA, 15 bp, Homo sapiens
agcagtattcacaac

SEQ ID NO: 1488488 - DNA, 15 bp, Homo sapiens
gcagtattcacaact

SEQ ID NO: 1488489 - DNA, 15 bp, Homo sapiens
cagtattcacaactt

SEQ ID NO: 1488490 - DNA, 15 bp, Homo sapiens
agtattcacaacttg

SEQ ID NO: 1488491 - DNA, 15 bp, Homo sapiens
gtattcacaacttgc

SEQ ID NO: 1488492 - DNA, 15 bp, Homo sapiens
tattcacaacttgca

SEQ ID NO: 1488493 - DNA, 15 bp, Homo sapiens
attcacaacttgcaa

SEQ ID NO: 1488494 - DNA, 15 bp, Homo sapiens
ttcacaacttgcaag

SEQ ID NO: 1488495 - DNA, 15 bp, Homo sapiens
tcacaacttgcaagg

SEQ ID NO: 1488496 - DNA, 15 bp, Homo sapiens
cacaacttgcaaggg

SEQ ID NO: 1488497 - DNA, 15 bp, Homo sapiens
acaacttgcaaggga

SEQ ID NO: 1488498 - DNA, 15 bp, Homo sapiens
caacttgcaagggag

SEQ ID NO: 1488499 - DNA, 15 bp, Homo sapiens
aacttgcaagggagc

SEQ ID NO: 1488500 - DNA, 15 bp, Homo sapiens
acttgcaagggagct

SEQ ID NO: 1488501 - DNA, 15 bp, Homo sapiens
cttgcaagggagctg

SEQ ID NO: 1488502 - DNA, 15 bp, Homo sapiens
ttgcaagggagctgg

SEQ ID NO: 1488503 - DNA, 15 bp, Homo sapiens
tgcaagggagctgga

SEQ ID NO: 1488504 - DNA, 15 bp, Homo sapiens
gcaagggagctggat

SEQ ID NO: 1488505 - DNA, 15 bp, Homo sapiens
caagggagctggatc

SEQ ID NO: 1488506 - DNA, 15 bp, Homo sapiens
aagggagctggatcc

SEQ ID NO: 1488507 - DNA, 15 bp, Homo sapiens
agggagctggatcca

SEQ ID NO: 1488508 - DNA, 15 bp, Homo sapiens
gggagctggatccag

SEQ ID NO: 1488509 - DNA, 15 bp, Homo sapiens
ggagctggatccagc

SEQ ID NO: 1488510 - DNA, 15 bp, Homo sapiens
gagctggatccagcc

SEQ ID NO: 1488511 - DNA, 15 bp, Homo sapiens
agctggatccagcca

SEQ ID NO: 1488512 - DNA, 15 bp, Homo sapiens
gctggatccagccag

SEQ ID NO: 1488513 - DNA, 15 bp, Homo sapiens
ctggatccagccagg

SEQ ID NO: 1488514 - DNA, 15 bp, Homo sapiens
tggatccagccaggg

SEQ ID NO: 1488515 - DNA, 15 bp, Homo sapiens
ggatccagccaggga

SEQ ID NO: 1488516 - DNA, 15 bp, Homo sapiens
gatccagccagggag

SEQ ID NO: 1488517 - DNA, 15 bp, Homo sapiens
atccagccagggagc

SEQ ID NO: 1488518 - DNA, 15 bp, Homo sapiens
tccagccagggagcg

SEQ ID NO: 1488519 - DNA, 15 bp, Homo sapiens
ccagccagggagcgc

SEQ ID NO: 1488520 - DNA, 15 bp, Homo sapiens
cagccagggagcgca

SEQ ID NO: 1488521 - DNA, 15 bp, Homo sapiens
agccagggagcgcac

SEQ ID NO: 1488522 - DNA, 15 bp, Homo sapiens
gccagggagcgcaca

SEQ ID NO: 1488523 - DNA, 15 bp, Homo sapiens
ccagggagcgcacaa

SEQ ID NO: 1488524 - DNA, 15 bp, Homo sapiens
cagggagcgcacaag

SEQ ID NO: 1488525 - DNA, 15 bp, Homo sapiens
agggagcgcacaagg

SEQ ID NO: 1488526 - DNA, 15 bp, Homo sapiens
gggagcgcacaaggt

SEQ ID NO: 1488527 - DNA, 15 bp, Homo sapiens
ggagcgcacaaggtg

SEQ ID NO: 1488528 - DNA, 15 bp, Homo sapiens
gagcgcacaaggtgt

SEQ ID NO: 1488529 - DNA, 15 bp, Homo sapiens
agcgcacaaggtgta

SEQ ID NO: 1488530 - DNA, 15 bp, Homo sapiens
gcgcacaaggtgtac

SEQ ID NO: 1488531 - DNA, 15 bp, Homo sapiens
cgcacaaggtgtact

SEQ ID NO: 1488532 - DNA, 15 bp, Homo sapiens
gcacaaggtgtactg

SEQ ID NO: 1488533 - DNA, 15 bp, Homo sapiens
cacaaggtgtactga

SEQ ID NO: 1488534 - DNA, 15 bp, Homo sapiens
acaaggtgtactgaa

SEQ ID NO: 1488535 - DNA, 15 bp, Homo sapiens
caaggtgtactgaat

SEQ ID NO: 1488536 - DNA, 15 bp, Homo sapiens
aaggtgtactgaatg

SEQ ID NO: 1488537 - DNA, 15 bp, Homo sapiens
aggtgtactgaatga

SEQ ID NO: 1488538 - DNA, 15 bp, Homo sapiens
ggtgtactgaatgag

SEQ ID NO: 1488539 - DNA, 15 bp, Homo sapiens
gtgtactgaatgagg

SEQ ID NO: 1488540 - DNA, 15 bp, Homo sapiens
tgtactgaatgaggg

SEQ ID NO: 1488541 - DNA, 15 bp, Homo sapiens
gtactgaatgaggga

SEQ ID NO: 1488542 - DNA, 15 bp, Homo sapiens
tactgaatgagggaa

SEQ ID NO: 1488543 - DNA, 15 bp, Homo sapiens
actgaatgagggaag

SEQ ID NO: 1488544 - DNA, 15 bp, Homo sapiens
ctgaatgagggaaga

SEQ ID NO: 1488545 - DNA, 15 bp, Homo sapiens
tgaatgagggaagag

SEQ ID NO: 1488546 - DNA, 15 bp, Homo sapiens
gaatgagggaagagc

SEQ ID NO: 1488547 - DNA, 15 bp, Homo sapiens
aatgagggaagagca

SEQ ID NO: 1488548 - DNA, 15 bp, Homo sapiens
atgagggaagagcat

SEQ ID NO: 1488549 - DNA, 15 bp, Homo sapiens
tgagggaagagcatg

SEQ ID NO: 1488550 - DNA, 15 bp, Homo sapiens
gagggaagagcatgt

SEQ ID NO: 1488551 - DNA, 15 bp, Homo sapiens
agggaagagcatgtc

SEQ ID NO: 1488552 - DNA, 15 bp, Homo sapiens
gggaagagcatgtca

SEQ ID NO: 1488553 - DNA, 15 bp, Homo sapiens
ggaagagcatgtcag

SEQ ID NO: 1488554 - DNA, 15 bp, Homo sapiens
gaagagcatgtcagt

SEQ ID NO: 1488555 - DNA, 15 bp, Homo sapiens
aagagcatgtcagtg

SEQ ID NO: 1488556 - DNA, 15 bp, Homo sapiens
agagcatgtcagtgg

SEQ ID NO: 1488557 - DNA, 15 bp, Homo sapiens
gagcatgtcagtggg

SEQ ID NO: 1488558 - DNA, 15 bp, Homo sapiens
agcatgtcagtgggt

SEQ ID NO: 1488559 - DNA, 15 bp, Homo sapiens
gcatgtcagtgggtc

SEQ ID NO: 1488560 - DNA, 15 bp, Homo sapiens
catgtcagtgggtcg

SEQ ID NO: 1488561 - DNA, 15 bp, Homo sapiens
atgtcagtgggtcgt

SEQ ID NO: 1488562 - DNA, 15 bp, Homo sapiens
tgtcagtgggtcgtc

SEQ ID NO: 1488563 - DNA, 15 bp, Homo sapiens
gtcagtgggtcgtca

SEQ ID NO: 1488564 - DNA, 15 bp, Homo sapiens
tcagtgggtcgtcag

SEQ ID NO: 1488565 - DNA, 15 bp, Homo sapiens
cagtgggtcgtcagg

SEQ ID NO: 1488566 - DNA, 15 bp, Homo sapiens
agtgggtcgtcaggg

SEQ ID NO: 1488567 - DNA, 15 bp, Homo sapiens
gtgggtcgtcaggga

SEQ ID NO: 1488568 - DNA, 15 bp, Homo sapiens
tgggtcgtcagggag

SEQ ID NO: 1488569 - DNA, 15 bp, Homo sapiens
gggtcgtcagggagg

SEQ ID NO: 1488570 - DNA, 15 bp, Homo sapiens
ggtcgtcagggaggg

SEQ ID NO: 1488571 - DNA, 15 bp, Homo sapiens
gtcgtcagggaggga

SEQ ID NO: 1488572 - DNA, 15 bp, Homo sapiens
tcgtcagggagggaa

SEQ ID NO: 1488573 - DNA, 15 bp, Homo sapiens
cgtcagggagggaag

SEQ ID NO: 1488574 - DNA, 15 bp, Homo sapiens
gtcagggagggaaga

SEQ ID NO: 1488575 - DNA, 15 bp, Homo sapiens
tcagggagggaagag

SEQ ID NO: 1488576 - DNA, 15 bp, Homo sapiens
cagggagggaagagt

SEQ ID NO: 1488577 - DNA, 15 bp, Homo sapiens
agggagggaagagtc

SEQ ID NO: 1488578 - DNA, 15 bp, Homo sapiens
gggagggaagagtct

SEQ ID NO: 1488579 - DNA, 15 bp, Homo sapiens
ggagggaagagtctc

SEQ ID NO: 1488580 - DNA, 15 bp, Homo sapiens
gagggaagagtctca

SEQ ID NO: 1488581 - DNA, 15 bp, Homo sapiens
agggaagagtctcag

SEQ ID NO: 1488582 - DNA, 15 bp, Homo sapiens
gggaagagtctcaga

SEQ ID NO: 1488583 - DNA, 15 bp, Homo sapiens
ggaagagtctcagag

SEQ ID NO: 1488584 - DNA, 15 bp, Homo sapiens
gaagagtctcagaga

SEQ ID NO: 1488585 - DNA, 15 bp, Homo sapiens
aagagtctcagagag

SEQ ID NO: 1488586 - DNA, 15 bp, Homo sapiens
agagtctcagagaga

SEQ ID NO: 1488587 - DNA, 15 bp, Homo sapiens
gagtctcagagagaa

SEQ ID NO: 1488588 - DNA, 15 bp, Homo sapiens
agtctcagagagaaa

SEQ ID NO: 1488589 - DNA, 15 bp, Homo sapiens
gtctcagagagaaat

SEQ ID NO: 1488590 - DNA, 15 bp, Homo sapiens
tctcagagagaaatg

SEQ ID NO: 1488591 - DNA, 15 bp, Homo sapiens
ctcagagagaaatgc

SEQ ID NO: 1488592 - DNA, 15 bp, Homo sapiens
tcagagagaaatgcc

SEQ ID NO: 1488593 - DNA, 15 bp, Homo sapiens
cagagagaaatgccc

SEQ ID NO: 1488594 - DNA, 15 bp, Homo sapiens
agagagaaatgccca

SEQ ID NO: 1488595 - DNA, 15 bp, Homo sapiens
gagagaaatgcccag

SEQ ID NO: 1488596 - DNA, 15 bp, Homo sapiens
agagaaatgcccaga

SEQ ID NO: 1488597 - DNA, 15 bp, Homo sapiens
gagaaatgcccagac

SEQ ID NO: 1488598 - DNA, 15 bp, Homo sapiens
agaaatgcccagact

SEQ ID NO: 1488599 - DNA, 15 bp, Homo sapiens
gaaatgcccagactg

SEQ ID NO: 1488600 - DNA, 15 bp, Homo sapiens
aaatgcccagactgg

SEQ ID NO: 1488601 - DNA, 15 bp, Homo sapiens
aatgcccagactgga

SEQ ID NO: 1488602 - DNA, 15 bp, Homo sapiens
atgcccagactggac

SEQ ID NO: 1488603 - DNA, 15 bp, Homo sapiens
tgcccagactggaca

SEQ ID NO: 1488604 - DNA, 15 bp, Homo sapiens
gcccagactggacag

SEQ ID NO: 1488605 - DNA, 15 bp, Homo sapiens
cccagactggacaga

SEQ ID NO: 1488606 - DNA, 15 bp, Homo sapiens
ccagactggacagaa

SEQ ID NO: 1488607 - DNA, 15 bp, Homo sapiens
cagactggacagaag

SEQ ID NO: 1488608 - DNA, 15 bp, Homo sapiens
agactggacagaagt

SEQ ID NO: 1488609 - DNA, 15 bp, Homo sapiens
gactggacagaagtg

SEQ ID NO: 1488610 - DNA, 15 bp, Homo sapiens
actggacagaagtgt

SEQ ID NO: 1488611 - DNA, 15 bp, Homo sapiens
ctggacagaagtgtg

SEQ ID NO: 1488612 - DNA, 15 bp, Homo sapiens
tggacagaagtgtga

SEQ ID NO: 1488613 - DNA, 15 bp, Homo sapiens
ggacagaagtgtgag

SEQ ID NO: 1488614 - DNA, 15 bp, Homo sapiens
gacagaagtgtgagg

SEQ ID NO: 1488615 - DNA, 15 bp, Homo sapiens
acagaagtgtgaggc

SEQ ID NO: 1488616 - DNA, 15 bp, Homo sapiens
cagaagtgtgaggca

SEQ ID NO: 1488617 - DNA, 15 bp, Homo sapiens
agaagtgtgaggcat

SEQ ID NO: 1488618 - DNA, 15 bp, Homo sapiens
gaagtgtgaggcatt

SEQ ID NO: 1488619 - DNA, 15 bp, Homo sapiens
aagtgtgaggcattc

SEQ ID NO: 1488620 - DNA, 15 bp, Homo sapiens
agtgtgaggcattcc

SEQ ID NO: 1488621 - DNA, 15 bp, Homo sapiens
gtgtgaggcattccc

SEQ ID NO: 1488622 - DNA, 15 bp, Homo sapiens
tgtgaggcattcccg

SEQ ID NO: 1488623 - DNA, 15 bp, Homo sapiens
gtgaggcattcccgg

SEQ ID NO: 1488624 - DNA, 15 bp, Homo sapiens
tgaggcattcccggt

SEQ ID NO: 1488625 - DNA, 15 bp, Homo sapiens
gaggcattcccggtg

SEQ ID NO: 1488626 - DNA, 15 bp, Homo sapiens
aggcattcccggtga

SEQ ID NO: 1488627 - DNA, 15 bp, Homo sapiens
ggcattcccggtgaa

SEQ ID NO: 1488628 - DNA, 15 bp, Homo sapiens
gcattcccggtgaac

SEQ ID NO: 1488629 - DNA, 15 bp, Homo sapiens
cattcccggtgaacc

SEQ ID NO: 1488630 - DNA, 15 bp, Homo sapiens
attcccggtgaaccg

SEQ ID NO: 1488631 - DNA, 15 bp, Homo sapiens
ttcccggtgaaccgg

SEQ ID NO: 1488632 - DNA, 15 bp, Homo sapiens
tcccggtgaaccggg

SEQ ID NO: 1488633 - DNA, 15 bp, Homo sapiens
cccggtgaaccggga

SEQ ID NO: 1488634 - DNA, 15 bp, Homo sapiens
ccggtgaaccgggac

SEQ ID NO: 1488635 - DNA, 15 bp, Homo sapiens
cggtgaaccgggacg

SEQ ID NO: 1488636 - DNA, 15 bp, Homo sapiens
ggtgaaccgggacgc

SEQ ID NO: 1488637 - DNA, 15 bp, Homo sapiens
gtgaaccgggacgct

SEQ ID NO: 1488638 - DNA, 15 bp, Homo sapiens
tgaaccgggacgctc

SEQ ID NO: 1488639 - DNA, 15 bp, Homo sapiens
gaaccgggacgctct

SEQ ID NO: 1488640 - DNA, 15 bp, Homo sapiens
aaccgggacgctctc

SEQ ID NO: 1488641 - DNA, 15 bp, Homo sapiens
accgggacgctctcc

SEQ ID NO: 1488642 - DNA, 15 bp, Homo sapiens
ccgggacgctctcct

SEQ ID NO: 1488643 - DNA, 15 bp, Homo sapiens
cgggacgctctcctc

SEQ ID NO: 1488644 - DNA, 15 bp, Homo sapiens
gggacgctctcctcc

SEQ ID NO: 1488645 - DNA, 15 bp, Homo sapiens
ggacgctctcctcct

SEQ ID NO: 1488646 - DNA, 15 bp, Homo sapiens
gacgctctcctccta

SEQ ID NO: 1488647 - DNA, 15 bp, Homo sapiens
acgctctcctcctac

SEQ ID NO: 1488648 - DNA, 15 bp, Homo sapiens
cgctctcctcctaca

SEQ ID NO: 1488649 - DNA, 15 bp, Homo sapiens
gctctcctcctacaa

SEQ ID NO: 1488650 - DNA, 15 bp, Homo sapiens
ctctcctcctacaat

SEQ ID NO: 1488651 - DNA, 15 bp, Homo sapiens
tctcctcctacaatg

SEQ ID NO: 1488652 - DNA, 15 bp, Homo sapiens
ctcctcctacaatgt

SEQ ID NO: 1488653 - DNA, 15 bp, Homo sapiens
tcctcctacaatgtt

SEQ ID NO: 1488654 - DNA, 15 bp, Homo sapiens
cctcctacaatgttg

SEQ ID NO: 1488655 - DNA, 15 bp, Homo sapiens
ctcctacaatgttgc

SEQ ID NO: 1488656 - DNA, 15 bp, Homo sapiens
tcctacaatgttgcc

SEQ ID NO: 1488657 - DNA, 15 bp, Homo sapiens
cctacaatgttgcca

SEQ ID NO: 1488658 - DNA, 15 bp, Homo sapiens
ctacaatgttgccac

SEQ ID NO: 1488659 - DNA, 15 bp, Homo sapiens
tacaatgttgccact

SEQ ID NO: 1488660 - DNA, 15 bp, Homo sapiens
acaatgttgccactt

SEQ ID NO: 1488661 - DNA, 15 bp, Homo sapiens
caatgttgccacttg

SEQ ID NO: 1488662 - DNA, 15 bp, Homo sapiens
aatgttgccacttga

SEQ ID NO: 1488663 - DNA, 15 bp, Homo sapiens
atgttgccacttgat

SEQ ID NO: 1488664 - DNA, 15 bp, Homo sapiens
tgttgccacttgatt

SEQ ID NO: 1488665 - DNA, 15 bp, Homo sapiens
gttgccacttgattg

SEQ ID NO: 1488666 - DNA, 15 bp, Homo sapiens
ttgccacttgattgg

SEQ ID NO: 1488667 - DNA, 15 bp, Homo sapiens
tgccacttgattgga

SEQ ID NO: 1488668 - DNA, 15 bp, Homo sapiens
gccacttgattggag

SEQ ID NO: 1488669 - DNA, 15 bp, Homo sapiens
ccacttgattggagt

SEQ ID NO: 1488670 - DNA, 15 bp, Homo sapiens
cacttgattggagtt

SEQ ID NO: 1488671 - DNA, 15 bp, Homo sapiens
acttgattggagttt

SEQ ID NO: 1488672 - DNA, 15 bp, Homo sapiens
cttgattggagtttc

SEQ ID NO: 1488673 - DNA, 15 bp, Homo sapiens
ttgattggagtttcc

SEQ ID NO: 1488674 - DNA, 15 bp, Homo sapiens
tgattggagtttcct

SEQ ID NO: 1488675 - DNA, 15 bp, Homo sapiens
gattggagtttcctt

SEQ ID NO: 1488676 - DNA, 15 bp, Homo sapiens
attggagtttccttg

SEQ ID NO: 1488677 - DNA, 15 bp, Homo sapiens
ttggagtttccttga

SEQ ID NO: 1488678 - DNA, 15 bp, Homo sapiens
tggagtttccttgat

SEQ ID NO: 1488679 - DNA, 15 bp, Homo sapiens
ggagtttccttgatt

SEQ ID NO: 1488680 - DNA, 15 bp, Homo sapiens
gagtttccttgattg

SEQ ID NO: 1488681 - DNA, 15 bp, Homo sapiens
agtttccttgattgt

SEQ ID NO: 1488682 - DNA, 15 bp, Homo sapiens
gtttccttgattgtg

SEQ ID NO: 1488683 - DNA, 15 bp, Homo sapiens
tttccttgattgtga

SEQ ID NO: 1488684 - DNA, 15 bp, Homo sapiens
ttccttgattgtgaa

SEQ ID NO: 1488685 - DNA, 15 bp, Homo sapiens
tccttgattgtgaac

SEQ ID NO: 1488686 - DNA, 15 bp, Homo sapiens
ccttgattgtgaact

SEQ ID NO: 1488687 - DNA, 15 bp, Homo sapiens
cttgattgtgaacta

SEQ ID NO: 1488688 - DNA, 15 bp, Homo sapiens
ttgattgtgaactac

SEQ ID NO: 1488689 - DNA, 15 bp, Homo sapiens
tgattgtgaactaca

SEQ ID NO: 1488690 - DNA, 15 bp, Homo sapiens
gattgtgaactacat

SEQ ID NO: 1488691 - DNA, 15 bp, Homo sapiens
attgtgaactacatt

SEQ ID NO: 1488692 - DNA, 15 bp, Homo sapiens
ttgtgaactacattc

SEQ ID NO: 1488693 - DNA, 15 bp, Homo sapiens
tgtgaactacattct

SEQ ID NO: 1488694 - DNA, 15 bp, Homo sapiens
gtgaactacattctt

SEQ ID NO: 1488695 - DNA, 15 bp, Homo sapiens
tgaactacattctta

SEQ ID NO: 1488696 - DNA, 15 bp, Homo sapiens
gaactacattcttaa

SEQ ID NO: 1488697 - DNA, 15 bp, Homo sapiens
aactacattcttaag

SEQ ID NO: 1488698 - DNA, 15 bp, Homo sapiens
actacattcttaagg

SEQ ID NO: 1488699 - DNA, 15 bp, Homo sapiens
ctacattcttaagga

SEQ ID NO: 1488700 - DNA, 15 bp, Homo sapiens
tacattcttaaggaa

SEQ ID NO: 1488701 - DNA, 15 bp, Homo sapiens
acattcttaaggaaa

SEQ ID NO: 1488702 - DNA, 15 bp, Homo sapiens
cattcttaaggaaac

SEQ ID NO: 1488703 - DNA, 15 bp, Homo sapiens
attcttaaggaaact

SEQ ID NO: 1488704 - DNA, 15 bp, Homo sapiens
ttcttaaggaaactt

SEQ ID NO: 1488705 - DNA, 15 bp, Homo sapiens
tcttaaggaaacttc

SEQ ID NO: 1488706 - DNA, 15 bp, Homo sapiens
cttaaggaaacttct

SEQ ID NO: 1488707 - DNA, 15 bp, Homo sapiens
ttaaggaaacttcta

SEQ ID NO: 1488708 - DNA, 15 bp, Homo sapiens
taaggaaacttctat

SEQ ID NO: 1488709 - DNA, 15 bp, Homo sapiens
aaggaaacttctatt

SEQ ID NO: 1488710 - DNA, 15 bp, Homo sapiens
aggaaacttctattc

SEQ ID NO: 1488711 - DNA, 15 bp, Homo sapiens
ggaaacttctattcc

SEQ ID NO: 1488712 - DNA, 15 bp, Homo sapiens
gaaacttctattcca

SEQ ID NO: 1488713 - DNA, 15 bp, Homo sapiens
aaacttctattccaa

SEQ ID NO: 1488714 - DNA, 15 bp, Homo sapiens
aacttctattccaaa

SEQ ID NO: 1488715 - DNA, 15 bp, Homo sapiens
acttctattccaaaa

SEQ ID NO: 1488716 - DNA, 15 bp, Homo sapiens
cttctattccaaaat

SEQ ID NO: 1488717 - DNA, 15 bp, Homo sapiens
ttctattccaaaatg

SEQ ID NO: 1488718 - DNA, 15 bp, Homo sapiens
tctattccaaaatga

SEQ ID NO: 1488719 - DNA, 15 bp, Homo sapiens
ctattccaaaatgag

SEQ ID NO: 1488720 - DNA, 15 bp, Homo sapiens
tattccaaaatgagt

SEQ ID NO: 1488721 - DNA, 15 bp, Homo sapiens
attccaaaatgagtt

SEQ ID NO: 1488722 - DNA, 15 bp, Homo sapiens
ttccaaaatgagttc

SEQ ID NO: 1488723 - DNA, 15 bp, Homo sapiens
tccaaaatgagttca

SEQ ID NO: 1488724 - DNA, 15 bp, Homo sapiens
ccaaaatgagttcaa

SEQ ID NO: 1488725 - DNA, 15 bp, Homo sapiens
caaaatgagttcaaa

SEQ ID NO: 1488726 - DNA, 15 bp, Homo sapiens
aaaatgagttcaaac

SEQ ID NO: 1488727 - DNA, 15 bp, Homo sapiens
aaatgagttcaaact

SEQ ID NO: 1488728 - DNA, 15 bp, Homo sapiens
aatgagttcaaactg

SEQ ID NO: 1488729 - DNA, 15 bp, Homo sapiens
atgagttcaaactgg

SEQ ID NO: 1488730 - DNA, 15 bp, Homo sapiens
tgagttcaaactggt

SEQ ID NO: 1488731 - DNA, 15 bp, Homo sapiens
gagttcaaactggtt

SEQ ID NO: 1488732 - DNA, 15 bp, Homo sapiens
agttcaaactggttt

SEQ ID NO: 1488733 - DNA, 15 bp, Homo sapiens
gttcaaactggtttt

SEQ ID NO: 1488734 - DNA, 15 bp, Homo sapiens
ttcaaactggttttg

SEQ ID NO: 1488735 - DNA, 15 bp, Homo sapiens
tcaaactggttttgt

SEQ ID NO: 1488736 - DNA, 15 bp, Homo sapiens
caaactggttttgtg

SEQ ID NO: 1488737 - DNA, 15 bp, Homo sapiens
aaactggttttgtgc

SEQ ID NO: 1488738 - DNA, 15 bp, Homo sapiens
aactggttttgtgcc

SEQ ID NO: 1488739 - DNA, 15 bp, Homo sapiens
actggttttgtgccc

SEQ ID NO: 1488740 - DNA, 15 bp, Homo sapiens
ctggttttgtgccct

SEQ ID NO: 1488741 - DNA, 15 bp, Homo sapiens
tggttttgtgccctt

SEQ ID NO: 1488742 - DNA, 15 bp, Homo sapiens
ggttttgtgcccttt

SEQ ID NO: 1488743 - DNA, 15 bp, Homo sapiens
gttttgtgccctttc

SEQ ID NO: 1488744 - DNA, 15 bp, Homo sapiens
ttttgtgccctttct

SEQ ID NO: 1488745 - DNA, 15 bp, Homo sapiens
tttgtgccctttcta

SEQ ID NO: 1488746 - DNA, 15 bp, Homo sapiens
ttgtgccctttctac

SEQ ID NO: 1488747 - DNA, 15 bp, Homo sapiens
tgtgccctttctaca

SEQ ID NO: 1488748 - DNA, 15 bp, Homo sapiens
gtgccctttctacac

SEQ ID NO: 1488749 - DNA, 15 bp, Homo sapiens
tgccctttctacacc

SEQ ID NO: 1488750 - DNA, 15 bp, Homo sapiens
gccctttctacacct

SEQ ID NO: 1488751 - DNA, 15 bp, Homo sapiens
ccctttctacaccta

SEQ ID NO: 1488752 - DNA, 15 bp, Homo sapiens
cctttctacacctac

SEQ ID NO: 1488753 - DNA, 15 bp, Homo sapiens
ctttctacacctaca

SEQ ID NO: 1488754 - DNA, 15 bp, Homo sapiens
tttctacacctacac

SEQ ID NO: 1488755 - DNA, 15 bp, Homo sapiens
ttctacacctacact

SEQ ID NO: 1488756 - DNA, 15 bp, Homo sapiens
tctacacctacactc

SEQ ID NO: 1488757 - DNA, 15 bp, Homo sapiens
ctacacctacactct

SEQ ID NO: 1488758 - DNA, 15 bp, Homo sapiens
tacacctacactcta

SEQ ID NO: 1488759 - DNA, 15 bp, Homo sapiens
acacctacactctat

SEQ ID NO: 1488760 - DNA, 15 bp, Homo sapiens
cacctacactctatc

SEQ ID NO: 1488761 - DNA, 15 bp, Homo sapiens
acctacactctatct

SEQ ID NO: 1488762 - DNA, 15 bp, Homo sapiens
cctacactctatctc

SEQ ID NO: 1488763 - DNA, 15 bp, Homo sapiens
ctacactctatctca

SEQ ID NO: 1488764 - DNA, 15 bp, Homo sapiens
tacactctatctcat

SEQ ID NO: 1488765 - DNA, 15 bp, Homo sapiens
acactctatctcatc

SEQ ID NO: 1488766 - DNA, 15 bp, Homo sapiens
cactctatctcatca

SEQ ID NO: 1488767 - DNA, 15 bp, Homo sapiens
actctatctcatcac

SEQ ID NO: 1488768 - DNA, 15 bp, Homo sapiens
ctctatctcatcact

SEQ ID NO: 1488769 - DNA, 15 bp, Homo sapiens
tctatctcatcactt

SEQ ID NO: 1488770 - DNA, 15 bp, Homo sapiens
ctatctcatcacttg

SEQ ID NO: 1488771 - DNA, 15 bp, Homo sapiens
tatctcatcacttgt

SEQ ID NO: 1488772 - DNA, 15 bp, Homo sapiens
atctcatcacttgtt

SEQ ID NO: 1488773 - DNA, 15 bp, Homo sapiens
tctcatcacttgttt

SEQ ID NO: 1488774 - DNA, 15 bp, Homo sapiens
ctcatcacttgtttt

SEQ ID NO: 1488775 - DNA, 15 bp, Homo sapiens
tcatcacttgttttt

SEQ ID NO: 1488776 - DNA, 15 bp, Homo sapiens
catcacttgtttttt

SEQ ID NO: 1488777 - DNA, 15 bp, Homo sapiens
atcacttgttttttt

SEQ ID NO: 1488778 - DNA, 15 bp, Homo sapiens
tcacttgtttttttc

SEQ ID NO: 1488779 - DNA, 15 bp, Homo sapiens
cacttgtttttttct

SEQ ID NO: 1488780 - DNA, 15 bp, Homo sapiens
acttgtttttttcta

SEQ ID NO: 1488781 - DNA, 15 bp, Homo sapiens
cttgtttttttctag

SEQ ID NO: 1488782 - DNA, 15 bp, Homo sapiens
ttgtttttttctagc

SEQ ID NO: 1488783 - DNA, 15 bp, Homo sapiens
tgtttttttctagct

SEQ ID NO: 1488784 - DNA, 15 bp, Homo sapiens
gtttttttctagctg

SEQ ID NO: 1488785 - DNA, 15 bp, Homo sapiens
tttttttctagctgt

SEQ ID NO: 1488786 - DNA, 15 bp, Homo sapiens
ttttttctagctgtg

SEQ ID NO: 1488787 - DNA, 15 bp, Homo sapiens
tttttctagctgtgt

SEQ ID NO: 1488788 - DNA, 15 bp, Homo sapiens
ttttctagctgtgta

SEQ ID NO: 1488789 - DNA, 15 bp, Homo sapiens
tttctagctgtgtac

SEQ ID NO: 1488790 - DNA, 15 bp, Homo sapiens
ttctagctgtgtacc

SEQ ID NO: 1488791 - DNA, 15 bp, Homo sapiens
tctagctgtgtacca

SEQ ID NO: 1488792 - DNA, 15 bp, Homo sapiens
ctagctgtgtaccac

SEQ ID NO: 1488793 - DNA, 15 bp, Homo sapiens
tagctgtgtaccact

SEQ ID NO: 1488794 - DNA, 15 bp, Homo sapiens
agctgtgtaccactc

SEQ ID NO: 1488795 - DNA, 15 bp, Homo sapiens
gctgtgtaccactca

SEQ ID NO: 1488796 - DNA, 15 bp, Homo sapiens
ctgtgtaccactcac

SEQ ID NO: 1488797 - DNA, 15 bp, Homo sapiens
tgtgtaccactcact

SEQ ID NO: 1488798 - DNA, 15 bp, Homo sapiens
gtgtaccactcactt

SEQ ID NO: 1488799 - DNA, 15 bp, Homo sapiens
tgtaccactcacttc

SEQ ID NO: 1488800 - DNA, 15 bp, Homo sapiens
gtaccactcacttcc

SEQ ID NO: 1488801 - DNA, 15 bp, Homo sapiens
taccactcacttcct

SEQ ID NO: 1488802 - DNA, 15 bp, Homo sapiens
accactcacttcctt

SEQ ID NO: 1488803 - DNA, 15 bp, Homo sapiens
ccactcacttcctta

SEQ ID NO: 1488804 - DNA, 15 bp, Homo sapiens
cactcacttccttaa

SEQ ID NO: 1488805 - DNA, 15 bp, Homo sapiens
actcacttccttaag

SEQ ID NO: 1488806 - DNA, 15 bp, Homo sapiens
ctcacttccttaaga

SEQ ID NO: 1488807 - DNA, 15 bp, Homo sapiens
tcacttccttaagaa

SEQ ID NO: 1488808 - DNA, 15 bp, Homo sapiens
cacttccttaagaag

SEQ ID NO: 1488809 - DNA, 15 bp, Homo sapiens
acttccttaagaagt

SEQ ID NO: 1488810 - DNA, 15 bp, Homo sapiens
cttccttaagaagtc

SEQ ID NO: 1488811 - DNA, 15 bp, Homo sapiens
ttccttaagaagtct

SEQ ID NO: 1488812 - DNA, 15 bp, Homo sapiens
tccttaagaagtctc

SEQ ID NO: 1488813 - DNA, 15 bp, Homo sapiens
ccttaagaagtctct

SEQ ID NO: 1488814 - DNA, 15 bp, Homo sapiens
cttaagaagtctctc

SEQ ID NO: 1488815 - DNA, 15 bp, Homo sapiens
ttaagaagtctctcc

SEQ ID NO: 1488816 - DNA, 15 bp, Homo sapiens
taagaagtctctcct

SEQ ID NO: 1488817 - DNA, 15 bp, Homo sapiens
aagaagtctctcctg

SEQ ID NO: 1488818 - DNA, 15 bp, Homo sapiens
agaagtctctcctgg

SEQ ID NO: 1488819 - DNA, 15 bp, Homo sapiens
gaagtctctcctggg

SEQ ID NO: 1488820 - DNA, 15 bp, Homo sapiens
aagtctctcctgggt

SEQ ID NO: 1488821 - DNA, 15 bp, Homo sapiens
agtctctcctgggtc

SEQ ID NO: 1488822 - DNA, 15 bp, Homo sapiens
gtctctcctgggtct

SEQ ID NO: 1488823 - DNA, 15 bp, Homo sapiens
tctctcctgggtctg

SEQ ID NO: 1488824 - DNA, 15 bp, Homo sapiens
ctctcctgggtctgc

SEQ ID NO: 1488825 - DNA, 15 bp, Homo sapiens
tctcctgggtctgcc

SEQ ID NO: 1488826 - DNA, 15 bp, Homo sapiens
ctcctgggtctgcct

SEQ ID NO: 1488827 - DNA, 15 bp, Homo sapiens
tcctgggtctgcctc

SEQ ID NO: 1488828 - DNA, 15 bp, Homo sapiens
cctgggtctgcctcc

SEQ ID NO: 1488829 - DNA, 15 bp, Homo sapiens
ctgggtctgcctcca

SEQ ID NO: 1488830 - DNA, 15 bp, Homo sapiens
tgggtctgcctccag

SEQ ID NO: 1488831 - DNA, 15 bp, Homo sapiens
gggtctgcctccaga

SEQ ID NO: 1488832 - DNA, 15 bp, Homo sapiens
ggtctgcctccagaa

SEQ ID NO: 1488833 - DNA, 15 bp, Homo sapiens
gtctgcctccagaac

SEQ ID NO: 1488834 - DNA, 15 bp, Homo sapiens
tctgcctccagaacc

SEQ ID NO: 1488835 - DNA, 15 bp, Homo sapiens
ctgcctccagaaccg

SEQ ID NO: 1488836 - DNA, 15 bp, Homo sapiens
tgcctccagaaccgc

SEQ ID NO: 1488837 - DNA, 15 bp, Homo sapiens
gcctccagaaccgct

SEQ ID NO: 1488838 - DNA, 15 bp, Homo sapiens
cctccagaaccgctg

SEQ ID NO: 1488839 - DNA, 15 bp, Homo sapiens
ctccagaaccgctgg

SEQ ID NO: 1488840 - DNA, 15 bp, Homo sapiens
tccagaaccgctggc

SEQ ID NO: 1488841 - DNA, 15 bp, Homo sapiens
ccagaaccgctggct

SEQ ID NO: 1488842 - DNA, 15 bp, Homo sapiens
cagaaccgctggctt

SEQ ID NO: 1488843 - DNA, 15 bp, Homo sapiens
agaaccgctggcttt

SEQ ID NO: 1488844 - DNA, 15 bp, Homo sapiens
gaaccgctggctttg

SEQ ID NO: 1488845 - DNA, 15 bp, Homo sapiens
aaccgctggctttgt

SEQ ID NO: 1488846 - DNA, 15 bp, Homo sapiens
accgctggctttgtg

SEQ ID NO: 1488847 - DNA, 15 bp, Homo sapiens
ccgctggctttgtgt

SEQ ID NO: 1488848 - DNA, 15 bp, Homo sapiens
cgctggctttgtgtt

SEQ ID NO: 1488849 - DNA, 15 bp, Homo sapiens
gctggctttgtgttc

SEQ ID NO: 1488850 - DNA, 15 bp, Homo sapiens
ctggctttgtgttct

SEQ ID NO: 1488851 - DNA, 15 bp, Homo sapiens
tggctttgtgttctc

SEQ ID NO: 1488852 - DNA, 15 bp, Homo sapiens
ggctttgtgttctct

SEQ ID NO: 1488853 - DNA, 15 bp, Homo sapiens
gctttgtgttctctg

SEQ ID NO: 1488854 - DNA, 15 bp, Homo sapiens
ctttgtgttctctgt

SEQ ID NO: 1488855 - DNA, 15 bp, Homo sapiens
tttgtgttctctgtg

SEQ ID NO: 1488856 - DNA, 15 bp, Homo sapiens
ttgtgttctctgtgt

SEQ ID NO: 1488857 - DNA, 15 bp, Homo sapiens
tgtgttctctgtgta

SEQ ID NO: 1488858 - DNA, 15 bp, Homo sapiens
gtgttctctgtgtat

SEQ ID NO: 1488859 - DNA, 15 bp, Homo sapiens
tgttctctgtgtatt

SEQ ID NO: 1488860 - DNA, 15 bp, Homo sapiens
gttctctgtgtattc

SEQ ID NO: 1488861 - DNA, 15 bp, Homo sapiens
ttctctgtgtattct

SEQ ID NO: 1488862 - DNA, 15 bp, Homo sapiens
tctctgtgtattctc

SEQ ID NO: 1488863 - DNA, 15 bp, Homo sapiens
ctctgtgtattctct

SEQ ID NO: 1488864 - DNA, 15 bp, Homo sapiens
tctgtgtattctctt

SEQ ID NO: 1488865 - DNA, 15 bp, Homo sapiens
ctgtgtattctcttt

SEQ ID NO: 1488866 - DNA, 15 bp, Homo sapiens
tgtgtattctctttg

SEQ ID NO: 1488867 - DNA, 15 bp, Homo sapiens
gtgtattctctttgc

SEQ ID NO: 1488868 - DNA, 15 bp, Homo sapiens
attctctttgctgtg

SEQ ID NO: 1488869 - DNA, 15 bp, Homo sapiens
ttctctttgctgtga

SEQ ID NO: 1488870 - DNA, 15 bp, Homo sapiens
tctctttgctgtgag

SEQ ID NO: 1488871 - DNA, 15 bp, Homo sapiens
ctctttgctgtgagt

SEQ ID NO: 1488872 - DNA, 15 bp, Homo sapiens
tctttgctgtgagtc

SEQ ID NO: 1488873 - DNA, 15 bp, Homo sapiens
ctttgctgtgagtct

SEQ ID NO: 1488874 - DNA, 15 bp, Homo sapiens
tttgctgtgagtctt

SEQ ID NO: 1488875 - DNA, 15 bp, Homo sapiens
ttgctgtgagtcttg

SEQ ID NO: 1488876 - DNA, 15 bp, Homo sapiens
tgctgtgagtcttga

SEQ ID NO: 1488877 - DNA, 15 bp, Homo sapiens
gctgtgagtcttgat

SEQ ID NO: 1488878 - DNA, 15 bp, Homo sapiens
ctgtgagtcttgatt

SEQ ID NO: 1488879 - DNA, 15 bp, Homo sapiens
tgtgagtcttgattt

SEQ ID NO: 1488880 - DNA, 15 bp, Homo sapiens
gtgagtcttgatttt

SEQ ID NO: 1488881 - DNA, 15 bp, Homo sapiens
tgagtcttgattttg

SEQ ID NO: 1488882 - DNA, 15 bp, Homo sapiens
gagtcttgattttgc

SEQ ID NO: 1488883 - DNA, 15 bp, Homo sapiens
agtcttgattttgcc

SEQ ID NO: 1488884 - DNA, 15 bp, Homo sapiens
gtcttgattttgccg

SEQ ID NO: 1488885 - DNA, 15 bp, Homo sapiens
tcttgattttgccgt

SEQ ID NO: 1488886 - DNA, 15 bp, Homo sapiens
cttgattttgccgtc

SEQ ID NO: 1488887 - DNA, 15 bp, Homo sapiens
ttgattttgccgtct

SEQ ID NO: 1488888 - DNA, 15 bp, Homo sapiens
tgattttgccgtctg

SEQ ID NO: 1488889 - DNA, 15 bp, Homo sapiens
gattttgccgtctgc

SEQ ID NO: 1488890 - DNA, 15 bp, Homo sapiens
attttgccgtctgca

SEQ ID NO: 1488891 - DNA, 15 bp, Homo sapiens
ttttgccgtctgcat

SEQ ID NO: 1488892 - DNA, 15 bp, Homo sapiens
tttgccgtctgcatg

SEQ ID NO: 1488893 - DNA, 15 bp, Homo sapiens
ttgccgtctgcatgt

SEQ ID NO: 1488894 - DNA, 15 bp, Homo sapiens
tgccgtctgcatgtc

SEQ ID NO: 1488895 - DNA, 15 bp, Homo sapiens
gccgtctgcatgtcc

SEQ ID NO: 1488896 - DNA, 15 bp, Homo sapiens
ccgtctgcatgtccc

SEQ ID NO: 1488897 - DNA, 15 bp, Homo sapiens
cgtctgcatgtcccc

SEQ ID NO: 1488898 - DNA, 15 bp, Homo sapiens
gtctgcatgtcccct

SEQ ID NO: 1488899 - DNA, 15 bp, Homo sapiens
tctgcatgtcccctt

SEQ ID NO: 1488900 - DNA, 15 bp, Homo sapiens
ctgcatgtccccttg

SEQ ID NO: 1488901 - DNA, 15 bp, Homo sapiens
tgcatgtccccttgg

SEQ ID NO: 1488902 - DNA, 15 bp, Homo sapiens
gcatgtccccttggc

SEQ ID NO: 1488903 - DNA, 15 bp, Homo sapiens
catgtccccttggcc

SEQ ID NO: 1488904 - DNA, 15 bp, Homo sapiens
atgtccccttggcca

SEQ ID NO: 1488905 - DNA, 15 bp, Homo sapiens
tgtccccttggccag

SEQ ID NO: 1488906 - DNA, 15 bp, Homo sapiens
gtccccttggccagg

SEQ ID NO: 1488907 - DNA, 15 bp, Homo sapiens
tccccttggccagga

SEQ ID NO: 1488908 - DNA, 15 bp, Homo sapiens
ccccttggccaggac

SEQ ID NO: 1488909 - DNA, 15 bp, Homo sapiens
cccttggccaggaca

SEQ ID NO: 1488910 - DNA, 15 bp, Homo sapiens
ccttggccaggacaa

SEQ ID NO: 1488911 - DNA, 15 bp, Homo sapiens
cttggccaggacaat

SEQ ID NO: 1488912 - DNA, 15 bp, Homo sapiens
ttggccaggacaatc

SEQ ID NO: 1488913 - DNA, 15 bp, Homo sapiens
tggccaggacaatcc

SEQ ID NO: 1488914 - DNA, 15 bp, Homo sapiens
ggccaggacaatcct

SEQ ID NO: 1488915 - DNA, 15 bp, Homo sapiens
gccaggacaatcctg

SEQ ID NO: 1488916 - DNA, 15 bp, Homo sapiens
ccaggacaatcctgt

SEQ ID NO: 1488917 - DNA, 15 bp, Homo sapiens
caggacaatcctgtg

SEQ ID NO: 1488918 - DNA, 15 bp, Homo sapiens
aggacaatcctgtgt

SEQ ID NO: 1488919 - DNA, 15 bp, Homo sapiens
ggacaatcctgtgtt

SEQ ID NO: 1488920 - DNA, 15 bp, Homo sapiens
gacaatcctgtgttc

SEQ ID NO: 1488921 - DNA, 15 bp, Homo sapiens
acaatcctgtgttcc

SEQ ID NO: 1488922 - DNA, 15 bp, Homo sapiens
caatcctgtgttccc

SEQ ID NO: 1488923 - DNA, 15 bp, Homo sapiens
aatcctgtgttccct

SEQ ID NO: 1488924 - DNA, 15 bp, Homo sapiens
atcctgtgttccctg

SEQ ID NO: 1488925 - DNA, 15 bp, Homo sapiens
tcctgtgttccctgt

SEQ ID NO: 1488926 - DNA, 15 bp, Homo sapiens
cctgtgttccctgtt

SEQ ID NO: 1488927 - DNA, 15 bp, Homo sapiens
ctgtgttccctgttg

SEQ ID NO: 1488928 - DNA, 15 bp, Homo sapiens
tgtgttccctgttgc

SEQ ID NO: 1488929 - DNA, 15 bp, Homo sapiens
gtgttccctgttgcc

SEQ ID NO: 1488930 - DNA, 15 bp, Homo sapiens
tgttccctgttgcct

SEQ ID NO: 1488931 - DNA, 15 bp, Homo sapiens
gttccctgttgcctg

SEQ ID NO: 1488932 - DNA, 15 bp, Homo sapiens
ttccctgttgcctgg

SEQ ID NO: 1488933 - DNA, 15 bp, Homo sapiens
tccctgttgcctggt

SEQ ID NO: 1488934 - DNA, 15 bp, Homo sapiens
ccctgttgcctggtc

SEQ ID NO: 1488935 - DNA, 15 bp, Homo sapiens
cctgttgcctggtcc

SEQ ID NO: 1488936 - DNA, 15 bp, Homo sapiens
ctgttgcctggtcca

SEQ ID NO: 1488937 - DNA, 15 bp, Homo sapiens
tgttgcctggtccac

SEQ ID NO: 1488938 - DNA, 15 bp, Homo sapiens
gttgcctggtccacc

SEQ ID NO: 1488939 - DNA, 15 bp, Homo sapiens
ttgcctggtccaccc

SEQ ID NO: 1488940 - DNA, 15 bp, Homo sapiens
tgcctggtccaccct

SEQ ID NO: 1488941 - DNA, 15 bp, Homo sapiens
gcctggtccaccctc

SEQ ID NO: 1488942 - DNA, 15 bp, Homo sapiens
cctggtccaccctcc

SEQ ID NO: 1488943 - DNA, 15 bp, Homo sapiens
ctggtccaccctcct

SEQ ID NO: 1488944 - DNA, 15 bp, Homo sapiens
tggtccaccctcctt

SEQ ID NO: 1488945 - DNA, 15 bp, Homo sapiens
ggtccaccctcctta

SEQ ID NO: 1488946 - DNA, 15 bp, Homo sapiens
gtccaccctccttag

SEQ ID NO: 1488947 - DNA, 15 bp, Homo sapiens
tccaccctccttagg

SEQ ID NO: 1488948 - DNA, 15 bp, Homo sapiens
ccaccctccttagga

SEQ ID NO: 1488949 - DNA, 15 bp, Homo sapiens
caccctccttaggat

SEQ ID NO: 1488950 - DNA, 15 bp, Homo sapiens
accctccttaggata

SEQ ID NO: 1488951 - DNA, 15 bp, Homo sapiens
ccctccttaggataa

SEQ ID NO: 1488952 - DNA, 15 bp, Homo sapiens
cctccttaggataat

SEQ ID NO: 1488953 - DNA, 15 bp, Homo sapiens
ctccttaggataatg

SEQ ID NO: 1488954 - DNA, 15 bp, Homo sapiens
tccttaggataatga

SEQ ID NO: 1488955 - DNA, 15 bp, Homo sapiens
ccttaggataatgat

SEQ ID NO: 1488956 - DNA, 15 bp, Homo sapiens
cttaggataatgatg

SEQ ID NO: 1488957 - DNA, 15 bp, Homo sapiens
ttaggataatgatgg

SEQ ID NO: 1488958 - DNA, 15 bp, Homo sapiens
taggataatgatggg

SEQ ID NO: 1488959 - DNA, 15 bp, Homo sapiens
aggataatgatggga

SEQ ID NO: 1488960 - DNA, 15 bp, Homo sapiens
ggataatgatgggag

SEQ ID NO: 1488961 - DNA, 15 bp, Homo sapiens
gataatgatgggagg

SEQ ID NO: 1488962 - DNA, 15 bp, Homo sapiens
ataatgatgggagga

SEQ ID NO: 1488963 - DNA, 15 bp, Homo sapiens
taatgatgggaggaa

SEQ ID NO: 1488964 - DNA, 15 bp, Homo sapiens
aatgatgggaggaac

SEQ ID NO: 1488965 - DNA, 15 bp, Homo sapiens
atgatgggaggaact

SEQ ID NO: 1488966 - DNA, 15 bp, Homo sapiens
tgatgggaggaactt

SEQ ID NO: 1488967 - DNA, 15 bp, Homo sapiens
gatgggaggaacttt

SEQ ID NO: 1488968 - DNA, 15 bp, Homo sapiens
atgggaggaactttt

SEQ ID NO: 1488969 - DNA, 15 bp, Homo sapiens
tgggaggaacttttt

SEQ ID NO: 1488970 - DNA, 15 bp, Homo sapiens
gggaggaactttttg

SEQ ID NO: 1488971 - DNA, 15 bp, Homo sapiens
ggaggaactttttgc

SEQ ID NO: 1488972 - DNA, 15 bp, Homo sapiens
gaggaactttttgcc

SEQ ID NO: 1488973 - DNA, 15 bp, Homo sapiens
aggaactttttgccc

SEQ ID NO: 1488974 - DNA, 15 bp, Homo sapiens
ggaactttttgccca

SEQ ID NO: 1488975 - DNA, 15 bp, Homo sapiens
gaactttttgcccat

SEQ ID NO: 1488976 - DNA, 15 bp, Homo sapiens
aactttttgcccatc

SEQ ID NO: 1488977 - DNA, 15 bp, Homo sapiens
actttttgcccatct

SEQ ID NO: 1488978 - DNA, 15 bp, Homo sapiens
ctttttgcccatcta

SEQ ID NO: 1488979 - DNA, 15 bp, Homo sapiens
tttttgcccatctat

SEQ ID NO: 1488980 - DNA, 15 bp, Homo sapiens
ttttgcccatctatg

SEQ ID NO: 1488981 - DNA, 15 bp, Homo sapiens
tttgcccatctatgg

SEQ ID NO: 1488982 - DNA, 15 bp, Homo sapiens
ttgcccatctatgga

SEQ ID NO: 1488983 - DNA, 15 bp, Homo sapiens
tgcccatctatggag

SEQ ID NO: 1488984 - DNA, 15 bp, Homo sapiens
gcccatctatggagc

SEQ ID NO: 1488985 - DNA, 15 bp, Homo sapiens
cccatctatggagca

SEQ ID NO: 1488986 - DNA, 15 bp, Homo sapiens
ccatctatggagcat

SEQ ID NO: 1488987 - DNA, 15 bp, Homo sapiens
catctatggagcatc

SEQ ID NO: 1488988 - DNA, 15 bp, Homo sapiens
atctatggagcatca

SEQ ID NO: 1488989 - DNA, 15 bp, Homo sapiens
tctatggagcatcac

SEQ ID NO: 1488990 - DNA, 15 bp, Homo sapiens
ctatggagcatcact

SEQ ID NO: 1488991 - DNA, 15 bp, Homo sapiens
tatggagcatcactg

SEQ ID NO: 1488992 - DNA, 15 bp, Homo sapiens
atggagcatcactgt

SEQ ID NO: 1488993 - DNA, 15 bp, Homo sapiens
tggagcatcactgtg

SEQ ID NO: 1488994 - DNA, 15 bp, Homo sapiens
ggagcatcactgtgc

SEQ ID NO: 1488995 - DNA, 15 bp, Homo sapiens
gagcatcactgtgcc

SEQ ID NO: 1488996 - DNA, 15 bp, Homo sapiens
agcatcactgtgccc

SEQ ID NO: 1488997 - DNA, 15 bp, Homo sapiens
gcatcactgtgccca

SEQ ID NO: 1488998 - DNA, 15 bp, Homo sapiens
catcactgtgcccag

SEQ ID NO: 1488999 - DNA, 15 bp, Homo sapiens
atcactgtgcccagc

SEQ ID NO: 1489000 - DNA, 15 bp, Homo sapiens
tcactgtgcccagcc

SEQ ID NO: 1489001 - DNA, 15 bp, Homo sapiens
cactgtgcccagccc

SEQ ID NO: 1489002 - DNA, 15 bp, Homo sapiens
actgtgcccagccct

SEQ ID NO: 1489003 - DNA, 15 bp, Homo sapiens
ctgtgcccagccctg

SEQ ID NO: 1489004 - DNA, 15 bp, Homo sapiens
tgtgcccagccctgc

SEQ ID NO: 1489005 - DNA, 15 bp, Homo sapiens
gtgcccagccctgcc

SEQ ID NO: 1489006 - DNA, 15 bp, Homo sapiens
tgcccagccctgcct

SEQ ID NO: 1489007 - DNA, 15 bp, Homo sapiens
gcccagccctgcctc

SEQ ID NO: 1489008 - DNA, 15 bp, Homo sapiens
cccagccctgcctcc

SEQ ID NO: 1489009 - DNA, 15 bp, Homo sapiens
ccagccctgcctccc

SEQ ID NO: 1489010 - DNA, 15 bp, Homo sapiens
cagccctgcctcccg

SEQ ID NO: 1489011 - DNA, 15 bp, Homo sapiens
agccctgcctcccgg

SEQ ID NO: 1489012 - DNA, 15 bp, Homo sapiens
gccctgcctcccggg

SEQ ID NO: 1489013 - DNA, 15 bp, Homo sapiens
ccctgcctcccgggc

SEQ ID NO: 1489014 - DNA, 15 bp, Homo sapiens
cctgcctcccgggct

SEQ ID NO: 1489015 - DNA, 15 bp, Homo sapiens
ctgcctcccgggctt

SEQ ID NO: 1489016 - DNA, 15 bp, Homo sapiens
tgcctcccgggcttc

SEQ ID NO: 1489017 - DNA, 15 bp, Homo sapiens
gcctcccgggcttct

SEQ ID NO: 1489018 - DNA, 15 bp, Homo sapiens
cctcccgggcttctt

SEQ ID NO: 1489019 - DNA, 15 bp, Homo sapiens
ctcccgggcttcttt

SEQ ID NO: 1489020 - DNA, 15 bp, Homo sapiens
tcccgggcttctttg

SEQ ID NO: 1489021 - DNA, 15 bp, Homo sapiens
cccgggcttctttgc

SEQ ID NO: 1489022 - DNA, 15 bp, Homo sapiens
ccgggcttctttgcc

SEQ ID NO: 1489023 - DNA, 15 bp, Homo sapiens
cgggcttctttgcct

SEQ ID NO: 1489024 - DNA, 15 bp, Homo sapiens
gggcttctttgcctc

SEQ ID NO: 1489025 - DNA, 15 bp, Homo sapiens
ggcttctttgcctct

SEQ ID NO: 1489026 - DNA, 15 bp, Homo sapiens
gcttctttgcctctg

SEQ ID NO: 1489027 - DNA, 15 bp, Homo sapiens
cttctttgcctctga

SEQ ID NO: 1489028 - DNA, 15 bp, Homo sapiens
ttctttgcctctgat

SEQ ID NO: 1489029 - DNA, 15 bp, Homo sapiens
tctttgcctctgata

SEQ ID NO: 1489030 - DNA, 15 bp, Homo sapiens
ctttgcctctgatat

SEQ ID NO: 1489031 - DNA, 15 bp, Homo sapiens
tttgcctctgatatt

SEQ ID NO: 1489032 - DNA, 15 bp, Homo sapiens
ttgcctctgatattc

SEQ ID NO: 1489033 - DNA, 15 bp, Homo sapiens
tgcctctgatattct

SEQ ID NO: 1489034 - DNA, 15 bp, Homo sapiens
gcctctgatattctg

SEQ ID NO: 1489035 - DNA, 15 bp, Homo sapiens
cctctgatattctgt

SEQ ID NO: 1489036 - DNA, 15 bp, Homo sapiens
ctctgatattctgtc

SEQ ID NO: 1489037 - DNA, 15 bp, Homo sapiens
tctgatattctgtca

SEQ ID NO: 1489038 - DNA, 15 bp, Homo sapiens
ctgatattctgtcat

SEQ ID NO: 1489039 - DNA, 15 bp, Homo sapiens
tgatattctgtcatc

SEQ ID NO: 1489040 - DNA, 15 bp, Homo sapiens
gatattctgtcatct

SEQ ID NO: 1489041 - DNA, 15 bp, Homo sapiens
atattctgtcatctt

SEQ ID NO: 1489042 - DNA, 15 bp, Homo sapiens
tattctgtcatcttc

SEQ ID NO: 1489043 - DNA, 15 bp, Homo sapiens
attctgtcatcttct

SEQ ID NO: 1489044 - DNA, 15 bp, Homo sapiens
ttctgtcatcttctc

SEQ ID NO: 1489045 - DNA, 15 bp, Homo sapiens
tctgtcatcttctcc

SEQ ID NO: 1489046 - DNA, 15 bp, Homo sapiens
ctgtcatcttctccc

SEQ ID NO: 1489047 - DNA, 15 bp, Homo sapiens
tgtcatcttctcccc

SEQ ID NO: 1489048 - DNA, 15 bp, Homo sapiens
gtcatcttctccccc

SEQ ID NO: 1489049 - DNA, 15 bp, Homo sapiens
tcatcttctccccca

SEQ ID NO: 1489050 - DNA, 15 bp, Homo sapiens
catcttctcccccaa

SEQ ID NO: 1489051 - DNA, 15 bp, Homo sapiens
atcttctcccccaac

SEQ ID NO: 1489052 - DNA, 15 bp, Homo sapiens
tcttctcccccaacc

SEQ ID NO: 1489053 - DNA, 15 bp, Homo sapiens
cttctcccccaacct

SEQ ID NO: 1489054 - DNA, 15 bp, Homo sapiens
ttctcccccaaccta

SEQ ID NO: 1489055 - DNA, 15 bp, Homo sapiens
tctcccccaacctag

SEQ ID NO: 1489056 - DNA, 15 bp, Homo sapiens
ctcccccaacctaga

SEQ ID NO: 1489057 - DNA, 15 bp, Homo sapiens
tcccccaacctagaa

SEQ ID NO: 1489058 - DNA, 15 bp, Homo sapiens
cccccaacctagaag

SEQ ID NO: 1489059 - DNA, 15 bp, Homo sapiens
ccccaacctagaaga

SEQ ID NO: 1489060 - DNA, 15 bp, Homo sapiens
cccaacctagaagag

SEQ ID NO: 1489061 - DNA, 15 bp, Homo sapiens
ccaacctagaagagg

SEQ ID NO: 1489062 - DNA, 15 bp, Homo sapiens
caacctagaagaggg

SEQ ID NO: 1489063 - DNA, 15 bp, Homo sapiens
aacctagaagaggga

SEQ ID NO: 1489064 - DNA, 15 bp, Homo sapiens
acctagaagagggaa

SEQ ID NO: 1489065 - DNA, 15 bp, Homo sapiens
cctagaagagggaag

SEQ ID NO: 1489066 - DNA, 15 bp, Homo sapiens
ctagaagagggaagg

SEQ ID NO: 1489067 - DNA, 15 bp, Homo sapiens
tagaagagggaaggg

SEQ ID NO: 1489068 - DNA, 15 bp, Homo sapiens
agaagagggaaggga

SEQ ID NO: 1489069 - DNA, 15 bp, Homo sapiens
gaagagggaagggaa

SEQ ID NO: 1489070 - DNA, 15 bp, Homo sapiens
aagagggaagggaaa

SEQ ID NO: 1489071 - DNA, 15 bp, Homo sapiens
agagggaagggaaag

SEQ ID NO: 1489072 - DNA, 15 bp, Homo sapiens
gagggaagggaaaga

SEQ ID NO: 1489073 - DNA, 15 bp, Homo sapiens
agggaagggaaagaa

SEQ ID NO: 1489074 - DNA, 15 bp, Homo sapiens
gggaagggaaagaaa

SEQ ID NO: 1489075 - DNA, 15 bp, Homo sapiens
ggaagggaaagaaat

SEQ ID NO: 1489076 - DNA, 15 bp, Homo sapiens
gaagggaaagaaatt

SEQ ID NO: 1489077 - DNA, 15 bp, Homo sapiens
aagggaaagaaatta

SEQ ID NO: 1489078 - DNA, 15 bp, Homo sapiens
agggaaagaaattat

SEQ ID NO: 1489079 - DNA, 15 bp, Homo sapiens
gggaaagaaattatt

SEQ ID NO: 1489080 - DNA, 15 bp, Homo sapiens
ggaaagaaattattt

SEQ ID NO: 1489081 - DNA, 15 bp, Homo sapiens
gaaagaaattatttt

SEQ ID NO: 1489082 - DNA, 15 bp, Homo sapiens
aaagaaattatttta

SEQ ID NO: 1489083 - DNA, 15 bp, Homo sapiens
aagaaattattttac

SEQ ID NO: 1489084 - DNA, 15 bp, Homo sapiens
agaaattattttact

SEQ ID NO: 1489085 - DNA, 15 bp, Homo sapiens
gaaattattttactg

SEQ ID NO: 1489086 - DNA, 15 bp, Homo sapiens
aaattattttactgg

SEQ ID NO: 1489087 - DNA, 15 bp, Homo sapiens
aattattttactgga

SEQ ID NO: 1489088 - DNA, 15 bp, Homo sapiens
attattttactggaa

SEQ ID NO: 1489089 - DNA, 15 bp, Homo sapiens
ttattttactggaaa

SEQ ID NO: 1489090 - DNA, 15 bp, Homo sapiens
tattttactggaaac

SEQ ID NO: 1489091 - DNA, 15 bp, Homo sapiens
attttactggaaact

SEQ ID NO: 1489092 - DNA, 15 bp, Homo sapiens
ttttactggaaactc

SEQ ID NO: 1489093 - DNA, 15 bp, Homo sapiens
tttactggaaactcc

SEQ ID NO: 1489094 - DNA, 15 bp, Homo sapiens
ttactggaaactcca

SEQ ID NO: 1489095 - DNA, 15 bp, Homo sapiens
tactggaaactccaa

SEQ ID NO: 1489096 - DNA, 15 bp, Homo sapiens
actggaaactccaag

SEQ ID NO: 1489097 - DNA, 15 bp, Homo sapiens
ctggaaactccaagg

SEQ ID NO: 1489098 - DNA, 15 bp, Homo sapiens
tggaaactccaaggt

SEQ ID NO: 1489099 - DNA, 15 bp, Homo sapiens
ggaaactccaaggtt

SEQ ID NO: 1489100 - DNA, 15 bp, Homo sapiens
gaaactccaaggttc

SEQ ID NO: 1489101 - DNA, 15 bp, Homo sapiens
aaactccaaggttca

SEQ ID NO: 1489102 - DNA, 15 bp, Homo sapiens
aactccaaggttcat

SEQ ID NO: 1489103 - DNA, 15 bp, Homo sapiens
actccaaggttcatg

SEQ ID NO: 1489104 - DNA, 15 bp, Homo sapiens
ctccaaggttcatga

SEQ ID NO: 1489105 - DNA, 15 bp, Homo sapiens
tccaaggttcatgaa

SEQ ID NO: 1489106 - DNA, 15 bp, Homo sapiens
ccaaggttcatgaat

SEQ ID NO: 1489107 - DNA, 15 bp, Homo sapiens
caaggttcatgaatg

SEQ ID NO: 1489108 - DNA, 15 bp, Homo sapiens
aaggttcatgaatga

SEQ ID NO: 1489109 - DNA, 15 bp, Homo sapiens
aggttcatgaatgat

SEQ ID NO: 1489110 - DNA, 15 bp, Homo sapiens
ggttcatgaatgata

SEQ ID NO: 1489111 - DNA, 15 bp, Homo sapiens
gttcatgaatgataa

SEQ ID NO: 1489112 - DNA, 15 bp, Homo sapiens
ttcatgaatgataaa

SEQ ID NO: 1489113 - DNA, 15 bp, Homo sapiens
tcatgaatgataaac

SEQ ID NO: 1489114 - DNA, 15 bp, Homo sapiens
catgaatgataaact

SEQ ID NO: 1489115 - DNA, 15 bp, Homo sapiens
atgaatgataaacta

SEQ ID NO: 1489116 - DNA, 15 bp, Homo sapiens
tgaatgataaactaa

SEQ ID NO: 1489117 - DNA, 15 bp, Homo sapiens
gaatgataaactaag

SEQ ID NO: 1489118 - DNA, 15 bp, Homo sapiens
aatgataaactaaga

SEQ ID NO: 1489119 - DNA, 15 bp, Homo sapiens
atgataaactaagaa

SEQ ID NO: 1489120 - DNA, 15 bp, Homo sapiens
tgataaactaagaac

SEQ ID NO: 1489121 - DNA, 15 bp, Homo sapiens
gataaactaagaacg

SEQ ID NO: 1489122 - DNA, 15 bp, Homo sapiens
ataaactaagaacgt

SEQ ID NO: 1489123 - DNA, 15 bp, Homo sapiens
taaactaagaacgta

SEQ ID NO: 1489124 - DNA, 15 bp, Homo sapiens
aaactaagaacgtaa

SEQ ID NO: 1489125 - DNA, 15 bp, Homo sapiens
aactaagaacgtaag

SEQ ID NO: 1489126 - DNA, 15 bp, Homo sapiens
actaagaacgtaagc

SEQ ID NO: 1489127 - DNA, 15 bp, Homo sapiens
ctaagaacgtaagcc

SEQ ID NO: 1489128 - DNA, 15 bp, Homo sapiens
taagaacgtaagcca

SEQ ID NO: 1489129 - DNA, 15 bp, Homo sapiens
aagaacgtaagccat

SEQ ID NO: 1489130 - DNA, 15 bp, Homo sapiens
agaacgtaagccatt

SEQ ID NO: 1489131 - DNA, 15 bp, Homo sapiens
gaacgtaagccattc

SEQ ID NO: 1489132 - DNA, 15 bp, Homo sapiens
aacgtaagccattct

SEQ ID NO: 1489133 - DNA, 15 bp, Homo sapiens
acgtaagccattctc

SEQ ID NO: 1489134 - DNA, 15 bp, Homo sapiens
cgtaagccattctct

SEQ ID NO: 1489135 - DNA, 15 bp, Homo sapiens
gtaagccattctcta

SEQ ID NO: 1489136 - DNA, 15 bp, Homo sapiens
taagccattctctac

SEQ ID NO: 1489137 - DNA, 15 bp, Homo sapiens
aagccattctctaca

SEQ ID NO: 1489138 - DNA, 15 bp, Homo sapiens
agccattctctacag

SEQ ID NO: 1489139 - DNA, 15 bp, Homo sapiens
gccattctctacagc

SEQ ID NO: 1489140 - DNA, 15 bp, Homo sapiens
ccattctctacagca

SEQ ID NO: 1489141 - DNA, 15 bp, Homo sapiens
cattctctacagcag

SEQ ID NO: 1489142 - DNA, 15 bp, Homo sapiens
attctctacagcaga

SEQ ID NO: 1489143 - DNA, 15 bp, Homo sapiens
ttctctacagcagaa

SEQ ID NO: 1489144 - DNA, 15 bp, Homo sapiens
tctctacagcagaag

SEQ ID NO: 1489145 - DNA, 15 bp, Homo sapiens
ctctacagcagaaga

SEQ ID NO: 1489146 - DNA, 15 bp, Homo sapiens
tctacagcagaagat

SEQ ID NO: 1489147 - DNA, 15 bp, Homo sapiens
ctacagcagaagatg

SEQ ID NO: 1489148 - DNA, 15 bp, Homo sapiens
tacagcagaagatgc

SEQ ID NO: 1489149 - DNA, 15 bp, Homo sapiens
acagcagaagatgct

SEQ ID NO: 1489150 - DNA, 15 bp, Homo sapiens
cagcagaagatgcta

SEQ ID NO: 1489151 - DNA, 15 bp, Homo sapiens
agcagaagatgctac

SEQ ID NO: 1489152 - DNA, 15 bp, Homo sapiens
gcagaagatgctacc

SEQ ID NO: 1489153 - DNA, 15 bp, Homo sapiens
cagaagatgctacct

SEQ ID NO: 1489154 - DNA, 15 bp, Homo sapiens
agaagatgctacctg

SEQ ID NO: 1489155 - DNA, 15 bp, Homo sapiens
gaagatgctacctga

SEQ ID NO: 1489156 - DNA, 15 bp, Homo sapiens
aagatgctacctgat

SEQ ID NO: 1489157 - DNA, 15 bp, Homo sapiens
agatgctacctgatt

SEQ ID NO: 1489158 - DNA, 15 bp, Homo sapiens
gatgctacctgattc

SEQ ID NO: 1489159 - DNA, 15 bp, Homo sapiens
atgctacctgattcc

SEQ ID NO: 1489160 - DNA, 15 bp, Homo sapiens
tgctacctgattcct

SEQ ID NO: 1489161 - DNA, 15 bp, Homo sapiens
gctacctgattcctg

SEQ ID NO: 1489162 - DNA, 15 bp, Homo sapiens
ctacctgattcctga

SEQ ID NO: 1489163 - DNA, 15 bp, Homo sapiens
tacctgattcctgaa

SEQ ID NO: 1489164 - DNA, 15 bp, Homo sapiens
acctgattcctgaaa

SEQ ID NO: 1489165 - DNA, 15 bp, Homo sapiens
cctgattcctgaaat

SEQ ID NO: 1489166 - DNA, 15 bp, Homo sapiens
ctgattcctgaaatg

SEQ ID NO: 1489167 - DNA, 15 bp, Homo sapiens
tgattcctgaaatgt

SEQ ID NO: 1489168 - DNA, 15 bp, Homo sapiens
gattcctgaaatgtc

SEQ ID NO: 1489169 - DNA, 15 bp, Homo sapiens
attcctgaaatgtca

SEQ ID NO: 1489170 - DNA, 15 bp, Homo sapiens
ttcctgaaatgtcat

SEQ ID NO: 1489171 - DNA, 15 bp, Homo sapiens
tcctgaaatgtcatc

SEQ ID NO: 1489172 - DNA, 15 bp, Homo sapiens
cctgaaatgtcatct

SEQ ID NO: 1489173 - DNA, 15 bp, Homo sapiens
ctgaaatgtcatctg

SEQ ID NO: 1489174 - DNA, 15 bp, Homo sapiens
tgaaatgtcatctgt

SEQ ID NO: 1489175 - DNA, 15 bp, Homo sapiens
gaaatgtcatctgtt

SEQ ID NO: 1489176 - DNA, 15 bp, Homo sapiens
aaatgtcatctgttt

SEQ ID NO: 1489177 - DNA, 15 bp, Homo sapiens
aatgtcatctgtttt

SEQ ID NO: 1489178 - DNA, 15 bp, Homo sapiens
atgtcatctgttttt

SEQ ID NO: 1489179 - DNA, 15 bp, Homo sapiens
tgtcatctgtttttg

SEQ ID NO: 1489180 - DNA, 15 bp, Homo sapiens
gtcatctgtttttgt

SEQ ID NO: 1489181 - DNA, 15 bp, Homo sapiens
tcatctgtttttgta

SEQ ID NO: 1489182 - DNA, 15 bp, Homo sapiens
catctgtttttgtag

SEQ ID NO: 1489183 - DNA, 15 bp, Homo sapiens
atctgtttttgtagc

SEQ ID NO: 1489184 - DNA, 15 bp, Homo sapiens
tctgtttttgtagca

SEQ ID NO: 1489185 - DNA, 15 bp, Homo sapiens
ctgtttttgtagcag

SEQ ID NO: 1489186 - DNA, 15 bp, Homo sapiens
tgtttttgtagcagg

SEQ ID NO: 1489187 - DNA, 15 bp, Homo sapiens
gtttttgtagcagga

SEQ ID NO: 1489188 - DNA, 15 bp, Homo sapiens
tttttgtagcaggac

SEQ ID NO: 1489189 - DNA, 15 bp, Homo sapiens
ttttgtagcaggact

SEQ ID NO: 1489190 - DNA, 15 bp, Homo sapiens
tttgtagcaggactg

SEQ ID NO: 1489191 - DNA, 15 bp, Homo sapiens
ttgtagcaggactgt

SEQ ID NO: 1489192 - DNA, 15 bp, Homo sapiens
tgtagcaggactgtg

SEQ ID NO: 1489193 - DNA, 15 bp, Homo sapiens
gtagcaggactgtgg

SEQ ID NO: 1489194 - DNA, 15 bp, Homo sapiens
tagcaggactgtggt

SEQ ID NO: 1489195 - DNA, 15 bp, Homo sapiens
agcaggactgtggta

SEQ ID NO: 1489196 - DNA, 15 bp, Homo sapiens
gcaggactgtggtac

SEQ ID NO: 1489197 - DNA, 15 bp, Homo sapiens
caggactgtggtaca

SEQ ID NO: 1489198 - DNA, 15 bp, Homo sapiens
aggactgtggtacat

SEQ ID NO: 1489199 - DNA, 15 bp, Homo sapiens
ggactgtggtacatg

SEQ ID NO: 1489200 - DNA, 15 bp, Homo sapiens
gactgtggtacatgt

SEQ ID NO: 1489201 - DNA, 15 bp, Homo sapiens
actgtggtacatgtt

SEQ ID NO: 1489202 - DNA, 15 bp, Homo sapiens
ctgtggtacatgttc

SEQ ID NO: 1489203 - DNA, 15 bp, Homo sapiens
tgtggtacatgttct

SEQ ID NO: 1489204 - DNA, 15 bp, Homo sapiens
gtggtacatgttctt

SEQ ID NO: 1489205 - DNA, 15 bp, Homo sapiens
tggtacatgttcttc

SEQ ID NO: 1489206 - DNA, 15 bp, Homo sapiens
ggtacatgttcttca

SEQ ID NO: 1489207 - DNA, 15 bp, Homo sapiens
gtacatgttcttcac

SEQ ID NO: 1489208 - DNA, 15 bp, Homo sapiens
tacatgttcttcact

SEQ ID NO: 1489209 - DNA, 15 bp, Homo sapiens
acatgttcttcactc

SEQ ID NO: 1489210 - DNA, 15 bp, Homo sapiens
catgttcttcactct

SEQ ID NO: 1489211 - DNA, 15 bp, Homo sapiens
atgttcttcactctt

SEQ ID NO: 1489212 - DNA, 15 bp, Homo sapiens
tgttcttcactctta

SEQ ID NO: 1489213 - DNA, 15 bp, Homo sapiens
gttcttcactcttat

SEQ ID NO: 1489214 - DNA, 15 bp, Homo sapiens
ttcttcactcttatc

SEQ ID NO: 1489215 - DNA, 15 bp, Homo sapiens
tcttcactcttatca

SEQ ID NO: 1489216 - DNA, 15 bp, Homo sapiens
cttcactcttatcac

SEQ ID NO: 1489217 - DNA, 15 bp, Homo sapiens
ttcactcttatcacc

SEQ ID NO: 1489218 - DNA, 15 bp, Homo sapiens
tcactcttatcacca

SEQ ID NO: 1489219 - DNA, 15 bp, Homo sapiens
cactcttatcaccaa

SEQ ID NO: 1489220 - DNA, 15 bp, Homo sapiens
actcttatcaccaaa

SEQ ID NO: 1489221 - DNA, 15 bp, Homo sapiens
ctcttatcaccaaaa

SEQ ID NO: 1489222 - DNA, 15 bp, Homo sapiens
tcttatcaccaaaag

SEQ ID NO: 1489223 - DNA, 15 bp, Homo sapiens
cttatcaccaaaaga

SEQ ID NO: 1489224 - DNA, 15 bp, Homo sapiens
ttatcaccaaaagac

SEQ ID NO: 1489225 - DNA, 15 bp, Homo sapiens
tatcaccaaaagaca

SEQ ID NO: 1489226 - DNA, 15 bp, Homo sapiens
atcaccaaaagacac

SEQ ID NO: 1489227 - DNA, 15 bp, Homo sapiens
tcaccaaaagacact

SEQ ID NO: 1489228 - DNA, 15 bp, Homo sapiens
caccaaaagacactt

SEQ ID NO: 1489229 - DNA, 15 bp, Homo sapiens
accaaaagacactta

SEQ ID NO: 1489230 - DNA, 15 bp, Homo sapiens
ccaaaagacacttag

SEQ ID NO: 1489231 - DNA, 15 bp, Homo sapiens
caaaagacacttagg

SEQ ID NO: 1489232 - DNA, 15 bp, Homo sapiens
aaaagacacttaggg

SEQ ID NO: 1489233 - DNA, 15 bp, Homo sapiens
aaagacacttagggg

SEQ ID NO: 1489234 - DNA, 15 bp, Homo sapiens
aagacacttaggggt

SEQ ID NO: 1489235 - DNA, 15 bp, Homo sapiens
agacacttaggggtc

SEQ ID NO: 1489236 - DNA, 15 bp, Homo sapiens
gacacttaggggtca

SEQ ID NO: 1489237 - DNA, 15 bp, Homo sapiens
acacttaggggtcat

SEQ ID NO: 1489238 - DNA, 15 bp, Homo sapiens
cacttaggggtcata

SEQ ID NO: 1489239 - DNA, 15 bp, Homo sapiens
acttaggggtcatag

SEQ ID NO: 1489240 - DNA, 15 bp, Homo sapiens
cttaggggtcatagg

SEQ ID NO: 1489241 - DNA, 15 bp, Homo sapiens
ttaggggtcataggt

SEQ ID NO: 1489242 - DNA, 15 bp, Homo sapiens
taggggtcataggtg

SEQ ID NO: 1489243 - DNA, 15 bp, Homo sapiens
aggggtcataggtgg

SEQ ID NO: 1489244 - DNA, 15 bp, Homo sapiens
ggggtcataggtggt

SEQ ID NO: 1489245 - DNA, 15 bp, Homo sapiens
gggtcataggtggta

SEQ ID NO: 1489246 - DNA, 15 bp, Homo sapiens
ggtcataggtggtaa

SEQ ID NO: 1489247 - DNA, 15 bp, Homo sapiens
gtcataggtggtaat

SEQ ID NO: 1489248 - DNA, 15 bp, Homo sapiens
tcataggtggtaatg

SEQ ID NO: 1489249 - DNA, 15 bp, Homo sapiens
cataggtggtaatgt

SEQ ID NO: 1489250 - DNA, 15 bp, Homo sapiens
ataggtggtaatgtg

SEQ ID NO: 1489251 - DNA, 15 bp, Homo sapiens
taggtggtaatgtgt

SEQ ID NO: 1489252 - DNA, 15 bp, Homo sapiens
aggtggtaatgtgtc

SEQ ID NO: 1489253 - DNA, 15 bp, Homo sapiens
ggtggtaatgtgtcc

SEQ ID NO: 1489254 - DNA, 15 bp, Homo sapiens
gtggtaatgtgtcct

SEQ ID NO: 1489255 - DNA, 15 bp, Homo sapiens
tggtaatgtgtcctc

SEQ ID NO: 1489256 - DNA, 15 bp, Homo sapiens
ggtaatgtgtcctct

SEQ ID NO: 1489257 - DNA, 15 bp, Homo sapiens
gtaatgtgtcctctg

SEQ ID NO: 1489258 - DNA, 15 bp, Homo sapiens
taatgtgtcctctgc

SEQ ID NO: 1489259 - DNA, 15 bp, Homo sapiens
aatgtgtcctctgct

SEQ ID NO: 1489260 - DNA, 15 bp, Homo sapiens
atgtgtcctctgctt

SEQ ID NO: 1489261 - DNA, 15 bp, Homo sapiens
tgtgtcctctgcttc

SEQ ID NO: 1489262 - DNA, 15 bp, Homo sapiens
gtgtcctctgcttcc

SEQ ID NO: 1489263 - DNA, 15 bp, Homo sapiens
tgtcctctgcttcca

SEQ ID NO: 1489264 - DNA, 15 bp, Homo sapiens
gtcctctgcttccag

SEQ ID NO: 1489265 - DNA, 15 bp, Homo sapiens
tcctctgcttccagt

SEQ ID NO: 1489266 - DNA, 15 bp, Homo sapiens
cctctgcttccagtg

SEQ ID NO: 1489267 - DNA, 15 bp, Homo sapiens
ctctgcttccagtgc

SEQ ID NO: 1489268 - DNA, 15 bp, Homo sapiens
tctgcttccagtgcg

SEQ ID NO: 1489269 - DNA, 15 bp, Homo sapiens
ctgcttccagtgcgg

SEQ ID NO: 1489270 - DNA, 15 bp, Homo sapiens
tgcttccagtgcgga

SEQ ID NO: 1489271 - DNA, 15 bp, Homo sapiens
gcttccagtgcggag

SEQ ID NO: 1489272 - DNA, 15 bp, Homo sapiens
cttccagtgcggagc

SEQ ID NO: 1489273 - DNA, 15 bp, Homo sapiens
ttccagtgcggagct

SEQ ID NO: 1489274 - DNA, 15 bp, Homo sapiens
tccagtgcggagctc

SEQ ID NO: 1489275 - DNA, 15 bp, Homo sapiens
ccagtgcggagctca

SEQ ID NO: 1489276 - DNA, 15 bp, Homo sapiens
cagtgcggagctcaa

SEQ ID NO: 1489277 - DNA, 15 bp, Homo sapiens
agtgcggagctcaag

SEQ ID NO: 1489278 - DNA, 15 bp, Homo sapiens
gtgcggagctcaagg

SEQ ID NO: 1489279 - DNA, 15 bp, Homo sapiens
tgcggagctcaagga

SEQ ID NO: 1489280 - DNA, 15 bp, Homo sapiens
gcggagctcaaggaa

SEQ ID NO: 1489281 - DNA, 15 bp, Homo sapiens
cggagctcaaggaat

SEQ ID NO: 1489282 - DNA, 15 bp, Homo sapiens
ggagctcaaggaatt

SEQ ID NO: 1489283 - DNA, 15 bp, Homo sapiens
gagctcaaggaattt

SEQ ID NO: 1489284 - DNA, 15 bp, Homo sapiens
agctcaaggaatttc

SEQ ID NO: 1489285 - DNA, 15 bp, Homo sapiens
gctcaaggaatttca

SEQ ID NO: 1489286 - DNA, 15 bp, Homo sapiens
ctcaaggaatttcat

SEQ ID NO: 1489287 - DNA, 15 bp, Homo sapiens
tcaaggaatttcatg

SEQ ID NO: 1489288 - DNA, 15 bp, Homo sapiens
caaggaatttcatgg

SEQ ID NO: 1489289 - DNA, 15 bp, Homo sapiens
aaggaatttcatgga

SEQ ID NO: 1489290 - DNA, 15 bp, Homo sapiens
aggaatttcatggag

SEQ ID NO: 1489291 - DNA, 15 bp, Homo sapiens
ggaatttcatggagt

SEQ ID NO: 1489292 - DNA, 15 bp, Homo sapiens
gaatttcatggagtc

SEQ ID NO: 1489293 - DNA, 15 bp, Homo sapiens
aatttcatggagtca

SEQ ID NO: 1489294 - DNA, 15 bp, Homo sapiens
atttcatggagtcag

SEQ ID NO: 1489295 - DNA, 15 bp, Homo sapiens
tttcatggagtcagg

SEQ ID NO: 1489296 - DNA, 15 bp, Homo sapiens
ttcatggagtcaggg

SEQ ID NO: 1489297 - DNA, 15 bp, Homo sapiens
tcatggagtcaggga

SEQ ID NO: 1489298 - DNA, 15 bp, Homo sapiens
catggagtcagggac

SEQ ID NO: 1489299 - DNA, 15 bp, Homo sapiens
atggagtcagggaca

SEQ ID NO: 1489300 - DNA, 15 bp, Homo sapiens
tggagtcagggacag

SEQ ID NO: 1489301 - DNA, 15 bp, Homo sapiens
ggagtcagggacagc

SEQ ID NO: 1489302 - DNA, 15 bp, Homo sapiens
gagtcagggacagct

SEQ ID NO: 1489303 - DNA, 15 bp, Homo sapiens
agtcagggacagctg

SEQ ID NO: 1489304 - DNA, 15 bp, Homo sapiens
gtcagggacagctgt

SEQ ID NO: 1489305 - DNA, 15 bp, Homo sapiens
tcagggacagctgtc

SEQ ID NO: 1489306 - DNA, 15 bp, Homo sapiens
cagggacagctgtct

SEQ ID NO: 1489307 - DNA, 15 bp, Homo sapiens
agggacagctgtctg

SEQ ID NO: 1489308 - DNA, 15 bp, Homo sapiens
gggacagctgtctga

SEQ ID NO: 1489309 - DNA, 15 bp, Homo sapiens
ggacagctgtctgaa

SEQ ID NO: 1489310 - DNA, 15 bp, Homo sapiens
gacagctgtctgaaa

SEQ ID NO: 1489311 - DNA, 15 bp, Homo sapiens
acagctgtctgaaag

SEQ ID NO: 1489312 - DNA, 15 bp, Homo sapiens
cagctgtctgaaagg

SEQ ID NO: 1489313 - DNA, 15 bp, Homo sapiens
agctgtctgaaaggt

SEQ ID NO: 1489314 - DNA, 15 bp, Homo sapiens
gctgtctgaaaggtt

SEQ ID NO: 1489315 - DNA, 15 bp, Homo sapiens
ctgtctgaaaggttg

SEQ ID NO: 1489316 - DNA, 15 bp, Homo sapiens
tgtctgaaaggttgc

SEQ ID NO: 1489317 - DNA, 15 bp, Homo sapiens
gtctgaaaggttgca

SEQ ID NO: 1489318 - DNA, 15 bp, Homo sapiens
tctgaaaggttgcaa

SEQ ID NO: 1489319 - DNA, 15 bp, Homo sapiens
ctgaaaggttgcaat

SEQ ID NO: 1489320 - DNA, 15 bp, Homo sapiens
tgaaaggttgcaatg

SEQ ID NO: 1489321 - DNA, 15 bp, Homo sapiens
gaaaggttgcaatgt

SEQ ID NO: 1489322 - DNA, 15 bp, Homo sapiens
aaaggttgcaatgtc

SEQ ID NO: 1489323 - DNA, 15 bp, Homo sapiens
aaggttgcaatgtca

SEQ ID NO: 1489324 - DNA, 15 bp, Homo sapiens
aggttgcaatgtcac

SEQ ID NO: 1489325 - DNA, 15 bp, Homo sapiens
ggttgcaatgtcacc

SEQ ID NO: 1489326 - DNA, 15 bp, Homo sapiens
gttgcaatgtcaccc

SEQ ID NO: 1489327 - DNA, 15 bp, Homo sapiens
ttgcaatgtcaccct

SEQ ID NO: 1489328 - DNA, 15 bp, Homo sapiens
tgcaatgtcaccctt

SEQ ID NO: 1489329 - DNA, 15 bp, Homo sapiens
gcaatgtcacccttt

SEQ ID NO: 1489330 - DNA, 15 bp, Homo sapiens
caatgtcaccctttt

SEQ ID NO: 1489331 - DNA, 15 bp, Homo sapiens
aatgtcacccttttc

SEQ ID NO: 1489332 - DNA, 15 bp, Homo sapiens
atgtcacccttttca

SEQ ID NO: 1489333 - DNA, 15 bp, Homo sapiens
tgtcacccttttcag

SEQ ID NO: 1489334 - DNA, 15 bp, Homo sapiens
gtcacccttttcagc

SEQ ID NO: 1489335 - DNA, 15 bp, Homo sapiens
tcacccttttcagct

SEQ ID NO: 1489336 - DNA, 15 bp, Homo sapiens
cacccttttcagctc

SEQ ID NO: 1489337 - DNA, 15 bp, Homo sapiens
acccttttcagctca

SEQ ID NO: 1489338 - DNA, 15 bp, Homo sapiens
cccttttcagctcag

SEQ ID NO: 1489339 - DNA, 15 bp, Homo sapiens
ccttttcagctcaga

SEQ ID NO: 1489340 - DNA, 15 bp, Homo sapiens
cttttcagctcagaa

SEQ ID NO: 1489341 - DNA, 15 bp, Homo sapiens
ttttcagctcagaac

SEQ ID NO: 1489342 - DNA, 15 bp, Homo sapiens
tttcagctcagaacc

SEQ ID NO: 1489343 - DNA, 15 bp, Homo sapiens
ttcagctcagaacca

SEQ ID NO: 1489344 - DNA, 15 bp, Homo sapiens
tcagctcagaaccat

SEQ ID NO: 1489345 - DNA, 15 bp, Homo sapiens
cagctcagaaccata

SEQ ID NO: 1489346 - DNA, 15 bp, Homo sapiens
agctcagaaccataa

SEQ ID NO: 1489347 - DNA, 15 bp, Homo sapiens
gctcagaaccataat

SEQ ID NO: 1489348 - DNA, 15 bp, Homo sapiens
ctcagaaccataatt

SEQ ID NO: 1489349 - DNA, 15 bp, Homo sapiens
tcagaaccataattc

SEQ ID NO: 1489350 - DNA, 15 bp, Homo sapiens
cagaaccataattcc

SEQ ID NO: 1489351 - DNA, 15 bp, Homo sapiens
agaaccataattcct

SEQ ID NO: 1489352 - DNA, 15 bp, Homo sapiens
gaaccataattcctt

SEQ ID NO: 1489353 - DNA, 15 bp, Homo sapiens
aaccataattccttg

SEQ ID NO: 1489354 - DNA, 15 bp, Homo sapiens
accataattccttga

SEQ ID NO: 1489355 - DNA, 15 bp, Homo sapiens
ccataattccttgag

SEQ ID NO: 1489356 - DNA, 15 bp, Homo sapiens
cataattccttgagc

SEQ ID NO: 1489357 - DNA, 15 bp, Homo sapiens
ataattccttgagcc

SEQ ID NO: 1489358 - DNA, 15 bp, Homo sapiens
taattccttgagccc

SEQ ID NO: 1489359 - DNA, 15 bp, Homo sapiens
aattccttgagccca

SEQ ID NO: 1489360 - DNA, 15 bp, Homo sapiens
attccttgagcccag

SEQ ID NO: 1489361 - DNA, 15 bp, Homo sapiens
ttccttgagcccaga

SEQ ID NO: 1489362 - DNA, 15 bp, Homo sapiens
tccttgagcccagat

SEQ ID NO: 1489363 - DNA, 15 bp, Homo sapiens
ccttgagcccagata

SEQ ID NO: 1489364 - DNA, 15 bp, Homo sapiens
cttgagcccagataa

SEQ ID NO: 1489365 - DNA, 15 bp, Homo sapiens
ttgagcccagataac

SEQ ID NO: 1489366 - DNA, 15 bp, Homo sapiens
tgagcccagataaca

SEQ ID NO: 1489367 - DNA, 15 bp, Homo sapiens
gagcccagataacag

SEQ ID NO: 1489368 - DNA, 15 bp, Homo sapiens
agcccagataacagt

SEQ ID NO: 1489369 - DNA, 15 bp, Homo sapiens
gcccagataacagtt

SEQ ID NO: 1489370 - DNA, 15 bp, Homo sapiens
cccagataacagttc

SEQ ID NO: 1489371 - DNA, 15 bp, Homo sapiens
ccagataacagttca

SEQ ID NO: 1489372 - DNA, 15 bp, Homo sapiens
cagataacagttcaa

SEQ ID NO: 1489373 - DNA, 15 bp, Homo sapiens
agataacagttcaaa

SEQ ID NO: 1489374 - DNA, 15 bp, Homo sapiens
gataacagttcaaaa

SEQ ID NO: 1489375 - DNA, 15 bp, Homo sapiens
ataacagttcaaaat

SEQ ID NO: 1489376 - DNA, 15 bp, Homo sapiens
taacagttcaaaatt

SEQ ID NO: 1489377 - DNA, 15 bp, Homo sapiens
aacagttcaaaattt

SEQ ID NO: 1489378 - DNA, 15 bp, Homo sapiens
acagttcaaaattta

SEQ ID NO: 1489379 - DNA, 15 bp, Homo sapiens
cagttcaaaatttag

SEQ ID NO: 1489380 - DNA, 15 bp, Homo sapiens
agttcaaaatttagg

SEQ ID NO: 1489381 - DNA, 15 bp, Homo sapiens
gttcaaaatttagga

SEQ ID NO: 1489382 - DNA, 15 bp, Homo sapiens
ttcaaaatttaggat

SEQ ID NO: 1489383 - DNA, 15 bp, Homo sapiens
tcaaaatttaggata

SEQ ID NO: 1489384 - DNA, 15 bp, Homo sapiens
caaaatttaggatat

SEQ ID NO: 1489385 - DNA, 15 bp, Homo sapiens
aaaatttaggatatg

SEQ ID NO: 1489386 - DNA, 15 bp, Homo sapiens
aaatttaggatatga

SEQ ID NO: 1489387 - DNA, 15 bp, Homo sapiens
aatttaggatatgaa

SEQ ID NO: 1489388 - DNA, 15 bp, Homo sapiens
atttaggatatgaag

SEQ ID NO: 1489389 - DNA, 15 bp, Homo sapiens
tttaggatatgaagc

SEQ ID NO: 1489390 - DNA, 15 bp, Homo sapiens
ttaggatatgaagcc

SEQ ID NO: 1489391 - DNA, 15 bp, Homo sapiens
taggatatgaagcca

SEQ ID NO: 1489392 - DNA, 15 bp, Homo sapiens
aggatatgaagccaa

SEQ ID NO: 1489393 - DNA, 15 bp, Homo sapiens
ggatatgaagccaaa

SEQ ID NO: 1489394 - DNA, 15 bp, Homo sapiens
gatatgaagccaaag

SEQ ID NO: 1489395 - DNA, 15 bp, Homo sapiens
atatgaagccaaagc

SEQ ID NO: 1489396 - DNA, 15 bp, Homo sapiens
tatgaagccaaagct

SEQ ID NO: 1489397 - DNA, 15 bp, Homo sapiens
atgaagccaaagctg

SEQ ID NO: 1489398 - DNA, 15 bp, Homo sapiens
tgaagccaaagctga

SEQ ID NO: 1489399 - DNA, 15 bp, Homo sapiens
gaagccaaagctgaa

SEQ ID NO: 1489400 - DNA, 15 bp, Homo sapiens
aagccaaagctgaac

SEQ ID NO: 1489401 - DNA, 15 bp, Homo sapiens
agccaaagctgaact

SEQ ID NO: 1489402 - DNA, 15 bp, Homo sapiens
gccaaagctgaactc

SEQ ID NO: 1489403 - DNA, 15 bp, Homo sapiens
ccaaagctgaactct

SEQ ID NO: 1489404 - DNA, 15 bp, Homo sapiens
caaagctgaactcta

SEQ ID NO: 1489405 - DNA, 15 bp, Homo sapiens
aaagctgaactctag

SEQ ID NO: 1489406 - DNA, 15 bp, Homo sapiens
aagctgaactctagc

SEQ ID NO: 1489407 - DNA, 15 bp, Homo sapiens
agctgaactctagct

SEQ ID NO: 1489408 - DNA, 15 bp, Homo sapiens
gctgaactctagctg

SEQ ID NO: 1489409 - DNA, 15 bp, Homo sapiens
ctgaactctagctga

SEQ ID NO: 1489410 - DNA, 15 bp, Homo sapiens
tgaactctagctgaa

SEQ ID NO: 1489411 - DNA, 15 bp, Homo sapiens
gaactctagctgaaa

SEQ ID NO: 1489412 - DNA, 15 bp, Homo sapiens
aactctagctgaaat

SEQ ID NO: 1489413 - DNA, 15 bp, Homo sapiens
actctagctgaaatc

SEQ ID NO: 1489414 - DNA, 15 bp, Homo sapiens
ctctagctgaaatca

SEQ ID NO: 1489415 - DNA, 15 bp, Homo sapiens
tctagctgaaatcaa

SEQ ID NO: 1489416 - DNA, 15 bp, Homo sapiens
ctagctgaaatcaag

SEQ ID NO: 1489417 - DNA, 15 bp, Homo sapiens
tagctgaaatcaaga

SEQ ID NO: 1489418 - DNA, 15 bp, Homo sapiens
agctgaaatcaagag

SEQ ID NO: 1489419 - DNA, 15 bp, Homo sapiens
gctgaaatcaagagt

SEQ ID NO: 1489420 - DNA, 15 bp, Homo sapiens
ctgaaatcaagagtg

SEQ ID NO: 1489421 - DNA, 15 bp, Homo sapiens
tgaaatcaagagtgg

SEQ ID NO: 1489422 - DNA, 15 bp, Homo sapiens
gaaatcaagagtgga

SEQ ID NO: 1489423 - DNA, 15 bp, Homo sapiens
aaatcaagagtggat

SEQ ID NO: 1489424 - DNA, 15 bp, Homo sapiens
aatcaagagtggata

SEQ ID NO: 1489425 - DNA, 15 bp, Homo sapiens
atcaagagtggatat

SEQ ID NO: 1489426 - DNA, 15 bp, Homo sapiens
tcaagagtggatata

SEQ ID NO: 1489427 - DNA, 15 bp, Homo sapiens
caagagtggatataa

SEQ ID NO: 1489428 - DNA, 15 bp, Homo sapiens
aagagtggatataat

SEQ ID NO: 1489429 - DNA, 15 bp, Homo sapiens
agagtggatataata

SEQ ID NO: 1489430 - DNA, 15 bp, Homo sapiens
gagtggatataataa

SEQ ID NO: 1489431 - DNA, 15 bp, Homo sapiens
agtggatataataac

SEQ ID NO: 1489432 - DNA, 15 bp, Homo sapiens
gtggatataataacc

SEQ ID NO: 1489433 - DNA, 15 bp, Homo sapiens
tggatataataacca

SEQ ID NO: 1489434 - DNA, 15 bp, Homo sapiens
ggatataataaccaa

SEQ ID NO: 1489435 - DNA, 15 bp, Homo sapiens
gatataataaccaag

SEQ ID NO: 1489436 - DNA, 15 bp, Homo sapiens
atataataaccaaga

SEQ ID NO: 1489437 - DNA, 15 bp, Homo sapiens
tataataaccaagaa

SEQ ID NO: 1489438 - DNA, 15 bp, Homo sapiens
ataataaccaagaaa

SEQ ID NO: 1489439 - DNA, 15 bp, Homo sapiens
taataaccaagaaac

SEQ ID NO: 1489440 - DNA, 15 bp, Homo sapiens
aataaccaagaaaca

SEQ ID NO: 1489441 - DNA, 15 bp, Homo sapiens
ataaccaagaaacaa

SEQ ID NO: 1489442 - DNA, 15 bp, Homo sapiens
taaccaagaaacaaa

SEQ ID NO: 1489443 - DNA, 15 bp, Homo sapiens
aaccaagaaacaaat

SEQ ID NO: 1489444 - DNA, 15 bp, Homo sapiens
accaagaaacaaatg

SEQ ID NO: 1489445 - DNA, 15 bp, Homo sapiens
ccaagaaacaaatgg

SEQ ID NO: 1489446 - DNA, 15 bp, Homo sapiens
caagaaacaaatggt

SEQ ID NO: 1489447 - DNA, 15 bp, Homo sapiens
aagaaacaaatggtt

SEQ ID NO: 1489448 - DNA, 15 bp, Homo sapiens
agaaacaaatggttc

SEQ ID NO: 1489449 - DNA, 15 bp, Homo sapiens
gaaacaaatggttct

SEQ ID NO: 1489450 - DNA, 15 bp, Homo sapiens
aaacaaatggttctg

SEQ ID NO: 1489451 - DNA, 15 bp, Homo sapiens
aacaaatggttctga

SEQ ID NO: 1489452 - DNA, 15 bp, Homo sapiens
acaaatggttctgac

SEQ ID NO: 1489453 - DNA, 15 bp, Homo sapiens
caaatggttctgaca

SEQ ID NO: 1489454 - DNA, 15 bp, Homo sapiens
aaatggttctgacaa

SEQ ID NO: 1489455 - DNA, 15 bp, Homo sapiens
aatggttctgacaag

SEQ ID NO: 1489456 - DNA, 15 bp, Homo sapiens
atggttctgacaagc

SEQ ID NO: 1489457 - DNA, 15 bp, Homo sapiens
tggttctgacaagca

SEQ ID NO: 1489458 - DNA, 15 bp, Homo sapiens
ggttctgacaagcac

SEQ ID NO: 1489459 - DNA, 15 bp, Homo sapiens
gttctgacaagcaca

SEQ ID NO: 1489460 - DNA, 15 bp, Homo sapiens
ttctgacaagcacag

SEQ ID NO: 1489461 - DNA, 15 bp, Homo sapiens
tctgacaagcacagc

SEQ ID NO: 1489462 - DNA, 15 bp, Homo sapiens
ctgacaagcacagct

SEQ ID NO: 1489463 - DNA, 15 bp, Homo sapiens
tgacaagcacagctt

SEQ ID NO: 1489464 - DNA, 15 bp, Homo sapiens
gacaagcacagcttt

SEQ ID NO: 1489465 - DNA, 15 bp, Homo sapiens
acaagcacagcttta

SEQ ID NO: 1489466 - DNA, 15 bp, Homo sapiens
caagcacagctttac

SEQ ID NO: 1489467 - DNA, 15 bp, Homo sapiens
aagcacagctttact

SEQ ID NO: 1489468 - DNA, 15 bp, Homo sapiens
agcacagctttactc

SEQ ID NO: 1489469 - DNA, 15 bp, Homo sapiens
gcacagctttactct

SEQ ID NO: 1489470 - DNA, 15 bp, Homo sapiens
cacagctttactctg

SEQ ID NO: 1489471 - DNA, 15 bp, Homo sapiens
acagctttactctga

SEQ ID NO: 1489472 - DNA, 15 bp, Homo sapiens
cagctttactctgag

SEQ ID NO: 1489473 - DNA, 15 bp, Homo sapiens
agctttactctgagc

SEQ ID NO: 1489474 - DNA, 15 bp, Homo sapiens
gctttactctgagca

SEQ ID NO: 1489475 - DNA, 15 bp, Homo sapiens
ctttactctgagcat

SEQ ID NO: 1489476 - DNA, 15 bp, Homo sapiens
tttactctgagcatg

SEQ ID NO: 1489477 - DNA, 15 bp, Homo sapiens
ttactctgagcatga

SEQ ID NO: 1489478 - DNA, 15 bp, Homo sapiens
tactctgagcatgac

SEQ ID NO: 1489479 - DNA, 15 bp, Homo sapiens
actctgagcatgact

SEQ ID NO: 1489480 - DNA, 15 bp, Homo sapiens
ctctgagcatgactc

SEQ ID NO: 1489481 - DNA, 15 bp, Homo sapiens
tctgagcatgactca

SEQ ID NO: 1489482 - DNA, 15 bp, Homo sapiens
ctgagcatgactcaa

SEQ ID NO: 1489483 - DNA, 15 bp, Homo sapiens
tgagcatgactcaag

SEQ ID NO: 1489484 - DNA, 15 bp, Homo sapiens
gagcatgactcaagg

SEQ ID NO: 1489485 - DNA, 15 bp, Homo sapiens
agcatgactcaaggg

SEQ ID NO: 1489486 - DNA, 15 bp, Homo sapiens
gcatgactcaagggc

SEQ ID NO: 1489487 - DNA, 15 bp, Homo sapiens
catgactcaagggca

SEQ ID NO: 1489488 - DNA, 15 bp, Homo sapiens
atgactcaagggcat

SEQ ID NO: 1489489 - DNA, 15 bp, Homo sapiens
tgactcaagggcatc

SEQ ID NO: 1489490 - DNA, 15 bp, Homo sapiens
gactcaagggcatct

SEQ ID NO: 1489491 - DNA, 15 bp, Homo sapiens
actcaagggcatctg

SEQ ID NO: 1489492 - DNA, 15 bp, Homo sapiens
ctcaagggcatctgg

SEQ ID NO: 1489493 - DNA, 15 bp, Homo sapiens
tcaagggcatctggt

SEQ ID NO: 1489494 - DNA, 15 bp, Homo sapiens
caagggcatctggta

SEQ ID NO: 1489495 - DNA, 15 bp, Homo sapiens
aagggcatctggtag

SEQ ID NO: 1489496 - DNA, 15 bp, Homo sapiens
agggcatctggtaga

SEQ ID NO: 1489497 - DNA, 15 bp, Homo sapiens
gggcatctggtagaa

SEQ ID NO: 1489498 - DNA, 15 bp, Homo sapiens
ggcatctggtagaaa

SEQ ID NO: 1489499 - DNA, 15 bp, Homo sapiens
gcatctggtagaaaa

SEQ ID NO: 1489500 - DNA, 15 bp, Homo sapiens
catctggtagaaaat

SEQ ID NO: 1489501 - DNA, 15 bp, Homo sapiens
atctggtagaaaatg

SEQ ID NO: 1489502 - DNA, 15 bp, Homo sapiens
tctggtagaaaatga

SEQ ID NO: 1489503 - DNA, 15 bp, Homo sapiens
ctggtagaaaatgaa

SEQ ID NO: 1489504 - DNA, 15 bp, Homo sapiens
tggtagaaaatgaag

SEQ ID NO: 1489505 - DNA, 15 bp, Homo sapiens
ggtagaaaatgaaga

SEQ ID NO: 1489506 - DNA, 15 bp, Homo sapiens
gtagaaaatgaagaa

SEQ ID NO: 1489507 - DNA, 15 bp, Homo sapiens
tagaaaatgaagaag

SEQ ID NO: 1489508 - DNA, 15 bp, Homo sapiens
agaaaatgaagaagg

SEQ ID NO: 1489509 - DNA, 15 bp, Homo sapiens
gaaaatgaagaagga

SEQ ID NO: 1489510 - DNA, 15 bp, Homo sapiens
aaaatgaagaaggat

SEQ ID NO: 1489511 - DNA, 15 bp, Homo sapiens
aaatgaagaaggatc

SEQ ID NO: 1489512 - DNA, 15 bp, Homo sapiens
aatgaagaaggatcc

SEQ ID NO: 1489513 - DNA, 15 bp, Homo sapiens
atgaagaaggatccc

SEQ ID NO: 1489514 - DNA, 15 bp, Homo sapiens
tgaagaaggatccca

SEQ ID NO: 1489515 - DNA, 15 bp, Homo sapiens
gaagaaggatcccag

SEQ ID NO: 1489516 - DNA, 15 bp, Homo sapiens
aagaaggatcccagc

SEQ ID NO: 1489517 - DNA, 15 bp, Homo sapiens
agaaggatcccagca

SEQ ID NO: 1489518 - DNA, 15 bp, Homo sapiens
gaaggatcccagcag

SEQ ID NO: 1489519 - DNA, 15 bp, Homo sapiens
aaggatcccagcaga

SEQ ID NO: 1489520 - DNA, 15 bp, Homo sapiens
aggatcccagcagat

SEQ ID NO: 1489521 - DNA, 15 bp, Homo sapiens
ggatcccagcagatg

SEQ ID NO: 1489522 - DNA, 15 bp, Homo sapiens
gatcccagcagatgt

SEQ ID NO: 1489523 - DNA, 15 bp, Homo sapiens
atcccagcagatgtt

SEQ ID NO: 1489524 - DNA, 15 bp, Homo sapiens
tcccagcagatgtta

SEQ ID NO: 1489525 - DNA, 15 bp, Homo sapiens
cccagcagatgttag

SEQ ID NO: 1489526 - DNA, 15 bp, Homo sapiens
ccagcagatgttagg

SEQ ID NO: 1489527 - DNA, 15 bp, Homo sapiens
cagcagatgttaggg

SEQ ID NO: 1489528 - DNA, 15 bp, Homo sapiens
agcagatgttagggc

SEQ ID NO: 1489529 - DNA, 15 bp, Homo sapiens
gcagatgttagggct

SEQ ID NO: 1489530 - DNA, 15 bp, Homo sapiens
cagatgttagggcta

SEQ ID NO: 1489531 - DNA, 15 bp, Homo sapiens
agatgttagggctag

SEQ ID NO: 1489532 - DNA, 15 bp, Homo sapiens
gatgttagggctagg

SEQ ID NO: 1489533 - DNA, 15 bp, Homo sapiens
atgttagggctaggg

SEQ ID NO: 1489534 - DNA, 15 bp, Homo sapiens
tgttagggctaggga

SEQ ID NO: 1489535 - DNA, 15 bp, Homo sapiens
gttagggctagggag

SEQ ID NO: 1489536 - DNA, 15 bp, Homo sapiens
ttagggctagggaga

SEQ ID NO: 1489537 - DNA, 15 bp, Homo sapiens
tagggctagggagat

SEQ ID NO: 1489538 - DNA, 15 bp, Homo sapiens
agggctagggagatc

SEQ ID NO: 1489539 - DNA, 15 bp, Homo sapiens
gggctagggagatcc

SEQ ID NO: 1489540 - DNA, 15 bp, Homo sapiens
ggctagggagatccc

SEQ ID NO: 1489541 - DNA, 15 bp, Homo sapiens
gctagggagatcccc

SEQ ID NO: 1489542 - DNA, 15 bp, Homo sapiens
ctagggagatcccct

SEQ ID NO: 1489543 - DNA, 15 bp, Homo sapiens
tagggagatcccctc

SEQ ID NO: 1489544 - DNA, 15 bp, Homo sapiens
agggagatcccctcg

SEQ ID NO: 1489545 - DNA, 15 bp, Homo sapiens
gggagatcccctcgg

SEQ ID NO: 1489546 - DNA, 15 bp, Homo sapiens
ggagatcccctcggt

SEQ ID NO: 1489547 - DNA, 15 bp, Homo sapiens
gagatcccctcggtt

SEQ ID NO: 1489548 - DNA, 15 bp, Homo sapiens
agatcccctcggttg

SEQ ID NO: 1489549 - DNA, 15 bp, Homo sapiens
gatcccctcggttgg

SEQ ID NO: 1489550 - DNA, 15 bp, Homo sapiens
atcccctcggttggg

SEQ ID NO: 1489551 - DNA, 15 bp, Homo sapiens
tcccctcggttgggg

SEQ ID NO: 1489552 - DNA, 15 bp, Homo sapiens
cccctcggttggggg

SEQ ID NO: 1489553 - DNA, 15 bp, Homo sapiens
ccctcggttggggga

SEQ ID NO: 1489554 - DNA, 15 bp, Homo sapiens
cctcggttgggggat

SEQ ID NO: 1489555 - DNA, 15 bp, Homo sapiens
ctcggttgggggatg

SEQ ID NO: 1489556 - DNA, 15 bp, Homo sapiens
tcggttgggggatgt

SEQ ID NO: 1489557 - DNA, 15 bp, Homo sapiens
cggttgggggatgta

SEQ ID NO: 1489558 - DNA, 15 bp, Homo sapiens
ggttgggggatgtaa

SEQ ID NO: 1489559 - DNA, 15 bp, Homo sapiens
gttgggggatgtaag

SEQ ID NO: 1489560 - DNA, 15 bp, Homo sapiens
ttgggggatgtaagt

SEQ ID NO: 1489561 - DNA, 15 bp, Homo sapiens
tgggggatgtaagtg

SEQ ID NO: 1489562 - DNA, 15 bp, Homo sapiens
gggggatgtaagtgt

SEQ ID NO: 1489563 - DNA, 15 bp, Homo sapiens
ggggatgtaagtgtt

SEQ ID NO: 1489564 - DNA, 15 bp, Homo sapiens
gggatgtaagtgttt

SEQ ID NO: 1489565 - DNA, 15 bp, Homo sapiens
ggatgtaagtgtttt

SEQ ID NO: 1489566 - DNA, 15 bp, Homo sapiens
gatgtaagtgtttta

SEQ ID NO: 1489567 - DNA, 15 bp, Homo sapiens
atgtaagtgttttaa

SEQ ID NO: 1489568 - DNA, 15 bp, Homo sapiens
tgtaagtgttttaat

SEQ ID NO: 1489569 - DNA, 15 bp, Homo sapiens
gtaagtgttttaata

SEQ ID NO: 1489570 - DNA, 15 bp, Homo sapiens
taagtgttttaatat

SEQ ID NO: 1489571 - DNA, 15 bp, Homo sapiens
aagtgttttaatatt

SEQ ID NO: 1489572 - DNA, 15 bp, Homo sapiens
agtgttttaatattg

SEQ ID NO: 1489573 - DNA, 15 bp, Homo sapiens
gtgttttaatattgt

SEQ ID NO: 1489574 - DNA, 15 bp, Homo sapiens
tgttttaatattgtg

SEQ ID NO: 1489575 - DNA, 15 bp, Homo sapiens
gttttaatattgtgt

SEQ ID NO: 1489576 - DNA, 15 bp, Homo sapiens
ttttaatattgtgtg

SEQ ID NO: 1489577 - DNA, 15 bp, Homo sapiens
tttaatattgtgtgg

SEQ ID NO: 1489578 - DNA, 15 bp, Homo sapiens
ttaatattgtgtggg

SEQ ID NO: 1489579 - DNA, 15 bp, Homo sapiens
taatattgtgtgggc

SEQ ID NO: 1489580 - DNA, 15 bp, Homo sapiens
aatattgtgtgggca

SEQ ID NO: 1489581 - DNA, 15 bp, Homo sapiens
atattgtgtgggcaa

SEQ ID NO: 1489582 - DNA, 15 bp, Homo sapiens
tattgtgtgggcaac

SEQ ID NO: 1489583 - DNA, 15 bp, Homo sapiens
attgtgtgggcaact

SEQ ID NO: 1489584 - DNA, 15 bp, Homo sapiens
ttgtgtgggcaactc

SEQ ID NO: 1489585 - DNA, 15 bp, Homo sapiens
tgtgtgggcaactct

SEQ ID NO: 1489586 - DNA, 15 bp, Homo sapiens
gtgtgggcaactctg

SEQ ID NO: 1489587 - DNA, 15 bp, Homo sapiens
tgtgggcaactctgc

SEQ ID NO: 1489588 - DNA, 15 bp, Homo sapiens
gtgggcaactctgct

SEQ ID NO: 1489589 - DNA, 15 bp, Homo sapiens
tgggcaactctgctt

SEQ ID NO: 1489590 - DNA, 15 bp, Homo sapiens
gggcaactctgcttt

SEQ ID NO: 1489591 - DNA, 15 bp, Homo sapiens
ggcaactctgctttg

SEQ ID NO: 1489592 - DNA, 15 bp, Homo sapiens
gcaactctgctttga

SEQ ID NO: 1489593 - DNA, 15 bp, Homo sapiens
caactctgctttgaa

SEQ ID NO: 1489594 - DNA, 15 bp, Homo sapiens
aactctgctttgaat

SEQ ID NO: 1489595 - DNA, 15 bp, Homo sapiens
actctgctttgaatg

SEQ ID NO: 1489596 - DNA, 15 bp, Homo sapiens
ctctgctttgaatgt

SEQ ID NO: 1489597 - DNA, 15 bp, Homo sapiens
tctgctttgaatgta

SEQ ID NO: 1489598 - DNA, 15 bp, Homo sapiens
ctgctttgaatgtat

SEQ ID NO: 1489599 - DNA, 15 bp, Homo sapiens
tgctttgaatgtatg

SEQ ID NO: 1489600 - DNA, 15 bp, Homo sapiens
gctttgaatgtatgt

SEQ ID NO: 1489601 - DNA, 15 bp, Homo sapiens
ctttgaatgtatgtc

SEQ ID NO: 1489602 - DNA, 15 bp, Homo sapiens
tttgaatgtatgtct

SEQ ID NO: 1489603 - DNA, 15 bp, Homo sapiens
ttgaatgtatgtctg

SEQ ID NO: 1489604 - DNA, 15 bp, Homo sapiens
tgaatgtatgtctgg

SEQ ID NO: 1489605 - DNA, 15 bp, Homo sapiens
gaatgtatgtctgga

SEQ ID NO: 1489606 - DNA, 15 bp, Homo sapiens
aatgtatgtctggag

SEQ ID NO: 1489607 - DNA, 15 bp, Homo sapiens
atgtatgtctggagg

SEQ ID NO: 1489608 - DNA, 15 bp, Homo sapiens
tgtatgtctggaggc

SEQ ID NO: 1489609 - DNA, 15 bp, Homo sapiens
gtatgtctggaggca

SEQ ID NO: 1489610 - DNA, 15 bp, Homo sapiens
tatgtctggaggcac

SEQ ID NO: 1489611 - DNA, 15 bp, Homo sapiens
atgtctggaggcacc

SEQ ID NO: 1489612 - DNA, 15 bp, Homo sapiens
tgtctggaggcacct

SEQ ID NO: 1489613 - DNA, 15 bp, Homo sapiens
gtctggaggcaccta

SEQ ID NO: 1489614 - DNA, 15 bp, Homo sapiens
tctggaggcacctac

SEQ ID NO: 1489615 - DNA, 15 bp, Homo sapiens
ctggaggcacctaca

SEQ ID NO: 1489616 - DNA, 15 bp, Homo sapiens
tggaggcacctacac

SEQ ID NO: 1489617 - DNA, 15 bp, Homo sapiens
ggaggcacctacacc

SEQ ID NO: 1489618 - DNA, 15 bp, Homo sapiens
gaggcacctacacca

SEQ ID NO: 1489619 - DNA, 15 bp, Homo sapiens
aggcacctacaccat

SEQ ID NO: 1489620 - DNA, 15 bp, Homo sapiens
ggcacctacaccatc

SEQ ID NO: 1489621 - DNA, 15 bp, Homo sapiens
gcacctacaccatcc

SEQ ID NO: 1489622 - DNA, 15 bp, Homo sapiens
cacctacaccatcca

SEQ ID NO: 1489623 - DNA, 15 bp, Homo sapiens
acctacaccatccaa

SEQ ID NO: 1489624 - DNA, 15 bp, Homo sapiens
cctacaccatccaaa

SEQ ID NO: 1489625 - DNA, 15 bp, Homo sapiens
ctacaccatccaaag

SEQ ID NO: 1489626 - DNA, 15 bp, Homo sapiens
tacaccatccaaagc

SEQ ID NO: 1489627 - DNA, 15 bp, Homo sapiens
acaccatccaaagcc

SEQ ID NO: 1489628 - DNA, 15 bp, Homo sapiens
caccatccaaagcct

SEQ ID NO: 1489629 - DNA, 15 bp, Homo sapiens
accatccaaagcctt

SEQ ID NO: 1489630 - DNA, 15 bp, Homo sapiens
ccatccaaagccttc

SEQ ID NO: 1489631 - DNA, 15 bp, Homo sapiens
catccaaagccttct

SEQ ID NO: 1489632 - DNA, 15 bp, Homo sapiens
atccaaagccttctg

SEQ ID NO: 1489633 - DNA, 15 bp, Homo sapiens
tccaaagccttctgg

SEQ ID NO: 1489634 - DNA, 15 bp, Homo sapiens
ccaaagccttctggt

SEQ ID NO: 1489635 - DNA, 15 bp, Homo sapiens
caaagccttctggtg

SEQ ID NO: 1489636 - DNA, 15 bp, Homo sapiens
aaagccttctggtgc

SEQ ID NO: 1489637 - DNA, 15 bp, Homo sapiens
aagccttctggtgca

SEQ ID NO: 1489638 - DNA, 15 bp, Homo sapiens
agccttctggtgcaa

SEQ ID NO: 1489639 - DNA, 15 bp, Homo sapiens
gccttctggtgcaaa

SEQ ID NO: 1489640 - DNA, 15 bp, Homo sapiens
ccttctggtgcaaaa

SEQ ID NO: 1489641 - DNA, 15 bp, Homo sapiens
cttctggtgcaaaag

SEQ ID NO: 1489642 - DNA, 15 bp, Homo sapiens
ttctggtgcaaaagc

SEQ ID NO: 1489643 - DNA, 15 bp, Homo sapiens
tctggtgcaaaagca

SEQ ID NO: 1489644 - DNA, 15 bp, Homo sapiens
ctggtgcaaaagcag

SEQ ID NO: 1489645 - DNA, 15 bp, Homo sapiens
tggtgcaaaagcagg

SEQ ID NO: 1489646 - DNA, 15 bp, Homo sapiens
ggtgcaaaagcagga

SEQ ID NO: 1489647 - DNA, 15 bp, Homo sapiens
gtgcaaaagcaggac

SEQ ID NO: 1489648 - DNA, 15 bp, Homo sapiens
tgcaaaagcaggact

SEQ ID NO: 1489649 - DNA, 15 bp, Homo sapiens
gcaaaagcaggactc

SEQ ID NO: 1489650 - DNA, 15 bp, Homo sapiens
caaaagcaggactcc

SEQ ID NO: 1489651 - DNA, 15 bp, Homo sapiens
aaaagcaggactcct

SEQ ID NO: 1489652 - DNA, 15 bp, Homo sapiens
aaagcaggactccta

SEQ ID NO: 1489653 - DNA, 15 bp, Homo sapiens
aagcaggactcctag

SEQ ID NO: 1489654 - DNA, 15 bp, Homo sapiens
agcaggactcctaga

SEQ ID NO: 1489655 - DNA, 15 bp, Homo sapiens
gcaggactcctagag

SEQ ID NO: 1489656 - DNA, 15 bp, Homo sapiens
caggactcctagagt

SEQ ID NO: 1489657 - DNA, 15 bp, Homo sapiens
aggactcctagagta

SEQ ID NO: 1489658 - DNA, 15 bp, Homo sapiens
ggactcctagagtat

SEQ ID NO: 1489659 - DNA, 15 bp, Homo sapiens
gactcctagagtata

SEQ ID NO: 1489660 - DNA, 15 bp, Homo sapiens
actcctagagtatat

SEQ ID NO: 1489661 - DNA, 15 bp, Homo sapiens
ctcctagagtatatt

SEQ ID NO: 1489662 - DNA, 15 bp, Homo sapiens
tcctagagtatattc

SEQ ID NO: 1489663 - DNA, 15 bp, Homo sapiens
cctagagtatattcc

SEQ ID NO: 1489664 - DNA, 15 bp, Homo sapiens
ctagagtatattcca

SEQ ID NO: 1489665 - DNA, 15 bp, Homo sapiens
tagagtatattccag

SEQ ID NO: 1489666 - DNA, 15 bp, Homo sapiens
agagtatattccagt

SEQ ID NO: 1489667 - DNA, 15 bp, Homo sapiens
gagtatattccagta

SEQ ID NO: 1489668 - DNA, 15 bp, Homo sapiens
agtatattccagtat

SEQ ID NO: 1489669 - DNA, 15 bp, Homo sapiens
gtatattccagtatt

SEQ ID NO: 1489670 - DNA, 15 bp, Homo sapiens
tatattccagtattt

SEQ ID NO: 1489671 - DNA, 15 bp, Homo sapiens
atattccagtatttt

SEQ ID NO: 1489672 - DNA, 15 bp, Homo sapiens
tattccagtattttt

SEQ ID NO: 1489673 - DNA, 15 bp, Homo sapiens
attccagtatttttt

SEQ ID NO: 1489674 - DNA, 15 bp, Homo sapiens
ttccagtattttttc

SEQ ID NO: 1489675 - DNA, 15 bp, Homo sapiens
tccagtattttttcc

SEQ ID NO: 1489676 - DNA, 15 bp, Homo sapiens
ccagtattttttccc

SEQ ID NO: 1489677 - DNA, 15 bp, Homo sapiens
cagtattttttccct

SEQ ID NO: 1489678 - DNA, 15 bp, Homo sapiens
agtattttttccctg

SEQ ID NO: 1489679 - DNA, 15 bp, Homo sapiens
gtattttttccctga

SEQ ID NO: 1489680 - DNA, 15 bp, Homo sapiens
tattttttccctgat

SEQ ID NO: 1489681 - DNA, 15 bp, Homo sapiens
attttttccctgatc

SEQ ID NO: 1489682 - DNA, 15 bp, Homo sapiens
ttttttccctgatcc

SEQ ID NO: 1489683 - DNA, 15 bp, Homo sapiens
tttttccctgatccc

SEQ ID NO: 1489684 - DNA, 15 bp, Homo sapiens
ttttccctgatccca

SEQ ID NO: 1489685 - DNA, 15 bp, Homo sapiens
tttccctgatcccag

SEQ ID NO: 1489686 - DNA, 15 bp, Homo sapiens
ttccctgatcccagc

SEQ ID NO: 1489687 - DNA, 15 bp, Homo sapiens
tccctgatcccagct

SEQ ID NO: 1489688 - DNA, 15 bp, Homo sapiens
ccctgatcccagctg

SEQ ID NO: 1489689 - DNA, 15 bp, Homo sapiens
cctgatcccagctga

SEQ ID NO: 1489690 - DNA, 15 bp, Homo sapiens
ctgatcccagctgaa

SEQ ID NO: 1489691 - DNA, 15 bp, Homo sapiens
tgatcccagctgaaa

SEQ ID NO: 1489692 - DNA, 15 bp, Homo sapiens
gatcccagctgaaaa

SEQ ID NO: 1489693 - DNA, 15 bp, Homo sapiens
atcccagctgaaaac

SEQ ID NO: 1489694 - DNA, 15 bp, Homo sapiens
tcccagctgaaaaca

SEQ ID NO: 1489695 - DNA, 15 bp, Homo sapiens
cccagctgaaaacag

SEQ ID NO: 1489696 - DNA, 15 bp, Homo sapiens
cagctgaaaacagcc

SEQ ID NO: 1489697 - DNA, 15 bp, Homo sapiens
agctgaaaacagcca

SEQ ID NO: 1489698 - DNA, 15 bp, Homo sapiens
gctgaaaacagccat

SEQ ID NO: 1489699 - DNA, 15 bp, Homo sapiens
ctgaaaacagccata

SEQ ID NO: 1489700 - DNA, 15 bp, Homo sapiens
tgaaaacagccatag

SEQ ID NO: 1489701 - DNA, 15 bp, Homo sapiens
gaaaacagccataga

SEQ ID NO: 1489702 - DNA, 15 bp, Homo sapiens
aaaacagccatagaa

SEQ ID NO: 1489703 - DNA, 15 bp, Homo sapiens
aaacagccatagaag

SEQ ID NO: 1489704 - DNA, 15 bp, Homo sapiens
aacagccatagaaga

SEQ ID NO: 1489705 - DNA, 15 bp, Homo sapiens
acagccatagaagag

SEQ ID NO: 1489706 - DNA, 15 bp, Homo sapiens
cagccatagaagagc

SEQ ID NO: 1489707 - DNA, 15 bp, Homo sapiens
agccatagaagagcc

SEQ ID NO: 1489708 - DNA, 15 bp, Homo sapiens
gccatagaagagcct

SEQ ID NO: 1489709 - DNA, 15 bp, Homo sapiens
ccatagaagagcctc

SEQ ID NO: 1489710 - DNA, 15 bp, Homo sapiens
catagaagagcctcc

SEQ ID NO: 1489711 - DNA, 15 bp, Homo sapiens
atagaagagcctccc

SEQ ID NO: 1489712 - DNA, 15 bp, Homo sapiens
tagaagagcctccct

SEQ ID NO: 1489713 - DNA, 15 bp, Homo sapiens
agaagagcctccctt

SEQ ID NO: 1489714 - DNA, 15 bp, Homo sapiens
gaagagcctcccttt

SEQ ID NO: 1489715 - DNA, 15 bp, Homo sapiens
aagagcctccctttt

SEQ ID NO: 1489716 - DNA, 15 bp, Homo sapiens
agagcctcccttttt

SEQ ID NO: 1489717 - DNA, 15 bp, Homo sapiens
gagcctccctttttg

SEQ ID NO: 1489718 - DNA, 15 bp, Homo sapiens
agcctccctttttga

SEQ ID NO: 1489719 - DNA, 15 bp, Homo sapiens
gcctccctttttgaa

SEQ ID NO: 1489720 - DNA, 15 bp, Homo sapiens
cctccctttttgaat

SEQ ID NO: 1489721 - DNA, 15 bp, Homo sapiens
ctccctttttgaatt

SEQ ID NO: 1489722 - DNA, 15 bp, Homo sapiens
tccctttttgaatta

SEQ ID NO: 1489723 - DNA, 15 bp, Homo sapiens
ccctttttgaattat

SEQ ID NO: 1489724 - DNA, 15 bp, Homo sapiens
cctttttgaattatg

SEQ ID NO: 1489725 - DNA, 15 bp, Homo sapiens
ctttttgaattatgg

SEQ ID NO: 1489726 - DNA, 15 bp, Homo sapiens
tttttgaattatggc

SEQ ID NO: 1489727 - DNA, 15 bp, Homo sapiens
ttttgaattatggct

SEQ ID NO: 1489728 - DNA, 15 bp, Homo sapiens
tttgaattatggctg

SEQ ID NO: 1489729 - DNA, 15 bp, Homo sapiens
ttgaattatggctgt

SEQ ID NO: 1489730 - DNA, 15 bp, Homo sapiens
tgaattatggctgtc

SEQ ID NO: 1489731 - DNA, 15 bp, Homo sapiens
gaattatggctgtct

SEQ ID NO: 1489732 - DNA, 15 bp, Homo sapiens
aattatggctgtctg

SEQ ID NO: 1489733 - DNA, 15 bp, Homo sapiens
attatggctgtctgt

SEQ ID NO: 1489734 - DNA, 15 bp, Homo sapiens
ttatggctgtctgtc

SEQ ID NO: 1489735 - DNA, 15 bp, Homo sapiens
tatggctgtctgtcc

SEQ ID NO: 1489736 - DNA, 15 bp, Homo sapiens
atggctgtctgtccg

SEQ ID NO: 1489737 - DNA, 15 bp, Homo sapiens
tggctgtctgtccgc

SEQ ID NO: 1489738 - DNA, 15 bp, Homo sapiens
ggctgtctgtccgct

SEQ ID NO: 1489739 - DNA, 15 bp, Homo sapiens
gctgtctgtccgctg

SEQ ID NO: 1489740 - DNA, 15 bp, Homo sapiens
ctgtctgtccgctgg

SEQ ID NO: 1489741 - DNA, 15 bp, Homo sapiens
tgtctgtccgctggg

SEQ ID NO: 1489742 - DNA, 15 bp, Homo sapiens
gtctgtccgctgggg

SEQ ID NO: 1489743 - DNA, 15 bp, Homo sapiens
tctgtccgctggggt

SEQ ID NO: 1489744 - DNA, 15 bp, Homo sapiens
ctgtccgctggggtg

SEQ ID NO: 1489745 - DNA, 15 bp, Homo sapiens
tgtccgctggggtgg

SEQ ID NO: 1489746 - DNA, 15 bp, Homo sapiens
gtccgctggggtgga

SEQ ID NO: 1489747 - DNA, 15 bp, Homo sapiens
tccgctggggtggag

SEQ ID NO: 1489748 - DNA, 15 bp, Homo sapiens
ccgctggggtggaga

SEQ ID NO: 1489749 - DNA, 15 bp, Homo sapiens
cgctggggtggagaa

SEQ ID NO: 1489750 - DNA, 15 bp, Homo sapiens
gctggggtggagaat

SEQ ID NO: 1489751 - DNA, 15 bp, Homo sapiens
ctggggtggagaatg

SEQ ID NO: 1489752 - DNA, 15 bp, Homo sapiens
tggggtggagaatgg

SEQ ID NO: 1489753 - DNA, 15 bp, Homo sapiens
ggggtggagaatggc

SEQ ID NO: 1489754 - DNA, 15 bp, Homo sapiens
gggtggagaatggcc

SEQ ID NO: 1489755 - DNA, 15 bp, Homo sapiens
ggtggagaatggccc

SEQ ID NO: 1489756 - DNA, 15 bp, Homo sapiens
gtggagaatggccct

SEQ ID NO: 1489757 - DNA, 15 bp, Homo sapiens
tggagaatggccctg

SEQ ID NO: 1489758 - DNA, 15 bp, Homo sapiens
ggagaatggccctgg

SEQ ID NO: 1489759 - DNA, 15 bp, Homo sapiens
gagaatggccctggg

SEQ ID NO: 1489760 - DNA, 15 bp, Homo sapiens
agaatggccctggga

SEQ ID NO: 1489761 - DNA, 15 bp, Homo sapiens
gaatggccctgggag

SEQ ID NO: 1489762 - DNA, 15 bp, Homo sapiens
aatggccctgggaga

SEQ ID NO: 1489763 - DNA, 15 bp, Homo sapiens
atggccctgggagac

SEQ ID NO: 1489764 - DNA, 15 bp, Homo sapiens
tggccctgggagaca

SEQ ID NO: 1489765 - DNA, 15 bp, Homo sapiens
ggccctgggagacaa

SEQ ID NO: 1489766 - DNA, 15 bp, Homo sapiens
gccctgggagacaag

SEQ ID NO: 1489767 - DNA, 15 bp, Homo sapiens
ccctgggagacaaga

SEQ ID NO: 1489768 - DNA, 15 bp, Homo sapiens
cctgggagacaagag

SEQ ID NO: 1489769 - DNA, 15 bp, Homo sapiens
ctgggagacaagaga

SEQ ID NO: 1489770 - DNA, 15 bp, Homo sapiens
tgggagacaagagac

SEQ ID NO: 1489771 - DNA, 15 bp, Homo sapiens
gggagacaagagaca

SEQ ID NO: 1489772 - DNA, 15 bp, Homo sapiens
ggagacaagagacag

SEQ ID NO: 1489773 - DNA, 15 bp, Homo sapiens
gagacaagagacagc

SEQ ID NO: 1489774 - DNA, 15 bp, Homo sapiens
agacaagagacagcc

SEQ ID NO: 1489775 - DNA, 15 bp, Homo sapiens
gacaagagacagccc

SEQ ID NO: 1489776 - DNA, 15 bp, Homo sapiens
acaagagacagccca

SEQ ID NO: 1489777 - DNA, 15 bp, Homo sapiens
caagagacagcccat

SEQ ID NO: 1489778 - DNA, 15 bp, Homo sapiens
aagagacagcccatg

SEQ ID NO: 1489779 - DNA, 15 bp, Homo sapiens
agagacagcccatgg

SEQ ID NO: 1489780 - DNA, 15 bp, Homo sapiens
gagacagcccatgga

SEQ ID NO: 1489781 - DNA, 15 bp, Homo sapiens
agacagcccatggag

SEQ ID NO: 1489782 - DNA, 15 bp, Homo sapiens
gacagcccatggagc

SEQ ID NO: 1489783 - DNA, 15 bp, Homo sapiens
acagcccatggagca

SEQ ID NO: 1489784 - DNA, 15 bp, Homo sapiens
cagcccatggagcag

SEQ ID NO: 1489785 - DNA, 15 bp, Homo sapiens
agcccatggagcagg

SEQ ID NO: 1489786 - DNA, 15 bp, Homo sapiens
gcccatggagcaggt

SEQ ID NO: 1489787 - DNA, 15 bp, Homo sapiens
cccatggagcaggtt

SEQ ID NO: 1489788 - DNA, 15 bp, Homo sapiens
ccatggagcaggttg

SEQ ID NO: 1489789 - DNA, 15 bp, Homo sapiens
catggagcaggttgt

SEQ ID NO: 1489790 - DNA, 15 bp, Homo sapiens
atggagcaggttgta

SEQ ID NO: 1489791 - DNA, 15 bp, Homo sapiens
tggagcaggttgtaa

SEQ ID NO: 1489792 - DNA, 15 bp, Homo sapiens
ggagcaggttgtaat

SEQ ID NO: 1489793 - DNA, 15 bp, Homo sapiens
gagcaggttgtaatt

SEQ ID NO: 1489794 - DNA, 15 bp, Homo sapiens
agcaggttgtaattc

SEQ ID NO: 1489795 - DNA, 15 bp, Homo sapiens
gcaggttgtaattct

SEQ ID NO: 1489796 - DNA, 15 bp, Homo sapiens
caggttgtaattcta

SEQ ID NO: 1489797 - DNA, 15 bp, Homo sapiens
aggttgtaattctac

SEQ ID NO: 1489798 - DNA, 15 bp, Homo sapiens
ggttgtaattctaca

SEQ ID NO: 1489799 - DNA, 15 bp, Homo sapiens
gttgtaattctacag

SEQ ID NO: 1489800 - DNA, 15 bp, Homo sapiens
ttgtaattctacagg

SEQ ID NO: 1489801 - DNA, 15 bp, Homo sapiens
tgtaattctacaggc

SEQ ID NO: 1489802 - DNA, 15 bp, Homo sapiens
gtaattctacaggca

SEQ ID NO: 1489803 - DNA, 15 bp, Homo sapiens
taattctacaggcat

SEQ ID NO: 1489804 - DNA, 15 bp, Homo sapiens
aattctacaggcata

SEQ ID NO: 1489805 - DNA, 15 bp, Homo sapiens
attctacaggcatat

SEQ ID NO: 1489806 - DNA, 15 bp, Homo sapiens
ttctacaggcatatg

SEQ ID NO: 1489807 - DNA, 15 bp, Homo sapiens
tctacaggcatatga

SEQ ID NO: 1489808 - DNA, 15 bp, Homo sapiens
ctacaggcatatgaa

SEQ ID NO: 1489809 - DNA, 15 bp, Homo sapiens
tacaggcatatgaag

SEQ ID NO: 1489810 - DNA, 15 bp, Homo sapiens
acaggcatatgaaga

SEQ ID NO: 1489811 - DNA, 15 bp, Homo sapiens
caggcatatgaagag

SEQ ID NO: 1489812 - DNA, 15 bp, Homo sapiens
aggcatatgaagagc

SEQ ID NO: 1489813 - DNA, 15 bp, Homo sapiens
ggcatatgaagagca

SEQ ID NO: 1489814 - DNA, 15 bp, Homo sapiens
gcatatgaagagcat

SEQ ID NO: 1489815 - DNA, 15 bp, Homo sapiens
catatgaagagcatt

SEQ ID NO: 1489816 - DNA, 15 bp, Homo sapiens
atatgaagagcattc

SEQ ID NO: 1489817 - DNA, 15 bp, Homo sapiens
tatgaagagcattca

SEQ ID NO: 1489818 - DNA, 15 bp, Homo sapiens
atgaagagcattcat

SEQ ID NO: 1489819 - DNA, 15 bp, Homo sapiens
tgaagagcattcatt

SEQ ID NO: 1489820 - DNA, 15 bp, Homo sapiens
gaagagcattcattc

SEQ ID NO: 1489821 - DNA, 15 bp, Homo sapiens
aagagcattcattct

SEQ ID NO: 1489822 - DNA, 15 bp, Homo sapiens
agagcattcattctg

SEQ ID NO: 1489823 - DNA, 15 bp, Homo sapiens
gagcattcattctga

SEQ ID NO: 1489824 - DNA, 15 bp, Homo sapiens
agcattcattctgaa

SEQ ID NO: 1489825 - DNA, 15 bp, Homo sapiens
gcattcattctgaag

SEQ ID NO: 1489826 - DNA, 15 bp, Homo sapiens
cattcattctgaaga

SEQ ID NO: 1489827 - DNA, 15 bp, Homo sapiens
attcattctgaagaa

SEQ ID NO: 1489828 - DNA, 15 bp, Homo sapiens
ttcattctgaagaag

SEQ ID NO: 1489829 - DNA, 15 bp, Homo sapiens
tcattctgaagaaga

SEQ ID NO: 1489830 - DNA, 15 bp, Homo sapiens
cattctgaagaagac

SEQ ID NO: 1489831 - DNA, 15 bp, Homo sapiens
attctgaagaagaca

SEQ ID NO: 1489832 - DNA, 15 bp, Homo sapiens
ttctgaagaagacat

SEQ ID NO: 1489833 - DNA, 15 bp, Homo sapiens
tctgaagaagacatt

SEQ ID NO: 1489834 - DNA, 15 bp, Homo sapiens
ctgaagaagacattc

SEQ ID NO: 1489835 - DNA, 15 bp, Homo sapiens
tgaagaagacattca

SEQ ID NO: 1489836 - DNA, 15 bp, Homo sapiens
gaagaagacattcaa

SEQ ID NO: 1489837 - DNA, 15 bp, Homo sapiens
aagaagacattcaat

SEQ ID NO: 1489838 - DNA, 15 bp, Homo sapiens
agaagacattcaatt

SEQ ID NO: 1489839 - DNA, 15 bp, Homo sapiens
gaagacattcaattc

SEQ ID NO: 1489840 - DNA, 15 bp, Homo sapiens
aagacattcaattca

SEQ ID NO: 1489841 - DNA, 15 bp, Homo sapiens
agacattcaattcag

SEQ ID NO: 1489842 - DNA, 15 bp, Homo sapiens
gacattcaattcagg

SEQ ID NO: 1489843 - DNA, 15 bp, Homo sapiens
acattcaattcagga

SEQ ID NO: 1489844 - DNA, 15 bp, Homo sapiens
cattcaattcaggaa

SEQ ID NO: 1489845 - DNA, 15 bp, Homo sapiens
attcaattcaggaat

SEQ ID NO: 1489846 - DNA, 15 bp, Homo sapiens
ttcaattcaggaatg

SEQ ID NO: 1489847 - DNA, 15 bp, Homo sapiens
tcaattcaggaatgt

SEQ ID NO: 1489848 - DNA, 15 bp, Homo sapiens
caattcaggaatgtg

SEQ ID NO: 1489849 - DNA, 15 bp, Homo sapiens
aattcaggaatgtga

SEQ ID NO: 1489850 - DNA, 15 bp, Homo sapiens
attcaggaatgtgaa

SEQ ID NO: 1489851 - DNA, 15 bp, Homo sapiens
ttcaggaatgtgaat

SEQ ID NO: 1489852 - DNA, 15 bp, Homo sapiens
tcaggaatgtgaatt

SEQ ID NO: 1489853 - DNA, 15 bp, Homo sapiens
caggaatgtgaatta

SEQ ID NO: 1489854 - DNA, 15 bp, Homo sapiens
aggaatgtgaattac

SEQ ID NO: 1489855 - DNA, 15 bp, Homo sapiens
ggaatgtgaattaca

SEQ ID NO: 1489856 - DNA, 15 bp, Homo sapiens
gaatgtgaattacac

SEQ ID NO: 1489857 - DNA, 15 bp, Homo sapiens
aatgtgaattacaca

SEQ ID NO: 1489858 - DNA, 15 bp, Homo sapiens
atgtgaattacacaa

SEQ ID NO: 1489859 - DNA, 15 bp, Homo sapiens
tgtgaattacacaag

SEQ ID NO: 1489860 - DNA, 15 bp, Homo sapiens
gtgaattacacaagg

SEQ ID NO: 1489861 - DNA, 15 bp, Homo sapiens
tgaattacacaagga

SEQ ID NO: 1489862 - DNA, 15 bp, Homo sapiens
gaattacacaaggaa

SEQ ID NO: 1489863 - DNA, 15 bp, Homo sapiens
aattacacaaggaag

SEQ ID NO: 1489864 - DNA, 15 bp, Homo sapiens
attacacaaggaagg

SEQ ID NO: 1489865 - DNA, 15 bp, Homo sapiens
ttacacaaggaaggt

SEQ ID NO: 1489866 - DNA, 15 bp, Homo sapiens
tacacaaggaaggta

SEQ ID NO: 1489867 - DNA, 15 bp, Homo sapiens
acacaaggaaggtag

SEQ ID NO: 1489868 - DNA, 15 bp, Homo sapiens
cacaaggaaggtaga

SEQ ID NO: 1489869 - DNA, 15 bp, Homo sapiens
acaaggaaggtagac

SEQ ID NO: 1489870 - DNA, 15 bp, Homo sapiens
caaggaaggtagaca

SEQ ID NO: 1489871 - DNA, 15 bp, Homo sapiens
aaggaaggtagacaa

SEQ ID NO: 1489872 - DNA, 15 bp, Homo sapiens
aggaaggtagacaaa

SEQ ID NO: 1489873 - DNA, 15 bp, Homo sapiens
ggaaggtagacaaat

SEQ ID NO: 1489874 - DNA, 15 bp, Homo sapiens
gaaggtagacaaatc

SEQ ID NO: 1489875 - DNA, 15 bp, Homo sapiens
aaggtagacaaatcc

SEQ ID NO: 1489876 - DNA, 15 bp, Homo sapiens
aggtagacaaatccc

SEQ ID NO: 1489877 - DNA, 15 bp, Homo sapiens
ggtagacaaatccca

SEQ ID NO: 1489878 - DNA, 15 bp, Homo sapiens
gtagacaaatcccag

SEQ ID NO: 1489879 - DNA, 15 bp, Homo sapiens
tagacaaatcccagc

SEQ ID NO: 1489880 - DNA, 15 bp, Homo sapiens
agacaaatcccagct

SEQ ID NO: 1489881 - DNA, 15 bp, Homo sapiens
gacaaatcccagctt

SEQ ID NO: 1489882 - DNA, 15 bp, Homo sapiens
acaaatcccagcttt

SEQ ID NO: 1489883 - DNA, 15 bp, Homo sapiens
caaatcccagcttta

SEQ ID NO: 1489884 - DNA, 15 bp, Homo sapiens
aaatcccagctttaa

SEQ ID NO: 1489885 - DNA, 15 bp, Homo sapiens
aatcccagctttaac

SEQ ID NO: 1489886 - DNA, 15 bp, Homo sapiens
atcccagctttaaca

SEQ ID NO: 1489887 - DNA, 15 bp, Homo sapiens
tcccagctttaacaa

SEQ ID NO: 1489888 - DNA, 15 bp, Homo sapiens
cccagctttaacaag

SEQ ID NO: 1489889 - DNA, 15 bp, Homo sapiens
ccagctttaacaagt

SEQ ID NO: 1489890 - DNA, 15 bp, Homo sapiens
cagctttaacaagtg

SEQ ID NO: 1489891 - DNA, 15 bp, Homo sapiens
agctttaacaagtgc

SEQ ID NO: 1489892 - DNA, 15 bp, Homo sapiens
gctttaacaagtgct

SEQ ID NO: 1489893 - DNA, 15 bp, Homo sapiens
ctttaacaagtgctg

SEQ ID NO: 1489894 - DNA, 15 bp, Homo sapiens
tttaacaagtgctgt

SEQ ID NO: 1489895 - DNA, 15 bp, Homo sapiens
ttaacaagtgctgtt

SEQ ID NO: 1489896 - DNA, 15 bp, Homo sapiens
taacaagtgctgttc

SEQ ID NO: 1489897 - DNA, 15 bp, Homo sapiens
aacaagtgctgttca

SEQ ID NO: 1489898 - DNA, 15 bp, Homo sapiens
acaagtgctgttcac

SEQ ID NO: 1489899 - DNA, 15 bp, Homo sapiens
caagtgctgttcacc

SEQ ID NO: 1489900 - DNA, 15 bp, Homo sapiens
aagtgctgttcacct

SEQ ID NO: 1489901 - DNA, 15 bp, Homo sapiens
agtgctgttcaccta

SEQ ID NO: 1489902 - DNA, 15 bp, Homo sapiens
gtgctgttcacctat

SEQ ID NO: 1489903 - DNA, 15 bp, Homo sapiens
tgctgttcacctatc

SEQ ID NO: 1489904 - DNA, 15 bp, Homo sapiens
gctgttcacctatca

SEQ ID NO: 1489905 - DNA, 15 bp, Homo sapiens
ctgttcacctatcac

SEQ ID NO: 1489906 - DNA, 15 bp, Homo sapiens
tgttcacctatcact

SEQ ID NO: 1489907 - DNA, 15 bp, Homo sapiens
gttcacctatcacta

SEQ ID NO: 1489908 - DNA, 15 bp, Homo sapiens
ttcacctatcactac

SEQ ID NO: 1489909 - DNA, 15 bp, Homo sapiens
tcacctatcactaca

SEQ ID NO: 1489910 - DNA, 15 bp, Homo sapiens
cacctatcactacat

SEQ ID NO: 1489911 - DNA, 15 bp, Homo sapiens
acctatcactacatt

SEQ ID NO: 1489912 - DNA, 15 bp, Homo sapiens
cctatcactacattt

SEQ ID NO: 1489913 - DNA, 15 bp, Homo sapiens
ctatcactacatttt

SEQ ID NO: 1489914 - DNA, 15 bp, Homo sapiens
tatcactacattttc

SEQ ID NO: 1489915 - DNA, 15 bp, Homo sapiens
atcactacattttca

SEQ ID NO: 1489916 - DNA, 15 bp, Homo sapiens
tcactacattttcaa

SEQ ID NO: 1489917 - DNA, 15 bp, Homo sapiens
cactacattttcaag

SEQ ID NO: 1489918 - DNA, 15 bp, Homo sapiens
actacattttcaagt

SEQ ID NO: 1489919 - DNA, 15 bp, Homo sapiens
ctacattttcaagta

SEQ ID NO: 1489920 - DNA, 15 bp, Homo sapiens
tacattttcaagtaa

SEQ ID NO: 1489921 - DNA, 15 bp, Homo sapiens
acattttcaagtaaa

SEQ ID NO: 1489922 - DNA, 15 bp, Homo sapiens
cattttcaagtaaag

SEQ ID NO: 1489923 - DNA, 15 bp, Homo sapiens
attttcaagtaaagg

SEQ ID NO: 1489924 - DNA, 15 bp, Homo sapiens
ttttcaagtaaaggt

SEQ ID NO: 1489925 - DNA, 15 bp, Homo sapiens
tttcaagtaaaggtg

SEQ ID NO: 1489926 - DNA, 15 bp, Homo sapiens
ttcaagtaaaggtgg

SEQ ID NO: 1489927 - DNA, 15 bp, Homo sapiens
tcaagtaaaggtggt

SEQ ID NO: 1489928 - DNA, 15 bp, Homo sapiens
caagtaaaggtggtg

SEQ ID NO: 1489929 - DNA, 15 bp, Homo sapiens
aagtaaaggtggtgt

SEQ ID NO: 1489930 - DNA, 15 bp, Homo sapiens
agtaaaggtggtgta

SEQ ID NO: 1489931 - DNA, 15 bp, Homo sapiens
gtaaaggtggtgtat

SEQ ID NO: 1489932 - DNA, 15 bp, Homo sapiens
taaaggtggtgtatc

SEQ ID NO: 1489933 - DNA, 15 bp, Homo sapiens
aaaggtggtgtatcc

SEQ ID NO: 1489934 - DNA, 15 bp, Homo sapiens
aaggtggtgtatcca

SEQ ID NO: 1489935 - DNA, 15 bp, Homo sapiens
aggtggtgtatccat

SEQ ID NO: 1489936 - DNA, 15 bp, Homo sapiens
ggtggtgtatccatt

SEQ ID NO: 1489937 - DNA, 15 bp, Homo sapiens
gtggtgtatccattt

SEQ ID NO: 1489938 - DNA, 15 bp, Homo sapiens
tggtgtatccatttg

SEQ ID NO: 1489939 - DNA, 15 bp, Homo sapiens
ggtgtatccatttgc

SEQ ID NO: 1489940 - DNA, 15 bp, Homo sapiens
gtgtatccatttgct

SEQ ID NO: 1489941 - DNA, 15 bp, Homo sapiens
tgtatccatttgcta

SEQ ID NO: 1489942 - DNA, 15 bp, Homo sapiens
gtatccatttgctag

SEQ ID NO: 1489943 - DNA, 15 bp, Homo sapiens
tatccatttgctagg

SEQ ID NO: 1489944 - DNA, 15 bp, Homo sapiens
atccatttgctaggg

SEQ ID NO: 1489945 - DNA, 15 bp, Homo sapiens
tccatttgctagggt

SEQ ID NO: 1489946 - DNA, 15 bp, Homo sapiens
ccatttgctagggtt

SEQ ID NO: 1489947 - DNA, 15 bp, Homo sapiens
catttgctagggttt

SEQ ID NO: 1489948 - DNA, 15 bp, Homo sapiens
atttgctagggtttc

SEQ ID NO: 1489949 - DNA, 15 bp, Homo sapiens
tttgctagggtttcc

SEQ ID NO: 1489950 - DNA, 15 bp, Homo sapiens
ttgctagggtttcca

SEQ ID NO: 1489951 - DNA, 15 bp, Homo sapiens
tgctagggtttccat

SEQ ID NO: 1489952 - DNA, 15 bp, Homo sapiens
gctagggtttccata

SEQ ID NO: 1489953 - DNA, 15 bp, Homo sapiens
ctagggtttccataa

SEQ ID NO: 1489954 - DNA, 15 bp, Homo sapiens
tagggtttccataac

SEQ ID NO: 1489955 - DNA, 15 bp, Homo sapiens
agggtttccataaca

SEQ ID NO: 1489956 - DNA, 15 bp, Homo sapiens
gggtttccataacaa

SEQ ID NO: 1489957 - DNA, 15 bp, Homo sapiens
ggtttccataacaac

SEQ ID NO: 1489958 - DNA, 15 bp, Homo sapiens
gtttccataacaaca

SEQ ID NO: 1489959 - DNA, 15 bp, Homo sapiens
tttccataacaacat

SEQ ID NO: 1489960 - DNA, 15 bp, Homo sapiens
ttccataacaacata

SEQ ID NO: 1489961 - DNA, 15 bp, Homo sapiens
tccataacaacatac

SEQ ID NO: 1489962 - DNA, 15 bp, Homo sapiens
ccataacaacatacc

SEQ ID NO: 1489963 - DNA, 15 bp, Homo sapiens
cataacaacatacca

SEQ ID NO: 1489964 - DNA, 15 bp, Homo sapiens
ataacaacataccag

SEQ ID NO: 1489965 - DNA, 15 bp, Homo sapiens
taacaacataccagg

SEQ ID NO: 1489966 - DNA, 15 bp, Homo sapiens
aacaacataccaggg

SEQ ID NO: 1489967 - DNA, 15 bp, Homo sapiens
acaacataccagggc

SEQ ID NO: 1489968 - DNA, 15 bp, Homo sapiens
caacataccagggct

SEQ ID NO: 1489969 - DNA, 15 bp, Homo sapiens
aacataccagggctg

SEQ ID NO: 1489970 - DNA, 15 bp, Homo sapiens
acataccagggctga

SEQ ID NO: 1489971 - DNA, 15 bp, Homo sapiens
cataccagggctgag

SEQ ID NO: 1489972 - DNA, 15 bp, Homo sapiens
ataccagggctgagt

SEQ ID NO: 1489973 - DNA, 15 bp, Homo sapiens
taccagggctgagtg

SEQ ID NO: 1489974 - DNA, 15 bp, Homo sapiens
accagggctgagtgg

SEQ ID NO: 1489975 - DNA, 15 bp, Homo sapiens
ccagggctgagtggc

SEQ ID NO: 1489976 - DNA, 15 bp, Homo sapiens
cagggctgagtggct

SEQ ID NO: 1489977 - DNA, 15 bp, Homo sapiens
agggctgagtggctt

SEQ ID NO: 1489978 - DNA, 15 bp, Homo sapiens
gggctgagtggctta

SEQ ID NO: 1489979 - DNA, 15 bp, Homo sapiens
ggctgagtggcttaa

SEQ ID NO: 1489980 - DNA, 15 bp, Homo sapiens
gctgagtggcttaag

SEQ ID NO: 1489981 - DNA, 15 bp, Homo sapiens
ctgagtggcttaagc

SEQ ID NO: 1489982 - DNA, 15 bp, Homo sapiens
tgagtggcttaagca

SEQ ID NO: 1489983 - DNA, 15 bp, Homo sapiens
gagtggcttaagcaa

SEQ ID NO: 1489984 - DNA, 15 bp, Homo sapiens
agtggcttaagcaaa

SEQ ID NO: 1489985 - DNA, 15 bp, Homo sapiens
gtggcttaagcaaaa

SEQ ID NO: 1489986 - DNA, 15 bp, Homo sapiens
tggcttaagcaaaag

SEQ ID NO: 1489987 - DNA, 15 bp, Homo sapiens
ggcttaagcaaaaga

SEQ ID NO: 1489988 - DNA, 15 bp, Homo sapiens
gcttaagcaaaagaa

SEQ ID NO: 1489989 - DNA, 15 bp, Homo sapiens
cttaagcaaaagaaa

SEQ ID NO: 1489990 - DNA, 15 bp, Homo sapiens
ttaagcaaaagaaat

SEQ ID NO: 1489991 - DNA, 15 bp, Homo sapiens
taagcaaaagaaatt

SEQ ID NO: 1489992 - DNA, 15 bp, Homo sapiens
aagcaaaagaaattt

SEQ ID NO: 1489993 - DNA, 15 bp, Homo sapiens
agcaaaagaaattta

SEQ ID NO: 1489994 - DNA, 15 bp, Homo sapiens
gcaaaagaaatttat

SEQ ID NO: 1489995 - DNA, 15 bp, Homo sapiens
caaaagaaatttatt

SEQ ID NO: 1489996 - DNA, 15 bp, Homo sapiens
aaaagaaatttattt

SEQ ID NO: 1489997 - DNA, 15 bp, Homo sapiens
aaagaaatttatttg

SEQ ID NO: 1489998 - DNA, 15 bp, Homo sapiens
aagaaatttatttgc

SEQ ID NO: 1489999 - DNA, 15 bp, Homo sapiens
agaaatttatttgct

SEQ ID NO: 1490000 - DNA, 15 bp, Homo sapiens
gaaatttatttgctc

SEQ ID NO: 1490001 - DNA, 15 bp, Homo sapiens
aaatttatttgctca

SEQ ID NO: 1490002 - DNA, 15 bp, Homo sapiens
aatttatttgctcag

SEQ ID NO: 1490003 - DNA, 15 bp, Homo sapiens
atttatttgctcaga

SEQ ID NO: 1490004 - DNA, 15 bp, Homo sapiens
tttatttgctcagag

SEQ ID NO: 1490005 - DNA, 15 bp, Homo sapiens
ttatttgctcagagt

SEQ ID NO: 1490006 - DNA, 15 bp, Homo sapiens
tatttgctcagagtt

SEQ ID NO: 1490007 - DNA, 15 bp, Homo sapiens
atttgctcagagttc

SEQ ID NO: 1490008 - DNA, 15 bp, Homo sapiens
tttgctcagagttct

SEQ ID NO: 1490009 - DNA, 15 bp, Homo sapiens
ttgctcagagttctg

SEQ ID NO: 1490010 - DNA, 15 bp, Homo sapiens
tgctcagagttctgg

SEQ ID NO: 1490011 - DNA, 15 bp, Homo sapiens
gctcagagttctgga

SEQ ID NO: 1490012 - DNA, 15 bp, Homo sapiens
ctcagagttctggag

SEQ ID NO: 1490013 - DNA, 15 bp, Homo sapiens
tcagagttctggaga

SEQ ID NO: 1490014 - DNA, 15 bp, Homo sapiens
cagagttctggagac

SEQ ID NO: 1490015 - DNA, 15 bp, Homo sapiens
agagttctggagact

SEQ ID NO: 1490016 - DNA, 15 bp, Homo sapiens
gagttctggagactg

SEQ ID NO: 1490017 - DNA, 15 bp, Homo sapiens
agttctggagactgg

SEQ ID NO: 1490018 - DNA, 15 bp, Homo sapiens
gttctggagactgga

SEQ ID NO: 1490019 - DNA, 15 bp, Homo sapiens
ttctggagactggaa

SEQ ID NO: 1490020 - DNA, 15 bp, Homo sapiens
tctggagactggaag

SEQ ID NO: 1490021 - DNA, 15 bp, Homo sapiens
ctggagactggaagt

SEQ ID NO: 1490022 - DNA, 15 bp, Homo sapiens
tggagactggaagtc

SEQ ID NO: 1490023 - DNA, 15 bp, Homo sapiens
ggagactggaagtcc

SEQ ID NO: 1490024 - DNA, 15 bp, Homo sapiens
gagactggaagtcca

SEQ ID NO: 1490025 - DNA, 15 bp, Homo sapiens
agactggaagtccaa

SEQ ID NO: 1490026 - DNA, 15 bp, Homo sapiens
gactggaagtccaag

SEQ ID NO: 1490027 - DNA, 15 bp, Homo sapiens
actggaagtccaaga

SEQ ID NO: 1490028 - DNA, 15 bp, Homo sapiens
caggagtggatcaat

SEQ ID NO: 1490029 - DNA, 15 bp, Homo sapiens
aggagtggatcaatc

SEQ ID NO: 1490030 - DNA, 15 bp, Homo sapiens
ggagtggatcaatca

SEQ ID NO: 1490031 - DNA, 15 bp, Homo sapiens
gagtggatcaatcag

SEQ ID NO: 1490032 - DNA, 15 bp, Homo sapiens
agtggatcaatcagc

SEQ ID NO: 1490033 - DNA, 15 bp, Homo sapiens
gtggatcaatcagcc

SEQ ID NO: 1490034 - DNA, 15 bp, Homo sapiens
tggatcaatcagcca

SEQ ID NO: 1490035 - DNA, 15 bp, Homo sapiens
ggatcaatcagccag

SEQ ID NO: 1490036 - DNA, 15 bp, Homo sapiens
gatcaatcagccagt

SEQ ID NO: 1490037 - DNA, 15 bp, Homo sapiens
atcaatcagccagtg

SEQ ID NO: 1490038 - DNA, 15 bp, Homo sapiens
tcaatcagccagtga

SEQ ID NO: 1490039 - DNA, 15 bp, Homo sapiens
caatcagccagtgag

SEQ ID NO: 1490040 - DNA, 15 bp, Homo sapiens
aatcagccagtgagg

SEQ ID NO: 1490041 - DNA, 15 bp, Homo sapiens
atcagccagtgaggg

SEQ ID NO: 1490042 - DNA, 15 bp, Homo sapiens
tcagccagtgagggt

SEQ ID NO: 1490043 - DNA, 15 bp, Homo sapiens
cagccagtgagggtc

SEQ ID NO: 1490044 - DNA, 15 bp, Homo sapiens
agccagtgagggtca

SEQ ID NO: 1490045 - DNA, 15 bp, Homo sapiens
gccagtgagggtcaa

SEQ ID NO: 1490046 - DNA, 15 bp, Homo sapiens
ccagtgagggtcaac

SEQ ID NO: 1490047 - DNA, 15 bp, Homo sapiens
cagtgagggtcaacg

SEQ ID NO: 1490048 - DNA, 15 bp, Homo sapiens
agtgagggtcaacgt

SEQ ID NO: 1490049 - DNA, 15 bp, Homo sapiens
gtgagggtcaacgtc

SEQ ID NO: 1490050 - DNA, 15 bp, Homo sapiens
tgagggtcaacgtca

SEQ ID NO: 1490051 - DNA, 15 bp, Homo sapiens
gagggtcaacgtcaa

SEQ ID NO: 1490052 - DNA, 15 bp, Homo sapiens
agggtcaacgtcaag

SEQ ID NO: 1490053 - DNA, 15 bp, Homo sapiens
gggtcaacgtcaagc

SEQ ID NO: 1490054 - DNA, 15 bp, Homo sapiens
ggtcaacgtcaagcg

SEQ ID NO: 1490055 - DNA, 15 bp, Homo sapiens
gtcaacgtcaagcgg

SEQ ID NO: 1490056 - DNA, 15 bp, Homo sapiens
tcaacgtcaagcggg

SEQ ID NO: 1490057 - DNA, 15 bp, Homo sapiens
caacgtcaagcggga

SEQ ID NO: 1490058 - DNA, 15 bp, Homo sapiens
aacgtcaagcgggag

SEQ ID NO: 1490059 - DNA, 15 bp, Homo sapiens
acgtcaagcgggagt

SEQ ID NO: 1490060 - DNA, 15 bp, Homo sapiens
cgtcaagcgggagta

SEQ ID NO: 1490061 - DNA, 15 bp, Homo sapiens
gtcaagcgggagtat

SEQ ID NO: 1490062 - DNA, 15 bp, Homo sapiens
tcaagcgggagtatg

SEQ ID NO: 1490063 - DNA, 15 bp, Homo sapiens
caagcgggagtatga

SEQ ID NO: 1490064 - DNA, 15 bp, Homo sapiens
aagcgggagtatgac

SEQ ID NO: 1490065 - DNA, 15 bp, Homo sapiens
agcgggagtatgacc

SEQ ID NO: 1490066 - DNA, 15 bp, Homo sapiens
gcgggagtatgacca

SEQ ID NO: 1490067 - DNA, 15 bp, Homo sapiens
cgggagtatgaccac

SEQ ID NO: 1490068 - DNA, 15 bp, Homo sapiens
gggagtatgaccaca

SEQ ID NO: 1490069 - DNA, 15 bp, Homo sapiens
ggagtatgaccacat

SEQ ID NO: 1490070 - DNA, 15 bp, Homo sapiens
gagtatgaccacatg

SEQ ID NO: 1490071 - DNA, 15 bp, Homo sapiens
agtatgaccacatga

SEQ ID NO: 1490072 - DNA, 15 bp, Homo sapiens
gtatgaccacatgaa

SEQ ID NO: 1490073 - DNA, 15 bp, Homo sapiens
tatgaccacatgaat

SEQ ID NO: 1490074 - DNA, 15 bp, Homo sapiens
atgaccacatgaatg

SEQ ID NO: 1490075 - DNA, 15 bp, Homo sapiens
tgaccacatgaatgg

SEQ ID NO: 1490076 - DNA, 15 bp, Homo sapiens
gaccacatgaatgga

SEQ ID NO: 1490077 - DNA, 15 bp, Homo sapiens
accacatgaatggat

SEQ ID NO: 1490078 - DNA, 15 bp, Homo sapiens
ccacatgaatggatc

SEQ ID NO: 1490079 - DNA, 15 bp, Homo sapiens
cacatgaatggatcc

SEQ ID NO: 1490080 - DNA, 15 bp, Homo sapiens
acatgaatggatcca

SEQ ID NO: 1490081 - DNA, 15 bp, Homo sapiens
catgaatggatccag

SEQ ID NO: 1490082 - DNA, 15 bp, Homo sapiens
atgaatggatccagg

SEQ ID NO: 1490083 - DNA, 15 bp, Homo sapiens
tgaatggatccaggt

SEQ ID NO: 1490084 - DNA, 15 bp, Homo sapiens
gaatggatccaggta

SEQ ID NO: 1490085 - DNA, 15 bp, Homo sapiens
aatggatccaggtaa

SEQ ID NO: 1490086 - DNA, 15 bp, Homo sapiens
atggatccaggtaag

SEQ ID NO: 1490087 - DNA, 15 bp, Homo sapiens
tggatccaggtaagc

SEQ ID NO: 1490088 - DNA, 15 bp, Homo sapiens
ggatccaggtaagct

SEQ ID NO: 1490089 - DNA, 15 bp, Homo sapiens
gatccaggtaagctc

SEQ ID NO: 1490090 - DNA, 15 bp, Homo sapiens
atccaggtaagctca

SEQ ID NO: 1490091 - DNA, 15 bp, Homo sapiens
tccaggtaagctcac

SEQ ID NO: 1490092 - DNA, 15 bp, Homo sapiens
ccaggtaagctcacc

SEQ ID NO: 1490093 - DNA, 15 bp, Homo sapiens
caggtaagctcacca

SEQ ID NO: 1490094 - DNA, 15 bp, Homo sapiens
aggtaagctcaccag

SEQ ID NO: 1490095 - DNA, 15 bp, Homo sapiens
ggtaagctcaccagg

SEQ ID NO: 1490096 - DNA, 15 bp, Homo sapiens
gtaagctcaccaggc

SEQ ID NO: 1490097 - DNA, 15 bp, Homo sapiens
taagctcaccaggcc

SEQ ID NO: 1490098 - DNA, 15 bp, Homo sapiens
aagctcaccaggcct

SEQ ID NO: 1490099 - DNA, 15 bp, Homo sapiens
agctcaccaggcctg

SEQ ID NO: 1490100 - DNA, 15 bp, Homo sapiens
gctcaccaggcctgt

SEQ ID NO: 1490101 - DNA, 15 bp, Homo sapiens
ctcaccaggcctgtg

SEQ ID NO: 1490102 - DNA, 15 bp, Homo sapiens
tcaccaggcctgtgc

SEQ ID NO: 1490103 - DNA, 15 bp, Homo sapiens
caccaggcctgtgca

SEQ ID NO: 1490104 - DNA, 15 bp, Homo sapiens
accaggcctgtgcag

SEQ ID NO: 1490105 - DNA, 15 bp, Homo sapiens
ccaggcctgtgcagg

SEQ ID NO: 1490106 - DNA, 15 bp, Homo sapiens
caggcctgtgcagga

SEQ ID NO: 1490107 - DNA, 15 bp, Homo sapiens
aggcctgtgcaggat

SEQ ID NO: 1490108 - DNA, 15 bp, Homo sapiens
ggcctgtgcaggatt

SEQ ID NO: 1490109 - DNA, 15 bp, Homo sapiens
gcctgtgcaggattg

SEQ ID NO: 1490110 - DNA, 15 bp, Homo sapiens
cctgtgcaggattgg

SEQ ID NO: 1490111 - DNA, 15 bp, Homo sapiens
ctgtgcaggattggg

SEQ ID NO: 1490112 - DNA, 15 bp, Homo sapiens
tgtgcaggattgggg

SEQ ID NO: 1490113 - DNA, 15 bp, Homo sapiens
gtgcaggattggggg

SEQ ID NO: 1490114 - DNA, 15 bp, Homo sapiens
tgcaggattggggga

SEQ ID NO: 1490115 - DNA, 15 bp, Homo sapiens
gcaggattgggggaa

SEQ ID NO: 1490116 - DNA, 15 bp, Homo sapiens
caggattgggggaag

SEQ ID NO: 1490117 - DNA, 15 bp, Homo sapiens
aggattgggggaagg

SEQ ID NO: 1490118 - DNA, 15 bp, Homo sapiens
ggattgggggaaggc

SEQ ID NO: 1490119 - DNA, 15 bp, Homo sapiens
gattgggggaaggca

SEQ ID NO: 1490120 - DNA, 15 bp, Homo sapiens
attgggggaaggcac

SEQ ID NO: 1490121 - DNA, 15 bp, Homo sapiens
ttgggggaaggcaca

SEQ ID NO: 1490122 - DNA, 15 bp, Homo sapiens
tgggggaaggcacaa

SEQ ID NO: 1490123 - DNA, 15 bp, Homo sapiens
gggggaaggcacaaa

SEQ ID NO: 1490124 - DNA, 15 bp, Homo sapiens
ggggaaggcacaaag

SEQ ID NO: 1490125 - DNA, 15 bp, Homo sapiens
gggaaggcacaaagt

SEQ ID NO: 1490126 - DNA, 15 bp, Homo sapiens
ggaaggcacaaagtc

SEQ ID NO: 1490127 - DNA, 15 bp, Homo sapiens
gaaggcacaaagtcg

SEQ ID NO: 1490128 - DNA, 15 bp, Homo sapiens
aaggcacaaagtcgc

SEQ ID NO: 1490129 - DNA, 15 bp, Homo sapiens
aggcacaaagtcgcc

SEQ ID NO: 1490130 - DNA, 15 bp, Homo sapiens
ggcacaaagtcgcca

SEQ ID NO: 1490131 - DNA, 15 bp, Homo sapiens
gcacaaagtcgccag

SEQ ID NO: 1490132 - DNA, 15 bp, Homo sapiens
cacaaagtcgccaga

SEQ ID NO: 1490133 - DNA, 15 bp, Homo sapiens
acaaagtcgccagat

SEQ ID NO: 1490134 - DNA, 15 bp, Homo sapiens
caaagtcgccagatc

SEQ ID NO: 1490135 - DNA, 15 bp, Homo sapiens
aaagtcgccagatct

SEQ ID NO: 1490136 - DNA, 15 bp, Homo sapiens
aagtcgccagatctg

SEQ ID NO: 1490137 - DNA, 15 bp, Homo sapiens
agtcgccagatctgc

SEQ ID NO: 1490138 - DNA, 15 bp, Homo sapiens
gtcgccagatctgca

SEQ ID NO: 1490139 - DNA, 15 bp, Homo sapiens
tcgccagatctgcag

SEQ ID NO: 1490140 - DNA, 15 bp, Homo sapiens
cgccagatctgcagc

SEQ ID NO: 1490141 - DNA, 15 bp, Homo sapiens
gccagatctgcagca

SEQ ID NO: 1490142 - DNA, 15 bp, Homo sapiens
ccagatctgcagcaa

SEQ ID NO: 1490143 - DNA, 15 bp, Homo sapiens
cagatctgcagcaag

SEQ ID NO: 1490144 - DNA, 15 bp, Homo sapiens
agatctgcagcaagt

SEQ ID NO: 1490145 - DNA, 15 bp, Homo sapiens
gatctgcagcaagtg

SEQ ID NO: 1490146 - DNA, 15 bp, Homo sapiens
atctgcagcaagtgg

SEQ ID NO: 1490147 - DNA, 15 bp, Homo sapiens
tctgcagcaagtggc

SEQ ID NO: 1490148 - DNA, 15 bp, Homo sapiens
ctgcagcaagtggct

SEQ ID NO: 1490149 - DNA, 15 bp, Homo sapiens
tgcagcaagtggctt

SEQ ID NO: 1490150 - DNA, 15 bp, Homo sapiens
gcagcaagtggcttc

SEQ ID NO: 1490151 - DNA, 15 bp, Homo sapiens
cagcaagtggcttct

SEQ ID NO: 1490152 - DNA, 15 bp, Homo sapiens
agcaagtggcttctg

SEQ ID NO: 1490153 - DNA, 15 bp, Homo sapiens
gcaagtggcttctgg

SEQ ID NO: 1490154 - DNA, 15 bp, Homo sapiens
caagtggcttctggc

SEQ ID NO: 1490155 - DNA, 15 bp, Homo sapiens
aagtggcttctggca

SEQ ID NO: 1490156 - DNA, 15 bp, Homo sapiens
agtggcttctggcac

SEQ ID NO: 1490157 - DNA, 15 bp, Homo sapiens
gtggcttctggcact

SEQ ID NO: 1490158 - DNA, 15 bp, Homo sapiens
tggcttctggcactt

SEQ ID NO: 1490159 - DNA, 15 bp, Homo sapiens
ggcttctggcactta

SEQ ID NO: 1490160 - DNA, 15 bp, Homo sapiens
gcttctggcacttaa

SEQ ID NO: 1490161 - DNA, 15 bp, Homo sapiens
cttctggcacttaag

SEQ ID NO: 1490162 - DNA, 15 bp, Homo sapiens
ttctggcacttaagg

SEQ ID NO: 1490163 - DNA, 15 bp, Homo sapiens
tctggcacttaaggt

SEQ ID NO: 1490164 - DNA, 15 bp, Homo sapiens
ctggcacttaaggtt

SEQ ID NO: 1490165 - DNA, 15 bp, Homo sapiens
tggcacttaaggttt

SEQ ID NO: 1490166 - DNA, 15 bp, Homo sapiens
ggcacttaaggtttt

SEQ ID NO: 1490167 - DNA, 15 bp, Homo sapiens
gcacttaaggttttt

SEQ ID NO: 1490168 - DNA, 15 bp, Homo sapiens
cacttaaggtttttg

SEQ ID NO: 1490169 - DNA, 15 bp, Homo sapiens
acttaaggtttttgc

SEQ ID NO: 1490170 - DNA, 15 bp, Homo sapiens
cttaaggtttttgca

SEQ ID NO: 1490171 - DNA, 15 bp, Homo sapiens
ttaaggtttttgcag

SEQ ID NO: 1490172 - DNA, 15 bp, Homo sapiens
taaggtttttgcagc

SEQ ID NO: 1490173 - DNA, 15 bp, Homo sapiens
aaggtttttgcagca

SEQ ID NO: 1490174 - DNA, 15 bp, Homo sapiens
aggtttttgcagcag

SEQ ID NO: 1490175 - DNA, 15 bp, Homo sapiens
ggtttttgcagcaga

SEQ ID NO: 1490176 - DNA, 15 bp, Homo sapiens
gtttttgcagcagat

SEQ ID NO: 1490177 - DNA, 15 bp, Homo sapiens
tttttgcagcagatg

SEQ ID NO: 1490178 - DNA, 15 bp, Homo sapiens
ttttgcagcagatgg

SEQ ID NO: 1490179 - DNA, 15 bp, Homo sapiens
tttgcagcagatggg

SEQ ID NO: 1490180 - DNA, 15 bp, Homo sapiens
ttgcagcagatgggg

SEQ ID NO: 1490181 - DNA, 15 bp, Homo sapiens
tgcagcagatggggc

SEQ ID NO: 1490182 - DNA, 15 bp, Homo sapiens
gcagcagatggggct

SEQ ID NO: 1490183 - DNA, 15 bp, Homo sapiens
cagcagatggggctc

SEQ ID NO: 1490184 - DNA, 15 bp, Homo sapiens
agcagatggggctct

SEQ ID NO: 1490185 - DNA, 15 bp, Homo sapiens
gcagatggggctcta

SEQ ID NO: 1490186 - DNA, 15 bp, Homo sapiens
cagatggggctctag

SEQ ID NO: 1490187 - DNA, 15 bp, Homo sapiens
agatggggctctaga

SEQ ID NO: 1490188 - DNA, 15 bp, Homo sapiens
gatggggctctagag

SEQ ID NO: 1490189 - DNA, 15 bp, Homo sapiens
atggggctctagagc

SEQ ID NO: 1490190 - DNA, 15 bp, Homo sapiens
tggggctctagagct

SEQ ID NO: 1490191 - DNA, 15 bp, Homo sapiens
ggggctctagagctg

SEQ ID NO: 1490192 - DNA, 15 bp, Homo sapiens
gggctctagagctgg

SEQ ID NO: 1490193 - DNA, 15 bp, Homo sapiens
ggctctagagctggg

SEQ ID NO: 1490194 - DNA, 15 bp, Homo sapiens
gctctagagctgggc

SEQ ID NO: 1490195 - DNA, 15 bp, Homo sapiens
ctctagagctgggcc

SEQ ID NO: 1490196 - DNA, 15 bp, Homo sapiens
tctagagctgggcca

SEQ ID NO: 1490197 - DNA, 15 bp, Homo sapiens
ctagagctgggccag

SEQ ID NO: 1490198 - DNA, 15 bp, Homo sapiens
tagagctgggccagg

SEQ ID NO: 1490199 - DNA, 15 bp, Homo sapiens
agagctgggccagga

SEQ ID NO: 1490200 - DNA, 15 bp, Homo sapiens
gagctgggccaggaa

SEQ ID NO: 1490201 - DNA, 15 bp, Homo sapiens
agctgggccaggaag

SEQ ID NO: 1490202 - DNA, 15 bp, Homo sapiens
gctgggccaggaagc

SEQ ID NO: 1490203 - DNA, 15 bp, Homo sapiens
ctgggccaggaagcc

SEQ ID NO: 1490204 - DNA, 15 bp, Homo sapiens
tgggccaggaagcct

SEQ ID NO: 1490205 - DNA, 15 bp, Homo sapiens
gggccaggaagcctg

SEQ ID NO: 1490206 - DNA, 15 bp, Homo sapiens
ggccaggaagcctgt

SEQ ID NO: 1490207 - DNA, 15 bp, Homo sapiens
gccaggaagcctgtg

SEQ ID NO: 1490208 - DNA, 15 bp, Homo sapiens
ccaggaagcctgtgt

SEQ ID NO: 1490209 - DNA, 15 bp, Homo sapiens
caggaagcctgtgtc

SEQ ID NO: 1490210 - DNA, 15 bp, Homo sapiens
aggaagcctgtgtca

SEQ ID NO: 1490211 - DNA, 15 bp, Homo sapiens
ggaagcctgtgtcag

SEQ ID NO: 1490212 - DNA, 15 bp, Homo sapiens
gaagcctgtgtcagt

SEQ ID NO: 1490213 - DNA, 15 bp, Homo sapiens
aagcctgtgtcagtc

SEQ ID NO: 1490214 - DNA, 15 bp, Homo sapiens
agcctgtgtcagtcc

SEQ ID NO: 1490215 - DNA, 15 bp, Homo sapiens
gcctgtgtcagtccc

SEQ ID NO: 1490216 - DNA, 15 bp, Homo sapiens
cctgtgtcagtccct

SEQ ID NO: 1490217 - DNA, 15 bp, Homo sapiens
ctgtgtcagtcccta

SEQ ID NO: 1490218 - DNA, 15 bp, Homo sapiens
tgtgtcagtccctag

SEQ ID NO: 1490219 - DNA, 15 bp, Homo sapiens
gtgtcagtccctaga

SEQ ID NO: 1490220 - DNA, 15 bp, Homo sapiens
tgtcagtccctagag

SEQ ID NO: 1490221 - DNA, 15 bp, Homo sapiens
gtcagtccctagaga

SEQ ID NO: 1490222 - DNA, 15 bp, Homo sapiens
tcagtccctagagag

SEQ ID NO: 1490223 - DNA, 15 bp, Homo sapiens
cagtccctagagagc

SEQ ID NO: 1490224 - DNA, 15 bp, Homo sapiens
agtccctagagagct

SEQ ID NO: 1490225 - DNA, 15 bp, Homo sapiens
gtccctagagagcta

SEQ ID NO: 1490226 - DNA, 15 bp, Homo sapiens
tccctagagagctaa

SEQ ID NO: 1490227 - DNA, 15 bp, Homo sapiens
ccctagagagctaag

SEQ ID NO: 1490228 - DNA, 15 bp, Homo sapiens
cctagagagctaagg

SEQ ID NO: 1490229 - DNA, 15 bp, Homo sapiens
ctagagagctaaggc

SEQ ID NO: 1490230 - DNA, 15 bp, Homo sapiens
tagagagctaaggca

SEQ ID NO: 1490231 - DNA, 15 bp, Homo sapiens
agagagctaaggcag

SEQ ID NO: 1490232 - DNA, 15 bp, Homo sapiens
gagagctaaggcaga

SEQ ID NO: 1490233 - DNA, 15 bp, Homo sapiens
agagctaaggcagag

SEQ ID NO: 1490234 - DNA, 15 bp, Homo sapiens
gagctaaggcagaga

SEQ ID NO: 1490235 - DNA, 15 bp, Homo sapiens
agctaaggcagagag

SEQ ID NO: 1490236 - DNA, 15 bp, Homo sapiens
gctaaggcagagagg

SEQ ID NO: 1490237 - DNA, 15 bp, Homo sapiens
ctaaggcagagaggg

SEQ ID NO: 1490238 - DNA, 15 bp, Homo sapiens
taaggcagagagggc

SEQ ID NO: 1490239 - DNA, 15 bp, Homo sapiens
aaggcagagagggcc

SEQ ID NO: 1490240 - DNA, 15 bp, Homo sapiens
aggcagagagggcca

SEQ ID NO: 1490241 - DNA, 15 bp, Homo sapiens
ggcagagagggccac

SEQ ID NO: 1490242 - DNA, 15 bp, Homo sapiens
gcagagagggccaca

SEQ ID NO: 1490243 - DNA, 15 bp, Homo sapiens
cagagagggccacag

SEQ ID NO: 1490244 - DNA, 15 bp, Homo sapiens
agagagggccacaga

SEQ ID NO: 1490245 - DNA, 15 bp, Homo sapiens
gagagggccacagac

SEQ ID NO: 1490246 - DNA, 15 bp, Homo sapiens
agagggccacagact

SEQ ID NO: 1490247 - DNA, 15 bp, Homo sapiens
gagggccacagactg

SEQ ID NO: 1490248 - DNA, 15 bp, Homo sapiens
agggccacagactga

SEQ ID NO: 1490249 - DNA, 15 bp, Homo sapiens
gggccacagactgat

SEQ ID NO: 1490250 - DNA, 15 bp, Homo sapiens
ggccacagactgatg

SEQ ID NO: 1490251 - DNA, 15 bp, Homo sapiens
gccacagactgatga

SEQ ID NO: 1490252 - DNA, 15 bp, Homo sapiens
ccacagactgatgat

SEQ ID NO: 1490253 - DNA, 15 bp, Homo sapiens
cacagactgatgatg

SEQ ID NO: 1490254 - DNA, 15 bp, Homo sapiens
acagactgatgatgg

SEQ ID NO: 1490255 - DNA, 15 bp, Homo sapiens
cagactgatgatggg

SEQ ID NO: 1490256 - DNA, 15 bp, Homo sapiens
agactgatgatgggg

SEQ ID NO: 1490257 - DNA, 15 bp, Homo sapiens
gactgatgatggggt

SEQ ID NO: 1490258 - DNA, 15 bp, Homo sapiens
actgatgatggggtg

SEQ ID NO: 1490259 - DNA, 15 bp, Homo sapiens
ctgatgatggggtgg

SEQ ID NO: 1490260 - DNA, 15 bp, Homo sapiens
tgatgatggggtgga

SEQ ID NO: 1490261 - DNA, 15 bp, Homo sapiens
gatgatggggtggag

SEQ ID NO: 1490262 - DNA, 15 bp, Homo sapiens
atgatggggtggagt

SEQ ID NO: 1490263 - DNA, 15 bp, Homo sapiens
tgatggggtggagta

SEQ ID NO: 1490264 - DNA, 15 bp, Homo sapiens
gatggggtggagtag

SEQ ID NO: 1490265 - DNA, 15 bp, Homo sapiens
atggggtggagtagg

SEQ ID NO: 1490266 - DNA, 15 bp, Homo sapiens
tggggtggagtaggg

SEQ ID NO: 1490267 - DNA, 15 bp, Homo sapiens
ggggtggagtagggc

SEQ ID NO: 1490268 - DNA, 15 bp, Homo sapiens
gggtggagtagggct

SEQ ID NO: 1490269 - DNA, 15 bp, Homo sapiens
ggtggagtagggcta

SEQ ID NO: 1490270 - DNA, 15 bp, Homo sapiens
gtggagtagggctag

SEQ ID NO: 1490271 - DNA, 15 bp, Homo sapiens
tggagtagggctagg

SEQ ID NO: 1490272 - DNA, 15 bp, Homo sapiens
ggagtagggctagga

SEQ ID NO: 1490273 - DNA, 15 bp, Homo sapiens
gagtagggctaggaa

SEQ ID NO: 1490274 - DNA, 15 bp, Homo sapiens
agtagggctaggaag

SEQ ID NO: 1490275 - DNA, 15 bp, Homo sapiens
gtagggctaggaagc

SEQ ID NO: 1490276 - DNA, 15 bp, Homo sapiens
tagggctaggaagcc

SEQ ID NO: 1490277 - DNA, 15 bp, Homo sapiens
agggctaggaagccc

SEQ ID NO: 1490278 - DNA, 15 bp, Homo sapiens
gggctaggaagcccc

SEQ ID NO: 1490279 - DNA, 15 bp, Homo sapiens
ggctaggaagccccc

SEQ ID NO: 1490280 - DNA, 15 bp, Homo sapiens
gctaggaagcccccc

SEQ ID NO: 1490281 - DNA, 15 bp, Homo sapiens
ctaggaagcccccct

SEQ ID NO: 1490282 - DNA, 15 bp, Homo sapiens
taggaagcccccctg

SEQ ID NO: 1490283 - DNA, 15 bp, Homo sapiens
aggaagcccccctgc

SEQ ID NO: 1490284 - DNA, 15 bp, Homo sapiens
ggaagcccccctgcc

SEQ ID NO: 1490285 - DNA, 15 bp, Homo sapiens
gaagcccccctgcct

SEQ ID NO: 1490286 - DNA, 15 bp, Homo sapiens
aagcccccctgcctc

SEQ ID NO: 1490287 - DNA, 15 bp, Homo sapiens
agcccccctgcctct

SEQ ID NO: 1490288 - DNA, 15 bp, Homo sapiens
gcccccctgcctctc

SEQ ID NO: 1490289 - DNA, 15 bp, Homo sapiens
cccccctgcctctct

SEQ ID NO: 1490290 - DNA, 15 bp, Homo sapiens
ccccctgcctctctg

SEQ ID NO: 1490291 - DNA, 15 bp, Homo sapiens
cccctgcctctctgg

SEQ ID NO: 1490292 - DNA, 15 bp, Homo sapiens
ccctgcctctctggg

SEQ ID NO: 1490293 - DNA, 15 bp, Homo sapiens
cctgcctctctgggg

SEQ ID NO: 1490294 - DNA, 15 bp, Homo sapiens
ctgcctctctggggc

SEQ ID NO: 1490295 - DNA, 15 bp, Homo sapiens
tgcctctctggggcc

SEQ ID NO: 1490296 - DNA, 15 bp, Homo sapiens
gcctctctggggccc

SEQ ID NO: 1490297 - DNA, 15 bp, Homo sapiens
cctctctggggccca

SEQ ID NO: 1490298 - DNA, 15 bp, Homo sapiens
ctctctggggcccac

SEQ ID NO: 1490299 - DNA, 15 bp, Homo sapiens
tctctggggcccacg

SEQ ID NO: 1490300 - DNA, 15 bp, Homo sapiens
ctctggggcccacga

SEQ ID NO: 1490301 - DNA, 15 bp, Homo sapiens
tctggggcccacgaa

SEQ ID NO: 1490302 - DNA, 15 bp, Homo sapiens
ctggggcccacgaag

SEQ ID NO: 1490303 - DNA, 15 bp, Homo sapiens
tggggcccacgaagc

SEQ ID NO: 1490304 - DNA, 15 bp, Homo sapiens
ggggcccacgaagcc

SEQ ID NO: 1490305 - DNA, 15 bp, Homo sapiens
gggcccacgaagccc

SEQ ID NO: 1490306 - DNA, 15 bp, Homo sapiens
ggcccacgaagccct

SEQ ID NO: 1490307 - DNA, 15 bp, Homo sapiens
gcccacgaagccctc

SEQ ID NO: 1490308 - DNA, 15 bp, Homo sapiens
cccacgaagccctca

SEQ ID NO: 1490309 - DNA, 15 bp, Homo sapiens
ccacgaagccctcag

SEQ ID NO: 1490310 - DNA, 15 bp, Homo sapiens
cacgaagccctcaga

SEQ ID NO: 1490311 - DNA, 15 bp, Homo sapiens
acgaagccctcagag

SEQ ID NO: 1490312 - DNA, 15 bp, Homo sapiens
cgaagccctcagagg

SEQ ID NO: 1490313 - DNA, 15 bp, Homo sapiens
gaagccctcagaggc

SEQ ID NO: 1490314 - DNA, 15 bp, Homo sapiens
aagccctcagaggcc

SEQ ID NO: 1490315 - DNA, 15 bp, Homo sapiens
agccctcagaggcca

SEQ ID NO: 1490316 - DNA, 15 bp, Homo sapiens
gccctcagaggccag

SEQ ID NO: 1490317 - DNA, 15 bp, Homo sapiens
ccctcagaggccagg

SEQ ID NO: 1490318 - DNA, 15 bp, Homo sapiens
cctcagaggccaggt

SEQ ID NO: 1490319 - DNA, 15 bp, Homo sapiens
ctcagaggccaggta

SEQ ID NO: 1490320 - DNA, 15 bp, Homo sapiens
tcagaggccaggtag

SEQ ID NO: 1490321 - DNA, 15 bp, Homo sapiens
cagaggccaggtagg

SEQ ID NO: 1490322 - DNA, 15 bp, Homo sapiens
agaggccaggtagga

SEQ ID NO: 1490323 - DNA, 15 bp, Homo sapiens
gaggccaggtaggag

SEQ ID NO: 1490324 - DNA, 15 bp, Homo sapiens
aggccaggtaggagt

SEQ ID NO: 1490325 - DNA, 15 bp, Homo sapiens
ggccaggtaggagtc

SEQ ID NO: 1490326 - DNA, 15 bp, Homo sapiens
gccaggtaggagtca

SEQ ID NO: 1490327 - DNA, 15 bp, Homo sapiens
ccaggtaggagtcag

SEQ ID NO: 1490328 - DNA, 15 bp, Homo sapiens
caggtaggagtcagg

SEQ ID NO: 1490329 - DNA, 15 bp, Homo sapiens
aggtaggagtcaggc

SEQ ID NO: 1490330 - DNA, 15 bp, Homo sapiens
ggtaggagtcaggcc

SEQ ID NO: 1490331 - DNA, 15 bp, Homo sapiens
gtaggagtcaggccc

SEQ ID NO: 1490332 - DNA, 15 bp, Homo sapiens
taggagtcaggcccc

SEQ ID NO: 1490333 - DNA, 15 bp, Homo sapiens
aggagtcaggcccca

SEQ ID NO: 1490334 - DNA, 15 bp, Homo sapiens
ggagtcaggccccaa

SEQ ID NO: 1490335 - DNA, 15 bp, Homo sapiens
gagtcaggccccaag

SEQ ID NO: 1490336 - DNA, 15 bp, Homo sapiens
agtcaggccccaagc

SEQ ID NO: 1490337 - DNA, 15 bp, Homo sapiens
gtcaggccccaagcg

SEQ ID NO: 1490338 - DNA, 15 bp, Homo sapiens
tcaggccccaagcgc

SEQ ID NO: 1490339 - DNA, 15 bp, Homo sapiens
caggccccaagcgcc

SEQ ID NO: 1490340 - DNA, 15 bp, Homo sapiens
aggccccaagcgcct

SEQ ID NO: 1490341 - DNA, 15 bp, Homo sapiens
ggccccaagcgccta

SEQ ID NO: 1490342 - DNA, 15 bp, Homo sapiens
gccccaagcgcctat

SEQ ID NO: 1490343 - DNA, 15 bp, Homo sapiens
ccccaagcgcctatg

SEQ ID NO: 1490344 - DNA, 15 bp, Homo sapiens
cccaagcgcctatgc

SEQ ID NO: 1490345 - DNA, 15 bp, Homo sapiens
ccaagcgcctatgca

SEQ ID NO: 1490346 - DNA, 15 bp, Homo sapiens
caagcgcctatgcag

SEQ ID NO: 1490347 - DNA, 15 bp, Homo sapiens
aagcgcctatgcaga

SEQ ID NO: 1490348 - DNA, 15 bp, Homo sapiens
agcgcctatgcagac

SEQ ID NO: 1490349 - DNA, 15 bp, Homo sapiens
gcgcctatgcagaca

SEQ ID NO: 1490350 - DNA, 15 bp, Homo sapiens
cgcctatgcagacac

SEQ ID NO: 1490351 - DNA, 15 bp, Homo sapiens
gcctatgcagacact

SEQ ID NO: 1490352 - DNA, 15 bp, Homo sapiens
cctatgcagacactc

SEQ ID NO: 1490353 - DNA, 15 bp, Homo sapiens
ctatgcagacactcg

SEQ ID NO: 1490354 - DNA, 15 bp, Homo sapiens
tatgcagacactcgt

SEQ ID NO: 1490355 - DNA, 15 bp, Homo sapiens
atgcagacactcgtg

SEQ ID NO: 1490356 - DNA, 15 bp, Homo sapiens
tgcagacactcgtgg

SEQ ID NO: 1490357 - DNA, 15 bp, Homo sapiens
gcagacactcgtgga

SEQ ID NO: 1490358 - DNA, 15 bp, Homo sapiens
cagacactcgtggaa

SEQ ID NO: 1490359 - DNA, 15 bp, Homo sapiens
agacactcgtggaac

SEQ ID NO: 1490360 - DNA, 15 bp, Homo sapiens
gacactcgtggaaca

SEQ ID NO: 1490361 - DNA, 15 bp, Homo sapiens
acactcgtggaacac

SEQ ID NO: 1490362 - DNA, 15 bp, Homo sapiens
cactcgtggaacact

SEQ ID NO: 1490363 - DNA, 15 bp, Homo sapiens
actcgtggaacactt

SEQ ID NO: 1490364 - DNA, 15 bp, Homo sapiens
ctcgtggaacactta

SEQ ID NO: 1490365 - DNA, 15 bp, Homo sapiens
tcgtggaacacttat

SEQ ID NO: 1490366 - DNA, 15 bp, Homo sapiens
cgtggaacacttatt

SEQ ID NO: 1490367 - DNA, 15 bp, Homo sapiens
gtggaacacttattt

SEQ ID NO: 1490368 - DNA, 15 bp, Homo sapiens
tggaacacttatttc

SEQ ID NO: 1490369 - DNA, 15 bp, Homo sapiens
ggaacacttatttct

SEQ ID NO: 1490370 - DNA, 15 bp, Homo sapiens
gaacacttatttctt

SEQ ID NO: 1490371 - DNA, 15 bp, Homo sapiens
aacacttatttcttg

SEQ ID NO: 1490372 - DNA, 15 bp, Homo sapiens
acacttatttcttgt

SEQ ID NO: 1490373 - DNA, 15 bp, Homo sapiens
cacttatttcttgtt

SEQ ID NO: 1490374 - DNA, 15 bp, Homo sapiens
acttatttcttgtta

SEQ ID NO: 1490375 - DNA, 15 bp, Homo sapiens
cttatttcttgttaa

SEQ ID NO: 1490376 - DNA, 15 bp, Homo sapiens
ttatttcttgttaat

SEQ ID NO: 1490377 - DNA, 15 bp, Homo sapiens
tatttcttgttaatc

SEQ ID NO: 1490378 - DNA, 15 bp, Homo sapiens
atttcttgttaatcc

SEQ ID NO: 1490379 - DNA, 15 bp, Homo sapiens
tttcttgttaatccc

SEQ ID NO: 1490380 - DNA, 15 bp, Homo sapiens
ttcttgttaatccca

SEQ ID NO: 1490381 - DNA, 15 bp, Homo sapiens
tcttgttaatcccag

SEQ ID NO: 1490382 - DNA, 15 bp, Homo sapiens
cttgttaatcccagg

SEQ ID NO: 1490383 - DNA, 15 bp, Homo sapiens
ttgttaatcccaggc

SEQ ID NO: 1490384 - DNA, 15 bp, Homo sapiens
tgttaatcccaggcc

SEQ ID NO: 1490385 - DNA, 15 bp, Homo sapiens
gttaatcccaggccc

SEQ ID NO: 1490386 - DNA, 15 bp, Homo sapiens
ttaatcccaggccca

SEQ ID NO: 1490387 - DNA, 15 bp, Homo sapiens
taatcccaggcccag

SEQ ID NO: 1490388 - DNA, 15 bp, Homo sapiens
aatcccaggcccagg

SEQ ID NO: 1490389 - DNA, 15 bp, Homo sapiens
atcccaggcccaggt

SEQ ID NO: 1490390 - DNA, 15 bp, Homo sapiens
tcccaggcccaggtc

SEQ ID NO: 1490391 - DNA, 15 bp, Homo sapiens
cccaggcccaggtcc

SEQ ID NO: 1490392 - DNA, 15 bp, Homo sapiens
ccaggcccaggtcca

SEQ ID NO: 1490393 - DNA, 15 bp, Homo sapiens
caggcccaggtccag

SEQ ID NO: 1490394 - DNA, 15 bp, Homo sapiens
aggcccaggtccagt

SEQ ID NO: 1490395 - DNA, 15 bp, Homo sapiens
ggcccaggtccagtc

SEQ ID NO: 1490396 - DNA, 15 bp, Homo sapiens
gcccaggtccagtcc

SEQ ID NO: 1490397 - DNA, 15 bp, Homo sapiens
cccaggtccagtcct

SEQ ID NO: 1490398 - DNA, 15 bp, Homo sapiens
ccaggtccagtcctg

SEQ ID NO: 1490399 - DNA, 15 bp, Homo sapiens
caggtccagtcctgt

SEQ ID NO: 1490400 - DNA, 15 bp, Homo sapiens
aggtccagtcctgtt

SEQ ID NO: 1490401 - DNA, 15 bp, Homo sapiens
ggtccagtcctgttg

SEQ ID NO: 1490402 - DNA, 15 bp, Homo sapiens
gtccagtcctgttgg

SEQ ID NO: 1490403 - DNA, 15 bp, Homo sapiens
tccagtcctgttggg

SEQ ID NO: 1490404 - DNA, 15 bp, Homo sapiens
ccagtcctgttgggg

SEQ ID NO: 1490405 - DNA, 15 bp, Homo sapiens
cagtcctgttgggga

SEQ ID NO: 1490406 - DNA, 15 bp, Homo sapiens
agtcctgttggggac

SEQ ID NO: 1490407 - DNA, 15 bp, Homo sapiens
gtcctgttggggaca

SEQ ID NO: 1490408 - DNA, 15 bp, Homo sapiens
tcctgttggggacag

SEQ ID NO: 1490409 - DNA, 15 bp, Homo sapiens
cctgttggggacagc

SEQ ID NO: 1490410 - DNA, 15 bp, Homo sapiens
ctgttggggacagct

SEQ ID NO: 1490411 - DNA, 15 bp, Homo sapiens
tgttggggacagctt

SEQ ID NO: 1490412 - DNA, 15 bp, Homo sapiens
gttggggacagctta

SEQ ID NO: 1490413 - DNA, 15 bp, Homo sapiens
ttggggacagcttag

SEQ ID NO: 1490414 - DNA, 15 bp, Homo sapiens
tggggacagcttagc

SEQ ID NO: 1490415 - DNA, 15 bp, Homo sapiens
ggggacagcttagca

SEQ ID NO: 1490416 - DNA, 15 bp, Homo sapiens
gggacagcttagcaa

SEQ ID NO: 1490417 - DNA, 15 bp, Homo sapiens
ggacagcttagcaat

SEQ ID NO: 1490418 - DNA, 15 bp, Homo sapiens
gacagcttagcaata

SEQ ID NO: 1490419 - DNA, 15 bp, Homo sapiens
acagcttagcaataa

SEQ ID NO: 1490420 - DNA, 15 bp, Homo sapiens
cagcttagcaataag

SEQ ID NO: 1490421 - DNA, 15 bp, Homo sapiens
agcttagcaataagc

SEQ ID NO: 1490422 - DNA, 15 bp, Homo sapiens
gcttagcaataagct

SEQ ID NO: 1490423 - DNA, 15 bp, Homo sapiens
cttagcaataagcta

SEQ ID NO: 1490424 - DNA, 15 bp, Homo sapiens
ttagcaataagctac

SEQ ID NO: 1490425 - DNA, 15 bp, Homo sapiens
tagcaataagctact

SEQ ID NO: 1490426 - DNA, 15 bp, Homo sapiens
agcaataagctactc

SEQ ID NO: 1490427 - DNA, 15 bp, Homo sapiens
gcaataagctactct

SEQ ID NO: 1490428 - DNA, 15 bp, Homo sapiens
caataagctactctt

SEQ ID NO: 1490429 - DNA, 15 bp, Homo sapiens
aataagctactcttc

SEQ ID NO: 1490430 - DNA, 15 bp, Homo sapiens
ataagctactcttcc

SEQ ID NO: 1490431 - DNA, 15 bp, Homo sapiens
taagctactcttccc

SEQ ID NO: 1490432 - DNA, 15 bp, Homo sapiens
aagctactcttccct

SEQ ID NO: 1490433 - DNA, 15 bp, Homo sapiens
agctactcttccctg

SEQ ID NO: 1490434 - DNA, 15 bp, Homo sapiens
gctactcttccctgt

SEQ ID NO: 1490435 - DNA, 15 bp, Homo sapiens
ctactcttccctgtc

SEQ ID NO: 1490436 - DNA, 15 bp, Homo sapiens
tactcttccctgtcc

SEQ ID NO: 1490437 - DNA, 15 bp, Homo sapiens
actcttccctgtcct

SEQ ID NO: 1490438 - DNA, 15 bp, Homo sapiens
ctcttccctgtcctg

SEQ ID NO: 1490439 - DNA, 15 bp, Homo sapiens
tcttccctgtcctgt

SEQ ID NO: 1490440 - DNA, 15 bp, Homo sapiens
cttccctgtcctgtt

SEQ ID NO: 1490441 - DNA, 15 bp, Homo sapiens
ttccctgtcctgttg

SEQ ID NO: 1490442 - DNA, 15 bp, Homo sapiens
tccctgtcctgttga

SEQ ID NO: 1490443 - DNA, 15 bp, Homo sapiens
ccctgtcctgttgaa

SEQ ID NO: 1490444 - DNA, 15 bp, Homo sapiens
cctgtcctgttgaag

SEQ ID NO: 1490445 - DNA, 15 bp, Homo sapiens
ctgtcctgttgaaga

SEQ ID NO: 1490446 - DNA, 15 bp, Homo sapiens
tgtcctgttgaagat

SEQ ID NO: 1490447 - DNA, 15 bp, Homo sapiens
gtcctgttgaagata

SEQ ID NO: 1490448 - DNA, 15 bp, Homo sapiens
tcctgttgaagatac

SEQ ID NO: 1490449 - DNA, 15 bp, Homo sapiens
cctgttgaagatact

SEQ ID NO: 1490450 - DNA, 15 bp, Homo sapiens
ctgttgaagatactt

SEQ ID NO: 1490451 - DNA, 15 bp, Homo sapiens
tgttgaagatactta

SEQ ID NO: 1490452 - DNA, 15 bp, Homo sapiens
gttgaagatacttaa

SEQ ID NO: 1490453 - DNA, 15 bp, Homo sapiens
ttgaagatacttaac

SEQ ID NO: 1490454 - DNA, 15 bp, Homo sapiens
tgaagatacttaacc

SEQ ID NO: 1490455 - DNA, 15 bp, Homo sapiens
gaagatacttaaccc

SEQ ID NO: 1490456 - DNA, 15 bp, Homo sapiens
aagatacttaacccc

SEQ ID NO: 1490457 - DNA, 15 bp, Homo sapiens
agatacttaacccct

SEQ ID NO: 1490458 - DNA, 15 bp, Homo sapiens
gatacttaacccctc

SEQ ID NO: 1490459 - DNA, 15 bp, Homo sapiens
atacttaacccctct

SEQ ID NO: 1490460 - DNA, 15 bp, Homo sapiens
tacttaacccctctg

SEQ ID NO: 1490461 - DNA, 15 bp, Homo sapiens
acttaacccctctgg

SEQ ID NO: 1490462 - DNA, 15 bp, Homo sapiens
cttaacccctctggg

SEQ ID NO: 1490463 - DNA, 15 bp, Homo sapiens
ttaacccctctgggc

SEQ ID NO: 1490464 - DNA, 15 bp, Homo sapiens
taacccctctgggca

SEQ ID NO: 1490465 - DNA, 15 bp, Homo sapiens
aacccctctgggcag

SEQ ID NO: 1490466 - DNA, 15 bp, Homo sapiens
acccctctgggcagg

SEQ ID NO: 1490467 - DNA, 15 bp, Homo sapiens
cccctctgggcaggt

SEQ ID NO: 1490468 - DNA, 15 bp, Homo sapiens
ccctctgggcaggtc

SEQ ID NO: 1490469 - DNA, 15 bp, Homo sapiens
cctctgggcaggtct

SEQ ID NO: 1490470 - DNA, 15 bp, Homo sapiens
ctctgggcaggtctc

SEQ ID NO: 1490471 - DNA, 15 bp, Homo sapiens
tctgggcaggtctca

SEQ ID NO: 1490472 - DNA, 15 bp, Homo sapiens
ctgggcaggtctcag

SEQ ID NO: 1490473 - DNA, 15 bp, Homo sapiens
tgggcaggtctcagc

SEQ ID NO: 1490474 - DNA, 15 bp, Homo sapiens
gggcaggtctcagca

SEQ ID NO: 1490475 - DNA, 15 bp, Homo sapiens
ggcaggtctcagcag

SEQ ID NO: 1490476 - DNA, 15 bp, Homo sapiens
gcaggtctcagcaga

SEQ ID NO: 1490477 - DNA, 15 bp, Homo sapiens
caggtctcagcagag

SEQ ID NO: 1490478 - DNA, 15 bp, Homo sapiens
aggtctcagcagagc

SEQ ID NO: 1490479 - DNA, 15 bp, Homo sapiens
ggtctcagcagagca

SEQ ID NO: 1490480 - DNA, 15 bp, Homo sapiens
gtctcagcagagcaa

SEQ ID NO: 1490481 - DNA, 15 bp, Homo sapiens
tctcagcagagcaaa

SEQ ID NO: 1490482 - DNA, 15 bp, Homo sapiens
ctcagcagagcaaag

SEQ ID NO: 1490483 - DNA, 15 bp, Homo sapiens
tcagcagagcaaagg

SEQ ID NO: 1490484 - DNA, 15 bp, Homo sapiens
cagcagagcaaaggt

SEQ ID NO: 1490485 - DNA, 15 bp, Homo sapiens
agcagagcaaaggtg

SEQ ID NO: 1490486 - DNA, 15 bp, Homo sapiens
gcagagcaaaggtga

SEQ ID NO: 1490487 - DNA, 15 bp, Homo sapiens
cagagcaaaggtgac

SEQ ID NO: 1490488 - DNA, 15 bp, Homo sapiens
agagcaaaggtgacc

SEQ ID NO: 1490489 - DNA, 15 bp, Homo sapiens
gagcaaaggtgacca

SEQ ID NO: 1490490 - DNA, 15 bp, Homo sapiens
agcaaaggtgaccaa

SEQ ID NO: 1490491 - DNA, 15 bp, Homo sapiens
gcaaaggtgaccaaa

SEQ ID NO: 1490492 - DNA, 15 bp, Homo sapiens
caaaggtgaccaaac

SEQ ID NO: 1490493 - DNA, 15 bp, Homo sapiens
aaaggtgaccaaacc

SEQ ID NO: 1490494 - DNA, 15 bp, Homo sapiens
aaggtgaccaaacca

SEQ ID NO: 1490495 - DNA, 15 bp, Homo sapiens
aggtgaccaaaccat

SEQ ID NO: 1490496 - DNA, 15 bp, Homo sapiens
ggtgaccaaaccatt

SEQ ID NO: 1490497 - DNA, 15 bp, Homo sapiens
gtgaccaaaccattc

SEQ ID NO: 1490498 - DNA, 15 bp, Homo sapiens
tgaccaaaccattct

SEQ ID NO: 1490499 - DNA, 15 bp, Homo sapiens
gaccaaaccattctt

SEQ ID NO: 1490500 - DNA, 15 bp, Homo sapiens
accaaaccattcttt

SEQ ID NO: 1490501 - DNA, 15 bp, Homo sapiens
ccaaaccattcttta

SEQ ID NO: 1490502 - DNA, 15 bp, Homo sapiens
caaaccattctttag

SEQ ID NO: 1490503 - DNA, 15 bp, Homo sapiens
aaaccattctttagt

SEQ ID NO: 1490504 - DNA, 15 bp, Homo sapiens
aaccattctttagta

SEQ ID NO: 1490505 - DNA, 15 bp, Homo sapiens
accattctttagtaa

SEQ ID NO: 1490506 - DNA, 15 bp, Homo sapiens
ccattctttagtaag

SEQ ID NO: 1490507 - DNA, 15 bp, Homo sapiens
cattctttagtaaga

SEQ ID NO: 1490508 - DNA, 15 bp, Homo sapiens
attctttagtaagag

SEQ ID NO: 1490509 - DNA, 15 bp, Homo sapiens
ttctttagtaagagt

SEQ ID NO: 1490510 - DNA, 15 bp, Homo sapiens
tctttagtaagagtg

SEQ ID NO: 1490511 - DNA, 15 bp, Homo sapiens
ctttagtaagagtgg

SEQ ID NO: 1490512 - DNA, 15 bp, Homo sapiens
tttagtaagagtgga

SEQ ID NO: 1490513 - DNA, 15 bp, Homo sapiens
ttagtaagagtggag

SEQ ID NO: 1490514 - DNA, 15 bp, Homo sapiens
tagtaagagtggaga

SEQ ID NO: 1490515 - DNA, 15 bp, Homo sapiens
agtaagagtggagaa

SEQ ID NO: 1490516 - DNA, 15 bp, Homo sapiens
gtaagagtggagaag

SEQ ID NO: 1490517 - DNA, 15 bp, Homo sapiens
taagagtggagaagg

SEQ ID NO: 1490518 - DNA, 15 bp, Homo sapiens
aagagtggagaaggg

SEQ ID NO: 1490519 - DNA, 15 bp, Homo sapiens
agagtggagaaggga

SEQ ID NO: 1490520 - DNA, 15 bp, Homo sapiens
gagtggagaagggat

SEQ ID NO: 1490521 - DNA, 15 bp, Homo sapiens
agtggagaagggatg

SEQ ID NO: 1490522 - DNA, 15 bp, Homo sapiens
gtggagaagggatga

SEQ ID NO: 1490523 - DNA, 15 bp, Homo sapiens
tggagaagggatgag

SEQ ID NO: 1490524 - DNA, 15 bp, Homo sapiens
ggagaagggatgagg

SEQ ID NO: 1490525 - DNA, 15 bp, Homo sapiens
gagaagggatgagga

SEQ ID NO: 1490526 - DNA, 15 bp, Homo sapiens
agaagggatgaggaa

SEQ ID NO: 1490527 - DNA, 15 bp, Homo sapiens
gaagggatgaggaag

SEQ ID NO: 1490528 - DNA, 15 bp, Homo sapiens
aagggatgaggaagg

SEQ ID NO: 1490529 - DNA, 15 bp, Homo sapiens
agggatgaggaaggt

SEQ ID NO: 1490530 - DNA, 15 bp, Homo sapiens
gggatgaggaaggtg

SEQ ID NO: 1490531 - DNA, 15 bp, Homo sapiens
ggatgaggaaggtgt

SEQ ID NO: 1490532 - DNA, 15 bp, Homo sapiens
gatgaggaaggtgtc

SEQ ID NO: 1490533 - DNA, 15 bp, Homo sapiens
atgaggaaggtgtct

SEQ ID NO: 1490534 - DNA, 15 bp, Homo sapiens
tgaggaaggtgtcta

SEQ ID NO: 1490535 - DNA, 15 bp, Homo sapiens
gaggaaggtgtctac

SEQ ID NO: 1490536 - DNA, 15 bp, Homo sapiens
aggaaggtgtctacc

SEQ ID NO: 1490537 - DNA, 15 bp, Homo sapiens
ggaaggtgtctacct

SEQ ID NO: 1490538 - DNA, 15 bp, Homo sapiens
gaaggtgtctacctt

SEQ ID NO: 1490539 - DNA, 15 bp, Homo sapiens
aaggtgtctaccttc

SEQ ID NO: 1490540 - DNA, 15 bp, Homo sapiens
aggtgtctaccttcc

SEQ ID NO: 1490541 - DNA, 15 bp, Homo sapiens
ggtgtctaccttcct

SEQ ID NO: 1490542 - DNA, 15 bp, Homo sapiens
gtgtctaccttcctg

SEQ ID NO: 1490543 - DNA, 15 bp, Homo sapiens
tgtctaccttcctgt

SEQ ID NO: 1490544 - DNA, 15 bp, Homo sapiens
gtctaccttcctgtg

SEQ ID NO: 1490545 - DNA, 15 bp, Homo sapiens
tctaccttcctgtgg

SEQ ID NO: 1490546 - DNA, 15 bp, Homo sapiens
ctaccttcctgtggg

SEQ ID NO: 1490547 - DNA, 15 bp, Homo sapiens
taccttcctgtgggg

SEQ ID NO: 1490548 - DNA, 15 bp, Homo sapiens
accttcctgtggggg

SEQ ID NO: 1490549 - DNA, 15 bp, Homo sapiens
ccttcctgtgggggc

SEQ ID NO: 1490550 - DNA, 15 bp, Homo sapiens
cttcctgtgggggct

SEQ ID NO: 1490551 - DNA, 15 bp, Homo sapiens
ttcctgtgggggctc

SEQ ID NO: 1490552 - DNA, 15 bp, Homo sapiens
tcctgtgggggctca

SEQ ID NO: 1490553 - DNA, 15 bp, Homo sapiens
cctgtgggggctcac

SEQ ID NO: 1490554 - DNA, 15 bp, Homo sapiens
ctgtgggggctcact

SEQ ID NO: 1490555 - DNA, 15 bp, Homo sapiens
tgtgggggctcactg

SEQ ID NO: 1490556 - DNA, 15 bp, Homo sapiens
gtgggggctcactgt

SEQ ID NO: 1490557 - DNA, 15 bp, Homo sapiens
tgggggctcactgtg

SEQ ID NO: 1490558 - DNA, 15 bp, Homo sapiens
gggggctcactgtgt

SEQ ID NO: 1490559 - DNA, 15 bp, Homo sapiens
ggggctcactgtgtc

SEQ ID NO: 1490560 - DNA, 15 bp, Homo sapiens
gggctcactgtgtct

SEQ ID NO: 1490561 - DNA, 15 bp, Homo sapiens
ggctcactgtgtctg

SEQ ID NO: 1490562 - DNA, 15 bp, Homo sapiens
gctcactgtgtctgg

SEQ ID NO: 1490563 - DNA, 15 bp, Homo sapiens
ctcactgtgtctggg

SEQ ID NO: 1490564 - DNA, 15 bp, Homo sapiens
tcactgtgtctggga

SEQ ID NO: 1490565 - DNA, 15 bp, Homo sapiens
cactgtgtctgggag

SEQ ID NO: 1490566 - DNA, 15 bp, Homo sapiens
actgtgtctgggagg

SEQ ID NO: 1490567 - DNA, 15 bp, Homo sapiens
ctgtgtctgggaggg

SEQ ID NO: 1490568 - DNA, 15 bp, Homo sapiens
tgtgtctgggagggg

SEQ ID NO: 1490569 - DNA, 15 bp, Homo sapiens
gtgtctgggaggggg

SEQ ID NO: 1490570 - DNA, 15 bp, Homo sapiens
tgtctgggagggggc

SEQ ID NO: 1490571 - DNA, 15 bp, Homo sapiens
gtctgggagggggca

SEQ ID NO: 1490572 - DNA, 15 bp, Homo sapiens
tctgggagggggcag

SEQ ID NO: 1490573 - DNA, 15 bp, Homo sapiens
ctgggagggggcagg

SEQ ID NO: 1490574 - DNA, 15 bp, Homo sapiens
tgggagggggcaggc

SEQ ID NO: 1490575 - DNA, 15 bp, Homo sapiens
gggagggggcaggca

SEQ ID NO: 1490576 - DNA, 15 bp, Homo sapiens
ggagggggcaggcac

SEQ ID NO: 1490577 - DNA, 15 bp, Homo sapiens
gagggggcaggcacc

SEQ ID NO: 1490578 - DNA, 15 bp, Homo sapiens
agggggcaggcacct

SEQ ID NO: 1490579 - DNA, 15 bp, Homo sapiens
gggggcaggcacctg

SEQ ID NO: 1490580 - DNA, 15 bp, Homo sapiens
ggggcaggcacctgg

SEQ ID NO: 1490581 - DNA, 15 bp, Homo sapiens
gggcaggcacctgga

SEQ ID NO: 1490582 - DNA, 15 bp, Homo sapiens
ggcaggcacctggaa

SEQ ID NO: 1490583 - DNA, 15 bp, Homo sapiens
gcaggcacctggaag

SEQ ID NO: 1490584 - DNA, 15 bp, Homo sapiens
caggcacctggaagg

SEQ ID NO: 1490585 - DNA, 15 bp, Homo sapiens
aggcacctggaaggc

SEQ ID NO: 1490586 - DNA, 15 bp, Homo sapiens
ggcacctggaaggcg

SEQ ID NO: 1490587 - DNA, 15 bp, Homo sapiens
gcacctggaaggcgt

SEQ ID NO: 1490588 - DNA, 15 bp, Homo sapiens
cacctggaaggcgtg

SEQ ID NO: 1490589 - DNA, 15 bp, Homo sapiens
acctggaaggcgtgc

SEQ ID NO: 1490590 - DNA, 15 bp, Homo sapiens
cctggaaggcgtgca

SEQ ID NO: 1490591 - DNA, 15 bp, Homo sapiens
ctggaaggcgtgcat

SEQ ID NO: 1490592 - DNA, 15 bp, Homo sapiens
tggaaggcgtgcatg

SEQ ID NO: 1490593 - DNA, 15 bp, Homo sapiens
ggaaggcgtgcatga

SEQ ID NO: 1490594 - DNA, 15 bp, Homo sapiens
gaaggcgtgcatgaa

SEQ ID NO: 1490595 - DNA, 15 bp, Homo sapiens
aaggcgtgcatgaag

SEQ ID NO: 1490596 - DNA, 15 bp, Homo sapiens
aggcgtgcatgaagt

SEQ ID NO: 1490597 - DNA, 15 bp, Homo sapiens
ggcgtgcatgaagtg

SEQ ID NO: 1490598 - DNA, 15 bp, Homo sapiens
gcgtgcatgaagtgg

SEQ ID NO: 1490599 - DNA, 15 bp, Homo sapiens
cgtgcatgaagtggg

SEQ ID NO: 1490600 - DNA, 15 bp, Homo sapiens
gtgcatgaagtgggt

SEQ ID NO: 1490601 - DNA, 15 bp, Homo sapiens
tgcatgaagtgggta

SEQ ID NO: 1490602 - DNA, 15 bp, Homo sapiens
gcatgaagtgggtac

SEQ ID NO: 1490603 - DNA, 15 bp, Homo sapiens
catgaagtgggtaca

SEQ ID NO: 1490604 - DNA, 15 bp, Homo sapiens
atgaagtgggtacaa

SEQ ID NO: 1490605 - DNA, 15 bp, Homo sapiens
tgaagtgggtacaat

SEQ ID NO: 1490606 - DNA, 15 bp, Homo sapiens
gaagtgggtacaata

SEQ ID NO: 1490607 - DNA, 15 bp, Homo sapiens
aagtgggtacaatac

SEQ ID NO: 1490608 - DNA, 15 bp, Homo sapiens
agtgggtacaatact

SEQ ID NO: 1490609 - DNA, 15 bp, Homo sapiens
gtgggtacaatactg

SEQ ID NO: 1490610 - DNA, 15 bp, Homo sapiens
tgggtacaatactgg

SEQ ID NO: 1490611 - DNA, 15 bp, Homo sapiens
gggtacaatactggg

SEQ ID NO: 1490612 - DNA, 15 bp, Homo sapiens
ggtacaatactgggt

SEQ ID NO: 1490613 - DNA, 15 bp, Homo sapiens
gtacaatactgggtc

SEQ ID NO: 1490614 - DNA, 15 bp, Homo sapiens
tacaatactgggtca

SEQ ID NO: 1490615 - DNA, 15 bp, Homo sapiens
acaatactgggtcag

SEQ ID NO: 1490616 - DNA, 15 bp, Homo sapiens
caatactgggtcagt

SEQ ID NO: 1490617 - DNA, 15 bp, Homo sapiens
aatactgggtcagtt

SEQ ID NO: 1490618 - DNA, 15 bp, Homo sapiens
atactgggtcagttc

SEQ ID NO: 1490619 - DNA, 15 bp, Homo sapiens
tactgggtcagttcg

SEQ ID NO: 1490620 - DNA, 15 bp, Homo sapiens
actgggtcagttcgg

SEQ ID NO: 1490621 - DNA, 15 bp, Homo sapiens
ctgggtcagttcggg

SEQ ID NO: 1490622 - DNA, 15 bp, Homo sapiens
tgggtcagttcgggc

SEQ ID NO: 1490623 - DNA, 15 bp, Homo sapiens
gggtcagttcgggct

SEQ ID NO: 1490624 - DNA, 15 bp, Homo sapiens
ggtcagttcgggctt

SEQ ID NO: 1490625 - DNA, 15 bp, Homo sapiens
gtcagttcgggcttt

SEQ ID NO: 1490626 - DNA, 15 bp, Homo sapiens
tcagttcgggctttg

SEQ ID NO: 1490627 - DNA, 15 bp, Homo sapiens
cagttcgggctttgc

SEQ ID NO: 1490628 - DNA, 15 bp, Homo sapiens
agttcgggctttgct

SEQ ID NO: 1490629 - DNA, 15 bp, Homo sapiens
gttcgggctttgctt

SEQ ID NO: 1490630 - DNA, 15 bp, Homo sapiens
ttcgggctttgcttg

SEQ ID NO: 1490631 - DNA, 15 bp, Homo sapiens
tcgggctttgcttgt

SEQ ID NO: 1490632 - DNA, 15 bp, Homo sapiens
cgggctttgcttgta

SEQ ID NO: 1490633 - DNA, 15 bp, Homo sapiens
gggctttgcttgtag

SEQ ID NO: 1490634 - DNA, 15 bp, Homo sapiens
ggctttgcttgtaga

SEQ ID NO: 1490635 - DNA, 15 bp, Homo sapiens
gctttgcttgtagaa

SEQ ID NO: 1490636 - DNA, 15 bp, Homo sapiens
ctttgcttgtagaaa

SEQ ID NO: 1490637 - DNA, 15 bp, Homo sapiens
tttgcttgtagaaat

SEQ ID NO: 1490638 - DNA, 15 bp, Homo sapiens
ttgcttgtagaaatg

SEQ ID NO: 1490639 - DNA, 15 bp, Homo sapiens
tgcttgtagaaatgg

SEQ ID NO: 1490640 - DNA, 15 bp, Homo sapiens
gcttgtagaaatgga

SEQ ID NO: 1490641 - DNA, 15 bp, Homo sapiens
cttgtagaaatggag

SEQ ID NO: 1490642 - DNA, 15 bp, Homo sapiens
ttgtagaaatggaga

SEQ ID NO: 1490643 - DNA, 15 bp, Homo sapiens
tgtagaaatggagac

SEQ ID NO: 1490644 - DNA, 15 bp, Homo sapiens
gtagaaatggagaca

SEQ ID NO: 1490645 - DNA, 15 bp, Homo sapiens
tagaaatggagacag

SEQ ID NO: 1490646 - DNA, 15 bp, Homo sapiens
agaaatggagacagg

SEQ ID NO: 1490647 - DNA, 15 bp, Homo sapiens
gaaatggagacagga

SEQ ID NO: 1490648 - DNA, 15 bp, Homo sapiens
aaatggagacaggag

SEQ ID NO: 1490649 - DNA, 15 bp, Homo sapiens
aatggagacaggagg

SEQ ID NO: 1490650 - DNA, 15 bp, Homo sapiens
atggagacaggaggg

SEQ ID NO: 1490651 - DNA, 15 bp, Homo sapiens
tggagacaggagggt

SEQ ID NO: 1490652 - DNA, 15 bp, Homo sapiens
ggagacaggagggtc

SEQ ID NO: 1490653 - DNA, 15 bp, Homo sapiens
gagacaggagggtcc

SEQ ID NO: 1490654 - DNA, 15 bp, Homo sapiens
agacaggagggtcca

SEQ ID NO: 1490655 - DNA, 15 bp, Homo sapiens
gacaggagggtccag

SEQ ID NO: 1490656 - DNA, 15 bp, Homo sapiens
acaggagggtccagg

SEQ ID NO: 1490657 - DNA, 15 bp, Homo sapiens
caggagggtccaggg

SEQ ID NO: 1490658 - DNA, 15 bp, Homo sapiens
aggagggtccaggga

SEQ ID NO: 1490659 - DNA, 15 bp, Homo sapiens
ggagggtccagggag

SEQ ID NO: 1490660 - DNA, 15 bp, Homo sapiens
gagggtccagggaga

SEQ ID NO: 1490661 - DNA, 15 bp, Homo sapiens
agggtccagggagag

SEQ ID NO: 1490662 - DNA, 15 bp, Homo sapiens
gggtccagggagaga

SEQ ID NO: 1490663 - DNA, 15 bp, Homo sapiens
ggtccagggagagaa

SEQ ID NO: 1490664 - DNA, 15 bp, Homo sapiens
gtccagggagagaaa

SEQ ID NO: 1490665 - DNA, 15 bp, Homo sapiens
tccagggagagaaaa

SEQ ID NO: 1490666 - DNA, 15 bp, Homo sapiens
ccagggagagaaaat

SEQ ID NO: 1490667 - DNA, 15 bp, Homo sapiens
cagggagagaaaatc

SEQ ID NO: 1490668 - DNA, 15 bp, Homo sapiens
agggagagaaaatca

SEQ ID NO: 1490669 - DNA, 15 bp, Homo sapiens
gggagagaaaatcac

SEQ ID NO: 1490670 - DNA, 15 bp, Homo sapiens
ggagagaaaatcaca

SEQ ID NO: 1490671 - DNA, 15 bp, Homo sapiens
gagagaaaatcacag

SEQ ID NO: 1490672 - DNA, 15 bp, Homo sapiens
agagaaaatcacagg

SEQ ID NO: 1490673 - DNA, 15 bp, Homo sapiens
gagaaaatcacaggg

SEQ ID NO: 1490674 - DNA, 15 bp, Homo sapiens
agaaaatcacagggt

SEQ ID NO: 1490675 - DNA, 15 bp, Homo sapiens
gaaaatcacagggtc

SEQ ID NO: 1490676 - DNA, 15 bp, Homo sapiens
aaaatcacagggtca

SEQ ID NO: 1490677 - DNA, 15 bp, Homo sapiens
aaatcacagggtcat

SEQ ID NO: 1490678 - DNA, 15 bp, Homo sapiens
aatcacagggtcatg

SEQ ID NO: 1490679 - DNA, 15 bp, Homo sapiens
atcacagggtcatgg

SEQ ID NO: 1490680 - DNA, 15 bp, Homo sapiens
tcacagggtcatgga

SEQ ID NO: 1490681 - DNA, 15 bp, Homo sapiens
cacagggtcatggaa

SEQ ID NO: 1490682 - DNA, 15 bp, Homo sapiens
acagggtcatggaag

SEQ ID NO: 1490683 - DNA, 15 bp, Homo sapiens
cagggtcatggaaga

SEQ ID NO: 1490684 - DNA, 15 bp, Homo sapiens
agggtcatggaagag

SEQ ID NO: 1490685 - DNA, 15 bp, Homo sapiens
gggtcatggaagagg

SEQ ID NO: 1490686 - DNA, 15 bp, Homo sapiens
ggtcatggaagagga

SEQ ID NO: 1490687 - DNA, 15 bp, Homo sapiens
gtcatggaagaggac

SEQ ID NO: 1490688 - DNA, 15 bp, Homo sapiens
tcatggaagaggaca

SEQ ID NO: 1490689 - DNA, 15 bp, Homo sapiens
catggaagaggacag

SEQ ID NO: 1490690 - DNA, 15 bp, Homo sapiens
atggaagaggacagt

SEQ ID NO: 1490691 - DNA, 15 bp, Homo sapiens
tggaagaggacagtg

SEQ ID NO: 1490692 - DNA, 15 bp, Homo sapiens
ggaagaggacagtgg

SEQ ID NO: 1490693 - DNA, 15 bp, Homo sapiens
gaagaggacagtgga

SEQ ID NO: 1490694 - DNA, 15 bp, Homo sapiens
aagaggacagtggac

SEQ ID NO: 1490695 - DNA, 15 bp, Homo sapiens
agaggacagtggaca

SEQ ID NO: 1490696 - DNA, 15 bp, Homo sapiens
gaggacagtggacag

SEQ ID NO: 1490697 - DNA, 15 bp, Homo sapiens
aggacagtggacagg

SEQ ID NO: 1490698 - DNA, 15 bp, Homo sapiens
ggacagtggacaggc

SEQ ID NO: 1490699 - DNA, 15 bp, Homo sapiens
gacagtggacaggcg

SEQ ID NO: 1490700 - DNA, 15 bp, Homo sapiens
acagtggacaggcgg

SEQ ID NO: 1490701 - DNA, 15 bp, Homo sapiens
cagtggacaggcggc

SEQ ID NO: 1490702 - DNA, 15 bp, Homo sapiens
agtggacaggcggcc

SEQ ID NO: 1490703 - DNA, 15 bp, Homo sapiens
gtggacaggcggcct

SEQ ID NO: 1490704 - DNA, 15 bp, Homo sapiens
tggacaggcggcctc

SEQ ID NO: 1490705 - DNA, 15 bp, Homo sapiens
ggacaggcggcctca

SEQ ID NO: 1490706 - DNA, 15 bp, Homo sapiens
gacaggcggcctcag

SEQ ID NO: 1490707 - DNA, 15 bp, Homo sapiens
acaggcggcctcagt

SEQ ID NO: 1490708 - DNA, 15 bp, Homo sapiens
caggcggcctcagtt

SEQ ID NO: 1490709 - DNA, 15 bp, Homo sapiens
aggcggcctcagttt

SEQ ID NO: 1490710 - DNA, 15 bp, Homo sapiens
ggcggcctcagtttt

SEQ ID NO: 1490711 - DNA, 15 bp, Homo sapiens
gcggcctcagttttg

SEQ ID NO: 1490712 - DNA, 15 bp, Homo sapiens
cggcctcagttttgc

SEQ ID NO: 1490713 - DNA, 15 bp, Homo sapiens
ggcctcagttttgcg

SEQ ID NO: 1490714 - DNA, 15 bp, Homo sapiens
gcctcagttttgcgt

SEQ ID NO: 1490715 - DNA, 15 bp, Homo sapiens
cctcagttttgcgtc

SEQ ID NO: 1490716 - DNA, 15 bp, Homo sapiens
ctcagttttgcgtcc

SEQ ID NO: 1490717 - DNA, 15 bp, Homo sapiens
tcagttttgcgtcct

SEQ ID NO: 1490718 - DNA, 15 bp, Homo sapiens
cagttttgcgtcctg

SEQ ID NO: 1490719 - DNA, 15 bp, Homo sapiens
agttttgcgtcctgc

SEQ ID NO: 1490720 - DNA, 15 bp, Homo sapiens
gttttgcgtcctgcc

SEQ ID NO: 1490721 - DNA, 15 bp, Homo sapiens
ttttgcgtcctgcct

SEQ ID NO: 1490722 - DNA, 15 bp, Homo sapiens
tttgcgtcctgcctc

SEQ ID NO: 1490723 - DNA, 15 bp, Homo sapiens
ttgcgtcctgcctct

SEQ ID NO: 1490724 - DNA, 15 bp, Homo sapiens
tgcgtcctgcctctg

SEQ ID NO: 1490725 - DNA, 15 bp, Homo sapiens
gcgtcctgcctctgc

SEQ ID NO: 1490726 - DNA, 15 bp, Homo sapiens
cgtcctgcctctgcc

SEQ ID NO: 1490727 - DNA, 15 bp, Homo sapiens
gtcctgcctctgccc

SEQ ID NO: 1490728 - DNA, 15 bp, Homo sapiens
tcctgcctctgcccc

SEQ ID NO: 1490729 - DNA, 15 bp, Homo sapiens
cctgcctctgcccct

SEQ ID NO: 1490730 - DNA, 15 bp, Homo sapiens
ctgcctctgcccctt

SEQ ID NO: 1490731 - DNA, 15 bp, Homo sapiens
tgcctctgccccttg

SEQ ID NO: 1490732 - DNA, 15 bp, Homo sapiens
gcctctgccccttgg

SEQ ID NO: 1490733 - DNA, 15 bp, Homo sapiens
cctctgccccttggg

SEQ ID NO: 1490734 - DNA, 15 bp, Homo sapiens
ctctgccccttgggc

SEQ ID NO: 1490735 - DNA, 15 bp, Homo sapiens
tctgccccttgggca

SEQ ID NO: 1490736 - DNA, 15 bp, Homo sapiens
ctgccccttgggcaa

SEQ ID NO: 1490737 - DNA, 15 bp, Homo sapiens
tgccccttgggcaag

SEQ ID NO: 1490738 - DNA, 15 bp, Homo sapiens
gccccttgggcaagt

SEQ ID NO: 1490739 - DNA, 15 bp, Homo sapiens
ccccttgggcaagtc

SEQ ID NO: 1490740 - DNA, 15 bp, Homo sapiens
cccttgggcaagtca

SEQ ID NO: 1490741 - DNA, 15 bp, Homo sapiens
ccttgggcaagtcat

SEQ ID NO: 1490742 - DNA, 15 bp, Homo sapiens
cttgggcaagtcatc

SEQ ID NO: 1490743 - DNA, 15 bp, Homo sapiens
ttgggcaagtcatcg

SEQ ID NO: 1490744 - DNA, 15 bp, Homo sapiens
tgggcaagtcatcga

SEQ ID NO: 1490745 - DNA, 15 bp, Homo sapiens
gggcaagtcatcgaa

SEQ ID NO: 1490746 - DNA, 15 bp, Homo sapiens
ggcaagtcatcgaaa

SEQ ID NO: 1490747 - DNA, 15 bp, Homo sapiens
gcaagtcatcgaaac

SEQ ID NO: 1490748 - DNA, 15 bp, Homo sapiens
caagtcatcgaaacc

SEQ ID NO: 1490749 - DNA, 15 bp, Homo sapiens
aagtcatcgaaaccc

SEQ ID NO: 1490750 - DNA, 15 bp, Homo sapiens
agtcatcgaaacccc

SEQ ID NO: 1490751 - DNA, 15 bp, Homo sapiens
gtcatcgaaacccct

SEQ ID NO: 1490752 - DNA, 15 bp, Homo sapiens
tcatcgaaacccctc

SEQ ID NO: 1490753 - DNA, 15 bp, Homo sapiens
catcgaaacccctca

SEQ ID NO: 1490754 - DNA, 15 bp, Homo sapiens
atcgaaacccctcag

SEQ ID NO: 1490755 - DNA, 15 bp, Homo sapiens
tcgaaacccctcaga

SEQ ID NO: 1490756 - DNA, 15 bp, Homo sapiens
cgaaacccctcagag

SEQ ID NO: 1490757 - DNA, 15 bp, Homo sapiens
gaaacccctcagagc

SEQ ID NO: 1490758 - DNA, 15 bp, Homo sapiens
aaacccctcagagca

SEQ ID NO: 1490759 - DNA, 15 bp, Homo sapiens
aacccctcagagcac

SEQ ID NO: 1490760 - DNA, 15 bp, Homo sapiens
acccctcagagcacc

SEQ ID NO: 1490761 - DNA, 15 bp, Homo sapiens
cccctcagagcacca

SEQ ID NO: 1490762 - DNA, 15 bp, Homo sapiens
ccctcagagcaccag

SEQ ID NO: 1490763 - DNA, 15 bp, Homo sapiens
cctcagagcaccagc

SEQ ID NO: 1490764 - DNA, 15 bp, Homo sapiens
ctcagagcaccagct

SEQ ID NO: 1490765 - DNA, 15 bp, Homo sapiens
tcagagcaccagctt

SEQ ID NO: 1490766 - DNA, 15 bp, Homo sapiens
cagagcaccagcttt

SEQ ID NO: 1490767 - DNA, 15 bp, Homo sapiens
agagcaccagctttc

SEQ ID NO: 1490768 - DNA, 15 bp, Homo sapiens
gagcaccagctttct

SEQ ID NO: 1490769 - DNA, 15 bp, Homo sapiens
agcaccagctttctc

SEQ ID NO: 1490770 - DNA, 15 bp, Homo sapiens
gcaccagctttctcc

SEQ ID NO: 1490771 - DNA, 15 bp, Homo sapiens
caccagctttctccc

SEQ ID NO: 1490772 - DNA, 15 bp, Homo sapiens
accagctttctccct

SEQ ID NO: 1490773 - DNA, 15 bp, Homo sapiens
ccagctttctccctt

SEQ ID NO: 1490774 - DNA, 15 bp, Homo sapiens
cagctttctcccttc

SEQ ID NO: 1490775 - DNA, 15 bp, Homo sapiens
agctttctcccttct

SEQ ID NO: 1490776 - DNA, 15 bp, Homo sapiens
gctttctcccttctc

SEQ ID NO: 1490777 - DNA, 15 bp, Homo sapiens
ctttctcccttctca

SEQ ID NO: 1490778 - DNA, 15 bp, Homo sapiens
tttctcccttctcaa

SEQ ID NO: 1490779 - DNA, 15 bp, Homo sapiens
ttctcccttctcaaa

SEQ ID NO: 1490780 - DNA, 15 bp, Homo sapiens
tctcccttctcaaac

SEQ ID NO: 1490781 - DNA, 15 bp, Homo sapiens
ctcccttctcaaaca

SEQ ID NO: 1490782 - DNA, 15 bp, Homo sapiens
tcccttctcaaacag

SEQ ID NO: 1490783 - DNA, 15 bp, Homo sapiens
cccttctcaaacagg

SEQ ID NO: 1490784 - DNA, 15 bp, Homo sapiens
ccttctcaaacagga

SEQ ID NO: 1490785 - DNA, 15 bp, Homo sapiens
cttctcaaacaggac

SEQ ID NO: 1490786 - DNA, 15 bp, Homo sapiens
ttctcaaacaggact

SEQ ID NO: 1490787 - DNA, 15 bp, Homo sapiens
tctcaaacaggactg

SEQ ID NO: 1490788 - DNA, 15 bp, Homo sapiens
ctcaaacaggactgg

SEQ ID NO: 1490789 - DNA, 15 bp, Homo sapiens
tcaaacaggactggg

SEQ ID NO: 1490790 - DNA, 15 bp, Homo sapiens
caaacaggactggga

SEQ ID NO: 1490791 - DNA, 15 bp, Homo sapiens
aaacaggactgggat

SEQ ID NO: 1490792 - DNA, 15 bp, Homo sapiens
aacaggactgggata

SEQ ID NO: 1490793 - DNA, 15 bp, Homo sapiens
acaggactgggatat

SEQ ID NO: 1490794 - DNA, 15 bp, Homo sapiens
caggactgggatatt

SEQ ID NO: 1490795 - DNA, 15 bp, Homo sapiens
aggactgggatattc

SEQ ID NO: 1490796 - DNA, 15 bp, Homo sapiens
ggactgggatattca

SEQ ID NO: 1490797 - DNA, 15 bp, Homo sapiens
gactgggatattcac

SEQ ID NO: 1490798 - DNA, 15 bp, Homo sapiens
actgggatattcact

SEQ ID NO: 1490799 - DNA, 15 bp, Homo sapiens
ctgggatattcactt

SEQ ID NO: 1490800 - DNA, 15 bp, Homo sapiens
tgggatattcacttc

SEQ ID NO: 1490801 - DNA, 15 bp, Homo sapiens
gggatattcacttcc

SEQ ID NO: 1490802 - DNA, 15 bp, Homo sapiens
ggatattcacttcct

SEQ ID NO: 1490803 - DNA, 15 bp, Homo sapiens
gatattcacttcctt

SEQ ID NO: 1490804 - DNA, 15 bp, Homo sapiens
atattcacttcctta

SEQ ID NO: 1490805 - DNA, 15 bp, Homo sapiens
tattcacttccttat

SEQ ID NO: 1490806 - DNA, 15 bp, Homo sapiens
attcacttccttatg

SEQ ID NO: 1490807 - DNA, 15 bp, Homo sapiens
ttcacttccttatgg

SEQ ID NO: 1490808 - DNA, 15 bp, Homo sapiens
tcacttccttatggt

SEQ ID NO: 1490809 - DNA, 15 bp, Homo sapiens
cacttccttatggtc

SEQ ID NO: 1490810 - DNA, 15 bp, Homo sapiens
acttccttatggtcc

SEQ ID NO: 1490811 - DNA, 15 bp, Homo sapiens
cttccttatggtcct

SEQ ID NO: 1490812 - DNA, 15 bp, Homo sapiens
ttccttatggtcctt

SEQ ID NO: 1490813 - DNA, 15 bp, Homo sapiens
tccttatggtcctta

SEQ ID NO: 1490814 - DNA, 15 bp, Homo sapiens
ccttatggtccttac

SEQ ID NO: 1490815 - DNA, 15 bp, Homo sapiens
cttatggtccttact

SEQ ID NO: 1490816 - DNA, 15 bp, Homo sapiens
ttatggtccttactc

SEQ ID NO: 1490817 - DNA, 15 bp, Homo sapiens
tatggtccttactct

SEQ ID NO: 1490818 - DNA, 15 bp, Homo sapiens
atggtccttactcta

SEQ ID NO: 1490819 - DNA, 15 bp, Homo sapiens
tggtccttactctag

SEQ ID NO: 1490820 - DNA, 15 bp, Homo sapiens
ggtccttactctagc

SEQ ID NO: 1490821 - DNA, 15 bp, Homo sapiens
gtccttactctagcg

SEQ ID NO: 1490822 - DNA, 15 bp, Homo sapiens
tccttactctagcgt

SEQ ID NO: 1490823 - DNA, 15 bp, Homo sapiens
ccttactctagcgtt

SEQ ID NO: 1490824 - DNA, 15 bp, Homo sapiens
cttactctagcgtta

SEQ ID NO: 1490825 - DNA, 15 bp, Homo sapiens
ttactctagcgttac

SEQ ID NO: 1490826 - DNA, 15 bp, Homo sapiens
tactctagcgttact

SEQ ID NO: 1490827 - DNA, 15 bp, Homo sapiens
actctagcgttactc

SEQ ID NO: 1490828 - DNA, 15 bp, Homo sapiens
ctctagcgttactct

SEQ ID NO: 1490829 - DNA, 15 bp, Homo sapiens
tctagcgttactctg

SEQ ID NO: 1490830 - DNA, 15 bp, Homo sapiens
ctagcgttactctga

SEQ ID NO: 1490831 - DNA, 15 bp, Homo sapiens
tagcgttactctgat

SEQ ID NO: 1490832 - DNA, 15 bp, Homo sapiens
agcgttactctgatg

SEQ ID NO: 1490833 - DNA, 15 bp, Homo sapiens
gcgttactctgatgc

SEQ ID NO: 1490834 - DNA, 15 bp, Homo sapiens
cgttactctgatgcc

SEQ ID NO: 1490835 - DNA, 15 bp, Homo sapiens
gttactctgatgcct

SEQ ID NO: 1490836 - DNA, 15 bp, Homo sapiens
ttactctgatgcctc

SEQ ID NO: 1490837 - DNA, 15 bp, Homo sapiens
tactctgatgcctca

SEQ ID NO: 1490838 - DNA, 15 bp, Homo sapiens
actctgatgcctcag

SEQ ID NO: 1490839 - DNA, 15 bp, Homo sapiens
ctctgatgcctcagg

SEQ ID NO: 1490840 - DNA, 15 bp, Homo sapiens
tctgatgcctcaggg

SEQ ID NO: 1490841 - DNA, 15 bp, Homo sapiens
ctgatgcctcaggga

SEQ ID NO: 1490842 - DNA, 15 bp, Homo sapiens
tgatgcctcagggaa

SEQ ID NO: 1490843 - DNA, 15 bp, Homo sapiens
gatgcctcagggaaa

SEQ ID NO: 1490844 - DNA, 15 bp, Homo sapiens
atgcctcagggaaag

SEQ ID NO: 1490845 - DNA, 15 bp, Homo sapiens
tgcctcagggaaagg

SEQ ID NO: 1490846 - DNA, 15 bp, Homo sapiens
gcctcagggaaagga

SEQ ID NO: 1490847 - DNA, 15 bp, Homo sapiens
cctcagggaaaggac

SEQ ID NO: 1490848 - DNA, 15 bp, Homo sapiens
ctcagggaaaggacc

SEQ ID NO: 1490849 - DNA, 15 bp, Homo sapiens
tcagggaaaggacct

SEQ ID NO: 1490850 - DNA, 15 bp, Homo sapiens
cagggaaaggacctg

SEQ ID NO: 1490851 - DNA, 15 bp, Homo sapiens
agggaaaggacctgg

SEQ ID NO: 1490852 - DNA, 15 bp, Homo sapiens
gggaaaggacctggg

SEQ ID NO: 1490853 - DNA, 15 bp, Homo sapiens
ggaaaggacctggga

SEQ ID NO: 1490854 - DNA, 15 bp, Homo sapiens
gaaaggacctgggat

SEQ ID NO: 1490855 - DNA, 15 bp, Homo sapiens
aaaggacctgggatg

SEQ ID NO: 1490856 - DNA, 15 bp, Homo sapiens
aaggacctgggatgg

SEQ ID NO: 1490857 - DNA, 15 bp, Homo sapiens
aggacctgggatggt

SEQ ID NO: 1490858 - DNA, 15 bp, Homo sapiens
ggacctgggatggtg

SEQ ID NO: 1490859 - DNA, 15 bp, Homo sapiens
gacctgggatggtgc

SEQ ID NO: 1490860 - DNA, 15 bp, Homo sapiens
acctgggatggtgcc

SEQ ID NO: 1490861 - DNA, 15 bp, Homo sapiens
cctgggatggtgcct

SEQ ID NO: 1490862 - DNA, 15 bp, Homo sapiens
ctgggatggtgcctg

SEQ ID NO: 1490863 - DNA, 15 bp, Homo sapiens
tgggatggtgcctga

SEQ ID NO: 1490864 - DNA, 15 bp, Homo sapiens
gggatggtgcctgag

SEQ ID NO: 1490865 - DNA, 15 bp, Homo sapiens
ggatggtgcctgaga

SEQ ID NO: 1490866 - DNA, 15 bp, Homo sapiens
gatggtgcctgagac

SEQ ID NO: 1490867 - DNA, 15 bp, Homo sapiens
atggtgcctgagacg

SEQ ID NO: 1490868 - DNA, 15 bp, Homo sapiens
tggtgcctgagacgc

SEQ ID NO: 1490869 - DNA, 15 bp, Homo sapiens
ggtgcctgagacgcg

SEQ ID NO: 1490870 - DNA, 15 bp, Homo sapiens
gtgcctgagacgcgt

SEQ ID NO: 1490871 - DNA, 15 bp, Homo sapiens
tgcctgagacgcgtt

SEQ ID NO: 1490872 - DNA, 15 bp, Homo sapiens
gcctgagacgcgtta

SEQ ID NO: 1490873 - DNA, 15 bp, Homo sapiens
cctgagacgcgttag

SEQ ID NO: 1490874 - DNA, 15 bp, Homo sapiens
ctgagacgcgttagg

SEQ ID NO: 1490875 - DNA, 15 bp, Homo sapiens
tgagacgcgttagga

SEQ ID NO: 1490876 - DNA, 15 bp, Homo sapiens
gagacgcgttaggaa

SEQ ID NO: 1490877 - DNA, 15 bp, Homo sapiens
agacgcgttaggaaa

SEQ ID NO: 1490878 - DNA, 15 bp, Homo sapiens
gacgcgttaggaaag

SEQ ID NO: 1490879 - DNA, 15 bp, Homo sapiens
acgcgttaggaaagt

SEQ ID NO: 1490880 - DNA, 15 bp, Homo sapiens
cgcgttaggaaagtg

SEQ ID NO: 1490881 - DNA, 15 bp, Homo sapiens
gcgttaggaaagtgc

SEQ ID NO: 1490882 - DNA, 15 bp, Homo sapiens
cgttaggaaagtgct

SEQ ID NO: 1490883 - DNA, 15 bp, Homo sapiens
gttaggaaagtgctc

SEQ ID NO: 1490884 - DNA, 15 bp, Homo sapiens
ttaggaaagtgctct

SEQ ID NO: 1490885 - DNA, 15 bp, Homo sapiens
taggaaagtgctcta

SEQ ID NO: 1490886 - DNA, 15 bp, Homo sapiens
aggaaagtgctctat

SEQ ID NO: 1490887 - DNA, 15 bp, Homo sapiens
ggaaagtgctctata

SEQ ID NO: 1490888 - DNA, 15 bp, Homo sapiens
gaaagtgctctatag

SEQ ID NO: 1490889 - DNA, 15 bp, Homo sapiens
aaagtgctctatagt

SEQ ID NO: 1490890 - DNA, 15 bp, Homo sapiens
aagtgctctatagtg

SEQ ID NO: 1490891 - DNA, 15 bp, Homo sapiens
agtgctctatagtga

SEQ ID NO: 1490892 - DNA, 15 bp, Homo sapiens
gtgctctatagtgac

SEQ ID NO: 1490893 - DNA, 15 bp, Homo sapiens
tgctctatagtgaca

SEQ ID NO: 1490894 - DNA, 15 bp, Homo sapiens
gctctatagtgacag

SEQ ID NO: 1490895 - DNA, 15 bp, Homo sapiens
ctctatagtgacagt

SEQ ID NO: 1490896 - DNA, 15 bp, Homo sapiens
tctatagtgacagtg

SEQ ID NO: 1490897 - DNA, 15 bp, Homo sapiens
ctatagtgacagtga

SEQ ID NO: 1490898 - DNA, 15 bp, Homo sapiens
tatagtgacagtgat

SEQ ID NO: 1490899 - DNA, 15 bp, Homo sapiens
atagtgacagtgatt

SEQ ID NO: 1490900 - DNA, 15 bp, Homo sapiens
tagtgacagtgattg

SEQ ID NO: 1490901 - DNA, 15 bp, Homo sapiens
agtgacagtgattgt

SEQ ID NO: 1490902 - DNA, 15 bp, Homo sapiens
gtgacagtgattgtt

SEQ ID NO: 1490903 - DNA, 15 bp, Homo sapiens
tgacagtgattgtta

SEQ ID NO: 1490904 - DNA, 15 bp, Homo sapiens
gacagtgattgttat

SEQ ID NO: 1490905 - DNA, 15 bp, Homo sapiens
acagtgattgttatg

SEQ ID NO: 1490906 - DNA, 15 bp, Homo sapiens
cagtgattgttatga

SEQ ID NO: 1490907 - DNA, 15 bp, Homo sapiens
agtgattgttatgag

SEQ ID NO: 1490908 - DNA, 15 bp, Homo sapiens
gtgattgttatgagc

SEQ ID NO: 1490909 - DNA, 15 bp, Homo sapiens
tgattgttatgagca

SEQ ID NO: 1490910 - DNA, 15 bp, Homo sapiens
gattgttatgagcaa

SEQ ID NO: 1490911 - DNA, 15 bp, Homo sapiens
attgttatgagcaaa

SEQ ID NO: 1490912 - DNA, 15 bp, Homo sapiens
ttgttatgagcaaag

SEQ ID NO: 1490913 - DNA, 15 bp, Homo sapiens
tgttatgagcaaaga

SEQ ID NO: 1490914 - DNA, 15 bp, Homo sapiens
gttatgagcaaagac

SEQ ID NO: 1490915 - DNA, 15 bp, Homo sapiens
ttatgagcaaagact

SEQ ID NO: 1490916 - DNA, 15 bp, Homo sapiens
tatgagcaaagactt

SEQ ID NO: 1490917 - DNA, 15 bp, Homo sapiens
atgagcaaagacttg

SEQ ID NO: 1490918 - DNA, 15 bp, Homo sapiens
tgagcaaagacttga

SEQ ID NO: 1490919 - DNA, 15 bp, Homo sapiens
gagcaaagacttgaa

SEQ ID NO: 1490920 - DNA, 15 bp, Homo sapiens
agcaaagacttgaaa

SEQ ID NO: 1490921 - DNA, 15 bp, Homo sapiens
gcaaagacttgaaag

SEQ ID NO: 1490922 - DNA, 15 bp, Homo sapiens
caaagacttgaaaga

SEQ ID NO: 1490923 - DNA, 15 bp, Homo sapiens
aaagacttgaaagac

SEQ ID NO: 1490924 - DNA, 15 bp, Homo sapiens
aagacttgaaagaca

SEQ ID NO: 1490925 - DNA, 15 bp, Homo sapiens
agacttgaaagacag

SEQ ID NO: 1490926 - DNA, 15 bp, Homo sapiens
gacttgaaagacaga

SEQ ID NO: 1490927 - DNA, 15 bp, Homo sapiens
acttgaaagacagag

SEQ ID NO: 1490928 - DNA, 15 bp, Homo sapiens
cttgaaagacagaga

SEQ ID NO: 1490929 - DNA, 15 bp, Homo sapiens
ttgaaagacagagaa

SEQ ID NO: 1490930 - DNA, 15 bp, Homo sapiens
tgaaagacagagaac

SEQ ID NO: 1490931 - DNA, 15 bp, Homo sapiens
gaaagacagagaaca

SEQ ID NO: 1490932 - DNA, 15 bp, Homo sapiens
aaagacagagaacat

SEQ ID NO: 1490933 - DNA, 15 bp, Homo sapiens
aagacagagaacatc

SEQ ID NO: 1490934 - DNA, 15 bp, Homo sapiens
agacagagaacatca

SEQ ID NO: 1490935 - DNA, 15 bp, Homo sapiens
gacagagaacatcag

SEQ ID NO: 1490936 - DNA, 15 bp, Homo sapiens
acagagaacatcagt

SEQ ID NO: 1490937 - DNA, 15 bp, Homo sapiens
cagagaacatcagtc

SEQ ID NO: 1490938 - DNA, 15 bp, Homo sapiens
agagaacatcagtct

SEQ ID NO: 1490939 - DNA, 15 bp, Homo sapiens
gagaacatcagtctt

SEQ ID NO: 1490940 - DNA, 15 bp, Homo sapiens
agaacatcagtctta

SEQ ID NO: 1490941 - DNA, 15 bp, Homo sapiens
gaacatcagtcttat

SEQ ID NO: 1490942 - DNA, 15 bp, Homo sapiens
aacatcagtcttatt

SEQ ID NO: 1490943 - DNA, 15 bp, Homo sapiens
acatcagtcttattc

SEQ ID NO: 1490944 - DNA, 15 bp, Homo sapiens
catcagtcttattca

SEQ ID NO: 1490945 - DNA, 15 bp, Homo sapiens
atcagtcttattcac

SEQ ID NO: 1490946 - DNA, 15 bp, Homo sapiens
tcagtcttattcaca

SEQ ID NO: 1490947 - DNA, 15 bp, Homo sapiens
cagtcttattcacaa

SEQ ID NO: 1490948 - DNA, 15 bp, Homo sapiens
agtcttattcacaaa

SEQ ID NO: 1490949 - DNA, 15 bp, Homo sapiens
gtcttattcacaaaa

SEQ ID NO: 1490950 - DNA, 15 bp, Homo sapiens
tcttattcacaaaat

SEQ ID NO: 1490951 - DNA, 15 bp, Homo sapiens
cttattcacaaaata

SEQ ID NO: 1490952 - DNA, 15 bp, Homo sapiens
ttattcacaaaatat

SEQ ID NO: 1490953 - DNA, 15 bp, Homo sapiens
tattcacaaaatatc

SEQ ID NO: 1490954 - DNA, 15 bp, Homo sapiens
attcacaaaatatca

SEQ ID NO: 1490955 - DNA, 15 bp, Homo sapiens
ttcacaaaatatcag

SEQ ID NO: 1490956 - DNA, 15 bp, Homo sapiens
tcacaaaatatcaga

SEQ ID NO: 1490957 - DNA, 15 bp, Homo sapiens
cacaaaatatcagat

SEQ ID NO: 1490958 - DNA, 15 bp, Homo sapiens
acaaaatatcagata

SEQ ID NO: 1490959 - DNA, 15 bp, Homo sapiens
caaaatatcagataa

SEQ ID NO: 1490960 - DNA, 15 bp, Homo sapiens
aaaatatcagataat

SEQ ID NO: 1490961 - DNA, 15 bp, Homo sapiens
aaatatcagataatc

SEQ ID NO: 1490962 - DNA, 15 bp, Homo sapiens
aatatcagataatct

SEQ ID NO: 1490963 - DNA, 15 bp, Homo sapiens
atatcagataatcta

SEQ ID NO: 1490964 - DNA, 15 bp, Homo sapiens
tatcagataatctac

SEQ ID NO: 1490965 - DNA, 15 bp, Homo sapiens
atcagataatctact

SEQ ID NO: 1490966 - DNA, 15 bp, Homo sapiens
tcagataatctactg

SEQ ID NO: 1490967 - DNA, 15 bp, Homo sapiens
cagataatctactgg

SEQ ID NO: 1490968 - DNA, 15 bp, Homo sapiens
agataatctactggg

SEQ ID NO: 1490969 - DNA, 15 bp, Homo sapiens
gataatctactgggc

SEQ ID NO: 1490970 - DNA, 15 bp, Homo sapiens
ataatctactgggcc

SEQ ID NO: 1490971 - DNA, 15 bp, Homo sapiens
taatctactgggcca

SEQ ID NO: 1490972 - DNA, 15 bp, Homo sapiens
aatctactgggccaa

SEQ ID NO: 1490973 - DNA, 15 bp, Homo sapiens
atctactgggccaaa

SEQ ID NO: 1490974 - DNA, 15 bp, Homo sapiens
tctactgggccaaag

SEQ ID NO: 1490975 - DNA, 15 bp, Homo sapiens
ctactgggccaaagg

SEQ ID NO: 1490976 - DNA, 15 bp, Homo sapiens
tactgggccaaaggc

SEQ ID NO: 1490977 - DNA, 15 bp, Homo sapiens
actgggccaaaggca

SEQ ID NO: 1490978 - DNA, 15 bp, Homo sapiens
ctgggccaaaggcac

SEQ ID NO: 1490979 - DNA, 15 bp, Homo sapiens
tgggccaaaggcaca

SEQ ID NO: 1490980 - DNA, 15 bp, Homo sapiens
gggccaaaggcacaa

SEQ ID NO: 1490981 - DNA, 15 bp, Homo sapiens
ggccaaaggcacaaa

SEQ ID NO: 1490982 - DNA, 15 bp, Homo sapiens
gccaaaggcacaaag

SEQ ID NO: 1490983 - DNA, 15 bp, Homo sapiens
ccaaaggcacaaaga

SEQ ID NO: 1490984 - DNA, 15 bp, Homo sapiens
caaaggcacaaagag

SEQ ID NO: 1490985 - DNA, 15 bp, Homo sapiens
aaaggcacaaagaga

SEQ ID NO: 1490986 - DNA, 15 bp, Homo sapiens
aaggcacaaagagat

SEQ ID NO: 1490987 - DNA, 15 bp, Homo sapiens
aggcacaaagagatg

SEQ ID NO: 1490988 - DNA, 15 bp, Homo sapiens
ggcacaaagagatga

SEQ ID NO: 1490989 - DNA, 15 bp, Homo sapiens
gcacaaagagatgaa

SEQ ID NO: 1490990 - DNA, 15 bp, Homo sapiens
cacaaagagatgaaa

SEQ ID NO: 1490991 - DNA, 15 bp, Homo sapiens
acaaagagatgaaaa

SEQ ID NO: 1490992 - DNA, 15 bp, Homo sapiens
caaagagatgaaaat

SEQ ID NO: 1490993 - DNA, 15 bp, Homo sapiens
aaagagatgaaaata

SEQ ID NO: 1490994 - DNA, 15 bp, Homo sapiens
aagagatgaaaataa

SEQ ID NO: 1490995 - DNA, 15 bp, Homo sapiens
agagatgaaaataaa

SEQ ID NO: 1490996 - DNA, 15 bp, Homo sapiens
gagatgaaaataaaa

SEQ ID NO: 1490997 - DNA, 15 bp, Homo sapiens
agatgaaaataaaaa

SEQ ID NO: 1490998 - DNA, 15 bp, Homo sapiens
gatgaaaataaaaag

SEQ ID NO: 1490999 - DNA, 15 bp, Homo sapiens
atgaaaataaaaagc

SEQ ID NO: 1491000 - DNA, 15 bp, Homo sapiens
tgaaaataaaaagca

SEQ ID NO: 1491001 - DNA, 15 bp, Homo sapiens
gaaaataaaaagcaa

SEQ ID NO: 1491002 - DNA, 15 bp, Homo sapiens
aaaataaaaagcaac

SEQ ID NO: 1491003 - DNA, 15 bp, Homo sapiens
aaataaaaagcaaca

SEQ ID NO: 1491004 - DNA, 15 bp, Homo sapiens
aataaaaagcaacag

SEQ ID NO: 1491005 - DNA, 15 bp, Homo sapiens
ataaaaagcaacaga

SEQ ID NO: 1491006 - DNA, 15 bp, Homo sapiens
taaaaagcaacagag

SEQ ID NO: 1491007 - DNA, 15 bp, Homo sapiens
aaaaagcaacagagg

SEQ ID NO: 1491008 - DNA, 15 bp, Homo sapiens
aaaagcaacagaggg

SEQ ID NO: 1491009 - DNA, 15 bp, Homo sapiens
aaagcaacagagggc

SEQ ID NO: 1491010 - DNA, 15 bp, Homo sapiens
aagcaacagagggcc

SEQ ID NO: 1491011 - DNA, 15 bp, Homo sapiens
agcaacagagggccc

SEQ ID NO: 1491012 - DNA, 15 bp, Homo sapiens
gcaacagagggccct

SEQ ID NO: 1491013 - DNA, 15 bp, Homo sapiens
caacagagggccctg

SEQ ID NO: 1491014 - DNA, 15 bp, Homo sapiens
aacagagggccctga

SEQ ID NO: 1491015 - DNA, 15 bp, Homo sapiens
acagagggccctgaa

SEQ ID NO: 1491016 - DNA, 15 bp, Homo sapiens
cagagggccctgaat

SEQ ID NO: 1491017 - DNA, 15 bp, Homo sapiens
agagggccctgaatg

SEQ ID NO: 1491018 - DNA, 15 bp, Homo sapiens
gagggccctgaatgg

SEQ ID NO: 1491019 - DNA, 15 bp, Homo sapiens
agggccctgaatggc

SEQ ID NO: 1491020 - DNA, 15 bp, Homo sapiens
gggccctgaatggca

SEQ ID NO: 1491021 - DNA, 15 bp, Homo sapiens
ggccctgaatggcag

SEQ ID NO: 1491022 - DNA, 15 bp, Homo sapiens
gccctgaatggcagg

SEQ ID NO: 1491023 - DNA, 15 bp, Homo sapiens
ccctgaatggcaggc

SEQ ID NO: 1491024 - DNA, 15 bp, Homo sapiens
cctgaatggcaggct

SEQ ID NO: 1491025 - DNA, 15 bp, Homo sapiens
ctgaatggcaggctg

SEQ ID NO: 1491026 - DNA, 15 bp, Homo sapiens
tgaatggcaggctga

SEQ ID NO: 1491027 - DNA, 15 bp, Homo sapiens
gaatggcaggctgaa

SEQ ID NO: 1491028 - DNA, 15 bp, Homo sapiens
aatggcaggctgaaa

SEQ ID NO: 1491029 - DNA, 15 bp, Homo sapiens
atggcaggctgaaaa

SEQ ID NO: 1491030 - DNA, 15 bp, Homo sapiens
tggcaggctgaaaac

SEQ ID NO: 1491031 - DNA, 15 bp, Homo sapiens
ggcaggctgaaaaca

SEQ ID NO: 1491032 - DNA, 15 bp, Homo sapiens
gcaggctgaaaacat

SEQ ID NO: 1491033 - DNA, 15 bp, Homo sapiens
caggctgaaaacatg

SEQ ID NO: 1491034 - DNA, 15 bp, Homo sapiens
aggctgaaaacatgt

SEQ ID NO: 1491035 - DNA, 15 bp, Homo sapiens
ggctgaaaacatgtg

SEQ ID NO: 1491036 - DNA, 15 bp, Homo sapiens
gctgaaaacatgtgc

SEQ ID NO: 1491037 - DNA, 15 bp, Homo sapiens
ctgaaaacatgtgcc

SEQ ID NO: 1491038 - DNA, 15 bp, Homo sapiens
tgaaaacatgtgcca

SEQ ID NO: 1491039 - DNA, 15 bp, Homo sapiens
gaaaacatgtgccat

SEQ ID NO: 1491040 - DNA, 15 bp, Homo sapiens
aaaacatgtgccatt

SEQ ID NO: 1491041 - DNA, 15 bp, Homo sapiens
aaacatgtgccattt

SEQ ID NO: 1491042 - DNA, 15 bp, Homo sapiens
aacatgtgccattta

SEQ ID NO: 1491043 - DNA, 15 bp, Homo sapiens
acatgtgccatttat

SEQ ID NO: 1491044 - DNA, 15 bp, Homo sapiens
catgtgccatttatt

SEQ ID NO: 1491045 - DNA, 15 bp, Homo sapiens
atgtgccatttattc

SEQ ID NO: 1491046 - DNA, 15 bp, Homo sapiens
tgtgccatttattcc

SEQ ID NO: 1491047 - DNA, 15 bp, Homo sapiens
gtgccatttattcca

SEQ ID NO: 1491048 - DNA, 15 bp, Homo sapiens
tgccatttattccac

SEQ ID NO: 1491049 - DNA, 15 bp, Homo sapiens
gccatttattccaca

SEQ ID NO: 1491050 - DNA, 15 bp, Homo sapiens
ccatttattccacag

SEQ ID NO: 1491051 - DNA, 15 bp, Homo sapiens
catttattccacagc

SEQ ID NO: 1491052 - DNA, 15 bp, Homo sapiens
atttattccacagcc

SEQ ID NO: 1491053 - DNA, 15 bp, Homo sapiens
tttattccacagcca

SEQ ID NO: 1491054 - DNA, 15 bp, Homo sapiens
ttattccacagccag

SEQ ID NO: 1491055 - DNA, 15 bp, Homo sapiens
tattccacagccaga

SEQ ID NO: 1491056 - DNA, 15 bp, Homo sapiens
attccacagccagag

SEQ ID NO: 1491057 - DNA, 15 bp, Homo sapiens
ttccacagccagagg

SEQ ID NO: 1491058 - DNA, 15 bp, Homo sapiens
tccacagccagaggc

SEQ ID NO: 1491059 - DNA, 15 bp, Homo sapiens
ccacagccagaggct

SEQ ID NO: 1491060 - DNA, 15 bp, Homo sapiens
cacagccagaggctg

SEQ ID NO: 1491061 - DNA, 15 bp, Homo sapiens
acagccagaggctga

SEQ ID NO: 1491062 - DNA, 15 bp, Homo sapiens
cagccagaggctgac

SEQ ID NO: 1491063 - DNA, 15 bp, Homo sapiens
agccagaggctgact

SEQ ID NO: 1491064 - DNA, 15 bp, Homo sapiens
gccagaggctgactt

SEQ ID NO: 1491065 - DNA, 15 bp, Homo sapiens
ccagaggctgacttt

SEQ ID NO: 1491066 - DNA, 15 bp, Homo sapiens
cagaggctgactttg

SEQ ID NO: 1491067 - DNA, 15 bp, Homo sapiens
agaggctgactttga

SEQ ID NO: 1491068 - DNA, 15 bp, Homo sapiens
gaggctgactttgag

SEQ ID NO: 1491069 - DNA, 15 bp, Homo sapiens
aggctgactttgagc

SEQ ID NO: 1491070 - DNA, 15 bp, Homo sapiens
ggctgactttgagca

SEQ ID NO: 1491071 - DNA, 15 bp, Homo sapiens
gctgactttgagcac

SEQ ID NO: 1491072 - DNA, 15 bp, Homo sapiens
ctgactttgagcacc

SEQ ID NO: 1491073 - DNA, 15 bp, Homo sapiens
tgactttgagcaccg

SEQ ID NO: 1491074 - DNA, 15 bp, Homo sapiens
gactttgagcaccga

SEQ ID NO: 1491075 - DNA, 15 bp, Homo sapiens
actttgagcaccgat

SEQ ID NO: 1491076 - DNA, 15 bp, Homo sapiens
ctttgagcaccgatg

SEQ ID NO: 1491077 - DNA, 15 bp, Homo sapiens
tttgagcaccgatgt

SEQ ID NO: 1491078 - DNA, 15 bp, Homo sapiens
ttgagcaccgatgtg

SEQ ID NO: 1491079 - DNA, 15 bp, Homo sapiens
tgagcaccgatgtga

SEQ ID NO: 1491080 - DNA, 15 bp, Homo sapiens
actcttgtgttctca

SEQ ID NO: 1491081 - DNA, 15 bp, Homo sapiens
ctcttgtgttctcaa

SEQ ID NO: 1491082 - DNA, 15 bp, Homo sapiens
tcttgtgttctcaac

SEQ ID NO: 1491083 - DNA, 15 bp, Homo sapiens
cttgtgttctcaacc

SEQ ID NO: 1491084 - DNA, 15 bp, Homo sapiens
ttgtgttctcaacct

SEQ ID NO: 1491085 - DNA, 15 bp, Homo sapiens
tgtgttctcaacctt

SEQ ID NO: 1491086 - DNA, 15 bp, Homo sapiens
gtgttctcaaccttg

SEQ ID NO: 1491087 - DNA, 15 bp, Homo sapiens
tgttctcaaccttgc

SEQ ID NO: 1491088 - DNA, 15 bp, Homo sapiens
gttctcaaccttgca

SEQ ID NO: 1491089 - DNA, 15 bp, Homo sapiens
ttctcaaccttgcag

SEQ ID NO: 1491090 - DNA, 15 bp, Homo sapiens
tctcaaccttgcagt

SEQ ID NO: 1491091 - DNA, 15 bp, Homo sapiens
ctcaaccttgcagta

SEQ ID NO: 1491092 - DNA, 15 bp, Homo sapiens
tcaaccttgcagtat

SEQ ID NO: 1491093 - DNA, 15 bp, Homo sapiens
caaccttgcagtatg

SEQ ID NO: 1491094 - DNA, 15 bp, Homo sapiens
aaccttgcagtatga

SEQ ID NO: 1491095 - DNA, 15 bp, Homo sapiens
accttgcagtatgag

SEQ ID NO: 1491096 - DNA, 15 bp, Homo sapiens
ccttgcagtatgaga

SEQ ID NO: 1491097 - DNA, 15 bp, Homo sapiens
cttgcagtatgagac

SEQ ID NO: 1491098 - DNA, 15 bp, Homo sapiens
ttgcagtatgagaca

SEQ ID NO: 1491099 - DNA, 15 bp, Homo sapiens
tgcagtatgagacat

SEQ ID NO: 1491100 - DNA, 15 bp, Homo sapiens
gcagtatgagacatg

SEQ ID NO: 1491101 - DNA, 15 bp, Homo sapiens
cagtatgagacatgt

SEQ ID NO: 1491102 - DNA, 15 bp, Homo sapiens
agtatgagacatgtc

SEQ ID NO: 1491103 - DNA, 15 bp, Homo sapiens
gtatgagacatgtca

SEQ ID NO: 1491104 - DNA, 15 bp, Homo sapiens
tatgagacatgtcac

SEQ ID NO: 1491105 - DNA, 15 bp, Homo sapiens
atgagacatgtcaca

SEQ ID NO: 1491106 - DNA, 15 bp, Homo sapiens
tgagacatgtcacac

SEQ ID NO: 1491107 - DNA, 15 bp, Homo sapiens
gagacatgtcacaca

SEQ ID NO: 1491108 - DNA, 15 bp, Homo sapiens
agacatgtcacacat

SEQ ID NO: 1491109 - DNA, 15 bp, Homo sapiens
gacatgtcacacata

SEQ ID NO: 1491110 - DNA, 15 bp, Homo sapiens
acatgtcacacataa

SEQ ID NO: 1491111 - DNA, 15 bp, Homo sapiens
catgtcacacataac

SEQ ID NO: 1491112 - DNA, 15 bp, Homo sapiens
atgtcacacataacc

SEQ ID NO: 1491113 - DNA, 15 bp, Homo sapiens
tgtcacacataacct

SEQ ID NO: 1491114 - DNA, 15 bp, Homo sapiens
gtcacacataacctg

SEQ ID NO: 1491115 - DNA, 15 bp, Homo sapiens
tcacacataacctgg

SEQ ID NO: 1491116 - DNA, 15 bp, Homo sapiens
cacacataacctggg

SEQ ID NO: 1491117 - DNA, 15 bp, Homo sapiens
acacataacctgggt

SEQ ID NO: 1491118 - DNA, 15 bp, Homo sapiens
cacataacctgggtg

SEQ ID NO: 1491119 - DNA, 15 bp, Homo sapiens
acataacctgggtgg

SEQ ID NO: 1491120 - DNA, 15 bp, Homo sapiens
cataacctgggtggg

SEQ ID NO: 1491121 - DNA, 15 bp, Homo sapiens
ataacctgggtgggg

SEQ ID NO: 1491122 - DNA, 15 bp, Homo sapiens
taacctgggtgggga

SEQ ID NO: 1491123 - DNA, 15 bp, Homo sapiens
aacctgggtggggag

SEQ ID NO: 1491124 - DNA, 15 bp, Homo sapiens
acctgggtggggagg

SEQ ID NO: 1491125 - DNA, 15 bp, Homo sapiens
cctgggtggggagga

SEQ ID NO: 1491126 - DNA, 15 bp, Homo sapiens
ctgggtggggaggat

SEQ ID NO: 1491127 - DNA, 15 bp, Homo sapiens
tgggtggggaggata

SEQ ID NO: 1491128 - DNA, 15 bp, Homo sapiens
gggtggggaggatac

SEQ ID NO: 1491129 - DNA, 15 bp, Homo sapiens
ggtggggaggataca

SEQ ID NO: 1491130 - DNA, 15 bp, Homo sapiens
gtggggaggatacac

SEQ ID NO: 1491131 - DNA, 15 bp, Homo sapiens
tggggaggatacaca

SEQ ID NO: 1491132 - DNA, 15 bp, Homo sapiens
ggggaggatacacag

SEQ ID NO: 1491133 - DNA, 15 bp, Homo sapiens
gggaggatacacagg

SEQ ID NO: 1491134 - DNA, 15 bp, Homo sapiens
ggaggatacacagga

SEQ ID NO: 1491135 - DNA, 15 bp, Homo sapiens
gaggatacacaggat

SEQ ID NO: 1491136 - DNA, 15 bp, Homo sapiens
aggatacacaggatc

SEQ ID NO: 1491137 - DNA, 15 bp, Homo sapiens
ggatacacaggatcc

SEQ ID NO: 1491138 - DNA, 15 bp, Homo sapiens
gatacacaggatcct

SEQ ID NO: 1491139 - DNA, 15 bp, Homo sapiens
atacacaggatcctg

SEQ ID NO: 1491140 - DNA, 15 bp, Homo sapiens
tacacaggatcctgg

SEQ ID NO: 1491141 - DNA, 15 bp, Homo sapiens
acacaggatcctgga

SEQ ID NO: 1491142 - DNA, 15 bp, Homo sapiens
cacaggatcctggaa

SEQ ID NO: 1491143 - DNA, 15 bp, Homo sapiens
acaggatcctggaaa

SEQ ID NO: 1491144 - DNA, 15 bp, Homo sapiens
caggatcctggaaaa

SEQ ID NO: 1491145 - DNA, 15 bp, Homo sapiens
aggatcctggaaaag

SEQ ID NO: 1491146 - DNA, 15 bp, Homo sapiens
ggatcctggaaaagt

SEQ ID NO: 1491147 - DNA, 15 bp, Homo sapiens
gatcctggaaaagtt

SEQ ID NO: 1491148 - DNA, 15 bp, Homo sapiens
atcctggaaaagtta

SEQ ID NO: 1491149 - DNA, 15 bp, Homo sapiens
tcctggaaaagttag

SEQ ID NO: 1491150 - DNA, 15 bp, Homo sapiens
cctggaaaagttagc

SEQ ID NO: 1491151 - DNA, 15 bp, Homo sapiens
ctggaaaagttagca

SEQ ID NO: 1491152 - DNA, 15 bp, Homo sapiens
tggaaaagttagcag

SEQ ID NO: 1491153 - DNA, 15 bp, Homo sapiens
ggaaaagttagcagc

SEQ ID NO: 1491154 - DNA, 15 bp, Homo sapiens
gaaaagttagcagca

SEQ ID NO: 1491155 - DNA, 15 bp, Homo sapiens
aaaagttagcagcat

SEQ ID NO: 1491156 - DNA, 15 bp, Homo sapiens
aaagttagcagcatc

SEQ ID NO: 1491157 - DNA, 15 bp, Homo sapiens
aagttagcagcatct

SEQ ID NO: 1491158 - DNA, 15 bp, Homo sapiens
agttagcagcatcta

SEQ ID NO: 1491159 - DNA, 15 bp, Homo sapiens
gttagcagcatctac

SEQ ID NO: 1491160 - DNA, 15 bp, Homo sapiens
ttagcagcatctact

SEQ ID NO: 1491161 - DNA, 15 bp, Homo sapiens
tagcagcatctactg

SEQ ID NO: 1491162 - DNA, 15 bp, Homo sapiens
agcagcatctactgt

SEQ ID NO: 1491163 - DNA, 15 bp, Homo sapiens
gcagcatctactgtg

SEQ ID NO: 1491164 - DNA, 15 bp, Homo sapiens
cagcatctactgtgt

SEQ ID NO: 1491165 - DNA, 15 bp, Homo sapiens
agcatctactgtgta

SEQ ID NO: 1491166 - DNA, 15 bp, Homo sapiens
gcatctactgtgtat

SEQ ID NO: 1491167 - DNA, 15 bp, Homo sapiens
catctactgtgtatg

SEQ ID NO: 1491168 - DNA, 15 bp, Homo sapiens
atctactgtgtatgg

SEQ ID NO: 1491169 - DNA, 15 bp, Homo sapiens
tctactgtgtatggg

SEQ ID NO: 1491170 - DNA, 15 bp, Homo sapiens
ctactgtgtatgggg

SEQ ID NO: 1491171 - DNA, 15 bp, Homo sapiens
tactgtgtatgggga

SEQ ID NO: 1491172 - DNA, 15 bp, Homo sapiens
actgtgtatggggat

SEQ ID NO: 1491173 - DNA, 15 bp, Homo sapiens
ctgtgtatggggatg

SEQ ID NO: 1491174 - DNA, 15 bp, Homo sapiens
tgtgtatggggatga

SEQ ID NO: 1491175 - DNA, 15 bp, Homo sapiens
gtgtatggggatgaa

SEQ ID NO: 1491176 - DNA, 15 bp, Homo sapiens
tgtatggggatgaaa

SEQ ID NO: 1491177 - DNA, 15 bp, Homo sapiens
gtatggggatgaaaa

SEQ ID NO: 1491178 - DNA, 15 bp, Homo sapiens
tatggggatgaaaac

SEQ ID NO: 1491179 - DNA, 15 bp, Homo sapiens
atggggatgaaaaca

SEQ ID NO: 1491180 - DNA, 15 bp, Homo sapiens
tggggatgaaaacag

SEQ ID NO: 1491181 - DNA, 15 bp, Homo sapiens
ggggatgaaaacagc

SEQ ID NO: 1491182 - DNA, 15 bp, Homo sapiens
gggatgaaaacagct

SEQ ID NO: 1491183 - DNA, 15 bp, Homo sapiens
ggatgaaaacagcta

SEQ ID NO: 1491184 - DNA, 15 bp, Homo sapiens
gatgaaaacagctag

SEQ ID NO: 1491185 - DNA, 15 bp, Homo sapiens
atgaaaacagctagt

SEQ ID NO: 1491186 - DNA, 15 bp, Homo sapiens
tgaaaacagctagtg

SEQ ID NO: 1491187 - DNA, 15 bp, Homo sapiens
gaaaacagctagtgg

SEQ ID NO: 1491188 - DNA, 15 bp, Homo sapiens
aaaacagctagtgga

SEQ ID NO: 1491189 - DNA, 15 bp, Homo sapiens
aaacagctagtggat

SEQ ID NO: 1491190 - DNA, 15 bp, Homo sapiens
aacagctagtggatt

SEQ ID NO: 1491191 - DNA, 15 bp, Homo sapiens
acagctagtggatta

SEQ ID NO: 1491192 - DNA, 15 bp, Homo sapiens
cagctagtggattag

SEQ ID NO: 1491193 - DNA, 15 bp, Homo sapiens
agctagtggattagg

SEQ ID NO: 1491194 - DNA, 15 bp, Homo sapiens
gctagtggattaggg

SEQ ID NO: 1491195 - DNA, 15 bp, Homo sapiens
ctagtggattagggc

SEQ ID NO: 1491196 - DNA, 15 bp, Homo sapiens
tagtggattagggcg

SEQ ID NO: 1491197 - DNA, 15 bp, Homo sapiens
agtggattagggcgg

SEQ ID NO: 1491198 - DNA, 15 bp, Homo sapiens
gtggattagggcggt

SEQ ID NO: 1491199 - DNA, 15 bp, Homo sapiens
tggattagggcggtg

SEQ ID NO: 1491200 - DNA, 15 bp, Homo sapiens
ggattagggcggtgg

SEQ ID NO: 1491201 - DNA, 15 bp, Homo sapiens
gattagggcggtggc

SEQ ID NO: 1491202 - DNA, 15 bp, Homo sapiens
attagggcggtggct

SEQ ID NO: 1491203 - DNA, 15 bp, Homo sapiens
ttagggcggtggctt

SEQ ID NO: 1491204 - DNA, 15 bp, Homo sapiens
tagggcggtggcttt

SEQ ID NO: 1491205 - DNA, 15 bp, Homo sapiens
agggcggtggcttta

SEQ ID NO: 1491206 - DNA, 15 bp, Homo sapiens
gggcggtggctttat

SEQ ID NO: 1491207 - DNA, 15 bp, Homo sapiens
ggcggtggctttatc

SEQ ID NO: 1491208 - DNA, 15 bp, Homo sapiens
gcggtggctttatca

SEQ ID NO: 1491209 - DNA, 15 bp, Homo sapiens
cggtggctttatcat

SEQ ID NO: 1491210 - DNA, 15 bp, Homo sapiens
ggtggctttatcata

SEQ ID NO: 1491211 - DNA, 15 bp, Homo sapiens
gtggctttatcataa

SEQ ID NO: 1491212 - DNA, 15 bp, Homo sapiens
tggctttatcataag

SEQ ID NO: 1491213 - DNA, 15 bp, Homo sapiens
ggctttatcataagt

SEQ ID NO: 1491214 - DNA, 15 bp, Homo sapiens
gctttatcataagtg

SEQ ID NO: 1491215 - DNA, 15 bp, Homo sapiens
ctttatcataagtga

SEQ ID NO: 1491216 - DNA, 15 bp, Homo sapiens
tttatcataagtgat

SEQ ID NO: 1491217 - DNA, 15 bp, Homo sapiens
ttatcataagtgatg

SEQ ID NO: 1491218 - DNA, 15 bp, Homo sapiens
tatcataagtgatgc

SEQ ID NO: 1491219 - DNA, 15 bp, Homo sapiens
atcataagtgatgct

SEQ ID NO: 1491220 - DNA, 15 bp, Homo sapiens
tcataagtgatgctt

SEQ ID NO: 1491221 - DNA, 15 bp, Homo sapiens
cataagtgatgcttt

SEQ ID NO: 1491222 - DNA, 15 bp, Homo sapiens
ataagtgatgctttt

SEQ ID NO: 1491223 - DNA, 15 bp, Homo sapiens
taagtgatgcttttt

SEQ ID NO: 1491224 - DNA, 15 bp, Homo sapiens
aagtgatgctttttc

SEQ ID NO: 1491225 - DNA, 15 bp, Homo sapiens
agtgatgctttttct

SEQ ID NO: 1491226 - DNA, 15 bp, Homo sapiens
gtgatgctttttctt

SEQ ID NO: 1491227 - DNA, 15 bp, Homo sapiens
tgatgctttttcttt

SEQ ID NO: 1491228 - DNA, 15 bp, Homo sapiens
gatgctttttctttt

SEQ ID NO: 1491229 - DNA, 15 bp, Homo sapiens
atgctttttcttttc

SEQ ID NO: 1491230 - DNA, 15 bp, Homo sapiens
tgctttttcttttct

SEQ ID NO: 1491231 - DNA, 15 bp, Homo sapiens
gctttttcttttctt

SEQ ID NO: 1491232 - DNA, 15 bp, Homo sapiens
ctttttcttttcttg

SEQ ID NO: 1491233 - DNA, 15 bp, Homo sapiens
tttttcttttcttgg

SEQ ID NO: 1491234 - DNA, 15 bp, Homo sapiens
ttttcttttcttgga

SEQ ID NO: 1491235 - DNA, 15 bp, Homo sapiens
tttcttttcttggaa

SEQ ID NO: 1491236 - DNA, 15 bp, Homo sapiens
ttcttttcttggaat

SEQ ID NO: 1491237 - DNA, 15 bp, Homo sapiens
tcttttcttggaatt

SEQ ID NO: 1491238 - DNA, 15 bp, Homo sapiens
cttttcttggaattt

SEQ ID NO: 1491239 - DNA, 15 bp, Homo sapiens
ttttcttggaatttg

SEQ ID NO: 1491240 - DNA, 15 bp, Homo sapiens
tttcttggaatttgc

SEQ ID NO: 1491241 - DNA, 15 bp, Homo sapiens
ttcttggaatttgct

SEQ ID NO: 1491242 - DNA, 15 bp, Homo sapiens
tcttggaatttgctt

SEQ ID NO: 1491243 - DNA, 15 bp, Homo sapiens
cttggaatttgcttt

SEQ ID NO: 1491244 - DNA, 15 bp, Homo sapiens
ttggaatttgctttt

SEQ ID NO: 1491245 - DNA, 15 bp, Homo sapiens
tggaatttgctttta

SEQ ID NO: 1491246 - DNA, 15 bp, Homo sapiens
ggaatttgcttttaa

SEQ ID NO: 1491247 - DNA, 15 bp, Homo sapiens
gaatttgcttttaag

SEQ ID NO: 1491248 - DNA, 15 bp, Homo sapiens
aatttgcttttaagt

SEQ ID NO: 1491249 - DNA, 15 bp, Homo sapiens
atttgcttttaagtt

SEQ ID NO: 1491250 - DNA, 15 bp, Homo sapiens
tttgcttttaagtta

SEQ ID NO: 1491251 - DNA, 15 bp, Homo sapiens
ttgcttttaagttat

SEQ ID NO: 1491252 - DNA, 15 bp, Homo sapiens
tgcttttaagttatt

SEQ ID NO: 1491253 - DNA, 15 bp, Homo sapiens
gcttttaagttattg

SEQ ID NO: 1491254 - DNA, 15 bp, Homo sapiens
cttttaagttattgc

SEQ ID NO: 1491255 - DNA, 15 bp, Homo sapiens
ttttaagttattgca

SEQ ID NO: 1491256 - DNA, 15 bp, Homo sapiens
tttaagttattgcat

SEQ ID NO: 1491257 - DNA, 15 bp, Homo sapiens
ttaagttattgcatc

SEQ ID NO: 1491258 - DNA, 15 bp, Homo sapiens
taagttattgcatct

SEQ ID NO: 1491259 - DNA, 15 bp, Homo sapiens
aagttattgcatctc

SEQ ID NO: 1491260 - DNA, 15 bp, Homo sapiens
agttattgcatctcc

SEQ ID NO: 1491261 - DNA, 15 bp, Homo sapiens
gttattgcatctcct

SEQ ID NO: 1491262 - DNA, 15 bp, Homo sapiens
ttattgcatctcctt

SEQ ID NO: 1491263 - DNA, 15 bp, Homo sapiens
tattgcatctccttt

SEQ ID NO: 1491264 - DNA, 15 bp, Homo sapiens
attgcatctcctttt

SEQ ID NO: 1491265 - DNA, 15 bp, Homo sapiens
ttgcatctccttttc

SEQ ID NO: 1491266 - DNA, 15 bp, Homo sapiens
tgcatctccttttca

SEQ ID NO: 1491267 - DNA, 15 bp, Homo sapiens
gcatctccttttcaa

SEQ ID NO: 1491268 - DNA, 15 bp, Homo sapiens
catctccttttcaaa

SEQ ID NO: 1491269 - DNA, 15 bp, Homo sapiens
atctccttttcaaaa

SEQ ID NO: 1491270 - DNA, 15 bp, Homo sapiens
tctccttttcaaaaa

SEQ ID NO: 1491271 - DNA, 15 bp, Homo sapiens
ctccttttcaaaaac

SEQ ID NO: 1491272 - DNA, 15 bp, Homo sapiens
tccttttcaaaaaca

SEQ ID NO: 1491273 - DNA, 15 bp, Homo sapiens
ccttttcaaaaacaa

SEQ ID NO: 1491274 - DNA, 15 bp, Homo sapiens
cttttcaaaaacaaa

SEQ ID NO: 1491275 - DNA, 15 bp, Homo sapiens
ttttcaaaaacaaaa

SEQ ID NO: 1491276 - DNA, 15 bp, Homo sapiens
tttcaaaaacaaaaa

SEQ ID NO: 1491277 - DNA, 15 bp, Homo sapiens
ttcaaaaacaaaaaa

SEQ ID NO: 1491278 - DNA, 15 bp, Homo sapiens
tcaaaaacaaaaaag

SEQ ID NO: 1491279 - DNA, 15 bp, Homo sapiens
caaaaacaaaaaagt

SEQ ID NO: 1491280 - DNA, 15 bp, Homo sapiens
aaaaacaaaaaagtc

SEQ ID NO: 1491281 - DNA, 15 bp, Homo sapiens
aaaacaaaaaagtca

SEQ ID NO: 1491282 - DNA, 15 bp, Homo sapiens
aaacaaaaaagtcac

SEQ ID NO: 1491283 - DNA, 15 bp, Homo sapiens
aacaaaaaagtcaca

SEQ ID NO: 1491284 - DNA, 15 bp, Homo sapiens
acaaaaaagtcacat

SEQ ID NO: 1491285 - DNA, 15 bp, Homo sapiens
caaaaaagtcacatc

SEQ ID NO: 1491286 - DNA, 15 bp, Homo sapiens
aaaaaagtcacatct

SEQ ID NO: 1491287 - DNA, 15 bp, Homo sapiens
aaaaagtcacatcta

SEQ ID NO: 1491288 - DNA, 15 bp, Homo sapiens
aaaagtcacatctat

SEQ ID NO: 1491289 - DNA, 15 bp, Homo sapiens
aaagtcacatctatg

SEQ ID NO: 1491290 - DNA, 15 bp, Homo sapiens
aagtcacatctatgt

SEQ ID NO: 1491291 - DNA, 15 bp, Homo sapiens
agtcacatctatgtc

SEQ ID NO: 1491292 - DNA, 15 bp, Homo sapiens
gtcacatctatgtcc

SEQ ID NO: 1491293 - DNA, 15 bp, Homo sapiens
tcacatctatgtcct

SEQ ID NO: 1491294 - DNA, 15 bp, Homo sapiens
cacatctatgtccta

SEQ ID NO: 1491295 - DNA, 15 bp, Homo sapiens
acatctatgtcctac

SEQ ID NO: 1491296 - DNA, 15 bp, Homo sapiens
catctatgtcctaca

SEQ ID NO: 1491297 - DNA, 15 bp, Homo sapiens
atctatgtcctacag

SEQ ID NO: 1491298 - DNA, 15 bp, Homo sapiens
tctatgtcctacaga

SEQ ID NO: 1491299 - DNA, 15 bp, Homo sapiens
ctatgtcctacagac

SEQ ID NO: 1491300 - DNA, 15 bp, Homo sapiens
tatgtcctacagact

SEQ ID NO: 1491301 - DNA, 15 bp, Homo sapiens
atgtcctacagactt

SEQ ID NO: 1491302 - DNA, 15 bp, Homo sapiens
tgtcctacagacttc

SEQ ID NO: 1491303 - DNA, 15 bp, Homo sapiens
gtcctacagacttcc

SEQ ID NO: 1491304 - DNA, 15 bp, Homo sapiens
tcctacagacttcct

SEQ ID NO: 1491305 - DNA, 15 bp, Homo sapiens
cctacagacttccta

SEQ ID NO: 1491306 - DNA, 15 bp, Homo sapiens
ctacagacttcctaa

SEQ ID NO: 1491307 - DNA, 15 bp, Homo sapiens
tacagacttcctaaa

SEQ ID NO: 1491308 - DNA, 15 bp, Homo sapiens
acagacttcctaaag

SEQ ID NO: 1491309 - DNA, 15 bp, Homo sapiens
cagacttcctaaagg

SEQ ID NO: 1491310 - DNA, 15 bp, Homo sapiens
agacttcctaaaggc

SEQ ID NO: 1491311 - DNA, 15 bp, Homo sapiens
gacttcctaaaggca

SEQ ID NO: 1491312 - DNA, 15 bp, Homo sapiens
acttcctaaaggcaa

SEQ ID NO: 1491313 - DNA, 15 bp, Homo sapiens
cttcctaaaggcaat

SEQ ID NO: 1491314 - DNA, 15 bp, Homo sapiens
ttcctaaaggcaata

SEQ ID NO: 1491315 - DNA, 15 bp, Homo sapiens
tcctaaaggcaatac

SEQ ID NO: 1491316 - DNA, 15 bp, Homo sapiens
cctaaaggcaataca

SEQ ID NO: 1491317 - DNA, 15 bp, Homo sapiens
ctaaaggcaatacag

SEQ ID NO: 1491318 - DNA, 15 bp, Homo sapiens
taaaggcaatacaga

SEQ ID NO: 1491319 - DNA, 15 bp, Homo sapiens
aaaggcaatacagat

SEQ ID NO: 1491320 - DNA, 15 bp, Homo sapiens
aaggcaatacagatt

SEQ ID NO: 1491321 - DNA, 15 bp, Homo sapiens
aggcaatacagattg

SEQ ID NO: 1491322 - DNA, 15 bp, Homo sapiens
ggcaatacagattgt

SEQ ID NO: 1491323 - DNA, 15 bp, Homo sapiens
gcaatacagattgtt

SEQ ID NO: 1491324 - DNA, 15 bp, Homo sapiens
caatacagattgttt

SEQ ID NO: 1491325 - DNA, 15 bp, Homo sapiens
aatacagattgttta

SEQ ID NO: 1491326 - DNA, 15 bp, Homo sapiens
atacagattgtttaa

SEQ ID NO: 1491327 - DNA, 15 bp, Homo sapiens
tacagattgtttaat

SEQ ID NO: 1491328 - DNA, 15 bp, Homo sapiens
acagattgtttaatt

SEQ ID NO: 1491329 - DNA, 15 bp, Homo sapiens
cagattgtttaattt

SEQ ID NO: 1491330 - DNA, 15 bp, Homo sapiens
agattgtttaatttt

SEQ ID NO: 1491331 - DNA, 15 bp, Homo sapiens
gattgtttaattttt

SEQ ID NO: 1491332 - DNA, 15 bp, Homo sapiens
attgtttaatttttg

SEQ ID NO: 1491333 - DNA, 15 bp, Homo sapiens
ttgtttaatttttgc

SEQ ID NO: 1491334 - DNA, 15 bp, Homo sapiens
tgtttaatttttgca

SEQ ID NO: 1491335 - DNA, 15 bp, Homo sapiens
gtttaatttttgcac

SEQ ID NO: 1491336 - DNA, 15 bp, Homo sapiens
tttaatttttgcaca

SEQ ID NO: 1491337 - DNA, 15 bp, Homo sapiens
ttaatttttgcacag

SEQ ID NO: 1491338 - DNA, 15 bp, Homo sapiens
taatttttgcacagg

SEQ ID NO: 1491339 - DNA, 15 bp, Homo sapiens
aatttttgcacaggg

SEQ ID NO: 1491340 - DNA, 15 bp, Homo sapiens
atttttgcacagggt

SEQ ID NO: 1491341 - DNA, 15 bp, Homo sapiens
tttttgcacagggtg

SEQ ID NO: 1491342 - DNA, 15 bp, Homo sapiens
ttttgcacagggtgc

SEQ ID NO: 1491343 - DNA, 15 bp, Homo sapiens
tttgcacagggtgca

SEQ ID NO: 1491344 - DNA, 15 bp, Homo sapiens
ttgcacagggtgcat

SEQ ID NO: 1491345 - DNA, 15 bp, Homo sapiens
tgcacagggtgcata

SEQ ID NO: 1491346 - DNA, 15 bp, Homo sapiens
gcacagggtgcatac

SEQ ID NO: 1491347 - DNA, 15 bp, Homo sapiens
cacagggtgcatact

SEQ ID NO: 1491348 - DNA, 15 bp, Homo sapiens
acagggtgcatacta

SEQ ID NO: 1491349 - DNA, 15 bp, Homo sapiens
cagggtgcatactac

SEQ ID NO: 1491350 - DNA, 15 bp, Homo sapiens
agggtgcatactacg

SEQ ID NO: 1491351 - DNA, 15 bp, Homo sapiens
gggtgcatactacgc

SEQ ID NO: 1491352 - DNA, 15 bp, Homo sapiens
ggtgcatactacgca

SEQ ID NO: 1491353 - DNA, 15 bp, Homo sapiens
gtgcatactacgcag

SEQ ID NO: 1491354 - DNA, 15 bp, Homo sapiens
tgcatactacgcagg

SEQ ID NO: 1491355 - DNA, 15 bp, Homo sapiens
gcatactacgcagga

SEQ ID NO: 1491356 - DNA, 15 bp, Homo sapiens
catactacgcaggag

SEQ ID NO: 1491357 - DNA, 15 bp, Homo sapiens
atactacgcaggagt

SEQ ID NO: 1491358 - DNA, 15 bp, Homo sapiens
tactacgcaggagtt

SEQ ID NO: 1491359 - DNA, 15 bp, Homo sapiens
actacgcaggagtta

SEQ ID NO: 1491360 - DNA, 15 bp, Homo sapiens
ctacgcaggagttac

SEQ ID NO: 1491361 - DNA, 15 bp, Homo sapiens
tacgcaggagttaca

SEQ ID NO: 1491362 - DNA, 15 bp, Homo sapiens
acgcaggagttacac

SEQ ID NO: 1491363 - DNA, 15 bp, Homo sapiens
cgcaggagttacacg

SEQ ID NO: 1491364 - DNA, 15 bp, Homo sapiens
gcaggagttacacgc

SEQ ID NO: 1491365 - DNA, 15 bp, Homo sapiens
caggagttacacgcc

SEQ ID NO: 1491366 - DNA, 15 bp, Homo sapiens
aggagttacacgccg

SEQ ID NO: 1491367 - DNA, 15 bp, Homo sapiens
ggagttacacgccgc

SEQ ID NO: 1491368 - DNA, 15 bp, Homo sapiens
gagttacacgccgcg

SEQ ID NO: 1491369 - DNA, 15 bp, Homo sapiens
agttacacgccgcgg

SEQ ID NO: 1491370 - DNA, 15 bp, Homo sapiens
gttacacgccgcggg

SEQ ID NO: 1491371 - DNA, 15 bp, Homo sapiens
ttacacgccgcgggt

SEQ ID NO: 1491372 - DNA, 15 bp, Homo sapiens
tacacgccgcgggtc

SEQ ID NO: 1491373 - DNA, 15 bp, Homo sapiens
acacgccgcgggtcc

SEQ ID NO: 1491374 - DNA, 15 bp, Homo sapiens
cacgccgcgggtcct

SEQ ID NO: 1491375 - DNA, 15 bp, Homo sapiens
acgccgcgggtccta

SEQ ID NO: 1491376 - DNA, 15 bp, Homo sapiens
cgccgcgggtcctaa

SEQ ID NO: 1491377 - DNA, 15 bp, Homo sapiens
gccgcgggtcctaat

SEQ ID NO: 1491378 - DNA, 15 bp, Homo sapiens
ccgcgggtcctaatg

SEQ ID NO: 1491379 - DNA, 15 bp, Homo sapiens
cgcgggtcctaatgc

SEQ ID NO: 1491380 - DNA, 15 bp, Homo sapiens
gcgggtcctaatgca

SEQ ID NO: 1491381 - DNA, 15 bp, Homo sapiens
cgggtcctaatgcag

SEQ ID NO: 1491382 - DNA, 15 bp, Homo sapiens
gggtcctaatgcagc

SEQ ID NO: 1491383 - DNA, 15 bp, Homo sapiens
ggtcctaatgcagcc

SEQ ID NO: 1491384 - DNA, 15 bp, Homo sapiens
gtcctaatgcagcca

SEQ ID NO: 1491385 - DNA, 15 bp, Homo sapiens
tcctaatgcagccat

SEQ ID NO: 1491386 - DNA, 15 bp, Homo sapiens
cctaatgcagccatg

SEQ ID NO: 1491387 - DNA, 15 bp, Homo sapiens
ctaatgcagccatgt

SEQ ID NO: 1491388 - DNA, 15 bp, Homo sapiens
taatgcagccatgtg

SEQ ID NO: 1491389 - DNA, 15 bp, Homo sapiens
aatgcagccatgtga

SEQ ID NO: 1491390 - DNA, 15 bp, Homo sapiens
atgcagccatgtgac

SEQ ID NO: 1491391 - DNA, 15 bp, Homo sapiens
tgcagccatgtgact

SEQ ID NO: 1491392 - DNA, 15 bp, Homo sapiens
gcagccatgtgactt

SEQ ID NO: 1491393 - DNA, 15 bp, Homo sapiens
cagccatgtgactta

SEQ ID NO: 1491394 - DNA, 15 bp, Homo sapiens
agccatgtgacttag

SEQ ID NO: 1491395 - DNA, 15 bp, Homo sapiens
gccatgtgacttagg

SEQ ID NO: 1491396 - DNA, 15 bp, Homo sapiens
ccatgtgacttaggc

SEQ ID NO: 1491397 - DNA, 15 bp, Homo sapiens
catgtgacttaggca

SEQ ID NO: 1491398 - DNA, 15 bp, Homo sapiens
atgtgacttaggcag

SEQ ID NO: 1491399 - DNA, 15 bp, Homo sapiens
tgtgacttaggcagc

SEQ ID NO: 1491400 - DNA, 15 bp, Homo sapiens
gtgacttaggcagcc

SEQ ID NO: 1491401 - DNA, 15 bp, Homo sapiens
tgacttaggcagccc

SEQ ID NO: 1491402 - DNA, 15 bp, Homo sapiens
gacttaggcagcccg

SEQ ID NO: 1491403 - DNA, 15 bp, Homo sapiens
acttaggcagcccgc

SEQ ID NO: 1491404 - DNA, 15 bp, Homo sapiens
cttaggcagcccgcg

SEQ ID NO: 1491405 - DNA, 15 bp, Homo sapiens
ttaggcagcccgcga

SEQ ID NO: 1491406 - DNA, 15 bp, Homo sapiens
taggcagcccgcgag

SEQ ID NO: 1491407 - DNA, 15 bp, Homo sapiens
aggcagcccgcgagg

SEQ ID NO: 1491408 - DNA, 15 bp, Homo sapiens
ggcagcccgcgaggc

SEQ ID NO: 1491409 - DNA, 15 bp, Homo sapiens
gcagcccgcgaggcc

SEQ ID NO: 1491410 - DNA, 15 bp, Homo sapiens
cagcccgcgaggcct

SEQ ID NO: 1491411 - DNA, 15 bp, Homo sapiens
agcccgcgaggcctc

SEQ ID NO: 1491412 - DNA, 15 bp, Homo sapiens
gcccgcgaggcctca

SEQ ID NO: 1491413 - DNA, 15 bp, Homo sapiens
cccgcgaggcctcac

SEQ ID NO: 1491414 - DNA, 15 bp, Homo sapiens
ccgcgaggcctcact

SEQ ID NO: 1491415 - DNA, 15 bp, Homo sapiens
cgcgaggcctcactt

SEQ ID NO: 1491416 - DNA, 15 bp, Homo sapiens
gcgaggcctcacttt

SEQ ID NO: 1491417 - DNA, 15 bp, Homo sapiens
cgaggcctcactttg

SEQ ID NO: 1491418 - DNA, 15 bp, Homo sapiens
gaggcctcactttgg

SEQ ID NO: 1491419 - DNA, 15 bp, Homo sapiens
aggcctcactttggc

SEQ ID NO: 1491420 - DNA, 15 bp, Homo sapiens
ggcctcactttggcc

SEQ ID NO: 1491421 - DNA, 15 bp, Homo sapiens
gcctcactttggcca

SEQ ID NO: 1491422 - DNA, 15 bp, Homo sapiens
cctcactttggccac

SEQ ID NO: 1491423 - DNA, 15 bp, Homo sapiens
ctcactttggccacg

SEQ ID NO: 1491424 - DNA, 15 bp, Homo sapiens
tcactttggccacgt

SEQ ID NO: 1491425 - DNA, 15 bp, Homo sapiens
cactttggccacgtg

SEQ ID NO: 1491426 - DNA, 15 bp, Homo sapiens
actttggccacgtga

SEQ ID NO: 1491427 - DNA, 15 bp, Homo sapiens
ctttggccacgtgaa

SEQ ID NO: 1491428 - DNA, 15 bp, Homo sapiens
tttggccacgtgaac

SEQ ID NO: 1491429 - DNA, 15 bp, Homo sapiens
ttggccacgtgaaca

SEQ ID NO: 1491430 - DNA, 15 bp, Homo sapiens
tggccacgtgaacat

SEQ ID NO: 1491431 - DNA, 15 bp, Homo sapiens
ggccacgtgaacatc

SEQ ID NO: 1491432 - DNA, 15 bp, Homo sapiens
gccacgtgaacatca

SEQ ID NO: 1491433 - DNA, 15 bp, Homo sapiens
ccacgtgaacatcag

SEQ ID NO: 1491434 - DNA, 15 bp, Homo sapiens
cacgtgaacatcagg

SEQ ID NO: 1491435 - DNA, 15 bp, Homo sapiens
acgtgaacatcaggt

SEQ ID NO: 1491436 - DNA, 15 bp, Homo sapiens
cgtgaacatcaggta

SEQ ID NO: 1491437 - DNA, 15 bp, Homo sapiens
gtgaacatcaggtat

SEQ ID NO: 1491438 - DNA, 15 bp, Homo sapiens
tgaacatcaggtatc

SEQ ID NO: 1491439 - DNA, 15 bp, Homo sapiens
gaacatcaggtatcc

SEQ ID NO: 1491440 - DNA, 15 bp, Homo sapiens
aacatcaggtatcct

SEQ ID NO: 1491441 - DNA, 15 bp, Homo sapiens
acatcaggtatcctt

SEQ ID NO: 1491442 - DNA, 15 bp, Homo sapiens
catcaggtatccttt

SEQ ID NO: 1491443 - DNA, 15 bp, Homo sapiens
atcaggtatcctttg

SEQ ID NO: 1491444 - DNA, 15 bp, Homo sapiens
tcaggtatcctttga

SEQ ID NO: 1491445 - DNA, 15 bp, Homo sapiens
caggtatcctttgac

SEQ ID NO: 1491446 - DNA, 15 bp, Homo sapiens
aggtatcctttgaca

SEQ ID NO: 1491447 - DNA, 15 bp, Homo sapiens
ggtatcctttgacag

SEQ ID NO: 1491448 - DNA, 15 bp, Homo sapiens
gtatcctttgacagt

SEQ ID NO: 1491449 - DNA, 15 bp, Homo sapiens
tatcctttgacagtg

SEQ ID NO: 1491450 - DNA, 15 bp, Homo sapiens
atcctttgacagtga

SEQ ID NO: 1491451 - DNA, 15 bp, Homo sapiens
tcctttgacagtgag

SEQ ID NO: 1491452 - DNA, 15 bp, Homo sapiens
cctttgacagtgagc

SEQ ID NO: 1491453 - DNA, 15 bp, Homo sapiens
ctttgacagtgagcc

SEQ ID NO: 1491454 - DNA, 15 bp, Homo sapiens
tttgacagtgagcct

SEQ ID NO: 1491455 - DNA, 15 bp, Homo sapiens
ttgacagtgagcctg

SEQ ID NO: 1491456 - DNA, 15 bp, Homo sapiens
tgacagtgagcctgg

SEQ ID NO: 1491457 - DNA, 15 bp, Homo sapiens
gacagtgagcctggg

SEQ ID NO: 1491458 - DNA, 15 bp, Homo sapiens
acagtgagcctgggc

SEQ ID NO: 1491459 - DNA, 15 bp, Homo sapiens
cagtgagcctgggct

SEQ ID NO: 1491460 - DNA, 15 bp, Homo sapiens
agtgagcctgggctc

SEQ ID NO: 1491461 - DNA, 15 bp, Homo sapiens
gtgagcctgggctca

SEQ ID NO: 1491462 - DNA, 15 bp, Homo sapiens
tgagcctgggctcag

SEQ ID NO: 1491463 - DNA, 15 bp, Homo sapiens
gagcctgggctcaga

SEQ ID NO: 1491464 - DNA, 15 bp, Homo sapiens
agcctgggctcagat

SEQ ID NO: 1491465 - DNA, 15 bp, Homo sapiens
gcctgggctcagatg

SEQ ID NO: 1491466 - DNA, 15 bp, Homo sapiens
cctgggctcagatgt

SEQ ID NO: 1491467 - DNA, 15 bp, Homo sapiens
ctgggctcagatgtg

SEQ ID NO: 1491468 - DNA, 15 bp, Homo sapiens
tgggctcagatgtgc

SEQ ID NO: 1491469 - DNA, 15 bp, Homo sapiens
gggctcagatgtgcg

SEQ ID NO: 1491470 - DNA, 15 bp, Homo sapiens
ggctcagatgtgcgg

SEQ ID NO: 1491471 - DNA, 15 bp, Homo sapiens
gctcagatgtgcggg

SEQ ID NO: 1491472 - DNA, 15 bp, Homo sapiens
ctcagatgtgcgggt

SEQ ID NO: 1491473 - DNA, 15 bp, Homo sapiens
tcagatgtgcgggtc

SEQ ID NO: 1491474 - DNA, 15 bp, Homo sapiens
cagatgtgcgggtct

SEQ ID NO: 1491475 - DNA, 15 bp, Homo sapiens
agatgtgcgggtctg

SEQ ID NO: 1491476 - DNA, 15 bp, Homo sapiens
gatgtgcgggtctga

SEQ ID NO: 1491477 - DNA, 15 bp, Homo sapiens
atgtgcgggtctgat

SEQ ID NO: 1491478 - DNA, 15 bp, Homo sapiens
tgtgcgggtctgatg

SEQ ID NO: 1491479 - DNA, 15 bp, Homo sapiens
gtgcgggtctgatga

SEQ ID NO: 1491480 - DNA, 15 bp, Homo sapiens
tgcgggtctgatgat

SEQ ID NO: 1491481 - DNA, 15 bp, Homo sapiens
gcgggtctgatgata

SEQ ID NO: 1491482 - DNA, 15 bp, Homo sapiens
cgggtctgatgatat

SEQ ID NO: 1491483 - DNA, 15 bp, Homo sapiens
gggtctgatgatata

SEQ ID NO: 1491484 - DNA, 15 bp, Homo sapiens
ggtctgatgatatac

SEQ ID NO: 1491485 - DNA, 15 bp, Homo sapiens
gtctgatgatatacc

SEQ ID NO: 1491486 - DNA, 15 bp, Homo sapiens
tctgatgatataccc

SEQ ID NO: 1491487 - DNA, 15 bp, Homo sapiens
ctgatgatataccca

SEQ ID NO: 1491488 - DNA, 15 bp, Homo sapiens
tgatgatatacccaa

SEQ ID NO: 1491489 - DNA, 15 bp, Homo sapiens
gatgatatacccaag

SEQ ID NO: 1491490 - DNA, 15 bp, Homo sapiens
atgatatacccaagt

SEQ ID NO: 1491491 - DNA, 15 bp, Homo sapiens
tgatatacccaagtt

SEQ ID NO: 1491492 - DNA, 15 bp, Homo sapiens
gatatacccaagttc

SEQ ID NO: 1491493 - DNA, 15 bp, Homo sapiens
atatacccaagttca

SEQ ID NO: 1491494 - DNA, 15 bp, Homo sapiens
tatacccaagttcag

SEQ ID NO: 1491495 - DNA, 15 bp, Homo sapiens
atacccaagttcagt

SEQ ID NO: 1491496 - DNA, 15 bp, Homo sapiens
tacccaagttcagtt

SEQ ID NO: 1491497 - DNA, 15 bp, Homo sapiens
acccaagttcagttg

SEQ ID NO: 1491498 - DNA, 15 bp, Homo sapiens
cccaagttcagttgc

SEQ ID NO: 1491499 - DNA, 15 bp, Homo sapiens
ccaagttcagttgct

SEQ ID NO: 1491500 - DNA, 15 bp, Homo sapiens
caagttcagttgctc

SEQ ID NO: 1491501 - DNA, 15 bp, Homo sapiens
aagttcagttgctct

SEQ ID NO: 1491502 - DNA, 15 bp, Homo sapiens
agttcagttgctctg

SEQ ID NO: 1491503 - DNA, 15 bp, Homo sapiens
gttcagttgctctga

SEQ ID NO: 1491504 - DNA, 15 bp, Homo sapiens
ttcagttgctctgag

SEQ ID NO: 1491505 - DNA, 15 bp, Homo sapiens
tcagttgctctgagt

SEQ ID NO: 1491506 - DNA, 15 bp, Homo sapiens
cagttgctctgagtt

SEQ ID NO: 1491507 - DNA, 15 bp, Homo sapiens
agttgctctgagttg

SEQ ID NO: 1491508 - DNA, 15 bp, Homo sapiens
gttgctctgagttga

SEQ ID NO: 1491509 - DNA, 15 bp, Homo sapiens
ttgctctgagttgac

SEQ ID NO: 1491510 - DNA, 15 bp, Homo sapiens
tgctctgagttgact

SEQ ID NO: 1491511 - DNA, 15 bp, Homo sapiens
gctctgagttgacta

SEQ ID NO: 1491512 - DNA, 15 bp, Homo sapiens
ctctgagttgactag

SEQ ID NO: 1491513 - DNA, 15 bp, Homo sapiens
tctgagttgactagg

SEQ ID NO: 1491514 - DNA, 15 bp, Homo sapiens
ctgagttgactagga

SEQ ID NO: 1491515 - DNA, 15 bp, Homo sapiens
tgagttgactaggaa

SEQ ID NO: 1491516 - DNA, 15 bp, Homo sapiens
gagttgactaggaag

SEQ ID NO: 1491517 - DNA, 15 bp, Homo sapiens
agttgactaggaagg

SEQ ID NO: 1491518 - DNA, 15 bp, Homo sapiens
gttgactaggaaggt

SEQ ID NO: 1491519 - DNA, 15 bp, Homo sapiens
ttgactaggaaggta

SEQ ID NO: 1491520 - DNA, 15 bp, Homo sapiens
tgactaggaaggtag

SEQ ID NO: 1491521 - DNA, 15 bp, Homo sapiens
gactaggaaggtaga

SEQ ID NO: 1491522 - DNA, 15 bp, Homo sapiens
actaggaaggtagag

SEQ ID NO: 1491523 - DNA, 15 bp, Homo sapiens
ctaggaaggtagaga

SEQ ID NO: 1491524 - DNA, 15 bp, Homo sapiens
taggaaggtagagaa

SEQ ID NO: 1491525 - DNA, 15 bp, Homo sapiens
aggaaggtagagaag

SEQ ID NO: 1491526 - DNA, 15 bp, Homo sapiens
ggaaggtagagaaga

SEQ ID NO: 1491527 - DNA, 15 bp, Homo sapiens
gaaggtagagaagat

SEQ ID NO: 1491528 - DNA, 15 bp, Homo sapiens
aaggtagagaagatc

SEQ ID NO: 1491529 - DNA, 15 bp, Homo sapiens
aggtagagaagatct

SEQ ID NO: 1491530 - DNA, 15 bp, Homo sapiens
ggtagagaagatctt

SEQ ID NO: 1491531 - DNA, 15 bp, Homo sapiens
gtagagaagatcttt

SEQ ID NO: 1491532 - DNA, 15 bp, Homo sapiens
tagagaagatctttg

SEQ ID NO: 1491533 - DNA, 15 bp, Homo sapiens
agagaagatctttgt

SEQ ID NO: 1491534 - DNA, 15 bp, Homo sapiens
gagaagatctttgta

SEQ ID NO: 1491535 - DNA, 15 bp, Homo sapiens
agaagatctttgtac

SEQ ID NO: 1491536 - DNA, 15 bp, Homo sapiens
gaagatctttgtaca

SEQ ID NO: 1491537 - DNA, 15 bp, Homo sapiens
aagatctttgtacag

SEQ ID NO: 1491538 - DNA, 15 bp, Homo sapiens
agatctttgtacagc

SEQ ID NO: 1491539 - DNA, 15 bp, Homo sapiens
gatctttgtacagcc

SEQ ID NO: 1491540 - DNA, 15 bp, Homo sapiens
atctttgtacagcct

SEQ ID NO: 1491541 - DNA, 15 bp, Homo sapiens
tctttgtacagccta

SEQ ID NO: 1491542 - DNA, 15 bp, Homo sapiens
ctttgtacagcctaa

SEQ ID NO: 1491543 - DNA, 15 bp, Homo sapiens
tttgtacagcctaaa

SEQ ID NO: 1491544 - DNA, 15 bp, Homo sapiens
ttgtacagcctaaag

SEQ ID NO: 1491545 - DNA, 15 bp, Homo sapiens
tgtacagcctaaaga

SEQ ID NO: 1491546 - DNA, 15 bp, Homo sapiens
gtacagcctaaagag

SEQ ID NO: 1491547 - DNA, 15 bp, Homo sapiens
tacagcctaaagagg

SEQ ID NO: 1491548 - DNA, 15 bp, Homo sapiens
acagcctaaagaggt

SEQ ID NO: 1491549 - DNA, 15 bp, Homo sapiens
cagcctaaagaggta

SEQ ID NO: 1491550 - DNA, 15 bp, Homo sapiens
agcctaaagaggtaa

SEQ ID NO: 1491551 - DNA, 15 bp, Homo sapiens
gcctaaagaggtaat

SEQ ID NO: 1491552 - DNA, 15 bp, Homo sapiens
cctaaagaggtaatc

SEQ ID NO: 1491553 - DNA, 15 bp, Homo sapiens
ctaaagaggtaatct

SEQ ID NO: 1491554 - DNA, 15 bp, Homo sapiens
taaagaggtaatctt

SEQ ID NO: 1491555 - DNA, 15 bp, Homo sapiens
aaagaggtaatcttc

SEQ ID NO: 1491556 - DNA, 15 bp, Homo sapiens
aagaggtaatcttca

SEQ ID NO: 1491557 - DNA, 15 bp, Homo sapiens
agaggtaatcttcag

SEQ ID NO: 1491558 - DNA, 15 bp, Homo sapiens
gaggtaatcttcagg

SEQ ID NO: 1491559 - DNA, 15 bp, Homo sapiens
aggtaatcttcagga

SEQ ID NO: 1491560 - DNA, 15 bp, Homo sapiens
ggtaatcttcaggag

SEQ ID NO: 1491561 - DNA, 15 bp, Homo sapiens
gtaatcttcaggaga

SEQ ID NO: 1491562 - DNA, 15 bp, Homo sapiens
taatcttcaggagaa

SEQ ID NO: 1491563 - DNA, 15 bp, Homo sapiens
aatcttcaggagaag

SEQ ID NO: 1491564 - DNA, 15 bp, Homo sapiens
atcttcaggagaagt

SEQ ID NO: 1491565 - DNA, 15 bp, Homo sapiens
tcttcaggagaagtc

SEQ ID NO: 1491566 - DNA, 15 bp, Homo sapiens
cttcaggagaagtct

SEQ ID NO: 1491567 - DNA, 15 bp, Homo sapiens
ttcaggagaagtctt

SEQ ID NO: 1491568 - DNA, 15 bp, Homo sapiens
tcaggagaagtcttt

SEQ ID NO: 1491569 - DNA, 15 bp, Homo sapiens
caggagaagtctttg

SEQ ID NO: 1491570 - DNA, 15 bp, Homo sapiens
aggagaagtctttga

SEQ ID NO: 1491571 - DNA, 15 bp, Homo sapiens
ggagaagtctttgaa

SEQ ID NO: 1491572 - DNA, 15 bp, Homo sapiens
gagaagtctttgaaa

SEQ ID NO: 1491573 - DNA, 15 bp, Homo sapiens
agaagtctttgaaat

SEQ ID NO: 1491574 - DNA, 15 bp, Homo sapiens
gaagtctttgaaatc

SEQ ID NO: 1491575 - DNA, 15 bp, Homo sapiens
aagtctttgaaatct

SEQ ID NO: 1491576 - DNA, 15 bp, Homo sapiens
agtctttgaaatctc

SEQ ID NO: 1491577 - DNA, 15 bp, Homo sapiens
gtctttgaaatctcc

SEQ ID NO: 1491578 - DNA, 15 bp, Homo sapiens
tctttgaaatctccc

SEQ ID NO: 1491579 - DNA, 15 bp, Homo sapiens
ctttgaaatctccct

SEQ ID NO: 1491580 - DNA, 15 bp, Homo sapiens
tttgaaatctccctt

SEQ ID NO: 1491581 - DNA, 15 bp, Homo sapiens
ttgaaatctcccttc

SEQ ID NO: 1491582 - DNA, 15 bp, Homo sapiens
tgaaatctcccttca

SEQ ID NO: 1491583 - DNA, 15 bp, Homo sapiens
gaaatctcccttcat

SEQ ID NO: 1491584 - DNA, 15 bp, Homo sapiens
aaatctcccttcatc

SEQ ID NO: 1491585 - DNA, 15 bp, Homo sapiens
aatctcccttcatcc

SEQ ID NO: 1491586 - DNA, 15 bp, Homo sapiens
atctcccttcatcca

SEQ ID NO: 1491587 - DNA, 15 bp, Homo sapiens
tctcccttcatccaa

SEQ ID NO: 1491588 - DNA, 15 bp, Homo sapiens
ctcccttcatccaaa

SEQ ID NO: 1491589 - DNA, 15 bp, Homo sapiens
tcccttcatccaaac

SEQ ID NO: 1491590 - DNA, 15 bp, Homo sapiens
cccttcatccaaaca

SEQ ID NO: 1491591 - DNA, 15 bp, Homo sapiens
ccttcatccaaacac

SEQ ID NO: 1491592 - DNA, 15 bp, Homo sapiens
cttcatccaaacacc

SEQ ID NO: 1491593 - DNA, 15 bp, Homo sapiens
ttcatccaaacaccc

SEQ ID NO: 1491594 - DNA, 15 bp, Homo sapiens
tcatccaaacaccca

SEQ ID NO: 1491595 - DNA, 15 bp, Homo sapiens
catccaaacacccaa

SEQ ID NO: 1491596 - DNA, 15 bp, Homo sapiens
atccaaacacccaag

SEQ ID NO: 1491597 - DNA, 15 bp, Homo sapiens
tccaaacacccaaga

SEQ ID NO: 1491598 - DNA, 15 bp, Homo sapiens
ccaaacacccaagat

SEQ ID NO: 1491599 - DNA, 15 bp, Homo sapiens
caaacacccaagatc

SEQ ID NO: 1491600 - DNA, 15 bp, Homo sapiens
aaacacccaagatct

SEQ ID NO: 1491601 - DNA, 15 bp, Homo sapiens
aacacccaagatctt

SEQ ID NO: 1491602 - DNA, 15 bp, Homo sapiens
acacccaagatctta

SEQ ID NO: 1491603 - DNA, 15 bp, Homo sapiens
cacccaagatcttac

SEQ ID NO: 1491604 - DNA, 15 bp, Homo sapiens
acccaagatcttaca

SEQ ID NO: 1491605 - DNA, 15 bp, Homo sapiens
cccaagatcttacac

SEQ ID NO: 1491606 - DNA, 15 bp, Homo sapiens
ccaagatcttacacc

SEQ ID NO: 1491607 - DNA, 15 bp, Homo sapiens
caagatcttacacct

SEQ ID NO: 1491608 - DNA, 15 bp, Homo sapiens
aagatcttacacctt

SEQ ID NO: 1491609 - DNA, 15 bp, Homo sapiens
agatcttacaccttg

SEQ ID NO: 1491610 - DNA, 15 bp, Homo sapiens
gatcttacaccttgt

SEQ ID NO: 1491611 - DNA, 15 bp, Homo sapiens
atcttacaccttgtt

SEQ ID NO: 1491612 - DNA, 15 bp, Homo sapiens
tcttacaccttgttt

SEQ ID NO: 1491613 - DNA, 15 bp, Homo sapiens
cttacaccttgtttt

SEQ ID NO: 1491614 - DNA, 15 bp, Homo sapiens
ttacaccttgtttta

SEQ ID NO: 1491615 - DNA, 15 bp, Homo sapiens
tacaccttgttttaa

SEQ ID NO: 1491616 - DNA, 15 bp, Homo sapiens
acaccttgttttaaa

SEQ ID NO: 1491617 - DNA, 15 bp, Homo sapiens
caccttgttttaaat

SEQ ID NO: 1491618 - DNA, 15 bp, Homo sapiens
accttgttttaaatg

SEQ ID NO: 1491619 - DNA, 15 bp, Homo sapiens
ccttgttttaaatgg

SEQ ID NO: 1491620 - DNA, 15 bp, Homo sapiens
cttgttttaaatggc

SEQ ID NO: 1491621 - DNA, 15 bp, Homo sapiens
ttgttttaaatggcc

SEQ ID NO: 1491622 - DNA, 15 bp, Homo sapiens
tgttttaaatggcct

SEQ ID NO: 1491623 - DNA, 15 bp, Homo sapiens
gttttaaatggccta

SEQ ID NO: 1491624 - DNA, 15 bp, Homo sapiens
ttttaaatggcctaa

SEQ ID NO: 1491625 - DNA, 15 bp, Homo sapiens
tttaaatggcctaac

SEQ ID NO: 1491626 - DNA, 15 bp, Homo sapiens
ttaaatggcctaaca

SEQ ID NO: 1491627 - DNA, 15 bp, Homo sapiens
taaatggcctaacac

SEQ ID NO: 1491628 - DNA, 15 bp, Homo sapiens
aaatggcctaacaca

SEQ ID NO: 1491629 - DNA, 15 bp, Homo sapiens
aatggcctaacacat

SEQ ID NO: 1491630 - DNA, 15 bp, Homo sapiens
atggcctaacacatt

SEQ ID NO: 1491631 - DNA, 15 bp, Homo sapiens
tggcctaacacattg

SEQ ID NO: 1491632 - DNA, 15 bp, Homo sapiens
ggcctaacacattgc

SEQ ID NO: 1491633 - DNA, 15 bp, Homo sapiens
gcctaacacattgca

SEQ ID NO: 1491634 - DNA, 15 bp, Homo sapiens
cctaacacattgcaa

SEQ ID NO: 1491635 - DNA, 15 bp, Homo sapiens
ctaacacattgcaaa

SEQ ID NO: 1491636 - DNA, 15 bp, Homo sapiens
taacacattgcaaag

SEQ ID NO: 1491637 - DNA, 15 bp, Homo sapiens
aacacattgcaaagc

SEQ ID NO: 1491638 - DNA, 15 bp, Homo sapiens
acacattgcaaagct

SEQ ID NO: 1491639 - DNA, 15 bp, Homo sapiens
cacattgcaaagctt

SEQ ID NO: 1491640 - DNA, 15 bp, Homo sapiens
acattgcaaagcttt

SEQ ID NO: 1491641 - DNA, 15 bp, Homo sapiens
cattgcaaagctttt

SEQ ID NO: 1491642 - DNA, 15 bp, Homo sapiens
attgcaaagcttttt

SEQ ID NO: 1491643 - DNA, 15 bp, Homo sapiens
ttgcaaagctttttt

SEQ ID NO: 1491644 - DNA, 15 bp, Homo sapiens
tgcaaagcttttttt

SEQ ID NO: 1491645 - DNA, 15 bp, Homo sapiens
gcaaagctttttttg

SEQ ID NO: 1491646 - DNA, 15 bp, Homo sapiens
caaagctttttttgg

SEQ ID NO: 1491647 - DNA, 15 bp, Homo sapiens
aaagctttttttgga

SEQ ID NO: 1491648 - DNA, 15 bp, Homo sapiens
aagctttttttggaa

SEQ ID NO: 1491649 - DNA, 15 bp, Homo sapiens
agctttttttggaaa

SEQ ID NO: 1491650 - DNA, 15 bp, Homo sapiens
gctttttttggaaac

SEQ ID NO: 1491651 - DNA, 15 bp, Homo sapiens
ctttttttggaaacc

SEQ ID NO: 1491652 - DNA, 15 bp, Homo sapiens
tttttttggaaacca

SEQ ID NO: 1491653 - DNA, 15 bp, Homo sapiens
ttttttggaaaccag

SEQ ID NO: 1491654 - DNA, 15 bp, Homo sapiens
tttttggaaaccagt

SEQ ID NO: 1491655 - DNA, 15 bp, Homo sapiens
ttttggaaaccagta

SEQ ID NO: 1491656 - DNA, 15 bp, Homo sapiens
tttggaaaccagtag

SEQ ID NO: 1491657 - DNA, 15 bp, Homo sapiens
ttggaaaccagtagc

SEQ ID NO: 1491658 - DNA, 15 bp, Homo sapiens
tggaaaccagtagca

SEQ ID NO: 1491659 - DNA, 15 bp, Homo sapiens
ggaaaccagtagcaa

SEQ ID NO: 1491660 - DNA, 15 bp, Homo sapiens
gaaaccagtagcaat

SEQ ID NO: 1491661 - DNA, 15 bp, Homo sapiens
aaaccagtagcaatg

SEQ ID NO: 1491662 - DNA, 15 bp, Homo sapiens
aaccagtagcaatgt

SEQ ID NO: 1491663 - DNA, 15 bp, Homo sapiens
accagtagcaatgtt

SEQ ID NO: 1491664 - DNA, 15 bp, Homo sapiens
ccagtagcaatgttc

SEQ ID NO: 1491665 - DNA, 15 bp, Homo sapiens
cagtagcaatgttca

SEQ ID NO: 1491666 - DNA, 15 bp, Homo sapiens
agtagcaatgttcac

SEQ ID NO: 1491667 - DNA, 15 bp, Homo sapiens
gtagcaatgttcaca

SEQ ID NO: 1491668 - DNA, 15 bp, Homo sapiens
tagcaatgttcacag

SEQ ID NO: 1491669 - DNA, 15 bp, Homo sapiens
agcaatgttcacaga

SEQ ID NO: 1491670 - DNA, 15 bp, Homo sapiens
gcaatgttcacagaa

SEQ ID NO: 1491671 - DNA, 15 bp, Homo sapiens
caatgttcacagaac

SEQ ID NO: 1491672 - DNA, 15 bp, Homo sapiens
aatgttcacagaaca

SEQ ID NO: 1491673 - DNA, 15 bp, Homo sapiens
atgttcacagaacac

SEQ ID NO: 1491674 - DNA, 15 bp, Homo sapiens
tgttcacagaacaca

SEQ ID NO: 1491675 - DNA, 15 bp, Homo sapiens
gttcacagaacacac

SEQ ID NO: 1491676 - DNA, 15 bp, Homo sapiens
ttcacagaacacaca

SEQ ID NO: 1491677 - DNA, 15 bp, Homo sapiens
tcacagaacacacac

SEQ ID NO: 1491678 - DNA, 15 bp, Homo sapiens
cacagaacacacaca

SEQ ID NO: 1491679 - DNA, 15 bp, Homo sapiens
acagaacacacacaa

SEQ ID NO: 1491680 - DNA, 15 bp, Homo sapiens
cagaacacacacaaa

SEQ ID NO: 1491681 - DNA, 15 bp, Homo sapiens
agaacacacacaaac

SEQ ID NO: 1491682 - DNA, 15 bp, Homo sapiens
gaacacacacaaaca

SEQ ID NO: 1491683 - DNA, 15 bp, Homo sapiens
aacacacacaaacag

SEQ ID NO: 1491684 - DNA, 15 bp, Homo sapiens
acacacacaaacaga

SEQ ID NO: 1491685 - DNA, 15 bp, Homo sapiens
cacacacaaacagaa

SEQ ID NO: 1491686 - DNA, 15 bp, Homo sapiens
acacacaaacagaac

SEQ ID NO: 1491687 - DNA, 15 bp, Homo sapiens
cacacaaacagaact

SEQ ID NO: 1491688 - DNA, 15 bp, Homo sapiens
acacaaacagaactc

SEQ ID NO: 1491689 - DNA, 15 bp, Homo sapiens
cacaaacagaactcg

SEQ ID NO: 1491690 - DNA, 15 bp, Homo sapiens
acaaacagaactcga

SEQ ID NO: 1491691 - DNA, 15 bp, Homo sapiens
caaacagaactcgag

SEQ ID NO: 1491692 - DNA, 15 bp, Homo sapiens
aaacagaactcgagg

SEQ ID NO: 1491693 - DNA, 15 bp, Homo sapiens
aacagaactcgagga

SEQ ID NO: 1491694 - DNA, 15 bp, Homo sapiens
acagaactcgaggag

SEQ ID NO: 1491695 - DNA, 15 bp, Homo sapiens
cagaactcgaggagt

SEQ ID NO: 1491696 - DNA, 15 bp, Homo sapiens
agaactcgaggagtc

SEQ ID NO: 1491697 - DNA, 15 bp, Homo sapiens
gaactcgaggagtca

SEQ ID NO: 1491698 - DNA, 15 bp, Homo sapiens
aactcgaggagtcaa

SEQ ID NO: 1491699 - DNA, 15 bp, Homo sapiens
actcgaggagtcaag

SEQ ID NO: 1491700 - DNA, 15 bp, Homo sapiens
ctcgaggagtcaaga

SEQ ID NO: 1491701 - DNA, 15 bp, Homo sapiens
tcgaggagtcaagag

SEQ ID NO: 1491702 - DNA, 15 bp, Homo sapiens
cgaggagtcaagagc

SEQ ID NO: 1491703 - DNA, 15 bp, Homo sapiens
gaggagtcaagagct

SEQ ID NO: 1491704 - DNA, 15 bp, Homo sapiens
aggagtcaagagcta

SEQ ID NO: 1491705 - DNA, 15 bp, Homo sapiens
ggagtcaagagctat

SEQ ID NO: 1491706 - DNA, 15 bp, Homo sapiens
gagtcaagagctatg

SEQ ID NO: 1491707 - DNA, 15 bp, Homo sapiens
gctgtgctcaaaagg

SEQ ID NO: 1491708 - DNA, 15 bp, Homo sapiens
ctgtgctcaaaagga

SEQ ID NO: 1491709 - DNA, 15 bp, Homo sapiens
tgtgctcaaaaggag

SEQ ID NO: 1491710 - DNA, 15 bp, Homo sapiens
gtgctcaaaaggaga

SEQ ID NO: 1491711 - DNA, 15 bp, Homo sapiens
tgctcaaaaggagaa

SEQ ID NO: 1491712 - DNA, 15 bp, Homo sapiens
gctcaaaaggagaaa

SEQ ID NO: 1491713 - DNA, 15 bp, Homo sapiens
ctcaaaaggagaaaa

SEQ ID NO: 1491714 - DNA, 15 bp, Homo sapiens
tcaaaaggagaaaaa

SEQ ID NO: 1491715 - DNA, 15 bp, Homo sapiens
caaaaggagaaaaat

SEQ ID NO: 1491716 - DNA, 15 bp, Homo sapiens
aaaaggagaaaaatc

SEQ ID NO: 1491717 - DNA, 15 bp, Homo sapiens
aaaggagaaaaatct

SEQ ID NO: 1491718 - DNA, 15 bp, Homo sapiens
aaggagaaaaatcta

SEQ ID NO: 1491719 - DNA, 15 bp, Homo sapiens
aggagaaaaatctag

SEQ ID NO: 1491720 - DNA, 15 bp, Homo sapiens
ggagaaaaatctagt

SEQ ID NO: 1491721 - DNA, 15 bp, Homo sapiens
gagaaaaatctagtt

SEQ ID NO: 1491722 - DNA, 15 bp, Homo sapiens
agaaaaatctagttt

SEQ ID NO: 1491723 - DNA, 15 bp, Homo sapiens
gaaaaatctagtttg

SEQ ID NO: 1491724 - DNA, 15 bp, Homo sapiens
aaaaatctagtttgg

SEQ ID NO: 1491725 - DNA, 15 bp, Homo sapiens
aaaatctagtttggg

SEQ ID NO: 1491726 - DNA, 15 bp, Homo sapiens
aaatctagtttgggt

SEQ ID NO: 1491727 - DNA, 15 bp, Homo sapiens
aatctagtttgggtt

SEQ ID NO: 1491728 - DNA, 15 bp, Homo sapiens
atctagtttgggttt

SEQ ID NO: 1491729 - DNA, 15 bp, Homo sapiens
tctagtttgggtttc

SEQ ID NO: 1491730 - DNA, 15 bp, Homo sapiens
ctagtttgggtttct

SEQ ID NO: 1491731 - DNA, 15 bp, Homo sapiens
tagtttgggtttctg

SEQ ID NO: 1491732 - DNA, 15 bp, Homo sapiens
agtttgggtttctgt

SEQ ID NO: 1491733 - DNA, 15 bp, Homo sapiens
gtttgggtttctgtt

SEQ ID NO: 1491734 - DNA, 15 bp, Homo sapiens
tttgggtttctgttc

SEQ ID NO: 1491735 - DNA, 15 bp, Homo sapiens
ttgggtttctgttca

SEQ ID NO: 1491736 - DNA, 15 bp, Homo sapiens
tgggtttctgttcaa

SEQ ID NO: 1491737 - DNA, 15 bp, Homo sapiens
gggtttctgttcaag

SEQ ID NO: 1491738 - DNA, 15 bp, Homo sapiens
ggtttctgttcaaga

SEQ ID NO: 1491739 - DNA, 15 bp, Homo sapiens
gtttctgttcaagac

SEQ ID NO: 1491740 - DNA, 15 bp, Homo sapiens
tttctgttcaagact

SEQ ID NO: 1491741 - DNA, 15 bp, Homo sapiens
ttctgttcaagacta

SEQ ID NO: 1491742 - DNA, 15 bp, Homo sapiens
tctgttcaagactaa

SEQ ID NO: 1491743 - DNA, 15 bp, Homo sapiens
ctgttcaagactaac

SEQ ID NO: 1491744 - DNA, 15 bp, Homo sapiens
tgttcaagactaaca

SEQ ID NO: 1491745 - DNA, 15 bp, Homo sapiens
gttcaagactaacac

SEQ ID NO: 1491746 - DNA, 15 bp, Homo sapiens
ttcaagactaacacc

SEQ ID NO: 1491747 - DNA, 15 bp, Homo sapiens
tcaagactaacaccg

SEQ ID NO: 1491748 - DNA, 15 bp, Homo sapiens
caagactaacaccgc

SEQ ID NO: 1491749 - DNA, 15 bp, Homo sapiens
aagactaacaccgct

SEQ ID NO: 1491750 - DNA, 15 bp, Homo sapiens
agactaacaccgctg

SEQ ID NO: 1491751 - DNA, 15 bp, Homo sapiens
gactaacaccgctgg

SEQ ID NO: 1491752 - DNA, 15 bp, Homo sapiens
actaacaccgctggg

SEQ ID NO: 1491753 - DNA, 15 bp, Homo sapiens
ctaacaccgctgggt

SEQ ID NO: 1491754 - DNA, 15 bp, Homo sapiens
taacaccgctgggtt

SEQ ID NO: 1491755 - DNA, 15 bp, Homo sapiens
aacaccgctgggttt

SEQ ID NO: 1491756 - DNA, 15 bp, Homo sapiens
acaccgctgggtttt

SEQ ID NO: 1491757 - DNA, 15 bp, Homo sapiens
caccgctgggttttt

SEQ ID NO: 1491758 - DNA, 15 bp, Homo sapiens
accgctgggtttttc

SEQ ID NO: 1491759 - DNA, 15 bp, Homo sapiens
ccgctgggtttttca

SEQ ID NO: 1491760 - DNA, 15 bp, Homo sapiens
cgctgggtttttcaa

SEQ ID NO: 1491761 - DNA, 15 bp, Homo sapiens
gctgggtttttcaac

SEQ ID NO: 1491762 - DNA, 15 bp, Homo sapiens
ctgggtttttcaact

SEQ ID NO: 1491763 - DNA, 15 bp, Homo sapiens
tgggtttttcaactg

SEQ ID NO: 1491764 - DNA, 15 bp, Homo sapiens
gggtttttcaactgc

SEQ ID NO: 1491765 - DNA, 15 bp, Homo sapiens
ggtttttcaactgca

SEQ ID NO: 1491766 - DNA, 15 bp, Homo sapiens
gtttttcaactgcac

SEQ ID NO: 1491767 - DNA, 15 bp, Homo sapiens
tttttcaactgcaca

SEQ ID NO: 1491768 - DNA, 15 bp, Homo sapiens
ttttcaactgcacag

SEQ ID NO: 1491769 - DNA, 15 bp, Homo sapiens
tttcaactgcacaga

SEQ ID NO: 1491770 - DNA, 15 bp, Homo sapiens
ttcaactgcacagat

SEQ ID NO: 1491771 - DNA, 15 bp, Homo sapiens
tcaactgcacagatg

SEQ ID NO: 1491772 - DNA, 15 bp, Homo sapiens
caactgcacagatgg

SEQ ID NO: 1491773 - DNA, 15 bp, Homo sapiens
aactgcacagatgga

SEQ ID NO: 1491774 - DNA, 15 bp, Homo sapiens
actgcacagatggaa

SEQ ID NO: 1491775 - DNA, 15 bp, Homo sapiens
ctgcacagatggaat

SEQ ID NO: 1491776 - DNA, 15 bp, Homo sapiens
tgcacagatggaatt

SEQ ID NO: 1491777 - DNA, 15 bp, Homo sapiens
gcacagatggaattg

SEQ ID NO: 1491778 - DNA, 15 bp, Homo sapiens
cacagatggaattgc

SEQ ID NO: 1491779 - DNA, 15 bp, Homo sapiens
acagatggaattgca

SEQ ID NO: 1491780 - DNA, 15 bp, Homo sapiens
cagatggaattgcag

SEQ ID NO: 1491781 - DNA, 15 bp, Homo sapiens
agatggaattgcagt

SEQ ID NO: 1491782 - DNA, 15 bp, Homo sapiens
gatggaattgcagta

SEQ ID NO: 1491783 - DNA, 15 bp, Homo sapiens
atggaattgcagtaa

SEQ ID NO: 1491784 - DNA, 15 bp, Homo sapiens
tggaattgcagtaaa

SEQ ID NO: 1491785 - DNA, 15 bp, Homo sapiens
ggaattgcagtaaaa

SEQ ID NO: 1491786 - DNA, 15 bp, Homo sapiens
gaattgcagtaaaag

SEQ ID NO: 1491787 - DNA, 15 bp, Homo sapiens
aattgcagtaaaagt

SEQ ID NO: 1491788 - DNA, 15 bp, Homo sapiens
attgcagtaaaagtc

SEQ ID NO: 1491789 - DNA, 15 bp, Homo sapiens
ttgcagtaaaagtct

SEQ ID NO: 1491790 - DNA, 15 bp, Homo sapiens
tgcagtaaaagtctc

SEQ ID NO: 1491791 - DNA, 15 bp, Homo sapiens
gcagtaaaagtctct

SEQ ID NO: 1491792 - DNA, 15 bp, Homo sapiens
cagtaaaagtctctc

SEQ ID NO: 1491793 - DNA, 15 bp, Homo sapiens
agtaaaagtctctct

SEQ ID NO: 1491794 - DNA, 15 bp, Homo sapiens
gtaaaagtctctctg

SEQ ID NO: 1491795 - DNA, 15 bp, Homo sapiens
taaaagtctctctgt

SEQ ID NO: 1491796 - DNA, 15 bp, Homo sapiens
aaaagtctctctgtt

SEQ ID NO: 1491797 - DNA, 15 bp, Homo sapiens
aaagtctctctgttt

SEQ ID NO: 1491798 - DNA, 15 bp, Homo sapiens
aagtctctctgtttc

SEQ ID NO: 1491799 - DNA, 15 bp, Homo sapiens
agtctctctgtttct

SEQ ID NO: 1491800 - DNA, 15 bp, Homo sapiens
gtctctctgtttctt

SEQ ID NO: 1491801 - DNA, 15 bp, Homo sapiens
tctctctgtttcttt

SEQ ID NO: 1491802 - DNA, 15 bp, Homo sapiens
ctctctgtttctttt

SEQ ID NO: 1491803 - DNA, 15 bp, Homo sapiens
tctctgtttcttttc

SEQ ID NO: 1491804 - DNA, 15 bp, Homo sapiens
ctctgtttcttttct

SEQ ID NO: 1491805 - DNA, 15 bp, Homo sapiens
tctgtttcttttcta

SEQ ID NO: 1491806 - DNA, 15 bp, Homo sapiens
ctgtttcttttctac

SEQ ID NO: 1491807 - DNA, 15 bp, Homo sapiens
tgtttcttttctaca

SEQ ID NO: 1491808 - DNA, 15 bp, Homo sapiens
gtttcttttctacag

SEQ ID NO: 1491809 - DNA, 15 bp, Homo sapiens
tttcttttctacagc

SEQ ID NO: 1491810 - DNA, 15 bp, Homo sapiens
ttcttttctacagcc

SEQ ID NO: 1491811 - DNA, 15 bp, Homo sapiens
tcttttctacagcca

SEQ ID NO: 1491812 - DNA, 15 bp, Homo sapiens
cttttctacagccat

SEQ ID NO: 1491813 - DNA, 15 bp, Homo sapiens
ttttctacagccatc

SEQ ID NO: 1491814 - DNA, 15 bp, Homo sapiens
tttctacagccatct

SEQ ID NO: 1491815 - DNA, 15 bp, Homo sapiens
ttctacagccatctg

SEQ ID NO: 1491816 - DNA, 15 bp, Homo sapiens
tctacagccatctga

SEQ ID NO: 1491817 - DNA, 15 bp, Homo sapiens
ctacagccatctgag

SEQ ID NO: 1491818 - DNA, 15 bp, Homo sapiens
tacagccatctgagg

SEQ ID NO: 1491819 - DNA, 15 bp, Homo sapiens
acagccatctgaggg

SEQ ID NO: 1491820 - DNA, 15 bp, Homo sapiens
cagccatctgaggga

SEQ ID NO: 1491821 - DNA, 15 bp, Homo sapiens
agccatctgagggat

SEQ ID NO: 1491822 - DNA, 15 bp, Homo sapiens
gccatctgagggatc

SEQ ID NO: 1491823 - DNA, 15 bp, Homo sapiens
ccatctgagggatcc

SEQ ID NO: 1491824 - DNA, 15 bp, Homo sapiens
catctgagggatccg

SEQ ID NO: 1491825 - DNA, 15 bp, Homo sapiens
atctgagggatccgt

SEQ ID NO: 1491826 - DNA, 15 bp, Homo sapiens
tctgagggatccgtg

SEQ ID NO: 1491827 - DNA, 15 bp, Homo sapiens
ctgagggatccgtgt

SEQ ID NO: 1491828 - DNA, 15 bp, Homo sapiens
tgagggatccgtgtt

SEQ ID NO: 1491829 - DNA, 15 bp, Homo sapiens
gagggatccgtgttc

SEQ ID NO: 1491830 - DNA, 15 bp, Homo sapiens
agggatccgtgttct

SEQ ID NO: 1491831 - DNA, 15 bp, Homo sapiens
gggatccgtgttctt

SEQ ID NO: 1491832 - DNA, 15 bp, Homo sapiens
ggatccgtgttcttt

SEQ ID NO: 1491833 - DNA, 15 bp, Homo sapiens
gatccgtgttctttc

SEQ ID NO: 1491834 - DNA, 15 bp, Homo sapiens
atccgtgttctttca

SEQ ID NO: 1491835 - DNA, 15 bp, Homo sapiens
tccgtgttctttcat

SEQ ID NO: 1491836 - DNA, 15 bp, Homo sapiens
ccgtgttctttcatg

SEQ ID NO: 1491837 - DNA, 15 bp, Homo sapiens
cgtgttctttcatga

SEQ ID NO: 1491838 - DNA, 15 bp, Homo sapiens
gtgttctttcatgaa

SEQ ID NO: 1491839 - DNA, 15 bp, Homo sapiens
tgttctttcatgaaa

SEQ ID NO: 1491840 - DNA, 15 bp, Homo sapiens
gttctttcatgaaat

SEQ ID NO: 1491841 - DNA, 15 bp, Homo sapiens
ttctttcatgaaatc

SEQ ID NO: 1491842 - DNA, 15 bp, Homo sapiens
tctttcatgaaatca

SEQ ID NO: 1491843 - DNA, 15 bp, Homo sapiens
ctttcatgaaatcat

SEQ ID NO: 1491844 - DNA, 15 bp, Homo sapiens
tttcatgaaatcatt

SEQ ID NO: 1491845 - DNA, 15 bp, Homo sapiens
ttcatgaaatcatta

SEQ ID NO: 1491846 - DNA, 15 bp, Homo sapiens
tcatgaaatcattaa

SEQ ID NO: 1491847 - DNA, 15 bp, Homo sapiens
catgaaatcattaat

SEQ ID NO: 1491848 - DNA, 15 bp, Homo sapiens
atgaaatcattaata

SEQ ID NO: 1491849 - DNA, 15 bp, Homo sapiens
tgaaatcattaatat

SEQ ID NO: 1491850 - DNA, 15 bp, Homo sapiens
gaaatcattaatatt

SEQ ID NO: 1491851 - DNA, 15 bp, Homo sapiens
aaatcattaatattc

SEQ ID NO: 1491852 - DNA, 15 bp, Homo sapiens
aatcattaatattct

SEQ ID NO: 1491853 - DNA, 15 bp, Homo sapiens
atcattaatattctt

SEQ ID NO: 1491854 - DNA, 15 bp, Homo sapiens
tcattaatattctta

SEQ ID NO: 1491855 - DNA, 15 bp, Homo sapiens
cattaatattcttaa

SEQ ID NO: 1491856 - DNA, 15 bp, Homo sapiens
attaatattcttaaa

SEQ ID NO: 1491857 - DNA, 15 bp, Homo sapiens
ttaatattcttaaaa

SEQ ID NO: 1491858 - DNA, 15 bp, Homo sapiens
taatattcttaaaat

SEQ ID NO: 1491859 - DNA, 15 bp, Homo sapiens
aatattcttaaaata

SEQ ID NO: 1491860 - DNA, 15 bp, Homo sapiens
atattcttaaaatac

SEQ ID NO: 1491861 - DNA, 15 bp, Homo sapiens
tattcttaaaataca

SEQ ID NO: 1491862 - DNA, 15 bp, Homo sapiens
attcttaaaatacag

SEQ ID NO: 1491863 - DNA, 15 bp, Homo sapiens
ttcttaaaatacaga

SEQ ID NO: 1491864 - DNA, 15 bp, Homo sapiens
tcttaaaatacagat

SEQ ID NO: 1491865 - DNA, 15 bp, Homo sapiens
cttaaaatacagatg

SEQ ID NO: 1491866 - DNA, 15 bp, Homo sapiens
ttaaaatacagatgg

SEQ ID NO: 1491867 - DNA, 15 bp, Homo sapiens
taaaatacagatggt

SEQ ID NO: 1491868 - DNA, 15 bp, Homo sapiens
aaaatacagatggtt

SEQ ID NO: 1491869 - DNA, 15 bp, Homo sapiens
aaatacagatggttc

SEQ ID NO: 1491870 - DNA, 15 bp, Homo sapiens
aatacagatggttcc

SEQ ID NO: 1491871 - DNA, 15 bp, Homo sapiens
atacagatggttccc

SEQ ID NO: 1491872 - DNA, 15 bp, Homo sapiens
tacagatggttcccg

SEQ ID NO: 1491873 - DNA, 15 bp, Homo sapiens
acagatggttcccgt

SEQ ID NO: 1491874 - DNA, 15 bp, Homo sapiens
cagatggttcccgtt

SEQ ID NO: 1491875 - DNA, 15 bp, Homo sapiens
agatggttcccgttt

SEQ ID NO: 1491876 - DNA, 15 bp, Homo sapiens
gatggttcccgtttc

SEQ ID NO: 1491877 - DNA, 15 bp, Homo sapiens
atggttcccgtttcc

SEQ ID NO: 1491878 - DNA, 15 bp, Homo sapiens
tggttcccgtttcca

SEQ ID NO: 1491879 - DNA, 15 bp, Homo sapiens
ggttcccgtttccag

SEQ ID NO: 1491880 - DNA, 15 bp, Homo sapiens
gttcccgtttccaga

SEQ ID NO: 1491881 - DNA, 15 bp, Homo sapiens
ttcccgtttccagag

SEQ ID NO: 1491882 - DNA, 15 bp, Homo sapiens
tcccgtttccagaga

SEQ ID NO: 1491883 - DNA, 15 bp, Homo sapiens
cccgtttccagagac

SEQ ID NO: 1491884 - DNA, 15 bp, Homo sapiens
ccgtttccagagaca

SEQ ID NO: 1491885 - DNA, 15 bp, Homo sapiens
cgtttccagagacat

SEQ ID NO: 1491886 - DNA, 15 bp, Homo sapiens
gtttccagagacatt

SEQ ID NO: 1491887 - DNA, 15 bp, Homo sapiens
tttccagagacattg

SEQ ID NO: 1491888 - DNA, 15 bp, Homo sapiens
ttccagagacattgg

SEQ ID NO: 1491889 - DNA, 15 bp, Homo sapiens
tccagagacattggt

SEQ ID NO: 1491890 - DNA, 15 bp, Homo sapiens
ccagagacattggtc

SEQ ID NO: 1491891 - DNA, 15 bp, Homo sapiens
cagagacattggtcc

SEQ ID NO: 1491892 - DNA, 15 bp, Homo sapiens
agagacattggtccc

SEQ ID NO: 1491893 - DNA, 15 bp, Homo sapiens
gagacattggtcccg

SEQ ID NO: 1491894 - DNA, 15 bp, Homo sapiens
agacattggtcccgg

SEQ ID NO: 1491895 - DNA, 15 bp, Homo sapiens
gacattggtcccggg

SEQ ID NO: 1491896 - DNA, 15 bp, Homo sapiens
acattggtcccgggg

SEQ ID NO: 1491897 - DNA, 15 bp, Homo sapiens
cattggtcccggggt

SEQ ID NO: 1491898 - DNA, 15 bp, Homo sapiens
attggtcccggggtc

SEQ ID NO: 1491899 - DNA, 15 bp, Homo sapiens
ttggtcccggggtct

SEQ ID NO: 1491900 - DNA, 15 bp, Homo sapiens
tggtcccggggtctg

SEQ ID NO: 1491901 - DNA, 15 bp, Homo sapiens
ggtcccggggtctgt

SEQ ID NO: 1491902 - DNA, 15 bp, Homo sapiens
gtcccggggtctgtg

SEQ ID NO: 1491903 - DNA, 15 bp, Homo sapiens
tcccggggtctgtga

SEQ ID NO: 1491904 - DNA, 15 bp, Homo sapiens
cccggggtctgtgaa

SEQ ID NO: 1491905 - DNA, 15 bp, Homo sapiens
ccggggtctgtgaaa

SEQ ID NO: 1491906 - DNA, 15 bp, Homo sapiens
cggggtctgtgaaat

SEQ ID NO: 1491907 - DNA, 15 bp, Homo sapiens
ggggtctgtgaaatt

SEQ ID NO: 1491908 - DNA, 15 bp, Homo sapiens
gggtctgtgaaattg

SEQ ID NO: 1491909 - DNA, 15 bp, Homo sapiens
ggtctgtgaaattgt

SEQ ID NO: 1491910 - DNA, 15 bp, Homo sapiens
gtctgtgaaattgtg

SEQ ID NO: 1491911 - DNA, 15 bp, Homo sapiens
tctgtgaaattgtgt

SEQ ID NO: 1491912 - DNA, 15 bp, Homo sapiens
ctgtgaaattgtgtt

SEQ ID NO: 1491913 - DNA, 15 bp, Homo sapiens
tgtgaaattgtgttt

SEQ ID NO: 1491914 - DNA, 15 bp, Homo sapiens
gtgaaattgtgttta

SEQ ID NO: 1491915 - DNA, 15 bp, Homo sapiens
tgaaattgtgtttat

SEQ ID NO: 1491916 - DNA, 15 bp, Homo sapiens
gaaattgtgtttatt

SEQ ID NO: 1491917 - DNA, 15 bp, Homo sapiens
aaattgtgtttattt

SEQ ID NO: 1491918 - DNA, 15 bp, Homo sapiens
aattgtgtttatttt

SEQ ID NO: 1491919 - DNA, 15 bp, Homo sapiens
attgtgtttattttc

SEQ ID NO: 1491920 - DNA, 15 bp, Homo sapiens
ttgtgtttattttca

SEQ ID NO: 1491921 - DNA, 15 bp, Homo sapiens
tgtgtttattttcat

SEQ ID NO: 1491922 - DNA, 15 bp, Homo sapiens
gtgtttattttcatt

SEQ ID NO: 1491923 - DNA, 15 bp, Homo sapiens
tgtttattttcattt

SEQ ID NO: 1491924 - DNA, 15 bp, Homo sapiens
gtttattttcatttt

SEQ ID NO: 1491925 - DNA, 15 bp, Homo sapiens
tttattttcattttg

SEQ ID NO: 1491926 - DNA, 15 bp, Homo sapiens
ttattttcattttga

SEQ ID NO: 1491927 - DNA, 15 bp, Homo sapiens
tattttcattttgat

SEQ ID NO: 1491928 - DNA, 15 bp, Homo sapiens
attttcattttgatg

SEQ ID NO: 1491929 - DNA, 15 bp, Homo sapiens
ttttcattttgatgc

SEQ ID NO: 1491930 - DNA, 15 bp, Homo sapiens
tttcattttgatgcc

SEQ ID NO: 1491931 - DNA, 15 bp, Homo sapiens
ttcattttgatgcca

SEQ ID NO: 1491932 - DNA, 15 bp, Homo sapiens
tcattttgatgccac

SEQ ID NO: 1491933 - DNA, 15 bp, Homo sapiens
cattttgatgccacc

SEQ ID NO: 1491934 - DNA, 15 bp, Homo sapiens
attttgatgccacca

SEQ ID NO: 1491935 - DNA, 15 bp, Homo sapiens
ttttgatgccaccat

SEQ ID NO: 1491936 - DNA, 15 bp, Homo sapiens
tttgatgccaccatt

SEQ ID NO: 1491937 - DNA, 15 bp, Homo sapiens
ttgatgccaccattt

SEQ ID NO: 1491938 - DNA, 15 bp, Homo sapiens
tgatgccaccatttc

SEQ ID NO: 1491939 - DNA, 15 bp, Homo sapiens
gatgccaccatttct

SEQ ID NO: 1491940 - DNA, 15 bp, Homo sapiens
atgccaccatttctc

SEQ ID NO: 1491941 - DNA, 15 bp, Homo sapiens
tgccaccatttctca

SEQ ID NO: 1491942 - DNA, 15 bp, Homo sapiens
gccaccatttctcag

SEQ ID NO: 1491943 - DNA, 15 bp, Homo sapiens
ccaccatttctcagg

SEQ ID NO: 1491944 - DNA, 15 bp, Homo sapiens
caccatttctcaggc

SEQ ID NO: 1491945 - DNA, 15 bp, Homo sapiens
accatttctcaggca

SEQ ID NO: 1491946 - DNA, 15 bp, Homo sapiens
ccatttctcaggcaa

SEQ ID NO: 1491947 - DNA, 15 bp, Homo sapiens
catttctcaggcaaa

SEQ ID NO: 1491948 - DNA, 15 bp, Homo sapiens
atttctcaggcaaag

SEQ ID NO: 1491949 - DNA, 15 bp, Homo sapiens
tttctcaggcaaagg

SEQ ID NO: 1491950 - DNA, 15 bp, Homo sapiens
ttctcaggcaaaggt

SEQ ID NO: 1491951 - DNA, 15 bp, Homo sapiens
tctcaggcaaaggtt

SEQ ID NO: 1491952 - DNA, 15 bp, Homo sapiens
ctcaggcaaaggttc

SEQ ID NO: 1491953 - DNA, 15 bp, Homo sapiens
tcaggcaaaggttcc

SEQ ID NO: 1491954 - DNA, 15 bp, Homo sapiens
caggcaaaggttcca

SEQ ID NO: 1491955 - DNA, 15 bp, Homo sapiens
aggcaaaggttccaa

SEQ ID NO: 1491956 - DNA, 15 bp, Homo sapiens
ggcaaaggttccaac

SEQ ID NO: 1491957 - DNA, 15 bp, Homo sapiens
gcaaaggttccaact

SEQ ID NO: 1491958 - DNA, 15 bp, Homo sapiens
caaaggttccaactg

SEQ ID NO: 1491959 - DNA, 15 bp, Homo sapiens
aaaggttccaactgc

SEQ ID NO: 1491960 - DNA, 15 bp, Homo sapiens
aaggttccaactgct

SEQ ID NO: 1491961 - DNA, 15 bp, Homo sapiens
aggttccaactgctc

SEQ ID NO: 1491962 - DNA, 15 bp, Homo sapiens
ggttccaactgctct

SEQ ID NO: 1491963 - DNA, 15 bp, Homo sapiens
gttccaactgctctc

SEQ ID NO: 1491964 - DNA, 15 bp, Homo sapiens
ttccaactgctctcc

SEQ ID NO: 1491965 - DNA, 15 bp, Homo sapiens
tccaactgctctcca

SEQ ID NO: 1491966 - DNA, 15 bp, Homo sapiens
ccaactgctctccaa

SEQ ID NO: 1491967 - DNA, 15 bp, Homo sapiens
caactgctctccaaa

SEQ ID NO: 1491968 - DNA, 15 bp, Homo sapiens
aactgctctccaaaa

SEQ ID NO: 1491969 - DNA, 15 bp, Homo sapiens
actgctctccaaaac

SEQ ID NO: 1491970 - DNA, 15 bp, Homo sapiens
ctgctctccaaaact

SEQ ID NO: 1491971 - DNA, 15 bp, Homo sapiens
tgctctccaaaactt

SEQ ID NO: 1491972 - DNA, 15 bp, Homo sapiens
gctctccaaaacttt

SEQ ID NO: 1491973 - DNA, 15 bp, Homo sapiens
ctctccaaaacttta

SEQ ID NO: 1491974 - DNA, 15 bp, Homo sapiens
tctccaaaactttaa

SEQ ID NO: 1491975 - DNA, 15 bp, Homo sapiens
ctccaaaactttaaa

SEQ ID NO: 1491976 - DNA, 15 bp, Homo sapiens
tccaaaactttaaag

SEQ ID NO: 1491977 - DNA, 15 bp, Homo sapiens
ccaaaactttaaaga

SEQ ID NO: 1491978 - DNA, 15 bp, Homo sapiens
caaaactttaaagag

SEQ ID NO: 1491979 - DNA, 15 bp, Homo sapiens
aaaactttaaagagt

SEQ ID NO: 1491980 - DNA, 15 bp, Homo sapiens
aaactttaaagagtg

SEQ ID NO: 1491981 - DNA, 15 bp, Homo sapiens
aactttaaagagtgc

SEQ ID NO: 1491982 - DNA, 15 bp, Homo sapiens
actttaaagagtgct

SEQ ID NO: 1491983 - DNA, 15 bp, Homo sapiens
ctttaaagagtgctc

SEQ ID NO: 1491984 - DNA, 15 bp, Homo sapiens
tttaaagagtgctct

SEQ ID NO: 1491985 - DNA, 15 bp, Homo sapiens
ttaaagagtgctctg

SEQ ID NO: 1491986 - DNA, 15 bp, Homo sapiens
taaagagtgctctgt

SEQ ID NO: 1491987 - DNA, 15 bp, Homo sapiens
aaagagtgctctgtc

SEQ ID NO: 1491988 - DNA, 15 bp, Homo sapiens
aagagtgctctgtca

SEQ ID NO: 1491989 - DNA, 15 bp, Homo sapiens
agagtgctctgtcag

SEQ ID NO: 1491990 - DNA, 15 bp, Homo sapiens
gagtgctctgtcagg

SEQ ID NO: 1491991 - DNA, 15 bp, Homo sapiens
agtgctctgtcagga

SEQ ID NO: 1491992 - DNA, 15 bp, Homo sapiens
gtgctctgtcaggat

SEQ ID NO: 1491993 - DNA, 15 bp, Homo sapiens
tgctctgtcaggata

SEQ ID NO: 1491994 - DNA, 15 bp, Homo sapiens
gctctgtcaggatac

SEQ ID NO: 1491995 - DNA, 15 bp, Homo sapiens
ctctgtcaggatacg

SEQ ID NO: 1491996 - DNA, 15 bp, Homo sapiens
tctgtcaggatacgt

SEQ ID NO: 1491997 - DNA, 15 bp, Homo sapiens
ctgtcaggatacgta

SEQ ID NO: 1491998 - DNA, 15 bp, Homo sapiens
tgtcaggatacgtag

SEQ ID NO: 1491999 - DNA, 15 bp, Homo sapiens
gtcaggatacgtagt

SEQ ID NO: 1492000 - DNA, 15 bp, Homo sapiens
tcaggatacgtagtg

SEQ ID NO: 1492001 - DNA, 15 bp, Homo sapiens
caggatacgtagtga

SEQ ID NO: 1492002 - DNA, 15 bp, Homo sapiens
aggatacgtagtgag

SEQ ID NO: 1492003 - DNA, 15 bp, Homo sapiens
ggatacgtagtgagg

SEQ ID NO: 1492004 - DNA, 15 bp, Homo sapiens
gatacgtagtgaggc

SEQ ID NO: 1492005 - DNA, 15 bp, Homo sapiens
atacgtagtgaggca

SEQ ID NO: 1492006 - DNA, 15 bp, Homo sapiens
tacgtagtgaggcag

SEQ ID NO: 1492007 - DNA, 15 bp, Homo sapiens
acgtagtgaggcagc

SEQ ID NO: 1492008 - DNA, 15 bp, Homo sapiens
cgtagtgaggcagct

SEQ ID NO: 1492009 - DNA, 15 bp, Homo sapiens
gtagtgaggcagcta

SEQ ID NO: 1492010 - DNA, 15 bp, Homo sapiens
tagtgaggcagctaa

SEQ ID NO: 1492011 - DNA, 15 bp, Homo sapiens
agtgaggcagctaag

SEQ ID NO: 1492012 - DNA, 15 bp, Homo sapiens
gtgaggcagctaagc

SEQ ID NO: 1492013 - DNA, 15 bp, Homo sapiens
tgaggcagctaagca

SEQ ID NO: 1492014 - DNA, 15 bp, Homo sapiens
gaggcagctaagcac

SEQ ID NO: 1492015 - DNA, 15 bp, Homo sapiens
aggcagctaagcacc

SEQ ID NO: 1492016 - DNA, 15 bp, Homo sapiens
ggcagctaagcacct

SEQ ID NO: 1492017 - DNA, 15 bp, Homo sapiens
gcagctaagcacctc

SEQ ID NO: 1492018 - DNA, 15 bp, Homo sapiens
cagctaagcacctcc

SEQ ID NO: 1492019 - DNA, 15 bp, Homo sapiens
agctaagcacctccc

SEQ ID NO: 1492020 - DNA, 15 bp, Homo sapiens
gctaagcacctccct

SEQ ID NO: 1492021 - DNA, 15 bp, Homo sapiens
ctaagcacctccctg

SEQ ID NO: 1492022 - DNA, 15 bp, Homo sapiens
taagcacctccctgg

SEQ ID NO: 1492023 - DNA, 15 bp, Homo sapiens
aagcacctccctgga

SEQ ID NO: 1492024 - DNA, 15 bp, Homo sapiens
agcacctccctggag

SEQ ID NO: 1492025 - DNA, 15 bp, Homo sapiens
gcacctccctggagt

SEQ ID NO: 1492026 - DNA, 15 bp, Homo sapiens
cacctccctggagtg

SEQ ID NO: 1492027 - DNA, 15 bp, Homo sapiens
acctccctggagtgc

SEQ ID NO: 1492028 - DNA, 15 bp, Homo sapiens
cctccctggagtgct

SEQ ID NO: 1492029 - DNA, 15 bp, Homo sapiens
ctccctggagtgcta

SEQ ID NO: 1492030 - DNA, 15 bp, Homo sapiens
tccctggagtgctaa

SEQ ID NO: 1492031 - DNA, 15 bp, Homo sapiens
ccctggagtgctaag

SEQ ID NO: 1492032 - DNA, 15 bp, Homo sapiens
cctggagtgctaagt

SEQ ID NO: 1492033 - DNA, 15 bp, Homo sapiens
ctggagtgctaagtg

SEQ ID NO: 1492034 - DNA, 15 bp, Homo sapiens
tggagtgctaagtgg

SEQ ID NO: 1492035 - DNA, 15 bp, Homo sapiens
ggagtgctaagtggt

SEQ ID NO: 1492036 - DNA, 15 bp, Homo sapiens
gagtgctaagtggtt

SEQ ID NO: 1492037 - DNA, 15 bp, Homo sapiens
agtgctaagtggttc

SEQ ID NO: 1492038 - DNA, 15 bp, Homo sapiens
gtgctaagtggttca

SEQ ID NO: 1492039 - DNA, 15 bp, Homo sapiens
tgctaagtggttcag

SEQ ID NO: 1492040 - DNA, 15 bp, Homo sapiens
gctaagtggttcagg

SEQ ID NO: 1492041 - DNA, 15 bp, Homo sapiens
ctaagtggttcaggc

SEQ ID NO: 1492042 - DNA, 15 bp, Homo sapiens
taagtggttcaggca

SEQ ID NO: 1492043 - DNA, 15 bp, Homo sapiens
aagtggttcaggcag

SEQ ID NO: 1492044 - DNA, 15 bp, Homo sapiens
agtggttcaggcagc

SEQ ID NO: 1492045 - DNA, 15 bp, Homo sapiens
gtggttcaggcagcg

SEQ ID NO: 1492046 - DNA, 15 bp, Homo sapiens
tggttcaggcagcgc

SEQ ID NO: 1492047 - DNA, 15 bp, Homo sapiens
ggttcaggcagcgcc

SEQ ID NO: 1492048 - DNA, 15 bp, Homo sapiens
gttcaggcagcgcca

SEQ ID NO: 1492049 - DNA, 15 bp, Homo sapiens
ttcaggcagcgccag

SEQ ID NO: 1492050 - DNA, 15 bp, Homo sapiens
tcaggcagcgccaga

SEQ ID NO: 1492051 - DNA, 15 bp, Homo sapiens
caggcagcgccagat

SEQ ID NO: 1492052 - DNA, 15 bp, Homo sapiens
aggcagcgccagatg

SEQ ID NO: 1492053 - DNA, 15 bp, Homo sapiens
ggcagcgccagatgc

SEQ ID NO: 1492054 - DNA, 15 bp, Homo sapiens
gcagcgccagatgcc

SEQ ID NO: 1492055 - DNA, 15 bp, Homo sapiens
cagcgccagatgcca

SEQ ID NO: 1492056 - DNA, 15 bp, Homo sapiens
agcgccagatgccat

SEQ ID NO: 1492057 - DNA, 15 bp, Homo sapiens
gcgccagatgccatg

SEQ ID NO: 1492058 - DNA, 15 bp, Homo sapiens
cgccagatgccatgg

SEQ ID NO: 1492059 - DNA, 15 bp, Homo sapiens
gccagatgccatgga

SEQ ID NO: 1492060 - DNA, 15 bp, Homo sapiens
ccagatgccatggag

SEQ ID NO: 1492061 - DNA, 15 bp, Homo sapiens
cagatgccatggagc

SEQ ID NO: 1492062 - DNA, 15 bp, Homo sapiens
agatgccatggagcc

SEQ ID NO: 1492063 - DNA, 15 bp, Homo sapiens
gatgccatggagcct

SEQ ID NO: 1492064 - DNA, 15 bp, Homo sapiens
atgccatggagcctg

SEQ ID NO: 1492065 - DNA, 15 bp, Homo sapiens
tgccatggagcctga

SEQ ID NO: 1492066 - DNA, 15 bp, Homo sapiens
gccatggagcctgat

SEQ ID NO: 1492067 - DNA, 15 bp, Homo sapiens
ccatggagcctgatg

SEQ ID NO: 1492068 - DNA, 15 bp, Homo sapiens
catggagcctgatga

SEQ ID NO: 1492069 - DNA, 15 bp, Homo sapiens
atggagcctgatgag

SEQ ID NO: 1492070 - DNA, 15 bp, Homo sapiens
tggagcctgatgagt

SEQ ID NO: 1492071 - DNA, 15 bp, Homo sapiens
ggagcctgatgagtg

SEQ ID NO: 1492072 - DNA, 15 bp, Homo sapiens
gagcctgatgagtgt

SEQ ID NO: 1492073 - DNA, 15 bp, Homo sapiens
agcctgatgagtgtt

SEQ ID NO: 1492074 - DNA, 15 bp, Homo sapiens
gcctgatgagtgttc

SEQ ID NO: 1492075 - DNA, 15 bp, Homo sapiens
cctgatgagtgttct

SEQ ID NO: 1492076 - DNA, 15 bp, Homo sapiens
ctgatgagtgttcta

SEQ ID NO: 1492077 - DNA, 15 bp, Homo sapiens
tgatgagtgttctag

SEQ ID NO: 1492078 - DNA, 15 bp, Homo sapiens
gatgagtgttctagg

SEQ ID NO: 1492079 - DNA, 15 bp, Homo sapiens
atgagtgttctaggg

SEQ ID NO: 1492080 - DNA, 15 bp, Homo sapiens
tgagtgttctagggg

SEQ ID NO: 1492081 - DNA, 15 bp, Homo sapiens
gagtgttctagggga

SEQ ID NO: 1492082 - DNA, 15 bp, Homo sapiens
agtgttctaggggaa

SEQ ID NO: 1492083 - DNA, 15 bp, Homo sapiens
gtgttctaggggaac

SEQ ID NO: 1492084 - DNA, 15 bp, Homo sapiens
tgttctaggggaacc

SEQ ID NO: 1492085 - DNA, 15 bp, Homo sapiens
gttctaggggaacca

SEQ ID NO: 1492086 - DNA, 15 bp, Homo sapiens
ttctaggggaaccat

SEQ ID NO: 1492087 - DNA, 15 bp, Homo sapiens
tctaggggaaccatg

SEQ ID NO: 1492088 - DNA, 15 bp, Homo sapiens
ctaggggaaccatgt

SEQ ID NO: 1492089 - DNA, 15 bp, Homo sapiens
taggggaaccatgtg

SEQ ID NO: 1492090 - DNA, 15 bp, Homo sapiens
aggggaaccatgtgg

SEQ ID NO: 1492091 - DNA, 15 bp, Homo sapiens
ggggaaccatgtgga

SEQ ID NO: 1492092 - DNA, 15 bp, Homo sapiens
gggaaccatgtggaa

SEQ ID NO: 1492093 - DNA, 15 bp, Homo sapiens
ggaaccatgtggaag

SEQ ID NO: 1492094 - DNA, 15 bp, Homo sapiens
gaaccatgtggaagg

SEQ ID NO: 1492095 - DNA, 15 bp, Homo sapiens
aaccatgtggaaggg

SEQ ID NO: 1492096 - DNA, 15 bp, Homo sapiens
accatgtggaaggga

SEQ ID NO: 1492097 - DNA, 15 bp, Homo sapiens
ccatgtggaagggag

SEQ ID NO: 1492098 - DNA, 15 bp, Homo sapiens
catgtggaagggagc

SEQ ID NO: 1492099 - DNA, 15 bp, Homo sapiens
atgtggaagggagct

SEQ ID NO: 1492100 - DNA, 15 bp, Homo sapiens
tgtggaagggagctc

SEQ ID NO: 1492101 - DNA, 15 bp, Homo sapiens
gtggaagggagctct

SEQ ID NO: 1492102 - DNA, 15 bp, Homo sapiens
tggaagggagctctc

SEQ ID NO: 1492103 - DNA, 15 bp, Homo sapiens
ggaagggagctctcc

SEQ ID NO: 1492104 - DNA, 15 bp, Homo sapiens
gaagggagctctccc

SEQ ID NO: 1492105 - DNA, 15 bp, Homo sapiens
aagggagctctccca

SEQ ID NO: 1492106 - DNA, 15 bp, Homo sapiens
agggagctctcccag

SEQ ID NO: 1492107 - DNA, 15 bp, Homo sapiens
gggagctctcccaga

SEQ ID NO: 1492108 - DNA, 15 bp, Homo sapiens
ggagctctcccagag

SEQ ID NO: 1492109 - DNA, 15 bp, Homo sapiens
gagctctcccagaga

SEQ ID NO: 1492110 - DNA, 15 bp, Homo sapiens
agctctcccagagag

SEQ ID NO: 1492111 - DNA, 15 bp, Homo sapiens
gctctcccagagaga

SEQ ID NO: 1492112 - DNA, 15 bp, Homo sapiens
ctctcccagagagaa

SEQ ID NO: 1492113 - DNA, 15 bp, Homo sapiens
tctcccagagagaaa

SEQ ID NO: 1492114 - DNA, 15 bp, Homo sapiens
ctcccagagagaaag

SEQ ID NO: 1492115 - DNA, 15 bp, Homo sapiens
tcccagagagaaaga

SEQ ID NO: 1492116 - DNA, 15 bp, Homo sapiens
cccagagagaaagag

SEQ ID NO: 1492117 - DNA, 15 bp, Homo sapiens
ccagagagaaagaga

SEQ ID NO: 1492118 - DNA, 15 bp, Homo sapiens
cagagagaaagagaa

SEQ ID NO: 1492119 - DNA, 15 bp, Homo sapiens
agagagaaagagaag

SEQ ID NO: 1492120 - DNA, 15 bp, Homo sapiens
gagagaaagagaagg

SEQ ID NO: 1492121 - DNA, 15 bp, Homo sapiens
agagaaagagaaggg

SEQ ID NO: 1492122 - DNA, 15 bp, Homo sapiens
gagaaagagaaggga

SEQ ID NO: 1492123 - DNA, 15 bp, Homo sapiens
agaaagagaagggaa

SEQ ID NO: 1492124 - DNA, 15 bp, Homo sapiens
gaaagagaagggaaa

SEQ ID NO: 1492125 - DNA, 15 bp, Homo sapiens
aaagagaagggaaag

SEQ ID NO: 1492126 - DNA, 15 bp, Homo sapiens
aagagaagggaaaga

SEQ ID NO: 1492127 - DNA, 15 bp, Homo sapiens
agagaagggaaagaa

SEQ ID NO: 1492128 - DNA, 15 bp, Homo sapiens
gagaagggaaagaaa

SEQ ID NO: 1492129 - DNA, 15 bp, Homo sapiens
agaagggaaagaaag

SEQ ID NO: 1492130 - DNA, 15 bp, Homo sapiens
aagggaaagaaagag

SEQ ID NO: 1492131 - DNA, 15 bp, Homo sapiens
agggaaagaaagagg

SEQ ID NO: 1492132 - DNA, 15 bp, Homo sapiens
gggaaagaaagaggg

SEQ ID NO: 1492133 - DNA, 15 bp, Homo sapiens
ggaaagaaagaggga

SEQ ID NO: 1492134 - DNA, 15 bp, Homo sapiens
gaaagaaagagggac

SEQ ID NO: 1492135 - DNA, 15 bp, Homo sapiens
aaagaaagagggaca

SEQ ID NO: 1492136 - DNA, 15 bp, Homo sapiens
aagaaagagggacaa

SEQ ID NO: 1492137 - DNA, 15 bp, Homo sapiens
agaaagagggacaag

SEQ ID NO: 1492138 - DNA, 15 bp, Homo sapiens
gaaagagggacaagg

SEQ ID NO: 1492139 - DNA, 15 bp, Homo sapiens
aaagagggacaaggg

SEQ ID NO: 1492140 - DNA, 15 bp, Homo sapiens
aagagggacaagggg

SEQ ID NO: 1492141 - DNA, 15 bp, Homo sapiens
agagggacaaggggt

SEQ ID NO: 1492142 - DNA, 15 bp, Homo sapiens
gagggacaaggggtg

SEQ ID NO: 1492143 - DNA, 15 bp, Homo sapiens
agggacaaggggtga

SEQ ID NO: 1492144 - DNA, 15 bp, Homo sapiens
gggacaaggggtgag

SEQ ID NO: 1492145 - DNA, 15 bp, Homo sapiens
ggacaaggggtgagg

SEQ ID NO: 1492146 - DNA, 15 bp, Homo sapiens
gacaaggggtgaggg

SEQ ID NO: 1492147 - DNA, 15 bp, Homo sapiens
acaaggggtgaggga

SEQ ID NO: 1492148 - DNA, 15 bp, Homo sapiens
caaggggtgagggag

SEQ ID NO: 1492149 - DNA, 15 bp, Homo sapiens
aaggggtgagggagg

SEQ ID NO: 1492150 - DNA, 15 bp, Homo sapiens
aggggtgagggaggc

SEQ ID NO: 1492151 - DNA, 15 bp, Homo sapiens
ggggtgagggaggct

SEQ ID NO: 1492152 - DNA, 15 bp, Homo sapiens
gggtgagggaggctg

SEQ ID NO: 1492153 - DNA, 15 bp, Homo sapiens
ggtgagggaggctgc

SEQ ID NO: 1492154 - DNA, 15 bp, Homo sapiens
gtgagggaggctgcc

SEQ ID NO: 1492155 - DNA, 15 bp, Homo sapiens
tgagggaggctgcct

SEQ ID NO: 1492156 - DNA, 15 bp, Homo sapiens
gagggaggctgccta

SEQ ID NO: 1492157 - DNA, 15 bp, Homo sapiens
agggaggctgcctag

SEQ ID NO: 1492158 - DNA, 15 bp, Homo sapiens
gggaggctgcctagg

SEQ ID NO: 1492159 - DNA, 15 bp, Homo sapiens
ggaggctgcctaggc

SEQ ID NO: 1492160 - DNA, 15 bp, Homo sapiens
gaggctgcctaggct

SEQ ID NO: 1492161 - DNA, 15 bp, Homo sapiens
aggctgcctaggctc

SEQ ID NO: 1492162 - DNA, 15 bp, Homo sapiens
ggctgcctaggctct

SEQ ID NO: 1492163 - DNA, 15 bp, Homo sapiens
gctgcctaggctctc

SEQ ID NO: 1492164 - DNA, 15 bp, Homo sapiens
ctgcctaggctctca

SEQ ID NO: 1492165 - DNA, 15 bp, Homo sapiens
tgcctaggctctcag

SEQ ID NO: 1492166 - DNA, 15 bp, Homo sapiens
gcctaggctctcagg

SEQ ID NO: 1492167 - DNA, 15 bp, Homo sapiens
cctaggctctcaggg

SEQ ID NO: 1492168 - DNA, 15 bp, Homo sapiens
ctaggctctcaggga

SEQ ID NO: 1492169 - DNA, 15 bp, Homo sapiens
taggctctcagggag

SEQ ID NO: 1492170 - DNA, 15 bp, Homo sapiens
aggctctcagggagc

SEQ ID NO: 1492171 - DNA, 15 bp, Homo sapiens
ggctctcagggagcc

SEQ ID NO: 1492172 - DNA, 15 bp, Homo sapiens
gctctcagggagcct

SEQ ID NO: 1492173 - DNA, 15 bp, Homo sapiens
ctctcagggagcctc

SEQ ID NO: 1492174 - DNA, 15 bp, Homo sapiens
tctcagggagcctct

SEQ ID NO: 1492175 - DNA, 15 bp, Homo sapiens
ctcagggagcctcta

SEQ ID NO: 1492176 - DNA, 15 bp, Homo sapiens
tcagggagcctctac

SEQ ID NO: 1492177 - DNA, 15 bp, Homo sapiens
cagggagcctctacc

SEQ ID NO: 1492178 - DNA, 15 bp, Homo sapiens
agggagcctctacct

SEQ ID NO: 1492179 - DNA, 15 bp, Homo sapiens
gggagcctctacctt

SEQ ID NO: 1492180 - DNA, 15 bp, Homo sapiens
ggagcctctaccttc

SEQ ID NO: 1492181 - DNA, 15 bp, Homo sapiens
gagcctctaccttcc

SEQ ID NO: 1492182 - DNA, 15 bp, Homo sapiens
agcctctaccttcct

SEQ ID NO: 1492183 - DNA, 15 bp, Homo sapiens
gcctctaccttcctg

SEQ ID NO: 1492184 - DNA, 15 bp, Homo sapiens
cctctaccttcctgc

SEQ ID NO: 1492185 - DNA, 15 bp, Homo sapiens
ctctaccttcctgca

SEQ ID NO: 1492186 - DNA, 15 bp, Homo sapiens
tctaccttcctgcag

SEQ ID NO: 1492187 - DNA, 15 bp, Homo sapiens
ctaccttcctgcagt

SEQ ID NO: 1492188 - DNA, 15 bp, Homo sapiens
taccttcctgcagtc

SEQ ID NO: 1492189 - DNA, 15 bp, Homo sapiens
accttcctgcagtcc

SEQ ID NO: 1492190 - DNA, 15 bp, Homo sapiens
ccttcctgcagtcct

SEQ ID NO: 1492191 - DNA, 15 bp, Homo sapiens
cttcctgcagtcctt

SEQ ID NO: 1492192 - DNA, 15 bp, Homo sapiens
ttcctgcagtccttg

SEQ ID NO: 1492193 - DNA, 15 bp, Homo sapiens
tcctgcagtccttgc

SEQ ID NO: 1492194 - DNA, 15 bp, Homo sapiens
cctgcagtccttgct

SEQ ID NO: 1492195 - DNA, 15 bp, Homo sapiens
ctgcagtccttgcta

SEQ ID NO: 1492196 - DNA, 15 bp, Homo sapiens
tgcagtccttgctaa

SEQ ID NO: 1492197 - DNA, 15 bp, Homo sapiens
gcagtccttgctaac

SEQ ID NO: 1492198 - DNA, 15 bp, Homo sapiens
cagtccttgctaaca

SEQ ID NO: 1492199 - DNA, 15 bp, Homo sapiens
agtccttgctaacaa

SEQ ID NO: 1492200 - DNA, 15 bp, Homo sapiens
gtccttgctaacaac

SEQ ID NO: 1492201 - DNA, 15 bp, Homo sapiens
tccttgctaacaacg

SEQ ID NO: 1492202 - DNA, 15 bp, Homo sapiens
ccttgctaacaacgt

SEQ ID NO: 1492203 - DNA, 15 bp, Homo sapiens
cttgctaacaacgtc

SEQ ID NO: 1492204 - DNA, 15 bp, Homo sapiens
ttgctaacaacgtct

SEQ ID NO: 1492205 - DNA, 15 bp, Homo sapiens
tgctaacaacgtctt

SEQ ID NO: 1492206 - DNA, 15 bp, Homo sapiens
gctaacaacgtcttc

SEQ ID NO: 1492207 - DNA, 15 bp, Homo sapiens
ctaacaacgtcttct

SEQ ID NO: 1492208 - DNA, 15 bp, Homo sapiens
taacaacgtcttctc

SEQ ID NO: 1492209 - DNA, 15 bp, Homo sapiens
aacaacgtcttctcc

SEQ ID NO: 1492210 - DNA, 15 bp, Homo sapiens
acaacgtcttctcct

SEQ ID NO: 1492211 - DNA, 15 bp, Homo sapiens
caacgtcttctcctc

SEQ ID NO: 1492212 - DNA, 15 bp, Homo sapiens
aacgtcttctcctct

SEQ ID NO: 1492213 - DNA, 15 bp, Homo sapiens
acgtcttctcctctg

SEQ ID NO: 1492214 - DNA, 15 bp, Homo sapiens
cgtcttctcctctgc

SEQ ID NO: 1492215 - DNA, 15 bp, Homo sapiens
gtcttctcctctgca

SEQ ID NO: 1492216 - DNA, 15 bp, Homo sapiens
tcttctcctctgcag

SEQ ID NO: 1492217 - DNA, 15 bp, Homo sapiens
cttctcctctgcaga

SEQ ID NO: 1492218 - DNA, 15 bp, Homo sapiens
ttctcctctgcagac

SEQ ID NO: 1492219 - DNA, 15 bp, Homo sapiens
tctcctctgcagacc

SEQ ID NO: 1492220 - DNA, 15 bp, Homo sapiens
ctcctctgcagaccc

SEQ ID NO: 1492221 - DNA, 15 bp, Homo sapiens
tcctctgcagacccc

SEQ ID NO: 1492222 - DNA, 15 bp, Homo sapiens
cctctgcagacccca

SEQ ID NO: 1492223 - DNA, 15 bp, Homo sapiens
ctctgcagaccccac

SEQ ID NO: 1492224 - DNA, 15 bp, Homo sapiens
tctgcagaccccaca

SEQ ID NO: 1492225 - DNA, 15 bp, Homo sapiens
ctgcagaccccacac

SEQ ID NO: 1492226 - DNA, 15 bp, Homo sapiens
tgcagaccccacact

SEQ ID NO: 1492227 - DNA, 15 bp, Homo sapiens
gcagaccccacactg

SEQ ID NO: 1492228 - DNA, 15 bp, Homo sapiens
agaccccacactgtg

SEQ ID NO: 1492229 - DNA, 15 bp, Homo sapiens
gaccccacactgtgg

SEQ ID NO: 1492230 - DNA, 15 bp, Homo sapiens
accccacactgtgga

SEQ ID NO: 1492231 - DNA, 15 bp, Homo sapiens
ccccacactgtggac

SEQ ID NO: 1492232 - DNA, 15 bp, Homo sapiens
cccacactgtggaca

SEQ ID NO: 1492233 - DNA, 15 bp, Homo sapiens
ccacactgtggacac

SEQ ID NO: 1492234 - DNA, 15 bp, Homo sapiens
cacactgtggacaca

SEQ ID NO: 1492235 - DNA, 15 bp, Homo sapiens
acactgtggacacag

SEQ ID NO: 1492236 - DNA, 15 bp, Homo sapiens
cactgtggacacagg

SEQ ID NO: 1492237 - DNA, 15 bp, Homo sapiens
actgtggacacagga

SEQ ID NO: 1492238 - DNA, 15 bp, Homo sapiens
ctgtggacacaggag

SEQ ID NO: 1492239 - DNA, 15 bp, Homo sapiens
tgtggacacaggagc

SEQ ID NO: 1492240 - DNA, 15 bp, Homo sapiens
gtggacacaggagca

SEQ ID NO: 1492241 - DNA, 15 bp, Homo sapiens
tggacacaggagcat

SEQ ID NO: 1492242 - DNA, 15 bp, Homo sapiens
ggacacaggagcatg

SEQ ID NO: 1492243 - DNA, 15 bp, Homo sapiens
gacacaggagcatgt

SEQ ID NO: 1492244 - DNA, 15 bp, Homo sapiens
acacaggagcatgtg

SEQ ID NO: 1492245 - DNA, 15 bp, Homo sapiens
cacaggagcatgtga

SEQ ID NO: 1492246 - DNA, 15 bp, Homo sapiens
acaggagcatgtgag

SEQ ID NO: 1492247 - DNA, 15 bp, Homo sapiens
caggagcatgtgagg

SEQ ID NO: 1492248 - DNA, 15 bp, Homo sapiens
aggagcatgtgaggc

SEQ ID NO: 1492249 - DNA, 15 bp, Homo sapiens
ggagcatgtgaggca

SEQ ID NO: 1492250 - DNA, 15 bp, Homo sapiens
gagcatgtgaggcaa

SEQ ID NO: 1492251 - DNA, 15 bp, Homo sapiens
agcatgtgaggcaat

SEQ ID NO: 1492252 - DNA, 15 bp, Homo sapiens
gcatgtgaggcaatg

SEQ ID NO: 1492253 - DNA, 15 bp, Homo sapiens
catgtgaggcaatgg

SEQ ID NO: 1492254 - DNA, 15 bp, Homo sapiens
atgtgaggcaatggc

SEQ ID NO: 1492255 - DNA, 15 bp, Homo sapiens
tgtgaggcaatggct

SEQ ID NO: 1492256 - DNA, 15 bp, Homo sapiens
gtgaggcaatggctg

SEQ ID NO: 1492257 - DNA, 15 bp, Homo sapiens
tgaggcaatggctgg

SEQ ID NO: 1492258 - DNA, 15 bp, Homo sapiens
gaggcaatggctgga

SEQ ID NO: 1492259 - DNA, 15 bp, Homo sapiens
aggcaatggctggag

SEQ ID NO: 1492260 - DNA, 15 bp, Homo sapiens
ggcaatggctggagt

SEQ ID NO: 1492261 - DNA, 15 bp, Homo sapiens
gcaatggctggagtg

SEQ ID NO: 1492262 - DNA, 15 bp, Homo sapiens
caatggctggagtgg

SEQ ID NO: 1492263 - DNA, 15 bp, Homo sapiens
aatggctggagtggg

SEQ ID NO: 1492264 - DNA, 15 bp, Homo sapiens
atggctggagtgggc

SEQ ID NO: 1492265 - DNA, 15 bp, Homo sapiens
tggctggagtgggcc

SEQ ID NO: 1492266 - DNA, 15 bp, Homo sapiens
ggctggagtgggcca

SEQ ID NO: 1492267 - DNA, 15 bp, Homo sapiens
gctggagtgggccat

SEQ ID NO: 1492268 - DNA, 15 bp, Homo sapiens
ctggagtgggccata

SEQ ID NO: 1492269 - DNA, 15 bp, Homo sapiens
tggagtgggccataa

SEQ ID NO: 1492270 - DNA, 15 bp, Homo sapiens
ggagtgggccataaa

SEQ ID NO: 1492271 - DNA, 15 bp, Homo sapiens
gagtgggccataaag

SEQ ID NO: 1492272 - DNA, 15 bp, Homo sapiens
agtgggccataaagg

SEQ ID NO: 1492273 - DNA, 15 bp, Homo sapiens
gtgggccataaagga

SEQ ID NO: 1492274 - DNA, 15 bp, Homo sapiens
tgggccataaaggag

SEQ ID NO: 1492275 - DNA, 15 bp, Homo sapiens
gggccataaaggagt

SEQ ID NO: 1492276 - DNA, 15 bp, Homo sapiens
ggccataaaggagta

SEQ ID NO: 1492277 - DNA, 15 bp, Homo sapiens
gccataaaggagtac

SEQ ID NO: 1492278 - DNA, 15 bp, Homo sapiens
ccataaaggagtaca

SEQ ID NO: 1492279 - DNA, 15 bp, Homo sapiens
cataaaggagtacag

SEQ ID NO: 1492280 - DNA, 15 bp, Homo sapiens
ataaaggagtacagc

SEQ ID NO: 1492281 - DNA, 15 bp, Homo sapiens
taaaggagtacagct

SEQ ID NO: 1492282 - DNA, 15 bp, Homo sapiens
aaaggagtacagctt

SEQ ID NO: 1492283 - DNA, 15 bp, Homo sapiens
aaggagtacagcttg

SEQ ID NO: 1492284 - DNA, 15 bp, Homo sapiens
aggagtacagcttga

SEQ ID NO: 1492285 - DNA, 15 bp, Homo sapiens
ggagtacagcttgat

SEQ ID NO: 1492286 - DNA, 15 bp, Homo sapiens
gagtacagcttgatg

SEQ ID NO: 1492287 - DNA, 15 bp, Homo sapiens
agtacagcttgatgg

SEQ ID NO: 1492288 - DNA, 15 bp, Homo sapiens
gtacagcttgatgga

SEQ ID NO: 1492289 - DNA, 15 bp, Homo sapiens
tacagcttgatggag

SEQ ID NO: 1492290 - DNA, 15 bp, Homo sapiens
acagcttgatggaga

SEQ ID NO: 1492291 - DNA, 15 bp, Homo sapiens
cagcttgatggagat

SEQ ID NO: 1492292 - DNA, 15 bp, Homo sapiens
agcttgatggagatc

SEQ ID NO: 1492293 - DNA, 15 bp, Homo sapiens
gcttgatggagatcg

SEQ ID NO: 1492294 - DNA, 15 bp, Homo sapiens
cttgatggagatcga

SEQ ID NO: 1492295 - DNA, 15 bp, Homo sapiens
ttgatggagatcgac

SEQ ID NO: 1492296 - DNA, 15 bp, Homo sapiens
tgatggagatcgaca

SEQ ID NO: 1492297 - DNA, 15 bp, Homo sapiens
gatggagatcgacac

SEQ ID NO: 1492298 - DNA, 15 bp, Homo sapiens
atggagatcgacaca

SEQ ID NO: 1492299 - DNA, 15 bp, Homo sapiens
tggagatcgacacat

SEQ ID NO: 1492300 - DNA, 15 bp, Homo sapiens
ggagatcgacacatc

SEQ ID NO: 1492301 - DNA, 15 bp, Homo sapiens
gagatcgacacatcc

SEQ ID NO: 1492302 - DNA, 15 bp, Homo sapiens
agatcgacacatcct

SEQ ID NO: 1492303 - DNA, 15 bp, Homo sapiens
gatcgacacatcctt

SEQ ID NO: 1492304 - DNA, 15 bp, Homo sapiens
atcgacacatccttt

SEQ ID NO: 1492305 - DNA, 15 bp, Homo sapiens
tcgacacatcctttt

SEQ ID NO: 1492306 - DNA, 15 bp, Homo sapiens
cgacacatccttttt

SEQ ID NO: 1492307 - DNA, 15 bp, Homo sapiens
gacacatcctttttc

SEQ ID NO: 1492308 - DNA, 15 bp, Homo sapiens
acacatcctttttcc

SEQ ID NO: 1492309 - DNA, 15 bp, Homo sapiens
cacatcctttttcca

SEQ ID NO: 1492310 - DNA, 15 bp, Homo sapiens
acatcctttttccag

SEQ ID NO: 1492311 - DNA, 15 bp, Homo sapiens
catcctttttccaga

SEQ ID NO: 1492312 - DNA, 15 bp, Homo sapiens
atcctttttccagaa

SEQ ID NO: 1492313 - DNA, 15 bp, Homo sapiens
tcctttttccagaac

SEQ ID NO: 1492314 - DNA, 15 bp, Homo sapiens
cctttttccagaaca

SEQ ID NO: 1492315 - DNA, 15 bp, Homo sapiens
ctttttccagaacat

SEQ ID NO: 1492316 - DNA, 15 bp, Homo sapiens
tttttccagaacatg

SEQ ID NO: 1492317 - DNA, 15 bp, Homo sapiens
ttttccagaacatgg

SEQ ID NO: 1492318 - DNA, 15 bp, Homo sapiens
tttccagaacatgga

SEQ ID NO: 1492319 - DNA, 15 bp, Homo sapiens
ttccagaacatggat

SEQ ID NO: 1492320 - DNA, 15 bp, Homo sapiens
tccagaacatggatg

SEQ ID NO: 1492321 - DNA, 15 bp, Homo sapiens
ccagaacatggatgg

SEQ ID NO: 1492322 - DNA, 15 bp, Homo sapiens
cagaacatggatggc

SEQ ID NO: 1492323 - DNA, 15 bp, Homo sapiens
agaacatggatggca

SEQ ID NO: 1492324 - DNA, 15 bp, Homo sapiens
gaacatggatggcaa

SEQ ID NO: 1492325 - DNA, 15 bp, Homo sapiens
aacatggatggcaag

SEQ ID NO: 1492326 - DNA, 15 bp, Homo sapiens
acatggatggcaagg

SEQ ID NO: 1492327 - DNA, 15 bp, Homo sapiens
catggatggcaagga

SEQ ID NO: 1492328 - DNA, 15 bp, Homo sapiens
atggatggcaaggaa

SEQ ID NO: 1492329 - DNA, 15 bp, Homo sapiens
tggatggcaaggaac

SEQ ID NO: 1492330 - DNA, 15 bp, Homo sapiens
ggatggcaaggaact

SEQ ID NO: 1492331 - DNA, 15 bp, Homo sapiens
gatggcaaggaactg

SEQ ID NO: 1492332 - DNA, 15 bp, Homo sapiens
atggcaaggaactgt

SEQ ID NO: 1492333 - DNA, 15 bp, Homo sapiens
tggcaaggaactgtg

SEQ ID NO: 1492334 - DNA, 15 bp, Homo sapiens
ggcaaggaactgtgt

SEQ ID NO: 1492335 - DNA, 15 bp, Homo sapiens
gcaaggaactgtgta

SEQ ID NO: 1492336 - DNA, 15 bp, Homo sapiens
caaggaactgtgtaa

SEQ ID NO: 1492337 - DNA, 15 bp, Homo sapiens
aaggaactgtgtaaa

SEQ ID NO: 1492338 - DNA, 15 bp, Homo sapiens
aggaactgtgtaaaa

SEQ ID NO: 1492339 - DNA, 15 bp, Homo sapiens
ggaactgtgtaaaat

SEQ ID NO: 1492340 - DNA, 15 bp, Homo sapiens
gaactgtgtaaaatg

SEQ ID NO: 1492341 - DNA, 15 bp, Homo sapiens
aactgtgtaaaatga

SEQ ID NO: 1492342 - DNA, 15 bp, Homo sapiens
actgtgtaaaatgaa

SEQ ID NO: 1492343 - DNA, 15 bp, Homo sapiens
ctgtgtaaaatgaac

SEQ ID NO: 1492344 - DNA, 15 bp, Homo sapiens
tgtgtaaaatgaaca

SEQ ID NO: 1492345 - DNA, 15 bp, Homo sapiens
gtgtaaaatgaacaa

SEQ ID NO: 1492346 - DNA, 15 bp, Homo sapiens
tgtaaaatgaacaag

SEQ ID NO: 1492347 - DNA, 15 bp, Homo sapiens
gtaaaatgaacaagg

SEQ ID NO: 1492348 - DNA, 15 bp, Homo sapiens
taaaatgaacaagga

SEQ ID NO: 1492349 - DNA, 15 bp, Homo sapiens
aaaatgaacaaggag

SEQ ID NO: 1492350 - DNA, 15 bp, Homo sapiens
aaatgaacaaggagg

SEQ ID NO: 1492351 - DNA, 15 bp, Homo sapiens
aatgaacaaggagga

SEQ ID NO: 1492352 - DNA, 15 bp, Homo sapiens
atgaacaaggaggac

SEQ ID NO: 1492353 - DNA, 15 bp, Homo sapiens
tgaacaaggaggact

SEQ ID NO: 1492354 - DNA, 15 bp, Homo sapiens
gaacaaggaggactt

SEQ ID NO: 1492355 - DNA, 15 bp, Homo sapiens
aacaaggaggacttc

SEQ ID NO: 1492356 - DNA, 15 bp, Homo sapiens
acaaggaggacttcc

SEQ ID NO: 1492357 - DNA, 15 bp, Homo sapiens
caaggaggacttcct

SEQ ID NO: 1492358 - DNA, 15 bp, Homo sapiens
aaggaggacttcctc

SEQ ID NO: 1492359 - DNA, 15 bp, Homo sapiens
aggaggacttcctcc

SEQ ID NO: 1492360 - DNA, 15 bp, Homo sapiens
ggaggacttcctccg

SEQ ID NO: 1492361 - DNA, 15 bp, Homo sapiens
gaggacttcctccgc

SEQ ID NO: 1492362 - DNA, 15 bp, Homo sapiens
aggacttcctccgcg

SEQ ID NO: 1492363 - DNA, 15 bp, Homo sapiens
ggacttcctccgcgc

SEQ ID NO: 1492364 - DNA, 15 bp, Homo sapiens
gacttcctccgcgcc

SEQ ID NO: 1492365 - DNA, 15 bp, Homo sapiens
acttcctccgcgcca

SEQ ID NO: 1492366 - DNA, 15 bp, Homo sapiens
cttcctccgcgccac

SEQ ID NO: 1492367 - DNA, 15 bp, Homo sapiens
ttcctccgcgccacc

SEQ ID NO: 1492368 - DNA, 15 bp, Homo sapiens
tcctccgcgccacca

SEQ ID NO: 1492369 - DNA, 15 bp, Homo sapiens
cctccgcgccaccac

SEQ ID NO: 1492370 - DNA, 15 bp, Homo sapiens
ctccgcgccaccacc

SEQ ID NO: 1492371 - DNA, 15 bp, Homo sapiens
tccgcgccaccaccc

SEQ ID NO: 1492372 - DNA, 15 bp, Homo sapiens
ccgcgccaccaccct

SEQ ID NO: 1492373 - DNA, 15 bp, Homo sapiens
cgcgccaccaccctc

SEQ ID NO: 1492374 - DNA, 15 bp, Homo sapiens
gcgccaccaccctct

SEQ ID NO: 1492375 - DNA, 15 bp, Homo sapiens
cgccaccaccctcta

SEQ ID NO: 1492376 - DNA, 15 bp, Homo sapiens
gccaccaccctctac

SEQ ID NO: 1492377 - DNA, 15 bp, Homo sapiens
ccaccaccctctaca

SEQ ID NO: 1492378 - DNA, 15 bp, Homo sapiens
caccaccctctacaa

SEQ ID NO: 1492379 - DNA, 15 bp, Homo sapiens
accaccctctacaac

SEQ ID NO: 1492380 - DNA, 15 bp, Homo sapiens
ccaccctctacaaca

SEQ ID NO: 1492381 - DNA, 15 bp, Homo sapiens
caccctctacaacac

SEQ ID NO: 1492382 - DNA, 15 bp, Homo sapiens
accctctacaacacg

SEQ ID NO: 1492383 - DNA, 15 bp, Homo sapiens
ccctctacaacacgg

SEQ ID NO: 1492384 - DNA, 15 bp, Homo sapiens
cctctacaacacgga

SEQ ID NO: 1492385 - DNA, 15 bp, Homo sapiens
ctctacaacacggaa

SEQ ID NO: 1492386 - DNA, 15 bp, Homo sapiens
tctacaacacggaag

SEQ ID NO: 1492387 - DNA, 15 bp, Homo sapiens
ctacaacacggaagt

SEQ ID NO: 1492388 - DNA, 15 bp, Homo sapiens
tacaacacggaagtg

SEQ ID NO: 1492389 - DNA, 15 bp, Homo sapiens
acaacacggaagtgc

SEQ ID NO: 1492390 - DNA, 15 bp, Homo sapiens
caacacggaagtgct

SEQ ID NO: 1492391 - DNA, 15 bp, Homo sapiens
aacacggaagtgctg

SEQ ID NO: 1492392 - DNA, 15 bp, Homo sapiens
acacggaagtgctgt

SEQ ID NO: 1492393 - DNA, 15 bp, Homo sapiens
cacggaagtgctgtt

SEQ ID NO: 1492394 - DNA, 15 bp, Homo sapiens
acggaagtgctgttg

SEQ ID NO: 1492395 - DNA, 15 bp, Homo sapiens
cggaagtgctgttgt

SEQ ID NO: 1492396 - DNA, 15 bp, Homo sapiens
ggaagtgctgttgtc

SEQ ID NO: 1492397 - DNA, 15 bp, Homo sapiens
gaagtgctgttgtca

SEQ ID NO: 1492398 - DNA, 15 bp, Homo sapiens
aagtgctgttgtcac

SEQ ID NO: 1492399 - DNA, 15 bp, Homo sapiens
agtgctgttgtcaca

SEQ ID NO: 1492400 - DNA, 15 bp, Homo sapiens
gtgctgttgtcacac

SEQ ID NO: 1492401 - DNA, 15 bp, Homo sapiens
tgctgttgtcacacc

SEQ ID NO: 1492402 - DNA, 15 bp, Homo sapiens
gctgttgtcacacct

SEQ ID NO: 1492403 - DNA, 15 bp, Homo sapiens
ctgttgtcacacctc

SEQ ID NO: 1492404 - DNA, 15 bp, Homo sapiens
tgttgtcacacctca

SEQ ID NO: 1492405 - DNA, 15 bp, Homo sapiens
gttgtcacacctcag

SEQ ID NO: 1492406 - DNA, 15 bp, Homo sapiens
ttgtcacacctcagt

SEQ ID NO: 1492407 - DNA, 15 bp, Homo sapiens
tgtcacacctcagtt

SEQ ID NO: 1492408 - DNA, 15 bp, Homo sapiens
gtcacacctcagtta

SEQ ID NO: 1492409 - DNA, 15 bp, Homo sapiens
tcacacctcagttac

SEQ ID NO: 1492410 - DNA, 15 bp, Homo sapiens
cacacctcagttacc

SEQ ID NO: 1492411 - DNA, 15 bp, Homo sapiens
acacctcagttacct

SEQ ID NO: 1492412 - DNA, 15 bp, Homo sapiens
cacctcagttacctc

SEQ ID NO: 1492413 - DNA, 15 bp, Homo sapiens
acctcagttacctca

SEQ ID NO: 1492414 - DNA, 15 bp, Homo sapiens
cctcagttacctcag

SEQ ID NO: 1492415 - DNA, 15 bp, Homo sapiens
ctcagttacctcagg

SEQ ID NO: 1492416 - DNA, 15 bp, Homo sapiens
tcagttacctcaggg

SEQ ID NO: 1492417 - DNA, 15 bp, Homo sapiens
cagttacctcaggga

SEQ ID NO: 1492418 - DNA, 15 bp, Homo sapiens
agttacctcagggaa

SEQ ID NO: 1492419 - DNA, 15 bp, Homo sapiens
gttacctcagggaaa

SEQ ID NO: 1492420 - DNA, 15 bp, Homo sapiens
ttacctcagggaaag

SEQ ID NO: 1492421 - DNA, 15 bp, Homo sapiens
tacctcagggaaagt

SEQ ID NO: 1492422 - DNA, 15 bp, Homo sapiens
acctcagggaaagta

SEQ ID NO: 1492423 - DNA, 15 bp, Homo sapiens
cctcagggaaagtaa

SEQ ID NO: 1492424 - DNA, 15 bp, Homo sapiens
ctcagggaaagtaag

SEQ ID NO: 1492425 - DNA, 15 bp, Homo sapiens
tcagggaaagtaagt

SEQ ID NO: 1492426 - DNA, 15 bp, Homo sapiens
cagggaaagtaagtg

SEQ ID NO: 1492427 - DNA, 15 bp, Homo sapiens
agggaaagtaagtgc

SEQ ID NO: 1492428 - DNA, 15 bp, Homo sapiens
gggaaagtaagtgcc

SEQ ID NO: 1492429 - DNA, 15 bp, Homo sapiens
ggaaagtaagtgccg

SEQ ID NO: 1492430 - DNA, 15 bp, Homo sapiens
gaaagtaagtgccgc

SEQ ID NO: 1492431 - DNA, 15 bp, Homo sapiens
aaagtaagtgccgcc

SEQ ID NO: 1492432 - DNA, 15 bp, Homo sapiens
aagtaagtgccgccc

SEQ ID NO: 1492433 - DNA, 15 bp, Homo sapiens
agtaagtgccgccca

SEQ ID NO: 1492434 - DNA, 15 bp, Homo sapiens
gtaagtgccgcccaa

SEQ ID NO: 1492435 - DNA, 15 bp, Homo sapiens
taagtgccgcccaag

SEQ ID NO: 1492436 - DNA, 15 bp, Homo sapiens
aagtgccgcccaagt

SEQ ID NO: 1492437 - DNA, 15 bp, Homo sapiens
agtgccgcccaagta

SEQ ID NO: 1492438 - DNA, 15 bp, Homo sapiens
gtgccgcccaagtac

SEQ ID NO: 1492439 - DNA, 15 bp, Homo sapiens
tgccgcccaagtacc

SEQ ID NO: 1492440 - DNA, 15 bp, Homo sapiens
gccgcccaagtaccc

SEQ ID NO: 1492441 - DNA, 15 bp, Homo sapiens
ccgcccaagtaccca

SEQ ID NO: 1492442 - DNA, 15 bp, Homo sapiens
cgcccaagtacccag

SEQ ID NO: 1492443 - DNA, 15 bp, Homo sapiens
gcccaagtacccagg

SEQ ID NO: 1492444 - DNA, 15 bp, Homo sapiens
cccaagtacccaggg

SEQ ID NO: 1492445 - DNA, 15 bp, Homo sapiens
ccaagtacccagggc

SEQ ID NO: 1492446 - DNA, 15 bp, Homo sapiens
caagtacccagggct

SEQ ID NO: 1492447 - DNA, 15 bp, Homo sapiens
aagtacccagggctg

SEQ ID NO: 1492448 - DNA, 15 bp, Homo sapiens
agtacccagggctgg

SEQ ID NO: 1492449 - DNA, 15 bp, Homo sapiens
gtacccagggctggg

SEQ ID NO: 1492450 - DNA, 15 bp, Homo sapiens
tacccagggctggga

SEQ ID NO: 1492451 - DNA, 15 bp, Homo sapiens
acccagggctgggag

SEQ ID NO: 1492452 - DNA, 15 bp, Homo sapiens
cccagggctgggagg

SEQ ID NO: 1492453 - DNA, 15 bp, Homo sapiens
ccagggctgggagga

SEQ ID NO: 1492454 - DNA, 15 bp, Homo sapiens
cagggctgggaggaa

SEQ ID NO: 1492455 - DNA, 15 bp, Homo sapiens
agggctgggaggaag

SEQ ID NO: 1492456 - DNA, 15 bp, Homo sapiens
gggctgggaggaagc

SEQ ID NO: 1492457 - DNA, 15 bp, Homo sapiens
ggctgggaggaagct

SEQ ID NO: 1492458 - DNA, 15 bp, Homo sapiens
gctgggaggaagctt

SEQ ID NO: 1492459 - DNA, 15 bp, Homo sapiens
ctgggaggaagcttg

SEQ ID NO: 1492460 - DNA, 15 bp, Homo sapiens
tgggaggaagcttgg

SEQ ID NO: 1492461 - DNA, 15 bp, Homo sapiens
gggaggaagcttggc

SEQ ID NO: 1492462 - DNA, 15 bp, Homo sapiens
ggaggaagcttggca

SEQ ID NO: 1492463 - DNA, 15 bp, Homo sapiens
gaggaagcttggcat

SEQ ID NO: 1492464 - DNA, 15 bp, Homo sapiens
aggaagcttggcatg

SEQ ID NO: 1492465 - DNA, 15 bp, Homo sapiens
ggaagcttggcatgg

SEQ ID NO: 1492466 - DNA, 15 bp, Homo sapiens
gaagcttggcatgga

SEQ ID NO: 1492467 - DNA, 15 bp, Homo sapiens
aagcttggcatggag

SEQ ID NO: 1492468 - DNA, 15 bp, Homo sapiens
agcttggcatggagc

SEQ ID NO: 1492469 - DNA, 15 bp, Homo sapiens
gcttggcatggagcc

SEQ ID NO: 1492470 - DNA, 15 bp, Homo sapiens
cttggcatggagcca

SEQ ID NO: 1492471 - DNA, 15 bp, Homo sapiens
ttggcatggagccaa

SEQ ID NO: 1492472 - DNA, 15 bp, Homo sapiens
tggcatggagccaac

SEQ ID NO: 1492473 - DNA, 15 bp, Homo sapiens
ggcatggagccaacc

SEQ ID NO: 1492474 - DNA, 15 bp, Homo sapiens
gcatggagccaaccc

SEQ ID NO: 1492475 - DNA, 15 bp, Homo sapiens
catggagccaaccca

SEQ ID NO: 1492476 - DNA, 15 bp, Homo sapiens
atggagccaacccag

SEQ ID NO: 1492477 - DNA, 15 bp, Homo sapiens
tggagccaacccagg

SEQ ID NO: 1492478 - DNA, 15 bp, Homo sapiens
ggagccaacccaggg

SEQ ID NO: 1492479 - DNA, 15 bp, Homo sapiens
gagccaacccaggga

SEQ ID NO: 1492480 - DNA, 15 bp, Homo sapiens
agccaacccagggag

SEQ ID NO: 1492481 - DNA, 15 bp, Homo sapiens
gccaacccagggaga

SEQ ID NO: 1492482 - DNA, 15 bp, Homo sapiens
ccaacccagggagag

SEQ ID NO: 1492483 - DNA, 15 bp, Homo sapiens
caacccagggagagg

SEQ ID NO: 1492484 - DNA, 15 bp, Homo sapiens
aacccagggagagga

SEQ ID NO: 1492485 - DNA, 15 bp, Homo sapiens
acccagggagaggaa

SEQ ID NO: 1492486 - DNA, 15 bp, Homo sapiens
agggagaggaagtca

SEQ ID NO: 1492487 - DNA, 15 bp, Homo sapiens
gggagaggaagtcag

SEQ ID NO: 1492488 - DNA, 15 bp, Homo sapiens
ggagaggaagtcagt

SEQ ID NO: 1492489 - DNA, 15 bp, Homo sapiens
gagaggaagtcagtg

SEQ ID NO: 1492490 - DNA, 15 bp, Homo sapiens
agaggaagtcagtgc

SEQ ID NO: 1492491 - DNA, 15 bp, Homo sapiens
gaggaagtcagtgct

SEQ ID NO: 1492492 - DNA, 15 bp, Homo sapiens
aggaagtcagtgctg

SEQ ID NO: 1492493 - DNA, 15 bp, Homo sapiens
ggaagtcagtgctgc

SEQ ID NO: 1492494 - DNA, 15 bp, Homo sapiens
gaagtcagtgctgcc

SEQ ID NO: 1492495 - DNA, 15 bp, Homo sapiens
aagtcagtgctgccc

SEQ ID NO: 1492496 - DNA, 15 bp, Homo sapiens
agtcagtgctgcccg

SEQ ID NO: 1492497 - DNA, 15 bp, Homo sapiens
gtcagtgctgcccgt

SEQ ID NO: 1492498 - DNA, 15 bp, Homo sapiens
tcagtgctgcccgtt

SEQ ID NO: 1492499 - DNA, 15 bp, Homo sapiens
cagtgctgcccgttc

SEQ ID NO: 1492500 - DNA, 15 bp, Homo sapiens
agtgctgcccgttcg

SEQ ID NO: 1492501 - DNA, 15 bp, Homo sapiens
gtgctgcccgttcgt

SEQ ID NO: 1492502 - DNA, 15 bp, Homo sapiens
tgctgcccgttcgtg

SEQ ID NO: 1492503 - DNA, 15 bp, Homo sapiens
gctgcccgttcgtgt

SEQ ID NO: 1492504 - DNA, 15 bp, Homo sapiens
ctgcccgttcgtgtt

SEQ ID NO: 1492505 - DNA, 15 bp, Homo sapiens
tgcccgttcgtgttg

SEQ ID NO: 1492506 - DNA, 15 bp, Homo sapiens
gcccgttcgtgttgg

SEQ ID NO: 1492507 - DNA, 15 bp, Homo sapiens
cccgttcgtgttggg

SEQ ID NO: 1492508 - DNA, 15 bp, Homo sapiens
ccgttcgtgttgggc

SEQ ID NO: 1492509 - DNA, 15 bp, Homo sapiens
cgttcgtgttgggca

SEQ ID NO: 1492510 - DNA, 15 bp, Homo sapiens
gttcgtgttgggcag

SEQ ID NO: 1492511 - DNA, 15 bp, Homo sapiens
ttcgtgttgggcaga

SEQ ID NO: 1492512 - DNA, 15 bp, Homo sapiens
tcgtgttgggcagat

SEQ ID NO: 1492513 - DNA, 15 bp, Homo sapiens
cgtgttgggcagatg

SEQ ID NO: 1492514 - DNA, 15 bp, Homo sapiens
gtgttgggcagatgc

SEQ ID NO: 1492515 - DNA, 15 bp, Homo sapiens
tgttgggcagatgcc

SEQ ID NO: 1492516 - DNA, 15 bp, Homo sapiens
gttgggcagatgccg

SEQ ID NO: 1492517 - DNA, 15 bp, Homo sapiens
ttgggcagatgccgc

SEQ ID NO: 1492518 - DNA, 15 bp, Homo sapiens
tgggcagatgccgcc

SEQ ID NO: 1492519 - DNA, 15 bp, Homo sapiens
gggcagatgccgccg

SEQ ID NO: 1492520 - DNA, 15 bp, Homo sapiens
ggcagatgccgccgg

SEQ ID NO: 1492521 - DNA, 15 bp, Homo sapiens
gcagatgccgccgga

SEQ ID NO: 1492522 - DNA, 15 bp, Homo sapiens
cagatgccgccggag

SEQ ID NO: 1492523 - DNA, 15 bp, Homo sapiens
agatgccgccggagc

SEQ ID NO: 1492524 - DNA, 15 bp, Homo sapiens
gatgccgccggagca

SEQ ID NO: 1492525 - DNA, 15 bp, Homo sapiens
atgccgccggagcag

SEQ ID NO: 1492526 - DNA, 15 bp, Homo sapiens
tgccgccggagcagc

SEQ ID NO: 1492527 - DNA, 15 bp, Homo sapiens
gccgccggagcagca

SEQ ID NO: 1492528 - DNA, 15 bp, Homo sapiens
ccgccggagcagcat

SEQ ID NO: 1492529 - DNA, 15 bp, Homo sapiens
cgccggagcagcatc

SEQ ID NO: 1492530 - DNA, 15 bp, Homo sapiens
gccggagcagcatcg

SEQ ID NO: 1492531 - DNA, 15 bp, Homo sapiens
ccggagcagcatcgt

SEQ ID NO: 1492532 - DNA, 15 bp, Homo sapiens
cggagcagcatcgtg

SEQ ID NO: 1492533 - DNA, 15 bp, Homo sapiens
ggagcagcatcgtgg

SEQ ID NO: 1492534 - DNA, 15 bp, Homo sapiens
gagcagcatcgtggg

SEQ ID NO: 1492535 - DNA, 15 bp, Homo sapiens
agcagcatcgtgggg

SEQ ID NO: 1492536 - DNA, 15 bp, Homo sapiens
gcagcatcgtggggc

SEQ ID NO: 1492537 - DNA, 15 bp, Homo sapiens
cagcatcgtggggcc

SEQ ID NO: 1492538 - DNA, 15 bp, Homo sapiens
agcatcgtggggcct

SEQ ID NO: 1492539 - DNA, 15 bp, Homo sapiens
gcatcgtggggcctg

SEQ ID NO: 1492540 - DNA, 15 bp, Homo sapiens
catcgtggggcctgt

SEQ ID NO: 1492541 - DNA, 15 bp, Homo sapiens
atcgtggggcctgta

SEQ ID NO: 1492542 - DNA, 15 bp, Homo sapiens
tcgtggggcctgtag

SEQ ID NO: 1492543 - DNA, 15 bp, Homo sapiens
cgtggggcctgtagt

SEQ ID NO: 1492544 - DNA, 15 bp, Homo sapiens
gtggggcctgtagtg

SEQ ID NO: 1492545 - DNA, 15 bp, Homo sapiens
tggggcctgtagtgt

SEQ ID NO: 1492546 - DNA, 15 bp, Homo sapiens
ggggcctgtagtgtt

SEQ ID NO: 1492547 - DNA, 15 bp, Homo sapiens
gggcctgtagtgttg

SEQ ID NO: 1492548 - DNA, 15 bp, Homo sapiens
ggcctgtagtgttgc

SEQ ID NO: 1492549 - DNA, 15 bp, Homo sapiens
gcctgtagtgttgcc

SEQ ID NO: 1492550 - DNA, 15 bp, Homo sapiens
cctgtagtgttgcca

SEQ ID NO: 1492551 - DNA, 15 bp, Homo sapiens
ctgtagtgttgccaa

SEQ ID NO: 1492552 - DNA, 15 bp, Homo sapiens
tgtagtgttgccaag

SEQ ID NO: 1492553 - DNA, 15 bp, Homo sapiens
gtagtgttgccaagg

SEQ ID NO: 1492554 - DNA, 15 bp, Homo sapiens
tagtgttgccaaggt

SEQ ID NO: 1492555 - DNA, 15 bp, Homo sapiens
agtgttgccaaggtc

SEQ ID NO: 1492556 - DNA, 15 bp, Homo sapiens
gtgttgccaaggtca

SEQ ID NO: 1492557 - DNA, 15 bp, Homo sapiens
tgttgccaaggtcac

SEQ ID NO: 1492558 - DNA, 15 bp, Homo sapiens
gttgccaaggtcacg

SEQ ID NO: 1492559 - DNA, 15 bp, Homo sapiens
ttgccaaggtcacgt

SEQ ID NO: 1492560 - DNA, 15 bp, Homo sapiens
tgccaaggtcacgtg

SEQ ID NO: 1492561 - DNA, 15 bp, Homo sapiens
gccaaggtcacgtgg

SEQ ID NO: 1492562 - DNA, 15 bp, Homo sapiens
ccaaggtcacgtggg

SEQ ID NO: 1492563 - DNA, 15 bp, Homo sapiens
caaggtcacgtgggc

SEQ ID NO: 1492564 - DNA, 15 bp, Homo sapiens
aaggtcacgtgggct

SEQ ID NO: 1492565 - DNA, 15 bp, Homo sapiens
aggtcacgtgggctc

SEQ ID NO: 1492566 - DNA, 15 bp, Homo sapiens
ggtcacgtgggctcc

SEQ ID NO: 1492567 - DNA, 15 bp, Homo sapiens
gtcacgtgggctcct

SEQ ID NO: 1492568 - DNA, 15 bp, Homo sapiens
tcacgtgggctccta

SEQ ID NO: 1492569 - DNA, 15 bp, Homo sapiens
cacgtgggctcctac

SEQ ID NO: 1492570 - DNA, 15 bp, Homo sapiens
acgtgggctcctaca

SEQ ID NO: 1492571 - DNA, 15 bp, Homo sapiens
cgtgggctcctacag

SEQ ID NO: 1492572 - DNA, 15 bp, Homo sapiens
gtgggctcctacaga

SEQ ID NO: 1492573 - DNA, 15 bp, Homo sapiens
tgggctcctacagac

SEQ ID NO: 1492574 - DNA, 15 bp, Homo sapiens
gggctcctacagacc

SEQ ID NO: 1492575 - DNA, 15 bp, Homo sapiens
ggctcctacagaccc

SEQ ID NO: 1492576 - DNA, 15 bp, Homo sapiens
gctcctacagaccct

SEQ ID NO: 1492577 - DNA, 15 bp, Homo sapiens
ctcctacagaccctg

SEQ ID NO: 1492578 - DNA, 15 bp, Homo sapiens
tcctacagaccctgt

SEQ ID NO: 1492579 - DNA, 15 bp, Homo sapiens
cctacagaccctgtg

SEQ ID NO: 1492580 - DNA, 15 bp, Homo sapiens
ctacagaccctgtga

SEQ ID NO: 1492581 - DNA, 15 bp, Homo sapiens
tacagaccctgtgag

SEQ ID NO: 1492582 - DNA, 15 bp, Homo sapiens
acagaccctgtgagg

SEQ ID NO: 1492583 - DNA, 15 bp, Homo sapiens
cagaccctgtgaggg

SEQ ID NO: 1492584 - DNA, 15 bp, Homo sapiens
agaccctgtgagggg

SEQ ID NO: 1492585 - DNA, 15 bp, Homo sapiens
gaccctgtgaggggc

SEQ ID NO: 1492586 - DNA, 15 bp, Homo sapiens
accctgtgaggggca

SEQ ID NO: 1492587 - DNA, 15 bp, Homo sapiens
ccctgtgaggggcag

SEQ ID NO: 1492588 - DNA, 15 bp, Homo sapiens
cctgtgaggggcaga

SEQ ID NO: 1492589 - DNA, 15 bp, Homo sapiens
ctgtgaggggcagac

SEQ ID NO: 1492590 - DNA, 15 bp, Homo sapiens
tgtgaggggcagacc

SEQ ID NO: 1492591 - DNA, 15 bp, Homo sapiens
gtgaggggcagaccc

SEQ ID NO: 1492592 - DNA, 15 bp, Homo sapiens
tgaggggcagaccca

SEQ ID NO: 1492593 - DNA, 15 bp, Homo sapiens
gaggggcagacccaa

SEQ ID NO: 1492594 - DNA, 15 bp, Homo sapiens
aggggcagacccaat

SEQ ID NO: 1492595 - DNA, 15 bp, Homo sapiens
ggggcagacccaatc

SEQ ID NO: 1492596 - DNA, 15 bp, Homo sapiens
gggcagacccaatcc

SEQ ID NO: 1492597 - DNA, 15 bp, Homo sapiens
ggcagacccaatcct

SEQ ID NO: 1492598 - DNA, 15 bp, Homo sapiens
gcagacccaatcctg

SEQ ID NO: 1492599 - DNA, 15 bp, Homo sapiens
cagacccaatcctga

SEQ ID NO: 1492600 - DNA, 15 bp, Homo sapiens
agacccaatcctgaa

SEQ ID NO: 1492601 - DNA, 15 bp, Homo sapiens
gacccaatcctgaag

SEQ ID NO: 1492602 - DNA, 15 bp, Homo sapiens
acccaatcctgaagt

SEQ ID NO: 1492603 - DNA, 15 bp, Homo sapiens
cccaatcctgaagtg

SEQ ID NO: 1492604 - DNA, 15 bp, Homo sapiens
ccaatcctgaagtgt

SEQ ID NO: 1492605 - DNA, 15 bp, Homo sapiens
caatcctgaagtgtc

SEQ ID NO: 1492606 - DNA, 15 bp, Homo sapiens
aatcctgaagtgtca

SEQ ID NO: 1492607 - DNA, 15 bp, Homo sapiens
atcctgaagtgtcaa

SEQ ID NO: 1492608 - DNA, 15 bp, Homo sapiens
tcctgaagtgtcaaa

SEQ ID NO: 1492609 - DNA, 15 bp, Homo sapiens
cctgaagtgtcaaag

SEQ ID NO: 1492610 - DNA, 15 bp, Homo sapiens
ctgaagtgtcaaagg

SEQ ID NO: 1492611 - DNA, 15 bp, Homo sapiens
tgaagtgtcaaagga

SEQ ID NO: 1492612 - DNA, 15 bp, Homo sapiens
gaagtgtcaaaggaa

SEQ ID NO: 1492613 - DNA, 15 bp, Homo sapiens
aagtgtcaaaggaag

SEQ ID NO: 1492614 - DNA, 15 bp, Homo sapiens
agtgtcaaaggaagt

SEQ ID NO: 1492615 - DNA, 15 bp, Homo sapiens
gtgtcaaaggaagta

SEQ ID NO: 1492616 - DNA, 15 bp, Homo sapiens
tgtcaaaggaagtaa

SEQ ID NO: 1492617 - DNA, 15 bp, Homo sapiens
gtcaaaggaagtaag

SEQ ID NO: 1492618 - DNA, 15 bp, Homo sapiens
tcaaaggaagtaaga

SEQ ID NO: 1492619 - DNA, 15 bp, Homo sapiens
caaaggaagtaagac

SEQ ID NO: 1492620 - DNA, 15 bp, Homo sapiens
aaaggaagtaagacg

SEQ ID NO: 1492621 - DNA, 15 bp, Homo sapiens
aaggaagtaagacga

SEQ ID NO: 1492622 - DNA, 15 bp, Homo sapiens
aggaagtaagacgag

SEQ ID NO: 1492623 - DNA, 15 bp, Homo sapiens
ggaagtaagacgaga

SEQ ID NO: 1492624 - DNA, 15 bp, Homo sapiens
gaagtaagacgagaa

SEQ ID NO: 1492625 - DNA, 15 bp, Homo sapiens
aagtaagacgagaaa

SEQ ID NO: 1492626 - DNA, 15 bp, Homo sapiens
agtaagacgagaaat

SEQ ID NO: 1492627 - DNA, 15 bp, Homo sapiens
gtaagacgagaaatg

SEQ ID NO: 1492628 - DNA, 15 bp, Homo sapiens
taagacgagaaatgg

SEQ ID NO: 1492629 - DNA, 15 bp, Homo sapiens
aagacgagaaatgga

SEQ ID NO: 1492630 - DNA, 15 bp, Homo sapiens
agacgagaaatggag

SEQ ID NO: 1492631 - DNA, 15 bp, Homo sapiens
gacgagaaatggaga

SEQ ID NO: 1492632 - DNA, 15 bp, Homo sapiens
acgagaaatggagaa

SEQ ID NO: 1492633 - DNA, 15 bp, Homo sapiens
cgagaaatggagaaa

SEQ ID NO: 1492634 - DNA, 15 bp, Homo sapiens
gagaaatggagaaaa

SEQ ID NO: 1492635 - DNA, 15 bp, Homo sapiens
tggagaaaagtagag

SEQ ID NO: 1492636 - DNA, 15 bp, Homo sapiens
ggagaaaagtagaga

SEQ ID NO: 1492637 - DNA, 15 bp, Homo sapiens
agaaaagtagagagc

SEQ ID NO: 1492638 - DNA, 15 bp, Homo sapiens
gaaaagtagagagct

SEQ ID NO: 1492639 - DNA, 15 bp, Homo sapiens
aaaagtagagagctg

SEQ ID NO: 1492640 - DNA, 15 bp, Homo sapiens
aaagtagagagctgt

SEQ ID NO: 1492641 - DNA, 15 bp, Homo sapiens
aagtagagagctgtg

SEQ ID NO: 1492642 - DNA, 15 bp, Homo sapiens
agtagagagctgtga

SEQ ID NO: 1492643 - DNA, 15 bp, Homo sapiens
gtagagagctgtgac

SEQ ID NO: 1492644 - DNA, 15 bp, Homo sapiens
tagagagctgtgacc

SEQ ID NO: 1492645 - DNA, 15 bp, Homo sapiens
agagagctgtgacct

SEQ ID NO: 1492646 - DNA, 15 bp, Homo sapiens
gagagctgtgacctg

SEQ ID NO: 1492647 - DNA, 15 bp, Homo sapiens
agagctgtgacctgg

SEQ ID NO: 1492648 - DNA, 15 bp, Homo sapiens
gagctgtgacctgga

SEQ ID NO: 1492649 - DNA, 15 bp, Homo sapiens
agctgtgacctggag

SEQ ID NO: 1492650 - DNA, 15 bp, Homo sapiens
gctgtgacctggagg

SEQ ID NO: 1492651 - DNA, 15 bp, Homo sapiens
ctgtgacctggaggg

SEQ ID NO: 1492652 - DNA, 15 bp, Homo sapiens
tgtgacctggagggg

SEQ ID NO: 1492653 - DNA, 15 bp, Homo sapiens
gtgacctggaggggt

SEQ ID NO: 1492654 - DNA, 15 bp, Homo sapiens
tgacctggaggggtc

SEQ ID NO: 1492655 - DNA, 15 bp, Homo sapiens
gacctggaggggtct

SEQ ID NO: 1492656 - DNA, 15 bp, Homo sapiens
acctggaggggtctg

SEQ ID NO: 1492657 - DNA, 15 bp, Homo sapiens
cctggaggggtctgg

SEQ ID NO: 1492658 - DNA, 15 bp, Homo sapiens
ctggaggggtctggc

SEQ ID NO: 1492659 - DNA, 15 bp, Homo sapiens
tggaggggtctggca

SEQ ID NO: 1492660 - DNA, 15 bp, Homo sapiens
ggaggggtctggcag

SEQ ID NO: 1492661 - DNA, 15 bp, Homo sapiens
gaggggtctggcaga

SEQ ID NO: 1492662 - DNA, 15 bp, Homo sapiens
aggggtctggcagag

SEQ ID NO: 1492663 - DNA, 15 bp, Homo sapiens
ggggtctggcagagg

SEQ ID NO: 1492664 - DNA, 15 bp, Homo sapiens
gggtctggcagaggc

SEQ ID NO: 1492665 - DNA, 15 bp, Homo sapiens
ggtctggcagaggct

SEQ ID NO: 1492666 - DNA, 15 bp, Homo sapiens
gtctggcagaggctg

SEQ ID NO: 1492667 - DNA, 15 bp, Homo sapiens
tctggcagaggctgg

SEQ ID NO: 1492668 - DNA, 15 bp, Homo sapiens
ctggcagaggctggt

SEQ ID NO: 1492669 - DNA, 15 bp, Homo sapiens
tggcagaggctggtt

SEQ ID NO: 1492670 - DNA, 15 bp, Homo sapiens
ggcagaggctggtta

SEQ ID NO: 1492671 - DNA, 15 bp, Homo sapiens
gcagaggctggttac

SEQ ID NO: 1492672 - DNA, 15 bp, Homo sapiens
cagaggctggttaca

SEQ ID NO: 1492673 - DNA, 15 bp, Homo sapiens
agaggctggttacac

SEQ ID NO: 1492674 - DNA, 15 bp, Homo sapiens
gaggctggttacact

SEQ ID NO: 1492675 - DNA, 15 bp, Homo sapiens
aggctggttacactc

SEQ ID NO: 1492676 - DNA, 15 bp, Homo sapiens
ggctggttacactct

SEQ ID NO: 1492677 - DNA, 15 bp, Homo sapiens
gctggttacactctt

SEQ ID NO: 1492678 - DNA, 15 bp, Homo sapiens
ctggttacactcttc

SEQ ID NO: 1492679 - DNA, 15 bp, Homo sapiens
tggttacactcttcc

SEQ ID NO: 1492680 - DNA, 15 bp, Homo sapiens
ggttacactcttccc

SEQ ID NO: 1492681 - DNA, 15 bp, Homo sapiens
gttacactcttccca

SEQ ID NO: 1492682 - DNA, 15 bp, Homo sapiens
ttacactcttcccat

SEQ ID NO: 1492683 - DNA, 15 bp, Homo sapiens
tacactcttcccatg

SEQ ID NO: 1492684 - DNA, 15 bp, Homo sapiens
acactcttcccatga

SEQ ID NO: 1492685 - DNA, 15 bp, Homo sapiens
cactcttcccatgag

SEQ ID NO: 1492686 - DNA, 15 bp, Homo sapiens
actcttcccatgaga

SEQ ID NO: 1492687 - DNA, 15 bp, Homo sapiens
ctcttcccatgagac

SEQ ID NO: 1492688 - DNA, 15 bp, Homo sapiens
tcttcccatgagacc

SEQ ID NO: 1492689 - DNA, 15 bp, Homo sapiens
cttcccatgagaccg

SEQ ID NO: 1492690 - DNA, 15 bp, Homo sapiens
ttcccatgagaccgc

SEQ ID NO: 1492691 - DNA, 15 bp, Homo sapiens
tcccatgagaccgcc

SEQ ID NO: 1492692 - DNA, 15 bp, Homo sapiens
cccatgagaccgcct

SEQ ID NO: 1492693 - DNA, 15 bp, Homo sapiens
ccatgagaccgcctt

SEQ ID NO: 1492694 - DNA, 15 bp, Homo sapiens
catgagaccgccttt

SEQ ID NO: 1492695 - DNA, 15 bp, Homo sapiens
atgagaccgcctttc

SEQ ID NO: 1492696 - DNA, 15 bp, Homo sapiens
tgagaccgcctttcc

SEQ ID NO: 1492697 - DNA, 15 bp, Homo sapiens
gagaccgcctttcca

SEQ ID NO: 1492698 - DNA, 15 bp, Homo sapiens
agaccgcctttccag

SEQ ID NO: 1492699 - DNA, 15 bp, Homo sapiens
gaccgcctttccaga

SEQ ID NO: 1492700 - DNA, 15 bp, Homo sapiens
accgcctttccagaa

SEQ ID NO: 1492701 - DNA, 15 bp, Homo sapiens
ccgcctttccagaaa

SEQ ID NO: 1492702 - DNA, 15 bp, Homo sapiens
cgcctttccagaaac

SEQ ID NO: 1492703 - DNA, 15 bp, Homo sapiens
gcctttccagaaact

SEQ ID NO: 1492704 - DNA, 15 bp, Homo sapiens
cctttccagaaacta

SEQ ID NO: 1492705 - DNA, 15 bp, Homo sapiens
ctttccagaaactat

SEQ ID NO: 1492706 - DNA, 15 bp, Homo sapiens
tttccagaaactatt

SEQ ID NO: 1492707 - DNA, 15 bp, Homo sapiens
ttccagaaactattc

SEQ ID NO: 1492708 - DNA, 15 bp, Homo sapiens
tccagaaactattcc

SEQ ID NO: 1492709 - DNA, 15 bp, Homo sapiens
ccagaaactattcca

SEQ ID NO: 1492710 - DNA, 15 bp, Homo sapiens
cagaaactattccaa

SEQ ID NO: 1492711 - DNA, 15 bp, Homo sapiens
agaaactattccaat

SEQ ID NO: 1492712 - DNA, 15 bp, Homo sapiens
gaaactattccaatt

SEQ ID NO: 1492713 - DNA, 15 bp, Homo sapiens
aaactattccaattt

SEQ ID NO: 1492714 - DNA, 15 bp, Homo sapiens
aactattccaatttg

SEQ ID NO: 1492715 - DNA, 15 bp, Homo sapiens
actattccaatttga

SEQ ID NO: 1492716 - DNA, 15 bp, Homo sapiens
ctattccaatttgaa

SEQ ID NO: 1492717 - DNA, 15 bp, Homo sapiens
tattccaatttgaaa

SEQ ID NO: 1492718 - DNA, 15 bp, Homo sapiens
attccaatttgaaaa

SEQ ID NO: 1492719 - DNA, 15 bp, Homo sapiens
ttccaatttgaaaat

SEQ ID NO: 1492720 - DNA, 15 bp, Homo sapiens
tccaatttgaaaata

SEQ ID NO: 1492721 - DNA, 15 bp, Homo sapiens
ccaatttgaaaatag

SEQ ID NO: 1492722 - DNA, 15 bp, Homo sapiens
caatttgaaaataga

SEQ ID NO: 1492723 - DNA, 15 bp, Homo sapiens
aatttgaaaatagat

SEQ ID NO: 1492724 - DNA, 15 bp, Homo sapiens
atttgaaaatagata

SEQ ID NO: 1492725 - DNA, 15 bp, Homo sapiens
tttgaaaatagatag

SEQ ID NO: 1492726 - DNA, 15 bp, Homo sapiens
ttgaaaatagataga

SEQ ID NO: 1492727 - DNA, 15 bp, Homo sapiens
tgaaaatagatagag

SEQ ID NO: 1492728 - DNA, 15 bp, Homo sapiens
gaaaatagatagaga

SEQ ID NO: 1492729 - DNA, 15 bp, Homo sapiens
aaaatagatagagat

SEQ ID NO: 1492730 - DNA, 15 bp, Homo sapiens
aaatagatagagatg

SEQ ID NO: 1492731 - DNA, 15 bp, Homo sapiens
aatagatagagatgg

SEQ ID NO: 1492732 - DNA, 15 bp, Homo sapiens
atagatagagatggg

SEQ ID NO: 1492733 - DNA, 15 bp, Homo sapiens
tagatagagatgggt

SEQ ID NO: 1492734 - DNA, 15 bp, Homo sapiens
agatagagatgggtg

SEQ ID NO: 1492735 - DNA, 15 bp, Homo sapiens
gatagagatgggtgg

SEQ ID NO: 1492736 - DNA, 15 bp, Homo sapiens
atagagatgggtggt

SEQ ID NO: 1492737 - DNA, 15 bp, Homo sapiens
tagagatgggtggtg

SEQ ID NO: 1492738 - DNA, 15 bp, Homo sapiens
agagatgggtggtgc

SEQ ID NO: 1492739 - DNA, 15 bp, Homo sapiens
gagatgggtggtgcc

SEQ ID NO: 1492740 - DNA, 15 bp, Homo sapiens
agatgggtggtgccc

SEQ ID NO: 1492741 - DNA, 15 bp, Homo sapiens
gatgggtggtgccct

SEQ ID NO: 1492742 - DNA, 15 bp, Homo sapiens
atgggtggtgccctg

SEQ ID NO: 1492743 - DNA, 15 bp, Homo sapiens
tgggtggtgccctgg

SEQ ID NO: 1492744 - DNA, 15 bp, Homo sapiens
gggtggtgccctggc

SEQ ID NO: 1492745 - DNA, 15 bp, Homo sapiens
ggtggtgccctggct

SEQ ID NO: 1492746 - DNA, 15 bp, Homo sapiens
gtggtgccctggctg

SEQ ID NO: 1492747 - DNA, 15 bp, Homo sapiens
tggtgccctggctgg

SEQ ID NO: 1492748 - DNA, 15 bp, Homo sapiens
ggtgccctggctggt

SEQ ID NO: 1492749 - DNA, 15 bp, Homo sapiens
gtgccctggctggtg

SEQ ID NO: 1492750 - DNA, 15 bp, Homo sapiens
tgccctggctggtgt

SEQ ID NO: 1492751 - DNA, 15 bp, Homo sapiens
gccctggctggtgtt

SEQ ID NO: 1492752 - DNA, 15 bp, Homo sapiens
ccctggctggtgttt

SEQ ID NO: 1492753 - DNA, 15 bp, Homo sapiens
cctggctggtgtttt

SEQ ID NO: 1492754 - DNA, 15 bp, Homo sapiens
ctggctggtgttttc

SEQ ID NO: 1492755 - DNA, 15 bp, Homo sapiens
tggctggtgttttcc

SEQ ID NO: 1492756 - DNA, 15 bp, Homo sapiens
ggctggtgttttcct

SEQ ID NO: 1492757 - DNA, 15 bp, Homo sapiens
gctggtgttttccta

SEQ ID NO: 1492758 - DNA, 15 bp, Homo sapiens
ctggtgttttcctaa

SEQ ID NO: 1492759 - DNA, 15 bp, Homo sapiens
tggtgttttcctaag

SEQ ID NO: 1492760 - DNA, 15 bp, Homo sapiens
ggtgttttcctaagt

SEQ ID NO: 1492761 - DNA, 15 bp, Homo sapiens
gtgttttcctaagtg

SEQ ID NO: 1492762 - DNA, 15 bp, Homo sapiens
tgttttcctaagtga

SEQ ID NO: 1492763 - DNA, 15 bp, Homo sapiens
gttttcctaagtgat

SEQ ID NO: 1492764 - DNA, 15 bp, Homo sapiens
ttttcctaagtgatt

SEQ ID NO: 1492765 - DNA, 15 bp, Homo sapiens
tttcctaagtgatta

SEQ ID NO: 1492766 - DNA, 15 bp, Homo sapiens
ttcctaagtgattat

SEQ ID NO: 1492767 - DNA, 15 bp, Homo sapiens
tcctaagtgattatt

SEQ ID NO: 1492768 - DNA, 15 bp, Homo sapiens
cctaagtgattattt

SEQ ID NO: 1492769 - DNA, 15 bp, Homo sapiens
ctaagtgattattta

SEQ ID NO: 1492770 - DNA, 15 bp, Homo sapiens
taagtgattatttaa

SEQ ID NO: 1492771 - DNA, 15 bp, Homo sapiens
aagtgattatttaaa

SEQ ID NO: 1492772 - DNA, 15 bp, Homo sapiens
agtgattatttaaaa

SEQ ID NO: 1492773 - DNA, 15 bp, Homo sapiens
gtgattatttaaaat

SEQ ID NO: 1492774 - DNA, 15 bp, Homo sapiens
tgattatttaaaatt

SEQ ID NO: 1492775 - DNA, 15 bp, Homo sapiens
gattatttaaaattc

SEQ ID NO: 1492776 - DNA, 15 bp, Homo sapiens
attatttaaaattcc

SEQ ID NO: 1492777 - DNA, 15 bp, Homo sapiens
ttatttaaaattcct

SEQ ID NO: 1492778 - DNA, 15 bp, Homo sapiens
tatttaaaattcctc

SEQ ID NO: 1492779 - DNA, 15 bp, Homo sapiens
atttaaaattcctcc

SEQ ID NO: 1492780 - DNA, 15 bp, Homo sapiens
tttaaaattcctcca

SEQ ID NO: 1492781 - DNA, 15 bp, Homo sapiens
ttaaaattcctccag

SEQ ID NO: 1492782 - DNA, 15 bp, Homo sapiens
taaaattcctccagg

SEQ ID NO: 1492783 - DNA, 15 bp, Homo sapiens
aaaattcctccagga

SEQ ID NO: 1492784 - DNA, 15 bp, Homo sapiens
aaattcctccaggaa

SEQ ID NO: 1492785 - DNA, 15 bp, Homo sapiens
aattcctccaggaaa

SEQ ID NO: 1492786 - DNA, 15 bp, Homo sapiens
attcctccaggaaac

SEQ ID NO: 1492787 - DNA, 15 bp, Homo sapiens
ttcctccaggaaact

SEQ ID NO: 1492788 - DNA, 15 bp, Homo sapiens
tcctccaggaaactc

SEQ ID NO: 1492789 - DNA, 15 bp, Homo sapiens
cctccaggaaactct

SEQ ID NO: 1492790 - DNA, 15 bp, Homo sapiens
ctccaggaaactcta

SEQ ID NO: 1492791 - DNA, 15 bp, Homo sapiens
tccaggaaactctag

SEQ ID NO: 1492792 - DNA, 15 bp, Homo sapiens
ccaggaaactctaga

SEQ ID NO: 1492793 - DNA, 15 bp, Homo sapiens
caggaaactctagat

SEQ ID NO: 1492794 - DNA, 15 bp, Homo sapiens
aggaaactctagatt

SEQ ID NO: 1492795 - DNA, 15 bp, Homo sapiens
ggaaactctagattc

SEQ ID NO: 1492796 - DNA, 15 bp, Homo sapiens
gaaactctagattca

SEQ ID NO: 1492797 - DNA, 15 bp, Homo sapiens
aaactctagattcaa

SEQ ID NO: 1492798 - DNA, 15 bp, Homo sapiens
aactctagattcaag

SEQ ID NO: 1492799 - DNA, 15 bp, Homo sapiens
actctagattcaagg

SEQ ID NO: 1492800 - DNA, 15 bp, Homo sapiens
ctctagattcaaggc

SEQ ID NO: 1492801 - DNA, 15 bp, Homo sapiens
tctagattcaaggct

SEQ ID NO: 1492802 - DNA, 15 bp, Homo sapiens
ctagattcaaggctt

SEQ ID NO: 1492803 - DNA, 15 bp, Homo sapiens
tagattcaaggcttt

SEQ ID NO: 1492804 - DNA, 15 bp, Homo sapiens
agattcaaggctttt

SEQ ID NO: 1492805 - DNA, 15 bp, Homo sapiens
gattcaaggcttttg

SEQ ID NO: 1492806 - DNA, 15 bp, Homo sapiens
attcaaggcttttgg

SEQ ID NO: 1492807 - DNA, 15 bp, Homo sapiens
ttcaaggcttttgga

SEQ ID NO: 1492808 - DNA, 15 bp, Homo sapiens
tcaaggcttttggat

SEQ ID NO: 1492809 - DNA, 15 bp, Homo sapiens
caaggcttttggatt

SEQ ID NO: 1492810 - DNA, 15 bp, Homo sapiens
aaggcttttggattt

SEQ ID NO: 1492811 - DNA, 15 bp, Homo sapiens
aggcttttggattta

SEQ ID NO: 1492812 - DNA, 15 bp, Homo sapiens
ggcttttggatttaa

SEQ ID NO: 1492813 - DNA, 15 bp, Homo sapiens
gcttttggatttaag

SEQ ID NO: 1492814 - DNA, 15 bp, Homo sapiens
cttttggatttaagg

SEQ ID NO: 1492815 - DNA, 15 bp, Homo sapiens
ttttggatttaaggt

SEQ ID NO: 1492816 - DNA, 15 bp, Homo sapiens
tttggatttaaggtg

SEQ ID NO: 1492817 - DNA, 15 bp, Homo sapiens
ttggatttaaggtgt

SEQ ID NO: 1492818 - DNA, 15 bp, Homo sapiens
tggatttaaggtgtt

SEQ ID NO: 1492819 - DNA, 15 bp, Homo sapiens
ggatttaaggtgttg

SEQ ID NO: 1492820 - DNA, 15 bp, Homo sapiens
gatttaaggtgttga

SEQ ID NO: 1492821 - DNA, 15 bp, Homo sapiens
atttaaggtgttgaa

SEQ ID NO: 1492822 - DNA, 15 bp, Homo sapiens
tttaaggtgttgaaa

SEQ ID NO: 1492823 - DNA, 15 bp, Homo sapiens
ttaaggtgttgaaaa

SEQ ID NO: 1492824 - DNA, 15 bp, Homo sapiens
taaggtgttgaaaat

SEQ ID NO: 1492825 - DNA, 15 bp, Homo sapiens
aaggtgttgaaaata

SEQ ID NO: 1492826 - DNA, 15 bp, Homo sapiens
aggtgttgaaaataa

SEQ ID NO: 1492827 - DNA, 15 bp, Homo sapiens
ggtgttgaaaataat

SEQ ID NO: 1492828 - DNA, 15 bp, Homo sapiens
gtgttgaaaataatt

SEQ ID NO: 1492829 - DNA, 15 bp, Homo sapiens
tgttgaaaataattt

SEQ ID NO: 1492830 - DNA, 15 bp, Homo sapiens
gttgaaaataattta

SEQ ID NO: 1492831 - DNA, 15 bp, Homo sapiens
ttgaaaataatttac

SEQ ID NO: 1492832 - DNA, 15 bp, Homo sapiens
tgaaaataatttaca

SEQ ID NO: 1492833 - DNA, 15 bp, Homo sapiens
gaaaataatttacat

SEQ ID NO: 1492834 - DNA, 15 bp, Homo sapiens
aaaataatttacata

SEQ ID NO: 1492835 - DNA, 15 bp, Homo sapiens
aaataatttacatat

SEQ ID NO: 1492836 - DNA, 15 bp, Homo sapiens
aataatttacatatt

SEQ ID NO: 1492837 - DNA, 15 bp, Homo sapiens
ataatttacatatta

SEQ ID NO: 1492838 - DNA, 15 bp, Homo sapiens
taatttacatattag

SEQ ID NO: 1492839 - DNA, 15 bp, Homo sapiens
aatttacatattagc

SEQ ID NO: 1492840 - DNA, 15 bp, Homo sapiens
atttacatattagct

SEQ ID NO: 1492841 - DNA, 15 bp, Homo sapiens
tttacatattagctt

SEQ ID NO: 1492842 - DNA, 15 bp, Homo sapiens
ttacatattagcttc

SEQ ID NO: 1492843 - DNA, 15 bp, Homo sapiens
tacatattagcttcc

SEQ ID NO: 1492844 - DNA, 15 bp, Homo sapiens
acatattagcttcct

SEQ ID NO: 1492845 - DNA, 15 bp, Homo sapiens
catattagcttcctc

SEQ ID NO: 1492846 - DNA, 15 bp, Homo sapiens
atattagcttcctct

SEQ ID NO: 1492847 - DNA, 15 bp, Homo sapiens
tattagcttcctctt

SEQ ID NO: 1492848 - DNA, 15 bp, Homo sapiens
attagcttcctctta

SEQ ID NO: 1492849 - DNA, 15 bp, Homo sapiens
ttagcttcctcttaa

SEQ ID NO: 1492850 - DNA, 15 bp, Homo sapiens
tagcttcctcttaat

SEQ ID NO: 1492851 - DNA, 15 bp, Homo sapiens
agcttcctcttaatc

SEQ ID NO: 1492852 - DNA, 15 bp, Homo sapiens
gcttcctcttaatct

SEQ ID NO: 1492853 - DNA, 15 bp, Homo sapiens
cttcctcttaatctt

SEQ ID NO: 1492854 - DNA, 15 bp, Homo sapiens
ttcctcttaatcttg

SEQ ID NO: 1492855 - DNA, 15 bp, Homo sapiens
tcctcttaatcttgg

SEQ ID NO: 1492856 - DNA, 15 bp, Homo sapiens
cctcttaatcttggg

SEQ ID NO: 1492857 - DNA, 15 bp, Homo sapiens
ctcttaatcttggga

SEQ ID NO: 1492858 - DNA, 15 bp, Homo sapiens
tcttaatcttgggat

SEQ ID NO: 1492859 - DNA, 15 bp, Homo sapiens
cttaatcttgggata

SEQ ID NO: 1492860 - DNA, 15 bp, Homo sapiens
ttaatcttgggatac

SEQ ID NO: 1492861 - DNA, 15 bp, Homo sapiens
taatcttgggatact

SEQ ID NO: 1492862 - DNA, 15 bp, Homo sapiens
aatcttgggatactc

SEQ ID NO: 1492863 - DNA, 15 bp, Homo sapiens
atcttgggatactct

SEQ ID NO: 1492864 - DNA, 15 bp, Homo sapiens
tcttgggatactctg

SEQ ID NO: 1492865 - DNA, 15 bp, Homo sapiens
cttgggatactctgg

SEQ ID NO: 1492866 - DNA, 15 bp, Homo sapiens
ttgggatactctggc

SEQ ID NO: 1492867 - DNA, 15 bp, Homo sapiens
tgggatactctggca

SEQ ID NO: 1492868 - DNA, 15 bp, Homo sapiens
gggatactctggcac

SEQ ID NO: 1492869 - DNA, 15 bp, Homo sapiens
ggatactctggcaca

SEQ ID NO: 1492870 - DNA, 15 bp, Homo sapiens
gatactctggcacac

SEQ ID NO: 1492871 - DNA, 15 bp, Homo sapiens
atactctggcacacc

SEQ ID NO: 1492872 - DNA, 15 bp, Homo sapiens
tactctggcacaccc

SEQ ID NO: 1492873 - DNA, 15 bp, Homo sapiens
actctggcacaccct

SEQ ID NO: 1492874 - DNA, 15 bp, Homo sapiens
ctctggcacacccta

SEQ ID NO: 1492875 - DNA, 15 bp, Homo sapiens
tctggcacaccctaa

SEQ ID NO: 1492876 - DNA, 15 bp, Homo sapiens
ctggcacaccctaac

SEQ ID NO: 1492877 - DNA, 15 bp, Homo sapiens
tggcacaccctaacc

SEQ ID NO: 1492878 - DNA, 15 bp, Homo sapiens
ggcacaccctaaccc

SEQ ID NO: 1492879 - DNA, 15 bp, Homo sapiens
gcacaccctaacccc

SEQ ID NO: 1492880 - DNA, 15 bp, Homo sapiens
cacaccctaacccca

SEQ ID NO: 1492881 - DNA, 15 bp, Homo sapiens
acaccctaaccccat

SEQ ID NO: 1492882 - DNA, 15 bp, Homo sapiens
caccctaaccccatt

SEQ ID NO: 1492883 - DNA, 15 bp, Homo sapiens
accctaaccccattt

SEQ ID NO: 1492884 - DNA, 15 bp, Homo sapiens
ccctaaccccatttg

SEQ ID NO: 1492885 - DNA, 15 bp, Homo sapiens
cctaaccccatttga

SEQ ID NO: 1492886 - DNA, 15 bp, Homo sapiens
ctaaccccatttgac

SEQ ID NO: 1492887 - DNA, 15 bp, Homo sapiens
taaccccatttgaca

SEQ ID NO: 1492888 - DNA, 15 bp, Homo sapiens
aaccccatttgacag

SEQ ID NO: 1492889 - DNA, 15 bp, Homo sapiens
accccatttgacagg

SEQ ID NO: 1492890 - DNA, 15 bp, Homo sapiens
ccccatttgacaggg

SEQ ID NO: 1492891 - DNA, 15 bp, Homo sapiens
cccatttgacagggc

SEQ ID NO: 1492892 - DNA, 15 bp, Homo sapiens
ccatttgacagggct

SEQ ID NO: 1492893 - DNA, 15 bp, Homo sapiens
catttgacagggctg

SEQ ID NO: 1492894 - DNA, 15 bp, Homo sapiens
atttgacagggctgc

SEQ ID NO: 1492895 - DNA, 15 bp, Homo sapiens
tttgacagggctgct

SEQ ID NO: 1492896 - DNA, 15 bp, Homo sapiens
ttgacagggctgcta

SEQ ID NO: 1492897 - DNA, 15 bp, Homo sapiens
tgacagggctgctat

SEQ ID NO: 1492898 - DNA, 15 bp, Homo sapiens
gacagggctgctatc

SEQ ID NO: 1492899 - DNA, 15 bp, Homo sapiens
acagggctgctatct

SEQ ID NO: 1492900 - DNA, 15 bp, Homo sapiens
cagggctgctatctg

SEQ ID NO: 1492901 - DNA, 15 bp, Homo sapiens
agggctgctatctgc

SEQ ID NO: 1492902 - DNA, 15 bp, Homo sapiens
gggctgctatctgca

SEQ ID NO: 1492903 - DNA, 15 bp, Homo sapiens
ggctgctatctgcac

SEQ ID NO: 1492904 - DNA, 15 bp, Homo sapiens
gctgctatctgcaca

SEQ ID NO: 1492905 - DNA, 15 bp, Homo sapiens
ctgctatctgcacac

SEQ ID NO: 1492906 - DNA, 15 bp, Homo sapiens
tgctatctgcacact

SEQ ID NO: 1492907 - DNA, 15 bp, Homo sapiens
gctatctgcacactt

SEQ ID NO: 1492908 - DNA, 15 bp, Homo sapiens
ctatctgcacacttc

SEQ ID NO: 1492909 - DNA, 15 bp, Homo sapiens
tatctgcacacttcc

SEQ ID NO: 1492910 - DNA, 15 bp, Homo sapiens
atctgcacacttcct

SEQ ID NO: 1492911 - DNA, 15 bp, Homo sapiens
tctgcacacttcctt

SEQ ID NO: 1492912 - DNA, 15 bp, Homo sapiens
ctgcacacttccttg

SEQ ID NO: 1492913 - DNA, 15 bp, Homo sapiens
tgcacacttccttga

SEQ ID NO: 1492914 - DNA, 15 bp, Homo sapiens
gcacacttccttgat

SEQ ID NO: 1492915 - DNA, 15 bp, Homo sapiens
cacacttccttgata

SEQ ID NO: 1492916 - DNA, 15 bp, Homo sapiens
acacttccttgataa

SEQ ID NO: 1492917 - DNA, 15 bp, Homo sapiens
cacttccttgataag

SEQ ID NO: 1492918 - DNA, 15 bp, Homo sapiens
acttccttgataagg

SEQ ID NO: 1492919 - DNA, 15 bp, Homo sapiens
cttccttgataagga

SEQ ID NO: 1492920 - DNA, 15 bp, Homo sapiens
ttccttgataaggaa

SEQ ID NO: 1492921 - DNA, 15 bp, Homo sapiens
tccttgataaggaag

SEQ ID NO: 1492922 - DNA, 15 bp, Homo sapiens
ccttgataaggaaga

SEQ ID NO: 1492923 - DNA, 15 bp, Homo sapiens
cttgataaggaagag

SEQ ID NO: 1492924 - DNA, 15 bp, Homo sapiens
ttgataaggaagagc

SEQ ID NO: 1492925 - DNA, 15 bp, Homo sapiens
tgataaggaagagca

SEQ ID NO: 1492926 - DNA, 15 bp, Homo sapiens
gataaggaagagcag

SEQ ID NO: 1492927 - DNA, 15 bp, Homo sapiens
ataaggaagagcagc

SEQ ID NO: 1492928 - DNA, 15 bp, Homo sapiens
taaggaagagcagcc

SEQ ID NO: 1492929 - DNA, 15 bp, Homo sapiens
aaggaagagcagcca

SEQ ID NO: 1492930 - DNA, 15 bp, Homo sapiens
aggaagagcagccaa

SEQ ID NO: 1492931 - DNA, 15 bp, Homo sapiens
ggaagagcagccaaa

SEQ ID NO: 1492932 - DNA, 15 bp, Homo sapiens
gaagagcagccaaag

SEQ ID NO: 1492933 - DNA, 15 bp, Homo sapiens
aagagcagccaaagg

SEQ ID NO: 1492934 - DNA, 15 bp, Homo sapiens
agagcagccaaaggt

SEQ ID NO: 1492935 - DNA, 15 bp, Homo sapiens
gagcagccaaaggtg

SEQ ID NO: 1492936 - DNA, 15 bp, Homo sapiens
agcagccaaaggtgc

SEQ ID NO: 1492937 - DNA, 15 bp, Homo sapiens
gcagccaaaggtgca

SEQ ID NO: 1492938 - DNA, 15 bp, Homo sapiens
cagccaaaggtgcag

SEQ ID NO: 1492939 - DNA, 15 bp, Homo sapiens
agccaaaggtgcagg

SEQ ID NO: 1492940 - DNA, 15 bp, Homo sapiens
gccaaaggtgcaggt

SEQ ID NO: 1492941 - DNA, 15 bp, Homo sapiens
ccaaaggtgcaggtg

SEQ ID NO: 1492942 - DNA, 15 bp, Homo sapiens
caaaggtgcaggtgt

SEQ ID NO: 1492943 - DNA, 15 bp, Homo sapiens
aaaggtgcaggtgtg

SEQ ID NO: 1492944 - DNA, 15 bp, Homo sapiens
aaggtgcaggtgtgt

SEQ ID NO: 1492945 - DNA, 15 bp, Homo sapiens
aggtgcaggtgtgtt

SEQ ID NO: 1492946 - DNA, 15 bp, Homo sapiens
ggtgcaggtgtgtta

SEQ ID NO: 1492947 - DNA, 15 bp, Homo sapiens
gtgcaggtgtgttag

SEQ ID NO: 1492948 - DNA, 15 bp, Homo sapiens
tgcaggtgtgttagg

SEQ ID NO: 1492949 - DNA, 15 bp, Homo sapiens
gcaggtgtgttagga

SEQ ID NO: 1492950 - DNA, 15 bp, Homo sapiens
caggtgtgttaggat

SEQ ID NO: 1492951 - DNA, 15 bp, Homo sapiens
aggtgtgttaggatc

SEQ ID NO: 1492952 - DNA, 15 bp, Homo sapiens
ggtgtgttaggatcc

SEQ ID NO: 1492953 - DNA, 15 bp, Homo sapiens
gtgtgttaggatcca

SEQ ID NO: 1492954 - DNA, 15 bp, Homo sapiens
tgtgttaggatccat

SEQ ID NO: 1492955 - DNA, 15 bp, Homo sapiens
gtgttaggatccatt

SEQ ID NO: 1492956 - DNA, 15 bp, Homo sapiens
tgttaggatccattg

SEQ ID NO: 1492957 - DNA, 15 bp, Homo sapiens
gttaggatccattgg

SEQ ID NO: 1492958 - DNA, 15 bp, Homo sapiens
ttaggatccattgga

SEQ ID NO: 1492959 - DNA, 15 bp, Homo sapiens
taggatccattggag

SEQ ID NO: 1492960 - DNA, 15 bp, Homo sapiens
aggatccattggagg

SEQ ID NO: 1492961 - DNA, 15 bp, Homo sapiens
ggatccattggaggc

SEQ ID NO: 1492962 - DNA, 15 bp, Homo sapiens
gatccattggaggct

SEQ ID NO: 1492963 - DNA, 15 bp, Homo sapiens
atccattggaggctt

SEQ ID NO: 1492964 - DNA, 15 bp, Homo sapiens
tccattggaggcttt

SEQ ID NO: 1492965 - DNA, 15 bp, Homo sapiens
ccattggaggctttc

SEQ ID NO: 1492966 - DNA, 15 bp, Homo sapiens
cattggaggctttct

SEQ ID NO: 1492967 - DNA, 15 bp, Homo sapiens
attggaggctttctt

SEQ ID NO: 1492968 - DNA, 15 bp, Homo sapiens
ttggaggctttcttc

SEQ ID NO: 1492969 - DNA, 15 bp, Homo sapiens
tggaggctttcttct

SEQ ID NO: 1492970 - DNA, 15 bp, Homo sapiens
ggaggctttcttctg

SEQ ID NO: 1492971 - DNA, 15 bp, Homo sapiens
gaggctttcttctgg

SEQ ID NO: 1492972 - DNA, 15 bp, Homo sapiens
aggctttcttctggt

SEQ ID NO: 1492973 - DNA, 15 bp, Homo sapiens
ggctttcttctggta

SEQ ID NO: 1492974 - DNA, 15 bp, Homo sapiens
gctttcttctggtac

SEQ ID NO: 1492975 - DNA, 15 bp, Homo sapiens
ctttcttctggtaca

SEQ ID NO: 1492976 - DNA, 15 bp, Homo sapiens
tttcttctggtacag

SEQ ID NO: 1492977 - DNA, 15 bp, Homo sapiens
ttcttctggtacagc

SEQ ID NO: 1492978 - DNA, 15 bp, Homo sapiens
tcttctggtacagcc

SEQ ID NO: 1492979 - DNA, 15 bp, Homo sapiens
cttctggtacagcca

SEQ ID NO: 1492980 - DNA, 15 bp, Homo sapiens
ttctggtacagccaa

SEQ ID NO: 1492981 - DNA, 15 bp, Homo sapiens
tctggtacagccaag

SEQ ID NO: 1492982 - DNA, 15 bp, Homo sapiens
ctggtacagccaaga

SEQ ID NO: 1492983 - DNA, 15 bp, Homo sapiens
tggtacagccaagaa

SEQ ID NO: 1492984 - DNA, 15 bp, Homo sapiens
ggtacagccaagaaa

SEQ ID NO: 1492985 - DNA, 15 bp, Homo sapiens
gtacagccaagaaaa

SEQ ID NO: 1492986 - DNA, 15 bp, Homo sapiens
tacagccaagaaaag

SEQ ID NO: 1492987 - DNA, 15 bp, Homo sapiens
acagccaagaaaagg

SEQ ID NO: 1492988 - DNA, 15 bp, Homo sapiens
cagccaagaaaagga

SEQ ID NO: 1492989 - DNA, 15 bp, Homo sapiens
agccaagaaaaggaa

SEQ ID NO: 1492990 - DNA, 15 bp, Homo sapiens
gccaagaaaaggaaa

SEQ ID NO: 1492991 - DNA, 15 bp, Homo sapiens
ccaagaaaaggaaaa

SEQ ID NO: 1492992 - DNA, 15 bp, Homo sapiens
caagaaaaggaaaag

SEQ ID NO: 1492993 - DNA, 15 bp, Homo sapiens
aagaaaaggaaaaga

SEQ ID NO: 1492994 - DNA, 15 bp, Homo sapiens
agaaaaggaaaagag

SEQ ID NO: 1492995 - DNA, 15 bp, Homo sapiens
gaaaaggaaaagagc

SEQ ID NO: 1492996 - DNA, 15 bp, Homo sapiens
aaaaggaaaagagct

SEQ ID NO: 1492997 - DNA, 15 bp, Homo sapiens
aaaggaaaagagctt

SEQ ID NO: 1492998 - DNA, 15 bp, Homo sapiens
aaggaaaagagcttt

SEQ ID NO: 1492999 - DNA, 15 bp, Homo sapiens
aggaaaagagctttg

SEQ ID NO: 1493000 - DNA, 15 bp, Homo sapiens
ggaaaagagctttgg

SEQ ID NO: 1493001 - DNA, 15 bp, Homo sapiens
gaaaagagctttgga

SEQ ID NO: 1493002 - DNA, 15 bp, Homo sapiens
aaaagagctttggaa

SEQ ID NO: 1493003 - DNA, 15 bp, Homo sapiens
aaagagctttggaaa

SEQ ID NO: 1493004 - DNA, 15 bp, Homo sapiens
aagagctttggaaag

SEQ ID NO: 1493005 - DNA, 15 bp, Homo sapiens
agagctttggaaagg

SEQ ID NO: 1493006 - DNA, 15 bp, Homo sapiens
gagctttggaaaggg

SEQ ID NO: 1493007 - DNA, 15 bp, Homo sapiens
agctttggaaagggc

SEQ ID NO: 1493008 - DNA, 15 bp, Homo sapiens
gctttggaaagggcg

SEQ ID NO: 1493009 - DNA, 15 bp, Homo sapiens
ctttggaaagggcga

SEQ ID NO: 1493010 - DNA, 15 bp, Homo sapiens
tttggaaagggcgag

SEQ ID NO: 1493011 - DNA, 15 bp, Homo sapiens
ttggaaagggcgagc

SEQ ID NO: 1493012 - DNA, 15 bp, Homo sapiens
tggaaagggcgagct

SEQ ID NO: 1493013 - DNA, 15 bp, Homo sapiens
ggaaagggcgagctt

SEQ ID NO: 1493014 - DNA, 15 bp, Homo sapiens
gaaagggcgagctta

SEQ ID NO: 1493015 - DNA, 15 bp, Homo sapiens
aaagggcgagcttaa

SEQ ID NO: 1493016 - DNA, 15 bp, Homo sapiens
aagggcgagcttaag

SEQ ID NO: 1493017 - DNA, 15 bp, Homo sapiens
agggcgagcttaaga

SEQ ID NO: 1493018 - DNA, 15 bp, Homo sapiens
gggcgagcttaagaa

SEQ ID NO: 1493019 - DNA, 15 bp, Homo sapiens
ggcgagcttaagaaa

SEQ ID NO: 1493020 - DNA, 15 bp, Homo sapiens
gcgagcttaagaaag

SEQ ID NO: 1493021 - DNA, 15 bp, Homo sapiens
cgagcttaagaaaga

SEQ ID NO: 1493022 - DNA, 15 bp, Homo sapiens
gagcttaagaaagaa

SEQ ID NO: 1493023 - DNA, 15 bp, Homo sapiens
agcttaagaaagaaa

SEQ ID NO: 1493024 - DNA, 15 bp, Homo sapiens
gcttaagaaagaaag

SEQ ID NO: 1493025 - DNA, 15 bp, Homo sapiens
cttaagaaagaaagc

SEQ ID NO: 1493026 - DNA, 15 bp, Homo sapiens
ttaagaaagaaagca

SEQ ID NO: 1493027 - DNA, 15 bp, Homo sapiens
taagaaagaaagcag

SEQ ID NO: 1493028 - DNA, 15 bp, Homo sapiens
aagaaagaaagcagg

SEQ ID NO: 1493029 - DNA, 15 bp, Homo sapiens
agaaagaaagcaggc

SEQ ID NO: 1493030 - DNA, 15 bp, Homo sapiens
gaaagaaagcaggca

SEQ ID NO: 1493031 - DNA, 15 bp, Homo sapiens
aaagaaagcaggcag

SEQ ID NO: 1493032 - DNA, 15 bp, Homo sapiens
aagaaagcaggcagt

SEQ ID NO: 1493033 - DNA, 15 bp, Homo sapiens
agaaagcaggcagtt

SEQ ID NO: 1493034 - DNA, 15 bp, Homo sapiens
gaaagcaggcagttg

SEQ ID NO: 1493035 - DNA, 15 bp, Homo sapiens
aaagcaggcagttgt

SEQ ID NO: 1493036 - DNA, 15 bp, Homo sapiens
aagcaggcagttgtc

SEQ ID NO: 1493037 - DNA, 15 bp, Homo sapiens
agcaggcagttgtcc

SEQ ID NO: 1493038 - DNA, 15 bp, Homo sapiens
gcaggcagttgtcca

SEQ ID NO: 1493039 - DNA, 15 bp, Homo sapiens
caggcagttgtccaa

SEQ ID NO: 1493040 - DNA, 15 bp, Homo sapiens
aggcagttgtccaag

SEQ ID NO: 1493041 - DNA, 15 bp, Homo sapiens
ggcagttgtccaaga

SEQ ID NO: 1493042 - DNA, 15 bp, Homo sapiens
gcagttgtccaagag

SEQ ID NO: 1493043 - DNA, 15 bp, Homo sapiens
cagttgtccaagaga

SEQ ID NO: 1493044 - DNA, 15 bp, Homo sapiens
agttgtccaagagat

SEQ ID NO: 1493045 - DNA, 15 bp, Homo sapiens
gttgtccaagagatt

SEQ ID NO: 1493046 - DNA, 15 bp, Homo sapiens
ttgtccaagagattt

SEQ ID NO: 1493047 - DNA, 15 bp, Homo sapiens
tgtccaagagattta

SEQ ID NO: 1493048 - DNA, 15 bp, Homo sapiens
gtccaagagatttat

SEQ ID NO: 1493049 - DNA, 15 bp, Homo sapiens
tccaagagatttatc

SEQ ID NO: 1493050 - DNA, 15 bp, Homo sapiens
ccaagagatttatct

SEQ ID NO: 1493051 - DNA, 15 bp, Homo sapiens
caagagatttatcta

SEQ ID NO: 1493052 - DNA, 15 bp, Homo sapiens
aagagatttatctag

SEQ ID NO: 1493053 - DNA, 15 bp, Homo sapiens
agagatttatctagt

SEQ ID NO: 1493054 - DNA, 15 bp, Homo sapiens
gagatttatctagta

SEQ ID NO: 1493055 - DNA, 15 bp, Homo sapiens
agatttatctagtat

SEQ ID NO: 1493056 - DNA, 15 bp, Homo sapiens
gatttatctagtatg

SEQ ID NO: 1493057 - DNA, 15 bp, Homo sapiens
atttatctagtatga

SEQ ID NO: 1493058 - DNA, 15 bp, Homo sapiens
tttatctagtatgag

SEQ ID NO: 1493059 - DNA, 15 bp, Homo sapiens
ttatctagtatgagg

SEQ ID NO: 1493060 - DNA, 15 bp, Homo sapiens
tatctagtatgaggt

SEQ ID NO: 1493061 - DNA, 15 bp, Homo sapiens
atctagtatgaggta

SEQ ID NO: 1493062 - DNA, 15 bp, Homo sapiens
tctagtatgaggtac

SEQ ID NO: 1493063 - DNA, 15 bp, Homo sapiens
ctagtatgaggtact

SEQ ID NO: 1493064 - DNA, 15 bp, Homo sapiens
tagtatgaggtactc

SEQ ID NO: 1493065 - DNA, 15 bp, Homo sapiens
agtatgaggtactct

SEQ ID NO: 1493066 - DNA, 15 bp, Homo sapiens
gtatgaggtactcta

SEQ ID NO: 1493067 - DNA, 15 bp, Homo sapiens
tatgaggtactctag

SEQ ID NO: 1493068 - DNA, 15 bp, Homo sapiens
atgaggtactctagc

SEQ ID NO: 1493069 - DNA, 15 bp, Homo sapiens
tgaggtactctagca

SEQ ID NO: 1493070 - DNA, 15 bp, Homo sapiens
gaggtactctagcac

SEQ ID NO: 1493071 - DNA, 15 bp, Homo sapiens
aggtactctagcacc

SEQ ID NO: 1493072 - DNA, 15 bp, Homo sapiens
ggtactctagcacca

SEQ ID NO: 1493073 - DNA, 15 bp, Homo sapiens
gtactctagcaccaa

SEQ ID NO: 1493074 - DNA, 15 bp, Homo sapiens
tactctagcaccaag

SEQ ID NO: 1493075 - DNA, 15 bp, Homo sapiens
actctagcaccaagc

SEQ ID NO: 1493076 - DNA, 15 bp, Homo sapiens
ctctagcaccaagcg

SEQ ID NO: 1493077 - DNA, 15 bp, Homo sapiens
tctagcaccaagcgc

SEQ ID NO: 1493078 - DNA, 15 bp, Homo sapiens
ctagcaccaagcgcc

SEQ ID NO: 1493079 - DNA, 15 bp, Homo sapiens
tagcaccaagcgccc

SEQ ID NO: 1493080 - DNA, 15 bp, Homo sapiens
agcaccaagcgccca

SEQ ID NO: 1493081 - DNA, 15 bp, Homo sapiens
gcaccaagcgcccat

SEQ ID NO: 1493082 - DNA, 15 bp, Homo sapiens
caccaagcgcccatc

SEQ ID NO: 1493083 - DNA, 15 bp, Homo sapiens
accaagcgcccatca

SEQ ID NO: 1493084 - DNA, 15 bp, Homo sapiens
ccaagcgcccatcag

SEQ ID NO: 1493085 - DNA, 15 bp, Homo sapiens
caagcgcccatcagt

SEQ ID NO: 1493086 - DNA, 15 bp, Homo sapiens
aagcgcccatcagtc

SEQ ID NO: 1493087 - DNA, 15 bp, Homo sapiens
agcgcccatcagtct

SEQ ID NO: 1493088 - DNA, 15 bp, Homo sapiens
gcgcccatcagtctg

SEQ ID NO: 1493089 - DNA, 15 bp, Homo sapiens
cgcccatcagtctga

SEQ ID NO: 1493090 - DNA, 15 bp, Homo sapiens
gcccatcagtctgat

SEQ ID NO: 1493091 - DNA, 15 bp, Homo sapiens
cccatcagtctgata

SEQ ID NO: 1493092 - DNA, 15 bp, Homo sapiens
ccatcagtctgatat

SEQ ID NO: 1493093 - DNA, 15 bp, Homo sapiens
catcagtctgatatg

SEQ ID NO: 1493094 - DNA, 15 bp, Homo sapiens
atcagtctgatatga

SEQ ID NO: 1493095 - DNA, 15 bp, Homo sapiens
tcagtctgatatgaa

SEQ ID NO: 1493096 - DNA, 15 bp, Homo sapiens
cagtctgatatgaat

SEQ ID NO: 1493097 - DNA, 15 bp, Homo sapiens
agtctgatatgaatt

SEQ ID NO: 1493098 - DNA, 15 bp, Homo sapiens
gtctgatatgaattt

SEQ ID NO: 1493099 - DNA, 15 bp, Homo sapiens
tctgatatgaatttc

SEQ ID NO: 1493100 - DNA, 15 bp, Homo sapiens
ctgatatgaatttca

SEQ ID NO: 1493101 - DNA, 15 bp, Homo sapiens
tgatatgaatttcat

SEQ ID NO: 1493102 - DNA, 15 bp, Homo sapiens
gatatgaatttcatt

SEQ ID NO: 1493103 - DNA, 15 bp, Homo sapiens
atatgaatttcattt

SEQ ID NO: 1493104 - DNA, 15 bp, Homo sapiens
tatgaatttcatttg

SEQ ID NO: 1493105 - DNA, 15 bp, Homo sapiens
atgaatttcatttga

SEQ ID NO: 1493106 - DNA, 15 bp, Homo sapiens
tgaatttcatttgat

SEQ ID NO: 1493107 - DNA, 15 bp, Homo sapiens
gaatttcatttgata

SEQ ID NO: 1493108 - DNA, 15 bp, Homo sapiens
aatttcatttgatat

SEQ ID NO: 1493109 - DNA, 15 bp, Homo sapiens
atttcatttgatatg

SEQ ID NO: 1493110 - DNA, 15 bp, Homo sapiens
tttcatttgatatga

SEQ ID NO: 1493111 - DNA, 15 bp, Homo sapiens
ttcatttgatatgaa

SEQ ID NO: 1493112 - DNA, 15 bp, Homo sapiens
tcatttgatatgaaa

SEQ ID NO: 1493113 - DNA, 15 bp, Homo sapiens
catttgatatgaaat

SEQ ID NO: 1493114 - DNA, 15 bp, Homo sapiens
atttgatatgaaata

SEQ ID NO: 1493115 - DNA, 15 bp, Homo sapiens
tttgatatgaaatat

SEQ ID NO: 1493116 - DNA, 15 bp, Homo sapiens
ttgatatgaaatata

SEQ ID NO: 1493117 - DNA, 15 bp, Homo sapiens
tgatatgaaatatac

SEQ ID NO: 1493118 - DNA, 15 bp, Homo sapiens
gatatgaaatataca

SEQ ID NO: 1493119 - DNA, 15 bp, Homo sapiens
atatgaaatatacac

SEQ ID NO: 1493120 - DNA, 15 bp, Homo sapiens
tatgaaatatacaca

SEQ ID NO: 1493121 - DNA, 15 bp, Homo sapiens
atgaaatatacacag

SEQ ID NO: 1493122 - DNA, 15 bp, Homo sapiens
tgaaatatacacaga

SEQ ID NO: 1493123 - DNA, 15 bp, Homo sapiens
gaaatatacacagag

SEQ ID NO: 1493124 - DNA, 15 bp, Homo sapiens
aaatatacacagagc

SEQ ID NO: 1493125 - DNA, 15 bp, Homo sapiens
aatatacacagagca

SEQ ID NO: 1493126 - DNA, 15 bp, Homo sapiens
atatacacagagcag

SEQ ID NO: 1493127 - DNA, 15 bp, Homo sapiens
tatacacagagcaga

SEQ ID NO: 1493128 - DNA, 15 bp, Homo sapiens
atacacagagcagaa

SEQ ID NO: 1493129 - DNA, 15 bp, Homo sapiens
tacacagagcagaag

SEQ ID NO: 1493130 - DNA, 15 bp, Homo sapiens
acacagagcagaaga

SEQ ID NO: 1493131 - DNA, 15 bp, Homo sapiens
cacagagcagaagaa

SEQ ID NO: 1493132 - DNA, 15 bp, Homo sapiens
acagagcagaagaat

SEQ ID NO: 1493133 - DNA, 15 bp, Homo sapiens
cagagcagaagaatg

SEQ ID NO: 1493134 - DNA, 15 bp, Homo sapiens
agagcagaagaatgg

SEQ ID NO: 1493135 - DNA, 15 bp, Homo sapiens
gagcagaagaatgga

SEQ ID NO: 1493136 - DNA, 15 bp, Homo sapiens
agcagaagaatggaa

SEQ ID NO: 1493137 - DNA, 15 bp, Homo sapiens
gcagaagaatggaat

SEQ ID NO: 1493138 - DNA, 15 bp, Homo sapiens
cagaagaatggaatt

SEQ ID NO: 1493139 - DNA, 15 bp, Homo sapiens
agaagaatggaatta

SEQ ID NO: 1493140 - DNA, 15 bp, Homo sapiens
gaagaatggaattat

SEQ ID NO: 1493141 - DNA, 15 bp, Homo sapiens
aagaatggaattatt

SEQ ID NO: 1493142 - DNA, 15 bp, Homo sapiens
agaatggaattattt

SEQ ID NO: 1493143 - DNA, 15 bp, Homo sapiens
gaatggaattatttt

SEQ ID NO: 1493144 - DNA, 15 bp, Homo sapiens
aatggaattatttta

SEQ ID NO: 1493145 - DNA, 15 bp, Homo sapiens
atggaattattttag

SEQ ID NO: 1493146 - DNA, 15 bp, Homo sapiens
tggaattattttagt

SEQ ID NO: 1493147 - DNA, 15 bp, Homo sapiens
ggaattattttagtc

SEQ ID NO: 1493148 - DNA, 15 bp, Homo sapiens
gaattattttagtcc

SEQ ID NO: 1493149 - DNA, 15 bp, Homo sapiens
aattattttagtcct

SEQ ID NO: 1493150 - DNA, 15 bp, Homo sapiens
attattttagtcctg

SEQ ID NO: 1493151 - DNA, 15 bp, Homo sapiens
ttattttagtcctgc

SEQ ID NO: 1493152 - DNA, 15 bp, Homo sapiens
tattttagtcctgct

SEQ ID NO: 1493153 - DNA, 15 bp, Homo sapiens
attttagtcctgctg

SEQ ID NO: 1493154 - DNA, 15 bp, Homo sapiens
ttttagtcctgctgg

SEQ ID NO: 1493155 - DNA, 15 bp, Homo sapiens
tttagtcctgctggt

SEQ ID NO: 1493156 - DNA, 15 bp, Homo sapiens
ttagtcctgctggta

SEQ ID NO: 1493157 - DNA, 15 bp, Homo sapiens
tagtcctgctggtaa

SEQ ID NO: 1493158 - DNA, 15 bp, Homo sapiens
agtcctgctggtaac

SEQ ID NO: 1493159 - DNA, 15 bp, Homo sapiens
gtcctgctggtaacc

SEQ ID NO: 1493160 - DNA, 15 bp, Homo sapiens
tcctgctggtaacct

SEQ ID NO: 1493161 - DNA, 15 bp, Homo sapiens
cctgctggtaacctc

SEQ ID NO: 1493162 - DNA, 15 bp, Homo sapiens
ctgctggtaacctca

SEQ ID NO: 1493163 - DNA, 15 bp, Homo sapiens
tgctggtaacctcag

SEQ ID NO: 1493164 - DNA, 15 bp, Homo sapiens
gctggtaacctcagc

SEQ ID NO: 1493165 - DNA, 15 bp, Homo sapiens
ctggtaacctcagcc

SEQ ID NO: 1493166 - DNA, 15 bp, Homo sapiens
tggtaacctcagcct

SEQ ID NO: 1493167 - DNA, 15 bp, Homo sapiens
ggtaacctcagcctg

SEQ ID NO: 1493168 - DNA, 15 bp, Homo sapiens
gtaacctcagcctga

SEQ ID NO: 1493169 - DNA, 15 bp, Homo sapiens
taacctcagcctgag

SEQ ID NO: 1493170 - DNA, 15 bp, Homo sapiens
aacctcagcctgagt

SEQ ID NO: 1493171 - DNA, 15 bp, Homo sapiens
acctcagcctgagtg

SEQ ID NO: 1493172 - DNA, 15 bp, Homo sapiens
cctcagcctgagtgc

SEQ ID NO: 1493173 - DNA, 15 bp, Homo sapiens
ctcagcctgagtgcc

SEQ ID NO: 1493174 - DNA, 15 bp, Homo sapiens
tcagcctgagtgccc

SEQ ID NO: 1493175 - DNA, 15 bp, Homo sapiens
cagcctgagtgccct

SEQ ID NO: 1493176 - DNA, 15 bp, Homo sapiens
agcctgagtgccctg

SEQ ID NO: 1493177 - DNA, 15 bp, Homo sapiens
gcctgagtgccctgc

SEQ ID NO: 1493178 - DNA, 15 bp, Homo sapiens
cctgagtgccctgct

SEQ ID NO: 1493179 - DNA, 15 bp, Homo sapiens
ctgagtgccctgctg

SEQ ID NO: 1493180 - DNA, 15 bp, Homo sapiens
tgagtgccctgctgg

SEQ ID NO: 1493181 - DNA, 15 bp, Homo sapiens
gagtgccctgctggg

SEQ ID NO: 1493182 - DNA, 15 bp, Homo sapiens
agtgccctgctggga

SEQ ID NO: 1493183 - DNA, 15 bp, Homo sapiens
gtgccctgctgggaa

SEQ ID NO: 1493184 - DNA, 15 bp, Homo sapiens
tgccctgctgggaat

SEQ ID NO: 1493185 - DNA, 15 bp, Homo sapiens
gccctgctgggaatc

SEQ ID NO: 1493186 - DNA, 15 bp, Homo sapiens
ccctgctgggaatcc

SEQ ID NO: 1493187 - DNA, 15 bp, Homo sapiens
cctgctgggaatcca

SEQ ID NO: 1493188 - DNA, 15 bp, Homo sapiens
ctgctgggaatccag

SEQ ID NO: 1493189 - DNA, 15 bp, Homo sapiens
tgctgggaatccagg

SEQ ID NO: 1493190 - DNA, 15 bp, Homo sapiens
gctgggaatccaggc

SEQ ID NO: 1493191 - DNA, 15 bp, Homo sapiens
ctgggaatccaggcc

SEQ ID NO: 1493192 - DNA, 15 bp, Homo sapiens
tgggaatccaggcca

SEQ ID NO: 1493193 - DNA, 15 bp, Homo sapiens
gggaatccaggccag

SEQ ID NO: 1493194 - DNA, 15 bp, Homo sapiens
ggaatccaggccagg

SEQ ID NO: 1493195 - DNA, 15 bp, Homo sapiens
gaatccaggccaggt

SEQ ID NO: 1493196 - DNA, 15 bp, Homo sapiens
aatccaggccaggtg

SEQ ID NO: 1493197 - DNA, 15 bp, Homo sapiens
atccaggccaggtgg

SEQ ID NO: 1493198 - DNA, 15 bp, Homo sapiens
tccaggccaggtggt

SEQ ID NO: 1493199 - DNA, 15 bp, Homo sapiens
ccaggccaggtggta

SEQ ID NO: 1493200 - DNA, 15 bp, Homo sapiens
caggccaggtggtat

SEQ ID NO: 1493201 - DNA, 15 bp, Homo sapiens
aggccaggtggtata

SEQ ID NO: 1493202 - DNA, 15 bp, Homo sapiens
ggccaggtggtatat

SEQ ID NO: 1493203 - DNA, 15 bp, Homo sapiens
gccaggtggtatatc

SEQ ID NO: 1493204 - DNA, 15 bp, Homo sapiens
ccaggtggtatatca

SEQ ID NO: 1493205 - DNA, 15 bp, Homo sapiens
caggtggtatatcaa

SEQ ID NO: 1493206 - DNA, 15 bp, Homo sapiens
aggtggtatatcaat

SEQ ID NO: 1493207 - DNA, 15 bp, Homo sapiens
ggtggtatatcaata

SEQ ID NO: 1493208 - DNA, 15 bp, Homo sapiens
gtggtatatcaatat

SEQ ID NO: 1493209 - DNA, 15 bp, Homo sapiens
tggtatatcaatatc

SEQ ID NO: 1493210 - DNA, 15 bp, Homo sapiens
ggtatatcaatatca

SEQ ID NO: 1493211 - DNA, 15 bp, Homo sapiens
gtatatcaatatcag

SEQ ID NO: 1493212 - DNA, 15 bp, Homo sapiens
tatatcaatatcagt

SEQ ID NO: 1493213 - DNA, 15 bp, Homo sapiens
atatcaatatcagtg

SEQ ID NO: 1493214 - DNA, 15 bp, Homo sapiens
tatcaatatcagtgc

SEQ ID NO: 1493215 - DNA, 15 bp, Homo sapiens
atcaatatcagtgct

SEQ ID NO: 1493216 - DNA, 15 bp, Homo sapiens
tcaatatcagtgcta

SEQ ID NO: 1493217 - DNA, 15 bp, Homo sapiens
caatatcagtgctac

SEQ ID NO: 1493218 - DNA, 15 bp, Homo sapiens
aatatcagtgctacc

SEQ ID NO: 1493219 - DNA, 15 bp, Homo sapiens
atatcagtgctaccc

SEQ ID NO: 1493220 - DNA, 15 bp, Homo sapiens
tatcagtgctacccc

SEQ ID NO: 1493221 - DNA, 15 bp, Homo sapiens
atcagtgctacccct

SEQ ID NO: 1493222 - DNA, 15 bp, Homo sapiens
tcagtgctaccccta

SEQ ID NO: 1493223 - DNA, 15 bp, Homo sapiens
cagtgctacccctaa

SEQ ID NO: 1493224 - DNA, 15 bp, Homo sapiens
agtgctacccctaag

SEQ ID NO: 1493225 - DNA, 15 bp, Homo sapiens
gtgctacccctaagt

SEQ ID NO: 1493226 - DNA, 15 bp, Homo sapiens
tgctacccctaagta

SEQ ID NO: 1493227 - DNA, 15 bp, Homo sapiens
gctacccctaagtat

SEQ ID NO: 1493228 - DNA, 15 bp, Homo sapiens
ctacccctaagtatg

SEQ ID NO: 1493229 - DNA, 15 bp, Homo sapiens
tacccctaagtatgg

SEQ ID NO: 1493230 - DNA, 15 bp, Homo sapiens
acccctaagtatgga

SEQ ID NO: 1493231 - DNA, 15 bp, Homo sapiens
cccctaagtatggaa

SEQ ID NO: 1493232 - DNA, 15 bp, Homo sapiens
ccctaagtatggaag

SEQ ID NO: 1493233 - DNA, 15 bp, Homo sapiens
cctaagtatggaagg

SEQ ID NO: 1493234 - DNA, 15 bp, Homo sapiens
ctaagtatggaagga

SEQ ID NO: 1493235 - DNA, 15 bp, Homo sapiens
taagtatggaaggat

SEQ ID NO: 1493236 - DNA, 15 bp, Homo sapiens
aagtatggaaggatt

SEQ ID NO: 1493237 - DNA, 15 bp, Homo sapiens
agtatggaaggattg

SEQ ID NO: 1493238 - DNA, 15 bp, Homo sapiens
gtatggaaggattgt

SEQ ID NO: 1493239 - DNA, 15 bp, Homo sapiens
tatggaaggattgtc

SEQ ID NO: 1493240 - DNA, 15 bp, Homo sapiens
atggaaggattgtcc

SEQ ID NO: 1493241 - DNA, 15 bp, Homo sapiens
tggaaggattgtcct

SEQ ID NO: 1493242 - DNA, 15 bp, Homo sapiens
ggaaggattgtcctg

SEQ ID NO: 1493243 - DNA, 15 bp, Homo sapiens
gaaggattgtcctgg

SEQ ID NO: 1493244 - DNA, 15 bp, Homo sapiens
aaggattgtcctggg

SEQ ID NO: 1493245 - DNA, 15 bp, Homo sapiens
aggattgtcctgggg

SEQ ID NO: 1493246 - DNA, 15 bp, Homo sapiens
ggattgtcctggggc

SEQ ID NO: 1493247 - DNA, 15 bp, Homo sapiens
gattgtcctggggcc

SEQ ID NO: 1493248 - DNA, 15 bp, Homo sapiens
attgtcctggggcct

SEQ ID NO: 1493249 - DNA, 15 bp, Homo sapiens
ttgtcctggggcctg

SEQ ID NO: 1493250 - DNA, 15 bp, Homo sapiens
tgtcctggggcctga

SEQ ID NO: 1493251 - DNA, 15 bp, Homo sapiens
gtcctggggcctgaa

SEQ ID NO: 1493252 - DNA, 15 bp, Homo sapiens
tcctggggcctgaaa

SEQ ID NO: 1493253 - DNA, 15 bp, Homo sapiens
cctggggcctgaaaa

SEQ ID NO: 1493254 - DNA, 15 bp, Homo sapiens
ctggggcctgaaaag

SEQ ID NO: 1493255 - DNA, 15 bp, Homo sapiens
tggggcctgaaaaga

SEQ ID NO: 1493256 - DNA, 15 bp, Homo sapiens
ggggcctgaaaagat

SEQ ID NO: 1493257 - DNA, 15 bp, Homo sapiens
gggcctgaaaagatg

SEQ ID NO: 1493258 - DNA, 15 bp, Homo sapiens
ggcctgaaaagatgg

SEQ ID NO: 1493259 - DNA, 15 bp, Homo sapiens
gcctgaaaagatggt

SEQ ID NO: 1493260 - DNA, 15 bp, Homo sapiens
cctgaaaagatggtg

SEQ ID NO: 1493261 - DNA, 15 bp, Homo sapiens
ctgaaaagatggtgc

SEQ ID NO: 1493262 - DNA, 15 bp, Homo sapiens
tgaaaagatggtgct

SEQ ID NO: 1493263 - DNA, 15 bp, Homo sapiens
gaaaagatggtgcta

SEQ ID NO: 1493264 - DNA, 15 bp, Homo sapiens
aaaagatggtgctag

SEQ ID NO: 1493265 - DNA, 15 bp, Homo sapiens
aaagatggtgctagg

SEQ ID NO: 1493266 - DNA, 15 bp, Homo sapiens
aagatggtgctagga

SEQ ID NO: 1493267 - DNA, 15 bp, Homo sapiens
agatggtgctaggat

SEQ ID NO: 1493268 - DNA, 15 bp, Homo sapiens
gatggtgctaggatc

SEQ ID NO: 1493269 - DNA, 15 bp, Homo sapiens
atggtgctaggatca

SEQ ID NO: 1493270 - DNA, 15 bp, Homo sapiens
tggtgctaggatcac

SEQ ID NO: 1493271 - DNA, 15 bp, Homo sapiens
ggtgctaggatcaca

SEQ ID NO: 1493272 - DNA, 15 bp, Homo sapiens
gtgctaggatcacag

SEQ ID NO: 1493273 - DNA, 15 bp, Homo sapiens
tgctaggatcacagg

SEQ ID NO: 1493274 - DNA, 15 bp, Homo sapiens
gctaggatcacagga

SEQ ID NO: 1493275 - DNA, 15 bp, Homo sapiens
ctaggatcacaggaa

SEQ ID NO: 1493276 - DNA, 15 bp, Homo sapiens
taggatcacaggaac

SEQ ID NO: 1493277 - DNA, 15 bp, Homo sapiens
aggatcacaggaaca

SEQ ID NO: 1493278 - DNA, 15 bp, Homo sapiens
ggatcacaggaacac

SEQ ID NO: 1493279 - DNA, 15 bp, Homo sapiens
gatcacaggaacaca

SEQ ID NO: 1493280 - DNA, 15 bp, Homo sapiens
atcacaggaacacag

SEQ ID NO: 1493281 - DNA, 15 bp, Homo sapiens
tcacaggaacacagg

SEQ ID NO: 1493282 - DNA, 15 bp, Homo sapiens
cacaggaacacaggt

SEQ ID NO: 1493283 - DNA, 15 bp, Homo sapiens
acaggaacacaggtt

SEQ ID NO: 1493284 - DNA, 15 bp, Homo sapiens
caggaacacaggttt

SEQ ID NO: 1493285 - DNA, 15 bp, Homo sapiens
aggaacacaggtttg

SEQ ID NO: 1493286 - DNA, 15 bp, Homo sapiens
ggaacacaggtttgg

SEQ ID NO: 1493287 - DNA, 15 bp, Homo sapiens
gaacacaggtttggg

SEQ ID NO: 1493288 - DNA, 15 bp, Homo sapiens
aacacaggtttgggc

SEQ ID NO: 1493289 - DNA, 15 bp, Homo sapiens
acacaggtttgggct

SEQ ID NO: 1493290 - DNA, 15 bp, Homo sapiens
cacaggtttgggctc

SEQ ID NO: 1493291 - DNA, 15 bp, Homo sapiens
acaggtttgggctca

SEQ ID NO: 1493292 - DNA, 15 bp, Homo sapiens
caggtttgggctcac

SEQ ID NO: 1493293 - DNA, 15 bp, Homo sapiens
aggtttgggctcaca

SEQ ID NO: 1493294 - DNA, 15 bp, Homo sapiens
ggtttgggctcacac

SEQ ID NO: 1493295 - DNA, 15 bp, Homo sapiens
gtttgggctcacact

SEQ ID NO: 1493296 - DNA, 15 bp, Homo sapiens
tttgggctcacacta

SEQ ID NO: 1493297 - DNA, 15 bp, Homo sapiens
ttgggctcacactac

SEQ ID NO: 1493298 - DNA, 15 bp, Homo sapiens
tgggctcacactacg

SEQ ID NO: 1493299 - DNA, 15 bp, Homo sapiens
gggctcacactacgt

SEQ ID NO: 1493300 - DNA, 15 bp, Homo sapiens
ggctcacactacgta

SEQ ID NO: 1493301 - DNA, 15 bp, Homo sapiens
gctcacactacgtaa

SEQ ID NO: 1493302 - DNA, 15 bp, Homo sapiens
ctcacactacgtaag

SEQ ID NO: 1493303 - DNA, 15 bp, Homo sapiens
tcacactacgtaaga

SEQ ID NO: 1493304 - DNA, 15 bp, Homo sapiens
cacactacgtaagag

SEQ ID NO: 1493305 - DNA, 15 bp, Homo sapiens
acactacgtaagagc

SEQ ID NO: 1493306 - DNA, 15 bp, Homo sapiens
cactacgtaagagca

SEQ ID NO: 1493307 - DNA, 15 bp, Homo sapiens
actacgtaagagcat

SEQ ID NO: 1493308 - DNA, 15 bp, Homo sapiens
ctacgtaagagcatt

SEQ ID NO: 1493309 - DNA, 15 bp, Homo sapiens
tacgtaagagcattc

SEQ ID NO: 1493310 - DNA, 15 bp, Homo sapiens
acgtaagagcattct

SEQ ID NO: 1493311 - DNA, 15 bp, Homo sapiens
cgtaagagcattcta

SEQ ID NO: 1493312 - DNA, 15 bp, Homo sapiens
gtaagagcattctag

SEQ ID NO: 1493313 - DNA, 15 bp, Homo sapiens
taagagcattctagc

SEQ ID NO: 1493314 - DNA, 15 bp, Homo sapiens
aagagcattctagca

SEQ ID NO: 1493315 - DNA, 15 bp, Homo sapiens
agagcattctagcag

SEQ ID NO: 1493316 - DNA, 15 bp, Homo sapiens
gagcattctagcagc

SEQ ID NO: 1493317 - DNA, 15 bp, Homo sapiens
agcattctagcagcc

SEQ ID NO: 1493318 - DNA, 15 bp, Homo sapiens
gcattctagcagccc

SEQ ID NO: 1493319 - DNA, 15 bp, Homo sapiens
cattctagcagccct

SEQ ID NO: 1493320 - DNA, 15 bp, Homo sapiens
attctagcagccctg

SEQ ID NO: 1493321 - DNA, 15 bp, Homo sapiens
ttctagcagccctgt

SEQ ID NO: 1493322 - DNA, 15 bp, Homo sapiens
tctagcagccctgtg

SEQ ID NO: 1493323 - DNA, 15 bp, Homo sapiens
ctagcagccctgtgc

SEQ ID NO: 1493324 - DNA, 15 bp, Homo sapiens
tagcagccctgtgca

SEQ ID NO: 1493325 - DNA, 15 bp, Homo sapiens
agcagccctgtgcaa

SEQ ID NO: 1493326 - DNA, 15 bp, Homo sapiens
gcagccctgtgcaaa

SEQ ID NO: 1493327 - DNA, 15 bp, Homo sapiens
cagccctgtgcaaag

SEQ ID NO: 1493328 - DNA, 15 bp, Homo sapiens
agccctgtgcaaaga

SEQ ID NO: 1493329 - DNA, 15 bp, Homo sapiens
gccctgtgcaaagac

SEQ ID NO: 1493330 - DNA, 15 bp, Homo sapiens
ccctgtgcaaagaca

SEQ ID NO: 1493331 - DNA, 15 bp, Homo sapiens
cctgtgcaaagacag

SEQ ID NO: 1493332 - DNA, 15 bp, Homo sapiens
ctgtgcaaagacagg

SEQ ID NO: 1493333 - DNA, 15 bp, Homo sapiens
tgtgcaaagacaggg

SEQ ID NO: 1493334 - DNA, 15 bp, Homo sapiens
gtgcaaagacagggc

SEQ ID NO: 1493335 - DNA, 15 bp, Homo sapiens
tgcaaagacagggca

SEQ ID NO: 1493336 - DNA, 15 bp, Homo sapiens
gcaaagacagggcag

SEQ ID NO: 1493337 - DNA, 15 bp, Homo sapiens
caaagacagggcagc

SEQ ID NO: 1493338 - DNA, 15 bp, Homo sapiens
aaagacagggcagcc

SEQ ID NO: 1493339 - DNA, 15 bp, Homo sapiens
aagacagggcagcct

SEQ ID NO: 1493340 - DNA, 15 bp, Homo sapiens
agacagggcagcctt

SEQ ID NO: 1493341 - DNA, 15 bp, Homo sapiens
gacagggcagccttg

SEQ ID NO: 1493342 - DNA, 15 bp, Homo sapiens
acagggcagccttga

SEQ ID NO: 1493343 - DNA, 15 bp, Homo sapiens
cagggcagccttgag

SEQ ID NO: 1493344 - DNA, 15 bp, Homo sapiens
agggcagccttgaga

SEQ ID NO: 1493345 - DNA, 15 bp, Homo sapiens
gggcagccttgagat

SEQ ID NO: 1493346 - DNA, 15 bp, Homo sapiens
ggcagccttgagatg

SEQ ID NO: 1493347 - DNA, 15 bp, Homo sapiens
gcagccttgagatgc

SEQ ID NO: 1493348 - DNA, 15 bp, Homo sapiens
cagccttgagatgct

SEQ ID NO: 1493349 - DNA, 15 bp, Homo sapiens
agccttgagatgcta

SEQ ID NO: 1493350 - DNA, 15 bp, Homo sapiens
gccttgagatgctat

SEQ ID NO: 1493351 - DNA, 15 bp, Homo sapiens
ccttgagatgctatt

SEQ ID NO: 1493352 - DNA, 15 bp, Homo sapiens
cttgagatgctattt

SEQ ID NO: 1493353 - DNA, 15 bp, Homo sapiens
ttgagatgctatttg

SEQ ID NO: 1493354 - DNA, 15 bp, Homo sapiens
tgagatgctatttgt

SEQ ID NO: 1493355 - DNA, 15 bp, Homo sapiens
gagatgctatttgtt

SEQ ID NO: 1493356 - DNA, 15 bp, Homo sapiens
agatgctatttgttg

SEQ ID NO: 1493357 - DNA, 15 bp, Homo sapiens
gatgctatttgttgt

SEQ ID NO: 1493358 - DNA, 15 bp, Homo sapiens
tgctatttgttgtga

SEQ ID NO: 1493359 - DNA, 15 bp, Homo sapiens
gctatttgttgtgaa

SEQ ID NO: 1493360 - DNA, 15 bp, Homo sapiens
ctatttgttgtgaat

SEQ ID NO: 1493361 - DNA, 15 bp, Homo sapiens
tatttgttgtgaatg

SEQ ID NO: 1493362 - DNA, 15 bp, Homo sapiens
atttgttgtgaatgg

SEQ ID NO: 1493363 - DNA, 15 bp, Homo sapiens
tttgttgtgaatggc

SEQ ID NO: 1493364 - DNA, 15 bp, Homo sapiens
ttgttgtgaatggcc

SEQ ID NO: 1493365 - DNA, 15 bp, Homo sapiens
tgttgtgaatggcca

SEQ ID NO: 1493366 - DNA, 15 bp, Homo sapiens
gttgtgaatggccaa

SEQ ID NO: 1493367 - DNA, 15 bp, Homo sapiens
ttgtgaatggccaag

SEQ ID NO: 1493368 - DNA, 15 bp, Homo sapiens
tgtgaatggccaagg

SEQ ID NO: 1493369 - DNA, 15 bp, Homo sapiens
gtgaatggccaaggc

SEQ ID NO: 1493370 - DNA, 15 bp, Homo sapiens
tgaatggccaaggca

SEQ ID NO: 1493371 - DNA, 15 bp, Homo sapiens
gaatggccaaggcag

SEQ ID NO: 1493372 - DNA, 15 bp, Homo sapiens
aatggccaaggcagc

SEQ ID NO: 1493373 - DNA, 15 bp, Homo sapiens
atggccaaggcagct

SEQ ID NO: 1493374 - DNA, 15 bp, Homo sapiens
tggccaaggcagctg

SEQ ID NO: 1493375 - DNA, 15 bp, Homo sapiens
ggccaaggcagctgc

SEQ ID NO: 1493376 - DNA, 15 bp, Homo sapiens
gccaaggcagctgcg

SEQ ID NO: 1493377 - DNA, 15 bp, Homo sapiens
ccaaggcagctgcga

SEQ ID NO: 1493378 - DNA, 15 bp, Homo sapiens
caaggcagctgcgag

SEQ ID NO: 1493379 - DNA, 15 bp, Homo sapiens
aaggcagctgcgagt

SEQ ID NO: 1493380 - DNA, 15 bp, Homo sapiens
aggcagctgcgagtc

SEQ ID NO: 1493381 - DNA, 15 bp, Homo sapiens
ggcagctgcgagtct

SEQ ID NO: 1493382 - DNA, 15 bp, Homo sapiens
gcagctgcgagtctt

SEQ ID NO: 1493383 - DNA, 15 bp, Homo sapiens
cagctgcgagtcttg

SEQ ID NO: 1493384 - DNA, 15 bp, Homo sapiens
agctgcgagtcttgc

SEQ ID NO: 1493385 - DNA, 15 bp, Homo sapiens
gctgcgagtcttgca

SEQ ID NO: 1493386 - DNA, 15 bp, Homo sapiens
ctgcgagtcttgcag

SEQ ID NO: 1493387 - DNA, 15 bp, Homo sapiens
tgcgagtcttgcagg

SEQ ID NO: 1493388 - DNA, 15 bp, Homo sapiens
gcgagtcttgcagga

SEQ ID NO: 1493389 - DNA, 15 bp, Homo sapiens
cgagtcttgcaggag

SEQ ID NO: 1493390 - DNA, 15 bp, Homo sapiens
gagtcttgcaggagt

SEQ ID NO: 1493391 - DNA, 15 bp, Homo sapiens
agtcttgcaggagtt

SEQ ID NO: 1493392 - DNA, 15 bp, Homo sapiens
gtcttgcaggagttt

SEQ ID NO: 1493393 - DNA, 15 bp, Homo sapiens
tcttgcaggagttta

SEQ ID NO: 1493394 - DNA, 15 bp, Homo sapiens
cttgcaggagtttag

SEQ ID NO: 1493395 - DNA, 15 bp, Homo sapiens
ttgcaggagtttagc

SEQ ID NO: 1493396 - DNA, 15 bp, Homo sapiens
tgcaggagtttagct

SEQ ID NO: 1493397 - DNA, 15 bp, Homo sapiens
gcaggagtttagctt

SEQ ID NO: 1493398 - DNA, 15 bp, Homo sapiens
caggagtttagcttt

SEQ ID NO: 1493399 - DNA, 15 bp, Homo sapiens
aggagtttagctttg

SEQ ID NO: 1493400 - DNA, 15 bp, Homo sapiens
ggagtttagctttgg

SEQ ID NO: 1493401 - DNA, 15 bp, Homo sapiens
gagtttagctttggg

SEQ ID NO: 1493402 - DNA, 15 bp, Homo sapiens
agtttagctttgggc

SEQ ID NO: 1493403 - DNA, 15 bp, Homo sapiens
gtttagctttgggca

SEQ ID NO: 1493404 - DNA, 15 bp, Homo sapiens
tttagctttgggcag

SEQ ID NO: 1493405 - DNA, 15 bp, Homo sapiens
ttagctttgggcagg

SEQ ID NO: 1493406 - DNA, 15 bp, Homo sapiens
tagctttgggcaggg

SEQ ID NO: 1493407 - DNA, 15 bp, Homo sapiens
agctttgggcagggg

SEQ ID NO: 1493408 - DNA, 15 bp, Homo sapiens
gctttgggcaggggc

SEQ ID NO: 1493409 - DNA, 15 bp, Homo sapiens
ctttgggcaggggct

SEQ ID NO: 1493410 - DNA, 15 bp, Homo sapiens
tttgggcaggggctt

SEQ ID NO: 1493411 - DNA, 15 bp, Homo sapiens
ttgggcaggggcttg

SEQ ID NO: 1493412 - DNA, 15 bp, Homo sapiens
tgggcaggggcttga

SEQ ID NO: 1493413 - DNA, 15 bp, Homo sapiens
gggcaggggcttgat

SEQ ID NO: 1493414 - DNA, 15 bp, Homo sapiens
ggcaggggcttgatg

SEQ ID NO: 1493415 - DNA, 15 bp, Homo sapiens
gcaggggcttgatga

SEQ ID NO: 1493416 - DNA, 15 bp, Homo sapiens
caggggcttgatgat

SEQ ID NO: 1493417 - DNA, 15 bp, Homo sapiens
aggggcttgatgatt

SEQ ID NO: 1493418 - DNA, 15 bp, Homo sapiens
ggggcttgatgattt

SEQ ID NO: 1493419 - DNA, 15 bp, Homo sapiens
gggcttgatgatttt

SEQ ID NO: 1493420 - DNA, 15 bp, Homo sapiens
ggcttgatgatttta

SEQ ID NO: 1493421 - DNA, 15 bp, Homo sapiens
gcttgatgattttaa

SEQ ID NO: 1493422 - DNA, 15 bp, Homo sapiens
cttgatgattttaag

SEQ ID NO: 1493423 - DNA, 15 bp, Homo sapiens
ttgatgattttaagc

SEQ ID NO: 1493424 - DNA, 15 bp, Homo sapiens
tgatgattttaagcc

SEQ ID NO: 1493425 - DNA, 15 bp, Homo sapiens
gatgattttaagccc

SEQ ID NO: 1493426 - DNA, 15 bp, Homo sapiens
atgattttaagcccc

SEQ ID NO: 1493427 - DNA, 15 bp, Homo sapiens
tgattttaagccccc

SEQ ID NO: 1493428 - DNA, 15 bp, Homo sapiens
gattttaagccccct

SEQ ID NO: 1493429 - DNA, 15 bp, Homo sapiens
attttaagccccctt

SEQ ID NO: 1493430 - DNA, 15 bp, Homo sapiens
ttttaagcccccttc

SEQ ID NO: 1493431 - DNA, 15 bp, Homo sapiens
tttaagcccccttcg

SEQ ID NO: 1493432 - DNA, 15 bp, Homo sapiens
ttaagcccccttcgc

SEQ ID NO: 1493433 - DNA, 15 bp, Homo sapiens
taagcccccttcgca

SEQ ID NO: 1493434 - DNA, 15 bp, Homo sapiens
aagcccccttcgcaa

SEQ ID NO: 1493435 - DNA, 15 bp, Homo sapiens
agcccccttcgcaag

SEQ ID NO: 1493436 - DNA, 15 bp, Homo sapiens
gcccccttcgcaagt

SEQ ID NO: 1493437 - DNA, 15 bp, Homo sapiens
cccccttcgcaagtt

SEQ ID NO: 1493438 - DNA, 15 bp, Homo sapiens
ccccttcgcaagttc

SEQ ID NO: 1493439 - DNA, 15 bp, Homo sapiens
cccttcgcaagttca

SEQ ID NO: 1493440 - DNA, 15 bp, Homo sapiens
ccttcgcaagttcag

SEQ ID NO: 1493441 - DNA, 15 bp, Homo sapiens
cttcgcaagttcaga

SEQ ID NO: 1493442 - DNA, 15 bp, Homo sapiens
ttcgcaagttcagat

SEQ ID NO: 1493443 - DNA, 15 bp, Homo sapiens
tcgcaagttcagatc

SEQ ID NO: 1493444 - DNA, 15 bp, Homo sapiens
cgcaagttcagatcc

SEQ ID NO: 1493445 - DNA, 15 bp, Homo sapiens
gcaagttcagatcct

SEQ ID NO: 1493446 - DNA, 15 bp, Homo sapiens
caagttcagatcctt

SEQ ID NO: 1493447 - DNA, 15 bp, Homo sapiens
aagttcagatcctta

SEQ ID NO: 1493448 - DNA, 15 bp, Homo sapiens
agttcagatccttag

SEQ ID NO: 1493449 - DNA, 15 bp, Homo sapiens
gttcagatccttaga

SEQ ID NO: 1493450 - DNA, 15 bp, Homo sapiens
ttcagatccttagac

SEQ ID NO: 1493451 - DNA, 15 bp, Homo sapiens
tcagatccttagaca

SEQ ID NO: 1493452 - DNA, 15 bp, Homo sapiens
cagatccttagacag

SEQ ID NO: 1493453 - DNA, 15 bp, Homo sapiens
agatccttagacagc

SEQ ID NO: 1493454 - DNA, 15 bp, Homo sapiens
gatccttagacagca

SEQ ID NO: 1493455 - DNA, 15 bp, Homo sapiens
atccttagacagcaa

SEQ ID NO: 1493456 - DNA, 15 bp, Homo sapiens
tccttagacagcaac

SEQ ID NO: 1493457 - DNA, 15 bp, Homo sapiens
ccttagacagcaact

SEQ ID NO: 1493458 - DNA, 15 bp, Homo sapiens
cttagacagcaactc

SEQ ID NO: 1493459 - DNA, 15 bp, Homo sapiens
ttagacagcaactct

SEQ ID NO: 1493460 - DNA, 15 bp, Homo sapiens
tagacagcaactctg

SEQ ID NO: 1493461 - DNA, 15 bp, Homo sapiens
agacagcaactctgg

SEQ ID NO: 1493462 - DNA, 15 bp, Homo sapiens
gacagcaactctggg

SEQ ID NO: 1493463 - DNA, 15 bp, Homo sapiens
acagcaactctggga

SEQ ID NO: 1493464 - DNA, 15 bp, Homo sapiens
cagcaactctgggac

SEQ ID NO: 1493465 - DNA, 15 bp, Homo sapiens
agcaactctgggacc

SEQ ID NO: 1493466 - DNA, 15 bp, Homo sapiens
gcaactctgggacct

SEQ ID NO: 1493467 - DNA, 15 bp, Homo sapiens
caactctgggacctg

SEQ ID NO: 1493468 - DNA, 15 bp, Homo sapiens
aactctgggacctgc

SEQ ID NO: 1493469 - DNA, 15 bp, Homo sapiens
actctgggacctgct

SEQ ID NO: 1493470 - DNA, 15 bp, Homo sapiens
ctctgggacctgctt

SEQ ID NO: 1493471 - DNA, 15 bp, Homo sapiens
tctgggacctgcttt

SEQ ID NO: 1493472 - DNA, 15 bp, Homo sapiens
ctgggacctgctttt

SEQ ID NO: 1493473 - DNA, 15 bp, Homo sapiens
tgggacctgcttttc

SEQ ID NO: 1493474 - DNA, 15 bp, Homo sapiens
gggacctgcttttcc

SEQ ID NO: 1493475 - DNA, 15 bp, Homo sapiens
ggacctgcttttcct

SEQ ID NO: 1493476 - DNA, 15 bp, Homo sapiens
gacctgcttttcctg

SEQ ID NO: 1493477 - DNA, 15 bp, Homo sapiens
acctgcttttcctgg

SEQ ID NO: 1493478 - DNA, 15 bp, Homo sapiens
cctgcttttcctgga

SEQ ID NO: 1493479 - DNA, 15 bp, Homo sapiens
ctgcttttcctggac

SEQ ID NO: 1493480 - DNA, 15 bp, Homo sapiens
tgcttttcctggact

SEQ ID NO: 1493481 - DNA, 15 bp, Homo sapiens
gcttttcctggactg

SEQ ID NO: 1493482 - DNA, 15 bp, Homo sapiens
cttttcctggactgg

SEQ ID NO: 1493483 - DNA, 15 bp, Homo sapiens
ttttcctggactggc

SEQ ID NO: 1493484 - DNA, 15 bp, Homo sapiens
tttcctggactggct

SEQ ID NO: 1493485 - DNA, 15 bp, Homo sapiens
ttcctggactggctg

SEQ ID NO: 1493486 - DNA, 15 bp, Homo sapiens
tcctggactggctgg

SEQ ID NO: 1493487 - DNA, 15 bp, Homo sapiens
cctggactggctggc

SEQ ID NO: 1493488 - DNA, 15 bp, Homo sapiens
ctggactggctggct

SEQ ID NO: 1493489 - DNA, 15 bp, Homo sapiens
tggactggctggctc

SEQ ID NO: 1493490 - DNA, 15 bp, Homo sapiens
ggactggctggctct

SEQ ID NO: 1493491 - DNA, 15 bp, Homo sapiens
gactggctggctctg

SEQ ID NO: 1493492 - DNA, 15 bp, Homo sapiens
actggctggctctgg

SEQ ID NO: 1493493 - DNA, 15 bp, Homo sapiens
ctggctggctctggg

SEQ ID NO: 1493494 - DNA, 15 bp, Homo sapiens
tggctggctctgggt

SEQ ID NO: 1493495 - DNA, 15 bp, Homo sapiens
ggctggctctgggtt

SEQ ID NO: 1493496 - DNA, 15 bp, Homo sapiens
gctggctctgggttg

SEQ ID NO: 1493497 - DNA, 15 bp, Homo sapiens
ctggctctgggttgg

SEQ ID NO: 1493498 - DNA, 15 bp, Homo sapiens
tggctctgggttggt

SEQ ID NO: 1493499 - DNA, 15 bp, Homo sapiens
ggctctgggttggtg

SEQ ID NO: 1493500 - DNA, 15 bp, Homo sapiens
gctctgggttggtga

SEQ ID NO: 1493501 - DNA, 15 bp, Homo sapiens
ctctgggttggtgag

SEQ ID NO: 1493502 - DNA, 15 bp, Homo sapiens
tctgggttggtgagc

SEQ ID NO: 1493503 - DNA, 15 bp, Homo sapiens
ctgggttggtgagct

SEQ ID NO: 1493504 - DNA, 15 bp, Homo sapiens
tgggttggtgagctc

SEQ ID NO: 1493505 - DNA, 15 bp, Homo sapiens
gggttggtgagctct

SEQ ID NO: 1493506 - DNA, 15 bp, Homo sapiens
ggttggtgagctctg

SEQ ID NO: 1493507 - DNA, 15 bp, Homo sapiens
gttggtgagctctgt

SEQ ID NO: 1493508 - DNA, 15 bp, Homo sapiens
ttggtgagctctgtt

SEQ ID NO: 1493509 - DNA, 15 bp, Homo sapiens
tggtgagctctgttt

SEQ ID NO: 1493510 - DNA, 15 bp, Homo sapiens
ggtgagctctgtttg

SEQ ID NO: 1493511 - DNA, 15 bp, Homo sapiens
gtgagctctgtttgc

SEQ ID NO: 1493512 - DNA, 15 bp, Homo sapiens
tgagctctgtttgct

SEQ ID NO: 1493513 - DNA, 15 bp, Homo sapiens
gagctctgtttgctc

SEQ ID NO: 1493514 - DNA, 15 bp, Homo sapiens
agctctgtttgctcg

SEQ ID NO: 1493515 - DNA, 15 bp, Homo sapiens
gctctgtttgctcgc

SEQ ID NO: 1493516 - DNA, 15 bp, Homo sapiens
ctctgtttgctcgcc

SEQ ID NO: 1493517 - DNA, 15 bp, Homo sapiens
tctgtttgctcgcca

SEQ ID NO: 1493518 - DNA, 15 bp, Homo sapiens
ctgtttgctcgccat

SEQ ID NO: 1493519 - DNA, 15 bp, Homo sapiens
tgtttgctcgccatc

SEQ ID NO: 1493520 - DNA, 15 bp, Homo sapiens
gtttgctcgccatcg

SEQ ID NO: 1493521 - DNA, 15 bp, Homo sapiens
tttgctcgccatcgt

SEQ ID NO: 1493522 - DNA, 15 bp, Homo sapiens
ttgctcgccatcgtt

SEQ ID NO: 1493523 - DNA, 15 bp, Homo sapiens
tgctcgccatcgttc

SEQ ID NO: 1493524 - DNA, 15 bp, Homo sapiens
gctcgccatcgttct

SEQ ID NO: 1493525 - DNA, 15 bp, Homo sapiens
ctcgccatcgttctg

SEQ ID NO: 1493526 - DNA, 15 bp, Homo sapiens
tcgccatcgttctgt

SEQ ID NO: 1493527 - DNA, 15 bp, Homo sapiens
cgccatcgttctgtg

SEQ ID NO: 1493528 - DNA, 15 bp, Homo sapiens
gccatcgttctgtgg

SEQ ID NO: 1493529 - DNA, 15 bp, Homo sapiens
ccatcgttctgtgga

SEQ ID NO: 1493530 - DNA, 15 bp, Homo sapiens
catcgttctgtggac

SEQ ID NO: 1493531 - DNA, 15 bp, Homo sapiens
atcgttctgtggacc

SEQ ID NO: 1493532 - DNA, 15 bp, Homo sapiens
tcgttctgtggacct

SEQ ID NO: 1493533 - DNA, 15 bp, Homo sapiens
cgttctgtggacctt

SEQ ID NO: 1493534 - DNA, 15 bp, Homo sapiens
gttctgtggaccttt

SEQ ID NO: 1493535 - DNA, 15 bp, Homo sapiens
ttctgtggaccttta

SEQ ID NO: 1493536 - DNA, 15 bp, Homo sapiens
tctgtggacctttaa

SEQ ID NO: 1493537 - DNA, 15 bp, Homo sapiens
ctgtggacctttaac

SEQ ID NO: 1493538 - DNA, 15 bp, Homo sapiens
tgtggacctttaact

SEQ ID NO: 1493539 - DNA, 15 bp, Homo sapiens
gtggacctttaactc

SEQ ID NO: 1493540 - DNA, 15 bp, Homo sapiens
tggacctttaactcc

SEQ ID NO: 1493541 - DNA, 15 bp, Homo sapiens
ggacctttaactccc

SEQ ID NO: 1493542 - DNA, 15 bp, Homo sapiens
gacctttaactcccc

SEQ ID NO: 1493543 - DNA, 15 bp, Homo sapiens
acctttaactcccca

SEQ ID NO: 1493544 - DNA, 15 bp, Homo sapiens
cctttaactccccat

SEQ ID NO: 1493545 - DNA, 15 bp, Homo sapiens
ctttaactccccatc

SEQ ID NO: 1493546 - DNA, 15 bp, Homo sapiens
tttaactccccatct

SEQ ID NO: 1493547 - DNA, 15 bp, Homo sapiens
ttaactccccatctt

SEQ ID NO: 1493548 - DNA, 15 bp, Homo sapiens
taactccccatcttt

SEQ ID NO: 1493549 - DNA, 15 bp, Homo sapiens
aactccccatctttg

SEQ ID NO: 1493550 - DNA, 15 bp, Homo sapiens
actccccatctttgg

SEQ ID NO: 1493551 - DNA, 15 bp, Homo sapiens
ctccccatctttgga

SEQ ID NO: 1493552 - DNA, 15 bp, Homo sapiens
tccccatctttggaa

SEQ ID NO: 1493553 - DNA, 15 bp, Homo sapiens
ccccatctttggaat

SEQ ID NO: 1493554 - DNA, 15 bp, Homo sapiens
cccatctttggaatc

SEQ ID NO: 1493555 - DNA, 15 bp, Homo sapiens
ccatctttggaatcc

SEQ ID NO: 1493556 - DNA, 15 bp, Homo sapiens
catctttggaatcca

SEQ ID NO: 1493557 - DNA, 15 bp, Homo sapiens
atctttggaatccac

SEQ ID NO: 1493558 - DNA, 15 bp, Homo sapiens
tctttggaatccact

SEQ ID NO: 1493559 - DNA, 15 bp, Homo sapiens
ctttggaatccactg

SEQ ID NO: 1493560 - DNA, 15 bp, Homo sapiens
tttggaatccactgt

SEQ ID NO: 1493561 - DNA, 15 bp, Homo sapiens
ttggaatccactgtc

SEQ ID NO: 1493562 - DNA, 15 bp, Homo sapiens
tggaatccactgtcc

SEQ ID NO: 1493563 - DNA, 15 bp, Homo sapiens
ggaatccactgtccc

SEQ ID NO: 1493564 - DNA, 15 bp, Homo sapiens
gaatccactgtccct

SEQ ID NO: 1493565 - DNA, 15 bp, Homo sapiens
aatccactgtccctt

SEQ ID NO: 1493566 - DNA, 15 bp, Homo sapiens
atccactgtcccttc

SEQ ID NO: 1493567 - DNA, 15 bp, Homo sapiens
tccactgtcccttca

SEQ ID NO: 1493568 - DNA, 15 bp, Homo sapiens
ccactgtcccttcag

SEQ ID NO: 1493569 - DNA, 15 bp, Homo sapiens
cactgtcccttcagc

SEQ ID NO: 1493570 - DNA, 15 bp, Homo sapiens
actgtcccttcagcg

SEQ ID NO: 1493571 - DNA, 15 bp, Homo sapiens
ctgtcccttcagcga

SEQ ID NO: 1493572 - DNA, 15 bp, Homo sapiens
tgtcccttcagcgac

SEQ ID NO: 1493573 - DNA, 15 bp, Homo sapiens
gtcccttcagcgaca

SEQ ID NO: 1493574 - DNA, 15 bp, Homo sapiens
tcccttcagcgacag

SEQ ID NO: 1493575 - DNA, 15 bp, Homo sapiens
cccttcagcgacagt

SEQ ID NO: 1493576 - DNA, 15 bp, Homo sapiens
ccttcagcgacagtg

SEQ ID NO: 1493577 - DNA, 15 bp, Homo sapiens
cttcagcgacagtgt

SEQ ID NO: 1493578 - DNA, 15 bp, Homo sapiens
ttcagcgacagtgtt

SEQ ID NO: 1493579 - DNA, 15 bp, Homo sapiens
tcagcgacagtgttc

SEQ ID NO: 1493580 - DNA, 15 bp, Homo sapiens
cagcgacagtgttcc

SEQ ID NO: 1493581 - DNA, 15 bp, Homo sapiens
agcgacagtgttcct

SEQ ID NO: 1493582 - DNA, 15 bp, Homo sapiens
gcgacagtgttcctc

SEQ ID NO: 1493583 - DNA, 15 bp, Homo sapiens
cgacagtgttcctca

SEQ ID NO: 1493584 - DNA, 15 bp, Homo sapiens
gacagtgttcctcat

SEQ ID NO: 1493585 - DNA, 15 bp, Homo sapiens
acagtgttcctcatg

SEQ ID NO: 1493586 - DNA, 15 bp, Homo sapiens
cagtgttcctcatgg

SEQ ID NO: 1493587 - DNA, 15 bp, Homo sapiens
agtgttcctcatggg

SEQ ID NO: 1493588 - DNA, 15 bp, Homo sapiens
gtgttcctcatgggg

SEQ ID NO: 1493589 - DNA, 15 bp, Homo sapiens
tgttcctcatggggc

SEQ ID NO: 1493590 - DNA, 15 bp, Homo sapiens
gttcctcatggggca

SEQ ID NO: 1493591 - DNA, 15 bp, Homo sapiens
ttcctcatggggcag

SEQ ID NO: 1493592 - DNA, 15 bp, Homo sapiens
tcctcatggggcagg

SEQ ID NO: 1493593 - DNA, 15 bp, Homo sapiens
cctcatggggcaggg

SEQ ID NO: 1493594 - DNA, 15 bp, Homo sapiens
ctcatggggcagggg

SEQ ID NO: 1493595 - DNA, 15 bp, Homo sapiens
tcatggggcaggggc

SEQ ID NO: 1493596 - DNA, 15 bp, Homo sapiens
catggggcaggggca

SEQ ID NO: 1493597 - DNA, 15 bp, Homo sapiens
atggggcaggggcaa

SEQ ID NO: 1493598 - DNA, 15 bp, Homo sapiens
tggggcaggggcaac

SEQ ID NO: 1493599 - DNA, 15 bp, Homo sapiens
ggggcaggggcaaca

SEQ ID NO: 1493600 - DNA, 15 bp, Homo sapiens
gggcaggggcaacac

SEQ ID NO: 1493601 - DNA, 15 bp, Homo sapiens
ggcaggggcaacacg

SEQ ID NO: 1493602 - DNA, 15 bp, Homo sapiens
gcaggggcaacacgt

SEQ ID NO: 1493603 - DNA, 15 bp, Homo sapiens
caggggcaacacgtg

SEQ ID NO: 1493604 - DNA, 15 bp, Homo sapiens
aggggcaacacgtgc

SEQ ID NO: 1493605 - DNA, 15 bp, Homo sapiens
ggggcaacacgtgct

SEQ ID NO: 1493606 - DNA, 15 bp, Homo sapiens
gggcaacacgtgctg

SEQ ID NO: 1493607 - DNA, 15 bp, Homo sapiens
ggcaacacgtgctgg

SEQ ID NO: 1493608 - DNA, 15 bp, Homo sapiens
gcaacacgtgctggc

SEQ ID NO: 1493609 - DNA, 15 bp, Homo sapiens
caacacgtgctggct

SEQ ID NO: 1493610 - DNA, 15 bp, Homo sapiens
aacacgtgctggctg

SEQ ID NO: 1493611 - DNA, 15 bp, Homo sapiens
acacgtgctggctgg

SEQ ID NO: 1493612 - DNA, 15 bp, Homo sapiens
cacgtgctggctgga

SEQ ID NO: 1493613 - DNA, 15 bp, Homo sapiens
acgtgctggctggag

SEQ ID NO: 1493614 - DNA, 15 bp, Homo sapiens
cgtgctggctggaga

SEQ ID NO: 1493615 - DNA, 15 bp, Homo sapiens
gtgctggctggagaa

SEQ ID NO: 1493616 - DNA, 15 bp, Homo sapiens
tgctggctggagaaa

SEQ ID NO: 1493617 - DNA, 15 bp, Homo sapiens
gctggctggagaaat

SEQ ID NO: 1493618 - DNA, 15 bp, Homo sapiens
ctggctggagaaatg

SEQ ID NO: 1493619 - DNA, 15 bp, Homo sapiens
tggctggagaaatga

SEQ ID NO: 1493620 - DNA, 15 bp, Homo sapiens
ggctggagaaatgaa

SEQ ID NO: 1493621 - DNA, 15 bp, Homo sapiens
gctggagaaatgaaa

SEQ ID NO: 1493622 - DNA, 15 bp, Homo sapiens
ctggagaaatgaaaa

SEQ ID NO: 1493623 - DNA, 15 bp, Homo sapiens
tggagaaatgaaaaa

SEQ ID NO: 1493624 - DNA, 15 bp, Homo sapiens
ggagaaatgaaaaat

SEQ ID NO: 1493625 - DNA, 15 bp, Homo sapiens
gagaaatgaaaaatc

SEQ ID NO: 1493626 - DNA, 15 bp, Homo sapiens
agaaatgaaaaatca

SEQ ID NO: 1493627 - DNA, 15 bp, Homo sapiens
gaaatgaaaaatcaa

SEQ ID NO: 1493628 - DNA, 15 bp, Homo sapiens
aaatgaaaaatcaaa

SEQ ID NO: 1493629 - DNA, 15 bp, Homo sapiens
aatgaaaaatcaaaa

SEQ ID NO: 1493630 - DNA, 15 bp, Homo sapiens
atgaaaaatcaaaaa

SEQ ID NO: 1493631 - DNA, 15 bp, Homo sapiens
tgaaaaatcaaaaaa

SEQ ID NO: 1493632 - DNA, 15 bp, Homo sapiens
gaaaaatcaaaaaac

SEQ ID NO: 1493633 - DNA, 15 bp, Homo sapiens
aaaaatcaaaaaact

SEQ ID NO: 1493634 - DNA, 15 bp, Homo sapiens
aaaatcaaaaaactg

SEQ ID NO: 1493635 - DNA, 15 bp, Homo sapiens
aaatcaaaaaactgg

SEQ ID NO: 1493636 - DNA, 15 bp, Homo sapiens
aatcaaaaaactggc

SEQ ID NO: 1493637 - DNA, 15 bp, Homo sapiens
atcaaaaaactggct

SEQ ID NO: 1493638 - DNA, 15 bp, Homo sapiens
tcaaaaaactggctt

SEQ ID NO: 1493639 - DNA, 15 bp, Homo sapiens
caaaaaactggcttt

SEQ ID NO: 1493640 - DNA, 15 bp, Homo sapiens
aaaaaactggctttg

SEQ ID NO: 1493641 - DNA, 15 bp, Homo sapiens
aaaaactggctttgg

SEQ ID NO: 1493642 - DNA, 15 bp, Homo sapiens
aaaactggctttggc

SEQ ID NO: 1493643 - DNA, 15 bp, Homo sapiens
aaactggctttggca

SEQ ID NO: 1493644 - DNA, 15 bp, Homo sapiens
aactggctttggcag

SEQ ID NO: 1493645 - DNA, 15 bp, Homo sapiens
actggctttggcagt

SEQ ID NO: 1493646 - DNA, 15 bp, Homo sapiens
ctggctttggcagtt

SEQ ID NO: 1493647 - DNA, 15 bp, Homo sapiens
tggctttggcagttt

SEQ ID NO: 1493648 - DNA, 15 bp, Homo sapiens
ggctttggcagtttc

SEQ ID NO: 1493649 - DNA, 15 bp, Homo sapiens
gctttggcagtttcc

SEQ ID NO: 1493650 - DNA, 15 bp, Homo sapiens
ctttggcagtttcca

SEQ ID NO: 1493651 - DNA, 15 bp, Homo sapiens
tttggcagtttccac

SEQ ID NO: 1493652 - DNA, 15 bp, Homo sapiens
ttggcagtttccact

SEQ ID NO: 1493653 - DNA, 15 bp, Homo sapiens
tggcagtttccactg

SEQ ID NO: 1493654 - DNA, 15 bp, Homo sapiens
ggcagtttccactgg

SEQ ID NO: 1493655 - DNA, 15 bp, Homo sapiens
gcagtttccactggt

SEQ ID NO: 1493656 - DNA, 15 bp, Homo sapiens
cagtttccactggtg

SEQ ID NO: 1493657 - DNA, 15 bp, Homo sapiens
agtttccactggtgc

SEQ ID NO: 1493658 - DNA, 15 bp, Homo sapiens
gtttccactggtgcc

SEQ ID NO: 1493659 - DNA, 15 bp, Homo sapiens
tttccactggtgcct

SEQ ID NO: 1493660 - DNA, 15 bp, Homo sapiens
ttccactggtgcctc

SEQ ID NO: 1493661 - DNA, 15 bp, Homo sapiens
tccactggtgcctct

SEQ ID NO: 1493662 - DNA, 15 bp, Homo sapiens
ccactggtgcctctg

SEQ ID NO: 1493663 - DNA, 15 bp, Homo sapiens
cactggtgcctctgt

SEQ ID NO: 1493664 - DNA, 15 bp, Homo sapiens
actggtgcctctgtg

SEQ ID NO: 1493665 - DNA, 15 bp, Homo sapiens
ctggtgcctctgtgc

SEQ ID NO: 1493666 - DNA, 15 bp, Homo sapiens
tggtgcctctgtgct

SEQ ID NO: 1493667 - DNA, 15 bp, Homo sapiens
ggtgcctctgtgctc

SEQ ID NO: 1493668 - DNA, 15 bp, Homo sapiens
gtgcctctgtgctct

SEQ ID NO: 1493669 - DNA, 15 bp, Homo sapiens
tgcctctgtgctctc

SEQ ID NO: 1493670 - DNA, 15 bp, Homo sapiens
gcctctgtgctctct

SEQ ID NO: 1493671 - DNA, 15 bp, Homo sapiens
cctctgtgctctctg

SEQ ID NO: 1493672 - DNA, 15 bp, Homo sapiens
ctctgtgctctctgg

SEQ ID NO: 1493673 - DNA, 15 bp, Homo sapiens
tctgtgctctctggt

SEQ ID NO: 1493674 - DNA, 15 bp, Homo sapiens
ctgtgctctctggtc

SEQ ID NO: 1493675 - DNA, 15 bp, Homo sapiens
tgtgctctctggtca

SEQ ID NO: 1493676 - DNA, 15 bp, Homo sapiens
gtgctctctggtcac

SEQ ID NO: 1493677 - DNA, 15 bp, Homo sapiens
tgctctctggtcacc

SEQ ID NO: 1493678 - DNA, 15 bp, Homo sapiens
gctctctggtcacct

SEQ ID NO: 1493679 - DNA, 15 bp, Homo sapiens
ctctctggtcacctt

SEQ ID NO: 1493680 - DNA, 15 bp, Homo sapiens
tctctggtcaccttt

SEQ ID NO: 1493681 - DNA, 15 bp, Homo sapiens
ctctggtcacctttc

SEQ ID NO: 1493682 - DNA, 15 bp, Homo sapiens
tctggtcacctttcc

SEQ ID NO: 1493683 - DNA, 15 bp, Homo sapiens
ctggtcacctttccg

SEQ ID NO: 1493684 - DNA, 15 bp, Homo sapiens
tggtcacctttccga

SEQ ID NO: 1493685 - DNA, 15 bp, Homo sapiens
ggtcacctttccgag

SEQ ID NO: 1493686 - DNA, 15 bp, Homo sapiens
gtcacctttccgagg

SEQ ID NO: 1493687 - DNA, 15 bp, Homo sapiens
tcacctttccgaggc

SEQ ID NO: 1493688 - DNA, 15 bp, Homo sapiens
cacctttccgaggcg

SEQ ID NO: 1493689 - DNA, 15 bp, Homo sapiens
acctttccgaggcgt

SEQ ID NO: 1493690 - DNA, 15 bp, Homo sapiens
cctttccgaggcgtc

SEQ ID NO: 1493691 - DNA, 15 bp, Homo sapiens
ctttccgaggcgtct

SEQ ID NO: 1493692 - DNA, 15 bp, Homo sapiens
tttccgaggcgtctg

SEQ ID NO: 1493693 - DNA, 15 bp, Homo sapiens
ttccgaggcgtctgg

SEQ ID NO: 1493694 - DNA, 15 bp, Homo sapiens
tccgaggcgtctggt

SEQ ID NO: 1493695 - DNA, 15 bp, Homo sapiens
ccgaggcgtctggta

SEQ ID NO: 1493696 - DNA, 15 bp, Homo sapiens
cgaggcgtctggtaa

SEQ ID NO: 1493697 - DNA, 15 bp, Homo sapiens
gaggcgtctggtaac

SEQ ID NO: 1493698 - DNA, 15 bp, Homo sapiens
aggcgtctggtaact

SEQ ID NO: 1493699 - DNA, 15 bp, Homo sapiens
ggcgtctggtaacta

SEQ ID NO: 1493700 - DNA, 15 bp, Homo sapiens
gcgtctggtaactag

SEQ ID NO: 1493701 - DNA, 15 bp, Homo sapiens
cgtctggtaactagt

SEQ ID NO: 1493702 - DNA, 15 bp, Homo sapiens
gtctggtaactagtg

SEQ ID NO: 1493703 - DNA, 15 bp, Homo sapiens
tctggtaactagtgc

SEQ ID NO: 1493704 - DNA, 15 bp, Homo sapiens
ctggtaactagtgcg

SEQ ID NO: 1493705 - DNA, 15 bp, Homo sapiens
tggtaactagtgcga

SEQ ID NO: 1493706 - DNA, 15 bp, Homo sapiens
ggtaactagtgcgag

SEQ ID NO: 1493707 - DNA, 15 bp, Homo sapiens
gtaactagtgcgaga

SEQ ID NO: 1493708 - DNA, 15 bp, Homo sapiens
taactagtgcgagaa

SEQ ID NO: 1493709 - DNA, 15 bp, Homo sapiens
aactagtgcgagaaa

SEQ ID NO: 1493710 - DNA, 15 bp, Homo sapiens
actagtgcgagaaag

SEQ ID NO: 1493711 - DNA, 15 bp, Homo sapiens
ctagtgcgagaaagt

SEQ ID NO: 1493712 - DNA, 15 bp, Homo sapiens
tagtgcgagaaagta

SEQ ID NO: 1493713 - DNA, 15 bp, Homo sapiens
agtgcgagaaagtag

SEQ ID NO: 1493714 - DNA, 15 bp, Homo sapiens
gtgcgagaaagtaga

SEQ ID NO: 1493715 - DNA, 15 bp, Homo sapiens
tgcgagaaagtagat

SEQ ID NO: 1493716 - DNA, 15 bp, Homo sapiens
gcgagaaagtagatg

SEQ ID NO: 1493717 - DNA, 15 bp, Homo sapiens
cgagaaagtagatga

SEQ ID NO: 1493718 - DNA, 15 bp, Homo sapiens
gagaaagtagatgat

SEQ ID NO: 1493719 - DNA, 15 bp, Homo sapiens
agaaagtagatgatg

SEQ ID NO: 1493720 - DNA, 15 bp, Homo sapiens
gaaagtagatgatgc

SEQ ID NO: 1493721 - DNA, 15 bp, Homo sapiens
aaagtagatgatgca

SEQ ID NO: 1493722 - DNA, 15 bp, Homo sapiens
aagtagatgatgcag

SEQ ID NO: 1493723 - DNA, 15 bp, Homo sapiens
agtagatgatgcagt

SEQ ID NO: 1493724 - DNA, 15 bp, Homo sapiens
gtagatgatgcagta

SEQ ID NO: 1493725 - DNA, 15 bp, Homo sapiens
tagatgatgcagtat

SEQ ID NO: 1493726 - DNA, 15 bp, Homo sapiens
agatgatgcagtatt

SEQ ID NO: 1493727 - DNA, 15 bp, Homo sapiens
gatgatgcagtattt

SEQ ID NO: 1493728 - DNA, 15 bp, Homo sapiens
atgatgcagtatttg

SEQ ID NO: 1493729 - DNA, 15 bp, Homo sapiens
tgatgcagtatttgt

SEQ ID NO: 1493730 - DNA, 15 bp, Homo sapiens
gatgcagtatttgtt

SEQ ID NO: 1493731 - DNA, 15 bp, Homo sapiens
atgcagtatttgtta

SEQ ID NO: 1493732 - DNA, 15 bp, Homo sapiens
tgcagtatttgttag

SEQ ID NO: 1493733 - DNA, 15 bp, Homo sapiens
gcagtatttgttagc

SEQ ID NO: 1493734 - DNA, 15 bp, Homo sapiens
cagtatttgttagct

SEQ ID NO: 1493735 - DNA, 15 bp, Homo sapiens
agtatttgttagctc

SEQ ID NO: 1493736 - DNA, 15 bp, Homo sapiens
gtatttgttagctcc

SEQ ID NO: 1493737 - DNA, 15 bp, Homo sapiens
tatttgttagctccg

SEQ ID NO: 1493738 - DNA, 15 bp, Homo sapiens
atttgttagctccgg

SEQ ID NO: 1493739 - DNA, 15 bp, Homo sapiens
tttgttagctccgga

SEQ ID NO: 1493740 - DNA, 15 bp, Homo sapiens
ttgttagctccggag

SEQ ID NO: 1493741 - DNA, 15 bp, Homo sapiens
tgttagctccggagc

SEQ ID NO: 1493742 - DNA, 15 bp, Homo sapiens
gttagctccggagca

SEQ ID NO: 1493743 - DNA, 15 bp, Homo sapiens
ttagctccggagcaa

SEQ ID NO: 1493744 - DNA, 15 bp, Homo sapiens
tagctccggagcaat

SEQ ID NO: 1493745 - DNA, 15 bp, Homo sapiens
agctccggagcaatt

SEQ ID NO: 1493746 - DNA, 15 bp, Homo sapiens
gctccggagcaatta

SEQ ID NO: 1493747 - DNA, 15 bp, Homo sapiens
ctccggagcaattac

SEQ ID NO: 1493748 - DNA, 15 bp, Homo sapiens
tccggagcaattacc

SEQ ID NO: 1493749 - DNA, 15 bp, Homo sapiens
ccggagcaattacct

SEQ ID NO: 1493750 - DNA, 15 bp, Homo sapiens
cggagcaattacctc

SEQ ID NO: 1493751 - DNA, 15 bp, Homo sapiens
ggagcaattacctca

SEQ ID NO: 1493752 - DNA, 15 bp, Homo sapiens
gagcaattacctcat

SEQ ID NO: 1493753 - DNA, 15 bp, Homo sapiens
agcaattacctcatg

SEQ ID NO: 1493754 - DNA, 15 bp, Homo sapiens
gcaattacctcatgt

SEQ ID NO: 1493755 - DNA, 15 bp, Homo sapiens
caattacctcatgtc

SEQ ID NO: 1493756 - DNA, 15 bp, Homo sapiens
aattacctcatgtct

SEQ ID NO: 1493757 - DNA, 15 bp, Homo sapiens
attacctcatgtctg

SEQ ID NO: 1493758 - DNA, 15 bp, Homo sapiens
ttacctcatgtctga

SEQ ID NO: 1493759 - DNA, 15 bp, Homo sapiens
tacctcatgtctgag

SEQ ID NO: 1493760 - DNA, 15 bp, Homo sapiens
acctcatgtctgagt

SEQ ID NO: 1493761 - DNA, 15 bp, Homo sapiens
cctcatgtctgagtc

SEQ ID NO: 1493762 - DNA, 15 bp, Homo sapiens
ctcatgtctgagtct

SEQ ID NO: 1493763 - DNA, 15 bp, Homo sapiens
tcatgtctgagtctt

SEQ ID NO: 1493764 - DNA, 15 bp, Homo sapiens
catgtctgagtcttg

SEQ ID NO: 1493765 - DNA, 15 bp, Homo sapiens
atgtctgagtcttgc

SEQ ID NO: 1493766 - DNA, 15 bp, Homo sapiens
tgtctgagtcttgct

SEQ ID NO: 1493767 - DNA, 15 bp, Homo sapiens
gtctgagtcttgctg

SEQ ID NO: 1493768 - DNA, 15 bp, Homo sapiens
tctgagtcttgctgc

SEQ ID NO: 1493769 - DNA, 15 bp, Homo sapiens
ctgagtcttgctgca

SEQ ID NO: 1493770 - DNA, 15 bp, Homo sapiens
tgagtcttgctgcaa

SEQ ID NO: 1493771 - DNA, 15 bp, Homo sapiens
gagtcttgctgcaac

SEQ ID NO: 1493772 - DNA, 15 bp, Homo sapiens
agtcttgctgcaaca

SEQ ID NO: 1493773 - DNA, 15 bp, Homo sapiens
gtcttgctgcaacat

SEQ ID NO: 1493774 - DNA, 15 bp, Homo sapiens
tcttgctgcaacatg

SEQ ID NO: 1493775 - DNA, 15 bp, Homo sapiens
cttgctgcaacatga

SEQ ID NO: 1493776 - DNA, 15 bp, Homo sapiens
ttgctgcaacatgag

SEQ ID NO: 1493777 - DNA, 15 bp, Homo sapiens
tgctgcaacatgagg

SEQ ID NO: 1493778 - DNA, 15 bp, Homo sapiens
gctgcaacatgaggt

SEQ ID NO: 1493779 - DNA, 15 bp, Homo sapiens
ctgcaacatgaggtc

SEQ ID NO: 1493780 - DNA, 15 bp, Homo sapiens
tgcaacatgaggtca

SEQ ID NO: 1493781 - DNA, 15 bp, Homo sapiens
gcaacatgaggtcag

SEQ ID NO: 1493782 - DNA, 15 bp, Homo sapiens
caacatgaggtcagc

SEQ ID NO: 1493783 - DNA, 15 bp, Homo sapiens
aacatgaggtcagcc

SEQ ID NO: 1493784 - DNA, 15 bp, Homo sapiens
acatgaggtcagccc

SEQ ID NO: 1493785 - DNA, 15 bp, Homo sapiens
catgaggtcagccca

SEQ ID NO: 1493786 - DNA, 15 bp, Homo sapiens
atgaggtcagcccaa

SEQ ID NO: 1493787 - DNA, 15 bp, Homo sapiens
tgaggtcagcccaag

SEQ ID NO: 1493788 - DNA, 15 bp, Homo sapiens
gaggtcagcccaaga

SEQ ID NO: 1493789 - DNA, 15 bp, Homo sapiens
aggtcagcccaagaa

SEQ ID NO: 1493790 - DNA, 15 bp, Homo sapiens
ggtcagcccaagaaa

SEQ ID NO: 1493791 - DNA, 15 bp, Homo sapiens
gtcagcccaagaaac

SEQ ID NO: 1493792 - DNA, 15 bp, Homo sapiens
tcagcccaagaaaca

SEQ ID NO: 1493793 - DNA, 15 bp, Homo sapiens
cagcccaagaaacaa

SEQ ID NO: 1493794 - DNA, 15 bp, Homo sapiens
agcccaagaaacaat

SEQ ID NO: 1493795 - DNA, 15 bp, Homo sapiens
gcccaagaaacaatt

SEQ ID NO: 1493796 - DNA, 15 bp, Homo sapiens
cccaagaaacaattt

SEQ ID NO: 1493797 - DNA, 15 bp, Homo sapiens
ccaagaaacaatttc

SEQ ID NO: 1493798 - DNA, 15 bp, Homo sapiens
caagaaacaatttca

SEQ ID NO: 1493799 - DNA, 15 bp, Homo sapiens
aagaaacaatttcaa

SEQ ID NO: 1493800 - DNA, 15 bp, Homo sapiens
agaaacaatttcaaa

SEQ ID NO: 1493801 - DNA, 15 bp, Homo sapiens
gaaacaatttcaaaa

SEQ ID NO: 1493802 - DNA, 15 bp, Homo sapiens
aaacaatttcaaaaa

SEQ ID NO: 1493803 - DNA, 15 bp, Homo sapiens
aacaatttcaaaaaa

SEQ ID NO: 1493804 - DNA, 15 bp, Homo sapiens
acaatttcaaaaaag

SEQ ID NO: 1493805 - DNA, 15 bp, Homo sapiens
caatttcaaaaaagg

SEQ ID NO: 1493806 - DNA, 15 bp, Homo sapiens
aatttcaaaaaaggg

SEQ ID NO: 1493807 - DNA, 15 bp, Homo sapiens
atttcaaaaaagggg

SEQ ID NO: 1493808 - DNA, 15 bp, Homo sapiens
tttcaaaaaagggga

SEQ ID NO: 1493809 - DNA, 15 bp, Homo sapiens
ttcaaaaaaggggac

SEQ ID NO: 1493810 - DNA, 15 bp, Homo sapiens
tcaaaaaaggggaca

SEQ ID NO: 1493811 - DNA, 15 bp, Homo sapiens
caaaaaaggggacaa

SEQ ID NO: 1493812 - DNA, 15 bp, Homo sapiens
aaaaaaggggacaat

SEQ ID NO: 1493813 - DNA, 15 bp, Homo sapiens
aaaaaggggacaatt

SEQ ID NO: 1493814 - DNA, 15 bp, Homo sapiens
aaaaggggacaattt

SEQ ID NO: 1493815 - DNA, 15 bp, Homo sapiens
aaaggggacaatttt

SEQ ID NO: 1493816 - DNA, 15 bp, Homo sapiens
aaggggacaattttc

SEQ ID NO: 1493817 - DNA, 15 bp, Homo sapiens
aggggacaattttcc

SEQ ID NO: 1493818 - DNA, 15 bp, Homo sapiens
ggggacaattttcca

SEQ ID NO: 1493819 - DNA, 15 bp, Homo sapiens
gggacaattttccac

SEQ ID NO: 1493820 - DNA, 15 bp, Homo sapiens
ggacaattttccacc

SEQ ID NO: 1493821 - DNA, 15 bp, Homo sapiens
gacaattttccaccc

SEQ ID NO: 1493822 - DNA, 15 bp, Homo sapiens
acaattttccaccca

SEQ ID NO: 1493823 - DNA, 15 bp, Homo sapiens
caattttccacccag

SEQ ID NO: 1493824 - DNA, 15 bp, Homo sapiens
aattttccacccagt

SEQ ID NO: 1493825 - DNA, 15 bp, Homo sapiens
attttccacccagtt

SEQ ID NO: 1493826 - DNA, 15 bp, Homo sapiens
ttttccacccagttt

SEQ ID NO: 1493827 - DNA, 15 bp, Homo sapiens
tttccacccagtttt

SEQ ID NO: 1493828 - DNA, 15 bp, Homo sapiens
ttccacccagttttt

SEQ ID NO: 1493829 - DNA, 15 bp, Homo sapiens
tccacccagtttttc

SEQ ID NO: 1493830 - DNA, 15 bp, Homo sapiens
ccacccagtttttca

SEQ ID NO: 1493831 - DNA, 15 bp, Homo sapiens
cacccagtttttcag

SEQ ID NO: 1493832 - DNA, 15 bp, Homo sapiens
acccagtttttcaga

SEQ ID NO: 1493833 - DNA, 15 bp, Homo sapiens
cccagtttttcagag

SEQ ID NO: 1493834 - DNA, 15 bp, Homo sapiens
ccagtttttcagagc

SEQ ID NO: 1493835 - DNA, 15 bp, Homo sapiens
cagtttttcagagct

SEQ ID NO: 1493836 - DNA, 15 bp, Homo sapiens
agtttttcagagctt

SEQ ID NO: 1493837 - DNA, 15 bp, Homo sapiens
gtttttcagagcttt

SEQ ID NO: 1493838 - DNA, 15 bp, Homo sapiens
ttttcagagctttgg

SEQ ID NO: 1493839 - DNA, 15 bp, Homo sapiens
tttcagagctttgga

SEQ ID NO: 1493840 - DNA, 15 bp, Homo sapiens
ttcagagctttggat

SEQ ID NO: 1493841 - DNA, 15 bp, Homo sapiens
tcagagctttggata

SEQ ID NO: 1493842 - DNA, 15 bp, Homo sapiens
cagagctttggataa

SEQ ID NO: 1493843 - DNA, 15 bp, Homo sapiens
agagctttggataat

SEQ ID NO: 1493844 - DNA, 15 bp, Homo sapiens
gagctttggataatt

SEQ ID NO: 1493845 - DNA, 15 bp, Homo sapiens
agctttggataatta

SEQ ID NO: 1493846 - DNA, 15 bp, Homo sapiens
gctttggataattag

SEQ ID NO: 1493847 - DNA, 15 bp, Homo sapiens
ctttggataattagc

SEQ ID NO: 1493848 - DNA, 15 bp, Homo sapiens
tttggataattagca

SEQ ID NO: 1493849 - DNA, 15 bp, Homo sapiens
ttggataattagcac

SEQ ID NO: 1493850 - DNA, 15 bp, Homo sapiens
tggataattagcact

SEQ ID NO: 1493851 - DNA, 15 bp, Homo sapiens
ggataattagcactt

SEQ ID NO: 1493852 - DNA, 15 bp, Homo sapiens
gataattagcacttt

SEQ ID NO: 1493853 - DNA, 15 bp, Homo sapiens
ataattagcactttc

SEQ ID NO: 1493854 - DNA, 15 bp, Homo sapiens
taattagcactttct

SEQ ID NO: 1493855 - DNA, 15 bp, Homo sapiens
aattagcactttcta

SEQ ID NO: 1493856 - DNA, 15 bp, Homo sapiens
attagcactttctaa

SEQ ID NO: 1493857 - DNA, 15 bp, Homo sapiens
ttagcactttctaat

SEQ ID NO: 1493858 - DNA, 15 bp, Homo sapiens
tagcactttctaatt

SEQ ID NO: 1493859 - DNA, 15 bp, Homo sapiens
agcactttctaattc

SEQ ID NO: 1493860 - DNA, 15 bp, Homo sapiens
gcactttctaattca

SEQ ID NO: 1493861 - DNA, 15 bp, Homo sapiens
cactttctaattcat

SEQ ID NO: 1493862 - DNA, 15 bp, Homo sapiens
actttctaattcata

SEQ ID NO: 1493863 - DNA, 15 bp, Homo sapiens
ctttctaattcatat

SEQ ID NO: 1493864 - DNA, 15 bp, Homo sapiens
tttctaattcatatt

SEQ ID NO: 1493865 - DNA, 15 bp, Homo sapiens
ttctaattcatattt

SEQ ID NO: 1493866 - DNA, 15 bp, Homo sapiens
tctaattcatatttt

SEQ ID NO: 1493867 - DNA, 15 bp, Homo sapiens
ctaattcatattttc

SEQ ID NO: 1493868 - DNA, 15 bp, Homo sapiens
taattcatattttca

SEQ ID NO: 1493869 - DNA, 15 bp, Homo sapiens
aattcatattttcag

SEQ ID NO: 1493870 - DNA, 15 bp, Homo sapiens
attcatattttcagc

SEQ ID NO: 1493871 - DNA, 15 bp, Homo sapiens
ttcatattttcagct

SEQ ID NO: 1493872 - DNA, 15 bp, Homo sapiens
tcatattttcagctt

SEQ ID NO: 1493873 - DNA, 15 bp, Homo sapiens
catattttcagcttt

SEQ ID NO: 1493874 - DNA, 15 bp, Homo sapiens
atattttcagctttt

SEQ ID NO: 1493875 - DNA, 15 bp, Homo sapiens
tattttcagctttta

SEQ ID NO: 1493876 - DNA, 15 bp, Homo sapiens
attttcagcttttaa

SEQ ID NO: 1493877 - DNA, 15 bp, Homo sapiens
ttttcagcttttaac

SEQ ID NO: 1493878 - DNA, 15 bp, Homo sapiens
tttcagcttttaact

SEQ ID NO: 1493879 - DNA, 15 bp, Homo sapiens
ttcagcttttaactg

SEQ ID NO: 1493880 - DNA, 15 bp, Homo sapiens
tcagcttttaactgt

SEQ ID NO: 1493881 - DNA, 15 bp, Homo sapiens
cagcttttaactgtt

SEQ ID NO: 1493882 - DNA, 15 bp, Homo sapiens
agcttttaactgttt

SEQ ID NO: 1493883 - DNA, 15 bp, Homo sapiens
gcttttaactgtttg

SEQ ID NO: 1493884 - DNA, 15 bp, Homo sapiens
cttttaactgtttgt

SEQ ID NO: 1493885 - DNA, 15 bp, Homo sapiens
ttttaactgtttgtg

SEQ ID NO: 1493886 - DNA, 15 bp, Homo sapiens
tttaactgtttgtgg

SEQ ID NO: 1493887 - DNA, 15 bp, Homo sapiens
ttaactgtttgtgga

SEQ ID NO: 1493888 - DNA, 15 bp, Homo sapiens
taactgtttgtggaa

SEQ ID NO: 1493889 - DNA, 15 bp, Homo sapiens
aactgtttgtggaat

SEQ ID NO: 1493890 - DNA, 15 bp, Homo sapiens
actgtttgtggaatt

SEQ ID NO: 1493891 - DNA, 15 bp, Homo sapiens
ctgtttgtggaattt

SEQ ID NO: 1493892 - DNA, 15 bp, Homo sapiens
tgtttgtggaatttt

SEQ ID NO: 1493893 - DNA, 15 bp, Homo sapiens
gtttgtggaatttta

SEQ ID NO: 1493894 - DNA, 15 bp, Homo sapiens
tttgtggaattttaa

SEQ ID NO: 1493895 - DNA, 15 bp, Homo sapiens
ttgtggaattttaaa

SEQ ID NO: 1493896 - DNA, 15 bp, Homo sapiens
tgtggaattttaaaa

SEQ ID NO: 1493897 - DNA, 15 bp, Homo sapiens
gtggaattttaaaaa

SEQ ID NO: 1493898 - DNA, 15 bp, Homo sapiens
tggaattttaaaaaa

SEQ ID NO: 1493899 - DNA, 15 bp, Homo sapiens
ggaattttaaaaaat

SEQ ID NO: 1493900 - DNA, 15 bp, Homo sapiens
gaattttaaaaaata

SEQ ID NO: 1493901 - DNA, 15 bp, Homo sapiens
ttttaaaaaataagg

SEQ ID NO: 1493902 - DNA, 15 bp, Homo sapiens
tttaaaaaataagga

SEQ ID NO: 1493903 - DNA, 15 bp, Homo sapiens
ttaaaaaataaggat

SEQ ID NO: 1493904 - DNA, 15 bp, Homo sapiens
taaaaaataaggatc

SEQ ID NO: 1493905 - DNA, 15 bp, Homo sapiens
aaaaaataaggatct

SEQ ID NO: 1493906 - DNA, 15 bp, Homo sapiens
aaaaataaggatctt

SEQ ID NO: 1493907 - DNA, 15 bp, Homo sapiens
aaaataaggatcttt

SEQ ID NO: 1493908 - DNA, 15 bp, Homo sapiens
aaataaggatctttg

SEQ ID NO: 1493909 - DNA, 15 bp, Homo sapiens
aataaggatctttga

SEQ ID NO: 1493910 - DNA, 15 bp, Homo sapiens
ataaggatctttgaa

SEQ ID NO: 1493911 - DNA, 15 bp, Homo sapiens
taaggatctttgaac

SEQ ID NO: 1493912 - DNA, 15 bp, Homo sapiens
aaggatctttgaaca

SEQ ID NO: 1493913 - DNA, 15 bp, Homo sapiens
aggatctttgaacag

SEQ ID NO: 1493914 - DNA, 15 bp, Homo sapiens
ggatctttgaacaga

SEQ ID NO: 1493915 - DNA, 15 bp, Homo sapiens
gatctttgaacagag

SEQ ID NO: 1493916 - DNA, 15 bp, Homo sapiens
atctttgaacagagt

SEQ ID NO: 1493917 - DNA, 15 bp, Homo sapiens
tctttgaacagagtc

SEQ ID NO: 1493918 - DNA, 15 bp, Homo sapiens
ctttgaacagagtcc

SEQ ID NO: 1493919 - DNA, 15 bp, Homo sapiens
tttgaacagagtcct

SEQ ID NO: 1493920 - DNA, 15 bp, Homo sapiens
ttgaacagagtcctg

SEQ ID NO: 1493921 - DNA, 15 bp, Homo sapiens
tgaacagagtcctgc

SEQ ID NO: 1493922 - DNA, 15 bp, Homo sapiens
gaacagagtcctgca

SEQ ID NO: 1493923 - DNA, 15 bp, Homo sapiens
aacagagtcctgcag

SEQ ID NO: 1493924 - DNA, 15 bp, Homo sapiens
acagagtcctgcagt

SEQ ID NO: 1493925 - DNA, 15 bp, Homo sapiens
cagagtcctgcagtg

SEQ ID NO: 1493926 - DNA, 15 bp, Homo sapiens
agagtcctgcagtga

SEQ ID NO: 1493927 - DNA, 15 bp, Homo sapiens
gagtcctgcagtgat

SEQ ID NO: 1493928 - DNA, 15 bp, Homo sapiens
agtcctgcagtgatc

SEQ ID NO: 1493929 - DNA, 15 bp, Homo sapiens
gtcctgcagtgatct

SEQ ID NO: 1493930 - DNA, 15 bp, Homo sapiens
tcctgcagtgatcta

SEQ ID NO: 1493931 - DNA, 15 bp, Homo sapiens
cctgcagtgatctag

SEQ ID NO: 1493932 - DNA, 15 bp, Homo sapiens
ctgcagtgatctagg

SEQ ID NO: 1493933 - DNA, 15 bp, Homo sapiens
tgcagtgatctaggc

SEQ ID NO: 1493934 - DNA, 15 bp, Homo sapiens
gcagtgatctaggca

SEQ ID NO: 1493935 - DNA, 15 bp, Homo sapiens
cagtgatctaggcag

SEQ ID NO: 1493936 - DNA, 15 bp, Homo sapiens
agtgatctaggcagg

SEQ ID NO: 1493937 - DNA, 15 bp, Homo sapiens
gtgatctaggcaggc

SEQ ID NO: 1493938 - DNA, 15 bp, Homo sapiens
tgatctaggcaggcc

SEQ ID NO: 1493939 - DNA, 15 bp, Homo sapiens
gatctaggcaggcca

SEQ ID NO: 1493940 - DNA, 15 bp, Homo sapiens
atctaggcaggccag

SEQ ID NO: 1493941 - DNA, 15 bp, Homo sapiens
tctaggcaggccagg

SEQ ID NO: 1493942 - DNA, 15 bp, Homo sapiens
ctaggcaggccaggg

SEQ ID NO: 1493943 - DNA, 15 bp, Homo sapiens
taggcaggccagggt

SEQ ID NO: 1493944 - DNA, 15 bp, Homo sapiens
aggcaggccagggtg

SEQ ID NO: 1493945 - DNA, 15 bp, Homo sapiens
ggcaggccagggtgg

SEQ ID NO: 1493946 - DNA, 15 bp, Homo sapiens
gcaggccagggtggg

SEQ ID NO: 1493947 - DNA, 15 bp, Homo sapiens
caggccagggtgggt

SEQ ID NO: 1493948 - DNA, 15 bp, Homo sapiens
aggccagggtgggtg

SEQ ID NO: 1493949 - DNA, 15 bp, Homo sapiens
ggccagggtgggtgt

SEQ ID NO: 1493950 - DNA, 15 bp, Homo sapiens
gccagggtgggtgtg

SEQ ID NO: 1493951 - DNA, 15 bp, Homo sapiens
ccagggtgggtgtgt

SEQ ID NO: 1493952 - DNA, 15 bp, Homo sapiens
cagggtgggtgtgtg

SEQ ID NO: 1493953 - DNA, 15 bp, Homo sapiens
agggtgggtgtgtgg

SEQ ID NO: 1493954 - DNA, 15 bp, Homo sapiens
gggtgggtgtgtgga

SEQ ID NO: 1493955 - DNA, 15 bp, Homo sapiens
ggtgggtgtgtggag

SEQ ID NO: 1493956 - DNA, 15 bp, Homo sapiens
gtgggtgtgtggagg

SEQ ID NO: 1493957 - DNA, 15 bp, Homo sapiens
tgggtgtgtggaggt

SEQ ID NO: 1493958 - DNA, 15 bp, Homo sapiens
gggtgtgtggaggtt

SEQ ID NO: 1493959 - DNA, 15 bp, Homo sapiens
ggtgtgtggaggtta

SEQ ID NO: 1493960 - DNA, 15 bp, Homo sapiens
gtgtgtggaggttag

SEQ ID NO: 1493961 - DNA, 15 bp, Homo sapiens
tgtgtggaggttagc

SEQ ID NO: 1493962 - DNA, 15 bp, Homo sapiens
gtgtggaggttagca

SEQ ID NO: 1493963 - DNA, 15 bp, Homo sapiens
tgtggaggttagcat

SEQ ID NO: 1493964 - DNA, 15 bp, Homo sapiens
gtggaggttagcatg

SEQ ID NO: 1493965 - DNA, 15 bp, Homo sapiens
tggaggttagcatga

SEQ ID NO: 1493966 - DNA, 15 bp, Homo sapiens
ggaggttagcatgag

SEQ ID NO: 1493967 - DNA, 15 bp, Homo sapiens
gaggttagcatgaga

SEQ ID NO: 1493968 - DNA, 15 bp, Homo sapiens
aggttagcatgagaa

SEQ ID NO: 1493969 - DNA, 15 bp, Homo sapiens
ggttagcatgagaag

SEQ ID NO: 1493970 - DNA, 15 bp, Homo sapiens
gttagcatgagaagg

SEQ ID NO: 1493971 - DNA, 15 bp, Homo sapiens
ttagcatgagaagga

SEQ ID NO: 1493972 - DNA, 15 bp, Homo sapiens
tagcatgagaaggag

SEQ ID NO: 1493973 - DNA, 15 bp, Homo sapiens
agcatgagaaggaga

SEQ ID NO: 1493974 - DNA, 15 bp, Homo sapiens
gcatgagaaggagag

SEQ ID NO: 1493975 - DNA, 15 bp, Homo sapiens
catgagaaggagaga

SEQ ID NO: 1493976 - DNA, 15 bp, Homo sapiens
atgagaaggagagac

SEQ ID NO: 1493977 - DNA, 15 bp, Homo sapiens
tgagaaggagagacc

SEQ ID NO: 1493978 - DNA, 15 bp, Homo sapiens
gagaaggagagacca

SEQ ID NO: 1493979 - DNA, 15 bp, Homo sapiens
agaaggagagaccag

SEQ ID NO: 1493980 - DNA, 15 bp, Homo sapiens
gaaggagagaccagc

SEQ ID NO: 1493981 - DNA, 15 bp, Homo sapiens
aaggagagaccagca

SEQ ID NO: 1493982 - DNA, 15 bp, Homo sapiens
aggagagaccagcaa

SEQ ID NO: 1493983 - DNA, 15 bp, Homo sapiens
ggagagaccagcaaa

SEQ ID NO: 1493984 - DNA, 15 bp, Homo sapiens
gagagaccagcaaag

SEQ ID NO: 1493985 - DNA, 15 bp, Homo sapiens
agagaccagcaaagc

SEQ ID NO: 1493986 - DNA, 15 bp, Homo sapiens
gagaccagcaaagca

SEQ ID NO: 1493987 - DNA, 15 bp, Homo sapiens
agaccagcaaagcaa

SEQ ID NO: 1493988 - DNA, 15 bp, Homo sapiens
gaccagcaaagcaac

SEQ ID NO: 1493989 - DNA, 15 bp, Homo sapiens
accagcaaagcaacc

SEQ ID NO: 1493990 - DNA, 15 bp, Homo sapiens
ccagcaaagcaacct

SEQ ID NO: 1493991 - DNA, 15 bp, Homo sapiens
cagcaaagcaacctg

SEQ ID NO: 1493992 - DNA, 15 bp, Homo sapiens
agcaaagcaacctga

SEQ ID NO: 1493993 - DNA, 15 bp, Homo sapiens
gcaaagcaacctgat

SEQ ID NO: 1493994 - DNA, 15 bp, Homo sapiens
caaagcaacctgatt

SEQ ID NO: 1493995 - DNA, 15 bp, Homo sapiens
aaagcaacctgattc

SEQ ID NO: 1493996 - DNA, 15 bp, Homo sapiens
aagcaacctgattcc

SEQ ID NO: 1493997 - DNA, 15 bp, Homo sapiens
agcaacctgattcca

SEQ ID NO: 1493998 - DNA, 15 bp, Homo sapiens
gcaacctgattccag

SEQ ID NO: 1493999 - DNA, 15 bp, Homo sapiens
caacctgattccagc

SEQ ID NO: 1494000 - DNA, 15 bp, Homo sapiens
aacctgattccagca

SEQ ID NO: 1494001 - DNA, 15 bp, Homo sapiens
acctgattccagcag

SEQ ID NO: 1494002 - DNA, 15 bp, Homo sapiens
cctgattccagcagg

SEQ ID NO: 1494003 - DNA, 15 bp, Homo sapiens
ctgattccagcagga

SEQ ID NO: 1494004 - DNA, 15 bp, Homo sapiens
tgattccagcaggag

SEQ ID NO: 1494005 - DNA, 15 bp, Homo sapiens
gattccagcaggagt

SEQ ID NO: 1494006 - DNA, 15 bp, Homo sapiens
attccagcaggagtt

SEQ ID NO: 1494007 - DNA, 15 bp, Homo sapiens
ttccagcaggagttt

SEQ ID NO: 1494008 - DNA, 15 bp, Homo sapiens
tccagcaggagtttg

SEQ ID NO: 1494009 - DNA, 15 bp, Homo sapiens
ccagcaggagtttgc

SEQ ID NO: 1494010 - DNA, 15 bp, Homo sapiens
cagcaggagtttgca

SEQ ID NO: 1494011 - DNA, 15 bp, Homo sapiens
agcaggagtttgcag

SEQ ID NO: 1494012 - DNA, 15 bp, Homo sapiens
gcaggagtttgcagg

SEQ ID NO: 1494013 - DNA, 15 bp, Homo sapiens
caggagtttgcagga

SEQ ID NO: 1494014 - DNA, 15 bp, Homo sapiens
aggagtttgcaggaa

SEQ ID NO: 1494015 - DNA, 15 bp, Homo sapiens
ggagtttgcaggaac

SEQ ID NO: 1494016 - DNA, 15 bp, Homo sapiens
gagtttgcaggaacc

SEQ ID NO: 1494017 - DNA, 15 bp, Homo sapiens
agtttgcaggaaccc

SEQ ID NO: 1494018 - DNA, 15 bp, Homo sapiens
gtttgcaggaaccct

SEQ ID NO: 1494019 - DNA, 15 bp, Homo sapiens
tttgcaggaacccta

SEQ ID NO: 1494020 - DNA, 15 bp, Homo sapiens
ttgcaggaaccctaa

SEQ ID NO: 1494021 - DNA, 15 bp, Homo sapiens
tgcaggaaccctaag

SEQ ID NO: 1494022 - DNA, 15 bp, Homo sapiens
gcaggaaccctaagc

SEQ ID NO: 1494023 - DNA, 15 bp, Homo sapiens
caggaaccctaagcc

SEQ ID NO: 1494024 - DNA, 15 bp, Homo sapiens
aggaaccctaagccc

SEQ ID NO: 1494025 - DNA, 15 bp, Homo sapiens
ggaaccctaagccct

SEQ ID NO: 1494026 - DNA, 15 bp, Homo sapiens
gaaccctaagccctt

SEQ ID NO: 1494027 - DNA, 15 bp, Homo sapiens
aaccctaagcccttt

SEQ ID NO: 1494028 - DNA, 15 bp, Homo sapiens
accctaagccctttc

SEQ ID NO: 1494029 - DNA, 15 bp, Homo sapiens
ccctaagccctttcc

SEQ ID NO: 1494030 - DNA, 15 bp, Homo sapiens
cctaagccctttcct

SEQ ID NO: 1494031 - DNA, 15 bp, Homo sapiens
ctaagccctttcctt

SEQ ID NO: 1494032 - DNA, 15 bp, Homo sapiens
taagccctttccttc

SEQ ID NO: 1494033 - DNA, 15 bp, Homo sapiens
aagccctttccttca

SEQ ID NO: 1494034 - DNA, 15 bp, Homo sapiens
agccctttccttcat

SEQ ID NO: 1494035 - DNA, 15 bp, Homo sapiens
gccctttccttcatt

SEQ ID NO: 1494036 - DNA, 15 bp, Homo sapiens
ccctttccttcattt

SEQ ID NO: 1494037 - DNA, 15 bp, Homo sapiens
cctttccttcatttg

SEQ ID NO: 1494038 - DNA, 15 bp, Homo sapiens
ctttccttcatttgc

SEQ ID NO: 1494039 - DNA, 15 bp, Homo sapiens
tttccttcatttgcc

SEQ ID NO: 1494040 - DNA, 15 bp, Homo sapiens
ttccttcatttgcca

SEQ ID NO: 1494041 - DNA, 15 bp, Homo sapiens
tccttcatttgccag

SEQ ID NO: 1494042 - DNA, 15 bp, Homo sapiens
ccttcatttgccagg

SEQ ID NO: 1494043 - DNA, 15 bp, Homo sapiens
cttcatttgccagga

SEQ ID NO: 1494044 - DNA, 15 bp, Homo sapiens
ttcatttgccaggag

SEQ ID NO: 1494045 - DNA, 15 bp, Homo sapiens
tcatttgccaggagt

SEQ ID NO: 1494046 - DNA, 15 bp, Homo sapiens
catttgccaggagta

SEQ ID NO: 1494047 - DNA, 15 bp, Homo sapiens
atttgccaggagtag

SEQ ID NO: 1494048 - DNA, 15 bp, Homo sapiens
tttgccaggagtaga

SEQ ID NO: 1494049 - DNA, 15 bp, Homo sapiens
ttgccaggagtagag

SEQ ID NO: 1494050 - DNA, 15 bp, Homo sapiens
tgccaggagtagaga

SEQ ID NO: 1494051 - DNA, 15 bp, Homo sapiens
gccaggagtagagag

SEQ ID NO: 1494052 - DNA, 15 bp, Homo sapiens
ccaggagtagagagg

SEQ ID NO: 1494053 - DNA, 15 bp, Homo sapiens
caggagtagagagga

SEQ ID NO: 1494054 - DNA, 15 bp, Homo sapiens
aggagtagagaggac

SEQ ID NO: 1494055 - DNA, 15 bp, Homo sapiens
ggagtagagaggaca

SEQ ID NO: 1494056 - DNA, 15 bp, Homo sapiens
gagtagagaggacaa

SEQ ID NO: 1494057 - DNA, 15 bp, Homo sapiens
agtagagaggacaac

SEQ ID NO: 1494058 - DNA, 15 bp, Homo sapiens
gtagagaggacaaca

SEQ ID NO: 1494059 - DNA, 15 bp, Homo sapiens
tagagaggacaacag

SEQ ID NO: 1494060 - DNA, 15 bp, Homo sapiens
agagaggacaacagt

SEQ ID NO: 1494061 - DNA, 15 bp, Homo sapiens
gagaggacaacagta

SEQ ID NO: 1494062 - DNA, 15 bp, Homo sapiens
agaggacaacagtag

SEQ ID NO: 1494063 - DNA, 15 bp, Homo sapiens
gaggacaacagtagc

SEQ ID NO: 1494064 - DNA, 15 bp, Homo sapiens
aggacaacagtagca

SEQ ID NO: 1494065 - DNA, 15 bp, Homo sapiens
ggacaacagtagcat

SEQ ID NO: 1494066 - DNA, 15 bp, Homo sapiens
gacaacagtagcata

SEQ ID NO: 1494067 - DNA, 15 bp, Homo sapiens
acaacagtagcatag

SEQ ID NO: 1494068 - DNA, 15 bp, Homo sapiens
caacagtagcataga

SEQ ID NO: 1494069 - DNA, 15 bp, Homo sapiens
aacagtagcatagac

SEQ ID NO: 1494070 - DNA, 15 bp, Homo sapiens
acagtagcatagaca

SEQ ID NO: 1494071 - DNA, 15 bp, Homo sapiens
cagtagcatagacag

SEQ ID NO: 1494072 - DNA, 15 bp, Homo sapiens
agtagcatagacagc

SEQ ID NO: 1494073 - DNA, 15 bp, Homo sapiens
gtagcatagacagca

SEQ ID NO: 1494074 - DNA, 15 bp, Homo sapiens
tagcatagacagcat

SEQ ID NO: 1494075 - DNA, 15 bp, Homo sapiens
agcatagacagcatg

SEQ ID NO: 1494076 - DNA, 15 bp, Homo sapiens
gcatagacagcatgc

SEQ ID NO: 1494077 - DNA, 15 bp, Homo sapiens
catagacagcatgct

SEQ ID NO: 1494078 - DNA, 15 bp, Homo sapiens
atagacagcatgctc

SEQ ID NO: 1494079 - DNA, 15 bp, Homo sapiens
tagacagcatgctct

SEQ ID NO: 1494080 - DNA, 15 bp, Homo sapiens
agacagcatgctctg

SEQ ID NO: 1494081 - DNA, 15 bp, Homo sapiens
gacagcatgctctga

SEQ ID NO: 1494082 - DNA, 15 bp, Homo sapiens
acagcatgctctgaa

SEQ ID NO: 1494083 - DNA, 15 bp, Homo sapiens
cagcatgctctgaac

SEQ ID NO: 1494084 - DNA, 15 bp, Homo sapiens
agcatgctctgaact

SEQ ID NO: 1494085 - DNA, 15 bp, Homo sapiens
gcatgctctgaactg

SEQ ID NO: 1494086 - DNA, 15 bp, Homo sapiens
catgctctgaactgt

SEQ ID NO: 1494087 - DNA, 15 bp, Homo sapiens
atgctctgaactgtt

SEQ ID NO: 1494088 - DNA, 15 bp, Homo sapiens
tgctctgaactgtta

SEQ ID NO: 1494089 - DNA, 15 bp, Homo sapiens
gctctgaactgttag

SEQ ID NO: 1494090 - DNA, 15 bp, Homo sapiens
ctctgaactgttagt

SEQ ID NO: 1494091 - DNA, 15 bp, Homo sapiens
tctgaactgttagtt

SEQ ID NO: 1494092 - DNA, 15 bp, Homo sapiens
ctgaactgttagtta

SEQ ID NO: 1494093 - DNA, 15 bp, Homo sapiens
tgaactgttagttaa

SEQ ID NO: 1494094 - DNA, 15 bp, Homo sapiens
gaactgttagttaaa

SEQ ID NO: 1494095 - DNA, 15 bp, Homo sapiens
aactgttagttaaag

SEQ ID NO: 1494096 - DNA, 15 bp, Homo sapiens
actgttagttaaagg

SEQ ID NO: 1494097 - DNA, 15 bp, Homo sapiens
ctgttagttaaaggg

SEQ ID NO: 1494098 - DNA, 15 bp, Homo sapiens
tgttagttaaagggc

SEQ ID NO: 1494099 - DNA, 15 bp, Homo sapiens
gttagttaaagggcc

SEQ ID NO: 1494100 - DNA, 15 bp, Homo sapiens
ttagttaaagggccc

SEQ ID NO: 1494101 - DNA, 15 bp, Homo sapiens
tagttaaagggccca

SEQ ID NO: 1494102 - DNA, 15 bp, Homo sapiens
agttaaagggcccag

SEQ ID NO: 1494103 - DNA, 15 bp, Homo sapiens
gttaaagggcccagt

SEQ ID NO: 1494104 - DNA, 15 bp, Homo sapiens
ttaaagggcccagtg

SEQ ID NO: 1494105 - DNA, 15 bp, Homo sapiens
taaagggcccagtgc

SEQ ID NO: 1494106 - DNA, 15 bp, Homo sapiens
aaagggcccagtgct

SEQ ID NO: 1494107 - DNA, 15 bp, Homo sapiens
aagggcccagtgctt

SEQ ID NO: 1494108 - DNA, 15 bp, Homo sapiens
agggcccagtgcttc

SEQ ID NO: 1494109 - DNA, 15 bp, Homo sapiens
gggcccagtgcttcg

SEQ ID NO: 1494110 - DNA, 15 bp, Homo sapiens
ggcccagtgcttcga

SEQ ID NO: 1494111 - DNA, 15 bp, Homo sapiens
gcccagtgcttcgag

SEQ ID NO: 1494112 - DNA, 15 bp, Homo sapiens
cccagtgcttcgaga

SEQ ID NO: 1494113 - DNA, 15 bp, Homo sapiens
ccagtgcttcgagac

SEQ ID NO: 1494114 - DNA, 15 bp, Homo sapiens
cagtgcttcgagact

SEQ ID NO: 1494115 - DNA, 15 bp, Homo sapiens
agtgcttcgagactc

SEQ ID NO: 1494116 - DNA, 15 bp, Homo sapiens
gtgcttcgagactct

SEQ ID NO: 1494117 - DNA, 15 bp, Homo sapiens
tgcttcgagactctt

SEQ ID NO: 1494118 - DNA, 15 bp, Homo sapiens
gcttcgagactcttc

SEQ ID NO: 1494119 - DNA, 15 bp, Homo sapiens
cttcgagactcttcg

SEQ ID NO: 1494120 - DNA, 15 bp, Homo sapiens
ttcgagactcttcgg

SEQ ID NO: 1494121 - DNA, 15 bp, Homo sapiens
tcgagactcttcggc

SEQ ID NO: 1494122 - DNA, 15 bp, Homo sapiens
cgagactcttcggcg

SEQ ID NO: 1494123 - DNA, 15 bp, Homo sapiens
gagactcttcggcgg

SEQ ID NO: 1494124 - DNA, 15 bp, Homo sapiens
agactcttcggcgga

SEQ ID NO: 1494125 - DNA, 15 bp, Homo sapiens
gactcttcggcggat

SEQ ID NO: 1494126 - DNA, 15 bp, Homo sapiens
actcttcggcggatg

SEQ ID NO: 1494127 - DNA, 15 bp, Homo sapiens
ctcttcggcggatgc

SEQ ID NO: 1494128 - DNA, 15 bp, Homo sapiens
tcttcggcggatgcc

SEQ ID NO: 1494129 - DNA, 15 bp, Homo sapiens
cttcggcggatgccc

SEQ ID NO: 1494130 - DNA, 15 bp, Homo sapiens
ttcggcggatgccct

SEQ ID NO: 1494131 - DNA, 15 bp, Homo sapiens
tcggcggatgccctt

SEQ ID NO: 1494132 - DNA, 15 bp, Homo sapiens
cggcggatgcccttg

SEQ ID NO: 1494133 - DNA, 15 bp, Homo sapiens
ggcggatgcccttgt

SEQ ID NO: 1494134 - DNA, 15 bp, Homo sapiens
gcggatgcccttgtt

SEQ ID NO: 1494135 - DNA, 15 bp, Homo sapiens
cggatgcccttgttg

SEQ ID NO: 1494136 - DNA, 15 bp, Homo sapiens
ggatgcccttgttgg

SEQ ID NO: 1494137 - DNA, 15 bp, Homo sapiens
gatgcccttgttggg

SEQ ID NO: 1494138 - DNA, 15 bp, Homo sapiens
atgcccttgttggga

SEQ ID NO: 1494139 - DNA, 15 bp, Homo sapiens
tgcccttgttgggag

SEQ ID NO: 1494140 - DNA, 15 bp, Homo sapiens
gcccttgttgggaga

SEQ ID NO: 1494141 - DNA, 15 bp, Homo sapiens
cccttgttgggagaa

SEQ ID NO: 1494142 - DNA, 15 bp, Homo sapiens
ccttgttgggagaat

SEQ ID NO: 1494143 - DNA, 15 bp, Homo sapiens
cttgttgggagaatg

SEQ ID NO: 1494144 - DNA, 15 bp, Homo sapiens
ttgttgggagaatgt

SEQ ID NO: 1494145 - DNA, 15 bp, Homo sapiens
tgttgggagaatgtt

SEQ ID NO: 1494146 - DNA, 15 bp, Homo sapiens
gttgggagaatgttc

SEQ ID NO: 1494147 - DNA, 15 bp, Homo sapiens
ttgggagaatgttca

SEQ ID NO: 1494148 - DNA, 15 bp, Homo sapiens
tgggagaatgttcaa

SEQ ID NO: 1494149 - DNA, 15 bp, Homo sapiens
gggagaatgttcaag

SEQ ID NO: 1494150 - DNA, 15 bp, Homo sapiens
ggagaatgttcaagg

SEQ ID NO: 1494151 - DNA, 15 bp, Homo sapiens
gagaatgttcaaggc

SEQ ID NO: 1494152 - DNA, 15 bp, Homo sapiens
agaatgttcaaggca

SEQ ID NO: 1494153 - DNA, 15 bp, Homo sapiens
gaatgttcaaggcat

SEQ ID NO: 1494154 - DNA, 15 bp, Homo sapiens
aatgttcaaggcatt

SEQ ID NO: 1494155 - DNA, 15 bp, Homo sapiens
atgttcaaggcattc

SEQ ID NO: 1494156 - DNA, 15 bp, Homo sapiens
tgttcaaggcattct

SEQ ID NO: 1494157 - DNA, 15 bp, Homo sapiens
gttcaaggcattctc

SEQ ID NO: 1494158 - DNA, 15 bp, Homo sapiens
ttcaaggcattctct

SEQ ID NO: 1494159 - DNA, 15 bp, Homo sapiens
tcaaggcattctctc

SEQ ID NO: 1494160 - DNA, 15 bp, Homo sapiens
caaggcattctctcc

SEQ ID NO: 1494161 - DNA, 15 bp, Homo sapiens
aaggcattctctcca

SEQ ID NO: 1494162 - DNA, 15 bp, Homo sapiens
aggcattctctccat

SEQ ID NO: 1494163 - DNA, 15 bp, Homo sapiens
ggcattctctccatg

SEQ ID NO: 1494164 - DNA, 15 bp, Homo sapiens
gcattctctccatgt

SEQ ID NO: 1494165 - DNA, 15 bp, Homo sapiens
cattctctccatgtg

SEQ ID NO: 1494166 - DNA, 15 bp, Homo sapiens
attctctccatgtgg

SEQ ID NO: 1494167 - DNA, 15 bp, Homo sapiens
ttctctccatgtggg

SEQ ID NO: 1494168 - DNA, 15 bp, Homo sapiens
tctctccatgtgggg

SEQ ID NO: 1494169 - DNA, 15 bp, Homo sapiens
ctctccatgtgggga

SEQ ID NO: 1494170 - DNA, 15 bp, Homo sapiens
tctccatgtggggaa

SEQ ID NO: 1494171 - DNA, 15 bp, Homo sapiens
ctccatgtggggaaa

SEQ ID NO: 1494172 - DNA, 15 bp, Homo sapiens
tccatgtggggaaag

SEQ ID NO: 1494173 - DNA, 15 bp, Homo sapiens
ccatgtggggaaagc

SEQ ID NO: 1494174 - DNA, 15 bp, Homo sapiens
catgtggggaaagcc

SEQ ID NO: 1494175 - DNA, 15 bp, Homo sapiens
atgtggggaaagccc

SEQ ID NO: 1494176 - DNA, 15 bp, Homo sapiens
tgtggggaaagccca

SEQ ID NO: 1494177 - DNA, 15 bp, Homo sapiens
gtggggaaagcccat

SEQ ID NO: 1494178 - DNA, 15 bp, Homo sapiens
tggggaaagcccatt

SEQ ID NO: 1494179 - DNA, 15 bp, Homo sapiens
ggggaaagcccattc

SEQ ID NO: 1494180 - DNA, 15 bp, Homo sapiens
gggaaagcccattca

SEQ ID NO: 1494181 - DNA, 15 bp, Homo sapiens
ggaaagcccattcat

SEQ ID NO: 1494182 - DNA, 15 bp, Homo sapiens
gaaagcccattcatg

SEQ ID NO: 1494183 - DNA, 15 bp, Homo sapiens
aaagcccattcatgc

SEQ ID NO: 1494184 - DNA, 15 bp, Homo sapiens
aagcccattcatgcc

SEQ ID NO: 1494185 - DNA, 15 bp, Homo sapiens
agcccattcatgcca

SEQ ID NO: 1494186 - DNA, 15 bp, Homo sapiens
gcccattcatgccat

SEQ ID NO: 1494187 - DNA, 15 bp, Homo sapiens
cccattcatgccata

SEQ ID NO: 1494188 - DNA, 15 bp, Homo sapiens
ccattcatgccatat

SEQ ID NO: 1494189 - DNA, 15 bp, Homo sapiens
cattcatgccatatg

SEQ ID NO: 1494190 - DNA, 15 bp, Homo sapiens
attcatgccatatga

SEQ ID NO: 1494191 - DNA, 15 bp, Homo sapiens
ttcatgccatatgac

SEQ ID NO: 1494192 - DNA, 15 bp, Homo sapiens
tcatgccatatgacc

SEQ ID NO: 1494193 - DNA, 15 bp, Homo sapiens
catgccatatgaccc

SEQ ID NO: 1494194 - DNA, 15 bp, Homo sapiens
atgccatatgacccc

SEQ ID NO: 1494195 - DNA, 15 bp, Homo sapiens
tgccatatgaccccg

SEQ ID NO: 1494196 - DNA, 15 bp, Homo sapiens
gccatatgaccccgg

SEQ ID NO: 1494197 - DNA, 15 bp, Homo sapiens
ccatatgaccccggg

SEQ ID NO: 1494198 - DNA, 15 bp, Homo sapiens
catatgaccccgggg

SEQ ID NO: 1494199 - DNA, 15 bp, Homo sapiens
atatgaccccggggc

SEQ ID NO: 1494200 - DNA, 15 bp, Homo sapiens
tatgaccccggggcc

SEQ ID NO: 1494201 - DNA, 15 bp, Homo sapiens
atgaccccggggccc

SEQ ID NO: 1494202 - DNA, 15 bp, Homo sapiens
tgaccccggggccct

SEQ ID NO: 1494203 - DNA, 15 bp, Homo sapiens
gaccccggggcccta

SEQ ID NO: 1494204 - DNA, 15 bp, Homo sapiens
accccggggccctaa

SEQ ID NO: 1494205 - DNA, 15 bp, Homo sapiens
ccccggggccctaac

SEQ ID NO: 1494206 - DNA, 15 bp, Homo sapiens
cccggggccctaacc

SEQ ID NO: 1494207 - DNA, 15 bp, Homo sapiens
ccggggccctaacca

SEQ ID NO: 1494208 - DNA, 15 bp, Homo sapiens
cggggccctaaccag

SEQ ID NO: 1494209 - DNA, 15 bp, Homo sapiens
ggggccctaaccagt

SEQ ID NO: 1494210 - DNA, 15 bp, Homo sapiens
gggccctaaccagtc

SEQ ID NO: 1494211 - DNA, 15 bp, Homo sapiens
ggccctaaccagtcc

SEQ ID NO: 1494212 - DNA, 15 bp, Homo sapiens
gccctaaccagtcca

SEQ ID NO: 1494213 - DNA, 15 bp, Homo sapiens
ccctaaccagtccat

SEQ ID NO: 1494214 - DNA, 15 bp, Homo sapiens
cctaaccagtccata

SEQ ID NO: 1494215 - DNA, 15 bp, Homo sapiens
ctaaccagtccataa

SEQ ID NO: 1494216 - DNA, 15 bp, Homo sapiens
taaccagtccataaa

SEQ ID NO: 1494217 - DNA, 15 bp, Homo sapiens
aaccagtccataaac

SEQ ID NO: 1494218 - DNA, 15 bp, Homo sapiens
accagtccataaaca

SEQ ID NO: 1494219 - DNA, 15 bp, Homo sapiens
ccagtccataaacag

SEQ ID NO: 1494220 - DNA, 15 bp, Homo sapiens
cagtccataaacagc

SEQ ID NO: 1494221 - DNA, 15 bp, Homo sapiens
agtccataaacagcc

SEQ ID NO: 1494222 - DNA, 15 bp, Homo sapiens
gtccataaacagccc

SEQ ID NO: 1494223 - DNA, 15 bp, Homo sapiens
tccataaacagccca

SEQ ID NO: 1494224 - DNA, 15 bp, Homo sapiens
ccataaacagcccaa

SEQ ID NO: 1494225 - DNA, 15 bp, Homo sapiens
cataaacagcccaag

SEQ ID NO: 1494226 - DNA, 15 bp, Homo sapiens
ataaacagcccaagg

SEQ ID NO: 1494227 - DNA, 15 bp, Homo sapiens
taaacagcccaaggt

SEQ ID NO: 1494228 - DNA, 15 bp, Homo sapiens
aaacagcccaaggtc

SEQ ID NO: 1494229 - DNA, 15 bp, Homo sapiens
aacagcccaaggtcc

SEQ ID NO: 1494230 - DNA, 15 bp, Homo sapiens
acagcccaaggtccc

SEQ ID NO: 1494231 - DNA, 15 bp, Homo sapiens
cagcccaaggtcccc

SEQ ID NO: 1494232 - DNA, 15 bp, Homo sapiens
agcccaaggtcccct

SEQ ID NO: 1494233 - DNA, 15 bp, Homo sapiens
gcccaaggtccccta

SEQ ID NO: 1494234 - DNA, 15 bp, Homo sapiens
cccaaggtcccctag

SEQ ID NO: 1494235 - DNA, 15 bp, Homo sapiens
ccaaggtcccctagt

SEQ ID NO: 1494236 - DNA, 15 bp, Homo sapiens
caaggtcccctagta

SEQ ID NO: 1494237 - DNA, 15 bp, Homo sapiens
aaggtcccctagtac

SEQ ID NO: 1494238 - DNA, 15 bp, Homo sapiens
aggtcccctagtact

SEQ ID NO: 1494239 - DNA, 15 bp, Homo sapiens
ggtcccctagtactt

SEQ ID NO: 1494240 - DNA, 15 bp, Homo sapiens
gtcccctagtacttc

SEQ ID NO: 1494241 - DNA, 15 bp, Homo sapiens
tcccctagtacttcc

SEQ ID NO: 1494242 - DNA, 15 bp, Homo sapiens
cccctagtacttcct

SEQ ID NO: 1494243 - DNA, 15 bp, Homo sapiens
ccctagtacttcctg

SEQ ID NO: 1494244 - DNA, 15 bp, Homo sapiens
cctagtacttcctgc

SEQ ID NO: 1494245 - DNA, 15 bp, Homo sapiens
ctagtacttcctgcc

SEQ ID NO: 1494246 - DNA, 15 bp, Homo sapiens
tagtacttcctgcca

SEQ ID NO: 1494247 - DNA, 15 bp, Homo sapiens
agtacttcctgccac

SEQ ID NO: 1494248 - DNA, 15 bp, Homo sapiens
gtacttcctgccacc

SEQ ID NO: 1494249 - DNA, 15 bp, Homo sapiens
tacttcctgccaccg

SEQ ID NO: 1494250 - DNA, 15 bp, Homo sapiens
acttcctgccaccga

SEQ ID NO: 1494251 - DNA, 15 bp, Homo sapiens
cttcctgccaccgaa

SEQ ID NO: 1494252 - DNA, 15 bp, Homo sapiens
ttcctgccaccgaac

SEQ ID NO: 1494253 - DNA, 15 bp, Homo sapiens
tcctgccaccgaaca

SEQ ID NO: 1494254 - DNA, 15 bp, Homo sapiens
cctgccaccgaacaa

SEQ ID NO: 1494255 - DNA, 15 bp, Homo sapiens
ctgccaccgaacaat

SEQ ID NO: 1494256 - DNA, 15 bp, Homo sapiens
tgccaccgaacaatg

SEQ ID NO: 1494257 - DNA, 15 bp, Homo sapiens
gccaccgaacaatgg

SEQ ID NO: 1494258 - DNA, 15 bp, Homo sapiens
ccaccgaacaatggg

SEQ ID NO: 1494259 - DNA, 15 bp, Homo sapiens
caccgaacaatggga

SEQ ID NO: 1494260 - DNA, 15 bp, Homo sapiens
accgaacaatgggaa

SEQ ID NO: 1494261 - DNA, 15 bp, Homo sapiens
ccgaacaatgggaac

SEQ ID NO: 1494262 - DNA, 15 bp, Homo sapiens
cgaacaatgggaaca

SEQ ID NO: 1494263 - DNA, 15 bp, Homo sapiens
gaacaatgggaacac

SEQ ID NO: 1494264 - DNA, 15 bp, Homo sapiens
aacaatgggaacaca

SEQ ID NO: 1494265 - DNA, 15 bp, Homo sapiens
acaatgggaacacag

SEQ ID NO: 1494266 - DNA, 15 bp, Homo sapiens
caatgggaacacaga

SEQ ID NO: 1494267 - DNA, 15 bp, Homo sapiens
aatgggaacacagat

SEQ ID NO: 1494268 - DNA, 15 bp, Homo sapiens
atgggaacacagatg

SEQ ID NO: 1494269 - DNA, 15 bp, Homo sapiens
tgggaacacagatgc

SEQ ID NO: 1494270 - DNA, 15 bp, Homo sapiens
gggaacacagatgct

SEQ ID NO: 1494271 - DNA, 15 bp, Homo sapiens
ggaacacagatgctg

SEQ ID NO: 1494272 - DNA, 15 bp, Homo sapiens
gaacacagatgctga

SEQ ID NO: 1494273 - DNA, 15 bp, Homo sapiens
aacacagatgctgaa

SEQ ID NO: 1494274 - DNA, 15 bp, Homo sapiens
acacagatgctgaag

SEQ ID NO: 1494275 - DNA, 15 bp, Homo sapiens
cacagatgctgaagt

SEQ ID NO: 1494276 - DNA, 15 bp, Homo sapiens
acagatgctgaagtg

SEQ ID NO: 1494277 - DNA, 15 bp, Homo sapiens
cagatgctgaagtga

SEQ ID NO: 1494278 - DNA, 15 bp, Homo sapiens
agatgctgaagtgag

SEQ ID NO: 1494279 - DNA, 15 bp, Homo sapiens
gatgctgaagtgaga

SEQ ID NO: 1494280 - DNA, 15 bp, Homo sapiens
atgctgaagtgagac

SEQ ID NO: 1494281 - DNA, 15 bp, Homo sapiens
tgctgaagtgagaca

SEQ ID NO: 1494282 - DNA, 15 bp, Homo sapiens
gctgaagtgagacaa

SEQ ID NO: 1494283 - DNA, 15 bp, Homo sapiens
ctgaagtgagacaaa

SEQ ID NO: 1494284 - DNA, 15 bp, Homo sapiens
tgaagtgagacaaat

SEQ ID NO: 1494285 - DNA, 15 bp, Homo sapiens
gaagtgagacaaatg

SEQ ID NO: 1494286 - DNA, 15 bp, Homo sapiens
aagtgagacaaatgc

SEQ ID NO: 1494287 - DNA, 15 bp, Homo sapiens
agtgagacaaatgcc

SEQ ID NO: 1494288 - DNA, 15 bp, Homo sapiens
gtgagacaaatgcct

SEQ ID NO: 1494289 - DNA, 15 bp, Homo sapiens
tgagacaaatgcctg

SEQ ID NO: 1494290 - DNA, 15 bp, Homo sapiens
gagacaaatgcctga

SEQ ID NO: 1494291 - DNA, 15 bp, Homo sapiens
agacaaatgcctgag

SEQ ID NO: 1494292 - DNA, 15 bp, Homo sapiens
gacaaatgcctgaga

SEQ ID NO: 1494293 - DNA, 15 bp, Homo sapiens
acaaatgcctgagaa

SEQ ID NO: 1494294 - DNA, 15 bp, Homo sapiens
caaatgcctgagaag

SEQ ID NO: 1494295 - DNA, 15 bp, Homo sapiens
aaatgcctgagaagg

SEQ ID NO: 1494296 - DNA, 15 bp, Homo sapiens
aatgcctgagaaggt

SEQ ID NO: 1494297 - DNA, 15 bp, Homo sapiens
atgcctgagaaggtg

SEQ ID NO: 1494298 - DNA, 15 bp, Homo sapiens
tgcctgagaaggtgg

SEQ ID NO: 1494299 - DNA, 15 bp, Homo sapiens
gcctgagaaggtggt

SEQ ID NO: 1494300 - DNA, 15 bp, Homo sapiens
cctgagaaggtggtc

SEQ ID NO: 1494301 - DNA, 15 bp, Homo sapiens
ctgagaaggtggtca

SEQ ID NO: 1494302 - DNA, 15 bp, Homo sapiens
tgagaaggtggtcac

SEQ ID NO: 1494303 - DNA, 15 bp, Homo sapiens
gagaaggtggtcact

SEQ ID NO: 1494304 - DNA, 15 bp, Homo sapiens
agaaggtggtcactg

SEQ ID NO: 1494305 - DNA, 15 bp, Homo sapiens
gaaggtggtcactgg

SEQ ID NO: 1494306 - DNA, 15 bp, Homo sapiens
aaggtggtcactggt

SEQ ID NO: 1494307 - DNA, 15 bp, Homo sapiens
aggtggtcactggtc

SEQ ID NO: 1494308 - DNA, 15 bp, Homo sapiens
ggtggtcactggtcg

SEQ ID NO: 1494309 - DNA, 15 bp, Homo sapiens
gtggtcactggtcgc

SEQ ID NO: 1494310 - DNA, 15 bp, Homo sapiens
tggtcactggtcgcc

SEQ ID NO: 1494311 - DNA, 15 bp, Homo sapiens
ggtcactggtcgcca

SEQ ID NO: 1494312 - DNA, 15 bp, Homo sapiens
gtcactggtcgccag

SEQ ID NO: 1494313 - DNA, 15 bp, Homo sapiens
tcactggtcgccagt

SEQ ID NO: 1494314 - DNA, 15 bp, Homo sapiens
cactggtcgccagta

SEQ ID NO: 1494315 - DNA, 15 bp, Homo sapiens
actggtcgccagtag

SEQ ID NO: 1494316 - DNA, 15 bp, Homo sapiens
ctggtcgccagtaga

SEQ ID NO: 1494317 - DNA, 15 bp, Homo sapiens
tggtcgccagtagag

SEQ ID NO: 1494318 - DNA, 15 bp, Homo sapiens
ggtcgccagtagaga

SEQ ID NO: 1494319 - DNA, 15 bp, Homo sapiens
gtcgccagtagagag

SEQ ID NO: 1494320 - DNA, 15 bp, Homo sapiens
tcgccagtagagaga

SEQ ID NO: 1494321 - DNA, 15 bp, Homo sapiens
cgccagtagagagac

SEQ ID NO: 1494322 - DNA, 15 bp, Homo sapiens
gccagtagagagacc

SEQ ID NO: 1494323 - DNA, 15 bp, Homo sapiens
ccagtagagagacct

SEQ ID NO: 1494324 - DNA, 15 bp, Homo sapiens
cagtagagagacctt

SEQ ID NO: 1494325 - DNA, 15 bp, Homo sapiens
agtagagagaccttc

SEQ ID NO: 1494326 - DNA, 15 bp, Homo sapiens
gtagagagaccttct

SEQ ID NO: 1494327 - DNA, 15 bp, Homo sapiens
tagagagaccttcta

SEQ ID NO: 1494328 - DNA, 15 bp, Homo sapiens
agagagaccttctat

SEQ ID NO: 1494329 - DNA, 15 bp, Homo sapiens
gagagaccttctatt

SEQ ID NO: 1494330 - DNA, 15 bp, Homo sapiens
agagaccttctattg

SEQ ID NO: 1494331 - DNA, 15 bp, Homo sapiens
gagaccttctattgg

SEQ ID NO: 1494332 - DNA, 15 bp, Homo sapiens
agaccttctattgga

SEQ ID NO: 1494333 - DNA, 15 bp, Homo sapiens
gaccttctattggag

SEQ ID NO: 1494334 - DNA, 15 bp, Homo sapiens
accttctattggaga

SEQ ID NO: 1494335 - DNA, 15 bp, Homo sapiens
ccttctattggagaa

SEQ ID NO: 1494336 - DNA, 15 bp, Homo sapiens
cttctattggagaag

SEQ ID NO: 1494337 - DNA, 15 bp, Homo sapiens
ttctattggagaaga

SEQ ID NO: 1494338 - DNA, 15 bp, Homo sapiens
tctattggagaagag

SEQ ID NO: 1494339 - DNA, 15 bp, Homo sapiens
ctattggagaagagc

SEQ ID NO: 1494340 - DNA, 15 bp, Homo sapiens
tattggagaagagca

SEQ ID NO: 1494341 - DNA, 15 bp, Homo sapiens
attggagaagagcag

SEQ ID NO: 1494342 - DNA, 15 bp, Homo sapiens
ttggagaagagcaga

SEQ ID NO: 1494343 - DNA, 15 bp, Homo sapiens
tggagaagagcagat

SEQ ID NO: 1494344 - DNA, 15 bp, Homo sapiens
ggagaagagcagata

SEQ ID NO: 1494345 - DNA, 15 bp, Homo sapiens
gagaagagcagataa

SEQ ID NO: 1494346 - DNA, 15 bp, Homo sapiens
agaagagcagataac

SEQ ID NO: 1494347 - DNA, 15 bp, Homo sapiens
gaagagcagataaca

SEQ ID NO: 1494348 - DNA, 15 bp, Homo sapiens
aagagcagataacaa

SEQ ID NO: 1494349 - DNA, 15 bp, Homo sapiens
agagcagataacaag

SEQ ID NO: 1494350 - DNA, 15 bp, Homo sapiens
gagcagataacaagg

SEQ ID NO: 1494351 - DNA, 15 bp, Homo sapiens
agcagataacaaggt

SEQ ID NO: 1494352 - DNA, 15 bp, Homo sapiens
gcagataacaaggtt

SEQ ID NO: 1494353 - DNA, 15 bp, Homo sapiens
cagataacaaggttg

SEQ ID NO: 1494354 - DNA, 15 bp, Homo sapiens
agataacaaggttga

SEQ ID NO: 1494355 - DNA, 15 bp, Homo sapiens
gataacaaggttgaa

SEQ ID NO: 1494356 - DNA, 15 bp, Homo sapiens
ataacaaggttgaag

SEQ ID NO: 1494357 - DNA, 15 bp, Homo sapiens
taacaaggttgaagt

SEQ ID NO: 1494358 - DNA, 15 bp, Homo sapiens
aacaaggttgaagtg

SEQ ID NO: 1494359 - DNA, 15 bp, Homo sapiens
acaaggttgaagtgg

SEQ ID NO: 1494360 - DNA, 15 bp, Homo sapiens
caaggttgaagtgga

SEQ ID NO: 1494361 - DNA, 15 bp, Homo sapiens
aaggttgaagtggag

SEQ ID NO: 1494362 - DNA, 15 bp, Homo sapiens
aggttgaagtggagg

SEQ ID NO: 1494363 - DNA, 15 bp, Homo sapiens
ggttgaagtggaggt

SEQ ID NO: 1494364 - DNA, 15 bp, Homo sapiens
gttgaagtggaggtg

SEQ ID NO: 1494365 - DNA, 15 bp, Homo sapiens
ttgaagtggaggtgc

SEQ ID NO: 1494366 - DNA, 15 bp, Homo sapiens
tgaagtggaggtgca

SEQ ID NO: 1494367 - DNA, 15 bp, Homo sapiens
gaagtggaggtgcag

SEQ ID NO: 1494368 - DNA, 15 bp, Homo sapiens
aagtggaggtgcaga

SEQ ID NO: 1494369 - DNA, 15 bp, Homo sapiens
agtggaggtgcagag

SEQ ID NO: 1494370 - DNA, 15 bp, Homo sapiens
gtggaggtgcagagg

SEQ ID NO: 1494371 - DNA, 15 bp, Homo sapiens
tggaggtgcagagga

SEQ ID NO: 1494372 - DNA, 15 bp, Homo sapiens
ggaggtgcagaggat

SEQ ID NO: 1494373 - DNA, 15 bp, Homo sapiens
gaggtgcagaggatg

SEQ ID NO: 1494374 - DNA, 15 bp, Homo sapiens
aggtgcagaggatgg

SEQ ID NO: 1494375 - DNA, 15 bp, Homo sapiens
ggtgcagaggatggc

SEQ ID NO: 1494376 - DNA, 15 bp, Homo sapiens
gtgcagaggatggca

SEQ ID NO: 1494377 - DNA, 15 bp, Homo sapiens
tgcagaggatggcat

SEQ ID NO: 1494378 - DNA, 15 bp, Homo sapiens
gcagaggatggcatt

SEQ ID NO: 1494379 - DNA, 15 bp, Homo sapiens
cagaggatggcattt

SEQ ID NO: 1494380 - DNA, 15 bp, Homo sapiens
agaggatggcatttt

SEQ ID NO: 1494381 - DNA, 15 bp, Homo sapiens
gaggatggcattttg

SEQ ID NO: 1494382 - DNA, 15 bp, Homo sapiens
aggatggcattttgg

SEQ ID NO: 1494383 - DNA, 15 bp, Homo sapiens
ggatggcattttggg

SEQ ID NO: 1494384 - DNA, 15 bp, Homo sapiens
gatggcattttgggg

SEQ ID NO: 1494385 - DNA, 15 bp, Homo sapiens
atggcattttggggg

SEQ ID NO: 1494386 - DNA, 15 bp, Homo sapiens
tggcattttgggggg

SEQ ID NO: 1494387 - DNA, 15 bp, Homo sapiens
ggcattttggggggt

SEQ ID NO: 1494388 - DNA, 15 bp, Homo sapiens
gcattttggggggta

SEQ ID NO: 1494389 - DNA, 15 bp, Homo sapiens
cattttggggggtat

SEQ ID NO: 1494390 - DNA, 15 bp, Homo sapiens
attttggggggtata

SEQ ID NO: 1494391 - DNA, 15 bp, Homo sapiens
ttttggggggtatag

SEQ ID NO: 1494392 - DNA, 15 bp, Homo sapiens
tttggggggtatagc

SEQ ID NO: 1494393 - DNA, 15 bp, Homo sapiens
ttggggggtatagca

SEQ ID NO: 1494394 - DNA, 15 bp, Homo sapiens
tggggggtatagcat

SEQ ID NO: 1494395 - DNA, 15 bp, Homo sapiens
ggggggtatagcatg

SEQ ID NO: 1494396 - DNA, 15 bp, Homo sapiens
gggggtatagcatgg

SEQ ID NO: 1494397 - DNA, 15 bp, Homo sapiens
ggggtatagcatggc

SEQ ID NO: 1494398 - DNA, 15 bp, Homo sapiens
gggtatagcatggca

SEQ ID NO: 1494399 - DNA, 15 bp, Homo sapiens
ggtatagcatggcaa

SEQ ID NO: 1494400 - DNA, 15 bp, Homo sapiens
gtatagcatggcaag

SEQ ID NO: 1494401 - DNA, 15 bp, Homo sapiens
tatagcatggcaaga

SEQ ID NO: 1494402 - DNA, 15 bp, Homo sapiens
atagcatggcaagaa

SEQ ID NO: 1494403 - DNA, 15 bp, Homo sapiens
tagcatggcaagaaa

SEQ ID NO: 1494404 - DNA, 15 bp, Homo sapiens
agcatggcaagaaaa

SEQ ID NO: 1494405 - DNA, 15 bp, Homo sapiens
gcatggcaagaaaaa

SEQ ID NO: 1494406 - DNA, 15 bp, Homo sapiens
catggcaagaaaaag

SEQ ID NO: 1494407 - DNA, 15 bp, Homo sapiens
atggcaagaaaaagc

SEQ ID NO: 1494408 - DNA, 15 bp, Homo sapiens
tggcaagaaaaagca

SEQ ID NO: 1494409 - DNA, 15 bp, Homo sapiens
ggcaagaaaaagcaa

SEQ ID NO: 1494410 - DNA, 15 bp, Homo sapiens
gcaagaaaaagcaaa

SEQ ID NO: 1494411 - DNA, 15 bp, Homo sapiens
caagaaaaagcaaat

SEQ ID NO: 1494412 - DNA, 15 bp, Homo sapiens
aagaaaaagcaaatt

SEQ ID NO: 1494413 - DNA, 15 bp, Homo sapiens
agaaaaagcaaattg

SEQ ID NO: 1494414 - DNA, 15 bp, Homo sapiens
gaaaaagcaaattgc

SEQ ID NO: 1494415 - DNA, 15 bp, Homo sapiens
aaaaagcaaattgct

SEQ ID NO: 1494416 - DNA, 15 bp, Homo sapiens
aaaagcaaattgctt

SEQ ID NO: 1494417 - DNA, 15 bp, Homo sapiens
aaagcaaattgcttc

SEQ ID NO: 1494418 - DNA, 15 bp, Homo sapiens
aagcaaattgcttct

SEQ ID NO: 1494419 - DNA, 15 bp, Homo sapiens
agcaaattgcttctt

SEQ ID NO: 1494420 - DNA, 15 bp, Homo sapiens
gcaaattgcttcttt

SEQ ID NO: 1494421 - DNA, 15 bp, Homo sapiens
caaattgcttctttc

SEQ ID NO: 1494422 - DNA, 15 bp, Homo sapiens
aaattgcttctttct

SEQ ID NO: 1494423 - DNA, 15 bp, Homo sapiens
aattgcttctttctt

SEQ ID NO: 1494424 - DNA, 15 bp, Homo sapiens
attgcttctttcttt

SEQ ID NO: 1494425 - DNA, 15 bp, Homo sapiens
ttgcttctttctttt

SEQ ID NO: 1494426 - DNA, 15 bp, Homo sapiens
tgcttctttcttttt

SEQ ID NO: 1494427 - DNA, 15 bp, Homo sapiens
gcttctttcttttta

SEQ ID NO: 1494428 - DNA, 15 bp, Homo sapiens
cttctttctttttaa

SEQ ID NO: 1494429 - DNA, 15 bp, Homo sapiens
ttctttctttttaag

SEQ ID NO: 1494430 - DNA, 15 bp, Homo sapiens
tctttctttttaaga

SEQ ID NO: 1494431 - DNA, 15 bp, Homo sapiens
ctttctttttaagaa

SEQ ID NO: 1494432 - DNA, 15 bp, Homo sapiens
tttctttttaagaat

SEQ ID NO: 1494433 - DNA, 15 bp, Homo sapiens
ttctttttaagaata

SEQ ID NO: 1494434 - DNA, 15 bp, Homo sapiens
tctttttaagaatat

SEQ ID NO: 1494435 - DNA, 15 bp, Homo sapiens
ctttttaagaatatt

SEQ ID NO: 1494436 - DNA, 15 bp, Homo sapiens
tttttaagaatattt

SEQ ID NO: 1494437 - DNA, 15 bp, Homo sapiens
ttttaagaatattta

SEQ ID NO: 1494438 - DNA, 15 bp, Homo sapiens
tttaagaatatttat

SEQ ID NO: 1494439 - DNA, 15 bp, Homo sapiens
ttaagaatatttata

SEQ ID NO: 1494440 - DNA, 15 bp, Homo sapiens
taagaatatttatag

SEQ ID NO: 1494441 - DNA, 15 bp, Homo sapiens
aagaatatttataga

SEQ ID NO: 1494442 - DNA, 15 bp, Homo sapiens
agaatatttatagac

SEQ ID NO: 1494443 - DNA, 15 bp, Homo sapiens
gaatatttatagaca

SEQ ID NO: 1494444 - DNA, 15 bp, Homo sapiens
aatatttatagacag

SEQ ID NO: 1494445 - DNA, 15 bp, Homo sapiens
atatttatagacaga

SEQ ID NO: 1494446 - DNA, 15 bp, Homo sapiens
tatttatagacagaa

SEQ ID NO: 1494447 - DNA, 15 bp, Homo sapiens
atttatagacagaaa

SEQ ID NO: 1494448 - DNA, 15 bp, Homo sapiens
tttatagacagaaag

SEQ ID NO: 1494449 - DNA, 15 bp, Homo sapiens
ttatagacagaaagt

SEQ ID NO: 1494450 - DNA, 15 bp, Homo sapiens
tatagacagaaagtg

SEQ ID NO: 1494451 - DNA, 15 bp, Homo sapiens
atagacagaaagtgc

SEQ ID NO: 1494452 - DNA, 15 bp, Homo sapiens
tagacagaaagtgcc

SEQ ID NO: 1494453 - DNA, 15 bp, Homo sapiens
agacagaaagtgccc

SEQ ID NO: 1494454 - DNA, 15 bp, Homo sapiens
gacagaaagtgcccc

SEQ ID NO: 1494455 - DNA, 15 bp, Homo sapiens
acagaaagtgccccc

SEQ ID NO: 1494456 - DNA, 15 bp, Homo sapiens
cagaaagtgccccca

SEQ ID NO: 1494457 - DNA, 15 bp, Homo sapiens
agaaagtgcccccaa

SEQ ID NO: 1494458 - DNA, 15 bp, Homo sapiens
gaaagtgcccccaaa

SEQ ID NO: 1494459 - DNA, 15 bp, Homo sapiens
aaagtgcccccaaat

SEQ ID NO: 1494460 - DNA, 15 bp, Homo sapiens
aagtgcccccaaatc

SEQ ID NO: 1494461 - DNA, 15 bp, Homo sapiens
agtgcccccaaatca

SEQ ID NO: 1494462 - DNA, 15 bp, Homo sapiens
gtgcccccaaatcaa

SEQ ID NO: 1494463 - DNA, 15 bp, Homo sapiens
tgcccccaaatcaat

SEQ ID NO: 1494464 - DNA, 15 bp, Homo sapiens
gcccccaaatcaata

SEQ ID NO: 1494465 - DNA, 15 bp, Homo sapiens
cccccaaatcaataa

SEQ ID NO: 1494466 - DNA, 15 bp, Homo sapiens
ccccaaatcaataaa

SEQ ID NO: 1494467 - DNA, 15 bp, Homo sapiens
cccaaatcaataaaa

SEQ ID NO: 1494468 - DNA, 15 bp, Homo sapiens
ccaaatcaataaaaa

SEQ ID NO: 1494469 - DNA, 15 bp, Homo sapiens
caaatcaataaaaat

SEQ ID NO: 1494470 - DNA, 15 bp, Homo sapiens
aaatcaataaaaata

SEQ ID NO: 1494471 - DNA, 15 bp, Homo sapiens
aatcaataaaaatat

SEQ ID NO: 1494472 - DNA, 15 bp, Homo sapiens
atcaataaaaatatt

SEQ ID NO: 1494473 - DNA, 15 bp, Homo sapiens
ctctggctgtgtgat

SEQ ID NO: 1494474 - DNA, 15 bp, Homo sapiens
tctggctgtgtgatc

SEQ ID NO: 1494475 - DNA, 15 bp, Homo sapiens
ctggctgtgtgatcc

SEQ ID NO: 1494476 - DNA, 15 bp, Homo sapiens
tggctgtgtgatcct

SEQ ID NO: 1494477 - DNA, 15 bp, Homo sapiens
ggctgtgtgatcctg

SEQ ID NO: 1494478 - DNA, 15 bp, Homo sapiens
gctgtgtgatcctgg

SEQ ID NO: 1494479 - DNA, 15 bp, Homo sapiens
ctgtgtgatcctggg

SEQ ID NO: 1494480 - DNA, 15 bp, Homo sapiens
tgtgtgatcctggga

SEQ ID NO: 1494481 - DNA, 15 bp, Homo sapiens
gtgtgatcctgggaa

SEQ ID NO: 1494482 - DNA, 15 bp, Homo sapiens
tgtgatcctgggaaa

SEQ ID NO: 1494483 - DNA, 15 bp, Homo sapiens
gtgatcctgggaaaa

SEQ ID NO: 1494484 - DNA, 15 bp, Homo sapiens
tgatcctgggaaaat

SEQ ID NO: 1494485 - DNA, 15 bp, Homo sapiens
gatcctgggaaaatg

SEQ ID NO: 1494486 - DNA, 15 bp, Homo sapiens
atcctgggaaaatga

SEQ ID NO: 1494487 - DNA, 15 bp, Homo sapiens
tcctgggaaaatgat

SEQ ID NO: 1494488 - DNA, 15 bp, Homo sapiens
cctgggaaaatgata

SEQ ID NO: 1494489 - DNA, 15 bp, Homo sapiens
ctgggaaaatgatat

SEQ ID NO: 1494490 - DNA, 15 bp, Homo sapiens
tgggaaaatgatatg

SEQ ID NO: 1494491 - DNA, 15 bp, Homo sapiens
gggaaaatgatatga

SEQ ID NO: 1494492 - DNA, 15 bp, Homo sapiens
ggaaaatgatatgac

SEQ ID NO: 1494493 - DNA, 15 bp, Homo sapiens
gaaaatgatatgact

SEQ ID NO: 1494494 - DNA, 15 bp, Homo sapiens
aaaatgatatgactt

SEQ ID NO: 1494495 - DNA, 15 bp, Homo sapiens
aaatgatatgacttc

SEQ ID NO: 1494496 - DNA, 15 bp, Homo sapiens
aatgatatgacttcg

SEQ ID NO: 1494497 - DNA, 15 bp, Homo sapiens
atgatatgacttcgc

SEQ ID NO: 1494498 - DNA, 15 bp, Homo sapiens
tgatatgacttcgct

SEQ ID NO: 1494499 - DNA, 15 bp, Homo sapiens
gatatgacttcgctg

SEQ ID NO: 1494500 - DNA, 15 bp, Homo sapiens
atatgacttcgctga

SEQ ID NO: 1494501 - DNA, 15 bp, Homo sapiens
tatgacttcgctgag

SEQ ID NO: 1494502 - DNA, 15 bp, Homo sapiens
atgacttcgctgagt

SEQ ID NO: 1494503 - DNA, 15 bp, Homo sapiens
tgacttcgctgagtg

SEQ ID NO: 1494504 - DNA, 15 bp, Homo sapiens
gacttcgctgagtgt

SEQ ID NO: 1494505 - DNA, 15 bp, Homo sapiens
acttcgctgagtgtt

SEQ ID NO: 1494506 - DNA, 15 bp, Homo sapiens
cttcgctgagtgttg

SEQ ID NO: 1494507 - DNA, 15 bp, Homo sapiens
ttcgctgagtgttgc

SEQ ID NO: 1494508 - DNA, 15 bp, Homo sapiens
tcgctgagtgttgct

SEQ ID NO: 1494509 - DNA, 15 bp, Homo sapiens
cgctgagtgttgctc

SEQ ID NO: 1494510 - DNA, 15 bp, Homo sapiens
gctgagtgttgctcc

SEQ ID NO: 1494511 - DNA, 15 bp, Homo sapiens
ctgagtgttgctcct

SEQ ID NO: 1494512 - DNA, 15 bp, Homo sapiens
tgagtgttgctcctt

SEQ ID NO: 1494513 - DNA, 15 bp, Homo sapiens
gagtgttgctccttt

SEQ ID NO: 1494514 - DNA, 15 bp, Homo sapiens
agtgttgctcctttc

SEQ ID NO: 1494515 - DNA, 15 bp, Homo sapiens
gtgttgctcctttca

SEQ ID NO: 1494516 - DNA, 15 bp, Homo sapiens
tgttgctcctttcat

SEQ ID NO: 1494517 - DNA, 15 bp, Homo sapiens
gttgctcctttcatc

SEQ ID NO: 1494518 - DNA, 15 bp, Homo sapiens
ttgctcctttcatct

SEQ ID NO: 1494519 - DNA, 15 bp, Homo sapiens
tgctcctttcatctg

SEQ ID NO: 1494520 - DNA, 15 bp, Homo sapiens
gctcctttcatctgt

SEQ ID NO: 1494521 - DNA, 15 bp, Homo sapiens
ctcctttcatctgta

SEQ ID NO: 1494522 - DNA, 15 bp, Homo sapiens
tcctttcatctgtaa

SEQ ID NO: 1494523 - DNA, 15 bp, Homo sapiens
cctttcatctgtaaa

SEQ ID NO: 1494524 - DNA, 15 bp, Homo sapiens
ctttcatctgtaaaa

SEQ ID NO: 1494525 - DNA, 15 bp, Homo sapiens
tttcatctgtaaaaa

SEQ ID NO: 1494526 - DNA, 15 bp, Homo sapiens
ttcatctgtaaaaag

SEQ ID NO: 1494527 - DNA, 15 bp, Homo sapiens
tcatctgtaaaaagg

SEQ ID NO: 1494528 - DNA, 15 bp, Homo sapiens
catctgtaaaaagga

SEQ ID NO: 1494529 - DNA, 15 bp, Homo sapiens
atctgtaaaaaggaa

SEQ ID NO: 1494530 - DNA, 15 bp, Homo sapiens
tctgtaaaaaggaat

SEQ ID NO: 1494531 - DNA, 15 bp, Homo sapiens
ctgtaaaaaggaata

SEQ ID NO: 1494532 - DNA, 15 bp, Homo sapiens
tgtaaaaaggaataa

SEQ ID NO: 1494533 - DNA, 15 bp, Homo sapiens
gtaaaaaggaataag

SEQ ID NO: 1494534 - DNA, 15 bp, Homo sapiens
taaaaaggaataagg

SEQ ID NO: 1494535 - DNA, 15 bp, Homo sapiens
aaaaaggaataaggg

SEQ ID NO: 1494536 - DNA, 15 bp, Homo sapiens
aaaaggaataaggga

SEQ ID NO: 1494537 - DNA, 15 bp, Homo sapiens
aaaggaataagggaa

SEQ ID NO: 1494538 - DNA, 15 bp, Homo sapiens
aaggaataagggaat

SEQ ID NO: 1494539 - DNA, 15 bp, Homo sapiens
aggaataagggaatg

SEQ ID NO: 1494540 - DNA, 15 bp, Homo sapiens
ggaataagggaatgc

SEQ ID NO: 1494541 - DNA, 15 bp, Homo sapiens
gaataagggaatgct

SEQ ID NO: 1494542 - DNA, 15 bp, Homo sapiens
aataagggaatgctg

SEQ ID NO: 1494543 - DNA, 15 bp, Homo sapiens
ataagggaatgctgg

SEQ ID NO: 1494544 - DNA, 15 bp, Homo sapiens
taagggaatgctggc

SEQ ID NO: 1494545 - DNA, 15 bp, Homo sapiens
aagggaatgctggct

SEQ ID NO: 1494546 - DNA, 15 bp, Homo sapiens
agggaatgctggctc

SEQ ID NO: 1494547 - DNA, 15 bp, Homo sapiens
gggaatgctggctct

SEQ ID NO: 1494548 - DNA, 15 bp, Homo sapiens
ggaatgctggctctg

SEQ ID NO: 1494549 - DNA, 15 bp, Homo sapiens
gaatgctggctctgt

SEQ ID NO: 1494550 - DNA, 15 bp, Homo sapiens
aatgctggctctgta

SEQ ID NO: 1494551 - DNA, 15 bp, Homo sapiens
atgctggctctgtat

SEQ ID NO: 1494552 - DNA, 15 bp, Homo sapiens
tgctggctctgtatg

SEQ ID NO: 1494553 - DNA, 15 bp, Homo sapiens
gctggctctgtatgg

SEQ ID NO: 1494554 - DNA, 15 bp, Homo sapiens
ctggctctgtatggc

SEQ ID NO: 1494555 - DNA, 15 bp, Homo sapiens
tggctctgtatggct

SEQ ID NO: 1494556 - DNA, 15 bp, Homo sapiens
ggctctgtatggctt

SEQ ID NO: 1494557 - DNA, 15 bp, Homo sapiens
gctctgtatggctta

SEQ ID NO: 1494558 - DNA, 15 bp, Homo sapiens
ctctgtatggcttat

SEQ ID NO: 1494559 - DNA, 15 bp, Homo sapiens
tctgtatggcttatg

SEQ ID NO: 1494560 - DNA, 15 bp, Homo sapiens
ctgtatggcttatgc

SEQ ID NO: 1494561 - DNA, 15 bp, Homo sapiens
tgtatggcttatgca

SEQ ID NO: 1494562 - DNA, 15 bp, Homo sapiens
gtatggcttatgcaa

SEQ ID NO: 1494563 - DNA, 15 bp, Homo sapiens
tatggcttatgcaag

SEQ ID NO: 1494564 - DNA, 15 bp, Homo sapiens
atggcttatgcaagg

SEQ ID NO: 1494565 - DNA, 15 bp, Homo sapiens
tggcttatgcaagga

SEQ ID NO: 1494566 - DNA, 15 bp, Homo sapiens
ggcttatgcaaggat

SEQ ID NO: 1494567 - DNA, 15 bp, Homo sapiens
gcttatgcaaggatt

SEQ ID NO: 1494568 - DNA, 15 bp, Homo sapiens
cttatgcaaggatta

SEQ ID NO: 1494569 - DNA, 15 bp, Homo sapiens
ttatgcaaggattaa

SEQ ID NO: 1494570 - DNA, 15 bp, Homo sapiens
tatgcaaggattaag

SEQ ID NO: 1494571 - DNA, 15 bp, Homo sapiens
atgcaaggattaagt

SEQ ID NO: 1494572 - DNA, 15 bp, Homo sapiens
tgcaaggattaagtg

SEQ ID NO: 1494573 - DNA, 15 bp, Homo sapiens
gcaaggattaagtga

SEQ ID NO: 1494574 - DNA, 15 bp, Homo sapiens
caaggattaagtgag

SEQ ID NO: 1494575 - DNA, 15 bp, Homo sapiens
aaggattaagtgaga

SEQ ID NO: 1494576 - DNA, 15 bp, Homo sapiens
aggattaagtgagaa

SEQ ID NO: 1494577 - DNA, 15 bp, Homo sapiens
ggattaagtgagaaa

SEQ ID NO: 1494578 - DNA, 15 bp, Homo sapiens
gattaagtgagaaaa

SEQ ID NO: 1494579 - DNA, 15 bp, Homo sapiens
attaagtgagaaaat

SEQ ID NO: 1494580 - DNA, 15 bp, Homo sapiens
ttaagtgagaaaata

SEQ ID NO: 1494581 - DNA, 15 bp, Homo sapiens
taagtgagaaaatag

SEQ ID NO: 1494582 - DNA, 15 bp, Homo sapiens
aagtgagaaaataga

SEQ ID NO: 1494583 - DNA, 15 bp, Homo sapiens
agtgagaaaatagat

SEQ ID NO: 1494584 - DNA, 15 bp, Homo sapiens
gtgagaaaatagatg

SEQ ID NO: 1494585 - DNA, 15 bp, Homo sapiens
tgagaaaatagatgg

SEQ ID NO: 1494586 - DNA, 15 bp, Homo sapiens
gagaaaatagatgga

SEQ ID NO: 1494587 - DNA, 15 bp, Homo sapiens
agaaaatagatggaa

SEQ ID NO: 1494588 - DNA, 15 bp, Homo sapiens
gaaaatagatggaaa

SEQ ID NO: 1494589 - DNA, 15 bp, Homo sapiens
aaaatagatggaaag

SEQ ID NO: 1494590 - DNA, 15 bp, Homo sapiens
aaatagatggaaagc

SEQ ID NO: 1494591 - DNA, 15 bp, Homo sapiens
aatagatggaaagcg

SEQ ID NO: 1494592 - DNA, 15 bp, Homo sapiens
atagatggaaagcgt

SEQ ID NO: 1494593 - DNA, 15 bp, Homo sapiens
tagatggaaagcgtc

SEQ ID NO: 1494594 - DNA, 15 bp, Homo sapiens
agatggaaagcgtct

SEQ ID NO: 1494595 - DNA, 15 bp, Homo sapiens
gatggaaagcgtctg

SEQ ID NO: 1494596 - DNA, 15 bp, Homo sapiens
atggaaagcgtctgg

SEQ ID NO: 1494597 - DNA, 15 bp, Homo sapiens
tggaaagcgtctggc

SEQ ID NO: 1494598 - DNA, 15 bp, Homo sapiens
ggaaagcgtctggca

SEQ ID NO: 1494599 - DNA, 15 bp, Homo sapiens
gaaagcgtctggcac

SEQ ID NO: 1494600 - DNA, 15 bp, Homo sapiens
aaagcgtctggcaca

SEQ ID NO: 1494601 - DNA, 15 bp, Homo sapiens
aagcgtctggcacac

SEQ ID NO: 1494602 - DNA, 15 bp, Homo sapiens
agcgtctggcacacc

SEQ ID NO: 1494603 - DNA, 15 bp, Homo sapiens
gcgtctggcacaccg

SEQ ID NO: 1494604 - DNA, 15 bp, Homo sapiens
cgtctggcacaccgt

SEQ ID NO: 1494605 - DNA, 15 bp, Homo sapiens
gtctggcacaccgtg

SEQ ID NO: 1494606 - DNA, 15 bp, Homo sapiens
tctggcacaccgtgc

SEQ ID NO: 1494607 - DNA, 15 bp, Homo sapiens
ctggcacaccgtgca

SEQ ID NO: 1494608 - DNA, 15 bp, Homo sapiens
tggcacaccgtgcat

SEQ ID NO: 1494609 - DNA, 15 bp, Homo sapiens
ggcacaccgtgcatg

SEQ ID NO: 1494610 - DNA, 15 bp, Homo sapiens
gcacaccgtgcatgt

SEQ ID NO: 1494611 - DNA, 15 bp, Homo sapiens
cacaccgtgcatgtt

SEQ ID NO: 1494612 - DNA, 15 bp, Homo sapiens
acaccgtgcatgttc

SEQ ID NO: 1494613 - DNA, 15 bp, Homo sapiens
caccgtgcatgttca

SEQ ID NO: 1494614 - DNA, 15 bp, Homo sapiens
accgtgcatgttcag

SEQ ID NO: 1494615 - DNA, 15 bp, Homo sapiens
ccgtgcatgttcagg

SEQ ID NO: 1494616 - DNA, 15 bp, Homo sapiens
cgtgcatgttcaggg

SEQ ID NO: 1494617 - DNA, 15 bp, Homo sapiens
gtgcatgttcaggga

SEQ ID NO: 1494618 - DNA, 15 bp, Homo sapiens
tgcatgttcagggag

SEQ ID NO: 1494619 - DNA, 15 bp, Homo sapiens
gcatgttcagggagc

SEQ ID NO: 1494620 - DNA, 15 bp, Homo sapiens
catgttcagggagca

SEQ ID NO: 1494621 - DNA, 15 bp, Homo sapiens
atgttcagggagcac

SEQ ID NO: 1494622 - DNA, 15 bp, Homo sapiens
tgttcagggagcact

SEQ ID NO: 1494623 - DNA, 15 bp, Homo sapiens
gttcagggagcactg

SEQ ID NO: 1494624 - DNA, 15 bp, Homo sapiens
ttcagggagcactgc

SEQ ID NO: 1494625 - DNA, 15 bp, Homo sapiens
tcagggagcactgcg

SEQ ID NO: 1494626 - DNA, 15 bp, Homo sapiens
cagggagcactgcgt

SEQ ID NO: 1494627 - DNA, 15 bp, Homo sapiens
agggagcactgcgtc

SEQ ID NO: 1494628 - DNA, 15 bp, Homo sapiens
gggagcactgcgtcc

SEQ ID NO: 1494629 - DNA, 15 bp, Homo sapiens
ggagcactgcgtccc

SEQ ID NO: 1494630 - DNA, 15 bp, Homo sapiens
gagcactgcgtcccc

SEQ ID NO: 1494631 - DNA, 15 bp, Homo sapiens
agcactgcgtcccca

SEQ ID NO: 1494632 - DNA, 15 bp, Homo sapiens
gcactgcgtccccac

SEQ ID NO: 1494633 - DNA, 15 bp, Homo sapiens
cactgcgtccccacc

SEQ ID NO: 1494634 - DNA, 15 bp, Homo sapiens
actgcgtccccacca

SEQ ID NO: 1494635 - DNA, 15 bp, Homo sapiens
ctgcgtccccaccac

SEQ ID NO: 1494636 - DNA, 15 bp, Homo sapiens
tgcgtccccaccacc

SEQ ID NO: 1494637 - DNA, 15 bp, Homo sapiens
gcgtccccaccacca

SEQ ID NO: 1494638 - DNA, 15 bp, Homo sapiens
cgtccccaccaccac

SEQ ID NO: 1494639 - DNA, 15 bp, Homo sapiens
gtccccaccaccacc

SEQ ID NO: 1494640 - DNA, 15 bp, Homo sapiens
tccccaccaccacct

SEQ ID NO: 1494641 - DNA, 15 bp, Homo sapiens
ccccaccaccacctt

SEQ ID NO: 1494642 - DNA, 15 bp, Homo sapiens
cccaccaccaccttc

SEQ ID NO: 1494643 - DNA, 15 bp, Homo sapiens
ccaccaccaccttca

SEQ ID NO: 1494644 - DNA, 15 bp, Homo sapiens
caccaccaccttcat

SEQ ID NO: 1494645 - DNA, 15 bp, Homo sapiens
accaccaccttcatc

SEQ ID NO: 1494646 - DNA, 15 bp, Homo sapiens
ccaccaccttcatca

SEQ ID NO: 1494647 - DNA, 15 bp, Homo sapiens
caccaccttcatcat

SEQ ID NO: 1494648 - DNA, 15 bp, Homo sapiens
accaccttcatcatg

SEQ ID NO: 1494649 - DNA, 15 bp, Homo sapiens
ccaccttcatcatgg

SEQ ID NO: 1494650 - DNA, 15 bp, Homo sapiens
caccttcatcatggc

SEQ ID NO: 1494651 - DNA, 15 bp, Homo sapiens
accttcatcatggcc

SEQ ID NO: 1494652 - DNA, 15 bp, Homo sapiens
ccttcatcatggcct

SEQ ID NO: 1494653 - DNA, 15 bp, Homo sapiens
cttcatcatggcctg

SEQ ID NO: 1494654 - DNA, 15 bp, Homo sapiens
ttcatcatggcctgt

SEQ ID NO: 1494655 - DNA, 15 bp, Homo sapiens
tcatcatggcctgtt

SEQ ID NO: 1494656 - DNA, 15 bp, Homo sapiens
catcatggcctgttt

SEQ ID NO: 1494657 - DNA, 15 bp, Homo sapiens
atcatggcctgttta

SEQ ID NO: 1494658 - DNA, 15 bp, Homo sapiens
tcatggcctgtttac

SEQ ID NO: 1494659 - DNA, 15 bp, Homo sapiens
catggcctgtttacc

SEQ ID NO: 1494660 - DNA, 15 bp, Homo sapiens
atggcctgtttaccc

SEQ ID NO: 1494661 - DNA, 15 bp, Homo sapiens
tggcctgtttaccct

SEQ ID NO: 1494662 - DNA, 15 bp, Homo sapiens
ggcctgtttaccctg

SEQ ID NO: 1494663 - DNA, 15 bp, Homo sapiens
gcctgtttaccctga

SEQ ID NO: 1494664 - DNA, 15 bp, Homo sapiens
cctgtttaccctgat

SEQ ID NO: 1494665 - DNA, 15 bp, Homo sapiens
ctgtttaccctgatg

SEQ ID NO: 1494666 - DNA, 15 bp, Homo sapiens
tgtttaccctgatgt

SEQ ID NO: 1494667 - DNA, 15 bp, Homo sapiens
gtttaccctgatgtg

SEQ ID NO: 1494668 - DNA, 15 bp, Homo sapiens
tttaccctgatgtgc

SEQ ID NO: 1494669 - DNA, 15 bp, Homo sapiens
ttaccctgatgtgct

SEQ ID NO: 1494670 - DNA, 15 bp, Homo sapiens
taccctgatgtgctg

SEQ ID NO: 1494671 - DNA, 15 bp, Homo sapiens
accctgatgtgctgg

SEQ ID NO: 1494672 - DNA, 15 bp, Homo sapiens
ccctgatgtgctggc

SEQ ID NO: 1494673 - DNA, 15 bp, Homo sapiens
cctgatgtgctggca

SEQ ID NO: 1494674 - DNA, 15 bp, Homo sapiens
ctgatgtgctggcat

SEQ ID NO: 1494675 - DNA, 15 bp, Homo sapiens
tgatgtgctggcatc

SEQ ID NO: 1494676 - DNA, 15 bp, Homo sapiens
gatgtgctggcatcg

SEQ ID NO: 1494677 - DNA, 15 bp, Homo sapiens
atgtgctggcatcgg

SEQ ID NO: 1494678 - DNA, 15 bp, Homo sapiens
tgtgctggcatcggg

SEQ ID NO: 1494679 - DNA, 15 bp, Homo sapiens
gtgctggcatcggga

SEQ ID NO: 1494680 - DNA, 15 bp, Homo sapiens
tgctggcatcgggaa

SEQ ID NO: 1494681 - DNA, 15 bp, Homo sapiens
gctggcatcgggaag

SEQ ID NO: 1494682 - DNA, 15 bp, Homo sapiens
ctggcatcgggaagg

SEQ ID NO: 1494683 - DNA, 15 bp, Homo sapiens
tggcatcgggaaggt

SEQ ID NO: 1494684 - DNA, 15 bp, Homo sapiens
ggcatcgggaaggtg

SEQ ID NO: 1494685 - DNA, 15 bp, Homo sapiens
gcatcgggaaggtgg

SEQ ID NO: 1494686 - DNA, 15 bp, Homo sapiens
catcgggaaggtggg

SEQ ID NO: 1494687 - DNA, 15 bp, Homo sapiens
atcgggaaggtgggg

SEQ ID NO: 1494688 - DNA, 15 bp, Homo sapiens
tcgggaaggtggggg

SEQ ID NO: 1494689 - DNA, 15 bp, Homo sapiens
cgggaaggtggggga

SEQ ID NO: 1494690 - DNA, 15 bp, Homo sapiens
gggaaggtgggggag

SEQ ID NO: 1494691 - DNA, 15 bp, Homo sapiens
ggaaggtgggggagc

SEQ ID NO: 1494692 - DNA, 15 bp, Homo sapiens
gaaggtgggggagct

SEQ ID NO: 1494693 - DNA, 15 bp, Homo sapiens
aaggtgggggagctc

SEQ ID NO: 1494694 - DNA, 15 bp, Homo sapiens
aggtgggggagctca

SEQ ID NO: 1494695 - DNA, 15 bp, Homo sapiens
ggtgggggagctcag

SEQ ID NO: 1494696 - DNA, 15 bp, Homo sapiens
gtgggggagctcagc

SEQ ID NO: 1494697 - DNA, 15 bp, Homo sapiens
tgggggagctcagca

SEQ ID NO: 1494698 - DNA, 15 bp, Homo sapiens
gggggagctcagcag

SEQ ID NO: 1494699 - DNA, 15 bp, Homo sapiens
ggggagctcagcagc

SEQ ID NO: 1494700 - DNA, 15 bp, Homo sapiens
gggagctcagcagca

SEQ ID NO: 1494701 - DNA, 15 bp, Homo sapiens
ggagctcagcagcac

SEQ ID NO: 1494702 - DNA, 15 bp, Homo sapiens
gagctcagcagcaca

SEQ ID NO: 1494703 - DNA, 15 bp, Homo sapiens
agctcagcagcacag

SEQ ID NO: 1494704 - DNA, 15 bp, Homo sapiens
gctcagcagcacagg

SEQ ID NO: 1494705 - DNA, 15 bp, Homo sapiens
ctcagcagcacaggc

SEQ ID NO: 1494706 - DNA, 15 bp, Homo sapiens
tcagcagcacaggcc

SEQ ID NO: 1494707 - DNA, 15 bp, Homo sapiens
cagcagcacaggcct

SEQ ID NO: 1494708 - DNA, 15 bp, Homo sapiens
agcagcacaggcctg

SEQ ID NO: 1494709 - DNA, 15 bp, Homo sapiens
gcagcacaggcctgt

SEQ ID NO: 1494710 - DNA, 15 bp, Homo sapiens
cagcacaggcctgtg

SEQ ID NO: 1494711 - DNA, 15 bp, Homo sapiens
agcacaggcctgtgg

SEQ ID NO: 1494712 - DNA, 15 bp, Homo sapiens
gcacaggcctgtggc

SEQ ID NO: 1494713 - DNA, 15 bp, Homo sapiens
cacaggcctgtggca

SEQ ID NO: 1494714 - DNA, 15 bp, Homo sapiens
acaggcctgtggcag

SEQ ID NO: 1494715 - DNA, 15 bp, Homo sapiens
caggcctgtggcagg

SEQ ID NO: 1494716 - DNA, 15 bp, Homo sapiens
aggcctgtggcaggg

SEQ ID NO: 1494717 - DNA, 15 bp, Homo sapiens
ggcctgtggcagggt

SEQ ID NO: 1494718 - DNA, 15 bp, Homo sapiens
gcctgtggcagggtc

SEQ ID NO: 1494719 - DNA, 15 bp, Homo sapiens
cctgtggcagggtca

SEQ ID NO: 1494720 - DNA, 15 bp, Homo sapiens
ctgtggcagggtcag

SEQ ID NO: 1494721 - DNA, 15 bp, Homo sapiens
tggcagggtcaggcc

SEQ ID NO: 1494722 - DNA, 15 bp, Homo sapiens
ggcagggtcaggcca

SEQ ID NO: 1494723 - DNA, 15 bp, Homo sapiens
gcagggtcaggccag

SEQ ID NO: 1494724 - DNA, 15 bp, Homo sapiens
cagggtcaggccaga

SEQ ID NO: 1494725 - DNA, 15 bp, Homo sapiens
agggtcaggccagaa

SEQ ID NO: 1494726 - DNA, 15 bp, Homo sapiens
gggtcaggccagaaa

SEQ ID NO: 1494727 - DNA, 15 bp, Homo sapiens
ggtcaggccagaaag

SEQ ID NO: 1494728 - DNA, 15 bp, Homo sapiens
gtcaggccagaaaga

SEQ ID NO: 1494729 - DNA, 15 bp, Homo sapiens
tcaggccagaaagag

SEQ ID NO: 1494730 - DNA, 15 bp, Homo sapiens
caggccagaaagagc

SEQ ID NO: 1494731 - DNA, 15 bp, Homo sapiens
aggccagaaagagcc

SEQ ID NO: 1494732 - DNA, 15 bp, Homo sapiens
ggccagaaagagcct

SEQ ID NO: 1494733 - DNA, 15 bp, Homo sapiens
gccagaaagagcctc

SEQ ID NO: 1494734 - DNA, 15 bp, Homo sapiens
ccagaaagagcctca

SEQ ID NO: 1494735 - DNA, 15 bp, Homo sapiens
cagaaagagcctcaa

SEQ ID NO: 1494736 - DNA, 15 bp, Homo sapiens
agaaagagcctcaag

SEQ ID NO: 1494737 - DNA, 15 bp, Homo sapiens
gaaagagcctcaagg

SEQ ID NO: 1494738 - DNA, 15 bp, Homo sapiens
aaagagcctcaaggc

SEQ ID NO: 1494739 - DNA, 15 bp, Homo sapiens
aagagcctcaaggca

SEQ ID NO: 1494740 - DNA, 15 bp, Homo sapiens
agagcctcaaggcag

SEQ ID NO: 1494741 - DNA, 15 bp, Homo sapiens
gagcctcaaggcagg

SEQ ID NO: 1494742 - DNA, 15 bp, Homo sapiens
agcctcaaggcagga

SEQ ID NO: 1494743 - DNA, 15 bp, Homo sapiens
gcctcaaggcaggag

SEQ ID NO: 1494744 - DNA, 15 bp, Homo sapiens
cctcaaggcaggaga

SEQ ID NO: 1494745 - DNA, 15 bp, Homo sapiens
ctcaaggcaggagaa

SEQ ID NO: 1494746 - DNA, 15 bp, Homo sapiens
tcaaggcaggagaaa

SEQ ID NO: 1494747 - DNA, 15 bp, Homo sapiens
caaggcaggagaaag

SEQ ID NO: 1494748 - DNA, 15 bp, Homo sapiens
aaggcaggagaaagc

SEQ ID NO: 1494749 - DNA, 15 bp, Homo sapiens
aggcaggagaaagca

SEQ ID NO: 1494750 - DNA, 15 bp, Homo sapiens
ggcaggagaaagcag

SEQ ID NO: 1494751 - DNA, 15 bp, Homo sapiens
gcaggagaaagcagt

SEQ ID NO: 1494752 - DNA, 15 bp, Homo sapiens
caggagaaagcagtc

SEQ ID NO: 1494753 - DNA, 15 bp, Homo sapiens
aggagaaagcagtcc

SEQ ID NO: 1494754 - DNA, 15 bp, Homo sapiens
ggagaaagcagtcca

SEQ ID NO: 1494755 - DNA, 15 bp, Homo sapiens
gagaaagcagtccaa

SEQ ID NO: 1494756 - DNA, 15 bp, Homo sapiens
agaaagcagtccaaa

SEQ ID NO: 1494757 - DNA, 15 bp, Homo sapiens
gaaagcagtccaaag

SEQ ID NO: 1494758 - DNA, 15 bp, Homo sapiens
aaagcagtccaaagc

SEQ ID NO: 1494759 - DNA, 15 bp, Homo sapiens
aagcagtccaaagcc

SEQ ID NO: 1494760 - DNA, 15 bp, Homo sapiens
agcagtccaaagcca

SEQ ID NO: 1494761 - DNA, 15 bp, Homo sapiens
gcagtccaaagccac

SEQ ID NO: 1494762 - DNA, 15 bp, Homo sapiens
cagtccaaagccaca

SEQ ID NO: 1494763 - DNA, 15 bp, Homo sapiens
agtccaaagccacag

SEQ ID NO: 1494764 - DNA, 15 bp, Homo sapiens
gtccaaagccacaga

SEQ ID NO: 1494765 - DNA, 15 bp, Homo sapiens
tccaaagccacagag

SEQ ID NO: 1494766 - DNA, 15 bp, Homo sapiens
ccaaagccacagaga

SEQ ID NO: 1494767 - DNA, 15 bp, Homo sapiens
caaagccacagagag

SEQ ID NO: 1494768 - DNA, 15 bp, Homo sapiens
aaagccacagagagg

SEQ ID NO: 1494769 - DNA, 15 bp, Homo sapiens
aagccacagagaggg

SEQ ID NO: 1494770 - DNA, 15 bp, Homo sapiens
agccacagagaggga

SEQ ID NO: 1494771 - DNA, 15 bp, Homo sapiens
gccacagagagggag

SEQ ID NO: 1494772 - DNA, 15 bp, Homo sapiens
ccacagagagggagg

SEQ ID NO: 1494773 - DNA, 15 bp, Homo sapiens
cacagagagggaggc

SEQ ID NO: 1494774 - DNA, 15 bp, Homo sapiens
acagagagggaggcc

SEQ ID NO: 1494775 - DNA, 15 bp, Homo sapiens
cagagagggaggcca

SEQ ID NO: 1494776 - DNA, 15 bp, Homo sapiens
agagagggaggccag

SEQ ID NO: 1494777 - DNA, 15 bp, Homo sapiens
gagagggaggccaga

SEQ ID NO: 1494778 - DNA, 15 bp, Homo sapiens
agagggaggccagac

SEQ ID NO: 1494779 - DNA, 15 bp, Homo sapiens
gagggaggccagact

SEQ ID NO: 1494780 - DNA, 15 bp, Homo sapiens
agggaggccagactc

SEQ ID NO: 1494781 - DNA, 15 bp, Homo sapiens
gggaggccagactcc

SEQ ID NO: 1494782 - DNA, 15 bp, Homo sapiens
ggaggccagactcca

SEQ ID NO: 1494783 - DNA, 15 bp, Homo sapiens
gaggccagactccag

SEQ ID NO: 1494784 - DNA, 15 bp, Homo sapiens
aggccagactccagg

SEQ ID NO: 1494785 - DNA, 15 bp, Homo sapiens
ggccagactccagga

SEQ ID NO: 1494786 - DNA, 15 bp, Homo sapiens
gccagactccaggag

SEQ ID NO: 1494787 - DNA, 15 bp, Homo sapiens
ccagactccaggagg

SEQ ID NO: 1494788 - DNA, 15 bp, Homo sapiens
cagactccaggagga

SEQ ID NO: 1494789 - DNA, 15 bp, Homo sapiens
agactccaggaggac

SEQ ID NO: 1494790 - DNA, 15 bp, Homo sapiens
gactccaggaggacc

SEQ ID NO: 1494791 - DNA, 15 bp, Homo sapiens
actccaggaggacct

SEQ ID NO: 1494792 - DNA, 15 bp, Homo sapiens
ctccaggaggacctg

SEQ ID NO: 1494793 - DNA, 15 bp, Homo sapiens
tccaggaggacctgc

SEQ ID NO: 1494794 - DNA, 15 bp, Homo sapiens
ccaggaggacctgcc

SEQ ID NO: 1494795 - DNA, 15 bp, Homo sapiens
caggaggacctgcct

SEQ ID NO: 1494796 - DNA, 15 bp, Homo sapiens
aggaggacctgcctg

SEQ ID NO: 1494797 - DNA, 15 bp, Homo sapiens
ggaggacctgcctgc

SEQ ID NO: 1494798 - DNA, 15 bp, Homo sapiens
gaggacctgcctgca

SEQ ID NO: 1494799 - DNA, 15 bp, Homo sapiens
aggacctgcctgcat

SEQ ID NO: 1494800 - DNA, 15 bp, Homo sapiens
ggacctgcctgcatc

SEQ ID NO: 1494801 - DNA, 15 bp, Homo sapiens
gacctgcctgcatca

SEQ ID NO: 1494802 - DNA, 15 bp, Homo sapiens
acctgcctgcatcag

SEQ ID NO: 1494803 - DNA, 15 bp, Homo sapiens
cctgcctgcatcaga

SEQ ID NO: 1494804 - DNA, 15 bp, Homo sapiens
ctgcctgcatcagaa

SEQ ID NO: 1494805 - DNA, 15 bp, Homo sapiens
tgcctgcatcagaac

SEQ ID NO: 1494806 - DNA, 15 bp, Homo sapiens
gcctgcatcagaaca

SEQ ID NO: 1494807 - DNA, 15 bp, Homo sapiens
cctgcatcagaacaa

SEQ ID NO: 1494808 - DNA, 15 bp, Homo sapiens
ctgcatcagaacaag

SEQ ID NO: 1494809 - DNA, 15 bp, Homo sapiens
tgcatcagaacaagt

SEQ ID NO: 1494810 - DNA, 15 bp, Homo sapiens
gcatcagaacaagtt

SEQ ID NO: 1494811 - DNA, 15 bp, Homo sapiens
catcagaacaagttc

SEQ ID NO: 1494812 - DNA, 15 bp, Homo sapiens
atcagaacaagttcc

SEQ ID NO: 1494813 - DNA, 15 bp, Homo sapiens
tcagaacaagttcct

SEQ ID NO: 1494814 - DNA, 15 bp, Homo sapiens
cagaacaagttcctt

SEQ ID NO: 1494815 - DNA, 15 bp, Homo sapiens
agaacaagttcctta

SEQ ID NO: 1494816 - DNA, 15 bp, Homo sapiens
gaacaagttccttaa

SEQ ID NO: 1494817 - DNA, 15 bp, Homo sapiens
aacaagttccttaag

SEQ ID NO: 1494818 - DNA, 15 bp, Homo sapiens
acaagttccttaaga

SEQ ID NO: 1494819 - DNA, 15 bp, Homo sapiens
caagttccttaagaa

SEQ ID NO: 1494820 - DNA, 15 bp, Homo sapiens
aagttccttaagaaa

SEQ ID NO: 1494821 - DNA, 15 bp, Homo sapiens
agttccttaagaaaa

SEQ ID NO: 1494822 - DNA, 15 bp, Homo sapiens
gttccttaagaaaac

SEQ ID NO: 1494823 - DNA, 15 bp, Homo sapiens
ttccttaagaaaaca

SEQ ID NO: 1494824 - DNA, 15 bp, Homo sapiens
tccttaagaaaacag

SEQ ID NO: 1494825 - DNA, 15 bp, Homo sapiens
ccttaagaaaacaga

SEQ ID NO: 1494826 - DNA, 15 bp, Homo sapiens
cttaagaaaacagag

SEQ ID NO: 1494827 - DNA, 15 bp, Homo sapiens
ttaagaaaacagagc

SEQ ID NO: 1494828 - DNA, 15 bp, Homo sapiens
taagaaaacagagcc

SEQ ID NO: 1494829 - DNA, 15 bp, Homo sapiens
gaaaacagagcctgg

SEQ ID NO: 1494830 - DNA, 15 bp, Homo sapiens
aaaacagagcctggg

SEQ ID NO: 1494831 - DNA, 15 bp, Homo sapiens
aaacagagcctgggg

SEQ ID NO: 1494832 - DNA, 15 bp, Homo sapiens
aacagagcctgggga

SEQ ID NO: 1494833 - DNA, 15 bp, Homo sapiens
cagagcctggggaac

SEQ ID NO: 1494834 - DNA, 15 bp, Homo sapiens
agagcctggggaact

SEQ ID NO: 1494835 - DNA, 15 bp, Homo sapiens
gagcctggggaacta

SEQ ID NO: 1494836 - DNA, 15 bp, Homo sapiens
agcctggggaactaa

SEQ ID NO: 1494837 - DNA, 15 bp, Homo sapiens
gcctggggaactaat

SEQ ID NO: 1494838 - DNA, 15 bp, Homo sapiens
cctggggaactaatg

SEQ ID NO: 1494839 - DNA, 15 bp, Homo sapiens
ctggggaactaatga

SEQ ID NO: 1494840 - DNA, 15 bp, Homo sapiens
tggggaactaatgaa

SEQ ID NO: 1494841 - DNA, 15 bp, Homo sapiens
ggggaactaatgaag

SEQ ID NO: 1494842 - DNA, 15 bp, Homo sapiens
gggaactaatgaagt

SEQ ID NO: 1494843 - DNA, 15 bp, Homo sapiens
ggaactaatgaagta

SEQ ID NO: 1494844 - DNA, 15 bp, Homo sapiens
gaactaatgaagtag

SEQ ID NO: 1494845 - DNA, 15 bp, Homo sapiens
aactaatgaagtaga

SEQ ID NO: 1494846 - DNA, 15 bp, Homo sapiens
actaatgaagtagaa

SEQ ID NO: 1494847 - DNA, 15 bp, Homo sapiens
ctaatgaagtagaaa

SEQ ID NO: 1494848 - DNA, 15 bp, Homo sapiens
taatgaagtagaaat

SEQ ID NO: 1494849 - DNA, 15 bp, Homo sapiens
aatgaagtagaaatc

SEQ ID NO: 1494850 - DNA, 15 bp, Homo sapiens
atgaagtagaaatcg

SEQ ID NO: 1494851 - DNA, 15 bp, Homo sapiens
tgaagtagaaatcgg

SEQ ID NO: 1494852 - DNA, 15 bp, Homo sapiens
gaagtagaaatcgga

SEQ ID NO: 1494853 - DNA, 15 bp, Homo sapiens
aagtagaaatcggag

SEQ ID NO: 1494854 - DNA, 15 bp, Homo sapiens
agtagaaatcggaga

SEQ ID NO: 1494855 - DNA, 15 bp, Homo sapiens
gtagaaatcggagaa

SEQ ID NO: 1494856 - DNA, 15 bp, Homo sapiens
tagaaatcggagaag

SEQ ID NO: 1494857 - DNA, 15 bp, Homo sapiens
agaaatcggagaaga

SEQ ID NO: 1494858 - DNA, 15 bp, Homo sapiens
gaaatcggagaagag

SEQ ID NO: 1494859 - DNA, 15 bp, Homo sapiens
aaatcggagaagagg

SEQ ID NO: 1494860 - DNA, 15 bp, Homo sapiens
aatcggagaagagga

SEQ ID NO: 1494861 - DNA, 15 bp, Homo sapiens
atcggagaagaggag

SEQ ID NO: 1494862 - DNA, 15 bp, Homo sapiens
tcggagaagaggagg

SEQ ID NO: 1494863 - DNA, 15 bp, Homo sapiens
cggagaagaggaggg

SEQ ID NO: 1494864 - DNA, 15 bp, Homo sapiens
ggagaagaggaggga

SEQ ID NO: 1494865 - DNA, 15 bp, Homo sapiens
gagaagaggagggaa

SEQ ID NO: 1494866 - DNA, 15 bp, Homo sapiens
agaagaggagggaat

SEQ ID NO: 1494867 - DNA, 15 bp, Homo sapiens
gaagaggagggaatc

SEQ ID NO: 1494868 - DNA, 15 bp, Homo sapiens
aagaggagggaatct

SEQ ID NO: 1494869 - DNA, 15 bp, Homo sapiens
agaggagggaatcta

SEQ ID NO: 1494870 - DNA, 15 bp, Homo sapiens
gaggagggaatctag

SEQ ID NO: 1494871 - DNA, 15 bp, Homo sapiens
aggagggaatctagg

SEQ ID NO: 1494872 - DNA, 15 bp, Homo sapiens
ggagggaatctaggt

SEQ ID NO: 1494873 - DNA, 15 bp, Homo sapiens
gagggaatctaggtc

SEQ ID NO: 1494874 - DNA, 15 bp, Homo sapiens
agggaatctaggtcc

SEQ ID NO: 1494875 - DNA, 15 bp, Homo sapiens
gggaatctaggtccc

SEQ ID NO: 1494876 - DNA, 15 bp, Homo sapiens
ggaatctaggtccct

SEQ ID NO: 1494877 - DNA, 15 bp, Homo sapiens
gaatctaggtccctt

SEQ ID NO: 1494878 - DNA, 15 bp, Homo sapiens
aatctaggtcccttg

SEQ ID NO: 1494879 - DNA, 15 bp, Homo sapiens
atctaggtcccttgg

SEQ ID NO: 1494880 - DNA, 15 bp, Homo sapiens
tctaggtcccttggg

SEQ ID NO: 1494881 - DNA, 15 bp, Homo sapiens
ctaggtcccttggga

SEQ ID NO: 1494882 - DNA, 15 bp, Homo sapiens
taggtcccttgggag

SEQ ID NO: 1494883 - DNA, 15 bp, Homo sapiens
aggtcccttgggaga

SEQ ID NO: 1494884 - DNA, 15 bp, Homo sapiens
ggtcccttgggagag

SEQ ID NO: 1494885 - DNA, 15 bp, Homo sapiens
gtcccttgggagaga

SEQ ID NO: 1494886 - DNA, 15 bp, Homo sapiens
tcccttgggagagag

SEQ ID NO: 1494887 - DNA, 15 bp, Homo sapiens
cccttgggagagagg

SEQ ID NO: 1494888 - DNA, 15 bp, Homo sapiens
ccttgggagagaggc

SEQ ID NO: 1494889 - DNA, 15 bp, Homo sapiens
cttgggagagaggcc

SEQ ID NO: 1494890 - DNA, 15 bp, Homo sapiens
ttgggagagaggcca

SEQ ID NO: 1494891 - DNA, 15 bp, Homo sapiens
tgggagagaggccag

SEQ ID NO: 1494892 - DNA, 15 bp, Homo sapiens
gggagagaggccaga

SEQ ID NO: 1494893 - DNA, 15 bp, Homo sapiens
ggagagaggccagat

SEQ ID NO: 1494894 - DNA, 15 bp, Homo sapiens
gagagaggccagatg

SEQ ID NO: 1494895 - DNA, 15 bp, Homo sapiens
agagaggccagatgc

SEQ ID NO: 1494896 - DNA, 15 bp, Homo sapiens
gagaggccagatgcc

SEQ ID NO: 1494897 - DNA, 15 bp, Homo sapiens
agaggccagatgccc

SEQ ID NO: 1494898 - DNA, 15 bp, Homo sapiens
gaggccagatgcccc

SEQ ID NO: 1494899 - DNA, 15 bp, Homo sapiens
aggccagatgccccc

SEQ ID NO: 1494900 - DNA, 15 bp, Homo sapiens
ggccagatgccccca

SEQ ID NO: 1494901 - DNA, 15 bp, Homo sapiens
gccagatgcccccaa

SEQ ID NO: 1494902 - DNA, 15 bp, Homo sapiens
ccagatgcccccaac

SEQ ID NO: 1494903 - DNA, 15 bp, Homo sapiens
cagatgcccccaacc

SEQ ID NO: 1494904 - DNA, 15 bp, Homo sapiens
agatgcccccaacca

SEQ ID NO: 1494905 - DNA, 15 bp, Homo sapiens
gatgcccccaaccag

SEQ ID NO: 1494906 - DNA, 15 bp, Homo sapiens
atgcccccaaccagc

SEQ ID NO: 1494907 - DNA, 15 bp, Homo sapiens
tgcccccaaccagcc

SEQ ID NO: 1494908 - DNA, 15 bp, Homo sapiens
gcccccaaccagccc

SEQ ID NO: 1494909 - DNA, 15 bp, Homo sapiens
cccccaaccagcccc

SEQ ID NO: 1494910 - DNA, 15 bp, Homo sapiens
ccccaaccagcccct

SEQ ID NO: 1494911 - DNA, 15 bp, Homo sapiens
cccaaccagcccctc

SEQ ID NO: 1494912 - DNA, 15 bp, Homo sapiens
ccaaccagcccctcc

SEQ ID NO: 1494913 - DNA, 15 bp, Homo sapiens
caaccagcccctcct

SEQ ID NO: 1494914 - DNA, 15 bp, Homo sapiens
aaccagcccctcctt

SEQ ID NO: 1494915 - DNA, 15 bp, Homo sapiens
accagcccctccttg

SEQ ID NO: 1494916 - DNA, 15 bp, Homo sapiens
ccagcccctccttgg

SEQ ID NO: 1494917 - DNA, 15 bp, Homo sapiens
cagcccctccttggg

SEQ ID NO: 1494918 - DNA, 15 bp, Homo sapiens
agcccctccttgggg

SEQ ID NO: 1494919 - DNA, 15 bp, Homo sapiens
gcccctccttgggga

SEQ ID NO: 1494920 - DNA, 15 bp, Homo sapiens
cccctccttggggaa

SEQ ID NO: 1494921 - DNA, 15 bp, Homo sapiens
ccctccttggggaag

SEQ ID NO: 1494922 - DNA, 15 bp, Homo sapiens
cctccttggggaagg

SEQ ID NO: 1494923 - DNA, 15 bp, Homo sapiens
ctccttggggaaggc

SEQ ID NO: 1494924 - DNA, 15 bp, Homo sapiens
tccttggggaaggca

SEQ ID NO: 1494925 - DNA, 15 bp, Homo sapiens
ccttggggaaggcag

SEQ ID NO: 1494926 - DNA, 15 bp, Homo sapiens
cttggggaaggcagc

SEQ ID NO: 1494927 - DNA, 15 bp, Homo sapiens
ttggggaaggcagcc

SEQ ID NO: 1494928 - DNA, 15 bp, Homo sapiens
tggggaaggcagcct

SEQ ID NO: 1494929 - DNA, 15 bp, Homo sapiens
ggggaaggcagcctc

SEQ ID NO: 1494930 - DNA, 15 bp, Homo sapiens
gggaaggcagcctct

SEQ ID NO: 1494931 - DNA, 15 bp, Homo sapiens
ggaaggcagcctctc

SEQ ID NO: 1494932 - DNA, 15 bp, Homo sapiens
gaaggcagcctctcc

SEQ ID NO: 1494933 - DNA, 15 bp, Homo sapiens
aaggcagcctctcct

SEQ ID NO: 1494934 - DNA, 15 bp, Homo sapiens
aggcagcctctcctt

SEQ ID NO: 1494935 - DNA, 15 bp, Homo sapiens
ggcagcctctccttc

SEQ ID NO: 1494936 - DNA, 15 bp, Homo sapiens
gcagcctctccttct

SEQ ID NO: 1494937 - DNA, 15 bp, Homo sapiens
cagcctctccttcta

SEQ ID NO: 1494938 - DNA, 15 bp, Homo sapiens
agcctctccttctag

SEQ ID NO: 1494939 - DNA, 15 bp, Homo sapiens
gcctctccttctagg

SEQ ID NO: 1494940 - DNA, 15 bp, Homo sapiens
cctctccttctagga

SEQ ID NO: 1494941 - DNA, 15 bp, Homo sapiens
ctctccttctaggag

SEQ ID NO: 1494942 - DNA, 15 bp, Homo sapiens
tctccttctaggagt

SEQ ID NO: 1494943 - DNA, 15 bp, Homo sapiens
ctccttctaggagtg

SEQ ID NO: 1494944 - DNA, 15 bp, Homo sapiens
tccttctaggagtga

SEQ ID NO: 1494945 - DNA, 15 bp, Homo sapiens
ccttctaggagtgaa

SEQ ID NO: 1494946 - DNA, 15 bp, Homo sapiens
cttctaggagtgaaa

SEQ ID NO: 1494947 - DNA, 15 bp, Homo sapiens
ttctaggagtgaaac

SEQ ID NO: 1494948 - DNA, 15 bp, Homo sapiens
tctaggagtgaaact

SEQ ID NO: 1494949 - DNA, 15 bp, Homo sapiens
ctaggagtgaaactt

SEQ ID NO: 1494950 - DNA, 15 bp, Homo sapiens
taggagtgaaacttg

SEQ ID NO: 1494951 - DNA, 15 bp, Homo sapiens
aggagtgaaacttga

SEQ ID NO: 1494952 - DNA, 15 bp, Homo sapiens
ggagtgaaacttgaa

SEQ ID NO: 1494953 - DNA, 15 bp, Homo sapiens
gagtgaaacttgaac

SEQ ID NO: 1494954 - DNA, 15 bp, Homo sapiens
agtgaaacttgaacc

SEQ ID NO: 1494955 - DNA, 15 bp, Homo sapiens
gtgaaacttgaacca

SEQ ID NO: 1494956 - DNA, 15 bp, Homo sapiens
tgaaacttgaaccaa

SEQ ID NO: 1494957 - DNA, 15 bp, Homo sapiens
gaaacttgaaccaag

SEQ ID NO: 1494958 - DNA, 15 bp, Homo sapiens
aaacttgaaccaaga

SEQ ID NO: 1494959 - DNA, 15 bp, Homo sapiens
aacttgaaccaagaa

SEQ ID NO: 1494960 - DNA, 15 bp, Homo sapiens
acttgaaccaagaac

SEQ ID NO: 1494961 - DNA, 15 bp, Homo sapiens
cttgaaccaagaaca

SEQ ID NO: 1494962 - DNA, 15 bp, Homo sapiens
ttgaaccaagaacag

SEQ ID NO: 1494963 - DNA, 15 bp, Homo sapiens
tgaaccaagaacagt

SEQ ID NO: 1494964 - DNA, 15 bp, Homo sapiens
gaaccaagaacagtc

SEQ ID NO: 1494965 - DNA, 15 bp, Homo sapiens
aaccaagaacagtct

SEQ ID NO: 1494966 - DNA, 15 bp, Homo sapiens
accaagaacagtctt

SEQ ID NO: 1494967 - DNA, 15 bp, Homo sapiens
ccaagaacagtcttt

SEQ ID NO: 1494968 - DNA, 15 bp, Homo sapiens
caagaacagtcttta

SEQ ID NO: 1494969 - DNA, 15 bp, Homo sapiens
aagaacagtctttag

SEQ ID NO: 1494970 - DNA, 15 bp, Homo sapiens
agaacagtctttagg

SEQ ID NO: 1494971 - DNA, 15 bp, Homo sapiens
gaacagtctttaggg

SEQ ID NO: 1494972 - DNA, 15 bp, Homo sapiens
aacagtctttagggc

SEQ ID NO: 1494973 - DNA, 15 bp, Homo sapiens
acagtctttagggca

SEQ ID NO: 1494974 - DNA, 15 bp, Homo sapiens
cagtctttagggcaa

SEQ ID NO: 1494975 - DNA, 15 bp, Homo sapiens
agtctttagggcaaa

SEQ ID NO: 1494976 - DNA, 15 bp, Homo sapiens
gtctttagggcaaaa

SEQ ID NO: 1494977 - DNA, 15 bp, Homo sapiens
tctttagggcaaaat

SEQ ID NO: 1494978 - DNA, 15 bp, Homo sapiens
ctttagggcaaaatc

SEQ ID NO: 1494979 - DNA, 15 bp, Homo sapiens
tttagggcaaaatcc

SEQ ID NO: 1494980 - DNA, 15 bp, Homo sapiens
ttagggcaaaatcct

SEQ ID NO: 1494981 - DNA, 15 bp, Homo sapiens
tagggcaaaatcctt

SEQ ID NO: 1494982 - DNA, 15 bp, Homo sapiens
agggcaaaatccttt

SEQ ID NO: 1494983 - DNA, 15 bp, Homo sapiens
gggcaaaatcctttt

SEQ ID NO: 1494984 - DNA, 15 bp, Homo sapiens
ggcaaaatccttttc

SEQ ID NO: 1494985 - DNA, 15 bp, Homo sapiens
gcaaaatccttttcc

SEQ ID NO: 1494986 - DNA, 15 bp, Homo sapiens
caaaatccttttcct

SEQ ID NO: 1494987 - DNA, 15 bp, Homo sapiens
aaaatccttttccta

SEQ ID NO: 1494988 - DNA, 15 bp, Homo sapiens
aaatccttttcctag

SEQ ID NO: 1494989 - DNA, 15 bp, Homo sapiens
aatccttttcctagg

SEQ ID NO: 1494990 - DNA, 15 bp, Homo sapiens
atccttttcctaggt

SEQ ID NO: 1494991 - DNA, 15 bp, Homo sapiens
tccttttcctaggtt

SEQ ID NO: 1494992 - DNA, 15 bp, Homo sapiens
ccttttcctaggttg

SEQ ID NO: 1494993 - DNA, 15 bp, Homo sapiens
cttttcctaggttgc

SEQ ID NO: 1494994 - DNA, 15 bp, Homo sapiens
ttttcctaggttgcc

SEQ ID NO: 1494995 - DNA, 15 bp, Homo sapiens
tttcctaggttgcca

SEQ ID NO: 1494996 - DNA, 15 bp, Homo sapiens
ttcctaggttgccat

SEQ ID NO: 1494997 - DNA, 15 bp, Homo sapiens
tcctaggttgccatg

SEQ ID NO: 1494998 - DNA, 15 bp, Homo sapiens
cctaggttgccatga

SEQ ID NO: 1494999 - DNA, 15 bp, Homo sapiens
ctaggttgccatgaa

SEQ ID NO: 1495000 - DNA, 15 bp, Homo sapiens
taggttgccatgaaa

SEQ ID NO: 1495001 - DNA, 15 bp, Homo sapiens
aggttgccatgaaat

SEQ ID NO: 1495002 - DNA, 15 bp, Homo sapiens
ggttgccatgaaata

SEQ ID NO: 1495003 - DNA, 15 bp, Homo sapiens
gttgccatgaaatat

SEQ ID NO: 1495004 - DNA, 15 bp, Homo sapiens
ttgccatgaaatata

SEQ ID NO: 1495005 - DNA, 15 bp, Homo sapiens
tgccatgaaatatac

SEQ ID NO: 1495006 - DNA, 15 bp, Homo sapiens
gccatgaaatataca

SEQ ID NO: 1495007 - DNA, 15 bp, Homo sapiens
ccatgaaatatacat

SEQ ID NO: 1495008 - DNA, 15 bp, Homo sapiens
catgaaatatacatt

SEQ ID NO: 1495009 - DNA, 15 bp, Homo sapiens
atgaaatatacattt

SEQ ID NO: 1495010 - DNA, 15 bp, Homo sapiens
tgaaatatacatttc

SEQ ID NO: 1495011 - DNA, 15 bp, Homo sapiens
gaaatatacatttca

SEQ ID NO: 1495012 - DNA, 15 bp, Homo sapiens
aaatatacatttcat

SEQ ID NO: 1495013 - DNA, 15 bp, Homo sapiens
aatatacatttcatg

SEQ ID NO: 1495014 - DNA, 15 bp, Homo sapiens
atatacatttcatgc

SEQ ID NO: 1495015 - DNA, 15 bp, Homo sapiens
tatacatttcatgca

SEQ ID NO: 1495016 - DNA, 15 bp, Homo sapiens
atacatttcatgcaa

SEQ ID NO: 1495017 - DNA, 15 bp, Homo sapiens
tacatttcatgcaag

SEQ ID NO: 1495018 - DNA, 15 bp, Homo sapiens
acatttcatgcaagc

SEQ ID NO: 1495019 - DNA, 15 bp, Homo sapiens
catttcatgcaagct

SEQ ID NO: 1495020 - DNA, 15 bp, Homo sapiens
atttcatgcaagctt

SEQ ID NO: 1495021 - DNA, 15 bp, Homo sapiens
tttcatgcaagcttt

SEQ ID NO: 1495022 - DNA, 15 bp, Homo sapiens
ttcatgcaagctttg

SEQ ID NO: 1495023 - DNA, 15 bp, Homo sapiens
tcatgcaagctttgg

SEQ ID NO: 1495024 - DNA, 15 bp, Homo sapiens
catgcaagctttgga

SEQ ID NO: 1495025 - DNA, 15 bp, Homo sapiens
atgcaagctttggag

SEQ ID NO: 1495026 - DNA, 15 bp, Homo sapiens
tgcaagctttggaga

SEQ ID NO: 1495027 - DNA, 15 bp, Homo sapiens
gcaagctttggagag

SEQ ID NO: 1495028 - DNA, 15 bp, Homo sapiens
caagctttggagagg

SEQ ID NO: 1495029 - DNA, 15 bp, Homo sapiens
aagctttggagaggt

SEQ ID NO: 1495030 - DNA, 15 bp, Homo sapiens
agctttggagaggtc

SEQ ID NO: 1495031 - DNA, 15 bp, Homo sapiens
gctttggagaggtca

SEQ ID NO: 1495032 - DNA, 15 bp, Homo sapiens
ctttggagaggtcaa

SEQ ID NO: 1495033 - DNA, 15 bp, Homo sapiens
tttggagaggtcaaa

SEQ ID NO: 1495034 - DNA, 15 bp, Homo sapiens
ttggagaggtcaaat

SEQ ID NO: 1495035 - DNA, 15 bp, Homo sapiens
tggagaggtcaaatg

SEQ ID NO: 1495036 - DNA, 15 bp, Homo sapiens
ggagaggtcaaatga

SEQ ID NO: 1495037 - DNA, 15 bp, Homo sapiens
gagaggtcaaatgac

SEQ ID NO: 1495038 - DNA, 15 bp, Homo sapiens
agaggtcaaatgacc

SEQ ID NO: 1495039 - DNA, 15 bp, Homo sapiens
gaggtcaaatgaccc

SEQ ID NO: 1495040 - DNA, 15 bp, Homo sapiens
aggtcaaatgaccct

SEQ ID NO: 1495041 - DNA, 15 bp, Homo sapiens
ggtcaaatgaccctt

SEQ ID NO: 1495042 - DNA, 15 bp, Homo sapiens
gtcaaatgacccttt

SEQ ID NO: 1495043 - DNA, 15 bp, Homo sapiens
tcaaatgaccctttc

SEQ ID NO: 1495044 - DNA, 15 bp, Homo sapiens
caaatgaccctttct

SEQ ID NO: 1495045 - DNA, 15 bp, Homo sapiens
aaatgaccctttctc

SEQ ID NO: 1495046 - DNA, 15 bp, Homo sapiens
aatgaccctttctct

SEQ ID NO: 1495047 - DNA, 15 bp, Homo sapiens
atgaccctttctctc

SEQ ID NO: 1495048 - DNA, 15 bp, Homo sapiens
tgaccctttctctca

SEQ ID NO: 1495049 - DNA, 15 bp, Homo sapiens
gaccctttctctcag

SEQ ID NO: 1495050 - DNA, 15 bp, Homo sapiens
accctttctctcagc

SEQ ID NO: 1495051 - DNA, 15 bp, Homo sapiens
ccctttctctcagct

SEQ ID NO: 1495052 - DNA, 15 bp, Homo sapiens
cctttctctcagctt

SEQ ID NO: 1495053 - DNA, 15 bp, Homo sapiens
ctttctctcagcttt

SEQ ID NO: 1495054 - DNA, 15 bp, Homo sapiens
tttctctcagctttc

SEQ ID NO: 1495055 - DNA, 15 bp, Homo sapiens
ttctctcagctttct

SEQ ID NO: 1495056 - DNA, 15 bp, Homo sapiens
tctctcagctttctg

SEQ ID NO: 1495057 - DNA, 15 bp, Homo sapiens
ctctcagctttctgg

SEQ ID NO: 1495058 - DNA, 15 bp, Homo sapiens
tctcagctttctggg

SEQ ID NO: 1495059 - DNA, 15 bp, Homo sapiens
ctcagctttctggga

SEQ ID NO: 1495060 - DNA, 15 bp, Homo sapiens
tcagctttctgggag

SEQ ID NO: 1495061 - DNA, 15 bp, Homo sapiens
cagctttctgggagt

SEQ ID NO: 1495062 - DNA, 15 bp, Homo sapiens
agctttctgggagtt

SEQ ID NO: 1495063 - DNA, 15 bp, Homo sapiens
gctttctgggagttt

SEQ ID NO: 1495064 - DNA, 15 bp, Homo sapiens
ctttctgggagtttc

SEQ ID NO: 1495065 - DNA, 15 bp, Homo sapiens
tttctgggagtttcc

SEQ ID NO: 1495066 - DNA, 15 bp, Homo sapiens
ttctgggagtttcct

SEQ ID NO: 1495067 - DNA, 15 bp, Homo sapiens
tctgggagtttcctg

SEQ ID NO: 1495068 - DNA, 15 bp, Homo sapiens
ctgggagtttcctgt

SEQ ID NO: 1495069 - DNA, 15 bp, Homo sapiens
tgggagtttcctgtg

SEQ ID NO: 1495070 - DNA, 15 bp, Homo sapiens
gggagtttcctgtgg

SEQ ID NO: 1495071 - DNA, 15 bp, Homo sapiens
ggagtttcctgtgga

SEQ ID NO: 1495072 - DNA, 15 bp, Homo sapiens
gagtttcctgtggaa

SEQ ID NO: 1495073 - DNA, 15 bp, Homo sapiens
agtttcctgtggaat

SEQ ID NO: 1495074 - DNA, 15 bp, Homo sapiens
gtttcctgtggaatt

SEQ ID NO: 1495075 - DNA, 15 bp, Homo sapiens
tttcctgtggaattc

SEQ ID NO: 1495076 - DNA, 15 bp, Homo sapiens
ttcctgtggaattca

SEQ ID NO: 1495077 - DNA, 15 bp, Homo sapiens
tcctgtggaattcat

SEQ ID NO: 1495078 - DNA, 15 bp, Homo sapiens
cctgtggaattcatg

SEQ ID NO: 1495079 - DNA, 15 bp, Homo sapiens
ctgtggaattcatgt

SEQ ID NO: 1495080 - DNA, 15 bp, Homo sapiens
tgtggaattcatgtg

SEQ ID NO: 1495081 - DNA, 15 bp, Homo sapiens
gtggaattcatgtgt

SEQ ID NO: 1495082 - DNA, 15 bp, Homo sapiens
tggaattcatgtgtg

SEQ ID NO: 1495083 - DNA, 15 bp, Homo sapiens
ggaattcatgtgtgc

SEQ ID NO: 1495084 - DNA, 15 bp, Homo sapiens
gaattcatgtgtgcc

SEQ ID NO: 1495085 - DNA, 15 bp, Homo sapiens
aattcatgtgtgccc

SEQ ID NO: 1495086 - DNA, 15 bp, Homo sapiens
attcatgtgtgccca

SEQ ID NO: 1495087 - DNA, 15 bp, Homo sapiens
ttcatgtgtgcccaa

SEQ ID NO: 1495088 - DNA, 15 bp, Homo sapiens
tcatgtgtgcccaaa

SEQ ID NO: 1495089 - DNA, 15 bp, Homo sapiens
catgtgtgcccaaag

SEQ ID NO: 1495090 - DNA, 15 bp, Homo sapiens
atgtgtgcccaaaga

SEQ ID NO: 1495091 - DNA, 15 bp, Homo sapiens
tgtgtgcccaaagaa

SEQ ID NO: 1495092 - DNA, 15 bp, Homo sapiens
gtgtgcccaaagaag

SEQ ID NO: 1495093 - DNA, 15 bp, Homo sapiens
tgtgcccaaagaaga

SEQ ID NO: 1495094 - DNA, 15 bp, Homo sapiens
gtgcccaaagaagaa

SEQ ID NO: 1495095 - DNA, 15 bp, Homo sapiens
tgcccaaagaagaac

SEQ ID NO: 1495096 - DNA, 15 bp, Homo sapiens
gcccaaagaagaact

SEQ ID NO: 1495097 - DNA, 15 bp, Homo sapiens
cccaaagaagaactt

SEQ ID NO: 1495098 - DNA, 15 bp, Homo sapiens
ccaaagaagaacttt

SEQ ID NO: 1495099 - DNA, 15 bp, Homo sapiens
caaagaagaactttc

SEQ ID NO: 1495100 - DNA, 15 bp, Homo sapiens
aaagaagaactttca

SEQ ID NO: 1495101 - DNA, 15 bp, Homo sapiens
aagaagaactttcac

SEQ ID NO: 1495102 - DNA, 15 bp, Homo sapiens
agaagaactttcacc

SEQ ID NO: 1495103 - DNA, 15 bp, Homo sapiens
gaagaactttcacca

SEQ ID NO: 1495104 - DNA, 15 bp, Homo sapiens
aagaactttcaccaa

SEQ ID NO: 1495105 - DNA, 15 bp, Homo sapiens
agaactttcaccaat

SEQ ID NO: 1495106 - DNA, 15 bp, Homo sapiens
gaactttcaccaatg

SEQ ID NO: 1495107 - DNA, 15 bp, Homo sapiens
aactttcaccaatgg

SEQ ID NO: 1495108 - DNA, 15 bp, Homo sapiens
actttcaccaatggg

SEQ ID NO: 1495109 - DNA, 15 bp, Homo sapiens
ctttcaccaatgggg

SEQ ID NO: 1495110 - DNA, 15 bp, Homo sapiens
tttcaccaatgggga

SEQ ID NO: 1495111 - DNA, 15 bp, Homo sapiens
ttcaccaatggggaa

SEQ ID NO: 1495112 - DNA, 15 bp, Homo sapiens
tcaccaatggggaaa

SEQ ID NO: 1495113 - DNA, 15 bp, Homo sapiens
caccaatggggaaat

SEQ ID NO: 1495114 - DNA, 15 bp, Homo sapiens
accaatggggaaatt

SEQ ID NO: 1495115 - DNA, 15 bp, Homo sapiens
ccaatggggaaattt

SEQ ID NO: 1495116 - DNA, 15 bp, Homo sapiens
caatggggaaattta

SEQ ID NO: 1495117 - DNA, 15 bp, Homo sapiens
aatggggaaatttaa

SEQ ID NO: 1495118 - DNA, 15 bp, Homo sapiens
atggggaaatttaat

SEQ ID NO: 1495119 - DNA, 15 bp, Homo sapiens
tggggaaatttaata

SEQ ID NO: 1495120 - DNA, 15 bp, Homo sapiens
ggggaaatttaataa

SEQ ID NO: 1495121 - DNA, 15 bp, Homo sapiens
gggaaatttaataaa

SEQ ID NO: 1495122 - DNA, 15 bp, Homo sapiens
ggaaatttaataaat

SEQ ID NO: 1495123 - DNA, 15 bp, Homo sapiens
gaaatttaataaatg

SEQ ID NO: 1495124 - DNA, 15 bp, Homo sapiens
atttaataaatgtgg

SEQ ID NO: 1495125 - DNA, 15 bp, Homo sapiens
tttaataaatgtggt

SEQ ID NO: 1495126 - DNA, 15 bp, Homo sapiens
ttaataaatgtggtt

SEQ ID NO: 1495127 - DNA, 15 bp, Homo sapiens
taataaatgtggttt

SEQ ID NO: 1495128 - DNA, 15 bp, Homo sapiens
aataaatgtggttta

SEQ ID NO: 1495129 - DNA, 15 bp, Homo sapiens
ataaatgtggtttat

SEQ ID NO: 1495130 - DNA, 15 bp, Homo sapiens
taaatgtggtttatc

SEQ ID NO: 1495131 - DNA, 15 bp, Homo sapiens
aaatgtggtttatct

SEQ ID NO: 1495132 - DNA, 15 bp, Homo sapiens
aatgtggtttatcta

SEQ ID NO: 1495133 - DNA, 15 bp, Homo sapiens
atgtggtttatctaa

SEQ ID NO: 1495134 - DNA, 15 bp, Homo sapiens
tgtggtttatctaag

SEQ ID NO: 1495135 - DNA, 15 bp, Homo sapiens
gtggtttatctaagg

SEQ ID NO: 1495136 - DNA, 15 bp, Homo sapiens
tggtttatctaaggt

SEQ ID NO: 1495137 - DNA, 15 bp, Homo sapiens
ggtttatctaaggtt

SEQ ID NO: 1495138 - DNA, 15 bp, Homo sapiens
gtttatctaaggttc

SEQ ID NO: 1495139 - DNA, 15 bp, Homo sapiens
tttatctaaggttcg

SEQ ID NO: 1495140 - DNA, 15 bp, Homo sapiens
ttatctaaggttcgt

SEQ ID NO: 1495141 - DNA, 15 bp, Homo sapiens
tatctaaggttcgtg

SEQ ID NO: 1495142 - DNA, 15 bp, Homo sapiens
atctaaggttcgtgc

SEQ ID NO: 1495143 - DNA, 15 bp, Homo sapiens
tctaaggttcgtgct

SEQ ID NO: 1495144 - DNA, 15 bp, Homo sapiens
ctaaggttcgtgctt

SEQ ID NO: 1495145 - DNA, 15 bp, Homo sapiens
taaggttcgtgcttt

SEQ ID NO: 1495146 - DNA, 15 bp, Homo sapiens
aaggttcgtgctttc

SEQ ID NO: 1495147 - DNA, 15 bp, Homo sapiens
aggttcgtgctttcg

SEQ ID NO: 1495148 - DNA, 15 bp, Homo sapiens
ggttcgtgctttcgg

SEQ ID NO: 1495149 - DNA, 15 bp, Homo sapiens
gttcgtgctttcggc

SEQ ID NO: 1495150 - DNA, 15 bp, Homo sapiens
ttcgtgctttcggct

SEQ ID NO: 1495151 - DNA, 15 bp, Homo sapiens
tcgtgctttcggcta

SEQ ID NO: 1495152 - DNA, 15 bp, Homo sapiens
cgtgctttcggctac

SEQ ID NO: 1495153 - DNA, 15 bp, Homo sapiens
gtgctttcggctaca

SEQ ID NO: 1495154 - DNA, 15 bp, Homo sapiens
tgctttcggctacat

SEQ ID NO: 1495155 - DNA, 15 bp, Homo sapiens
gctttcggctacatc

SEQ ID NO: 1495156 - DNA, 15 bp, Homo sapiens
ctttcggctacatct

SEQ ID NO: 1495157 - DNA, 15 bp, Homo sapiens
tttcggctacatctg

SEQ ID NO: 1495158 - DNA, 15 bp, Homo sapiens
ttcggctacatctgc

SEQ ID NO: 1495159 - DNA, 15 bp, Homo sapiens
tcggctacatctgca

SEQ ID NO: 1495160 - DNA, 15 bp, Homo sapiens
cggctacatctgcac

SEQ ID NO: 1495161 - DNA, 15 bp, Homo sapiens
ggctacatctgcact

SEQ ID NO: 1495162 - DNA, 15 bp, Homo sapiens
gctacatctgcacta

SEQ ID NO: 1495163 - DNA, 15 bp, Homo sapiens
ctacatctgcactaa

SEQ ID NO: 1495164 - DNA, 15 bp, Homo sapiens
tacatctgcactaat

SEQ ID NO: 1495165 - DNA, 15 bp, Homo sapiens
acatctgcactaatg

SEQ ID NO: 1495166 - DNA, 15 bp, Homo sapiens
catctgcactaatga

SEQ ID NO: 1495167 - DNA, 15 bp, Homo sapiens
atctgcactaatgac

SEQ ID NO: 1495168 - DNA, 15 bp, Homo sapiens
tctgcactaatgact

SEQ ID NO: 1495169 - DNA, 15 bp, Homo sapiens
ctgcactaatgactc

SEQ ID NO: 1495170 - DNA, 15 bp, Homo sapiens
tgcactaatgactca

SEQ ID NO: 1495171 - DNA, 15 bp, Homo sapiens
gcactaatgactcag

SEQ ID NO: 1495172 - DNA, 15 bp, Homo sapiens
cactaatgactcagg

SEQ ID NO: 1495173 - DNA, 15 bp, Homo sapiens
actaatgactcaggc

SEQ ID NO: 1495174 - DNA, 15 bp, Homo sapiens
ctaatgactcaggca

SEQ ID NO: 1495175 - DNA, 15 bp, Homo sapiens
taatgactcaggcag

SEQ ID NO: 1495176 - DNA, 15 bp, Homo sapiens
aatgactcaggcagt

SEQ ID NO: 1495177 - DNA, 15 bp, Homo sapiens
atgactcaggcagtt

SEQ ID NO: 1495178 - DNA, 15 bp, Homo sapiens
tgactcaggcagttt

SEQ ID NO: 1495179 - DNA, 15 bp, Homo sapiens
gactcaggcagtttg

SEQ ID NO: 1495180 - DNA, 15 bp, Homo sapiens
actcaggcagtttgc

SEQ ID NO: 1495181 - DNA, 15 bp, Homo sapiens
ctcaggcagtttgct

SEQ ID NO: 1495182 - DNA, 15 bp, Homo sapiens
tcaggcagtttgctc

SEQ ID NO: 1495183 - DNA, 15 bp, Homo sapiens
caggcagtttgctcc

SEQ ID NO: 1495184 - DNA, 15 bp, Homo sapiens
aggcagtttgctcct

SEQ ID NO: 1495185 - DNA, 15 bp, Homo sapiens
ggcagtttgctcctc

SEQ ID NO: 1495186 - DNA, 15 bp, Homo sapiens
gcagtttgctcctcg

SEQ ID NO: 1495187 - DNA, 15 bp, Homo sapiens
cagtttgctcctcgg

SEQ ID NO: 1495188 - DNA, 15 bp, Homo sapiens
agtttgctcctcgga

SEQ ID NO: 1495189 - DNA, 15 bp, Homo sapiens
gtttgctcctcggag

SEQ ID NO: 1495190 - DNA, 15 bp, Homo sapiens
tttgctcctcggaga

SEQ ID NO: 1495191 - DNA, 15 bp, Homo sapiens
ttgctcctcggagac

SEQ ID NO: 1495192 - DNA, 15 bp, Homo sapiens
tgctcctcggagacc

SEQ ID NO: 1495193 - DNA, 15 bp, Homo sapiens
gctcctcggagacca

SEQ ID NO: 1495194 - DNA, 15 bp, Homo sapiens
ctcctcggagaccat

SEQ ID NO: 1495195 - DNA, 15 bp, Homo sapiens
tcctcggagaccatc

SEQ ID NO: 1495196 - DNA, 15 bp, Homo sapiens
cctcggagaccatca

SEQ ID NO: 1495197 - DNA, 15 bp, Homo sapiens
ctcggagaccatcat

SEQ ID NO: 1495198 - DNA, 15 bp, Homo sapiens
tcggagaccatcatt

SEQ ID NO: 1495199 - DNA, 15 bp, Homo sapiens
cggagaccatcattt

SEQ ID NO: 1495200 - DNA, 15 bp, Homo sapiens
ggagaccatcatttt

SEQ ID NO: 1495201 - DNA, 15 bp, Homo sapiens
gagaccatcattttt

SEQ ID NO: 1495202 - DNA, 15 bp, Homo sapiens
agaccatcatttttc

SEQ ID NO: 1495203 - DNA, 15 bp, Homo sapiens
gaccatcatttttct

SEQ ID NO: 1495204 - DNA, 15 bp, Homo sapiens
accatcatttttctt

SEQ ID NO: 1495205 - DNA, 15 bp, Homo sapiens
ccatcatttttcttt

SEQ ID NO: 1495206 - DNA, 15 bp, Homo sapiens
catcatttttcttta

SEQ ID NO: 1495207 - DNA, 15 bp, Homo sapiens
atcatttttctttat

SEQ ID NO: 1495208 - DNA, 15 bp, Homo sapiens
tcatttttctttatt

SEQ ID NO: 1495209 - DNA, 15 bp, Homo sapiens
catttttctttattt

SEQ ID NO: 1495210 - DNA, 15 bp, Homo sapiens
atttttctttatttg

SEQ ID NO: 1495211 - DNA, 15 bp, Homo sapiens
tttttctttatttgc

SEQ ID NO: 1495212 - DNA, 15 bp, Homo sapiens
ttttctttatttgct

SEQ ID NO: 1495213 - DNA, 15 bp, Homo sapiens
tttctttatttgctc

SEQ ID NO: 1495214 - DNA, 15 bp, Homo sapiens
ttctttatttgctcc

SEQ ID NO: 1495215 - DNA, 15 bp, Homo sapiens
tctttatttgctcca

SEQ ID NO: 1495216 - DNA, 15 bp, Homo sapiens
ctttatttgctccag

SEQ ID NO: 1495217 - DNA, 15 bp, Homo sapiens
tttatttgctccagc

SEQ ID NO: 1495218 - DNA, 15 bp, Homo sapiens
ttatttgctccagca

SEQ ID NO: 1495219 - DNA, 15 bp, Homo sapiens
tatttgctccagcag

SEQ ID NO: 1495220 - DNA, 15 bp, Homo sapiens
atttgctccagcagt

SEQ ID NO: 1495221 - DNA, 15 bp, Homo sapiens
tttgctccagcagtg

SEQ ID NO: 1495222 - DNA, 15 bp, Homo sapiens
ttgctccagcagtga

SEQ ID NO: 1495223 - DNA, 15 bp, Homo sapiens
tgctccagcagtgag

SEQ ID NO: 1495224 - DNA, 15 bp, Homo sapiens
gctccagcagtgagg

SEQ ID NO: 1495225 - DNA, 15 bp, Homo sapiens
ctccagcagtgaggt

SEQ ID NO: 1495226 - DNA, 15 bp, Homo sapiens
tccagcagtgaggtt

SEQ ID NO: 1495227 - DNA, 15 bp, Homo sapiens
ccagcagtgaggttt

SEQ ID NO: 1495228 - DNA, 15 bp, Homo sapiens
cagcagtgaggtttc

SEQ ID NO: 1495229 - DNA, 15 bp, Homo sapiens
agcagtgaggtttca

SEQ ID NO: 1495230 - DNA, 15 bp, Homo sapiens
gcagtgaggtttcag

SEQ ID NO: 1495231 - DNA, 15 bp, Homo sapiens
cagtgaggtttcagc

SEQ ID NO: 1495232 - DNA, 15 bp, Homo sapiens
agtgaggtttcagcc

SEQ ID NO: 1495233 - DNA, 15 bp, Homo sapiens
gtgaggtttcagcct

SEQ ID NO: 1495234 - DNA, 15 bp, Homo sapiens
tgaggtttcagcctg

SEQ ID NO: 1495235 - DNA, 15 bp, Homo sapiens
gaggtttcagcctga

SEQ ID NO: 1495236 - DNA, 15 bp, Homo sapiens
aggtttcagcctgag

SEQ ID NO: 1495237 - DNA, 15 bp, Homo sapiens
ggtttcagcctgagg

SEQ ID NO: 1495238 - DNA, 15 bp, Homo sapiens
gtttcagcctgaggg

SEQ ID NO: 1495239 - DNA, 15 bp, Homo sapiens
tttcagcctgaggga

SEQ ID NO: 1495240 - DNA, 15 bp, Homo sapiens
ttcagcctgagggag

SEQ ID NO: 1495241 - DNA, 15 bp, Homo sapiens
tcagcctgagggaga

SEQ ID NO: 1495242 - DNA, 15 bp, Homo sapiens
cagcctgagggagag

SEQ ID NO: 1495243 - DNA, 15 bp, Homo sapiens
agcctgagggagaga

SEQ ID NO: 1495244 - DNA, 15 bp, Homo sapiens
gcctgagggagagaa

SEQ ID NO: 1495245 - DNA, 15 bp, Homo sapiens
cctgagggagagaac

SEQ ID NO: 1495246 - DNA, 15 bp, Homo sapiens
ctgagggagagaacg

SEQ ID NO: 1495247 - DNA, 15 bp, Homo sapiens
tgagggagagaacgt

SEQ ID NO: 1495248 - DNA, 15 bp, Homo sapiens
gagggagagaacgtc

SEQ ID NO: 1495249 - DNA, 15 bp, Homo sapiens
agggagagaacgtca

SEQ ID NO: 1495250 - DNA, 15 bp, Homo sapiens
gggagagaacgtcag

SEQ ID NO: 1495251 - DNA, 15 bp, Homo sapiens
ggagagaacgtcagg

SEQ ID NO: 1495252 - DNA, 15 bp, Homo sapiens
gagagaacgtcaggg

SEQ ID NO: 1495253 - DNA, 15 bp, Homo sapiens
agagaacgtcaggga

SEQ ID NO: 1495254 - DNA, 15 bp, Homo sapiens
gagaacgtcagggac

SEQ ID NO: 1495255 - DNA, 15 bp, Homo sapiens
agaacgtcagggacg

SEQ ID NO: 1495256 - DNA, 15 bp, Homo sapiens
gaacgtcagggacgg

SEQ ID NO: 1495257 - DNA, 15 bp, Homo sapiens
aacgtcagggacgga

SEQ ID NO: 1495258 - DNA, 15 bp, Homo sapiens
acgtcagggacggag

SEQ ID NO: 1495259 - DNA, 15 bp, Homo sapiens
cgtcagggacggaga

SEQ ID NO: 1495260 - DNA, 15 bp, Homo sapiens
gtcagggacggagag

SEQ ID NO: 1495261 - DNA, 15 bp, Homo sapiens
tcagggacggagagg

SEQ ID NO: 1495262 - DNA, 15 bp, Homo sapiens
cagggacggagaggc

SEQ ID NO: 1495263 - DNA, 15 bp, Homo sapiens
agggacggagaggca

SEQ ID NO: 1495264 - DNA, 15 bp, Homo sapiens
gggacggagaggcaa

SEQ ID NO: 1495265 - DNA, 15 bp, Homo sapiens
ggacggagaggcaag

SEQ ID NO: 1495266 - DNA, 15 bp, Homo sapiens
gacggagaggcaagc

SEQ ID NO: 1495267 - DNA, 15 bp, Homo sapiens
acggagaggcaagca

SEQ ID NO: 1495268 - DNA, 15 bp, Homo sapiens
cggagaggcaagcat

SEQ ID NO: 1495269 - DNA, 15 bp, Homo sapiens
ggagaggcaagcatt

SEQ ID NO: 1495270 - DNA, 15 bp, Homo sapiens
gagaggcaagcattc

SEQ ID NO: 1495271 - DNA, 15 bp, Homo sapiens
agaggcaagcattct

SEQ ID NO: 1495272 - DNA, 15 bp, Homo sapiens
gaggcaagcattctt

SEQ ID NO: 1495273 - DNA, 15 bp, Homo sapiens
aggcaagcattcttg

SEQ ID NO: 1495274 - DNA, 15 bp, Homo sapiens
ggcaagcattcttgg

SEQ ID NO: 1495275 - DNA, 15 bp, Homo sapiens
gcaagcattcttggt

SEQ ID NO: 1495276 - DNA, 15 bp, Homo sapiens
caagcattcttggtc

SEQ ID NO: 1495277 - DNA, 15 bp, Homo sapiens
aagcattcttggtcc

SEQ ID NO: 1495278 - DNA, 15 bp, Homo sapiens
agcattcttggtcct

SEQ ID NO: 1495279 - DNA, 15 bp, Homo sapiens
gcattcttggtccta

SEQ ID NO: 1495280 - DNA, 15 bp, Homo sapiens
cattcttggtcctac

SEQ ID NO: 1495281 - DNA, 15 bp, Homo sapiens
attcttggtcctact

SEQ ID NO: 1495282 - DNA, 15 bp, Homo sapiens
ttcttggtcctactt

SEQ ID NO: 1495283 - DNA, 15 bp, Homo sapiens
tcttggtcctacttc

SEQ ID NO: 1495284 - DNA, 15 bp, Homo sapiens
cttggtcctacttct

SEQ ID NO: 1495285 - DNA, 15 bp, Homo sapiens
ttggtcctacttctg

SEQ ID NO: 1495286 - DNA, 15 bp, Homo sapiens
tggtcctacttctgg

SEQ ID NO: 1495287 - DNA, 15 bp, Homo sapiens
ggtcctacttctggg

SEQ ID NO: 1495288 - DNA, 15 bp, Homo sapiens
gtcctacttctggga

SEQ ID NO: 1495289 - DNA, 15 bp, Homo sapiens
tcctacttctgggat

SEQ ID NO: 1495290 - DNA, 15 bp, Homo sapiens
cctacttctgggatt

SEQ ID NO: 1495291 - DNA, 15 bp, Homo sapiens
ctacttctgggattt

SEQ ID NO: 1495292 - DNA, 15 bp, Homo sapiens
tacttctgggatttt

SEQ ID NO: 1495293 - DNA, 15 bp, Homo sapiens
acttctgggattttt

SEQ ID NO: 1495294 - DNA, 15 bp, Homo sapiens
cttctgggatttttt

SEQ ID NO: 1495295 - DNA, 15 bp, Homo sapiens
ttctgggattttttt

SEQ ID NO: 1495296 - DNA, 15 bp, Homo sapiens
tctgggatttttttg

SEQ ID NO: 1495297 - DNA, 15 bp, Homo sapiens
ctgggatttttttgt

SEQ ID NO: 1495298 - DNA, 15 bp, Homo sapiens
tgggatttttttgta

SEQ ID NO: 1495299 - DNA, 15 bp, Homo sapiens
gggatttttttgtat

SEQ ID NO: 1495300 - DNA, 15 bp, Homo sapiens
ggatttttttgtatt

SEQ ID NO: 1495301 - DNA, 15 bp, Homo sapiens
gatttttttgtattc

SEQ ID NO: 1495302 - DNA, 15 bp, Homo sapiens
atttttttgtattcc

SEQ ID NO: 1495303 - DNA, 15 bp, Homo sapiens
tttttttgtattccc

SEQ ID NO: 1495304 - DNA, 15 bp, Homo sapiens
ttttttgtattccct

SEQ ID NO: 1495305 - DNA, 15 bp, Homo sapiens
tttttgtattccctc

SEQ ID NO: 1495306 - DNA, 15 bp, Homo sapiens
ttttgtattccctcc

SEQ ID NO: 1495307 - DNA, 15 bp, Homo sapiens
tttgtattccctccg

SEQ ID NO: 1495308 - DNA, 15 bp, Homo sapiens
ttgtattccctccga

SEQ ID NO: 1495309 - DNA, 15 bp, Homo sapiens
tgtattccctccgaa

SEQ ID NO: 1495310 - DNA, 15 bp, Homo sapiens
gtattccctccgaac

SEQ ID NO: 1495311 - DNA, 15 bp, Homo sapiens
tattccctccgaaca

SEQ ID NO: 1495312 - DNA, 15 bp, Homo sapiens
attccctccgaacat

SEQ ID NO: 1495313 - DNA, 15 bp, Homo sapiens
ttccctccgaacatt

SEQ ID NO: 1495314 - DNA, 15 bp, Homo sapiens
tccctccgaacattt

SEQ ID NO: 1495315 - DNA, 15 bp, Homo sapiens
ccctccgaacatttg

SEQ ID NO: 1495316 - DNA, 15 bp, Homo sapiens
cctccgaacatttgg

SEQ ID NO: 1495317 - DNA, 15 bp, Homo sapiens
ctccgaacatttggt

SEQ ID NO: 1495318 - DNA, 15 bp, Homo sapiens
tccgaacatttggtt

SEQ ID NO: 1495319 - DNA, 15 bp, Homo sapiens
ccgaacatttggttc

SEQ ID NO: 1495320 - DNA, 15 bp, Homo sapiens
cgaacatttggttcc

SEQ ID NO: 1495321 - DNA, 15 bp, Homo sapiens
gaacatttggttcca

SEQ ID NO: 1495322 - DNA, 15 bp, Homo sapiens
aacatttggttccat

SEQ ID NO: 1495323 - DNA, 15 bp, Homo sapiens
acatttggttccatt

SEQ ID NO: 1495324 - DNA, 15 bp, Homo sapiens
catttggttccattt

SEQ ID NO: 1495325 - DNA, 15 bp, Homo sapiens
atttggttccatttc

SEQ ID NO: 1495326 - DNA, 15 bp, Homo sapiens
tttggttccatttct

SEQ ID NO: 1495327 - DNA, 15 bp, Homo sapiens
ttggttccatttctt

SEQ ID NO: 1495328 - DNA, 15 bp, Homo sapiens
tggttccatttcttc

SEQ ID NO: 1495329 - DNA, 15 bp, Homo sapiens
ggttccatttcttca

SEQ ID NO: 1495330 - DNA, 15 bp, Homo sapiens
gttccatttcttcac

SEQ ID NO: 1495331 - DNA, 15 bp, Homo sapiens
ttccatttcttcact

SEQ ID NO: 1495332 - DNA, 15 bp, Homo sapiens
tccatttcttcactt

SEQ ID NO: 1495333 - DNA, 15 bp, Homo sapiens
ccatttcttcacttc

SEQ ID NO: 1495334 - DNA, 15 bp, Homo sapiens
catttcttcacttcc

SEQ ID NO: 1495335 - DNA, 15 bp, Homo sapiens
atttcttcacttcct

SEQ ID NO: 1495336 - DNA, 15 bp, Homo sapiens
tttcttcacttcctt

SEQ ID NO: 1495337 - DNA, 15 bp, Homo sapiens
ttcttcacttccttc

SEQ ID NO: 1495338 - DNA, 15 bp, Homo sapiens
tcttcacttccttcc

SEQ ID NO: 1495339 - DNA, 15 bp, Homo sapiens
cttcacttccttcca

SEQ ID NO: 1495340 - DNA, 15 bp, Homo sapiens
ttcacttccttccag

SEQ ID NO: 1495341 - DNA, 15 bp, Homo sapiens
tcacttccttccagt

SEQ ID NO: 1495342 - DNA, 15 bp, Homo sapiens
cacttccttccagtc

SEQ ID NO: 1495343 - DNA, 15 bp, Homo sapiens
acttccttccagtcg

SEQ ID NO: 1495344 - DNA, 15 bp, Homo sapiens
cttccttccagtcgt

SEQ ID NO: 1495345 - DNA, 15 bp, Homo sapiens
ttccttccagtcgtg

SEQ ID NO: 1495346 - DNA, 15 bp, Homo sapiens
tccttccagtcgtgc

SEQ ID NO: 1495347 - DNA, 15 bp, Homo sapiens
ccttccagtcgtgcc

SEQ ID NO: 1495348 - DNA, 15 bp, Homo sapiens
cttccagtcgtgccg

SEQ ID NO: 1495349 - DNA, 15 bp, Homo sapiens
ttccagtcgtgccgg

SEQ ID NO: 1495350 - DNA, 15 bp, Homo sapiens
tccagtcgtgccgga

SEQ ID NO: 1495351 - DNA, 15 bp, Homo sapiens
ccagtcgtgccggat

SEQ ID NO: 1495352 - DNA, 15 bp, Homo sapiens
cagtcgtgccggatt

SEQ ID NO: 1495353 - DNA, 15 bp, Homo sapiens
agtcgtgccggatta

SEQ ID NO: 1495354 - DNA, 15 bp, Homo sapiens
gtcgtgccggattat

SEQ ID NO: 1495355 - DNA, 15 bp, Homo sapiens
tcgtgccggattatt

SEQ ID NO: 1495356 - DNA, 15 bp, Homo sapiens
cgtgccggattattt

SEQ ID NO: 1495357 - DNA, 15 bp, Homo sapiens
gtgccggattatttc

SEQ ID NO: 1495358 - DNA, 15 bp, Homo sapiens
tgccggattatttct

SEQ ID NO: 1495359 - DNA, 15 bp, Homo sapiens
gccggattatttctt

SEQ ID NO: 1495360 - DNA, 15 bp, Homo sapiens
ccggattatttctta

SEQ ID NO: 1495361 - DNA, 15 bp, Homo sapiens
cggattatttcttat

SEQ ID NO: 1495362 - DNA, 15 bp, Homo sapiens
ggattatttcttatt

SEQ ID NO: 1495363 - DNA, 15 bp, Homo sapiens
gattatttcttattg

SEQ ID NO: 1495364 - DNA, 15 bp, Homo sapiens
attatttcttattgc

SEQ ID NO: 1495365 - DNA, 15 bp, Homo sapiens
ttatttcttattgca

SEQ ID NO: 1495366 - DNA, 15 bp, Homo sapiens
tatttcttattgcag

SEQ ID NO: 1495367 - DNA, 15 bp, Homo sapiens
atttcttattgcagc

SEQ ID NO: 1495368 - DNA, 15 bp, Homo sapiens
tttcttattgcagca

SEQ ID NO: 1495369 - DNA, 15 bp, Homo sapiens
ttcttattgcagcag

SEQ ID NO: 1495370 - DNA, 15 bp, Homo sapiens
tcttattgcagcaga

SEQ ID NO: 1495371 - DNA, 15 bp, Homo sapiens
cttattgcagcagaa

SEQ ID NO: 1495372 - DNA, 15 bp, Homo sapiens
ttattgcagcagaac

SEQ ID NO: 1495373 - DNA, 15 bp, Homo sapiens
tattgcagcagaacc

SEQ ID NO: 1495374 - DNA, 15 bp, Homo sapiens
attgcagcagaaccc

SEQ ID NO: 1495375 - DNA, 15 bp, Homo sapiens
ttgcagcagaaccca

SEQ ID NO: 1495376 - DNA, 15 bp, Homo sapiens
tgcagcagaacccat

SEQ ID NO: 1495377 - DNA, 15 bp, Homo sapiens
gcagcagaacccatt

SEQ ID NO: 1495378 - DNA, 15 bp, Homo sapiens
cagcagaacccattc

SEQ ID NO: 1495379 - DNA, 15 bp, Homo sapiens
agcagaacccattca

SEQ ID NO: 1495380 - DNA, 15 bp, Homo sapiens
gcagaacccattcat

SEQ ID NO: 1495381 - DNA, 15 bp, Homo sapiens
cagaacccattcata

SEQ ID NO: 1495382 - DNA, 15 bp, Homo sapiens
agaacccattcataa

SEQ ID NO: 1495383 - DNA, 15 bp, Homo sapiens
gaacccattcataac

SEQ ID NO: 1495384 - DNA, 15 bp, Homo sapiens
aacccattcataact

SEQ ID NO: 1495385 - DNA, 15 bp, Homo sapiens
acccattcataactt

SEQ ID NO: 1495386 - DNA, 15 bp, Homo sapiens
cccattcataacttt

SEQ ID NO: 1495387 - DNA, 15 bp, Homo sapiens
ccattcataacttta

SEQ ID NO: 1495388 - DNA, 15 bp, Homo sapiens
cattcataactttaa

SEQ ID NO: 1495389 - DNA, 15 bp, Homo sapiens
attcataactttaat

SEQ ID NO: 1495390 - DNA, 15 bp, Homo sapiens
ttcataactttaatc

SEQ ID NO: 1495391 - DNA, 15 bp, Homo sapiens
tcataactttaatca

SEQ ID NO: 1495392 - DNA, 15 bp, Homo sapiens
cataactttaatcag

SEQ ID NO: 1495393 - DNA, 15 bp, Homo sapiens
ataactttaatcaga

SEQ ID NO: 1495394 - DNA, 15 bp, Homo sapiens
taactttaatcagag

SEQ ID NO: 1495395 - DNA, 15 bp, Homo sapiens
aactttaatcagagg

SEQ ID NO: 1495396 - DNA, 15 bp, Homo sapiens
actttaatcagagga

SEQ ID NO: 1495397 - DNA, 15 bp, Homo sapiens
ctttaatcagaggac

SEQ ID NO: 1495398 - DNA, 15 bp, Homo sapiens
tttaatcagaggaca

SEQ ID NO: 1495399 - DNA, 15 bp, Homo sapiens
ttaatcagaggacag

SEQ ID NO: 1495400 - DNA, 15 bp, Homo sapiens
taatcagaggacagg

SEQ ID NO: 1495401 - DNA, 15 bp, Homo sapiens
aatcagaggacagga

SEQ ID NO: 1495402 - DNA, 15 bp, Homo sapiens
atcagaggacaggac

SEQ ID NO: 1495403 - DNA, 15 bp, Homo sapiens
tcagaggacaggacg

SEQ ID NO: 1495404 - DNA, 15 bp, Homo sapiens
cagaggacaggacga

SEQ ID NO: 1495405 - DNA, 15 bp, Homo sapiens
agaggacaggacgaa

SEQ ID NO: 1495406 - DNA, 15 bp, Homo sapiens
gaggacaggacgaat

SEQ ID NO: 1495407 - DNA, 15 bp, Homo sapiens
aggacaggacgaatg

SEQ ID NO: 1495408 - DNA, 15 bp, Homo sapiens
ggacaggacgaatgt

SEQ ID NO: 1495409 - DNA, 15 bp, Homo sapiens
gacaggacgaatgtt

SEQ ID NO: 1495410 - DNA, 15 bp, Homo sapiens
acaggacgaatgttc

SEQ ID NO: 1495411 - DNA, 15 bp, Homo sapiens
caggacgaatgttca

SEQ ID NO: 1495412 - DNA, 15 bp, Homo sapiens
aggacgaatgttcag

SEQ ID NO: 1495413 - DNA, 15 bp, Homo sapiens
ggacgaatgttcagt

SEQ ID NO: 1495414 - DNA, 15 bp, Homo sapiens
gacgaatgttcagta

SEQ ID NO: 1495415 - DNA, 15 bp, Homo sapiens
acgaatgttcagtaa

SEQ ID NO: 1495416 - DNA, 15 bp, Homo sapiens
cgaatgttcagtaaa

SEQ ID NO: 1495417 - DNA, 15 bp, Homo sapiens
gaatgttcagtaaac

SEQ ID NO: 1495418 - DNA, 15 bp, Homo sapiens
aatgttcagtaaacg

SEQ ID NO: 1495419 - DNA, 15 bp, Homo sapiens
atgttcagtaaacgc

SEQ ID NO: 1495420 - DNA, 15 bp, Homo sapiens
tgttcagtaaacgca

SEQ ID NO: 1495421 - DNA, 15 bp, Homo sapiens
gttcagtaaacgcat

SEQ ID NO: 1495422 - DNA, 15 bp, Homo sapiens
ttcagtaaacgcatg

SEQ ID NO: 1495423 - DNA, 15 bp, Homo sapiens
tcagtaaacgcatgt

SEQ ID NO: 1495424 - DNA, 15 bp, Homo sapiens
cagtaaacgcatgta

SEQ ID NO: 1495425 - DNA, 15 bp, Homo sapiens
agtaaacgcatgtat

SEQ ID NO: 1495426 - DNA, 15 bp, Homo sapiens
gtaaacgcatgtata

SEQ ID NO: 1495427 - DNA, 15 bp, Homo sapiens
taaacgcatgtataa

SEQ ID NO: 1495428 - DNA, 15 bp, Homo sapiens
aaacgcatgtataaa

SEQ ID NO: 1495429 - DNA, 15 bp, Homo sapiens
aacgcatgtataaag

SEQ ID NO: 1495430 - DNA, 15 bp, Homo sapiens
acgcatgtataaaga

SEQ ID NO: 1495431 - DNA, 15 bp, Homo sapiens
cgcatgtataaagag

SEQ ID NO: 1495432 - DNA, 15 bp, Homo sapiens
gcatgtataaagaga

SEQ ID NO: 1495433 - DNA, 15 bp, Homo sapiens
catgtataaagagaa

SEQ ID NO: 1495434 - DNA, 15 bp, Homo sapiens
atgtataaagagaac

SEQ ID NO: 1495435 - DNA, 15 bp, Homo sapiens
tgtataaagagaact

SEQ ID NO: 1495436 - DNA, 15 bp, Homo sapiens
gtataaagagaacta

SEQ ID NO: 1495437 - DNA, 15 bp, Homo sapiens
tataaagagaactat

SEQ ID NO: 1495438 - DNA, 15 bp, Homo sapiens
ataaagagaactatt

SEQ ID NO: 1495439 - DNA, 15 bp, Homo sapiens
taaagagaactattg

SEQ ID NO: 1495440 - DNA, 15 bp, Homo sapiens
aaagagaactattgt

SEQ ID NO: 1495441 - DNA, 15 bp, Homo sapiens
aagagaactattgta

SEQ ID NO: 1495442 - DNA, 15 bp, Homo sapiens
agagaactattgtat

SEQ ID NO: 1495443 - DNA, 15 bp, Homo sapiens
gagaactattgtatg

SEQ ID NO: 1495444 - DNA, 15 bp, Homo sapiens
agaactattgtatgt

SEQ ID NO: 1495445 - DNA, 15 bp, Homo sapiens
gaactattgtatgta

SEQ ID NO: 1495446 - DNA, 15 bp, Homo sapiens
aactattgtatgtaa

SEQ ID NO: 1495447 - DNA, 15 bp, Homo sapiens
actattgtatgtaat

SEQ ID NO: 1495448 - DNA, 15 bp, Homo sapiens
ctattgtatgtaatt

SEQ ID NO: 1495449 - DNA, 15 bp, Homo sapiens
tattgtatgtaattg

SEQ ID NO: 1495450 - DNA, 15 bp, Homo sapiens
attgtatgtaattgt

SEQ ID NO: 1495451 - DNA, 15 bp, Homo sapiens
ttgtatgtaattgtg

SEQ ID NO: 1495452 - DNA, 15 bp, Homo sapiens
tgtatgtaattgtga

SEQ ID NO: 1495453 - DNA, 15 bp, Homo sapiens
gtatgtaattgtgac

SEQ ID NO: 1495454 - DNA, 15 bp, Homo sapiens
tatgtaattgtgaca

SEQ ID NO: 1495455 - DNA, 15 bp, Homo sapiens
atgtaattgtgacat

SEQ ID NO: 1495456 - DNA, 15 bp, Homo sapiens
tgtaattgtgacatc

SEQ ID NO: 1495457 - DNA, 15 bp, Homo sapiens
gtaattgtgacatct

SEQ ID NO: 1495458 - DNA, 15 bp, Homo sapiens
taattgtgacatctg

SEQ ID NO: 1495459 - DNA, 15 bp, Homo sapiens
aattgtgacatctgt

SEQ ID NO: 1495460 - DNA, 15 bp, Homo sapiens
attgtgacatctgtg

SEQ ID NO: 1495461 - DNA, 15 bp, Homo sapiens
ttgtgacatctgtgg

SEQ ID NO: 1495462 - DNA, 15 bp, Homo sapiens
tgtgacatctgtggg

SEQ ID NO: 1495463 - DNA, 15 bp, Homo sapiens
gtgacatctgtggga

SEQ ID NO: 1495464 - DNA, 15 bp, Homo sapiens
tgacatctgtgggag

SEQ ID NO: 1495465 - DNA, 15 bp, Homo sapiens
gacatctgtgggaga

SEQ ID NO: 1495466 - DNA, 15 bp, Homo sapiens
acatctgtgggagaa

SEQ ID NO: 1495467 - DNA, 15 bp, Homo sapiens
catctgtgggagaaa

SEQ ID NO: 1495468 - DNA, 15 bp, Homo sapiens
atctgtgggagaaag

SEQ ID NO: 1495469 - DNA, 15 bp, Homo sapiens
tctgtgggagaaagg

SEQ ID NO: 1495470 - DNA, 15 bp, Homo sapiens
ctgtgggagaaagga

SEQ ID NO: 1495471 - DNA, 15 bp, Homo sapiens
tgtgggagaaaggat

SEQ ID NO: 1495472 - DNA, 15 bp, Homo sapiens
gtgggagaaaggatg

SEQ ID NO: 1495473 - DNA, 15 bp, Homo sapiens
tgggagaaaggatgt

SEQ ID NO: 1495474 - DNA, 15 bp, Homo sapiens
gggagaaaggatgta

SEQ ID NO: 1495475 - DNA, 15 bp, Homo sapiens
ggagaaaggatgtaa

SEQ ID NO: 1495476 - DNA, 15 bp, Homo sapiens
gagaaaggatgtaaa

SEQ ID NO: 1495477 - DNA, 15 bp, Homo sapiens
agaaaggatgtaaaa

SEQ ID NO: 1495478 - DNA, 15 bp, Homo sapiens
gaaaggatgtaaaaa

SEQ ID NO: 1495479 - DNA, 15 bp, Homo sapiens
aaaggatgtaaaaat

SEQ ID NO: 1495480 - DNA, 15 bp, Homo sapiens
aaggatgtaaaaata

SEQ ID NO: 1495481 - DNA, 15 bp, Homo sapiens
aggatgtaaaaatag

SEQ ID NO: 1495482 - DNA, 15 bp, Homo sapiens
ggatgtaaaaatagt

SEQ ID NO: 1495483 - DNA, 15 bp, Homo sapiens
gatgtaaaaatagta

SEQ ID NO: 1495484 - DNA, 15 bp, Homo sapiens
atgtaaaaatagtaa

SEQ ID NO: 1495485 - DNA, 15 bp, Homo sapiens
tgtaaaaatagtaac

SEQ ID NO: 1495486 - DNA, 15 bp, Homo sapiens
gtaaaaatagtaacg

SEQ ID NO: 1495487 - DNA, 15 bp, Homo sapiens
taaaaatagtaacga

SEQ ID NO: 1495488 - DNA, 15 bp, Homo sapiens
aaaaatagtaacgat

SEQ ID NO: 1495489 - DNA, 15 bp, Homo sapiens
aaaatagtaacgatc

SEQ ID NO: 1495490 - DNA, 15 bp, Homo sapiens
aaatagtaacgatca

SEQ ID NO: 1495491 - DNA, 15 bp, Homo sapiens
aatagtaacgatcat

SEQ ID NO: 1495492 - DNA, 15 bp, Homo sapiens
atagtaacgatcata

SEQ ID NO: 1495493 - DNA, 15 bp, Homo sapiens
tagtaacgatcatag

SEQ ID NO: 1495494 - DNA, 15 bp, Homo sapiens
agtaacgatcatagc

SEQ ID NO: 1495495 - DNA, 15 bp, Homo sapiens
gtaacgatcatagct

SEQ ID NO: 1495496 - DNA, 15 bp, Homo sapiens
taacgatcatagcta

SEQ ID NO: 1495497 - DNA, 15 bp, Homo sapiens
aacgatcatagctag

SEQ ID NO: 1495498 - DNA, 15 bp, Homo sapiens
acgatcatagctagc

SEQ ID NO: 1495499 - DNA, 15 bp, Homo sapiens
cgatcatagctagca

SEQ ID NO: 1495500 - DNA, 15 bp, Homo sapiens
gatcatagctagcat

SEQ ID NO: 1495501 - DNA, 15 bp, Homo sapiens
atcatagctagcatt

SEQ ID NO: 1495502 - DNA, 15 bp, Homo sapiens
tcatagctagcattt

SEQ ID NO: 1495503 - DNA, 15 bp, Homo sapiens
catagctagcattta

SEQ ID NO: 1495504 - DNA, 15 bp, Homo sapiens
atagctagcatttat

SEQ ID NO: 1495505 - DNA, 15 bp, Homo sapiens
tagctagcatttatg

SEQ ID NO: 1495506 - DNA, 15 bp, Homo sapiens
agctagcatttatgg

SEQ ID NO: 1495507 - DNA, 15 bp, Homo sapiens
gctagcatttatgga

SEQ ID NO: 1495508 - DNA, 15 bp, Homo sapiens
ctagcatttatggaa

SEQ ID NO: 1495509 - DNA, 15 bp, Homo sapiens
tagcatttatggaac

SEQ ID NO: 1495510 - DNA, 15 bp, Homo sapiens
agcatttatggaaca

SEQ ID NO: 1495511 - DNA, 15 bp, Homo sapiens
gcatttatggaacac

SEQ ID NO: 1495512 - DNA, 15 bp, Homo sapiens
catttatggaacact

SEQ ID NO: 1495513 - DNA, 15 bp, Homo sapiens
atttatggaacactt

SEQ ID NO: 1495514 - DNA, 15 bp, Homo sapiens
tttatggaacactta

SEQ ID NO: 1495515 - DNA, 15 bp, Homo sapiens
ttatggaacacttat

SEQ ID NO: 1495516 - DNA, 15 bp, Homo sapiens
tatggaacacttatg

SEQ ID NO: 1495517 - DNA, 15 bp, Homo sapiens
atggaacacttatga

SEQ ID NO: 1495518 - DNA, 15 bp, Homo sapiens
tggaacacttatgag

SEQ ID NO: 1495519 - DNA, 15 bp, Homo sapiens
ggaacacttatgagc

SEQ ID NO: 1495520 - DNA, 15 bp, Homo sapiens
gaacacttatgagcc

SEQ ID NO: 1495521 - DNA, 15 bp, Homo sapiens
aacacttatgagcca

SEQ ID NO: 1495522 - DNA, 15 bp, Homo sapiens
acacttatgagccaa

SEQ ID NO: 1495523 - DNA, 15 bp, Homo sapiens
cacttatgagccaag

SEQ ID NO: 1495524 - DNA, 15 bp, Homo sapiens
acttatgagccaagg

SEQ ID NO: 1495525 - DNA, 15 bp, Homo sapiens
cttatgagccaaggt

SEQ ID NO: 1495526 - DNA, 15 bp, Homo sapiens
ttatgagccaaggtc

SEQ ID NO: 1495527 - DNA, 15 bp, Homo sapiens
tatgagccaaggtcc

SEQ ID NO: 1495528 - DNA, 15 bp, Homo sapiens
atgagccaaggtcca

SEQ ID NO: 1495529 - DNA, 15 bp, Homo sapiens
tgagccaaggtccat

SEQ ID NO: 1495530 - DNA, 15 bp, Homo sapiens
gagccaaggtccatt

SEQ ID NO: 1495531 - DNA, 15 bp, Homo sapiens
agccaaggtccattc

SEQ ID NO: 1495532 - DNA, 15 bp, Homo sapiens
gccaaggtccattct

SEQ ID NO: 1495533 - DNA, 15 bp, Homo sapiens
ccaaggtccattctg

SEQ ID NO: 1495534 - DNA, 15 bp, Homo sapiens
caaggtccattctga

SEQ ID NO: 1495535 - DNA, 15 bp, Homo sapiens
aaggtccattctgag

SEQ ID NO: 1495536 - DNA, 15 bp, Homo sapiens
aggtccattctgagc

SEQ ID NO: 1495537 - DNA, 15 bp, Homo sapiens
ggtccattctgagca

SEQ ID NO: 1495538 - DNA, 15 bp, Homo sapiens
gtccattctgagcac

SEQ ID NO: 1495539 - DNA, 15 bp, Homo sapiens
tccattctgagcaca

SEQ ID NO: 1495540 - DNA, 15 bp, Homo sapiens
ccattctgagcacat

SEQ ID NO: 1495541 - DNA, 15 bp, Homo sapiens
cattctgagcacatt

SEQ ID NO: 1495542 - DNA, 15 bp, Homo sapiens
attctgagcacattg

SEQ ID NO: 1495543 - DNA, 15 bp, Homo sapiens
ttctgagcacattgc

SEQ ID NO: 1495544 - DNA, 15 bp, Homo sapiens
tctgagcacattgca

SEQ ID NO: 1495545 - DNA, 15 bp, Homo sapiens
ctgagcacattgcat

SEQ ID NO: 1495546 - DNA, 15 bp, Homo sapiens
tgagcacattgcatg

SEQ ID NO: 1495547 - DNA, 15 bp, Homo sapiens
gagcacattgcatgc

SEQ ID NO: 1495548 - DNA, 15 bp, Homo sapiens
agcacattgcatgca

SEQ ID NO: 1495549 - DNA, 15 bp, Homo sapiens
gcacattgcatgcat

SEQ ID NO: 1495550 - DNA, 15 bp, Homo sapiens
cacattgcatgcatt

SEQ ID NO: 1495551 - DNA, 15 bp, Homo sapiens
acattgcatgcatta

SEQ ID NO: 1495552 - DNA, 15 bp, Homo sapiens
cattgcatgcattat

SEQ ID NO: 1495553 - DNA, 15 bp, Homo sapiens
attgcatgcattatt

SEQ ID NO: 1495554 - DNA, 15 bp, Homo sapiens
ttgcatgcattattt

SEQ ID NO: 1495555 - DNA, 15 bp, Homo sapiens
tgcatgcattatttg

SEQ ID NO: 1495556 - DNA, 15 bp, Homo sapiens
gcatgcattatttga

SEQ ID NO: 1495557 - DNA, 15 bp, Homo sapiens
catgcattatttgat

SEQ ID NO: 1495558 - DNA, 15 bp, Homo sapiens
atgcattatttgatt

SEQ ID NO: 1495559 - DNA, 15 bp, Homo sapiens
tgcattatttgattt

SEQ ID NO: 1495560 - DNA, 15 bp, Homo sapiens
gcattatttgattta

SEQ ID NO: 1495561 - DNA, 15 bp, Homo sapiens
cattatttgatttaa

SEQ ID NO: 1495562 - DNA, 15 bp, Homo sapiens
attatttgatttaat

SEQ ID NO: 1495563 - DNA, 15 bp, Homo sapiens
ttatttgatttaatc

SEQ ID NO: 1495564 - DNA, 15 bp, Homo sapiens
tatttgatttaatct

SEQ ID NO: 1495565 - DNA, 15 bp, Homo sapiens
atttgatttaatctt

SEQ ID NO: 1495566 - DNA, 15 bp, Homo sapiens
tttgatttaatcttc

SEQ ID NO: 1495567 - DNA, 15 bp, Homo sapiens
ttgatttaatcttca

SEQ ID NO: 1495568 - DNA, 15 bp, Homo sapiens
tgatttaatcttcat

SEQ ID NO: 1495569 - DNA, 15 bp, Homo sapiens
gatttaatcttcata

SEQ ID NO: 1495570 - DNA, 15 bp, Homo sapiens
ttaatcttcataatg

SEQ ID NO: 1495571 - DNA, 15 bp, Homo sapiens
taatcttcataatgc

SEQ ID NO: 1495572 - DNA, 15 bp, Homo sapiens
aatcttcataatgcc

SEQ ID NO: 1495573 - DNA, 15 bp, Homo sapiens
atcttcataatgcca

SEQ ID NO: 1495574 - DNA, 15 bp, Homo sapiens
tcttcataatgccat

SEQ ID NO: 1495575 - DNA, 15 bp, Homo sapiens
cttcataatgccatt

SEQ ID NO: 1495576 - DNA, 15 bp, Homo sapiens
ttcataatgccattg

SEQ ID NO: 1495577 - DNA, 15 bp, Homo sapiens
tcataatgccattga

SEQ ID NO: 1495578 - DNA, 15 bp, Homo sapiens
cataatgccattgag

SEQ ID NO: 1495579 - DNA, 15 bp, Homo sapiens
ataatgccattgagt

SEQ ID NO: 1495580 - DNA, 15 bp, Homo sapiens
taatgccattgagtg

SEQ ID NO: 1495581 - DNA, 15 bp, Homo sapiens
aatgccattgagtgg

SEQ ID NO: 1495582 - DNA, 15 bp, Homo sapiens
atgccattgagtggt

SEQ ID NO: 1495583 - DNA, 15 bp, Homo sapiens
tgccattgagtggtg

SEQ ID NO: 1495584 - DNA, 15 bp, Homo sapiens
gccattgagtggtgt

SEQ ID NO: 1495585 - DNA, 15 bp, Homo sapiens
ccattgagtggtgtt

SEQ ID NO: 1495586 - DNA, 15 bp, Homo sapiens
cattgagtggtgtta

SEQ ID NO: 1495587 - DNA, 15 bp, Homo sapiens
attgagtggtgttag

SEQ ID NO: 1495588 - DNA, 15 bp, Homo sapiens
ttgagtggtgttagc

SEQ ID NO: 1495589 - DNA, 15 bp, Homo sapiens
tgagtggtgttagcc

SEQ ID NO: 1495590 - DNA, 15 bp, Homo sapiens
gagtggtgttagccc

SEQ ID NO: 1495591 - DNA, 15 bp, Homo sapiens
agtggtgttagccca

SEQ ID NO: 1495592 - DNA, 15 bp, Homo sapiens
gtggtgttagcccat

SEQ ID NO: 1495593 - DNA, 15 bp, Homo sapiens
tggtgttagcccatt

SEQ ID NO: 1495594 - DNA, 15 bp, Homo sapiens
ggtgttagcccattt

SEQ ID NO: 1495595 - DNA, 15 bp, Homo sapiens
gtgttagcccatttt

SEQ ID NO: 1495596 - DNA, 15 bp, Homo sapiens
tgttagcccatttta

SEQ ID NO: 1495597 - DNA, 15 bp, Homo sapiens
gttagcccattttac

SEQ ID NO: 1495598 - DNA, 15 bp, Homo sapiens
ttagcccattttaca

SEQ ID NO: 1495599 - DNA, 15 bp, Homo sapiens
tagcccattttacag

SEQ ID NO: 1495600 - DNA, 15 bp, Homo sapiens
agcccattttacaga

SEQ ID NO: 1495601 - DNA, 15 bp, Homo sapiens
gcccattttacagat

SEQ ID NO: 1495602 - DNA, 15 bp, Homo sapiens
ttacagatgagaaac

SEQ ID NO: 1495603 - DNA, 15 bp, Homo sapiens
tacagatgagaaact

SEQ ID NO: 1495604 - DNA, 15 bp, Homo sapiens
acagatgagaaactg

SEQ ID NO: 1495605 - DNA, 15 bp, Homo sapiens
cagatgagaaactgc

SEQ ID NO: 1495606 - DNA, 15 bp, Homo sapiens
agatgagaaactgct

SEQ ID NO: 1495607 - DNA, 15 bp, Homo sapiens
gatgagaaactgctg

SEQ ID NO: 1495608 - DNA, 15 bp, Homo sapiens
atgagaaactgctgg

SEQ ID NO: 1495609 - DNA, 15 bp, Homo sapiens
tgagaaactgctggc

SEQ ID NO: 1495610 - DNA, 15 bp, Homo sapiens
gagaaactgctggct

SEQ ID NO: 1495611 - DNA, 15 bp, Homo sapiens
agaaactgctggctc

SEQ ID NO: 1495612 - DNA, 15 bp, Homo sapiens
gaaactgctggctca

SEQ ID NO: 1495613 - DNA, 15 bp, Homo sapiens
aaactgctggctcaa

SEQ ID NO: 1495614 - DNA, 15 bp, Homo sapiens
aactgctggctcaaa

SEQ ID NO: 1495615 - DNA, 15 bp, Homo sapiens
actgctggctcaaag

SEQ ID NO: 1495616 - DNA, 15 bp, Homo sapiens
ctgctggctcaaaga

SEQ ID NO: 1495617 - DNA, 15 bp, Homo sapiens
tgctggctcaaagag

SEQ ID NO: 1495618 - DNA, 15 bp, Homo sapiens
gctggctcaaagaga

SEQ ID NO: 1495619 - DNA, 15 bp, Homo sapiens
ctggctcaaagagat

SEQ ID NO: 1495620 - DNA, 15 bp, Homo sapiens
tggctcaaagagatg

SEQ ID NO: 1495621 - DNA, 15 bp, Homo sapiens
ggctcaaagagatga

SEQ ID NO: 1495622 - DNA, 15 bp, Homo sapiens
gctcaaagagatgag

SEQ ID NO: 1495623 - DNA, 15 bp, Homo sapiens
ctcaaagagatgagg

SEQ ID NO: 1495624 - DNA, 15 bp, Homo sapiens
tcaaagagatgaggg

SEQ ID NO: 1495625 - DNA, 15 bp, Homo sapiens
caaagagatgaggga

SEQ ID NO: 1495626 - DNA, 15 bp, Homo sapiens
aaagagatgagggaa

SEQ ID NO: 1495627 - DNA, 15 bp, Homo sapiens
aagagatgagggaaa

SEQ ID NO: 1495628 - DNA, 15 bp, Homo sapiens
agagatgagggaaat

SEQ ID NO: 1495629 - DNA, 15 bp, Homo sapiens
gagatgagggaaatc

SEQ ID NO: 1495630 - DNA, 15 bp, Homo sapiens
agatgagggaaatca

SEQ ID NO: 1495631 - DNA, 15 bp, Homo sapiens
gatgagggaaatcag

SEQ ID NO: 1495632 - DNA, 15 bp, Homo sapiens
atgagggaaatcagt

SEQ ID NO: 1495633 - DNA, 15 bp, Homo sapiens
tgagggaaatcagtg

SEQ ID NO: 1495634 - DNA, 15 bp, Homo sapiens
gagggaaatcagtgg

SEQ ID NO: 1495635 - DNA, 15 bp, Homo sapiens
agggaaatcagtgga

SEQ ID NO: 1495636 - DNA, 15 bp, Homo sapiens
gggaaatcagtggag

SEQ ID NO: 1495637 - DNA, 15 bp, Homo sapiens
ggaaatcagtggagg

SEQ ID NO: 1495638 - DNA, 15 bp, Homo sapiens
gaaatcagtggaggg

SEQ ID NO: 1495639 - DNA, 15 bp, Homo sapiens
aaatcagtggagggc

SEQ ID NO: 1495640 - DNA, 15 bp, Homo sapiens
aatcagtggagggca

SEQ ID NO: 1495641 - DNA, 15 bp, Homo sapiens
atcagtggagggcac

SEQ ID NO: 1495642 - DNA, 15 bp, Homo sapiens
tcagtggagggcaca

SEQ ID NO: 1495643 - DNA, 15 bp, Homo sapiens
cagtggagggcacaa

SEQ ID NO: 1495644 - DNA, 15 bp, Homo sapiens
agtggagggcacaaa

SEQ ID NO: 1495645 - DNA, 15 bp, Homo sapiens
gtggagggcacaaag

SEQ ID NO: 1495646 - DNA, 15 bp, Homo sapiens
tggagggcacaaagc

SEQ ID NO: 1495647 - DNA, 15 bp, Homo sapiens
ggagggcacaaagct

SEQ ID NO: 1495648 - DNA, 15 bp, Homo sapiens
gagggcacaaagcta

SEQ ID NO: 1495649 - DNA, 15 bp, Homo sapiens
agggcacaaagctag

SEQ ID NO: 1495650 - DNA, 15 bp, Homo sapiens
gggcacaaagctagt

SEQ ID NO: 1495651 - DNA, 15 bp, Homo sapiens
ggcacaaagctagtc

SEQ ID NO: 1495652 - DNA, 15 bp, Homo sapiens
gcacaaagctagtca

SEQ ID NO: 1495653 - DNA, 15 bp, Homo sapiens
cacaaagctagtcag

SEQ ID NO: 1495654 - DNA, 15 bp, Homo sapiens
acaaagctagtcagt

SEQ ID NO: 1495655 - DNA, 15 bp, Homo sapiens
caaagctagtcagtg

SEQ ID NO: 1495656 - DNA, 15 bp, Homo sapiens
aaagctagtcagtga

SEQ ID NO: 1495657 - DNA, 15 bp, Homo sapiens
aagctagtcagtgat

SEQ ID NO: 1495658 - DNA, 15 bp, Homo sapiens
agctagtcagtgata

SEQ ID NO: 1495659 - DNA, 15 bp, Homo sapiens
gctagtcagtgataa

SEQ ID NO: 1495660 - DNA, 15 bp, Homo sapiens
ctagtcagtgataag

SEQ ID NO: 1495661 - DNA, 15 bp, Homo sapiens
tagtcagtgataaga

SEQ ID NO: 1495662 - DNA, 15 bp, Homo sapiens
agtcagtgataagag

SEQ ID NO: 1495663 - DNA, 15 bp, Homo sapiens
gtcagtgataagagg

SEQ ID NO: 1495664 - DNA, 15 bp, Homo sapiens
tcagtgataagaggc

SEQ ID NO: 1495665 - DNA, 15 bp, Homo sapiens
cagtgataagaggca

SEQ ID NO: 1495666 - DNA, 15 bp, Homo sapiens
agtgataagaggcag

SEQ ID NO: 1495667 - DNA, 15 bp, Homo sapiens
gtgataagaggcagg

SEQ ID NO: 1495668 - DNA, 15 bp, Homo sapiens
tgataagaggcaggt

SEQ ID NO: 1495669 - DNA, 15 bp, Homo sapiens
gataagaggcaggtc

SEQ ID NO: 1495670 - DNA, 15 bp, Homo sapiens
ataagaggcaggtct

SEQ ID NO: 1495671 - DNA, 15 bp, Homo sapiens
taagaggcaggtcta

SEQ ID NO: 1495672 - DNA, 15 bp, Homo sapiens
aagaggcaggtctaa

SEQ ID NO: 1495673 - DNA, 15 bp, Homo sapiens
agaggcaggtctaat

SEQ ID NO: 1495674 - DNA, 15 bp, Homo sapiens
gaggcaggtctaatt

SEQ ID NO: 1495675 - DNA, 15 bp, Homo sapiens
aggcaggtctaattt

SEQ ID NO: 1495676 - DNA, 15 bp, Homo sapiens
ggcaggtctaatttt

SEQ ID NO: 1495677 - DNA, 15 bp, Homo sapiens
gcaggtctaatttta

SEQ ID NO: 1495678 - DNA, 15 bp, Homo sapiens
caggtctaattttaa

SEQ ID NO: 1495679 - DNA, 15 bp, Homo sapiens
aggtctaattttaaa

SEQ ID NO: 1495680 - DNA, 15 bp, Homo sapiens
ggtctaattttaaag

SEQ ID NO: 1495681 - DNA, 15 bp, Homo sapiens
gtctaattttaaagt

SEQ ID NO: 1495682 - DNA, 15 bp, Homo sapiens
tctaattttaaagtc

SEQ ID NO: 1495683 - DNA, 15 bp, Homo sapiens
ctaattttaaagtct

SEQ ID NO: 1495684 - DNA, 15 bp, Homo sapiens
taattttaaagtctc

SEQ ID NO: 1495685 - DNA, 15 bp, Homo sapiens
aattttaaagtctcc

SEQ ID NO: 1495686 - DNA, 15 bp, Homo sapiens
attttaaagtctcct

SEQ ID NO: 1495687 - DNA, 15 bp, Homo sapiens
ttttaaagtctcctt

SEQ ID NO: 1495688 - DNA, 15 bp, Homo sapiens
tttaaagtctccttt

SEQ ID NO: 1495689 - DNA, 15 bp, Homo sapiens
ttaaagtctcctttg

SEQ ID NO: 1495690 - DNA, 15 bp, Homo sapiens
taaagtctcctttgc

SEQ ID NO: 1495691 - DNA, 15 bp, Homo sapiens
aaagtctcctttgct

SEQ ID NO: 1495692 - DNA, 15 bp, Homo sapiens
aagtctcctttgctt

SEQ ID NO: 1495693 - DNA, 15 bp, Homo sapiens
agtctcctttgctta

SEQ ID NO: 1495694 - DNA, 15 bp, Homo sapiens
gtctcctttgcttaa

SEQ ID NO: 1495695 - DNA, 15 bp, Homo sapiens
tctcctttgcttaat

SEQ ID NO: 1495696 - DNA, 15 bp, Homo sapiens
ctcctttgcttaata

SEQ ID NO: 1495697 - DNA, 15 bp, Homo sapiens
tcctttgcttaataa

SEQ ID NO: 1495698 - DNA, 15 bp, Homo sapiens
cctttgcttaataaa

SEQ ID NO: 1495699 - DNA, 15 bp, Homo sapiens
ctttgcttaataaac

SEQ ID NO: 1495700 - DNA, 15 bp, Homo sapiens
tttgcttaataaaca

SEQ ID NO: 1495701 - DNA, 15 bp, Homo sapiens
ttgcttaataaacat

SEQ ID NO: 1495702 - DNA, 15 bp, Homo sapiens
tgcttaataaacata

SEQ ID NO: 1495703 - DNA, 15 bp, Homo sapiens
gcttaataaacatac

SEQ ID NO: 1495704 - DNA, 15 bp, Homo sapiens
cttaataaacataca

SEQ ID NO: 1495705 - DNA, 15 bp, Homo sapiens
ttaataaacatacag

SEQ ID NO: 1495706 - DNA, 15 bp, Homo sapiens
taataaacatacagt

SEQ ID NO: 1495707 - DNA, 15 bp, Homo sapiens
aataaacatacagtc

SEQ ID NO: 1495708 - DNA, 15 bp, Homo sapiens
ataaacatacagtcg

SEQ ID NO: 1495709 - DNA, 15 bp, Homo sapiens
taaacatacagtcgt

SEQ ID NO: 1495710 - DNA, 15 bp, Homo sapiens
aaacatacagtcgtg

SEQ ID NO: 1495711 - DNA, 15 bp, Homo sapiens
aacatacagtcgtgc

SEQ ID NO: 1495712 - DNA, 15 bp, Homo sapiens
acatacagtcgtgct

SEQ ID NO: 1495713 - DNA, 15 bp, Homo sapiens
catacagtcgtgctt

SEQ ID NO: 1495714 - DNA, 15 bp, Homo sapiens
atacagtcgtgcttt

SEQ ID NO: 1495715 - DNA, 15 bp, Homo sapiens
tacagtcgtgctttg

SEQ ID NO: 1495716 - DNA, 15 bp, Homo sapiens
acagtcgtgctttgc

SEQ ID NO: 1495717 - DNA, 15 bp, Homo sapiens
cagtcgtgctttgct

SEQ ID NO: 1495718 - DNA, 15 bp, Homo sapiens
agtcgtgctttgctt

SEQ ID NO: 1495719 - DNA, 15 bp, Homo sapiens
gtcgtgctttgcttc

SEQ ID NO: 1495720 - DNA, 15 bp, Homo sapiens
tcgtgctttgcttca

SEQ ID NO: 1495721 - DNA, 15 bp, Homo sapiens
cgtgctttgcttcat

SEQ ID NO: 1495722 - DNA, 15 bp, Homo sapiens
gtgctttgcttcatg

SEQ ID NO: 1495723 - DNA, 15 bp, Homo sapiens
tgctttgcttcatga

SEQ ID NO: 1495724 - DNA, 15 bp, Homo sapiens
gctttgcttcatgat

SEQ ID NO: 1495725 - DNA, 15 bp, Homo sapiens
ctttgcttcatgatg

SEQ ID NO: 1495726 - DNA, 15 bp, Homo sapiens
tttgcttcatgatgg

SEQ ID NO: 1495727 - DNA, 15 bp, Homo sapiens
ttgcttcatgatggg

SEQ ID NO: 1495728 - DNA, 15 bp, Homo sapiens
tgcttcatgatgggg

SEQ ID NO: 1495729 - DNA, 15 bp, Homo sapiens
gcttcatgatgggga

SEQ ID NO: 1495730 - DNA, 15 bp, Homo sapiens
cttcatgatggggat

SEQ ID NO: 1495731 - DNA, 15 bp, Homo sapiens
ttcatgatggggata

SEQ ID NO: 1495732 - DNA, 15 bp, Homo sapiens
tcatgatggggatag

SEQ ID NO: 1495733 - DNA, 15 bp, Homo sapiens
catgatggggatagt

SEQ ID NO: 1495734 - DNA, 15 bp, Homo sapiens
atgatggggatagtt

SEQ ID NO: 1495735 - DNA, 15 bp, Homo sapiens
tgatggggatagttc

SEQ ID NO: 1495736 - DNA, 15 bp, Homo sapiens
gatggggatagttca

SEQ ID NO: 1495737 - DNA, 15 bp, Homo sapiens
atggggatagttcat

SEQ ID NO: 1495738 - DNA, 15 bp, Homo sapiens
tggggatagttcatc

SEQ ID NO: 1495739 - DNA, 15 bp, Homo sapiens
ggggatagttcatct

SEQ ID NO: 1495740 - DNA, 15 bp, Homo sapiens
gggatagttcatctt

SEQ ID NO: 1495741 - DNA, 15 bp, Homo sapiens
ggatagttcatcttc

SEQ ID NO: 1495742 - DNA, 15 bp, Homo sapiens
gatagttcatcttca

SEQ ID NO: 1495743 - DNA, 15 bp, Homo sapiens
atagttcatcttcat

SEQ ID NO: 1495744 - DNA, 15 bp, Homo sapiens
tagttcatcttcatg

SEQ ID NO: 1495745 - DNA, 15 bp, Homo sapiens
agttcatcttcatgt

SEQ ID NO: 1495746 - DNA, 15 bp, Homo sapiens
gttcatcttcatgtg

SEQ ID NO: 1495747 - DNA, 15 bp, Homo sapiens
ttcatcttcatgtga

SEQ ID NO: 1495748 - DNA, 15 bp, Homo sapiens
tcatcttcatgtgaa

SEQ ID NO: 1495749 - DNA, 15 bp, Homo sapiens
catcttcatgtgaat

SEQ ID NO: 1495750 - DNA, 15 bp, Homo sapiens
atcttcatgtgaata

SEQ ID NO: 1495751 - DNA, 15 bp, Homo sapiens
tcttcatgtgaatac

SEQ ID NO: 1495752 - DNA, 15 bp, Homo sapiens
cttcatgtgaatacc

SEQ ID NO: 1495753 - DNA, 15 bp, Homo sapiens
ttcatgtgaatacca

SEQ ID NO: 1495754 - DNA, 15 bp, Homo sapiens
tcatgtgaataccac

SEQ ID NO: 1495755 - DNA, 15 bp, Homo sapiens
catgtgaataccaca

SEQ ID NO: 1495756 - DNA, 15 bp, Homo sapiens
atgtgaataccacaa

SEQ ID NO: 1495757 - DNA, 15 bp, Homo sapiens
tgtgaataccacaaa

SEQ ID NO: 1495758 - DNA, 15 bp, Homo sapiens
gtgaataccacaaaa

SEQ ID NO: 1495759 - DNA, 15 bp, Homo sapiens
tgaataccacaaaat

SEQ ID NO: 1495760 - DNA, 15 bp, Homo sapiens
gaataccacaaaatg

SEQ ID NO: 1495761 - DNA, 15 bp, Homo sapiens
aataccacaaaatgt

SEQ ID NO: 1495762 - DNA, 15 bp, Homo sapiens
ataccacaaaatgta

SEQ ID NO: 1495763 - DNA, 15 bp, Homo sapiens
taccacaaaatgtac

SEQ ID NO: 1495764 - DNA, 15 bp, Homo sapiens
accacaaaatgtact

SEQ ID NO: 1495765 - DNA, 15 bp, Homo sapiens
ccacaaaatgtactt

SEQ ID NO: 1495766 - DNA, 15 bp, Homo sapiens
cacaaaatgtactta

SEQ ID NO: 1495767 - DNA, 15 bp, Homo sapiens
acaaaatgtacttac

SEQ ID NO: 1495768 - DNA, 15 bp, Homo sapiens
caaaatgtacttaca

SEQ ID NO: 1495769 - DNA, 15 bp, Homo sapiens
aaaatgtacttacac

SEQ ID NO: 1495770 - DNA, 15 bp, Homo sapiens
aaatgtacttacaca

SEQ ID NO: 1495771 - DNA, 15 bp, Homo sapiens
aatgtacttacacaa

SEQ ID NO: 1495772 - DNA, 15 bp, Homo sapiens
atgtacttacacaaa

SEQ ID NO: 1495773 - DNA, 15 bp, Homo sapiens
tgtacttacacaaac

SEQ ID NO: 1495774 - DNA, 15 bp, Homo sapiens
gtacttacacaaacc

SEQ ID NO: 1495775 - DNA, 15 bp, Homo sapiens
tacttacacaaaccc

SEQ ID NO: 1495776 - DNA, 15 bp, Homo sapiens
acttacacaaaccca

SEQ ID NO: 1495777 - DNA, 15 bp, Homo sapiens
cttacacaaacccac

SEQ ID NO: 1495778 - DNA, 15 bp, Homo sapiens
ttacacaaacccaca

SEQ ID NO: 1495779 - DNA, 15 bp, Homo sapiens
tacacaaacccacat

SEQ ID NO: 1495780 - DNA, 15 bp, Homo sapiens
acacaaacccacata

SEQ ID NO: 1495781 - DNA, 15 bp, Homo sapiens
cacaaacccacatag

SEQ ID NO: 1495782 - DNA, 15 bp, Homo sapiens
acaaacccacatagc

SEQ ID NO: 1495783 - DNA, 15 bp, Homo sapiens
caaacccacatagca

SEQ ID NO: 1495784 - DNA, 15 bp, Homo sapiens
aaacccacatagcat

SEQ ID NO: 1495785 - DNA, 15 bp, Homo sapiens
aacccacatagcata

SEQ ID NO: 1495786 - DNA, 15 bp, Homo sapiens
acccacatagcatag

SEQ ID NO: 1495787 - DNA, 15 bp, Homo sapiens
cccacatagcatagc

SEQ ID NO: 1495788 - DNA, 15 bp, Homo sapiens
ccacatagcatagcc

SEQ ID NO: 1495789 - DNA, 15 bp, Homo sapiens
cacatagcatagcct

SEQ ID NO: 1495790 - DNA, 15 bp, Homo sapiens
acatagcatagccta

SEQ ID NO: 1495791 - DNA, 15 bp, Homo sapiens
catagcatagcctac

SEQ ID NO: 1495792 - DNA, 15 bp, Homo sapiens
atagcatagcctact

SEQ ID NO: 1495793 - DNA, 15 bp, Homo sapiens
tagcatagcctacta

SEQ ID NO: 1495794 - DNA, 15 bp, Homo sapiens
agcatagcctactac

SEQ ID NO: 1495795 - DNA, 15 bp, Homo sapiens
gcatagcctactaca

SEQ ID NO: 1495796 - DNA, 15 bp, Homo sapiens
catagcctactacac

SEQ ID NO: 1495797 - DNA, 15 bp, Homo sapiens
atagcctactacaca

SEQ ID NO: 1495798 - DNA, 15 bp, Homo sapiens
tagcctactacacac

SEQ ID NO: 1495799 - DNA, 15 bp, Homo sapiens
agcctactacacact

SEQ ID NO: 1495800 - DNA, 15 bp, Homo sapiens
gcctactacacactg

SEQ ID NO: 1495801 - DNA, 15 bp, Homo sapiens
cctactacacactga

SEQ ID NO: 1495802 - DNA, 15 bp, Homo sapiens
ctactacacactgag

SEQ ID NO: 1495803 - DNA, 15 bp, Homo sapiens
tactacacactgagg

SEQ ID NO: 1495804 - DNA, 15 bp, Homo sapiens
actacacactgaggc

SEQ ID NO: 1495805 - DNA, 15 bp, Homo sapiens
ctacacactgaggct

SEQ ID NO: 1495806 - DNA, 15 bp, Homo sapiens
tacacactgaggctg

SEQ ID NO: 1495807 - DNA, 15 bp, Homo sapiens
acacactgaggctgt

SEQ ID NO: 1495808 - DNA, 15 bp, Homo sapiens
cacactgaggctgta

SEQ ID NO: 1495809 - DNA, 15 bp, Homo sapiens
acactgaggctgtat

SEQ ID NO: 1495810 - DNA, 15 bp, Homo sapiens
cactgaggctgtatg

SEQ ID NO: 1495811 - DNA, 15 bp, Homo sapiens
actgaggctgtatgc

SEQ ID NO: 1495812 - DNA, 15 bp, Homo sapiens
ctgaggctgtatgct

SEQ ID NO: 1495813 - DNA, 15 bp, Homo sapiens
tgaggctgtatgcta

SEQ ID NO: 1495814 - DNA, 15 bp, Homo sapiens
gaggctgtatgctac

SEQ ID NO: 1495815 - DNA, 15 bp, Homo sapiens
aggctgtatgctaca

SEQ ID NO: 1495816 - DNA, 15 bp, Homo sapiens
ggctgtatgctacag

SEQ ID NO: 1495817 - DNA, 15 bp, Homo sapiens
gctgtatgctacagc

SEQ ID NO: 1495818 - DNA, 15 bp, Homo sapiens
ctgtatgctacagcc

SEQ ID NO: 1495819 - DNA, 15 bp, Homo sapiens
tgtatgctacagcct

SEQ ID NO: 1495820 - DNA, 15 bp, Homo sapiens
gtatgctacagcctg

SEQ ID NO: 1495821 - DNA, 15 bp, Homo sapiens
tatgctacagcctgt

SEQ ID NO: 1495822 - DNA, 15 bp, Homo sapiens
atgctacagcctgtg

SEQ ID NO: 1495823 - DNA, 15 bp, Homo sapiens
tgctacagcctgtgg

SEQ ID NO: 1495824 - DNA, 15 bp, Homo sapiens
gctacagcctgtggc

SEQ ID NO: 1495825 - DNA, 15 bp, Homo sapiens
ctacagcctgtggct

SEQ ID NO: 1495826 - DNA, 15 bp, Homo sapiens
tacagcctgtggctc

SEQ ID NO: 1495827 - DNA, 15 bp, Homo sapiens
acagcctgtggctcc

SEQ ID NO: 1495828 - DNA, 15 bp, Homo sapiens
cagcctgtggctcct

SEQ ID NO: 1495829 - DNA, 15 bp, Homo sapiens
agcctgtggctccta

SEQ ID NO: 1495830 - DNA, 15 bp, Homo sapiens
gcctgtggctcctag

SEQ ID NO: 1495831 - DNA, 15 bp, Homo sapiens
cctgtggctcctagc

SEQ ID NO: 1495832 - DNA, 15 bp, Homo sapiens
ctgtggctcctagct

SEQ ID NO: 1495833 - DNA, 15 bp, Homo sapiens
tgtggctcctagctt

SEQ ID NO: 1495834 - DNA, 15 bp, Homo sapiens
gtggctcctagctta

SEQ ID NO: 1495835 - DNA, 15 bp, Homo sapiens
tggctcctagcttac

SEQ ID NO: 1495836 - DNA, 15 bp, Homo sapiens
ggctcctagcttact

SEQ ID NO: 1495837 - DNA, 15 bp, Homo sapiens
gctcctagcttacta

SEQ ID NO: 1495838 - DNA, 15 bp, Homo sapiens
ctcctagcttactaa

SEQ ID NO: 1495839 - DNA, 15 bp, Homo sapiens
tcctagcttactaag

SEQ ID NO: 1495840 - DNA, 15 bp, Homo sapiens
cctagcttactaagc

SEQ ID NO: 1495841 - DNA, 15 bp, Homo sapiens
ctagcttactaagct

SEQ ID NO: 1495842 - DNA, 15 bp, Homo sapiens
tagcttactaagctg

SEQ ID NO: 1495843 - DNA, 15 bp, Homo sapiens
agcttactaagctgt

SEQ ID NO: 1495844 - DNA, 15 bp, Homo sapiens
gcttactaagctgta

SEQ ID NO: 1495845 - DNA, 15 bp, Homo sapiens
cttactaagctgtat

SEQ ID NO: 1495846 - DNA, 15 bp, Homo sapiens
ttactaagctgtata

SEQ ID NO: 1495847 - DNA, 15 bp, Homo sapiens
tactaagctgtatag

SEQ ID NO: 1495848 - DNA, 15 bp, Homo sapiens
actaagctgtatagc

SEQ ID NO: 1495849 - DNA, 15 bp, Homo sapiens
ctaagctgtatagca

SEQ ID NO: 1495850 - DNA, 15 bp, Homo sapiens
taagctgtatagcat

SEQ ID NO: 1495851 - DNA, 15 bp, Homo sapiens
aagctgtatagcatg

SEQ ID NO: 1495852 - DNA, 15 bp, Homo sapiens
agctgtatagcatgt

SEQ ID NO: 1495853 - DNA, 15 bp, Homo sapiens
gctgtatagcatgtt

SEQ ID NO: 1495854 - DNA, 15 bp, Homo sapiens
ctgtatagcatgtta

SEQ ID NO: 1495855 - DNA, 15 bp, Homo sapiens
tgtatagcatgttat

SEQ ID NO: 1495856 - DNA, 15 bp, Homo sapiens
gtatagcatgttatt

SEQ ID NO: 1495857 - DNA, 15 bp, Homo sapiens
tatagcatgttattg

SEQ ID NO: 1495858 - DNA, 15 bp, Homo sapiens
atagcatgttattgt

SEQ ID NO: 1495859 - DNA, 15 bp, Homo sapiens
tagcatgttattgta

SEQ ID NO: 1495860 - DNA, 15 bp, Homo sapiens
agcatgttattgtac

SEQ ID NO: 1495861 - DNA, 15 bp, Homo sapiens
gcatgttattgtact

SEQ ID NO: 1495862 - DNA, 15 bp, Homo sapiens
catgttattgtactg

SEQ ID NO: 1495863 - DNA, 15 bp, Homo sapiens
atgttattgtactga

SEQ ID NO: 1495864 - DNA, 15 bp, Homo sapiens
tgttattgtactgaa

SEQ ID NO: 1495865 - DNA, 15 bp, Homo sapiens
gttattgtactgaat

SEQ ID NO: 1495866 - DNA, 15 bp, Homo sapiens
ttattgtactgaata

SEQ ID NO: 1495867 - DNA, 15 bp, Homo sapiens
tattgtactgaatat

SEQ ID NO: 1495868 - DNA, 15 bp, Homo sapiens
attgtactgaatata

SEQ ID NO: 1495869 - DNA, 15 bp, Homo sapiens
ttgtactgaatatag

SEQ ID NO: 1495870 - DNA, 15 bp, Homo sapiens
tgtactgaatatagt

SEQ ID NO: 1495871 - DNA, 15 bp, Homo sapiens
gtactgaatatagta

SEQ ID NO: 1495872 - DNA, 15 bp, Homo sapiens
tactgaatatagtag

SEQ ID NO: 1495873 - DNA, 15 bp, Homo sapiens
actgaatatagtaga

SEQ ID NO: 1495874 - DNA, 15 bp, Homo sapiens
ctgaatatagtagac

SEQ ID NO: 1495875 - DNA, 15 bp, Homo sapiens
tgaatatagtagaca

SEQ ID NO: 1495876 - DNA, 15 bp, Homo sapiens
gaatatagtagacaa

SEQ ID NO: 1495877 - DNA, 15 bp, Homo sapiens
aatatagtagacaac

SEQ ID NO: 1495878 - DNA, 15 bp, Homo sapiens
atatagtagacaacc

SEQ ID NO: 1495879 - DNA, 15 bp, Homo sapiens
tatagtagacaaccg

SEQ ID NO: 1495880 - DNA, 15 bp, Homo sapiens
atagtagacaaccgt

SEQ ID NO: 1495881 - DNA, 15 bp, Homo sapiens
tagtagacaaccgta

SEQ ID NO: 1495882 - DNA, 15 bp, Homo sapiens
agtagacaaccgtag

SEQ ID NO: 1495883 - DNA, 15 bp, Homo sapiens
gtagacaaccgtagc

SEQ ID NO: 1495884 - DNA, 15 bp, Homo sapiens
tagacaaccgtagca

SEQ ID NO: 1495885 - DNA, 15 bp, Homo sapiens
agacaaccgtagcac

SEQ ID NO: 1495886 - DNA, 15 bp, Homo sapiens
gacaaccgtagcaca

SEQ ID NO: 1495887 - DNA, 15 bp, Homo sapiens
acaaccgtagcacaa

SEQ ID NO: 1495888 - DNA, 15 bp, Homo sapiens
caaccgtagcacaat

SEQ ID NO: 1495889 - DNA, 15 bp, Homo sapiens
aaccgtagcacaatg

SEQ ID NO: 1495890 - DNA, 15 bp, Homo sapiens
accgtagcacaatgg

SEQ ID NO: 1495891 - DNA, 15 bp, Homo sapiens
ccgtagcacaatggc

SEQ ID NO: 1495892 - DNA, 15 bp, Homo sapiens
cgtagcacaatggca

SEQ ID NO: 1495893 - DNA, 15 bp, Homo sapiens
gtagcacaatggcaa

SEQ ID NO: 1495894 - DNA, 15 bp, Homo sapiens
tagcacaatggcaag

SEQ ID NO: 1495895 - DNA, 15 bp, Homo sapiens
agcacaatggcaagt

SEQ ID NO: 1495896 - DNA, 15 bp, Homo sapiens
gcacaatggcaagta

SEQ ID NO: 1495897 - DNA, 15 bp, Homo sapiens
cacaatggcaagtat

SEQ ID NO: 1495898 - DNA, 15 bp, Homo sapiens
acaatggcaagtatt

SEQ ID NO: 1495899 - DNA, 15 bp, Homo sapiens
caatggcaagtattt

SEQ ID NO: 1495900 - DNA, 15 bp, Homo sapiens
aatggcaagtatttg

SEQ ID NO: 1495901 - DNA, 15 bp, Homo sapiens
atggcaagtatttgt

SEQ ID NO: 1495902 - DNA, 15 bp, Homo sapiens
tggcaagtatttgtg

SEQ ID NO: 1495903 - DNA, 15 bp, Homo sapiens
ggcaagtatttgtgc

SEQ ID NO: 1495904 - DNA, 15 bp, Homo sapiens
gcaagtatttgtgca

SEQ ID NO: 1495905 - DNA, 15 bp, Homo sapiens
caagtatttgtgcat

SEQ ID NO: 1495906 - DNA, 15 bp, Homo sapiens
aagtatttgtgcatc

SEQ ID NO: 1495907 - DNA, 15 bp, Homo sapiens
agtatttgtgcatct

SEQ ID NO: 1495908 - DNA, 15 bp, Homo sapiens
gtatttgtgcatcta

SEQ ID NO: 1495909 - DNA, 15 bp, Homo sapiens
tatttgtgcatctaa

SEQ ID NO: 1495910 - DNA, 15 bp, Homo sapiens
atttgtgcatctaac

SEQ ID NO: 1495911 - DNA, 15 bp, Homo sapiens
tttgtgcatctaact

SEQ ID NO: 1495912 - DNA, 15 bp, Homo sapiens
ttgtgcatctaactt

SEQ ID NO: 1495913 - DNA, 15 bp, Homo sapiens
tgtgcatctaacttt

SEQ ID NO: 1495914 - DNA, 15 bp, Homo sapiens
gtgcatctaactttt

SEQ ID NO: 1495915 - DNA, 15 bp, Homo sapiens
tgcatctaactttta

SEQ ID NO: 1495916 - DNA, 15 bp, Homo sapiens
gcatctaacttttaa

SEQ ID NO: 1495917 - DNA, 15 bp, Homo sapiens
catctaacttttaaa

SEQ ID NO: 1495918 - DNA, 15 bp, Homo sapiens
atctaacttttaaaa

SEQ ID NO: 1495919 - DNA, 15 bp, Homo sapiens
tctaacttttaaaag

SEQ ID NO: 1495920 - DNA, 15 bp, Homo sapiens
ctaacttttaaaaga

SEQ ID NO: 1495921 - DNA, 15 bp, Homo sapiens
taacttttaaaagat

SEQ ID NO: 1495922 - DNA, 15 bp, Homo sapiens
aacttttaaaagata

SEQ ID NO: 1495923 - DNA, 15 bp, Homo sapiens
acttttaaaagatac

SEQ ID NO: 1495924 - DNA, 15 bp, Homo sapiens
cttttaaaagataca

SEQ ID NO: 1495925 - DNA, 15 bp, Homo sapiens
ttttaaaagatacag

SEQ ID NO: 1495926 - DNA, 15 bp, Homo sapiens
tttaaaagatacagt

SEQ ID NO: 1495927 - DNA, 15 bp, Homo sapiens
ttaaaagatacagta

SEQ ID NO: 1495928 - DNA, 15 bp, Homo sapiens
taaaagatacagtaa

SEQ ID NO: 1495929 - DNA, 15 bp, Homo sapiens
aaaagatacagtaaa

SEQ ID NO: 1495930 - DNA, 15 bp, Homo sapiens
aaagatacagtaaaa

SEQ ID NO: 1495931 - DNA, 15 bp, Homo sapiens
aagatacagtaaaaa

SEQ ID NO: 1495932 - DNA, 15 bp, Homo sapiens
agatacagtaaaaat

SEQ ID NO: 1495933 - DNA, 15 bp, Homo sapiens
gatacagtaaaaata

SEQ ID NO: 1495934 - DNA, 15 bp, Homo sapiens
atacagtaaaaatac

SEQ ID NO: 1495935 - DNA, 15 bp, Homo sapiens
tacagtaaaaataca

SEQ ID NO: 1495936 - DNA, 15 bp, Homo sapiens
acagtaaaaatacac

SEQ ID NO: 1495937 - DNA, 15 bp, Homo sapiens
cagtaaaaatacact

SEQ ID NO: 1495938 - DNA, 15 bp, Homo sapiens
agtaaaaatacacta

SEQ ID NO: 1495939 - DNA, 15 bp, Homo sapiens
gtaaaaatacactat

SEQ ID NO: 1495940 - DNA, 15 bp, Homo sapiens
taaaaatacactatt

SEQ ID NO: 1495941 - DNA, 15 bp, Homo sapiens
aaaaatacactatta

SEQ ID NO: 1495942 - DNA, 15 bp, Homo sapiens
aaaatacactattac

SEQ ID NO: 1495943 - DNA, 15 bp, Homo sapiens
aaatacactattacc

SEQ ID NO: 1495944 - DNA, 15 bp, Homo sapiens
aatacactattaccg

SEQ ID NO: 1495945 - DNA, 15 bp, Homo sapiens
atacactattaccgt

SEQ ID NO: 1495946 - DNA, 15 bp, Homo sapiens
tacactattaccgtt

SEQ ID NO: 1495947 - DNA, 15 bp, Homo sapiens
acactattaccgttg

SEQ ID NO: 1495948 - DNA, 15 bp, Homo sapiens
cactattaccgttgt

SEQ ID NO: 1495949 - DNA, 15 bp, Homo sapiens
actattaccgttgtc

SEQ ID NO: 1495950 - DNA, 15 bp, Homo sapiens
ctattaccgttgtcg

SEQ ID NO: 1495951 - DNA, 15 bp, Homo sapiens
tattaccgttgtcgt

SEQ ID NO: 1495952 - DNA, 15 bp, Homo sapiens
attaccgttgtcgta

SEQ ID NO: 1495953 - DNA, 15 bp, Homo sapiens
ttaccgttgtcgtat

SEQ ID NO: 1495954 - DNA, 15 bp, Homo sapiens
taccgttgtcgtata

SEQ ID NO: 1495955 - DNA, 15 bp, Homo sapiens
accgttgtcgtatat

SEQ ID NO: 1495956 - DNA, 15 bp, Homo sapiens
ccgttgtcgtatatg

SEQ ID NO: 1495957 - DNA, 15 bp, Homo sapiens
cgttgtcgtatatgt

SEQ ID NO: 1495958 - DNA, 15 bp, Homo sapiens
gttgtcgtatatgtg

SEQ ID NO: 1495959 - DNA, 15 bp, Homo sapiens
ttgtcgtatatgtgg

SEQ ID NO: 1495960 - DNA, 15 bp, Homo sapiens
tgtcgtatatgtggt

SEQ ID NO: 1495961 - DNA, 15 bp, Homo sapiens
gtcgtatatgtggtc

SEQ ID NO: 1495962 - DNA, 15 bp, Homo sapiens
tcgtatatgtggtcc

SEQ ID NO: 1495963 - DNA, 15 bp, Homo sapiens
cgtatatgtggtcca

SEQ ID NO: 1495964 - DNA, 15 bp, Homo sapiens
gtatatgtggtccat

SEQ ID NO: 1495965 - DNA, 15 bp, Homo sapiens
tatatgtggtccatc

SEQ ID NO: 1495966 - DNA, 15 bp, Homo sapiens
atatgtggtccatct

SEQ ID NO: 1495967 - DNA, 15 bp, Homo sapiens
tatgtggtccatctt

SEQ ID NO: 1495968 - DNA, 15 bp, Homo sapiens
atgtggtccatcttt

SEQ ID NO: 1495969 - DNA, 15 bp, Homo sapiens
tgtggtccatctttg

SEQ ID NO: 1495970 - DNA, 15 bp, Homo sapiens
gtggtccatctttgc

SEQ ID NO: 1495971 - DNA, 15 bp, Homo sapiens
tggtccatctttgcc

SEQ ID NO: 1495972 - DNA, 15 bp, Homo sapiens
ggtccatctttgccc

SEQ ID NO: 1495973 - DNA, 15 bp, Homo sapiens
gtccatctttgccca

SEQ ID NO: 1495974 - DNA, 15 bp, Homo sapiens
tccatctttgcccaa

SEQ ID NO: 1495975 - DNA, 15 bp, Homo sapiens
ccatctttgcccaaa

SEQ ID NO: 1495976 - DNA, 15 bp, Homo sapiens
catctttgcccaaaa

SEQ ID NO: 1495977 - DNA, 15 bp, Homo sapiens
atctttgcccaaaac

SEQ ID NO: 1495978 - DNA, 15 bp, Homo sapiens
tctttgcccaaaaca

SEQ ID NO: 1495979 - DNA, 15 bp, Homo sapiens
ctttgcccaaaacat

SEQ ID NO: 1495980 - DNA, 15 bp, Homo sapiens
tttgcccaaaacatc

SEQ ID NO: 1495981 - DNA, 15 bp, Homo sapiens
ttgcccaaaacatca

SEQ ID NO: 1495982 - DNA, 15 bp, Homo sapiens
tgcccaaaacatcat

SEQ ID NO: 1495983 - DNA, 15 bp, Homo sapiens
gcccaaaacatcatt

SEQ ID NO: 1495984 - DNA, 15 bp, Homo sapiens
cccaaaacatcattt

SEQ ID NO: 1495985 - DNA, 15 bp, Homo sapiens
ccaaaacatcatttt

SEQ ID NO: 1495986 - DNA, 15 bp, Homo sapiens
caaaacatcattttt

SEQ ID NO: 1495987 - DNA, 15 bp, Homo sapiens
aaaacatcatttttt

SEQ ID NO: 1495988 - DNA, 15 bp, Homo sapiens
aaacatcattttttg

SEQ ID NO: 1495989 - DNA, 15 bp, Homo sapiens
aacatcattttttgg

SEQ ID NO: 1495990 - DNA, 15 bp, Homo sapiens
acatcattttttggt

SEQ ID NO: 1495991 - DNA, 15 bp, Homo sapiens
catcattttttggtg

SEQ ID NO: 1495992 - DNA, 15 bp, Homo sapiens
atcattttttggtgt

SEQ ID NO: 1495993 - DNA, 15 bp, Homo sapiens
tcattttttggtgtg

SEQ ID NO: 1495994 - DNA, 15 bp, Homo sapiens
cattttttggtgtgt

SEQ ID NO: 1495995 - DNA, 15 bp, Homo sapiens
attttttggtgtgtg

SEQ ID NO: 1495996 - DNA, 15 bp, Homo sapiens
ttttttggtgtgtga

SEQ ID NO: 1495997 - DNA, 15 bp, Homo sapiens
tttttggtgtgtgac

SEQ ID NO: 1495998 - DNA, 15 bp, Homo sapiens
ttttggtgtgtgact

SEQ ID NO: 1495999 - DNA, 15 bp, Homo sapiens
tttggtgtgtgacta

SEQ ID NO: 1496000 - DNA, 15 bp, Homo sapiens
ttggtgtgtgactat

SEQ ID NO: 1496001 - DNA, 15 bp, Homo sapiens
tggtgtgtgactatt

SEQ ID NO: 1496002 - DNA, 15 bp, Homo sapiens
ggtgtgtgactatta

SEQ ID NO: 1496003 - DNA, 15 bp, Homo sapiens
gtgtgtgactattaa

SEQ ID NO: 1496004 - DNA, 15 bp, Homo sapiens
tgtgtgactattaac

SEQ ID NO: 1496005 - DNA, 15 bp, Homo sapiens
gtgtgactattaaca

SEQ ID NO: 1496006 - DNA, 15 bp, Homo sapiens
tgtgactattaacag

SEQ ID NO: 1496007 - DNA, 15 bp, Homo sapiens
gtgactattaacagg

SEQ ID NO: 1496008 - DNA, 15 bp, Homo sapiens
tgactattaacagga

SEQ ID NO: 1496009 - DNA, 15 bp, Homo sapiens
gactattaacaggaa

SEQ ID NO: 1496010 - DNA, 15 bp, Homo sapiens
actattaacaggaac

SEQ ID NO: 1496011 - DNA, 15 bp, Homo sapiens
ctattaacaggaact

SEQ ID NO: 1496012 - DNA, 15 bp, Homo sapiens
tattaacaggaactt

SEQ ID NO: 1496013 - DNA, 15 bp, Homo sapiens
attaacaggaacttg

SEQ ID NO: 1496014 - DNA, 15 bp, Homo sapiens
ttaacaggaacttgt

SEQ ID NO: 1496015 - DNA, 15 bp, Homo sapiens
taacaggaacttgtc

SEQ ID NO: 1496016 - DNA, 15 bp, Homo sapiens
aacaggaacttgtcc

SEQ ID NO: 1496017 - DNA, 15 bp, Homo sapiens
acaggaacttgtccc

SEQ ID NO: 1496018 - DNA, 15 bp, Homo sapiens
caggaacttgtccca

SEQ ID NO: 1496019 - DNA, 15 bp, Homo sapiens
aggaacttgtcccag

SEQ ID NO: 1496020 - DNA, 15 bp, Homo sapiens
ggaacttgtcccagc

SEQ ID NO: 1496021 - DNA, 15 bp, Homo sapiens
gaacttgtcccagcc

SEQ ID NO: 1496022 - DNA, 15 bp, Homo sapiens
aacttgtcccagcct

SEQ ID NO: 1496023 - DNA, 15 bp, Homo sapiens
acttgtcccagcctt

SEQ ID NO: 1496024 - DNA, 15 bp, Homo sapiens
cttgtcccagcctta

SEQ ID NO: 1496025 - DNA, 15 bp, Homo sapiens
ttgtcccagccttac

SEQ ID NO: 1496026 - DNA, 15 bp, Homo sapiens
tgtcccagccttact

SEQ ID NO: 1496027 - DNA, 15 bp, Homo sapiens
gtcccagccttactt

SEQ ID NO: 1496028 - DNA, 15 bp, Homo sapiens
tcccagccttacttt

SEQ ID NO: 1496029 - DNA, 15 bp, Homo sapiens
cccagccttactttg

SEQ ID NO: 1496030 - DNA, 15 bp, Homo sapiens
ccagccttactttgt

SEQ ID NO: 1496031 - DNA, 15 bp, Homo sapiens
cagccttactttgtc

SEQ ID NO: 1496032 - DNA, 15 bp, Homo sapiens
agccttactttgtca

SEQ ID NO: 1496033 - DNA, 15 bp, Homo sapiens
gccttactttgtcat

SEQ ID NO: 1496034 - DNA, 15 bp, Homo sapiens
ccttactttgtcatt

SEQ ID NO: 1496035 - DNA, 15 bp, Homo sapiens
cttactttgtcattg

SEQ ID NO: 1496036 - DNA, 15 bp, Homo sapiens
ttactttgtcattgg

SEQ ID NO: 1496037 - DNA, 15 bp, Homo sapiens
tactttgtcattggt

SEQ ID NO: 1496038 - DNA, 15 bp, Homo sapiens
actttgtcattggta

SEQ ID NO: 1496039 - DNA, 15 bp, Homo sapiens
ctttgtcattggtat

SEQ ID NO: 1496040 - DNA, 15 bp, Homo sapiens
tttgtcattggtatt

SEQ ID NO: 1496041 - DNA, 15 bp, Homo sapiens
ttgtcattggtattc

SEQ ID NO: 1496042 - DNA, 15 bp, Homo sapiens
tgtcattggtattct

SEQ ID NO: 1496043 - DNA, 15 bp, Homo sapiens
gtcattggtattctt

SEQ ID NO: 1496044 - DNA, 15 bp, Homo sapiens
tcattggtattcttg

SEQ ID NO: 1496045 - DNA, 15 bp, Homo sapiens
cattggtattcttga

SEQ ID NO: 1496046 - DNA, 15 bp, Homo sapiens
attggtattcttgaa

SEQ ID NO: 1496047 - DNA, 15 bp, Homo sapiens
ttggtattcttgaac

SEQ ID NO: 1496048 - DNA, 15 bp, Homo sapiens
tggtattcttgaaca

SEQ ID NO: 1496049 - DNA, 15 bp, Homo sapiens
ggtattcttgaacat

SEQ ID NO: 1496050 - DNA, 15 bp, Homo sapiens
gtattcttgaacatg

SEQ ID NO: 1496051 - DNA, 15 bp, Homo sapiens
tattcttgaacatgg

SEQ ID NO: 1496052 - DNA, 15 bp, Homo sapiens
attcttgaacatgga

SEQ ID NO: 1496053 - DNA, 15 bp, Homo sapiens
ttcttgaacatggaa

SEQ ID NO: 1496054 - DNA, 15 bp, Homo sapiens
tcttgaacatggaat

SEQ ID NO: 1496055 - DNA, 15 bp, Homo sapiens
cttgaacatggaata

SEQ ID NO: 1496056 - DNA, 15 bp, Homo sapiens
ttgaacatggaataa

SEQ ID NO: 1496057 - DNA, 15 bp, Homo sapiens
tgaacatggaataac

SEQ ID NO: 1496058 - DNA, 15 bp, Homo sapiens
gaacatggaataacc

SEQ ID NO: 1496059 - DNA, 15 bp, Homo sapiens
aacatggaataacca

SEQ ID NO: 1496060 - DNA, 15 bp, Homo sapiens
acatggaataaccaa

SEQ ID NO: 1496061 - DNA, 15 bp, Homo sapiens
catggaataaccaaa

SEQ ID NO: 1496062 - DNA, 15 bp, Homo sapiens
atggaataaccaaat

SEQ ID NO: 1496063 - DNA, 15 bp, Homo sapiens
tggaataaccaaatg

SEQ ID NO: 1496064 - DNA, 15 bp, Homo sapiens
ggaataaccaaatgt

SEQ ID NO: 1496065 - DNA, 15 bp, Homo sapiens
gaataaccaaatgta

SEQ ID NO: 1496066 - DNA, 15 bp, Homo sapiens
aataaccaaatgtag

SEQ ID NO: 1496067 - DNA, 15 bp, Homo sapiens
ataaccaaatgtagc

SEQ ID NO: 1496068 - DNA, 15 bp, Homo sapiens
taaccaaatgtagct

SEQ ID NO: 1496069 - DNA, 15 bp, Homo sapiens
aaccaaatgtagctg

SEQ ID NO: 1496070 - DNA, 15 bp, Homo sapiens
accaaatgtagctgg

SEQ ID NO: 1496071 - DNA, 15 bp, Homo sapiens
ccaaatgtagctggc

SEQ ID NO: 1496072 - DNA, 15 bp, Homo sapiens
caaatgtagctggct

SEQ ID NO: 1496073 - DNA, 15 bp, Homo sapiens
aaatgtagctggctc

SEQ ID NO: 1496074 - DNA, 15 bp, Homo sapiens
aatgtagctggctct

SEQ ID NO: 1496075 - DNA, 15 bp, Homo sapiens
atgtagctggctctt

SEQ ID NO: 1496076 - DNA, 15 bp, Homo sapiens
tgtagctggctcttg

SEQ ID NO: 1496077 - DNA, 15 bp, Homo sapiens
gtagctggctcttgg

SEQ ID NO: 1496078 - DNA, 15 bp, Homo sapiens
tagctggctcttgga

SEQ ID NO: 1496079 - DNA, 15 bp, Homo sapiens
agctggctcttggat

SEQ ID NO: 1496080 - DNA, 15 bp, Homo sapiens
gctggctcttggatg

SEQ ID NO: 1496081 - DNA, 15 bp, Homo sapiens
ctggctcttggatgt

SEQ ID NO: 1496082 - DNA, 15 bp, Homo sapiens
tggctcttggatgtt

SEQ ID NO: 1496083 - DNA, 15 bp, Homo sapiens
ggctcttggatgtta

SEQ ID NO: 1496084 - DNA, 15 bp, Homo sapiens
gctcttggatgttat

SEQ ID NO: 1496085 - DNA, 15 bp, Homo sapiens
ctcttggatgttata

SEQ ID NO: 1496086 - DNA, 15 bp, Homo sapiens
tcttggatgttatat

SEQ ID NO: 1496087 - DNA, 15 bp, Homo sapiens
cttggatgttatatt

SEQ ID NO: 1496088 - DNA, 15 bp, Homo sapiens
ttggatgttatattc

SEQ ID NO: 1496089 - DNA, 15 bp, Homo sapiens
tggatgttatattca

SEQ ID NO: 1496090 - DNA, 15 bp, Homo sapiens
ggatgttatattcat

SEQ ID NO: 1496091 - DNA, 15 bp, Homo sapiens
gatgttatattcatg

SEQ ID NO: 1496092 - DNA, 15 bp, Homo sapiens
atgttatattcatgt

SEQ ID NO: 1496093 - DNA, 15 bp, Homo sapiens
tgttatattcatgtg

SEQ ID NO: 1496094 - DNA, 15 bp, Homo sapiens
gttatattcatgtga

SEQ ID NO: 1496095 - DNA, 15 bp, Homo sapiens
ttatattcatgtgac

SEQ ID NO: 1496096 - DNA, 15 bp, Homo sapiens
tatattcatgtgact

SEQ ID NO: 1496097 - DNA, 15 bp, Homo sapiens
atattcatgtgactg

SEQ ID NO: 1496098 - DNA, 15 bp, Homo sapiens
tattcatgtgactgt

SEQ ID NO: 1496099 - DNA, 15 bp, Homo sapiens
attcatgtgactgtc

SEQ ID NO: 1496100 - DNA, 15 bp, Homo sapiens
ttcatgtgactgtct

SEQ ID NO: 1496101 - DNA, 15 bp, Homo sapiens
tcatgtgactgtctc

SEQ ID NO: 1496102 - DNA, 15 bp, Homo sapiens
catgtgactgtctca

SEQ ID NO: 1496103 - DNA, 15 bp, Homo sapiens
atgtgactgtctcat

SEQ ID NO: 1496104 - DNA, 15 bp, Homo sapiens
tgtgactgtctcatt

SEQ ID NO: 1496105 - DNA, 15 bp, Homo sapiens
gtgactgtctcattt

SEQ ID NO: 1496106 - DNA, 15 bp, Homo sapiens
tgactgtctcatttc

SEQ ID NO: 1496107 - DNA, 15 bp, Homo sapiens
gactgtctcatttct

SEQ ID NO: 1496108 - DNA, 15 bp, Homo sapiens
actgtctcatttcta

SEQ ID NO: 1496109 - DNA, 15 bp, Homo sapiens
ctgtctcatttctaa

SEQ ID NO: 1496110 - DNA, 15 bp, Homo sapiens
tgtctcatttctaaa

SEQ ID NO: 1496111 - DNA, 15 bp, Homo sapiens
gtctcatttctaaaa

SEQ ID NO: 1496112 - DNA, 15 bp, Homo sapiens
tctcatttctaaaat

SEQ ID NO: 1496113 - DNA, 15 bp, Homo sapiens
ctcatttctaaaatg

SEQ ID NO: 1496114 - DNA, 15 bp, Homo sapiens
tcatttctaaaatgg

SEQ ID NO: 1496115 - DNA, 15 bp, Homo sapiens
catttctaaaatggc

SEQ ID NO: 1496116 - DNA, 15 bp, Homo sapiens
atttctaaaatggca

SEQ ID NO: 1496117 - DNA, 15 bp, Homo sapiens
tttctaaaatggcat

SEQ ID NO: 1496118 - DNA, 15 bp, Homo sapiens
ttctaaaatggcatc

SEQ ID NO: 1496119 - DNA, 15 bp, Homo sapiens
tctaaaatggcatcc

SEQ ID NO: 1496120 - DNA, 15 bp, Homo sapiens
ctaaaatggcatcca

SEQ ID NO: 1496121 - DNA, 15 bp, Homo sapiens
taaaatggcatccac

SEQ ID NO: 1496122 - DNA, 15 bp, Homo sapiens
aaaatggcatccaca

SEQ ID NO: 1496123 - DNA, 15 bp, Homo sapiens
aaatggcatccacat

SEQ ID NO: 1496124 - DNA, 15 bp, Homo sapiens
aatggcatccacata

SEQ ID NO: 1496125 - DNA, 15 bp, Homo sapiens
atggcatccacatag

SEQ ID NO: 1496126 - DNA, 15 bp, Homo sapiens
tggcatccacatagc

SEQ ID NO: 1496127 - DNA, 15 bp, Homo sapiens
ggcatccacatagcc

SEQ ID NO: 1496128 - DNA, 15 bp, Homo sapiens
gcatccacatagcca

SEQ ID NO: 1496129 - DNA, 15 bp, Homo sapiens
catccacatagccac

SEQ ID NO: 1496130 - DNA, 15 bp, Homo sapiens
atccacatagccaca

SEQ ID NO: 1496131 - DNA, 15 bp, Homo sapiens
tccacatagccacac

SEQ ID NO: 1496132 - DNA, 15 bp, Homo sapiens
ccacatagccacact

SEQ ID NO: 1496133 - DNA, 15 bp, Homo sapiens
cacatagccacactt

SEQ ID NO: 1496134 - DNA, 15 bp, Homo sapiens
acatagccacacttt

SEQ ID NO: 1496135 - DNA, 15 bp, Homo sapiens
catagccacactttg

SEQ ID NO: 1496136 - DNA, 15 bp, Homo sapiens
atagccacactttgg

SEQ ID NO: 1496137 - DNA, 15 bp, Homo sapiens
tagccacactttggc

SEQ ID NO: 1496138 - DNA, 15 bp, Homo sapiens
agccacactttggca

SEQ ID NO: 1496139 - DNA, 15 bp, Homo sapiens
gccacactttggcat

SEQ ID NO: 1496140 - DNA, 15 bp, Homo sapiens
ccacactttggcata

SEQ ID NO: 1496141 - DNA, 15 bp, Homo sapiens
cacactttggcatac

SEQ ID NO: 1496142 - DNA, 15 bp, Homo sapiens
acactttggcataca

SEQ ID NO: 1496143 - DNA, 15 bp, Homo sapiens
cactttggcatacag

SEQ ID NO: 1496144 - DNA, 15 bp, Homo sapiens
actttggcatacagc

SEQ ID NO: 1496145 - DNA, 15 bp, Homo sapiens
ctttggcatacagcg

SEQ ID NO: 1496146 - DNA, 15 bp, Homo sapiens
tttggcatacagcgg

SEQ ID NO: 1496147 - DNA, 15 bp, Homo sapiens
ttggcatacagcggg

SEQ ID NO: 1496148 - DNA, 15 bp, Homo sapiens
tggcatacagcgggc

SEQ ID NO: 1496149 - DNA, 15 bp, Homo sapiens
ggcatacagcgggct

SEQ ID NO: 1496150 - DNA, 15 bp, Homo sapiens
gcatacagcgggctc

SEQ ID NO: 1496151 - DNA, 15 bp, Homo sapiens
catacagcgggctca

SEQ ID NO: 1496152 - DNA, 15 bp, Homo sapiens
atacagcgggctcaa

SEQ ID NO: 1496153 - DNA, 15 bp, Homo sapiens
tacagcgggctcaat

SEQ ID NO: 1496154 - DNA, 15 bp, Homo sapiens
acagcgggctcaata

SEQ ID NO: 1496155 - DNA, 15 bp, Homo sapiens
cagcgggctcaatac

SEQ ID NO: 1496156 - DNA, 15 bp, Homo sapiens
agcgggctcaatacc

SEQ ID NO: 1496157 - DNA, 15 bp, Homo sapiens
gcgggctcaatacca

SEQ ID NO: 1496158 - DNA, 15 bp, Homo sapiens
cgggctcaataccac

SEQ ID NO: 1496159 - DNA, 15 bp, Homo sapiens
gggctcaataccacc

SEQ ID NO: 1496160 - DNA, 15 bp, Homo sapiens
ggctcaataccaccc

SEQ ID NO: 1496161 - DNA, 15 bp, Homo sapiens
gctcaataccacccc

SEQ ID NO: 1496162 - DNA, 15 bp, Homo sapiens
ctcaataccaccccc

SEQ ID NO: 1496163 - DNA, 15 bp, Homo sapiens
tcaataccacccccg

SEQ ID NO: 1496164 - DNA, 15 bp, Homo sapiens
caataccacccccgt

SEQ ID NO: 1496165 - DNA, 15 bp, Homo sapiens
aataccacccccgtc

SEQ ID NO: 1496166 - DNA, 15 bp, Homo sapiens
ataccacccccgtca

SEQ ID NO: 1496167 - DNA, 15 bp, Homo sapiens
taccacccccgtcat

SEQ ID NO: 1496168 - DNA, 15 bp, Homo sapiens
accacccccgtcatc

SEQ ID NO: 1496169 - DNA, 15 bp, Homo sapiens
ccacccccgtcatcc

SEQ ID NO: 1496170 - DNA, 15 bp, Homo sapiens
cacccccgtcatccc

SEQ ID NO: 1496171 - DNA, 15 bp, Homo sapiens
acccccgtcatcccc

SEQ ID NO: 1496172 - DNA, 15 bp, Homo sapiens
cccccgtcatccccc

SEQ ID NO: 1496173 - DNA, 15 bp, Homo sapiens
ccccgtcatccccct

SEQ ID NO: 1496174 - DNA, 15 bp, Homo sapiens
cccgtcatccccctc

SEQ ID NO: 1496175 - DNA, 15 bp, Homo sapiens
ccgtcatccccctcc

SEQ ID NO: 1496176 - DNA, 15 bp, Homo sapiens
cgtcatccccctcct

SEQ ID NO: 1496177 - DNA, 15 bp, Homo sapiens
gtcatccccctcctt

SEQ ID NO: 1496178 - DNA, 15 bp, Homo sapiens
tcatccccctccttg

SEQ ID NO: 1496179 - DNA, 15 bp, Homo sapiens
catccccctccttgt

SEQ ID NO: 1496180 - DNA, 15 bp, Homo sapiens
atccccctccttgtt

SEQ ID NO: 1496181 - DNA, 15 bp, Homo sapiens
tccccctccttgttt

SEQ ID NO: 1496182 - DNA, 15 bp, Homo sapiens
ccccctccttgtttt

SEQ ID NO: 1496183 - DNA, 15 bp, Homo sapiens
cccctccttgttttc

SEQ ID NO: 1496184 - DNA, 15 bp, Homo sapiens
ccctccttgttttca

SEQ ID NO: 1496185 - DNA, 15 bp, Homo sapiens
cctccttgttttcat

SEQ ID NO: 1496186 - DNA, 15 bp, Homo sapiens
ctccttgttttcatc

SEQ ID NO: 1496187 - DNA, 15 bp, Homo sapiens
tccttgttttcatct

SEQ ID NO: 1496188 - DNA, 15 bp, Homo sapiens
ccttgttttcatctg

SEQ ID NO: 1496189 - DNA, 15 bp, Homo sapiens
cttgttttcatctgg

SEQ ID NO: 1496190 - DNA, 15 bp, Homo sapiens
ttgttttcatctgga

SEQ ID NO: 1496191 - DNA, 15 bp, Homo sapiens
tgttttcatctggag

SEQ ID NO: 1496192 - DNA, 15 bp, Homo sapiens
gttttcatctggagc

SEQ ID NO: 1496193 - DNA, 15 bp, Homo sapiens
ttttcatctggagct

SEQ ID NO: 1496194 - DNA, 15 bp, Homo sapiens
tttcatctggagctg

SEQ ID NO: 1496195 - DNA, 15 bp, Homo sapiens
ttcatctggagctgc

SEQ ID NO: 1496196 - DNA, 15 bp, Homo sapiens
tcatctggagctgct

SEQ ID NO: 1496197 - DNA, 15 bp, Homo sapiens
catctggagctgctg

SEQ ID NO: 1496198 - DNA, 15 bp, Homo sapiens
atctggagctgctgc

SEQ ID NO: 1496199 - DNA, 15 bp, Homo sapiens
tctggagctgctgca

SEQ ID NO: 1496200 - DNA, 15 bp, Homo sapiens
ctggagctgctgcag

SEQ ID NO: 1496201 - DNA, 15 bp, Homo sapiens
tggagctgctgcaga

SEQ ID NO: 1496202 - DNA, 15 bp, Homo sapiens
ggagctgctgcagag

SEQ ID NO: 1496203 - DNA, 15 bp, Homo sapiens
gagctgctgcagagc

SEQ ID NO: 1496204 - DNA, 15 bp, Homo sapiens
agctgctgcagagct

SEQ ID NO: 1496205 - DNA, 15 bp, Homo sapiens
gctgctgcagagcta

SEQ ID NO: 1496206 - DNA, 15 bp, Homo sapiens
ctgctgcagagctag

SEQ ID NO: 1496207 - DNA, 15 bp, Homo sapiens
tgctgcagagctaga

SEQ ID NO: 1496208 - DNA, 15 bp, Homo sapiens
gctgcagagctagaa

SEQ ID NO: 1496209 - DNA, 15 bp, Homo sapiens
ctgcagagctagaac

SEQ ID NO: 1496210 - DNA, 15 bp, Homo sapiens
tgcagagctagaact

SEQ ID NO: 1496211 - DNA, 15 bp, Homo sapiens
gcagagctagaacta

SEQ ID NO: 1496212 - DNA, 15 bp, Homo sapiens
cagagctagaactaa

SEQ ID NO: 1496213 - DNA, 15 bp, Homo sapiens
agagctagaactaac

SEQ ID NO: 1496214 - DNA, 15 bp, Homo sapiens
gagctagaactaaca

SEQ ID NO: 1496215 - DNA, 15 bp, Homo sapiens
agctagaactaacag

SEQ ID NO: 1496216 - DNA, 15 bp, Homo sapiens
gctagaactaacagt

SEQ ID NO: 1496217 - DNA, 15 bp, Homo sapiens
ctagaactaacagtc

SEQ ID NO: 1496218 - DNA, 15 bp, Homo sapiens
tagaactaacagtca

SEQ ID NO: 1496219 - DNA, 15 bp, Homo sapiens
agaactaacagtcat

SEQ ID NO: 1496220 - DNA, 15 bp, Homo sapiens
gaactaacagtcata

SEQ ID NO: 1496221 - DNA, 15 bp, Homo sapiens
aactaacagtcatat

SEQ ID NO: 1496222 - DNA, 15 bp, Homo sapiens
actaacagtcatatt

SEQ ID NO: 1496223 - DNA, 15 bp, Homo sapiens
ctaacagtcatattc

SEQ ID NO: 1496224 - DNA, 15 bp, Homo sapiens
taacagtcatattct

SEQ ID NO: 1496225 - DNA, 15 bp, Homo sapiens
aacagtcatattcta

SEQ ID NO: 1496226 - DNA, 15 bp, Homo sapiens
acagtcatattctag

SEQ ID NO: 1496227 - DNA, 15 bp, Homo sapiens
cagtcatattctagg

SEQ ID NO: 1496228 - DNA, 15 bp, Homo sapiens
agtcatattctaggc

SEQ ID NO: 1496229 - DNA, 15 bp, Homo sapiens
gtcatattctaggca

SEQ ID NO: 1496230 - DNA, 15 bp, Homo sapiens
tcatattctaggcaa

SEQ ID NO: 1496231 - DNA, 15 bp, Homo sapiens
catattctaggcaat

SEQ ID NO: 1496232 - DNA, 15 bp, Homo sapiens
atattctaggcaatt

SEQ ID NO: 1496233 - DNA, 15 bp, Homo sapiens
tattctaggcaattg

SEQ ID NO: 1496234 - DNA, 15 bp, Homo sapiens
attctaggcaattgg

SEQ ID NO: 1496235 - DNA, 15 bp, Homo sapiens
ttctaggcaattgga

SEQ ID NO: 1496236 - DNA, 15 bp, Homo sapiens
tctaggcaattggac

SEQ ID NO: 1496237 - DNA, 15 bp, Homo sapiens
ctaggcaattggaca

SEQ ID NO: 1496238 - DNA, 15 bp, Homo sapiens
taggcaattggacaa

SEQ ID NO: 1496239 - DNA, 15 bp, Homo sapiens
aggcaattggacaat

SEQ ID NO: 1496240 - DNA, 15 bp, Homo sapiens
ggcaattggacaatt

SEQ ID NO: 1496241 - DNA, 15 bp, Homo sapiens
gcaattggacaattc

SEQ ID NO: 1496242 - DNA, 15 bp, Homo sapiens
caattggacaattct

SEQ ID NO: 1496243 - DNA, 15 bp, Homo sapiens
aattggacaattctt

SEQ ID NO: 1496244 - DNA, 15 bp, Homo sapiens
attggacaattctta

SEQ ID NO: 1496245 - DNA, 15 bp, Homo sapiens
ttggacaattcttat

SEQ ID NO: 1496246 - DNA, 15 bp, Homo sapiens
tggacaattcttata

SEQ ID NO: 1496247 - DNA, 15 bp, Homo sapiens
ggacaattcttataa

SEQ ID NO: 1496248 - DNA, 15 bp, Homo sapiens
gacaattcttataaa

SEQ ID NO: 1496249 - DNA, 15 bp, Homo sapiens
acaattcttataaaa

SEQ ID NO: 1496250 - DNA, 15 bp, Homo sapiens
caattcttataaaat

SEQ ID NO: 1496251 - DNA, 15 bp, Homo sapiens
aattcttataaaatt

SEQ ID NO: 1496252 - DNA, 15 bp, Homo sapiens
attcttataaaattc

SEQ ID NO: 1496253 - DNA, 15 bp, Homo sapiens
ttcttataaaattct

SEQ ID NO: 1496254 - DNA, 15 bp, Homo sapiens
tcttataaaattctc

SEQ ID NO: 1496255 - DNA, 15 bp, Homo sapiens
cttataaaattctct

SEQ ID NO: 1496256 - DNA, 15 bp, Homo sapiens
ttataaaattctctt

SEQ ID NO: 1496257 - DNA, 15 bp, Homo sapiens
tataaaattctcttc

SEQ ID NO: 1496258 - DNA, 15 bp, Homo sapiens
ataaaattctcttcc

SEQ ID NO: 1496259 - DNA, 15 bp, Homo sapiens
taaaattctcttcct

SEQ ID NO: 1496260 - DNA, 15 bp, Homo sapiens
aaaattctcttcctc

SEQ ID NO: 1496261 - DNA, 15 bp, Homo sapiens
aaattctcttcctct

SEQ ID NO: 1496262 - DNA, 15 bp, Homo sapiens
aattctcttcctctg

SEQ ID NO: 1496263 - DNA, 15 bp, Homo sapiens
attctcttcctctgc

SEQ ID NO: 1496264 - DNA, 15 bp, Homo sapiens
ttctcttcctctgcc

SEQ ID NO: 1496265 - DNA, 15 bp, Homo sapiens
tctcttcctctgccg

SEQ ID NO: 1496266 - DNA, 15 bp, Homo sapiens
ctcttcctctgccgg

SEQ ID NO: 1496267 - DNA, 15 bp, Homo sapiens
tcttcctctgccggg

SEQ ID NO: 1496268 - DNA, 15 bp, Homo sapiens
cttcctctgccgggt

SEQ ID NO: 1496269 - DNA, 15 bp, Homo sapiens
ttcctctgccgggtg

SEQ ID NO: 1496270 - DNA, 15 bp, Homo sapiens
tcctctgccgggtgc

SEQ ID NO: 1496271 - DNA, 15 bp, Homo sapiens
cctctgccgggtgcg

SEQ ID NO: 1496272 - DNA, 15 bp, Homo sapiens
ctctgccgggtgcgg

SEQ ID NO: 1496273 - DNA, 15 bp, Homo sapiens
tctgccgggtgcggt

SEQ ID NO: 1496274 - DNA, 15 bp, Homo sapiens
ctgccgggtgcggtg

SEQ ID NO: 1496275 - DNA, 15 bp, Homo sapiens
tgccgggtgcggtgg

SEQ ID NO: 1496276 - DNA, 15 bp, Homo sapiens
gccgggtgcggtggt

SEQ ID NO: 1496277 - DNA, 15 bp, Homo sapiens
ccgggtgcggtggta

SEQ ID NO: 1496278 - DNA, 15 bp, Homo sapiens
cgggtgcggtggtaa

SEQ ID NO: 1496279 - DNA, 15 bp, Homo sapiens
gggtgcggtggtaat

SEQ ID NO: 1496280 - DNA, 15 bp, Homo sapiens
ggtgcggtggtaatc

SEQ ID NO: 1496281 - DNA, 15 bp, Homo sapiens
gtgcggtggtaatcc

SEQ ID NO: 1496282 - DNA, 15 bp, Homo sapiens
tgcggtggtaatccc

SEQ ID NO: 1496283 - DNA, 15 bp, Homo sapiens
gcggtggtaatccca

SEQ ID NO: 1496284 - DNA, 15 bp, Homo sapiens
cggtggtaatcccag

SEQ ID NO: 1496285 - DNA, 15 bp, Homo sapiens
ggtggtaatcccagc

SEQ ID NO: 1496286 - DNA, 15 bp, Homo sapiens
gtggtaatcccagca

SEQ ID NO: 1496287 - DNA, 15 bp, Homo sapiens
tggtaatcccagcac

SEQ ID NO: 1496288 - DNA, 15 bp, Homo sapiens
ggtaatcccagcact

SEQ ID NO: 1496289 - DNA, 15 bp, Homo sapiens
gcagatcacctgaga

SEQ ID NO: 1496290 - DNA, 15 bp, Homo sapiens
cagatcacctgagac

SEQ ID NO: 1496291 - DNA, 15 bp, Homo sapiens
agatcacctgagacc

SEQ ID NO: 1496292 - DNA, 15 bp, Homo sapiens
tcacctgagaccagc

SEQ ID NO: 1496293 - DNA, 15 bp, Homo sapiens
cacctgagaccagcc

SEQ ID NO: 1496294 - DNA, 15 bp, Homo sapiens
acctgagaccagcct

SEQ ID NO: 1496295 - DNA, 15 bp, Homo sapiens
cctgagaccagcctg

SEQ ID NO: 1496296 - DNA, 15 bp, Homo sapiens
ctgagaccagcctga

SEQ ID NO: 1496297 - DNA, 15 bp, Homo sapiens
tacaaaattagccga

SEQ ID NO: 1496298 - DNA, 15 bp, Homo sapiens
acaaaattagccgag

SEQ ID NO: 1496299 - DNA, 15 bp, Homo sapiens
caaaattagccgagc

SEQ ID NO: 1496300 - DNA, 15 bp, Homo sapiens
aaaattagccgagca

SEQ ID NO: 1496301 - DNA, 15 bp, Homo sapiens
aaattagccgagcat

SEQ ID NO: 1496302 - DNA, 15 bp, Homo sapiens
aattagccgagcatg

SEQ ID NO: 1496303 - DNA, 15 bp, Homo sapiens
attagccgagcatgg

SEQ ID NO: 1496304 - DNA, 15 bp, Homo sapiens
ttagccgagcatggt

SEQ ID NO: 1496305 - DNA, 15 bp, Homo sapiens
tagccgagcatggtg

SEQ ID NO: 1496306 - DNA, 15 bp, Homo sapiens
agccgagcatggtgg

SEQ ID NO: 1496307 - DNA, 15 bp, Homo sapiens
gccgagcatggtggc

SEQ ID NO: 1496308 - DNA, 15 bp, Homo sapiens
ccgagcatggtggca

SEQ ID NO: 1496309 - DNA, 15 bp, Homo sapiens
cgagcatggtggcac

SEQ ID NO: 1496310 - DNA, 15 bp, Homo sapiens
gagcatggtggcaca

SEQ ID NO: 1496311 - DNA, 15 bp, Homo sapiens
agcatggtggcacat

SEQ ID NO: 1496312 - DNA, 15 bp, Homo sapiens
ccagctactggggaa

SEQ ID NO: 1496313 - DNA, 15 bp, Homo sapiens
cagctactggggaag

SEQ ID NO: 1496314 - DNA, 15 bp, Homo sapiens
agctactggggaagc

SEQ ID NO: 1496315 - DNA, 15 bp, Homo sapiens
gctactggggaagct

SEQ ID NO: 1496316 - DNA, 15 bp, Homo sapiens
ctactggggaagctg

SEQ ID NO: 1496317 - DNA, 15 bp, Homo sapiens
tactggggaagctga

SEQ ID NO: 1496318 - DNA, 15 bp, Homo sapiens
actggggaagctgag

SEQ ID NO: 1496319 - DNA, 15 bp, Homo sapiens
ctggggaagctgagg

SEQ ID NO: 1496320 - DNA, 15 bp, Homo sapiens
tggggaagctgaggc

SEQ ID NO: 1496321 - DNA, 15 bp, Homo sapiens
ggggaagctgaggca

SEQ ID NO: 1496322 - DNA, 15 bp, Homo sapiens
gaatcacttgaatct

SEQ ID NO: 1496323 - DNA, 15 bp, Homo sapiens
aatcacttgaatctg

SEQ ID NO: 1496324 - DNA, 15 bp, Homo sapiens
atcacttgaatctgc

SEQ ID NO: 1496325 - DNA, 15 bp, Homo sapiens
tcacttgaatctgcg

SEQ ID NO: 1496326 - DNA, 15 bp, Homo sapiens
cacttgaatctgcga

SEQ ID NO: 1496327 - DNA, 15 bp, Homo sapiens
acttgaatctgcgag

SEQ ID NO: 1496328 - DNA, 15 bp, Homo sapiens
cttgaatctgcgagg

SEQ ID NO: 1496329 - DNA, 15 bp, Homo sapiens
ttgaatctgcgaggc

SEQ ID NO: 1496330 - DNA, 15 bp, Homo sapiens
tgaatctgcgaggcg

SEQ ID NO: 1496331 - DNA, 15 bp, Homo sapiens
gaatctgcgaggcgg

SEQ ID NO: 1496332 - DNA, 15 bp, Homo sapiens
aatctgcgaggcgga

SEQ ID NO: 1496333 - DNA, 15 bp, Homo sapiens
atctgcgaggcggag

SEQ ID NO: 1496334 - DNA, 15 bp, Homo sapiens
tctgcgaggcggagg

SEQ ID NO: 1496335 - DNA, 15 bp, Homo sapiens
ctgcgaggcggaggt

SEQ ID NO: 1496336 - DNA, 15 bp, Homo sapiens
tgcgaggcggaggtt

SEQ ID NO: 1496337 - DNA, 15 bp, Homo sapiens
gcgaggcggaggttg

SEQ ID NO: 1496338 - DNA, 15 bp, Homo sapiens
cgaggcggaggttgc

SEQ ID NO: 1496339 - DNA, 15 bp, Homo sapiens
gttgcagtgaactga

SEQ ID NO: 1496340 - DNA, 15 bp, Homo sapiens
ttgcagtgaactgag

SEQ ID NO: 1496341 - DNA, 15 bp, Homo sapiens
tgcagtgaactgaga

SEQ ID NO: 1496342 - DNA, 15 bp, Homo sapiens
gcagtgaactgagat

SEQ ID NO: 1496343 - DNA, 15 bp, Homo sapiens
agtgaactgagatcg

SEQ ID NO: 1496344 - DNA, 15 bp, Homo sapiens
gtgaactgagatcgc

SEQ ID NO: 1496345 - DNA, 15 bp, Homo sapiens
tgaactgagatcgcg

SEQ ID NO: 1496346 - DNA, 15 bp, Homo sapiens
gaactgagatcgcgc

SEQ ID NO: 1496347 - DNA, 15 bp, Homo sapiens
aactgagatcgcgcc

SEQ ID NO: 1496348 - DNA, 15 bp, Homo sapiens
actgagatcgcgcca

SEQ ID NO: 1496349 - DNA, 15 bp, Homo sapiens
ctgagatcgcgccat

SEQ ID NO: 1496350 - DNA, 15 bp, Homo sapiens
tgagatcgcgccatt

SEQ ID NO: 1496351 - DNA, 15 bp, Homo sapiens
ctgggcaacaagagc

SEQ ID NO: 1496352 - DNA, 15 bp, Homo sapiens
gagcgaaactccgtt

SEQ ID NO: 1496353 - DNA, 15 bp, Homo sapiens
agcgaaactccgttt

SEQ ID NO: 1496354 - DNA, 15 bp, Homo sapiens
gcgaaactccgtttc

SEQ ID NO: 1496355 - DNA, 15 bp, Homo sapiens
cgaaactccgtttca

SEQ ID NO: 1496356 - DNA, 15 bp, Homo sapiens
gaaactccgtttcaa

SEQ ID NO: 1496357 - DNA, 15 bp, Homo sapiens
aaactccgtttcaaa

SEQ ID NO: 1496358 - DNA, 15 bp, Homo sapiens
aactccgtttcaaaa

SEQ ID NO: 1496359 - DNA, 15 bp, Homo sapiens
cgtttcaaaaaaaat

SEQ ID NO: 1496360 - DNA, 15 bp, Homo sapiens
gtttcaaaaaaaata

SEQ ID NO: 1496361 - DNA, 15 bp, Homo sapiens
tttcaaaaaaaataa

SEQ ID NO: 1496362 - DNA, 15 bp, Homo sapiens
ttcaaaaaaaataaa

SEQ ID NO: 1496363 - DNA, 15 bp, Homo sapiens
tcaaaaaaaataaat

SEQ ID NO: 1496364 - DNA, 15 bp, Homo sapiens
caaaaaaaataaata

SEQ ID NO: 1496365 - DNA, 15 bp, Homo sapiens
ataaataaataaatt

SEQ ID NO: 1496366 - DNA, 15 bp, Homo sapiens
taaataaataaattc

SEQ ID NO: 1496367 - DNA, 15 bp, Homo sapiens
aaataaataaattct

SEQ ID NO: 1496368 - DNA, 15 bp, Homo sapiens
aataaataaattctc

SEQ ID NO: 1496369 - DNA, 15 bp, Homo sapiens
ataaataaattctct

SEQ ID NO: 1496370 - DNA, 15 bp, Homo sapiens
taaataaattctctt

SEQ ID NO: 1496371 - DNA, 15 bp, Homo sapiens
aaataaattctcttc

SEQ ID NO: 1496372 - DNA, 15 bp, Homo sapiens
aataaattctcttcc

SEQ ID NO: 1496373 - DNA, 15 bp, Homo sapiens
ataaattctcttcct

SEQ ID NO: 1496374 - DNA, 15 bp, Homo sapiens
taaattctcttcctc

SEQ ID NO: 1496375 - DNA, 15 bp, Homo sapiens
aaattctcttcctca

SEQ ID NO: 1496376 - DNA, 15 bp, Homo sapiens
aattctcttcctcat

SEQ ID NO: 1496377 - DNA, 15 bp, Homo sapiens
attctcttcctcatc

SEQ ID NO: 1496378 - DNA, 15 bp, Homo sapiens
ttctcttcctcatcg

SEQ ID NO: 1496379 - DNA, 15 bp, Homo sapiens
tctcttcctcatcgt

SEQ ID NO: 1496380 - DNA, 15 bp, Homo sapiens
ctcttcctcatcgtc

SEQ ID NO: 1496381 - DNA, 15 bp, Homo sapiens
tcttcctcatcgtct

SEQ ID NO: 1496382 - DNA, 15 bp, Homo sapiens
cttcctcatcgtctg

SEQ ID NO: 1496383 - DNA, 15 bp, Homo sapiens
ttcctcatcgtctgg

SEQ ID NO: 1496384 - DNA, 15 bp, Homo sapiens
tcctcatcgtctggc

SEQ ID NO: 1496385 - DNA, 15 bp, Homo sapiens
cctcatcgtctggct

SEQ ID NO: 1496386 - DNA, 15 bp, Homo sapiens
ctcatcgtctggctt

SEQ ID NO: 1496387 - DNA, 15 bp, Homo sapiens
tcatcgtctggcttg

SEQ ID NO: 1496388 - DNA, 15 bp, Homo sapiens
catcgtctggcttgg

SEQ ID NO: 1496389 - DNA, 15 bp, Homo sapiens
atcgtctggcttgga

SEQ ID NO: 1496390 - DNA, 15 bp, Homo sapiens
tcgtctggcttggat

SEQ ID NO: 1496391 - DNA, 15 bp, Homo sapiens
cgtctggcttggata

SEQ ID NO: 1496392 - DNA, 15 bp, Homo sapiens
gtctggcttggatag

SEQ ID NO: 1496393 - DNA, 15 bp, Homo sapiens
tctggcttggatagt

SEQ ID NO: 1496394 - DNA, 15 bp, Homo sapiens
ctggcttggatagtg

SEQ ID NO: 1496395 - DNA, 15 bp, Homo sapiens
tggcttggatagtgc

SEQ ID NO: 1496396 - DNA, 15 bp, Homo sapiens
ggcttggatagtgca

SEQ ID NO: 1496397 - DNA, 15 bp, Homo sapiens
gcttggatagtgcac

SEQ ID NO: 1496398 - DNA, 15 bp, Homo sapiens
cttggatagtgcaca

SEQ ID NO: 1496399 - DNA, 15 bp, Homo sapiens
ttggatagtgcacac

SEQ ID NO: 1496400 - DNA, 15 bp, Homo sapiens
tggatagtgcacaca

SEQ ID NO: 1496401 - DNA, 15 bp, Homo sapiens
ggatagtgcacacat

SEQ ID NO: 1496402 - DNA, 15 bp, Homo sapiens
gatagtgcacacatt

SEQ ID NO: 1496403 - DNA, 15 bp, Homo sapiens
atagtgcacacattt

SEQ ID NO: 1496404 - DNA, 15 bp, Homo sapiens
tagtgcacacatttt

SEQ ID NO: 1496405 - DNA, 15 bp, Homo sapiens
agtgcacacattttc

SEQ ID NO: 1496406 - DNA, 15 bp, Homo sapiens
gtgcacacattttct

SEQ ID NO: 1496407 - DNA, 15 bp, Homo sapiens
tgcacacattttctc

SEQ ID NO: 1496408 - DNA, 15 bp, Homo sapiens
gcacacattttctct

SEQ ID NO: 1496409 - DNA, 15 bp, Homo sapiens
cacacattttctctg

SEQ ID NO: 1496410 - DNA, 15 bp, Homo sapiens
acacattttctctga

SEQ ID NO: 1496411 - DNA, 15 bp, Homo sapiens
cacattttctctgag

SEQ ID NO: 1496412 - DNA, 15 bp, Homo sapiens
acattttctctgagg

SEQ ID NO: 1496413 - DNA, 15 bp, Homo sapiens
cattttctctgaggc

SEQ ID NO: 1496414 - DNA, 15 bp, Homo sapiens
attttctctgaggca

SEQ ID NO: 1496415 - DNA, 15 bp, Homo sapiens
ttttctctgaggcac

SEQ ID NO: 1496416 - DNA, 15 bp, Homo sapiens
tttctctgaggcaca

SEQ ID NO: 1496417 - DNA, 15 bp, Homo sapiens
ttctctgaggcacac

SEQ ID NO: 1496418 - DNA, 15 bp, Homo sapiens
tctctgaggcacaca

SEQ ID NO: 1496419 - DNA, 15 bp, Homo sapiens
ctctgaggcacacaa

SEQ ID NO: 1496420 - DNA, 15 bp, Homo sapiens
tctgaggcacacaac

SEQ ID NO: 1496421 - DNA, 15 bp, Homo sapiens
ctgaggcacacaacc

SEQ ID NO: 1496422 - DNA, 15 bp, Homo sapiens
tgaggcacacaacca

SEQ ID NO: 1496423 - DNA, 15 bp, Homo sapiens
gaggcacacaaccaa

SEQ ID NO: 1496424 - DNA, 15 bp, Homo sapiens
aggcacacaaccaaa

SEQ ID NO: 1496425 - DNA, 15 bp, Homo sapiens
ggcacacaaccaaac

SEQ ID NO: 1496426 - DNA, 15 bp, Homo sapiens
gcacacaaccaaacg

SEQ ID NO: 1496427 - DNA, 15 bp, Homo sapiens
cacacaaccaaacgc

SEQ ID NO: 1496428 - DNA, 15 bp, Homo sapiens
acacaaccaaacgcc

SEQ ID NO: 1496429 - DNA, 15 bp, Homo sapiens
cacaaccaaacgccc

SEQ ID NO: 1496430 - DNA, 15 bp, Homo sapiens
acaaccaaacgccca

SEQ ID NO: 1496431 - DNA, 15 bp, Homo sapiens
caaccaaacgcccac

SEQ ID NO: 1496432 - DNA, 15 bp, Homo sapiens
aaccaaacgcccaca

SEQ ID NO: 1496433 - DNA, 15 bp, Homo sapiens
accaaacgcccacag

SEQ ID NO: 1496434 - DNA, 15 bp, Homo sapiens
ccaaacgcccacagc

SEQ ID NO: 1496435 - DNA, 15 bp, Homo sapiens
caaacgcccacagct

SEQ ID NO: 1496436 - DNA, 15 bp, Homo sapiens
aaacgcccacagctg

SEQ ID NO: 1496437 - DNA, 15 bp, Homo sapiens
aacgcccacagctgg

SEQ ID NO: 1496438 - DNA, 15 bp, Homo sapiens
acgcccacagctggg

SEQ ID NO: 1496439 - DNA, 15 bp, Homo sapiens
cgcccacagctgggt

SEQ ID NO: 1496440 - DNA, 15 bp, Homo sapiens
gcccacagctgggtg

SEQ ID NO: 1496441 - DNA, 15 bp, Homo sapiens
cccacagctgggtga

SEQ ID NO: 1496442 - DNA, 15 bp, Homo sapiens
ccacagctgggtgag

SEQ ID NO: 1496443 - DNA, 15 bp, Homo sapiens
cacagctgggtgagg

SEQ ID NO: 1496444 - DNA, 15 bp, Homo sapiens
acagctgggtgaggc

SEQ ID NO: 1496445 - DNA, 15 bp, Homo sapiens
cagctgggtgaggcg

SEQ ID NO: 1496446 - DNA, 15 bp, Homo sapiens
agctgggtgaggcgg

SEQ ID NO: 1496447 - DNA, 15 bp, Homo sapiens
gctgggtgaggcggc

SEQ ID NO: 1496448 - DNA, 15 bp, Homo sapiens
ctgggtgaggcggca

SEQ ID NO: 1496449 - DNA, 15 bp, Homo sapiens
tgggtgaggcggcaa

SEQ ID NO: 1496450 - DNA, 15 bp, Homo sapiens
gggtgaggcggcaac

SEQ ID NO: 1496451 - DNA, 15 bp, Homo sapiens
ggtgaggcggcaact

SEQ ID NO: 1496452 - DNA, 15 bp, Homo sapiens
gtgaggcggcaactc

SEQ ID NO: 1496453 - DNA, 15 bp, Homo sapiens
tgaggcggcaactcc

SEQ ID NO: 1496454 - DNA, 15 bp, Homo sapiens
gaggcggcaactcca

SEQ ID NO: 1496455 - DNA, 15 bp, Homo sapiens
aggcggcaactccat

SEQ ID NO: 1496456 - DNA, 15 bp, Homo sapiens
ggcggcaactccatt

SEQ ID NO: 1496457 - DNA, 15 bp, Homo sapiens
gcggcaactccattt

SEQ ID NO: 1496458 - DNA, 15 bp, Homo sapiens
cggcaactccatttc

SEQ ID NO: 1496459 - DNA, 15 bp, Homo sapiens
ggcaactccatttcg

SEQ ID NO: 1496460 - DNA, 15 bp, Homo sapiens
gcaactccatttcgg

SEQ ID NO: 1496461 - DNA, 15 bp, Homo sapiens
caactccatttcggc

SEQ ID NO: 1496462 - DNA, 15 bp, Homo sapiens
aactccatttcggca

SEQ ID NO: 1496463 - DNA, 15 bp, Homo sapiens
actccatttcggcat

SEQ ID NO: 1496464 - DNA, 15 bp, Homo sapiens
ctccatttcggcatc

SEQ ID NO: 1496465 - DNA, 15 bp, Homo sapiens
tccatttcggcatcc

SEQ ID NO: 1496466 - DNA, 15 bp, Homo sapiens
ccatttcggcatccc

SEQ ID NO: 1496467 - DNA, 15 bp, Homo sapiens
catttcggcatccct

SEQ ID NO: 1496468 - DNA, 15 bp, Homo sapiens
atttcggcatccctt

SEQ ID NO: 1496469 - DNA, 15 bp, Homo sapiens
tttcggcatcccttc

SEQ ID NO: 1496470 - DNA, 15 bp, Homo sapiens
ttcggcatcccttcc

SEQ ID NO: 1496471 - DNA, 15 bp, Homo sapiens
tcggcatcccttcca

SEQ ID NO: 1496472 - DNA, 15 bp, Homo sapiens
cggcatcccttccat

SEQ ID NO: 1496473 - DNA, 15 bp, Homo sapiens
ggcatcccttccatg

SEQ ID NO: 1496474 - DNA, 15 bp, Homo sapiens
gcatcccttccatga

SEQ ID NO: 1496475 - DNA, 15 bp, Homo sapiens
catcccttccatgac

SEQ ID NO: 1496476 - DNA, 15 bp, Homo sapiens
atcccttccatgact

SEQ ID NO: 1496477 - DNA, 15 bp, Homo sapiens
tcccttccatgactg

SEQ ID NO: 1496478 - DNA, 15 bp, Homo sapiens
cccttccatgactgg

SEQ ID NO: 1496479 - DNA, 15 bp, Homo sapiens
ccttccatgactgga

SEQ ID NO: 1496480 - DNA, 15 bp, Homo sapiens
cttccatgactggag

SEQ ID NO: 1496481 - DNA, 15 bp, Homo sapiens
ttccatgactggaga

SEQ ID NO: 1496482 - DNA, 15 bp, Homo sapiens
tccatgactggagac

SEQ ID NO: 1496483 - DNA, 15 bp, Homo sapiens
ccatgactggagact

SEQ ID NO: 1496484 - DNA, 15 bp, Homo sapiens
catgactggagacta

SEQ ID NO: 1496485 - DNA, 15 bp, Homo sapiens
atgactggagactaa

SEQ ID NO: 1496486 - DNA, 15 bp, Homo sapiens
tgactggagactaaa

SEQ ID NO: 1496487 - DNA, 15 bp, Homo sapiens
gactggagactaaaa

SEQ ID NO: 1496488 - DNA, 15 bp, Homo sapiens
actggagactaaaaa

SEQ ID NO: 1496489 - DNA, 15 bp, Homo sapiens
ctggagactaaaaat

SEQ ID NO: 1496490 - DNA, 15 bp, Homo sapiens
tggagactaaaaata

SEQ ID NO: 1496491 - DNA, 15 bp, Homo sapiens
ggagactaaaaatag

SEQ ID NO: 1496492 - DNA, 15 bp, Homo sapiens
gagactaaaaatagg

SEQ ID NO: 1496493 - DNA, 15 bp, Homo sapiens
agactaaaaataggg

SEQ ID NO: 1496494 - DNA, 15 bp, Homo sapiens
gactaaaaatagggg

SEQ ID NO: 1496495 - DNA, 15 bp, Homo sapiens
actaaaaataggggt

SEQ ID NO: 1496496 - DNA, 15 bp, Homo sapiens
ctaaaaataggggtg

SEQ ID NO: 1496497 - DNA, 15 bp, Homo sapiens
taaaaataggggtgt

SEQ ID NO: 1496498 - DNA, 15 bp, Homo sapiens
aaaaataggggtgtg

SEQ ID NO: 1496499 - DNA, 15 bp, Homo sapiens
aaaataggggtgtgt

SEQ ID NO: 1496500 - DNA, 15 bp, Homo sapiens
aaataggggtgtgtc

SEQ ID NO: 1496501 - DNA, 15 bp, Homo sapiens
aataggggtgtgtct

SEQ ID NO: 1496502 - DNA, 15 bp, Homo sapiens
ataggggtgtgtctg

SEQ ID NO: 1496503 - DNA, 15 bp, Homo sapiens
taggggtgtgtctga

SEQ ID NO: 1496504 - DNA, 15 bp, Homo sapiens
aggggtgtgtctgac

SEQ ID NO: 1496505 - DNA, 15 bp, Homo sapiens
ggggtgtgtctgaca

SEQ ID NO: 1496506 - DNA, 15 bp, Homo sapiens
gggtgtgtctgacag

SEQ ID NO: 1496507 - DNA, 15 bp, Homo sapiens
ggtgtgtctgacagc

SEQ ID NO: 1496508 - DNA, 15 bp, Homo sapiens
gtgtgtctgacagcc

SEQ ID NO: 1496509 - DNA, 15 bp, Homo sapiens
tgtgtctgacagccc

SEQ ID NO: 1496510 - DNA, 15 bp, Homo sapiens
gtgtctgacagccca

SEQ ID NO: 1496511 - DNA, 15 bp, Homo sapiens
tgtctgacagcccat

SEQ ID NO: 1496512 - DNA, 15 bp, Homo sapiens
gtctgacagcccatt

SEQ ID NO: 1496513 - DNA, 15 bp, Homo sapiens
tctgacagcccattc

SEQ ID NO: 1496514 - DNA, 15 bp, Homo sapiens
ctgacagcccattcc

SEQ ID NO: 1496515 - DNA, 15 bp, Homo sapiens
tgacagcccattccc

SEQ ID NO: 1496516 - DNA, 15 bp, Homo sapiens
gacagcccattccca

SEQ ID NO: 1496517 - DNA, 15 bp, Homo sapiens
acagcccattcccac

SEQ ID NO: 1496518 - DNA, 15 bp, Homo sapiens
cagcccattcccacc

SEQ ID NO: 1496519 - DNA, 15 bp, Homo sapiens
agcccattcccaccc

SEQ ID NO: 1496520 - DNA, 15 bp, Homo sapiens
gcccattcccacccc

SEQ ID NO: 1496521 - DNA, 15 bp, Homo sapiens
cccattcccacccct

SEQ ID NO: 1496522 - DNA, 15 bp, Homo sapiens
ccattcccacccctg

SEQ ID NO: 1496523 - DNA, 15 bp, Homo sapiens
cattcccacccctgg

SEQ ID NO: 1496524 - DNA, 15 bp, Homo sapiens
attcccacccctggc

SEQ ID NO: 1496525 - DNA, 15 bp, Homo sapiens
ttcccacccctggca

SEQ ID NO: 1496526 - DNA, 15 bp, Homo sapiens
tcccacccctggcac

SEQ ID NO: 1496527 - DNA, 15 bp, Homo sapiens
cccacccctggcacc

SEQ ID NO: 1496528 - DNA, 15 bp, Homo sapiens
ccacccctggcaccc

SEQ ID NO: 1496529 - DNA, 15 bp, Homo sapiens
cacccctggcaccca

SEQ ID NO: 1496530 - DNA, 15 bp, Homo sapiens
acccctggcacccaa

SEQ ID NO: 1496531 - DNA, 15 bp, Homo sapiens
cccctggcacccaag

SEQ ID NO: 1496532 - DNA, 15 bp, Homo sapiens
ccctggcacccaagc

SEQ ID NO: 1496533 - DNA, 15 bp, Homo sapiens
cctggcacccaagcc

SEQ ID NO: 1496534 - DNA, 15 bp, Homo sapiens
ctggcacccaagcca

SEQ ID NO: 1496535 - DNA, 15 bp, Homo sapiens
tggcacccaagccag

SEQ ID NO: 1496536 - DNA, 15 bp, Homo sapiens
gcacccaagccagtc

SEQ ID NO: 1496537 - DNA, 15 bp, Homo sapiens
cacccaagccagtcc

SEQ ID NO: 1496538 - DNA, 15 bp, Homo sapiens
acccaagccagtcca

SEQ ID NO: 1496539 - DNA, 15 bp, Homo sapiens
cccaagccagtccac

SEQ ID NO: 1496540 - DNA, 15 bp, Homo sapiens
ccaagccagtccact

SEQ ID NO: 1496541 - DNA, 15 bp, Homo sapiens
caagccagtccactc

SEQ ID NO: 1496542 - DNA, 15 bp, Homo sapiens
aagccagtccactcg

SEQ ID NO: 1496543 - DNA, 15 bp, Homo sapiens
agccagtccactcgg

SEQ ID NO: 1496544 - DNA, 15 bp, Homo sapiens
gccagtccactcggc

SEQ ID NO: 1496545 - DNA, 15 bp, Homo sapiens
ccagtccactcggcc

SEQ ID NO: 1496546 - DNA, 15 bp, Homo sapiens
cagtccactcggcca

SEQ ID NO: 1496547 - DNA, 15 bp, Homo sapiens
agtccactcggccac

SEQ ID NO: 1496548 - DNA, 15 bp, Homo sapiens
gtccactcggccaca

SEQ ID NO: 1496549 - DNA, 15 bp, Homo sapiens
tccactcggccacag

SEQ ID NO: 1496550 - DNA, 15 bp, Homo sapiens
ccactcggccacagg

SEQ ID NO: 1496551 - DNA, 15 bp, Homo sapiens
cactcggccacaggg

SEQ ID NO: 1496552 - DNA, 15 bp, Homo sapiens
actcggccacaggga

SEQ ID NO: 1496553 - DNA, 15 bp, Homo sapiens
ctcggccacagggag

SEQ ID NO: 1496554 - DNA, 15 bp, Homo sapiens
tcggccacagggagc

SEQ ID NO: 1496555 - DNA, 15 bp, Homo sapiens
cggccacagggagcg

SEQ ID NO: 1496556 - DNA, 15 bp, Homo sapiens
ggccacagggagcgg

SEQ ID NO: 1496557 - DNA, 15 bp, Homo sapiens
gccacagggagcggg

SEQ ID NO: 1496558 - DNA, 15 bp, Homo sapiens
ccacagggagcgggg

SEQ ID NO: 1496559 - DNA, 15 bp, Homo sapiens
cacagggagcgggga

SEQ ID NO: 1496560 - DNA, 15 bp, Homo sapiens
acagggagcggggaa

SEQ ID NO: 1496561 - DNA, 15 bp, Homo sapiens
cagggagcggggaaa

SEQ ID NO: 1496562 - DNA, 15 bp, Homo sapiens
agggagcggggaaaa

SEQ ID NO: 1496563 - DNA, 15 bp, Homo sapiens
gggagcggggaaaag

SEQ ID NO: 1496564 - DNA, 15 bp, Homo sapiens
ggagcggggaaaagg

SEQ ID NO: 1496565 - DNA, 15 bp, Homo sapiens
gagcggggaaaaggg

SEQ ID NO: 1496566 - DNA, 15 bp, Homo sapiens
agcggggaaaagggt

SEQ ID NO: 1496567 - DNA, 15 bp, Homo sapiens
gcggggaaaagggtt

SEQ ID NO: 1496568 - DNA, 15 bp, Homo sapiens
cggggaaaagggttg

SEQ ID NO: 1496569 - DNA, 15 bp, Homo sapiens
ggggaaaagggttgt

SEQ ID NO: 1496570 - DNA, 15 bp, Homo sapiens
gggaaaagggttgtt

SEQ ID NO: 1496571 - DNA, 15 bp, Homo sapiens
ggaaaagggttgttt

SEQ ID NO: 1496572 - DNA, 15 bp, Homo sapiens
gaaaagggttgttta

SEQ ID NO: 1496573 - DNA, 15 bp, Homo sapiens
aaaagggttgtttag

SEQ ID NO: 1496574 - DNA, 15 bp, Homo sapiens
aaagggttgtttaga

SEQ ID NO: 1496575 - DNA, 15 bp, Homo sapiens
aagggttgtttagaa

SEQ ID NO: 1496576 - DNA, 15 bp, Homo sapiens
agggttgtttagaag

SEQ ID NO: 1496577 - DNA, 15 bp, Homo sapiens
gggttgtttagaaga

SEQ ID NO: 1496578 - DNA, 15 bp, Homo sapiens
ggttgtttagaagaa

SEQ ID NO: 1496579 - DNA, 15 bp, Homo sapiens
gttgtttagaagaat

SEQ ID NO: 1496580 - DNA, 15 bp, Homo sapiens
ttgtttagaagaatt

SEQ ID NO: 1496581 - DNA, 15 bp, Homo sapiens
tgtttagaagaattt

SEQ ID NO: 1496582 - DNA, 15 bp, Homo sapiens
gtttagaagaatttt

SEQ ID NO: 1496583 - DNA, 15 bp, Homo sapiens
tttagaagaattttc

SEQ ID NO: 1496584 - DNA, 15 bp, Homo sapiens
ttagaagaattttct

SEQ ID NO: 1496585 - DNA, 15 bp, Homo sapiens
tagaagaattttctt

SEQ ID NO: 1496586 - DNA, 15 bp, Homo sapiens
agaagaattttctta

SEQ ID NO: 1496587 - DNA, 15 bp, Homo sapiens
gaagaattttcttag

SEQ ID NO: 1496588 - DNA, 15 bp, Homo sapiens
aagaattttcttagc

SEQ ID NO: 1496589 - DNA, 15 bp, Homo sapiens
agaattttcttagcc

SEQ ID NO: 1496590 - DNA, 15 bp, Homo sapiens
gaattttcttagcct

SEQ ID NO: 1496591 - DNA, 15 bp, Homo sapiens
aattttcttagcctc

SEQ ID NO: 1496592 - DNA, 15 bp, Homo sapiens
attttcttagcctcg

SEQ ID NO: 1496593 - DNA, 15 bp, Homo sapiens
ttttcttagcctcga

SEQ ID NO: 1496594 - DNA, 15 bp, Homo sapiens
tttcttagcctcgaa

SEQ ID NO: 1496595 - DNA, 15 bp, Homo sapiens
ttcttagcctcgaat

SEQ ID NO: 1496596 - DNA, 15 bp, Homo sapiens
tcttagcctcgaata

SEQ ID NO: 1496597 - DNA, 15 bp, Homo sapiens
cttagcctcgaatac

SEQ ID NO: 1496598 - DNA, 15 bp, Homo sapiens
ttagcctcgaataca

SEQ ID NO: 1496599 - DNA, 15 bp, Homo sapiens
tagcctcgaatacat

SEQ ID NO: 1496600 - DNA, 15 bp, Homo sapiens
agcctcgaatacatg

SEQ ID NO: 1496601 - DNA, 15 bp, Homo sapiens
gcctcgaatacatgt

SEQ ID NO: 1496602 - DNA, 15 bp, Homo sapiens
cctcgaatacatgtg

SEQ ID NO: 1496603 - DNA, 15 bp, Homo sapiens
ctcgaatacatgtgt

SEQ ID NO: 1496604 - DNA, 15 bp, Homo sapiens
tcgaatacatgtgtt

SEQ ID NO: 1496605 - DNA, 15 bp, Homo sapiens
cgaatacatgtgttg

SEQ ID NO: 1496606 - DNA, 15 bp, Homo sapiens
gaatacatgtgttga

SEQ ID NO: 1496607 - DNA, 15 bp, Homo sapiens
aatacatgtgttgag

SEQ ID NO: 1496608 - DNA, 15 bp, Homo sapiens
atacatgtgttgagc

SEQ ID NO: 1496609 - DNA, 15 bp, Homo sapiens
tacatgtgttgagct

SEQ ID NO: 1496610 - DNA, 15 bp, Homo sapiens
acatgtgttgagctt

SEQ ID NO: 1496611 - DNA, 15 bp, Homo sapiens
catgtgttgagctta

SEQ ID NO: 1496612 - DNA, 15 bp, Homo sapiens
atgtgttgagcttat

SEQ ID NO: 1496613 - DNA, 15 bp, Homo sapiens
tgtgttgagcttatg

SEQ ID NO: 1496614 - DNA, 15 bp, Homo sapiens
gtgttgagcttatgg

SEQ ID NO: 1496615 - DNA, 15 bp, Homo sapiens
tgttgagcttatggt

SEQ ID NO: 1496616 - DNA, 15 bp, Homo sapiens
gttgagcttatggta

SEQ ID NO: 1496617 - DNA, 15 bp, Homo sapiens
ttgagcttatggtat

SEQ ID NO: 1496618 - DNA, 15 bp, Homo sapiens
tgagcttatggtatg

SEQ ID NO: 1496619 - DNA, 15 bp, Homo sapiens
gagcttatggtatgt

SEQ ID NO: 1496620 - DNA, 15 bp, Homo sapiens
agcttatggtatgtt

SEQ ID NO: 1496621 - DNA, 15 bp, Homo sapiens
gcttatggtatgttt

SEQ ID NO: 1496622 - DNA, 15 bp, Homo sapiens
cttatggtatgtttt

SEQ ID NO: 1496623 - DNA, 15 bp, Homo sapiens
ttatggtatgtttta

SEQ ID NO: 1496624 - DNA, 15 bp, Homo sapiens
tatggtatgttttat

SEQ ID NO: 1496625 - DNA, 15 bp, Homo sapiens
atggtatgttttata

SEQ ID NO: 1496626 - DNA, 15 bp, Homo sapiens
tggtatgttttataa

SEQ ID NO: 1496627 - DNA, 15 bp, Homo sapiens
ggtatgttttataaa

SEQ ID NO: 1496628 - DNA, 15 bp, Homo sapiens
gtatgttttataaaa

SEQ ID NO: 1496629 - DNA, 15 bp, Homo sapiens
tatgttttataaaag

SEQ ID NO: 1496630 - DNA, 15 bp, Homo sapiens
gttttataaaagcag

SEQ ID NO: 1496631 - DNA, 15 bp, Homo sapiens
ttttataaaagcaga

SEQ ID NO: 1496632 - DNA, 15 bp, Homo sapiens
tttataaaagcagat

SEQ ID NO: 1496633 - DNA, 15 bp, Homo sapiens
ttataaaagcagatc

SEQ ID NO: 1496634 - DNA, 15 bp, Homo sapiens
tataaaagcagatcc

SEQ ID NO: 1496635 - DNA, 15 bp, Homo sapiens
ataaaagcagatccc

SEQ ID NO: 1496636 - DNA, 15 bp, Homo sapiens
taaaagcagatccca

SEQ ID NO: 1496637 - DNA, 15 bp, Homo sapiens
aaaagcagatcccag

SEQ ID NO: 1496638 - DNA, 15 bp, Homo sapiens
aaagcagatcccagc

SEQ ID NO: 1496639 - DNA, 15 bp, Homo sapiens
aagcagatcccagcc

SEQ ID NO: 1496640 - DNA, 15 bp, Homo sapiens
agcagatcccagccc

SEQ ID NO: 1496641 - DNA, 15 bp, Homo sapiens
gcagatcccagccct

SEQ ID NO: 1496642 - DNA, 15 bp, Homo sapiens
cagatcccagccctc

SEQ ID NO: 1496643 - DNA, 15 bp, Homo sapiens
agatcccagccctcg

SEQ ID NO: 1496644 - DNA, 15 bp, Homo sapiens
gatcccagccctcgt

SEQ ID NO: 1496645 - DNA, 15 bp, Homo sapiens
atcccagccctcgtt

SEQ ID NO: 1496646 - DNA, 15 bp, Homo sapiens
tcccagccctcgttt

SEQ ID NO: 1496647 - DNA, 15 bp, Homo sapiens
cccagccctcgtttc

SEQ ID NO: 1496648 - DNA, 15 bp, Homo sapiens
ccagccctcgtttca

SEQ ID NO: 1496649 - DNA, 15 bp, Homo sapiens
cagccctcgtttcaa

SEQ ID NO: 1496650 - DNA, 15 bp, Homo sapiens
agccctcgtttcaag

SEQ ID NO: 1496651 - DNA, 15 bp, Homo sapiens
gccctcgtttcaagg

SEQ ID NO: 1496652 - DNA, 15 bp, Homo sapiens
ccctcgtttcaaggg

SEQ ID NO: 1496653 - DNA, 15 bp, Homo sapiens
cctcgtttcaagggc

SEQ ID NO: 1496654 - DNA, 15 bp, Homo sapiens
ctcgtttcaagggct

SEQ ID NO: 1496655 - DNA, 15 bp, Homo sapiens
tcgtttcaagggctc

SEQ ID NO: 1496656 - DNA, 15 bp, Homo sapiens
cgtttcaagggctct

SEQ ID NO: 1496657 - DNA, 15 bp, Homo sapiens
gtttcaagggctctt

SEQ ID NO: 1496658 - DNA, 15 bp, Homo sapiens
tttcaagggctcttt

SEQ ID NO: 1496659 - DNA, 15 bp, Homo sapiens
ttcaagggctcttta

SEQ ID NO: 1496660 - DNA, 15 bp, Homo sapiens
tcaagggctctttaa

SEQ ID NO: 1496661 - DNA, 15 bp, Homo sapiens
caagggctctttaag

SEQ ID NO: 1496662 - DNA, 15 bp, Homo sapiens
aagggctctttaaga

SEQ ID NO: 1496663 - DNA, 15 bp, Homo sapiens
agggctctttaagat

SEQ ID NO: 1496664 - DNA, 15 bp, Homo sapiens
gggctctttaagatt

SEQ ID NO: 1496665 - DNA, 15 bp, Homo sapiens
ggctctttaagattt

SEQ ID NO: 1496666 - DNA, 15 bp, Homo sapiens
gctctttaagatttc

SEQ ID NO: 1496667 - DNA, 15 bp, Homo sapiens
ctctttaagatttcc

SEQ ID NO: 1496668 - DNA, 15 bp, Homo sapiens
tctttaagatttcct

SEQ ID NO: 1496669 - DNA, 15 bp, Homo sapiens
ctttaagatttcctt

SEQ ID NO: 1496670 - DNA, 15 bp, Homo sapiens
tttaagatttcctta

SEQ ID NO: 1496671 - DNA, 15 bp, Homo sapiens
ttaagatttccttag

SEQ ID NO: 1496672 - DNA, 15 bp, Homo sapiens
taagatttccttagg

SEQ ID NO: 1496673 - DNA, 15 bp, Homo sapiens
aagatttccttagga

SEQ ID NO: 1496674 - DNA, 15 bp, Homo sapiens
agatttccttaggag

SEQ ID NO: 1496675 - DNA, 15 bp, Homo sapiens
gatttccttaggaga

SEQ ID NO: 1496676 - DNA, 15 bp, Homo sapiens
atttccttaggagaa

SEQ ID NO: 1496677 - DNA, 15 bp, Homo sapiens
tttccttaggagaat

SEQ ID NO: 1496678 - DNA, 15 bp, Homo sapiens
ttccttaggagaatc

SEQ ID NO: 1496679 - DNA, 15 bp, Homo sapiens
tccttaggagaatct

SEQ ID NO: 1496680 - DNA, 15 bp, Homo sapiens
ccttaggagaatctc

SEQ ID NO: 1496681 - DNA, 15 bp, Homo sapiens
cttaggagaatctca

SEQ ID NO: 1496682 - DNA, 15 bp, Homo sapiens
ttaggagaatctcaa

SEQ ID NO: 1496683 - DNA, 15 bp, Homo sapiens
taggagaatctcaaa

SEQ ID NO: 1496684 - DNA, 15 bp, Homo sapiens
aggagaatctcaaag

SEQ ID NO: 1496685 - DNA, 15 bp, Homo sapiens
ggagaatctcaaaga

SEQ ID NO: 1496686 - DNA, 15 bp, Homo sapiens
gagaatctcaaagag

SEQ ID NO: 1496687 - DNA, 15 bp, Homo sapiens
agaatctcaaagaga

SEQ ID NO: 1496688 - DNA, 15 bp, Homo sapiens
gaatctcaaagagaa

SEQ ID NO: 1496689 - DNA, 15 bp, Homo sapiens
aatctcaaagagaat

SEQ ID NO: 1496690 - DNA, 15 bp, Homo sapiens
atctcaaagagaatg

SEQ ID NO: 1496691 - DNA, 15 bp, Homo sapiens
tctcaaagagaatgg

SEQ ID NO: 1496692 - DNA, 15 bp, Homo sapiens
ctcaaagagaatggc

SEQ ID NO: 1496693 - DNA, 15 bp, Homo sapiens
tcaaagagaatggca

SEQ ID NO: 1496694 - DNA, 15 bp, Homo sapiens
caaagagaatggcaa

SEQ ID NO: 1496695 - DNA, 15 bp, Homo sapiens
aaagagaatggcaaa

SEQ ID NO: 1496696 - DNA, 15 bp, Homo sapiens
aagagaatggcaaaa

SEQ ID NO: 1496697 - DNA, 15 bp, Homo sapiens
agagaatggcaaaaa

SEQ ID NO: 1496698 - DNA, 15 bp, Homo sapiens
gagaatggcaaaaat

SEQ ID NO: 1496699 - DNA, 15 bp, Homo sapiens
agaatggcaaaaatg

SEQ ID NO: 1496700 - DNA, 15 bp, Homo sapiens
gaatggcaaaaatgc

SEQ ID NO: 1496701 - DNA, 15 bp, Homo sapiens
aatggcaaaaatgcc

SEQ ID NO: 1496702 - DNA, 15 bp, Homo sapiens
atggcaaaaatgcct

SEQ ID NO: 1496703 - DNA, 15 bp, Homo sapiens
tggcaaaaatgccta

SEQ ID NO: 1496704 - DNA, 15 bp, Homo sapiens
ggcaaaaatgcctaa

SEQ ID NO: 1496705 - DNA, 15 bp, Homo sapiens
gcaaaaatgcctaag

SEQ ID NO: 1496706 - DNA, 15 bp, Homo sapiens
caaaaatgcctaagt

SEQ ID NO: 1496707 - DNA, 15 bp, Homo sapiens
aaaaatgcctaagtt

SEQ ID NO: 1496708 - DNA, 15 bp, Homo sapiens
aaaatgcctaagttt

SEQ ID NO: 1496709 - DNA, 15 bp, Homo sapiens
aaatgcctaagtttc

SEQ ID NO: 1496710 - DNA, 15 bp, Homo sapiens
aatgcctaagtttca

SEQ ID NO: 1496711 - DNA, 15 bp, Homo sapiens
atgcctaagtttcac

SEQ ID NO: 1496712 - DNA, 15 bp, Homo sapiens
tgcctaagtttcaca

SEQ ID NO: 1496713 - DNA, 15 bp, Homo sapiens
gcctaagtttcacaa

SEQ ID NO: 1496714 - DNA, 15 bp, Homo sapiens
cctaagtttcacaaa

SEQ ID NO: 1496715 - DNA, 15 bp, Homo sapiens
ctaagtttcacaaaa

SEQ ID NO: 1496716 - DNA, 15 bp, Homo sapiens
taagtttcacaaaat

SEQ ID NO: 1496717 - DNA, 15 bp, Homo sapiens
aagtttcacaaaata

SEQ ID NO: 1496718 - DNA, 15 bp, Homo sapiens
agtttcacaaaatac

SEQ ID NO: 1496719 - DNA, 15 bp, Homo sapiens
gtttcacaaaataca

SEQ ID NO: 1496720 - DNA, 15 bp, Homo sapiens
tttcacaaaatacaa

SEQ ID NO: 1496721 - DNA, 15 bp, Homo sapiens
ttcacaaaatacaac

SEQ ID NO: 1496722 - DNA, 15 bp, Homo sapiens
tcacaaaatacaacc

SEQ ID NO: 1496723 - DNA, 15 bp, Homo sapiens
cacaaaatacaacct

SEQ ID NO: 1496724 - DNA, 15 bp, Homo sapiens
acaaaatacaacctt

SEQ ID NO: 1496725 - DNA, 15 bp, Homo sapiens
caaaatacaaccttg

SEQ ID NO: 1496726 - DNA, 15 bp, Homo sapiens
aaaatacaaccttga

SEQ ID NO: 1496727 - DNA, 15 bp, Homo sapiens
aaatacaaccttgaa

SEQ ID NO: 1496728 - DNA, 15 bp, Homo sapiens
aatacaaccttgaat

SEQ ID NO: 1496729 - DNA, 15 bp, Homo sapiens
atacaaccttgaatt

SEQ ID NO: 1496730 - DNA, 15 bp, Homo sapiens
tacaaccttgaattc

SEQ ID NO: 1496731 - DNA, 15 bp, Homo sapiens
acaaccttgaattca

SEQ ID NO: 1496732 - DNA, 15 bp, Homo sapiens
caaccttgaattcac

SEQ ID NO: 1496733 - DNA, 15 bp, Homo sapiens
aaccttgaattcact

SEQ ID NO: 1496734 - DNA, 15 bp, Homo sapiens
accttgaattcactt

SEQ ID NO: 1496735 - DNA, 15 bp, Homo sapiens
ccttgaattcacttt

SEQ ID NO: 1496736 - DNA, 15 bp, Homo sapiens
cttgaattcacttta

SEQ ID NO: 1496737 - DNA, 15 bp, Homo sapiens
ttgaattcactttaa

SEQ ID NO: 1496738 - DNA, 15 bp, Homo sapiens
tgaattcactttaaa

SEQ ID NO: 1496739 - DNA, 15 bp, Homo sapiens
gaattcactttaaac

SEQ ID NO: 1496740 - DNA, 15 bp, Homo sapiens
aattcactttaaaca

SEQ ID NO: 1496741 - DNA, 15 bp, Homo sapiens
attcactttaaacaa

SEQ ID NO: 1496742 - DNA, 15 bp, Homo sapiens
ttcactttaaacaaa

SEQ ID NO: 1496743 - DNA, 15 bp, Homo sapiens
tcactttaaacaaag

SEQ ID NO: 1496744 - DNA, 15 bp, Homo sapiens
cactttaaacaaagg

SEQ ID NO: 1496745 - DNA, 15 bp, Homo sapiens
actttaaacaaagga

SEQ ID NO: 1496746 - DNA, 15 bp, Homo sapiens
ctttaaacaaaggaa

SEQ ID NO: 1496747 - DNA, 15 bp, Homo sapiens
tttaaacaaaggaaa

SEQ ID NO: 1496748 - DNA, 15 bp, Homo sapiens
ttaaacaaaggaaaa

SEQ ID NO: 1496749 - DNA, 15 bp, Homo sapiens
taaacaaaggaaaaa

SEQ ID NO: 1496750 - DNA, 15 bp, Homo sapiens
aaacaaaggaaaaag

SEQ ID NO: 1496751 - DNA, 15 bp, Homo sapiens
aacaaaggaaaaagt

SEQ ID NO: 1496752 - DNA, 15 bp, Homo sapiens
acaaaggaaaaagtc

SEQ ID NO: 1496753 - DNA, 15 bp, Homo sapiens
caaaggaaaaagtct

SEQ ID NO: 1496754 - DNA, 15 bp, Homo sapiens
aaaggaaaaagtcta

SEQ ID NO: 1496755 - DNA, 15 bp, Homo sapiens
aaggaaaaagtctag

SEQ ID NO: 1496756 - DNA, 15 bp, Homo sapiens
aggaaaaagtctagt

SEQ ID NO: 1496757 - DNA, 15 bp, Homo sapiens
ggaaaaagtctagtt

SEQ ID NO: 1496758 - DNA, 15 bp, Homo sapiens
gaaaaagtctagttt

SEQ ID NO: 1496759 - DNA, 15 bp, Homo sapiens
aaaaagtctagtttt

SEQ ID NO: 1496760 - DNA, 15 bp, Homo sapiens
aaaagtctagtttta

SEQ ID NO: 1496761 - DNA, 15 bp, Homo sapiens
aaagtctagttttag

SEQ ID NO: 1496762 - DNA, 15 bp, Homo sapiens
aagtctagttttagg

SEQ ID NO: 1496763 - DNA, 15 bp, Homo sapiens
agtctagttttagga

SEQ ID NO: 1496764 - DNA, 15 bp, Homo sapiens
gtctagttttaggaa

SEQ ID NO: 1496765 - DNA, 15 bp, Homo sapiens
tctagttttaggaaa

SEQ ID NO: 1496766 - DNA, 15 bp, Homo sapiens
ctagttttaggaaag

SEQ ID NO: 1496767 - DNA, 15 bp, Homo sapiens
tagttttaggaaaga

SEQ ID NO: 1496768 - DNA, 15 bp, Homo sapiens
agttttaggaaagaa

SEQ ID NO: 1496769 - DNA, 15 bp, Homo sapiens
gttttaggaaagaag

SEQ ID NO: 1496770 - DNA, 15 bp, Homo sapiens
ttttaggaaagaagg

SEQ ID NO: 1496771 - DNA, 15 bp, Homo sapiens
tttaggaaagaaggg

SEQ ID NO: 1496772 - DNA, 15 bp, Homo sapiens
ttaggaaagaaggga

SEQ ID NO: 1496773 - DNA, 15 bp, Homo sapiens
taggaaagaagggag

SEQ ID NO: 1496774 - DNA, 15 bp, Homo sapiens
aggaaagaagggaga

SEQ ID NO: 1496775 - DNA, 15 bp, Homo sapiens
ggaaagaagggagaa

SEQ ID NO: 1496776 - DNA, 15 bp, Homo sapiens
gaaagaagggagaat

SEQ ID NO: 1496777 - DNA, 15 bp, Homo sapiens
aaagaagggagaatg

SEQ ID NO: 1496778 - DNA, 15 bp, Homo sapiens
aagaagggagaatgt

SEQ ID NO: 1496779 - DNA, 15 bp, Homo sapiens
agaagggagaatgtg

SEQ ID NO: 1496780 - DNA, 15 bp, Homo sapiens
gaagggagaatgtgt

SEQ ID NO: 1496781 - DNA, 15 bp, Homo sapiens
aagggagaatgtgtt

SEQ ID NO: 1496782 - DNA, 15 bp, Homo sapiens
agggagaatgtgttt

SEQ ID NO: 1496783 - DNA, 15 bp, Homo sapiens
gggagaatgtgtttt

SEQ ID NO: 1496784 - DNA, 15 bp, Homo sapiens
ggagaatgtgtttta

SEQ ID NO: 1496785 - DNA, 15 bp, Homo sapiens
gagaatgtgttttac

SEQ ID NO: 1496786 - DNA, 15 bp, Homo sapiens
agaatgtgttttaca

SEQ ID NO: 1496787 - DNA, 15 bp, Homo sapiens
gaatgtgttttacat

SEQ ID NO: 1496788 - DNA, 15 bp, Homo sapiens
aatgtgttttacatg

SEQ ID NO: 1496789 - DNA, 15 bp, Homo sapiens
atgtgttttacatgt

SEQ ID NO: 1496790 - DNA, 15 bp, Homo sapiens
tgtgttttacatgta

SEQ ID NO: 1496791 - DNA, 15 bp, Homo sapiens
gtgttttacatgtaa

SEQ ID NO: 1496792 - DNA, 15 bp, Homo sapiens
tgttttacatgtaac

SEQ ID NO: 1496793 - DNA, 15 bp, Homo sapiens
gttttacatgtaaca

SEQ ID NO: 1496794 - DNA, 15 bp, Homo sapiens
ttttacatgtaacaa

SEQ ID NO: 1496795 - DNA, 15 bp, Homo sapiens
tttacatgtaacaac

SEQ ID NO: 1496796 - DNA, 15 bp, Homo sapiens
ttacatgtaacaaca

SEQ ID NO: 1496797 - DNA, 15 bp, Homo sapiens
tacatgtaacaacaa

SEQ ID NO: 1496798 - DNA, 15 bp, Homo sapiens
acatgtaacaacaaa

SEQ ID NO: 1496799 - DNA, 15 bp, Homo sapiens
catgtaacaacaaat

SEQ ID NO: 1496800 - DNA, 15 bp, Homo sapiens
atgtaacaacaaatt

SEQ ID NO: 1496801 - DNA, 15 bp, Homo sapiens
tgtaacaacaaattg

SEQ ID NO: 1496802 - DNA, 15 bp, Homo sapiens
gtaacaacaaattgc

SEQ ID NO: 1496803 - DNA, 15 bp, Homo sapiens
taacaacaaattgct

SEQ ID NO: 1496804 - DNA, 15 bp, Homo sapiens
aacaacaaattgctt

SEQ ID NO: 1496805 - DNA, 15 bp, Homo sapiens
acaacaaattgcttt

SEQ ID NO: 1496806 - DNA, 15 bp, Homo sapiens
caacaaattgctttt

SEQ ID NO: 1496807 - DNA, 15 bp, Homo sapiens
aacaaattgcttttt

SEQ ID NO: 1496808 - DNA, 15 bp, Homo sapiens
acaaattgctttttc

SEQ ID NO: 1496809 - DNA, 15 bp, Homo sapiens
caaattgctttttca

SEQ ID NO: 1496810 - DNA, 15 bp, Homo sapiens
aaattgctttttcaa

SEQ ID NO: 1496811 - DNA, 15 bp, Homo sapiens
aattgctttttcaaa

SEQ ID NO: 1496812 - DNA, 15 bp, Homo sapiens
attgctttttcaaag

SEQ ID NO: 1496813 - DNA, 15 bp, Homo sapiens
ttgctttttcaaagt

SEQ ID NO: 1496814 - DNA, 15 bp, Homo sapiens
tgctttttcaaagtg

SEQ ID NO: 1496815 - DNA, 15 bp, Homo sapiens
gctttttcaaagtgc

SEQ ID NO: 1496816 - DNA, 15 bp, Homo sapiens
ctttttcaaagtgct

SEQ ID NO: 1496817 - DNA, 15 bp, Homo sapiens
tttttcaaagtgctg

SEQ ID NO: 1496818 - DNA, 15 bp, Homo sapiens
ttttcaaagtgctgg

SEQ ID NO: 1496819 - DNA, 15 bp, Homo sapiens
tttcaaagtgctggg

SEQ ID NO: 1496820 - DNA, 15 bp, Homo sapiens
ttcaaagtgctgggt

SEQ ID NO: 1496821 - DNA, 15 bp, Homo sapiens
tcaaagtgctgggta

SEQ ID NO: 1496822 - DNA, 15 bp, Homo sapiens
caaagtgctgggtac

SEQ ID NO: 1496823 - DNA, 15 bp, Homo sapiens
aaagtgctgggtaca

SEQ ID NO: 1496824 - DNA, 15 bp, Homo sapiens
aagtgctgggtacag

SEQ ID NO: 1496825 - DNA, 15 bp, Homo sapiens
agtgctgggtacaga

SEQ ID NO: 1496826 - DNA, 15 bp, Homo sapiens
gtgctgggtacagaa

SEQ ID NO: 1496827 - DNA, 15 bp, Homo sapiens
tgctgggtacagaag

SEQ ID NO: 1496828 - DNA, 15 bp, Homo sapiens
gctgggtacagaaga

SEQ ID NO: 1496829 - DNA, 15 bp, Homo sapiens
ctgggtacagaagag

SEQ ID NO: 1496830 - DNA, 15 bp, Homo sapiens
tgggtacagaagagg

SEQ ID NO: 1496831 - DNA, 15 bp, Homo sapiens
gggtacagaagaggt

SEQ ID NO: 1496832 - DNA, 15 bp, Homo sapiens
ggtacagaagaggta

SEQ ID NO: 1496833 - DNA, 15 bp, Homo sapiens
gtacagaagaggtat

SEQ ID NO: 1496834 - DNA, 15 bp, Homo sapiens
tacagaagaggtatg

SEQ ID NO: 1496835 - DNA, 15 bp, Homo sapiens
acagaagaggtatga

SEQ ID NO: 1496836 - DNA, 15 bp, Homo sapiens
cagaagaggtatgaa

SEQ ID NO: 1496837 - DNA, 15 bp, Homo sapiens
agaagaggtatgaat

SEQ ID NO: 1496838 - DNA, 15 bp, Homo sapiens
gaagaggtatgaatt

SEQ ID NO: 1496839 - DNA, 15 bp, Homo sapiens
aagaggtatgaattg

SEQ ID NO: 1496840 - DNA, 15 bp, Homo sapiens
agaggtatgaattga

SEQ ID NO: 1496841 - DNA, 15 bp, Homo sapiens
gaggtatgaattgaa

SEQ ID NO: 1496842 - DNA, 15 bp, Homo sapiens
aggtatgaattgaag

SEQ ID NO: 1496843 - DNA, 15 bp, Homo sapiens
ggtatgaattgaagt

SEQ ID NO: 1496844 - DNA, 15 bp, Homo sapiens
gtatgaattgaagtt

SEQ ID NO: 1496845 - DNA, 15 bp, Homo sapiens
tatgaattgaagttt

SEQ ID NO: 1496846 - DNA, 15 bp, Homo sapiens
atgaattgaagttta

SEQ ID NO: 1496847 - DNA, 15 bp, Homo sapiens
tgaattgaagtttaa

SEQ ID NO: 1496848 - DNA, 15 bp, Homo sapiens
gaattgaagtttaat

SEQ ID NO: 1496849 - DNA, 15 bp, Homo sapiens
aattgaagtttaatt

SEQ ID NO: 1496850 - DNA, 15 bp, Homo sapiens
attgaagtttaattt

SEQ ID NO: 1496851 - DNA, 15 bp, Homo sapiens
ttgaagtttaatttg

SEQ ID NO: 1496852 - DNA, 15 bp, Homo sapiens
tgaagtttaatttga

SEQ ID NO: 1496853 - DNA, 15 bp, Homo sapiens
gaagtttaatttgaa

SEQ ID NO: 1496854 - DNA, 15 bp, Homo sapiens
aagtttaatttgaaa

SEQ ID NO: 1496855 - DNA, 15 bp, Homo sapiens
agtttaatttgaaaa

SEQ ID NO: 1496856 - DNA, 15 bp, Homo sapiens
gtttaatttgaaaag

SEQ ID NO: 1496857 - DNA, 15 bp, Homo sapiens
tttaatttgaaaaga

SEQ ID NO: 1496858 - DNA, 15 bp, Homo sapiens
ttaatttgaaaagat

SEQ ID NO: 1496859 - DNA, 15 bp, Homo sapiens
taatttgaaaagatt

SEQ ID NO: 1496860 - DNA, 15 bp, Homo sapiens
aatttgaaaagattg

SEQ ID NO: 1496861 - DNA, 15 bp, Homo sapiens
atttgaaaagattgg

SEQ ID NO: 1496862 - DNA, 15 bp, Homo sapiens
tttgaaaagattgga

SEQ ID NO: 1496863 - DNA, 15 bp, Homo sapiens
ttgaaaagattggat

SEQ ID NO: 1496864 - DNA, 15 bp, Homo sapiens
tgaaaagattggata

SEQ ID NO: 1496865 - DNA, 15 bp, Homo sapiens
gaaaagattggatat

SEQ ID NO: 1496866 - DNA, 15 bp, Homo sapiens
aaaagattggatatc

SEQ ID NO: 1496867 - DNA, 15 bp, Homo sapiens
aaagattggatatca

SEQ ID NO: 1496868 - DNA, 15 bp, Homo sapiens
aagattggatatcag

SEQ ID NO: 1496869 - DNA, 15 bp, Homo sapiens
agattggatatcagc

SEQ ID NO: 1496870 - DNA, 15 bp, Homo sapiens
gattggatatcagca

SEQ ID NO: 1496871 - DNA, 15 bp, Homo sapiens
attggatatcagcat

SEQ ID NO: 1496872 - DNA, 15 bp, Homo sapiens
ttggatatcagcatt

SEQ ID NO: 1496873 - DNA, 15 bp, Homo sapiens
tggatatcagcattc

SEQ ID NO: 1496874 - DNA, 15 bp, Homo sapiens
ggatatcagcattct

SEQ ID NO: 1496875 - DNA, 15 bp, Homo sapiens
gatatcagcattctg

SEQ ID NO: 1496876 - DNA, 15 bp, Homo sapiens
atatcagcattctga

SEQ ID NO: 1496877 - DNA, 15 bp, Homo sapiens
tatcagcattctgag

SEQ ID NO: 1496878 - DNA, 15 bp, Homo sapiens
atcagcattctgaga

SEQ ID NO: 1496879 - DNA, 15 bp, Homo sapiens
tcagcattctgagat

SEQ ID NO: 1496880 - DNA, 15 bp, Homo sapiens
cagcattctgagatt

SEQ ID NO: 1496881 - DNA, 15 bp, Homo sapiens
agcattctgagatta

SEQ ID NO: 1496882 - DNA, 15 bp, Homo sapiens
gcattctgagattac

SEQ ID NO: 1496883 - DNA, 15 bp, Homo sapiens
cattctgagattaca

SEQ ID NO: 1496884 - DNA, 15 bp, Homo sapiens
attctgagattacag

SEQ ID NO: 1496885 - DNA, 15 bp, Homo sapiens
ttctgagattacaga

SEQ ID NO: 1496886 - DNA, 15 bp, Homo sapiens
tctgagattacagaa

SEQ ID NO: 1496887 - DNA, 15 bp, Homo sapiens
ctgagattacagaaa

SEQ ID NO: 1496888 - DNA, 15 bp, Homo sapiens
tgagattacagaaaa

SEQ ID NO: 1496889 - DNA, 15 bp, Homo sapiens
gagattacagaaaat

SEQ ID NO: 1496890 - DNA, 15 bp, Homo sapiens
agattacagaaaatt

SEQ ID NO: 1496891 - DNA, 15 bp, Homo sapiens
gattacagaaaattc

SEQ ID NO: 1496892 - DNA, 15 bp, Homo sapiens
attacagaaaattca

SEQ ID NO: 1496893 - DNA, 15 bp, Homo sapiens
ttacagaaaattcaa

SEQ ID NO: 1496894 - DNA, 15 bp, Homo sapiens
tacagaaaattcaac

SEQ ID NO: 1496895 - DNA, 15 bp, Homo sapiens
acagaaaattcaacg

SEQ ID NO: 1496896 - DNA, 15 bp, Homo sapiens
cagaaaattcaacgc

SEQ ID NO: 1496897 - DNA, 15 bp, Homo sapiens
agaaaattcaacgcg

SEQ ID NO: 1496898 - DNA, 15 bp, Homo sapiens
gaaaattcaacgcgt

SEQ ID NO: 1496899 - DNA, 15 bp, Homo sapiens
aaaattcaacgcgtg

SEQ ID NO: 1496900 - DNA, 15 bp, Homo sapiens
aaattcaacgcgtga

SEQ ID NO: 1496901 - DNA, 15 bp, Homo sapiens
aattcaacgcgtgac

SEQ ID NO: 1496902 - DNA, 15 bp, Homo sapiens
attcaacgcgtgact

SEQ ID NO: 1496903 - DNA, 15 bp, Homo sapiens
ttcaacgcgtgactc

SEQ ID NO: 1496904 - DNA, 15 bp, Homo sapiens
tcaacgcgtgactcc

SEQ ID NO: 1496905 - DNA, 15 bp, Homo sapiens
caacgcgtgactcct

SEQ ID NO: 1496906 - DNA, 15 bp, Homo sapiens
aacgcgtgactcctc

SEQ ID NO: 1496907 - DNA, 15 bp, Homo sapiens
acgcgtgactcctca

SEQ ID NO: 1496908 - DNA, 15 bp, Homo sapiens
cgcgtgactcctcag

SEQ ID NO: 1496909 - DNA, 15 bp, Homo sapiens
gcgtgactcctcagg

SEQ ID NO: 1496910 - DNA, 15 bp, Homo sapiens
cgtgactcctcaggt

SEQ ID NO: 1496911 - DNA, 15 bp, Homo sapiens
gtgactcctcaggtt

SEQ ID NO: 1496912 - DNA, 15 bp, Homo sapiens
tgactcctcaggttc

SEQ ID NO: 1496913 - DNA, 15 bp, Homo sapiens
gactcctcaggttca

SEQ ID NO: 1496914 - DNA, 15 bp, Homo sapiens
actcctcaggttcag

SEQ ID NO: 1496915 - DNA, 15 bp, Homo sapiens
ctcctcaggttcagt

SEQ ID NO: 1496916 - DNA, 15 bp, Homo sapiens
tcctcaggttcagtg

SEQ ID NO: 1496917 - DNA, 15 bp, Homo sapiens
cctcaggttcagtgc

SEQ ID NO: 1496918 - DNA, 15 bp, Homo sapiens
ctcaggttcagtgcg

SEQ ID NO: 1496919 - DNA, 15 bp, Homo sapiens
tcaggttcagtgcgt

SEQ ID NO: 1496920 - DNA, 15 bp, Homo sapiens
caggttcagtgcgtg

SEQ ID NO: 1496921 - DNA, 15 bp, Homo sapiens
aggttcagtgcgtgc

SEQ ID NO: 1496922 - DNA, 15 bp, Homo sapiens
ggttcagtgcgtgct

SEQ ID NO: 1496923 - DNA, 15 bp, Homo sapiens
gttcagtgcgtgctc

SEQ ID NO: 1496924 - DNA, 15 bp, Homo sapiens
ttcagtgcgtgctct

SEQ ID NO: 1496925 - DNA, 15 bp, Homo sapiens
tcagtgcgtgctctt

SEQ ID NO: 1496926 - DNA, 15 bp, Homo sapiens
cagtgcgtgctctta

SEQ ID NO: 1496927 - DNA, 15 bp, Homo sapiens
agtgcgtgctcttag

SEQ ID NO: 1496928 - DNA, 15 bp, Homo sapiens
gtgcgtgctcttaga

SEQ ID NO: 1496929 - DNA, 15 bp, Homo sapiens
tgcgtgctcttagac

SEQ ID NO: 1496930 - DNA, 15 bp, Homo sapiens
gcgtgctcttagaca

SEQ ID NO: 1496931 - DNA, 15 bp, Homo sapiens
cgtgctcttagacat

SEQ ID NO: 1496932 - DNA, 15 bp, Homo sapiens
gtgctcttagacata

SEQ ID NO: 1496933 - DNA, 15 bp, Homo sapiens
tgctcttagacatag

SEQ ID NO: 1496934 - DNA, 15 bp, Homo sapiens
gctcttagacatagg

SEQ ID NO: 1496935 - DNA, 15 bp, Homo sapiens
ctcttagacataggt

SEQ ID NO: 1496936 - DNA, 15 bp, Homo sapiens
tcttagacataggtg

SEQ ID NO: 1496937 - DNA, 15 bp, Homo sapiens
cttagacataggtga

SEQ ID NO: 1496938 - DNA, 15 bp, Homo sapiens
ttagacataggtgaa

SEQ ID NO: 1496939 - DNA, 15 bp, Homo sapiens
tagacataggtgaag

SEQ ID NO: 1496940 - DNA, 15 bp, Homo sapiens
agacataggtgaagg

SEQ ID NO: 1496941 - DNA, 15 bp, Homo sapiens
gacataggtgaaggg

SEQ ID NO: 1496942 - DNA, 15 bp, Homo sapiens
acataggtgaaggga

SEQ ID NO: 1496943 - DNA, 15 bp, Homo sapiens
cataggtgaagggaa

SEQ ID NO: 1496944 - DNA, 15 bp, Homo sapiens
ataggtgaagggaag

SEQ ID NO: 1496945 - DNA, 15 bp, Homo sapiens
taggtgaagggaagc

SEQ ID NO: 1496946 - DNA, 15 bp, Homo sapiens
aggtgaagggaagca

SEQ ID NO: 1496947 - DNA, 15 bp, Homo sapiens
ggtgaagggaagcaa

SEQ ID NO: 1496948 - DNA, 15 bp, Homo sapiens
gtgaagggaagcaaa

SEQ ID NO: 1496949 - DNA, 15 bp, Homo sapiens
tgaagggaagcaaaa

SEQ ID NO: 1496950 - DNA, 15 bp, Homo sapiens
gaagggaagcaaaag

SEQ ID NO: 1496951 - DNA, 15 bp, Homo sapiens
aagggaagcaaaagt

SEQ ID NO: 1496952 - DNA, 15 bp, Homo sapiens
agggaagcaaaagtt

SEQ ID NO: 1496953 - DNA, 15 bp, Homo sapiens
gggaagcaaaagttc

SEQ ID NO: 1496954 - DNA, 15 bp, Homo sapiens
ggaagcaaaagttcc

SEQ ID NO: 1496955 - DNA, 15 bp, Homo sapiens
gaagcaaaagttcct

SEQ ID NO: 1496956 - DNA, 15 bp, Homo sapiens
aagcaaaagttccta

SEQ ID NO: 1496957 - DNA, 15 bp, Homo sapiens
agcaaaagttcctat

SEQ ID NO: 1496958 - DNA, 15 bp, Homo sapiens
gcaaaagttcctatt

SEQ ID NO: 1496959 - DNA, 15 bp, Homo sapiens
caaaagttcctattg

SEQ ID NO: 1496960 - DNA, 15 bp, Homo sapiens
aaaagttcctattgg

SEQ ID NO: 1496961 - DNA, 15 bp, Homo sapiens
aaagttcctattgga

SEQ ID NO: 1496962 - DNA, 15 bp, Homo sapiens
aagttcctattggaa

SEQ ID NO: 1496963 - DNA, 15 bp, Homo sapiens
agttcctattggaat

SEQ ID NO: 1496964 - DNA, 15 bp, Homo sapiens
gttcctattggaata

SEQ ID NO: 1496965 - DNA, 15 bp, Homo sapiens
ttcctattggaatac

SEQ ID NO: 1496966 - DNA, 15 bp, Homo sapiens
tcctattggaatact

SEQ ID NO: 1496967 - DNA, 15 bp, Homo sapiens
cctattggaatacta

SEQ ID NO: 1496968 - DNA, 15 bp, Homo sapiens
ctattggaatactac

SEQ ID NO: 1496969 - DNA, 15 bp, Homo sapiens
tattggaatactacc

SEQ ID NO: 1496970 - DNA, 15 bp, Homo sapiens
attggaatactacca

SEQ ID NO: 1496971 - DNA, 15 bp, Homo sapiens
ttggaatactaccac

SEQ ID NO: 1496972 - DNA, 15 bp, Homo sapiens
tggaatactaccact

SEQ ID NO: 1496973 - DNA, 15 bp, Homo sapiens
ggaatactaccactc

SEQ ID NO: 1496974 - DNA, 15 bp, Homo sapiens
gaatactaccactca

SEQ ID NO: 1496975 - DNA, 15 bp, Homo sapiens
aatactaccactcac

SEQ ID NO: 1496976 - DNA, 15 bp, Homo sapiens
atactaccactcacc

SEQ ID NO: 1496977 - DNA, 15 bp, Homo sapiens
tactaccactcacct

SEQ ID NO: 1496978 - DNA, 15 bp, Homo sapiens
actaccactcacctc

SEQ ID NO: 1496979 - DNA, 15 bp, Homo sapiens
accactcacctcctt

SEQ ID NO: 1496980 - DNA, 15 bp, Homo sapiens
ccactcacctccttc

SEQ ID NO: 1496981 - DNA, 15 bp, Homo sapiens
cactcacctccttcc

SEQ ID NO: 1496982 - DNA, 15 bp, Homo sapiens
actcacctccttccc

SEQ ID NO: 1496983 - DNA, 15 bp, Homo sapiens
tcacctccttcccaa

SEQ ID NO: 1496984 - DNA, 15 bp, Homo sapiens
cacctccttcccaac

SEQ ID NO: 1496985 - DNA, 15 bp, Homo sapiens
acctccttcccaact

SEQ ID NO: 1496986 - DNA, 15 bp, Homo sapiens
cctccttcccaactc

SEQ ID NO: 1496987 - DNA, 15 bp, Homo sapiens
ctccttcccaactcc

SEQ ID NO: 1496988 - DNA, 15 bp, Homo sapiens
tccttcccaactccc

SEQ ID NO: 1496989 - DNA, 15 bp, Homo sapiens
ccttcccaactccca

SEQ ID NO: 1496990 - DNA, 15 bp, Homo sapiens
cttcccaactcccat

SEQ ID NO: 1496991 - DNA, 15 bp, Homo sapiens
ttcccaactcccatt

SEQ ID NO: 1496992 - DNA, 15 bp, Homo sapiens
tcccaactcccattg

SEQ ID NO: 1496993 - DNA, 15 bp, Homo sapiens
cccaactcccattgc

SEQ ID NO: 1496994 - DNA, 15 bp, Homo sapiens
ccaactcccattgcc

SEQ ID NO: 1496995 - DNA, 15 bp, Homo sapiens
caactcccattgccc

SEQ ID NO: 1496996 - DNA, 15 bp, Homo sapiens
aactcccattgcccc

SEQ ID NO: 1496997 - DNA, 15 bp, Homo sapiens
actcccattgccccc

SEQ ID NO: 1496998 - DNA, 15 bp, Homo sapiens
ctcccattgccccct

SEQ ID NO: 1496999 - DNA, 15 bp, Homo sapiens
tcccattgccccctc

SEQ ID NO: 1497000 - DNA, 15 bp, Homo sapiens
cccattgccccctcc

SEQ ID NO: 1497001 - DNA, 15 bp, Homo sapiens
ccattgccccctcca

SEQ ID NO: 1497002 - DNA, 15 bp, Homo sapiens
cattgccccctccac

SEQ ID NO: 1497003 - DNA, 15 bp, Homo sapiens
attgccccctccacc

SEQ ID NO: 1497004 - DNA, 15 bp, Homo sapiens
ttgccccctccacca

SEQ ID NO: 1497005 - DNA, 15 bp, Homo sapiens
tgccccctccaccag

SEQ ID NO: 1497006 - DNA, 15 bp, Homo sapiens
gccccctccaccagt

SEQ ID NO: 1497007 - DNA, 15 bp, Homo sapiens
ccccctccaccagta

SEQ ID NO: 1497008 - DNA, 15 bp, Homo sapiens
cccctccaccagtaa

SEQ ID NO: 1497009 - DNA, 15 bp, Homo sapiens
ccctccaccagtaac

SEQ ID NO: 1497010 - DNA, 15 bp, Homo sapiens
cctccaccagtaaca

SEQ ID NO: 1497011 - DNA, 15 bp, Homo sapiens
ctccaccagtaacat

SEQ ID NO: 1497012 - DNA, 15 bp, Homo sapiens
tccaccagtaacata

SEQ ID NO: 1497013 - DNA, 15 bp, Homo sapiens
ccaccagtaacatac

SEQ ID NO: 1497014 - DNA, 15 bp, Homo sapiens
caccagtaacatacc

SEQ ID NO: 1497015 - DNA, 15 bp, Homo sapiens
accagtaacatacct

SEQ ID NO: 1497016 - DNA, 15 bp, Homo sapiens
ccagtaacatacctg

SEQ ID NO: 1497017 - DNA, 15 bp, Homo sapiens
cagtaacatacctgt

SEQ ID NO: 1497018 - DNA, 15 bp, Homo sapiens
agtaacatacctgtg

SEQ ID NO: 1497019 - DNA, 15 bp, Homo sapiens
gtaacatacctgtgt

SEQ ID NO: 1497020 - DNA, 15 bp, Homo sapiens
taacatacctgtgta

SEQ ID NO: 1497021 - DNA, 15 bp, Homo sapiens
aacatacctgtgtac

SEQ ID NO: 1497022 - DNA, 15 bp, Homo sapiens
acatacctgtgtacc

SEQ ID NO: 1497023 - DNA, 15 bp, Homo sapiens
catacctgtgtacct

SEQ ID NO: 1497024 - DNA, 15 bp, Homo sapiens
atacctgtgtacctt

SEQ ID NO: 1497025 - DNA, 15 bp, Homo sapiens
tacctgtgtacctta

SEQ ID NO: 1497026 - DNA, 15 bp, Homo sapiens
acctgtgtaccttac

SEQ ID NO: 1497027 - DNA, 15 bp, Homo sapiens
cctgtgtaccttacc

SEQ ID NO: 1497028 - DNA, 15 bp, Homo sapiens
ctgtgtaccttaccc

SEQ ID NO: 1497029 - DNA, 15 bp, Homo sapiens
tgtgtaccttaccct

SEQ ID NO: 1497030 - DNA, 15 bp, Homo sapiens
gtgtaccttaccctc

SEQ ID NO: 1497031 - DNA, 15 bp, Homo sapiens
tgtaccttaccctca

SEQ ID NO: 1497032 - DNA, 15 bp, Homo sapiens
gtaccttaccctcac

SEQ ID NO: 1497033 - DNA, 15 bp, Homo sapiens
taccttaccctcacc

SEQ ID NO: 1497034 - DNA, 15 bp, Homo sapiens
accttaccctcacct

SEQ ID NO: 1497035 - DNA, 15 bp, Homo sapiens
ccttaccctcacctg

SEQ ID NO: 1497036 - DNA, 15 bp, Homo sapiens
cttaccctcacctgt

SEQ ID NO: 1497037 - DNA, 15 bp, Homo sapiens
ttaccctcacctgtg

SEQ ID NO: 1497038 - DNA, 15 bp, Homo sapiens
taccctcacctgtga

SEQ ID NO: 1497039 - DNA, 15 bp, Homo sapiens
accctcacctgtgaa

SEQ ID NO: 1497040 - DNA, 15 bp, Homo sapiens
ccctcacctgtgaaa

SEQ ID NO: 1497041 - DNA, 15 bp, Homo sapiens
cctcacctgtgaaag

SEQ ID NO: 1497042 - DNA, 15 bp, Homo sapiens
ctcacctgtgaaagg

SEQ ID NO: 1497043 - DNA, 15 bp, Homo sapiens
tcacctgtgaaagga

SEQ ID NO: 1497044 - DNA, 15 bp, Homo sapiens
cacctgtgaaaggac

SEQ ID NO: 1497045 - DNA, 15 bp, Homo sapiens
acctgtgaaaggacc

SEQ ID NO: 1497046 - DNA, 15 bp, Homo sapiens
cctgtgaaaggaccc

SEQ ID NO: 1497047 - DNA, 15 bp, Homo sapiens
ctgtgaaaggaccca

SEQ ID NO: 1497048 - DNA, 15 bp, Homo sapiens
tgtgaaaggacccat

SEQ ID NO: 1497049 - DNA, 15 bp, Homo sapiens
gtgaaaggacccata

SEQ ID NO: 1497050 - DNA, 15 bp, Homo sapiens
tgaaaggacccatat

SEQ ID NO: 1497051 - DNA, 15 bp, Homo sapiens
gaaaggacccatatg

SEQ ID NO: 1497052 - DNA, 15 bp, Homo sapiens
aaaggacccatatgt

SEQ ID NO: 1497053 - DNA, 15 bp, Homo sapiens
aaggacccatatgta

SEQ ID NO: 1497054 - DNA, 15 bp, Homo sapiens
aggacccatatgtac

SEQ ID NO: 1497055 - DNA, 15 bp, Homo sapiens
ggacccatatgtaca

SEQ ID NO: 1497056 - DNA, 15 bp, Homo sapiens
gacccatatgtacat

SEQ ID NO: 1497057 - DNA, 15 bp, Homo sapiens
acccatatgtacata

SEQ ID NO: 1497058 - DNA, 15 bp, Homo sapiens
cccatatgtacataa

SEQ ID NO: 1497059 - DNA, 15 bp, Homo sapiens
ccatatgtacataaa

SEQ ID NO: 1497060 - DNA, 15 bp, Homo sapiens
catatgtacataaac

SEQ ID NO: 1497061 - DNA, 15 bp, Homo sapiens
atatgtacataaacc

SEQ ID NO: 1497062 - DNA, 15 bp, Homo sapiens
tatgtacataaaccc

SEQ ID NO: 1497063 - DNA, 15 bp, Homo sapiens
atgtacataaaccca

SEQ ID NO: 1497064 - DNA, 15 bp, Homo sapiens
tgtacataaacccag

SEQ ID NO: 1497065 - DNA, 15 bp, Homo sapiens
gtacataaacccaga

SEQ ID NO: 1497066 - DNA, 15 bp, Homo sapiens
tacataaacccagaa

SEQ ID NO: 1497067 - DNA, 15 bp, Homo sapiens
acataaacccagaag

SEQ ID NO: 1497068 - DNA, 15 bp, Homo sapiens
cataaacccagaaga

SEQ ID NO: 1497069 - DNA, 15 bp, Homo sapiens
ataaacccagaagat

SEQ ID NO: 1497070 - DNA, 15 bp, Homo sapiens
taaacccagaagata

SEQ ID NO: 1497071 - DNA, 15 bp, Homo sapiens
aaacccagaagatac

SEQ ID NO: 1497072 - DNA, 15 bp, Homo sapiens
aacccagaagatacc

SEQ ID NO: 1497073 - DNA, 15 bp, Homo sapiens
acccagaagatacca

SEQ ID NO: 1497074 - DNA, 15 bp, Homo sapiens
cccagaagataccac

SEQ ID NO: 1497075 - DNA, 15 bp, Homo sapiens
ccagaagataccaca

SEQ ID NO: 1497076 - DNA, 15 bp, Homo sapiens
cagaagataccacag

SEQ ID NO: 1497077 - DNA, 15 bp, Homo sapiens
agaagataccacagc

SEQ ID NO: 1497078 - DNA, 15 bp, Homo sapiens
gaagataccacagca

SEQ ID NO: 1497079 - DNA, 15 bp, Homo sapiens
aagataccacagcag

SEQ ID NO: 1497080 - DNA, 15 bp, Homo sapiens
agataccacagcagg

SEQ ID NO: 1497081 - DNA, 15 bp, Homo sapiens
gataccacagcagga

SEQ ID NO: 1497082 - DNA, 15 bp, Homo sapiens
ataccacagcaggaa

SEQ ID NO: 1497083 - DNA, 15 bp, Homo sapiens
taccacagcaggaag

SEQ ID NO: 1497084 - DNA, 15 bp, Homo sapiens
accacagcaggaagg

SEQ ID NO: 1497085 - DNA, 15 bp, Homo sapiens
ccacagcaggaagga

SEQ ID NO: 1497086 - DNA, 15 bp, Homo sapiens
cacagcaggaaggag

SEQ ID NO: 1497087 - DNA, 15 bp, Homo sapiens
acagcaggaaggagt

SEQ ID NO: 1497088 - DNA, 15 bp, Homo sapiens
cagcaggaaggagtg

SEQ ID NO: 1497089 - DNA, 15 bp, Homo sapiens
agcaggaaggagtga

SEQ ID NO: 1497090 - DNA, 15 bp, Homo sapiens
gcaggaaggagtgat

SEQ ID NO: 1497091 - DNA, 15 bp, Homo sapiens
caggaaggagtgata

SEQ ID NO: 1497092 - DNA, 15 bp, Homo sapiens
aggaaggagtgatac

SEQ ID NO: 1497093 - DNA, 15 bp, Homo sapiens
ggaaggagtgatact

SEQ ID NO: 1497094 - DNA, 15 bp, Homo sapiens
gaaggagtgatactg

SEQ ID NO: 1497095 - DNA, 15 bp, Homo sapiens
aaggagtgatactgg

SEQ ID NO: 1497096 - DNA, 15 bp, Homo sapiens
aggagtgatactggc

SEQ ID NO: 1497097 - DNA, 15 bp, Homo sapiens
ggagtgatactggct

SEQ ID NO: 1497098 - DNA, 15 bp, Homo sapiens
gagtgatactggctt

SEQ ID NO: 1497099 - DNA, 15 bp, Homo sapiens
agtgatactggcttc

SEQ ID NO: 1497100 - DNA, 15 bp, Homo sapiens
gtgatactggcttct

SEQ ID NO: 1497101 - DNA, 15 bp, Homo sapiens
tgatactggcttctc

SEQ ID NO: 1497102 - DNA, 15 bp, Homo sapiens
gatactggcttctcc

SEQ ID NO: 1497103 - DNA, 15 bp, Homo sapiens
atactggcttctcct

SEQ ID NO: 1497104 - DNA, 15 bp, Homo sapiens
tactggcttctcctc

SEQ ID NO: 1497105 - DNA, 15 bp, Homo sapiens
actggcttctcctcc

SEQ ID NO: 1497106 - DNA, 15 bp, Homo sapiens
ctggcttctcctcca

SEQ ID NO: 1497107 - DNA, 15 bp, Homo sapiens
tggcttctcctccag

SEQ ID NO: 1497108 - DNA, 15 bp, Homo sapiens
ggcttctcctccagg

SEQ ID NO: 1497109 - DNA, 15 bp, Homo sapiens
gcttctcctccaggc

SEQ ID NO: 1497110 - DNA, 15 bp, Homo sapiens
cttctcctccaggcc

SEQ ID NO: 1497111 - DNA, 15 bp, Homo sapiens
ttctcctccaggcca

SEQ ID NO: 1497112 - DNA, 15 bp, Homo sapiens
tctcctccaggccat

SEQ ID NO: 1497113 - DNA, 15 bp, Homo sapiens
ctcctccaggccatg

SEQ ID NO: 1497114 - DNA, 15 bp, Homo sapiens
tcctccaggccatgg

SEQ ID NO: 1497115 - DNA, 15 bp, Homo sapiens
cctccaggccatggc

SEQ ID NO: 1497116 - DNA, 15 bp, Homo sapiens
ctccaggccatggca

SEQ ID NO: 1497117 - DNA, 15 bp, Homo sapiens
tccaggccatggcaa

SEQ ID NO: 1497118 - DNA, 15 bp, Homo sapiens
ccaggccatggcaaa

SEQ ID NO: 1497119 - DNA, 15 bp, Homo sapiens
caggccatggcaaag

SEQ ID NO: 1497120 - DNA, 15 bp, Homo sapiens
aggccatggcaaagt

SEQ ID NO: 1497121 - DNA, 15 bp, Homo sapiens
ggccatggcaaagta

SEQ ID NO: 1497122 - DNA, 15 bp, Homo sapiens
gccatggcaaagtac

SEQ ID NO: 1497123 - DNA, 15 bp, Homo sapiens
ccatggcaaagtaca

SEQ ID NO: 1497124 - DNA, 15 bp, Homo sapiens
catggcaaagtacaa

SEQ ID NO: 1497125 - DNA, 15 bp, Homo sapiens
atggcaaagtacaag

SEQ ID NO: 1497126 - DNA, 15 bp, Homo sapiens
tggcaaagtacaagc

SEQ ID NO: 1497127 - DNA, 15 bp, Homo sapiens
ggcaaagtacaagct

SEQ ID NO: 1497128 - DNA, 15 bp, Homo sapiens
gcaaagtacaagctg

SEQ ID NO: 1497129 - DNA, 15 bp, Homo sapiens
caaagtacaagctgc

SEQ ID NO: 1497130 - DNA, 15 bp, Homo sapiens
aaagtacaagctgca

SEQ ID NO: 1497131 - DNA, 15 bp, Homo sapiens
aagtacaagctgcag

SEQ ID NO: 1497132 - DNA, 15 bp, Homo sapiens
agtacaagctgcagg

SEQ ID NO: 1497133 - DNA, 15 bp, Homo sapiens
gtacaagctgcaggc

SEQ ID NO: 1497134 - DNA, 15 bp, Homo sapiens
tacaagctgcaggcc

SEQ ID NO: 1497135 - DNA, 15 bp, Homo sapiens
acaagctgcaggcca

SEQ ID NO: 1497136 - DNA, 15 bp, Homo sapiens
caagctgcaggccaa

SEQ ID NO: 1497137 - DNA, 15 bp, Homo sapiens
agctgcaggccaaat

SEQ ID NO: 1497138 - DNA, 15 bp, Homo sapiens
gctgcaggccaaatc

SEQ ID NO: 1497139 - DNA, 15 bp, Homo sapiens
ctgcaggccaaatct

SEQ ID NO: 1497140 - DNA, 15 bp, Homo sapiens
tgcaggccaaatctg

SEQ ID NO: 1497141 - DNA, 15 bp, Homo sapiens
gcaggccaaatctgg

SEQ ID NO: 1497142 - DNA, 15 bp, Homo sapiens
caggccaaatctggc

SEQ ID NO: 1497143 - DNA, 15 bp, Homo sapiens
aggccaaatctggcc

SEQ ID NO: 1497144 - DNA, 15 bp, Homo sapiens
ggccaaatctggcca

SEQ ID NO: 1497145 - DNA, 15 bp, Homo sapiens
gccaaatctggccaa

SEQ ID NO: 1497146 - DNA, 15 bp, Homo sapiens
ccaaatctggccaaa

SEQ ID NO: 1497147 - DNA, 15 bp, Homo sapiens
caaatctggccaaaa

SEQ ID NO: 1497148 - DNA, 15 bp, Homo sapiens
aaatctggccaaaag

SEQ ID NO: 1497149 - DNA, 15 bp, Homo sapiens
aatctggccaaaagt

SEQ ID NO: 1497150 - DNA, 15 bp, Homo sapiens
atctggccaaaagtg

SEQ ID NO: 1497151 - DNA, 15 bp, Homo sapiens
tctggccaaaagtgg

SEQ ID NO: 1497152 - DNA, 15 bp, Homo sapiens
ctggccaaaagtggc

SEQ ID NO: 1497153 - DNA, 15 bp, Homo sapiens
tggccaaaagtggcc

SEQ ID NO: 1497154 - DNA, 15 bp, Homo sapiens
ggccaaaagtggccc

SEQ ID NO: 1497155 - DNA, 15 bp, Homo sapiens
gccaaaagtggccca

SEQ ID NO: 1497156 - DNA, 15 bp, Homo sapiens
ccaaaagtggcccat

SEQ ID NO: 1497157 - DNA, 15 bp, Homo sapiens
caaaagtggcccatg

SEQ ID NO: 1497158 - DNA, 15 bp, Homo sapiens
aaaagtggcccatgg

SEQ ID NO: 1497159 - DNA, 15 bp, Homo sapiens
aaagtggcccatgga

SEQ ID NO: 1497160 - DNA, 15 bp, Homo sapiens
aagtggcccatggac

SEQ ID NO: 1497161 - DNA, 15 bp, Homo sapiens
agtggcccatggaca

SEQ ID NO: 1497162 - DNA, 15 bp, Homo sapiens
gtggcccatggacaa

SEQ ID NO: 1497163 - DNA, 15 bp, Homo sapiens
tggcccatggacaaa

SEQ ID NO: 1497164 - DNA, 15 bp, Homo sapiens
ggcccatggacaaag

SEQ ID NO: 1497165 - DNA, 15 bp, Homo sapiens
gcccatggacaaagc

SEQ ID NO: 1497166 - DNA, 15 bp, Homo sapiens
cccatggacaaagca

SEQ ID NO: 1497167 - DNA, 15 bp, Homo sapiens
ccatggacaaagcaa

SEQ ID NO: 1497168 - DNA, 15 bp, Homo sapiens
catggacaaagcaaa

SEQ ID NO: 1497169 - DNA, 15 bp, Homo sapiens
atggacaaagcaaaa

SEQ ID NO: 1497170 - DNA, 15 bp, Homo sapiens
tggacaaagcaaaac

SEQ ID NO: 1497171 - DNA, 15 bp, Homo sapiens
ggacaaagcaaaaca

SEQ ID NO: 1497172 - DNA, 15 bp, Homo sapiens
gacaaagcaaaacaa

SEQ ID NO: 1497173 - DNA, 15 bp, Homo sapiens
acaaagcaaaacaaa

SEQ ID NO: 1497174 - DNA, 15 bp, Homo sapiens
caaagcaaaacaaaa

SEQ ID NO: 1497175 - DNA, 15 bp, Homo sapiens
aaagcaaaacaaaaa

SEQ ID NO: 1497176 - DNA, 15 bp, Homo sapiens
aagcaaaacaaaaac

SEQ ID NO: 1497177 - DNA, 15 bp, Homo sapiens
agcaaaacaaaaact

SEQ ID NO: 1497178 - DNA, 15 bp, Homo sapiens
gcaaaacaaaaacta

SEQ ID NO: 1497179 - DNA, 15 bp, Homo sapiens
caaaacaaaaactaa

SEQ ID NO: 1497180 - DNA, 15 bp, Homo sapiens
aaaacaaaaactaag

SEQ ID NO: 1497181 - DNA, 15 bp, Homo sapiens
aaacaaaaactaaga

SEQ ID NO: 1497182 - DNA, 15 bp, Homo sapiens
aacaaaaactaagaa

SEQ ID NO: 1497183 - DNA, 15 bp, Homo sapiens
acaaaaactaagaag

SEQ ID NO: 1497184 - DNA, 15 bp, Homo sapiens
caaaaactaagaaga

SEQ ID NO: 1497185 - DNA, 15 bp, Homo sapiens
aaaaactaagaagac

SEQ ID NO: 1497186 - DNA, 15 bp, Homo sapiens
aaaactaagaagact

SEQ ID NO: 1497187 - DNA, 15 bp, Homo sapiens
aaactaagaagactg

SEQ ID NO: 1497188 - DNA, 15 bp, Homo sapiens
aactaagaagactgt

SEQ ID NO: 1497189 - DNA, 15 bp, Homo sapiens
actaagaagactgtg

SEQ ID NO: 1497190 - DNA, 15 bp, Homo sapiens
ctaagaagactgtgc

SEQ ID NO: 1497191 - DNA, 15 bp, Homo sapiens
taagaagactgtgca

SEQ ID NO: 1497192 - DNA, 15 bp, Homo sapiens
aagaagactgtgcaa

SEQ ID NO: 1497193 - DNA, 15 bp, Homo sapiens
agaagactgtgcaac

SEQ ID NO: 1497194 - DNA, 15 bp, Homo sapiens
gaagactgtgcaaca

SEQ ID NO: 1497195 - DNA, 15 bp, Homo sapiens
aagactgtgcaacag

SEQ ID NO: 1497196 - DNA, 15 bp, Homo sapiens
agactgtgcaacaga

SEQ ID NO: 1497197 - DNA, 15 bp, Homo sapiens
gactgtgcaacagag

SEQ ID NO: 1497198 - DNA, 15 bp, Homo sapiens
actgtgcaacagaga

SEQ ID NO: 1497199 - DNA, 15 bp, Homo sapiens
ctgtgcaacagagat

SEQ ID NO: 1497200 - DNA, 15 bp, Homo sapiens
tgtgcaacagagatt

SEQ ID NO: 1497201 - DNA, 15 bp, Homo sapiens
gtgcaacagagattg

SEQ ID NO: 1497202 - DNA, 15 bp, Homo sapiens
tgcaacagagattgt

SEQ ID NO: 1497203 - DNA, 15 bp, Homo sapiens
gcaacagagattgta

SEQ ID NO: 1497204 - DNA, 15 bp, Homo sapiens
caacagagattgtag

SEQ ID NO: 1497205 - DNA, 15 bp, Homo sapiens
aacagagattgtagt

SEQ ID NO: 1497206 - DNA, 15 bp, Homo sapiens
acagagattgtagtt

SEQ ID NO: 1497207 - DNA, 15 bp, Homo sapiens
cagagattgtagtta

SEQ ID NO: 1497208 - DNA, 15 bp, Homo sapiens
agagattgtagttag

SEQ ID NO: 1497209 - DNA, 15 bp, Homo sapiens
gagattgtagttagc

SEQ ID NO: 1497210 - DNA, 15 bp, Homo sapiens
agattgtagttagcc

SEQ ID NO: 1497211 - DNA, 15 bp, Homo sapiens
gattgtagttagcct

SEQ ID NO: 1497212 - DNA, 15 bp, Homo sapiens
attgtagttagccta

SEQ ID NO: 1497213 - DNA, 15 bp, Homo sapiens
ttgtagttagcctat

SEQ ID NO: 1497214 - DNA, 15 bp, Homo sapiens
tgtagttagcctatg

SEQ ID NO: 1497215 - DNA, 15 bp, Homo sapiens
gtagttagcctatga

SEQ ID NO: 1497216 - DNA, 15 bp, Homo sapiens
tagttagcctatgaa

SEQ ID NO: 1497217 - DNA, 15 bp, Homo sapiens
agttagcctatgaag

SEQ ID NO: 1497218 - DNA, 15 bp, Homo sapiens
gttagcctatgaagc

SEQ ID NO: 1497219 - DNA, 15 bp, Homo sapiens
ttagcctatgaagcc

SEQ ID NO: 1497220 - DNA, 15 bp, Homo sapiens
tagcctatgaagcca

SEQ ID NO: 1497221 - DNA, 15 bp, Homo sapiens
agcctatgaagccaa

SEQ ID NO: 1497222 - DNA, 15 bp, Homo sapiens
gcctatgaagccaaa

SEQ ID NO: 1497223 - DNA, 15 bp, Homo sapiens
cctatgaagccaaaa

SEQ ID NO: 1497224 - DNA, 15 bp, Homo sapiens
ctatgaagccaaaat

SEQ ID NO: 1497225 - DNA, 15 bp, Homo sapiens
tatgaagccaaaata

SEQ ID NO: 1497226 - DNA, 15 bp, Homo sapiens
atgaagccaaaatat

SEQ ID NO: 1497227 - DNA, 15 bp, Homo sapiens
tgaagccaaaatatt

SEQ ID NO: 1497228 - DNA, 15 bp, Homo sapiens
gaagccaaaatattt

SEQ ID NO: 1497229 - DNA, 15 bp, Homo sapiens
aagccaaaatattta

SEQ ID NO: 1497230 - DNA, 15 bp, Homo sapiens
agccaaaatatttac

SEQ ID NO: 1497231 - DNA, 15 bp, Homo sapiens
gccaaaatatttact

SEQ ID NO: 1497232 - DNA, 15 bp, Homo sapiens
ccaaaatatttacta

SEQ ID NO: 1497233 - DNA, 15 bp, Homo sapiens
caaaatatttactat

SEQ ID NO: 1497234 - DNA, 15 bp, Homo sapiens
aaaatatttactatc

SEQ ID NO: 1497235 - DNA, 15 bp, Homo sapiens
aaatatttactatct

SEQ ID NO: 1497236 - DNA, 15 bp, Homo sapiens
aatatttactatctc

SEQ ID NO: 1497237 - DNA, 15 bp, Homo sapiens
atatttactatctcc

SEQ ID NO: 1497238 - DNA, 15 bp, Homo sapiens
tatttactatctcct

SEQ ID NO: 1497239 - DNA, 15 bp, Homo sapiens
atttactatctcctt

SEQ ID NO: 1497240 - DNA, 15 bp, Homo sapiens
tttactatctccttt

SEQ ID NO: 1497241 - DNA, 15 bp, Homo sapiens
ttactatctcctttt

SEQ ID NO: 1497242 - DNA, 15 bp, Homo sapiens
tactatctccttttg

SEQ ID NO: 1497243 - DNA, 15 bp, Homo sapiens
actatctccttttga

SEQ ID NO: 1497244 - DNA, 15 bp, Homo sapiens
ctatctccttttgat

SEQ ID NO: 1497245 - DNA, 15 bp, Homo sapiens
tatctccttttgata

SEQ ID NO: 1497246 - DNA, 15 bp, Homo sapiens
atctccttttgatag

SEQ ID NO: 1497247 - DNA, 15 bp, Homo sapiens
tctccttttgataga

SEQ ID NO: 1497248 - DNA, 15 bp, Homo sapiens
ctccttttgatagaa

SEQ ID NO: 1497249 - DNA, 15 bp, Homo sapiens
tccttttgatagaag

SEQ ID NO: 1497250 - DNA, 15 bp, Homo sapiens
ccttttgatagaaga

SEQ ID NO: 1497251 - DNA, 15 bp, Homo sapiens
cttttgatagaagaa

SEQ ID NO: 1497252 - DNA, 15 bp, Homo sapiens
ttttgatagaagaaa

SEQ ID NO: 1497253 - DNA, 15 bp, Homo sapiens
tttgatagaagaaat

SEQ ID NO: 1497254 - DNA, 15 bp, Homo sapiens
ttgatagaagaaatc

SEQ ID NO: 1497255 - DNA, 15 bp, Homo sapiens
tgatagaagaaatct

SEQ ID NO: 1497256 - DNA, 15 bp, Homo sapiens
gatagaagaaatctg

SEQ ID NO: 1497257 - DNA, 15 bp, Homo sapiens
atagaagaaatctgc

SEQ ID NO: 1497258 - DNA, 15 bp, Homo sapiens
tagaagaaatctgcc

SEQ ID NO: 1497259 - DNA, 15 bp, Homo sapiens
agaagaaatctgcca

SEQ ID NO: 1497260 - DNA, 15 bp, Homo sapiens
gaagaaatctgccaa

SEQ ID NO: 1497261 - DNA, 15 bp, Homo sapiens
aagaaatctgccaac

SEQ ID NO: 1497262 - DNA, 15 bp, Homo sapiens
agaaatctgccaacc

SEQ ID NO: 1497263 - DNA, 15 bp, Homo sapiens
gaaatctgccaacct

SEQ ID NO: 1497264 - DNA, 15 bp, Homo sapiens
aaatctgccaacctc

SEQ ID NO: 1497265 - DNA, 15 bp, Homo sapiens
aatctgccaacctct

SEQ ID NO: 1497266 - DNA, 15 bp, Homo sapiens
atctgccaacctctg

SEQ ID NO: 1497267 - DNA, 15 bp, Homo sapiens
tctgccaacctctgc

SEQ ID NO: 1497268 - DNA, 15 bp, Homo sapiens
ctgccaacctctgct

SEQ ID NO: 1497269 - DNA, 15 bp, Homo sapiens
tgccaacctctgctc

SEQ ID NO: 1497270 - DNA, 15 bp, Homo sapiens
gccaacctctgctct

SEQ ID NO: 1497271 - DNA, 15 bp, Homo sapiens
ccaacctctgctcta

SEQ ID NO: 1497272 - DNA, 15 bp, Homo sapiens
caacctctgctctag

SEQ ID NO: 1497273 - DNA, 15 bp, Homo sapiens
aacctctgctctagt

SEQ ID NO: 1497274 - DNA, 15 bp, Homo sapiens
acctctgctctagtt

SEQ ID NO: 1497275 - DNA, 15 bp, Homo sapiens
cctctgctctagttc

SEQ ID NO: 1497276 - DNA, 15 bp, Homo sapiens
ctctgctctagttca

SEQ ID NO: 1497277 - DNA, 15 bp, Homo sapiens
tctgctctagttcaa

SEQ ID NO: 1497278 - DNA, 15 bp, Homo sapiens
ctgctctagttcaag

SEQ ID NO: 1497279 - DNA, 15 bp, Homo sapiens
tgctctagttcaaga

SEQ ID NO: 1497280 - DNA, 15 bp, Homo sapiens
gctctagttcaagaa

SEQ ID NO: 1497281 - DNA, 15 bp, Homo sapiens
ctctagttcaagaaa

SEQ ID NO: 1497282 - DNA, 15 bp, Homo sapiens
tctagttcaagaaaa

SEQ ID NO: 1497283 - DNA, 15 bp, Homo sapiens
ctagttcaagaaaaa

SEQ ID NO: 1497284 - DNA, 15 bp, Homo sapiens
tagttcaagaaaaaa

SEQ ID NO: 1497285 - DNA, 15 bp, Homo sapiens
agttcaagaaaaaaa

SEQ ID NO: 1497286 - DNA, 15 bp, Homo sapiens
gttcaagaaaaaaaa

SEQ ID NO: 1497287 - DNA, 15 bp, Homo sapiens
ttcaagaaaaaaaat

SEQ ID NO: 1497288 - DNA, 15 bp, Homo sapiens
tcaagaaaaaaaatc

SEQ ID NO: 1497289 - DNA, 15 bp, Homo sapiens
caagaaaaaaaatca

SEQ ID NO: 1497290 - DNA, 15 bp, Homo sapiens
aagaaaaaaaatcaa

SEQ ID NO: 1497291 - DNA, 15 bp, Homo sapiens
agaaaaaaaatcaaa

SEQ ID NO: 1497292 - DNA, 15 bp, Homo sapiens
gaaaaaaaatcaaaa

SEQ ID NO: 1497293 - DNA, 15 bp, Homo sapiens
aaaaaaatcaaaatc

SEQ ID NO: 1497294 - DNA, 15 bp, Homo sapiens
aaaaaatcaaaatct

SEQ ID NO: 1497295 - DNA, 15 bp, Homo sapiens
aaaaatcaaaatcta

SEQ ID NO: 1497296 - DNA, 15 bp, Homo sapiens
aaaatcaaaatctag

SEQ ID NO: 1497297 - DNA, 15 bp, Homo sapiens
aaatcaaaatctaga

SEQ ID NO: 1497298 - DNA, 15 bp, Homo sapiens
aatcaaaatctagac

SEQ ID NO: 1497299 - DNA, 15 bp, Homo sapiens
atcaaaatctagaca

SEQ ID NO: 1497300 - DNA, 15 bp, Homo sapiens
tcaaaatctagacat

SEQ ID NO: 1497301 - DNA, 15 bp, Homo sapiens
caaaatctagacatg

SEQ ID NO: 1497302 - DNA, 15 bp, Homo sapiens
aaaatctagacatgt

SEQ ID NO: 1497303 - DNA, 15 bp, Homo sapiens
aaatctagacatgtc

SEQ ID NO: 1497304 - DNA, 15 bp, Homo sapiens
aatctagacatgtca

SEQ ID NO: 1497305 - DNA, 15 bp, Homo sapiens
atctagacatgtcaa

SEQ ID NO: 1497306 - DNA, 15 bp, Homo sapiens
tctagacatgtcaag

SEQ ID NO: 1497307 - DNA, 15 bp, Homo sapiens
ctagacatgtcaagt

SEQ ID NO: 1497308 - DNA, 15 bp, Homo sapiens
tagacatgtcaagtc

SEQ ID NO: 1497309 - DNA, 15 bp, Homo sapiens
agacatgtcaagtca

SEQ ID NO: 1497310 - DNA, 15 bp, Homo sapiens
gacatgtcaagtcac

SEQ ID NO: 1497311 - DNA, 15 bp, Homo sapiens
acatgtcaagtcact

SEQ ID NO: 1497312 - DNA, 15 bp, Homo sapiens
catgtcaagtcactc

SEQ ID NO: 1497313 - DNA, 15 bp, Homo sapiens
atgtcaagtcactca

SEQ ID NO: 1497314 - DNA, 15 bp, Homo sapiens
tgtcaagtcactcac

SEQ ID NO: 1497315 - DNA, 15 bp, Homo sapiens
gtcaagtcactcacc

SEQ ID NO: 1497316 - DNA, 15 bp, Homo sapiens
tcaagtcactcacca

SEQ ID NO: 1497317 - DNA, 15 bp, Homo sapiens
caagtcactcaccaa

SEQ ID NO: 1497318 - DNA, 15 bp, Homo sapiens
aagtcactcaccaac

SEQ ID NO: 1497319 - DNA, 15 bp, Homo sapiens
agtcactcaccaact

SEQ ID NO: 1497320 - DNA, 15 bp, Homo sapiens
gtcactcaccaactg

SEQ ID NO: 1497321 - DNA, 15 bp, Homo sapiens
tcactcaccaactgt

SEQ ID NO: 1497322 - DNA, 15 bp, Homo sapiens
cactcaccaactgtc

SEQ ID NO: 1497323 - DNA, 15 bp, Homo sapiens
actcaccaactgtca

SEQ ID NO: 1497324 - DNA, 15 bp, Homo sapiens
ctcaccaactgtcac

SEQ ID NO: 1497325 - DNA, 15 bp, Homo sapiens
tcaccaactgtcaca

SEQ ID NO: 1497326 - DNA, 15 bp, Homo sapiens
caccaactgtcacat

SEQ ID NO: 1497327 - DNA, 15 bp, Homo sapiens
accaactgtcacatg

SEQ ID NO: 1497328 - DNA, 15 bp, Homo sapiens
ccaactgtcacatgg

SEQ ID NO: 1497329 - DNA, 15 bp, Homo sapiens
caactgtcacatggt

SEQ ID NO: 1497330 - DNA, 15 bp, Homo sapiens
aactgtcacatggtg

SEQ ID NO: 1497331 - DNA, 15 bp, Homo sapiens
actgtcacatggtga

SEQ ID NO: 1497332 - DNA, 15 bp, Homo sapiens
ctgtcacatggtgag

SEQ ID NO: 1497333 - DNA, 15 bp, Homo sapiens
tgtcacatggtgagt

SEQ ID NO: 1497334 - DNA, 15 bp, Homo sapiens
gtcacatggtgagtt

SEQ ID NO: 1497335 - DNA, 15 bp, Homo sapiens
tcacatggtgagtta

SEQ ID NO: 1497336 - DNA, 15 bp, Homo sapiens
cacatggtgagttaa

SEQ ID NO: 1497337 - DNA, 15 bp, Homo sapiens
acatggtgagttaat

SEQ ID NO: 1497338 - DNA, 15 bp, Homo sapiens
catggtgagttaata

SEQ ID NO: 1497339 - DNA, 15 bp, Homo sapiens
atggtgagttaataa

SEQ ID NO: 1497340 - DNA, 15 bp, Homo sapiens
tggtgagttaataac

SEQ ID NO: 1497341 - DNA, 15 bp, Homo sapiens
ggtgagttaataaca

SEQ ID NO: 1497342 - DNA, 15 bp, Homo sapiens
gtgagttaataacaa

SEQ ID NO: 1497343 - DNA, 15 bp, Homo sapiens
tgagttaataacaac

SEQ ID NO: 1497344 - DNA, 15 bp, Homo sapiens
gagttaataacaact

SEQ ID NO: 1497345 - DNA, 15 bp, Homo sapiens
agttaataacaactg

SEQ ID NO: 1497346 - DNA, 15 bp, Homo sapiens
gttaataacaactgg

SEQ ID NO: 1497347 - DNA, 15 bp, Homo sapiens
ttaataacaactgga

SEQ ID NO: 1497348 - DNA, 15 bp, Homo sapiens
taataacaactggaa

SEQ ID NO: 1497349 - DNA, 15 bp, Homo sapiens
aataacaactggaat

SEQ ID NO: 1497350 - DNA, 15 bp, Homo sapiens
ataacaactggaata

SEQ ID NO: 1497351 - DNA, 15 bp, Homo sapiens
taacaactggaatag

SEQ ID NO: 1497352 - DNA, 15 bp, Homo sapiens
aacaactggaataga

SEQ ID NO: 1497353 - DNA, 15 bp, Homo sapiens
acaactggaatagac

SEQ ID NO: 1497354 - DNA, 15 bp, Homo sapiens
caactggaatagacc

SEQ ID NO: 1497355 - DNA, 15 bp, Homo sapiens
aactggaatagaccc

SEQ ID NO: 1497356 - DNA, 15 bp, Homo sapiens
actggaatagacccg

SEQ ID NO: 1497357 - DNA, 15 bp, Homo sapiens
ctggaatagacccgg

SEQ ID NO: 1497358 - DNA, 15 bp, Homo sapiens
tggaatagacccggg

SEQ ID NO: 1497359 - DNA, 15 bp, Homo sapiens
ggaatagacccgggt

SEQ ID NO: 1497360 - DNA, 15 bp, Homo sapiens
gaatagacccgggtt

SEQ ID NO: 1497361 - DNA, 15 bp, Homo sapiens
aatagacccgggttt

SEQ ID NO: 1497362 - DNA, 15 bp, Homo sapiens
atagacccgggttta

SEQ ID NO: 1497363 - DNA, 15 bp, Homo sapiens
tagacccgggtttac

SEQ ID NO: 1497364 - DNA, 15 bp, Homo sapiens
agacccgggtttact

SEQ ID NO: 1497365 - DNA, 15 bp, Homo sapiens
gacccgggtttactg

SEQ ID NO: 1497366 - DNA, 15 bp, Homo sapiens
acccgggtttactga

SEQ ID NO: 1497367 - DNA, 15 bp, Homo sapiens
cccgggtttactgat

SEQ ID NO: 1497368 - DNA, 15 bp, Homo sapiens
ccgggtttactgatt

SEQ ID NO: 1497369 - DNA, 15 bp, Homo sapiens
cgggtttactgattc

SEQ ID NO: 1497370 - DNA, 15 bp, Homo sapiens
gggtttactgattct

SEQ ID NO: 1497371 - DNA, 15 bp, Homo sapiens
ggtttactgattctc

SEQ ID NO: 1497372 - DNA, 15 bp, Homo sapiens
gtttactgattctca

SEQ ID NO: 1497373 - DNA, 15 bp, Homo sapiens
tttactgattctcaa

SEQ ID NO: 1497374 - DNA, 15 bp, Homo sapiens
ttactgattctcaat

SEQ ID NO: 1497375 - DNA, 15 bp, Homo sapiens
tactgattctcaatg

SEQ ID NO: 1497376 - DNA, 15 bp, Homo sapiens
actgattctcaatgc

SEQ ID NO: 1497377 - DNA, 15 bp, Homo sapiens
ctgattctcaatgct

SEQ ID NO: 1497378 - DNA, 15 bp, Homo sapiens
tgattctcaatgctg

SEQ ID NO: 1497379 - DNA, 15 bp, Homo sapiens
gattctcaatgctgt

SEQ ID NO: 1497380 - DNA, 15 bp, Homo sapiens
attctcaatgctgtg

SEQ ID NO: 1497381 - DNA, 15 bp, Homo sapiens
ttctcaatgctgtgt

SEQ ID NO: 1497382 - DNA, 15 bp, Homo sapiens
tctcaatgctgtgtt

SEQ ID NO: 1497383 - DNA, 15 bp, Homo sapiens
ctcaatgctgtgttc

SEQ ID NO: 1497384 - DNA, 15 bp, Homo sapiens
tcaatgctgtgttcc

SEQ ID NO: 1497385 - DNA, 15 bp, Homo sapiens
caatgctgtgttcct

SEQ ID NO: 1497386 - DNA, 15 bp, Homo sapiens
aatgctgtgttccta

SEQ ID NO: 1497387 - DNA, 15 bp, Homo sapiens
atgctgtgttcctat

SEQ ID NO: 1497388 - DNA, 15 bp, Homo sapiens
tgctgtgttcctatc

SEQ ID NO: 1497389 - DNA, 15 bp, Homo sapiens
gctgtgttcctatca

SEQ ID NO: 1497390 - DNA, 15 bp, Homo sapiens
ctgtgttcctatcat

SEQ ID NO: 1497391 - DNA, 15 bp, Homo sapiens
tgtgttcctatcatg

SEQ ID NO: 1497392 - DNA, 15 bp, Homo sapiens
gtgttcctatcatga

SEQ ID NO: 1497393 - DNA, 15 bp, Homo sapiens
tgttcctatcatgat

SEQ ID NO: 1497394 - DNA, 15 bp, Homo sapiens
gttcctatcatgatt

SEQ ID NO: 1497395 - DNA, 15 bp, Homo sapiens
ttcctatcatgatta

SEQ ID NO: 1497396 - DNA, 15 bp, Homo sapiens
tcctatcatgattat

SEQ ID NO: 1497397 - DNA, 15 bp, Homo sapiens
cctatcatgattatg

SEQ ID NO: 1497398 - DNA, 15 bp, Homo sapiens
ctatcatgattatgg

SEQ ID NO: 1497399 - DNA, 15 bp, Homo sapiens
tatcatgattatggc

SEQ ID NO: 1497400 - DNA, 15 bp, Homo sapiens
atcatgattatggca

SEQ ID NO: 1497401 - DNA, 15 bp, Homo sapiens
tcatgattatggcac

SEQ ID NO: 1497402 - DNA, 15 bp, Homo sapiens
catgattatggcaca

SEQ ID NO: 1497403 - DNA, 15 bp, Homo sapiens
atgattatggcacag

SEQ ID NO: 1497404 - DNA, 15 bp, Homo sapiens
tgattatggcacaga

SEQ ID NO: 1497405 - DNA, 15 bp, Homo sapiens
gattatggcacagac

SEQ ID NO: 1497406 - DNA, 15 bp, Homo sapiens
attatggcacagacc

SEQ ID NO: 1497407 - DNA, 15 bp, Homo sapiens
ttatggcacagacca

SEQ ID NO: 1497408 - DNA, 15 bp, Homo sapiens
tatggcacagaccac

SEQ ID NO: 1497409 - DNA, 15 bp, Homo sapiens
atggcacagaccaca

SEQ ID NO: 1497410 - DNA, 15 bp, Homo sapiens
tggcacagaccacag

SEQ ID NO: 1497411 - DNA, 15 bp, Homo sapiens
ggcacagaccacagc

SEQ ID NO: 1497412 - DNA, 15 bp, Homo sapiens
gcacagaccacagcg

SEQ ID NO: 1497413 - DNA, 15 bp, Homo sapiens
cacagaccacagcgc

SEQ ID NO: 1497414 - DNA, 15 bp, Homo sapiens
acagaccacagcgct

SEQ ID NO: 1497415 - DNA, 15 bp, Homo sapiens
cagaccacagcgctt

SEQ ID NO: 1497416 - DNA, 15 bp, Homo sapiens
agaccacagcgcttc

SEQ ID NO: 1497417 - DNA, 15 bp, Homo sapiens
gaccacagcgcttca

SEQ ID NO: 1497418 - DNA, 15 bp, Homo sapiens
accacagcgcttcag

SEQ ID NO: 1497419 - DNA, 15 bp, Homo sapiens
ccacagcgcttcaga

SEQ ID NO: 1497420 - DNA, 15 bp, Homo sapiens
cacagcgcttcagaa

SEQ ID NO: 1497421 - DNA, 15 bp, Homo sapiens
acagcgcttcagaac

SEQ ID NO: 1497422 - DNA, 15 bp, Homo sapiens
cagcgcttcagaact

SEQ ID NO: 1497423 - DNA, 15 bp, Homo sapiens
agcgcttcagaacta

SEQ ID NO: 1497424 - DNA, 15 bp, Homo sapiens
gcgcttcagaactat

SEQ ID NO: 1497425 - DNA, 15 bp, Homo sapiens
cgcttcagaactatg

SEQ ID NO: 1497426 - DNA, 15 bp, Homo sapiens
gcttcagaactatga

SEQ ID NO: 1497427 - DNA, 15 bp, Homo sapiens
cttcagaactatgaa

SEQ ID NO: 1497428 - DNA, 15 bp, Homo sapiens
ttcagaactatgaat

SEQ ID NO: 1497429 - DNA, 15 bp, Homo sapiens
tcagaactatgaata

SEQ ID NO: 1497430 - DNA, 15 bp, Homo sapiens
cagaactatgaatat

SEQ ID NO: 1497431 - DNA, 15 bp, Homo sapiens
agaactatgaatatg

SEQ ID NO: 1497432 - DNA, 15 bp, Homo sapiens
gaactatgaatatgg

SEQ ID NO: 1497433 - DNA, 15 bp, Homo sapiens
aactatgaatatggc

SEQ ID NO: 1497434 - DNA, 15 bp, Homo sapiens
actatgaatatggca

SEQ ID NO: 1497435 - DNA, 15 bp, Homo sapiens
ctatgaatatggcag

SEQ ID NO: 1497436 - DNA, 15 bp, Homo sapiens
tatgaatatggcagc

SEQ ID NO: 1497437 - DNA, 15 bp, Homo sapiens
atgaatatggcagct

SEQ ID NO: 1497438 - DNA, 15 bp, Homo sapiens
tgaatatggcagctt

SEQ ID NO: 1497439 - DNA, 15 bp, Homo sapiens
gaatatggcagctta

SEQ ID NO: 1497440 - DNA, 15 bp, Homo sapiens
aatatggcagcttag

SEQ ID NO: 1497441 - DNA, 15 bp, Homo sapiens
atatggcagcttagg

SEQ ID NO: 1497442 - DNA, 15 bp, Homo sapiens
tatggcagcttaggg

SEQ ID NO: 1497443 - DNA, 15 bp, Homo sapiens
atggcagcttagggg

SEQ ID NO: 1497444 - DNA, 15 bp, Homo sapiens
tggcagcttaggggg

SEQ ID NO: 1497445 - DNA, 15 bp, Homo sapiens
ggcagcttagggggc

SEQ ID NO: 1497446 - DNA, 15 bp, Homo sapiens
gcagcttagggggcg

SEQ ID NO: 1497447 - DNA, 15 bp, Homo sapiens
cagcttagggggcgt

SEQ ID NO: 1497448 - DNA, 15 bp, Homo sapiens
agcttagggggcgtg

SEQ ID NO: 1497449 - DNA, 15 bp, Homo sapiens
gcttagggggcgtgg

SEQ ID NO: 1497450 - DNA, 15 bp, Homo sapiens
cttagggggcgtggt

SEQ ID NO: 1497451 - DNA, 15 bp, Homo sapiens
ttagggggcgtggtg

SEQ ID NO: 1497452 - DNA, 15 bp, Homo sapiens
tagggggcgtggtgt

SEQ ID NO: 1497453 - DNA, 15 bp, Homo sapiens
agggggcgtggtgtt

SEQ ID NO: 1497454 - DNA, 15 bp, Homo sapiens
gggggcgtggtgttt

SEQ ID NO: 1497455 - DNA, 15 bp, Homo sapiens
ggggcgtggtgtttg

SEQ ID NO: 1497456 - DNA, 15 bp, Homo sapiens
gggcgtggtgtttgt

SEQ ID NO: 1497457 - DNA, 15 bp, Homo sapiens
ggcgtggtgtttgtt

SEQ ID NO: 1497458 - DNA, 15 bp, Homo sapiens
gcgtggtgtttgttt

SEQ ID NO: 1497459 - DNA, 15 bp, Homo sapiens
cgtggtgtttgtttc

SEQ ID NO: 1497460 - DNA, 15 bp, Homo sapiens
gtggtgtttgtttcc

SEQ ID NO: 1497461 - DNA, 15 bp, Homo sapiens
tggtgtttgtttccc

SEQ ID NO: 1497462 - DNA, 15 bp, Homo sapiens
ggtgtttgtttcccc

SEQ ID NO: 1497463 - DNA, 15 bp, Homo sapiens
gtgtttgtttcccca

SEQ ID NO: 1497464 - DNA, 15 bp, Homo sapiens
tgtttgtttccccag

SEQ ID NO: 1497465 - DNA, 15 bp, Homo sapiens
gtttgtttccccaga

SEQ ID NO: 1497466 - DNA, 15 bp, Homo sapiens
tttgtttccccagag

SEQ ID NO: 1497467 - DNA, 15 bp, Homo sapiens
ttgtttccccagaga

SEQ ID NO: 1497468 - DNA, 15 bp, Homo sapiens
tgtttccccagagag

SEQ ID NO: 1497469 - DNA, 15 bp, Homo sapiens
gtttccccagagagc

SEQ ID NO: 1497470 - DNA, 15 bp, Homo sapiens
tttccccagagagca

SEQ ID NO: 1497471 - DNA, 15 bp, Homo sapiens
ttccccagagagcat

SEQ ID NO: 1497472 - DNA, 15 bp, Homo sapiens
tccccagagagcatt

SEQ ID NO: 1497473 - DNA, 15 bp, Homo sapiens
ccccagagagcattt

SEQ ID NO: 1497474 - DNA, 15 bp, Homo sapiens
cccagagagcatttc

SEQ ID NO: 1497475 - DNA, 15 bp, Homo sapiens
ccagagagcatttca

SEQ ID NO: 1497476 - DNA, 15 bp, Homo sapiens
cagagagcatttcat

SEQ ID NO: 1497477 - DNA, 15 bp, Homo sapiens
agagagcatttcatt

SEQ ID NO: 1497478 - DNA, 15 bp, Homo sapiens
gagagcatttcattc

SEQ ID NO: 1497479 - DNA, 15 bp, Homo sapiens
agagcatttcattcc

SEQ ID NO: 1497480 - DNA, 15 bp, Homo sapiens
gagcatttcattcca

SEQ ID NO: 1497481 - DNA, 15 bp, Homo sapiens
agcatttcattccaa

SEQ ID NO: 1497482 - DNA, 15 bp, Homo sapiens
gcatttcattccaaa

SEQ ID NO: 1497483 - DNA, 15 bp, Homo sapiens
catttcattccaaag

SEQ ID NO: 1497484 - DNA, 15 bp, Homo sapiens
atttcattccaaagt

SEQ ID NO: 1497485 - DNA, 15 bp, Homo sapiens
tttcattccaaagta

SEQ ID NO: 1497486 - DNA, 15 bp, Homo sapiens
ttcattccaaagtat

SEQ ID NO: 1497487 - DNA, 15 bp, Homo sapiens
tcattccaaagtatt

SEQ ID NO: 1497488 - DNA, 15 bp, Homo sapiens
cattccaaagtattc

SEQ ID NO: 1497489 - DNA, 15 bp, Homo sapiens
attccaaagtattct

SEQ ID NO: 1497490 - DNA, 15 bp, Homo sapiens
ttccaaagtattctg

SEQ ID NO: 1497491 - DNA, 15 bp, Homo sapiens
tccaaagtattctgt

SEQ ID NO: 1497492 - DNA, 15 bp, Homo sapiens
ccaaagtattctgtc

SEQ ID NO: 1497493 - DNA, 15 bp, Homo sapiens
caaagtattctgtct

SEQ ID NO: 1497494 - DNA, 15 bp, Homo sapiens
aaagtattctgtctc

SEQ ID NO: 1497495 - DNA, 15 bp, Homo sapiens
aagtattctgtctct

SEQ ID NO: 1497496 - DNA, 15 bp, Homo sapiens
agtattctgtctctt

SEQ ID NO: 1497497 - DNA, 15 bp, Homo sapiens
gtattctgtctcttc

SEQ ID NO: 1497498 - DNA, 15 bp, Homo sapiens
tattctgtctcttca

SEQ ID NO: 1497499 - DNA, 15 bp, Homo sapiens
attctgtctcttcac

SEQ ID NO: 1497500 - DNA, 15 bp, Homo sapiens
ttctgtctcttcact

SEQ ID NO: 1497501 - DNA, 15 bp, Homo sapiens
tctgtctcttcactc

SEQ ID NO: 1497502 - DNA, 15 bp, Homo sapiens
ctgtctcttcactcc

SEQ ID NO: 1497503 - DNA, 15 bp, Homo sapiens
tgtctcttcactcca

SEQ ID NO: 1497504 - DNA, 15 bp, Homo sapiens
gtctcttcactccat

SEQ ID NO: 1497505 - DNA, 15 bp, Homo sapiens
tctcttcactccata

SEQ ID NO: 1497506 - DNA, 15 bp, Homo sapiens
ctcttcactccataa

SEQ ID NO: 1497507 - DNA, 15 bp, Homo sapiens
tcttcactccataaa

SEQ ID NO: 1497508 - DNA, 15 bp, Homo sapiens
cttcactccataaag

SEQ ID NO: 1497509 - DNA, 15 bp, Homo sapiens
ttcactccataaagc

SEQ ID NO: 1497510 - DNA, 15 bp, Homo sapiens
tcactccataaagct

SEQ ID NO: 1497511 - DNA, 15 bp, Homo sapiens
cactccataaagcta

SEQ ID NO: 1497512 - DNA, 15 bp, Homo sapiens
actccataaagctat

SEQ ID NO: 1497513 - DNA, 15 bp, Homo sapiens
ctccataaagctatt

SEQ ID NO: 1497514 - DNA, 15 bp, Homo sapiens
tccataaagctatta

SEQ ID NO: 1497515 - DNA, 15 bp, Homo sapiens
ccataaagctattac

SEQ ID NO: 1497516 - DNA, 15 bp, Homo sapiens
cataaagctattaca

SEQ ID NO: 1497517 - DNA, 15 bp, Homo sapiens
ataaagctattacag

SEQ ID NO: 1497518 - DNA, 15 bp, Homo sapiens
taaagctattacagg

SEQ ID NO: 1497519 - DNA, 15 bp, Homo sapiens
aaagctattacaggc

SEQ ID NO: 1497520 - DNA, 15 bp, Homo sapiens
aagctattacaggcc

SEQ ID NO: 1497521 - DNA, 15 bp, Homo sapiens
agctattacaggcct

SEQ ID NO: 1497522 - DNA, 15 bp, Homo sapiens
gctattacaggcctg

SEQ ID NO: 1497523 - DNA, 15 bp, Homo sapiens
ctattacaggcctgt

SEQ ID NO: 1497524 - DNA, 15 bp, Homo sapiens
tattacaggcctgta

SEQ ID NO: 1497525 - DNA, 15 bp, Homo sapiens
attacaggcctgtat

SEQ ID NO: 1497526 - DNA, 15 bp, Homo sapiens
ttacaggcctgtatg

SEQ ID NO: 1497527 - DNA, 15 bp, Homo sapiens
tacaggcctgtatga

SEQ ID NO: 1497528 - DNA, 15 bp, Homo sapiens
acaggcctgtatgat

SEQ ID NO: 1497529 - DNA, 15 bp, Homo sapiens
caggcctgtatgatt

SEQ ID NO: 1497530 - DNA, 15 bp, Homo sapiens
aggcctgtatgattg

SEQ ID NO: 1497531 - DNA, 15 bp, Homo sapiens
ggcctgtatgattgt

SEQ ID NO: 1497532 - DNA, 15 bp, Homo sapiens
gcctgtatgattgtc

SEQ ID NO: 1497533 - DNA, 15 bp, Homo sapiens
cctgtatgattgtct

SEQ ID NO: 1497534 - DNA, 15 bp, Homo sapiens
ctgtatgattgtctc

SEQ ID NO: 1497535 - DNA, 15 bp, Homo sapiens
tgtatgattgtctcc

SEQ ID NO: 1497536 - DNA, 15 bp, Homo sapiens
gtatgattgtctcca

SEQ ID NO: 1497537 - DNA, 15 bp, Homo sapiens
tatgattgtctccaa

SEQ ID NO: 1497538 - DNA, 15 bp, Homo sapiens
atgattgtctccaac

SEQ ID NO: 1497539 - DNA, 15 bp, Homo sapiens
tgattgtctccaacc

SEQ ID NO: 1497540 - DNA, 15 bp, Homo sapiens
gattgtctccaacca

SEQ ID NO: 1497541 - DNA, 15 bp, Homo sapiens
attgtctccaaccaa

SEQ ID NO: 1497542 - DNA, 15 bp, Homo sapiens
ttgtctccaaccaaa

SEQ ID NO: 1497543 - DNA, 15 bp, Homo sapiens
tgtctccaaccaaat

SEQ ID NO: 1497544 - DNA, 15 bp, Homo sapiens
gtctccaaccaaatg

SEQ ID NO: 1497545 - DNA, 15 bp, Homo sapiens
tctccaaccaaatgg

SEQ ID NO: 1497546 - DNA, 15 bp, Homo sapiens
ctccaaccaaatgga

SEQ ID NO: 1497547 - DNA, 15 bp, Homo sapiens
tccaaccaaatggat

SEQ ID NO: 1497548 - DNA, 15 bp, Homo sapiens
ccaaccaaatggatt

SEQ ID NO: 1497549 - DNA, 15 bp, Homo sapiens
caaccaaatggattc

SEQ ID NO: 1497550 - DNA, 15 bp, Homo sapiens
aaccaaatggattcc

SEQ ID NO: 1497551 - DNA, 15 bp, Homo sapiens
accaaatggattcca

SEQ ID NO: 1497552 - DNA, 15 bp, Homo sapiens
ccaaatggattccat

SEQ ID NO: 1497553 - DNA, 15 bp, Homo sapiens
caaatggattccatt

SEQ ID NO: 1497554 - DNA, 15 bp, Homo sapiens
aaatggattccattc

SEQ ID NO: 1497555 - DNA, 15 bp, Homo sapiens
aatggattccattcg

SEQ ID NO: 1497556 - DNA, 15 bp, Homo sapiens
atggattccattcgc

SEQ ID NO: 1497557 - DNA, 15 bp, Homo sapiens
tggattccattcgct

SEQ ID NO: 1497558 - DNA, 15 bp, Homo sapiens
ggattccattcgctt

SEQ ID NO: 1497559 - DNA, 15 bp, Homo sapiens
gattccattcgcttt

SEQ ID NO: 1497560 - DNA, 15 bp, Homo sapiens
attccattcgctttt

SEQ ID NO: 1497561 - DNA, 15 bp, Homo sapiens
ttccattcgcttttc

SEQ ID NO: 1497562 - DNA, 15 bp, Homo sapiens
tccattcgcttttcc

SEQ ID NO: 1497563 - DNA, 15 bp, Homo sapiens
ccattcgcttttcct

SEQ ID NO: 1497564 - DNA, 15 bp, Homo sapiens
cattcgcttttcctt

SEQ ID NO: 1497565 - DNA, 15 bp, Homo sapiens
attcgcttttccttt

SEQ ID NO: 1497566 - DNA, 15 bp, Homo sapiens
ttcgcttttcctttc

SEQ ID NO: 1497567 - DNA, 15 bp, Homo sapiens
tcgcttttcctttct

SEQ ID NO: 1497568 - DNA, 15 bp, Homo sapiens
cgcttttcctttctt

SEQ ID NO: 1497569 - DNA, 15 bp, Homo sapiens
gcttttcctttcttc

SEQ ID NO: 1497570 - DNA, 15 bp, Homo sapiens
cttttcctttcttcc

SEQ ID NO: 1497571 - DNA, 15 bp, Homo sapiens
ttttcctttcttcct

SEQ ID NO: 1497572 - DNA, 15 bp, Homo sapiens
tttcctttcttccta

SEQ ID NO: 1497573 - DNA, 15 bp, Homo sapiens
ttcctttcttcctag

SEQ ID NO: 1497574 - DNA, 15 bp, Homo sapiens
tcctttcttcctagg

SEQ ID NO: 1497575 - DNA, 15 bp, Homo sapiens
cctttcttcctagga

SEQ ID NO: 1497576 - DNA, 15 bp, Homo sapiens
ctttcttcctaggag

SEQ ID NO: 1497577 - DNA, 15 bp, Homo sapiens
tttcttcctaggagt

SEQ ID NO: 1497578 - DNA, 15 bp, Homo sapiens
ttcttcctaggagtc

SEQ ID NO: 1497579 - DNA, 15 bp, Homo sapiens
tcttcctaggagtcc

SEQ ID NO: 1497580 - DNA, 15 bp, Homo sapiens
cttcctaggagtcct

SEQ ID NO: 1497581 - DNA, 15 bp, Homo sapiens
ttcctaggagtcctc

SEQ ID NO: 1497582 - DNA, 15 bp, Homo sapiens
tcctaggagtcctct

SEQ ID NO: 1497583 - DNA, 15 bp, Homo sapiens
cctaggagtcctctg

SEQ ID NO: 1497584 - DNA, 15 bp, Homo sapiens
ctaggagtcctctgt

SEQ ID NO: 1497585 - DNA, 15 bp, Homo sapiens
taggagtcctctgtc

SEQ ID NO: 1497586 - DNA, 15 bp, Homo sapiens
aggagtcctctgtcc

SEQ ID NO: 1497587 - DNA, 15 bp, Homo sapiens
ggagtcctctgtccc

SEQ ID NO: 1497588 - DNA, 15 bp, Homo sapiens
gagtcctctgtccct

SEQ ID NO: 1497589 - DNA, 15 bp, Homo sapiens
agtcctctgtccctc

SEQ ID NO: 1497590 - DNA, 15 bp, Homo sapiens
gtcctctgtccctct

SEQ ID NO: 1497591 - DNA, 15 bp, Homo sapiens
tcctctgtccctctt

SEQ ID NO: 1497592 - DNA, 15 bp, Homo sapiens
cctctgtccctcttc

SEQ ID NO: 1497593 - DNA, 15 bp, Homo sapiens
ctctgtccctcttcc

SEQ ID NO: 1497594 - DNA, 15 bp, Homo sapiens
tctgtccctcttccc

SEQ ID NO: 1497595 - DNA, 15 bp, Homo sapiens
ctgtccctcttcccc

SEQ ID NO: 1497596 - DNA, 15 bp, Homo sapiens
tgtccctcttcccct

SEQ ID NO: 1497597 - DNA, 15 bp, Homo sapiens
gtccctcttcccctc

SEQ ID NO: 1497598 - DNA, 15 bp, Homo sapiens
tccctcttcccctct

SEQ ID NO: 1497599 - DNA, 15 bp, Homo sapiens
ccctcttcccctctc

SEQ ID NO: 1497600 - DNA, 15 bp, Homo sapiens
cctcttcccctctcc

SEQ ID NO: 1497601 - DNA, 15 bp, Homo sapiens
ctcttcccctctccc

SEQ ID NO: 1497602 - DNA, 15 bp, Homo sapiens
tcttcccctctcccc

SEQ ID NO: 1497603 - DNA, 15 bp, Homo sapiens
cttcccctctcccca

SEQ ID NO: 1497604 - DNA, 15 bp, Homo sapiens
ttcccctctccccat

SEQ ID NO: 1497605 - DNA, 15 bp, Homo sapiens
tcccctctccccatc

SEQ ID NO: 1497606 - DNA, 15 bp, Homo sapiens
cccctctccccatct

SEQ ID NO: 1497607 - DNA, 15 bp, Homo sapiens
ccctctccccatctc

SEQ ID NO: 1497608 - DNA, 15 bp, Homo sapiens
cctctccccatctct

SEQ ID NO: 1497609 - DNA, 15 bp, Homo sapiens
ctctccccatctctt

SEQ ID NO: 1497610 - DNA, 15 bp, Homo sapiens
tctccccatctcttt

SEQ ID NO: 1497611 - DNA, 15 bp, Homo sapiens
tccccatctctttcc

SEQ ID NO: 1497612 - DNA, 15 bp, Homo sapiens
ccccatctctttccc

SEQ ID NO: 1497613 - DNA, 15 bp, Homo sapiens
cccatctctttccct

SEQ ID NO: 1497614 - DNA, 15 bp, Homo sapiens
ccatctctttccctt

SEQ ID NO: 1497615 - DNA, 15 bp, Homo sapiens
catctctttcccttt

SEQ ID NO: 1497616 - DNA, 15 bp, Homo sapiens
atctctttccctttc

SEQ ID NO: 1497617 - DNA, 15 bp, Homo sapiens
ctctttccctttcta

SEQ ID NO: 1497618 - DNA, 15 bp, Homo sapiens
tctttccctttctac

SEQ ID NO: 1497619 - DNA, 15 bp, Homo sapiens
ctttccctttctact

SEQ ID NO: 1497620 - DNA, 15 bp, Homo sapiens
tttccctttctactc

SEQ ID NO: 1497621 - DNA, 15 bp, Homo sapiens
ttccctttctactcc

SEQ ID NO: 1497622 - DNA, 15 bp, Homo sapiens
tccctttctactccc

SEQ ID NO: 1497623 - DNA, 15 bp, Homo sapiens
ccctttctactccct

SEQ ID NO: 1497624 - DNA, 15 bp, Homo sapiens
cctttctactccctc

SEQ ID NO: 1497625 - DNA, 15 bp, Homo sapiens
ctttctactccctcc

SEQ ID NO: 1497626 - DNA, 15 bp, Homo sapiens
tttctactccctcct

SEQ ID NO: 1497627 - DNA, 15 bp, Homo sapiens
ttctactccctcctc

SEQ ID NO: 1497628 - DNA, 15 bp, Homo sapiens
tctactccctcctca

SEQ ID NO: 1497629 - DNA, 15 bp, Homo sapiens
ctactccctcctcat

SEQ ID NO: 1497630 - DNA, 15 bp, Homo sapiens
tactccctcctcatg

SEQ ID NO: 1497631 - DNA, 15 bp, Homo sapiens
actccctcctcatgt

SEQ ID NO: 1497632 - DNA, 15 bp, Homo sapiens
ctccctcctcatgtc

SEQ ID NO: 1497633 - DNA, 15 bp, Homo sapiens
tccctcctcatgtca

SEQ ID NO: 1497634 - DNA, 15 bp, Homo sapiens
ccctcctcatgtcat

SEQ ID NO: 1497635 - DNA, 15 bp, Homo sapiens
cctcctcatgtcatc

SEQ ID NO: 1497636 - DNA, 15 bp, Homo sapiens
ctcctcatgtcatct

SEQ ID NO: 1497637 - DNA, 15 bp, Homo sapiens
tcctcatgtcatctc

SEQ ID NO: 1497638 - DNA, 15 bp, Homo sapiens
cctcatgtcatctcc

SEQ ID NO: 1497639 - DNA, 15 bp, Homo sapiens
ctcatgtcatctcct

SEQ ID NO: 1497640 - DNA, 15 bp, Homo sapiens
tcatgtcatctccta

SEQ ID NO: 1497641 - DNA, 15 bp, Homo sapiens
catgtcatctcctac

SEQ ID NO: 1497642 - DNA, 15 bp, Homo sapiens
atgtcatctcctact

SEQ ID NO: 1497643 - DNA, 15 bp, Homo sapiens
tgtcatctcctactc

SEQ ID NO: 1497644 - DNA, 15 bp, Homo sapiens
gtcatctcctactct

SEQ ID NO: 1497645 - DNA, 15 bp, Homo sapiens
tcatctcctactctt

SEQ ID NO: 1497646 - DNA, 15 bp, Homo sapiens
catctcctactcttg

SEQ ID NO: 1497647 - DNA, 15 bp, Homo sapiens
atctcctactcttga

SEQ ID NO: 1497648 - DNA, 15 bp, Homo sapiens
tctcctactcttgat

SEQ ID NO: 1497649 - DNA, 15 bp, Homo sapiens
ctcctactcttgatc

SEQ ID NO: 1497650 - DNA, 15 bp, Homo sapiens
tcctactcttgatct

SEQ ID NO: 1497651 - DNA, 15 bp, Homo sapiens
cctactcttgatctc

SEQ ID NO: 1497652 - DNA, 15 bp, Homo sapiens
ctactcttgatctca

SEQ ID NO: 1497653 - DNA, 15 bp, Homo sapiens
tactcttgatctcag

SEQ ID NO: 1497654 - DNA, 15 bp, Homo sapiens
actcttgatctcaga

SEQ ID NO: 1497655 - DNA, 15 bp, Homo sapiens
ctcttgatctcagaa

SEQ ID NO: 1497656 - DNA, 15 bp, Homo sapiens
tcttgatctcagaag

SEQ ID NO: 1497657 - DNA, 15 bp, Homo sapiens
cttgatctcagaaga

SEQ ID NO: 1497658 - DNA, 15 bp, Homo sapiens
ttgatctcagaagaa

SEQ ID NO: 1497659 - DNA, 15 bp, Homo sapiens
tgatctcagaagaac

SEQ ID NO: 1497660 - DNA, 15 bp, Homo sapiens
gatctcagaagaaca

SEQ ID NO: 1497661 - DNA, 15 bp, Homo sapiens
atctcagaagaacat

SEQ ID NO: 1497662 - DNA, 15 bp, Homo sapiens
tctcagaagaacatt

SEQ ID NO: 1497663 - DNA, 15 bp, Homo sapiens
ctcagaagaacattt

SEQ ID NO: 1497664 - DNA, 15 bp, Homo sapiens
tcagaagaacatttt

SEQ ID NO: 1497665 - DNA, 15 bp, Homo sapiens
cagaagaacattttg

SEQ ID NO: 1497666 - DNA, 15 bp, Homo sapiens
agaagaacattttgg

SEQ ID NO: 1497667 - DNA, 15 bp, Homo sapiens
gaagaacattttggt

SEQ ID NO: 1497668 - DNA, 15 bp, Homo sapiens
aagaacattttggtt

SEQ ID NO: 1497669 - DNA, 15 bp, Homo sapiens
agaacattttggtta

SEQ ID NO: 1497670 - DNA, 15 bp, Homo sapiens
gaacattttggttat

SEQ ID NO: 1497671 - DNA, 15 bp, Homo sapiens
aacattttggttata

SEQ ID NO: 1497672 - DNA, 15 bp, Homo sapiens
acattttggttataa

SEQ ID NO: 1497673 - DNA, 15 bp, Homo sapiens
cattttggttataac

SEQ ID NO: 1497674 - DNA, 15 bp, Homo sapiens
attttggttataacc

SEQ ID NO: 1497675 - DNA, 15 bp, Homo sapiens
ttttggttataacct

SEQ ID NO: 1497676 - DNA, 15 bp, Homo sapiens
tttggttataacctg

SEQ ID NO: 1497677 - DNA, 15 bp, Homo sapiens
ttggttataacctgt

SEQ ID NO: 1497678 - DNA, 15 bp, Homo sapiens
tggttataacctgtt

SEQ ID NO: 1497679 - DNA, 15 bp, Homo sapiens
ggttataacctgttt

SEQ ID NO: 1497680 - DNA, 15 bp, Homo sapiens
gttataacctgttta

SEQ ID NO: 1497681 - DNA, 15 bp, Homo sapiens
ttataacctgtttat

SEQ ID NO: 1497682 - DNA, 15 bp, Homo sapiens
tataacctgtttatg

SEQ ID NO: 1497683 - DNA, 15 bp, Homo sapiens
ataacctgtttatgt

SEQ ID NO: 1497684 - DNA, 15 bp, Homo sapiens
taacctgtttatgtt

SEQ ID NO: 1497685 - DNA, 15 bp, Homo sapiens
aacctgtttatgttt

SEQ ID NO: 1497686 - DNA, 15 bp, Homo sapiens
acctgtttatgtttt

SEQ ID NO: 1497687 - DNA, 15 bp, Homo sapiens
cctgtttatgttttg

SEQ ID NO: 1497688 - DNA, 15 bp, Homo sapiens
ctgtttatgttttgc

SEQ ID NO: 1497689 - DNA, 15 bp, Homo sapiens
tgtttatgttttgcc

SEQ ID NO: 1497690 - DNA, 15 bp, Homo sapiens
gtttatgttttgcct

SEQ ID NO: 1497691 - DNA, 15 bp, Homo sapiens
tttatgttttgcctc

SEQ ID NO: 1497692 - DNA, 15 bp, Homo sapiens
ttatgttttgcctct

SEQ ID NO: 1497693 - DNA, 15 bp, Homo sapiens
tatgttttgcctctc

SEQ ID NO: 1497694 - DNA, 15 bp, Homo sapiens
atgttttgcctctca

SEQ ID NO: 1497695 - DNA, 15 bp, Homo sapiens
tgttttgcctctcag

SEQ ID NO: 1497696 - DNA, 15 bp, Homo sapiens
gttttgcctctcagg

SEQ ID NO: 1497697 - DNA, 15 bp, Homo sapiens
ttttgcctctcaggt

SEQ ID NO: 1497698 - DNA, 15 bp, Homo sapiens
tttgcctctcaggtt

SEQ ID NO: 1497699 - DNA, 15 bp, Homo sapiens
ttgcctctcaggttc

SEQ ID NO: 1497700 - DNA, 15 bp, Homo sapiens
tgcctctcaggttca

SEQ ID NO: 1497701 - DNA, 15 bp, Homo sapiens
gcctctcaggttcac

SEQ ID NO: 1497702 - DNA, 15 bp, Homo sapiens
cctctcaggttcact

SEQ ID NO: 1497703 - DNA, 15 bp, Homo sapiens
ctctcaggttcactg

SEQ ID NO: 1497704 - DNA, 15 bp, Homo sapiens
tctcaggttcactgc

SEQ ID NO: 1497705 - DNA, 15 bp, Homo sapiens
ctcaggttcactgct

SEQ ID NO: 1497706 - DNA, 15 bp, Homo sapiens
tcaggttcactgctg

SEQ ID NO: 1497707 - DNA, 15 bp, Homo sapiens
caggttcactgctgg

SEQ ID NO: 1497708 - DNA, 15 bp, Homo sapiens
aggttcactgctggc

SEQ ID NO: 1497709 - DNA, 15 bp, Homo sapiens
ggttcactgctggcc

SEQ ID NO: 1497710 - DNA, 15 bp, Homo sapiens
gttcactgctggcct

SEQ ID NO: 1497711 - DNA, 15 bp, Homo sapiens
ttcactgctggccta

SEQ ID NO: 1497712 - DNA, 15 bp, Homo sapiens
tcactgctggcctat

SEQ ID NO: 1497713 - DNA, 15 bp, Homo sapiens
cactgctggcctata

SEQ ID NO: 1497714 - DNA, 15 bp, Homo sapiens
actgctggcctataa

SEQ ID NO: 1497715 - DNA, 15 bp, Homo sapiens
ctgctggcctataat

SEQ ID NO: 1497716 - DNA, 15 bp, Homo sapiens
tgctggcctataata

SEQ ID NO: 1497717 - DNA, 15 bp, Homo sapiens
gctggcctataatac

SEQ ID NO: 1497718 - DNA, 15 bp, Homo sapiens
ctggcctataataca

SEQ ID NO: 1497719 - DNA, 15 bp, Homo sapiens
tggcctataatacaa

SEQ ID NO: 1497720 - DNA, 15 bp, Homo sapiens
ggcctataatacaac

SEQ ID NO: 1497721 - DNA, 15 bp, Homo sapiens
gcctataatacaacc

SEQ ID NO: 1497722 - DNA, 15 bp, Homo sapiens
cctataatacaacct

SEQ ID NO: 1497723 - DNA, 15 bp, Homo sapiens
ctataatacaacctc

SEQ ID NO: 1497724 - DNA, 15 bp, Homo sapiens
tataatacaacctcc

SEQ ID NO: 1497725 - DNA, 15 bp, Homo sapiens
ataatacaacctccc

SEQ ID NO: 1497726 - DNA, 15 bp, Homo sapiens
taatacaacctccca

SEQ ID NO: 1497727 - DNA, 15 bp, Homo sapiens
aatacaacctcccac

SEQ ID NO: 1497728 - DNA, 15 bp, Homo sapiens
atacaacctcccaca

SEQ ID NO: 1497729 - DNA, 15 bp, Homo sapiens
tacaacctcccacac

SEQ ID NO: 1497730 - DNA, 15 bp, Homo sapiens
acaacctcccacacc

SEQ ID NO: 1497731 - DNA, 15 bp, Homo sapiens
caacctcccacaccg

SEQ ID NO: 1497732 - DNA, 15 bp, Homo sapiens
aacctcccacaccga

SEQ ID NO: 1497733 - DNA, 15 bp, Homo sapiens
acctcccacaccgac

SEQ ID NO: 1497734 - DNA, 15 bp, Homo sapiens
cctcccacaccgacc

SEQ ID NO: 1497735 - DNA, 15 bp, Homo sapiens
ctcccacaccgacca

SEQ ID NO: 1497736 - DNA, 15 bp, Homo sapiens
tcccacaccgaccaa

SEQ ID NO: 1497737 - DNA, 15 bp, Homo sapiens
cccacaccgaccaat

SEQ ID NO: 1497738 - DNA, 15 bp, Homo sapiens
ccacaccgaccaatc

SEQ ID NO: 1497739 - DNA, 15 bp, Homo sapiens
cacaccgaccaatcc

SEQ ID NO: 1497740 - DNA, 15 bp, Homo sapiens
acaccgaccaatcct

SEQ ID NO: 1497741 - DNA, 15 bp, Homo sapiens
caccgaccaatcctc

SEQ ID NO: 1497742 - DNA, 15 bp, Homo sapiens
accgaccaatcctca

SEQ ID NO: 1497743 - DNA, 15 bp, Homo sapiens
ccgaccaatcctcac

SEQ ID NO: 1497744 - DNA, 15 bp, Homo sapiens
cgaccaatcctcacg

SEQ ID NO: 1497745 - DNA, 15 bp, Homo sapiens
gaccaatcctcacga

SEQ ID NO: 1497746 - DNA, 15 bp, Homo sapiens
accaatcctcacgat

SEQ ID NO: 1497747 - DNA, 15 bp, Homo sapiens
ccaatcctcacgatt

SEQ ID NO: 1497748 - DNA, 15 bp, Homo sapiens
caatcctcacgattg

SEQ ID NO: 1497749 - DNA, 15 bp, Homo sapiens
aatcctcacgattga

SEQ ID NO: 1497750 - DNA, 15 bp, Homo sapiens
atcctcacgattgag

SEQ ID NO: 1497751 - DNA, 15 bp, Homo sapiens
tcctcacgattgagt

SEQ ID NO: 1497752 - DNA, 15 bp, Homo sapiens
cctcacgattgagtg

SEQ ID NO: 1497753 - DNA, 15 bp, Homo sapiens
ctcacgattgagtgt

SEQ ID NO: 1497754 - DNA, 15 bp, Homo sapiens
tcacgattgagtgtc

SEQ ID NO: 1497755 - DNA, 15 bp, Homo sapiens
cacgattgagtgtca

SEQ ID NO: 1497756 - DNA, 15 bp, Homo sapiens
acgattgagtgtcaa

SEQ ID NO: 1497757 - DNA, 15 bp, Homo sapiens
cgattgagtgtcaaa

SEQ ID NO: 1497758 - DNA, 15 bp, Homo sapiens
gattgagtgtcaaag

SEQ ID NO: 1497759 - DNA, 15 bp, Homo sapiens
attgagtgtcaaaga

SEQ ID NO: 1497760 - DNA, 15 bp, Homo sapiens
ttgagtgtcaaagaa

SEQ ID NO: 1497761 - DNA, 15 bp, Homo sapiens
tgagtgtcaaagaag

SEQ ID NO: 1497762 - DNA, 15 bp, Homo sapiens
gagtgtcaaagaagg

SEQ ID NO: 1497763 - DNA, 15 bp, Homo sapiens
agtgtcaaagaaggt

SEQ ID NO: 1497764 - DNA, 15 bp, Homo sapiens
gtgtcaaagaaggta

SEQ ID NO: 1497765 - DNA, 15 bp, Homo sapiens
tgtcaaagaaggtaa

SEQ ID NO: 1497766 - DNA, 15 bp, Homo sapiens
gtcaaagaaggtaag

SEQ ID NO: 1497767 - DNA, 15 bp, Homo sapiens
tcaaagaaggtaagt

SEQ ID NO: 1497768 - DNA, 15 bp, Homo sapiens
caaagaaggtaagtt

SEQ ID NO: 1497769 - DNA, 15 bp, Homo sapiens
aaagaaggtaagttt

SEQ ID NO: 1497770 - DNA, 15 bp, Homo sapiens
aagaaggtaagtttg

SEQ ID NO: 1497771 - DNA, 15 bp, Homo sapiens
agaaggtaagtttgt

SEQ ID NO: 1497772 - DNA, 15 bp, Homo sapiens
gaaggtaagtttgtt

SEQ ID NO: 1497773 - DNA, 15 bp, Homo sapiens
aaggtaagtttgttc

SEQ ID NO: 1497774 - DNA, 15 bp, Homo sapiens
aggtaagtttgttct

SEQ ID NO: 1497775 - DNA, 15 bp, Homo sapiens
ggtaagtttgttctt

SEQ ID NO: 1497776 - DNA, 15 bp, Homo sapiens
gtaagtttgttcttt

SEQ ID NO: 1497777 - DNA, 15 bp, Homo sapiens
taagtttgttctttt

SEQ ID NO: 1497778 - DNA, 15 bp, Homo sapiens
aagtttgttcttttg

SEQ ID NO: 1497779 - DNA, 15 bp, Homo sapiens
agtttgttcttttgt

SEQ ID NO: 1497780 - DNA, 15 bp, Homo sapiens
gtttgttcttttgtg

SEQ ID NO: 1497781 - DNA, 15 bp, Homo sapiens
tttgttcttttgtgc

SEQ ID NO: 1497782 - DNA, 15 bp, Homo sapiens
ttgttcttttgtgca

SEQ ID NO: 1497783 - DNA, 15 bp, Homo sapiens
tgttcttttgtgcac

SEQ ID NO: 1497784 - DNA, 15 bp, Homo sapiens
gttcttttgtgcact

SEQ ID NO: 1497785 - DNA, 15 bp, Homo sapiens
ttcttttgtgcactt

SEQ ID NO: 1497786 - DNA, 15 bp, Homo sapiens
tcttttgtgcactta

SEQ ID NO: 1497787 - DNA, 15 bp, Homo sapiens
cttttgtgcacttaa

SEQ ID NO: 1497788 - DNA, 15 bp, Homo sapiens
ttttgtgcacttaaa

SEQ ID NO: 1497789 - DNA, 15 bp, Homo sapiens
tttgtgcacttaaaa

SEQ ID NO: 1497790 - DNA, 15 bp, Homo sapiens
ttgtgcacttaaaat

SEQ ID NO: 1497791 - DNA, 15 bp, Homo sapiens
gtgcacttaaaattt

SEQ ID NO: 1497792 - DNA, 15 bp, Homo sapiens
tgcacttaaaatttt

SEQ ID NO: 1497793 - DNA, 15 bp, Homo sapiens
gcacttaaaattttc

SEQ ID NO: 1497794 - DNA, 15 bp, Homo sapiens
cacttaaaattttct

SEQ ID NO: 1497795 - DNA, 15 bp, Homo sapiens
acttaaaattttctt

SEQ ID NO: 1497796 - DNA, 15 bp, Homo sapiens
cttaaaattttcttc

SEQ ID NO: 1497797 - DNA, 15 bp, Homo sapiens
ttaaaattttcttct

SEQ ID NO: 1497798 - DNA, 15 bp, Homo sapiens
taaaattttcttctg

SEQ ID NO: 1497799 - DNA, 15 bp, Homo sapiens
aaaattttcttctgt

SEQ ID NO: 1497800 - DNA, 15 bp, Homo sapiens
aaattttcttctgta

SEQ ID NO: 1497801 - DNA, 15 bp, Homo sapiens
aattttcttctgtac

SEQ ID NO: 1497802 - DNA, 15 bp, Homo sapiens
attttcttctgtacc

SEQ ID NO: 1497803 - DNA, 15 bp, Homo sapiens
ttttcttctgtacca

SEQ ID NO: 1497804 - DNA, 15 bp, Homo sapiens
tttcttctgtaccag

SEQ ID NO: 1497805 - DNA, 15 bp, Homo sapiens
ttcttctgtaccaga

SEQ ID NO: 1497806 - DNA, 15 bp, Homo sapiens
tcttctgtaccagac

SEQ ID NO: 1497807 - DNA, 15 bp, Homo sapiens
cttctgtaccagaca

SEQ ID NO: 1497808 - DNA, 15 bp, Homo sapiens
ttctgtaccagacat

SEQ ID NO: 1497809 - DNA, 15 bp, Homo sapiens
tctgtaccagacatg

SEQ ID NO: 1497810 - DNA, 15 bp, Homo sapiens
ctgtaccagacatga

SEQ ID NO: 1497811 - DNA, 15 bp, Homo sapiens
tgtaccagacatgac

SEQ ID NO: 1497812 - DNA, 15 bp, Homo sapiens
gtaccagacatgaca

SEQ ID NO: 1497813 - DNA, 15 bp, Homo sapiens
taccagacatgacac

SEQ ID NO: 1497814 - DNA, 15 bp, Homo sapiens
accagacatgacaca

SEQ ID NO: 1497815 - DNA, 15 bp, Homo sapiens
ccagacatgacacag

SEQ ID NO: 1497816 - DNA, 15 bp, Homo sapiens
cagacatgacacagg

SEQ ID NO: 1497817 - DNA, 15 bp, Homo sapiens
agacatgacacaggc

SEQ ID NO: 1497818 - DNA, 15 bp, Homo sapiens
gacatgacacaggcc

SEQ ID NO: 1497819 - DNA, 15 bp, Homo sapiens
acatgacacaggccc

SEQ ID NO: 1497820 - DNA, 15 bp, Homo sapiens
catgacacaggccca

SEQ ID NO: 1497821 - DNA, 15 bp, Homo sapiens
atgacacaggcccat

SEQ ID NO: 1497822 - DNA, 15 bp, Homo sapiens
tgacacaggcccatg

SEQ ID NO: 1497823 - DNA, 15 bp, Homo sapiens
gacacaggcccatgc

SEQ ID NO: 1497824 - DNA, 15 bp, Homo sapiens
acacaggcccatgct

SEQ ID NO: 1497825 - DNA, 15 bp, Homo sapiens
cacaggcccatgctg

SEQ ID NO: 1497826 - DNA, 15 bp, Homo sapiens
acaggcccatgctgt

SEQ ID NO: 1497827 - DNA, 15 bp, Homo sapiens
caggcccatgctgtt

SEQ ID NO: 1497828 - DNA, 15 bp, Homo sapiens
aggcccatgctgtta

SEQ ID NO: 1497829 - DNA, 15 bp, Homo sapiens
ggcccatgctgttaa

SEQ ID NO: 1497830 - DNA, 15 bp, Homo sapiens
gcccatgctgttaag

SEQ ID NO: 1497831 - DNA, 15 bp, Homo sapiens
cccatgctgttaagg

SEQ ID NO: 1497832 - DNA, 15 bp, Homo sapiens
ccatgctgttaaggt

SEQ ID NO: 1497833 - DNA, 15 bp, Homo sapiens
catgctgttaaggtt

SEQ ID NO: 1497834 - DNA, 15 bp, Homo sapiens
atgctgttaaggttg

SEQ ID NO: 1497835 - DNA, 15 bp, Homo sapiens
tgctgttaaggttgt

SEQ ID NO: 1497836 - DNA, 15 bp, Homo sapiens
gctgttaaggttgtt

SEQ ID NO: 1497837 - DNA, 15 bp, Homo sapiens
ctgttaaggttgttg

SEQ ID NO: 1497838 - DNA, 15 bp, Homo sapiens
tgttaaggttgttgc

SEQ ID NO: 1497839 - DNA, 15 bp, Homo sapiens
gttaaggttgttgca

SEQ ID NO: 1497840 - DNA, 15 bp, Homo sapiens
ttaaggttgttgcag

SEQ ID NO: 1497841 - DNA, 15 bp, Homo sapiens
taaggttgttgcaga

SEQ ID NO: 1497842 - DNA, 15 bp, Homo sapiens
aaggttgttgcagaa

SEQ ID NO: 1497843 - DNA, 15 bp, Homo sapiens
aggttgttgcagaaa

SEQ ID NO: 1497844 - DNA, 15 bp, Homo sapiens
ggttgttgcagaaaa

SEQ ID NO: 1497845 - DNA, 15 bp, Homo sapiens
gttgttgcagaaaac

SEQ ID NO: 1497846 - DNA, 15 bp, Homo sapiens
ttgttgcagaaaacc

SEQ ID NO: 1497847 - DNA, 15 bp, Homo sapiens
tgttgcagaaaacca

SEQ ID NO: 1497848 - DNA, 15 bp, Homo sapiens
gttgcagaaaaccag

SEQ ID NO: 1497849 - DNA, 15 bp, Homo sapiens
ttgcagaaaaccagc

SEQ ID NO: 1497850 - DNA, 15 bp, Homo sapiens
tgcagaaaaccagct

SEQ ID NO: 1497851 - DNA, 15 bp, Homo sapiens
gcagaaaaccagctt

SEQ ID NO: 1497852 - DNA, 15 bp, Homo sapiens
cagaaaaccagcttg

SEQ ID NO: 1497853 - DNA, 15 bp, Homo sapiens
agaaaaccagcttgc

SEQ ID NO: 1497854 - DNA, 15 bp, Homo sapiens
gaaaaccagcttgcg

SEQ ID NO: 1497855 - DNA, 15 bp, Homo sapiens
aaaaccagcttgcgt

SEQ ID NO: 1497856 - DNA, 15 bp, Homo sapiens
aaaccagcttgcgtg

SEQ ID NO: 1497857 - DNA, 15 bp, Homo sapiens
aaccagcttgcgtgt

SEQ ID NO: 1497858 - DNA, 15 bp, Homo sapiens
accagcttgcgtgtt

SEQ ID NO: 1497859 - DNA, 15 bp, Homo sapiens
ccagcttgcgtgttc

SEQ ID NO: 1497860 - DNA, 15 bp, Homo sapiens
cagcttgcgtgttcc

SEQ ID NO: 1497861 - DNA, 15 bp, Homo sapiens
agcttgcgtgttcca

SEQ ID NO: 1497862 - DNA, 15 bp, Homo sapiens
gcttgcgtgttccac

SEQ ID NO: 1497863 - DNA, 15 bp, Homo sapiens
cttgcgtgttccact

SEQ ID NO: 1497864 - DNA, 15 bp, Homo sapiens
ttgcgtgttccactc

SEQ ID NO: 1497865 - DNA, 15 bp, Homo sapiens
tgcgtgttccactca

SEQ ID NO: 1497866 - DNA, 15 bp, Homo sapiens
gcgtgttccactcaa

SEQ ID NO: 1497867 - DNA, 15 bp, Homo sapiens
cgtgttccactcaac

SEQ ID NO: 1497868 - DNA, 15 bp, Homo sapiens
gtgttccactcaact

SEQ ID NO: 1497869 - DNA, 15 bp, Homo sapiens
tgttccactcaactt

SEQ ID NO: 1497870 - DNA, 15 bp, Homo sapiens
gttccactcaacttt

SEQ ID NO: 1497871 - DNA, 15 bp, Homo sapiens
ttccactcaactttt

SEQ ID NO: 1497872 - DNA, 15 bp, Homo sapiens
tccactcaacttttc

SEQ ID NO: 1497873 - DNA, 15 bp, Homo sapiens
ccactcaacttttcc

SEQ ID NO: 1497874 - DNA, 15 bp, Homo sapiens
cactcaacttttcct

SEQ ID NO: 1497875 - DNA, 15 bp, Homo sapiens
actcaacttttccta

SEQ ID NO: 1497876 - DNA, 15 bp, Homo sapiens
ctcaacttttcctag

SEQ ID NO: 1497877 - DNA, 15 bp, Homo sapiens
tcaacttttcctagc

SEQ ID NO: 1497878 - DNA, 15 bp, Homo sapiens
caacttttcctagca

SEQ ID NO: 1497879 - DNA, 15 bp, Homo sapiens
aacttttcctagcat

SEQ ID NO: 1497880 - DNA, 15 bp, Homo sapiens
acttttcctagcata

SEQ ID NO: 1497881 - DNA, 15 bp, Homo sapiens
cttttcctagcatac

SEQ ID NO: 1497882 - DNA, 15 bp, Homo sapiens
ttttcctagcataca

SEQ ID NO: 1497883 - DNA, 15 bp, Homo sapiens
tttcctagcatacaa

SEQ ID NO: 1497884 - DNA, 15 bp, Homo sapiens
ttcctagcatacaaa

SEQ ID NO: 1497885 - DNA, 15 bp, Homo sapiens
tcctagcatacaaag

SEQ ID NO: 1497886 - DNA, 15 bp, Homo sapiens
cctagcatacaaaga

SEQ ID NO: 1497887 - DNA, 15 bp, Homo sapiens
ctagcatacaaagac

SEQ ID NO: 1497888 - DNA, 15 bp, Homo sapiens
tagcatacaaagaca

SEQ ID NO: 1497889 - DNA, 15 bp, Homo sapiens
agcatacaaagacaa

SEQ ID NO: 1497890 - DNA, 15 bp, Homo sapiens
gcatacaaagacaag

SEQ ID NO: 1497891 - DNA, 15 bp, Homo sapiens
catacaaagacaagc

SEQ ID NO: 1497892 - DNA, 15 bp, Homo sapiens
atacaaagacaagcc

SEQ ID NO: 1497893 - DNA, 15 bp, Homo sapiens
tacaaagacaagcca

SEQ ID NO: 1497894 - DNA, 15 bp, Homo sapiens
acaaagacaagccaa

SEQ ID NO: 1497895 - DNA, 15 bp, Homo sapiens
caaagacaagccaaa

SEQ ID NO: 1497896 - DNA, 15 bp, Homo sapiens
aaagacaagccaaaa

SEQ ID NO: 1497897 - DNA, 15 bp, Homo sapiens
aagacaagccaaaat

SEQ ID NO: 1497898 - DNA, 15 bp, Homo sapiens
agacaagccaaaatt

SEQ ID NO: 1497899 - DNA, 15 bp, Homo sapiens
gacaagccaaaattt

SEQ ID NO: 1497900 - DNA, 15 bp, Homo sapiens
acaagccaaaatttt

SEQ ID NO: 1497901 - DNA, 15 bp, Homo sapiens
caagccaaaattttc

SEQ ID NO: 1497902 - DNA, 15 bp, Homo sapiens
aagccaaaattttcg

SEQ ID NO: 1497903 - DNA, 15 bp, Homo sapiens
agccaaaattttcgc

SEQ ID NO: 1497904 - DNA, 15 bp, Homo sapiens
gccaaaattttcgcc

SEQ ID NO: 1497905 - DNA, 15 bp, Homo sapiens
ccaaaattttcgcca

SEQ ID NO: 1497906 - DNA, 15 bp, Homo sapiens
caaaattttcgccac

SEQ ID NO: 1497907 - DNA, 15 bp, Homo sapiens
aaaattttcgccact

SEQ ID NO: 1497908 - DNA, 15 bp, Homo sapiens
aaattttcgccactt

SEQ ID NO: 1497909 - DNA, 15 bp, Homo sapiens
aattttcgccacttg

SEQ ID NO: 1497910 - DNA, 15 bp, Homo sapiens
attttcgccacttgt

SEQ ID NO: 1497911 - DNA, 15 bp, Homo sapiens
ttttcgccacttgtg

SEQ ID NO: 1497912 - DNA, 15 bp, Homo sapiens
tttcgccacttgtgc

SEQ ID NO: 1497913 - DNA, 15 bp, Homo sapiens
ttcgccacttgtgct

SEQ ID NO: 1497914 - DNA, 15 bp, Homo sapiens
tcgccacttgtgcta

SEQ ID NO: 1497915 - DNA, 15 bp, Homo sapiens
cgccacttgtgctac

SEQ ID NO: 1497916 - DNA, 15 bp, Homo sapiens
gccacttgtgctacc

SEQ ID NO: 1497917 - DNA, 15 bp, Homo sapiens
ccacttgtgctacca

SEQ ID NO: 1497918 - DNA, 15 bp, Homo sapiens
cacttgtgctaccag

SEQ ID NO: 1497919 - DNA, 15 bp, Homo sapiens
acttgtgctaccagt

SEQ ID NO: 1497920 - DNA, 15 bp, Homo sapiens
cttgtgctaccagtt

SEQ ID NO: 1497921 - DNA, 15 bp, Homo sapiens
ttgtgctaccagttg

SEQ ID NO: 1497922 - DNA, 15 bp, Homo sapiens
tgtgctaccagttgc

SEQ ID NO: 1497923 - DNA, 15 bp, Homo sapiens
gtgctaccagttgca

SEQ ID NO: 1497924 - DNA, 15 bp, Homo sapiens
tgctaccagttgcaa

SEQ ID NO: 1497925 - DNA, 15 bp, Homo sapiens
gctaccagttgcaaa

SEQ ID NO: 1497926 - DNA, 15 bp, Homo sapiens
ctaccagttgcaaaa

SEQ ID NO: 1497927 - DNA, 15 bp, Homo sapiens
taccagttgcaaaaa

SEQ ID NO: 1497928 - DNA, 15 bp, Homo sapiens
accagttgcaaaaat

SEQ ID NO: 1497929 - DNA, 15 bp, Homo sapiens
ccagttgcaaaaata

SEQ ID NO: 1497930 - DNA, 15 bp, Homo sapiens
cagttgcaaaaatac

SEQ ID NO: 1497931 - DNA, 15 bp, Homo sapiens
agttgcaaaaataca

SEQ ID NO: 1497932 - DNA, 15 bp, Homo sapiens
gttgcaaaaatacag

SEQ ID NO: 1497933 - DNA, 15 bp, Homo sapiens
ttgcaaaaatacagt

SEQ ID NO: 1497934 - DNA, 15 bp, Homo sapiens
tgcaaaaatacagta

SEQ ID NO: 1497935 - DNA, 15 bp, Homo sapiens
gcaaaaatacagtaa

SEQ ID NO: 1497936 - DNA, 15 bp, Homo sapiens
caaaaatacagtaaa

SEQ ID NO: 1497937 - DNA, 15 bp, Homo sapiens
aaaaatacagtaaag

SEQ ID NO: 1497938 - DNA, 15 bp, Homo sapiens
aaaatacagtaaaga

SEQ ID NO: 1497939 - DNA, 15 bp, Homo sapiens
aaatacagtaaagaa

SEQ ID NO: 1497940 - DNA, 15 bp, Homo sapiens
aatacagtaaagaaa

SEQ ID NO: 1497941 - DNA, 15 bp, Homo sapiens
atacagtaaagaaag

SEQ ID NO: 1497942 - DNA, 15 bp, Homo sapiens
tacagtaaagaaagt

SEQ ID NO: 1497943 - DNA, 15 bp, Homo sapiens
acagtaaagaaagtt

SEQ ID NO: 1497944 - DNA, 15 bp, Homo sapiens
cagtaaagaaagttt

SEQ ID NO: 1497945 - DNA, 15 bp, Homo sapiens
agtaaagaaagtttt

SEQ ID NO: 1497946 - DNA, 15 bp, Homo sapiens
gtaaagaaagtttta

SEQ ID NO: 1497947 - DNA, 15 bp, Homo sapiens
taaagaaagttttac

SEQ ID NO: 1497948 - DNA, 15 bp, Homo sapiens
aaagaaagttttaca

SEQ ID NO: 1497949 - DNA, 15 bp, Homo sapiens
aagaaagttttacag

SEQ ID NO: 1497950 - DNA, 15 bp, Homo sapiens
agaaagttttacagt

SEQ ID NO: 1497951 - DNA, 15 bp, Homo sapiens
gaaagttttacagta

SEQ ID NO: 1497952 - DNA, 15 bp, Homo sapiens
aaagttttacagtat

SEQ ID NO: 1497953 - DNA, 15 bp, Homo sapiens
aagttttacagtatc

SEQ ID NO: 1497954 - DNA, 15 bp, Homo sapiens
agttttacagtatct

SEQ ID NO: 1497955 - DNA, 15 bp, Homo sapiens
gttttacagtatctt

SEQ ID NO: 1497956 - DNA, 15 bp, Homo sapiens
ttttacagtatcttg

SEQ ID NO: 1497957 - DNA, 15 bp, Homo sapiens
tttacagtatcttgt

SEQ ID NO: 1497958 - DNA, 15 bp, Homo sapiens
ttacagtatcttgta

SEQ ID NO: 1497959 - DNA, 15 bp, Homo sapiens
tacagtatcttgtaa

SEQ ID NO: 1497960 - DNA, 15 bp, Homo sapiens
acagtatcttgtaat

SEQ ID NO: 1497961 - DNA, 15 bp, Homo sapiens
cagtatcttgtaata

SEQ ID NO: 1497962 - DNA, 15 bp, Homo sapiens
agtatcttgtaataa

SEQ ID NO: 1497963 - DNA, 15 bp, Homo sapiens
gtatcttgtaataat

SEQ ID NO: 1497964 - DNA, 15 bp, Homo sapiens
tatcttgtaataata

SEQ ID NO: 1497965 - DNA, 15 bp, Homo sapiens
atcttgtaataatat

SEQ ID NO: 1497966 - DNA, 15 bp, Homo sapiens
tcttgtaataatatc

SEQ ID NO: 1497967 - DNA, 15 bp, Homo sapiens
cttgtaataatatca

SEQ ID NO: 1497968 - DNA, 15 bp, Homo sapiens
ttgtaataatatcac

SEQ ID NO: 1497969 - DNA, 15 bp, Homo sapiens
tgtaataatatcaca

SEQ ID NO: 1497970 - DNA, 15 bp, Homo sapiens
gtaataatatcacaa

SEQ ID NO: 1497971 - DNA, 15 bp, Homo sapiens
taataatatcacaaa

SEQ ID NO: 1497972 - DNA, 15 bp, Homo sapiens
aataatatcacaaag

SEQ ID NO: 1497973 - DNA, 15 bp, Homo sapiens
ataatatcacaaaga

SEQ ID NO: 1497974 - DNA, 15 bp, Homo sapiens
taatatcacaaagat

SEQ ID NO: 1497975 - DNA, 15 bp, Homo sapiens
aatatcacaaagata

SEQ ID NO: 1497976 - DNA, 15 bp, Homo sapiens
atatcacaaagatac

SEQ ID NO: 1497977 - DNA, 15 bp, Homo sapiens
tatcacaaagataca

SEQ ID NO: 1497978 - DNA, 15 bp, Homo sapiens
atcacaaagatacaa

SEQ ID NO: 1497979 - DNA, 15 bp, Homo sapiens
tcacaaagatacaac

SEQ ID NO: 1497980 - DNA, 15 bp, Homo sapiens
cacaaagatacaact

SEQ ID NO: 1497981 - DNA, 15 bp, Homo sapiens
acaaagatacaactt

SEQ ID NO: 1497982 - DNA, 15 bp, Homo sapiens
caaagatacaacttg

SEQ ID NO: 1497983 - DNA, 15 bp, Homo sapiens
aaagatacaacttga

SEQ ID NO: 1497984 - DNA, 15 bp, Homo sapiens
aagatacaacttgaa

SEQ ID NO: 1497985 - DNA, 15 bp, Homo sapiens
agatacaacttgaag

SEQ ID NO: 1497986 - DNA, 15 bp, Homo sapiens
gatacaacttgaagt

SEQ ID NO: 1497987 - DNA, 15 bp, Homo sapiens
atacaacttgaagtt

SEQ ID NO: 1497988 - DNA, 15 bp, Homo sapiens
tacaacttgaagttg

SEQ ID NO: 1497989 - DNA, 15 bp, Homo sapiens
acaacttgaagttgt

SEQ ID NO: 1497990 - DNA, 15 bp, Homo sapiens
caacttgaagttgtc

SEQ ID NO: 1497991 - DNA, 15 bp, Homo sapiens
aacttgaagttgtca

SEQ ID NO: 1497992 - DNA, 15 bp, Homo sapiens
acttgaagttgtcac

SEQ ID NO: 1497993 - DNA, 15 bp, Homo sapiens
cttgaagttgtcact

SEQ ID NO: 1497994 - DNA, 15 bp, Homo sapiens
ttgaagttgtcactc

SEQ ID NO: 1497995 - DNA, 15 bp, Homo sapiens
tgaagttgtcactcc

SEQ ID NO: 1497996 - DNA, 15 bp, Homo sapiens
gaagttgtcactcca

SEQ ID NO: 1497997 - DNA, 15 bp, Homo sapiens
aagttgtcactccat

SEQ ID NO: 1497998 - DNA, 15 bp, Homo sapiens
agttgtcactccatg

SEQ ID NO: 1497999 - DNA, 15 bp, Homo sapiens
gttgtcactccatgc

SEQ ID NO: 1498000 - DNA, 15 bp, Homo sapiens
ttgtcactccatgca

SEQ ID NO: 1498001 - DNA, 15 bp, Homo sapiens
tgtcactccatgcag

SEQ ID NO: 1498002 - DNA, 15 bp, Homo sapiens
gtcactccatgcagg

SEQ ID NO: 1498003 - DNA, 15 bp, Homo sapiens
tcactccatgcagga

SEQ ID NO: 1498004 - DNA, 15 bp, Homo sapiens
cactccatgcaggaa

SEQ ID NO: 1498005 - DNA, 15 bp, Homo sapiens
actccatgcaggaaa

SEQ ID NO: 1498006 - DNA, 15 bp, Homo sapiens
ctccatgcaggaaaa

SEQ ID NO: 1498007 - DNA, 15 bp, Homo sapiens
tccatgcaggaaaac

SEQ ID NO: 1498008 - DNA, 15 bp, Homo sapiens
ccatgcaggaaaaca

SEQ ID NO: 1498009 - DNA, 15 bp, Homo sapiens
catgcaggaaaacat

SEQ ID NO: 1498010 - DNA, 15 bp, Homo sapiens
atgcaggaaaacatg

SEQ ID NO: 1498011 - DNA, 15 bp, Homo sapiens
tgcaggaaaacatgt

SEQ ID NO: 1498012 - DNA, 15 bp, Homo sapiens
gcaggaaaacatgtt

SEQ ID NO: 1498013 - DNA, 15 bp, Homo sapiens
caggaaaacatgtta

SEQ ID NO: 1498014 - DNA, 15 bp, Homo sapiens
aggaaaacatgttac

SEQ ID NO: 1498015 - DNA, 15 bp, Homo sapiens
ggaaaacatgttact

SEQ ID NO: 1498016 - DNA, 15 bp, Homo sapiens
gaaaacatgttactt

SEQ ID NO: 1498017 - DNA, 15 bp, Homo sapiens
aaaacatgttacttt

SEQ ID NO: 1498018 - DNA, 15 bp, Homo sapiens
aaacatgttactttt

SEQ ID NO: 1498019 - DNA, 15 bp, Homo sapiens
aacatgttactttta

SEQ ID NO: 1498020 - DNA, 15 bp, Homo sapiens
acatgttacttttag

SEQ ID NO: 1498021 - DNA, 15 bp, Homo sapiens
catgttacttttaga

SEQ ID NO: 1498022 - DNA, 15 bp, Homo sapiens
atgttacttttagaa

SEQ ID NO: 1498023 - DNA, 15 bp, Homo sapiens
tgttacttttagaaa

SEQ ID NO: 1498024 - DNA, 15 bp, Homo sapiens
gttacttttagaaaa

SEQ ID NO: 1498025 - DNA, 15 bp, Homo sapiens
ttacttttagaaaaa

SEQ ID NO: 1498026 - DNA, 15 bp, Homo sapiens
tacttttagaaaaaa

SEQ ID NO: 1498027 - DNA, 15 bp, Homo sapiens
acttttagaaaaaaa

SEQ ID NO: 1498028 - DNA, 15 bp, Homo sapiens
cttttagaaaaaaat

SEQ ID NO: 1498029 - DNA, 15 bp, Homo sapiens
ttttagaaaaaaatg

SEQ ID NO: 1498030 - DNA, 15 bp, Homo sapiens
tttagaaaaaaatga

SEQ ID NO: 1498031 - DNA, 15 bp, Homo sapiens
ttagaaaaaaatgaa

SEQ ID NO: 1498032 - DNA, 15 bp, Homo sapiens
tagaaaaaaatgaat

SEQ ID NO: 1498033 - DNA, 15 bp, Homo sapiens
agaaaaaaatgaatg

SEQ ID NO: 1498034 - DNA, 15 bp, Homo sapiens
gaaaaaaatgaatgc

SEQ ID NO: 1498035 - DNA, 15 bp, Homo sapiens
aaaaaaatgaatgct

SEQ ID NO: 1498036 - DNA, 15 bp, Homo sapiens
aaaaaatgaatgctg

SEQ ID NO: 1498037 - DNA, 15 bp, Homo sapiens
aaaaatgaatgctgc

SEQ ID NO: 1498038 - DNA, 15 bp, Homo sapiens
aaaatgaatgctgct

SEQ ID NO: 1498039 - DNA, 15 bp, Homo sapiens
aaatgaatgctgctt

SEQ ID NO: 1498040 - DNA, 15 bp, Homo sapiens
aatgaatgctgctta

SEQ ID NO: 1498041 - DNA, 15 bp, Homo sapiens
atgaatgctgcttac

SEQ ID NO: 1498042 - DNA, 15 bp, Homo sapiens
tgaatgctgcttact

SEQ ID NO: 1498043 - DNA, 15 bp, Homo sapiens
gaatgctgcttactt

SEQ ID NO: 1498044 - DNA, 15 bp, Homo sapiens
aatgctgcttacttt

SEQ ID NO: 1498045 - DNA, 15 bp, Homo sapiens
atgctgcttactttc

SEQ ID NO: 1498046 - DNA, 15 bp, Homo sapiens
tgctgcttactttca

SEQ ID NO: 1498047 - DNA, 15 bp, Homo sapiens
gctgcttactttcaa

SEQ ID NO: 1498048 - DNA, 15 bp, Homo sapiens
ctgcttactttcaaa

SEQ ID NO: 1498049 - DNA, 15 bp, Homo sapiens
tgcttactttcaaag

SEQ ID NO: 1498050 - DNA, 15 bp, Homo sapiens
gcttactttcaaagt

SEQ ID NO: 1498051 - DNA, 15 bp, Homo sapiens
cttactttcaaagtt

SEQ ID NO: 1498052 - DNA, 15 bp, Homo sapiens
ttactttcaaagttg

SEQ ID NO: 1498053 - DNA, 15 bp, Homo sapiens
tactttcaaagttga

SEQ ID NO: 1498054 - DNA, 15 bp, Homo sapiens
actttcaaagttgaa

SEQ ID NO: 1498055 - DNA, 15 bp, Homo sapiens
ctttcaaagttgaaa

SEQ ID NO: 1498056 - DNA, 15 bp, Homo sapiens
tttcaaagttgaaag

SEQ ID NO: 1498057 - DNA, 15 bp, Homo sapiens
ttcaaagttgaaagt

SEQ ID NO: 1498058 - DNA, 15 bp, Homo sapiens
tcaaagttgaaagtt

SEQ ID NO: 1498059 - DNA, 15 bp, Homo sapiens
caaagttgaaagttg

SEQ ID NO: 1498060 - DNA, 15 bp, Homo sapiens
aaagttgaaagttgg

SEQ ID NO: 1498061 - DNA, 15 bp, Homo sapiens
aagttgaaagttggg

SEQ ID NO: 1498062 - DNA, 15 bp, Homo sapiens
agttgaaagttggga

SEQ ID NO: 1498063 - DNA, 15 bp, Homo sapiens
gttgaaagttgggag

SEQ ID NO: 1498064 - DNA, 15 bp, Homo sapiens
ttgaaagttgggagt

SEQ ID NO: 1498065 - DNA, 15 bp, Homo sapiens
tgaaagttgggagtt

SEQ ID NO: 1498066 - DNA, 15 bp, Homo sapiens
gaaagttgggagttt

SEQ ID NO: 1498067 - DNA, 15 bp, Homo sapiens
aaagttgggagtttt

SEQ ID NO: 1498068 - DNA, 15 bp, Homo sapiens
aagttgggagttttc

SEQ ID NO: 1498069 - DNA, 15 bp, Homo sapiens
agttgggagttttct

SEQ ID NO: 1498070 - DNA, 15 bp, Homo sapiens
gttgggagttttctc

SEQ ID NO: 1498071 - DNA, 15 bp, Homo sapiens
ttgggagttttctct

SEQ ID NO: 1498072 - DNA, 15 bp, Homo sapiens
tgggagttttctctg

SEQ ID NO: 1498073 - DNA, 15 bp, Homo sapiens
gggagttttctctga

SEQ ID NO: 1498074 - DNA, 15 bp, Homo sapiens
ggagttttctctgat

SEQ ID NO: 1498075 - DNA, 15 bp, Homo sapiens
gagttttctctgatg

SEQ ID NO: 1498076 - DNA, 15 bp, Homo sapiens
agttttctctgatga

SEQ ID NO: 1498077 - DNA, 15 bp, Homo sapiens
gttttctctgatgaa

SEQ ID NO: 1498078 - DNA, 15 bp, Homo sapiens
ttttctctgatgaaa

SEQ ID NO: 1498079 - DNA, 15 bp, Homo sapiens
tttctctgatgaaaa

SEQ ID NO: 1498080 - DNA, 15 bp, Homo sapiens
ttctctgatgaaaat

SEQ ID NO: 1498081 - DNA, 15 bp, Homo sapiens
tctctgatgaaaata

SEQ ID NO: 1498082 - DNA, 15 bp, Homo sapiens
ctctgatgaaaataa

SEQ ID NO: 1498083 - DNA, 15 bp, Homo sapiens
tctgatgaaaataat

SEQ ID NO: 1498084 - DNA, 15 bp, Homo sapiens
ctgatgaaaataatg

SEQ ID NO: 1498085 - DNA, 15 bp, Homo sapiens
tgatgaaaataatga

SEQ ID NO: 1498086 - DNA, 15 bp, Homo sapiens
gatgaaaataatgaa

SEQ ID NO: 1498087 - DNA, 15 bp, Homo sapiens
atgaaaataatgaaa

SEQ ID NO: 1498088 - DNA, 15 bp, Homo sapiens
tgaaaataatgaaat

SEQ ID NO: 1498089 - DNA, 15 bp, Homo sapiens
gaaaataatgaaatg

SEQ ID NO: 1498090 - DNA, 15 bp, Homo sapiens
aaaataatgaaatga

SEQ ID NO: 1498091 - DNA, 15 bp, Homo sapiens
aaataatgaaatgaa

SEQ ID NO: 1498092 - DNA, 15 bp, Homo sapiens
aataatgaaatgaag

SEQ ID NO: 1498093 - DNA, 15 bp, Homo sapiens
ataatgaaatgaaga

SEQ ID NO: 1498094 - DNA, 15 bp, Homo sapiens
taatgaaatgaagag

SEQ ID NO: 1498095 - DNA, 15 bp, Homo sapiens
aatgaaatgaagagt

SEQ ID NO: 1498096 - DNA, 15 bp, Homo sapiens
atgaaatgaagagtt

SEQ ID NO: 1498097 - DNA, 15 bp, Homo sapiens
tgaaatgaagagttc

SEQ ID NO: 1498098 - DNA, 15 bp, Homo sapiens
gaaatgaagagttca

SEQ ID NO: 1498099 - DNA, 15 bp, Homo sapiens
aaatgaagagttcaa

SEQ ID NO: 1498100 - DNA, 15 bp, Homo sapiens
aatgaagagttcaag

SEQ ID NO: 1498101 - DNA, 15 bp, Homo sapiens
atgaagagttcaagg

SEQ ID NO: 1498102 - DNA, 15 bp, Homo sapiens
tgaagagttcaagga

SEQ ID NO: 1498103 - DNA, 15 bp, Homo sapiens
gaagagttcaaggat

SEQ ID NO: 1498104 - DNA, 15 bp, Homo sapiens
aagagttcaaggatt

SEQ ID NO: 1498105 - DNA, 15 bp, Homo sapiens
agagttcaaggattc

SEQ ID NO: 1498106 - DNA, 15 bp, Homo sapiens
gagttcaaggattcc

SEQ ID NO: 1498107 - DNA, 15 bp, Homo sapiens
agttcaaggattcca

SEQ ID NO: 1498108 - DNA, 15 bp, Homo sapiens
gttcaaggattccag

SEQ ID NO: 1498109 - DNA, 15 bp, Homo sapiens
ttcaaggattccagc

SEQ ID NO: 1498110 - DNA, 15 bp, Homo sapiens
tcaaggattccagca

SEQ ID NO: 1498111 - DNA, 15 bp, Homo sapiens
caaggattccagcat

SEQ ID NO: 1498112 - DNA, 15 bp, Homo sapiens
aaggattccagcatg

SEQ ID NO: 1498113 - DNA, 15 bp, Homo sapiens
aggattccagcatgt

SEQ ID NO: 1498114 - DNA, 15 bp, Homo sapiens
ggattccagcatgtc

SEQ ID NO: 1498115 - DNA, 15 bp, Homo sapiens
gattccagcatgtct

SEQ ID NO: 1498116 - DNA, 15 bp, Homo sapiens
attccagcatgtcta

SEQ ID NO: 1498117 - DNA, 15 bp, Homo sapiens
ttccagcatgtctac

SEQ ID NO: 1498118 - DNA, 15 bp, Homo sapiens
tccagcatgtctacc

SEQ ID NO: 1498119 - DNA, 15 bp, Homo sapiens
ccagcatgtctacct

SEQ ID NO: 1498120 - DNA, 15 bp, Homo sapiens
cagcatgtctacctt

SEQ ID NO: 1498121 - DNA, 15 bp, Homo sapiens
agcatgtctaccttt

SEQ ID NO: 1498122 - DNA, 15 bp, Homo sapiens
gcatgtctaccttta

SEQ ID NO: 1498123 - DNA, 15 bp, Homo sapiens
catgtctacctttaa

SEQ ID NO: 1498124 - DNA, 15 bp, Homo sapiens
atgtctacctttaaa

SEQ ID NO: 1498125 - DNA, 15 bp, Homo sapiens
tgtctacctttaaag

SEQ ID NO: 1498126 - DNA, 15 bp, Homo sapiens
gtctacctttaaagg

SEQ ID NO: 1498127 - DNA, 15 bp, Homo sapiens
tctacctttaaaggt

SEQ ID NO: 1498128 - DNA, 15 bp, Homo sapiens
ctacctttaaaggtt

SEQ ID NO: 1498129 - DNA, 15 bp, Homo sapiens
tacctttaaaggttt

SEQ ID NO: 1498130 - DNA, 15 bp, Homo sapiens
acctttaaaggtttt

SEQ ID NO: 1498131 - DNA, 15 bp, Homo sapiens
cctttaaaggttttt

SEQ ID NO: 1498132 - DNA, 15 bp, Homo sapiens
ctttaaaggtttttt

SEQ ID NO: 1498133 - DNA, 15 bp, Homo sapiens
tttaaaggttttttt

SEQ ID NO: 1498134 - DNA, 15 bp, Homo sapiens
ttaaaggtttttttc

SEQ ID NO: 1498135 - DNA, 15 bp, Homo sapiens
taaaggtttttttcc

SEQ ID NO: 1498136 - DNA, 15 bp, Homo sapiens
aaaggtttttttcct

SEQ ID NO: 1498137 - DNA, 15 bp, Homo sapiens
aaggtttttttccta

SEQ ID NO: 1498138 - DNA, 15 bp, Homo sapiens
aggtttttttcctaa

SEQ ID NO: 1498139 - DNA, 15 bp, Homo sapiens
ggtttttttcctaag

SEQ ID NO: 1498140 - DNA, 15 bp, Homo sapiens
gtttttttcctaaga

SEQ ID NO: 1498141 - DNA, 15 bp, Homo sapiens
tttttttcctaagaa

SEQ ID NO: 1498142 - DNA, 15 bp, Homo sapiens
ttttttcctaagaaa

SEQ ID NO: 1498143 - DNA, 15 bp, Homo sapiens
tttttcctaagaaat

SEQ ID NO: 1498144 - DNA, 15 bp, Homo sapiens
ttttcctaagaaatt

SEQ ID NO: 1498145 - DNA, 15 bp, Homo sapiens
tttcctaagaaattt

SEQ ID NO: 1498146 - DNA, 15 bp, Homo sapiens
ttcctaagaaatttt

SEQ ID NO: 1498147 - DNA, 15 bp, Homo sapiens
tcctaagaaatttta

SEQ ID NO: 1498148 - DNA, 15 bp, Homo sapiens
cctaagaaattttag

SEQ ID NO: 1498149 - DNA, 15 bp, Homo sapiens
ctaagaaattttagc

SEQ ID NO: 1498150 - DNA, 15 bp, Homo sapiens
taagaaattttagca

SEQ ID NO: 1498151 - DNA, 15 bp, Homo sapiens
aagaaattttagcag

SEQ ID NO: 1498152 - DNA, 15 bp, Homo sapiens
agaaattttagcagc

SEQ ID NO: 1498153 - DNA, 15 bp, Homo sapiens
gaaattttagcagcc

SEQ ID NO: 1498154 - DNA, 15 bp, Homo sapiens
aaattttagcagccg

SEQ ID NO: 1498155 - DNA, 15 bp, Homo sapiens
aattttagcagccgg

SEQ ID NO: 1498156 - DNA, 15 bp, Homo sapiens
attttagcagccggt

SEQ ID NO: 1498157 - DNA, 15 bp, Homo sapiens
ttttagcagccggtc

SEQ ID NO: 1498158 - DNA, 15 bp, Homo sapiens
tttagcagccggtca

SEQ ID NO: 1498159 - DNA, 15 bp, Homo sapiens
ttagcagccggtcat

SEQ ID NO: 1498160 - DNA, 15 bp, Homo sapiens
tagcagccggtcatg

SEQ ID NO: 1498161 - DNA, 15 bp, Homo sapiens
agcagccggtcatgc

SEQ ID NO: 1498162 - DNA, 15 bp, Homo sapiens
gcagccggtcatgct

SEQ ID NO: 1498163 - DNA, 15 bp, Homo sapiens
cagccggtcatgctg

SEQ ID NO: 1498164 - DNA, 15 bp, Homo sapiens
agccggtcatgctgg

SEQ ID NO: 1498165 - DNA, 15 bp, Homo sapiens
gccggtcatgctggc

SEQ ID NO: 1498166 - DNA, 15 bp, Homo sapiens
ccggtcatgctggct

SEQ ID NO: 1498167 - DNA, 15 bp, Homo sapiens
cggtcatgctggctc

SEQ ID NO: 1498168 - DNA, 15 bp, Homo sapiens
ggtcatgctggctca

SEQ ID NO: 1498169 - DNA, 15 bp, Homo sapiens
gtcatgctggctcac

SEQ ID NO: 1498170 - DNA, 15 bp, Homo sapiens
tcatgctggctcaca

SEQ ID NO: 1498171 - DNA, 15 bp, Homo sapiens
catgctggctcacac

SEQ ID NO: 1498172 - DNA, 15 bp, Homo sapiens
atgctggctcacacc

SEQ ID NO: 1498173 - DNA, 15 bp, Homo sapiens
tgctggctcacacct

SEQ ID NO: 1498174 - DNA, 15 bp, Homo sapiens
gctggctcacacctg

SEQ ID NO: 1498175 - DNA, 15 bp, Homo sapiens
ctggctcacacctgt

SEQ ID NO: 1498176 - DNA, 15 bp, Homo sapiens
cctgtaatcccagcg

SEQ ID NO: 1498177 - DNA, 15 bp, Homo sapiens
ctgtaatcccagcgc

SEQ ID NO: 1498178 - DNA, 15 bp, Homo sapiens
tgtaatcccagcgct

SEQ ID NO: 1498179 - DNA, 15 bp, Homo sapiens
gtaatcccagcgctt

SEQ ID NO: 1498180 - DNA, 15 bp, Homo sapiens
taatcccagcgcttt

SEQ ID NO: 1498181 - DNA, 15 bp, Homo sapiens
aatcccagcgctttg

SEQ ID NO: 1498182 - DNA, 15 bp, Homo sapiens
atcccagcgctttgg

SEQ ID NO: 1498183 - DNA, 15 bp, Homo sapiens
tcccagcgctttggg

SEQ ID NO: 1498184 - DNA, 15 bp, Homo sapiens
cccagcgctttgggg

SEQ ID NO: 1498185 - DNA, 15 bp, Homo sapiens
ccagcgctttggggg

SEQ ID NO: 1498186 - DNA, 15 bp, Homo sapiens
cagcgctttgggggg

SEQ ID NO: 1498187 - DNA, 15 bp, Homo sapiens
agcgctttggggggc

SEQ ID NO: 1498188 - DNA, 15 bp, Homo sapiens
gcgctttggggggcc

SEQ ID NO: 1498189 - DNA, 15 bp, Homo sapiens
cgctttggggggccg

SEQ ID NO: 1498190 - DNA, 15 bp, Homo sapiens
gctttggggggccga

SEQ ID NO: 1498191 - DNA, 15 bp, Homo sapiens
ctttggggggccgaa

SEQ ID NO: 1498192 - DNA, 15 bp, Homo sapiens
tttggggggccgaag

SEQ ID NO: 1498193 - DNA, 15 bp, Homo sapiens
ttggggggccgaagt

SEQ ID NO: 1498194 - DNA, 15 bp, Homo sapiens
tggggggccgaagtg

SEQ ID NO: 1498195 - DNA, 15 bp, Homo sapiens
ggggggccgaagtgg

SEQ ID NO: 1498196 - DNA, 15 bp, Homo sapiens
gggggccgaagtggg

SEQ ID NO: 1498197 - DNA, 15 bp, Homo sapiens
ggggccgaagtgggt

SEQ ID NO: 1498198 - DNA, 15 bp, Homo sapiens
gggccgaagtgggtg

SEQ ID NO: 1498199 - DNA, 15 bp, Homo sapiens
ggccgaagtgggtgg

SEQ ID NO: 1498200 - DNA, 15 bp, Homo sapiens
gccgaagtgggtgga

SEQ ID NO: 1498201 - DNA, 15 bp, Homo sapiens
ccgaagtgggtggat

SEQ ID NO: 1498202 - DNA, 15 bp, Homo sapiens
cgaagtgggtggatc

SEQ ID NO: 1498203 - DNA, 15 bp, Homo sapiens
gaagtgggtggatca

SEQ ID NO: 1498204 - DNA, 15 bp, Homo sapiens
aagtgggtggatcac

SEQ ID NO: 1498205 - DNA, 15 bp, Homo sapiens
agtgggtggatcact

SEQ ID NO: 1498206 - DNA, 15 bp, Homo sapiens
gggtggatcacttgg

SEQ ID NO: 1498207 - DNA, 15 bp, Homo sapiens
ggtggatcacttggg

SEQ ID NO: 1498208 - DNA, 15 bp, Homo sapiens
gtggatcacttgggg

SEQ ID NO: 1498209 - DNA, 15 bp, Homo sapiens
tggatcacttggggt

SEQ ID NO: 1498210 - DNA, 15 bp, Homo sapiens
ggatcacttggggtc

SEQ ID NO: 1498211 - DNA, 15 bp, Homo sapiens
gatcacttggggtca

SEQ ID NO: 1498212 - DNA, 15 bp, Homo sapiens
atcacttggggtcag

SEQ ID NO: 1498213 - DNA, 15 bp, Homo sapiens
tcacttggggtcagg

SEQ ID NO: 1498214 - DNA, 15 bp, Homo sapiens
cacttggggtcagga

SEQ ID NO: 1498215 - DNA, 15 bp, Homo sapiens
acttggggtcaggag

SEQ ID NO: 1498216 - DNA, 15 bp, Homo sapiens
cttggggtcaggagt

SEQ ID NO: 1498217 - DNA, 15 bp, Homo sapiens
ttggggtcaggagtt

SEQ ID NO: 1498218 - DNA, 15 bp, Homo sapiens
tggggtcaggagttc

SEQ ID NO: 1498219 - DNA, 15 bp, Homo sapiens
ggggtcaggagttcg

SEQ ID NO: 1498220 - DNA, 15 bp, Homo sapiens
gggtcaggagttcga

SEQ ID NO: 1498221 - DNA, 15 bp, Homo sapiens
ggtcaggagttcgaa

SEQ ID NO: 1498222 - DNA, 15 bp, Homo sapiens
gtcaggagttcgaag

SEQ ID NO: 1498223 - DNA, 15 bp, Homo sapiens
tcaggagttcgaagc

SEQ ID NO: 1498224 - DNA, 15 bp, Homo sapiens
caggagttcgaagcc

SEQ ID NO: 1498225 - DNA, 15 bp, Homo sapiens
aggagttcgaagccc

SEQ ID NO: 1498226 - DNA, 15 bp, Homo sapiens
ggagttcgaagccca

SEQ ID NO: 1498227 - DNA, 15 bp, Homo sapiens
gagttcgaagcccag

SEQ ID NO: 1498228 - DNA, 15 bp, Homo sapiens
agttcgaagcccagc

SEQ ID NO: 1498229 - DNA, 15 bp, Homo sapiens
gttcgaagcccagcc

SEQ ID NO: 1498230 - DNA, 15 bp, Homo sapiens
ttcgaagcccagcct

SEQ ID NO: 1498231 - DNA, 15 bp, Homo sapiens
tcgaagcccagcctg

SEQ ID NO: 1498232 - DNA, 15 bp, Homo sapiens
cgaagcccagcctgg

SEQ ID NO: 1498233 - DNA, 15 bp, Homo sapiens
gaagcccagcctggc

SEQ ID NO: 1498234 - DNA, 15 bp, Homo sapiens
aagcccagcctggcc

SEQ ID NO: 1498235 - DNA, 15 bp, Homo sapiens
agcccagcctggcca

SEQ ID NO: 1498236 - DNA, 15 bp, Homo sapiens
gcccagcctggccag

SEQ ID NO: 1498237 - DNA, 15 bp, Homo sapiens
cccagcctggccagc

SEQ ID NO: 1498238 - DNA, 15 bp, Homo sapiens
ctggccagcatggca

SEQ ID NO: 1498239 - DNA, 15 bp, Homo sapiens
tggccagcatggcaa

SEQ ID NO: 1498240 - DNA, 15 bp, Homo sapiens
ggccagcatggcaaa

SEQ ID NO: 1498241 - DNA, 15 bp, Homo sapiens
gccagcatggcaaaa

SEQ ID NO: 1498242 - DNA, 15 bp, Homo sapiens
ccagcatggcaaaac

SEQ ID NO: 1498243 - DNA, 15 bp, Homo sapiens
cagcatggcaaaacc

SEQ ID NO: 1498244 - DNA, 15 bp, Homo sapiens
agcatggcaaaacca

SEQ ID NO: 1498245 - DNA, 15 bp, Homo sapiens
gcatggcaaaaccac

SEQ ID NO: 1498246 - DNA, 15 bp, Homo sapiens
catggcaaaaccacc

SEQ ID NO: 1498247 - DNA, 15 bp, Homo sapiens
atggcaaaaccacca

SEQ ID NO: 1498248 - DNA, 15 bp, Homo sapiens
tggcaaaaccaccat

SEQ ID NO: 1498249 - DNA, 15 bp, Homo sapiens
ggcaaaaccaccatc

SEQ ID NO: 1498250 - DNA, 15 bp, Homo sapiens
gcaaaaccaccatct

SEQ ID NO: 1498251 - DNA, 15 bp, Homo sapiens
caaaaccaccatctc

SEQ ID NO: 1498252 - DNA, 15 bp, Homo sapiens
aaaaccaccatctca

SEQ ID NO: 1498253 - DNA, 15 bp, Homo sapiens
aaaccaccatctcag

SEQ ID NO: 1498254 - DNA, 15 bp, Homo sapiens
aaccaccatctcagc

SEQ ID NO: 1498255 - DNA, 15 bp, Homo sapiens
accaccatctcagct

SEQ ID NO: 1498256 - DNA, 15 bp, Homo sapiens
ccaccatctcagcta

SEQ ID NO: 1498257 - DNA, 15 bp, Homo sapiens
caccatctcagctaa

SEQ ID NO: 1498258 - DNA, 15 bp, Homo sapiens
accatctcagctaaa

SEQ ID NO: 1498259 - DNA, 15 bp, Homo sapiens
ccatctcagctaaaa

SEQ ID NO: 1498260 - DNA, 15 bp, Homo sapiens
catctcagctaaaaa

SEQ ID NO: 1498261 - DNA, 15 bp, Homo sapiens
atctcagctaaaaaa

SEQ ID NO: 1498262 - DNA, 15 bp, Homo sapiens
tctcagctaaaaaat

SEQ ID NO: 1498263 - DNA, 15 bp, Homo sapiens
ctcagctaaaaaata

SEQ ID NO: 1498264 - DNA, 15 bp, Homo sapiens
tcagctaaaaaatac

SEQ ID NO: 1498265 - DNA, 15 bp, Homo sapiens
cagctaaaaaataca

SEQ ID NO: 1498266 - DNA, 15 bp, Homo sapiens
agctaaaaaatacaa

SEQ ID NO: 1498267 - DNA, 15 bp, Homo sapiens
gctaaaaaatacaaa

SEQ ID NO: 1498268 - DNA, 15 bp, Homo sapiens
caggtgtggtggcag

SEQ ID NO: 1498269 - DNA, 15 bp, Homo sapiens
aggtgtggtggcagg

SEQ ID NO: 1498270 - DNA, 15 bp, Homo sapiens
ggtgtggtggcaggt

SEQ ID NO: 1498271 - DNA, 15 bp, Homo sapiens
gtgtggtggcaggta

SEQ ID NO: 1498272 - DNA, 15 bp, Homo sapiens
tgtggtggcaggtac

SEQ ID NO: 1498273 - DNA, 15 bp, Homo sapiens
gtggtggcaggtacc

SEQ ID NO: 1498274 - DNA, 15 bp, Homo sapiens
caggtacctgtaatt

SEQ ID NO: 1498275 - DNA, 15 bp, Homo sapiens
aggtacctgtaattc

SEQ ID NO: 1498276 - DNA, 15 bp, Homo sapiens
ggtacctgtaattcc

SEQ ID NO: 1498277 - DNA, 15 bp, Homo sapiens
gtacctgtaattcca

SEQ ID NO: 1498278 - DNA, 15 bp, Homo sapiens
tacctgtaattccag

SEQ ID NO: 1498279 - DNA, 15 bp, Homo sapiens
tgagacatgagaatc

SEQ ID NO: 1498280 - DNA, 15 bp, Homo sapiens
gagacatgagaatcg

SEQ ID NO: 1498281 - DNA, 15 bp, Homo sapiens
agacatgagaatcgc

SEQ ID NO: 1498282 - DNA, 15 bp, Homo sapiens
gacatgagaatcgct

SEQ ID NO: 1498283 - DNA, 15 bp, Homo sapiens
acatgagaatcgctt

SEQ ID NO: 1498284 - DNA, 15 bp, Homo sapiens
atgagaatcgcttgg

SEQ ID NO: 1498285 - DNA, 15 bp, Homo sapiens
tgagaatcgcttgga

SEQ ID NO: 1498286 - DNA, 15 bp, Homo sapiens
aatcgcttggaccca

SEQ ID NO: 1498287 - DNA, 15 bp, Homo sapiens
atcgcttggacccag

SEQ ID NO: 1498288 - DNA, 15 bp, Homo sapiens
tcgcttggacccagg

SEQ ID NO: 1498289 - DNA, 15 bp, Homo sapiens
cgcttggacccagga

SEQ ID NO: 1498290 - DNA, 15 bp, Homo sapiens
gcttggacccaggag

SEQ ID NO: 1498291 - DNA, 15 bp, Homo sapiens
aggcagaggctgcaa

SEQ ID NO: 1498292 - DNA, 15 bp, Homo sapiens
ggcagaggctgcaat

SEQ ID NO: 1498293 - DNA, 15 bp, Homo sapiens
gcagaggctgcaatg

SEQ ID NO: 1498294 - DNA, 15 bp, Homo sapiens
cagaggctgcaatga

SEQ ID NO: 1498295 - DNA, 15 bp, Homo sapiens
agaggctgcaatgag

SEQ ID NO: 1498296 - DNA, 15 bp, Homo sapiens
gaggctgcaatgagc

SEQ ID NO: 1498297 - DNA, 15 bp, Homo sapiens
aggctgcaatgagcc

SEQ ID NO: 1498298 - DNA, 15 bp, Homo sapiens
ggctgcaatgagccg

SEQ ID NO: 1498299 - DNA, 15 bp, Homo sapiens
gctgcaatgagccga

SEQ ID NO: 1498300 - DNA, 15 bp, Homo sapiens
ctgcaatgagccgag

SEQ ID NO: 1498301 - DNA, 15 bp, Homo sapiens
tgcaatgagccgagt

SEQ ID NO: 1498302 - DNA, 15 bp, Homo sapiens
gcaatgagccgagtt

SEQ ID NO: 1498303 - DNA, 15 bp, Homo sapiens
caatgagccgagttc

SEQ ID NO: 1498304 - DNA, 15 bp, Homo sapiens
aatgagccgagttcg

SEQ ID NO: 1498305 - DNA, 15 bp, Homo sapiens
atgagccgagttcgc

SEQ ID NO: 1498306 - DNA, 15 bp, Homo sapiens
tgagccgagttcgcg

SEQ ID NO: 1498307 - DNA, 15 bp, Homo sapiens
gagccgagttcgcgc

SEQ ID NO: 1498308 - DNA, 15 bp, Homo sapiens
agccgagttcgcgcc

SEQ ID NO: 1498309 - DNA, 15 bp, Homo sapiens
gccgagttcgcgcca

SEQ ID NO: 1498310 - DNA, 15 bp, Homo sapiens
ccgagttcgcgccac

SEQ ID NO: 1498311 - DNA, 15 bp, Homo sapiens
cgagttcgcgccact

SEQ ID NO: 1498312 - DNA, 15 bp, Homo sapiens
gagttcgcgccactg

SEQ ID NO: 1498313 - DNA, 15 bp, Homo sapiens
agttcgcgccactgc

SEQ ID NO: 1498314 - DNA, 15 bp, Homo sapiens
gttcgcgccactgca

SEQ ID NO: 1498315 - DNA, 15 bp, Homo sapiens
ttcgcgccactgcac

SEQ ID NO: 1498316 - DNA, 15 bp, Homo sapiens
tgtctcaaaaaaaat

SEQ ID NO: 1498317 - DNA, 15 bp, Homo sapiens
gtctcaaaaaaaatt

SEQ ID NO: 1498318 - DNA, 15 bp, Homo sapiens
tctcaaaaaaaattt

SEQ ID NO: 1498319 - DNA, 15 bp, Homo sapiens
ctcaaaaaaaatttt

SEQ ID NO: 1498320 - DNA, 15 bp, Homo sapiens
tcaaaaaaaatttta

SEQ ID NO: 1498321 - DNA, 15 bp, Homo sapiens
caaaaaaaattttag

SEQ ID NO: 1498322 - DNA, 15 bp, Homo sapiens
aaaaaaaattttagc

SEQ ID NO: 1498323 - DNA, 15 bp, Homo sapiens
aaaaaaattttagcg

SEQ ID NO: 1498324 - DNA, 15 bp, Homo sapiens
aaaaaattttagcga

SEQ ID NO: 1498325 - DNA, 15 bp, Homo sapiens
aaaaattttagcgat

SEQ ID NO: 1498326 - DNA, 15 bp, Homo sapiens
aaaattttagcgatg

SEQ ID NO: 1498327 - DNA, 15 bp, Homo sapiens
aaattttagcgatgt

SEQ ID NO: 1498328 - DNA, 15 bp, Homo sapiens
aattttagcgatgtc

SEQ ID NO: 1498329 - DNA, 15 bp, Homo sapiens
attttagcgatgtca

SEQ ID NO: 1498330 - DNA, 15 bp, Homo sapiens
ttttagcgatgtcaa

SEQ ID NO: 1498331 - DNA, 15 bp, Homo sapiens
tttagcgatgtcaat

SEQ ID NO: 1498332 - DNA, 15 bp, Homo sapiens
ttagcgatgtcaatt

SEQ ID NO: 1498333 - DNA, 15 bp, Homo sapiens
tagcgatgtcaattc

SEQ ID NO: 1498334 - DNA, 15 bp, Homo sapiens
agcgatgtcaattca

SEQ ID NO: 1498335 - DNA, 15 bp, Homo sapiens
gcgatgtcaattcat

SEQ ID NO: 1498336 - DNA, 15 bp, Homo sapiens
cgatgtcaattcatt

SEQ ID NO: 1498337 - DNA, 15 bp, Homo sapiens
gatgtcaattcattt

SEQ ID NO: 1498338 - DNA, 15 bp, Homo sapiens
atgtcaattcatttt

SEQ ID NO: 1498339 - DNA, 15 bp, Homo sapiens
tgtcaattcattttt

SEQ ID NO: 1498340 - DNA, 15 bp, Homo sapiens
gtcaattcattttta

SEQ ID NO: 1498341 - DNA, 15 bp, Homo sapiens
tcaattcatttttaa

SEQ ID NO: 1498342 - DNA, 15 bp, Homo sapiens
caattcatttttaaa

SEQ ID NO: 1498343 - DNA, 15 bp, Homo sapiens
aattcatttttaaag

SEQ ID NO: 1498344 - DNA, 15 bp, Homo sapiens
attcatttttaaagt

SEQ ID NO: 1498345 - DNA, 15 bp, Homo sapiens
ttcatttttaaagtg

SEQ ID NO: 1498346 - DNA, 15 bp, Homo sapiens
tcatttttaaagtgg

SEQ ID NO: 1498347 - DNA, 15 bp, Homo sapiens
catttttaaagtggt

SEQ ID NO: 1498348 - DNA, 15 bp, Homo sapiens
atttttaaagtggtg

SEQ ID NO: 1498349 - DNA, 15 bp, Homo sapiens
tttttaaagtggtgg

SEQ ID NO: 1498350 - DNA, 15 bp, Homo sapiens
ttttaaagtggtggc

SEQ ID NO: 1498351 - DNA, 15 bp, Homo sapiens
tttaaagtggtggct

SEQ ID NO: 1498352 - DNA, 15 bp, Homo sapiens
ttaaagtggtggctt

SEQ ID NO: 1498353 - DNA, 15 bp, Homo sapiens
taaagtggtggctta

SEQ ID NO: 1498354 - DNA, 15 bp, Homo sapiens
aaagtggtggcttaa

SEQ ID NO: 1498355 - DNA, 15 bp, Homo sapiens
aagtggtggcttaag

SEQ ID NO: 1498356 - DNA, 15 bp, Homo sapiens
agtggtggcttaagg

SEQ ID NO: 1498357 - DNA, 15 bp, Homo sapiens
gtggtggcttaaggg

SEQ ID NO: 1498358 - DNA, 15 bp, Homo sapiens
tggtggcttaagggt

SEQ ID NO: 1498359 - DNA, 15 bp, Homo sapiens
ggtggcttaagggtt

SEQ ID NO: 1498360 - DNA, 15 bp, Homo sapiens
gtggcttaagggttt

SEQ ID NO: 1498361 - DNA, 15 bp, Homo sapiens
tggcttaagggtttg

SEQ ID NO: 1498362 - DNA, 15 bp, Homo sapiens
ggcttaagggtttgg

SEQ ID NO: 1498363 - DNA, 15 bp, Homo sapiens
gcttaagggtttggt

SEQ ID NO: 1498364 - DNA, 15 bp, Homo sapiens
cttaagggtttggtc

SEQ ID NO: 1498365 - DNA, 15 bp, Homo sapiens
ttaagggtttggtct

SEQ ID NO: 1498366 - DNA, 15 bp, Homo sapiens
taagggtttggtctg

SEQ ID NO: 1498367 - DNA, 15 bp, Homo sapiens
aagggtttggtctgg

SEQ ID NO: 1498368 - DNA, 15 bp, Homo sapiens
agggtttggtctggt

SEQ ID NO: 1498369 - DNA, 15 bp, Homo sapiens
gggtttggtctggtt

SEQ ID NO: 1498370 - DNA, 15 bp, Homo sapiens
ggtttggtctggttt

SEQ ID NO: 1498371 - DNA, 15 bp, Homo sapiens
gtttggtctggtttg

SEQ ID NO: 1498372 - DNA, 15 bp, Homo sapiens
tttggtctggtttgg

SEQ ID NO: 1498373 - DNA, 15 bp, Homo sapiens
ttggtctggtttggt

SEQ ID NO: 1498374 - DNA, 15 bp, Homo sapiens
tggtctggtttggtt

SEQ ID NO: 1498375 - DNA, 15 bp, Homo sapiens
ggtctggtttggttt

SEQ ID NO: 1498376 - DNA, 15 bp, Homo sapiens
gtctggtttggtttg

SEQ ID NO: 1498377 - DNA, 15 bp, Homo sapiens
tctggtttggtttgg

SEQ ID NO: 1498378 - DNA, 15 bp, Homo sapiens
ctggtttggtttggt

SEQ ID NO: 1498379 - DNA, 15 bp, Homo sapiens
tggtttggtttggtt

SEQ ID NO: 1498380 - DNA, 15 bp, Homo sapiens
ggtttggtttggttt

SEQ ID NO: 1498381 - DNA, 15 bp, Homo sapiens
gtttggtttggtttt

SEQ ID NO: 1498382 - DNA, 15 bp, Homo sapiens
tttggtttggttttg

SEQ ID NO: 1498383 - DNA, 15 bp, Homo sapiens
ttggtttggttttgc

SEQ ID NO: 1498384 - DNA, 15 bp, Homo sapiens
tggtttggttttgct

SEQ ID NO: 1498385 - DNA, 15 bp, Homo sapiens
ggtttggttttgctg

SEQ ID NO: 1498386 - DNA, 15 bp, Homo sapiens
gtttggttttgctga

SEQ ID NO: 1498387 - DNA, 15 bp, Homo sapiens
tttggttttgctgag

SEQ ID NO: 1498388 - DNA, 15 bp, Homo sapiens
ttggttttgctgaga

SEQ ID NO: 1498389 - DNA, 15 bp, Homo sapiens
tggttttgctgagaa

SEQ ID NO: 1498390 - DNA, 15 bp, Homo sapiens
ggttttgctgagaaa

SEQ ID NO: 1498391 - DNA, 15 bp, Homo sapiens
gttttgctgagaaag

SEQ ID NO: 1498392 - DNA, 15 bp, Homo sapiens
ttttgctgagaaaga

SEQ ID NO: 1498393 - DNA, 15 bp, Homo sapiens
tttgctgagaaagaa

SEQ ID NO: 1498394 - DNA, 15 bp, Homo sapiens
ttgctgagaaagaaa

SEQ ID NO: 1498395 - DNA, 15 bp, Homo sapiens
tgctgagaaagaaaa

SEQ ID NO: 1498396 - DNA, 15 bp, Homo sapiens
gctgagaaagaaaac

SEQ ID NO: 1498397 - DNA, 15 bp, Homo sapiens
ctgagaaagaaaact

SEQ ID NO: 1498398 - DNA, 15 bp, Homo sapiens
tgagaaagaaaactt

SEQ ID NO: 1498399 - DNA, 15 bp, Homo sapiens
gagaaagaaaacttc

SEQ ID NO: 1498400 - DNA, 15 bp, Homo sapiens
agaaagaaaacttcc

SEQ ID NO: 1498401 - DNA, 15 bp, Homo sapiens
gaaagaaaacttcct

SEQ ID NO: 1498402 - DNA, 15 bp, Homo sapiens
aaagaaaacttcctc

SEQ ID NO: 1498403 - DNA, 15 bp, Homo sapiens
aagaaaacttcctcg

SEQ ID NO: 1498404 - DNA, 15 bp, Homo sapiens
agaaaacttcctcgg

SEQ ID NO: 1498405 - DNA, 15 bp, Homo sapiens
gaaaacttcctcggc

SEQ ID NO: 1498406 - DNA, 15 bp, Homo sapiens
aaaacttcctcggca

SEQ ID NO: 1498407 - DNA, 15 bp, Homo sapiens
aaacttcctcggcaa

SEQ ID NO: 1498408 - DNA, 15 bp, Homo sapiens
aacttcctcggcaaa

SEQ ID NO: 1498409 - DNA, 15 bp, Homo sapiens
acttcctcggcaaat

SEQ ID NO: 1498410 - DNA, 15 bp, Homo sapiens
cttcctcggcaaatg

SEQ ID NO: 1498411 - DNA, 15 bp, Homo sapiens
ttcctcggcaaatga

SEQ ID NO: 1498412 - DNA, 15 bp, Homo sapiens
tcctcggcaaatgat

SEQ ID NO: 1498413 - DNA, 15 bp, Homo sapiens
cctcggcaaatgatt

SEQ ID NO: 1498414 - DNA, 15 bp, Homo sapiens
ctcggcaaatgattt

SEQ ID NO: 1498415 - DNA, 15 bp, Homo sapiens
tcggcaaatgatttt

SEQ ID NO: 1498416 - DNA, 15 bp, Homo sapiens
cggcaaatgattttt

SEQ ID NO: 1498417 - DNA, 15 bp, Homo sapiens
ggcaaatgatttttg

SEQ ID NO: 1498418 - DNA, 15 bp, Homo sapiens
gcaaatgatttttgc

SEQ ID NO: 1498419 - DNA, 15 bp, Homo sapiens
caaatgatttttgcc

SEQ ID NO: 1498420 - DNA, 15 bp, Homo sapiens
aaatgatttttgcca

SEQ ID NO: 1498421 - DNA, 15 bp, Homo sapiens
aatgatttttgccag

SEQ ID NO: 1498422 - DNA, 15 bp, Homo sapiens
atgatttttgccagt

SEQ ID NO: 1498423 - DNA, 15 bp, Homo sapiens
tgatttttgccagtg

SEQ ID NO: 1498424 - DNA, 15 bp, Homo sapiens
gatttttgccagtga

SEQ ID NO: 1498425 - DNA, 15 bp, Homo sapiens
atttttgccagtgaa

SEQ ID NO: 1498426 - DNA, 15 bp, Homo sapiens
tttttgccagtgaag

SEQ ID NO: 1498427 - DNA, 15 bp, Homo sapiens
ttttgccagtgaaga

SEQ ID NO: 1498428 - DNA, 15 bp, Homo sapiens
tttgccagtgaagat

SEQ ID NO: 1498429 - DNA, 15 bp, Homo sapiens
ttgccagtgaagatt

SEQ ID NO: 1498430 - DNA, 15 bp, Homo sapiens
tgccagtgaagattt

SEQ ID NO: 1498431 - DNA, 15 bp, Homo sapiens
gccagtgaagatttt

SEQ ID NO: 1498432 - DNA, 15 bp, Homo sapiens
ccagtgaagatttta

SEQ ID NO: 1498433 - DNA, 15 bp, Homo sapiens
cagtgaagattttag

SEQ ID NO: 1498434 - DNA, 15 bp, Homo sapiens
agtgaagattttagt

SEQ ID NO: 1498435 - DNA, 15 bp, Homo sapiens
gtgaagattttagta

SEQ ID NO: 1498436 - DNA, 15 bp, Homo sapiens
tgaagattttagtac

SEQ ID NO: 1498437 - DNA, 15 bp, Homo sapiens
gaagattttagtaca

SEQ ID NO: 1498438 - DNA, 15 bp, Homo sapiens
aagattttagtacac

SEQ ID NO: 1498439 - DNA, 15 bp, Homo sapiens
agattttagtacacg

SEQ ID NO: 1498440 - DNA, 15 bp, Homo sapiens
gattttagtacacgt

SEQ ID NO: 1498441 - DNA, 15 bp, Homo sapiens
attttagtacacgtc

SEQ ID NO: 1498442 - DNA, 15 bp, Homo sapiens
ttttagtacacgtca

SEQ ID NO: 1498443 - DNA, 15 bp, Homo sapiens
tttagtacacgtcac

SEQ ID NO: 1498444 - DNA, 15 bp, Homo sapiens
ttagtacacgtcaca

SEQ ID NO: 1498445 - DNA, 15 bp, Homo sapiens
tagtacacgtcacaa

SEQ ID NO: 1498446 - DNA, 15 bp, Homo sapiens
agtacacgtcacaat

SEQ ID NO: 1498447 - DNA, 15 bp, Homo sapiens
gtacacgtcacaata

SEQ ID NO: 1498448 - DNA, 15 bp, Homo sapiens
tacacgtcacaatag

SEQ ID NO: 1498449 - DNA, 15 bp, Homo sapiens
acacgtcacaataga

SEQ ID NO: 1498450 - DNA, 15 bp, Homo sapiens
cacgtcacaatagaa

SEQ ID NO: 1498451 - DNA, 15 bp, Homo sapiens
acgtcacaatagaat

SEQ ID NO: 1498452 - DNA, 15 bp, Homo sapiens
cgtcacaatagaatt

SEQ ID NO: 1498453 - DNA, 15 bp, Homo sapiens
gtcacaatagaattc

SEQ ID NO: 1498454 - DNA, 15 bp, Homo sapiens
tcacaatagaattcc

SEQ ID NO: 1498455 - DNA, 15 bp, Homo sapiens
cacaatagaattcct

SEQ ID NO: 1498456 - DNA, 15 bp, Homo sapiens
acaatagaattcctc

SEQ ID NO: 1498457 - DNA, 15 bp, Homo sapiens
caatagaattcctca

SEQ ID NO: 1498458 - DNA, 15 bp, Homo sapiens
aatagaattcctcag

SEQ ID NO: 1498459 - DNA, 15 bp, Homo sapiens
atagaattcctcagc

SEQ ID NO: 1498460 - DNA, 15 bp, Homo sapiens
tagaattcctcagcg

SEQ ID NO: 1498461 - DNA, 15 bp, Homo sapiens
agaattcctcagcgt

SEQ ID NO: 1498462 - DNA, 15 bp, Homo sapiens
gaattcctcagcgtc

SEQ ID NO: 1498463 - DNA, 15 bp, Homo sapiens
aattcctcagcgtct

SEQ ID NO: 1498464 - DNA, 15 bp, Homo sapiens
attcctcagcgtctt

SEQ ID NO: 1498465 - DNA, 15 bp, Homo sapiens
ttcctcagcgtcttt

SEQ ID NO: 1498466 - DNA, 15 bp, Homo sapiens
tcctcagcgtcttta

SEQ ID NO: 1498467 - DNA, 15 bp, Homo sapiens
cctcagcgtctttat

SEQ ID NO: 1498468 - DNA, 15 bp, Homo sapiens
ctcagcgtctttatg

SEQ ID NO: 1498469 - DNA, 15 bp, Homo sapiens
tcagcgtctttatga

SEQ ID NO: 1498470 - DNA, 15 bp, Homo sapiens
cagcgtctttatgaa

SEQ ID NO: 1498471 - DNA, 15 bp, Homo sapiens
agcgtctttatgaaa

SEQ ID NO: 1498472 - DNA, 15 bp, Homo sapiens
gcgtctttatgaaac

SEQ ID NO: 1498473 - DNA, 15 bp, Homo sapiens
cgtctttatgaaaca

SEQ ID NO: 1498474 - DNA, 15 bp, Homo sapiens
gtctttatgaaacat

SEQ ID NO: 1498475 - DNA, 15 bp, Homo sapiens
tctttatgaaacatc

SEQ ID NO: 1498476 - DNA, 15 bp, Homo sapiens
ctttatgaaacatcg

SEQ ID NO: 1498477 - DNA, 15 bp, Homo sapiens
tttatgaaacatcgt

SEQ ID NO: 1498478 - DNA, 15 bp, Homo sapiens
ttatgaaacatcgtg

SEQ ID NO: 1498479 - DNA, 15 bp, Homo sapiens
tatgaaacatcgtga

SEQ ID NO: 1498480 - DNA, 15 bp, Homo sapiens
atgaaacatcgtgag

SEQ ID NO: 1498481 - DNA, 15 bp, Homo sapiens
tgaaacatcgtgagg

SEQ ID NO: 1498482 - DNA, 15 bp, Homo sapiens
gaaacatcgtgagga

SEQ ID NO: 1498483 - DNA, 15 bp, Homo sapiens
aaacatcgtgaggag

SEQ ID NO: 1498484 - DNA, 15 bp, Homo sapiens
aacatcgtgaggagt

SEQ ID NO: 1498485 - DNA, 15 bp, Homo sapiens
acatcgtgaggagtg

SEQ ID NO: 1498486 - DNA, 15 bp, Homo sapiens
catcgtgaggagtgg

SEQ ID NO: 1498487 - DNA, 15 bp, Homo sapiens
atcgtgaggagtggt

SEQ ID NO: 1498488 - DNA, 15 bp, Homo sapiens
tcgtgaggagtggtt

SEQ ID NO: 1498489 - DNA, 15 bp, Homo sapiens
cgtgaggagtggttc

SEQ ID NO: 1498490 - DNA, 15 bp, Homo sapiens
gtgaggagtggttca

SEQ ID NO: 1498491 - DNA, 15 bp, Homo sapiens
tgaggagtggttcag

SEQ ID NO: 1498492 - DNA, 15 bp, Homo sapiens
gaggagtggttcaga

SEQ ID NO: 1498493 - DNA, 15 bp, Homo sapiens
aggagtggttcagat

SEQ ID NO: 1498494 - DNA, 15 bp, Homo sapiens
ggagtggttcagata

SEQ ID NO: 1498495 - DNA, 15 bp, Homo sapiens
gagtggttcagatac

SEQ ID NO: 1498496 - DNA, 15 bp, Homo sapiens
agtggttcagatact

SEQ ID NO: 1498497 - DNA, 15 bp, Homo sapiens
gtggttcagatactg

SEQ ID NO: 1498498 - DNA, 15 bp, Homo sapiens
tggttcagatactgt

SEQ ID NO: 1498499 - DNA, 15 bp, Homo sapiens
ggttcagatactgtt

SEQ ID NO: 1498500 - DNA, 15 bp, Homo sapiens
gttcagatactgtta

SEQ ID NO: 1498501 - DNA, 15 bp, Homo sapiens
ttcagatactgttag

SEQ ID NO: 1498502 - DNA, 15 bp, Homo sapiens
tcagatactgttaga

SEQ ID NO: 1498503 - DNA, 15 bp, Homo sapiens
cagatactgttagat

SEQ ID NO: 1498504 - DNA, 15 bp, Homo sapiens
agatactgttagatt

SEQ ID NO: 1498505 - DNA, 15 bp, Homo sapiens
gatactgttagattt

SEQ ID NO: 1498506 - DNA, 15 bp, Homo sapiens
atactgttagatttc

SEQ ID NO: 1498507 - DNA, 15 bp, Homo sapiens
tactgttagatttca

SEQ ID NO: 1498508 - DNA, 15 bp, Homo sapiens
actgttagatttcag

SEQ ID NO: 1498509 - DNA, 15 bp, Homo sapiens
ctgttagatttcagg

SEQ ID NO: 1498510 - DNA, 15 bp, Homo sapiens
tgttagatttcaggc

SEQ ID NO: 1498511 - DNA, 15 bp, Homo sapiens
gttagatttcaggca

SEQ ID NO: 1498512 - DNA, 15 bp, Homo sapiens
ttagatttcaggcat

SEQ ID NO: 1498513 - DNA, 15 bp, Homo sapiens
tagatttcaggcatt

SEQ ID NO: 1498514 - DNA, 15 bp, Homo sapiens
agatttcaggcattg

SEQ ID NO: 1498515 - DNA, 15 bp, Homo sapiens
gatttcaggcattga

SEQ ID NO: 1498516 - DNA, 15 bp, Homo sapiens
atttcaggcattgaa

SEQ ID NO: 1498517 - DNA, 15 bp, Homo sapiens
tttcaggcattgaaa

SEQ ID NO: 1498518 - DNA, 15 bp, Homo sapiens
ttcaggcattgaaac

SEQ ID NO: 1498519 - DNA, 15 bp, Homo sapiens
tcaggcattgaaaca

SEQ ID NO: 1498520 - DNA, 15 bp, Homo sapiens
caggcattgaaacaa

SEQ ID NO: 1498521 - DNA, 15 bp, Homo sapiens
aggcattgaaacaag

SEQ ID NO: 1498522 - DNA, 15 bp, Homo sapiens
ggcattgaaacaagt

SEQ ID NO: 1498523 - DNA, 15 bp, Homo sapiens
gcattgaaacaagtg

SEQ ID NO: 1498524 - DNA, 15 bp, Homo sapiens
cattgaaacaagtga

SEQ ID NO: 1498525 - DNA, 15 bp, Homo sapiens
attgaaacaagtgaa

SEQ ID NO: 1498526 - DNA, 15 bp, Homo sapiens
ttgaaacaagtgaat

SEQ ID NO: 1498527 - DNA, 15 bp, Homo sapiens
tgaaacaagtgaata

SEQ ID NO: 1498528 - DNA, 15 bp, Homo sapiens
gaaacaagtgaataa

SEQ ID NO: 1498529 - DNA, 15 bp, Homo sapiens
aaacaagtgaataat

SEQ ID NO: 1498530 - DNA, 15 bp, Homo sapiens
aacaagtgaataatt

SEQ ID NO: 1498531 - DNA, 15 bp, Homo sapiens
acaagtgaataattc

SEQ ID NO: 1498532 - DNA, 15 bp, Homo sapiens
caagtgaataattca

SEQ ID NO: 1498533 - DNA, 15 bp, Homo sapiens
aagtgaataattcat

SEQ ID NO: 1498534 - DNA, 15 bp, Homo sapiens
agtgaataattcata

SEQ ID NO: 1498535 - DNA, 15 bp, Homo sapiens
gtgaataattcatag

SEQ ID NO: 1498536 - DNA, 15 bp, Homo sapiens
tgaataattcatagt

SEQ ID NO: 1498537 - DNA, 15 bp, Homo sapiens
gaataattcatagta

SEQ ID NO: 1498538 - DNA, 15 bp, Homo sapiens
aataattcatagtac

SEQ ID NO: 1498539 - DNA, 15 bp, Homo sapiens
ataattcatagtacc

SEQ ID NO: 1498540 - DNA, 15 bp, Homo sapiens
taattcatagtacct

SEQ ID NO: 1498541 - DNA, 15 bp, Homo sapiens
aattcatagtacctg

SEQ ID NO: 1498542 - DNA, 15 bp, Homo sapiens
attcatagtacctgg

SEQ ID NO: 1498543 - DNA, 15 bp, Homo sapiens
ttcatagtacctggt

SEQ ID NO: 1498544 - DNA, 15 bp, Homo sapiens
tcatagtacctggtt

SEQ ID NO: 1498545 - DNA, 15 bp, Homo sapiens
catagtacctggttt

SEQ ID NO: 1498546 - DNA, 15 bp, Homo sapiens
atagtacctggttta

SEQ ID NO: 1498547 - DNA, 15 bp, Homo sapiens
tagtacctggtttaa

SEQ ID NO: 1498548 - DNA, 15 bp, Homo sapiens
agtacctggtttaaa

SEQ ID NO: 1498549 - DNA, 15 bp, Homo sapiens
gtacctggtttaaag

SEQ ID NO: 1498550 - DNA, 15 bp, Homo sapiens
tacctggtttaaagg

SEQ ID NO: 1498551 - DNA, 15 bp, Homo sapiens
acctggtttaaagga

SEQ ID NO: 1498552 - DNA, 15 bp, Homo sapiens
cctggtttaaaggag

SEQ ID NO: 1498553 - DNA, 15 bp, Homo sapiens
ctggtttaaaggagg

SEQ ID NO: 1498554 - DNA, 15 bp, Homo sapiens
tggtttaaaggagga

SEQ ID NO: 1498555 - DNA, 15 bp, Homo sapiens
ggtttaaaggaggaa

SEQ ID NO: 1498556 - DNA, 15 bp, Homo sapiens
gtttaaaggaggaaa

SEQ ID NO: 1498557 - DNA, 15 bp, Homo sapiens
tttaaaggaggaaaa

SEQ ID NO: 1498558 - DNA, 15 bp, Homo sapiens
ttaaaggaggaaaag

SEQ ID NO: 1498559 - DNA, 15 bp, Homo sapiens
taaaggaggaaaaga

SEQ ID NO: 1498560 - DNA, 15 bp, Homo sapiens
aaaggaggaaaagat

SEQ ID NO: 1498561 - DNA, 15 bp, Homo sapiens
aaggaggaaaagatg

SEQ ID NO: 1498562 - DNA, 15 bp, Homo sapiens
aggaggaaaagatgt

SEQ ID NO: 1498563 - DNA, 15 bp, Homo sapiens
ggaggaaaagatgtg

SEQ ID NO: 1498564 - DNA, 15 bp, Homo sapiens
gaggaaaagatgtga

SEQ ID NO: 1498565 - DNA, 15 bp, Homo sapiens
aggaaaagatgtgaa

SEQ ID NO: 1498566 - DNA, 15 bp, Homo sapiens
ggaaaagatgtgaac

SEQ ID NO: 1498567 - DNA, 15 bp, Homo sapiens
gaaaagatgtgaaca

SEQ ID NO: 1498568 - DNA, 15 bp, Homo sapiens
aaaagatgtgaacaa

SEQ ID NO: 1498569 - DNA, 15 bp, Homo sapiens
aaagatgtgaacaaa

SEQ ID NO: 1498570 - DNA, 15 bp, Homo sapiens
aagatgtgaacaaat

SEQ ID NO: 1498571 - DNA, 15 bp, Homo sapiens
agatgtgaacaaata

SEQ ID NO: 1498572 - DNA, 15 bp, Homo sapiens
gatgtgaacaaataa

SEQ ID NO: 1498573 - DNA, 15 bp, Homo sapiens
atgtgaacaaataat

SEQ ID NO: 1498574 - DNA, 15 bp, Homo sapiens
tgtgaacaaataatt

SEQ ID NO: 1498575 - DNA, 15 bp, Homo sapiens
gtgaacaaataatta

SEQ ID NO: 1498576 - DNA, 15 bp, Homo sapiens
tgaacaaataattat

SEQ ID NO: 1498577 - DNA, 15 bp, Homo sapiens
gaacaaataattatt

SEQ ID NO: 1498578 - DNA, 15 bp, Homo sapiens
aacaaataattatta

SEQ ID NO: 1498579 - DNA, 15 bp, Homo sapiens
acaaataattattag

SEQ ID NO: 1498580 - DNA, 15 bp, Homo sapiens
caaataattattagg

SEQ ID NO: 1498581 - DNA, 15 bp, Homo sapiens
aaataattattagga

SEQ ID NO: 1498582 - DNA, 15 bp, Homo sapiens
aataattattaggaa

SEQ ID NO: 1498583 - DNA, 15 bp, Homo sapiens
ataattattaggaac

SEQ ID NO: 1498584 - DNA, 15 bp, Homo sapiens
taattattaggaacc

SEQ ID NO: 1498585 - DNA, 15 bp, Homo sapiens
aattattaggaacca

SEQ ID NO: 1498586 - DNA, 15 bp, Homo sapiens
attattaggaaccag

SEQ ID NO: 1498587 - DNA, 15 bp, Homo sapiens
ttattaggaaccaga

SEQ ID NO: 1498588 - DNA, 15 bp, Homo sapiens
tattaggaaccagag

SEQ ID NO: 1498589 - DNA, 15 bp, Homo sapiens
attaggaaccagaga

SEQ ID NO: 1498590 - DNA, 15 bp, Homo sapiens
ttaggaaccagagag

SEQ ID NO: 1498591 - DNA, 15 bp, Homo sapiens
taggaaccagagaga

SEQ ID NO: 1498592 - DNA, 15 bp, Homo sapiens
aggaaccagagagag

SEQ ID NO: 1498593 - DNA, 15 bp, Homo sapiens
ggaaccagagagaga

SEQ ID NO: 1498594 - DNA, 15 bp, Homo sapiens
gaaccagagagagac

SEQ ID NO: 1498595 - DNA, 15 bp, Homo sapiens
aaccagagagagact

SEQ ID NO: 1498596 - DNA, 15 bp, Homo sapiens
accagagagagactg

SEQ ID NO: 1498597 - DNA, 15 bp, Homo sapiens
ccagagagagactgg

SEQ ID NO: 1498598 - DNA, 15 bp, Homo sapiens
cagagagagactgga

SEQ ID NO: 1498599 - DNA, 15 bp, Homo sapiens
agagagagactggaa

SEQ ID NO: 1498600 - DNA, 15 bp, Homo sapiens
gagagagactggaaa

SEQ ID NO: 1498601 - DNA, 15 bp, Homo sapiens
agagagactggaaaa

SEQ ID NO: 1498602 - DNA, 15 bp, Homo sapiens
gagagactggaaaaa

SEQ ID NO: 1498603 - DNA, 15 bp, Homo sapiens
agagactggaaaaaa

SEQ ID NO: 1498604 - DNA, 15 bp, Homo sapiens
gagactggaaaaaat

SEQ ID NO: 1498605 - DNA, 15 bp, Homo sapiens
agactggaaaaaata

SEQ ID NO: 1498606 - DNA, 15 bp, Homo sapiens
gactggaaaaaatat

SEQ ID NO: 1498607 - DNA, 15 bp, Homo sapiens
actggaaaaaatatt

SEQ ID NO: 1498608 - DNA, 15 bp, Homo sapiens
ctggaaaaaatattt

SEQ ID NO: 1498609 - DNA, 15 bp, Homo sapiens
tggaaaaaatatttg

SEQ ID NO: 1498610 - DNA, 15 bp, Homo sapiens
ggaaaaaatatttgc

SEQ ID NO: 1498611 - DNA, 15 bp, Homo sapiens
gaaaaaatatttgcg

SEQ ID NO: 1498612 - DNA, 15 bp, Homo sapiens
aaaaaatatttgcgc

SEQ ID NO: 1498613 - DNA, 15 bp, Homo sapiens
aaaaatatttgcgcg

SEQ ID NO: 1498614 - DNA, 15 bp, Homo sapiens
aaaatatttgcgcgg

SEQ ID NO: 1498615 - DNA, 15 bp, Homo sapiens
aaatatttgcgcggc

SEQ ID NO: 1498616 - DNA, 15 bp, Homo sapiens
aatatttgcgcggca

SEQ ID NO: 1498617 - DNA, 15 bp, Homo sapiens
atatttgcgcggcat

SEQ ID NO: 1498618 - DNA, 15 bp, Homo sapiens
tatttgcgcggcata

SEQ ID NO: 1498619 - DNA, 15 bp, Homo sapiens
atttgcgcggcatag

SEQ ID NO: 1498620 - DNA, 15 bp, Homo sapiens
tttgcgcggcatagc

SEQ ID NO: 1498621 - DNA, 15 bp, Homo sapiens
ttgcgcggcatagca

SEQ ID NO: 1498622 - DNA, 15 bp, Homo sapiens
tgcgcggcatagcaa

SEQ ID NO: 1498623 - DNA, 15 bp, Homo sapiens
gcgcggcatagcaaa

SEQ ID NO: 1498624 - DNA, 15 bp, Homo sapiens
cgcggcatagcaaaa

SEQ ID NO: 1498625 - DNA, 15 bp, Homo sapiens
gcggcatagcaaaaa

SEQ ID NO: 1498626 - DNA, 15 bp, Homo sapiens
cggcatagcaaaaat

SEQ ID NO: 1498627 - DNA, 15 bp, Homo sapiens
ggcatagcaaaaatt

SEQ ID NO: 1498628 - DNA, 15 bp, Homo sapiens
gcatagcaaaaattc

SEQ ID NO: 1498629 - DNA, 15 bp, Homo sapiens
catagcaaaaattcc

SEQ ID NO: 1498630 - DNA, 15 bp, Homo sapiens
atagcaaaaattcca

SEQ ID NO: 1498631 - DNA, 15 bp, Homo sapiens
tagcaaaaattccac

SEQ ID NO: 1498632 - DNA, 15 bp, Homo sapiens
agcaaaaattccaca

SEQ ID NO: 1498633 - DNA, 15 bp, Homo sapiens
gcaaaaattccacag

SEQ ID NO: 1498634 - DNA, 15 bp, Homo sapiens
caaaaattccacaga

SEQ ID NO: 1498635 - DNA, 15 bp, Homo sapiens
aaaaattccacagag

SEQ ID NO: 1498636 - DNA, 15 bp, Homo sapiens
aaaattccacagagg

SEQ ID NO: 1498637 - DNA, 15 bp, Homo sapiens
aaattccacagagga

SEQ ID NO: 1498638 - DNA, 15 bp, Homo sapiens
aattccacagaggag

SEQ ID NO: 1498639 - DNA, 15 bp, Homo sapiens
attccacagaggagg

SEQ ID NO: 1498640 - DNA, 15 bp, Homo sapiens
ttccacagaggaggg

SEQ ID NO: 1498641 - DNA, 15 bp, Homo sapiens
tccacagaggagggg

SEQ ID NO: 1498642 - DNA, 15 bp, Homo sapiens
ccacagaggagggga

SEQ ID NO: 1498643 - DNA, 15 bp, Homo sapiens
cacagaggaggggac

SEQ ID NO: 1498644 - DNA, 15 bp, Homo sapiens
acagaggaggggact

SEQ ID NO: 1498645 - DNA, 15 bp, Homo sapiens
cagaggaggggactt

SEQ ID NO: 1498646 - DNA, 15 bp, Homo sapiens
agaggaggggacttt

SEQ ID NO: 1498647 - DNA, 15 bp, Homo sapiens
gaggaggggactttt

SEQ ID NO: 1498648 - DNA, 15 bp, Homo sapiens
aggaggggacttttg

SEQ ID NO: 1498649 - DNA, 15 bp, Homo sapiens
ggaggggacttttga

SEQ ID NO: 1498650 - DNA, 15 bp, Homo sapiens
gaggggacttttgaa

SEQ ID NO: 1498651 - DNA, 15 bp, Homo sapiens
aggggacttttgaat

SEQ ID NO: 1498652 - DNA, 15 bp, Homo sapiens
ggggacttttgaata

SEQ ID NO: 1498653 - DNA, 15 bp, Homo sapiens
gggacttttgaatag

SEQ ID NO: 1498654 - DNA, 15 bp, Homo sapiens
ggacttttgaatagg

SEQ ID NO: 1498655 - DNA, 15 bp, Homo sapiens
gacttttgaatagga

SEQ ID NO: 1498656 - DNA, 15 bp, Homo sapiens
acttttgaataggag

SEQ ID NO: 1498657 - DNA, 15 bp, Homo sapiens
cttttgaataggagc

SEQ ID NO: 1498658 - DNA, 15 bp, Homo sapiens
ttttgaataggagct

SEQ ID NO: 1498659 - DNA, 15 bp, Homo sapiens
tttgaataggagctt

SEQ ID NO: 1498660 - DNA, 15 bp, Homo sapiens
ttgaataggagcttg

SEQ ID NO: 1498661 - DNA, 15 bp, Homo sapiens
tgaataggagcttga

SEQ ID NO: 1498662 - DNA, 15 bp, Homo sapiens
gaataggagcttgaa

SEQ ID NO: 1498663 - DNA, 15 bp, Homo sapiens
aataggagcttgaag

SEQ ID NO: 1498664 - DNA, 15 bp, Homo sapiens
ataggagcttgaaga

SEQ ID NO: 1498665 - DNA, 15 bp, Homo sapiens
taggagcttgaagaa

SEQ ID NO: 1498666 - DNA, 15 bp, Homo sapiens
aggagcttgaagaat

SEQ ID NO: 1498667 - DNA, 15 bp, Homo sapiens
ggagcttgaagaata

SEQ ID NO: 1498668 - DNA, 15 bp, Homo sapiens
gagcttgaagaataa

SEQ ID NO: 1498669 - DNA, 15 bp, Homo sapiens
agcttgaagaataat

SEQ ID NO: 1498670 - DNA, 15 bp, Homo sapiens
gcttgaagaataata

SEQ ID NO: 1498671 - DNA, 15 bp, Homo sapiens
cttgaagaataataa

SEQ ID NO: 1498672 - DNA, 15 bp, Homo sapiens
ttgaagaataataag

SEQ ID NO: 1498673 - DNA, 15 bp, Homo sapiens
tgaagaataataaga

SEQ ID NO: 1498674 - DNA, 15 bp, Homo sapiens
gaagaataataagag

SEQ ID NO: 1498675 - DNA, 15 bp, Homo sapiens
aagaataataagagt

SEQ ID NO: 1498676 - DNA, 15 bp, Homo sapiens
agaataataagagtg

SEQ ID NO: 1498677 - DNA, 15 bp, Homo sapiens
gaataataagagtgt

SEQ ID NO: 1498678 - DNA, 15 bp, Homo sapiens
aataataagagtgtg

SEQ ID NO: 1498679 - DNA, 15 bp, Homo sapiens
ataataagagtgtgg

SEQ ID NO: 1498680 - DNA, 15 bp, Homo sapiens
taataagagtgtggc

SEQ ID NO: 1498681 - DNA, 15 bp, Homo sapiens
aataagagtgtggca

SEQ ID NO: 1498682 - DNA, 15 bp, Homo sapiens
ataagagtgtggcag

SEQ ID NO: 1498683 - DNA, 15 bp, Homo sapiens
taagagtgtggcagg

SEQ ID NO: 1498684 - DNA, 15 bp, Homo sapiens
aagagtgtggcaggc

SEQ ID NO: 1498685 - DNA, 15 bp, Homo sapiens
agagtgtggcaggca

SEQ ID NO: 1498686 - DNA, 15 bp, Homo sapiens
gagtgtggcaggcac

SEQ ID NO: 1498687 - DNA, 15 bp, Homo sapiens
agtgtggcaggcact

SEQ ID NO: 1498688 - DNA, 15 bp, Homo sapiens
gtgtggcaggcactc

SEQ ID NO: 1498689 - DNA, 15 bp, Homo sapiens
tgtggcaggcactct

SEQ ID NO: 1498690 - DNA, 15 bp, Homo sapiens
gtggcaggcactctg

SEQ ID NO: 1498691 - DNA, 15 bp, Homo sapiens
tggcaggcactctgt

SEQ ID NO: 1498692 - DNA, 15 bp, Homo sapiens
ggcaggcactctgtc

SEQ ID NO: 1498693 - DNA, 15 bp, Homo sapiens
gcaggcactctgtcc

SEQ ID NO: 1498694 - DNA, 15 bp, Homo sapiens
caggcactctgtcct

SEQ ID NO: 1498695 - DNA, 15 bp, Homo sapiens
aggcactctgtcctc

SEQ ID NO: 1498696 - DNA, 15 bp, Homo sapiens
ggcactctgtcctcc

SEQ ID NO: 1498697 - DNA, 15 bp, Homo sapiens
gcactctgtcctcct

SEQ ID NO: 1498698 - DNA, 15 bp, Homo sapiens
cactctgtcctcctt

SEQ ID NO: 1498699 - DNA, 15 bp, Homo sapiens
actctgtcctccttg

SEQ ID NO: 1498700 - DNA, 15 bp, Homo sapiens
ctctgtcctccttgg

SEQ ID NO: 1498701 - DNA, 15 bp, Homo sapiens
tctgtcctccttggc

SEQ ID NO: 1498702 - DNA, 15 bp, Homo sapiens
ctgtcctccttggct

SEQ ID NO: 1498703 - DNA, 15 bp, Homo sapiens
tgtcctccttggctc

SEQ ID NO: 1498704 - DNA, 15 bp, Homo sapiens
gtcctccttggctcg

SEQ ID NO: 1498705 - DNA, 15 bp, Homo sapiens
tcctccttggctcgc

SEQ ID NO: 1498706 - DNA, 15 bp, Homo sapiens
cctccttggctcgct

SEQ ID NO: 1498707 - DNA, 15 bp, Homo sapiens
ctccttggctcgctg

SEQ ID NO: 1498708 - DNA, 15 bp, Homo sapiens
tccttggctcgctgt

SEQ ID NO: 1498709 - DNA, 15 bp, Homo sapiens
ccttggctcgctgtc

SEQ ID NO: 1498710 - DNA, 15 bp, Homo sapiens
cttggctcgctgtct

SEQ ID NO: 1498711 - DNA, 15 bp, Homo sapiens
ttggctcgctgtctg

SEQ ID NO: 1498712 - DNA, 15 bp, Homo sapiens
tggctcgctgtctgt

SEQ ID NO: 1498713 - DNA, 15 bp, Homo sapiens
ggctcgctgtctgtc

SEQ ID NO: 1498714 - DNA, 15 bp, Homo sapiens
gctcgctgtctgtcc

SEQ ID NO: 1498715 - DNA, 15 bp, Homo sapiens
ctcgctgtctgtccc

SEQ ID NO: 1498716 - DNA, 15 bp, Homo sapiens
tcgctgtctgtcccc

SEQ ID NO: 1498717 - DNA, 15 bp, Homo sapiens
cgctgtctgtcccca

SEQ ID NO: 1498718 - DNA, 15 bp, Homo sapiens
gctgtctgtccccag

SEQ ID NO: 1498719 - DNA, 15 bp, Homo sapiens
ctgtctgtccccagt

SEQ ID NO: 1498720 - DNA, 15 bp, Homo sapiens
tgtctgtccccagtt

SEQ ID NO: 1498721 - DNA, 15 bp, Homo sapiens
gtctgtccccagttt

SEQ ID NO: 1498722 - DNA, 15 bp, Homo sapiens
tctgtccccagtttt

SEQ ID NO: 1498723 - DNA, 15 bp, Homo sapiens
ctgtccccagttttt

SEQ ID NO: 1498724 - DNA, 15 bp, Homo sapiens
tgtccccagtttttc

SEQ ID NO: 1498725 - DNA, 15 bp, Homo sapiens
gtccccagtttttct

SEQ ID NO: 1498726 - DNA, 15 bp, Homo sapiens
tccccagtttttctt

SEQ ID NO: 1498727 - DNA, 15 bp, Homo sapiens
ccccagtttttcttt

SEQ ID NO: 1498728 - DNA, 15 bp, Homo sapiens
cccagtttttcttta

SEQ ID NO: 1498729 - DNA, 15 bp, Homo sapiens
ccagtttttctttaa

SEQ ID NO: 1498730 - DNA, 15 bp, Homo sapiens
cagtttttctttaac

SEQ ID NO: 1498731 - DNA, 15 bp, Homo sapiens
agtttttctttaact

SEQ ID NO: 1498732 - DNA, 15 bp, Homo sapiens
gtttttctttaactc

SEQ ID NO: 1498733 - DNA, 15 bp, Homo sapiens
tttttctttaactca

SEQ ID NO: 1498734 - DNA, 15 bp, Homo sapiens
ttttctttaactcac

SEQ ID NO: 1498735 - DNA, 15 bp, Homo sapiens
tttctttaactcacc

SEQ ID NO: 1498736 - DNA, 15 bp, Homo sapiens
ttctttaactcaccc

SEQ ID NO: 1498737 - DNA, 15 bp, Homo sapiens
tctttaactcaccct

SEQ ID NO: 1498738 - DNA, 15 bp, Homo sapiens
ctttaactcaccctc

SEQ ID NO: 1498739 - DNA, 15 bp, Homo sapiens
tttaactcaccctcc

SEQ ID NO: 1498740 - DNA, 15 bp, Homo sapiens
ttaactcaccctccc

SEQ ID NO: 1498741 - DNA, 15 bp, Homo sapiens
taactcaccctcccc

SEQ ID NO: 1498742 - DNA, 15 bp, Homo sapiens
aactcaccctcccca

SEQ ID NO: 1498743 - DNA, 15 bp, Homo sapiens
actcaccctccccaa

SEQ ID NO: 1498744 - DNA, 15 bp, Homo sapiens
ctcaccctccccaaa

SEQ ID NO: 1498745 - DNA, 15 bp, Homo sapiens
tcaccctccccaaaa

SEQ ID NO: 1498746 - DNA, 15 bp, Homo sapiens
caccctccccaaaat

SEQ ID NO: 1498747 - DNA, 15 bp, Homo sapiens
accctccccaaaata

SEQ ID NO: 1498748 - DNA, 15 bp, Homo sapiens
ccctccccaaaatat

SEQ ID NO: 1498749 - DNA, 15 bp, Homo sapiens
cctccccaaaatata

SEQ ID NO: 1498750 - DNA, 15 bp, Homo sapiens
ctccccaaaatatat

SEQ ID NO: 1498751 - DNA, 15 bp, Homo sapiens
tccccaaaatatata

SEQ ID NO: 1498752 - DNA, 15 bp, Homo sapiens
ccccaaaatatataa

SEQ ID NO: 1498753 - DNA, 15 bp, Homo sapiens
cccaaaatatataag

SEQ ID NO: 1498754 - DNA, 15 bp, Homo sapiens
ccaaaatatataaga

SEQ ID NO: 1498755 - DNA, 15 bp, Homo sapiens
caaaatatataagaa

SEQ ID NO: 1498756 - DNA, 15 bp, Homo sapiens
aaaatatataagaaa

SEQ ID NO: 1498757 - DNA, 15 bp, Homo sapiens
aaatatataagaaag

SEQ ID NO: 1498758 - DNA, 15 bp, Homo sapiens
aatatataagaaagg

SEQ ID NO: 1498759 - DNA, 15 bp, Homo sapiens
atatataagaaaggc

SEQ ID NO: 1498760 - DNA, 15 bp, Homo sapiens
tatataagaaaggca

SEQ ID NO: 1498761 - DNA, 15 bp, Homo sapiens
atataagaaaggcag

SEQ ID NO: 1498762 - DNA, 15 bp, Homo sapiens
tataagaaaggcaga

SEQ ID NO: 1498763 - DNA, 15 bp, Homo sapiens
ataagaaaggcagaa

SEQ ID NO: 1498764 - DNA, 15 bp, Homo sapiens
taagaaaggcagaag

SEQ ID NO: 1498765 - DNA, 15 bp, Homo sapiens
aagaaaggcagaagt

SEQ ID NO: 1498766 - DNA, 15 bp, Homo sapiens
agaaaggcagaagtt

SEQ ID NO: 1498767 - DNA, 15 bp, Homo sapiens
gaaaggcagaagttc

SEQ ID NO: 1498768 - DNA, 15 bp, Homo sapiens
aaaggcagaagttct

SEQ ID NO: 1498769 - DNA, 15 bp, Homo sapiens
aaggcagaagttctc

SEQ ID NO: 1498770 - DNA, 15 bp, Homo sapiens
aggcagaagttctca

SEQ ID NO: 1498771 - DNA, 15 bp, Homo sapiens
ggcagaagttctcag

SEQ ID NO: 1498772 - DNA, 15 bp, Homo sapiens
gcagaagttctcagg

SEQ ID NO: 1498773 - DNA, 15 bp, Homo sapiens
cagaagttctcagga

SEQ ID NO: 1498774 - DNA, 15 bp, Homo sapiens
agaagttctcaggat

SEQ ID NO: 1498775 - DNA, 15 bp, Homo sapiens
gaagttctcaggatc

SEQ ID NO: 1498776 - DNA, 15 bp, Homo sapiens
aagttctcaggatca

SEQ ID NO: 1498777 - DNA, 15 bp, Homo sapiens
agttctcaggatcag

SEQ ID NO: 1498778 - DNA, 15 bp, Homo sapiens
gttctcaggatcagt

SEQ ID NO: 1498779 - DNA, 15 bp, Homo sapiens
ttctcaggatcagtt

SEQ ID NO: 1498780 - DNA, 15 bp, Homo sapiens
tctcaggatcagtta

SEQ ID NO: 1498781 - DNA, 15 bp, Homo sapiens
ctcaggatcagttac

SEQ ID NO: 1498782 - DNA, 15 bp, Homo sapiens
tcaggatcagttaca

SEQ ID NO: 1498783 - DNA, 15 bp, Homo sapiens
caggatcagttacat

SEQ ID NO: 1498784 - DNA, 15 bp, Homo sapiens
aggatcagttacata

SEQ ID NO: 1498785 - DNA, 15 bp, Homo sapiens
ggatcagttacatat

SEQ ID NO: 1498786 - DNA, 15 bp, Homo sapiens
gatcagttacatata

SEQ ID NO: 1498787 - DNA, 15 bp, Homo sapiens
atcagttacatatag

SEQ ID NO: 1498788 - DNA, 15 bp, Homo sapiens
tcagttacatatagc

SEQ ID NO: 1498789 - DNA, 15 bp, Homo sapiens
cagttacatatagca

SEQ ID NO: 1498790 - DNA, 15 bp, Homo sapiens
agttacatatagcac

SEQ ID NO: 1498791 - DNA, 15 bp, Homo sapiens
gttacatatagcaca

SEQ ID NO: 1498792 - DNA, 15 bp, Homo sapiens
ttacatatagcacag

SEQ ID NO: 1498793 - DNA, 15 bp, Homo sapiens
tacatatagcacagc

SEQ ID NO: 1498794 - DNA, 15 bp, Homo sapiens
acatatagcacagca

SEQ ID NO: 1498795 - DNA, 15 bp, Homo sapiens
catatagcacagcac

SEQ ID NO: 1498796 - DNA, 15 bp, Homo sapiens
atatagcacagcact

SEQ ID NO: 1498797 - DNA, 15 bp, Homo sapiens
tatagcacagcactg

SEQ ID NO: 1498798 - DNA, 15 bp, Homo sapiens
atagcacagcactgc

SEQ ID NO: 1498799 - DNA, 15 bp, Homo sapiens
tagcacagcactgca

SEQ ID NO: 1498800 - DNA, 15 bp, Homo sapiens
agcacagcactgcaa

SEQ ID NO: 1498801 - DNA, 15 bp, Homo sapiens
gcacagcactgcaaa

SEQ ID NO: 1498802 - DNA, 15 bp, Homo sapiens
cacagcactgcaaaa

SEQ ID NO: 1498803 - DNA, 15 bp, Homo sapiens
acagcactgcaaaac

SEQ ID NO: 1498804 - DNA, 15 bp, Homo sapiens
cagcactgcaaaacc

SEQ ID NO: 1498805 - DNA, 15 bp, Homo sapiens
agcactgcaaaacct

SEQ ID NO: 1498806 - DNA, 15 bp, Homo sapiens
gcactgcaaaacctt

SEQ ID NO: 1498807 - DNA, 15 bp, Homo sapiens
cactgcaaaaccttt

SEQ ID NO: 1498808 - DNA, 15 bp, Homo sapiens
actgcaaaacctttc

SEQ ID NO: 1498809 - DNA, 15 bp, Homo sapiens
ctgcaaaacctttca

SEQ ID NO: 1498810 - DNA, 15 bp, Homo sapiens
tgcaaaacctttcag

SEQ ID NO: 1498811 - DNA, 15 bp, Homo sapiens
gcaaaacctttcaga

SEQ ID NO: 1498812 - DNA, 15 bp, Homo sapiens
caaaacctttcagag

SEQ ID NO: 1498813 - DNA, 15 bp, Homo sapiens
aaaacctttcagaga

SEQ ID NO: 1498814 - DNA, 15 bp, Homo sapiens
aaacctttcagagaa

SEQ ID NO: 1498815 - DNA, 15 bp, Homo sapiens
aacctttcagagaaa

SEQ ID NO: 1498816 - DNA, 15 bp, Homo sapiens
acctttcagagaaac

SEQ ID NO: 1498817 - DNA, 15 bp, Homo sapiens
cctttcagagaaaca

SEQ ID NO: 1498818 - DNA, 15 bp, Homo sapiens
ctttcagagaaacaa

SEQ ID NO: 1498819 - DNA, 15 bp, Homo sapiens
tttcagagaaacaaa

SEQ ID NO: 1498820 - DNA, 15 bp, Homo sapiens
ttcagagaaacaaag

SEQ ID NO: 1498821 - DNA, 15 bp, Homo sapiens
tcagagaaacaaagg

SEQ ID NO: 1498822 - DNA, 15 bp, Homo sapiens
cagagaaacaaaggc

SEQ ID NO: 1498823 - DNA, 15 bp, Homo sapiens
agagaaacaaaggct

SEQ ID NO: 1498824 - DNA, 15 bp, Homo sapiens
gagaaacaaaggctc

SEQ ID NO: 1498825 - DNA, 15 bp, Homo sapiens
agaaacaaaggctct

SEQ ID NO: 1498826 - DNA, 15 bp, Homo sapiens
gaaacaaaggctctt

SEQ ID NO: 1498827 - DNA, 15 bp, Homo sapiens
aaacaaaggctcttc

SEQ ID NO: 1498828 - DNA, 15 bp, Homo sapiens
aacaaaggctcttct

SEQ ID NO: 1498829 - DNA, 15 bp, Homo sapiens
acaaaggctcttcta

SEQ ID NO: 1498830 - DNA, 15 bp, Homo sapiens
caaaggctcttctaa

SEQ ID NO: 1498831 - DNA, 15 bp, Homo sapiens
aaaggctcttctaag

SEQ ID NO: 1498832 - DNA, 15 bp, Homo sapiens
aaggctcttctaagg

SEQ ID NO: 1498833 - DNA, 15 bp, Homo sapiens
aggctcttctaaggg

SEQ ID NO: 1498834 - DNA, 15 bp, Homo sapiens
ggctcttctaaggga

SEQ ID NO: 1498835 - DNA, 15 bp, Homo sapiens
gctcttctaagggaa

SEQ ID NO: 1498836 - DNA, 15 bp, Homo sapiens
ctcttctaagggaag

SEQ ID NO: 1498837 - DNA, 15 bp, Homo sapiens
tcttctaagggaagg

SEQ ID NO: 1498838 - DNA, 15 bp, Homo sapiens
cttctaagggaagga

SEQ ID NO: 1498839 - DNA, 15 bp, Homo sapiens
ttctaagggaaggac

SEQ ID NO: 1498840 - DNA, 15 bp, Homo sapiens
tctaagggaaggacc

SEQ ID NO: 1498841 - DNA, 15 bp, Homo sapiens
ctaagggaaggacca

SEQ ID NO: 1498842 - DNA, 15 bp, Homo sapiens
taagggaaggaccat

SEQ ID NO: 1498843 - DNA, 15 bp, Homo sapiens
aagggaaggaccatt

SEQ ID NO: 1498844 - DNA, 15 bp, Homo sapiens
agggaaggaccattt

SEQ ID NO: 1498845 - DNA, 15 bp, Homo sapiens
gggaaggaccatttg

SEQ ID NO: 1498846 - DNA, 15 bp, Homo sapiens
ggaaggaccatttgg

SEQ ID NO: 1498847 - DNA, 15 bp, Homo sapiens
gaaggaccatttggc

SEQ ID NO: 1498848 - DNA, 15 bp, Homo sapiens
aaggaccatttggct

SEQ ID NO: 1498849 - DNA, 15 bp, Homo sapiens
aggaccatttggctt

SEQ ID NO: 1498850 - DNA, 15 bp, Homo sapiens
ggaccatttggctta

SEQ ID NO: 1498851 - DNA, 15 bp, Homo sapiens
gaccatttggcttaa

SEQ ID NO: 1498852 - DNA, 15 bp, Homo sapiens
accatttggcttaaa

SEQ ID NO: 1498853 - DNA, 15 bp, Homo sapiens
ccatttggcttaaaa

SEQ ID NO: 1498854 - DNA, 15 bp, Homo sapiens
catttggcttaaaat

SEQ ID NO: 1498855 - DNA, 15 bp, Homo sapiens
atttggcttaaaatc

SEQ ID NO: 1498856 - DNA, 15 bp, Homo sapiens
tttggcttaaaatcc

SEQ ID NO: 1498857 - DNA, 15 bp, Homo sapiens
ttggcttaaaatccg

SEQ ID NO: 1498858 - DNA, 15 bp, Homo sapiens
tggcttaaaatccgc

SEQ ID NO: 1498859 - DNA, 15 bp, Homo sapiens
ggcttaaaatccgca

SEQ ID NO: 1498860 - DNA, 15 bp, Homo sapiens
gcttaaaatccgcat

SEQ ID NO: 1498861 - DNA, 15 bp, Homo sapiens
cttaaaatccgcatg

SEQ ID NO: 1498862 - DNA, 15 bp, Homo sapiens
ttaaaatccgcatgg

SEQ ID NO: 1498863 - DNA, 15 bp, Homo sapiens
taaaatccgcatggg

SEQ ID NO: 1498864 - DNA, 15 bp, Homo sapiens
aaaatccgcatgggg

SEQ ID NO: 1498865 - DNA, 15 bp, Homo sapiens
aaatccgcatggggt

SEQ ID NO: 1498866 - DNA, 15 bp, Homo sapiens
aatccgcatggggtg

SEQ ID NO: 1498867 - DNA, 15 bp, Homo sapiens
atccgcatggggtgt

SEQ ID NO: 1498868 - DNA, 15 bp, Homo sapiens
tccgcatggggtgtg

SEQ ID NO: 1498869 - DNA, 15 bp, Homo sapiens
ccgcatggggtgtga

SEQ ID NO: 1498870 - DNA, 15 bp, Homo sapiens
cgcatggggtgtgaa

SEQ ID NO: 1498871 - DNA, 15 bp, Homo sapiens
gcatggggtgtgaag

SEQ ID NO: 1498872 - DNA, 15 bp, Homo sapiens
catggggtgtgaagg

SEQ ID NO: 1498873 - DNA, 15 bp, Homo sapiens
atggggtgtgaagga

SEQ ID NO: 1498874 - DNA, 15 bp, Homo sapiens
tggggtgtgaaggaa

SEQ ID NO: 1498875 - DNA, 15 bp, Homo sapiens
ggggtgtgaaggaaa

SEQ ID NO: 1498876 - DNA, 15 bp, Homo sapiens
gggtgtgaaggaaac

SEQ ID NO: 1498877 - DNA, 15 bp, Homo sapiens
ggtgtgaaggaaaca

SEQ ID NO: 1498878 - DNA, 15 bp, Homo sapiens
gtgtgaaggaaacag

SEQ ID NO: 1498879 - DNA, 15 bp, Homo sapiens
tgtgaaggaaacaga

SEQ ID NO: 1498880 - DNA, 15 bp, Homo sapiens
gtgaaggaaacagag

SEQ ID NO: 1498881 - DNA, 15 bp, Homo sapiens
tgaaggaaacagaga

SEQ ID NO: 1498882 - DNA, 15 bp, Homo sapiens
gaaggaaacagagag

SEQ ID NO: 1498883 - DNA, 15 bp, Homo sapiens
aaggaaacagagagc

SEQ ID NO: 1498884 - DNA, 15 bp, Homo sapiens
aggaaacagagagcc

SEQ ID NO: 1498885 - DNA, 15 bp, Homo sapiens
ggaaacagagagcca

SEQ ID NO: 1498886 - DNA, 15 bp, Homo sapiens
gaaacagagagccaa

SEQ ID NO: 1498887 - DNA, 15 bp, Homo sapiens
aaacagagagccaaa

SEQ ID NO: 1498888 - DNA, 15 bp, Homo sapiens
aacagagagccaaag

SEQ ID NO: 1498889 - DNA, 15 bp, Homo sapiens
acagagagccaaagg

SEQ ID NO: 1498890 - DNA, 15 bp, Homo sapiens
cagagagccaaaggc

SEQ ID NO: 1498891 - DNA, 15 bp, Homo sapiens
agagagccaaaggca

SEQ ID NO: 1498892 - DNA, 15 bp, Homo sapiens
gagagccaaaggcac

SEQ ID NO: 1498893 - DNA, 15 bp, Homo sapiens
agagccaaaggcact

SEQ ID NO: 1498894 - DNA, 15 bp, Homo sapiens
gagccaaaggcacta

SEQ ID NO: 1498895 - DNA, 15 bp, Homo sapiens
agccaaaggcactag

SEQ ID NO: 1498896 - DNA, 15 bp, Homo sapiens
gccaaaggcactagc

SEQ ID NO: 1498897 - DNA, 15 bp, Homo sapiens
ccaaaggcactagct

SEQ ID NO: 1498898 - DNA, 15 bp, Homo sapiens
caaaggcactagctg

SEQ ID NO: 1498899 - DNA, 15 bp, Homo sapiens
aaaggcactagctgg

SEQ ID NO: 1498900 - DNA, 15 bp, Homo sapiens
aaggcactagctggc

SEQ ID NO: 1498901 - DNA, 15 bp, Homo sapiens
aggcactagctggct

SEQ ID NO: 1498902 - DNA, 15 bp, Homo sapiens
ggcactagctggctg

SEQ ID NO: 1498903 - DNA, 15 bp, Homo sapiens
gcactagctggctgt

SEQ ID NO: 1498904 - DNA, 15 bp, Homo sapiens
cactagctggctgtc

SEQ ID NO: 1498905 - DNA, 15 bp, Homo sapiens
actagctggctgtct

SEQ ID NO: 1498906 - DNA, 15 bp, Homo sapiens
ctagctggctgtctt

SEQ ID NO: 1498907 - DNA, 15 bp, Homo sapiens
tagctggctgtcttg

SEQ ID NO: 1498908 - DNA, 15 bp, Homo sapiens
agctggctgtcttgc

SEQ ID NO: 1498909 - DNA, 15 bp, Homo sapiens
gctggctgtcttgcc

SEQ ID NO: 1498910 - DNA, 15 bp, Homo sapiens
ctggctgtcttgccc

SEQ ID NO: 1498911 - DNA, 15 bp, Homo sapiens
tggctgtcttgccca

SEQ ID NO: 1498912 - DNA, 15 bp, Homo sapiens
ggctgtcttgcccaa

SEQ ID NO: 1498913 - DNA, 15 bp, Homo sapiens
gctgtcttgcccaag

SEQ ID NO: 1498914 - DNA, 15 bp, Homo sapiens
ctgtcttgcccaagg

SEQ ID NO: 1498915 - DNA, 15 bp, Homo sapiens
tgtcttgcccaaggt

SEQ ID NO: 1498916 - DNA, 15 bp, Homo sapiens
gtcttgcccaaggtt

SEQ ID NO: 1498917 - DNA, 15 bp, Homo sapiens
tcttgcccaaggtta

SEQ ID NO: 1498918 - DNA, 15 bp, Homo sapiens
cttgcccaaggttac

SEQ ID NO: 1498919 - DNA, 15 bp, Homo sapiens
ttgcccaaggttaca

SEQ ID NO: 1498920 - DNA, 15 bp, Homo sapiens
tgcccaaggttacaa

SEQ ID NO: 1498921 - DNA, 15 bp, Homo sapiens
gcccaaggttacaac

SEQ ID NO: 1498922 - DNA, 15 bp, Homo sapiens
cccaaggttacaact

SEQ ID NO: 1498923 - DNA, 15 bp, Homo sapiens
ccaaggttacaactt

SEQ ID NO: 1498924 - DNA, 15 bp, Homo sapiens
caaggttacaacttt

SEQ ID NO: 1498925 - DNA, 15 bp, Homo sapiens
aaggttacaactttg

SEQ ID NO: 1498926 - DNA, 15 bp, Homo sapiens
aggttacaactttga

SEQ ID NO: 1498927 - DNA, 15 bp, Homo sapiens
ggttacaactttgat

SEQ ID NO: 1498928 - DNA, 15 bp, Homo sapiens
gttacaactttgatc

SEQ ID NO: 1498929 - DNA, 15 bp, Homo sapiens
ttacaactttgatca

SEQ ID NO: 1498930 - DNA, 15 bp, Homo sapiens
tacaactttgatcac

SEQ ID NO: 1498931 - DNA, 15 bp, Homo sapiens
acaactttgatcaca

SEQ ID NO: 1498932 - DNA, 15 bp, Homo sapiens
caactttgatcacac

SEQ ID NO: 1498933 - DNA, 15 bp, Homo sapiens
aactttgatcacaca

SEQ ID NO: 1498934 - DNA, 15 bp, Homo sapiens
actttgatcacacag

SEQ ID NO: 1498935 - DNA, 15 bp, Homo sapiens
ctttgatcacacagc

SEQ ID NO: 1498936 - DNA, 15 bp, Homo sapiens
tttgatcacacagca

SEQ ID NO: 1498937 - DNA, 15 bp, Homo sapiens
ttgatcacacagcac

SEQ ID NO: 1498938 - DNA, 15 bp, Homo sapiens
tgatcacacagcact

SEQ ID NO: 1498939 - DNA, 15 bp, Homo sapiens
gatcacacagcactt

SEQ ID NO: 1498940 - DNA, 15 bp, Homo sapiens
atcacacagcacttt

SEQ ID NO: 1498941 - DNA, 15 bp, Homo sapiens
tcacacagcactttg

SEQ ID NO: 1498942 - DNA, 15 bp, Homo sapiens
cacacagcactttgt

SEQ ID NO: 1498943 - DNA, 15 bp, Homo sapiens
acacagcactttgtg

SEQ ID NO: 1498944 - DNA, 15 bp, Homo sapiens
cacagcactttgtgt

SEQ ID NO: 1498945 - DNA, 15 bp, Homo sapiens
acagcactttgtgtt

SEQ ID NO: 1498946 - DNA, 15 bp, Homo sapiens
cagcactttgtgttt

SEQ ID NO: 1498947 - DNA, 15 bp, Homo sapiens
agcactttgtgtttc

SEQ ID NO: 1498948 - DNA, 15 bp, Homo sapiens
gcactttgtgtttcc

SEQ ID NO: 1498949 - DNA, 15 bp, Homo sapiens
cactttgtgtttcct

SEQ ID NO: 1498950 - DNA, 15 bp, Homo sapiens
actttgtgtttcctg

SEQ ID NO: 1498951 - DNA, 15 bp, Homo sapiens
ctttgtgtttcctgt

SEQ ID NO: 1498952 - DNA, 15 bp, Homo sapiens
tttgtgtttcctgtt

SEQ ID NO: 1498953 - DNA, 15 bp, Homo sapiens
ttgtgtttcctgtta

SEQ ID NO: 1498954 - DNA, 15 bp, Homo sapiens
tgtgtttcctgttaa

SEQ ID NO: 1498955 - DNA, 15 bp, Homo sapiens
gtgtttcctgttaac

SEQ ID NO: 1498956 - DNA, 15 bp, Homo sapiens
tgtttcctgttaaca

SEQ ID NO: 1498957 - DNA, 15 bp, Homo sapiens
gtttcctgttaacaa

SEQ ID NO: 1498958 - DNA, 15 bp, Homo sapiens
tttcctgttaacaat

SEQ ID NO: 1498959 - DNA, 15 bp, Homo sapiens
ttcctgttaacaatt

SEQ ID NO: 1498960 - DNA, 15 bp, Homo sapiens
tcctgttaacaattt

SEQ ID NO: 1498961 - DNA, 15 bp, Homo sapiens
cctgttaacaattta

SEQ ID NO: 1498962 - DNA, 15 bp, Homo sapiens
ctgttaacaatttat

SEQ ID NO: 1498963 - DNA, 15 bp, Homo sapiens
tgttaacaatttata

SEQ ID NO: 1498964 - DNA, 15 bp, Homo sapiens
gttaacaatttataa

SEQ ID NO: 1498965 - DNA, 15 bp, Homo sapiens
ttaacaatttataat

SEQ ID NO: 1498966 - DNA, 15 bp, Homo sapiens
taacaatttataatt

SEQ ID NO: 1498967 - DNA, 15 bp, Homo sapiens
aacaatttataattt

SEQ ID NO: 1498968 - DNA, 15 bp, Homo sapiens
acaatttataattta

SEQ ID NO: 1498969 - DNA, 15 bp, Homo sapiens
caatttataatttaa

SEQ ID NO: 1498970 - DNA, 15 bp, Homo sapiens
aatttataatttaat

SEQ ID NO: 1498971 - DNA, 15 bp, Homo sapiens
atttataatttaata

SEQ ID NO: 1498972 - DNA, 15 bp, Homo sapiens
tttataatttaataa

SEQ ID NO: 1498973 - DNA, 15 bp, Homo sapiens
ttataatttaataat

SEQ ID NO: 1498974 - DNA, 15 bp, Homo sapiens
tataatttaataatg

SEQ ID NO: 1498975 - DNA, 15 bp, Homo sapiens
ataatttaataatga

SEQ ID NO: 1498976 - DNA, 15 bp, Homo sapiens
taatttaataatgac

SEQ ID NO: 1498977 - DNA, 15 bp, Homo sapiens
aatttaataatgacc

SEQ ID NO: 1498978 - DNA, 15 bp, Homo sapiens
atttaataatgacca

SEQ ID NO: 1498979 - DNA, 15 bp, Homo sapiens
tttaataatgaccag

SEQ ID NO: 1498980 - DNA, 15 bp, Homo sapiens
ttaataatgaccaga

SEQ ID NO: 1498981 - DNA, 15 bp, Homo sapiens
taataatgaccagaa

SEQ ID NO: 1498982 - DNA, 15 bp, Homo sapiens
aataatgaccagaac

SEQ ID NO: 1498983 - DNA, 15 bp, Homo sapiens
ataatgaccagaaca

SEQ ID NO: 1498984 - DNA, 15 bp, Homo sapiens
taatgaccagaacat

SEQ ID NO: 1498985 - DNA, 15 bp, Homo sapiens
aatgaccagaacatt

SEQ ID NO: 1498986 - DNA, 15 bp, Homo sapiens
atgaccagaacattt

SEQ ID NO: 1498987 - DNA, 15 bp, Homo sapiens
tgaccagaacattta

SEQ ID NO: 1498988 - DNA, 15 bp, Homo sapiens
gaccagaacatttag

SEQ ID NO: 1498989 - DNA, 15 bp, Homo sapiens
accagaacatttagt

SEQ ID NO: 1498990 - DNA, 15 bp, Homo sapiens
ccagaacatttagtg

SEQ ID NO: 1498991 - DNA, 15 bp, Homo sapiens
cagaacatttagtgg

SEQ ID NO: 1498992 - DNA, 15 bp, Homo sapiens
agaacatttagtgga

SEQ ID NO: 1498993 - DNA, 15 bp, Homo sapiens
gaacatttagtggaa

SEQ ID NO: 1498994 - DNA, 15 bp, Homo sapiens
aacatttagtggaag

SEQ ID NO: 1498995 - DNA, 15 bp, Homo sapiens
acatttagtggaaga

SEQ ID NO: 1498996 - DNA, 15 bp, Homo sapiens
catttagtggaagaa

SEQ ID NO: 1498997 - DNA, 15 bp, Homo sapiens
atttagtggaagaat

SEQ ID NO: 1498998 - DNA, 15 bp, Homo sapiens
tttagtggaagaatt

SEQ ID NO: 1498999 - DNA, 15 bp, Homo sapiens
ttagtggaagaatta

SEQ ID NO: 1499000 - DNA, 15 bp, Homo sapiens
tagtggaagaattat

SEQ ID NO: 1499001 - DNA, 15 bp, Homo sapiens
agtggaagaattata

SEQ ID NO: 1499002 - DNA, 15 bp, Homo sapiens
gtggaagaattatac

SEQ ID NO: 1499003 - DNA, 15 bp, Homo sapiens
tggaagaattataca

SEQ ID NO: 1499004 - DNA, 15 bp, Homo sapiens
ggaagaattatacaa

SEQ ID NO: 1499005 - DNA, 15 bp, Homo sapiens
gaagaattatacaac

SEQ ID NO: 1499006 - DNA, 15 bp, Homo sapiens
aagaattatacaaca

SEQ ID NO: 1499007 - DNA, 15 bp, Homo sapiens
agaattatacaacat

SEQ ID NO: 1499008 - DNA, 15 bp, Homo sapiens
gaattatacaacata

SEQ ID NO: 1499009 - DNA, 15 bp, Homo sapiens
aattatacaacataa

SEQ ID NO: 1499010 - DNA, 15 bp, Homo sapiens
attatacaacataat

SEQ ID NO: 1499011 - DNA, 15 bp, Homo sapiens
ttatacaacataatg

SEQ ID NO: 1499012 - DNA, 15 bp, Homo sapiens
tatacaacataatga

SEQ ID NO: 1499013 - DNA, 15 bp, Homo sapiens
atacaacataatgaa

SEQ ID NO: 1499014 - DNA, 15 bp, Homo sapiens
tacaacataatgaat

SEQ ID NO: 1499015 - DNA, 15 bp, Homo sapiens
acaacataatgaatc

SEQ ID NO: 1499016 - DNA, 15 bp, Homo sapiens
caacataatgaatcc

SEQ ID NO: 1499017 - DNA, 15 bp, Homo sapiens
aacataatgaatccg

SEQ ID NO: 1499018 - DNA, 15 bp, Homo sapiens
acataatgaatccgc

SEQ ID NO: 1499019 - DNA, 15 bp, Homo sapiens
cataatgaatccgct

SEQ ID NO: 1499020 - DNA, 15 bp, Homo sapiens
ataatgaatccgctt

SEQ ID NO: 1499021 - DNA, 15 bp, Homo sapiens
taatgaatccgcttt

SEQ ID NO: 1499022 - DNA, 15 bp, Homo sapiens
aatgaatccgctttt

SEQ ID NO: 1499023 - DNA, 15 bp, Homo sapiens
atgaatccgctttta

SEQ ID NO: 1499024 - DNA, 15 bp, Homo sapiens
tgaatccgcttttaa

SEQ ID NO: 1499025 - DNA, 15 bp, Homo sapiens
gaatccgcttttaaa

SEQ ID NO: 1499026 - DNA, 15 bp, Homo sapiens
aatccgcttttaaac

SEQ ID NO: 1499027 - DNA, 15 bp, Homo sapiens
atccgcttttaaaca

SEQ ID NO: 1499028 - DNA, 15 bp, Homo sapiens
tccgcttttaaacat

SEQ ID NO: 1499029 - DNA, 15 bp, Homo sapiens
ccgcttttaaacatt

SEQ ID NO: 1499030 - DNA, 15 bp, Homo sapiens
cgcttttaaacattt

SEQ ID NO: 1499031 - DNA, 15 bp, Homo sapiens
gcttttaaacatttg

SEQ ID NO: 1499032 - DNA, 15 bp, Homo sapiens
cttttaaacatttgt

SEQ ID NO: 1499033 - DNA, 15 bp, Homo sapiens
ttttaaacatttgtg

SEQ ID NO: 1499034 - DNA, 15 bp, Homo sapiens
tttaaacatttgtgt

SEQ ID NO: 1499035 - DNA, 15 bp, Homo sapiens
ttaaacatttgtgtt

SEQ ID NO: 1499036 - DNA, 15 bp, Homo sapiens
taaacatttgtgttt

SEQ ID NO: 1499037 - DNA, 15 bp, Homo sapiens
aaacatttgtgtttt

SEQ ID NO: 1499038 - DNA, 15 bp, Homo sapiens
aacatttgtgttttt

SEQ ID NO: 1499039 - DNA, 15 bp, Homo sapiens
acatttgtgtttttc

SEQ ID NO: 1499040 - DNA, 15 bp, Homo sapiens
catttgtgtttttca

SEQ ID NO: 1499041 - DNA, 15 bp, Homo sapiens
atttgtgtttttcat

SEQ ID NO: 1499042 - DNA, 15 bp, Homo sapiens
tttgtgtttttcatt

SEQ ID NO: 1499043 - DNA, 15 bp, Homo sapiens
ttgtgtttttcattt

SEQ ID NO: 1499044 - DNA, 15 bp, Homo sapiens
tgtgtttttcatttg

SEQ ID NO: 1499045 - DNA, 15 bp, Homo sapiens
gtgtttttcatttgt

SEQ ID NO: 1499046 - DNA, 15 bp, Homo sapiens
tgtttttcatttgtt

SEQ ID NO: 1499047 - DNA, 15 bp, Homo sapiens
gtttttcatttgttt

SEQ ID NO: 1499048 - DNA, 15 bp, Homo sapiens
tttttcatttgtttc

SEQ ID NO: 1499049 - DNA, 15 bp, Homo sapiens
ttttcatttgtttcc

SEQ ID NO: 1499050 - DNA, 15 bp, Homo sapiens
tttcatttgtttcct

SEQ ID NO: 1499051 - DNA, 15 bp, Homo sapiens
ttcatttgtttcctt

SEQ ID NO: 1499052 - DNA, 15 bp, Homo sapiens
tcatttgtttccttc

SEQ ID NO: 1499053 - DNA, 15 bp, Homo sapiens
catttgtttccttct

SEQ ID NO: 1499054 - DNA, 15 bp, Homo sapiens
atttgtttccttctc

SEQ ID NO: 1499055 - DNA, 15 bp, Homo sapiens
tttgtttccttctct

SEQ ID NO: 1499056 - DNA, 15 bp, Homo sapiens
ttgtttccttctctc

SEQ ID NO: 1499057 - DNA, 15 bp, Homo sapiens
tgtttccttctctcc

SEQ ID NO: 1499058 - DNA, 15 bp, Homo sapiens
gtttccttctctcct

SEQ ID NO: 1499059 - DNA, 15 bp, Homo sapiens
tttccttctctccta

SEQ ID NO: 1499060 - DNA, 15 bp, Homo sapiens
ttccttctctcctat

SEQ ID NO: 1499061 - DNA, 15 bp, Homo sapiens
tccttctctcctatc

SEQ ID NO: 1499062 - DNA, 15 bp, Homo sapiens
ccttctctcctatcc

SEQ ID NO: 1499063 - DNA, 15 bp, Homo sapiens
cttctctcctatccc

SEQ ID NO: 1499064 - DNA, 15 bp, Homo sapiens
ttctctcctatccca

SEQ ID NO: 1499065 - DNA, 15 bp, Homo sapiens
tctctcctatcccac

SEQ ID NO: 1499066 - DNA, 15 bp, Homo sapiens
ctctcctatcccacc

SEQ ID NO: 1499067 - DNA, 15 bp, Homo sapiens
tctcctatcccaccc

SEQ ID NO: 1499068 - DNA, 15 bp, Homo sapiens
ctcctatcccaccct

SEQ ID NO: 1499069 - DNA, 15 bp, Homo sapiens
tcctatcccaccctg

SEQ ID NO: 1499070 - DNA, 15 bp, Homo sapiens
cctatcccaccctga

SEQ ID NO: 1499071 - DNA, 15 bp, Homo sapiens
ctatcccaccctgag

SEQ ID NO: 1499072 - DNA, 15 bp, Homo sapiens
tatcccaccctgagc

SEQ ID NO: 1499073 - DNA, 15 bp, Homo sapiens
atcccaccctgagcc

SEQ ID NO: 1499074 - DNA, 15 bp, Homo sapiens
tcccaccctgagcca

SEQ ID NO: 1499075 - DNA, 15 bp, Homo sapiens
cccaccctgagccag

SEQ ID NO: 1499076 - DNA, 15 bp, Homo sapiens
ccaccctgagccagt

SEQ ID NO: 1499077 - DNA, 15 bp, Homo sapiens
caccctgagccagtc

SEQ ID NO: 1499078 - DNA, 15 bp, Homo sapiens
accctgagccagtcc

SEQ ID NO: 1499079 - DNA, 15 bp, Homo sapiens
ccctgagccagtcct

SEQ ID NO: 1499080 - DNA, 15 bp, Homo sapiens
cctgagccagtcctg

SEQ ID NO: 1499081 - DNA, 15 bp, Homo sapiens
ctgagccagtcctgt

SEQ ID NO: 1499082 - DNA, 15 bp, Homo sapiens
tgagccagtcctgtt

SEQ ID NO: 1499083 - DNA, 15 bp, Homo sapiens
gagccagtcctgttt

SEQ ID NO: 1499084 - DNA, 15 bp, Homo sapiens
agccagtcctgtttc

SEQ ID NO: 1499085 - DNA, 15 bp, Homo sapiens
gccagtcctgtttct

SEQ ID NO: 1499086 - DNA, 15 bp, Homo sapiens
ccagtcctgtttctg

SEQ ID NO: 1499087 - DNA, 15 bp, Homo sapiens
cagtcctgtttctgc

SEQ ID NO: 1499088 - DNA, 15 bp, Homo sapiens
agtcctgtttctgcc

SEQ ID NO: 1499089 - DNA, 15 bp, Homo sapiens
gtcctgtttctgcca

SEQ ID NO: 1499090 - DNA, 15 bp, Homo sapiens
tcctgtttctgccac

SEQ ID NO: 1499091 - DNA, 15 bp, Homo sapiens
cctgtttctgccact

SEQ ID NO: 1499092 - DNA, 15 bp, Homo sapiens
ctgtttctgccactg

SEQ ID NO: 1499093 - DNA, 15 bp, Homo sapiens
tgtttctgccactgt

SEQ ID NO: 1499094 - DNA, 15 bp, Homo sapiens
gtttctgccactgtt

SEQ ID NO: 1499095 - DNA, 15 bp, Homo sapiens
tttctgccactgttt

SEQ ID NO: 1499096 - DNA, 15 bp, Homo sapiens
ttctgccactgtttt

SEQ ID NO: 1499097 - DNA, 15 bp, Homo sapiens
tctgccactgttttt

SEQ ID NO: 1499098 - DNA, 15 bp, Homo sapiens
ctgccactgtttttc

SEQ ID NO: 1499099 - DNA, 15 bp, Homo sapiens
tgccactgtttttcc

SEQ ID NO: 1499100 - DNA, 15 bp, Homo sapiens
gccactgtttttcct

SEQ ID NO: 1499101 - DNA, 15 bp, Homo sapiens
ccactgtttttcctt

SEQ ID NO: 1499102 - DNA, 15 bp, Homo sapiens
cactgtttttccttt

SEQ ID NO: 1499103 - DNA, 15 bp, Homo sapiens
actgtttttcctttc

SEQ ID NO: 1499104 - DNA, 15 bp, Homo sapiens
ctgtttttcctttcc

SEQ ID NO: 1499105 - DNA, 15 bp, Homo sapiens
tgtttttcctttcca

SEQ ID NO: 1499106 - DNA, 15 bp, Homo sapiens
gtttttcctttccaa

SEQ ID NO: 1499107 - DNA, 15 bp, Homo sapiens
tttttcctttccaaa

SEQ ID NO: 1499108 - DNA, 15 bp, Homo sapiens
ttttcctttccaaat

SEQ ID NO: 1499109 - DNA, 15 bp, Homo sapiens
tttcctttccaaatc

SEQ ID NO: 1499110 - DNA, 15 bp, Homo sapiens
ttcctttccaaatca

SEQ ID NO: 1499111 - DNA, 15 bp, Homo sapiens
tcctttccaaatcag

SEQ ID NO: 1499112 - DNA, 15 bp, Homo sapiens
cctttccaaatcaga

SEQ ID NO: 1499113 - DNA, 15 bp, Homo sapiens
ctttccaaatcagat

SEQ ID NO: 1499114 - DNA, 15 bp, Homo sapiens
tttccaaatcagatt

SEQ ID NO: 1499115 - DNA, 15 bp, Homo sapiens
ttccaaatcagattt

SEQ ID NO: 1499116 - DNA, 15 bp, Homo sapiens
tccaaatcagatttc

SEQ ID NO: 1499117 - DNA, 15 bp, Homo sapiens
ccaaatcagatttct

SEQ ID NO: 1499118 - DNA, 15 bp, Homo sapiens
caaatcagatttctt

SEQ ID NO: 1499119 - DNA, 15 bp, Homo sapiens
aaatcagatttcttg

SEQ ID NO: 1499120 - DNA, 15 bp, Homo sapiens
aatcagatttcttga

SEQ ID NO: 1499121 - DNA, 15 bp, Homo sapiens
atcagatttcttgag

SEQ ID NO: 1499122 - DNA, 15 bp, Homo sapiens
tcagatttcttgagt

SEQ ID NO: 1499123 - DNA, 15 bp, Homo sapiens
cagatttcttgagtt

SEQ ID NO: 1499124 - DNA, 15 bp, Homo sapiens
agatttcttgagttt

SEQ ID NO: 1499125 - DNA, 15 bp, Homo sapiens
gatttcttgagtttt

SEQ ID NO: 1499126 - DNA, 15 bp, Homo sapiens
atttcttgagttttg

SEQ ID NO: 1499127 - DNA, 15 bp, Homo sapiens
tttcttgagttttgt

SEQ ID NO: 1499128 - DNA, 15 bp, Homo sapiens
ttcttgagttttgtc

SEQ ID NO: 1499129 - DNA, 15 bp, Homo sapiens
tcttgagttttgtca

SEQ ID NO: 1499130 - DNA, 15 bp, Homo sapiens
cttgagttttgtcat

SEQ ID NO: 1499131 - DNA, 15 bp, Homo sapiens
ttgagttttgtcatg

SEQ ID NO: 1499132 - DNA, 15 bp, Homo sapiens
tgagttttgtcatga

SEQ ID NO: 1499133 - DNA, 15 bp, Homo sapiens
gagttttgtcatgaa

SEQ ID NO: 1499134 - DNA, 15 bp, Homo sapiens
agttttgtcatgaac

SEQ ID NO: 1499135 - DNA, 15 bp, Homo sapiens
gttttgtcatgaacg

SEQ ID NO: 1499136 - DNA, 15 bp, Homo sapiens
ttttgtcatgaacgc

SEQ ID NO: 1499137 - DNA, 15 bp, Homo sapiens
tttgtcatgaacgct

SEQ ID NO: 1499138 - DNA, 15 bp, Homo sapiens
ttgtcatgaacgctg

SEQ ID NO: 1499139 - DNA, 15 bp, Homo sapiens
tgtcatgaacgctga

SEQ ID NO: 1499140 - DNA, 15 bp, Homo sapiens
gtcatgaacgctgaa

SEQ ID NO: 1499141 - DNA, 15 bp, Homo sapiens
tcatgaacgctgaat

SEQ ID NO: 1499142 - DNA, 15 bp, Homo sapiens
catgaacgctgaatt

SEQ ID NO: 1499143 - DNA, 15 bp, Homo sapiens
atgaacgctgaattt

SEQ ID NO: 1499144 - DNA, 15 bp, Homo sapiens
tgaacgctgaatttc

SEQ ID NO: 1499145 - DNA, 15 bp, Homo sapiens
gaacgctgaatttct

SEQ ID NO: 1499146 - DNA, 15 bp, Homo sapiens
aacgctgaatttcta

SEQ ID NO: 1499147 - DNA, 15 bp, Homo sapiens
acgctgaatttctat

SEQ ID NO: 1499148 - DNA, 15 bp, Homo sapiens
cgctgaatttctatg

SEQ ID NO: 1499149 - DNA, 15 bp, Homo sapiens
gctgaatttctatgg

SEQ ID NO: 1499150 - DNA, 15 bp, Homo sapiens
ctgaatttctatgga

SEQ ID NO: 1499151 - DNA, 15 bp, Homo sapiens
tgaatttctatggat

SEQ ID NO: 1499152 - DNA, 15 bp, Homo sapiens
gaatttctatggatt

SEQ ID NO: 1499153 - DNA, 15 bp, Homo sapiens
aatttctatggattc

SEQ ID NO: 1499154 - DNA, 15 bp, Homo sapiens
atttctatggattca

SEQ ID NO: 1499155 - DNA, 15 bp, Homo sapiens
tttctatggattcat

SEQ ID NO: 1499156 - DNA, 15 bp, Homo sapiens
ttctatggattcatt

SEQ ID NO: 1499157 - DNA, 15 bp, Homo sapiens
tctatggattcattc

SEQ ID NO: 1499158 - DNA, 15 bp, Homo sapiens
ctatggattcattct

SEQ ID NO: 1499159 - DNA, 15 bp, Homo sapiens
tatggattcattcta

SEQ ID NO: 1499160 - DNA, 15 bp, Homo sapiens
atggattcattctac

SEQ ID NO: 1499161 - DNA, 15 bp, Homo sapiens
tggattcattctaca

SEQ ID NO: 1499162 - DNA, 15 bp, Homo sapiens
ggattcattctacat

SEQ ID NO: 1499163 - DNA, 15 bp, Homo sapiens
gattcattctacatt

SEQ ID NO: 1499164 - DNA, 15 bp, Homo sapiens
attcattctacattg

SEQ ID NO: 1499165 - DNA, 15 bp, Homo sapiens
ttcattctacattgt

SEQ ID NO: 1499166 - DNA, 15 bp, Homo sapiens
tcattctacattgtg

SEQ ID NO: 1499167 - DNA, 15 bp, Homo sapiens
cattctacattgtga

SEQ ID NO: 1499168 - DNA, 15 bp, Homo sapiens
attctacattgtgag

SEQ ID NO: 1499169 - DNA, 15 bp, Homo sapiens
ttctacattgtgagt

SEQ ID NO: 1499170 - DNA, 15 bp, Homo sapiens
tctacattgtgagtc

SEQ ID NO: 1499171 - DNA, 15 bp, Homo sapiens
ctacattgtgagtca

SEQ ID NO: 1499172 - DNA, 15 bp, Homo sapiens
tacattgtgagtcag

SEQ ID NO: 1499173 - DNA, 15 bp, Homo sapiens
acattgtgagtcaga

SEQ ID NO: 1499174 - DNA, 15 bp, Homo sapiens
cattgtgagtcagat

SEQ ID NO: 1499175 - DNA, 15 bp, Homo sapiens
attgtgagtcagatt

SEQ ID NO: 1499176 - DNA, 15 bp, Homo sapiens
ttgtgagtcagattt

SEQ ID NO: 1499177 - DNA, 15 bp, Homo sapiens
tgtgagtcagatttc

SEQ ID NO: 1499178 - DNA, 15 bp, Homo sapiens
gtgagtcagatttca

SEQ ID NO: 1499179 - DNA, 15 bp, Homo sapiens
tgagtcagatttcac

SEQ ID NO: 1499180 - DNA, 15 bp, Homo sapiens
gagtcagatttcact

SEQ ID NO: 1499181 - DNA, 15 bp, Homo sapiens
agtcagatttcactt

SEQ ID NO: 1499182 - DNA, 15 bp, Homo sapiens
gtcagatttcacttt

SEQ ID NO: 1499183 - DNA, 15 bp, Homo sapiens
tcagatttcactttt

SEQ ID NO: 1499184 - DNA, 15 bp, Homo sapiens
cagatttcacttttt

SEQ ID NO: 1499185 - DNA, 15 bp, Homo sapiens
agatttcactttttg

SEQ ID NO: 1499186 - DNA, 15 bp, Homo sapiens
gatttcactttttga

SEQ ID NO: 1499187 - DNA, 15 bp, Homo sapiens
atttcactttttgac

SEQ ID NO: 1499188 - DNA, 15 bp, Homo sapiens
tttcactttttgacc

SEQ ID NO: 1499189 - DNA, 15 bp, Homo sapiens
ttcactttttgacct

SEQ ID NO: 1499190 - DNA, 15 bp, Homo sapiens
tcactttttgaccta

SEQ ID NO: 1499191 - DNA, 15 bp, Homo sapiens
cactttttgacctat

SEQ ID NO: 1499192 - DNA, 15 bp, Homo sapiens
actttttgacctatt

SEQ ID NO: 1499193 - DNA, 15 bp, Homo sapiens
ctttttgacctattt

SEQ ID NO: 1499194 - DNA, 15 bp, Homo sapiens
tttttgacctatttt

SEQ ID NO: 1499195 - DNA, 15 bp, Homo sapiens
ttttgacctatttta

SEQ ID NO: 1499196 - DNA, 15 bp, Homo sapiens
tttgacctattttaa

SEQ ID NO: 1499197 - DNA, 15 bp, Homo sapiens
ttgacctattttaat

SEQ ID NO: 1499198 - DNA, 15 bp, Homo sapiens
tgacctattttaata

SEQ ID NO: 1499199 - DNA, 15 bp, Homo sapiens
gacctattttaatat

SEQ ID NO: 1499200 - DNA, 15 bp, Homo sapiens
acctattttaatatg

SEQ ID NO: 1499201 - DNA, 15 bp, Homo sapiens
cctattttaatatgc

SEQ ID NO: 1499202 - DNA, 15 bp, Homo sapiens
ctattttaatatgct

SEQ ID NO: 1499203 - DNA, 15 bp, Homo sapiens
tattttaatatgctg

SEQ ID NO: 1499204 - DNA, 15 bp, Homo sapiens
attttaatatgctgt

SEQ ID NO: 1499205 - DNA, 15 bp, Homo sapiens
ttttaatatgctgtt

SEQ ID NO: 1499206 - DNA, 15 bp, Homo sapiens
tttaatatgctgttg

SEQ ID NO: 1499207 - DNA, 15 bp, Homo sapiens
ttaatatgctgttgc

SEQ ID NO: 1499208 - DNA, 15 bp, Homo sapiens
taatatgctgttgca

SEQ ID NO: 1499209 - DNA, 15 bp, Homo sapiens
aatatgctgttgcaa

SEQ ID NO: 1499210 - DNA, 15 bp, Homo sapiens
atatgctgttgcaaa

SEQ ID NO: 1499211 - DNA, 15 bp, Homo sapiens
tatgctgttgcaaat

SEQ ID NO: 1499212 - DNA, 15 bp, Homo sapiens
atgctgttgcaaatg

SEQ ID NO: 1499213 - DNA, 15 bp, Homo sapiens
tgctgttgcaaatgt

SEQ ID NO: 1499214 - DNA, 15 bp, Homo sapiens
gctgttgcaaatgtc

SEQ ID NO: 1499215 - DNA, 15 bp, Homo sapiens
ctgttgcaaatgtct

SEQ ID NO: 1499216 - DNA, 15 bp, Homo sapiens
tgttgcaaatgtctg

SEQ ID NO: 1499217 - DNA, 15 bp, Homo sapiens
gttgcaaatgtctgt

SEQ ID NO: 1499218 - DNA, 15 bp, Homo sapiens
ttgcaaatgtctgta

SEQ ID NO: 1499219 - DNA, 15 bp, Homo sapiens
tgcaaatgtctgtaa

SEQ ID NO: 1499220 - DNA, 15 bp, Homo sapiens
gcaaatgtctgtaag

SEQ ID NO: 1499221 - DNA, 15 bp, Homo sapiens
caaatgtctgtaaga

SEQ ID NO: 1499222 - DNA, 15 bp, Homo sapiens
aaatgtctgtaagag

SEQ ID NO: 1499223 - DNA, 15 bp, Homo sapiens
aatgtctgtaagaga

SEQ ID NO: 1499224 - DNA, 15 bp, Homo sapiens
atgtctgtaagagag

SEQ ID NO: 1499225 - DNA, 15 bp, Homo sapiens
tgtctgtaagagaga

SEQ ID NO: 1499226 - DNA, 15 bp, Homo sapiens
gtctgtaagagagaa

SEQ ID NO: 1499227 - DNA, 15 bp, Homo sapiens
tctgtaagagagaaa

SEQ ID NO: 1499228 - DNA, 15 bp, Homo sapiens
ctgtaagagagaaaa

SEQ ID NO: 1499229 - DNA, 15 bp, Homo sapiens
tgtaagagagaaaat

SEQ ID NO: 1499230 - DNA, 15 bp, Homo sapiens
gtaagagagaaaata

SEQ ID NO: 1499231 - DNA, 15 bp, Homo sapiens
taagagagaaaatac

SEQ ID NO: 1499232 - DNA, 15 bp, Homo sapiens
aagagagaaaataca

SEQ ID NO: 1499233 - DNA, 15 bp, Homo sapiens
agagagaaaatacat

SEQ ID NO: 1499234 - DNA, 15 bp, Homo sapiens
gagagaaaatacatt

SEQ ID NO: 1499235 - DNA, 15 bp, Homo sapiens
agagaaaatacattt

SEQ ID NO: 1499236 - DNA, 15 bp, Homo sapiens
gagaaaatacatttt

SEQ ID NO: 1499237 - DNA, 15 bp, Homo sapiens
agaaaatacatttta

SEQ ID NO: 1499238 - DNA, 15 bp, Homo sapiens
gaaaatacattttag

SEQ ID NO: 1499239 - DNA, 15 bp, Homo sapiens
aaaatacattttagt

SEQ ID NO: 1499240 - DNA, 15 bp, Homo sapiens
aaatacattttagtg

SEQ ID NO: 1499241 - DNA, 15 bp, Homo sapiens
aatacattttagtgg

SEQ ID NO: 1499242 - DNA, 15 bp, Homo sapiens
atacattttagtggc

SEQ ID NO: 1499243 - DNA, 15 bp, Homo sapiens
tacattttagtggca

SEQ ID NO: 1499244 - DNA, 15 bp, Homo sapiens
acattttagtggcaa

SEQ ID NO: 1499245 - DNA, 15 bp, Homo sapiens
cattttagtggcaaa

SEQ ID NO: 1499246 - DNA, 15 bp, Homo sapiens
attttagtggcaaac

SEQ ID NO: 1499247 - DNA, 15 bp, Homo sapiens
ttttagtggcaaacg

SEQ ID NO: 1499248 - DNA, 15 bp, Homo sapiens
tttagtggcaaacgc

SEQ ID NO: 1499249 - DNA, 15 bp, Homo sapiens
ttagtggcaaacgca

SEQ ID NO: 1499250 - DNA, 15 bp, Homo sapiens
tagtggcaaacgcat

SEQ ID NO: 1499251 - DNA, 15 bp, Homo sapiens
agtggcaaacgcatt

SEQ ID NO: 1499252 - DNA, 15 bp, Homo sapiens
gtggcaaacgcatta

SEQ ID NO: 1499253 - DNA, 15 bp, Homo sapiens
tggcaaacgcattag

SEQ ID NO: 1499254 - DNA, 15 bp, Homo sapiens
ggcaaacgcattaga

SEQ ID NO: 1499255 - DNA, 15 bp, Homo sapiens
gcaaacgcattagat

SEQ ID NO: 1499256 - DNA, 15 bp, Homo sapiens
caaacgcattagatt

SEQ ID NO: 1499257 - DNA, 15 bp, Homo sapiens
aaacgcattagattg

SEQ ID NO: 1499258 - DNA, 15 bp, Homo sapiens
aacgcattagattga

SEQ ID NO: 1499259 - DNA, 15 bp, Homo sapiens
acgcattagattgaa

SEQ ID NO: 1499260 - DNA, 15 bp, Homo sapiens
cgcattagattgaag

SEQ ID NO: 1499261 - DNA, 15 bp, Homo sapiens
gcattagattgaagg

SEQ ID NO: 1499262 - DNA, 15 bp, Homo sapiens
cattagattgaaggt

SEQ ID NO: 1499263 - DNA, 15 bp, Homo sapiens
attagattgaaggtc

SEQ ID NO: 1499264 - DNA, 15 bp, Homo sapiens
ttagattgaaggtca

SEQ ID NO: 1499265 - DNA, 15 bp, Homo sapiens
tagattgaaggtcag

SEQ ID NO: 1499266 - DNA, 15 bp, Homo sapiens
agattgaaggtcagg

SEQ ID NO: 1499267 - DNA, 15 bp, Homo sapiens
gattgaaggtcaggg

SEQ ID NO: 1499268 - DNA, 15 bp, Homo sapiens
attgaaggtcagggc

SEQ ID NO: 1499269 - DNA, 15 bp, Homo sapiens
ttgaaggtcagggca

SEQ ID NO: 1499270 - DNA, 15 bp, Homo sapiens
aaggtcagggcacct

SEQ ID NO: 1499271 - DNA, 15 bp, Homo sapiens
aggtcagggcacctt

SEQ ID NO: 1499272 - DNA, 15 bp, Homo sapiens
ggtcagggcaccttt

SEQ ID NO: 1499273 - DNA, 15 bp, Homo sapiens
gtcagggcacctttg

SEQ ID NO: 1499274 - DNA, 15 bp, Homo sapiens
tcagggcacctttgg

SEQ ID NO: 1499275 - DNA, 15 bp, Homo sapiens
cagggcacctttggc

SEQ ID NO: 1499276 - DNA, 15 bp, Homo sapiens
agggcacctttggct

SEQ ID NO: 1499277 - DNA, 15 bp, Homo sapiens
gggcacctttggctt

SEQ ID NO: 1499278 - DNA, 15 bp, Homo sapiens
ggcacctttggcttc

SEQ ID NO: 1499279 - DNA, 15 bp, Homo sapiens
gcacctttggcttcc

SEQ ID NO: 1499280 - DNA, 15 bp, Homo sapiens
cacctttggcttcct

SEQ ID NO: 1499281 - DNA, 15 bp, Homo sapiens
acctttggcttcctg

SEQ ID NO: 1499282 - DNA, 15 bp, Homo sapiens
cctttggcttcctgt

SEQ ID NO: 1499283 - DNA, 15 bp, Homo sapiens
ctttggcttcctgtg

SEQ ID NO: 1499284 - DNA, 15 bp, Homo sapiens
tttggcttcctgtga

SEQ ID NO: 1499285 - DNA, 15 bp, Homo sapiens
ttggcttcctgtgag

SEQ ID NO: 1499286 - DNA, 15 bp, Homo sapiens
tggcttcctgtgaga

SEQ ID NO: 1499287 - DNA, 15 bp, Homo sapiens
ggcttcctgtgagaa

SEQ ID NO: 1499288 - DNA, 15 bp, Homo sapiens
gcttcctgtgagaaa

SEQ ID NO: 1499289 - DNA, 15 bp, Homo sapiens
cttcctgtgagaaaa

SEQ ID NO: 1499290 - DNA, 15 bp, Homo sapiens
ttcctgtgagaaaac

SEQ ID NO: 1499291 - DNA, 15 bp, Homo sapiens
tcctgtgagaaaacc

SEQ ID NO: 1499292 - DNA, 15 bp, Homo sapiens
cctgtgagaaaacca

SEQ ID NO: 1499293 - DNA, 15 bp, Homo sapiens
ctgtgagaaaaccac

SEQ ID NO: 1499294 - DNA, 15 bp, Homo sapiens
tgtgagaaaaccact

SEQ ID NO: 1499295 - DNA, 15 bp, Homo sapiens
gtgagaaaaccactt

SEQ ID NO: 1499296 - DNA, 15 bp, Homo sapiens
tgagaaaaccacttc

SEQ ID NO: 1499297 - DNA, 15 bp, Homo sapiens
gagaaaaccacttca

SEQ ID NO: 1499298 - DNA, 15 bp, Homo sapiens
agaaaaccacttcag

SEQ ID NO: 1499299 - DNA, 15 bp, Homo sapiens
gaaaaccacttcagg

SEQ ID NO: 1499300 - DNA, 15 bp, Homo sapiens
aaaaccacttcaggc

SEQ ID NO: 1499301 - DNA, 15 bp, Homo sapiens
aaaccacttcaggcc

SEQ ID NO: 1499302 - DNA, 15 bp, Homo sapiens
aaccacttcaggccc

SEQ ID NO: 1499303 - DNA, 15 bp, Homo sapiens
accacttcaggccct

SEQ ID NO: 1499304 - DNA, 15 bp, Homo sapiens
ccacttcaggccctg

SEQ ID NO: 1499305 - DNA, 15 bp, Homo sapiens
cacttcaggccctga

SEQ ID NO: 1499306 - DNA, 15 bp, Homo sapiens
acttcaggccctgaa

SEQ ID NO: 1499307 - DNA, 15 bp, Homo sapiens
cttcaggccctgaac

SEQ ID NO: 1499308 - DNA, 15 bp, Homo sapiens
ttcaggccctgaacc

SEQ ID NO: 1499309 - DNA, 15 bp, Homo sapiens
tcaggccctgaacct

SEQ ID NO: 1499310 - DNA, 15 bp, Homo sapiens
caggccctgaacctc

SEQ ID NO: 1499311 - DNA, 15 bp, Homo sapiens
aggccctgaacctca

SEQ ID NO: 1499312 - DNA, 15 bp, Homo sapiens
ggccctgaacctcag

SEQ ID NO: 1499313 - DNA, 15 bp, Homo sapiens
gccctgaacctcagt

SEQ ID NO: 1499314 - DNA, 15 bp, Homo sapiens
ccctgaacctcagtt

SEQ ID NO: 1499315 - DNA, 15 bp, Homo sapiens
cctgaacctcagttt

SEQ ID NO: 1499316 - DNA, 15 bp, Homo sapiens
ctgaacctcagtttc

SEQ ID NO: 1499317 - DNA, 15 bp, Homo sapiens
tgaacctcagtttcc

SEQ ID NO: 1499318 - DNA, 15 bp, Homo sapiens
gaacctcagtttcct

SEQ ID NO: 1499319 - DNA, 15 bp, Homo sapiens
aacctcagtttcctg

SEQ ID NO: 1499320 - DNA, 15 bp, Homo sapiens
acctcagtttcctgc

SEQ ID NO: 1499321 - DNA, 15 bp, Homo sapiens
cctcagtttcctgca

SEQ ID NO: 1499322 - DNA, 15 bp, Homo sapiens
ctcagtttcctgcag

SEQ ID NO: 1499323 - DNA, 15 bp, Homo sapiens
tcagtttcctgcaga

SEQ ID NO: 1499324 - DNA, 15 bp, Homo sapiens
cagtttcctgcagaa

SEQ ID NO: 1499325 - DNA, 15 bp, Homo sapiens
agtttcctgcagaac

SEQ ID NO: 1499326 - DNA, 15 bp, Homo sapiens
gtttcctgcagaacg

SEQ ID NO: 1499327 - DNA, 15 bp, Homo sapiens
tttcctgcagaacga

SEQ ID NO: 1499328 - DNA, 15 bp, Homo sapiens
ttcctgcagaacgaa

SEQ ID NO: 1499329 - DNA, 15 bp, Homo sapiens
tcctgcagaacgaaa

SEQ ID NO: 1499330 - DNA, 15 bp, Homo sapiens
cctgcagaacgaaag

SEQ ID NO: 1499331 - DNA, 15 bp, Homo sapiens
ctgcagaacgaaaga

SEQ ID NO: 1499332 - DNA, 15 bp, Homo sapiens
tgcagaacgaaagag

SEQ ID NO: 1499333 - DNA, 15 bp, Homo sapiens
gcagaacgaaagaga

SEQ ID NO: 1499334 - DNA, 15 bp, Homo sapiens
cagaacgaaagagaa

SEQ ID NO: 1499335 - DNA, 15 bp, Homo sapiens
agaacgaaagagaag

SEQ ID NO: 1499336 - DNA, 15 bp, Homo sapiens
gaacgaaagagaaga

SEQ ID NO: 1499337 - DNA, 15 bp, Homo sapiens
aacgaaagagaagaa

SEQ ID NO: 1499338 - DNA, 15 bp, Homo sapiens
acgaaagagaagaac

SEQ ID NO: 1499339 - DNA, 15 bp, Homo sapiens
cgaaagagaagaact

SEQ ID NO: 1499340 - DNA, 15 bp, Homo sapiens
gaaagagaagaactc

SEQ ID NO: 1499341 - DNA, 15 bp, Homo sapiens
aaagagaagaactct

SEQ ID NO: 1499342 - DNA, 15 bp, Homo sapiens
aagagaagaactctg

SEQ ID NO: 1499343 - DNA, 15 bp, Homo sapiens
agagaagaactctgt

SEQ ID NO: 1499344 - DNA, 15 bp, Homo sapiens
gagaagaactctgtc

SEQ ID NO: 1499345 - DNA, 15 bp, Homo sapiens
agaagaactctgtca

SEQ ID NO: 1499346 - DNA, 15 bp, Homo sapiens
gaagaactctgtcag

SEQ ID NO: 1499347 - DNA, 15 bp, Homo sapiens
aagaactctgtcagc

SEQ ID NO: 1499348 - DNA, 15 bp, Homo sapiens
agaactctgtcagca

SEQ ID NO: 1499349 - DNA, 15 bp, Homo sapiens
gaactctgtcagcaa

SEQ ID NO: 1499350 - DNA, 15 bp, Homo sapiens
aactctgtcagcaag

SEQ ID NO: 1499351 - DNA, 15 bp, Homo sapiens
actctgtcagcaaga

SEQ ID NO: 1499352 - DNA, 15 bp, Homo sapiens
ctctgtcagcaagag

SEQ ID NO: 1499353 - DNA, 15 bp, Homo sapiens
tctgtcagcaagagg

SEQ ID NO: 1499354 - DNA, 15 bp, Homo sapiens
ctgtcagcaagaggc

SEQ ID NO: 1499355 - DNA, 15 bp, Homo sapiens
tgtcagcaagaggcc

SEQ ID NO: 1499356 - DNA, 15 bp, Homo sapiens
gtcagcaagaggcca

SEQ ID NO: 1499357 - DNA, 15 bp, Homo sapiens
tcagcaagaggccag

SEQ ID NO: 1499358 - DNA, 15 bp, Homo sapiens
cagcaagaggccagc

SEQ ID NO: 1499359 - DNA, 15 bp, Homo sapiens
agcaagaggccagcc

SEQ ID NO: 1499360 - DNA, 15 bp, Homo sapiens
gcaagaggccagccc

SEQ ID NO: 1499361 - DNA, 15 bp, Homo sapiens
caagaggccagccct

SEQ ID NO: 1499362 - DNA, 15 bp, Homo sapiens
aagaggccagccctg

SEQ ID NO: 1499363 - DNA, 15 bp, Homo sapiens
agaggccagccctga

SEQ ID NO: 1499364 - DNA, 15 bp, Homo sapiens
gaggccagccctgac

SEQ ID NO: 1499365 - DNA, 15 bp, Homo sapiens
aggccagccctgact

SEQ ID NO: 1499366 - DNA, 15 bp, Homo sapiens
ggccagccctgactc

SEQ ID NO: 1499367 - DNA, 15 bp, Homo sapiens
gccagccctgactct

SEQ ID NO: 1499368 - DNA, 15 bp, Homo sapiens
ccagccctgactctg

SEQ ID NO: 1499369 - DNA, 15 bp, Homo sapiens
cagccctgactctgg

SEQ ID NO: 1499370 - DNA, 15 bp, Homo sapiens
agccctgactctgga

SEQ ID NO: 1499371 - DNA, 15 bp, Homo sapiens
gccctgactctggag

SEQ ID NO: 1499372 - DNA, 15 bp, Homo sapiens
ccctgactctggaga

SEQ ID NO: 1499373 - DNA, 15 bp, Homo sapiens
cctgactctggagat

SEQ ID NO: 1499374 - DNA, 15 bp, Homo sapiens
ctgactctggagatc

SEQ ID NO: 1499375 - DNA, 15 bp, Homo sapiens
tgactctggagatct

SEQ ID NO: 1499376 - DNA, 15 bp, Homo sapiens
gactctggagatctt

SEQ ID NO: 1499377 - DNA, 15 bp, Homo sapiens
actctggagatcttg

SEQ ID NO: 1499378 - DNA, 15 bp, Homo sapiens
ctctggagatcttgg

SEQ ID NO: 1499379 - DNA, 15 bp, Homo sapiens
tctggagatcttggc

SEQ ID NO: 1499380 - DNA, 15 bp, Homo sapiens
ctggagatcttggcc

SEQ ID NO: 1499381 - DNA, 15 bp, Homo sapiens
tggagatcttggcct

SEQ ID NO: 1499382 - DNA, 15 bp, Homo sapiens
ggagatcttggcctc

SEQ ID NO: 1499383 - DNA, 15 bp, Homo sapiens
gagatcttggcctct

SEQ ID NO: 1499384 - DNA, 15 bp, Homo sapiens
agatcttggcctcta

SEQ ID NO: 1499385 - DNA, 15 bp, Homo sapiens
gatcttggcctctaa

SEQ ID NO: 1499386 - DNA, 15 bp, Homo sapiens
atcttggcctctaag

SEQ ID NO: 1499387 - DNA, 15 bp, Homo sapiens
tcttggcctctaagg

SEQ ID NO: 1499388 - DNA, 15 bp, Homo sapiens
cttggcctctaagga

SEQ ID NO: 1499389 - DNA, 15 bp, Homo sapiens
ttggcctctaaggag

SEQ ID NO: 1499390 - DNA, 15 bp, Homo sapiens
tggcctctaaggaga

SEQ ID NO: 1499391 - DNA, 15 bp, Homo sapiens
ggcctctaaggagat

SEQ ID NO: 1499392 - DNA, 15 bp, Homo sapiens
gcctctaaggagatg

SEQ ID NO: 1499393 - DNA, 15 bp, Homo sapiens
cctctaaggagatga

SEQ ID NO: 1499394 - DNA, 15 bp, Homo sapiens
ctctaaggagatgac

SEQ ID NO: 1499395 - DNA, 15 bp, Homo sapiens
tctaaggagatgaca

SEQ ID NO: 1499396 - DNA, 15 bp, Homo sapiens
ctaaggagatgacag

SEQ ID NO: 1499397 - DNA, 15 bp, Homo sapiens
taaggagatgacagg

SEQ ID NO: 1499398 - DNA, 15 bp, Homo sapiens
aaggagatgacagga

SEQ ID NO: 1499399 - DNA, 15 bp, Homo sapiens
aggagatgacaggag

SEQ ID NO: 1499400 - DNA, 15 bp, Homo sapiens
ggagatgacaggagc

SEQ ID NO: 1499401 - DNA, 15 bp, Homo sapiens
gagatgacaggagca

SEQ ID NO: 1499402 - DNA, 15 bp, Homo sapiens
agatgacaggagcac

SEQ ID NO: 1499403 - DNA, 15 bp, Homo sapiens
gatgacaggagcact

SEQ ID NO: 1499404 - DNA, 15 bp, Homo sapiens
atgacaggagcactc

SEQ ID NO: 1499405 - DNA, 15 bp, Homo sapiens
tgacaggagcactca

SEQ ID NO: 1499406 - DNA, 15 bp, Homo sapiens
gacaggagcactcac

SEQ ID NO: 1499407 - DNA, 15 bp, Homo sapiens
acaggagcactcaca

SEQ ID NO: 1499408 - DNA, 15 bp, Homo sapiens
caggagcactcacat

SEQ ID NO: 1499409 - DNA, 15 bp, Homo sapiens
aggagcactcacatt

SEQ ID NO: 1499410 - DNA, 15 bp, Homo sapiens
ggagcactcacattg

SEQ ID NO: 1499411 - DNA, 15 bp, Homo sapiens
gagcactcacattgc

SEQ ID NO: 1499412 - DNA, 15 bp, Homo sapiens
agcactcacattgcg

SEQ ID NO: 1499413 - DNA, 15 bp, Homo sapiens
gcactcacattgcga

SEQ ID NO: 1499414 - DNA, 15 bp, Homo sapiens
cactcacattgcgag

SEQ ID NO: 1499415 - DNA, 15 bp, Homo sapiens
actcacattgcgagg

SEQ ID NO: 1499416 - DNA, 15 bp, Homo sapiens
ctcacattgcgaggg

SEQ ID NO: 1499417 - DNA, 15 bp, Homo sapiens
tcacattgcgagggc

SEQ ID NO: 1499418 - DNA, 15 bp, Homo sapiens
cacattgcgagggct

SEQ ID NO: 1499419 - DNA, 15 bp, Homo sapiens
acattgcgagggctc

SEQ ID NO: 1499420 - DNA, 15 bp, Homo sapiens
cattgcgagggctca

SEQ ID NO: 1499421 - DNA, 15 bp, Homo sapiens
attgcgagggctcaa

SEQ ID NO: 1499422 - DNA, 15 bp, Homo sapiens
ttgcgagggctcaag

SEQ ID NO: 1499423 - DNA, 15 bp, Homo sapiens
tgcgagggctcaaga

SEQ ID NO: 1499424 - DNA, 15 bp, Homo sapiens
gcgagggctcaagag

SEQ ID NO: 1499425 - DNA, 15 bp, Homo sapiens
cgagggctcaagagc

SEQ ID NO: 1499426 - DNA, 15 bp, Homo sapiens
gagggctcaagagcc

SEQ ID NO: 1499427 - DNA, 15 bp, Homo sapiens
agggctcaagagcca

SEQ ID NO: 1499428 - DNA, 15 bp, Homo sapiens
gggctcaagagccac

SEQ ID NO: 1499429 - DNA, 15 bp, Homo sapiens
ggctcaagagccact

SEQ ID NO: 1499430 - DNA, 15 bp, Homo sapiens
gctcaagagccactg

SEQ ID NO: 1499431 - DNA, 15 bp, Homo sapiens
ctcaagagccactgt

SEQ ID NO: 1499432 - DNA, 15 bp, Homo sapiens
tcaagagccactgtc

SEQ ID NO: 1499433 - DNA, 15 bp, Homo sapiens
caagagccactgtcc

SEQ ID NO: 1499434 - DNA, 15 bp, Homo sapiens
aagagccactgtcct

SEQ ID NO: 1499435 - DNA, 15 bp, Homo sapiens
agagccactgtcctt

SEQ ID NO: 1499436 - DNA, 15 bp, Homo sapiens
gagccactgtccttt

SEQ ID NO: 1499437 - DNA, 15 bp, Homo sapiens
agccactgtcctttg

SEQ ID NO: 1499438 - DNA, 15 bp, Homo sapiens
gccactgtcctttga

SEQ ID NO: 1499439 - DNA, 15 bp, Homo sapiens
ccactgtcctttgat

SEQ ID NO: 1499440 - DNA, 15 bp, Homo sapiens
cactgtcctttgata

SEQ ID NO: 1499441 - DNA, 15 bp, Homo sapiens
actgtcctttgatat

SEQ ID NO: 1499442 - DNA, 15 bp, Homo sapiens
ctgtcctttgatatg

SEQ ID NO: 1499443 - DNA, 15 bp, Homo sapiens
tgtcctttgatatgt

SEQ ID NO: 1499444 - DNA, 15 bp, Homo sapiens
gtcctttgatatgtt

SEQ ID NO: 1499445 - DNA, 15 bp, Homo sapiens
tcctttgatatgttc

SEQ ID NO: 1499446 - DNA, 15 bp, Homo sapiens
cctttgatatgttct

SEQ ID NO: 1499447 - DNA, 15 bp, Homo sapiens
ctttgatatgttcta

SEQ ID NO: 1499448 - DNA, 15 bp, Homo sapiens
ttgatatgttctaca

SEQ ID NO: 1499449 - DNA, 15 bp, Homo sapiens
tgatatgttctacat

SEQ ID NO: 1499450 - DNA, 15 bp, Homo sapiens
gatatgttctacata

SEQ ID NO: 1499451 - DNA, 15 bp, Homo sapiens
atatgttctacatac

SEQ ID NO: 1499452 - DNA, 15 bp, Homo sapiens
tatgttctacatact

SEQ ID NO: 1499453 - DNA, 15 bp, Homo sapiens
atgttctacatactg

SEQ ID NO: 1499454 - DNA, 15 bp, Homo sapiens
tgttctacatactga

SEQ ID NO: 1499455 - DNA, 15 bp, Homo sapiens
gttctacatactgag

SEQ ID NO: 1499456 - DNA, 15 bp, Homo sapiens
ttctacatactgagt

SEQ ID NO: 1499457 - DNA, 15 bp, Homo sapiens
tctacatactgagtt

SEQ ID NO: 1499458 - DNA, 15 bp, Homo sapiens
ctacatactgagttt

SEQ ID NO: 1499459 - DNA, 15 bp, Homo sapiens
tacatactgagtttt

SEQ ID NO: 1499460 - DNA, 15 bp, Homo sapiens
acatactgagtttta

SEQ ID NO: 1499461 - DNA, 15 bp, Homo sapiens
catactgagttttat

SEQ ID NO: 1499462 - DNA, 15 bp, Homo sapiens
atactgagttttatt

SEQ ID NO: 1499463 - DNA, 15 bp, Homo sapiens
tactgagttttattt

SEQ ID NO: 1499464 - DNA, 15 bp, Homo sapiens
actgagttttatttc

SEQ ID NO: 1499465 - DNA, 15 bp, Homo sapiens
ctgagttttatttca

SEQ ID NO: 1499466 - DNA, 15 bp, Homo sapiens
tgagttttatttcat

SEQ ID NO: 1499467 - DNA, 15 bp, Homo sapiens
gagttttatttcatt

SEQ ID NO: 1499468 - DNA, 15 bp, Homo sapiens
agttttatttcattt

SEQ ID NO: 1499469 - DNA, 15 bp, Homo sapiens
gttttatttcatttg

SEQ ID NO: 1499470 - DNA, 15 bp, Homo sapiens
ttttatttcatttgt

SEQ ID NO: 1499471 - DNA, 15 bp, Homo sapiens
tttatttcatttgtg

SEQ ID NO: 1499472 - DNA, 15 bp, Homo sapiens
ttatttcatttgtgg

SEQ ID NO: 1499473 - DNA, 15 bp, Homo sapiens
tatttcatttgtgga

SEQ ID NO: 1499474 - DNA, 15 bp, Homo sapiens
atttcatttgtggat

SEQ ID NO: 1499475 - DNA, 15 bp, Homo sapiens
tttcatttgtggata

SEQ ID NO: 1499476 - DNA, 15 bp, Homo sapiens
ttcatttgtggatag

SEQ ID NO: 1499477 - DNA, 15 bp, Homo sapiens
tcatttgtggatagg

SEQ ID NO: 1499478 - DNA, 15 bp, Homo sapiens
catttgtggataggg

SEQ ID NO: 1499479 - DNA, 15 bp, Homo sapiens
atttgtggataggga

SEQ ID NO: 1499480 - DNA, 15 bp, Homo sapiens
tttgtggatagggat

SEQ ID NO: 1499481 - DNA, 15 bp, Homo sapiens
tgtggatagggatcc

SEQ ID NO: 1499482 - DNA, 15 bp, Homo sapiens
gtggatagggatcca

SEQ ID NO: 1499483 - DNA, 15 bp, Homo sapiens
tggatagggatccac

SEQ ID NO: 1499484 - DNA, 15 bp, Homo sapiens
ggatagggatccact

SEQ ID NO: 1499485 - DNA, 15 bp, Homo sapiens
gatagggatccactt

SEQ ID NO: 1499486 - DNA, 15 bp, Homo sapiens
atagggatccacttt

SEQ ID NO: 1499487 - DNA, 15 bp, Homo sapiens
tagggatccactttt

SEQ ID NO: 1499488 - DNA, 15 bp, Homo sapiens
agggatccacttttt

SEQ ID NO: 1499489 - DNA, 15 bp, Homo sapiens
gggatccactttttg

SEQ ID NO: 1499490 - DNA, 15 bp, Homo sapiens
ggatccactttttgg

SEQ ID NO: 1499491 - DNA, 15 bp, Homo sapiens
gatccactttttgga

SEQ ID NO: 1499492 - DNA, 15 bp, Homo sapiens
atccactttttggaa

SEQ ID NO: 1499493 - DNA, 15 bp, Homo sapiens
tccactttttggaag

SEQ ID NO: 1499494 - DNA, 15 bp, Homo sapiens
ccactttttggaagg

SEQ ID NO: 1499495 - DNA, 15 bp, Homo sapiens
cactttttggaagga

SEQ ID NO: 1499496 - DNA, 15 bp, Homo sapiens
actttttggaaggaa

SEQ ID NO: 1499497 - DNA, 15 bp, Homo sapiens
ctttttggaaggaag

SEQ ID NO: 1499498 - DNA, 15 bp, Homo sapiens
tttttggaaggaagg

SEQ ID NO: 1499499 - DNA, 15 bp, Homo sapiens
ttttggaaggaagga

SEQ ID NO: 1499500 - DNA, 15 bp, Homo sapiens
tttggaaggaaggaa

SEQ ID NO: 1499501 - DNA, 15 bp, Homo sapiens
ttggaaggaaggaaa

SEQ ID NO: 1499502 - DNA, 15 bp, Homo sapiens
tggaaggaaggaaaa

SEQ ID NO: 1499503 - DNA, 15 bp, Homo sapiens
ggaaggaaggaaaaa

SEQ ID NO: 1499504 - DNA, 15 bp, Homo sapiens
gaaggaaggaaaaaa

SEQ ID NO: 1499505 - DNA, 15 bp, Homo sapiens
aaggaaggaaaaaag

SEQ ID NO: 1499506 - DNA, 15 bp, Homo sapiens
aggaaggaaaaaaga

SEQ ID NO: 1499507 - DNA, 15 bp, Homo sapiens
ggaaggaaaaaagaa

SEQ ID NO: 1499508 - DNA, 15 bp, Homo sapiens
gaaggaaaaaagaag

SEQ ID NO: 1499509 - DNA, 15 bp, Homo sapiens
aaggaaaaaagaagg

SEQ ID NO: 1499510 - DNA, 15 bp, Homo sapiens
aggaaaaaagaaggg

SEQ ID NO: 1499511 - DNA, 15 bp, Homo sapiens
ggaaaaaagaagggg

SEQ ID NO: 1499512 - DNA, 15 bp, Homo sapiens
gaaaaaagaagggga

SEQ ID NO: 1499513 - DNA, 15 bp, Homo sapiens
aaaaaagaaggggaa

SEQ ID NO: 1499514 - DNA, 15 bp, Homo sapiens
aaaaagaaggggaaa

SEQ ID NO: 1499515 - DNA, 15 bp, Homo sapiens
aaagaaggggaaaaa

SEQ ID NO: 1499516 - DNA, 15 bp, Homo sapiens
aagaaggggaaaaat

SEQ ID NO: 1499517 - DNA, 15 bp, Homo sapiens
agaaggggaaaaatg

SEQ ID NO: 1499518 - DNA, 15 bp, Homo sapiens
gaaggggaaaaatga

SEQ ID NO: 1499519 - DNA, 15 bp, Homo sapiens
aaggggaaaaatgac

SEQ ID NO: 1499520 - DNA, 15 bp, Homo sapiens
aggggaaaaatgact

SEQ ID NO: 1499521 - DNA, 15 bp, Homo sapiens
gggaaaaatgactag

SEQ ID NO: 1499522 - DNA, 15 bp, Homo sapiens
ggaaaaatgactaga

SEQ ID NO: 1499523 - DNA, 15 bp, Homo sapiens
gaaaaatgactagag

SEQ ID NO: 1499524 - DNA, 15 bp, Homo sapiens
aaaaatgactagagg

SEQ ID NO: 1499525 - DNA, 15 bp, Homo sapiens
aaaatgactagaggg

SEQ ID NO: 1499526 - DNA, 15 bp, Homo sapiens
aaatgactagaggga

SEQ ID NO: 1499527 - DNA, 15 bp, Homo sapiens
aatgactagagggag

SEQ ID NO: 1499528 - DNA, 15 bp, Homo sapiens
atgactagagggaga

SEQ ID NO: 1499529 - DNA, 15 bp, Homo sapiens
tgactagagggagag

SEQ ID NO: 1499530 - DNA, 15 bp, Homo sapiens
gactagagggagaga

SEQ ID NO: 1499531 - DNA, 15 bp, Homo sapiens
actagagggagagag

SEQ ID NO: 1499532 - DNA, 15 bp, Homo sapiens
ctagagggagagaga

SEQ ID NO: 1499533 - DNA, 15 bp, Homo sapiens
tagagggagagagag

SEQ ID NO: 1499534 - DNA, 15 bp, Homo sapiens
agagggagagagaga

SEQ ID NO: 1499535 - DNA, 15 bp, Homo sapiens
gagggagagagagag

SEQ ID NO: 1499536 - DNA, 15 bp, Homo sapiens
agggagagagagaga

SEQ ID NO: 1499537 - DNA, 15 bp, Homo sapiens
gggagagagagagag

SEQ ID NO: 1499538 - DNA, 15 bp, Homo sapiens
ggagagagagagagg

SEQ ID NO: 1499539 - DNA, 15 bp, Homo sapiens
gagagagagagaggg

SEQ ID NO: 1499540 - DNA, 15 bp, Homo sapiens
gagagagagagggaa

SEQ ID NO: 1499541 - DNA, 15 bp, Homo sapiens
agagagagagggaag

SEQ ID NO: 1499542 - DNA, 15 bp, Homo sapiens
gagagagagggaagg

SEQ ID NO: 1499543 - DNA, 15 bp, Homo sapiens
agagagagggaagga

SEQ ID NO: 1499544 - DNA, 15 bp, Homo sapiens
gagagagggaaggaa

SEQ ID NO: 1499545 - DNA, 15 bp, Homo sapiens
agagagggaaggaag

SEQ ID NO: 1499546 - DNA, 15 bp, Homo sapiens
gagagggaaggaagg

SEQ ID NO: 1499547 - DNA, 15 bp, Homo sapiens
agagggaaggaaggg

SEQ ID NO: 1499548 - DNA, 15 bp, Homo sapiens
gagggaaggaaggga

SEQ ID NO: 1499549 - DNA, 15 bp, Homo sapiens
agggaaggaagggaa

SEQ ID NO: 1499550 - DNA, 15 bp, Homo sapiens
gggaaggaagggaag

SEQ ID NO: 1499551 - DNA, 15 bp, Homo sapiens
ggaaggaagggaagg

SEQ ID NO: 1499552 - DNA, 15 bp, Homo sapiens
gaaggaagggaaggg

SEQ ID NO: 1499553 - DNA, 15 bp, Homo sapiens
aaggaagggaaggga

SEQ ID NO: 1499554 - DNA, 15 bp, Homo sapiens
aggaagggaagggaa

SEQ ID NO: 1499555 - DNA, 15 bp, Homo sapiens
ggaagggaagggaag

SEQ ID NO: 1499556 - DNA, 15 bp, Homo sapiens
gaagggaagggaagg

SEQ ID NO: 1499557 - DNA, 15 bp, Homo sapiens
aagggaagggaagga

SEQ ID NO: 1499558 - DNA, 15 bp, Homo sapiens
agggaagggaaggaa

SEQ ID NO: 1499559 - DNA, 15 bp, Homo sapiens
gggaagggaaggaag

SEQ ID NO: 1499560 - DNA, 15 bp, Homo sapiens
ggaagggaaggaaga

SEQ ID NO: 1499561 - DNA, 15 bp, Homo sapiens
gaagggaaggaagat

SEQ ID NO: 1499562 - DNA, 15 bp, Homo sapiens
aagggaaggaagata

SEQ ID NO: 1499563 - DNA, 15 bp, Homo sapiens
agggaaggaagatag

SEQ ID NO: 1499564 - DNA, 15 bp, Homo sapiens
gggaaggaagatagg

SEQ ID NO: 1499565 - DNA, 15 bp, Homo sapiens
ggaaggaagataggg

SEQ ID NO: 1499566 - DNA, 15 bp, Homo sapiens
gaaggaagataggga

SEQ ID NO: 1499567 - DNA, 15 bp, Homo sapiens
aaggaagatagggag

SEQ ID NO: 1499568 - DNA, 15 bp, Homo sapiens
aggaagatagggagg

SEQ ID NO: 1499569 - DNA, 15 bp, Homo sapiens
ggaagatagggaggg

SEQ ID NO: 1499570 - DNA, 15 bp, Homo sapiens
gaagatagggaggga

SEQ ID NO: 1499571 - DNA, 15 bp, Homo sapiens
aagatagggagggag

SEQ ID NO: 1499572 - DNA, 15 bp, Homo sapiens
agatagggagggaga

SEQ ID NO: 1499573 - DNA, 15 bp, Homo sapiens
gatagggagggagaa

SEQ ID NO: 1499574 - DNA, 15 bp, Homo sapiens
atagggagggagaaa

SEQ ID NO: 1499575 - DNA, 15 bp, Homo sapiens
tagggagggagaaaa

SEQ ID NO: 1499576 - DNA, 15 bp, Homo sapiens
agggagggagaaaag

SEQ ID NO: 1499577 - DNA, 15 bp, Homo sapiens
gggagggagaaaagc

SEQ ID NO: 1499578 - DNA, 15 bp, Homo sapiens
ggagggagaaaagca

SEQ ID NO: 1499579 - DNA, 15 bp, Homo sapiens
gagggagaaaagcaa

SEQ ID NO: 1499580 - DNA, 15 bp, Homo sapiens
agggagaaaagcaag

SEQ ID NO: 1499581 - DNA, 15 bp, Homo sapiens
gggagaaaagcaagg

SEQ ID NO: 1499582 - DNA, 15 bp, Homo sapiens
ggagaaaagcaaggc

SEQ ID NO: 1499583 - DNA, 15 bp, Homo sapiens
gagaaaagcaaggct

SEQ ID NO: 1499584 - DNA, 15 bp, Homo sapiens
agaaaagcaaggcta

SEQ ID NO: 1499585 - DNA, 15 bp, Homo sapiens
gaaaagcaaggctat

SEQ ID NO: 1499586 - DNA, 15 bp, Homo sapiens
aaaagcaaggctata

SEQ ID NO: 1499587 - DNA, 15 bp, Homo sapiens
aaagcaaggctataa

SEQ ID NO: 1499588 - DNA, 15 bp, Homo sapiens
aagcaaggctataag

SEQ ID NO: 1499589 - DNA, 15 bp, Homo sapiens
agcaaggctataagg

SEQ ID NO: 1499590 - DNA, 15 bp, Homo sapiens
gcaaggctataagga

SEQ ID NO: 1499591 - DNA, 15 bp, Homo sapiens
caaggctataaggaa

SEQ ID NO: 1499592 - DNA, 15 bp, Homo sapiens
aaggctataaggaag

SEQ ID NO: 1499593 - DNA, 15 bp, Homo sapiens
aggctataaggaagg

SEQ ID NO: 1499594 - DNA, 15 bp, Homo sapiens
ggctataaggaagga

SEQ ID NO: 1499595 - DNA, 15 bp, Homo sapiens
gctataaggaaggaa

SEQ ID NO: 1499596 - DNA, 15 bp, Homo sapiens
ctataaggaaggaag

SEQ ID NO: 1499597 - DNA, 15 bp, Homo sapiens
tataaggaaggaagg

SEQ ID NO: 1499598 - DNA, 15 bp, Homo sapiens
ataaggaaggaaggg

SEQ ID NO: 1499599 - DNA, 15 bp, Homo sapiens
taaggaaggaaggga

SEQ ID NO: 1499600 - DNA, 15 bp, Homo sapiens
aggaagggagggaag

SEQ ID NO: 1499601 - DNA, 15 bp, Homo sapiens
ggaagggagggaagg

SEQ ID NO: 1499602 - DNA, 15 bp, Homo sapiens
gaagggagggaagga

SEQ ID NO: 1499603 - DNA, 15 bp, Homo sapiens
aagggagggaaggag

SEQ ID NO: 1499604 - DNA, 15 bp, Homo sapiens
agggagggaaggagg

SEQ ID NO: 1499605 - DNA, 15 bp, Homo sapiens
gggagggaaggagga

SEQ ID NO: 1499606 - DNA, 15 bp, Homo sapiens
ggagggaaggaggaa

SEQ ID NO: 1499607 - DNA, 15 bp, Homo sapiens
gagggaaggaggaag

SEQ ID NO: 1499608 - DNA, 15 bp, Homo sapiens
agggaaggaggaagg

SEQ ID NO: 1499609 - DNA, 15 bp, Homo sapiens
gggaaggaggaaggg

SEQ ID NO: 1499610 - DNA, 15 bp, Homo sapiens
ggaaggaggaaggga

SEQ ID NO: 1499611 - DNA, 15 bp, Homo sapiens
gaaggaggaagggag

SEQ ID NO: 1499612 - DNA, 15 bp, Homo sapiens
aaggaggaagggagg

SEQ ID NO: 1499613 - DNA, 15 bp, Homo sapiens
aggaggaagggaggg

SEQ ID NO: 1499614 - DNA, 15 bp, Homo sapiens
ggaggaagggaggga

SEQ ID NO: 1499615 - DNA, 15 bp, Homo sapiens
gaggaagggagggat

SEQ ID NO: 1499616 - DNA, 15 bp, Homo sapiens
aggaagggagggatg

SEQ ID NO: 1499617 - DNA, 15 bp, Homo sapiens
ggaagggagggatgg

SEQ ID NO: 1499618 - DNA, 15 bp, Homo sapiens
gaagggagggatggg

SEQ ID NO: 1499619 - DNA, 15 bp, Homo sapiens
aagggagggatggga

SEQ ID NO: 1499620 - DNA, 15 bp, Homo sapiens
agggagggatgggag

SEQ ID NO: 1499621 - DNA, 15 bp, Homo sapiens
gggagggatgggagg

SEQ ID NO: 1499622 - DNA, 15 bp, Homo sapiens
ggagggatgggagga

SEQ ID NO: 1499623 - DNA, 15 bp, Homo sapiens
gagggatgggaggaa

SEQ ID NO: 1499624 - DNA, 15 bp, Homo sapiens
agggatgggaggaac

SEQ ID NO: 1499625 - DNA, 15 bp, Homo sapiens
gggatgggaggaacc

SEQ ID NO: 1499626 - DNA, 15 bp, Homo sapiens
ggatgggaggaaccc

SEQ ID NO: 1499627 - DNA, 15 bp, Homo sapiens
gatgggaggaaccct

SEQ ID NO: 1499628 - DNA, 15 bp, Homo sapiens
atgggaggaacccta

SEQ ID NO: 1499629 - DNA, 15 bp, Homo sapiens
tgggaggaaccctaa

SEQ ID NO: 1499630 - DNA, 15 bp, Homo sapiens
gggaggaaccctaac

SEQ ID NO: 1499631 - DNA, 15 bp, Homo sapiens
ggaggaaccctaacc

SEQ ID NO: 1499632 - DNA, 15 bp, Homo sapiens
gaggaaccctaacct

SEQ ID NO: 1499633 - DNA, 15 bp, Homo sapiens
aggaaccctaacctc

SEQ ID NO: 1499634 - DNA, 15 bp, Homo sapiens
ggaaccctaacctct

SEQ ID NO: 1499635 - DNA, 15 bp, Homo sapiens
gaaccctaacctctg

SEQ ID NO: 1499636 - DNA, 15 bp, Homo sapiens
aaccctaacctctga

SEQ ID NO: 1499637 - DNA, 15 bp, Homo sapiens
accctaacctctgaa

SEQ ID NO: 1499638 - DNA, 15 bp, Homo sapiens
ccctaacctctgaac

SEQ ID NO: 1499639 - DNA, 15 bp, Homo sapiens
cctaacctctgaact

SEQ ID NO: 1499640 - DNA, 15 bp, Homo sapiens
ctaacctctgaactg

SEQ ID NO: 1499641 - DNA, 15 bp, Homo sapiens
taacctctgaactgc

SEQ ID NO: 1499642 - DNA, 15 bp, Homo sapiens
aacctctgaactgct

SEQ ID NO: 1499643 - DNA, 15 bp, Homo sapiens
acctctgaactgctg

SEQ ID NO: 1499644 - DNA, 15 bp, Homo sapiens
cctctgaactgctga

SEQ ID NO: 1499645 - DNA, 15 bp, Homo sapiens
ctctgaactgctgag

SEQ ID NO: 1499646 - DNA, 15 bp, Homo sapiens
tctgaactgctgagt

SEQ ID NO: 1499647 - DNA, 15 bp, Homo sapiens
ctgaactgctgagtt

SEQ ID NO: 1499648 - DNA, 15 bp, Homo sapiens
tgaactgctgagttc

SEQ ID NO: 1499649 - DNA, 15 bp, Homo sapiens
gaactgctgagttcg

SEQ ID NO: 1499650 - DNA, 15 bp, Homo sapiens
aactgctgagttcgg

SEQ ID NO: 1499651 - DNA, 15 bp, Homo sapiens
actgctgagttcgga

SEQ ID NO: 1499652 - DNA, 15 bp, Homo sapiens
ctgctgagttcggat

SEQ ID NO: 1499653 - DNA, 15 bp, Homo sapiens
tgctgagttcggatt

SEQ ID NO: 1499654 - DNA, 15 bp, Homo sapiens
gctgagttcggattt

SEQ ID NO: 1499655 - DNA, 15 bp, Homo sapiens
ctgagttcggatttt

SEQ ID NO: 1499656 - DNA, 15 bp, Homo sapiens
tgagttcggattttt

SEQ ID NO: 1499657 - DNA, 15 bp, Homo sapiens
gagttcggatttttg

SEQ ID NO: 1499658 - DNA, 15 bp, Homo sapiens
agttcggatttttgt

SEQ ID NO: 1499659 - DNA, 15 bp, Homo sapiens
gttcggatttttgta

SEQ ID NO: 1499660 - DNA, 15 bp, Homo sapiens
ttcggatttttgtaa

SEQ ID NO: 1499661 - DNA, 15 bp, Homo sapiens
tcggatttttgtaag

SEQ ID NO: 1499662 - DNA, 15 bp, Homo sapiens
cggatttttgtaagt

SEQ ID NO: 1499663 - DNA, 15 bp, Homo sapiens
ggatttttgtaagtt

SEQ ID NO: 1499664 - DNA, 15 bp, Homo sapiens
gatttttgtaagttt

SEQ ID NO: 1499665 - DNA, 15 bp, Homo sapiens
atttttgtaagtttc

SEQ ID NO: 1499666 - DNA, 15 bp, Homo sapiens
tttttgtaagtttct

SEQ ID NO: 1499667 - DNA, 15 bp, Homo sapiens
ttttgtaagtttctc

SEQ ID NO: 1499668 - DNA, 15 bp, Homo sapiens
tttgtaagtttctcc

SEQ ID NO: 1499669 - DNA, 15 bp, Homo sapiens
ttgtaagtttctcca

SEQ ID NO: 1499670 - DNA, 15 bp, Homo sapiens
tgtaagtttctccaa

SEQ ID NO: 1499671 - DNA, 15 bp, Homo sapiens
gtaagtttctccaac

SEQ ID NO: 1499672 - DNA, 15 bp, Homo sapiens
taagtttctccaaca

SEQ ID NO: 1499673 - DNA, 15 bp, Homo sapiens
aagtttctccaacac

SEQ ID NO: 1499674 - DNA, 15 bp, Homo sapiens
agtttctccaacact

SEQ ID NO: 1499675 - DNA, 15 bp, Homo sapiens
gtttctccaacactt

SEQ ID NO: 1499676 - DNA, 15 bp, Homo sapiens
tttctccaacacttc

SEQ ID NO: 1499677 - DNA, 15 bp, Homo sapiens
ttctccaacacttca

SEQ ID NO: 1499678 - DNA, 15 bp, Homo sapiens
tctccaacacttcag

SEQ ID NO: 1499679 - DNA, 15 bp, Homo sapiens
ctccaacacttcagg

SEQ ID NO: 1499680 - DNA, 15 bp, Homo sapiens
tccaacacttcaggc

SEQ ID NO: 1499681 - DNA, 15 bp, Homo sapiens
ccaacacttcaggct

SEQ ID NO: 1499682 - DNA, 15 bp, Homo sapiens
caacacttcaggcta

SEQ ID NO: 1499683 - DNA, 15 bp, Homo sapiens
aacacttcaggctac

SEQ ID NO: 1499684 - DNA, 15 bp, Homo sapiens
acacttcaggctaca

SEQ ID NO: 1499685 - DNA, 15 bp, Homo sapiens
cacttcaggctacaa

SEQ ID NO: 1499686 - DNA, 15 bp, Homo sapiens
acttcaggctacaac

SEQ ID NO: 1499687 - DNA, 15 bp, Homo sapiens
cttcaggctacaacc

SEQ ID NO: 1499688 - DNA, 15 bp, Homo sapiens
ttcaggctacaacct

SEQ ID NO: 1499689 - DNA, 15 bp, Homo sapiens
tcaggctacaacctg

SEQ ID NO: 1499690 - DNA, 15 bp, Homo sapiens
caggctacaacctgc

SEQ ID NO: 1499691 - DNA, 15 bp, Homo sapiens
aggctacaacctgct

SEQ ID NO: 1499692 - DNA, 15 bp, Homo sapiens
ggctacaacctgcta

SEQ ID NO: 1499693 - DNA, 15 bp, Homo sapiens
gctacaacctgctac

SEQ ID NO: 1499694 - DNA, 15 bp, Homo sapiens
ctacaacctgctacc

SEQ ID NO: 1499695 - DNA, 15 bp, Homo sapiens
tacaacctgctacca

SEQ ID NO: 1499696 - DNA, 15 bp, Homo sapiens
acaacctgctaccaa

SEQ ID NO: 1499697 - DNA, 15 bp, Homo sapiens
caacctgctaccaac

SEQ ID NO: 1499698 - DNA, 15 bp, Homo sapiens
aacctgctaccaaca

SEQ ID NO: 1499699 - DNA, 15 bp, Homo sapiens
acctgctaccaacat

SEQ ID NO: 1499700 - DNA, 15 bp, Homo sapiens
cctgctaccaacatc

SEQ ID NO: 1499701 - DNA, 15 bp, Homo sapiens
ctgctaccaacatca

SEQ ID NO: 1499702 - DNA, 15 bp, Homo sapiens
tgctaccaacatcag

SEQ ID NO: 1499703 - DNA, 15 bp, Homo sapiens
gctaccaacatcaga

SEQ ID NO: 1499704 - DNA, 15 bp, Homo sapiens
ctaccaacatcagaa

SEQ ID NO: 1499705 - DNA, 15 bp, Homo sapiens
taccaacatcagaat

SEQ ID NO: 1499706 - DNA, 15 bp, Homo sapiens
accaacatcagaatt

SEQ ID NO: 1499707 - DNA, 15 bp, Homo sapiens
ccaacatcagaatta

SEQ ID NO: 1499708 - DNA, 15 bp, Homo sapiens
caacatcagaattag

SEQ ID NO: 1499709 - DNA, 15 bp, Homo sapiens
aacatcagaattagc

SEQ ID NO: 1499710 - DNA, 15 bp, Homo sapiens
acatcagaattagcc

SEQ ID NO: 1499711 - DNA, 15 bp, Homo sapiens
catcagaattagcca

SEQ ID NO: 1499712 - DNA, 15 bp, Homo sapiens
atcagaattagccag

SEQ ID NO: 1499713 - DNA, 15 bp, Homo sapiens
tcagaattagccagt

SEQ ID NO: 1499714 - DNA, 15 bp, Homo sapiens
cagaattagccagtg

SEQ ID NO: 1499715 - DNA, 15 bp, Homo sapiens
agaattagccagtga

SEQ ID NO: 1499716 - DNA, 15 bp, Homo sapiens
gaattagccagtgag

SEQ ID NO: 1499717 - DNA, 15 bp, Homo sapiens
aattagccagtgagg

SEQ ID NO: 1499718 - DNA, 15 bp, Homo sapiens
attagccagtgaggc

SEQ ID NO: 1499719 - DNA, 15 bp, Homo sapiens
ttagccagtgaggct

SEQ ID NO: 1499720 - DNA, 15 bp, Homo sapiens
tagccagtgaggctc

SEQ ID NO: 1499721 - DNA, 15 bp, Homo sapiens
agccagtgaggctct

SEQ ID NO: 1499722 - DNA, 15 bp, Homo sapiens
gccagtgaggctctg

SEQ ID NO: 1499723 - DNA, 15 bp, Homo sapiens
ccagtgaggctctga

SEQ ID NO: 1499724 - DNA, 15 bp, Homo sapiens
cagtgaggctctgaa

SEQ ID NO: 1499725 - DNA, 15 bp, Homo sapiens
agtgaggctctgaag

SEQ ID NO: 1499726 - DNA, 15 bp, Homo sapiens
gtgaggctctgaagc

SEQ ID NO: 1499727 - DNA, 15 bp, Homo sapiens
tgaggctctgaagca

SEQ ID NO: 1499728 - DNA, 15 bp, Homo sapiens
gaggctctgaagcag

SEQ ID NO: 1499729 - DNA, 15 bp, Homo sapiens
aggctctgaagcaga

SEQ ID NO: 1499730 - DNA, 15 bp, Homo sapiens
ggctctgaagcagag

SEQ ID NO: 1499731 - DNA, 15 bp, Homo sapiens
gctctgaagcagagc

SEQ ID NO: 1499732 - DNA, 15 bp, Homo sapiens
ctctgaagcagagct

SEQ ID NO: 1499733 - DNA, 15 bp, Homo sapiens
tctgaagcagagcta

SEQ ID NO: 1499734 - DNA, 15 bp, Homo sapiens
ctgaagcagagctaa

SEQ ID NO: 1499735 - DNA, 15 bp, Homo sapiens
tgaagcagagctaat

SEQ ID NO: 1499736 - DNA, 15 bp, Homo sapiens
gaagcagagctaatg

SEQ ID NO: 1499737 - DNA, 15 bp, Homo sapiens
aagcagagctaatga

SEQ ID NO: 1499738 - DNA, 15 bp, Homo sapiens
agcagagctaatgaa

SEQ ID NO: 1499739 - DNA, 15 bp, Homo sapiens
gcagagctaatgaaa

SEQ ID NO: 1499740 - DNA, 15 bp, Homo sapiens
cagagctaatgaaat

SEQ ID NO: 1499741 - DNA, 15 bp, Homo sapiens
agagctaatgaaata

SEQ ID NO: 1499742 - DNA, 15 bp, Homo sapiens
gagctaatgaaatat

SEQ ID NO: 1499743 - DNA, 15 bp, Homo sapiens
agctaatgaaatatt

SEQ ID NO: 1499744 - DNA, 15 bp, Homo sapiens
gctaatgaaatattt

SEQ ID NO: 1499745 - DNA, 15 bp, Homo sapiens
ctaatgaaatatttt

SEQ ID NO: 1499746 - DNA, 15 bp, Homo sapiens
taatgaaatattttc

SEQ ID NO: 1499747 - DNA, 15 bp, Homo sapiens
aatgaaatattttct

SEQ ID NO: 1499748 - DNA, 15 bp, Homo sapiens
atgaaatattttctg

SEQ ID NO: 1499749 - DNA, 15 bp, Homo sapiens
tgaaatattttctga

SEQ ID NO: 1499750 - DNA, 15 bp, Homo sapiens
gaaatattttctgat

SEQ ID NO: 1499751 - DNA, 15 bp, Homo sapiens
aaatattttctgata

SEQ ID NO: 1499752 - DNA, 15 bp, Homo sapiens
aatattttctgatat

SEQ ID NO: 1499753 - DNA, 15 bp, Homo sapiens
atattttctgatatt

SEQ ID NO: 1499754 - DNA, 15 bp, Homo sapiens
tattttctgatattg

SEQ ID NO: 1499755 - DNA, 15 bp, Homo sapiens
attttctgatattgg

SEQ ID NO: 1499756 - DNA, 15 bp, Homo sapiens
ttttctgatattggg

SEQ ID NO: 1499757 - DNA, 15 bp, Homo sapiens
tttctgatattgggc

SEQ ID NO: 1499758 - DNA, 15 bp, Homo sapiens
ttctgatattgggct

SEQ ID NO: 1499759 - DNA, 15 bp, Homo sapiens
tctgatattgggctt

SEQ ID NO: 1499760 - DNA, 15 bp, Homo sapiens
ctgatattgggcttc

SEQ ID NO: 1499761 - DNA, 15 bp, Homo sapiens
tgatattgggcttca

SEQ ID NO: 1499762 - DNA, 15 bp, Homo sapiens
gatattgggcttcag

SEQ ID NO: 1499763 - DNA, 15 bp, Homo sapiens
atattgggcttcaga

SEQ ID NO: 1499764 - DNA, 15 bp, Homo sapiens
tattgggcttcagat

SEQ ID NO: 1499765 - DNA, 15 bp, Homo sapiens
attgggcttcagata

SEQ ID NO: 1499766 - DNA, 15 bp, Homo sapiens
ttgggcttcagatat

SEQ ID NO: 1499767 - DNA, 15 bp, Homo sapiens
tgggcttcagatata

SEQ ID NO: 1499768 - DNA, 15 bp, Homo sapiens
gggcttcagatatag

SEQ ID NO: 1499769 - DNA, 15 bp, Homo sapiens
ggcttcagatatagg

SEQ ID NO: 1499770 - DNA, 15 bp, Homo sapiens
gcttcagatataggg

SEQ ID NO: 1499771 - DNA, 15 bp, Homo sapiens
cttcagatatagggt

SEQ ID NO: 1499772 - DNA, 15 bp, Homo sapiens
ttcagatatagggtt

SEQ ID NO: 1499773 - DNA, 15 bp, Homo sapiens
tcagatatagggttt

SEQ ID NO: 1499774 - DNA, 15 bp, Homo sapiens
cagatatagggttta

SEQ ID NO: 1499775 - DNA, 15 bp, Homo sapiens
agatatagggtttag

SEQ ID NO: 1499776 - DNA, 15 bp, Homo sapiens
gatatagggtttagt

SEQ ID NO: 1499777 - DNA, 15 bp, Homo sapiens
atatagggtttagtt

SEQ ID NO: 1499778 - DNA, 15 bp, Homo sapiens
tatagggtttagttt

SEQ ID NO: 1499779 - DNA, 15 bp, Homo sapiens
atagggtttagttta

SEQ ID NO: 1499780 - DNA, 15 bp, Homo sapiens
tagggtttagtttag

SEQ ID NO: 1499781 - DNA, 15 bp, Homo sapiens
agggtttagtttaga

SEQ ID NO: 1499782 - DNA, 15 bp, Homo sapiens
gggtttagtttagaa

SEQ ID NO: 1499783 - DNA, 15 bp, Homo sapiens
ggtttagtttagaaa

SEQ ID NO: 1499784 - DNA, 15 bp, Homo sapiens
gtttagtttagaaac

SEQ ID NO: 1499785 - DNA, 15 bp, Homo sapiens
tttagtttagaaact

SEQ ID NO: 1499786 - DNA, 15 bp, Homo sapiens
ttagtttagaaactg

SEQ ID NO: 1499787 - DNA, 15 bp, Homo sapiens
tagtttagaaactgg

SEQ ID NO: 1499788 - DNA, 15 bp, Homo sapiens
agtttagaaactggt

SEQ ID NO: 1499789 - DNA, 15 bp, Homo sapiens
gtttagaaactggtt

SEQ ID NO: 1499790 - DNA, 15 bp, Homo sapiens
tttagaaactggttt

SEQ ID NO: 1499791 - DNA, 15 bp, Homo sapiens
ttagaaactggttta

SEQ ID NO: 1499792 - DNA, 15 bp, Homo sapiens
tagaaactggtttag

SEQ ID NO: 1499793 - DNA, 15 bp, Homo sapiens
agaaactggtttagc

SEQ ID NO: 1499794 - DNA, 15 bp, Homo sapiens
gaaactggtttagcc

SEQ ID NO: 1499795 - DNA, 15 bp, Homo sapiens
aaactggtttagcca

SEQ ID NO: 1499796 - DNA, 15 bp, Homo sapiens
aactggtttagccaa

SEQ ID NO: 1499797 - DNA, 15 bp, Homo sapiens
actggtttagccaag

SEQ ID NO: 1499798 - DNA, 15 bp, Homo sapiens
ctggtttagccaagt

SEQ ID NO: 1499799 - DNA, 15 bp, Homo sapiens
tggtttagccaagtt

SEQ ID NO: 1499800 - DNA, 15 bp, Homo sapiens
ggtttagccaagttg

SEQ ID NO: 1499801 - DNA, 15 bp, Homo sapiens
gtttagccaagttga

SEQ ID NO: 1499802 - DNA, 15 bp, Homo sapiens
tttagccaagttgaa

SEQ ID NO: 1499803 - DNA, 15 bp, Homo sapiens
ttagccaagttgaaa

SEQ ID NO: 1499804 - DNA, 15 bp, Homo sapiens
tagccaagttgaaat

SEQ ID NO: 1499805 - DNA, 15 bp, Homo sapiens
agccaagttgaaatg

SEQ ID NO: 1499806 - DNA, 15 bp, Homo sapiens
gccaagttgaaatgt

SEQ ID NO: 1499807 - DNA, 15 bp, Homo sapiens
ccaagttgaaatgtg

SEQ ID NO: 1499808 - DNA, 15 bp, Homo sapiens
caagttgaaatgtgt

SEQ ID NO: 1499809 - DNA, 15 bp, Homo sapiens
aagttgaaatgtgtt

SEQ ID NO: 1499810 - DNA, 15 bp, Homo sapiens
agttgaaatgtgttg

SEQ ID NO: 1499811 - DNA, 15 bp, Homo sapiens
gttgaaatgtgttgc

SEQ ID NO: 1499812 - DNA, 15 bp, Homo sapiens
ttgaaatgtgttgct

SEQ ID NO: 1499813 - DNA, 15 bp, Homo sapiens
tgaaatgtgttgcta

SEQ ID NO: 1499814 - DNA, 15 bp, Homo sapiens
gaaatgtgttgctaa

SEQ ID NO: 1499815 - DNA, 15 bp, Homo sapiens
aaatgtgttgctaac

SEQ ID NO: 1499816 - DNA, 15 bp, Homo sapiens
aatgtgttgctaacc

SEQ ID NO: 1499817 - DNA, 15 bp, Homo sapiens
atgtgttgctaacca

SEQ ID NO: 1499818 - DNA, 15 bp, Homo sapiens
tgtgttgctaaccat

SEQ ID NO: 1499819 - DNA, 15 bp, Homo sapiens
gtgttgctaaccatc

SEQ ID NO: 1499820 - DNA, 15 bp, Homo sapiens
tgttgctaaccatct

SEQ ID NO: 1499821 - DNA, 15 bp, Homo sapiens
gttgctaaccatctc

SEQ ID NO: 1499822 - DNA, 15 bp, Homo sapiens
ttgctaaccatctcc

SEQ ID NO: 1499823 - DNA, 15 bp, Homo sapiens
tgctaaccatctcct

SEQ ID NO: 1499824 - DNA, 15 bp, Homo sapiens
gctaaccatctcctc

SEQ ID NO: 1499825 - DNA, 15 bp, Homo sapiens
ctaaccatctcctcc

SEQ ID NO: 1499826 - DNA, 15 bp, Homo sapiens
taaccatctcctcct

SEQ ID NO: 1499827 - DNA, 15 bp, Homo sapiens
aaccatctcctcctc

SEQ ID NO: 1499828 - DNA, 15 bp, Homo sapiens
accatctcctcctcc

SEQ ID NO: 1499829 - DNA, 15 bp, Homo sapiens
ccatctcctcctcct

SEQ ID NO: 1499830 - DNA, 15 bp, Homo sapiens
catctcctcctcctc

SEQ ID NO: 1499831 - DNA, 15 bp, Homo sapiens
atctcctcctcctcc

SEQ ID NO: 1499832 - DNA, 15 bp, Homo sapiens
tctcctcctcctcct

SEQ ID NO: 1499833 - DNA, 15 bp, Homo sapiens
tcctcctcctcctgc

SEQ ID NO: 1499834 - DNA, 15 bp, Homo sapiens
cctcctcctcctgct

SEQ ID NO: 1499835 - DNA, 15 bp, Homo sapiens
ctcctcctcctgctg

SEQ ID NO: 1499836 - DNA, 15 bp, Homo sapiens
tcctcctcctgctgt

SEQ ID NO: 1499837 - DNA, 15 bp, Homo sapiens
cctcctcctgctgtc

SEQ ID NO: 1499838 - DNA, 15 bp, Homo sapiens
ctcctcctgctgtct

SEQ ID NO: 1499839 - DNA, 15 bp, Homo sapiens
tcctcctgctgtctt

SEQ ID NO: 1499840 - DNA, 15 bp, Homo sapiens
cctcctgctgtctta

SEQ ID NO: 1499841 - DNA, 15 bp, Homo sapiens
ctcctgctgtcttat

SEQ ID NO: 1499842 - DNA, 15 bp, Homo sapiens
tcctgctgtcttatt

SEQ ID NO: 1499843 - DNA, 15 bp, Homo sapiens
cctgctgtcttattg

SEQ ID NO: 1499844 - DNA, 15 bp, Homo sapiens
ctgctgtcttattgt

SEQ ID NO: 1499845 - DNA, 15 bp, Homo sapiens
tgctgtcttattgtt

SEQ ID NO: 1499846 - DNA, 15 bp, Homo sapiens
gctgtcttattgttc

SEQ ID NO: 1499847 - DNA, 15 bp, Homo sapiens
ctgtcttattgttca

SEQ ID NO: 1499848 - DNA, 15 bp, Homo sapiens
tgtcttattgttcag

SEQ ID NO: 1499849 - DNA, 15 bp, Homo sapiens
gtcttattgttcagc

SEQ ID NO: 1499850 - DNA, 15 bp, Homo sapiens
tcttattgttcagcc

SEQ ID NO: 1499851 - DNA, 15 bp, Homo sapiens
cttattgttcagccg

SEQ ID NO: 1499852 - DNA, 15 bp, Homo sapiens
ttattgttcagccgt

SEQ ID NO: 1499853 - DNA, 15 bp, Homo sapiens
tattgttcagccgtg

SEQ ID NO: 1499854 - DNA, 15 bp, Homo sapiens
attgttcagccgtgt

SEQ ID NO: 1499855 - DNA, 15 bp, Homo sapiens
ttgttcagccgtgtc

SEQ ID NO: 1499856 - DNA, 15 bp, Homo sapiens
tgttcagccgtgtcc

SEQ ID NO: 1499857 - DNA, 15 bp, Homo sapiens
gttcagccgtgtcct

SEQ ID NO: 1499858 - DNA, 15 bp, Homo sapiens
ttcagccgtgtcctc

SEQ ID NO: 1499859 - DNA, 15 bp, Homo sapiens
tcagccgtgtcctct

SEQ ID NO: 1499860 - DNA, 15 bp, Homo sapiens
cagccgtgtcctcta

SEQ ID NO: 1499861 - DNA, 15 bp, Homo sapiens
agccgtgtcctctac

SEQ ID NO: 1499862 - DNA, 15 bp, Homo sapiens
gccgtgtcctctacc

SEQ ID NO: 1499863 - DNA, 15 bp, Homo sapiens
ccgtgtcctctacct

SEQ ID NO: 1499864 - DNA, 15 bp, Homo sapiens
cgtgtcctctacctg

SEQ ID NO: 1499865 - DNA, 15 bp, Homo sapiens
gtgtcctctacctgc

SEQ ID NO: 1499866 - DNA, 15 bp, Homo sapiens
tgtcctctacctgcc

SEQ ID NO: 1499867 - DNA, 15 bp, Homo sapiens
gtcctctacctgcca

SEQ ID NO: 1499868 - DNA, 15 bp, Homo sapiens
tcctctacctgccat

SEQ ID NO: 1499869 - DNA, 15 bp, Homo sapiens
cctctacctgccata

SEQ ID NO: 1499870 - DNA, 15 bp, Homo sapiens
ctctacctgccatac

SEQ ID NO: 1499871 - DNA, 15 bp, Homo sapiens
tctacctgccataca

SEQ ID NO: 1499872 - DNA, 15 bp, Homo sapiens
ctacctgccatacac

SEQ ID NO: 1499873 - DNA, 15 bp, Homo sapiens
tacctgccatacaca

SEQ ID NO: 1499874 - DNA, 15 bp, Homo sapiens
acctgccatacacat

SEQ ID NO: 1499875 - DNA, 15 bp, Homo sapiens
cctgccatacacatt

SEQ ID NO: 1499876 - DNA, 15 bp, Homo sapiens
ctgccatacacattt

SEQ ID NO: 1499877 - DNA, 15 bp, Homo sapiens
tgccatacacatttc

SEQ ID NO: 1499878 - DNA, 15 bp, Homo sapiens
gccatacacatttcc

SEQ ID NO: 1499879 - DNA, 15 bp, Homo sapiens
ccatacacatttcct

SEQ ID NO: 1499880 - DNA, 15 bp, Homo sapiens
catacacatttcctt

SEQ ID NO: 1499881 - DNA, 15 bp, Homo sapiens
atacacatttccttc

SEQ ID NO: 1499882 - DNA, 15 bp, Homo sapiens
tacacatttccttcc

SEQ ID NO: 1499883 - DNA, 15 bp, Homo sapiens
acacatttccttccc

SEQ ID NO: 1499884 - DNA, 15 bp, Homo sapiens
cacatttccttccct

SEQ ID NO: 1499885 - DNA, 15 bp, Homo sapiens
acatttccttccctt

SEQ ID NO: 1499886 - DNA, 15 bp, Homo sapiens
catttccttcccttg

SEQ ID NO: 1499887 - DNA, 15 bp, Homo sapiens
atttccttcccttgg

SEQ ID NO: 1499888 - DNA, 15 bp, Homo sapiens
tttccttcccttggc

SEQ ID NO: 1499889 - DNA, 15 bp, Homo sapiens
ttccttcccttggcc

SEQ ID NO: 1499890 - DNA, 15 bp, Homo sapiens
tccttcccttggccc

SEQ ID NO: 1499891 - DNA, 15 bp, Homo sapiens
ccttcccttggccct

SEQ ID NO: 1499892 - DNA, 15 bp, Homo sapiens
cttcccttggccctt

SEQ ID NO: 1499893 - DNA, 15 bp, Homo sapiens
ttcccttggcccttt

SEQ ID NO: 1499894 - DNA, 15 bp, Homo sapiens
tcccttggccctttt

SEQ ID NO: 1499895 - DNA, 15 bp, Homo sapiens
cccttggcccttttg

SEQ ID NO: 1499896 - DNA, 15 bp, Homo sapiens
ccttggcccttttgt

SEQ ID NO: 1499897 - DNA, 15 bp, Homo sapiens
cttggcccttttgtg

SEQ ID NO: 1499898 - DNA, 15 bp, Homo sapiens
ttggcccttttgtgt

SEQ ID NO: 1499899 - DNA, 15 bp, Homo sapiens
tggcccttttgtgtt

SEQ ID NO: 1499900 - DNA, 15 bp, Homo sapiens
ggcccttttgtgttt

SEQ ID NO: 1499901 - DNA, 15 bp, Homo sapiens
gcccttttgtgttta

SEQ ID NO: 1499902 - DNA, 15 bp, Homo sapiens
cccttttgtgtttag

SEQ ID NO: 1499903 - DNA, 15 bp, Homo sapiens
ccttttgtgtttagg

SEQ ID NO: 1499904 - DNA, 15 bp, Homo sapiens
cttttgtgtttaggg

SEQ ID NO: 1499905 - DNA, 15 bp, Homo sapiens
ttttgtgtttaggga

SEQ ID NO: 1499906 - DNA, 15 bp, Homo sapiens
tttgtgtttagggag

SEQ ID NO: 1499907 - DNA, 15 bp, Homo sapiens
ttgtgtttagggagg

SEQ ID NO: 1499908 - DNA, 15 bp, Homo sapiens
tgtgtttagggagga

SEQ ID NO: 1499909 - DNA, 15 bp, Homo sapiens
gtgtttagggaggac

SEQ ID NO: 1499910 - DNA, 15 bp, Homo sapiens
tgtttagggaggaca

SEQ ID NO: 1499911 - DNA, 15 bp, Homo sapiens
gtttagggaggacat

SEQ ID NO: 1499912 - DNA, 15 bp, Homo sapiens
tttagggaggacatt

SEQ ID NO: 1499913 - DNA, 15 bp, Homo sapiens
ttagggaggacattt

SEQ ID NO: 1499914 - DNA, 15 bp, Homo sapiens
tagggaggacatttg

SEQ ID NO: 1499915 - DNA, 15 bp, Homo sapiens
agggaggacatttgt

SEQ ID NO: 1499916 - DNA, 15 bp, Homo sapiens
gggaggacatttgta

SEQ ID NO: 1499917 - DNA, 15 bp, Homo sapiens
ggaggacatttgtaa

SEQ ID NO: 1499918 - DNA, 15 bp, Homo sapiens
gaggacatttgtaac

SEQ ID NO: 1499919 - DNA, 15 bp, Homo sapiens
aggacatttgtaaca

SEQ ID NO: 1499920 - DNA, 15 bp, Homo sapiens
ggacatttgtaacac

SEQ ID NO: 1499921 - DNA, 15 bp, Homo sapiens
gacatttgtaacact

SEQ ID NO: 1499922 - DNA, 15 bp, Homo sapiens
acatttgtaacactg

SEQ ID NO: 1499923 - DNA, 15 bp, Homo sapiens
catttgtaacactgc

SEQ ID NO: 1499924 - DNA, 15 bp, Homo sapiens
atttgtaacactgct

SEQ ID NO: 1499925 - DNA, 15 bp, Homo sapiens
tttgtaacactgctg

SEQ ID NO: 1499926 - DNA, 15 bp, Homo sapiens
ttgtaacactgctgg

SEQ ID NO: 1499927 - DNA, 15 bp, Homo sapiens
tgtaacactgctggc

SEQ ID NO: 1499928 - DNA, 15 bp, Homo sapiens
gtaacactgctggct

SEQ ID NO: 1499929 - DNA, 15 bp, Homo sapiens
taacactgctggctc

SEQ ID NO: 1499930 - DNA, 15 bp, Homo sapiens
aacactgctggctca

SEQ ID NO: 1499931 - DNA, 15 bp, Homo sapiens
acactgctggctcat

SEQ ID NO: 1499932 - DNA, 15 bp, Homo sapiens
cactgctggctcatt

SEQ ID NO: 1499933 - DNA, 15 bp, Homo sapiens
actgctggctcattc

SEQ ID NO: 1499934 - DNA, 15 bp, Homo sapiens
ctgctggctcattca

SEQ ID NO: 1499935 - DNA, 15 bp, Homo sapiens
tgctggctcattcag

SEQ ID NO: 1499936 - DNA, 15 bp, Homo sapiens
gctggctcattcagg

SEQ ID NO: 1499937 - DNA, 15 bp, Homo sapiens
ctggctcattcaggc

SEQ ID NO: 1499938 - DNA, 15 bp, Homo sapiens
tggctcattcaggct

SEQ ID NO: 1499939 - DNA, 15 bp, Homo sapiens
ggctcattcaggctt

SEQ ID NO: 1499940 - DNA, 15 bp, Homo sapiens
gctcattcaggctta

SEQ ID NO: 1499941 - DNA, 15 bp, Homo sapiens
ctcattcaggcttat

SEQ ID NO: 1499942 - DNA, 15 bp, Homo sapiens
tcattcaggcttatt

SEQ ID NO: 1499943 - DNA, 15 bp, Homo sapiens
cattcaggcttattg

SEQ ID NO: 1499944 - DNA, 15 bp, Homo sapiens
attcaggcttattgc

SEQ ID NO: 1499945 - DNA, 15 bp, Homo sapiens
ttcaggcttattgca

SEQ ID NO: 1499946 - DNA, 15 bp, Homo sapiens
tcaggcttattgcag

SEQ ID NO: 1499947 - DNA, 15 bp, Homo sapiens
caggcttattgcagg

SEQ ID NO: 1499948 - DNA, 15 bp, Homo sapiens
aggcttattgcagga

SEQ ID NO: 1499949 - DNA, 15 bp, Homo sapiens
ggcttattgcaggag

SEQ ID NO: 1499950 - DNA, 15 bp, Homo sapiens
gcttattgcaggagc

SEQ ID NO: 1499951 - DNA, 15 bp, Homo sapiens
cttattgcaggagca

SEQ ID NO: 1499952 - DNA, 15 bp, Homo sapiens
ttattgcaggagcag

SEQ ID NO: 1499953 - DNA, 15 bp, Homo sapiens
tattgcaggagcagc

SEQ ID NO: 1499954 - DNA, 15 bp, Homo sapiens
attgcaggagcagct

SEQ ID NO: 1499955 - DNA, 15 bp, Homo sapiens
ttgcaggagcagctc

SEQ ID NO: 1499956 - DNA, 15 bp, Homo sapiens
tgcaggagcagctcc

SEQ ID NO: 1499957 - DNA, 15 bp, Homo sapiens
gcaggagcagctccc

SEQ ID NO: 1499958 - DNA, 15 bp, Homo sapiens
caggagcagctccct

SEQ ID NO: 1499959 - DNA, 15 bp, Homo sapiens
aggagcagctccctc

SEQ ID NO: 1499960 - DNA, 15 bp, Homo sapiens
ggagcagctccctct

SEQ ID NO: 1499961 - DNA, 15 bp, Homo sapiens
gagcagctccctctt

SEQ ID NO: 1499962 - DNA, 15 bp, Homo sapiens
agcagctccctcttg

SEQ ID NO: 1499963 - DNA, 15 bp, Homo sapiens
gcagctccctcttgc

SEQ ID NO: 1499964 - DNA, 15 bp, Homo sapiens
cagctccctcttgct

SEQ ID NO: 1499965 - DNA, 15 bp, Homo sapiens
agctccctcttgctg

SEQ ID NO: 1499966 - DNA, 15 bp, Homo sapiens
gctccctcttgctgg

SEQ ID NO: 1499967 - DNA, 15 bp, Homo sapiens
ctccctcttgctggg

SEQ ID NO: 1499968 - DNA, 15 bp, Homo sapiens
tccctcttgctgggt

SEQ ID NO: 1499969 - DNA, 15 bp, Homo sapiens
ccctcttgctgggta

SEQ ID NO: 1499970 - DNA, 15 bp, Homo sapiens
cctcttgctgggtag

SEQ ID NO: 1499971 - DNA, 15 bp, Homo sapiens
ctcttgctgggtagc

SEQ ID NO: 1499972 - DNA, 15 bp, Homo sapiens
tcttgctgggtagca

SEQ ID NO: 1499973 - DNA, 15 bp, Homo sapiens
cttgctgggtagcaa

SEQ ID NO: 1499974 - DNA, 15 bp, Homo sapiens
ttgctgggtagcaac

SEQ ID NO: 1499975 - DNA, 15 bp, Homo sapiens
tgctgggtagcaacc

SEQ ID NO: 1499976 - DNA, 15 bp, Homo sapiens
gctgggtagcaaccc

SEQ ID NO: 1499977 - DNA, 15 bp, Homo sapiens
ctgggtagcaacccc

SEQ ID NO: 1499978 - DNA, 15 bp, Homo sapiens
tgggtagcaacccct

SEQ ID NO: 1499979 - DNA, 15 bp, Homo sapiens
gggtagcaacccctc

SEQ ID NO: 1499980 - DNA, 15 bp, Homo sapiens
ggtagcaacccctct

SEQ ID NO: 1499981 - DNA, 15 bp, Homo sapiens
gtagcaacccctctt

SEQ ID NO: 1499982 - DNA, 15 bp, Homo sapiens
tagcaacccctcttc

SEQ ID NO: 1499983 - DNA, 15 bp, Homo sapiens
agcaacccctcttct

SEQ ID NO: 1499984 - DNA, 15 bp, Homo sapiens
gcaacccctcttctg

SEQ ID NO: 1499985 - DNA, 15 bp, Homo sapiens
caacccctcttctga

SEQ ID NO: 1499986 - DNA, 15 bp, Homo sapiens
aacccctcttctgaa

SEQ ID NO: 1499987 - DNA, 15 bp, Homo sapiens
acccctcttctgaaa

SEQ ID NO: 1499988 - DNA, 15 bp, Homo sapiens
cccctcttctgaaat

SEQ ID NO: 1499989 - DNA, 15 bp, Homo sapiens
ccctcttctgaaatg

SEQ ID NO: 1499990 - DNA, 15 bp, Homo sapiens
cctcttctgaaatga

SEQ ID NO: 1499991 - DNA, 15 bp, Homo sapiens
ctcttctgaaatgaa

SEQ ID NO: 1499992 - DNA, 15 bp, Homo sapiens
tcttctgaaatgaat

SEQ ID NO: 1499993 - DNA, 15 bp, Homo sapiens
cttctgaaatgaatt

SEQ ID NO: 1499994 - DNA, 15 bp, Homo sapiens
ttctgaaatgaatta

SEQ ID NO: 1499995 - DNA, 15 bp, Homo sapiens
tctgaaatgaattaa

SEQ ID NO: 1499996 - DNA, 15 bp, Homo sapiens
ctgaaatgaattaac

SEQ ID NO: 1499997 - DNA, 15 bp, Homo sapiens
tgaaatgaattaact

SEQ ID NO: 1499998 - DNA, 15 bp, Homo sapiens
gaaatgaattaactg

SEQ ID NO: 1499999 - DNA, 15 bp, Homo sapiens
aaatgaattaactgt

SEQ ID NO: 1500000 - DNA, 15 bp, Homo sapiens
aatgaattaactgta

SEQ ID NO: 1500001 - DNA, 15 bp, Homo sapiens
atgaattaactgtag

SEQ ID NO: 1500002 - DNA, 15 bp, Homo sapiens
tgaattaactgtagt

SEQ ID NO: 1500003 - DNA, 15 bp, Homo sapiens
gaattaactgtagta

SEQ ID NO: 1500004 - DNA, 15 bp, Homo sapiens
aattaactgtagtat

SEQ ID NO: 1500005 - DNA, 15 bp, Homo sapiens
attaactgtagtatc

SEQ ID NO: 1500006 - DNA, 15 bp, Homo sapiens
ttaactgtagtatcc

SEQ ID NO: 1500007 - DNA, 15 bp, Homo sapiens
taactgtagtatcca

SEQ ID NO: 1500008 - DNA, 15 bp, Homo sapiens
aactgtagtatccag

SEQ ID NO: 1500009 - DNA, 15 bp, Homo sapiens
actgtagtatccagg

SEQ ID NO: 1500010 - DNA, 15 bp, Homo sapiens
ctgtagtatccaggc

SEQ ID NO: 1500011 - DNA, 15 bp, Homo sapiens
tgtagtatccaggca

SEQ ID NO: 1500012 - DNA, 15 bp, Homo sapiens
gtagtatccaggcaa

SEQ ID NO: 1500013 - DNA, 15 bp, Homo sapiens
tagtatccaggcaaa

SEQ ID NO: 1500014 - DNA, 15 bp, Homo sapiens
agtatccaggcaaac

SEQ ID NO: 1500015 - DNA, 15 bp, Homo sapiens
gtatccaggcaaaca

SEQ ID NO: 1500016 - DNA, 15 bp, Homo sapiens
tatccaggcaaacac

SEQ ID NO: 1500017 - DNA, 15 bp, Homo sapiens
atccaggcaaacaca

SEQ ID NO: 1500018 - DNA, 15 bp, Homo sapiens
tccaggcaaacacac

SEQ ID NO: 1500019 - DNA, 15 bp, Homo sapiens
ccaggcaaacacacg

SEQ ID NO: 1500020 - DNA, 15 bp, Homo sapiens
caggcaaacacacgc

SEQ ID NO: 1500021 - DNA, 15 bp, Homo sapiens
aggcaaacacacgct

SEQ ID NO: 1500022 - DNA, 15 bp, Homo sapiens
ggcaaacacacgctg

SEQ ID NO: 1500023 - DNA, 15 bp, Homo sapiens
gcaaacacacgctgc

SEQ ID NO: 1500024 - DNA, 15 bp, Homo sapiens
caaacacacgctgcc

SEQ ID NO: 1500025 - DNA, 15 bp, Homo sapiens
aaacacacgctgcca

SEQ ID NO: 1500026 - DNA, 15 bp, Homo sapiens
aacacacgctgccag

SEQ ID NO: 1500027 - DNA, 15 bp, Homo sapiens
acacacgctgccagg

SEQ ID NO: 1500028 - DNA, 15 bp, Homo sapiens
cacacgctgccagga

SEQ ID NO: 1500029 - DNA, 15 bp, Homo sapiens
acacgctgccaggac

SEQ ID NO: 1500030 - DNA, 15 bp, Homo sapiens
cacgctgccaggacc

SEQ ID NO: 1500031 - DNA, 15 bp, Homo sapiens
acgctgccaggacct

SEQ ID NO: 1500032 - DNA, 15 bp, Homo sapiens
cgctgccaggacctc

SEQ ID NO: 1500033 - DNA, 15 bp, Homo sapiens
gctgccaggacctca

SEQ ID NO: 1500034 - DNA, 15 bp, Homo sapiens
ctgccaggacctcat

SEQ ID NO: 1500035 - DNA, 15 bp, Homo sapiens
tgccaggacctcatt

SEQ ID NO: 1500036 - DNA, 15 bp, Homo sapiens
gccaggacctcattc

SEQ ID NO: 1500037 - DNA, 15 bp, Homo sapiens
ccaggacctcattca

SEQ ID NO: 1500038 - DNA, 15 bp, Homo sapiens
caggacctcattcag

SEQ ID NO: 1500039 - DNA, 15 bp, Homo sapiens
aggacctcattcagg

SEQ ID NO: 1500040 - DNA, 15 bp, Homo sapiens
ggacctcattcaggt

SEQ ID NO: 1500041 - DNA, 15 bp, Homo sapiens
gacctcattcaggtg

SEQ ID NO: 1500042 - DNA, 15 bp, Homo sapiens
acctcattcaggtgg

SEQ ID NO: 1500043 - DNA, 15 bp, Homo sapiens
cctcattcaggtggt

SEQ ID NO: 1500044 - DNA, 15 bp, Homo sapiens
ctcattcaggtggtg

SEQ ID NO: 1500045 - DNA, 15 bp, Homo sapiens
tcattcaggtggtgc

SEQ ID NO: 1500046 - DNA, 15 bp, Homo sapiens
cattcaggtggtgcc

SEQ ID NO: 1500047 - DNA, 15 bp, Homo sapiens
attcaggtggtgccg

SEQ ID NO: 1500048 - DNA, 15 bp, Homo sapiens
ttcaggtggtgccgg

SEQ ID NO: 1500049 - DNA, 15 bp, Homo sapiens
tcaggtggtgccggc

SEQ ID NO: 1500050 - DNA, 15 bp, Homo sapiens
caggtggtgccggca

SEQ ID NO: 1500051 - DNA, 15 bp, Homo sapiens
aggtggtgccggcat

SEQ ID NO: 1500052 - DNA, 15 bp, Homo sapiens
ggtggtgccggcatt

SEQ ID NO: 1500053 - DNA, 15 bp, Homo sapiens
gtggtgccggcattt

SEQ ID NO: 1500054 - DNA, 15 bp, Homo sapiens
tggtgccggcattta

SEQ ID NO: 1500055 - DNA, 15 bp, Homo sapiens
ggtgccggcatttat

SEQ ID NO: 1500056 - DNA, 15 bp, Homo sapiens
gtgccggcatttatc

SEQ ID NO: 1500057 - DNA, 15 bp, Homo sapiens
tgccggcatttatct

SEQ ID NO: 1500058 - DNA, 15 bp, Homo sapiens
gccggcatttatctc

SEQ ID NO: 1500059 - DNA, 15 bp, Homo sapiens
ccggcatttatctcc

SEQ ID NO: 1500060 - DNA, 15 bp, Homo sapiens
cggcatttatctccc

SEQ ID NO: 1500061 - DNA, 15 bp, Homo sapiens
ggcatttatctccca

SEQ ID NO: 1500062 - DNA, 15 bp, Homo sapiens
gcatttatctcccaa

SEQ ID NO: 1500063 - DNA, 15 bp, Homo sapiens
catttatctcccaac

SEQ ID NO: 1500064 - DNA, 15 bp, Homo sapiens
atttatctcccaaca

SEQ ID NO: 1500065 - DNA, 15 bp, Homo sapiens
tttatctcccaacat

SEQ ID NO: 1500066 - DNA, 15 bp, Homo sapiens
ttatctcccaacatc

SEQ ID NO: 1500067 - DNA, 15 bp, Homo sapiens
tatctcccaacatcg

SEQ ID NO: 1500068 - DNA, 15 bp, Homo sapiens
atctcccaacatcgg

SEQ ID NO: 1500069 - DNA, 15 bp, Homo sapiens
tctcccaacatcggg

SEQ ID NO: 1500070 - DNA, 15 bp, Homo sapiens
ctcccaacatcgggc

SEQ ID NO: 1500071 - DNA, 15 bp, Homo sapiens
tcccaacatcgggcc

SEQ ID NO: 1500072 - DNA, 15 bp, Homo sapiens
cccaacatcgggcct

SEQ ID NO: 1500073 - DNA, 15 bp, Homo sapiens
ccaacatcgggcctg

SEQ ID NO: 1500074 - DNA, 15 bp, Homo sapiens
caacatcgggcctgg

SEQ ID NO: 1500075 - DNA, 15 bp, Homo sapiens
aacatcgggcctggc

SEQ ID NO: 1500076 - DNA, 15 bp, Homo sapiens
acatcgggcctggcc

SEQ ID NO: 1500077 - DNA, 15 bp, Homo sapiens
catcgggcctggcct

SEQ ID NO: 1500078 - DNA, 15 bp, Homo sapiens
atcgggcctggcctc

SEQ ID NO: 1500079 - DNA, 15 bp, Homo sapiens
attgggagctagcag

SEQ ID NO: 1500080 - DNA, 15 bp, Homo sapiens
ttgggagctagcagg

SEQ ID NO: 1500081 - DNA, 15 bp, Homo sapiens
tgggagctagcaggc

SEQ ID NO: 1500082 - DNA, 15 bp, Homo sapiens
gggagctagcaggcc

SEQ ID NO: 1500083 - DNA, 15 bp, Homo sapiens
ggagctagcaggccc

SEQ ID NO: 1500084 - DNA, 15 bp, Homo sapiens
gagctagcaggccct

SEQ ID NO: 1500085 - DNA, 15 bp, Homo sapiens
agctagcaggccctt

SEQ ID NO: 1500086 - DNA, 15 bp, Homo sapiens
gctagcaggcccttg

SEQ ID NO: 1500087 - DNA, 15 bp, Homo sapiens
ctagcaggcccttgt

SEQ ID NO: 1500088 - DNA, 15 bp, Homo sapiens
tagcaggcccttgtc

SEQ ID NO: 1500089 - DNA, 15 bp, Homo sapiens
agcaggcccttgtcg

SEQ ID NO: 1500090 - DNA, 15 bp, Homo sapiens
gcaggcccttgtcgc

SEQ ID NO: 1500091 - DNA, 15 bp, Homo sapiens
caggcccttgtcgca

SEQ ID NO: 1500092 - DNA, 15 bp, Homo sapiens
aggcccttgtcgcag

SEQ ID NO: 1500093 - DNA, 15 bp, Homo sapiens
ggcccttgtcgcagt

SEQ ID NO: 1500094 - DNA, 15 bp, Homo sapiens
gcccttgtcgcagtg

SEQ ID NO: 1500095 - DNA, 15 bp, Homo sapiens
cccttgtcgcagtgt

SEQ ID NO: 1500096 - DNA, 15 bp, Homo sapiens
ccttgtcgcagtgtg

SEQ ID NO: 1500097 - DNA, 15 bp, Homo sapiens
cttgtcgcagtgtgg

SEQ ID NO: 1500098 - DNA, 15 bp, Homo sapiens
ttgtcgcagtgtggc

SEQ ID NO: 1500099 - DNA, 15 bp, Homo sapiens
tgtcgcagtgtggcc

SEQ ID NO: 1500100 - DNA, 15 bp, Homo sapiens
gtcgcagtgtggccc

SEQ ID NO: 1500101 - DNA, 15 bp, Homo sapiens
tcgcagtgtggccca

SEQ ID NO: 1500102 - DNA, 15 bp, Homo sapiens
cgcagtgtggcccac

SEQ ID NO: 1500103 - DNA, 15 bp, Homo sapiens
gcagtgtggcccact

SEQ ID NO: 1500104 - DNA, 15 bp, Homo sapiens
cagtgtggcccactc

SEQ ID NO: 1500105 - DNA, 15 bp, Homo sapiens
agtgtggcccactca

SEQ ID NO: 1500106 - DNA, 15 bp, Homo sapiens
gtgtggcccactcac

SEQ ID NO: 1500107 - DNA, 15 bp, Homo sapiens
tgtggcccactcacc

SEQ ID NO: 1500108 - DNA, 15 bp, Homo sapiens
gtggcccactcacct

SEQ ID NO: 1500109 - DNA, 15 bp, Homo sapiens
tggcccactcacctt

SEQ ID NO: 1500110 - DNA, 15 bp, Homo sapiens
ggcccactcaccttc

SEQ ID NO: 1500111 - DNA, 15 bp, Homo sapiens
gcccactcaccttcc

SEQ ID NO: 1500112 - DNA, 15 bp, Homo sapiens
cccactcaccttccc

SEQ ID NO: 1500113 - DNA, 15 bp, Homo sapiens
ccactcaccttccca

SEQ ID NO: 1500114 - DNA, 15 bp, Homo sapiens
cactcaccttcccat

SEQ ID NO: 1500115 - DNA, 15 bp, Homo sapiens
actcaccttcccatc

SEQ ID NO: 1500116 - DNA, 15 bp, Homo sapiens
ctcaccttcccatcc

SEQ ID NO: 1500117 - DNA, 15 bp, Homo sapiens
tcaccttcccatccc

SEQ ID NO: 1500118 - DNA, 15 bp, Homo sapiens
caccttcccatccca

SEQ ID NO: 1500119 - DNA, 15 bp, Homo sapiens
accttcccatcccag

SEQ ID NO: 1500120 - DNA, 15 bp, Homo sapiens
ccttcccatcccagg

SEQ ID NO: 1500121 - DNA, 15 bp, Homo sapiens
cttcccatcccaggg

SEQ ID NO: 1500122 - DNA, 15 bp, Homo sapiens
ttcccatcccaggga

SEQ ID NO: 1500123 - DNA, 15 bp, Homo sapiens
tcccatcccagggac

SEQ ID NO: 1500124 - DNA, 15 bp, Homo sapiens
cccatcccagggact

SEQ ID NO: 1500125 - DNA, 15 bp, Homo sapiens
ccatcccagggactc

SEQ ID NO: 1500126 - DNA, 15 bp, Homo sapiens
catcccagggactct

SEQ ID NO: 1500127 - DNA, 15 bp, Homo sapiens
atcccagggactctg

SEQ ID NO: 1500128 - DNA, 15 bp, Homo sapiens
tcccagggactctgc

SEQ ID NO: 1500129 - DNA, 15 bp, Homo sapiens
cccagggactctgcc

SEQ ID NO: 1500130 - DNA, 15 bp, Homo sapiens
ccagggactctgcct

SEQ ID NO: 1500131 - DNA, 15 bp, Homo sapiens
cagggactctgccta

SEQ ID NO: 1500132 - DNA, 15 bp, Homo sapiens
agggactctgcctac

SEQ ID NO: 1500133 - DNA, 15 bp, Homo sapiens
gggactctgcctacc

SEQ ID NO: 1500134 - DNA, 15 bp, Homo sapiens
ggactctgcctaccc

SEQ ID NO: 1500135 - DNA, 15 bp, Homo sapiens
gactctgcctaccca

SEQ ID NO: 1500136 - DNA, 15 bp, Homo sapiens
actctgcctacccat

SEQ ID NO: 1500137 - DNA, 15 bp, Homo sapiens
ctctgcctacccatt

SEQ ID NO: 1500138 - DNA, 15 bp, Homo sapiens
tctgcctacccattc

SEQ ID NO: 1500139 - DNA, 15 bp, Homo sapiens
ctgcctacccattcc

SEQ ID NO: 1500140 - DNA, 15 bp, Homo sapiens
tgcctacccattcct

SEQ ID NO: 1500141 - DNA, 15 bp, Homo sapiens
gcctacccattcctt

SEQ ID NO: 1500142 - DNA, 15 bp, Homo sapiens
cctacccattcctta

SEQ ID NO: 1500143 - DNA, 15 bp, Homo sapiens
ctacccattccttag

SEQ ID NO: 1500144 - DNA, 15 bp, Homo sapiens
tacccattccttagt

SEQ ID NO: 1500145 - DNA, 15 bp, Homo sapiens
acccattccttagtg

SEQ ID NO: 1500146 - DNA, 15 bp, Homo sapiens
cccattccttagtgc

SEQ ID NO: 1500147 - DNA, 15 bp, Homo sapiens
ccattccttagtgcc

SEQ ID NO: 1500148 - DNA, 15 bp, Homo sapiens
cattccttagtgcct

SEQ ID NO: 1500149 - DNA, 15 bp, Homo sapiens
attccttagtgcctg

SEQ ID NO: 1500150 - DNA, 15 bp, Homo sapiens
ttccttagtgcctgg

SEQ ID NO: 1500151 - DNA, 15 bp, Homo sapiens
tccttagtgcctggt

SEQ ID NO: 1500152 - DNA, 15 bp, Homo sapiens
ccttagtgcctggtc

SEQ ID NO: 1500153 - DNA, 15 bp, Homo sapiens
cttagtgcctggtca

SEQ ID NO: 1500154 - DNA, 15 bp, Homo sapiens
ttagtgcctggtcat

SEQ ID NO: 1500155 - DNA, 15 bp, Homo sapiens
tagtgcctggtcatt

SEQ ID NO: 1500156 - DNA, 15 bp, Homo sapiens
agtgcctggtcatta

SEQ ID NO: 1500157 - DNA, 15 bp, Homo sapiens
gtgcctggtcattac

SEQ ID NO: 1500158 - DNA, 15 bp, Homo sapiens
tgcctggtcattact

SEQ ID NO: 1500159 - DNA, 15 bp, Homo sapiens
gcctggtcattactg

SEQ ID NO: 1500160 - DNA, 15 bp, Homo sapiens
cctggtcattactgc

SEQ ID NO: 1500161 - DNA, 15 bp, Homo sapiens
ctggtcattactgcc

SEQ ID NO: 1500162 - DNA, 15 bp, Homo sapiens
tggtcattactgcca

SEQ ID NO: 1500163 - DNA, 15 bp, Homo sapiens
ggtcattactgccag

SEQ ID NO: 1500164 - DNA, 15 bp, Homo sapiens
gtcattactgccaga

SEQ ID NO: 1500165 - DNA, 15 bp, Homo sapiens
tcattactgccagag

SEQ ID NO: 1500166 - DNA, 15 bp, Homo sapiens
cattactgccagagg

SEQ ID NO: 1500167 - DNA, 15 bp, Homo sapiens
attactgccagagga

SEQ ID NO: 1500168 - DNA, 15 bp, Homo sapiens
ttactgccagaggag

SEQ ID NO: 1500169 - DNA, 15 bp, Homo sapiens
tactgccagaggaga

SEQ ID NO: 1500170 - DNA, 15 bp, Homo sapiens
actgccagaggagaa

SEQ ID NO: 1500171 - DNA, 15 bp, Homo sapiens
ctgccagaggagaaa

SEQ ID NO: 1500172 - DNA, 15 bp, Homo sapiens
tgccagaggagaaag

SEQ ID NO: 1500173 - DNA, 15 bp, Homo sapiens
gccagaggagaaagc

SEQ ID NO: 1500174 - DNA, 15 bp, Homo sapiens
ccagaggagaaagca

SEQ ID NO: 1500175 - DNA, 15 bp, Homo sapiens
cagaggagaaagcag

SEQ ID NO: 1500176 - DNA, 15 bp, Homo sapiens
agaggagaaagcagc

SEQ ID NO: 1500177 - DNA, 15 bp, Homo sapiens
gaggagaaagcagcc

SEQ ID NO: 1500178 - DNA, 15 bp, Homo sapiens
aggagaaagcagcca

SEQ ID NO: 1500179 - DNA, 15 bp, Homo sapiens
ggagaaagcagccac

SEQ ID NO: 1500180 - DNA, 15 bp, Homo sapiens
gagaaagcagccacc

SEQ ID NO: 1500181 - DNA, 15 bp, Homo sapiens
agaaagcagccaccc

SEQ ID NO: 1500182 - DNA, 15 bp, Homo sapiens
gaaagcagccaccca

SEQ ID NO: 1500183 - DNA, 15 bp, Homo sapiens
aaagcagccacccag

SEQ ID NO: 1500184 - DNA, 15 bp, Homo sapiens
aagcagccacccagc

SEQ ID NO: 1500185 - DNA, 15 bp, Homo sapiens
agcagccacccagca

SEQ ID NO: 1500186 - DNA, 15 bp, Homo sapiens
gcagccacccagcat

SEQ ID NO: 1500187 - DNA, 15 bp, Homo sapiens
cagccacccagcata

SEQ ID NO: 1500188 - DNA, 15 bp, Homo sapiens
agccacccagcatat

SEQ ID NO: 1500189 - DNA, 15 bp, Homo sapiens
gccacccagcatatt

SEQ ID NO: 1500190 - DNA, 15 bp, Homo sapiens
ccacccagcatattc

SEQ ID NO: 1500191 - DNA, 15 bp, Homo sapiens
cacccagcatattct

SEQ ID NO: 1500192 - DNA, 15 bp, Homo sapiens
acccagcatattctg

SEQ ID NO: 1500193 - DNA, 15 bp, Homo sapiens
cccagcatattctgg

SEQ ID NO: 1500194 - DNA, 15 bp, Homo sapiens
ccagcatattctggg

SEQ ID NO: 1500195 - DNA, 15 bp, Homo sapiens
cagcatattctgggt

SEQ ID NO: 1500196 - DNA, 15 bp, Homo sapiens
agcatattctgggta

SEQ ID NO: 1500197 - DNA, 15 bp, Homo sapiens
gcatattctgggtat

SEQ ID NO: 1500198 - DNA, 15 bp, Homo sapiens
catattctgggtatt

SEQ ID NO: 1500199 - DNA, 15 bp, Homo sapiens
atattctgggtattt

SEQ ID NO: 1500200 - DNA, 15 bp, Homo sapiens
tattctgggtatttt

SEQ ID NO: 1500201 - DNA, 15 bp, Homo sapiens
attctgggtattttt

SEQ ID NO: 1500202 - DNA, 15 bp, Homo sapiens
ttctgggtatttttc

SEQ ID NO: 1500203 - DNA, 15 bp, Homo sapiens
tctgggtatttttct

SEQ ID NO: 1500204 - DNA, 15 bp, Homo sapiens
ctgggtatttttctc

SEQ ID NO: 1500205 - DNA, 15 bp, Homo sapiens
tgggtatttttctct

SEQ ID NO: 1500206 - DNA, 15 bp, Homo sapiens
gggtatttttctctc

SEQ ID NO: 1500207 - DNA, 15 bp, Homo sapiens
ggtatttttctctct

SEQ ID NO: 1500208 - DNA, 15 bp, Homo sapiens
gtatttttctctctg

SEQ ID NO: 1500209 - DNA, 15 bp, Homo sapiens
tatttttctctctgc

SEQ ID NO: 1500210 - DNA, 15 bp, Homo sapiens
atttttctctctgca

SEQ ID NO: 1500211 - DNA, 15 bp, Homo sapiens
tttttctctctgcac

SEQ ID NO: 1500212 - DNA, 15 bp, Homo sapiens
ttttctctctgcaca

SEQ ID NO: 1500213 - DNA, 15 bp, Homo sapiens
tttctctctgcacaa

SEQ ID NO: 1500214 - DNA, 15 bp, Homo sapiens
ttctctctgcacaag

SEQ ID NO: 1500215 - DNA, 15 bp, Homo sapiens
tctctctgcacaagt

SEQ ID NO: 1500216 - DNA, 15 bp, Homo sapiens
ctctctgcacaagtt

SEQ ID NO: 1500217 - DNA, 15 bp, Homo sapiens
tctctgcacaagttc

SEQ ID NO: 1500218 - DNA, 15 bp, Homo sapiens
ctctgcacaagttct

SEQ ID NO: 1500219 - DNA, 15 bp, Homo sapiens
tctgcacaagttctc

SEQ ID NO: 1500220 - DNA, 15 bp, Homo sapiens
ctgcacaagttctct

SEQ ID NO: 1500221 - DNA, 15 bp, Homo sapiens
tgcacaagttctctg

SEQ ID NO: 1500222 - DNA, 15 bp, Homo sapiens
gcacaagttctctgt

SEQ ID NO: 1500223 - DNA, 15 bp, Homo sapiens
cacaagttctctgta

SEQ ID NO: 1500224 - DNA, 15 bp, Homo sapiens
acaagttctctgtag

SEQ ID NO: 1500225 - DNA, 15 bp, Homo sapiens
caagttctctgtaga

SEQ ID NO: 1500226 - DNA, 15 bp, Homo sapiens
aagttctctgtagaa

SEQ ID NO: 1500227 - DNA, 15 bp, Homo sapiens
agttctctgtagaac

SEQ ID NO: 1500228 - DNA, 15 bp, Homo sapiens
gttctctgtagaact

SEQ ID NO: 1500229 - DNA, 15 bp, Homo sapiens
ttctctgtagaactt

SEQ ID NO: 1500230 - DNA, 15 bp, Homo sapiens
tctctgtagaactta

SEQ ID NO: 1500231 - DNA, 15 bp, Homo sapiens
ctctgtagaacttag

SEQ ID NO: 1500232 - DNA, 15 bp, Homo sapiens
tctgtagaacttaga

SEQ ID NO: 1500233 - DNA, 15 bp, Homo sapiens
ctgtagaacttagag

SEQ ID NO: 1500234 - DNA, 15 bp, Homo sapiens
tgtagaacttagagc

SEQ ID NO: 1500235 - DNA, 15 bp, Homo sapiens
gtagaacttagagct

SEQ ID NO: 1500236 - DNA, 15 bp, Homo sapiens
tagaacttagagctg

SEQ ID NO: 1500237 - DNA, 15 bp, Homo sapiens
agaacttagagctgc

SEQ ID NO: 1500238 - DNA, 15 bp, Homo sapiens
gaacttagagctgca

SEQ ID NO: 1500239 - DNA, 15 bp, Homo sapiens
aacttagagctgcaa

SEQ ID NO: 1500240 - DNA, 15 bp, Homo sapiens
acttagagctgcaag

SEQ ID NO: 1500241 - DNA, 15 bp, Homo sapiens
cttagagctgcaagc

SEQ ID NO: 1500242 - DNA, 15 bp, Homo sapiens
ttagagctgcaagcc

SEQ ID NO: 1500243 - DNA, 15 bp, Homo sapiens
tagagctgcaagcca

SEQ ID NO: 1500244 - DNA, 15 bp, Homo sapiens
agagctgcaagccaa

SEQ ID NO: 1500245 - DNA, 15 bp, Homo sapiens
gagctgcaagccaag

SEQ ID NO: 1500246 - DNA, 15 bp, Homo sapiens
agctgcaagccaagc

SEQ ID NO: 1500247 - DNA, 15 bp, Homo sapiens
gctgcaagccaagct

SEQ ID NO: 1500248 - DNA, 15 bp, Homo sapiens
ctgcaagccaagctc

SEQ ID NO: 1500249 - DNA, 15 bp, Homo sapiens
tgcaagccaagctct

SEQ ID NO: 1500250 - DNA, 15 bp, Homo sapiens
gcaagccaagctctg

SEQ ID NO: 1500251 - DNA, 15 bp, Homo sapiens
caagccaagctctgg

SEQ ID NO: 1500252 - DNA, 15 bp, Homo sapiens
aagccaagctctggg

SEQ ID NO: 1500253 - DNA, 15 bp, Homo sapiens
agccaagctctgggc

SEQ ID NO: 1500254 - DNA, 15 bp, Homo sapiens
gccaagctctgggcc

SEQ ID NO: 1500255 - DNA, 15 bp, Homo sapiens
ccaagctctgggcct

SEQ ID NO: 1500256 - DNA, 15 bp, Homo sapiens
caagctctgggcctg

SEQ ID NO: 1500257 - DNA, 15 bp, Homo sapiens
aagctctgggcctgc

SEQ ID NO: 1500258 - DNA, 15 bp, Homo sapiens
agctctgggcctgcc

SEQ ID NO: 1500259 - DNA, 15 bp, Homo sapiens
gctctgggcctgcca

SEQ ID NO: 1500260 - DNA, 15 bp, Homo sapiens
ctctgggcctgccaa

SEQ ID NO: 1500261 - DNA, 15 bp, Homo sapiens
tctgggcctgccaag

SEQ ID NO: 1500262 - DNA, 15 bp, Homo sapiens
ctgggcctgccaagg

SEQ ID NO: 1500263 - DNA, 15 bp, Homo sapiens
tgggcctgccaaggg

SEQ ID NO: 1500264 - DNA, 15 bp, Homo sapiens
gggcctgccaagggc

SEQ ID NO: 1500265 - DNA, 15 bp, Homo sapiens
ggcctgccaagggcc

SEQ ID NO: 1500266 - DNA, 15 bp, Homo sapiens
gcctgccaagggcca

SEQ ID NO: 1500267 - DNA, 15 bp, Homo sapiens
cctgccaagggccaa

SEQ ID NO: 1500268 - DNA, 15 bp, Homo sapiens
ctgccaagggccaat

SEQ ID NO: 1500269 - DNA, 15 bp, Homo sapiens
tgccaagggccaatc

SEQ ID NO: 1500270 - DNA, 15 bp, Homo sapiens
gccaagggccaatcc

SEQ ID NO: 1500271 - DNA, 15 bp, Homo sapiens
ccaagggccaatcca

SEQ ID NO: 1500272 - DNA, 15 bp, Homo sapiens
caagggccaatccag

SEQ ID NO: 1500273 - DNA, 15 bp, Homo sapiens
aagggccaatccagg

SEQ ID NO: 1500274 - DNA, 15 bp, Homo sapiens
agggccaatccaggt

SEQ ID NO: 1500275 - DNA, 15 bp, Homo sapiens
gggccaatccaggtc

SEQ ID NO: 1500276 - DNA, 15 bp, Homo sapiens
ggccaatccaggtcc

SEQ ID NO: 1500277 - DNA, 15 bp, Homo sapiens
gccaatccaggtcct

SEQ ID NO: 1500278 - DNA, 15 bp, Homo sapiens
ccaatccaggtcctg

SEQ ID NO: 1500279 - DNA, 15 bp, Homo sapiens
caatccaggtcctgt

SEQ ID NO: 1500280 - DNA, 15 bp, Homo sapiens
aatccaggtcctgtc

SEQ ID NO: 1500281 - DNA, 15 bp, Homo sapiens
atccaggtcctgtcc

SEQ ID NO: 1500282 - DNA, 15 bp, Homo sapiens
tccaggtcctgtcca

SEQ ID NO: 1500283 - DNA, 15 bp, Homo sapiens
ccaggtcctgtccat

SEQ ID NO: 1500284 - DNA, 15 bp, Homo sapiens
caggtcctgtccatc

SEQ ID NO: 1500285 - DNA, 15 bp, Homo sapiens
aggtcctgtccatcc

SEQ ID NO: 1500286 - DNA, 15 bp, Homo sapiens
ggtcctgtccatcca

SEQ ID NO: 1500287 - DNA, 15 bp, Homo sapiens
gtcctgtccatccaa

SEQ ID NO: 1500288 - DNA, 15 bp, Homo sapiens
tcctgtccatccaaa

SEQ ID NO: 1500289 - DNA, 15 bp, Homo sapiens
cctgtccatccaaaa

SEQ ID NO: 1500290 - DNA, 15 bp, Homo sapiens
ctgtccatccaaaag

SEQ ID NO: 1500291 - DNA, 15 bp, Homo sapiens
tgtccatccaaaagc

SEQ ID NO: 1500292 - DNA, 15 bp, Homo sapiens
gtccatccaaaagct

SEQ ID NO: 1500293 - DNA, 15 bp, Homo sapiens
tccatccaaaagcta

SEQ ID NO: 1500294 - DNA, 15 bp, Homo sapiens
ccatccaaaagctaa

SEQ ID NO: 1500295 - DNA, 15 bp, Homo sapiens
catccaaaagctaaa

SEQ ID NO: 1500296 - DNA, 15 bp, Homo sapiens
atccaaaagctaaag

SEQ ID NO: 1500297 - DNA, 15 bp, Homo sapiens
tccaaaagctaaagc

SEQ ID NO: 1500298 - DNA, 15 bp, Homo sapiens
ccaaaagctaaagct

SEQ ID NO: 1500299 - DNA, 15 bp, Homo sapiens
caaaagctaaagctc

SEQ ID NO: 1500300 - DNA, 15 bp, Homo sapiens
aaaagctaaagctca

SEQ ID NO: 1500301 - DNA, 15 bp, Homo sapiens
aaagctaaagctcat

SEQ ID NO: 1500302 - DNA, 15 bp, Homo sapiens
aagctaaagctcatg

SEQ ID NO: 1500303 - DNA, 15 bp, Homo sapiens
agctaaagctcatgg

SEQ ID NO: 1500304 - DNA, 15 bp, Homo sapiens
gctaaagctcatggc

SEQ ID NO: 1500305 - DNA, 15 bp, Homo sapiens
ctaaagctcatggcg

SEQ ID NO: 1500306 - DNA, 15 bp, Homo sapiens
taaagctcatggcgc

SEQ ID NO: 1500307 - DNA, 15 bp, Homo sapiens
aaagctcatggcgca

SEQ ID NO: 1500308 - DNA, 15 bp, Homo sapiens
aagctcatggcgcag

SEQ ID NO: 1500309 - DNA, 15 bp, Homo sapiens
agctcatggcgcagc

SEQ ID NO: 1500310 - DNA, 15 bp, Homo sapiens
gctcatggcgcagct

SEQ ID NO: 1500311 - DNA, 15 bp, Homo sapiens
ctcatggcgcagctt

SEQ ID NO: 1500312 - DNA, 15 bp, Homo sapiens
tcatggcgcagcttc

SEQ ID NO: 1500313 - DNA, 15 bp, Homo sapiens
catggcgcagcttct

SEQ ID NO: 1500314 - DNA, 15 bp, Homo sapiens
atggcgcagcttctc

SEQ ID NO: 1500315 - DNA, 15 bp, Homo sapiens
tggcgcagcttctcc

SEQ ID NO: 1500316 - DNA, 15 bp, Homo sapiens
ggcgcagcttctccc

SEQ ID NO: 1500317 - DNA, 15 bp, Homo sapiens
gcgcagcttctccca

SEQ ID NO: 1500318 - DNA, 15 bp, Homo sapiens
cgcagcttctcccaa

SEQ ID NO: 1500319 - DNA, 15 bp, Homo sapiens
gcagcttctcccaat

SEQ ID NO: 1500320 - DNA, 15 bp, Homo sapiens
cagcttctcccaatg

SEQ ID NO: 1500321 - DNA, 15 bp, Homo sapiens
agcttctcccaatga

SEQ ID NO: 1500322 - DNA, 15 bp, Homo sapiens
gcttctcccaatgac

SEQ ID NO: 1500323 - DNA, 15 bp, Homo sapiens
cttctcccaatgact

SEQ ID NO: 1500324 - DNA, 15 bp, Homo sapiens
ttctcccaatgactc

SEQ ID NO: 1500325 - DNA, 15 bp, Homo sapiens
tctcccaatgactcc

SEQ ID NO: 1500326 - DNA, 15 bp, Homo sapiens
ctcccaatgactccc

SEQ ID NO: 1500327 - DNA, 15 bp, Homo sapiens
tcccaatgactccca

SEQ ID NO: 1500328 - DNA, 15 bp, Homo sapiens
cccaatgactcccac

SEQ ID NO: 1500329 - DNA, 15 bp, Homo sapiens
ccaatgactcccaca

SEQ ID NO: 1500330 - DNA, 15 bp, Homo sapiens
caatgactcccacag

SEQ ID NO: 1500331 - DNA, 15 bp, Homo sapiens
aatgactcccacagt

SEQ ID NO: 1500332 - DNA, 15 bp, Homo sapiens
atgactcccacagtc

SEQ ID NO: 1500333 - DNA, 15 bp, Homo sapiens
tgactcccacagtca

SEQ ID NO: 1500334 - DNA, 15 bp, Homo sapiens
gactcccacagtcat

SEQ ID NO: 1500335 - DNA, 15 bp, Homo sapiens
actcccacagtcatg

SEQ ID NO: 1500336 - DNA, 15 bp, Homo sapiens
ctcccacagtcatgc

SEQ ID NO: 1500337 - DNA, 15 bp, Homo sapiens
tcccacagtcatgcc

SEQ ID NO: 1500338 - DNA, 15 bp, Homo sapiens
cccacagtcatgcct

SEQ ID NO: 1500339 - DNA, 15 bp, Homo sapiens
ccacagtcatgcctt

SEQ ID NO: 1500340 - DNA, 15 bp, Homo sapiens
cacagtcatgccttg

SEQ ID NO: 1500341 - DNA, 15 bp, Homo sapiens
acagtcatgccttgc

SEQ ID NO: 1500342 - DNA, 15 bp, Homo sapiens
cagtcatgccttgcc

SEQ ID NO: 1500343 - DNA, 15 bp, Homo sapiens
agtcatgccttgccc

SEQ ID NO: 1500344 - DNA, 15 bp, Homo sapiens
gtcatgccttgcccc

SEQ ID NO: 1500345 - DNA, 15 bp, Homo sapiens
tcatgccttgcccct

SEQ ID NO: 1500346 - DNA, 15 bp, Homo sapiens
catgccttgcccctg

SEQ ID NO: 1500347 - DNA, 15 bp, Homo sapiens
atgccttgcccctga

SEQ ID NO: 1500348 - DNA, 15 bp, Homo sapiens
tgccttgcccctgac

SEQ ID NO: 1500349 - DNA, 15 bp, Homo sapiens
gccttgcccctgact

SEQ ID NO: 1500350 - DNA, 15 bp, Homo sapiens
ccttgcccctgactt

SEQ ID NO: 1500351 - DNA, 15 bp, Homo sapiens
cttgcccctgacttt

SEQ ID NO: 1500352 - DNA, 15 bp, Homo sapiens
ttgcccctgactttt

SEQ ID NO: 1500353 - DNA, 15 bp, Homo sapiens
tgcccctgacttttt

SEQ ID NO: 1500354 - DNA, 15 bp, Homo sapiens
gcccctgacttttta

SEQ ID NO: 1500355 - DNA, 15 bp, Homo sapiens
cccctgactttttat

SEQ ID NO: 1500356 - DNA, 15 bp, Homo sapiens
ccctgactttttatt

SEQ ID NO: 1500357 - DNA, 15 bp, Homo sapiens
cctgactttttattg

SEQ ID NO: 1500358 - DNA, 15 bp, Homo sapiens
ctgactttttattgc

SEQ ID NO: 1500359 - DNA, 15 bp, Homo sapiens
tgactttttattgct

SEQ ID NO: 1500360 - DNA, 15 bp, Homo sapiens
gactttttattgctg

SEQ ID NO: 1500361 - DNA, 15 bp, Homo sapiens
actttttattgctga

SEQ ID NO: 1500362 - DNA, 15 bp, Homo sapiens
ctttttattgctgac

SEQ ID NO: 1500363 - DNA, 15 bp, Homo sapiens
tttttattgctgaca

SEQ ID NO: 1500364 - DNA, 15 bp, Homo sapiens
ttttattgctgacag

SEQ ID NO: 1500365 - DNA, 15 bp, Homo sapiens
tttattgctgacagg

SEQ ID NO: 1500366 - DNA, 15 bp, Homo sapiens
ttattgctgacaggg

SEQ ID NO: 1500367 - DNA, 15 bp, Homo sapiens
tattgctgacaggga

SEQ ID NO: 1500368 - DNA, 15 bp, Homo sapiens
attgctgacagggaa

SEQ ID NO: 1500369 - DNA, 15 bp, Homo sapiens
ttgctgacagggaat

SEQ ID NO: 1500370 - DNA, 15 bp, Homo sapiens
tgctgacagggaatt

SEQ ID NO: 1500371 - DNA, 15 bp, Homo sapiens
gctgacagggaattc

SEQ ID NO: 1500372 - DNA, 15 bp, Homo sapiens
ctgacagggaattcc

SEQ ID NO: 1500373 - DNA, 15 bp, Homo sapiens
tgacagggaattccc

SEQ ID NO: 1500374 - DNA, 15 bp, Homo sapiens
gacagggaattccct

SEQ ID NO: 1500375 - DNA, 15 bp, Homo sapiens
acagggaattccctg

SEQ ID NO: 1500376 - DNA, 15 bp, Homo sapiens
cagggaattccctgg

SEQ ID NO: 1500377 - DNA, 15 bp, Homo sapiens
agggaattccctggg

SEQ ID NO: 1500378 - DNA, 15 bp, Homo sapiens
gggaattccctgggg

SEQ ID NO: 1500379 - DNA, 15 bp, Homo sapiens
ggaattccctggggg

SEQ ID NO: 1500380 - DNA, 15 bp, Homo sapiens
gaattccctggggga

SEQ ID NO: 1500381 - DNA, 15 bp, Homo sapiens
aattccctgggggac

SEQ ID NO: 1500382 - DNA, 15 bp, Homo sapiens
attccctgggggaca

SEQ ID NO: 1500383 - DNA, 15 bp, Homo sapiens
ttccctgggggacat

SEQ ID NO: 1500384 - DNA, 15 bp, Homo sapiens
tccctgggggacatg

SEQ ID NO: 1500385 - DNA, 15 bp, Homo sapiens
ccctgggggacatga

SEQ ID NO: 1500386 - DNA, 15 bp, Homo sapiens
cctgggggacatgac

SEQ ID NO: 1500387 - DNA, 15 bp, Homo sapiens
ctgggggacatgacc

SEQ ID NO: 1500388 - DNA, 15 bp, Homo sapiens
tgggggacatgacca

SEQ ID NO: 1500389 - DNA, 15 bp, Homo sapiens
gggggacatgaccac

SEQ ID NO: 1500390 - DNA, 15 bp, Homo sapiens
ggggacatgaccact

SEQ ID NO: 1500391 - DNA, 15 bp, Homo sapiens
gggacatgaccacta

SEQ ID NO: 1500392 - DNA, 15 bp, Homo sapiens
ggacatgaccactaa

SEQ ID NO: 1500393 - DNA, 15 bp, Homo sapiens
gacatgaccactaat

SEQ ID NO: 1500394 - DNA, 15 bp, Homo sapiens
acatgaccactaatt

SEQ ID NO: 1500395 - DNA, 15 bp, Homo sapiens
catgaccactaatta

SEQ ID NO: 1500396 - DNA, 15 bp, Homo sapiens
atgaccactaattag

SEQ ID NO: 1500397 - DNA, 15 bp, Homo sapiens
tgaccactaattaga

SEQ ID NO: 1500398 - DNA, 15 bp, Homo sapiens
gaccactaattagag

SEQ ID NO: 1500399 - DNA, 15 bp, Homo sapiens
accactaattagaga

SEQ ID NO: 1500400 - DNA, 15 bp, Homo sapiens
ccactaattagagat

SEQ ID NO: 1500401 - DNA, 15 bp, Homo sapiens
cactaattagagatc

SEQ ID NO: 1500402 - DNA, 15 bp, Homo sapiens
actaattagagatca

SEQ ID NO: 1500403 - DNA, 15 bp, Homo sapiens
ctaattagagatcag

SEQ ID NO: 1500404 - DNA, 15 bp, Homo sapiens
taattagagatcagt

SEQ ID NO: 1500405 - DNA, 15 bp, Homo sapiens
aattagagatcagtc

SEQ ID NO: 1500406 - DNA, 15 bp, Homo sapiens
attagagatcagtca

SEQ ID NO: 1500407 - DNA, 15 bp, Homo sapiens
ttagagatcagtcag

SEQ ID NO: 1500408 - DNA, 15 bp, Homo sapiens
tagagatcagtcagt

SEQ ID NO: 1500409 - DNA, 15 bp, Homo sapiens
agagatcagtcagtg

SEQ ID NO: 1500410 - DNA, 15 bp, Homo sapiens
gagatcagtcagtga

SEQ ID NO: 1500411 - DNA, 15 bp, Homo sapiens
agatcagtcagtgat

SEQ ID NO: 1500412 - DNA, 15 bp, Homo sapiens
gatcagtcagtgatt

SEQ ID NO: 1500413 - DNA, 15 bp, Homo sapiens
atcagtcagtgattc

SEQ ID NO: 1500414 - DNA, 15 bp, Homo sapiens
tcagtcagtgattca

SEQ ID NO: 1500415 - DNA, 15 bp, Homo sapiens
cagtcagtgattcag

SEQ ID NO: 1500416 - DNA, 15 bp, Homo sapiens
agtcagtgattcagg

SEQ ID NO: 1500417 - DNA, 15 bp, Homo sapiens
gtcagtgattcaggc

SEQ ID NO: 1500418 - DNA, 15 bp, Homo sapiens
tcagtgattcaggcc

SEQ ID NO: 1500419 - DNA, 15 bp, Homo sapiens
cagtgattcaggcct

SEQ ID NO: 1500420 - DNA, 15 bp, Homo sapiens
agtgattcaggcctt

SEQ ID NO: 1500421 - DNA, 15 bp, Homo sapiens
gtgattcaggccttt

SEQ ID NO: 1500422 - DNA, 15 bp, Homo sapiens
tgattcaggcctttc

SEQ ID NO: 1500423 - DNA, 15 bp, Homo sapiens
gattcaggcctttct

SEQ ID NO: 1500424 - DNA, 15 bp, Homo sapiens
attcaggcctttcta

SEQ ID NO: 1500425 - DNA, 15 bp, Homo sapiens
ttcaggcctttctag

SEQ ID NO: 1500426 - DNA, 15 bp, Homo sapiens
tcaggcctttctaga

SEQ ID NO: 1500427 - DNA, 15 bp, Homo sapiens
caggcctttctagat

SEQ ID NO: 1500428 - DNA, 15 bp, Homo sapiens
aggcctttctagatg

SEQ ID NO: 1500429 - DNA, 15 bp, Homo sapiens
ggcctttctagatga

SEQ ID NO: 1500430 - DNA, 15 bp, Homo sapiens
gcctttctagatgaa

SEQ ID NO: 1500431 - DNA, 15 bp, Homo sapiens
cctttctagatgaag

SEQ ID NO: 1500432 - DNA, 15 bp, Homo sapiens
ctttctagatgaaga

SEQ ID NO: 1500433 - DNA, 15 bp, Homo sapiens
tttctagatgaagag

SEQ ID NO: 1500434 - DNA, 15 bp, Homo sapiens
ttctagatgaagaga

SEQ ID NO: 1500435 - DNA, 15 bp, Homo sapiens
tctagatgaagagat

SEQ ID NO: 1500436 - DNA, 15 bp, Homo sapiens
ctagatgaagagatt

SEQ ID NO: 1500437 - DNA, 15 bp, Homo sapiens
tagatgaagagattc

SEQ ID NO: 1500438 - DNA, 15 bp, Homo sapiens
agatgaagagattca

SEQ ID NO: 1500439 - DNA, 15 bp, Homo sapiens
gatgaagagattcaa

SEQ ID NO: 1500440 - DNA, 15 bp, Homo sapiens
atgaagagattcaaa

SEQ ID NO: 1500441 - DNA, 15 bp, Homo sapiens
tgaagagattcaaaa

SEQ ID NO: 1500442 - DNA, 15 bp, Homo sapiens
gaagagattcaaaag

SEQ ID NO: 1500443 - DNA, 15 bp, Homo sapiens
aagagattcaaaagc

SEQ ID NO: 1500444 - DNA, 15 bp, Homo sapiens
agagattcaaaagcc

SEQ ID NO: 1500445 - DNA, 15 bp, Homo sapiens
gagattcaaaagcct

SEQ ID NO: 1500446 - DNA, 15 bp, Homo sapiens
agattcaaaagcctt

SEQ ID NO: 1500447 - DNA, 15 bp, Homo sapiens
gattcaaaagccttg

SEQ ID NO: 1500448 - DNA, 15 bp, Homo sapiens
attcaaaagccttgc

SEQ ID NO: 1500449 - DNA, 15 bp, Homo sapiens
ttcaaaagccttgcc

SEQ ID NO: 1500450 - DNA, 15 bp, Homo sapiens
tcaaaagccttgcca

SEQ ID NO: 1500451 - DNA, 15 bp, Homo sapiens
caaaagccttgccaa

SEQ ID NO: 1500452 - DNA, 15 bp, Homo sapiens
aaaagccttgccaaa

SEQ ID NO: 1500453 - DNA, 15 bp, Homo sapiens
aaagccttgccaaag

SEQ ID NO: 1500454 - DNA, 15 bp, Homo sapiens
aagccttgccaaagg

SEQ ID NO: 1500455 - DNA, 15 bp, Homo sapiens
agccttgccaaaggg

SEQ ID NO: 1500456 - DNA, 15 bp, Homo sapiens
gccttgccaaaggga

SEQ ID NO: 1500457 - DNA, 15 bp, Homo sapiens
ccttgccaaagggat

SEQ ID NO: 1500458 - DNA, 15 bp, Homo sapiens
cttgccaaagggatt

SEQ ID NO: 1500459 - DNA, 15 bp, Homo sapiens
ttgccaaagggattg

SEQ ID NO: 1500460 - DNA, 15 bp, Homo sapiens
tgccaaagggattga

SEQ ID NO: 1500461 - DNA, 15 bp, Homo sapiens
gccaaagggattgag

SEQ ID NO: 1500462 - DNA, 15 bp, Homo sapiens
ccaaagggattgagg

SEQ ID NO: 1500463 - DNA, 15 bp, Homo sapiens
caaagggattgaggg

SEQ ID NO: 1500464 - DNA, 15 bp, Homo sapiens
aaagggattgagggg

SEQ ID NO: 1500465 - DNA, 15 bp, Homo sapiens
aagggattgaggggg

SEQ ID NO: 1500466 - DNA, 15 bp, Homo sapiens
agggattgagggggg

SEQ ID NO: 1500467 - DNA, 15 bp, Homo sapiens
gggattgagggggga

SEQ ID NO: 1500468 - DNA, 15 bp, Homo sapiens
ggattgaggggggat

SEQ ID NO: 1500469 - DNA, 15 bp, Homo sapiens
gattgaggggggata

SEQ ID NO: 1500470 - DNA, 15 bp, Homo sapiens
attgaggggggatat

SEQ ID NO: 1500471 - DNA, 15 bp, Homo sapiens
ttgaggggggatatg

SEQ ID NO: 1500472 - DNA, 15 bp, Homo sapiens
tgaggggggatatgg

SEQ ID NO: 1500473 - DNA, 15 bp, Homo sapiens
gaggggggatatggc

SEQ ID NO: 1500474 - DNA, 15 bp, Homo sapiens
aggggggatatggct

SEQ ID NO: 1500475 - DNA, 15 bp, Homo sapiens
ggggggatatggctc

SEQ ID NO: 1500476 - DNA, 15 bp, Homo sapiens
gggggatatggctca

SEQ ID NO: 1500477 - DNA, 15 bp, Homo sapiens
ggggatatggctcac

SEQ ID NO: 1500478 - DNA, 15 bp, Homo sapiens
gggatatggctcacc

SEQ ID NO: 1500479 - DNA, 15 bp, Homo sapiens
ggatatggctcaccc

SEQ ID NO: 1500480 - DNA, 15 bp, Homo sapiens
gatatggctcaccca

SEQ ID NO: 1500481 - DNA, 15 bp, Homo sapiens
atatggctcacccaa

SEQ ID NO: 1500482 - DNA, 15 bp, Homo sapiens
tatggctcacccaag

SEQ ID NO: 1500483 - DNA, 15 bp, Homo sapiens
atggctcacccaaga

SEQ ID NO: 1500484 - DNA, 15 bp, Homo sapiens
tggctcacccaagat

SEQ ID NO: 1500485 - DNA, 15 bp, Homo sapiens
ggctcacccaagatc

SEQ ID NO: 1500486 - DNA, 15 bp, Homo sapiens
gctcacccaagatca

SEQ ID NO: 1500487 - DNA, 15 bp, Homo sapiens
ctcacccaagatcac

SEQ ID NO: 1500488 - DNA, 15 bp, Homo sapiens
tcacccaagatcaca

SEQ ID NO: 1500489 - DNA, 15 bp, Homo sapiens
cacccaagatcacac

SEQ ID NO: 1500490 - DNA, 15 bp, Homo sapiens
acccaagatcacaca

SEQ ID NO: 1500491 - DNA, 15 bp, Homo sapiens
caagatcacacagct

SEQ ID NO: 1500492 - DNA, 15 bp, Homo sapiens
aagatcacacagcta

SEQ ID NO: 1500493 - DNA, 15 bp, Homo sapiens
agatcacacagctag

SEQ ID NO: 1500494 - DNA, 15 bp, Homo sapiens
gatcacacagctagt

SEQ ID NO: 1500495 - DNA, 15 bp, Homo sapiens
atcacacagctagtt

SEQ ID NO: 1500496 - DNA, 15 bp, Homo sapiens
cacacagctagttct

SEQ ID NO: 1500497 - DNA, 15 bp, Homo sapiens
acacagctagttctg

SEQ ID NO: 1500498 - DNA, 15 bp, Homo sapiens
cacagctagttctgg

SEQ ID NO: 1500499 - DNA, 15 bp, Homo sapiens
acagctagttctggg

SEQ ID NO: 1500500 - DNA, 15 bp, Homo sapiens
cagctagttctgggc

SEQ ID NO: 1500501 - DNA, 15 bp, Homo sapiens
agctagttctgggca

SEQ ID NO: 1500502 - DNA, 15 bp, Homo sapiens
gctagttctgggcag

SEQ ID NO: 1500503 - DNA, 15 bp, Homo sapiens
ctagttctgggcaga

SEQ ID NO: 1500504 - DNA, 15 bp, Homo sapiens
tagttctgggcagag

SEQ ID NO: 1500505 - DNA, 15 bp, Homo sapiens
agttctgggcagagt

SEQ ID NO: 1500506 - DNA, 15 bp, Homo sapiens
gttctgggcagagtt

SEQ ID NO: 1500507 - DNA, 15 bp, Homo sapiens
ttctgggcagagttt

SEQ ID NO: 1500508 - DNA, 15 bp, Homo sapiens
tctgggcagagtttg

SEQ ID NO: 1500509 - DNA, 15 bp, Homo sapiens
ctgggcagagtttgc

SEQ ID NO: 1500510 - DNA, 15 bp, Homo sapiens
tgggcagagtttgca

SEQ ID NO: 1500511 - DNA, 15 bp, Homo sapiens
gggcagagtttgcac

SEQ ID NO: 1500512 - DNA, 15 bp, Homo sapiens
ggcagagtttgcacc

SEQ ID NO: 1500513 - DNA, 15 bp, Homo sapiens
gcagagtttgcacct

SEQ ID NO: 1500514 - DNA, 15 bp, Homo sapiens
cagagtttgcacctc

SEQ ID NO: 1500515 - DNA, 15 bp, Homo sapiens
agagtttgcacctca

SEQ ID NO: 1500516 - DNA, 15 bp, Homo sapiens
gagtttgcacctcac

SEQ ID NO: 1500517 - DNA, 15 bp, Homo sapiens
agtttgcacctcact

SEQ ID NO: 1500518 - DNA, 15 bp, Homo sapiens
gtttgcacctcactt

SEQ ID NO: 1500519 - DNA, 15 bp, Homo sapiens
tttgcacctcacttc

SEQ ID NO: 1500520 - DNA, 15 bp, Homo sapiens
ttgcacctcacttcc

SEQ ID NO: 1500521 - DNA, 15 bp, Homo sapiens
tgcacctcacttccc

SEQ ID NO: 1500522 - DNA, 15 bp, Homo sapiens
gcacctcacttccca

SEQ ID NO: 1500523 - DNA, 15 bp, Homo sapiens
cacctcacttcccac

SEQ ID NO: 1500524 - DNA, 15 bp, Homo sapiens
acctcacttcccaca

SEQ ID NO: 1500525 - DNA, 15 bp, Homo sapiens
cctcacttcccacat

SEQ ID NO: 1500526 - DNA, 15 bp, Homo sapiens
ctcacttcccacatt

SEQ ID NO: 1500527 - DNA, 15 bp, Homo sapiens
tcacttcccacattc

SEQ ID NO: 1500528 - DNA, 15 bp, Homo sapiens
cacttcccacattcc

SEQ ID NO: 1500529 - DNA, 15 bp, Homo sapiens
acttcccacattcca

SEQ ID NO: 1500530 - DNA, 15 bp, Homo sapiens
cttcccacattccat

SEQ ID NO: 1500531 - DNA, 15 bp, Homo sapiens
ttcccacattccatt

SEQ ID NO: 1500532 - DNA, 15 bp, Homo sapiens
tcccacattccattt

SEQ ID NO: 1500533 - DNA, 15 bp, Homo sapiens
cccacattccattta

SEQ ID NO: 1500534 - DNA, 15 bp, Homo sapiens
ccacattccatttac

SEQ ID NO: 1500535 - DNA, 15 bp, Homo sapiens
cacattccatttacc

SEQ ID NO: 1500536 - DNA, 15 bp, Homo sapiens
acattccatttacca

SEQ ID NO: 1500537 - DNA, 15 bp, Homo sapiens
cattccatttaccag

SEQ ID NO: 1500538 - DNA, 15 bp, Homo sapiens
attccatttaccagg

SEQ ID NO: 1500539 - DNA, 15 bp, Homo sapiens
ttccatttaccaggc

SEQ ID NO: 1500540 - DNA, 15 bp, Homo sapiens
tccatttaccaggcc

SEQ ID NO: 1500541 - DNA, 15 bp, Homo sapiens
ccatttaccaggcct

SEQ ID NO: 1500542 - DNA, 15 bp, Homo sapiens
catttaccaggcctt

SEQ ID NO: 1500543 - DNA, 15 bp, Homo sapiens
atttaccaggccttg

SEQ ID NO: 1500544 - DNA, 15 bp, Homo sapiens
tttaccaggccttgg

SEQ ID NO: 1500545 - DNA, 15 bp, Homo sapiens
ttaccaggccttggg

SEQ ID NO: 1500546 - DNA, 15 bp, Homo sapiens
taccaggccttgggg

SEQ ID NO: 1500547 - DNA, 15 bp, Homo sapiens
accaggccttggggc

SEQ ID NO: 1500548 - DNA, 15 bp, Homo sapiens
ccaggccttggggca

SEQ ID NO: 1500549 - DNA, 15 bp, Homo sapiens
caggccttggggcaa

SEQ ID NO: 1500550 - DNA, 15 bp, Homo sapiens
aggccttggggcaaa

SEQ ID NO: 1500551 - DNA, 15 bp, Homo sapiens
ggccttggggcaaag

SEQ ID NO: 1500552 - DNA, 15 bp, Homo sapiens
gccttggggcaaagc

SEQ ID NO: 1500553 - DNA, 15 bp, Homo sapiens
ccttggggcaaagca

SEQ ID NO: 1500554 - DNA, 15 bp, Homo sapiens
cttggggcaaagcat

SEQ ID NO: 1500555 - DNA, 15 bp, Homo sapiens
ttggggcaaagcatc

SEQ ID NO: 1500556 - DNA, 15 bp, Homo sapiens
tggggcaaagcatct

SEQ ID NO: 1500557 - DNA, 15 bp, Homo sapiens
ggggcaaagcatctt

SEQ ID NO: 1500558 - DNA, 15 bp, Homo sapiens
gggcaaagcatctta

SEQ ID NO: 1500559 - DNA, 15 bp, Homo sapiens
ggcaaagcatcttag

SEQ ID NO: 1500560 - DNA, 15 bp, Homo sapiens
gcaaagcatcttagg

SEQ ID NO: 1500561 - DNA, 15 bp, Homo sapiens
caaagcatcttagga

SEQ ID NO: 1500562 - DNA, 15 bp, Homo sapiens
aaagcatcttaggat

SEQ ID NO: 1500563 - DNA, 15 bp, Homo sapiens
aagcatcttaggatc

SEQ ID NO: 1500564 - DNA, 15 bp, Homo sapiens
agcatcttaggatct

SEQ ID NO: 1500565 - DNA, 15 bp, Homo sapiens
gcatcttaggatcta

SEQ ID NO: 1500566 - DNA, 15 bp, Homo sapiens
catcttaggatctaa

SEQ ID NO: 1500567 - DNA, 15 bp, Homo sapiens
atcttaggatctaac

SEQ ID NO: 1500568 - DNA, 15 bp, Homo sapiens
tcttaggatctaacc

SEQ ID NO: 1500569 - DNA, 15 bp, Homo sapiens
cttaggatctaacct

SEQ ID NO: 1500570 - DNA, 15 bp, Homo sapiens
ttaggatctaacctc

SEQ ID NO: 1500571 - DNA, 15 bp, Homo sapiens
taggatctaacctcg

SEQ ID NO: 1500572 - DNA, 15 bp, Homo sapiens
aggatctaacctcgc

SEQ ID NO: 1500573 - DNA, 15 bp, Homo sapiens
ggatctaacctcgct

SEQ ID NO: 1500574 - DNA, 15 bp, Homo sapiens
gatctaacctcgctt

SEQ ID NO: 1500575 - DNA, 15 bp, Homo sapiens
atctaacctcgctta

SEQ ID NO: 1500576 - DNA, 15 bp, Homo sapiens
tctaacctcgcttat

SEQ ID NO: 1500577 - DNA, 15 bp, Homo sapiens
ctaacctcgcttatt

SEQ ID NO: 1500578 - DNA, 15 bp, Homo sapiens
taacctcgcttatta

SEQ ID NO: 1500579 - DNA, 15 bp, Homo sapiens
aacctcgcttattat

SEQ ID NO: 1500580 - DNA, 15 bp, Homo sapiens
acctcgcttattata

SEQ ID NO: 1500581 - DNA, 15 bp, Homo sapiens
cctcgcttattatac

SEQ ID NO: 1500582 - DNA, 15 bp, Homo sapiens
ctcgcttattatacc

SEQ ID NO: 1500583 - DNA, 15 bp, Homo sapiens
tcgcttattataccc

SEQ ID NO: 1500584 - DNA, 15 bp, Homo sapiens
cgcttattataccca

SEQ ID NO: 1500585 - DNA, 15 bp, Homo sapiens
gcttattatacccat

SEQ ID NO: 1500586 - DNA, 15 bp, Homo sapiens
cttattatacccatc

SEQ ID NO: 1500587 - DNA, 15 bp, Homo sapiens
ttattatacccatct

SEQ ID NO: 1500588 - DNA, 15 bp, Homo sapiens
tattatacccatctc

SEQ ID NO: 1500589 - DNA, 15 bp, Homo sapiens
attatacccatctcc

SEQ ID NO: 1500590 - DNA, 15 bp, Homo sapiens
ttatacccatctcca

SEQ ID NO: 1500591 - DNA, 15 bp, Homo sapiens
tatacccatctccaa

SEQ ID NO: 1500592 - DNA, 15 bp, Homo sapiens
atacccatctccaag

SEQ ID NO: 1500593 - DNA, 15 bp, Homo sapiens
tacccatctccaagg

SEQ ID NO: 1500594 - DNA, 15 bp, Homo sapiens
acccatctccaaggc

SEQ ID NO: 1500595 - DNA, 15 bp, Homo sapiens
cccatctccaaggca

SEQ ID NO: 1500596 - DNA, 15 bp, Homo sapiens
ccatctccaaggcaa

SEQ ID NO: 1500597 - DNA, 15 bp, Homo sapiens
catctccaaggcaag

SEQ ID NO: 1500598 - DNA, 15 bp, Homo sapiens
atctccaaggcaagc

SEQ ID NO: 1500599 - DNA, 15 bp, Homo sapiens
tctccaaggcaagca

SEQ ID NO: 1500600 - DNA, 15 bp, Homo sapiens
ctccaaggcaagcag

SEQ ID NO: 1500601 - DNA, 15 bp, Homo sapiens
tccaaggcaagcaga

SEQ ID NO: 1500602 - DNA, 15 bp, Homo sapiens
ccaaggcaagcagaa

SEQ ID NO: 1500603 - DNA, 15 bp, Homo sapiens
caaggcaagcagaaa

SEQ ID NO: 1500604 - DNA, 15 bp, Homo sapiens
aaggcaagcagaaag

SEQ ID NO: 1500605 - DNA, 15 bp, Homo sapiens
aggcaagcagaaagg

SEQ ID NO: 1500606 - DNA, 15 bp, Homo sapiens
ggcaagcagaaaggc

SEQ ID NO: 1500607 - DNA, 15 bp, Homo sapiens
gcaagcagaaaggca

SEQ ID NO: 1500608 - DNA, 15 bp, Homo sapiens
caagcagaaaggcaa

SEQ ID NO: 1500609 - DNA, 15 bp, Homo sapiens
aagcagaaaggcaaa

SEQ ID NO: 1500610 - DNA, 15 bp, Homo sapiens
agcagaaaggcaaat

SEQ ID NO: 1500611 - DNA, 15 bp, Homo sapiens
gcagaaaggcaaatc

SEQ ID NO: 1500612 - DNA, 15 bp, Homo sapiens
cagaaaggcaaatca

SEQ ID NO: 1500613 - DNA, 15 bp, Homo sapiens
agaaaggcaaatcaa

SEQ ID NO: 1500614 - DNA, 15 bp, Homo sapiens
gaaaggcaaatcaac

SEQ ID NO: 1500615 - DNA, 15 bp, Homo sapiens
aaaggcaaatcaaca

SEQ ID NO: 1500616 - DNA, 15 bp, Homo sapiens
aaggcaaatcaacaa

SEQ ID NO: 1500617 - DNA, 15 bp, Homo sapiens
aggcaaatcaacaat

SEQ ID NO: 1500618 - DNA, 15 bp, Homo sapiens
ggcaaatcaacaatg

SEQ ID NO: 1500619 - DNA, 15 bp, Homo sapiens
gcaaatcaacaatga

SEQ ID NO: 1500620 - DNA, 15 bp, Homo sapiens
caaatcaacaatgac

SEQ ID NO: 1500621 - DNA, 15 bp, Homo sapiens
aaatcaacaatgaca

SEQ ID NO: 1500622 - DNA, 15 bp, Homo sapiens
aatcaacaatgacat

SEQ ID NO: 1500623 - DNA, 15 bp, Homo sapiens
atcaacaatgacata

SEQ ID NO: 1500624 - DNA, 15 bp, Homo sapiens
tcaacaatgacataa

SEQ ID NO: 1500625 - DNA, 15 bp, Homo sapiens
caacaatgacataag

SEQ ID NO: 1500626 - DNA, 15 bp, Homo sapiens
aacaatgacataaga

SEQ ID NO: 1500627 - DNA, 15 bp, Homo sapiens
acaatgacataagaa

SEQ ID NO: 1500628 - DNA, 15 bp, Homo sapiens
caatgacataagaag

SEQ ID NO: 1500629 - DNA, 15 bp, Homo sapiens
aatgacataagaagg

SEQ ID NO: 1500630 - DNA, 15 bp, Homo sapiens
atgacataagaaggg

SEQ ID NO: 1500631 - DNA, 15 bp, Homo sapiens
tgacataagaagggc

SEQ ID NO: 1500632 - DNA, 15 bp, Homo sapiens
gacataagaagggct

SEQ ID NO: 1500633 - DNA, 15 bp, Homo sapiens
acataagaagggctt

SEQ ID NO: 1500634 - DNA, 15 bp, Homo sapiens
cataagaagggcttg

SEQ ID NO: 1500635 - DNA, 15 bp, Homo sapiens
ataagaagggcttgt

SEQ ID NO: 1500636 - DNA, 15 bp, Homo sapiens
taagaagggcttgtc

SEQ ID NO: 1500637 - DNA, 15 bp, Homo sapiens
aagaagggcttgtca

SEQ ID NO: 1500638 - DNA, 15 bp, Homo sapiens
agaagggcttgtcaa

SEQ ID NO: 1500639 - DNA, 15 bp, Homo sapiens
gaagggcttgtcaag

SEQ ID NO: 1500640 - DNA, 15 bp, Homo sapiens
aagggcttgtcaagt

SEQ ID NO: 1500641 - DNA, 15 bp, Homo sapiens
agggcttgtcaagtc

SEQ ID NO: 1500642 - DNA, 15 bp, Homo sapiens
gggcttgtcaagtcg

SEQ ID NO: 1500643 - DNA, 15 bp, Homo sapiens
ggcttgtcaagtcga

SEQ ID NO: 1500644 - DNA, 15 bp, Homo sapiens
gcttgtcaagtcgat

SEQ ID NO: 1500645 - DNA, 15 bp, Homo sapiens
cttgtcaagtcgatc

SEQ ID NO: 1500646 - DNA, 15 bp, Homo sapiens
ttgtcaagtcgatcc

SEQ ID NO: 1500647 - DNA, 15 bp, Homo sapiens
tgtcaagtcgatccc

SEQ ID NO: 1500648 - DNA, 15 bp, Homo sapiens
gtcaagtcgatccca

SEQ ID NO: 1500649 - DNA, 15 bp, Homo sapiens
tcaagtcgatcccaa

SEQ ID NO: 1500650 - DNA, 15 bp, Homo sapiens
caagtcgatcccaat

SEQ ID NO: 1500651 - DNA, 15 bp, Homo sapiens
aagtcgatcccaatg

SEQ ID NO: 1500652 - DNA, 15 bp, Homo sapiens
agtcgatcccaatgt

SEQ ID NO: 1500653 - DNA, 15 bp, Homo sapiens
gtcgatcccaatgtc

SEQ ID NO: 1500654 - DNA, 15 bp, Homo sapiens
tcgatcccaatgtcg

SEQ ID NO: 1500655 - DNA, 15 bp, Homo sapiens
cgatcccaatgtcga

SEQ ID NO: 1500656 - DNA, 15 bp, Homo sapiens
gatcccaatgtcgaa

SEQ ID NO: 1500657 - DNA, 15 bp, Homo sapiens
atcccaatgtcgaag

SEQ ID NO: 1500658 - DNA, 15 bp, Homo sapiens
tcccaatgtcgaagg

SEQ ID NO: 1500659 - DNA, 15 bp, Homo sapiens
cccaatgtcgaagga

SEQ ID NO: 1500660 - DNA, 15 bp, Homo sapiens
ccaatgtcgaaggaa

SEQ ID NO: 1500661 - DNA, 15 bp, Homo sapiens
caatgtcgaaggaaa

SEQ ID NO: 1500662 - DNA, 15 bp, Homo sapiens
aatgtcgaaggaaac

SEQ ID NO: 1500663 - DNA, 15 bp, Homo sapiens
atgtcgaaggaaaca

SEQ ID NO: 1500664 - DNA, 15 bp, Homo sapiens
tgtcgaaggaaacaa

SEQ ID NO: 1500665 - DNA, 15 bp, Homo sapiens
gtcgaaggaaacaaa

SEQ ID NO: 1500666 - DNA, 15 bp, Homo sapiens
tcgaaggaaacaaaa

SEQ ID NO: 1500667 - DNA, 15 bp, Homo sapiens
cgaaggaaacaaaag

SEQ ID NO: 1500668 - DNA, 15 bp, Homo sapiens
gaaggaaacaaaagg

SEQ ID NO: 1500669 - DNA, 15 bp, Homo sapiens
aaggaaacaaaaggt

SEQ ID NO: 1500670 - DNA, 15 bp, Homo sapiens
aggaaacaaaaggtt

SEQ ID NO: 1500671 - DNA, 15 bp, Homo sapiens
ggaaacaaaaggttt

SEQ ID NO: 1500672 - DNA, 15 bp, Homo sapiens
gaaacaaaaggtttc

SEQ ID NO: 1500673 - DNA, 15 bp, Homo sapiens
aaacaaaaggtttct

SEQ ID NO: 1500674 - DNA, 15 bp, Homo sapiens
aacaaaaggtttctt

SEQ ID NO: 1500675 - DNA, 15 bp, Homo sapiens
acaaaaggtttcttt

SEQ ID NO: 1500676 - DNA, 15 bp, Homo sapiens
caaaaggtttcttta

SEQ ID NO: 1500677 - DNA, 15 bp, Homo sapiens
aaaaggtttctttaa

SEQ ID NO: 1500678 - DNA, 15 bp, Homo sapiens
aaaggtttctttaaa

SEQ ID NO: 1500679 - DNA, 15 bp, Homo sapiens
aaggtttctttaaaa

SEQ ID NO: 1500680 - DNA, 15 bp, Homo sapiens
aggtttctttaaaag

SEQ ID NO: 1500681 - DNA, 15 bp, Homo sapiens
ggtttctttaaaagg

SEQ ID NO: 1500682 - DNA, 15 bp, Homo sapiens
gtttctttaaaagga

SEQ ID NO: 1500683 - DNA, 15 bp, Homo sapiens
tttctttaaaaggat

SEQ ID NO: 1500684 - DNA, 15 bp, Homo sapiens
ttctttaaaaggatg

SEQ ID NO: 1500685 - DNA, 15 bp, Homo sapiens
tctttaaaaggatga

SEQ ID NO: 1500686 - DNA, 15 bp, Homo sapiens
ctttaaaaggatgag

SEQ ID NO: 1500687 - DNA, 15 bp, Homo sapiens
tttaaaaggatgaga

SEQ ID NO: 1500688 - DNA, 15 bp, Homo sapiens
ttaaaaggatgagaa

SEQ ID NO: 1500689 - DNA, 15 bp, Homo sapiens
taaaaggatgagaag

SEQ ID NO: 1500690 - DNA, 15 bp, Homo sapiens
aaaaggatgagaagc

SEQ ID NO: 1500691 - DNA, 15 bp, Homo sapiens
aaaggatgagaagct

SEQ ID NO: 1500692 - DNA, 15 bp, Homo sapiens
aaggatgagaagctc

SEQ ID NO: 1500693 - DNA, 15 bp, Homo sapiens
aggatgagaagctcc

SEQ ID NO: 1500694 - DNA, 15 bp, Homo sapiens
ggatgagaagctccc

SEQ ID NO: 1500695 - DNA, 15 bp, Homo sapiens
gatgagaagctccct

SEQ ID NO: 1500696 - DNA, 15 bp, Homo sapiens
atgagaagctccctg

SEQ ID NO: 1500697 - DNA, 15 bp, Homo sapiens
tgagaagctccctgc

SEQ ID NO: 1500698 - DNA, 15 bp, Homo sapiens
gagaagctccctgca

SEQ ID NO: 1500699 - DNA, 15 bp, Homo sapiens
agaagctccctgcat

SEQ ID NO: 1500700 - DNA, 15 bp, Homo sapiens
gaagctccctgcatt

SEQ ID NO: 1500701 - DNA, 15 bp, Homo sapiens
aagctccctgcattt

SEQ ID NO: 1500702 - DNA, 15 bp, Homo sapiens
agctccctgcattta

SEQ ID NO: 1500703 - DNA, 15 bp, Homo sapiens
gctccctgcatttag

SEQ ID NO: 1500704 - DNA, 15 bp, Homo sapiens
ctccctgcatttagg

SEQ ID NO: 1500705 - DNA, 15 bp, Homo sapiens
tccctgcatttaggg

SEQ ID NO: 1500706 - DNA, 15 bp, Homo sapiens
ccctgcatttaggga

SEQ ID NO: 1500707 - DNA, 15 bp, Homo sapiens
cctgcatttagggaa

SEQ ID NO: 1500708 - DNA, 15 bp, Homo sapiens
ctgcatttagggaac

SEQ ID NO: 1500709 - DNA, 15 bp, Homo sapiens
tgcatttagggaact

SEQ ID NO: 1500710 - DNA, 15 bp, Homo sapiens
gcatttagggaactg

SEQ ID NO: 1500711 - DNA, 15 bp, Homo sapiens
catttagggaactgg

SEQ ID NO: 1500712 - DNA, 15 bp, Homo sapiens
atttagggaactggg

SEQ ID NO: 1500713 - DNA, 15 bp, Homo sapiens
tttagggaactgggt

SEQ ID NO: 1500714 - DNA, 15 bp, Homo sapiens
ttagggaactgggtt

SEQ ID NO: 1500715 - DNA, 15 bp, Homo sapiens
tagggaactgggttc

SEQ ID NO: 1500716 - DNA, 15 bp, Homo sapiens
agggaactgggttct

SEQ ID NO: 1500717 - DNA, 15 bp, Homo sapiens
gggaactgggttctg

SEQ ID NO: 1500718 - DNA, 15 bp, Homo sapiens
ggaactgggttctgc

SEQ ID NO: 1500719 - DNA, 15 bp, Homo sapiens
gaactgggttctgcc

SEQ ID NO: 1500720 - DNA, 15 bp, Homo sapiens
aactgggttctgcct

SEQ ID NO: 1500721 - DNA, 15 bp, Homo sapiens
actgggttctgcctt

SEQ ID NO: 1500722 - DNA, 15 bp, Homo sapiens
ctgggttctgccttc

SEQ ID NO: 1500723 - DNA, 15 bp, Homo sapiens
tgggttctgccttct

SEQ ID NO: 1500724 - DNA, 15 bp, Homo sapiens
gggttctgccttctc

SEQ ID NO: 1500725 - DNA, 15 bp, Homo sapiens
ggttctgccttctct

SEQ ID NO: 1500726 - DNA, 15 bp, Homo sapiens
gttctgccttctctg

SEQ ID NO: 1500727 - DNA, 15 bp, Homo sapiens
ttctgccttctctgg

SEQ ID NO: 1500728 - DNA, 15 bp, Homo sapiens
tctgccttctctggg

SEQ ID NO: 1500729 - DNA, 15 bp, Homo sapiens
ctgccttctctgggc

SEQ ID NO: 1500730 - DNA, 15 bp, Homo sapiens
tgccttctctgggct

SEQ ID NO: 1500731 - DNA, 15 bp, Homo sapiens
gccttctctgggctg

SEQ ID NO: 1500732 - DNA, 15 bp, Homo sapiens
ccttctctgggctga

SEQ ID NO: 1500733 - DNA, 15 bp, Homo sapiens
cttctctgggctgag

SEQ ID NO: 1500734 - DNA, 15 bp, Homo sapiens
ttctctgggctgagg

SEQ ID NO: 1500735 - DNA, 15 bp, Homo sapiens
tctctgggctgaggt

SEQ ID NO: 1500736 - DNA, 15 bp, Homo sapiens
ctctgggctgaggtg

SEQ ID NO: 1500737 - DNA, 15 bp, Homo sapiens
tctgggctgaggtgt

SEQ ID NO: 1500738 - DNA, 15 bp, Homo sapiens
ctgggctgaggtgtt

SEQ ID NO: 1500739 - DNA, 15 bp, Homo sapiens
tgggctgaggtgttc

SEQ ID NO: 1500740 - DNA, 15 bp, Homo sapiens
gggctgaggtgttct

SEQ ID NO: 1500741 - DNA, 15 bp, Homo sapiens
ggctgaggtgttctg

SEQ ID NO: 1500742 - DNA, 15 bp, Homo sapiens
gctgaggtgttctgt

SEQ ID NO: 1500743 - DNA, 15 bp, Homo sapiens
ctgaggtgttctgtt

SEQ ID NO: 1500744 - DNA, 15 bp, Homo sapiens
tgaggtgttctgttc

SEQ ID NO: 1500745 - DNA, 15 bp, Homo sapiens
gaggtgttctgttct

SEQ ID NO: 1500746 - DNA, 15 bp, Homo sapiens
aggtgttctgttctc

SEQ ID NO: 1500747 - DNA, 15 bp, Homo sapiens
ggtgttctgttctct

SEQ ID NO: 1500748 - DNA, 15 bp, Homo sapiens
gtgttctgttctctc

SEQ ID NO: 1500749 - DNA, 15 bp, Homo sapiens
tgttctgttctctcc

SEQ ID NO: 1500750 - DNA, 15 bp, Homo sapiens
gttctgttctctccc

SEQ ID NO: 1500751 - DNA, 15 bp, Homo sapiens
ttctgttctctcccg

SEQ ID NO: 1500752 - DNA, 15 bp, Homo sapiens
tctgttctctcccgt

SEQ ID NO: 1500753 - DNA, 15 bp, Homo sapiens
ctgttctctcccgtt

SEQ ID NO: 1500754 - DNA, 15 bp, Homo sapiens
tgttctctcccgttt

SEQ ID NO: 1500755 - DNA, 15 bp, Homo sapiens
gttctctcccgtttg

SEQ ID NO: 1500756 - DNA, 15 bp, Homo sapiens
ttctctcccgtttgc

SEQ ID NO: 1500757 - DNA, 15 bp, Homo sapiens
tctctcccgtttgcc

SEQ ID NO: 1500758 - DNA, 15 bp, Homo sapiens
ctctcccgtttgcct

SEQ ID NO: 1500759 - DNA, 15 bp, Homo sapiens
tctcccgtttgcctc

SEQ ID NO: 1500760 - DNA, 15 bp, Homo sapiens
ctcccgtttgcctca

SEQ ID NO: 1500761 - DNA, 15 bp, Homo sapiens
tcccgtttgcctcac

SEQ ID NO: 1500762 - DNA, 15 bp, Homo sapiens
cccgtttgcctcacg

SEQ ID NO: 1500763 - DNA, 15 bp, Homo sapiens
ccgtttgcctcacgg

SEQ ID NO: 1500764 - DNA, 15 bp, Homo sapiens
cgtttgcctcacggc

SEQ ID NO: 1500765 - DNA, 15 bp, Homo sapiens
gtttgcctcacggcg

SEQ ID NO: 1500766 - DNA, 15 bp, Homo sapiens
tttgcctcacggcgt

SEQ ID NO: 1500767 - DNA, 15 bp, Homo sapiens
ttgcctcacggcgtg

SEQ ID NO: 1500768 - DNA, 15 bp, Homo sapiens
tgcctcacggcgtgc

SEQ ID NO: 1500769 - DNA, 15 bp, Homo sapiens
gcctcacggcgtgca

SEQ ID NO: 1500770 - DNA, 15 bp, Homo sapiens
cctcacggcgtgcag

SEQ ID NO: 1500771 - DNA, 15 bp, Homo sapiens
ctcacggcgtgcagg

SEQ ID NO: 1500772 - DNA, 15 bp, Homo sapiens
tcacggcgtgcagga

SEQ ID NO: 1500773 - DNA, 15 bp, Homo sapiens
cacggcgtgcaggaa

SEQ ID NO: 1500774 - DNA, 15 bp, Homo sapiens
acggcgtgcaggaag

SEQ ID NO: 1500775 - DNA, 15 bp, Homo sapiens
cggcgtgcaggaagc

SEQ ID NO: 1500776 - DNA, 15 bp, Homo sapiens
ggcgtgcaggaagcg

SEQ ID NO: 1500777 - DNA, 15 bp, Homo sapiens
gcgtgcaggaagcgg

SEQ ID NO: 1500778 - DNA, 15 bp, Homo sapiens
cgtgcaggaagcggg

SEQ ID NO: 1500779 - DNA, 15 bp, Homo sapiens
gtgcaggaagcgggc

SEQ ID NO: 1500780 - DNA, 15 bp, Homo sapiens
tgcaggaagcgggca

SEQ ID NO: 1500781 - DNA, 15 bp, Homo sapiens
gcaggaagcgggcag

SEQ ID NO: 1500782 - DNA, 15 bp, Homo sapiens
caggaagcgggcaga

SEQ ID NO: 1500783 - DNA, 15 bp, Homo sapiens
aggaagcgggcagat

SEQ ID NO: 1500784 - DNA, 15 bp, Homo sapiens
ggaagcgggcagatc

SEQ ID NO: 1500785 - DNA, 15 bp, Homo sapiens
gaagcgggcagatcc

SEQ ID NO: 1500786 - DNA, 15 bp, Homo sapiens
aagcgggcagatcca

SEQ ID NO: 1500787 - DNA, 15 bp, Homo sapiens
agcgggcagatccag

SEQ ID NO: 1500788 - DNA, 15 bp, Homo sapiens
gcgggcagatccagc

SEQ ID NO: 1500789 - DNA, 15 bp, Homo sapiens
cgggcagatccagct

SEQ ID NO: 1500790 - DNA, 15 bp, Homo sapiens
gggcagatccagctg

SEQ ID NO: 1500791 - DNA, 15 bp, Homo sapiens
ggcagatccagctgt

SEQ ID NO: 1500792 - DNA, 15 bp, Homo sapiens
gcagatccagctgtg

SEQ ID NO: 1500793 - DNA, 15 bp, Homo sapiens
cagatccagctgtgg

SEQ ID NO: 1500794 - DNA, 15 bp, Homo sapiens
agatccagctgtggc

SEQ ID NO: 1500795 - DNA, 15 bp, Homo sapiens
gatccagctgtggca

SEQ ID NO: 1500796 - DNA, 15 bp, Homo sapiens
atccagctgtggcaa

SEQ ID NO: 1500797 - DNA, 15 bp, Homo sapiens
tccagctgtggcaat

SEQ ID NO: 1500798 - DNA, 15 bp, Homo sapiens
ccagctgtggcaatt

SEQ ID NO: 1500799 - DNA, 15 bp, Homo sapiens
cagctgtggcaattc

SEQ ID NO: 1500800 - DNA, 15 bp, Homo sapiens
agctgtggcaattcc

SEQ ID NO: 1500801 - DNA, 15 bp, Homo sapiens
gctgtggcaattcct

SEQ ID NO: 1500802 - DNA, 15 bp, Homo sapiens
ctgtggcaattcctc

SEQ ID NO: 1500803 - DNA, 15 bp, Homo sapiens
tgtggcaattcctcc

SEQ ID NO: 1500804 - DNA, 15 bp, Homo sapiens
gtggcaattcctcct

SEQ ID NO: 1500805 - DNA, 15 bp, Homo sapiens
tggcaattcctcctg

SEQ ID NO: 1500806 - DNA, 15 bp, Homo sapiens
ggcaattcctcctgg

SEQ ID NO: 1500807 - DNA, 15 bp, Homo sapiens
gcaattcctcctgga

SEQ ID NO: 1500808 - DNA, 15 bp, Homo sapiens
caattcctcctggag

SEQ ID NO: 1500809 - DNA, 15 bp, Homo sapiens
aattcctcctggagc

SEQ ID NO: 1500810 - DNA, 15 bp, Homo sapiens
attcctcctggagct

SEQ ID NO: 1500811 - DNA, 15 bp, Homo sapiens
ttcctcctggagctg

SEQ ID NO: 1500812 - DNA, 15 bp, Homo sapiens
tcctcctggagctgc

SEQ ID NO: 1500813 - DNA, 15 bp, Homo sapiens
cctcctggagctgct

SEQ ID NO: 1500814 - DNA, 15 bp, Homo sapiens
ctcctggagctgctc

SEQ ID NO: 1500815 - DNA, 15 bp, Homo sapiens
tcctggagctgctct

SEQ ID NO: 1500816 - DNA, 15 bp, Homo sapiens
cctggagctgctctc

SEQ ID NO: 1500817 - DNA, 15 bp, Homo sapiens
ctggagctgctctcc

SEQ ID NO: 1500818 - DNA, 15 bp, Homo sapiens
tggagctgctctccg

SEQ ID NO: 1500819 - DNA, 15 bp, Homo sapiens
ggagctgctctccga

SEQ ID NO: 1500820 - DNA, 15 bp, Homo sapiens
gagctgctctccgac

SEQ ID NO: 1500821 - DNA, 15 bp, Homo sapiens
agctgctctccgaca

SEQ ID NO: 1500822 - DNA, 15 bp, Homo sapiens
gctgctctccgacag

SEQ ID NO: 1500823 - DNA, 15 bp, Homo sapiens
ctgctctccgacagc

SEQ ID NO: 1500824 - DNA, 15 bp, Homo sapiens
tgctctccgacagcg

SEQ ID NO: 1500825 - DNA, 15 bp, Homo sapiens
gctctccgacagcgc

SEQ ID NO: 1500826 - DNA, 15 bp, Homo sapiens
ctctccgacagcgcc

SEQ ID NO: 1500827 - DNA, 15 bp, Homo sapiens
tctccgacagcgcca

SEQ ID NO: 1500828 - DNA, 15 bp, Homo sapiens
ctccgacagcgccaa

SEQ ID NO: 1500829 - DNA, 15 bp, Homo sapiens
tccgacagcgccaac

SEQ ID NO: 1500830 - DNA, 15 bp, Homo sapiens
ccgacagcgccaacg

SEQ ID NO: 1500831 - DNA, 15 bp, Homo sapiens
cgacagcgccaacgc

SEQ ID NO: 1500832 - DNA, 15 bp, Homo sapiens
gacagcgccaacgcc

SEQ ID NO: 1500833 - DNA, 15 bp, Homo sapiens
acagcgccaacgcca

SEQ ID NO: 1500834 - DNA, 15 bp, Homo sapiens
cagcgccaacgccag

SEQ ID NO: 1500835 - DNA, 15 bp, Homo sapiens
agcgccaacgccagc

SEQ ID NO: 1500836 - DNA, 15 bp, Homo sapiens
gcgccaacgccagct

SEQ ID NO: 1500837 - DNA, 15 bp, Homo sapiens
cgccaacgccagctg

SEQ ID NO: 1500838 - DNA, 15 bp, Homo sapiens
gccaacgccagctgt

SEQ ID NO: 1500839 - DNA, 15 bp, Homo sapiens
ccaacgccagctgta

SEQ ID NO: 1500840 - DNA, 15 bp, Homo sapiens
caacgccagctgtat

SEQ ID NO: 1500841 - DNA, 15 bp, Homo sapiens
aacgccagctgtatc

SEQ ID NO: 1500842 - DNA, 15 bp, Homo sapiens
acgccagctgtatca

SEQ ID NO: 1500843 - DNA, 15 bp, Homo sapiens
cgccagctgtatcac

SEQ ID NO: 1500844 - DNA, 15 bp, Homo sapiens
gccagctgtatcacc

SEQ ID NO: 1500845 - DNA, 15 bp, Homo sapiens
ccagctgtatcacct

SEQ ID NO: 1500846 - DNA, 15 bp, Homo sapiens
cagctgtatcacctg

SEQ ID NO: 1500847 - DNA, 15 bp, Homo sapiens
agctgtatcacctgg

SEQ ID NO: 1500848 - DNA, 15 bp, Homo sapiens
gctgtatcacctggg

SEQ ID NO: 1500849 - DNA, 15 bp, Homo sapiens
ctgtatcacctggga

SEQ ID NO: 1500850 - DNA, 15 bp, Homo sapiens
tgtatcacctgggag

SEQ ID NO: 1500851 - DNA, 15 bp, Homo sapiens
gtatcacctgggagg

SEQ ID NO: 1500852 - DNA, 15 bp, Homo sapiens
tatcacctgggaggg

SEQ ID NO: 1500853 - DNA, 15 bp, Homo sapiens
atcacctgggagggg

SEQ ID NO: 1500854 - DNA, 15 bp, Homo sapiens
tcacctgggagggga

SEQ ID NO: 1500855 - DNA, 15 bp, Homo sapiens
cacctgggaggggac

SEQ ID NO: 1500856 - DNA, 15 bp, Homo sapiens
acctgggaggggacc

SEQ ID NO: 1500857 - DNA, 15 bp, Homo sapiens
cctgggaggggacca

SEQ ID NO: 1500858 - DNA, 15 bp, Homo sapiens
ctgggaggggaccaa

SEQ ID NO: 1500859 - DNA, 15 bp, Homo sapiens
tgggaggggaccaac

SEQ ID NO: 1500860 - DNA, 15 bp, Homo sapiens
gggaggggaccaacg

SEQ ID NO: 1500861 - DNA, 15 bp, Homo sapiens
ggaggggaccaacgg

SEQ ID NO: 1500862 - DNA, 15 bp, Homo sapiens
gaggggaccaacggg

SEQ ID NO: 1500863 - DNA, 15 bp, Homo sapiens
aggggaccaacgggg

SEQ ID NO: 1500864 - DNA, 15 bp, Homo sapiens
ggggaccaacgggga

SEQ ID NO: 1500865 - DNA, 15 bp, Homo sapiens
gggaccaacggggag

SEQ ID NO: 1500866 - DNA, 15 bp, Homo sapiens
ggaccaacggggagt

SEQ ID NO: 1500867 - DNA, 15 bp, Homo sapiens
gaccaacggggagtt

SEQ ID NO: 1500868 - DNA, 15 bp, Homo sapiens
accaacggggagttc

SEQ ID NO: 1500869 - DNA, 15 bp, Homo sapiens
ccaacggggagttca

SEQ ID NO: 1500870 - DNA, 15 bp, Homo sapiens
caacggggagttcaa

SEQ ID NO: 1500871 - DNA, 15 bp, Homo sapiens
aacggggagttcaaa

SEQ ID NO: 1500872 - DNA, 15 bp, Homo sapiens
acggggagttcaaaa

SEQ ID NO: 1500873 - DNA, 15 bp, Homo sapiens
cggggagttcaaaat

SEQ ID NO: 1500874 - DNA, 15 bp, Homo sapiens
ggggagttcaaaatg

SEQ ID NO: 1500875 - DNA, 15 bp, Homo sapiens
gggagttcaaaatga

SEQ ID NO: 1500876 - DNA, 15 bp, Homo sapiens
ggagttcaaaatgac

SEQ ID NO: 1500877 - DNA, 15 bp, Homo sapiens
gagttcaaaatgacg

SEQ ID NO: 1500878 - DNA, 15 bp, Homo sapiens
agttcaaaatgacgg

SEQ ID NO: 1500879 - DNA, 15 bp, Homo sapiens
gttcaaaatgacgga

SEQ ID NO: 1500880 - DNA, 15 bp, Homo sapiens
ttcaaaatgacggac

SEQ ID NO: 1500881 - DNA, 15 bp, Homo sapiens
tcaaaatgacggacc

SEQ ID NO: 1500882 - DNA, 15 bp, Homo sapiens
caaaatgacggaccc

SEQ ID NO: 1500883 - DNA, 15 bp, Homo sapiens
aaaatgacggacccc

SEQ ID NO: 1500884 - DNA, 15 bp, Homo sapiens
aaatgacggaccccg

SEQ ID NO: 1500885 - DNA, 15 bp, Homo sapiens
aatgacggaccccga

SEQ ID NO: 1500886 - DNA, 15 bp, Homo sapiens
atgacggaccccgat

SEQ ID NO: 1500887 - DNA, 15 bp, Homo sapiens
tgacggaccccgatg

SEQ ID NO: 1500888 - DNA, 15 bp, Homo sapiens
gacggaccccgatga

SEQ ID NO: 1500889 - DNA, 15 bp, Homo sapiens
acggaccccgatgag

SEQ ID NO: 1500890 - DNA, 15 bp, Homo sapiens
cggaccccgatgagg

SEQ ID NO: 1500891 - DNA, 15 bp, Homo sapiens
ggaccccgatgaggt

SEQ ID NO: 1500892 - DNA, 15 bp, Homo sapiens
gaccccgatgaggtg

SEQ ID NO: 1500893 - DNA, 15 bp, Homo sapiens
accccgatgaggtgg

SEQ ID NO: 1500894 - DNA, 15 bp, Homo sapiens
ccccgatgaggtggc

SEQ ID NO: 1500895 - DNA, 15 bp, Homo sapiens
cccgatgaggtggcc

SEQ ID NO: 1500896 - DNA, 15 bp, Homo sapiens
ccgatgaggtggcca

SEQ ID NO: 1500897 - DNA, 15 bp, Homo sapiens
cgatgaggtggccag

SEQ ID NO: 1500898 - DNA, 15 bp, Homo sapiens
gatgaggtggccagg

SEQ ID NO: 1500899 - DNA, 15 bp, Homo sapiens
atgaggtggccaggc

SEQ ID NO: 1500900 - DNA, 15 bp, Homo sapiens
tgaggtggccaggcg

SEQ ID NO: 1500901 - DNA, 15 bp, Homo sapiens
gaggtggccaggcgc

SEQ ID NO: 1500902 - DNA, 15 bp, Homo sapiens
aggtggccaggcgct

SEQ ID NO: 1500903 - DNA, 15 bp, Homo sapiens
ggtggccaggcgctg

SEQ ID NO: 1500904 - DNA, 15 bp, Homo sapiens
gtggccaggcgctgg

SEQ ID NO: 1500905 - DNA, 15 bp, Homo sapiens
tggccaggcgctggg

SEQ ID NO: 1500906 - DNA, 15 bp, Homo sapiens
ggccaggcgctgggg

SEQ ID NO: 1500907 - DNA, 15 bp, Homo sapiens
gccaggcgctggggc

SEQ ID NO: 1500908 - DNA, 15 bp, Homo sapiens
ccaggcgctggggcg

SEQ ID NO: 1500909 - DNA, 15 bp, Homo sapiens
caggcgctggggcga

SEQ ID NO: 1500910 - DNA, 15 bp, Homo sapiens
aggcgctggggcgag

SEQ ID NO: 1500911 - DNA, 15 bp, Homo sapiens
ggcgctggggcgagc

SEQ ID NO: 1500912 - DNA, 15 bp, Homo sapiens
gcgctggggcgagcg

SEQ ID NO: 1500913 - DNA, 15 bp, Homo sapiens
cgctggggcgagcgg

SEQ ID NO: 1500914 - DNA, 15 bp, Homo sapiens
gctggggcgagcgga

SEQ ID NO: 1500915 - DNA, 15 bp, Homo sapiens
ctggggcgagcggaa

SEQ ID NO: 1500916 - DNA, 15 bp, Homo sapiens
tggggcgagcggaaa

SEQ ID NO: 1500917 - DNA, 15 bp, Homo sapiens
ggggcgagcggaaaa

SEQ ID NO: 1500918 - DNA, 15 bp, Homo sapiens
gggcgagcggaaaag

SEQ ID NO: 1500919 - DNA, 15 bp, Homo sapiens
ggcgagcggaaaagc

SEQ ID NO: 1500920 - DNA, 15 bp, Homo sapiens
gcgagcggaaaagca

SEQ ID NO: 1500921 - DNA, 15 bp, Homo sapiens
cgagcggaaaagcaa

SEQ ID NO: 1500922 - DNA, 15 bp, Homo sapiens
gagcggaaaagcaag

SEQ ID NO: 1500923 - DNA, 15 bp, Homo sapiens
agcggaaaagcaagc

SEQ ID NO: 1500924 - DNA, 15 bp, Homo sapiens
gcggaaaagcaagcc

SEQ ID NO: 1500925 - DNA, 15 bp, Homo sapiens
cggaaaagcaagccc

SEQ ID NO: 1500926 - DNA, 15 bp, Homo sapiens
ggaaaagcaagccca

SEQ ID NO: 1500927 - DNA, 15 bp, Homo sapiens
gaaaagcaagcccaa

SEQ ID NO: 1500928 - DNA, 15 bp, Homo sapiens
aaaagcaagcccaac

SEQ ID NO: 1500929 - DNA, 15 bp, Homo sapiens
aaagcaagcccaaca

SEQ ID NO: 1500930 - DNA, 15 bp, Homo sapiens
aagcaagcccaacat

SEQ ID NO: 1500931 - DNA, 15 bp, Homo sapiens
agcaagcccaacatg

SEQ ID NO: 1500932 - DNA, 15 bp, Homo sapiens
gcaagcccaacatga

SEQ ID NO: 1500933 - DNA, 15 bp, Homo sapiens
caagcccaacatgaa

SEQ ID NO: 1500934 - DNA, 15 bp, Homo sapiens
aagcccaacatgaat

SEQ ID NO: 1500935 - DNA, 15 bp, Homo sapiens
agcccaacatgaatt

SEQ ID NO: 1500936 - DNA, 15 bp, Homo sapiens
gcccaacatgaatta

SEQ ID NO: 1500937 - DNA, 15 bp, Homo sapiens
cccaacatgaattac

SEQ ID NO: 1500938 - DNA, 15 bp, Homo sapiens
ccaacatgaattacg

SEQ ID NO: 1500939 - DNA, 15 bp, Homo sapiens
caacatgaattacga

SEQ ID NO: 1500940 - DNA, 15 bp, Homo sapiens
aacatgaattacgac

SEQ ID NO: 1500941 - DNA, 15 bp, Homo sapiens
acatgaattacgaca

SEQ ID NO: 1500942 - DNA, 15 bp, Homo sapiens
catgaattacgacaa

SEQ ID NO: 1500943 - DNA, 15 bp, Homo sapiens
atgaattacgacaag

SEQ ID NO: 1500944 - DNA, 15 bp, Homo sapiens
tgaattacgacaagc

SEQ ID NO: 1500945 - DNA, 15 bp, Homo sapiens
gaattacgacaagct

SEQ ID NO: 1500946 - DNA, 15 bp, Homo sapiens
aattacgacaagctg

SEQ ID NO: 1500947 - DNA, 15 bp, Homo sapiens
attacgacaagctga

SEQ ID NO: 1500948 - DNA, 15 bp, Homo sapiens
ttacgacaagctgag

SEQ ID NO: 1500949 - DNA, 15 bp, Homo sapiens
tacgacaagctgagc

SEQ ID NO: 1500950 - DNA, 15 bp, Homo sapiens
acgacaagctgagcc

SEQ ID NO: 1500951 - DNA, 15 bp, Homo sapiens
cgacaagctgagccg

SEQ ID NO: 1500952 - DNA, 15 bp, Homo sapiens
gacaagctgagccgg

SEQ ID NO: 1500953 - DNA, 15 bp, Homo sapiens
acaagctgagccggg

SEQ ID NO: 1500954 - DNA, 15 bp, Homo sapiens
caagctgagccgggc

SEQ ID NO: 1500955 - DNA, 15 bp, Homo sapiens
aagctgagccgggcc

SEQ ID NO: 1500956 - DNA, 15 bp, Homo sapiens
agctgagccgggccc

SEQ ID NO: 1500957 - DNA, 15 bp, Homo sapiens
gctgagccgggccct

SEQ ID NO: 1500958 - DNA, 15 bp, Homo sapiens
ctgagccgggccctc

SEQ ID NO: 1500959 - DNA, 15 bp, Homo sapiens
tgagccgggccctcc

SEQ ID NO: 1500960 - DNA, 15 bp, Homo sapiens
gagccgggccctccg

SEQ ID NO: 1500961 - DNA, 15 bp, Homo sapiens
agccgggccctccgt

SEQ ID NO: 1500962 - DNA, 15 bp, Homo sapiens
gccgggccctccgtt

SEQ ID NO: 1500963 - DNA, 15 bp, Homo sapiens
ccgggccctccgtta

SEQ ID NO: 1500964 - DNA, 15 bp, Homo sapiens
cgggccctccgttat

SEQ ID NO: 1500965 - DNA, 15 bp, Homo sapiens
gggccctccgttatt

SEQ ID NO: 1500966 - DNA, 15 bp, Homo sapiens
ggccctccgttatta

SEQ ID NO: 1500967 - DNA, 15 bp, Homo sapiens
gccctccgttattac

SEQ ID NO: 1500968 - DNA, 15 bp, Homo sapiens
ccctccgttattact

SEQ ID NO: 1500969 - DNA, 15 bp, Homo sapiens
cctccgttattacta

SEQ ID NO: 1500970 - DNA, 15 bp, Homo sapiens
ctccgttattactat

SEQ ID NO: 1500971 - DNA, 15 bp, Homo sapiens
tccgttattactatg

SEQ ID NO: 1500972 - DNA, 15 bp, Homo sapiens
ccgttattactatga

SEQ ID NO: 1500973 - DNA, 15 bp, Homo sapiens
cgttattactatgat

SEQ ID NO: 1500974 - DNA, 15 bp, Homo sapiens
gttattactatgata

SEQ ID NO: 1500975 - DNA, 15 bp, Homo sapiens
ttattactatgataa

SEQ ID NO: 1500976 - DNA, 15 bp, Homo sapiens
tattactatgataaa

SEQ ID NO: 1500977 - DNA, 15 bp, Homo sapiens
attactatgataaaa

SEQ ID NO: 1500978 - DNA, 15 bp, Homo sapiens
ttactatgataaaaa

SEQ ID NO: 1500979 - DNA, 15 bp, Homo sapiens
tactatgataaaaac

SEQ ID NO: 1500980 - DNA, 15 bp, Homo sapiens
actatgataaaaaca

SEQ ID NO: 1500981 - DNA, 15 bp, Homo sapiens
ctatgataaaaacat

SEQ ID NO: 1500982 - DNA, 15 bp, Homo sapiens
tatgataaaaacatt

SEQ ID NO: 1500983 - DNA, 15 bp, Homo sapiens
atgataaaaacatta

SEQ ID NO: 1500984 - DNA, 15 bp, Homo sapiens
tgataaaaacattat

SEQ ID NO: 1500985 - DNA, 15 bp, Homo sapiens
gataaaaacattatg

SEQ ID NO: 1500986 - DNA, 15 bp, Homo sapiens
ataaaaacattatga

SEQ ID NO: 1500987 - DNA, 15 bp, Homo sapiens
taaaaacattatgac

SEQ ID NO: 1500988 - DNA, 15 bp, Homo sapiens
aaaaacattatgacc

SEQ ID NO: 1500989 - DNA, 15 bp, Homo sapiens
aaaacattatgacca

SEQ ID NO: 1500990 - DNA, 15 bp, Homo sapiens
aaacattatgaccaa

SEQ ID NO: 1500991 - DNA, 15 bp, Homo sapiens
aacattatgaccaaa

SEQ ID NO: 1500992 - DNA, 15 bp, Homo sapiens
acattatgaccaaag

SEQ ID NO: 1500993 - DNA, 15 bp, Homo sapiens
cattatgaccaaagt

SEQ ID NO: 1500994 - DNA, 15 bp, Homo sapiens
attatgaccaaagtg

SEQ ID NO: 1500995 - DNA, 15 bp, Homo sapiens
ttatgaccaaagtgc

SEQ ID NO: 1500996 - DNA, 15 bp, Homo sapiens
tatgaccaaagtgca

SEQ ID NO: 1500997 - DNA, 15 bp, Homo sapiens
atgaccaaagtgcac

SEQ ID NO: 1500998 - DNA, 15 bp, Homo sapiens
tgaccaaagtgcacg

SEQ ID NO: 1500999 - DNA, 15 bp, Homo sapiens
gaccaaagtgcacgg

SEQ ID NO: 1501000 - DNA, 15 bp, Homo sapiens
accaaagtgcacggc

SEQ ID NO: 1501001 - DNA, 15 bp, Homo sapiens
ccaaagtgcacggca

SEQ ID NO: 1501002 - DNA, 15 bp, Homo sapiens
caaagtgcacggcaa

SEQ ID NO: 1501003 - DNA, 15 bp, Homo sapiens
aaagtgcacggcaaa

SEQ ID NO: 1501004 - DNA, 15 bp, Homo sapiens
aagtgcacggcaaaa

SEQ ID NO: 1501005 - DNA, 15 bp, Homo sapiens
agtgcacggcaaaag

SEQ ID NO: 1501006 - DNA, 15 bp, Homo sapiens
gtgcacggcaaaaga

SEQ ID NO: 1501007 - DNA, 15 bp, Homo sapiens
tgcacggcaaaagat

SEQ ID NO: 1501008 - DNA, 15 bp, Homo sapiens
gcacggcaaaagata

SEQ ID NO: 1501009 - DNA, 15 bp, Homo sapiens
cacggcaaaagatat

SEQ ID NO: 1501010 - DNA, 15 bp, Homo sapiens
acggcaaaagatatg

SEQ ID NO: 1501011 - DNA, 15 bp, Homo sapiens
cggcaaaagatatgc

SEQ ID NO: 1501012 - DNA, 15 bp, Homo sapiens
ggcaaaagatatgct

SEQ ID NO: 1501013 - DNA, 15 bp, Homo sapiens
gcaaaagatatgctt

SEQ ID NO: 1501014 - DNA, 15 bp, Homo sapiens
caaaagatatgctta

SEQ ID NO: 1501015 - DNA, 15 bp, Homo sapiens
aaaagatatgcttac

SEQ ID NO: 1501016 - DNA, 15 bp, Homo sapiens
aaagatatgcttaca

SEQ ID NO: 1501017 - DNA, 15 bp, Homo sapiens
aagatatgcttacaa

SEQ ID NO: 1501018 - DNA, 15 bp, Homo sapiens
agatatgcttacaaa

SEQ ID NO: 1501019 - DNA, 15 bp, Homo sapiens
gatatgcttacaaat

SEQ ID NO: 1501020 - DNA, 15 bp, Homo sapiens
atatgcttacaaatt

SEQ ID NO: 1501021 - DNA, 15 bp, Homo sapiens
tatgcttacaaattt

SEQ ID NO: 1501022 - DNA, 15 bp, Homo sapiens
atgcttacaaatttg

SEQ ID NO: 1501023 - DNA, 15 bp, Homo sapiens
tgcttacaaatttga

SEQ ID NO: 1501024 - DNA, 15 bp, Homo sapiens
gcttacaaatttgac

SEQ ID NO: 1501025 - DNA, 15 bp, Homo sapiens
cttacaaatttgact

SEQ ID NO: 1501026 - DNA, 15 bp, Homo sapiens
ttacaaatttgactt

SEQ ID NO: 1501027 - DNA, 15 bp, Homo sapiens
tacaaatttgacttc

SEQ ID NO: 1501028 - DNA, 15 bp, Homo sapiens
acaaatttgacttcc

SEQ ID NO: 1501029 - DNA, 15 bp, Homo sapiens
caaatttgacttcca

SEQ ID NO: 1501030 - DNA, 15 bp, Homo sapiens
aaatttgacttccac

SEQ ID NO: 1501031 - DNA, 15 bp, Homo sapiens
aatttgacttccacg

SEQ ID NO: 1501032 - DNA, 15 bp, Homo sapiens
atttgacttccacgg

SEQ ID NO: 1501033 - DNA, 15 bp, Homo sapiens
tttgacttccacggc

SEQ ID NO: 1501034 - DNA, 15 bp, Homo sapiens
ttgacttccacggca

SEQ ID NO: 1501035 - DNA, 15 bp, Homo sapiens
tgacttccacggcat

SEQ ID NO: 1501036 - DNA, 15 bp, Homo sapiens
gacttccacggcatt

SEQ ID NO: 1501037 - DNA, 15 bp, Homo sapiens
acttccacggcattg

SEQ ID NO: 1501038 - DNA, 15 bp, Homo sapiens
cttccacggcattgc

SEQ ID NO: 1501039 - DNA, 15 bp, Homo sapiens
ttccacggcattgcc

SEQ ID NO: 1501040 - DNA, 15 bp, Homo sapiens
tccacggcattgccc

SEQ ID NO: 1501041 - DNA, 15 bp, Homo sapiens
ccacggcattgccca

SEQ ID NO: 1501042 - DNA, 15 bp, Homo sapiens
cacggcattgcccag

SEQ ID NO: 1501043 - DNA, 15 bp, Homo sapiens
acggcattgcccagg

SEQ ID NO: 1501044 - DNA, 15 bp, Homo sapiens
cggcattgcccaggc

SEQ ID NO: 1501045 - DNA, 15 bp, Homo sapiens
ggcattgcccaggct

SEQ ID NO: 1501046 - DNA, 15 bp, Homo sapiens
gcattgcccaggctc

SEQ ID NO: 1501047 - DNA, 15 bp, Homo sapiens
cattgcccaggctct

SEQ ID NO: 1501048 - DNA, 15 bp, Homo sapiens
attgcccaggctctg

SEQ ID NO: 1501049 - DNA, 15 bp, Homo sapiens
ttgcccaggctctgc

SEQ ID NO: 1501050 - DNA, 15 bp, Homo sapiens
tgcccaggctctgca

SEQ ID NO: 1501051 - DNA, 15 bp, Homo sapiens
gcccaggctctgcag

SEQ ID NO: 1501052 - DNA, 15 bp, Homo sapiens
cccaggctctgcagc

SEQ ID NO: 1501053 - DNA, 15 bp, Homo sapiens
ccaggctctgcagcc

SEQ ID NO: 1501054 - DNA, 15 bp, Homo sapiens
caggctctgcagcca

SEQ ID NO: 1501055 - DNA, 15 bp, Homo sapiens
aggctctgcagccac

SEQ ID NO: 1501056 - DNA, 15 bp, Homo sapiens
ggctctgcagccaca

SEQ ID NO: 1501057 - DNA, 15 bp, Homo sapiens
gctctgcagccacat

SEQ ID NO: 1501058 - DNA, 15 bp, Homo sapiens
ctctgcagccacatc

SEQ ID NO: 1501059 - DNA, 15 bp, Homo sapiens
tctgcagccacatcc

SEQ ID NO: 1501060 - DNA, 15 bp, Homo sapiens
ctgcagccacatccg

SEQ ID NO: 1501061 - DNA, 15 bp, Homo sapiens
tgcagccacatccga

SEQ ID NO: 1501062 - DNA, 15 bp, Homo sapiens
gcagccacatccgac

SEQ ID NO: 1501063 - DNA, 15 bp, Homo sapiens
cagccacatccgacc

SEQ ID NO: 1501064 - DNA, 15 bp, Homo sapiens
agccacatccgaccg

SEQ ID NO: 1501065 - DNA, 15 bp, Homo sapiens
gccacatccgaccga

SEQ ID NO: 1501066 - DNA, 15 bp, Homo sapiens
ccacatccgaccgag

SEQ ID NO: 1501067 - DNA, 15 bp, Homo sapiens
cacatccgaccgagt

SEQ ID NO: 1501068 - DNA, 15 bp, Homo sapiens
acatccgaccgagtc

SEQ ID NO: 1501069 - DNA, 15 bp, Homo sapiens
catccgaccgagtcg

SEQ ID NO: 1501070 - DNA, 15 bp, Homo sapiens
atccgaccgagtcgt

SEQ ID NO: 1501071 - DNA, 15 bp, Homo sapiens
tccgaccgagtcgtc

SEQ ID NO: 1501072 - DNA, 15 bp, Homo sapiens
ccgaccgagtcgtcc

SEQ ID NO: 1501073 - DNA, 15 bp, Homo sapiens
cgaccgagtcgtcca

SEQ ID NO: 1501074 - DNA, 15 bp, Homo sapiens
gaccgagtcgtccat

SEQ ID NO: 1501075 - DNA, 15 bp, Homo sapiens
accgagtcgtccatg

SEQ ID NO: 1501076 - DNA, 15 bp, Homo sapiens
ccgagtcgtccatgt

SEQ ID NO: 1501077 - DNA, 15 bp, Homo sapiens
cgagtcgtccatgta

SEQ ID NO: 1501078 - DNA, 15 bp, Homo sapiens
gagtcgtccatgtac

SEQ ID NO: 1501079 - DNA, 15 bp, Homo sapiens
agtcgtccatgtaca

SEQ ID NO: 1501080 - DNA, 15 bp, Homo sapiens
gtcgtccatgtacaa

SEQ ID NO: 1501081 - DNA, 15 bp, Homo sapiens
tcgtccatgtacaag

SEQ ID NO: 1501082 - DNA, 15 bp, Homo sapiens
cgtccatgtacaagt

SEQ ID NO: 1501083 - DNA, 15 bp, Homo sapiens
gtccatgtacaagta

SEQ ID NO: 1501084 - DNA, 15 bp, Homo sapiens
tccatgtacaagtac

SEQ ID NO: 1501085 - DNA, 15 bp, Homo sapiens
ccatgtacaagtacc

SEQ ID NO: 1501086 - DNA, 15 bp, Homo sapiens
catgtacaagtaccc

SEQ ID NO: 1501087 - DNA, 15 bp, Homo sapiens
atgtacaagtaccct

SEQ ID NO: 1501088 - DNA, 15 bp, Homo sapiens
tgtacaagtaccctt

SEQ ID NO: 1501089 - DNA, 15 bp, Homo sapiens
gtacaagtacccttc

SEQ ID NO: 1501090 - DNA, 15 bp, Homo sapiens
tacaagtacccttct

SEQ ID NO: 1501091 - DNA, 15 bp, Homo sapiens
acaagtacccttctg

SEQ ID NO: 1501092 - DNA, 15 bp, Homo sapiens
caagtacccttctga

SEQ ID NO: 1501093 - DNA, 15 bp, Homo sapiens
aagtacccttctgac

SEQ ID NO: 1501094 - DNA, 15 bp, Homo sapiens
agtacccttctgaca

SEQ ID NO: 1501095 - DNA, 15 bp, Homo sapiens
gtacccttctgacat

SEQ ID NO: 1501096 - DNA, 15 bp, Homo sapiens
tacccttctgacatc

SEQ ID NO: 1501097 - DNA, 15 bp, Homo sapiens
acccttctgacatct

SEQ ID NO: 1501098 - DNA, 15 bp, Homo sapiens
cccttctgacatctc

SEQ ID NO: 1501099 - DNA, 15 bp, Homo sapiens
ccttctgacatctcc

SEQ ID NO: 1501100 - DNA, 15 bp, Homo sapiens
cttctgacatctcct

SEQ ID NO: 1501101 - DNA, 15 bp, Homo sapiens
ttctgacatctccta

SEQ ID NO: 1501102 - DNA, 15 bp, Homo sapiens
tctgacatctcctac

SEQ ID NO: 1501103 - DNA, 15 bp, Homo sapiens
ctgacatctcctaca

SEQ ID NO: 1501104 - DNA, 15 bp, Homo sapiens
tgacatctcctacat

SEQ ID NO: 1501105 - DNA, 15 bp, Homo sapiens
gacatctcctacatg

SEQ ID NO: 1501106 - DNA, 15 bp, Homo sapiens
acatctcctacatgc

SEQ ID NO: 1501107 - DNA, 15 bp, Homo sapiens
catctcctacatgcc

SEQ ID NO: 1501108 - DNA, 15 bp, Homo sapiens
atctcctacatgcct

SEQ ID NO: 1501109 - DNA, 15 bp, Homo sapiens
tctcctacatgcctt

SEQ ID NO: 1501110 - DNA, 15 bp, Homo sapiens
ctcctacatgccttc

SEQ ID NO: 1501111 - DNA, 15 bp, Homo sapiens
tcctacatgccttcc

SEQ ID NO: 1501112 - DNA, 15 bp, Homo sapiens
cctacatgccttcct

SEQ ID NO: 1501113 - DNA, 15 bp, Homo sapiens
ctacatgccttccta

SEQ ID NO: 1501114 - DNA, 15 bp, Homo sapiens
tacatgccttcctac

SEQ ID NO: 1501115 - DNA, 15 bp, Homo sapiens
acatgccttcctacc

SEQ ID NO: 1501116 - DNA, 15 bp, Homo sapiens
catgccttcctacca

SEQ ID NO: 1501117 - DNA, 15 bp, Homo sapiens
atgccttcctaccat

SEQ ID NO: 1501118 - DNA, 15 bp, Homo sapiens
tgccttcctaccatg

SEQ ID NO: 1501119 - DNA, 15 bp, Homo sapiens
gccttcctaccatgc

SEQ ID NO: 1501120 - DNA, 15 bp, Homo sapiens
ccttcctaccatgcc

SEQ ID NO: 1501121 - DNA, 15 bp, Homo sapiens
cttcctaccatgccc

SEQ ID NO: 1501122 - DNA, 15 bp, Homo sapiens
ttcctaccatgccca

SEQ ID NO: 1501123 - DNA, 15 bp, Homo sapiens
tcctaccatgcccac

SEQ ID NO: 1501124 - DNA, 15 bp, Homo sapiens
cctaccatgcccacc

SEQ ID NO: 1501125 - DNA, 15 bp, Homo sapiens
ctaccatgcccacca

SEQ ID NO: 1501126 - DNA, 15 bp, Homo sapiens
taccatgcccaccag

SEQ ID NO: 1501127 - DNA, 15 bp, Homo sapiens
accatgcccaccagc

SEQ ID NO: 1501128 - DNA, 15 bp, Homo sapiens
ccatgcccaccagca

SEQ ID NO: 1501129 - DNA, 15 bp, Homo sapiens
catgcccaccagcag

SEQ ID NO: 1501130 - DNA, 15 bp, Homo sapiens
atgcccaccagcaga

SEQ ID NO: 1501131 - DNA, 15 bp, Homo sapiens
tgcccaccagcagaa

SEQ ID NO: 1501132 - DNA, 15 bp, Homo sapiens
gcccaccagcagaag

SEQ ID NO: 1501133 - DNA, 15 bp, Homo sapiens
cccaccagcagaagg

SEQ ID NO: 1501134 - DNA, 15 bp, Homo sapiens
ccaccagcagaaggt

SEQ ID NO: 1501135 - DNA, 15 bp, Homo sapiens
caccagcagaaggtg

SEQ ID NO: 1501136 - DNA, 15 bp, Homo sapiens
accagcagaaggtga

SEQ ID NO: 1501137 - DNA, 15 bp, Homo sapiens
ccagcagaaggtgaa

SEQ ID NO: 1501138 - DNA, 15 bp, Homo sapiens
cagcagaaggtgaac

SEQ ID NO: 1501139 - DNA, 15 bp, Homo sapiens
agcagaaggtgaact

SEQ ID NO: 1501140 - DNA, 15 bp, Homo sapiens
gcagaaggtgaactt

SEQ ID NO: 1501141 - DNA, 15 bp, Homo sapiens
cagaaggtgaacttt

SEQ ID NO: 1501142 - DNA, 15 bp, Homo sapiens
agaaggtgaactttg

SEQ ID NO: 1501143 - DNA, 15 bp, Homo sapiens
gaaggtgaactttgt

SEQ ID NO: 1501144 - DNA, 15 bp, Homo sapiens
aaggtgaactttgtc

SEQ ID NO: 1501145 - DNA, 15 bp, Homo sapiens
aggtgaactttgtcc

SEQ ID NO: 1501146 - DNA, 15 bp, Homo sapiens
ggtgaactttgtccc

SEQ ID NO: 1501147 - DNA, 15 bp, Homo sapiens
gtgaactttgtccct

SEQ ID NO: 1501148 - DNA, 15 bp, Homo sapiens
tgaactttgtccctc

SEQ ID NO: 1501149 - DNA, 15 bp, Homo sapiens
gaactttgtccctcc

SEQ ID NO: 1501150 - DNA, 15 bp, Homo sapiens
aactttgtccctccc

SEQ ID NO: 1501151 - DNA, 15 bp, Homo sapiens
actttgtccctcccc

SEQ ID NO: 1501152 - DNA, 15 bp, Homo sapiens
ctttgtccctcccca

SEQ ID NO: 1501153 - DNA, 15 bp, Homo sapiens
tttgtccctccccat

SEQ ID NO: 1501154 - DNA, 15 bp, Homo sapiens
ttgtccctccccatc

SEQ ID NO: 1501155 - DNA, 15 bp, Homo sapiens
tgtccctccccatcc

SEQ ID NO: 1501156 - DNA, 15 bp, Homo sapiens
gtccctccccatcca

SEQ ID NO: 1501157 - DNA, 15 bp, Homo sapiens
tccctccccatccat

SEQ ID NO: 1501158 - DNA, 15 bp, Homo sapiens
ccctccccatccatc

SEQ ID NO: 1501159 - DNA, 15 bp, Homo sapiens
cctccccatccatcc

SEQ ID NO: 1501160 - DNA, 15 bp, Homo sapiens
ctccccatccatcct

SEQ ID NO: 1501161 - DNA, 15 bp, Homo sapiens
tccccatccatcctc

SEQ ID NO: 1501162 - DNA, 15 bp, Homo sapiens
ccccatccatcctcc

SEQ ID NO: 1501163 - DNA, 15 bp, Homo sapiens
cccatccatcctcca

SEQ ID NO: 1501164 - DNA, 15 bp, Homo sapiens
ccatccatcctccat

SEQ ID NO: 1501165 - DNA, 15 bp, Homo sapiens
catccatcctccatg

SEQ ID NO: 1501166 - DNA, 15 bp, Homo sapiens
atccatcctccatgc

SEQ ID NO: 1501167 - DNA, 15 bp, Homo sapiens
tccatcctccatgcc

SEQ ID NO: 1501168 - DNA, 15 bp, Homo sapiens
ccatcctccatgcct

SEQ ID NO: 1501169 - DNA, 15 bp, Homo sapiens
catcctccatgcctg

SEQ ID NO: 1501170 - DNA, 15 bp, Homo sapiens
atcctccatgcctgt

SEQ ID NO: 1501171 - DNA, 15 bp, Homo sapiens
tcctccatgcctgtc

SEQ ID NO: 1501172 - DNA, 15 bp, Homo sapiens
cctccatgcctgtca

SEQ ID NO: 1501173 - DNA, 15 bp, Homo sapiens
ctccatgcctgtcac

SEQ ID NO: 1501174 - DNA, 15 bp, Homo sapiens
tccatgcctgtcact

SEQ ID NO: 1501175 - DNA, 15 bp, Homo sapiens
ccatgcctgtcactt

SEQ ID NO: 1501176 - DNA, 15 bp, Homo sapiens
catgcctgtcacttc

SEQ ID NO: 1501177 - DNA, 15 bp, Homo sapiens
atgcctgtcacttcc

SEQ ID NO: 1501178 - DNA, 15 bp, Homo sapiens
tgcctgtcacttcct

SEQ ID NO: 1501179 - DNA, 15 bp, Homo sapiens
gcctgtcacttcctc

SEQ ID NO: 1501180 - DNA, 15 bp, Homo sapiens
cctgtcacttcctcc

SEQ ID NO: 1501181 - DNA, 15 bp, Homo sapiens
ctgtcacttcctcca

SEQ ID NO: 1501182 - DNA, 15 bp, Homo sapiens
tgtcacttcctccag

SEQ ID NO: 1501183 - DNA, 15 bp, Homo sapiens
gtcacttcctccagc

SEQ ID NO: 1501184 - DNA, 15 bp, Homo sapiens
tcacttcctccagct

SEQ ID NO: 1501185 - DNA, 15 bp, Homo sapiens
cacttcctccagctt

SEQ ID NO: 1501186 - DNA, 15 bp, Homo sapiens
acttcctccagcttc

SEQ ID NO: 1501187 - DNA, 15 bp, Homo sapiens
cttcctccagcttct

SEQ ID NO: 1501188 - DNA, 15 bp, Homo sapiens
ttcctccagcttctt

SEQ ID NO: 1501189 - DNA, 15 bp, Homo sapiens
tcctccagcttcttt

SEQ ID NO: 1501190 - DNA, 15 bp, Homo sapiens
cctccagcttctttg

SEQ ID NO: 1501191 - DNA, 15 bp, Homo sapiens
ctccagcttctttgg

SEQ ID NO: 1501192 - DNA, 15 bp, Homo sapiens
tccagcttctttgga

SEQ ID NO: 1501193 - DNA, 15 bp, Homo sapiens
ccagcttctttggag

SEQ ID NO: 1501194 - DNA, 15 bp, Homo sapiens
cagcttctttggagc

SEQ ID NO: 1501195 - DNA, 15 bp, Homo sapiens
agcttctttggagcc

SEQ ID NO: 1501196 - DNA, 15 bp, Homo sapiens
gcttctttggagccg

SEQ ID NO: 1501197 - DNA, 15 bp, Homo sapiens
cttctttggagccgc

SEQ ID NO: 1501198 - DNA, 15 bp, Homo sapiens
ttctttggagccgca

SEQ ID NO: 1501199 - DNA, 15 bp, Homo sapiens
tctttggagccgcat

SEQ ID NO: 1501200 - DNA, 15 bp, Homo sapiens
ctttggagccgcatc

SEQ ID NO: 1501201 - DNA, 15 bp, Homo sapiens
tttggagccgcatca

SEQ ID NO: 1501202 - DNA, 15 bp, Homo sapiens
ttggagccgcatcac

SEQ ID NO: 1501203 - DNA, 15 bp, Homo sapiens
tggagccgcatcaca

SEQ ID NO: 1501204 - DNA, 15 bp, Homo sapiens
ggagccgcatcacaa

SEQ ID NO: 1501205 - DNA, 15 bp, Homo sapiens
gagccgcatcacaat

SEQ ID NO: 1501206 - DNA, 15 bp, Homo sapiens
agccgcatcacaata

SEQ ID NO: 1501207 - DNA, 15 bp, Homo sapiens
gccgcatcacaatac

SEQ ID NO: 1501208 - DNA, 15 bp, Homo sapiens
ccgcatcacaatact

SEQ ID NO: 1501209 - DNA, 15 bp, Homo sapiens
cgcatcacaatactg

SEQ ID NO: 1501210 - DNA, 15 bp, Homo sapiens
gcatcacaatactgg

SEQ ID NO: 1501211 - DNA, 15 bp, Homo sapiens
catcacaatactgga

SEQ ID NO: 1501212 - DNA, 15 bp, Homo sapiens
atcacaatactggac

SEQ ID NO: 1501213 - DNA, 15 bp, Homo sapiens
tcacaatactggacc

SEQ ID NO: 1501214 - DNA, 15 bp, Homo sapiens
cacaatactggacct

SEQ ID NO: 1501215 - DNA, 15 bp, Homo sapiens
acaatactggacctc

SEQ ID NO: 1501216 - DNA, 15 bp, Homo sapiens
caatactggacctcc

SEQ ID NO: 1501217 - DNA, 15 bp, Homo sapiens
aatactggacctccc

SEQ ID NO: 1501218 - DNA, 15 bp, Homo sapiens
atactggacctcccc

SEQ ID NO: 1501219 - DNA, 15 bp, Homo sapiens
tactggacctccccc

SEQ ID NO: 1501220 - DNA, 15 bp, Homo sapiens
actggacctccccca

SEQ ID NO: 1501221 - DNA, 15 bp, Homo sapiens
ctggacctcccccac

SEQ ID NO: 1501222 - DNA, 15 bp, Homo sapiens
tggacctcccccacg

SEQ ID NO: 1501223 - DNA, 15 bp, Homo sapiens
ggacctcccccacgg

SEQ ID NO: 1501224 - DNA, 15 bp, Homo sapiens
gacctcccccacggg

SEQ ID NO: 1501225 - DNA, 15 bp, Homo sapiens
acctcccccacgggg

SEQ ID NO: 1501226 - DNA, 15 bp, Homo sapiens
cctcccccacggggg

SEQ ID NO: 1501227 - DNA, 15 bp, Homo sapiens
ctcccccacgggggg

SEQ ID NO: 1501228 - DNA, 15 bp, Homo sapiens
tcccccacgggggga

SEQ ID NO: 1501229 - DNA, 15 bp, Homo sapiens
cccccacggggggaa

SEQ ID NO: 1501230 - DNA, 15 bp, Homo sapiens
ccccacggggggaat

SEQ ID NO: 1501231 - DNA, 15 bp, Homo sapiens
cccacggggggaatc

SEQ ID NO: 1501232 - DNA, 15 bp, Homo sapiens
ccacggggggaatct

SEQ ID NO: 1501233 - DNA, 15 bp, Homo sapiens
cacggggggaatcta

SEQ ID NO: 1501234 - DNA, 15 bp, Homo sapiens
acggggggaatctac

SEQ ID NO: 1501235 - DNA, 15 bp, Homo sapiens
cggggggaatctacc

SEQ ID NO: 1501236 - DNA, 15 bp, Homo sapiens
ggggggaatctaccc

SEQ ID NO: 1501237 - DNA, 15 bp, Homo sapiens
gggggaatctacccc

SEQ ID NO: 1501238 - DNA, 15 bp, Homo sapiens
ggggaatctacccca

SEQ ID NO: 1501239 - DNA, 15 bp, Homo sapiens
gggaatctaccccaa

SEQ ID NO: 1501240 - DNA, 15 bp, Homo sapiens
ggaatctaccccaac

SEQ ID NO: 1501241 - DNA, 15 bp, Homo sapiens
gaatctaccccaacc

SEQ ID NO: 1501242 - DNA, 15 bp, Homo sapiens
aatctaccccaaccc

SEQ ID NO: 1501243 - DNA, 15 bp, Homo sapiens
atctaccccaacccc

SEQ ID NO: 1501244 - DNA, 15 bp, Homo sapiens
tctaccccaacccca

SEQ ID NO: 1501245 - DNA, 15 bp, Homo sapiens
ctaccccaaccccaa

SEQ ID NO: 1501246 - DNA, 15 bp, Homo sapiens
taccccaaccccaac

SEQ ID NO: 1501247 - DNA, 15 bp, Homo sapiens
accccaaccccaacg

SEQ ID NO: 1501248 - DNA, 15 bp, Homo sapiens
ccccaaccccaacgt

SEQ ID NO: 1501249 - DNA, 15 bp, Homo sapiens
cccaaccccaacgtc

SEQ ID NO: 1501250 - DNA, 15 bp, Homo sapiens
ccaaccccaacgtcc

SEQ ID NO: 1501251 - DNA, 15 bp, Homo sapiens
caaccccaacgtccc

SEQ ID NO: 1501252 - DNA, 15 bp, Homo sapiens
aaccccaacgtcccc

SEQ ID NO: 1501253 - DNA, 15 bp, Homo sapiens
accccaacgtccccc

SEQ ID NO: 1501254 - DNA, 15 bp, Homo sapiens
ccccaacgtcccccg

SEQ ID NO: 1501255 - DNA, 15 bp, Homo sapiens
cccaacgtcccccgc

SEQ ID NO: 1501256 - DNA, 15 bp, Homo sapiens
ccaacgtcccccgcc

SEQ ID NO: 1501257 - DNA, 15 bp, Homo sapiens
caacgtcccccgcca

SEQ ID NO: 1501258 - DNA, 15 bp, Homo sapiens
aacgtcccccgccat

SEQ ID NO: 1501259 - DNA, 15 bp, Homo sapiens
acgtcccccgccatc

SEQ ID NO: 1501260 - DNA, 15 bp, Homo sapiens
cgtcccccgccatcc

SEQ ID NO: 1501261 - DNA, 15 bp, Homo sapiens
gtcccccgccatcct

SEQ ID NO: 1501262 - DNA, 15 bp, Homo sapiens
tcccccgccatccta

SEQ ID NO: 1501263 - DNA, 15 bp, Homo sapiens
cccccgccatcctaa

SEQ ID NO: 1501264 - DNA, 15 bp, Homo sapiens
ccccgccatcctaac

SEQ ID NO: 1501265 - DNA, 15 bp, Homo sapiens
cccgccatcctaaca

SEQ ID NO: 1501266 - DNA, 15 bp, Homo sapiens
ccgccatcctaacac

SEQ ID NO: 1501267 - DNA, 15 bp, Homo sapiens
cgccatcctaacacc

SEQ ID NO: 1501268 - DNA, 15 bp, Homo sapiens
gccatcctaacaccc

SEQ ID NO: 1501269 - DNA, 15 bp, Homo sapiens
ccatcctaacaccca

SEQ ID NO: 1501270 - DNA, 15 bp, Homo sapiens
catcctaacacccac

SEQ ID NO: 1501271 - DNA, 15 bp, Homo sapiens
atcctaacacccacg

SEQ ID NO: 1501272 - DNA, 15 bp, Homo sapiens
tcctaacacccacgt

SEQ ID NO: 1501273 - DNA, 15 bp, Homo sapiens
cctaacacccacgtg

SEQ ID NO: 1501274 - DNA, 15 bp, Homo sapiens
ctaacacccacgtgc

SEQ ID NO: 1501275 - DNA, 15 bp, Homo sapiens
taacacccacgtgcc

SEQ ID NO: 1501276 - DNA, 15 bp, Homo sapiens
aacacccacgtgcct

SEQ ID NO: 1501277 - DNA, 15 bp, Homo sapiens
acacccacgtgcctt

SEQ ID NO: 1501278 - DNA, 15 bp, Homo sapiens
cacccacgtgccttc

SEQ ID NO: 1501279 - DNA, 15 bp, Homo sapiens
acccacgtgccttca

SEQ ID NO: 1501280 - DNA, 15 bp, Homo sapiens
cccacgtgccttcac

SEQ ID NO: 1501281 - DNA, 15 bp, Homo sapiens
ccacgtgccttcaca

SEQ ID NO: 1501282 - DNA, 15 bp, Homo sapiens
cacgtgccttcacac

SEQ ID NO: 1501283 - DNA, 15 bp, Homo sapiens
acgtgccttcacact

SEQ ID NO: 1501284 - DNA, 15 bp, Homo sapiens
cgtgccttcacactt

SEQ ID NO: 1501285 - DNA, 15 bp, Homo sapiens
gtgccttcacactta

SEQ ID NO: 1501286 - DNA, 15 bp, Homo sapiens
tgccttcacacttag

SEQ ID NO: 1501287 - DNA, 15 bp, Homo sapiens
gccttcacacttagg

SEQ ID NO: 1501288 - DNA, 15 bp, Homo sapiens
ccttcacacttaggc

SEQ ID NO: 1501289 - DNA, 15 bp, Homo sapiens
cttcacacttaggca

SEQ ID NO: 1501290 - DNA, 15 bp, Homo sapiens
ttcacacttaggcag

SEQ ID NO: 1501291 - DNA, 15 bp, Homo sapiens
tcacacttaggcagc

SEQ ID NO: 1501292 - DNA, 15 bp, Homo sapiens
cacacttaggcagct

SEQ ID NO: 1501293 - DNA, 15 bp, Homo sapiens
acacttaggcagcta

SEQ ID NO: 1501294 - DNA, 15 bp, Homo sapiens
cacttaggcagctac

SEQ ID NO: 1501295 - DNA, 15 bp, Homo sapiens
acttaggcagctact

SEQ ID NO: 1501296 - DNA, 15 bp, Homo sapiens
cttaggcagctacta

SEQ ID NO: 1501297 - DNA, 15 bp, Homo sapiens
ttaggcagctactac

SEQ ID NO: 1501298 - DNA, 15 bp, Homo sapiens
taggcagctactact

SEQ ID NO: 1501299 - DNA, 15 bp, Homo sapiens
aggcagctactacta

SEQ ID NO: 1501300 - DNA, 15 bp, Homo sapiens
ggcagctactactag

SEQ ID NO: 1501301 - DNA, 15 bp, Homo sapiens
gcagctactactaga

SEQ ID NO: 1501302 - DNA, 15 bp, Homo sapiens
cagctactactagaa

SEQ ID NO: 1501303 - DNA, 15 bp, Homo sapiens
agctactactagaag

SEQ ID NO: 1501304 - DNA, 15 bp, Homo sapiens
gctactactagaagc

SEQ ID NO: 1501305 - DNA, 15 bp, Homo sapiens
ctactactagaagct

SEQ ID NO: 1501306 - DNA, 15 bp, Homo sapiens
tactactagaagctt

SEQ ID NO: 1501307 - DNA, 15 bp, Homo sapiens
actactagaagctta

SEQ ID NO: 1501308 - DNA, 15 bp, Homo sapiens
ctactagaagcttac

SEQ ID NO: 1501309 - DNA, 15 bp, Homo sapiens
tactagaagcttact

SEQ ID NO: 1501310 - DNA, 15 bp, Homo sapiens
actagaagcttactc

SEQ ID NO: 1501311 - DNA, 15 bp, Homo sapiens
ctagaagcttactca

SEQ ID NO: 1501312 - DNA, 15 bp, Homo sapiens
tagaagcttactcat

SEQ ID NO: 1501313 - DNA, 15 bp, Homo sapiens
agaagcttactcatc

SEQ ID NO: 1501314 - DNA, 15 bp, Homo sapiens
gaagcttactcatca

SEQ ID NO: 1501315 - DNA, 15 bp, Homo sapiens
aagcttactcatcag

SEQ ID NO: 1501316 - DNA, 15 bp, Homo sapiens
agcttactcatcagt

SEQ ID NO: 1501317 - DNA, 15 bp, Homo sapiens
gcttactcatcagtg

SEQ ID NO: 1501318 - DNA, 15 bp, Homo sapiens
cttactcatcagtgg

SEQ ID NO: 1501319 - DNA, 15 bp, Homo sapiens
ttactcatcagtggc

SEQ ID NO: 1501320 - DNA, 15 bp, Homo sapiens
tactcatcagtggcc

SEQ ID NO: 1501321 - DNA, 15 bp, Homo sapiens
actcatcagtggcct

SEQ ID NO: 1501322 - DNA, 15 bp, Homo sapiens
ctcatcagtggcctt

SEQ ID NO: 1501323 - DNA, 15 bp, Homo sapiens
tcatcagtggccttc

SEQ ID NO: 1501324 - DNA, 15 bp, Homo sapiens
catcagtggccttct

SEQ ID NO: 1501325 - DNA, 15 bp, Homo sapiens
atcagtggccttcta

SEQ ID NO: 1501326 - DNA, 15 bp, Homo sapiens
tcagtggccttctag

SEQ ID NO: 1501327 - DNA, 15 bp, Homo sapiens
cagtggccttctagc

SEQ ID NO: 1501328 - DNA, 15 bp, Homo sapiens
agtggccttctagct

SEQ ID NO: 1501329 - DNA, 15 bp, Homo sapiens
gtggccttctagctg

SEQ ID NO: 1501330 - DNA, 15 bp, Homo sapiens
tggccttctagctga

SEQ ID NO: 1501331 - DNA, 15 bp, Homo sapiens
ggccttctagctgaa

SEQ ID NO: 1501332 - DNA, 15 bp, Homo sapiens
gccttctagctgaag

SEQ ID NO: 1501333 - DNA, 15 bp, Homo sapiens
ccttctagctgaagc

SEQ ID NO: 1501334 - DNA, 15 bp, Homo sapiens
cttctagctgaagcc

SEQ ID NO: 1501335 - DNA, 15 bp, Homo sapiens
ttctagctgaagccc

SEQ ID NO: 1501336 - DNA, 15 bp, Homo sapiens
tctagctgaagccca

SEQ ID NO: 1501337 - DNA, 15 bp, Homo sapiens
ctagctgaagcccat

SEQ ID NO: 1501338 - DNA, 15 bp, Homo sapiens
tagctgaagcccatc

SEQ ID NO: 1501339 - DNA, 15 bp, Homo sapiens
agctgaagcccatcc

SEQ ID NO: 1501340 - DNA, 15 bp, Homo sapiens
gctgaagcccatcct

SEQ ID NO: 1501341 - DNA, 15 bp, Homo sapiens
ctgaagcccatcctg

SEQ ID NO: 1501342 - DNA, 15 bp, Homo sapiens
tgaagcccatcctgc

SEQ ID NO: 1501343 - DNA, 15 bp, Homo sapiens
gaagcccatcctgca

SEQ ID NO: 1501344 - DNA, 15 bp, Homo sapiens
aagcccatcctgcac

SEQ ID NO: 1501345 - DNA, 15 bp, Homo sapiens
agcccatcctgcaca

SEQ ID NO: 1501346 - DNA, 15 bp, Homo sapiens
gcccatcctgcacac

SEQ ID NO: 1501347 - DNA, 15 bp, Homo sapiens
cccatcctgcacact

SEQ ID NO: 1501348 - DNA, 15 bp, Homo sapiens
ccatcctgcacactt

SEQ ID NO: 1501349 - DNA, 15 bp, Homo sapiens
catcctgcacactta

SEQ ID NO: 1501350 - DNA, 15 bp, Homo sapiens
atcctgcacacttac

SEQ ID NO: 1501351 - DNA, 15 bp, Homo sapiens
tcctgcacacttact

SEQ ID NO: 1501352 - DNA, 15 bp, Homo sapiens
cctgcacacttactg

SEQ ID NO: 1501353 - DNA, 15 bp, Homo sapiens
ctgcacacttactgg

SEQ ID NO: 1501354 - DNA, 15 bp, Homo sapiens
tgcacacttactgga

SEQ ID NO: 1501355 - DNA, 15 bp, Homo sapiens
gcacacttactggat

SEQ ID NO: 1501356 - DNA, 15 bp, Homo sapiens
cacacttactggatg

SEQ ID NO: 1501357 - DNA, 15 bp, Homo sapiens
acacttactggatgc

SEQ ID NO: 1501358 - DNA, 15 bp, Homo sapiens
cacttactggatgct

SEQ ID NO: 1501359 - DNA, 15 bp, Homo sapiens
acttactggatgctt

SEQ ID NO: 1501360 - DNA, 15 bp, Homo sapiens
cttactggatgcttt

SEQ ID NO: 1501361 - DNA, 15 bp, Homo sapiens
ttactggatgctttg

SEQ ID NO: 1501362 - DNA, 15 bp, Homo sapiens
tactggatgctttgg

SEQ ID NO: 1501363 - DNA, 15 bp, Homo sapiens
actggatgctttgga

SEQ ID NO: 1501364 - DNA, 15 bp, Homo sapiens
ctggatgctttggac

SEQ ID NO: 1501365 - DNA, 15 bp, Homo sapiens
tggatgctttggact

SEQ ID NO: 1501366 - DNA, 15 bp, Homo sapiens
ggatgctttggactc

SEQ ID NO: 1501367 - DNA, 15 bp, Homo sapiens
gatgctttggactca

SEQ ID NO: 1501368 - DNA, 15 bp, Homo sapiens
atgctttggactcaa

SEQ ID NO: 1501369 - DNA, 15 bp, Homo sapiens
tgctttggactcaac

SEQ ID NO: 1501370 - DNA, 15 bp, Homo sapiens
gctttggactcaaca

SEQ ID NO: 1501371 - DNA, 15 bp, Homo sapiens
ctttggactcaacag

SEQ ID NO: 1501372 - DNA, 15 bp, Homo sapiens
tttggactcaacagg

SEQ ID NO: 1501373 - DNA, 15 bp, Homo sapiens
ttggactcaacagga

SEQ ID NO: 1501374 - DNA, 15 bp, Homo sapiens
tggactcaacaggac

SEQ ID NO: 1501375 - DNA, 15 bp, Homo sapiens
ggactcaacaggaca

SEQ ID NO: 1501376 - DNA, 15 bp, Homo sapiens
gactcaacaggacat

SEQ ID NO: 1501377 - DNA, 15 bp, Homo sapiens
actcaacaggacata

SEQ ID NO: 1501378 - DNA, 15 bp, Homo sapiens
ctcaacaggacatat

SEQ ID NO: 1501379 - DNA, 15 bp, Homo sapiens
tcaacaggacatatg

SEQ ID NO: 1501380 - DNA, 15 bp, Homo sapiens
caacaggacatatgt

SEQ ID NO: 1501381 - DNA, 15 bp, Homo sapiens
aacaggacatatgtg

SEQ ID NO: 1501382 - DNA, 15 bp, Homo sapiens
acaggacatatgtgg

SEQ ID NO: 1501383 - DNA, 15 bp, Homo sapiens
caggacatatgtggc

SEQ ID NO: 1501384 - DNA, 15 bp, Homo sapiens
aggacatatgtggcc

SEQ ID NO: 1501385 - DNA, 15 bp, Homo sapiens
ggacatatgtggcct

SEQ ID NO: 1501386 - DNA, 15 bp, Homo sapiens
gacatatgtggcctt

SEQ ID NO: 1501387 - DNA, 15 bp, Homo sapiens
acatatgtggccttg

SEQ ID NO: 1501388 - DNA, 15 bp, Homo sapiens
catatgtggccttga

SEQ ID NO: 1501389 - DNA, 15 bp, Homo sapiens
atatgtggccttgaa

SEQ ID NO: 1501390 - DNA, 15 bp, Homo sapiens
tatgtggccttgaag

SEQ ID NO: 1501391 - DNA, 15 bp, Homo sapiens
atgtggccttgaagg

SEQ ID NO: 1501392 - DNA, 15 bp, Homo sapiens
tgtggccttgaaggg

SEQ ID NO: 1501393 - DNA, 15 bp, Homo sapiens
gtggccttgaaggga

SEQ ID NO: 1501394 - DNA, 15 bp, Homo sapiens
tggccttgaagggaa

SEQ ID NO: 1501395 - DNA, 15 bp, Homo sapiens
ggccttgaagggaag

SEQ ID NO: 1501396 - DNA, 15 bp, Homo sapiens
gccttgaagggaaga

SEQ ID NO: 1501397 - DNA, 15 bp, Homo sapiens
ccttgaagggaagac

SEQ ID NO: 1501398 - DNA, 15 bp, Homo sapiens
cttgaagggaagaca

SEQ ID NO: 1501399 - DNA, 15 bp, Homo sapiens
ttgaagggaagacaa

SEQ ID NO: 1501400 - DNA, 15 bp, Homo sapiens
tgaagggaagacaaa

SEQ ID NO: 1501401 - DNA, 15 bp, Homo sapiens
gaagggaagacaaaa

SEQ ID NO: 1501402 - DNA, 15 bp, Homo sapiens
aagggaagacaaaac

SEQ ID NO: 1501403 - DNA, 15 bp, Homo sapiens
agggaagacaaaact

SEQ ID NO: 1501404 - DNA, 15 bp, Homo sapiens
gggaagacaaaactg

SEQ ID NO: 1501405 - DNA, 15 bp, Homo sapiens
ggaagacaaaactgg

SEQ ID NO: 1501406 - DNA, 15 bp, Homo sapiens
gaagacaaaactgga

SEQ ID NO: 1501407 - DNA, 15 bp, Homo sapiens
aagacaaaactggat

SEQ ID NO: 1501408 - DNA, 15 bp, Homo sapiens
agacaaaactggatg

SEQ ID NO: 1501409 - DNA, 15 bp, Homo sapiens
gacaaaactggatgt

SEQ ID NO: 1501410 - DNA, 15 bp, Homo sapiens
acaaaactggatgtt

SEQ ID NO: 1501411 - DNA, 15 bp, Homo sapiens
caaaactggatgttc

SEQ ID NO: 1501412 - DNA, 15 bp, Homo sapiens
aaaactggatgttct

SEQ ID NO: 1501413 - DNA, 15 bp, Homo sapiens
aaactggatgttctt

SEQ ID NO: 1501414 - DNA, 15 bp, Homo sapiens
aactggatgttcttt

SEQ ID NO: 1501415 - DNA, 15 bp, Homo sapiens
actggatgttctttc

SEQ ID NO: 1501416 - DNA, 15 bp, Homo sapiens
ctggatgttctttct

SEQ ID NO: 1501417 - DNA, 15 bp, Homo sapiens
tggatgttctttctt

SEQ ID NO: 1501418 - DNA, 15 bp, Homo sapiens
ggatgttctttcttg

SEQ ID NO: 1501419 - DNA, 15 bp, Homo sapiens
gatgttctttcttgt

SEQ ID NO: 1501420 - DNA, 15 bp, Homo sapiens
atgttctttcttgtt

SEQ ID NO: 1501421 - DNA, 15 bp, Homo sapiens
tgttctttcttgttg

SEQ ID NO: 1501422 - DNA, 15 bp, Homo sapiens
gttctttcttgttgg

SEQ ID NO: 1501423 - DNA, 15 bp, Homo sapiens
ttctttcttgttgga

SEQ ID NO: 1501424 - DNA, 15 bp, Homo sapiens
tctttcttgttggat

SEQ ID NO: 1501425 - DNA, 15 bp, Homo sapiens
ctttcttgttggata

SEQ ID NO: 1501426 - DNA, 15 bp, Homo sapiens
tttcttgttggatag

SEQ ID NO: 1501427 - DNA, 15 bp, Homo sapiens
ttcttgttggataga

SEQ ID NO: 1501428 - DNA, 15 bp, Homo sapiens
tcttgttggatagaa

SEQ ID NO: 1501429 - DNA, 15 bp, Homo sapiens
cttgttggatagaac

SEQ ID NO: 1501430 - DNA, 15 bp, Homo sapiens
ttgttggatagaacc

SEQ ID NO: 1501431 - DNA, 15 bp, Homo sapiens
tgttggatagaacct

SEQ ID NO: 1501432 - DNA, 15 bp, Homo sapiens
gttggatagaacctt

SEQ ID NO: 1501433 - DNA, 15 bp, Homo sapiens
ttggatagaaccttt

SEQ ID NO: 1501434 - DNA, 15 bp, Homo sapiens
tggatagaacctttg

SEQ ID NO: 1501435 - DNA, 15 bp, Homo sapiens
ggatagaacctttgt

SEQ ID NO: 1501436 - DNA, 15 bp, Homo sapiens
gatagaacctttgta

SEQ ID NO: 1501437 - DNA, 15 bp, Homo sapiens
atagaacctttgtat

SEQ ID NO: 1501438 - DNA, 15 bp, Homo sapiens
tagaacctttgtatt

SEQ ID NO: 1501439 - DNA, 15 bp, Homo sapiens
agaacctttgtattt

SEQ ID NO: 1501440 - DNA, 15 bp, Homo sapiens
gaacctttgtatttg

SEQ ID NO: 1501441 - DNA, 15 bp, Homo sapiens
aacctttgtatttgt

SEQ ID NO: 1501442 - DNA, 15 bp, Homo sapiens
acctttgtatttgtt

SEQ ID NO: 1501443 - DNA, 15 bp, Homo sapiens
cctttgtatttgttc

SEQ ID NO: 1501444 - DNA, 15 bp, Homo sapiens
ctttgtatttgttct

SEQ ID NO: 1501445 - DNA, 15 bp, Homo sapiens
tttgtatttgttctt

SEQ ID NO: 1501446 - DNA, 15 bp, Homo sapiens
ttgtatttgttcttt

SEQ ID NO: 1501447 - DNA, 15 bp, Homo sapiens
tgtatttgttcttta

SEQ ID NO: 1501448 - DNA, 15 bp, Homo sapiens
gtatttgttctttaa

SEQ ID NO: 1501449 - DNA, 15 bp, Homo sapiens
tatttgttctttaaa

SEQ ID NO: 1501450 - DNA, 15 bp, Homo sapiens
atttgttctttaaaa

SEQ ID NO: 1501451 - DNA, 15 bp, Homo sapiens
tttgttctttaaaaa

SEQ ID NO: 1501452 - DNA, 15 bp, Homo sapiens
ttgttctttaaaaac

SEQ ID NO: 1501453 - DNA, 15 bp, Homo sapiens
tgttctttaaaaaca

SEQ ID NO: 1501454 - DNA, 15 bp, Homo sapiens
gttctttaaaaacat

SEQ ID NO: 1501455 - DNA, 15 bp, Homo sapiens
tttaaaaacattttt

SEQ ID NO: 1501456 - DNA, 15 bp, Homo sapiens
ttaaaaacatttttt

SEQ ID NO: 1501457 - DNA, 15 bp, Homo sapiens
taaaaacattttttt

SEQ ID NO: 1501458 - DNA, 15 bp, Homo sapiens
aaaaacatttttttt

SEQ ID NO: 1501459 - DNA, 15 bp, Homo sapiens
aaaacatttttttta

SEQ ID NO: 1501460 - DNA, 15 bp, Homo sapiens
aaacattttttttaa

SEQ ID NO: 1501461 - DNA, 15 bp, Homo sapiens
aacattttttttaat

SEQ ID NO: 1501462 - DNA, 15 bp, Homo sapiens
acattttttttaatg

SEQ ID NO: 1501463 - DNA, 15 bp, Homo sapiens
cattttttttaatgt

SEQ ID NO: 1501464 - DNA, 15 bp, Homo sapiens
attttttttaatgtt

SEQ ID NO: 1501465 - DNA, 15 bp, Homo sapiens
ttttttttaatgttg

SEQ ID NO: 1501466 - DNA, 15 bp, Homo sapiens
tttttttaatgttgg

SEQ ID NO: 1501467 - DNA, 15 bp, Homo sapiens
ttttttaatgttggt

SEQ ID NO: 1501468 - DNA, 15 bp, Homo sapiens
tttttaatgttggta

SEQ ID NO: 1501469 - DNA, 15 bp, Homo sapiens
ttttaatgttggtaa

SEQ ID NO: 1501470 - DNA, 15 bp, Homo sapiens
tttaatgttggtaac

SEQ ID NO: 1501471 - DNA, 15 bp, Homo sapiens
ttaatgttggtaact

SEQ ID NO: 1501472 - DNA, 15 bp, Homo sapiens
taatgttggtaactt

SEQ ID NO: 1501473 - DNA, 15 bp, Homo sapiens
aatgttggtaacttt

SEQ ID NO: 1501474 - DNA, 15 bp, Homo sapiens
atgttggtaactttt

SEQ ID NO: 1501475 - DNA, 15 bp, Homo sapiens
tgttggtaacttttg

SEQ ID NO: 1501476 - DNA, 15 bp, Homo sapiens
gttggtaacttttgc

SEQ ID NO: 1501477 - DNA, 15 bp, Homo sapiens
ttggtaacttttgct

SEQ ID NO: 1501478 - DNA, 15 bp, Homo sapiens
tggtaacttttgctt

SEQ ID NO: 1501479 - DNA, 15 bp, Homo sapiens
ggtaacttttgcttc

SEQ ID NO: 1501480 - DNA, 15 bp, Homo sapiens
gtaacttttgcttcc

SEQ ID NO: 1501481 - DNA, 15 bp, Homo sapiens
taacttttgcttcct

SEQ ID NO: 1501482 - DNA, 15 bp, Homo sapiens
aacttttgcttcctc

SEQ ID NO: 1501483 - DNA, 15 bp, Homo sapiens
acttttgcttcctct

SEQ ID NO: 1501484 - DNA, 15 bp, Homo sapiens
cttttgcttcctcta

SEQ ID NO: 1501485 - DNA, 15 bp, Homo sapiens
ttttgcttcctctac

SEQ ID NO: 1501486 - DNA, 15 bp, Homo sapiens
tttgcttcctctacc

SEQ ID NO: 1501487 - DNA, 15 bp, Homo sapiens
ttgcttcctctacct

SEQ ID NO: 1501488 - DNA, 15 bp, Homo sapiens
tgcttcctctacctg

SEQ ID NO: 1501489 - DNA, 15 bp, Homo sapiens
gcttcctctacctga

SEQ ID NO: 1501490 - DNA, 15 bp, Homo sapiens
cttcctctacctgaa

SEQ ID NO: 1501491 - DNA, 15 bp, Homo sapiens
ttcctctacctgaac

SEQ ID NO: 1501492 - DNA, 15 bp, Homo sapiens
tcctctacctgaaca

SEQ ID NO: 1501493 - DNA, 15 bp, Homo sapiens
cctctacctgaacaa

SEQ ID NO: 1501494 - DNA, 15 bp, Homo sapiens
ctctacctgaacaaa

SEQ ID NO: 1501495 - DNA, 15 bp, Homo sapiens
tctacctgaacaaag

SEQ ID NO: 1501496 - DNA, 15 bp, Homo sapiens
ctacctgaacaaaga

SEQ ID NO: 1501497 - DNA, 15 bp, Homo sapiens
tacctgaacaaagag

SEQ ID NO: 1501498 - DNA, 15 bp, Homo sapiens
acctgaacaaagaga

SEQ ID NO: 1501499 - DNA, 15 bp, Homo sapiens
cctgaacaaagagat

SEQ ID NO: 1501500 - DNA, 15 bp, Homo sapiens
ctgaacaaagagatg

SEQ ID NO: 1501501 - DNA, 15 bp, Homo sapiens
tgaacaaagagatga

SEQ ID NO: 1501502 - DNA, 15 bp, Homo sapiens
gaacaaagagatgaa

SEQ ID NO: 1501503 - DNA, 15 bp, Homo sapiens
aacaaagagatgaat

SEQ ID NO: 1501504 - DNA, 15 bp, Homo sapiens
acaaagagatgaata

SEQ ID NO: 1501505 - DNA, 15 bp, Homo sapiens
caaagagatgaataa

SEQ ID NO: 1501506 - DNA, 15 bp, Homo sapiens
aaagagatgaataat

SEQ ID NO: 1501507 - DNA, 15 bp, Homo sapiens
aagagatgaataatt

SEQ ID NO: 1501508 - DNA, 15 bp, Homo sapiens
agagatgaataattc

SEQ ID NO: 1501509 - DNA, 15 bp, Homo sapiens
gagatgaataattcc

SEQ ID NO: 1501510 - DNA, 15 bp, Homo sapiens
agatgaataattcca

SEQ ID NO: 1501511 - DNA, 15 bp, Homo sapiens
gatgaataattccat

SEQ ID NO: 1501512 - DNA, 15 bp, Homo sapiens
atgaataattccatg

SEQ ID NO: 1501513 - DNA, 15 bp, Homo sapiens
tgaataattccatgg

SEQ ID NO: 1501514 - DNA, 15 bp, Homo sapiens
gaataattccatggg

SEQ ID NO: 1501515 - DNA, 15 bp, Homo sapiens
aataattccatgggc

SEQ ID NO: 1501516 - DNA, 15 bp, Homo sapiens
ataattccatgggcc

SEQ ID NO: 1501517 - DNA, 15 bp, Homo sapiens
taattccatgggcca

SEQ ID NO: 1501518 - DNA, 15 bp, Homo sapiens
aattccatgggccag

SEQ ID NO: 1501519 - DNA, 15 bp, Homo sapiens
attccatgggccagt

SEQ ID NO: 1501520 - DNA, 15 bp, Homo sapiens
ttccatgggccagta

SEQ ID NO: 1501521 - DNA, 15 bp, Homo sapiens
tccatgggccagtat

SEQ ID NO: 1501522 - DNA, 15 bp, Homo sapiens
ccatgggccagtatg

SEQ ID NO: 1501523 - DNA, 15 bp, Homo sapiens
catgggccagtatgc

SEQ ID NO: 1501524 - DNA, 15 bp, Homo sapiens
atgggccagtatgcc

SEQ ID NO: 1501525 - DNA, 15 bp, Homo sapiens
tgggccagtatgcca

SEQ ID NO: 1501526 - DNA, 15 bp, Homo sapiens
gggccagtatgccag

SEQ ID NO: 1501527 - DNA, 15 bp, Homo sapiens
ggccagtatgccagt

SEQ ID NO: 1501528 - DNA, 15 bp, Homo sapiens
gccagtatgccagtt

SEQ ID NO: 1501529 - DNA, 15 bp, Homo sapiens
ccagtatgccagttt

SEQ ID NO: 1501530 - DNA, 15 bp, Homo sapiens
cagtatgccagtttg

SEQ ID NO: 1501531 - DNA, 15 bp, Homo sapiens
agtatgccagtttga

SEQ ID NO: 1501532 - DNA, 15 bp, Homo sapiens
gtatgccagtttgaa

SEQ ID NO: 1501533 - DNA, 15 bp, Homo sapiens
tatgccagtttgaat

SEQ ID NO: 1501534 - DNA, 15 bp, Homo sapiens
atgccagtttgaatt

SEQ ID NO: 1501535 - DNA, 15 bp, Homo sapiens
tgccagtttgaattc

SEQ ID NO: 1501536 - DNA, 15 bp, Homo sapiens
gccagtttgaattct

SEQ ID NO: 1501537 - DNA, 15 bp, Homo sapiens
ccagtttgaattctc

SEQ ID NO: 1501538 - DNA, 15 bp, Homo sapiens
cagtttgaattctca

SEQ ID NO: 1501539 - DNA, 15 bp, Homo sapiens
agtttgaattctcag

SEQ ID NO: 1501540 - DNA, 15 bp, Homo sapiens
gtttgaattctcagt

SEQ ID NO: 1501541 - DNA, 15 bp, Homo sapiens
tttgaattctcagtc

SEQ ID NO: 1501542 - DNA, 15 bp, Homo sapiens
ttgaattctcagtct

SEQ ID NO: 1501543 - DNA, 15 bp, Homo sapiens
tgaattctcagtctc

SEQ ID NO: 1501544 - DNA, 15 bp, Homo sapiens
gaattctcagtctcc

SEQ ID NO: 1501545 - DNA, 15 bp, Homo sapiens
aattctcagtctcct

SEQ ID NO: 1501546 - DNA, 15 bp, Homo sapiens
attctcagtctccta

SEQ ID NO: 1501547 - DNA, 15 bp, Homo sapiens
ttctcagtctcctag

SEQ ID NO: 1501548 - DNA, 15 bp, Homo sapiens
tctcagtctcctagc

SEQ ID NO: 1501549 - DNA, 15 bp, Homo sapiens
ctcagtctcctagca

SEQ ID NO: 1501550 - DNA, 15 bp, Homo sapiens
tcagtctcctagcat

SEQ ID NO: 1501551 - DNA, 15 bp, Homo sapiens
cagtctcctagcatc

SEQ ID NO: 1501552 - DNA, 15 bp, Homo sapiens
agtctcctagcatct

SEQ ID NO: 1501553 - DNA, 15 bp, Homo sapiens
gtctcctagcatctt

SEQ ID NO: 1501554 - DNA, 15 bp, Homo sapiens
tctcctagcatcttg

SEQ ID NO: 1501555 - DNA, 15 bp, Homo sapiens
ctcctagcatcttgt

SEQ ID NO: 1501556 - DNA, 15 bp, Homo sapiens
tcctagcatcttgtg

SEQ ID NO: 1501557 - DNA, 15 bp, Homo sapiens
cctagcatcttgtga

SEQ ID NO: 1501558 - DNA, 15 bp, Homo sapiens
ctagcatcttgtgag

SEQ ID NO: 1501559 - DNA, 15 bp, Homo sapiens
tagcatcttgtgagt

SEQ ID NO: 1501560 - DNA, 15 bp, Homo sapiens
agcatcttgtgagtt

SEQ ID NO: 1501561 - DNA, 15 bp, Homo sapiens
gcatcttgtgagttg

SEQ ID NO: 1501562 - DNA, 15 bp, Homo sapiens
catcttgtgagttgc

SEQ ID NO: 1501563 - DNA, 15 bp, Homo sapiens
atcttgtgagttgca

SEQ ID NO: 1501564 - DNA, 15 bp, Homo sapiens
tcttgtgagttgcat

SEQ ID NO: 1501565 - DNA, 15 bp, Homo sapiens
cttgtgagttgcata

SEQ ID NO: 1501566 - DNA, 15 bp, Homo sapiens
ttgtgagttgcatat

SEQ ID NO: 1501567 - DNA, 15 bp, Homo sapiens
tgtgagttgcatatt

SEQ ID NO: 1501568 - DNA, 15 bp, Homo sapiens
gtgagttgcatatta

SEQ ID NO: 1501569 - DNA, 15 bp, Homo sapiens
tgagttgcatattaa

SEQ ID NO: 1501570 - DNA, 15 bp, Homo sapiens
gagttgcatattaag

SEQ ID NO: 1501571 - DNA, 15 bp, Homo sapiens
agttgcatattaaga

SEQ ID NO: 1501572 - DNA, 15 bp, Homo sapiens
gttgcatattaagat

SEQ ID NO: 1501573 - DNA, 15 bp, Homo sapiens
ttgcatattaagatt

SEQ ID NO: 1501574 - DNA, 15 bp, Homo sapiens
tgcatattaagatta

SEQ ID NO: 1501575 - DNA, 15 bp, Homo sapiens
gcatattaagattac

SEQ ID NO: 1501576 - DNA, 15 bp, Homo sapiens
catattaagattact

SEQ ID NO: 1501577 - DNA, 15 bp, Homo sapiens
atattaagattactg

SEQ ID NO: 1501578 - DNA, 15 bp, Homo sapiens
tattaagattactgg

SEQ ID NO: 1501579 - DNA, 15 bp, Homo sapiens
attaagattactgga

SEQ ID NO: 1501580 - DNA, 15 bp, Homo sapiens
ttaagattactggaa

SEQ ID NO: 1501581 - DNA, 15 bp, Homo sapiens
taagattactggaat

SEQ ID NO: 1501582 - DNA, 15 bp, Homo sapiens
aagattactggaatg

SEQ ID NO: 1501583 - DNA, 15 bp, Homo sapiens
agattactggaatgg

SEQ ID NO: 1501584 - DNA, 15 bp, Homo sapiens
gattactggaatggt

SEQ ID NO: 1501585 - DNA, 15 bp, Homo sapiens
attactggaatggtt

SEQ ID NO: 1501586 - DNA, 15 bp, Homo sapiens
ttactggaatggtta

SEQ ID NO: 1501587 - DNA, 15 bp, Homo sapiens
tactggaatggttaa

SEQ ID NO: 1501588 - DNA, 15 bp, Homo sapiens
actggaatggttaag

SEQ ID NO: 1501589 - DNA, 15 bp, Homo sapiens
ctggaatggttaagt

SEQ ID NO: 1501590 - DNA, 15 bp, Homo sapiens
tggaatggttaagtc

SEQ ID NO: 1501591 - DNA, 15 bp, Homo sapiens
ggaatggttaagtca

SEQ ID NO: 1501592 - DNA, 15 bp, Homo sapiens
gaatggttaagtcat

SEQ ID NO: 1501593 - DNA, 15 bp, Homo sapiens
aatggttaagtcatg

SEQ ID NO: 1501594 - DNA, 15 bp, Homo sapiens
atggttaagtcatgg

SEQ ID NO: 1501595 - DNA, 15 bp, Homo sapiens
tggttaagtcatggt

SEQ ID NO: 1501596 - DNA, 15 bp, Homo sapiens
ggttaagtcatggtt

SEQ ID NO: 1501597 - DNA, 15 bp, Homo sapiens
gttaagtcatggttc

SEQ ID NO: 1501598 - DNA, 15 bp, Homo sapiens
ttaagtcatggttct

SEQ ID NO: 1501599 - DNA, 15 bp, Homo sapiens
taagtcatggttctg

SEQ ID NO: 1501600 - DNA, 15 bp, Homo sapiens
aagtcatggttctga

SEQ ID NO: 1501601 - DNA, 15 bp, Homo sapiens
agtcatggttctgag

SEQ ID NO: 1501602 - DNA, 15 bp, Homo sapiens
gtcatggttctgaga

SEQ ID NO: 1501603 - DNA, 15 bp, Homo sapiens
tcatggttctgagaa

SEQ ID NO: 1501604 - DNA, 15 bp, Homo sapiens
catggttctgagaaa

SEQ ID NO: 1501605 - DNA, 15 bp, Homo sapiens
atggttctgagaaag

SEQ ID NO: 1501606 - DNA, 15 bp, Homo sapiens
tggttctgagaaaga

SEQ ID NO: 1501607 - DNA, 15 bp, Homo sapiens
ggttctgagaaagaa

SEQ ID NO: 1501608 - DNA, 15 bp, Homo sapiens
gttctgagaaagaag

SEQ ID NO: 1501609 - DNA, 15 bp, Homo sapiens
ttctgagaaagaagc

SEQ ID NO: 1501610 - DNA, 15 bp, Homo sapiens
tctgagaaagaagct

SEQ ID NO: 1501611 - DNA, 15 bp, Homo sapiens
ctgagaaagaagctg

SEQ ID NO: 1501612 - DNA, 15 bp, Homo sapiens
tgagaaagaagctgt

SEQ ID NO: 1501613 - DNA, 15 bp, Homo sapiens
gagaaagaagctgta

SEQ ID NO: 1501614 - DNA, 15 bp, Homo sapiens
agaaagaagctgtac

SEQ ID NO: 1501615 - DNA, 15 bp, Homo sapiens
gaaagaagctgtacg

SEQ ID NO: 1501616 - DNA, 15 bp, Homo sapiens
aaagaagctgtacgt

SEQ ID NO: 1501617 - DNA, 15 bp, Homo sapiens
aagaagctgtacgtt

SEQ ID NO: 1501618 - DNA, 15 bp, Homo sapiens
agaagctgtacgttt

SEQ ID NO: 1501619 - DNA, 15 bp, Homo sapiens
gaagctgtacgtttt

SEQ ID NO: 1501620 - DNA, 15 bp, Homo sapiens
aagctgtacgttttc

SEQ ID NO: 1501621 - DNA, 15 bp, Homo sapiens
agctgtacgttttct

SEQ ID NO: 1501622 - DNA, 15 bp, Homo sapiens
gctgtacgttttctt

SEQ ID NO: 1501623 - DNA, 15 bp, Homo sapiens
ctgtacgttttcttt

SEQ ID NO: 1501624 - DNA, 15 bp, Homo sapiens
tgtacgttttcttta

SEQ ID NO: 1501625 - DNA, 15 bp, Homo sapiens
gtacgttttctttat

SEQ ID NO: 1501626 - DNA, 15 bp, Homo sapiens
tacgttttctttatg

SEQ ID NO: 1501627 - DNA, 15 bp, Homo sapiens
acgttttctttatgt

SEQ ID NO: 1501628 - DNA, 15 bp, Homo sapiens
cgttttctttatgtt

SEQ ID NO: 1501629 - DNA, 15 bp, Homo sapiens
gttttctttatgttt

SEQ ID NO: 1501630 - DNA, 15 bp, Homo sapiens
ttttctttatgtttt

SEQ ID NO: 1501631 - DNA, 15 bp, Homo sapiens
tttctttatgttttt

SEQ ID NO: 1501632 - DNA, 15 bp, Homo sapiens
ttctttatgttttta

SEQ ID NO: 1501633 - DNA, 15 bp, Homo sapiens
tctttatgtttttat

SEQ ID NO: 1501634 - DNA, 15 bp, Homo sapiens
ctttatgtttttatg

SEQ ID NO: 1501635 - DNA, 15 bp, Homo sapiens
tttatgtttttatga

SEQ ID NO: 1501636 - DNA, 15 bp, Homo sapiens
ttatgtttttatgac

SEQ ID NO: 1501637 - DNA, 15 bp, Homo sapiens
tatgtttttatgacc

SEQ ID NO: 1501638 - DNA, 15 bp, Homo sapiens
atgtttttatgacca

SEQ ID NO: 1501639 - DNA, 15 bp, Homo sapiens
tgtttttatgaccaa

SEQ ID NO: 1501640 - DNA, 15 bp, Homo sapiens
gtttttatgaccaaa

SEQ ID NO: 1501641 - DNA, 15 bp, Homo sapiens
tttttatgaccaaag

SEQ ID NO: 1501642 - DNA, 15 bp, Homo sapiens
ttttatgaccaaagc

SEQ ID NO: 1501643 - DNA, 15 bp, Homo sapiens
tttatgaccaaagca

SEQ ID NO: 1501644 - DNA, 15 bp, Homo sapiens
ttatgaccaaagcag

SEQ ID NO: 1501645 - DNA, 15 bp, Homo sapiens
tatgaccaaagcagt

SEQ ID NO: 1501646 - DNA, 15 bp, Homo sapiens
atgaccaaagcagtt

SEQ ID NO: 1501647 - DNA, 15 bp, Homo sapiens
tgaccaaagcagttt

SEQ ID NO: 1501648 - DNA, 15 bp, Homo sapiens
gaccaaagcagtttc

SEQ ID NO: 1501649 - DNA, 15 bp, Homo sapiens
accaaagcagtttct

SEQ ID NO: 1501650 - DNA, 15 bp, Homo sapiens
ccaaagcagtttctt

SEQ ID NO: 1501651 - DNA, 15 bp, Homo sapiens
caaagcagtttcttg

SEQ ID NO: 1501652 - DNA, 15 bp, Homo sapiens
aaagcagtttcttgt

SEQ ID NO: 1501653 - DNA, 15 bp, Homo sapiens
aagcagtttcttgtc

SEQ ID NO: 1501654 - DNA, 15 bp, Homo sapiens
agcagtttcttgtca

SEQ ID NO: 1501655 - DNA, 15 bp, Homo sapiens
gcagtttcttgtcaa

SEQ ID NO: 1501656 - DNA, 15 bp, Homo sapiens
cagtttcttgtcaat

SEQ ID NO: 1501657 - DNA, 15 bp, Homo sapiens
agtttcttgtcaata

SEQ ID NO: 1501658 - DNA, 15 bp, Homo sapiens
gtttcttgtcaatac

SEQ ID NO: 1501659 - DNA, 15 bp, Homo sapiens
tttcttgtcaataca

SEQ ID NO: 1501660 - DNA, 15 bp, Homo sapiens
ttcttgtcaatacac

SEQ ID NO: 1501661 - DNA, 15 bp, Homo sapiens
tcttgtcaatacacg

SEQ ID NO: 1501662 - DNA, 15 bp, Homo sapiens
cttgtcaatacacgg

SEQ ID NO: 1501663 - DNA, 15 bp, Homo sapiens
ttgtcaatacacggg

SEQ ID NO: 1501664 - DNA, 15 bp, Homo sapiens
tgtcaatacacgggg

SEQ ID NO: 1501665 - DNA, 15 bp, Homo sapiens
gtcaatacacggggt

SEQ ID NO: 1501666 - DNA, 15 bp, Homo sapiens
tcaatacacggggtt

SEQ ID NO: 1501667 - DNA, 15 bp, Homo sapiens
caatacacggggttc

SEQ ID NO: 1501668 - DNA, 15 bp, Homo sapiens
aatacacggggttca

SEQ ID NO: 1501669 - DNA, 15 bp, Homo sapiens
atacacggggttcag

SEQ ID NO: 1501670 - DNA, 15 bp, Homo sapiens
tacacggggttcagt

SEQ ID NO: 1501671 - DNA, 15 bp, Homo sapiens
acacggggttcagta

SEQ ID NO: 1501672 - DNA, 15 bp, Homo sapiens
cacggggttcagtat

SEQ ID NO: 1501673 - DNA, 15 bp, Homo sapiens
acggggttcagtatg

SEQ ID NO: 1501674 - DNA, 15 bp, Homo sapiens
cggggttcagtatga

SEQ ID NO: 1501675 - DNA, 15 bp, Homo sapiens
ggggttcagtatgac

SEQ ID NO: 1501676 - DNA, 15 bp, Homo sapiens
gggttcagtatgaca

SEQ ID NO: 1501677 - DNA, 15 bp, Homo sapiens
ggttcagtatgacac

SEQ ID NO: 1501678 - DNA, 15 bp, Homo sapiens
gttcagtatgacaca

SEQ ID NO: 1501679 - DNA, 15 bp, Homo sapiens
ttcagtatgacacag

SEQ ID NO: 1501680 - DNA, 15 bp, Homo sapiens
tcagtatgacacaga

SEQ ID NO: 1501681 - DNA, 15 bp, Homo sapiens
cagtatgacacagaa

SEQ ID NO: 1501682 - DNA, 15 bp, Homo sapiens
agtatgacacagaat

SEQ ID NO: 1501683 - DNA, 15 bp, Homo sapiens
gtatgacacagaatc

SEQ ID NO: 1501684 - DNA, 15 bp, Homo sapiens
tatgacacagaatca

SEQ ID NO: 1501685 - DNA, 15 bp, Homo sapiens
atgacacagaatcat

SEQ ID NO: 1501686 - DNA, 15 bp, Homo sapiens
tgacacagaatcatg

SEQ ID NO: 1501687 - DNA, 15 bp, Homo sapiens
gacacagaatcatgg

SEQ ID NO: 1501688 - DNA, 15 bp, Homo sapiens
acacagaatcatgga

SEQ ID NO: 1501689 - DNA, 15 bp, Homo sapiens
cacagaatcatggac

SEQ ID NO: 1501690 - DNA, 15 bp, Homo sapiens
acagaatcatggact

SEQ ID NO: 1501691 - DNA, 15 bp, Homo sapiens
cagaatcatggactt

SEQ ID NO: 1501692 - DNA, 15 bp, Homo sapiens
agaatcatggactta

SEQ ID NO: 1501693 - DNA, 15 bp, Homo sapiens
gaatcatggacttaa

SEQ ID NO: 1501694 - DNA, 15 bp, Homo sapiens
aatcatggacttaac

SEQ ID NO: 1501695 - DNA, 15 bp, Homo sapiens
atcatggacttaacc

SEQ ID NO: 1501696 - DNA, 15 bp, Homo sapiens
tcatggacttaaccc

SEQ ID NO: 1501697 - DNA, 15 bp, Homo sapiens
catggacttaacccg

SEQ ID NO: 1501698 - DNA, 15 bp, Homo sapiens
atggacttaacccgt

SEQ ID NO: 1501699 - DNA, 15 bp, Homo sapiens
tggacttaacccgtc

SEQ ID NO: 1501700 - DNA, 15 bp, Homo sapiens
ggacttaacccgtca

SEQ ID NO: 1501701 - DNA, 15 bp, Homo sapiens
gacttaacccgtcat

SEQ ID NO: 1501702 - DNA, 15 bp, Homo sapiens
acttaacccgtcatg

SEQ ID NO: 1501703 - DNA, 15 bp, Homo sapiens
cttaacccgtcatgt

SEQ ID NO: 1501704 - DNA, 15 bp, Homo sapiens
ttaacccgtcatgtt

SEQ ID NO: 1501705 - DNA, 15 bp, Homo sapiens
taacccgtcatgttc

SEQ ID NO: 1501706 - DNA, 15 bp, Homo sapiens
aacccgtcatgttct

SEQ ID NO: 1501707 - DNA, 15 bp, Homo sapiens
acccgtcatgttctg

SEQ ID NO: 1501708 - DNA, 15 bp, Homo sapiens
cccgtcatgttctgg

SEQ ID NO: 1501709 - DNA, 15 bp, Homo sapiens
ccgtcatgttctggt

SEQ ID NO: 1501710 - DNA, 15 bp, Homo sapiens
cgtcatgttctggtt

SEQ ID NO: 1501711 - DNA, 15 bp, Homo sapiens
gtcatgttctggttt

SEQ ID NO: 1501712 - DNA, 15 bp, Homo sapiens
tcatgttctggtttg

SEQ ID NO: 1501713 - DNA, 15 bp, Homo sapiens
catgttctggtttga

SEQ ID NO: 1501714 - DNA, 15 bp, Homo sapiens
atgttctggtttgag

SEQ ID NO: 1501715 - DNA, 15 bp, Homo sapiens
tgttctggtttgaga

SEQ ID NO: 1501716 - DNA, 15 bp, Homo sapiens
gttctggtttgagat

SEQ ID NO: 1501717 - DNA, 15 bp, Homo sapiens
ttctggtttgagatt

SEQ ID NO: 1501718 - DNA, 15 bp, Homo sapiens
tctggtttgagattt

SEQ ID NO: 1501719 - DNA, 15 bp, Homo sapiens
ctggtttgagattta

SEQ ID NO: 1501720 - DNA, 15 bp, Homo sapiens
tggtttgagatttag

SEQ ID NO: 1501721 - DNA, 15 bp, Homo sapiens
ggtttgagatttagt

SEQ ID NO: 1501722 - DNA, 15 bp, Homo sapiens
gtttgagatttagtg

SEQ ID NO: 1501723 - DNA, 15 bp, Homo sapiens
tttgagatttagtga

SEQ ID NO: 1501724 - DNA, 15 bp, Homo sapiens
ttgagatttagtgac

SEQ ID NO: 1501725 - DNA, 15 bp, Homo sapiens
tgagatttagtgaca

SEQ ID NO: 1501726 - DNA, 15 bp, Homo sapiens
gagatttagtgacaa

SEQ ID NO: 1501727 - DNA, 15 bp, Homo sapiens
agatttagtgacaaa

SEQ ID NO: 1501728 - DNA, 15 bp, Homo sapiens
gatttagtgacaaat

SEQ ID NO: 1501729 - DNA, 15 bp, Homo sapiens
atttagtgacaaata

SEQ ID NO: 1501730 - DNA, 15 bp, Homo sapiens
tttagtgacaaatag

SEQ ID NO: 1501731 - DNA, 15 bp, Homo sapiens
ttagtgacaaataga

SEQ ID NO: 1501732 - DNA, 15 bp, Homo sapiens
tagtgacaaatagag

SEQ ID NO: 1501733 - DNA, 15 bp, Homo sapiens
agtgacaaatagagg

SEQ ID NO: 1501734 - DNA, 15 bp, Homo sapiens
gtgacaaatagaggt

SEQ ID NO: 1501735 - DNA, 15 bp, Homo sapiens
tgacaaatagaggtg

SEQ ID NO: 1501736 - DNA, 15 bp, Homo sapiens
gacaaatagaggtgg

SEQ ID NO: 1501737 - DNA, 15 bp, Homo sapiens
acaaatagaggtggg

SEQ ID NO: 1501738 - DNA, 15 bp, Homo sapiens
caaatagaggtggga

SEQ ID NO: 1501739 - DNA, 15 bp, Homo sapiens
aaatagaggtgggaa

SEQ ID NO: 1501740 - DNA, 15 bp, Homo sapiens
aatagaggtgggaag

SEQ ID NO: 1501741 - DNA, 15 bp, Homo sapiens
atagaggtgggaagc

SEQ ID NO: 1501742 - DNA, 15 bp, Homo sapiens
tagaggtgggaagct

SEQ ID NO: 1501743 - DNA, 15 bp, Homo sapiens
agaggtgggaagctt

SEQ ID NO: 1501744 - DNA, 15 bp, Homo sapiens
gaggtgggaagctta

SEQ ID NO: 1501745 - DNA, 15 bp, Homo sapiens
aggtgggaagcttat

SEQ ID NO: 1501746 - DNA, 15 bp, Homo sapiens
ggtgggaagcttata

SEQ ID NO: 1501747 - DNA, 15 bp, Homo sapiens
gtgggaagcttataa

SEQ ID NO: 1501748 - DNA, 15 bp, Homo sapiens
tgggaagcttataat

SEQ ID NO: 1501749 - DNA, 15 bp, Homo sapiens
gggaagcttataatc

SEQ ID NO: 1501750 - DNA, 15 bp, Homo sapiens
ggaagcttataatct

SEQ ID NO: 1501751 - DNA, 15 bp, Homo sapiens
gaagcttataatcta

SEQ ID NO: 1501752 - DNA, 15 bp, Homo sapiens
aagcttataatctaa

SEQ ID NO: 1501753 - DNA, 15 bp, Homo sapiens
agcttataatctaat

SEQ ID NO: 1501754 - DNA, 15 bp, Homo sapiens
gcttataatctaatt

SEQ ID NO: 1501755 - DNA, 15 bp, Homo sapiens
cttataatctaattt

SEQ ID NO: 1501756 - DNA, 15 bp, Homo sapiens
ttataatctaatttt

SEQ ID NO: 1501757 - DNA, 15 bp, Homo sapiens
tataatctaatttta

SEQ ID NO: 1501758 - DNA, 15 bp, Homo sapiens
ataatctaattttag

SEQ ID NO: 1501759 - DNA, 15 bp, Homo sapiens
taatctaattttagg

SEQ ID NO: 1501760 - DNA, 15 bp, Homo sapiens
aatctaattttagga

SEQ ID NO: 1501761 - DNA, 15 bp, Homo sapiens
atctaattttaggag

SEQ ID NO: 1501762 - DNA, 15 bp, Homo sapiens
tctaattttaggagg

SEQ ID NO: 1501763 - DNA, 15 bp, Homo sapiens
ctaattttaggagga

SEQ ID NO: 1501764 - DNA, 15 bp, Homo sapiens
taattttaggaggac

SEQ ID NO: 1501765 - DNA, 15 bp, Homo sapiens
aattttaggaggacc

SEQ ID NO: 1501766 - DNA, 15 bp, Homo sapiens
attttaggaggacca

SEQ ID NO: 1501767 - DNA, 15 bp, Homo sapiens
ttttaggaggaccaa

SEQ ID NO: 1501768 - DNA, 15 bp, Homo sapiens
tttaggaggaccaaa

SEQ ID NO: 1501769 - DNA, 15 bp, Homo sapiens
ttaggaggaccaaat

SEQ ID NO: 1501770 - DNA, 15 bp, Homo sapiens
taggaggaccaaatt

SEQ ID NO: 1501771 - DNA, 15 bp, Homo sapiens
aggaggaccaaattc

SEQ ID NO: 1501772 - DNA, 15 bp, Homo sapiens
ggaggaccaaattca

SEQ ID NO: 1501773 - DNA, 15 bp, Homo sapiens
gaggaccaaattcag

SEQ ID NO: 1501774 - DNA, 15 bp, Homo sapiens
aggaccaaattcagt

SEQ ID NO: 1501775 - DNA, 15 bp, Homo sapiens
ggaccaaattcagtg

SEQ ID NO: 1501776 - DNA, 15 bp, Homo sapiens
gaccaaattcagtgg

SEQ ID NO: 1501777 - DNA, 15 bp, Homo sapiens
accaaattcagtgga

SEQ ID NO: 1501778 - DNA, 15 bp, Homo sapiens
ccaaattcagtggat

SEQ ID NO: 1501779 - DNA, 15 bp, Homo sapiens
caaattcagtggatg

SEQ ID NO: 1501780 - DNA, 15 bp, Homo sapiens
aaattcagtggatgg

SEQ ID NO: 1501781 - DNA, 15 bp, Homo sapiens
aattcagtggatggc

SEQ ID NO: 1501782 - DNA, 15 bp, Homo sapiens
attcagtggatggca

SEQ ID NO: 1501783 - DNA, 15 bp, Homo sapiens
ttcagtggatggcaa

SEQ ID NO: 1501784 - DNA, 15 bp, Homo sapiens
tcagtggatggcaac

SEQ ID NO: 1501785 - DNA, 15 bp, Homo sapiens
cagtggatggcaact

SEQ ID NO: 1501786 - DNA, 15 bp, Homo sapiens
agtggatggcaactg

SEQ ID NO: 1501787 - DNA, 15 bp, Homo sapiens
gtggatggcaactgg

SEQ ID NO: 1501788 - DNA, 15 bp, Homo sapiens
tggatggcaactgga

SEQ ID NO: 1501789 - DNA, 15 bp, Homo sapiens
ggatggcaactggaa

SEQ ID NO: 1501790 - DNA, 15 bp, Homo sapiens
gatggcaactggaac

SEQ ID NO: 1501791 - DNA, 15 bp, Homo sapiens
atggcaactggaaca

SEQ ID NO: 1501792 - DNA, 15 bp, Homo sapiens
tggcaactggaacat

SEQ ID NO: 1501793 - DNA, 15 bp, Homo sapiens
ggcaactggaacatt

SEQ ID NO: 1501794 - DNA, 15 bp, Homo sapiens
gcaactggaacattg

SEQ ID NO: 1501795 - DNA, 15 bp, Homo sapiens
caactggaacattga

SEQ ID NO: 1501796 - DNA, 15 bp, Homo sapiens
aactggaacattgat

SEQ ID NO: 1501797 - DNA, 15 bp, Homo sapiens
actggaacattgatt

SEQ ID NO: 1501798 - DNA, 15 bp, Homo sapiens
ctggaacattgattg

SEQ ID NO: 1501799 - DNA, 15 bp, Homo sapiens
tggaacattgattgt

SEQ ID NO: 1501800 - DNA, 15 bp, Homo sapiens
ggaacattgattgta

SEQ ID NO: 1501801 - DNA, 15 bp, Homo sapiens
gaacattgattgtaa

SEQ ID NO: 1501802 - DNA, 15 bp, Homo sapiens
aacattgattgtaag

SEQ ID NO: 1501803 - DNA, 15 bp, Homo sapiens
acattgattgtaagg

SEQ ID NO: 1501804 - DNA, 15 bp, Homo sapiens
cattgattgtaaggc

SEQ ID NO: 1501805 - DNA, 15 bp, Homo sapiens
attgattgtaaggcc

SEQ ID NO: 1501806 - DNA, 15 bp, Homo sapiens
ttgattgtaaggcca

SEQ ID NO: 1501807 - DNA, 15 bp, Homo sapiens
tgattgtaaggccag

SEQ ID NO: 1501808 - DNA, 15 bp, Homo sapiens
gattgtaaggccagt

SEQ ID NO: 1501809 - DNA, 15 bp, Homo sapiens
attgtaaggccagtg

SEQ ID NO: 1501810 - DNA, 15 bp, Homo sapiens
ttgtaaggccagtga

SEQ ID NO: 1501811 - DNA, 15 bp, Homo sapiens
tgtaaggccagtgaa

SEQ ID NO: 1501812 - DNA, 15 bp, Homo sapiens
gtaaggccagtgaag

SEQ ID NO: 1501813 - DNA, 15 bp, Homo sapiens
taaggccagtgaagt

SEQ ID NO: 1501814 - DNA, 15 bp, Homo sapiens
aaggccagtgaagtt

SEQ ID NO: 1501815 - DNA, 15 bp, Homo sapiens
aggccagtgaagttt

SEQ ID NO: 1501816 - DNA, 15 bp, Homo sapiens
ggccagtgaagtttt

SEQ ID NO: 1501817 - DNA, 15 bp, Homo sapiens
gccagtgaagttttc

SEQ ID NO: 1501818 - DNA, 15 bp, Homo sapiens
ccagtgaagttttca

SEQ ID NO: 1501819 - DNA, 15 bp, Homo sapiens
cagtgaagttttcac

SEQ ID NO: 1501820 - DNA, 15 bp, Homo sapiens
agtgaagttttcacc

SEQ ID NO: 1501821 - DNA, 15 bp, Homo sapiens
gtgaagttttcaccc

SEQ ID NO: 1501822 - DNA, 15 bp, Homo sapiens
tgaagttttcaccca

SEQ ID NO: 1501823 - DNA, 15 bp, Homo sapiens
gaagttttcacccaa

SEQ ID NO: 1501824 - DNA, 15 bp, Homo sapiens
aagttttcacccaac

SEQ ID NO: 1501825 - DNA, 15 bp, Homo sapiens
agttttcacccaact

SEQ ID NO: 1501826 - DNA, 15 bp, Homo sapiens
gttttcacccaactg

SEQ ID NO: 1501827 - DNA, 15 bp, Homo sapiens
ttttcacccaactgg

SEQ ID NO: 1501828 - DNA, 15 bp, Homo sapiens
tttcacccaactgga

SEQ ID NO: 1501829 - DNA, 15 bp, Homo sapiens
ttcacccaactggaa

SEQ ID NO: 1501830 - DNA, 15 bp, Homo sapiens
tcacccaactggaat

SEQ ID NO: 1501831 - DNA, 15 bp, Homo sapiens
cacccaactggaatt

SEQ ID NO: 1501832 - DNA, 15 bp, Homo sapiens
acccaactggaattt

SEQ ID NO: 1501833 - DNA, 15 bp, Homo sapiens
cccaactggaatttg

SEQ ID NO: 1501834 - DNA, 15 bp, Homo sapiens
ccaactggaatttga

SEQ ID NO: 1501835 - DNA, 15 bp, Homo sapiens
caactggaatttgat

SEQ ID NO: 1501836 - DNA, 15 bp, Homo sapiens
aactggaatttgatg

SEQ ID NO: 1501837 - DNA, 15 bp, Homo sapiens
actggaatttgatgg

SEQ ID NO: 1501838 - DNA, 15 bp, Homo sapiens
ctggaatttgatgga

SEQ ID NO: 1501839 - DNA, 15 bp, Homo sapiens
tggaatttgatggaa

SEQ ID NO: 1501840 - DNA, 15 bp, Homo sapiens
ggaatttgatggaaa

SEQ ID NO: 1501841 - DNA, 15 bp, Homo sapiens
gaatttgatggaaag

SEQ ID NO: 1501842 - DNA, 15 bp, Homo sapiens
aatttgatggaaaga

SEQ ID NO: 1501843 - DNA, 15 bp, Homo sapiens
atttgatggaaagaa

SEQ ID NO: 1501844 - DNA, 15 bp, Homo sapiens
tttgatggaaagaag

SEQ ID NO: 1501845 - DNA, 15 bp, Homo sapiens
ttgatggaaagaagg

SEQ ID NO: 1501846 - DNA, 15 bp, Homo sapiens
tgatggaaagaaggt

SEQ ID NO: 1501847 - DNA, 15 bp, Homo sapiens
gatggaaagaaggtt

SEQ ID NO: 1501848 - DNA, 15 bp, Homo sapiens
atggaaagaaggttt

SEQ ID NO: 1501849 - DNA, 15 bp, Homo sapiens
tggaaagaaggtttg

SEQ ID NO: 1501850 - DNA, 15 bp, Homo sapiens
ggaaagaaggtttgt

SEQ ID NO: 1501851 - DNA, 15 bp, Homo sapiens
gaaagaaggtttgtg

SEQ ID NO: 1501852 - DNA, 15 bp, Homo sapiens
aaagaaggtttgtgt

SEQ ID NO: 1501853 - DNA, 15 bp, Homo sapiens
aagaaggtttgtgtg

SEQ ID NO: 1501854 - DNA, 15 bp, Homo sapiens
agaaggtttgtgtgt

SEQ ID NO: 1501855 - DNA, 15 bp, Homo sapiens
gaaggtttgtgtgtt

SEQ ID NO: 1501856 - DNA, 15 bp, Homo sapiens
aaggtttgtgtgttt

SEQ ID NO: 1501857 - DNA, 15 bp, Homo sapiens
aggtttgtgtgttta

SEQ ID NO: 1501858 - DNA, 15 bp, Homo sapiens
ggtttgtgtgtttaa

SEQ ID NO: 1501859 - DNA, 15 bp, Homo sapiens
gtttgtgtgtttaag

SEQ ID NO: 1501860 - DNA, 15 bp, Homo sapiens
tttgtgtgtttaaga

SEQ ID NO: 1501861 - DNA, 15 bp, Homo sapiens
ttgtgtgtttaagac

SEQ ID NO: 1501862 - DNA, 15 bp, Homo sapiens
tgtgtgtttaagacg

SEQ ID NO: 1501863 - DNA, 15 bp, Homo sapiens
gtgtgtttaagacgc

SEQ ID NO: 1501864 - DNA, 15 bp, Homo sapiens
tgtgtttaagacgcc

SEQ ID NO: 1501865 - DNA, 15 bp, Homo sapiens
gtgtttaagacgcca

SEQ ID NO: 1501866 - DNA, 15 bp, Homo sapiens
tgtttaagacgccaa

SEQ ID NO: 1501867 - DNA, 15 bp, Homo sapiens
gtttaagacgccaag

SEQ ID NO: 1501868 - DNA, 15 bp, Homo sapiens
tttaagacgccaagg

SEQ ID NO: 1501869 - DNA, 15 bp, Homo sapiens
ttaagacgccaaggg

SEQ ID NO: 1501870 - DNA, 15 bp, Homo sapiens
taagacgccaagggc

SEQ ID NO: 1501871 - DNA, 15 bp, Homo sapiens
aagacgccaagggca

SEQ ID NO: 1501872 - DNA, 15 bp, Homo sapiens
agacgccaagggcat

SEQ ID NO: 1501873 - DNA, 15 bp, Homo sapiens
gacgccaagggcatt

SEQ ID NO: 1501874 - DNA, 15 bp, Homo sapiens
acgccaagggcattg

SEQ ID NO: 1501875 - DNA, 15 bp, Homo sapiens
cgccaagggcattgc

SEQ ID NO: 1501876 - DNA, 15 bp, Homo sapiens
gccaagggcattgca

SEQ ID NO: 1501877 - DNA, 15 bp, Homo sapiens
ccaagggcattgcag

SEQ ID NO: 1501878 - DNA, 15 bp, Homo sapiens
caagggcattgcaga

SEQ ID NO: 1501879 - DNA, 15 bp, Homo sapiens
aagggcattgcagaa

SEQ ID NO: 1501880 - DNA, 15 bp, Homo sapiens
agggcattgcagaat

SEQ ID NO: 1501881 - DNA, 15 bp, Homo sapiens
gggcattgcagaatc

SEQ ID NO: 1501882 - DNA, 15 bp, Homo sapiens
ggcattgcagaatcc

SEQ ID NO: 1501883 - DNA, 15 bp, Homo sapiens
gcattgcagaatccc

SEQ ID NO: 1501884 - DNA, 15 bp, Homo sapiens
cattgcagaatccct

SEQ ID NO: 1501885 - DNA, 15 bp, Homo sapiens
attgcagaatccctc

SEQ ID NO: 1501886 - DNA, 15 bp, Homo sapiens
ttgcagaatccctct

SEQ ID NO: 1501887 - DNA, 15 bp, Homo sapiens
tgcagaatccctctc

SEQ ID NO: 1501888 - DNA, 15 bp, Homo sapiens
gcagaatccctctca

SEQ ID NO: 1501889 - DNA, 15 bp, Homo sapiens
cagaatccctctcag

SEQ ID NO: 1501890 - DNA, 15 bp, Homo sapiens
agaatccctctcagt

SEQ ID NO: 1501891 - DNA, 15 bp, Homo sapiens
gaatccctctcagtg

SEQ ID NO: 1501892 - DNA, 15 bp, Homo sapiens
aatccctctcagtgg

SEQ ID NO: 1501893 - DNA, 15 bp, Homo sapiens
atccctctcagtgga

SEQ ID NO: 1501894 - DNA, 15 bp, Homo sapiens
tccctctcagtggac

SEQ ID NO: 1501895 - DNA, 15 bp, Homo sapiens
ccctctcagtggaca

SEQ ID NO: 1501896 - DNA, 15 bp, Homo sapiens
cctctcagtggacag

SEQ ID NO: 1501897 - DNA, 15 bp, Homo sapiens
ctctcagtggacagt

SEQ ID NO: 1501898 - DNA, 15 bp, Homo sapiens
tctcagtggacagta

SEQ ID NO: 1501899 - DNA, 15 bp, Homo sapiens
ctcagtggacagtat

SEQ ID NO: 1501900 - DNA, 15 bp, Homo sapiens
tcagtggacagtatg

SEQ ID NO: 1501901 - DNA, 15 bp, Homo sapiens
cagtggacagtatgc

SEQ ID NO: 1501902 - DNA, 15 bp, Homo sapiens
agtggacagtatgca

SEQ ID NO: 1501903 - DNA, 15 bp, Homo sapiens
gtggacagtatgcac

SEQ ID NO: 1501904 - DNA, 15 bp, Homo sapiens
tggacagtatgcact

SEQ ID NO: 1501905 - DNA, 15 bp, Homo sapiens
ggacagtatgcactc

SEQ ID NO: 1501906 - DNA, 15 bp, Homo sapiens
gacagtatgcactca

SEQ ID NO: 1501907 - DNA, 15 bp, Homo sapiens
acagtatgcactcag

SEQ ID NO: 1501908 - DNA, 15 bp, Homo sapiens
cagtatgcactcagc

SEQ ID NO: 1501909 - DNA, 15 bp, Homo sapiens
agtatgcactcagct

SEQ ID NO: 1501910 - DNA, 15 bp, Homo sapiens
gtatgcactcagctg

SEQ ID NO: 1501911 - DNA, 15 bp, Homo sapiens
tatgcactcagctga

SEQ ID NO: 1501912 - DNA, 15 bp, Homo sapiens
atgcactcagctgac

SEQ ID NO: 1501913 - DNA, 15 bp, Homo sapiens
tgcactcagctgacc

SEQ ID NO: 1501914 - DNA, 15 bp, Homo sapiens
gcactcagctgacca

SEQ ID NO: 1501915 - DNA, 15 bp, Homo sapiens
cactcagctgaccac

SEQ ID NO: 1501916 - DNA, 15 bp, Homo sapiens
actcagctgaccact

SEQ ID NO: 1501917 - DNA, 15 bp, Homo sapiens
ctcagctgaccactc

SEQ ID NO: 1501918 - DNA, 15 bp, Homo sapiens
tcagctgaccactct

SEQ ID NO: 1501919 - DNA, 15 bp, Homo sapiens
cagctgaccactctc

SEQ ID NO: 1501920 - DNA, 15 bp, Homo sapiens
agctgaccactctct

SEQ ID NO: 1501921 - DNA, 15 bp, Homo sapiens
gctgaccactctctc

SEQ ID NO: 1501922 - DNA, 15 bp, Homo sapiens
ctgaccactctctct

SEQ ID NO: 1501923 - DNA, 15 bp, Homo sapiens
tgaccactctctcta

SEQ ID NO: 1501924 - DNA, 15 bp, Homo sapiens
gaccactctctctag

SEQ ID NO: 1501925 - DNA, 15 bp, Homo sapiens
accactctctctaga

SEQ ID NO: 1501926 - DNA, 15 bp, Homo sapiens
ccactctctctagaa

SEQ ID NO: 1501927 - DNA, 15 bp, Homo sapiens
cactctctctagaaa

SEQ ID NO: 1501928 - DNA, 15 bp, Homo sapiens
actctctctagaaat

SEQ ID NO: 1501929 - DNA, 15 bp, Homo sapiens
ctctctctagaaata

SEQ ID NO: 1501930 - DNA, 15 bp, Homo sapiens
tctctctagaaatag

SEQ ID NO: 1501931 - DNA, 15 bp, Homo sapiens
ctctctagaaatagt

SEQ ID NO: 1501932 - DNA, 15 bp, Homo sapiens
tctctagaaatagtc

SEQ ID NO: 1501933 - DNA, 15 bp, Homo sapiens
ctctagaaatagtca

SEQ ID NO: 1501934 - DNA, 15 bp, Homo sapiens
tctagaaatagtcaa

SEQ ID NO: 1501935 - DNA, 15 bp, Homo sapiens
ctagaaatagtcaag

SEQ ID NO: 1501936 - DNA, 15 bp, Homo sapiens
tagaaatagtcaaga

SEQ ID NO: 1501937 - DNA, 15 bp, Homo sapiens
agaaatagtcaagat

SEQ ID NO: 1501938 - DNA, 15 bp, Homo sapiens
gaaatagtcaagata

SEQ ID NO: 1501939 - DNA, 15 bp, Homo sapiens
aaatagtcaagatat

SEQ ID NO: 1501940 - DNA, 15 bp, Homo sapiens
aatagtcaagatatg

SEQ ID NO: 1501941 - DNA, 15 bp, Homo sapiens
atagtcaagatatga

SEQ ID NO: 1501942 - DNA, 15 bp, Homo sapiens
tagtcaagatatgaa

SEQ ID NO: 1501943 - DNA, 15 bp, Homo sapiens
agtcaagatatgaac

SEQ ID NO: 1501944 - DNA, 15 bp, Homo sapiens
gtcaagatatgaact

SEQ ID NO: 1501945 - DNA, 15 bp, Homo sapiens
tcaagatatgaacta

SEQ ID NO: 1501946 - DNA, 15 bp, Homo sapiens
caagatatgaactaa

SEQ ID NO: 1501947 - DNA, 15 bp, Homo sapiens
aagatatgaactaag

SEQ ID NO: 1501948 - DNA, 15 bp, Homo sapiens
agatatgaactaaga

SEQ ID NO: 1501949 - DNA, 15 bp, Homo sapiens
gatatgaactaagaa

SEQ ID NO: 1501950 - DNA, 15 bp, Homo sapiens
atatgaactaagaaa

SEQ ID NO: 1501951 - DNA, 15 bp, Homo sapiens
tatgaactaagaaat

SEQ ID NO: 1501952 - DNA, 15 bp, Homo sapiens
atgaactaagaaatt

SEQ ID NO: 1501953 - DNA, 15 bp, Homo sapiens
tgaactaagaaattt

SEQ ID NO: 1501954 - DNA, 15 bp, Homo sapiens
gaactaagaaatttt

SEQ ID NO: 1501955 - DNA, 15 bp, Homo sapiens
aactaagaaatttta

SEQ ID NO: 1501956 - DNA, 15 bp, Homo sapiens
actaagaaattttaa

SEQ ID NO: 1501957 - DNA, 15 bp, Homo sapiens
ctaagaaattttaat

SEQ ID NO: 1501958 - DNA, 15 bp, Homo sapiens
taagaaattttaatg

SEQ ID NO: 1501959 - DNA, 15 bp, Homo sapiens
aagaaattttaatgc

SEQ ID NO: 1501960 - DNA, 15 bp, Homo sapiens
agaaattttaatgca

SEQ ID NO: 1501961 - DNA, 15 bp, Homo sapiens
gaaattttaatgcaa

SEQ ID NO: 1501962 - DNA, 15 bp, Homo sapiens
aaattttaatgcaaa

SEQ ID NO: 1501963 - DNA, 15 bp, Homo sapiens
aattttaatgcaaat

SEQ ID NO: 1501964 - DNA, 15 bp, Homo sapiens
attttaatgcaaata

SEQ ID NO: 1501965 - DNA, 15 bp, Homo sapiens
ttttaatgcaaatac

SEQ ID NO: 1501966 - DNA, 15 bp, Homo sapiens
tttaatgcaaataca

SEQ ID NO: 1501967 - DNA, 15 bp, Homo sapiens
ttaatgcaaatacat

SEQ ID NO: 1501968 - DNA, 15 bp, Homo sapiens
taatgcaaatacata

SEQ ID NO: 1501969 - DNA, 15 bp, Homo sapiens
aatgcaaatacatac

SEQ ID NO: 1501970 - DNA, 15 bp, Homo sapiens
atgcaaatacataca

SEQ ID NO: 1501971 - DNA, 15 bp, Homo sapiens
tgcaaatacatacat

SEQ ID NO: 1501972 - DNA, 15 bp, Homo sapiens
gcaaatacatacatt

SEQ ID NO: 1501973 - DNA, 15 bp, Homo sapiens
caaatacatacattc

SEQ ID NO: 1501974 - DNA, 15 bp, Homo sapiens
aaatacatacattcc

SEQ ID NO: 1501975 - DNA, 15 bp, Homo sapiens
aatacatacattcct

SEQ ID NO: 1501976 - DNA, 15 bp, Homo sapiens
atacatacattcctg

SEQ ID NO: 1501977 - DNA, 15 bp, Homo sapiens
tacatacattcctga

SEQ ID NO: 1501978 - DNA, 15 bp, Homo sapiens
acatacattcctgaa

SEQ ID NO: 1501979 - DNA, 15 bp, Homo sapiens
catacattcctgaaa

SEQ ID NO: 1501980 - DNA, 15 bp, Homo sapiens
atacattcctgaaag

SEQ ID NO: 1501981 - DNA, 15 bp, Homo sapiens
tacattcctgaaaga

SEQ ID NO: 1501982 - DNA, 15 bp, Homo sapiens
acattcctgaaagac

SEQ ID NO: 1501983 - DNA, 15 bp, Homo sapiens
cattcctgaaagacg

SEQ ID NO: 1501984 - DNA, 15 bp, Homo sapiens
attcctgaaagacgg

SEQ ID NO: 1501985 - DNA, 15 bp, Homo sapiens
ttcctgaaagacggg

SEQ ID NO: 1501986 - DNA, 15 bp, Homo sapiens
tcctgaaagacgggg

SEQ ID NO: 1501987 - DNA, 15 bp, Homo sapiens
cctgaaagacgggga

SEQ ID NO: 1501988 - DNA, 15 bp, Homo sapiens
ctgaaagacggggaa

SEQ ID NO: 1501989 - DNA, 15 bp, Homo sapiens
tgaaagacggggaat

SEQ ID NO: 1501990 - DNA, 15 bp, Homo sapiens
gaaagacggggaatt

SEQ ID NO: 1501991 - DNA, 15 bp, Homo sapiens
aaagacggggaatta

SEQ ID NO: 1501992 - DNA, 15 bp, Homo sapiens
aagacggggaattaa

SEQ ID NO: 1501993 - DNA, 15 bp, Homo sapiens
agacggggaattaaa

SEQ ID NO: 1501994 - DNA, 15 bp, Homo sapiens
gacggggaattaaat

SEQ ID NO: 1501995 - DNA, 15 bp, Homo sapiens
acggggaattaaatt

SEQ ID NO: 1501996 - DNA, 15 bp, Homo sapiens
cggggaattaaatta

SEQ ID NO: 1501997 - DNA, 15 bp, Homo sapiens
ggggaattaaattac

SEQ ID NO: 1501998 - DNA, 15 bp, Homo sapiens
gggaattaaattact

SEQ ID NO: 1501999 - DNA, 15 bp, Homo sapiens
ggaattaaattacta

SEQ ID NO: 1502000 - DNA, 15 bp, Homo sapiens
gaattaaattactaa

SEQ ID NO: 1502001 - DNA, 15 bp, Homo sapiens
aattaaattactaat

SEQ ID NO: 1502002 - DNA, 15 bp, Homo sapiens
attaaattactaatt

SEQ ID NO: 1502003 - DNA, 15 bp, Homo sapiens
ttaaattactaattt

SEQ ID NO: 1502004 - DNA, 15 bp, Homo sapiens
taaattactaatttt

SEQ ID NO: 1502005 - DNA, 15 bp, Homo sapiens
aaattactaattttt

SEQ ID NO: 1502006 - DNA, 15 bp, Homo sapiens
aattactaatttttt

SEQ ID NO: 1502007 - DNA, 15 bp, Homo sapiens
attactaattttttt

SEQ ID NO: 1502008 - DNA, 15 bp, Homo sapiens
ttactaatttttttt

SEQ ID NO: 1502009 - DNA, 15 bp, Homo sapiens
tactaattttttttt

SEQ ID NO: 1502010 - DNA, 15 bp, Homo sapiens
actaatttttttttt

SEQ ID NO: 1502011 - DNA, 15 bp, Homo sapiens
ttttttttaaatgat

SEQ ID NO: 1502012 - DNA, 15 bp, Homo sapiens
tttttttaaatgatg

SEQ ID NO: 1502013 - DNA, 15 bp, Homo sapiens
ttttttaaatgatga

SEQ ID NO: 1502014 - DNA, 15 bp, Homo sapiens
tttttaaatgatgac

SEQ ID NO: 1502015 - DNA, 15 bp, Homo sapiens
ttttaaatgatgaca

SEQ ID NO: 1502016 - DNA, 15 bp, Homo sapiens
tttaaatgatgacag

SEQ ID NO: 1502017 - DNA, 15 bp, Homo sapiens
ttaaatgatgacagt

SEQ ID NO: 1502018 - DNA, 15 bp, Homo sapiens
taaatgatgacagtg

SEQ ID NO: 1502019 - DNA, 15 bp, Homo sapiens
aaatgatgacagtgg

SEQ ID NO: 1502020 - DNA, 15 bp, Homo sapiens
aatgatgacagtggt

SEQ ID NO: 1502021 - DNA, 15 bp, Homo sapiens
atgatgacagtggtc

SEQ ID NO: 1502022 - DNA, 15 bp, Homo sapiens
tgatgacagtggtcc

SEQ ID NO: 1502023 - DNA, 15 bp, Homo sapiens
gatgacagtggtccc

SEQ ID NO: 1502024 - DNA, 15 bp, Homo sapiens
atgacagtggtccca

SEQ ID NO: 1502025 - DNA, 15 bp, Homo sapiens
tgacagtggtcccag

SEQ ID NO: 1502026 - DNA, 15 bp, Homo sapiens
gacagtggtcccaga

SEQ ID NO: 1502027 - DNA, 15 bp, Homo sapiens
acagtggtcccagaa

SEQ ID NO: 1502028 - DNA, 15 bp, Homo sapiens
cagtggtcccagaac

SEQ ID NO: 1502029 - DNA, 15 bp, Homo sapiens
agtggtcccagaact

SEQ ID NO: 1502030 - DNA, 15 bp, Homo sapiens
gtggtcccagaactt

SEQ ID NO: 1502031 - DNA, 15 bp, Homo sapiens
tggtcccagaacttg

SEQ ID NO: 1502032 - DNA, 15 bp, Homo sapiens
ggtcccagaacttgg

SEQ ID NO: 1502033 - DNA, 15 bp, Homo sapiens
gtcccagaacttgga

SEQ ID NO: 1502034 - DNA, 15 bp, Homo sapiens
tcccagaacttggaa

SEQ ID NO: 1502035 - DNA, 15 bp, Homo sapiens
cccagaacttggaaa

SEQ ID NO: 1502036 - DNA, 15 bp, Homo sapiens
ccagaacttggaaaa

SEQ ID NO: 1502037 - DNA, 15 bp, Homo sapiens
cagaacttggaaaag

SEQ ID NO: 1502038 - DNA, 15 bp, Homo sapiens
agaacttggaaaagt

SEQ ID NO: 1502039 - DNA, 15 bp, Homo sapiens
gaacttggaaaagtt

SEQ ID NO: 1502040 - DNA, 15 bp, Homo sapiens
aacttggaaaagttg

SEQ ID NO: 1502041 - DNA, 15 bp, Homo sapiens
acttggaaaagttgt

SEQ ID NO: 1502042 - DNA, 15 bp, Homo sapiens
cttggaaaagttgta

SEQ ID NO: 1502043 - DNA, 15 bp, Homo sapiens
ttggaaaagttgtag

SEQ ID NO: 1502044 - DNA, 15 bp, Homo sapiens
tggaaaagttgtagg

SEQ ID NO: 1502045 - DNA, 15 bp, Homo sapiens
ggaaaagttgtaggg

SEQ ID NO: 1502046 - DNA, 15 bp, Homo sapiens
gaaaagttgtaggga

SEQ ID NO: 1502047 - DNA, 15 bp, Homo sapiens
aaaagttgtagggat

SEQ ID NO: 1502048 - DNA, 15 bp, Homo sapiens
aaagttgtagggatt

SEQ ID NO: 1502049 - DNA, 15 bp, Homo sapiens
aagttgtagggattt

SEQ ID NO: 1502050 - DNA, 15 bp, Homo sapiens
agttgtagggatttc

SEQ ID NO: 1502051 - DNA, 15 bp, Homo sapiens
gttgtagggatttct

SEQ ID NO: 1502052 - DNA, 15 bp, Homo sapiens
ttgtagggatttcta

SEQ ID NO: 1502053 - DNA, 15 bp, Homo sapiens
tgtagggatttctaa

SEQ ID NO: 1502054 - DNA, 15 bp, Homo sapiens
gtagggatttctaaa

SEQ ID NO: 1502055 - DNA, 15 bp, Homo sapiens
tagggatttctaaac

SEQ ID NO: 1502056 - DNA, 15 bp, Homo sapiens
agggatttctaaact

SEQ ID NO: 1502057 - DNA, 15 bp, Homo sapiens
gggatttctaaactc

SEQ ID NO: 1502058 - DNA, 15 bp, Homo sapiens
ggatttctaaactca

SEQ ID NO: 1502059 - DNA, 15 bp, Homo sapiens
gatttctaaactcaa

SEQ ID NO: 1502060 - DNA, 15 bp, Homo sapiens
atttctaaactcaag

SEQ ID NO: 1502061 - DNA, 15 bp, Homo sapiens
tttctaaactcaagc

SEQ ID NO: 1502062 - DNA, 15 bp, Homo sapiens
ttctaaactcaagca

SEQ ID NO: 1502063 - DNA, 15 bp, Homo sapiens
tctaaactcaagcag

SEQ ID NO: 1502064 - DNA, 15 bp, Homo sapiens
ctaaactcaagcaga

SEQ ID NO: 1502065 - DNA, 15 bp, Homo sapiens
taaactcaagcagat

SEQ ID NO: 1502066 - DNA, 15 bp, Homo sapiens
aaactcaagcagatt

SEQ ID NO: 1502067 - DNA, 15 bp, Homo sapiens
aactcaagcagattc

SEQ ID NO: 1502068 - DNA, 15 bp, Homo sapiens
actcaagcagattcg

SEQ ID NO: 1502069 - DNA, 15 bp, Homo sapiens
ctcaagcagattcgc

SEQ ID NO: 1502070 - DNA, 15 bp, Homo sapiens
tcaagcagattcgca

SEQ ID NO: 1502071 - DNA, 15 bp, Homo sapiens
caagcagattcgcaa

SEQ ID NO: 1502072 - DNA, 15 bp, Homo sapiens
aagcagattcgcaag

SEQ ID NO: 1502073 - DNA, 15 bp, Homo sapiens
agcagattcgcaagt

SEQ ID NO: 1502074 - DNA, 15 bp, Homo sapiens
gcagattcgcaagtg

SEQ ID NO: 1502075 - DNA, 15 bp, Homo sapiens
cagattcgcaagtgc

SEQ ID NO: 1502076 - DNA, 15 bp, Homo sapiens
agattcgcaagtgct

SEQ ID NO: 1502077 - DNA, 15 bp, Homo sapiens
gattcgcaagtgctg

SEQ ID NO: 1502078 - DNA, 15 bp, Homo sapiens
attcgcaagtgctgt

SEQ ID NO: 1502079 - DNA, 15 bp, Homo sapiens
ttcgcaagtgctgtg

SEQ ID NO: 1502080 - DNA, 15 bp, Homo sapiens
tcgcaagtgctgtgc

SEQ ID NO: 1502081 - DNA, 15 bp, Homo sapiens
cgcaagtgctgtgcg

SEQ ID NO: 1502082 - DNA, 15 bp, Homo sapiens
gcaagtgctgtgcgc

SEQ ID NO: 1502083 - DNA, 15 bp, Homo sapiens
caagtgctgtgcgct

SEQ ID NO: 1502084 - DNA, 15 bp, Homo sapiens
aagtgctgtgcgctt

SEQ ID NO: 1502085 - DNA, 15 bp, Homo sapiens
agtgctgtgcgcttg

SEQ ID NO: 1502086 - DNA, 15 bp, Homo sapiens
gtgctgtgcgcttgt

SEQ ID NO: 1502087 - DNA, 15 bp, Homo sapiens
tgctgtgcgcttgtc

SEQ ID NO: 1502088 - DNA, 15 bp, Homo sapiens
gctgtgcgcttgtca

SEQ ID NO: 1502089 - DNA, 15 bp, Homo sapiens
ctgtgcgcttgtcag

SEQ ID NO: 1502090 - DNA, 15 bp, Homo sapiens
tgtgcgcttgtcaga

SEQ ID NO: 1502091 - DNA, 15 bp, Homo sapiens
gtgcgcttgtcagac

SEQ ID NO: 1502092 - DNA, 15 bp, Homo sapiens
tgcgcttgtcagacc

SEQ ID NO: 1502093 - DNA, 15 bp, Homo sapiens
gcgcttgtcagacca

SEQ ID NO: 1502094 - DNA, 15 bp, Homo sapiens
cgcttgtcagaccat

SEQ ID NO: 1502095 - DNA, 15 bp, Homo sapiens
gcttgtcagaccatc

SEQ ID NO: 1502096 - DNA, 15 bp, Homo sapiens
cttgtcagaccatca

SEQ ID NO: 1502097 - DNA, 15 bp, Homo sapiens
ttgtcagaccatcag

SEQ ID NO: 1502098 - DNA, 15 bp, Homo sapiens
tgtcagaccatcaga

SEQ ID NO: 1502099 - DNA, 15 bp, Homo sapiens
gtcagaccatcagac

SEQ ID NO: 1502100 - DNA, 15 bp, Homo sapiens
tcagaccatcagacc

SEQ ID NO: 1502101 - DNA, 15 bp, Homo sapiens
cagaccatcagacca

SEQ ID NO: 1502102 - DNA, 15 bp, Homo sapiens
agaccatcagaccag

SEQ ID NO: 1502103 - DNA, 15 bp, Homo sapiens
gaccatcagaccagg

SEQ ID NO: 1502104 - DNA, 15 bp, Homo sapiens
accatcagaccaggg

SEQ ID NO: 1502105 - DNA, 15 bp, Homo sapiens
ccatcagaccagggc

SEQ ID NO: 1502106 - DNA, 15 bp, Homo sapiens
catcagaccagggcc

SEQ ID NO: 1502107 - DNA, 15 bp, Homo sapiens
atcagaccagggcca

SEQ ID NO: 1502108 - DNA, 15 bp, Homo sapiens
tcagaccagggccaa

SEQ ID NO: 1502109 - DNA, 15 bp, Homo sapiens
cagaccagggccaac

SEQ ID NO: 1502110 - DNA, 15 bp, Homo sapiens
agaccagggccaacc

SEQ ID NO: 1502111 - DNA, 15 bp, Homo sapiens
gaccagggccaacca

SEQ ID NO: 1502112 - DNA, 15 bp, Homo sapiens
accagggccaaccaa

SEQ ID NO: 1502113 - DNA, 15 bp, Homo sapiens
ccagggccaaccaat

SEQ ID NO: 1502114 - DNA, 15 bp, Homo sapiens
cagggccaaccaatc

SEQ ID NO: 1502115 - DNA, 15 bp, Homo sapiens
agggccaaccaatca

SEQ ID NO: 1502116 - DNA, 15 bp, Homo sapiens
gggccaaccaatcag

SEQ ID NO: 1502117 - DNA, 15 bp, Homo sapiens
ggccaaccaatcaga

SEQ ID NO: 1502118 - DNA, 15 bp, Homo sapiens
gccaaccaatcagaa

SEQ ID NO: 1502119 - DNA, 15 bp, Homo sapiens
ccaaccaatcagaag

SEQ ID NO: 1502120 - DNA, 15 bp, Homo sapiens
caaccaatcagaagg

SEQ ID NO: 1502121 - DNA, 15 bp, Homo sapiens
aaccaatcagaaggc

SEQ ID NO: 1502122 - DNA, 15 bp, Homo sapiens
accaatcagaaggca

SEQ ID NO: 1502123 - DNA, 15 bp, Homo sapiens
ccaatcagaaggcaa

SEQ ID NO: 1502124 - DNA, 15 bp, Homo sapiens
caatcagaaggcaac

SEQ ID NO: 1502125 - DNA, 15 bp, Homo sapiens
aatcagaaggcaact

SEQ ID NO: 1502126 - DNA, 15 bp, Homo sapiens
atcagaaggcaactt

SEQ ID NO: 1502127 - DNA, 15 bp, Homo sapiens
tcagaaggcaactta

SEQ ID NO: 1502128 - DNA, 15 bp, Homo sapiens
cagaaggcaacttac

SEQ ID NO: 1502129 - DNA, 15 bp, Homo sapiens
agaaggcaacttact

SEQ ID NO: 1502130 - DNA, 15 bp, Homo sapiens
gaaggcaacttactg

SEQ ID NO: 1502131 - DNA, 15 bp, Homo sapiens
aaggcaacttactgt

SEQ ID NO: 1502132 - DNA, 15 bp, Homo sapiens
aggcaacttactgta

SEQ ID NO: 1502133 - DNA, 15 bp, Homo sapiens
ggcaacttactgtat

SEQ ID NO: 1502134 - DNA, 15 bp, Homo sapiens
gcaacttactgtata

SEQ ID NO: 1502135 - DNA, 15 bp, Homo sapiens
caacttactgtataa

SEQ ID NO: 1502136 - DNA, 15 bp, Homo sapiens
aacttactgtataaa

SEQ ID NO: 1502137 - DNA, 15 bp, Homo sapiens
acttactgtataaat

SEQ ID NO: 1502138 - DNA, 15 bp, Homo sapiens
cttactgtataaatt

SEQ ID NO: 1502139 - DNA, 15 bp, Homo sapiens
ttactgtataaatta

SEQ ID NO: 1502140 - DNA, 15 bp, Homo sapiens
tactgtataaattat

SEQ ID NO: 1502141 - DNA, 15 bp, Homo sapiens
actgtataaattatg

SEQ ID NO: 1502142 - DNA, 15 bp, Homo sapiens
ctgtataaattatgc

SEQ ID NO: 1502143 - DNA, 15 bp, Homo sapiens
tgtataaattatgca

SEQ ID NO: 1502144 - DNA, 15 bp, Homo sapiens
gtataaattatgcag

SEQ ID NO: 1502145 - DNA, 15 bp, Homo sapiens
tataaattatgcaga

SEQ ID NO: 1502146 - DNA, 15 bp, Homo sapiens
ataaattatgcagag

SEQ ID NO: 1502147 - DNA, 15 bp, Homo sapiens
taaattatgcagagt

SEQ ID NO: 1502148 - DNA, 15 bp, Homo sapiens
aaattatgcagagtt

SEQ ID NO: 1502149 - DNA, 15 bp, Homo sapiens
aattatgcagagtta

SEQ ID NO: 1502150 - DNA, 15 bp, Homo sapiens
attatgcagagttat

SEQ ID NO: 1502151 - DNA, 15 bp, Homo sapiens
ttatgcagagttatt

SEQ ID NO: 1502152 - DNA, 15 bp, Homo sapiens
tatgcagagttattt

SEQ ID NO: 1502153 - DNA, 15 bp, Homo sapiens
atgcagagttatttt

SEQ ID NO: 1502154 - DNA, 15 bp, Homo sapiens
tgcagagttattttc

SEQ ID NO: 1502155 - DNA, 15 bp, Homo sapiens
gcagagttattttcc

SEQ ID NO: 1502156 - DNA, 15 bp, Homo sapiens
cagagttattttcct

SEQ ID NO: 1502157 - DNA, 15 bp, Homo sapiens
agagttattttccta

SEQ ID NO: 1502158 - DNA, 15 bp, Homo sapiens
gagttattttcctat

SEQ ID NO: 1502159 - DNA, 15 bp, Homo sapiens
agttattttcctata

SEQ ID NO: 1502160 - DNA, 15 bp, Homo sapiens
gttattttcctatat

SEQ ID NO: 1502161 - DNA, 15 bp, Homo sapiens
ttattttcctatatc

SEQ ID NO: 1502162 - DNA, 15 bp, Homo sapiens
tattttcctatatct

SEQ ID NO: 1502163 - DNA, 15 bp, Homo sapiens
attttcctatatctc

SEQ ID NO: 1502164 - DNA, 15 bp, Homo sapiens
ttttcctatatctca

SEQ ID NO: 1502165 - DNA, 15 bp, Homo sapiens
tttcctatatctcac

SEQ ID NO: 1502166 - DNA, 15 bp, Homo sapiens
ttcctatatctcaca

SEQ ID NO: 1502167 - DNA, 15 bp, Homo sapiens
tcctatatctcacag

SEQ ID NO: 1502168 - DNA, 15 bp, Homo sapiens
cctatatctcacagt

SEQ ID NO: 1502169 - DNA, 15 bp, Homo sapiens
ctatatctcacagta

SEQ ID NO: 1502170 - DNA, 15 bp, Homo sapiens
tatatctcacagtat

SEQ ID NO: 1502171 - DNA, 15 bp, Homo sapiens
atatctcacagtatt

SEQ ID NO: 1502172 - DNA, 15 bp, Homo sapiens
tatctcacagtatta

SEQ ID NO: 1502173 - DNA, 15 bp, Homo sapiens
atctcacagtattaa

SEQ ID NO: 1502174 - DNA, 15 bp, Homo sapiens
tctcacagtattaaa

SEQ ID NO: 1502175 - DNA, 15 bp, Homo sapiens
ctcacagtattaaaa

SEQ ID NO: 1502176 - DNA, 15 bp, Homo sapiens
tcacagtattaaaaa

SEQ ID NO: 1502177 - DNA, 15 bp, Homo sapiens
cacagtattaaaaat

SEQ ID NO: 1502178 - DNA, 15 bp, Homo sapiens
acagtattaaaaata

SEQ ID NO: 1502179 - DNA, 15 bp, Homo sapiens
cagtattaaaaataa

SEQ ID NO: 1502180 - DNA, 15 bp, Homo sapiens
agtattaaaaataaa

SEQ ID NO: 1502181 - DNA, 15 bp, Homo sapiens
gtattaaaaataaat

SEQ ID NO: 1502182 - DNA, 15 bp, Homo sapiens
tattaaaaataaata

SEQ ID NO: 1502183 - DNA, 15 bp, Homo sapiens
attaaaaataaataa

SEQ ID NO: 1502184 - DNA, 15 bp, Homo sapiens
ttaaaaataaataat

SEQ ID NO: 1502185 - DNA, 15 bp, Homo sapiens
taaaaataaataatt

SEQ ID NO: 1502186 - DNA, 15 bp, Homo sapiens
aaaaataaataatta

SEQ ID NO: 1502187 - DNA, 15 bp, Homo sapiens
aaaataaataattaa

SEQ ID NO: 1502188 - DNA, 15 bp, Homo sapiens
aaataaataattaaa

SEQ ID NO: 1502189 - DNA, 15 bp, Homo sapiens
aataaataattaaaa

SEQ ID NO: 1502190 - DNA, 15 bp, Homo sapiens
ataaataattaaaaa

SEQ ID NO: 1502191 - DNA, 15 bp, Homo sapiens
taaataattaaaaat

SEQ ID NO: 1502192 - DNA, 15 bp, Homo sapiens
aaataattaaaaatt

SEQ ID NO: 1502193 - DNA, 15 bp, Homo sapiens
aataattaaaaatta

SEQ ID NO: 1502194 - DNA, 15 bp, Homo sapiens
ataattaaaaattaa

SEQ ID NO: 1502195 - DNA, 15 bp, Homo sapiens
taattaaaaattaag

SEQ ID NO: 1502196 - DNA, 15 bp, Homo sapiens
aattaaaaattaaga

SEQ ID NO: 1502197 - DNA, 15 bp, Homo sapiens
attaaaaattaagaa

SEQ ID NO: 1502198 - DNA, 15 bp, Homo sapiens
ttaaaaattaagaat

SEQ ID NO: 1502199 - DNA, 15 bp, Homo sapiens
taaaaattaagaata

SEQ ID NO: 1502200 - DNA, 15 bp, Homo sapiens
aaaaattaagaataa

SEQ ID NO: 1502201 - DNA, 15 bp, Homo sapiens
aaaattaagaataaa

SEQ ID NO: 1502202 - DNA, 15 bp, Homo sapiens
aaattaagaataaat

SEQ ID NO: 1502203 - DNA, 15 bp, Homo sapiens
aattaagaataaata

SEQ ID NO: 1502204 - DNA, 15 bp, Homo sapiens
attaagaataaataa

SEQ ID NO: 1502205 - DNA, 15 bp, Homo sapiens
ttaagaataaataaa

SEQ ID NO: 1502206 - DNA, 15 bp, Homo sapiens
taagaataaataaac

SEQ ID NO: 1502207 - DNA, 15 bp, Homo sapiens
aagaataaataaacg

SEQ ID NO: 1502208 - DNA, 15 bp, Homo sapiens
agaataaataaacga

SEQ ID NO: 1502209 - DNA, 15 bp, Homo sapiens
gaataaataaacgag

SEQ ID NO: 1502210 - DNA, 15 bp, Homo sapiens
aataaataaacgagt

SEQ ID NO: 1502211 - DNA, 15 bp, Homo sapiens
ataaataaacgagtt

SEQ ID NO: 1502212 - DNA, 15 bp, Homo sapiens
taaataaacgagttg

SEQ ID NO: 1502213 - DNA, 15 bp, Homo sapiens
aaataaacgagttga

SEQ ID NO: 1502214 - DNA, 15 bp, Homo sapiens
aataaacgagttgac

SEQ ID NO: 1502215 - DNA, 15 bp, Homo sapiens
ataaacgagttgacc

SEQ ID NO: 1502216 - DNA, 15 bp, Homo sapiens
taaacgagttgacct

SEQ ID NO: 1502217 - DNA, 15 bp, Homo sapiens
aaacgagttgacctc

SEQ ID NO: 1502218 - DNA, 15 bp, Homo sapiens
aacgagttgacctcg

SEQ ID NO: 1502219 - DNA, 15 bp, Homo sapiens
acgagttgacctcgg

SEQ ID NO: 1502220 - DNA, 15 bp, Homo sapiens
cgagttgacctcggt

SEQ ID NO: 1502221 - DNA, 15 bp, Homo sapiens
gagttgacctcggtc

SEQ ID NO: 1502222 - DNA, 15 bp, Homo sapiens
agttgacctcggtca

SEQ ID NO: 1502223 - DNA, 15 bp, Homo sapiens
gttgacctcggtcac

SEQ ID NO: 1502224 - DNA, 15 bp, Homo sapiens
ttgacctcggtcaca

SEQ ID NO: 1502225 - DNA, 15 bp, Homo sapiens
tgacctcggtcacaa

SEQ ID NO: 1502226 - DNA, 15 bp, Homo sapiens
gacctcggtcacaaa

SEQ ID NO: 1502227 - DNA, 15 bp, Homo sapiens
acctcggtcacaaaa

SEQ ID NO: 1502228 - DNA, 15 bp, Homo sapiens
cctcggtcacaaaag

SEQ ID NO: 1502229 - DNA, 15 bp, Homo sapiens
ctcggtcacaaaagc

SEQ ID NO: 1502230 - DNA, 15 bp, Homo sapiens
tcggtcacaaaagca

SEQ ID NO: 1502231 - DNA, 15 bp, Homo sapiens
cggtcacaaaagcag

SEQ ID NO: 1502232 - DNA, 15 bp, Homo sapiens
ggtcacaaaagcagt

SEQ ID NO: 1502233 - DNA, 15 bp, Homo sapiens
gtcacaaaagcagtt

SEQ ID NO: 1502234 - DNA, 15 bp, Homo sapiens
tcacaaaagcagttt

SEQ ID NO: 1502235 - DNA, 15 bp, Homo sapiens
cacaaaagcagtttt

SEQ ID NO: 1502236 - DNA, 15 bp, Homo sapiens
acaaaagcagtttta

SEQ ID NO: 1502237 - DNA, 15 bp, Homo sapiens
caaaagcagttttac

SEQ ID NO: 1502238 - DNA, 15 bp, Homo sapiens
aaaagcagttttact

SEQ ID NO: 1502239 - DNA, 15 bp, Homo sapiens
aaagcagttttacta

SEQ ID NO: 1502240 - DNA, 15 bp, Homo sapiens
aagcagttttactat

SEQ ID NO: 1502241 - DNA, 15 bp, Homo sapiens
agcagttttactatc

SEQ ID NO: 1502242 - DNA, 15 bp, Homo sapiens
gcagttttactatcg

SEQ ID NO: 1502243 - DNA, 15 bp, Homo sapiens
cagttttactatcga

SEQ ID NO: 1502244 - DNA, 15 bp, Homo sapiens
agttttactatcgaa

SEQ ID NO: 1502245 - DNA, 15 bp, Homo sapiens
gttttactatcgaat

SEQ ID NO: 1502246 - DNA, 15 bp, Homo sapiens
ttttactatcgaatc

SEQ ID NO: 1502247 - DNA, 15 bp, Homo sapiens
tttactatcgaatca

SEQ ID NO: 1502248 - DNA, 15 bp, Homo sapiens
ttactatcgaatcaa

SEQ ID NO: 1502249 - DNA, 15 bp, Homo sapiens
tactatcgaatcaat

SEQ ID NO: 1502250 - DNA, 15 bp, Homo sapiens
actatcgaatcaatc

SEQ ID NO: 1502251 - DNA, 15 bp, Homo sapiens
ctatcgaatcaatcg

SEQ ID NO: 1502252 - DNA, 15 bp, Homo sapiens
tatcgaatcaatcgc

SEQ ID NO: 1502253 - DNA, 15 bp, Homo sapiens
atcgaatcaatcgct

SEQ ID NO: 1502254 - DNA, 15 bp, Homo sapiens
tcgaatcaatcgctg

SEQ ID NO: 1502255 - DNA, 15 bp, Homo sapiens
cgaatcaatcgctgt

SEQ ID NO: 1502256 - DNA, 15 bp, Homo sapiens
gaatcaatcgctgtt

SEQ ID NO: 1502257 - DNA, 15 bp, Homo sapiens
aatcaatcgctgtta

SEQ ID NO: 1502258 - DNA, 15 bp, Homo sapiens
atcaatcgctgttat

SEQ ID NO: 1502259 - DNA, 15 bp, Homo sapiens
tcaatcgctgttatt

SEQ ID NO: 1502260 - DNA, 15 bp, Homo sapiens
caatcgctgttattt

SEQ ID NO: 1502261 - DNA, 15 bp, Homo sapiens
aatcgctgttatttt

SEQ ID NO: 1502262 - DNA, 15 bp, Homo sapiens
atcgctgttattttt

SEQ ID NO: 1502263 - DNA, 15 bp, Homo sapiens
tcgctgttatttttt

SEQ ID NO: 1502264 - DNA, 15 bp, Homo sapiens
cgctgttattttttt

SEQ ID NO: 1502265 - DNA, 15 bp, Homo sapiens
gctgttatttttttt

SEQ ID NO: 1502266 - DNA, 15 bp, Homo sapiens
gttattttttttaat

SEQ ID NO: 1502267 - DNA, 15 bp, Homo sapiens
ttattttttttaatg

SEQ ID NO: 1502268 - DNA, 15 bp, Homo sapiens
tattttttttaatgt

SEQ ID NO: 1502269 - DNA, 15 bp, Homo sapiens
attttttttaatgta

SEQ ID NO: 1502270 - DNA, 15 bp, Homo sapiens
ttttttttaatgtaa

SEQ ID NO: 1502271 - DNA, 15 bp, Homo sapiens
tttttttaatgtaat

SEQ ID NO: 1502272 - DNA, 15 bp, Homo sapiens
ttttttaatgtaatt

SEQ ID NO: 1502273 - DNA, 15 bp, Homo sapiens
tttttaatgtaattt

SEQ ID NO: 1502274 - DNA, 15 bp, Homo sapiens
ttttaatgtaatttg

SEQ ID NO: 1502275 - DNA, 15 bp, Homo sapiens
tttaatgtaatttgt

SEQ ID NO: 1502276 - DNA, 15 bp, Homo sapiens
ttaatgtaatttgta

SEQ ID NO: 1502277 - DNA, 15 bp, Homo sapiens
taatgtaatttgtac

SEQ ID NO: 1502278 - DNA, 15 bp, Homo sapiens
aatgtaatttgtaca

SEQ ID NO: 1502279 - DNA, 15 bp, Homo sapiens
atgtaatttgtacat

SEQ ID NO: 1502280 - DNA, 15 bp, Homo sapiens
tgtaatttgtacatc

SEQ ID NO: 1502281 - DNA, 15 bp, Homo sapiens
gtaatttgtacatct

SEQ ID NO: 1502282 - DNA, 15 bp, Homo sapiens
taatttgtacatctt

SEQ ID NO: 1502283 - DNA, 15 bp, Homo sapiens
aatttgtacatcttt

SEQ ID NO: 1502284 - DNA, 15 bp, Homo sapiens
atttgtacatctttt

SEQ ID NO: 1502285 - DNA, 15 bp, Homo sapiens
tttgtacatcttttt

SEQ ID NO: 1502286 - DNA, 15 bp, Homo sapiens
ttgtacatctttttt

SEQ ID NO: 1502287 - DNA, 15 bp, Homo sapiens
tgtacatcttttttc

SEQ ID NO: 1502288 - DNA, 15 bp, Homo sapiens
gtacatcttttttca

SEQ ID NO: 1502289 - DNA, 15 bp, Homo sapiens
tacatcttttttcaa

SEQ ID NO: 1502290 - DNA, 15 bp, Homo sapiens
acatcttttttcaat

SEQ ID NO: 1502291 - DNA, 15 bp, Homo sapiens
catcttttttcaatc

SEQ ID NO: 1502292 - DNA, 15 bp, Homo sapiens
atcttttttcaatct

SEQ ID NO: 1502293 - DNA, 15 bp, Homo sapiens
tcttttttcaatctg

SEQ ID NO: 1502294 - DNA, 15 bp, Homo sapiens
cttttttcaatctgt

SEQ ID NO: 1502295 - DNA, 15 bp, Homo sapiens
ttttttcaatctgta

SEQ ID NO: 1502296 - DNA, 15 bp, Homo sapiens
tttttcaatctgtac

SEQ ID NO: 1502297 - DNA, 15 bp, Homo sapiens
ttttcaatctgtaca

SEQ ID NO: 1502298 - DNA, 15 bp, Homo sapiens
tttcaatctgtacat

SEQ ID NO: 1502299 - DNA, 15 bp, Homo sapiens
ttcaatctgtacatt

SEQ ID NO: 1502300 - DNA, 15 bp, Homo sapiens
tcaatctgtacattt

SEQ ID NO: 1502301 - DNA, 15 bp, Homo sapiens
caatctgtacatttg

SEQ ID NO: 1502302 - DNA, 15 bp, Homo sapiens
aatctgtacatttgg

SEQ ID NO: 1502303 - DNA, 15 bp, Homo sapiens
atctgtacatttggg

SEQ ID NO: 1502304 - DNA, 15 bp, Homo sapiens
tctgtacatttgggc

SEQ ID NO: 1502305 - DNA, 15 bp, Homo sapiens
ctgtacatttgggct

SEQ ID NO: 1502306 - DNA, 15 bp, Homo sapiens
tgtacatttgggctg

SEQ ID NO: 1502307 - DNA, 15 bp, Homo sapiens
gtacatttgggctgt

SEQ ID NO: 1502308 - DNA, 15 bp, Homo sapiens
tacatttgggctgtc

SEQ ID NO: 1502309 - DNA, 15 bp, Homo sapiens
acatttgggctgtct

SEQ ID NO: 1502310 - DNA, 15 bp, Homo sapiens
catttgggctgtctg

SEQ ID NO: 1502311 - DNA, 15 bp, Homo sapiens
atttgggctgtctgt

SEQ ID NO: 1502312 - DNA, 15 bp, Homo sapiens
tttgggctgtctgta

SEQ ID NO: 1502313 - DNA, 15 bp, Homo sapiens
ttgggctgtctgtat

SEQ ID NO: 1502314 - DNA, 15 bp, Homo sapiens
tgggctgtctgtatg

SEQ ID NO: 1502315 - DNA, 15 bp, Homo sapiens
gggctgtctgtatgt

SEQ ID NO: 1502316 - DNA, 15 bp, Homo sapiens
ggctgtctgtatgtt

SEQ ID NO: 1502317 - DNA, 15 bp, Homo sapiens
gctgtctgtatgttt

SEQ ID NO: 1502318 - DNA, 15 bp, Homo sapiens
ctgtctgtatgtttt

SEQ ID NO: 1502319 - DNA, 15 bp, Homo sapiens
tgtctgtatgttttt

SEQ ID NO: 1502320 - DNA, 15 bp, Homo sapiens
gtctgtatgttttta

SEQ ID NO: 1502321 - DNA, 15 bp, Homo sapiens
tctgtatgtttttat

SEQ ID NO: 1502322 - DNA, 15 bp, Homo sapiens
ctgtatgtttttata

SEQ ID NO: 1502323 - DNA, 15 bp, Homo sapiens
tgtatgtttttatag

SEQ ID NO: 1502324 - DNA, 15 bp, Homo sapiens
gtatgtttttatagc

SEQ ID NO: 1502325 - DNA, 15 bp, Homo sapiens
tatgtttttatagct

SEQ ID NO: 1502326 - DNA, 15 bp, Homo sapiens
atgtttttatagctg

SEQ ID NO: 1502327 - DNA, 15 bp, Homo sapiens
tgtttttatagctgg

SEQ ID NO: 1502328 - DNA, 15 bp, Homo sapiens
gtttttatagctggt

SEQ ID NO: 1502329 - DNA, 15 bp, Homo sapiens
tttttatagctggtt

SEQ ID NO: 1502330 - DNA, 15 bp, Homo sapiens
ttttatagctggttt

SEQ ID NO: 1502331 - DNA, 15 bp, Homo sapiens
tttatagctggtttt

SEQ ID NO: 1502332 - DNA, 15 bp, Homo sapiens
ttatagctggttttt

SEQ ID NO: 1502333 - DNA, 15 bp, Homo sapiens
tatagctggttttta

SEQ ID NO: 1502334 - DNA, 15 bp, Homo sapiens
atagctggtttttaa

SEQ ID NO: 1502335 - DNA, 15 bp, Homo sapiens
tagctggtttttaaa

SEQ ID NO: 1502336 - DNA, 15 bp, Homo sapiens
agctggtttttaaaa

SEQ ID NO: 1502337 - DNA, 15 bp, Homo sapiens
gctggtttttaaaaa

SEQ ID NO: 1502338 - DNA, 15 bp, Homo sapiens
ctggtttttaaaaag

SEQ ID NO: 1502339 - DNA, 15 bp, Homo sapiens
tggtttttaaaaagc

SEQ ID NO: 1502340 - DNA, 15 bp, Homo sapiens
ggtttttaaaaagca

SEQ ID NO: 1502341 - DNA, 15 bp, Homo sapiens
gtttttaaaaagcat

SEQ ID NO: 1502342 - DNA, 15 bp, Homo sapiens
tttttaaaaagcata

SEQ ID NO: 1502343 - DNA, 15 bp, Homo sapiens
ttttaaaaagcataa

SEQ ID NO: 1502344 - DNA, 15 bp, Homo sapiens
tttaaaaagcataat

SEQ ID NO: 1502345 - DNA, 15 bp, Homo sapiens
ttaaaaagcataata

SEQ ID NO: 1502346 - DNA, 15 bp, Homo sapiens
taaaaagcataatat

SEQ ID NO: 1502347 - DNA, 15 bp, Homo sapiens
aaaaagcataatatg

SEQ ID NO: 1502348 - DNA, 15 bp, Homo sapiens
aaaagcataatatgc

SEQ ID NO: 1502349 - DNA, 15 bp, Homo sapiens
aaagcataatatgcc

SEQ ID NO: 1502350 - DNA, 15 bp, Homo sapiens
aagcataatatgcct

SEQ ID NO: 1502351 - DNA, 15 bp, Homo sapiens
agcataatatgccta

SEQ ID NO: 1502352 - DNA, 15 bp, Homo sapiens
gcataatatgcctat

SEQ ID NO: 1502353 - DNA, 15 bp, Homo sapiens
cataatatgcctata

SEQ ID NO: 1502354 - DNA, 15 bp, Homo sapiens
ataatatgcctatag

SEQ ID NO: 1502355 - DNA, 15 bp, Homo sapiens
taatatgcctatagc

SEQ ID NO: 1502356 - DNA, 15 bp, Homo sapiens
aatatgcctatagct

SEQ ID NO: 1502357 - DNA, 15 bp, Homo sapiens
atatgcctatagctg

SEQ ID NO: 1502358 - DNA, 15 bp, Homo sapiens
tatgcctatagctga

SEQ ID NO: 1502359 - DNA, 15 bp, Homo sapiens
atgcctatagctgaa

SEQ ID NO: 1502360 - DNA, 15 bp, Homo sapiens
tgcctatagctgaaa

SEQ ID NO: 1502361 - DNA, 15 bp, Homo sapiens
gcctatagctgaaaa

SEQ ID NO: 1502362 - DNA, 15 bp, Homo sapiens
cctatagctgaaaag

SEQ ID NO: 1502363 - DNA, 15 bp, Homo sapiens
ctatagctgaaaagg

SEQ ID NO: 1502364 - DNA, 15 bp, Homo sapiens
tatagctgaaaagga

SEQ ID NO: 1502365 - DNA, 15 bp, Homo sapiens
atagctgaaaaggaa

SEQ ID NO: 1502366 - DNA, 15 bp, Homo sapiens
tagctgaaaaggaaa

SEQ ID NO: 1502367 - DNA, 15 bp, Homo sapiens
agctgaaaaggaaac

SEQ ID NO: 1502368 - DNA, 15 bp, Homo sapiens
ctgaaaaggaaacag

SEQ ID NO: 1502369 - DNA, 15 bp, Homo sapiens
tgaaaaggaaacagg

SEQ ID NO: 1502370 - DNA, 15 bp, Homo sapiens
gaaaaggaaacaggg

SEQ ID NO: 1502371 - DNA, 15 bp, Homo sapiens
aaaaggaaacagggc

SEQ ID NO: 1502372 - DNA, 15 bp, Homo sapiens
aaaggaaacagggct

SEQ ID NO: 1502373 - DNA, 15 bp, Homo sapiens
aaggaaacagggctg

SEQ ID NO: 1502374 - DNA, 15 bp, Homo sapiens
aggaaacagggctgt

SEQ ID NO: 1502375 - DNA, 15 bp, Homo sapiens
ggaaacagggctgtt

SEQ ID NO: 1502376 - DNA, 15 bp, Homo sapiens
gaaacagggctgttt

SEQ ID NO: 1502377 - DNA, 15 bp, Homo sapiens
aaacagggctgttta

SEQ ID NO: 1502378 - DNA, 15 bp, Homo sapiens
aacagggctgtttaa

SEQ ID NO: 1502379 - DNA, 15 bp, Homo sapiens
acagggctgtttaag

SEQ ID NO: 1502380 - DNA, 15 bp, Homo sapiens
cagggctgtttaagt

SEQ ID NO: 1502381 - DNA, 15 bp, Homo sapiens
agggctgtttaagtc

SEQ ID NO: 1502382 - DNA, 15 bp, Homo sapiens
gggctgtttaagtca

SEQ ID NO: 1502383 - DNA, 15 bp, Homo sapiens
ggctgtttaagtcac

SEQ ID NO: 1502384 - DNA, 15 bp, Homo sapiens
gctgtttaagtcact

SEQ ID NO: 1502385 - DNA, 15 bp, Homo sapiens
ctgtttaagtcactg

SEQ ID NO: 1502386 - DNA, 15 bp, Homo sapiens
tgtttaagtcactga

SEQ ID NO: 1502387 - DNA, 15 bp, Homo sapiens
gtttaagtcactgac

SEQ ID NO: 1502388 - DNA, 15 bp, Homo sapiens
tttaagtcactgact

SEQ ID NO: 1502389 - DNA, 15 bp, Homo sapiens
ttaagtcactgactt

SEQ ID NO: 1502390 - DNA, 15 bp, Homo sapiens
taagtcactgactta

SEQ ID NO: 1502391 - DNA, 15 bp, Homo sapiens
aagtcactgacttat

SEQ ID NO: 1502392 - DNA, 15 bp, Homo sapiens
agtcactgacttatg

SEQ ID NO: 1502393 - DNA, 15 bp, Homo sapiens
gtcactgacttatga

SEQ ID NO: 1502394 - DNA, 15 bp, Homo sapiens
tcactgacttatgag

SEQ ID NO: 1502395 - DNA, 15 bp, Homo sapiens
cactgacttatgaga

SEQ ID NO: 1502396 - DNA, 15 bp, Homo sapiens
actgacttatgagaa

SEQ ID NO: 1502397 - DNA, 15 bp, Homo sapiens
ctgacttatgagaaa

SEQ ID NO: 1502398 - DNA, 15 bp, Homo sapiens
tgacttatgagaaag

SEQ ID NO: 1502399 - DNA, 15 bp, Homo sapiens
gacttatgagaaagc

SEQ ID NO: 1502400 - DNA, 15 bp, Homo sapiens
acttatgagaaagca

SEQ ID NO: 1502401 - DNA, 15 bp, Homo sapiens
cttatgagaaagcaa

SEQ ID NO: 1502402 - DNA, 15 bp, Homo sapiens
ttatgagaaagcaaa

SEQ ID NO: 1502403 - DNA, 15 bp, Homo sapiens
tatgagaaagcaaag

SEQ ID NO: 1502404 - DNA, 15 bp, Homo sapiens
atgagaaagcaaagc

SEQ ID NO: 1502405 - DNA, 15 bp, Homo sapiens
tgagaaagcaaagca

SEQ ID NO: 1502406 - DNA, 15 bp, Homo sapiens
gagaaagcaaagcac

SEQ ID NO: 1502407 - DNA, 15 bp, Homo sapiens
agaaagcaaagcact

SEQ ID NO: 1502408 - DNA, 15 bp, Homo sapiens
gaaagcaaagcactg

SEQ ID NO: 1502409 - DNA, 15 bp, Homo sapiens
aaagcaaagcactgg

SEQ ID NO: 1502410 - DNA, 15 bp, Homo sapiens
aagcaaagcactggt

SEQ ID NO: 1502411 - DNA, 15 bp, Homo sapiens
agcaaagcactggta

SEQ ID NO: 1502412 - DNA, 15 bp, Homo sapiens
gcaaagcactggtac

SEQ ID NO: 1502413 - DNA, 15 bp, Homo sapiens
caaagcactggtaca

SEQ ID NO: 1502414 - DNA, 15 bp, Homo sapiens
aaagcactggtacag

SEQ ID NO: 1502415 - DNA, 15 bp, Homo sapiens
aagcactggtacagt

SEQ ID NO: 1502416 - DNA, 15 bp, Homo sapiens
agcactggtacagtt

SEQ ID NO: 1502417 - DNA, 15 bp, Homo sapiens
gcactggtacagtta

SEQ ID NO: 1502418 - DNA, 15 bp, Homo sapiens
cactggtacagttat

SEQ ID NO: 1502419 - DNA, 15 bp, Homo sapiens
actggtacagttatt

SEQ ID NO: 1502420 - DNA, 15 bp, Homo sapiens
ctggtacagttattt

SEQ ID NO: 1502421 - DNA, 15 bp, Homo sapiens
tggtacagttattta

SEQ ID NO: 1502422 - DNA, 15 bp, Homo sapiens
ggtacagttatttaa

SEQ ID NO: 1502423 - DNA, 15 bp, Homo sapiens
gtacagttatttaac

SEQ ID NO: 1502424 - DNA, 15 bp, Homo sapiens
tacagttatttaaca

SEQ ID NO: 1502425 - DNA, 15 bp, Homo sapiens
acagttatttaacag

SEQ ID NO: 1502426 - DNA, 15 bp, Homo sapiens
cagttatttaacagg

SEQ ID NO: 1502427 - DNA, 15 bp, Homo sapiens
agttatttaacaggc

SEQ ID NO: 1502428 - DNA, 15 bp, Homo sapiens
gttatttaacaggca

SEQ ID NO: 1502429 - DNA, 15 bp, Homo sapiens
ttatttaacaggcat

SEQ ID NO: 1502430 - DNA, 15 bp, Homo sapiens
tatttaacaggcata

SEQ ID NO: 1502431 - DNA, 15 bp, Homo sapiens
atttaacaggcatac

SEQ ID NO: 1502432 - DNA, 15 bp, Homo sapiens
tttaacaggcataca

SEQ ID NO: 1502433 - DNA, 15 bp, Homo sapiens
ttaacaggcatacac

SEQ ID NO: 1502434 - DNA, 15 bp, Homo sapiens
taacaggcatacaca

SEQ ID NO: 1502435 - DNA, 15 bp, Homo sapiens
aacaggcatacacaa

SEQ ID NO: 1502436 - DNA, 15 bp, Homo sapiens
acaggcatacacaag

SEQ ID NO: 1502437 - DNA, 15 bp, Homo sapiens
caggcatacacaagc

SEQ ID NO: 1502438 - DNA, 15 bp, Homo sapiens
aggcatacacaagca

SEQ ID NO: 1502439 - DNA, 15 bp, Homo sapiens
ggcatacacaagcag

SEQ ID NO: 1502440 - DNA, 15 bp, Homo sapiens
gcatacacaagcagg

SEQ ID NO: 1502441 - DNA, 15 bp, Homo sapiens
catacacaagcaggg

SEQ ID NO: 1502442 - DNA, 15 bp, Homo sapiens
atacacaagcaggga

SEQ ID NO: 1502443 - DNA, 15 bp, Homo sapiens
tacacaagcagggaa

SEQ ID NO: 1502444 - DNA, 15 bp, Homo sapiens
acacaagcagggaaa

SEQ ID NO: 1502445 - DNA, 15 bp, Homo sapiens
cacaagcagggaaaa

SEQ ID NO: 1502446 - DNA, 15 bp, Homo sapiens
acaagcagggaaaag

SEQ ID NO: 1502447 - DNA, 15 bp, Homo sapiens
caagcagggaaaaga

SEQ ID NO: 1502448 - DNA, 15 bp, Homo sapiens
aagcagggaaaagat

SEQ ID NO: 1502449 - DNA, 15 bp, Homo sapiens
agcagggaaaagata

SEQ ID NO: 1502450 - DNA, 15 bp, Homo sapiens
gcagggaaaagataa

SEQ ID NO: 1502451 - DNA, 15 bp, Homo sapiens
cagggaaaagataat

SEQ ID NO: 1502452 - DNA, 15 bp, Homo sapiens
agggaaaagataatc

SEQ ID NO: 1502453 - DNA, 15 bp, Homo sapiens
gggaaaagataatcc

SEQ ID NO: 1502454 - DNA, 15 bp, Homo sapiens
ggaaaagataatcca

SEQ ID NO: 1502455 - DNA, 15 bp, Homo sapiens
gaaaagataatccat

SEQ ID NO: 1502456 - DNA, 15 bp, Homo sapiens
aaaagataatccatt

SEQ ID NO: 1502457 - DNA, 15 bp, Homo sapiens
aaagataatccattt

SEQ ID NO: 1502458 - DNA, 15 bp, Homo sapiens
aagataatccattta

SEQ ID NO: 1502459 - DNA, 15 bp, Homo sapiens
agataatccatttag

SEQ ID NO: 1502460 - DNA, 15 bp, Homo sapiens
gataatccatttaga

SEQ ID NO: 1502461 - DNA, 15 bp, Homo sapiens
ataatccatttagat

SEQ ID NO: 1502462 - DNA, 15 bp, Homo sapiens
taatccatttagatc

SEQ ID NO: 1502463 - DNA, 15 bp, Homo sapiens
aatccatttagatct

SEQ ID NO: 1502464 - DNA, 15 bp, Homo sapiens
atccatttagatctt

SEQ ID NO: 1502465 - DNA, 15 bp, Homo sapiens
tccatttagatcttt

SEQ ID NO: 1502466 - DNA, 15 bp, Homo sapiens
ccatttagatcttta

SEQ ID NO: 1502467 - DNA, 15 bp, Homo sapiens
catttagatctttaa

SEQ ID NO: 1502468 - DNA, 15 bp, Homo sapiens
atttagatctttaat

SEQ ID NO: 1502469 - DNA, 15 bp, Homo sapiens
tttagatctttaatg

SEQ ID NO: 1502470 - DNA, 15 bp, Homo sapiens
ttagatctttaatgc

SEQ ID NO: 1502471 - DNA, 15 bp, Homo sapiens
tagatctttaatgct

SEQ ID NO: 1502472 - DNA, 15 bp, Homo sapiens
agatctttaatgctt

SEQ ID NO: 1502473 - DNA, 15 bp, Homo sapiens
gatctttaatgcttt

SEQ ID NO: 1502474 - DNA, 15 bp, Homo sapiens
atctttaatgctttg

SEQ ID NO: 1502475 - DNA, 15 bp, Homo sapiens
tctttaatgctttgg

SEQ ID NO: 1502476 - DNA, 15 bp, Homo sapiens
ctttaatgctttgga

SEQ ID NO: 1502477 - DNA, 15 bp, Homo sapiens
tttaatgctttggaa

SEQ ID NO: 1502478 - DNA, 15 bp, Homo sapiens
ttaatgctttggaaa

SEQ ID NO: 1502479 - DNA, 15 bp, Homo sapiens
taatgctttggaaat

SEQ ID NO: 1502480 - DNA, 15 bp, Homo sapiens
aatgctttggaaatg

SEQ ID NO: 1502481 - DNA, 15 bp, Homo sapiens
atgctttggaaatgc

SEQ ID NO: 1502482 - DNA, 15 bp, Homo sapiens
tgctttggaaatgcg

SEQ ID NO: 1502483 - DNA, 15 bp, Homo sapiens
gctttggaaatgcgt

SEQ ID NO: 1502484 - DNA, 15 bp, Homo sapiens
ctttggaaatgcgtg

SEQ ID NO: 1502485 - DNA, 15 bp, Homo sapiens
tttggaaatgcgtgt

SEQ ID NO: 1502486 - DNA, 15 bp, Homo sapiens
ttggaaatgcgtgta

SEQ ID NO: 1502487 - DNA, 15 bp, Homo sapiens
tggaaatgcgtgtaa

SEQ ID NO: 1502488 - DNA, 15 bp, Homo sapiens
ggaaatgcgtgtaac

SEQ ID NO: 1502489 - DNA, 15 bp, Homo sapiens
gaaatgcgtgtaaca

SEQ ID NO: 1502490 - DNA, 15 bp, Homo sapiens
aaatgcgtgtaacag

SEQ ID NO: 1502491 - DNA, 15 bp, Homo sapiens
aatgcgtgtaacagt

SEQ ID NO: 1502492 - DNA, 15 bp, Homo sapiens
atgcgtgtaacagta

SEQ ID NO: 1502493 - DNA, 15 bp, Homo sapiens
tgcgtgtaacagtac

SEQ ID NO: 1502494 - DNA, 15 bp, Homo sapiens
gcgtgtaacagtact

SEQ ID NO: 1502495 - DNA, 15 bp, Homo sapiens
cgtgtaacagtactg

SEQ ID NO: 1502496 - DNA, 15 bp, Homo sapiens
gtgtaacagtactgc

SEQ ID NO: 1502497 - DNA, 15 bp, Homo sapiens
tgtaacagtactgca

SEQ ID NO: 1502498 - DNA, 15 bp, Homo sapiens
gtaacagtactgcaa

SEQ ID NO: 1502499 - DNA, 15 bp, Homo sapiens
taacagtactgcaat

SEQ ID NO: 1502500 - DNA, 15 bp, Homo sapiens
aacagtactgcaata

SEQ ID NO: 1502501 - DNA, 15 bp, Homo sapiens
acagtactgcaataa

SEQ ID NO: 1502502 - DNA, 15 bp, Homo sapiens
cagtactgcaataat

SEQ ID NO: 1502503 - DNA, 15 bp, Homo sapiens
agtactgcaataatc

SEQ ID NO: 1502504 - DNA, 15 bp, Homo sapiens
gtactgcaataatca

SEQ ID NO: 1502505 - DNA, 15 bp, Homo sapiens
tactgcaataatcac

SEQ ID NO: 1502506 - DNA, 15 bp, Homo sapiens
actgcaataatcaca

SEQ ID NO: 1502507 - DNA, 15 bp, Homo sapiens
ctgcaataatcacag

SEQ ID NO: 1502508 - DNA, 15 bp, Homo sapiens
tgcaataatcacagc

SEQ ID NO: 1502509 - DNA, 15 bp, Homo sapiens
gcaataatcacagct

SEQ ID NO: 1502510 - DNA, 15 bp, Homo sapiens
caataatcacagctc

SEQ ID NO: 1502511 - DNA, 15 bp, Homo sapiens
aataatcacagctct

SEQ ID NO: 1502512 - DNA, 15 bp, Homo sapiens
ataatcacagctctg

SEQ ID NO: 1502513 - DNA, 15 bp, Homo sapiens
taatcacagctctgg

SEQ ID NO: 1502514 - DNA, 15 bp, Homo sapiens
aatcacagctctggg

SEQ ID NO: 1502515 - DNA, 15 bp, Homo sapiens
atcacagctctggga

SEQ ID NO: 1502516 - DNA, 15 bp, Homo sapiens
tcacagctctgggaa

SEQ ID NO: 1502517 - DNA, 15 bp, Homo sapiens
cacagctctgggaaa

SEQ ID NO: 1502518 - DNA, 15 bp, Homo sapiens
acagctctgggaaaa

SEQ ID NO: 1502519 - DNA, 15 bp, Homo sapiens
cagctctgggaaaaa

SEQ ID NO: 1502520 - DNA, 15 bp, Homo sapiens
agctctgggaaaaac

SEQ ID NO: 1502521 - DNA, 15 bp, Homo sapiens
gctctgggaaaaaca

SEQ ID NO: 1502522 - DNA, 15 bp, Homo sapiens
ctctgggaaaaacaa

SEQ ID NO: 1502523 - DNA, 15 bp, Homo sapiens
tctgggaaaaacaac

SEQ ID NO: 1502524 - DNA, 15 bp, Homo sapiens
ctgggaaaaacaacg

SEQ ID NO: 1502525 - DNA, 15 bp, Homo sapiens
tgggaaaaacaacga

SEQ ID NO: 1502526 - DNA, 15 bp, Homo sapiens
gggaaaaacaacgaa

SEQ ID NO: 1502527 - DNA, 15 bp, Homo sapiens
ggaaaaacaacgaaa

SEQ ID NO: 1502528 - DNA, 15 bp, Homo sapiens
gaaaaacaacgaaac

SEQ ID NO: 1502529 - DNA, 15 bp, Homo sapiens
aaaaacaacgaaact

SEQ ID NO: 1502530 - DNA, 15 bp, Homo sapiens
aaaacaacgaaactt

SEQ ID NO: 1502531 - DNA, 15 bp, Homo sapiens
aaacaacgaaacttt

SEQ ID NO: 1502532 - DNA, 15 bp, Homo sapiens
aacaacgaaactttc

SEQ ID NO: 1502533 - DNA, 15 bp, Homo sapiens
acaacgaaactttcc

SEQ ID NO: 1502534 - DNA, 15 bp, Homo sapiens
caacgaaactttccc

SEQ ID NO: 1502535 - DNA, 15 bp, Homo sapiens
aacgaaactttccct

SEQ ID NO: 1502536 - DNA, 15 bp, Homo sapiens
acgaaactttccctt

SEQ ID NO: 1502537 - DNA, 15 bp, Homo sapiens
cgaaactttcccttg

SEQ ID NO: 1502538 - DNA, 15 bp, Homo sapiens
gaaactttcccttgt

SEQ ID NO: 1502539 - DNA, 15 bp, Homo sapiens
aaactttcccttgtg

SEQ ID NO: 1502540 - DNA, 15 bp, Homo sapiens
aactttcccttgtgg

SEQ ID NO: 1502541 - DNA, 15 bp, Homo sapiens
actttcccttgtgga

SEQ ID NO: 1502542 - DNA, 15 bp, Homo sapiens
ctttcccttgtggag

SEQ ID NO: 1502543 - DNA, 15 bp, Homo sapiens
tttcccttgtggaga

SEQ ID NO: 1502544 - DNA, 15 bp, Homo sapiens
ttcccttgtggagag

SEQ ID NO: 1502545 - DNA, 15 bp, Homo sapiens
tcccttgtggagagg

SEQ ID NO: 1502546 - DNA, 15 bp, Homo sapiens
cccttgtggagagga

SEQ ID NO: 1502547 - DNA, 15 bp, Homo sapiens
ccttgtggagaggag

SEQ ID NO: 1502548 - DNA, 15 bp, Homo sapiens
cttgtggagaggagg

SEQ ID NO: 1502549 - DNA, 15 bp, Homo sapiens
ttgtggagaggaggg

SEQ ID NO: 1502550 - DNA, 15 bp, Homo sapiens
tgtggagaggaggga

SEQ ID NO: 1502551 - DNA, 15 bp, Homo sapiens
gtggagaggagggat

SEQ ID NO: 1502552 - DNA, 15 bp, Homo sapiens
tggagaggagggatt

SEQ ID NO: 1502553 - DNA, 15 bp, Homo sapiens
ggagaggagggattt

SEQ ID NO: 1502554 - DNA, 15 bp, Homo sapiens
gagaggagggatttt

SEQ ID NO: 1502555 - DNA, 15 bp, Homo sapiens
agaggagggattttc

SEQ ID NO: 1502556 - DNA, 15 bp, Homo sapiens
gaggagggattttcc

SEQ ID NO: 1502557 - DNA, 15 bp, Homo sapiens
aggagggattttcct

SEQ ID NO: 1502558 - DNA, 15 bp, Homo sapiens
ggagggattttcctg

SEQ ID NO: 1502559 - DNA, 15 bp, Homo sapiens
gagggattttcctgc

SEQ ID NO: 1502560 - DNA, 15 bp, Homo sapiens
agggattttcctgct

SEQ ID NO: 1502561 - DNA, 15 bp, Homo sapiens
gggattttcctgctc

SEQ ID NO: 1502562 - DNA, 15 bp, Homo sapiens
ggattttcctgctct

SEQ ID NO: 1502563 - DNA, 15 bp, Homo sapiens
gattttcctgctcta

SEQ ID NO: 1502564 - DNA, 15 bp, Homo sapiens
attttcctgctctat

SEQ ID NO: 1502565 - DNA, 15 bp, Homo sapiens
ttttcctgctctata

SEQ ID NO: 1502566 - DNA, 15 bp, Homo sapiens
tttcctgctctatat

SEQ ID NO: 1502567 - DNA, 15 bp, Homo sapiens
ttcctgctctatata

SEQ ID NO: 1502568 - DNA, 15 bp, Homo sapiens
tcctgctctatataa

SEQ ID NO: 1502569 - DNA, 15 bp, Homo sapiens
cctgctctatataag

SEQ ID NO: 1502570 - DNA, 15 bp, Homo sapiens
ctgctctatataagc

SEQ ID NO: 1502571 - DNA, 15 bp, Homo sapiens
tgctctatataagca

SEQ ID NO: 1502572 - DNA, 15 bp, Homo sapiens
gctctatataagcaa

SEQ ID NO: 1502573 - DNA, 15 bp, Homo sapiens
ctctatataagcaac

SEQ ID NO: 1502574 - DNA, 15 bp, Homo sapiens
tctatataagcaaca

SEQ ID NO: 1502575 - DNA, 15 bp, Homo sapiens
ctatataagcaacat

SEQ ID NO: 1502576 - DNA, 15 bp, Homo sapiens
tatataagcaacata

SEQ ID NO: 1502577 - DNA, 15 bp, Homo sapiens
atataagcaacatat

SEQ ID NO: 1502578 - DNA, 15 bp, Homo sapiens
tataagcaacatatt

SEQ ID NO: 1502579 - DNA, 15 bp, Homo sapiens
ataagcaacatattt

SEQ ID NO: 1502580 - DNA, 15 bp, Homo sapiens
taagcaacatatttt

SEQ ID NO: 1502581 - DNA, 15 bp, Homo sapiens
aagcaacatattttt

SEQ ID NO: 1502582 - DNA, 15 bp, Homo sapiens
agcaacatattttta

SEQ ID NO: 1502583 - DNA, 15 bp, Homo sapiens
gcaacatatttttag

SEQ ID NO: 1502584 - DNA, 15 bp, Homo sapiens
caacatatttttaga

SEQ ID NO: 1502585 - DNA, 15 bp, Homo sapiens
aacatatttttagac

SEQ ID NO: 1502586 - DNA, 15 bp, Homo sapiens
acatatttttagaca

SEQ ID NO: 1502587 - DNA, 15 bp, Homo sapiens
catatttttagacat

SEQ ID NO: 1502588 - DNA, 15 bp, Homo sapiens
atatttttagacatt

SEQ ID NO: 1502589 - DNA, 15 bp, Homo sapiens
tatttttagacatta

SEQ ID NO: 1502590 - DNA, 15 bp, Homo sapiens
atttttagacattaa

SEQ ID NO: 1502591 - DNA, 15 bp, Homo sapiens
tttttagacattaaa

SEQ ID NO: 1502592 - DNA, 15 bp, Homo sapiens
ttttagacattaaaa

SEQ ID NO: 1502593 - DNA, 15 bp, Homo sapiens
tttagacattaaaat

SEQ ID NO: 1502594 - DNA, 15 bp, Homo sapiens
ttagacattaaaata

SEQ ID NO: 1502595 - DNA, 15 bp, Homo sapiens
tagacattaaaatat

SEQ ID NO: 1502596 - DNA, 15 bp, Homo sapiens
agacattaaaatata

SEQ ID NO: 1502597 - DNA, 15 bp, Homo sapiens
gacattaaaatatat

SEQ ID NO: 1502598 - DNA, 15 bp, Homo sapiens
acattaaaatatata

SEQ ID NO: 1502599 - DNA, 15 bp, Homo sapiens
cattaaaatatatat

SEQ ID NO: 1502600 - DNA, 15 bp, Homo sapiens
attaaaatatatata

SEQ ID NO: 1502601 - DNA, 15 bp, Homo sapiens
ttaaaatatatataa

SEQ ID NO: 1502602 - DNA, 15 bp, Homo sapiens
taaaatatatataat

SEQ ID NO: 1502603 - DNA, 15 bp, Homo sapiens
aaaatatatataatt

SEQ ID NO: 1502604 - DNA, 15 bp, Homo sapiens
aaatatatataattt

SEQ ID NO: 1502605 - DNA, 15 bp, Homo sapiens
aatatatataatttt

SEQ ID NO: 1502606 - DNA, 15 bp, Homo sapiens
atatatataattttg

SEQ ID NO: 1502607 - DNA, 15 bp, Homo sapiens
tatatataattttgc

SEQ ID NO: 1502608 - DNA, 15 bp, Homo sapiens
atatataattttgca

SEQ ID NO: 1502609 - DNA, 15 bp, Homo sapiens
tatataattttgcag

SEQ ID NO: 1502610 - DNA, 15 bp, Homo sapiens
atataattttgcagg

SEQ ID NO: 1502611 - DNA, 15 bp, Homo sapiens
tataattttgcaggt

SEQ ID NO: 1502612 - DNA, 15 bp, Homo sapiens
ataattttgcaggta

SEQ ID NO: 1502613 - DNA, 15 bp, Homo sapiens
taattttgcaggtaa

SEQ ID NO: 1502614 - DNA, 15 bp, Homo sapiens
aattttgcaggtaat

SEQ ID NO: 1502615 - DNA, 15 bp, Homo sapiens
attttgcaggtaatt

SEQ ID NO: 1502616 - DNA, 15 bp, Homo sapiens
ttttgcaggtaattg

SEQ ID NO: 1502617 - DNA, 15 bp, Homo sapiens
tttgcaggtaattgt

SEQ ID NO: 1502618 - DNA, 15 bp, Homo sapiens
ttgcaggtaattgtt

SEQ ID NO: 1502619 - DNA, 15 bp, Homo sapiens
tgcaggtaattgttg

SEQ ID NO: 1502620 - DNA, 15 bp, Homo sapiens
gcaggtaattgttga

SEQ ID NO: 1502621 - DNA, 15 bp, Homo sapiens
caggtaattgttgac

SEQ ID NO: 1502622 - DNA, 15 bp, Homo sapiens
aggtaattgttgact

SEQ ID NO: 1502623 - DNA, 15 bp, Homo sapiens
ggtaattgttgactt

SEQ ID NO: 1502624 - DNA, 15 bp, Homo sapiens
gtaattgttgacttt

SEQ ID NO: 1502625 - DNA, 15 bp, Homo sapiens
taattgttgactttt

SEQ ID NO: 1502626 - DNA, 15 bp, Homo sapiens
aattgttgacttttt

SEQ ID NO: 1502627 - DNA, 15 bp, Homo sapiens
attgttgactttttt

SEQ ID NO: 1502628 - DNA, 15 bp, Homo sapiens
ttgttgactttttta

SEQ ID NO: 1502629 - DNA, 15 bp, Homo sapiens
tgttgacttttttaa

SEQ ID NO: 1502630 - DNA, 15 bp, Homo sapiens
gttgacttttttaac

SEQ ID NO: 1502631 - DNA, 15 bp, Homo sapiens
ttgacttttttaact

SEQ ID NO: 1502632 - DNA, 15 bp, Homo sapiens
tgacttttttaacta

SEQ ID NO: 1502633 - DNA, 15 bp, Homo sapiens
gacttttttaactat

SEQ ID NO: 1502634 - DNA, 15 bp, Homo sapiens
acttttttaactata

SEQ ID NO: 1502635 - DNA, 15 bp, Homo sapiens
cttttttaactatat

SEQ ID NO: 1502636 - DNA, 15 bp, Homo sapiens
ttttttaactatatt

SEQ ID NO: 1502637 - DNA, 15 bp, Homo sapiens
ttttaactatattaa

SEQ ID NO: 1502638 - DNA, 15 bp, Homo sapiens
tttaactatattaag

SEQ ID NO: 1502639 - DNA, 15 bp, Homo sapiens
ttaactatattaagt

SEQ ID NO: 1502640 - DNA, 15 bp, Homo sapiens
taactatattaagtg

SEQ ID NO: 1502641 - DNA, 15 bp, Homo sapiens
aactatattaagtgt

SEQ ID NO: 1502642 - DNA, 15 bp, Homo sapiens
actatattaagtgtt

SEQ ID NO: 1502643 - DNA, 15 bp, Homo sapiens
ctatattaagtgtta

SEQ ID NO: 1502644 - DNA, 15 bp, Homo sapiens
tatattaagtgttaa

SEQ ID NO: 1502645 - DNA, 15 bp, Homo sapiens
atattaagtgttaag

SEQ ID NO: 1502646 - DNA, 15 bp, Homo sapiens
tattaagtgttaagc

SEQ ID NO: 1502647 - DNA, 15 bp, Homo sapiens
attaagtgttaagct

SEQ ID NO: 1502648 - DNA, 15 bp, Homo sapiens
ttaagtgttaagctg

SEQ ID NO: 1502649 - DNA, 15 bp, Homo sapiens
taagtgttaagctga

SEQ ID NO: 1502650 - DNA, 15 bp, Homo sapiens
aagtgttaagctgac

SEQ ID NO: 1502651 - DNA, 15 bp, Homo sapiens
agtgttaagctgaca

SEQ ID NO: 1502652 - DNA, 15 bp, Homo sapiens
gtgttaagctgacaa

SEQ ID NO: 1502653 - DNA, 15 bp, Homo sapiens
tgttaagctgacaac

SEQ ID NO: 1502654 - DNA, 15 bp, Homo sapiens
gttaagctgacaact

SEQ ID NO: 1502655 - DNA, 15 bp, Homo sapiens
ttaagctgacaactg

SEQ ID NO: 1502656 - DNA, 15 bp, Homo sapiens
taagctgacaactgt

SEQ ID NO: 1502657 - DNA, 15 bp, Homo sapiens
aagctgacaactgtc

SEQ ID NO: 1502658 - DNA, 15 bp, Homo sapiens
agctgacaactgtca

SEQ ID NO: 1502659 - DNA, 15 bp, Homo sapiens
gctgacaactgtcaa

SEQ ID NO: 1502660 - DNA, 15 bp, Homo sapiens
ctgacaactgtcaaa

SEQ ID NO: 1502661 - DNA, 15 bp, Homo sapiens
tgacaactgtcaaag

SEQ ID NO: 1502662 - DNA, 15 bp, Homo sapiens
gacaactgtcaaaga

SEQ ID NO: 1502663 - DNA, 15 bp, Homo sapiens
acaactgtcaaagaa

SEQ ID NO: 1502664 - DNA, 15 bp, Homo sapiens
caactgtcaaagaag

SEQ ID NO: 1502665 - DNA, 15 bp, Homo sapiens
aactgtcaaagaaga

SEQ ID NO: 1502666 - DNA, 15 bp, Homo sapiens
actgtcaaagaagac

SEQ ID NO: 1502667 - DNA, 15 bp, Homo sapiens
ctgtcaaagaagacc

SEQ ID NO: 1502668 - DNA, 15 bp, Homo sapiens
tgtcaaagaagacca

SEQ ID NO: 1502669 - DNA, 15 bp, Homo sapiens
gtcaaagaagaccat

SEQ ID NO: 1502670 - DNA, 15 bp, Homo sapiens
tcaaagaagaccatg

SEQ ID NO: 1502671 - DNA, 15 bp, Homo sapiens
caaagaagaccatgt

SEQ ID NO: 1502672 - DNA, 15 bp, Homo sapiens
aaagaagaccatgtt

SEQ ID NO: 1502673 - DNA, 15 bp, Homo sapiens
aagaagaccatgttg

SEQ ID NO: 1502674 - DNA, 15 bp, Homo sapiens
agaagaccatgttgt

SEQ ID NO: 1502675 - DNA, 15 bp, Homo sapiens
gaagaccatgttgta

SEQ ID NO: 1502676 - DNA, 15 bp, Homo sapiens
aagaccatgttgtaa

SEQ ID NO: 1502677 - DNA, 15 bp, Homo sapiens
agaccatgttgtaaa

SEQ ID NO: 1502678 - DNA, 15 bp, Homo sapiens
gaccatgttgtaaaa

SEQ ID NO: 1502679 - DNA, 15 bp, Homo sapiens
accatgttgtaaaat

SEQ ID NO: 1502680 - DNA, 15 bp, Homo sapiens
ccatgttgtaaaata

SEQ ID NO: 1502681 - DNA, 15 bp, Homo sapiens
catgttgtaaaataa

SEQ ID NO: 1502682 - DNA, 15 bp, Homo sapiens
atgttgtaaaataat

SEQ ID NO: 1502683 - DNA, 15 bp, Homo sapiens
tgttgtaaaataatt

SEQ ID NO: 1502684 - DNA, 15 bp, Homo sapiens
gttgtaaaataattt

SEQ ID NO: 1502685 - DNA, 15 bp, Homo sapiens
ttgtaaaataatttg

SEQ ID NO: 1502686 - DNA, 15 bp, Homo sapiens
gtaaaataatttgac

SEQ ID NO: 1502687 - DNA, 15 bp, Homo sapiens
taaaataatttgact

SEQ ID NO: 1502688 - DNA, 15 bp, Homo sapiens
aaaataatttgacta

SEQ ID NO: 1502689 - DNA, 15 bp, Homo sapiens
aaataatttgactaa

SEQ ID NO: 1502690 - DNA, 15 bp, Homo sapiens
aataatttgactaaa

SEQ ID NO: 1502691 - DNA, 15 bp, Homo sapiens
ataatttgactaaat

SEQ ID NO: 1502692 - DNA, 15 bp, Homo sapiens
taatttgactaaata

SEQ ID NO: 1502693 - DNA, 15 bp, Homo sapiens
aatttgactaaataa

SEQ ID NO: 1502694 - DNA, 15 bp, Homo sapiens
atttgactaaataaa

SEQ ID NO: 1502695 - DNA, 15 bp, Homo sapiens
tttgactaaataaat

SEQ ID NO: 1502696 - DNA, 15 bp, Homo sapiens
ttgactaaataaatg

SEQ ID NO: 1502697 - DNA, 15 bp, Homo sapiens
tgactaaataaatgg

SEQ ID NO: 1502698 - DNA, 15 bp, Homo sapiens
gactaaataaatggt

SEQ ID NO: 1502699 - DNA, 15 bp, Homo sapiens
actaaataaatggtt

SEQ ID NO: 1502700 - DNA, 15 bp, Homo sapiens
ctaaataaatggttc

SEQ ID NO: 1502701 - DNA, 15 bp, Homo sapiens
taaataaatggttcc

SEQ ID NO: 1502702 - DNA, 15 bp, Homo sapiens
aaataaatggttcct

SEQ ID NO: 1502703 - DNA, 15 bp, Homo sapiens
aataaatggttcctt

SEQ ID NO: 1502704 - DNA, 15 bp, Homo sapiens
ataaatggttccttc

SEQ ID NO: 1502705 - DNA, 15 bp, Homo sapiens
taaatggttccttct

SEQ ID NO: 1502706 - DNA, 15 bp, Homo sapiens
aaatggttccttctc

SEQ ID NO: 1502707 - DNA, 15 bp, Homo sapiens
aatggttccttctct

SEQ ID NO: 1502708 - DNA, 15 bp, Homo sapiens
atggttccttctctc

SEQ ID NO: 1502709 - DNA, 15 bp, Homo sapiens
tggttccttctctca

SEQ ID NO: 1502710 - DNA, 15 bp, Homo sapiens
ggttccttctctcag

SEQ ID NO: 1502711 - DNA, 15 bp, Homo sapiens
gttccttctctcagt

SEQ ID NO: 1502712 - DNA, 15 bp, Homo sapiens
ttccttctctcagtg

SEQ ID NO: 1502713 - DNA, 15 bp, Homo sapiens
tccttctctcagtgc

SEQ ID NO: 1502714 - DNA, 15 bp, Homo sapiens
ccttctctcagtgct

SEQ ID NO: 1502715 - DNA, 15 bp, Homo sapiens
cttctctcagtgctg

SEQ ID NO: 1502716 - DNA, 15 bp, Homo sapiens
ttctctcagtgctga

SEQ ID NO: 1502717 - DNA, 15 bp, Homo sapiens
tctctcagtgctgag

SEQ ID NO: 1502718 - DNA, 15 bp, Homo sapiens
ctctcagtgctgagg

SEQ ID NO: 1502719 - DNA, 15 bp, Homo sapiens
tctcagtgctgagga

SEQ ID NO: 1502720 - DNA, 15 bp, Homo sapiens
ctcagtgctgaggac

SEQ ID NO: 1502721 - DNA, 15 bp, Homo sapiens
tcagtgctgaggaca

SEQ ID NO: 1502722 - DNA, 15 bp, Homo sapiens
cagtgctgaggacag

SEQ ID NO: 1502723 - DNA, 15 bp, Homo sapiens
agtgctgaggacagt

SEQ ID NO: 1502724 - DNA, 15 bp, Homo sapiens
gtgctgaggacagtt

SEQ ID NO: 1502725 - DNA, 15 bp, Homo sapiens
tgctgaggacagttt

SEQ ID NO: 1502726 - DNA, 15 bp, Homo sapiens
gctgaggacagtttt

SEQ ID NO: 1502727 - DNA, 15 bp, Homo sapiens
ctgaggacagttttc

SEQ ID NO: 1502728 - DNA, 15 bp, Homo sapiens
tgaggacagttttct

SEQ ID NO: 1502729 - DNA, 15 bp, Homo sapiens
gaggacagttttctt

SEQ ID NO: 1502730 - DNA, 15 bp, Homo sapiens
aggacagttttctta

SEQ ID NO: 1502731 - DNA, 15 bp, Homo sapiens
ggacagttttcttat

SEQ ID NO: 1502732 - DNA, 15 bp, Homo sapiens
gacagttttcttatt

SEQ ID NO: 1502733 - DNA, 15 bp, Homo sapiens
acagttttcttattt

SEQ ID NO: 1502734 - DNA, 15 bp, Homo sapiens
cagttttcttattta

SEQ ID NO: 1502735 - DNA, 15 bp, Homo sapiens
agttttcttatttac

SEQ ID NO: 1502736 - DNA, 15 bp, Homo sapiens
gttttcttatttacc

SEQ ID NO: 1502737 - DNA, 15 bp, Homo sapiens
ttttcttatttaccg

SEQ ID NO: 1502738 - DNA, 15 bp, Homo sapiens
tttcttatttaccgc

SEQ ID NO: 1502739 - DNA, 15 bp, Homo sapiens
ttcttatttaccgcc

SEQ ID NO: 1502740 - DNA, 15 bp, Homo sapiens
tcttatttaccgccc

SEQ ID NO: 1502741 - DNA, 15 bp, Homo sapiens
cttatttaccgcccc

SEQ ID NO: 1502742 - DNA, 15 bp, Homo sapiens
ttatttaccgccccc

SEQ ID NO: 1502743 - DNA, 15 bp, Homo sapiens
tatttaccgcccccg

SEQ ID NO: 1502744 - DNA, 15 bp, Homo sapiens
atttaccgcccccgt

SEQ ID NO: 1502745 - DNA, 15 bp, Homo sapiens
tttaccgcccccgtt

SEQ ID NO: 1502746 - DNA, 15 bp, Homo sapiens
ttaccgcccccgtta

SEQ ID NO: 1502747 - DNA, 15 bp, Homo sapiens
taccgcccccgttag

SEQ ID NO: 1502748 - DNA, 15 bp, Homo sapiens
accgcccccgttagg

SEQ ID NO: 1502749 - DNA, 15 bp, Homo sapiens
ccgcccccgttaggt

SEQ ID NO: 1502750 - DNA, 15 bp, Homo sapiens
cgcccccgttaggtc

SEQ ID NO: 1502751 - DNA, 15 bp, Homo sapiens
gcccccgttaggtca

SEQ ID NO: 1502752 - DNA, 15 bp, Homo sapiens
cccccgttaggtcaa

SEQ ID NO: 1502753 - DNA, 15 bp, Homo sapiens
ccccgttaggtcaaa

SEQ ID NO: 1502754 - DNA, 15 bp, Homo sapiens
cccgttaggtcaaag

SEQ ID NO: 1502755 - DNA, 15 bp, Homo sapiens
ccgttaggtcaaagg

SEQ ID NO: 1502756 - DNA, 15 bp, Homo sapiens
cgttaggtcaaaggg

SEQ ID NO: 1502757 - DNA, 15 bp, Homo sapiens
gttaggtcaaagggt

SEQ ID NO: 1502758 - DNA, 15 bp, Homo sapiens
ttaggtcaaagggtt

SEQ ID NO: 1502759 - DNA, 15 bp, Homo sapiens
taggtcaaagggttt

SEQ ID NO: 1502760 - DNA, 15 bp, Homo sapiens
aggtcaaagggtttt

SEQ ID NO: 1502761 - DNA, 15 bp, Homo sapiens
ggtcaaagggttttc

SEQ ID NO: 1502762 - DNA, 15 bp, Homo sapiens
gtcaaagggttttcc

SEQ ID NO: 1502763 - DNA, 15 bp, Homo sapiens
tcaaagggttttccc

SEQ ID NO: 1502764 - DNA, 15 bp, Homo sapiens
caaagggttttccct

SEQ ID NO: 1502765 - DNA, 15 bp, Homo sapiens
aaagggttttccctg

SEQ ID NO: 1502766 - DNA, 15 bp, Homo sapiens
aagggttttccctgg

SEQ ID NO: 1502767 - DNA, 15 bp, Homo sapiens
agggttttccctggg

SEQ ID NO: 1502768 - DNA, 15 bp, Homo sapiens
gggttttccctgggg

SEQ ID NO: 1502769 - DNA, 15 bp, Homo sapiens
ggttttccctgggga

SEQ ID NO: 1502770 - DNA, 15 bp, Homo sapiens
gttttccctggggaa

SEQ ID NO: 1502771 - DNA, 15 bp, Homo sapiens
ttttccctggggaac

SEQ ID NO: 1502772 - DNA, 15 bp, Homo sapiens
tttccctggggaact

SEQ ID NO: 1502773 - DNA, 15 bp, Homo sapiens
ttccctggggaactt

SEQ ID NO: 1502774 - DNA, 15 bp, Homo sapiens
tccctggggaacttt

SEQ ID NO: 1502775 - DNA, 15 bp, Homo sapiens
ccctggggaactttc

SEQ ID NO: 1502776 - DNA, 15 bp, Homo sapiens
cctggggaactttcc

SEQ ID NO: 1502777 - DNA, 15 bp, Homo sapiens
ctggggaactttcct

SEQ ID NO: 1502778 - DNA, 15 bp, Homo sapiens
tggggaactttccta

SEQ ID NO: 1502779 - DNA, 15 bp, Homo sapiens
ggggaactttcctat

SEQ ID NO: 1502780 - DNA, 15 bp, Homo sapiens
ggaactttcctattt

SEQ ID NO: 1502781 - DNA, 15 bp, Homo sapiens
gaactttcctattta

SEQ ID NO: 1502782 - DNA, 15 bp, Homo sapiens
aactttcctatttac

SEQ ID NO: 1502783 - DNA, 15 bp, Homo sapiens
actttcctatttact

SEQ ID NO: 1502784 - DNA, 15 bp, Homo sapiens
ctttcctatttactt

SEQ ID NO: 1502785 - DNA, 15 bp, Homo sapiens
tttcctatttacttc

SEQ ID NO: 1502786 - DNA, 15 bp, Homo sapiens
ttcctatttacttct

SEQ ID NO: 1502787 - DNA, 15 bp, Homo sapiens
tcctatttacttctt

SEQ ID NO: 1502788 - DNA, 15 bp, Homo sapiens
cctatttacttcttg

SEQ ID NO: 1502789 - DNA, 15 bp, Homo sapiens
ctatttacttcttgc

SEQ ID NO: 1502790 - DNA, 15 bp, Homo sapiens
tatttacttcttgca

SEQ ID NO: 1502791 - DNA, 15 bp, Homo sapiens
atttacttcttgcac

SEQ ID NO: 1502792 - DNA, 15 bp, Homo sapiens
tttacttcttgcact

SEQ ID NO: 1502793 - DNA, 15 bp, Homo sapiens
ttacttcttgcacta

SEQ ID NO: 1502794 - DNA, 15 bp, Homo sapiens
tacttcttgcactat

SEQ ID NO: 1502795 - DNA, 15 bp, Homo sapiens
acttcttgcactatc

SEQ ID NO: 1502796 - DNA, 15 bp, Homo sapiens
cttcttgcactatca

SEQ ID NO: 1502797 - DNA, 15 bp, Homo sapiens
ttcttgcactatcaa

SEQ ID NO: 1502798 - DNA, 15 bp, Homo sapiens
tcttgcactatcaag

SEQ ID NO: 1502799 - DNA, 15 bp, Homo sapiens
cttgcactatcaaga

SEQ ID NO: 1502800 - DNA, 15 bp, Homo sapiens
ttgcactatcaagaa

SEQ ID NO: 1502801 - DNA, 15 bp, Homo sapiens
tgcactatcaagaat

SEQ ID NO: 1502802 - DNA, 15 bp, Homo sapiens
gcactatcaagaatt

SEQ ID NO: 1502803 - DNA, 15 bp, Homo sapiens
cactatcaagaattt

SEQ ID NO: 1502804 - DNA, 15 bp, Homo sapiens
actatcaagaatttt

SEQ ID NO: 1502805 - DNA, 15 bp, Homo sapiens
ctatcaagaattttt

SEQ ID NO: 1502806 - DNA, 15 bp, Homo sapiens
tatcaagaatttttc

SEQ ID NO: 1502807 - DNA, 15 bp, Homo sapiens
atcaagaatttttcg

SEQ ID NO: 1502808 - DNA, 15 bp, Homo sapiens
tcaagaatttttcga

SEQ ID NO: 1502809 - DNA, 15 bp, Homo sapiens
caagaatttttcgaa

SEQ ID NO: 1502810 - DNA, 15 bp, Homo sapiens
aagaatttttcgaat

SEQ ID NO: 1502811 - DNA, 15 bp, Homo sapiens
agaatttttcgaatg

SEQ ID NO: 1502812 - DNA, 15 bp, Homo sapiens
gaatttttcgaatgt

SEQ ID NO: 1502813 - DNA, 15 bp, Homo sapiens
aatttttcgaatgta

SEQ ID NO: 1502814 - DNA, 15 bp, Homo sapiens
atttttcgaatgtac

SEQ ID NO: 1502815 - DNA, 15 bp, Homo sapiens
tttttcgaatgtacc

SEQ ID NO: 1502816 - DNA, 15 bp, Homo sapiens
ttttcgaatgtacct

SEQ ID NO: 1502817 - DNA, 15 bp, Homo sapiens
tttcgaatgtaccta

SEQ ID NO: 1502818 - DNA, 15 bp, Homo sapiens
ttcgaatgtacctac

SEQ ID NO: 1502819 - DNA, 15 bp, Homo sapiens
tcgaatgtacctact

SEQ ID NO: 1502820 - DNA, 15 bp, Homo sapiens
cgaatgtacctactg

SEQ ID NO: 1502821 - DNA, 15 bp, Homo sapiens
gaatgtacctactgc

SEQ ID NO: 1502822 - DNA, 15 bp, Homo sapiens
aatgtacctactgca

SEQ ID NO: 1502823 - DNA, 15 bp, Homo sapiens
atgtacctactgcag

SEQ ID NO: 1502824 - DNA, 15 bp, Homo sapiens
tgtacctactgcagt

SEQ ID NO: 1502825 - DNA, 15 bp, Homo sapiens
gtacctactgcagta

SEQ ID NO: 1502826 - DNA, 15 bp, Homo sapiens
tacctactgcagtac

SEQ ID NO: 1502827 - DNA, 15 bp, Homo sapiens
acctactgcagtaca

SEQ ID NO: 1502828 - DNA, 15 bp, Homo sapiens
cctactgcagtacag

SEQ ID NO: 1502829 - DNA, 15 bp, Homo sapiens
ctactgcagtacagc

SEQ ID NO: 1502830 - DNA, 15 bp, Homo sapiens
tactgcagtacagca

SEQ ID NO: 1502831 - DNA, 15 bp, Homo sapiens
actgcagtacagcag

SEQ ID NO: 1502832 - DNA, 15 bp, Homo sapiens
ctgcagtacagcaga

SEQ ID NO: 1502833 - DNA, 15 bp, Homo sapiens
tgcagtacagcagaa

SEQ ID NO: 1502834 - DNA, 15 bp, Homo sapiens
gcagtacagcagaag

SEQ ID NO: 1502835 - DNA, 15 bp, Homo sapiens
cagtacagcagaagg

SEQ ID NO: 1502836 - DNA, 15 bp, Homo sapiens
agtacagcagaaggt

SEQ ID NO: 1502837 - DNA, 15 bp, Homo sapiens
gtacagcagaaggta

SEQ ID NO: 1502838 - DNA, 15 bp, Homo sapiens
tacagcagaaggtaa

SEQ ID NO: 1502839 - DNA, 15 bp, Homo sapiens
acagcagaaggtaaa

SEQ ID NO: 1502840 - DNA, 15 bp, Homo sapiens
cagcagaaggtaaaa

SEQ ID NO: 1502841 - DNA, 15 bp, Homo sapiens
agcagaaggtaaaaa

SEQ ID NO: 1502842 - DNA, 15 bp, Homo sapiens
gcagaaggtaaaaaa

SEQ ID NO: 1502843 - DNA, 15 bp, Homo sapiens
cagaaggtaaaaaat

SEQ ID NO: 1502844 - DNA, 15 bp, Homo sapiens
agaaggtaaaaaatc

SEQ ID NO: 1502845 - DNA, 15 bp, Homo sapiens
gaaggtaaaaaatca

SEQ ID NO: 1502846 - DNA, 15 bp, Homo sapiens
aaggtaaaaaatcag

SEQ ID NO: 1502847 - DNA, 15 bp, Homo sapiens
aggtaaaaaatcagt

SEQ ID NO: 1502848 - DNA, 15 bp, Homo sapiens
ggtaaaaaatcagtg

SEQ ID NO: 1502849 - DNA, 15 bp, Homo sapiens
gtaaaaaatcagtgt

SEQ ID NO: 1502850 - DNA, 15 bp, Homo sapiens
taaaaaatcagtgtg

SEQ ID NO: 1502851 - DNA, 15 bp, Homo sapiens
aaaaaatcagtgtgg

SEQ ID NO: 1502852 - DNA, 15 bp, Homo sapiens
aaaaatcagtgtggt

SEQ ID NO: 1502853 - DNA, 15 bp, Homo sapiens
aaaatcagtgtggtt

SEQ ID NO: 1502854 - DNA, 15 bp, Homo sapiens
aaatcagtgtggttt

SEQ ID NO: 1502855 - DNA, 15 bp, Homo sapiens
aatcagtgtggtttt

SEQ ID NO: 1502856 - DNA, 15 bp, Homo sapiens
atcagtgtggttttt

SEQ ID NO: 1502857 - DNA, 15 bp, Homo sapiens
tcagtgtggtttttc

SEQ ID NO: 1502858 - DNA, 15 bp, Homo sapiens
cagtgtggtttttca

SEQ ID NO: 1502859 - DNA, 15 bp, Homo sapiens
agtgtggtttttcat

SEQ ID NO: 1502860 - DNA, 15 bp, Homo sapiens
gtgtggtttttcatt

SEQ ID NO: 1502861 - DNA, 15 bp, Homo sapiens
tgtggtttttcattg

SEQ ID NO: 1502862 - DNA, 15 bp, Homo sapiens
gtggtttttcattgt

SEQ ID NO: 1502863 - DNA, 15 bp, Homo sapiens
tggtttttcattgtt

SEQ ID NO: 1502864 - DNA, 15 bp, Homo sapiens
ggtttttcattgttg

SEQ ID NO: 1502865 - DNA, 15 bp, Homo sapiens
gtttttcattgttgt

SEQ ID NO: 1502866 - DNA, 15 bp, Homo sapiens
tttttcattgttgtt

SEQ ID NO: 1502867 - DNA, 15 bp, Homo sapiens
ttttcattgttgttg

SEQ ID NO: 1502868 - DNA, 15 bp, Homo sapiens
tttcattgttgttga

SEQ ID NO: 1502869 - DNA, 15 bp, Homo sapiens
ttcattgttgttgat

SEQ ID NO: 1502870 - DNA, 15 bp, Homo sapiens
tcattgttgttgatg

SEQ ID NO: 1502871 - DNA, 15 bp, Homo sapiens
cattgttgttgatga

SEQ ID NO: 1502872 - DNA, 15 bp, Homo sapiens
attgttgttgatgat

SEQ ID NO: 1502873 - DNA, 15 bp, Homo sapiens
ttgttgttgatgatg

SEQ ID NO: 1502874 - DNA, 15 bp, Homo sapiens
tgttgttgatgatgt

SEQ ID NO: 1502875 - DNA, 15 bp, Homo sapiens
gttgttgatgatgtt

SEQ ID NO: 1502876 - DNA, 15 bp, Homo sapiens
ttgttgatgatgttt

SEQ ID NO: 1502877 - DNA, 15 bp, Homo sapiens
tgttgatgatgtttg

SEQ ID NO: 1502878 - DNA, 15 bp, Homo sapiens
gttgatgatgtttgt

SEQ ID NO: 1502879 - DNA, 15 bp, Homo sapiens
ttgatgatgtttgta

SEQ ID NO: 1502880 - DNA, 15 bp, Homo sapiens
tgatgatgtttgtag

SEQ ID NO: 1502881 - DNA, 15 bp, Homo sapiens
gatgatgtttgtagt

SEQ ID NO: 1502882 - DNA, 15 bp, Homo sapiens
atgatgtttgtagtg

SEQ ID NO: 1502883 - DNA, 15 bp, Homo sapiens
tgatgtttgtagtgt

SEQ ID NO: 1502884 - DNA, 15 bp, Homo sapiens
gatgtttgtagtgtt

SEQ ID NO: 1502885 - DNA, 15 bp, Homo sapiens
atgtttgtagtgttt

SEQ ID NO: 1502886 - DNA, 15 bp, Homo sapiens
tgtttgtagtgtttt

SEQ ID NO: 1502887 - DNA, 15 bp, Homo sapiens
gtttgtagtgttttt

SEQ ID NO: 1502888 - DNA, 15 bp, Homo sapiens
tttgtagtgtttttg

SEQ ID NO: 1502889 - DNA, 15 bp, Homo sapiens
ttgtagtgtttttgt

SEQ ID NO: 1502890 - DNA, 15 bp, Homo sapiens
tgtagtgtttttgtg

SEQ ID NO: 1502891 - DNA, 15 bp, Homo sapiens
gtagtgtttttgtgt

SEQ ID NO: 1502892 - DNA, 15 bp, Homo sapiens
tagtgtttttgtgtg

SEQ ID NO: 1502893 - DNA, 15 bp, Homo sapiens
agtgtttttgtgtgt

SEQ ID NO: 1502894 - DNA, 15 bp, Homo sapiens
gtgtttttgtgtgtg

SEQ ID NO: 1502895 - DNA, 15 bp, Homo sapiens
tgtttttgtgtgtgt

SEQ ID NO: 1502896 - DNA, 15 bp, Homo sapiens
gtttttgtgtgtgtt

SEQ ID NO: 1502897 - DNA, 15 bp, Homo sapiens
gtgtgtgttatttaa

SEQ ID NO: 1502898 - DNA, 15 bp, Homo sapiens
tgtgtgttatttaaa

SEQ ID NO: 1502899 - DNA, 15 bp, Homo sapiens
gtgtgttatttaaat

SEQ ID NO: 1502900 - DNA, 15 bp, Homo sapiens
tgtgttatttaaatc

SEQ ID NO: 1502901 - DNA, 15 bp, Homo sapiens
gtgttatttaaatct

SEQ ID NO: 1502902 - DNA, 15 bp, Homo sapiens
tgttatttaaatctt

SEQ ID NO: 1502903 - DNA, 15 bp, Homo sapiens
gttatttaaatcttc

SEQ ID NO: 1502904 - DNA, 15 bp, Homo sapiens
ttatttaaatcttcc

SEQ ID NO: 1502905 - DNA, 15 bp, Homo sapiens
tatttaaatcttcct

SEQ ID NO: 1502906 - DNA, 15 bp, Homo sapiens
atttaaatcttcctc

SEQ ID NO: 1502907 - DNA, 15 bp, Homo sapiens
tttaaatcttcctcc

SEQ ID NO: 1502908 - DNA, 15 bp, Homo sapiens
ttaaatcttcctcca

SEQ ID NO: 1502909 - DNA, 15 bp, Homo sapiens
taaatcttcctccag

SEQ ID NO: 1502910 - DNA, 15 bp, Homo sapiens
aaatcttcctccagc

SEQ ID NO: 1502911 - DNA, 15 bp, Homo sapiens
aatcttcctccagcc

SEQ ID NO: 1502912 - DNA, 15 bp, Homo sapiens
atcttcctccagcct

SEQ ID NO: 1502913 - DNA, 15 bp, Homo sapiens
tcttcctccagccta

SEQ ID NO: 1502914 - DNA, 15 bp, Homo sapiens
cttcctccagcctaa

SEQ ID NO: 1502915 - DNA, 15 bp, Homo sapiens
ttcctccagcctaaa

SEQ ID NO: 1502916 - DNA, 15 bp, Homo sapiens
tcctccagcctaaaa

SEQ ID NO: 1502917 - DNA, 15 bp, Homo sapiens
cctccagcctaaaag

SEQ ID NO: 1502918 - DNA, 15 bp, Homo sapiens
ctccagcctaaaagg

SEQ ID NO: 1502919 - DNA, 15 bp, Homo sapiens
tccagcctaaaaggg

SEQ ID NO: 1502920 - DNA, 15 bp, Homo sapiens
ccagcctaaaagggt

SEQ ID NO: 1502921 - DNA, 15 bp, Homo sapiens
cagcctaaaagggtt

SEQ ID NO: 1502922 - DNA, 15 bp, Homo sapiens
agcctaaaagggttt

SEQ ID NO: 1502923 - DNA, 15 bp, Homo sapiens
gcctaaaagggtttt

SEQ ID NO: 1502924 - DNA, 15 bp, Homo sapiens
cctaaaagggtttta

SEQ ID NO: 1502925 - DNA, 15 bp, Homo sapiens
ctaaaagggttttat

SEQ ID NO: 1502926 - DNA, 15 bp, Homo sapiens
taaaagggttttata

SEQ ID NO: 1502927 - DNA, 15 bp, Homo sapiens
aaaagggttttataa

SEQ ID NO: 1502928 - DNA, 15 bp, Homo sapiens
aaagggttttataaa

SEQ ID NO: 1502929 - DNA, 15 bp, Homo sapiens
aagggttttataaaa

SEQ ID NO: 1502930 - DNA, 15 bp, Homo sapiens
agggttttataaaac

SEQ ID NO: 1502931 - DNA, 15 bp, Homo sapiens
gggttttataaaaca

SEQ ID NO: 1502932 - DNA, 15 bp, Homo sapiens
ggttttataaaacag

SEQ ID NO: 1502933 - DNA, 15 bp, Homo sapiens
gttttataaaacagc

SEQ ID NO: 1502934 - DNA, 15 bp, Homo sapiens
ttttataaaacagca

SEQ ID NO: 1502935 - DNA, 15 bp, Homo sapiens
tttataaaacagcag

SEQ ID NO: 1502936 - DNA, 15 bp, Homo sapiens
ttataaaacagcagc

SEQ ID NO: 1502937 - DNA, 15 bp, Homo sapiens
tataaaacagcagct

SEQ ID NO: 1502938 - DNA, 15 bp, Homo sapiens
ataaaacagcagcta

SEQ ID NO: 1502939 - DNA, 15 bp, Homo sapiens
taaaacagcagctaa

SEQ ID NO: 1502940 - DNA, 15 bp, Homo sapiens
aaaacagcagctaag

SEQ ID NO: 1502941 - DNA, 15 bp, Homo sapiens
aaacagcagctaagg

SEQ ID NO: 1502942 - DNA, 15 bp, Homo sapiens
aacagcagctaaggc

SEQ ID NO: 1502943 - DNA, 15 bp, Homo sapiens
acagcagctaaggcc

SEQ ID NO: 1502944 - DNA, 15 bp, Homo sapiens
cagcagctaaggcca

SEQ ID NO: 1502945 - DNA, 15 bp, Homo sapiens
agcagctaaggccat

SEQ ID NO: 1502946 - DNA, 15 bp, Homo sapiens
gcagctaaggccatg

SEQ ID NO: 1502947 - DNA, 15 bp, Homo sapiens
cagctaaggccatgg

SEQ ID NO: 1502948 - DNA, 15 bp, Homo sapiens
agctaaggccatgga

SEQ ID NO: 1502949 - DNA, 15 bp, Homo sapiens
gctaaggccatggat

SEQ ID NO: 1502950 - DNA, 15 bp, Homo sapiens
ctaaggccatggata

SEQ ID NO: 1502951 - DNA, 15 bp, Homo sapiens
taaggccatggataa

SEQ ID NO: 1502952 - DNA, 15 bp, Homo sapiens
aaggccatggataaa

SEQ ID NO: 1502953 - DNA, 15 bp, Homo sapiens
aggccatggataaac

SEQ ID NO: 1502954 - DNA, 15 bp, Homo sapiens
ggccatggataaacc

SEQ ID NO: 1502955 - DNA, 15 bp, Homo sapiens
gccatggataaacct

SEQ ID NO: 1502956 - DNA, 15 bp, Homo sapiens
ccatggataaacctg

SEQ ID NO: 1502957 - DNA, 15 bp, Homo sapiens
catggataaacctgt

SEQ ID NO: 1502958 - DNA, 15 bp, Homo sapiens
atggataaacctgta

SEQ ID NO: 1502959 - DNA, 15 bp, Homo sapiens
tggataaacctgtat

SEQ ID NO: 1502960 - DNA, 15 bp, Homo sapiens
ggataaacctgtatg

SEQ ID NO: 1502961 - DNA, 15 bp, Homo sapiens
gataaacctgtatgt

SEQ ID NO: 1502962 - DNA, 15 bp, Homo sapiens
ataaacctgtatgta

SEQ ID NO: 1502963 - DNA, 15 bp, Homo sapiens
taaacctgtatgtaa

SEQ ID NO: 1502964 - DNA, 15 bp, Homo sapiens
aaacctgtatgtaag

SEQ ID NO: 1502965 - DNA, 15 bp, Homo sapiens
aacctgtatgtaagg

SEQ ID NO: 1502966 - DNA, 15 bp, Homo sapiens
acctgtatgtaagga

SEQ ID NO: 1502967 - DNA, 15 bp, Homo sapiens
cctgtatgtaaggac

SEQ ID NO: 1502968 - DNA, 15 bp, Homo sapiens
ctgtatgtaaggact

SEQ ID NO: 1502969 - DNA, 15 bp, Homo sapiens
tgtatgtaaggactg

SEQ ID NO: 1502970 - DNA, 15 bp, Homo sapiens
gtatgtaaggactgg

SEQ ID NO: 1502971 - DNA, 15 bp, Homo sapiens
tatgtaaggactgga

SEQ ID NO: 1502972 - DNA, 15 bp, Homo sapiens
atgtaaggactggag

SEQ ID NO: 1502973 - DNA, 15 bp, Homo sapiens
tgtaaggactggagc

SEQ ID NO: 1502974 - DNA, 15 bp, Homo sapiens
gtaaggactggagca

SEQ ID NO: 1502975 - DNA, 15 bp, Homo sapiens
taaggactggagcaa

SEQ ID NO: 1502976 - DNA, 15 bp, Homo sapiens
aaggactggagcaaa

SEQ ID NO: 1502977 - DNA, 15 bp, Homo sapiens
aggactggagcaaag

SEQ ID NO: 1502978 - DNA, 15 bp, Homo sapiens
ggactggagcaaagc

SEQ ID NO: 1502979 - DNA, 15 bp, Homo sapiens
gactggagcaaagcg

SEQ ID NO: 1502980 - DNA, 15 bp, Homo sapiens
actggagcaaagcga

SEQ ID NO: 1502981 - DNA, 15 bp, Homo sapiens
ctggagcaaagcgag

SEQ ID NO: 1502982 - DNA, 15 bp, Homo sapiens
tggagcaaagcgagc

SEQ ID NO: 1502983 - DNA, 15 bp, Homo sapiens
ggagcaaagcgagct

SEQ ID NO: 1502984 - DNA, 15 bp, Homo sapiens
gagcaaagcgagctg

SEQ ID NO: 1502985 - DNA, 15 bp, Homo sapiens
agcaaagcgagctgg

SEQ ID NO: 1502986 - DNA, 15 bp, Homo sapiens
gcaaagcgagctggt

SEQ ID NO: 1502987 - DNA, 15 bp, Homo sapiens
caaagcgagctggtc

SEQ ID NO: 1502988 - DNA, 15 bp, Homo sapiens
aaagcgagctggtct

SEQ ID NO: 1502989 - DNA, 15 bp, Homo sapiens
aagcgagctggtcta

SEQ ID NO: 1502990 - DNA, 15 bp, Homo sapiens
agcgagctggtctat

SEQ ID NO: 1502991 - DNA, 15 bp, Homo sapiens
gcgagctggtctatc

SEQ ID NO: 1502992 - DNA, 15 bp, Homo sapiens
cgagctggtctatcc

SEQ ID NO: 1502993 - DNA, 15 bp, Homo sapiens
gagctggtctatcca

SEQ ID NO: 1502994 - DNA, 15 bp, Homo sapiens
agctggtctatccag

SEQ ID NO: 1502995 - DNA, 15 bp, Homo sapiens
gctggtctatccaga

SEQ ID NO: 1502996 - DNA, 15 bp, Homo sapiens
ctggtctatccagac

SEQ ID NO: 1502997 - DNA, 15 bp, Homo sapiens
tggtctatccagact

SEQ ID NO: 1502998 - DNA, 15 bp, Homo sapiens
ggtctatccagactg

SEQ ID NO: 1502999 - DNA, 15 bp, Homo sapiens
gtctatccagactgg

SEQ ID NO: 1503000 - DNA, 15 bp, Homo sapiens
tctatccagactggt

SEQ ID NO: 1503001 - DNA, 15 bp, Homo sapiens
ctatccagactggtc

SEQ ID NO: 1503002 - DNA, 15 bp, Homo sapiens
tatccagactggtct

SEQ ID NO: 1503003 - DNA, 15 bp, Homo sapiens
atccagactggtctg

SEQ ID NO: 1503004 - DNA, 15 bp, Homo sapiens
tccagactggtctgt

SEQ ID NO: 1503005 - DNA, 15 bp, Homo sapiens
ccagactggtctgtg

SEQ ID NO: 1503006 - DNA, 15 bp, Homo sapiens
cagactggtctgtga

SEQ ID NO: 1503007 - DNA, 15 bp, Homo sapiens
agactggtctgtgag

SEQ ID NO: 1503008 - DNA, 15 bp, Homo sapiens
gactggtctgtgaga

SEQ ID NO: 1503009 - DNA, 15 bp, Homo sapiens
actggtctgtgagat

SEQ ID NO: 1503010 - DNA, 15 bp, Homo sapiens
ctggtctgtgagatt

SEQ ID NO: 1503011 - DNA, 15 bp, Homo sapiens
tggtctgtgagattt

SEQ ID NO: 1503012 - DNA, 15 bp, Homo sapiens
ggtctgtgagattta

SEQ ID NO: 1503013 - DNA, 15 bp, Homo sapiens
gtctgtgagatttaa

SEQ ID NO: 1503014 - DNA, 15 bp, Homo sapiens
tctgtgagatttaac

SEQ ID NO: 1503015 - DNA, 15 bp, Homo sapiens
ctgtgagatttaact

SEQ ID NO: 1503016 - DNA, 15 bp, Homo sapiens
tgtgagatttaactc

SEQ ID NO: 1503017 - DNA, 15 bp, Homo sapiens
gtgagatttaactct

SEQ ID NO: 1503018 - DNA, 15 bp, Homo sapiens
tgagatttaactctg

SEQ ID NO: 1503019 - DNA, 15 bp, Homo sapiens
gagatttaactctgc

SEQ ID NO: 1503020 - DNA, 15 bp, Homo sapiens
agatttaactctgca

SEQ ID NO: 1503021 - DNA, 15 bp, Homo sapiens
gatttaactctgcag

SEQ ID NO: 1503022 - DNA, 15 bp, Homo sapiens
atttaactctgcagc

SEQ ID NO: 1503023 - DNA, 15 bp, Homo sapiens
tttaactctgcagcc

SEQ ID NO: 1503024 - DNA, 15 bp, Homo sapiens
ttaactctgcagcct

SEQ ID NO: 1503025 - DNA, 15 bp, Homo sapiens
taactctgcagcctc

SEQ ID NO: 1503026 - DNA, 15 bp, Homo sapiens
aactctgcagcctcc

SEQ ID NO: 1503027 - DNA, 15 bp, Homo sapiens
actctgcagcctccc

SEQ ID NO: 1503028 - DNA, 15 bp, Homo sapiens
ctctgcagcctcccc

SEQ ID NO: 1503029 - DNA, 15 bp, Homo sapiens
tctgcagcctcccct

SEQ ID NO: 1503030 - DNA, 15 bp, Homo sapiens
ctgcagcctcccctg

SEQ ID NO: 1503031 - DNA, 15 bp, Homo sapiens
tgcagcctcccctgg

SEQ ID NO: 1503032 - DNA, 15 bp, Homo sapiens
gcagcctcccctggg

SEQ ID NO: 1503033 - DNA, 15 bp, Homo sapiens
cagcctcccctgggc

SEQ ID NO: 1503034 - DNA, 15 bp, Homo sapiens
agcctcccctgggca

SEQ ID NO: 1503035 - DNA, 15 bp, Homo sapiens
gcctcccctgggcac

SEQ ID NO: 1503036 - DNA, 15 bp, Homo sapiens
cctcccctgggcact

SEQ ID NO: 1503037 - DNA, 15 bp, Homo sapiens
ctcccctgggcactt

SEQ ID NO: 1503038 - DNA, 15 bp, Homo sapiens
tcccctgggcacttc

SEQ ID NO: 1503039 - DNA, 15 bp, Homo sapiens
cccctgggcacttca

SEQ ID NO: 1503040 - DNA, 15 bp, Homo sapiens
ccctgggcacttcag

SEQ ID NO: 1503041 - DNA, 15 bp, Homo sapiens
cctgggcacttcaga

SEQ ID NO: 1503042 - DNA, 15 bp, Homo sapiens
ctgggcacttcagac

SEQ ID NO: 1503043 - DNA, 15 bp, Homo sapiens
tgggcacttcagacc

SEQ ID NO: 1503044 - DNA, 15 bp, Homo sapiens
gggcacttcagaccc

SEQ ID NO: 1503045 - DNA, 15 bp, Homo sapiens
ggcacttcagaccca

SEQ ID NO: 1503046 - DNA, 15 bp, Homo sapiens
gcacttcagacccag

SEQ ID NO: 1503047 - DNA, 15 bp, Homo sapiens
cacttcagacccaga

SEQ ID NO: 1503048 - DNA, 15 bp, Homo sapiens
acttcagacccagac

SEQ ID NO: 1503049 - DNA, 15 bp, Homo sapiens
cttcagacccagacg

SEQ ID NO: 1503050 - DNA, 15 bp, Homo sapiens
ttcagacccagacgg

SEQ ID NO: 1503051 - DNA, 15 bp, Homo sapiens
tcagacccagacggc

SEQ ID NO: 1503052 - DNA, 15 bp, Homo sapiens
cagacccagacggcc

SEQ ID NO: 1503053 - DNA, 15 bp, Homo sapiens
agacccagacggcca

SEQ ID NO: 1503054 - DNA, 15 bp, Homo sapiens
gacccagacggccac

SEQ ID NO: 1503055 - DNA, 15 bp, Homo sapiens
acccagacggccacc

SEQ ID NO: 1503056 - DNA, 15 bp, Homo sapiens
cccagacggccacct

SEQ ID NO: 1503057 - DNA, 15 bp, Homo sapiens
ccagacggccacctt

SEQ ID NO: 1503058 - DNA, 15 bp, Homo sapiens
cagacggccaccttc

SEQ ID NO: 1503059 - DNA, 15 bp, Homo sapiens
agacggccaccttct

SEQ ID NO: 1503060 - DNA, 15 bp, Homo sapiens
gacggccaccttctg

SEQ ID NO: 1503061 - DNA, 15 bp, Homo sapiens
acggccaccttctgc

SEQ ID NO: 1503062 - DNA, 15 bp, Homo sapiens
cggccaccttctgcc

SEQ ID NO: 1503063 - DNA, 15 bp, Homo sapiens
ggccaccttctgcca

SEQ ID NO: 1503064 - DNA, 15 bp, Homo sapiens
gccaccttctgccac

SEQ ID NO: 1503065 - DNA, 15 bp, Homo sapiens
ccaccttctgccact

SEQ ID NO: 1503066 - DNA, 15 bp, Homo sapiens
caccttctgccactc

SEQ ID NO: 1503067 - DNA, 15 bp, Homo sapiens
accttctgccactcc

SEQ ID NO: 1503068 - DNA, 15 bp, Homo sapiens
ccttctgccactcca

SEQ ID NO: 1503069 - DNA, 15 bp, Homo sapiens
cttctgccactccag

SEQ ID NO: 1503070 - DNA, 15 bp, Homo sapiens
ttctgccactccagc

SEQ ID NO: 1503071 - DNA, 15 bp, Homo sapiens
tctgccactccagca

SEQ ID NO: 1503072 - DNA, 15 bp, Homo sapiens
ctgccactccagcaa

SEQ ID NO: 1503073 - DNA, 15 bp, Homo sapiens
tgccactccagcaaa

SEQ ID NO: 1503074 - DNA, 15 bp, Homo sapiens
gccactccagcaaag

SEQ ID NO: 1503075 - DNA, 15 bp, Homo sapiens
ccactccagcaaaga

SEQ ID NO: 1503076 - DNA, 15 bp, Homo sapiens
cactccagcaaagaa

SEQ ID NO: 1503077 - DNA, 15 bp, Homo sapiens
actccagcaaagaat

SEQ ID NO: 1503078 - DNA, 15 bp, Homo sapiens
ctccagcaaagaata

SEQ ID NO: 1503079 - DNA, 15 bp, Homo sapiens
tccagcaaagaataa

SEQ ID NO: 1503080 - DNA, 15 bp, Homo sapiens
ccagcaaagaataag

SEQ ID NO: 1503081 - DNA, 15 bp, Homo sapiens
cagcaaagaataagc

SEQ ID NO: 1503082 - DNA, 15 bp, Homo sapiens
agcaaagaataagcg

SEQ ID NO: 1503083 - DNA, 15 bp, Homo sapiens
gcaaagaataagcgc

SEQ ID NO: 1503084 - DNA, 15 bp, Homo sapiens
caaagaataagcgcc

SEQ ID NO: 1503085 - DNA, 15 bp, Homo sapiens
aaagaataagcgccc

SEQ ID NO: 1503086 - DNA, 15 bp, Homo sapiens
aagaataagcgccct

SEQ ID NO: 1503087 - DNA, 15 bp, Homo sapiens
agaataagcgccctg

SEQ ID NO: 1503088 - DNA, 15 bp, Homo sapiens
gaataagcgccctgc

SEQ ID NO: 1503089 - DNA, 15 bp, Homo sapiens
aataagcgccctgct

SEQ ID NO: 1503090 - DNA, 15 bp, Homo sapiens
ataagcgccctgctt

SEQ ID NO: 1503091 - DNA, 15 bp, Homo sapiens
taagcgccctgcttc

SEQ ID NO: 1503092 - DNA, 15 bp, Homo sapiens
aagcgccctgcttcc

SEQ ID NO: 1503093 - DNA, 15 bp, Homo sapiens
agcgccctgcttcct

SEQ ID NO: 1503094 - DNA, 15 bp, Homo sapiens
gcgccctgcttcctt

SEQ ID NO: 1503095 - DNA, 15 bp, Homo sapiens
cgccctgcttccttc

SEQ ID NO: 1503096 - DNA, 15 bp, Homo sapiens
gccctgcttccttca

SEQ ID NO: 1503097 - DNA, 15 bp, Homo sapiens
ccctgcttccttcag

SEQ ID NO: 1503098 - DNA, 15 bp, Homo sapiens
cctgcttccttcagg

SEQ ID NO: 1503099 - DNA, 15 bp, Homo sapiens
ctgcttccttcaggt

SEQ ID NO: 1503100 - DNA, 15 bp, Homo sapiens
tgcttccttcaggtc

SEQ ID NO: 1503101 - DNA, 15 bp, Homo sapiens
gcttccttcaggtct

SEQ ID NO: 1503102 - DNA, 15 bp, Homo sapiens
cttccttcaggtctc

SEQ ID NO: 1503103 - DNA, 15 bp, Homo sapiens
ttccttcaggtctca

SEQ ID NO: 1503104 - DNA, 15 bp, Homo sapiens
tccttcaggtctcag

SEQ ID NO: 1503105 - DNA, 15 bp, Homo sapiens
ccttcaggtctcaga

SEQ ID NO: 1503106 - DNA, 15 bp, Homo sapiens
cttcaggtctcagac

SEQ ID NO: 1503107 - DNA, 15 bp, Homo sapiens
ttcaggtctcagacc

SEQ ID NO: 1503108 - DNA, 15 bp, Homo sapiens
tcaggtctcagacca

SEQ ID NO: 1503109 - DNA, 15 bp, Homo sapiens
caggtctcagaccag

SEQ ID NO: 1503110 - DNA, 15 bp, Homo sapiens
aggtctcagaccagg

SEQ ID NO: 1503111 - DNA, 15 bp, Homo sapiens
ggtctcagaccagga

SEQ ID NO: 1503112 - DNA, 15 bp, Homo sapiens
gtctcagaccaggac

SEQ ID NO: 1503113 - DNA, 15 bp, Homo sapiens
tctcagaccaggact

SEQ ID NO: 1503114 - DNA, 15 bp, Homo sapiens
ctcagaccaggactt

SEQ ID NO: 1503115 - DNA, 15 bp, Homo sapiens
tcagaccaggacttt

SEQ ID NO: 1503116 - DNA, 15 bp, Homo sapiens
cagaccaggacttta

SEQ ID NO: 1503117 - DNA, 15 bp, Homo sapiens
agaccaggactttat

SEQ ID NO: 1503118 - DNA, 15 bp, Homo sapiens
gaccaggactttatg

SEQ ID NO: 1503119 - DNA, 15 bp, Homo sapiens
accaggactttatgg

SEQ ID NO: 1503120 - DNA, 15 bp, Homo sapiens
ccaggactttatggc

SEQ ID NO: 1503121 - DNA, 15 bp, Homo sapiens
caggactttatggct

SEQ ID NO: 1503122 - DNA, 15 bp, Homo sapiens
aggactttatggctc

SEQ ID NO: 1503123 - DNA, 15 bp, Homo sapiens
ggactttatggctca

SEQ ID NO: 1503124 - DNA, 15 bp, Homo sapiens
gactttatggctcat

SEQ ID NO: 1503125 - DNA, 15 bp, Homo sapiens
actttatggctcatg

SEQ ID NO: 1503126 - DNA, 15 bp, Homo sapiens
ctttatggctcatgc

SEQ ID NO: 1503127 - DNA, 15 bp, Homo sapiens
tttatggctcatgca

SEQ ID NO: 1503128 - DNA, 15 bp, Homo sapiens
ttatggctcatgcag

SEQ ID NO: 1503129 - DNA, 15 bp, Homo sapiens
tatggctcatgcaga

SEQ ID NO: 1503130 - DNA, 15 bp, Homo sapiens
atggctcatgcagat

SEQ ID NO: 1503131 - DNA, 15 bp, Homo sapiens
tggctcatgcagatt

SEQ ID NO: 1503132 - DNA, 15 bp, Homo sapiens
ggctcatgcagattt

SEQ ID NO: 1503133 - DNA, 15 bp, Homo sapiens
gctcatgcagatttt

SEQ ID NO: 1503134 - DNA, 15 bp, Homo sapiens
ctcatgcagattttt

SEQ ID NO: 1503135 - DNA, 15 bp, Homo sapiens
tcatgcagattttta

SEQ ID NO: 1503136 - DNA, 15 bp, Homo sapiens
catgcagatttttaa

SEQ ID NO: 1503137 - DNA, 15 bp, Homo sapiens
atgcagatttttaag

SEQ ID NO: 1503138 - DNA, 15 bp, Homo sapiens
tgcagatttttaagg

SEQ ID NO: 1503139 - DNA, 15 bp, Homo sapiens
gcagatttttaaggt

SEQ ID NO: 1503140 - DNA, 15 bp, Homo sapiens
cagatttttaaggtc

SEQ ID NO: 1503141 - DNA, 15 bp, Homo sapiens
agatttttaaggtca

SEQ ID NO: 1503142 - DNA, 15 bp, Homo sapiens
gatttttaaggtcat

SEQ ID NO: 1503143 - DNA, 15 bp, Homo sapiens
ttaaggtcatttttc

SEQ ID NO: 1503144 - DNA, 15 bp, Homo sapiens
taaggtcatttttct

SEQ ID NO: 1503145 - DNA, 15 bp, Homo sapiens
aaggtcatttttctt

SEQ ID NO: 1503146 - DNA, 15 bp, Homo sapiens
aggtcatttttcttc

SEQ ID NO: 1503147 - DNA, 15 bp, Homo sapiens
ggtcatttttcttcc

SEQ ID NO: 1503148 - DNA, 15 bp, Homo sapiens
gtcatttttcttccc

SEQ ID NO: 1503149 - DNA, 15 bp, Homo sapiens
tcatttttcttccca

SEQ ID NO: 1503150 - DNA, 15 bp, Homo sapiens
catttttcttcccaa

SEQ ID NO: 1503151 - DNA, 15 bp, Homo sapiens
atttttcttcccaag

SEQ ID NO: 1503152 - DNA, 15 bp, Homo sapiens
tttttcttcccaagg

SEQ ID NO: 1503153 - DNA, 15 bp, Homo sapiens
ttttcttcccaagga

SEQ ID NO: 1503154 - DNA, 15 bp, Homo sapiens
tttcttcccaaggaa

SEQ ID NO: 1503155 - DNA, 15 bp, Homo sapiens
ttcttcccaaggaag

SEQ ID NO: 1503156 - DNA, 15 bp, Homo sapiens
tcttcccaaggaaga

SEQ ID NO: 1503157 - DNA, 15 bp, Homo sapiens
cttcccaaggaagaa

SEQ ID NO: 1503158 - DNA, 15 bp, Homo sapiens
ttcccaaggaagaaa

SEQ ID NO: 1503159 - DNA, 15 bp, Homo sapiens
tcccaaggaagaaac

SEQ ID NO: 1503160 - DNA, 15 bp, Homo sapiens
cccaaggaagaaact

SEQ ID NO: 1503161 - DNA, 15 bp, Homo sapiens
ccaaggaagaaactt

SEQ ID NO: 1503162 - DNA, 15 bp, Homo sapiens
caaggaagaaacttg

SEQ ID NO: 1503163 - DNA, 15 bp, Homo sapiens
aaggaagaaacttgc

SEQ ID NO: 1503164 - DNA, 15 bp, Homo sapiens
aggaagaaacttgcc

SEQ ID NO: 1503165 - DNA, 15 bp, Homo sapiens
ggaagaaacttgcct

SEQ ID NO: 1503166 - DNA, 15 bp, Homo sapiens
gaagaaacttgcctc

SEQ ID NO: 1503167 - DNA, 15 bp, Homo sapiens
aagaaacttgcctcc

SEQ ID NO: 1503168 - DNA, 15 bp, Homo sapiens
agaaacttgcctcca

SEQ ID NO: 1503169 - DNA, 15 bp, Homo sapiens
gaaacttgcctccag

SEQ ID NO: 1503170 - DNA, 15 bp, Homo sapiens
aaacttgcctccagt

SEQ ID NO: 1503171 - DNA, 15 bp, Homo sapiens
aacttgcctccagtt

SEQ ID NO: 1503172 - DNA, 15 bp, Homo sapiens
acttgcctccagttc

SEQ ID NO: 1503173 - DNA, 15 bp, Homo sapiens
cttgcctccagttcc

SEQ ID NO: 1503174 - DNA, 15 bp, Homo sapiens
ttgcctccagttcct

SEQ ID NO: 1503175 - DNA, 15 bp, Homo sapiens
tgcctccagttcctt

SEQ ID NO: 1503176 - DNA, 15 bp, Homo sapiens
gcctccagttccttc

SEQ ID NO: 1503177 - DNA, 15 bp, Homo sapiens
cctccagttccttca

SEQ ID NO: 1503178 - DNA, 15 bp, Homo sapiens
ctccagttccttcac

SEQ ID NO: 1503179 - DNA, 15 bp, Homo sapiens
tccagttccttcact

SEQ ID NO: 1503180 - DNA, 15 bp, Homo sapiens
ccagttccttcactg

SEQ ID NO: 1503181 - DNA, 15 bp, Homo sapiens
cagttccttcactgt

SEQ ID NO: 1503182 - DNA, 15 bp, Homo sapiens
agttccttcactgtt

SEQ ID NO: 1503183 - DNA, 15 bp, Homo sapiens
gttccttcactgtta

SEQ ID NO: 1503184 - DNA, 15 bp, Homo sapiens
ttccttcactgttag

SEQ ID NO: 1503185 - DNA, 15 bp, Homo sapiens
tccttcactgttagg

SEQ ID NO: 1503186 - DNA, 15 bp, Homo sapiens
ccttcactgttaggt

SEQ ID NO: 1503187 - DNA, 15 bp, Homo sapiens
cttcactgttaggta

SEQ ID NO: 1503188 - DNA, 15 bp, Homo sapiens
ttcactgttaggtag

SEQ ID NO: 1503189 - DNA, 15 bp, Homo sapiens
tcactgttaggtagc

SEQ ID NO: 1503190 - DNA, 15 bp, Homo sapiens
cactgttaggtagct

SEQ ID NO: 1503191 - DNA, 15 bp, Homo sapiens
actgttaggtagctt

SEQ ID NO: 1503192 - DNA, 15 bp, Homo sapiens
ctgttaggtagctta

SEQ ID NO: 1503193 - DNA, 15 bp, Homo sapiens
tgttaggtagcttat

SEQ ID NO: 1503194 - DNA, 15 bp, Homo sapiens
gttaggtagcttatt

SEQ ID NO: 1503195 - DNA, 15 bp, Homo sapiens
ttaggtagcttattt

SEQ ID NO: 1503196 - DNA, 15 bp, Homo sapiens
taggtagcttatttt

SEQ ID NO: 1503197 - DNA, 15 bp, Homo sapiens
aggtagcttattttc

SEQ ID NO: 1503198 - DNA, 15 bp, Homo sapiens
ggtagcttattttca

SEQ ID NO: 1503199 - DNA, 15 bp, Homo sapiens
gtagcttattttcat

SEQ ID NO: 1503200 - DNA, 15 bp, Homo sapiens
tagcttattttcatt

SEQ ID NO: 1503201 - DNA, 15 bp, Homo sapiens
agcttattttcattt

SEQ ID NO: 1503202 - DNA, 15 bp, Homo sapiens
gcttattttcatttt

SEQ ID NO: 1503203 - DNA, 15 bp, Homo sapiens
ttattttcattttct

SEQ ID NO: 1503204 - DNA, 15 bp, Homo sapiens
tattttcattttctc

SEQ ID NO: 1503205 - DNA, 15 bp, Homo sapiens
attttcattttctct

SEQ ID NO: 1503206 - DNA, 15 bp, Homo sapiens
ttttcattttctcta

SEQ ID NO: 1503207 - DNA, 15 bp, Homo sapiens
tttcattttctctat

SEQ ID NO: 1503208 - DNA, 15 bp, Homo sapiens
ttcattttctctatt

SEQ ID NO: 1503209 - DNA, 15 bp, Homo sapiens
tcattttctctattt

SEQ ID NO: 1503210 - DNA, 15 bp, Homo sapiens
cattttctctatttt

SEQ ID NO: 1503211 - DNA, 15 bp, Homo sapiens
attttctctatttta

SEQ ID NO: 1503212 - DNA, 15 bp, Homo sapiens
ttttctctattttac

SEQ ID NO: 1503213 - DNA, 15 bp, Homo sapiens
tttctctattttaca

SEQ ID NO: 1503214 - DNA, 15 bp, Homo sapiens
ttctctattttacaa

SEQ ID NO: 1503215 - DNA, 15 bp, Homo sapiens
tctctattttacaat

SEQ ID NO: 1503216 - DNA, 15 bp, Homo sapiens
ctctattttacaatg

SEQ ID NO: 1503217 - DNA, 15 bp, Homo sapiens
tctattttacaatga

SEQ ID NO: 1503218 - DNA, 15 bp, Homo sapiens
ctattttacaatgaa

SEQ ID NO: 1503219 - DNA, 15 bp, Homo sapiens
tattttacaatgaaa

SEQ ID NO: 1503220 - DNA, 15 bp, Homo sapiens
attttacaatgaaaa

SEQ ID NO: 1503221 - DNA, 15 bp, Homo sapiens
ttttacaatgaaaag

SEQ ID NO: 1503222 - DNA, 15 bp, Homo sapiens
tttacaatgaaaaga

SEQ ID NO: 1503223 - DNA, 15 bp, Homo sapiens
ttacaatgaaaagag

SEQ ID NO: 1503224 - DNA, 15 bp, Homo sapiens
tacaatgaaaagagt

SEQ ID NO: 1503225 - DNA, 15 bp, Homo sapiens
acaatgaaaagagtg

SEQ ID NO: 1503226 - DNA, 15 bp, Homo sapiens
caatgaaaagagtga

SEQ ID NO: 1503227 - DNA, 15 bp, Homo sapiens
aatgaaaagagtgag

SEQ ID NO: 1503228 - DNA, 15 bp, Homo sapiens
atgaaaagagtgaga

SEQ ID NO: 1503229 - DNA, 15 bp, Homo sapiens
tgaaaagagtgagac

SEQ ID NO: 1503230 - DNA, 15 bp, Homo sapiens
gaaaagagtgagacc

SEQ ID NO: 1503231 - DNA, 15 bp, Homo sapiens
aaaagagtgagacct

SEQ ID NO: 1503232 - DNA, 15 bp, Homo sapiens
aaagagtgagacctg

SEQ ID NO: 1503233 - DNA, 15 bp, Homo sapiens
aagagtgagacctgg

SEQ ID NO: 1503234 - DNA, 15 bp, Homo sapiens
agagtgagacctggg

SEQ ID NO: 1503235 - DNA, 15 bp, Homo sapiens
gagtgagacctggga

SEQ ID NO: 1503236 - DNA, 15 bp, Homo sapiens
agtgagacctgggaa

SEQ ID NO: 1503237 - DNA, 15 bp, Homo sapiens
gtgagacctgggaag

SEQ ID NO: 1503238 - DNA, 15 bp, Homo sapiens
tgagacctgggaagt

SEQ ID NO: 1503239 - DNA, 15 bp, Homo sapiens
gagacctgggaagtc

SEQ ID NO: 1503240 - DNA, 15 bp, Homo sapiens
agacctgggaagtcc

SEQ ID NO: 1503241 - DNA, 15 bp, Homo sapiens
gacctgggaagtcct

SEQ ID NO: 1503242 - DNA, 15 bp, Homo sapiens
acctgggaagtcctt

SEQ ID NO: 1503243 - DNA, 15 bp, Homo sapiens
cctgggaagtccttg

SEQ ID NO: 1503244 - DNA, 15 bp, Homo sapiens
ctgggaagtccttga

SEQ ID NO: 1503245 - DNA, 15 bp, Homo sapiens
tgggaagtccttgat

SEQ ID NO: 1503246 - DNA, 15 bp, Homo sapiens
gggaagtccttgatt

SEQ ID NO: 1503247 - DNA, 15 bp, Homo sapiens
ggaagtccttgattt

SEQ ID NO: 1503248 - DNA, 15 bp, Homo sapiens
gaagtccttgatttg

SEQ ID NO: 1503249 - DNA, 15 bp, Homo sapiens
aagtccttgatttgc

SEQ ID NO: 1503250 - DNA, 15 bp, Homo sapiens
agtccttgatttgca

SEQ ID NO: 1503251 - DNA, 15 bp, Homo sapiens
gtccttgatttgcaa

SEQ ID NO: 1503252 - DNA, 15 bp, Homo sapiens
tccttgatttgcaag

SEQ ID NO: 1503253 - DNA, 15 bp, Homo sapiens
ccttgatttgcaagg

SEQ ID NO: 1503254 - DNA, 15 bp, Homo sapiens
cttgatttgcaagga

SEQ ID NO: 1503255 - DNA, 15 bp, Homo sapiens
ttgatttgcaaggaa

SEQ ID NO: 1503256 - DNA, 15 bp, Homo sapiens
tgatttgcaaggaat

SEQ ID NO: 1503257 - DNA, 15 bp, Homo sapiens
gatttgcaaggaatt

SEQ ID NO: 1503258 - DNA, 15 bp, Homo sapiens
atttgcaaggaatta

SEQ ID NO: 1503259 - DNA, 15 bp, Homo sapiens
tttgcaaggaattag

SEQ ID NO: 1503260 - DNA, 15 bp, Homo sapiens
ttgcaaggaattaga

SEQ ID NO: 1503261 - DNA, 15 bp, Homo sapiens
tgcaaggaattagac

SEQ ID NO: 1503262 - DNA, 15 bp, Homo sapiens
gcaaggaattagact

SEQ ID NO: 1503263 - DNA, 15 bp, Homo sapiens
caaggaattagactc

SEQ ID NO: 1503264 - DNA, 15 bp, Homo sapiens
aaggaattagactca

SEQ ID NO: 1503265 - DNA, 15 bp, Homo sapiens
aggaattagactcac

SEQ ID NO: 1503266 - DNA, 15 bp, Homo sapiens
ggaattagactcaca

SEQ ID NO: 1503267 - DNA, 15 bp, Homo sapiens
gaattagactcacag

SEQ ID NO: 1503268 - DNA, 15 bp, Homo sapiens
aattagactcacagc

SEQ ID NO: 1503269 - DNA, 15 bp, Homo sapiens
attagactcacagca

SEQ ID NO: 1503270 - DNA, 15 bp, Homo sapiens
ttagactcacagcat

SEQ ID NO: 1503271 - DNA, 15 bp, Homo sapiens
tagactcacagcatt

SEQ ID NO: 1503272 - DNA, 15 bp, Homo sapiens
agactcacagcattg

SEQ ID NO: 1503273 - DNA, 15 bp, Homo sapiens
gactcacagcattgg

SEQ ID NO: 1503274 - DNA, 15 bp, Homo sapiens
actcacagcattggt

SEQ ID NO: 1503275 - DNA, 15 bp, Homo sapiens
ctcacagcattggta

SEQ ID NO: 1503276 - DNA, 15 bp, Homo sapiens
tcacagcattggtaa

SEQ ID NO: 1503277 - DNA, 15 bp, Homo sapiens
cacagcattggtaac

SEQ ID NO: 1503278 - DNA, 15 bp, Homo sapiens
acagcattggtaacc

SEQ ID NO: 1503279 - DNA, 15 bp, Homo sapiens
cagcattggtaaccc

SEQ ID NO: 1503280 - DNA, 15 bp, Homo sapiens
agcattggtaaccct

SEQ ID NO: 1503281 - DNA, 15 bp, Homo sapiens
gcattggtaacccta

SEQ ID NO: 1503282 - DNA, 15 bp, Homo sapiens
cattggtaaccctag

SEQ ID NO: 1503283 - DNA, 15 bp, Homo sapiens
attggtaaccctaga

SEQ ID NO: 1503284 - DNA, 15 bp, Homo sapiens
ttggtaaccctagaa

SEQ ID NO: 1503285 - DNA, 15 bp, Homo sapiens
tggtaaccctagaac

SEQ ID NO: 1503286 - DNA, 15 bp, Homo sapiens
ggtaaccctagaacc

SEQ ID NO: 1503287 - DNA, 15 bp, Homo sapiens
gtaaccctagaacct

SEQ ID NO: 1503288 - DNA, 15 bp, Homo sapiens
taaccctagaacctt

SEQ ID NO: 1503289 - DNA, 15 bp, Homo sapiens
aaccctagaaccttc

SEQ ID NO: 1503290 - DNA, 15 bp, Homo sapiens
accctagaaccttct

SEQ ID NO: 1503291 - DNA, 15 bp, Homo sapiens
ccctagaaccttctt

SEQ ID NO: 1503292 - DNA, 15 bp, Homo sapiens
cctagaaccttctta

SEQ ID NO: 1503293 - DNA, 15 bp, Homo sapiens
ctagaaccttcttag

SEQ ID NO: 1503294 - DNA, 15 bp, Homo sapiens
tagaaccttcttagg

SEQ ID NO: 1503295 - DNA, 15 bp, Homo sapiens
agaaccttcttaggg

SEQ ID NO: 1503296 - DNA, 15 bp, Homo sapiens
gaaccttcttagggt

SEQ ID NO: 1503297 - DNA, 15 bp, Homo sapiens
aaccttcttagggta

SEQ ID NO: 1503298 - DNA, 15 bp, Homo sapiens
accttcttagggtaa

SEQ ID NO: 1503299 - DNA, 15 bp, Homo sapiens
ccttcttagggtaac

SEQ ID NO: 1503300 - DNA, 15 bp, Homo sapiens
cttcttagggtaaca

SEQ ID NO: 1503301 - DNA, 15 bp, Homo sapiens
ttcttagggtaacac

SEQ ID NO: 1503302 - DNA, 15 bp, Homo sapiens
tcttagggtaacact

SEQ ID NO: 1503303 - DNA, 15 bp, Homo sapiens
cttagggtaacacta

SEQ ID NO: 1503304 - DNA, 15 bp, Homo sapiens
ttagggtaacactaa

SEQ ID NO: 1503305 - DNA, 15 bp, Homo sapiens
tagggtaacactaag

SEQ ID NO: 1503306 - DNA, 15 bp, Homo sapiens
agggtaacactaagt

SEQ ID NO: 1503307 - DNA, 15 bp, Homo sapiens
gggtaacactaagta

SEQ ID NO: 1503308 - DNA, 15 bp, Homo sapiens
ggtaacactaagtac

SEQ ID NO: 1503309 - DNA, 15 bp, Homo sapiens
gtaacactaagtacc

SEQ ID NO: 1503310 - DNA, 15 bp, Homo sapiens
taacactaagtacct

SEQ ID NO: 1503311 - DNA, 15 bp, Homo sapiens
aacactaagtacctt

SEQ ID NO: 1503312 - DNA, 15 bp, Homo sapiens
acactaagtaccttc

SEQ ID NO: 1503313 - DNA, 15 bp, Homo sapiens
cactaagtaccttct

SEQ ID NO: 1503314 - DNA, 15 bp, Homo sapiens
actaagtaccttcta

SEQ ID NO: 1503315 - DNA, 15 bp, Homo sapiens
ctaagtaccttctag

SEQ ID NO: 1503316 - DNA, 15 bp, Homo sapiens
taagtaccttctaga

SEQ ID NO: 1503317 - DNA, 15 bp, Homo sapiens
aagtaccttctagac

SEQ ID NO: 1503318 - DNA, 15 bp, Homo sapiens
agtaccttctagaca

SEQ ID NO: 1503319 - DNA, 15 bp, Homo sapiens
gtaccttctagacaa

SEQ ID NO: 1503320 - DNA, 15 bp, Homo sapiens
taccttctagacaac

SEQ ID NO: 1503321 - DNA, 15 bp, Homo sapiens
accttctagacaaca

SEQ ID NO: 1503322 - DNA, 15 bp, Homo sapiens
ccttctagacaacat

SEQ ID NO: 1503323 - DNA, 15 bp, Homo sapiens
cttctagacaacatg

SEQ ID NO: 1503324 - DNA, 15 bp, Homo sapiens
ttctagacaacatgt

SEQ ID NO: 1503325 - DNA, 15 bp, Homo sapiens
tctagacaacatgtc

SEQ ID NO: 1503326 - DNA, 15 bp, Homo sapiens
ctagacaacatgtct

SEQ ID NO: 1503327 - DNA, 15 bp, Homo sapiens
tagacaacatgtcta

SEQ ID NO: 1503328 - DNA, 15 bp, Homo sapiens
agacaacatgtctac

SEQ ID NO: 1503329 - DNA, 15 bp, Homo sapiens
gacaacatgtctacc

SEQ ID NO: 1503330 - DNA, 15 bp, Homo sapiens
acaacatgtctacct

SEQ ID NO: 1503331 - DNA, 15 bp, Homo sapiens
caacatgtctaccta

SEQ ID NO: 1503332 - DNA, 15 bp, Homo sapiens
aacatgtctacctaa

SEQ ID NO: 1503333 - DNA, 15 bp, Homo sapiens
acatgtctacctaaa

SEQ ID NO: 1503334 - DNA, 15 bp, Homo sapiens
catgtctacctaaat

SEQ ID NO: 1503335 - DNA, 15 bp, Homo sapiens
atgtctacctaaatg

SEQ ID NO: 1503336 - DNA, 15 bp, Homo sapiens
tgtctacctaaatga

SEQ ID NO: 1503337 - DNA, 15 bp, Homo sapiens
gtctacctaaatgaa

SEQ ID NO: 1503338 - DNA, 15 bp, Homo sapiens
tctacctaaatgaaa

SEQ ID NO: 1503339 - DNA, 15 bp, Homo sapiens
ctacctaaatgaaat

SEQ ID NO: 1503340 - DNA, 15 bp, Homo sapiens
tacctaaatgaaatg

SEQ ID NO: 1503341 - DNA, 15 bp, Homo sapiens
acctaaatgaaatgg

SEQ ID NO: 1503342 - DNA, 15 bp, Homo sapiens
cctaaatgaaatggg

SEQ ID NO: 1503343 - DNA, 15 bp, Homo sapiens
ctaaatgaaatggga

SEQ ID NO: 1503344 - DNA, 15 bp, Homo sapiens
taaatgaaatgggat

SEQ ID NO: 1503345 - DNA, 15 bp, Homo sapiens
aaatgaaatgggatg

SEQ ID NO: 1503346 - DNA, 15 bp, Homo sapiens
aatgaaatgggatgt

SEQ ID NO: 1503347 - DNA, 15 bp, Homo sapiens
atgaaatgggatgtg

SEQ ID NO: 1503348 - DNA, 15 bp, Homo sapiens
tgaaatgggatgtgt

SEQ ID NO: 1503349 - DNA, 15 bp, Homo sapiens
gaaatgggatgtgtt

SEQ ID NO: 1503350 - DNA, 15 bp, Homo sapiens
aaatgggatgtgttt

SEQ ID NO: 1503351 - DNA, 15 bp, Homo sapiens
aatgggatgtgtttc

SEQ ID NO: 1503352 - DNA, 15 bp, Homo sapiens
atgggatgtgtttcg

SEQ ID NO: 1503353 - DNA, 15 bp, Homo sapiens
tgggatgtgtttcgg

SEQ ID NO: 1503354 - DNA, 15 bp, Homo sapiens
gggatgtgtttcgga

SEQ ID NO: 1503355 - DNA, 15 bp, Homo sapiens
ggatgtgtttcggaa

SEQ ID NO: 1503356 - DNA, 15 bp, Homo sapiens
gatgtgtttcggaac

SEQ ID NO: 1503357 - DNA, 15 bp, Homo sapiens
atgtgtttcggaaca

SEQ ID NO: 1503358 - DNA, 15 bp, Homo sapiens
tgtgtttcggaacat

SEQ ID NO: 1503359 - DNA, 15 bp, Homo sapiens
gtgtttcggaacatt

SEQ ID NO: 1503360 - DNA, 15 bp, Homo sapiens
tgtttcggaacattt

SEQ ID NO: 1503361 - DNA, 15 bp, Homo sapiens
gtttcggaacatttg

SEQ ID NO: 1503362 - DNA, 15 bp, Homo sapiens
tttcggaacatttgt

SEQ ID NO: 1503363 - DNA, 15 bp, Homo sapiens
ttcggaacatttgtc

SEQ ID NO: 1503364 - DNA, 15 bp, Homo sapiens
tcggaacatttgtct

SEQ ID NO: 1503365 - DNA, 15 bp, Homo sapiens
cggaacatttgtctc

SEQ ID NO: 1503366 - DNA, 15 bp, Homo sapiens
ggaacatttgtctcc

SEQ ID NO: 1503367 - DNA, 15 bp, Homo sapiens
gaacatttgtctcca

SEQ ID NO: 1503368 - DNA, 15 bp, Homo sapiens
aacatttgtctccag

SEQ ID NO: 1503369 - DNA, 15 bp, Homo sapiens
acatttgtctccagt

SEQ ID NO: 1503370 - DNA, 15 bp, Homo sapiens
catttgtctccagtt

SEQ ID NO: 1503371 - DNA, 15 bp, Homo sapiens
atttgtctccagttt

SEQ ID NO: 1503372 - DNA, 15 bp, Homo sapiens
tttgtctccagtttt

SEQ ID NO: 1503373 - DNA, 15 bp, Homo sapiens
ttgtctccagttttt

SEQ ID NO: 1503374 - DNA, 15 bp, Homo sapiens
tgtctccagtttttt

SEQ ID NO: 1503375 - DNA, 15 bp, Homo sapiens
gtctccagttttttt

SEQ ID NO: 1503376 - DNA, 15 bp, Homo sapiens
tctccagtttttttt

SEQ ID NO: 1503377 - DNA, 15 bp, Homo sapiens
ctccagttttttttt

SEQ ID NO: 1503378 - DNA, 15 bp, Homo sapiens
tccagttttttttta

SEQ ID NO: 1503379 - DNA, 15 bp, Homo sapiens
ccagtttttttttaa

SEQ ID NO: 1503380 - DNA, 15 bp, Homo sapiens
cagtttttttttaat

SEQ ID NO: 1503381 - DNA, 15 bp, Homo sapiens
agtttttttttaatc

SEQ ID NO: 1503382 - DNA, 15 bp, Homo sapiens
gtttttttttaatct

SEQ ID NO: 1503383 - DNA, 15 bp, Homo sapiens
tttttttttaatctt

SEQ ID NO: 1503384 - DNA, 15 bp, Homo sapiens
ttttttttaatcttg

SEQ ID NO: 1503385 - DNA, 15 bp, Homo sapiens
tttttttaatcttgc

SEQ ID NO: 1503386 - DNA, 15 bp, Homo sapiens
ttttttaatcttgca

SEQ ID NO: 1503387 - DNA, 15 bp, Homo sapiens
tttttaatcttgcac

SEQ ID NO: 1503388 - DNA, 15 bp, Homo sapiens
ttttaatcttgcacc

SEQ ID NO: 1503389 - DNA, 15 bp, Homo sapiens
tttaatcttgcaccc

SEQ ID NO: 1503390 - DNA, 15 bp, Homo sapiens
ttaatcttgcaccct

SEQ ID NO: 1503391 - DNA, 15 bp, Homo sapiens
taatcttgcaccctg

SEQ ID NO: 1503392 - DNA, 15 bp, Homo sapiens
aatcttgcaccctgc

SEQ ID NO: 1503393 - DNA, 15 bp, Homo sapiens
atcttgcaccctgcc

SEQ ID NO: 1503394 - DNA, 15 bp, Homo sapiens
tcttgcaccctgcca

SEQ ID NO: 1503395 - DNA, 15 bp, Homo sapiens
cttgcaccctgccat

SEQ ID NO: 1503396 - DNA, 15 bp, Homo sapiens
ttgcaccctgccatt

SEQ ID NO: 1503397 - DNA, 15 bp, Homo sapiens
tgcaccctgccattt

SEQ ID NO: 1503398 - DNA, 15 bp, Homo sapiens
gcaccctgccattta

SEQ ID NO: 1503399 - DNA, 15 bp, Homo sapiens
caccctgccatttaa

SEQ ID NO: 1503400 - DNA, 15 bp, Homo sapiens
accctgccatttaaa

SEQ ID NO: 1503401 - DNA, 15 bp, Homo sapiens
ccctgccatttaaaa

SEQ ID NO: 1503402 - DNA, 15 bp, Homo sapiens
cctgccatttaaaaa

SEQ ID NO: 1503403 - DNA, 15 bp, Homo sapiens
ctgccatttaaaaag

SEQ ID NO: 1503404 - DNA, 15 bp, Homo sapiens
tgccatttaaaaaga

SEQ ID NO: 1503405 - DNA, 15 bp, Homo sapiens
gccatttaaaaagat

SEQ ID NO: 1503406 - DNA, 15 bp, Homo sapiens
ccatttaaaaagatg

SEQ ID NO: 1503407 - DNA, 15 bp, Homo sapiens
catttaaaaagatgt

SEQ ID NO: 1503408 - DNA, 15 bp, Homo sapiens
atttaaaaagatgtg

SEQ ID NO: 1503409 - DNA, 15 bp, Homo sapiens
tttaaaaagatgtgt

SEQ ID NO: 1503410 - DNA, 15 bp, Homo sapiens
ttaaaaagatgtgta

SEQ ID NO: 1503411 - DNA, 15 bp, Homo sapiens
taaaaagatgtgtaa

SEQ ID NO: 1503412 - DNA, 15 bp, Homo sapiens
aaaaagatgtgtaaa

SEQ ID NO: 1503413 - DNA, 15 bp, Homo sapiens
aaaagatgtgtaaag

SEQ ID NO: 1503414 - DNA, 15 bp, Homo sapiens
aaagatgtgtaaagc

SEQ ID NO: 1503415 - DNA, 15 bp, Homo sapiens
aagatgtgtaaagca

SEQ ID NO: 1503416 - DNA, 15 bp, Homo sapiens
agatgtgtaaagcac

SEQ ID NO: 1503417 - DNA, 15 bp, Homo sapiens
gatgtgtaaagcaca

SEQ ID NO: 1503418 - DNA, 15 bp, Homo sapiens
atgtgtaaagcacat

SEQ ID NO: 1503419 - DNA, 15 bp, Homo sapiens
tgtgtaaagcacata

SEQ ID NO: 1503420 - DNA, 15 bp, Homo sapiens
gtgtaaagcacatat

SEQ ID NO: 1503421 - DNA, 15 bp, Homo sapiens
tgtaaagcacatatt

SEQ ID NO: 1503422 - DNA, 15 bp, Homo sapiens
gtaaagcacatattc

SEQ ID NO: 1503423 - DNA, 15 bp, Homo sapiens
taaagcacatattct

SEQ ID NO: 1503424 - DNA, 15 bp, Homo sapiens
aaagcacatattctc

SEQ ID NO: 1503425 - DNA, 15 bp, Homo sapiens
aagcacatattctca

SEQ ID NO: 1503426 - DNA, 15 bp, Homo sapiens
agcacatattctcaa

SEQ ID NO: 1503427 - DNA, 15 bp, Homo sapiens
gcacatattctcaac

SEQ ID NO: 1503428 - DNA, 15 bp, Homo sapiens
cacatattctcaaca

SEQ ID NO: 1503429 - DNA, 15 bp, Homo sapiens
acatattctcaacat

SEQ ID NO: 1503430 - DNA, 15 bp, Homo sapiens
catattctcaacata

SEQ ID NO: 1503431 - DNA, 15 bp, Homo sapiens
atattctcaacatat

SEQ ID NO: 1503432 - DNA, 15 bp, Homo sapiens
tattctcaacatatg

SEQ ID NO: 1503433 - DNA, 15 bp, Homo sapiens
attctcaacatatgc

SEQ ID NO: 1503434 - DNA, 15 bp, Homo sapiens
ttctcaacatatgca

SEQ ID NO: 1503435 - DNA, 15 bp, Homo sapiens
tctcaacatatgcac

SEQ ID NO: 1503436 - DNA, 15 bp, Homo sapiens
ctcaacatatgcaca

SEQ ID NO: 1503437 - DNA, 15 bp, Homo sapiens
tcaacatatgcacat

SEQ ID NO: 1503438 - DNA, 15 bp, Homo sapiens
caacatatgcacatt

SEQ ID NO: 1503439 - DNA, 15 bp, Homo sapiens
aacatatgcacattg

SEQ ID NO: 1503440 - DNA, 15 bp, Homo sapiens
acatatgcacattga

SEQ ID NO: 1503441 - DNA, 15 bp, Homo sapiens
catatgcacattgat

SEQ ID NO: 1503442 - DNA, 15 bp, Homo sapiens
atatgcacattgatt

SEQ ID NO: 1503443 - DNA, 15 bp, Homo sapiens
tatgcacattgattt

SEQ ID NO: 1503444 - DNA, 15 bp, Homo sapiens
atgcacattgattta

SEQ ID NO: 1503445 - DNA, 15 bp, Homo sapiens
tgcacattgatttat

SEQ ID NO: 1503446 - DNA, 15 bp, Homo sapiens
gcacattgatttata

SEQ ID NO: 1503447 - DNA, 15 bp, Homo sapiens
cacattgatttataa

SEQ ID NO: 1503448 - DNA, 15 bp, Homo sapiens
acattgatttataaa

SEQ ID NO: 1503449 - DNA, 15 bp, Homo sapiens
cattgatttataaat

SEQ ID NO: 1503450 - DNA, 15 bp, Homo sapiens
attgatttataaatc

SEQ ID NO: 1503451 - DNA, 15 bp, Homo sapiens
ttgatttataaatca

SEQ ID NO: 1503452 - DNA, 15 bp, Homo sapiens
tgatttataaatcat

SEQ ID NO: 1503453 - DNA, 15 bp, Homo sapiens
gatttataaatcata

SEQ ID NO: 1503454 - DNA, 15 bp, Homo sapiens
atttataaatcatat

SEQ ID NO: 1503455 - DNA, 15 bp, Homo sapiens
tttataaatcatata

SEQ ID NO: 1503456 - DNA, 15 bp, Homo sapiens
ttataaatcatatat

SEQ ID NO: 1503457 - DNA, 15 bp, Homo sapiens
tataaatcatatata

SEQ ID NO: 1503458 - DNA, 15 bp, Homo sapiens
ataaatcatatatac

SEQ ID NO: 1503459 - DNA, 15 bp, Homo sapiens
taaatcatatataca

SEQ ID NO: 1503460 - DNA, 15 bp, Homo sapiens
aaatcatatatacaa

SEQ ID NO: 1503461 - DNA, 15 bp, Homo sapiens
aatcatatatacaaa

SEQ ID NO: 1503462 - DNA, 15 bp, Homo sapiens
atcatatatacaaac

SEQ ID NO: 1503463 - DNA, 15 bp, Homo sapiens
tcatatatacaaact

SEQ ID NO: 1503464 - DNA, 15 bp, Homo sapiens
catatatacaaactg

SEQ ID NO: 1503465 - DNA, 15 bp, Homo sapiens
atatatacaaactgt

SEQ ID NO: 1503466 - DNA, 15 bp, Homo sapiens
tatatacaaactgtt

SEQ ID NO: 1503467 - DNA, 15 bp, Homo sapiens
atatacaaactgtta

SEQ ID NO: 1503468 - DNA, 15 bp, Homo sapiens
tatacaaactgttac

SEQ ID NO: 1503469 - DNA, 15 bp, Homo sapiens
atacaaactgttaca

SEQ ID NO: 1503470 - DNA, 15 bp, Homo sapiens
tacaaactgttacat

SEQ ID NO: 1503471 - DNA, 15 bp, Homo sapiens
acaaactgttacatt

SEQ ID NO: 1503472 - DNA, 15 bp, Homo sapiens
caaactgttacatta

SEQ ID NO: 1503473 - DNA, 15 bp, Homo sapiens
aaactgttacattat

SEQ ID NO: 1503474 - DNA, 15 bp, Homo sapiens
aactgttacattatt

SEQ ID NO: 1503475 - DNA, 15 bp, Homo sapiens
actgttacattattc

SEQ ID NO: 1503476 - DNA, 15 bp, Homo sapiens
ctgttacattattct

SEQ ID NO: 1503477 - DNA, 15 bp, Homo sapiens
tgttacattattctt

SEQ ID NO: 1503478 - DNA, 15 bp, Homo sapiens
gttacattattcttc

SEQ ID NO: 1503479 - DNA, 15 bp, Homo sapiens
ttacattattcttca

SEQ ID NO: 1503480 - DNA, 15 bp, Homo sapiens
tacattattcttcat

SEQ ID NO: 1503481 - DNA, 15 bp, Homo sapiens
acattattcttcata

SEQ ID NO: 1503482 - DNA, 15 bp, Homo sapiens
cattattcttcatat

SEQ ID NO: 1503483 - DNA, 15 bp, Homo sapiens
attattcttcatatt

SEQ ID NO: 1503484 - DNA, 15 bp, Homo sapiens
ttattcttcatatta

SEQ ID NO: 1503485 - DNA, 15 bp, Homo sapiens
tattcttcatattag

SEQ ID NO: 1503486 - DNA, 15 bp, Homo sapiens
attcttcatattaga

SEQ ID NO: 1503487 - DNA, 15 bp, Homo sapiens
ttcttcatattagaa

SEQ ID NO: 1503488 - DNA, 15 bp, Homo sapiens
tcttcatattagaaa

SEQ ID NO: 1503489 - DNA, 15 bp, Homo sapiens
cttcatattagaaaa

SEQ ID NO: 1503490 - DNA, 15 bp, Homo sapiens
ttcatattagaaaac

SEQ ID NO: 1503491 - DNA, 15 bp, Homo sapiens
tcatattagaaaaca

SEQ ID NO: 1503492 - DNA, 15 bp, Homo sapiens
catattagaaaacaa

SEQ ID NO: 1503493 - DNA, 15 bp, Homo sapiens
atattagaaaacaaa

SEQ ID NO: 1503494 - DNA, 15 bp, Homo sapiens
tattagaaaacaaat

SEQ ID NO: 1503495 - DNA, 15 bp, Homo sapiens
attagaaaacaaata

SEQ ID NO: 1503496 - DNA, 15 bp, Homo sapiens
ttagaaaacaaatac

SEQ ID NO: 1503497 - DNA, 15 bp, Homo sapiens
tagaaaacaaataca

SEQ ID NO: 1503498 - DNA, 15 bp, Homo sapiens
agaaaacaaatacaa

SEQ ID NO: 1503499 - DNA, 15 bp, Homo sapiens
gaaaacaaatacaaa

SEQ ID NO: 1503500 - DNA, 15 bp, Homo sapiens
aaaacaaatacaaaa

SEQ ID NO: 1503501 - DNA, 15 bp, Homo sapiens
aaacaaatacaaaat

SEQ ID NO: 1503502 - DNA, 15 bp, Homo sapiens
aacaaatacaaaata

SEQ ID NO: 1503503 - DNA, 15 bp, Homo sapiens
acaaatacaaaatag

SEQ ID NO: 1503504 - DNA, 15 bp, Homo sapiens
caaatacaaaataga

SEQ ID NO: 1503505 - DNA, 15 bp, Homo sapiens
aaatacaaaatagaa

SEQ ID NO: 1503506 - DNA, 15 bp, Homo sapiens
aatacaaaatagaac

SEQ ID NO: 1503507 - DNA, 15 bp, Homo sapiens
atacaaaatagaaca

SEQ ID NO: 1503508 - DNA, 15 bp, Homo sapiens
tacaaaatagaacat

SEQ ID NO: 1503509 - DNA, 15 bp, Homo sapiens
acaaaatagaacatt

SEQ ID NO: 1503510 - DNA, 15 bp, Homo sapiens
caaaatagaacattt

SEQ ID NO: 1503511 - DNA, 15 bp, Homo sapiens
aaaatagaacatttt

SEQ ID NO: 1503512 - DNA, 15 bp, Homo sapiens
aaatagaacatttta

SEQ ID NO: 1503513 - DNA, 15 bp, Homo sapiens
aatagaacattttaa

SEQ ID NO: 1503514 - DNA, 15 bp, Homo sapiens
atagaacattttaaa

SEQ ID NO: 1503515 - DNA, 15 bp, Homo sapiens
tagaacattttaaat

SEQ ID NO: 1503516 - DNA, 15 bp, Homo sapiens
agaacattttaaatg

SEQ ID NO: 1503517 - DNA, 15 bp, Homo sapiens
gaacattttaaatgg

SEQ ID NO: 1503518 - DNA, 15 bp, Homo sapiens
aacattttaaatggt

SEQ ID NO: 1503519 - DNA, 15 bp, Homo sapiens
acattttaaatggtg

SEQ ID NO: 1503520 - DNA, 15 bp, Homo sapiens
cattttaaatggtga

SEQ ID NO: 1503521 - DNA, 15 bp, Homo sapiens
attttaaatggtgat

SEQ ID NO: 1503522 - DNA, 15 bp, Homo sapiens
ttttaaatggtgata

SEQ ID NO: 1503523 - DNA, 15 bp, Homo sapiens
tttaaatggtgatat

SEQ ID NO: 1503524 - DNA, 15 bp, Homo sapiens
ttaaatggtgatata

SEQ ID NO: 1503525 - DNA, 15 bp, Homo sapiens
taaatggtgatataa

SEQ ID NO: 1503526 - DNA, 15 bp, Homo sapiens
aaatggtgatataaa

SEQ ID NO: 1503527 - DNA, 15 bp, Homo sapiens
aatggtgatataaaa

SEQ ID NO: 1503528 - DNA, 15 bp, Homo sapiens
atggtgatataaaaa

SEQ ID NO: 1503529 - DNA, 15 bp, Homo sapiens
tggtgatataaaaat

SEQ ID NO: 1503530 - DNA, 15 bp, Homo sapiens
ggtgatataaaaata

SEQ ID NO: 1503531 - DNA, 15 bp, Homo sapiens
gtgatataaaaataa

SEQ ID NO: 1503532 - DNA, 15 bp, Homo sapiens
tgatataaaaataaa

SEQ ID NO: 1503533 - DNA, 15 bp, Homo sapiens
gatataaaaataaat

SEQ ID NO: 1503534 - DNA, 15 bp, Homo sapiens
atataaaaataaatt

SEQ ID NO: 1503535 - DNA, 15 bp, Homo sapiens
tataaaaataaattg

SEQ ID NO: 1503536 - DNA, 15 bp, Homo sapiens
ataaaaataaattga

SEQ ID NO: 1503537 - DNA, 15 bp, Homo sapiens
taaaaataaattgaa

SEQ ID NO: 1503538 - DNA, 15 bp, Homo sapiens
aaaaataaattgaaa

SEQ ID NO: 1503539 - DNA, 15 bp, Homo sapiens
aaaataaattgaaac

SEQ ID NO: 1503540 - DNA, 15 bp, Homo sapiens
aaataaattgaaact

SEQ ID NO: 1503541 - DNA, 15 bp, Homo sapiens
aataaattgaaactg

SEQ ID NO: 1503542 - DNA, 15 bp, Homo sapiens
ataaattgaaactga

SEQ ID NO: 1503543 - DNA, 15 bp, Homo sapiens
taaattgaaactgaa

SEQ ID NO: 1503544 - DNA, 15 bp, Homo sapiens
aaattgaaactgaaa

SEQ ID NO: 1503545 - DNA, 15 bp, Homo sapiens
aattgaaactgaaat

SEQ ID NO: 1503546 - DNA, 15 bp, Homo sapiens
attgaaactgaaatt

SEQ ID NO: 1503547 - DNA, 15 bp, Homo sapiens
ttgaaactgaaattc

SEQ ID NO: 1503548 - DNA, 15 bp, Homo sapiens
tgaaactgaaattct

SEQ ID NO: 1503549 - DNA, 15 bp, Homo sapiens
gaaactgaaattcta

SEQ ID NO: 1503550 - DNA, 15 bp, Homo sapiens
aaactgaaattctac

SEQ ID NO: 1503551 - DNA, 15 bp, Homo sapiens
aactgaaattctact

SEQ ID NO: 1503552 - DNA, 15 bp, Homo sapiens
actgaaattctactc

SEQ ID NO: 1503553 - DNA, 15 bp, Homo sapiens
ctgaaattctactct

SEQ ID NO: 1503554 - DNA, 15 bp, Homo sapiens
tgaaattctactctt

SEQ ID NO: 1503555 - DNA, 15 bp, Homo sapiens
gaaattctactcttt

SEQ ID NO: 1503556 - DNA, 15 bp, Homo sapiens
aaattctactctttt

SEQ ID NO: 1503557 - DNA, 15 bp, Homo sapiens
aattctactcttttc

SEQ ID NO: 1503558 - DNA, 15 bp, Homo sapiens
attctactcttttcc

SEQ ID NO: 1503559 - DNA, 15 bp, Homo sapiens
ttctactcttttcct

SEQ ID NO: 1503560 - DNA, 15 bp, Homo sapiens
tctactcttttcctc

SEQ ID NO: 1503561 - DNA, 15 bp, Homo sapiens
ctactcttttcctcc

SEQ ID NO: 1503562 - DNA, 15 bp, Homo sapiens
tactcttttcctcct

SEQ ID NO: 1503563 - DNA, 15 bp, Homo sapiens
actcttttcctccta

SEQ ID NO: 1503564 - DNA, 15 bp, Homo sapiens
ctcttttcctcctat

SEQ ID NO: 1503565 - DNA, 15 bp, Homo sapiens
tcttttcctcctatt

SEQ ID NO: 1503566 - DNA, 15 bp, Homo sapiens
cttttcctcctattt

SEQ ID NO: 1503567 - DNA, 15 bp, Homo sapiens
ttttcctcctatttt

SEQ ID NO: 1503568 - DNA, 15 bp, Homo sapiens
tttcctcctattttc

SEQ ID NO: 1503569 - DNA, 15 bp, Homo sapiens
ttcctcctattttct

SEQ ID NO: 1503570 - DNA, 15 bp, Homo sapiens
tcctcctattttctc

SEQ ID NO: 1503571 - DNA, 15 bp, Homo sapiens
cctcctattttctct

SEQ ID NO: 1503572 - DNA, 15 bp, Homo sapiens
ctcctattttctcta

SEQ ID NO: 1503573 - DNA, 15 bp, Homo sapiens
tcctattttctctat

SEQ ID NO: 1503574 - DNA, 15 bp, Homo sapiens
cctattttctctata

SEQ ID NO: 1503575 - DNA, 15 bp, Homo sapiens
ctattttctctatat

SEQ ID NO: 1503576 - DNA, 15 bp, Homo sapiens
tattttctctatatt

SEQ ID NO: 1503577 - DNA, 15 bp, Homo sapiens
attttctctatattg

SEQ ID NO: 1503578 - DNA, 15 bp, Homo sapiens
ttttctctatattga

SEQ ID NO: 1503579 - DNA, 15 bp, Homo sapiens
tttctctatattgaa

SEQ ID NO: 1503580 - DNA, 15 bp, Homo sapiens
ttctctatattgaat

SEQ ID NO: 1503581 - DNA, 15 bp, Homo sapiens
tctctatattgaata

SEQ ID NO: 1503582 - DNA, 15 bp, Homo sapiens
ctctatattgaatat

SEQ ID NO: 1503583 - DNA, 15 bp, Homo sapiens
tctatattgaatatc

SEQ ID NO: 1503584 - DNA, 15 bp, Homo sapiens
ctatattgaatatcc

SEQ ID NO: 1503585 - DNA, 15 bp, Homo sapiens
tatattgaatatcct

SEQ ID NO: 1503586 - DNA, 15 bp, Homo sapiens
atattgaatatcctc

SEQ ID NO: 1503587 - DNA, 15 bp, Homo sapiens
tattgaatatcctct

SEQ ID NO: 1503588 - DNA, 15 bp, Homo sapiens
attgaatatcctctg

SEQ ID NO: 1503589 - DNA, 15 bp, Homo sapiens
ttgaatatcctctgc

SEQ ID NO: 1503590 - DNA, 15 bp, Homo sapiens
tgaatatcctctgct

SEQ ID NO: 1503591 - DNA, 15 bp, Homo sapiens
gaatatcctctgcta

SEQ ID NO: 1503592 - DNA, 15 bp, Homo sapiens
aatatcctctgctat

SEQ ID NO: 1503593 - DNA, 15 bp, Homo sapiens
atatcctctgctatt

SEQ ID NO: 1503594 - DNA, 15 bp, Homo sapiens
tatcctctgctatta

SEQ ID NO: 1503595 - DNA, 15 bp, Homo sapiens
atcctctgctattaa

SEQ ID NO: 1503596 - DNA, 15 bp, Homo sapiens
tcctctgctattaac

SEQ ID NO: 1503597 - DNA, 15 bp, Homo sapiens
cctctgctattaact

SEQ ID NO: 1503598 - DNA, 15 bp, Homo sapiens
ctctgctattaactc

SEQ ID NO: 1503599 - DNA, 15 bp, Homo sapiens
tctgctattaactct

SEQ ID NO: 1503600 - DNA, 15 bp, Homo sapiens
ctgctattaactctc

SEQ ID NO: 1503601 - DNA, 15 bp, Homo sapiens
tgctattaactctca

SEQ ID NO: 1503602 - DNA, 15 bp, Homo sapiens
gctattaactctcaa

SEQ ID NO: 1503603 - DNA, 15 bp, Homo sapiens
ctattaactctcaaa

SEQ ID NO: 1503604 - DNA, 15 bp, Homo sapiens
tattaactctcaaaa

SEQ ID NO: 1503605 - DNA, 15 bp, Homo sapiens
attaactctcaaaac

SEQ ID NO: 1503606 - DNA, 15 bp, Homo sapiens
ttaactctcaaaaca

SEQ ID NO: 1503607 - DNA, 15 bp, Homo sapiens
taactctcaaaacaa

SEQ ID NO: 1503608 - DNA, 15 bp, Homo sapiens
aactctcaaaacaaa

SEQ ID NO: 1503609 - DNA, 15 bp, Homo sapiens
actctcaaaacaaag

SEQ ID NO: 1503610 - DNA, 15 bp, Homo sapiens
ctctcaaaacaaaga

SEQ ID NO: 1503611 - DNA, 15 bp, Homo sapiens
tctcaaaacaaagat

SEQ ID NO: 1503612 - DNA, 15 bp, Homo sapiens
ctcaaaacaaagatg

SEQ ID NO: 1503613 - DNA, 15 bp, Homo sapiens
tcaaaacaaagatgt

SEQ ID NO: 1503614 - DNA, 15 bp, Homo sapiens
caaaacaaagatgtt

SEQ ID NO: 1503615 - DNA, 15 bp, Homo sapiens
aaaacaaagatgttg

SEQ ID NO: 1503616 - DNA, 15 bp, Homo sapiens
aaacaaagatgttgg

SEQ ID NO: 1503617 - DNA, 15 bp, Homo sapiens
aacaaagatgttggt

SEQ ID NO: 1503618 - DNA, 15 bp, Homo sapiens
acaaagatgttggtc

SEQ ID NO: 1503619 - DNA, 15 bp, Homo sapiens
caaagatgttggtct

SEQ ID NO: 1503620 - DNA, 15 bp, Homo sapiens
aaagatgttggtctt

SEQ ID NO: 1503621 - DNA, 15 bp, Homo sapiens
aagatgttggtcttt

SEQ ID NO: 1503622 - DNA, 15 bp, Homo sapiens
agatgttggtcttta

SEQ ID NO: 1503623 - DNA, 15 bp, Homo sapiens
gatgttggtctttag

SEQ ID NO: 1503624 - DNA, 15 bp, Homo sapiens
atgttggtctttagt

SEQ ID NO: 1503625 - DNA, 15 bp, Homo sapiens
tgttggtctttagtg

SEQ ID NO: 1503626 - DNA, 15 bp, Homo sapiens
gttggtctttagtga

SEQ ID NO: 1503627 - DNA, 15 bp, Homo sapiens
ttggtctttagtgaa

SEQ ID NO: 1503628 - DNA, 15 bp, Homo sapiens
tggtctttagtgaaa

SEQ ID NO: 1503629 - DNA, 15 bp, Homo sapiens
ggtctttagtgaaaa

SEQ ID NO: 1503630 - DNA, 15 bp, Homo sapiens
gtctttagtgaaaaa

SEQ ID NO: 1503631 - DNA, 15 bp, Homo sapiens
tctttagtgaaaaaa

SEQ ID NO: 1503632 - DNA, 15 bp, Homo sapiens
ctttagtgaaaaaag

SEQ ID NO: 1503633 - DNA, 15 bp, Homo sapiens
tttagtgaaaaaagt

SEQ ID NO: 1503634 - DNA, 15 bp, Homo sapiens
ttagtgaaaaaagtg

SEQ ID NO: 1503635 - DNA, 15 bp, Homo sapiens
tagtgaaaaaagtgt

SEQ ID NO: 1503636 - DNA, 15 bp, Homo sapiens
agtgaaaaaagtgta

SEQ ID NO: 1503637 - DNA, 15 bp, Homo sapiens
gtgaaaaaagtgtat

SEQ ID NO: 1503638 - DNA, 15 bp, Homo sapiens
tgaaaaaagtgtatg

SEQ ID NO: 1503639 - DNA, 15 bp, Homo sapiens
gaaaaaagtgtatgc

SEQ ID NO: 1503640 - DNA, 15 bp, Homo sapiens
aaaaaagtgtatgca

SEQ ID NO: 1503641 - DNA, 15 bp, Homo sapiens
aaaaagtgtatgcat

SEQ ID NO: 1503642 - DNA, 15 bp, Homo sapiens
aaaagtgtatgcatg

SEQ ID NO: 1503643 - DNA, 15 bp, Homo sapiens
aaagtgtatgcatgt

SEQ ID NO: 1503644 - DNA, 15 bp, Homo sapiens
aagtgtatgcatgta

SEQ ID NO: 1503645 - DNA, 15 bp, Homo sapiens
agtgtatgcatgtac

SEQ ID NO: 1503646 - DNA, 15 bp, Homo sapiens
gtgtatgcatgtact

SEQ ID NO: 1503647 - DNA, 15 bp, Homo sapiens
tgtatgcatgtactg

SEQ ID NO: 1503648 - DNA, 15 bp, Homo sapiens
gtatgcatgtactgg

SEQ ID NO: 1503649 - DNA, 15 bp, Homo sapiens
tatgcatgtactgga

SEQ ID NO: 1503650 - DNA, 15 bp, Homo sapiens
atgcatgtactggat

SEQ ID NO: 1503651 - DNA, 15 bp, Homo sapiens
tgcatgtactggatt

SEQ ID NO: 1503652 - DNA, 15 bp, Homo sapiens
gcatgtactggattt

SEQ ID NO: 1503653 - DNA, 15 bp, Homo sapiens
catgtactggatttc

SEQ ID NO: 1503654 - DNA, 15 bp, Homo sapiens
atgtactggatttct

SEQ ID NO: 1503655 - DNA, 15 bp, Homo sapiens
tgtactggatttcta

SEQ ID NO: 1503656 - DNA, 15 bp, Homo sapiens
gtactggatttctag

SEQ ID NO: 1503657 - DNA, 15 bp, Homo sapiens
tactggatttctagt

SEQ ID NO: 1503658 - DNA, 15 bp, Homo sapiens
actggatttctagtg

SEQ ID NO: 1503659 - DNA, 15 bp, Homo sapiens
ctggatttctagtga

SEQ ID NO: 1503660 - DNA, 15 bp, Homo sapiens
tggatttctagtgac

SEQ ID NO: 1503661 - DNA, 15 bp, Homo sapiens
ggatttctagtgact

SEQ ID NO: 1503662 - DNA, 15 bp, Homo sapiens
gatttctagtgactt

SEQ ID NO: 1503663 - DNA, 15 bp, Homo sapiens
atttctagtgacttc

SEQ ID NO: 1503664 - DNA, 15 bp, Homo sapiens
tttctagtgacttcc

SEQ ID NO: 1503665 - DNA, 15 bp, Homo sapiens
ttctagtgacttcca

SEQ ID NO: 1503666 - DNA, 15 bp, Homo sapiens
tctagtgacttccaa

SEQ ID NO: 1503667 - DNA, 15 bp, Homo sapiens
ctagtgacttccaag

SEQ ID NO: 1503668 - DNA, 15 bp, Homo sapiens
tagtgacttccaaga

SEQ ID NO: 1503669 - DNA, 15 bp, Homo sapiens
agtgacttccaagaa

SEQ ID NO: 1503670 - DNA, 15 bp, Homo sapiens
gtgacttccaagaaa

SEQ ID NO: 1503671 - DNA, 15 bp, Homo sapiens
tgacttccaagaaag

SEQ ID NO: 1503672 - DNA, 15 bp, Homo sapiens
gacttccaagaaagg

SEQ ID NO: 1503673 - DNA, 15 bp, Homo sapiens
acttccaagaaagga

SEQ ID NO: 1503674 - DNA, 15 bp, Homo sapiens
cttccaagaaaggag

SEQ ID NO: 1503675 - DNA, 15 bp, Homo sapiens
ttccaagaaaggaga

SEQ ID NO: 1503676 - DNA, 15 bp, Homo sapiens
tccaagaaaggagaa

SEQ ID NO: 1503677 - DNA, 15 bp, Homo sapiens
ccaagaaaggagaaa

SEQ ID NO: 1503678 - DNA, 15 bp, Homo sapiens
caagaaaggagaaaa

SEQ ID NO: 1503679 - DNA, 15 bp, Homo sapiens
aagaaaggagaaaat

SEQ ID NO: 1503680 - DNA, 15 bp, Homo sapiens
agaaaggagaaaatt

SEQ ID NO: 1503681 - DNA, 15 bp, Homo sapiens
gaaaggagaaaatta

SEQ ID NO: 1503682 - DNA, 15 bp, Homo sapiens
aaaggagaaaattaa

SEQ ID NO: 1503683 - DNA, 15 bp, Homo sapiens
aaggagaaaattaaa

SEQ ID NO: 1503684 - DNA, 15 bp, Homo sapiens
aggagaaaattaaaa

SEQ ID NO: 1503685 - DNA, 15 bp, Homo sapiens
ggagaaaattaaaac

SEQ ID NO: 1503686 - DNA, 15 bp, Homo sapiens
gagaaaattaaaact

SEQ ID NO: 1503687 - DNA, 15 bp, Homo sapiens
agaaaattaaaactt

SEQ ID NO: 1503688 - DNA, 15 bp, Homo sapiens
gaaaattaaaacttg

SEQ ID NO: 1503689 - DNA, 15 bp, Homo sapiens
aaaattaaaacttgg

SEQ ID NO: 1503690 - DNA, 15 bp, Homo sapiens
aaattaaaacttggt

SEQ ID NO: 1503691 - DNA, 15 bp, Homo sapiens
aattaaaacttggta

SEQ ID NO: 1503692 - DNA, 15 bp, Homo sapiens
attaaaacttggtat

SEQ ID NO: 1503693 - DNA, 15 bp, Homo sapiens
ttaaaacttggtatt

SEQ ID NO: 1503694 - DNA, 15 bp, Homo sapiens
taaaacttggtatta

SEQ ID NO: 1503695 - DNA, 15 bp, Homo sapiens
aaaacttggtattag

SEQ ID NO: 1503696 - DNA, 15 bp, Homo sapiens
aaacttggtattagt

SEQ ID NO: 1503697 - DNA, 15 bp, Homo sapiens
aacttggtattagtg

SEQ ID NO: 1503698 - DNA, 15 bp, Homo sapiens
acttggtattagtgg

SEQ ID NO: 1503699 - DNA, 15 bp, Homo sapiens
cttggtattagtggc

SEQ ID NO: 1503700 - DNA, 15 bp, Homo sapiens
ttggtattagtggcc

SEQ ID NO: 1503701 - DNA, 15 bp, Homo sapiens
tggtattagtggccc

SEQ ID NO: 1503702 - DNA, 15 bp, Homo sapiens
ggtattagtggccca

SEQ ID NO: 1503703 - DNA, 15 bp, Homo sapiens
gtattagtggcccaa

SEQ ID NO: 1503704 - DNA, 15 bp, Homo sapiens
tattagtggcccaag

SEQ ID NO: 1503705 - DNA, 15 bp, Homo sapiens
attagtggcccaagc

SEQ ID NO: 1503706 - DNA, 15 bp, Homo sapiens
ttagtggcccaagca

SEQ ID NO: 1503707 - DNA, 15 bp, Homo sapiens
tagtggcccaagcat

SEQ ID NO: 1503708 - DNA, 15 bp, Homo sapiens
agtggcccaagcata

SEQ ID NO: 1503709 - DNA, 15 bp, Homo sapiens
gtggcccaagcatag

SEQ ID NO: 1503710 - DNA, 15 bp, Homo sapiens
tggcccaagcataga

SEQ ID NO: 1503711 - DNA, 15 bp, Homo sapiens
ggcccaagcatagaa

SEQ ID NO: 1503712 - DNA, 15 bp, Homo sapiens
gcccaagcatagaaa

SEQ ID NO: 1503713 - DNA, 15 bp, Homo sapiens
cccaagcatagaaag

SEQ ID NO: 1503714 - DNA, 15 bp, Homo sapiens
ccaagcatagaaaga

SEQ ID NO: 1503715 - DNA, 15 bp, Homo sapiens
caagcatagaaagag

SEQ ID NO: 1503716 - DNA, 15 bp, Homo sapiens
aagcatagaaagagg

SEQ ID NO: 1503717 - DNA, 15 bp, Homo sapiens
agcatagaaagagga

SEQ ID NO: 1503718 - DNA, 15 bp, Homo sapiens
gcatagaaagaggaa

SEQ ID NO: 1503719 - DNA, 15 bp, Homo sapiens
catagaaagaggaat

SEQ ID NO: 1503720 - DNA, 15 bp, Homo sapiens
atagaaagaggaatg

SEQ ID NO: 1503721 - DNA, 15 bp, Homo sapiens
tagaaagaggaatga

SEQ ID NO: 1503722 - DNA, 15 bp, Homo sapiens
agaaagaggaatgat

SEQ ID NO: 1503723 - DNA, 15 bp, Homo sapiens
gaaagaggaatgatg

SEQ ID NO: 1503724 - DNA, 15 bp, Homo sapiens
aaagaggaatgatga

SEQ ID NO: 1503725 - DNA, 15 bp, Homo sapiens
aagaggaatgatgaa

SEQ ID NO: 1503726 - DNA, 15 bp, Homo sapiens
agaggaatgatgaag

SEQ ID NO: 1503727 - DNA, 15 bp, Homo sapiens
gaggaatgatgaagg

SEQ ID NO: 1503728 - DNA, 15 bp, Homo sapiens
aggaatgatgaaggc

SEQ ID NO: 1503729 - DNA, 15 bp, Homo sapiens
ggaatgatgaaggcc

SEQ ID NO: 1503730 - DNA, 15 bp, Homo sapiens
gaatgatgaaggcca

SEQ ID NO: 1503731 - DNA, 15 bp, Homo sapiens
aatgatgaaggccag

SEQ ID NO: 1503732 - DNA, 15 bp, Homo sapiens
atgatgaaggccagg

SEQ ID NO: 1503733 - DNA, 15 bp, Homo sapiens
tgatgaaggccaggt

SEQ ID NO: 1503734 - DNA, 15 bp, Homo sapiens
gatgaaggccaggta

SEQ ID NO: 1503735 - DNA, 15 bp, Homo sapiens
atgaaggccaggtat

SEQ ID NO: 1503736 - DNA, 15 bp, Homo sapiens
tgaaggccaggtatg

SEQ ID NO: 1503737 - DNA, 15 bp, Homo sapiens
gaaggccaggtatgt

SEQ ID NO: 1503738 - DNA, 15 bp, Homo sapiens
aaggccaggtatgtt

SEQ ID NO: 1503739 - DNA, 15 bp, Homo sapiens
aggccaggtatgttt

SEQ ID NO: 1503740 - DNA, 15 bp, Homo sapiens
ggccaggtatgttta

SEQ ID NO: 1503741 - DNA, 15 bp, Homo sapiens
gccaggtatgtttaa

SEQ ID NO: 1503742 - DNA, 15 bp, Homo sapiens
ccaggtatgtttaag

SEQ ID NO: 1503743 - DNA, 15 bp, Homo sapiens
caggtatgtttaaga

SEQ ID NO: 1503744 - DNA, 15 bp, Homo sapiens
aggtatgtttaagaa

SEQ ID NO: 1503745 - DNA, 15 bp, Homo sapiens
ggtatgtttaagaac

SEQ ID NO: 1503746 - DNA, 15 bp, Homo sapiens
gtatgtttaagaaca

SEQ ID NO: 1503747 - DNA, 15 bp, Homo sapiens
tatgtttaagaacaa

SEQ ID NO: 1503748 - DNA, 15 bp, Homo sapiens
atgtttaagaacaaa

SEQ ID NO: 1503749 - DNA, 15 bp, Homo sapiens
tgtttaagaacaaac

SEQ ID NO: 1503750 - DNA, 15 bp, Homo sapiens
gtttaagaacaaact

SEQ ID NO: 1503751 - DNA, 15 bp, Homo sapiens
tttaagaacaaacta

SEQ ID NO: 1503752 - DNA, 15 bp, Homo sapiens
ttaagaacaaactag

SEQ ID NO: 1503753 - DNA, 15 bp, Homo sapiens
taagaacaaactagc

SEQ ID NO: 1503754 - DNA, 15 bp, Homo sapiens
aagaacaaactagct

SEQ ID NO: 1503755 - DNA, 15 bp, Homo sapiens
agaacaaactagctg

SEQ ID NO: 1503756 - DNA, 15 bp, Homo sapiens
gaacaaactagctga

SEQ ID NO: 1503757 - DNA, 15 bp, Homo sapiens
aacaaactagctgaa

SEQ ID NO: 1503758 - DNA, 15 bp, Homo sapiens
acaaactagctgaat

SEQ ID NO: 1503759 - DNA, 15 bp, Homo sapiens
caaactagctgaatt

SEQ ID NO: 1503760 - DNA, 15 bp, Homo sapiens
aaactagctgaattc

SEQ ID NO: 1503761 - DNA, 15 bp, Homo sapiens
aactagctgaattct

SEQ ID NO: 1503762 - DNA, 15 bp, Homo sapiens
actagctgaattctt

SEQ ID NO: 1503763 - DNA, 15 bp, Homo sapiens
ctagctgaattcttt

SEQ ID NO: 1503764 - DNA, 15 bp, Homo sapiens
tagctgaattctttg

SEQ ID NO: 1503765 - DNA, 15 bp, Homo sapiens
agctgaattctttgg

SEQ ID NO: 1503766 - DNA, 15 bp, Homo sapiens
gctgaattctttggc

SEQ ID NO: 1503767 - DNA, 15 bp, Homo sapiens
ctgaattctttggca

SEQ ID NO: 1503768 - DNA, 15 bp, Homo sapiens
tgaattctttggcag

SEQ ID NO: 1503769 - DNA, 15 bp, Homo sapiens
gaattctttggcaga

SEQ ID NO: 1503770 - DNA, 15 bp, Homo sapiens
aattctttggcagat

SEQ ID NO: 1503771 - DNA, 15 bp, Homo sapiens
attctttggcagatc

SEQ ID NO: 1503772 - DNA, 15 bp, Homo sapiens
ttctttggcagatct

SEQ ID NO: 1503773 - DNA, 15 bp, Homo sapiens
tctttggcagatctc

SEQ ID NO: 1503774 - DNA, 15 bp, Homo sapiens
ctttggcagatctcc

SEQ ID NO: 1503775 - DNA, 15 bp, Homo sapiens
tttggcagatctcca

SEQ ID NO: 1503776 - DNA, 15 bp, Homo sapiens
ttggcagatctccat

SEQ ID NO: 1503777 - DNA, 15 bp, Homo sapiens
tggcagatctccatc

SEQ ID NO: 1503778 - DNA, 15 bp, Homo sapiens
ggcagatctccatct

SEQ ID NO: 1503779 - DNA, 15 bp, Homo sapiens
gcagatctccatctt

SEQ ID NO: 1503780 - DNA, 15 bp, Homo sapiens
cagatctccatctta

SEQ ID NO: 1503781 - DNA, 15 bp, Homo sapiens
agatctccatcttag

SEQ ID NO: 1503782 - DNA, 15 bp, Homo sapiens
gatctccatcttagc

SEQ ID NO: 1503783 - DNA, 15 bp, Homo sapiens
atctccatcttagcc

SEQ ID NO: 1503784 - DNA, 15 bp, Homo sapiens
tctccatcttagcca

SEQ ID NO: 1503785 - DNA, 15 bp, Homo sapiens
ctccatcttagccac

SEQ ID NO: 1503786 - DNA, 15 bp, Homo sapiens
tccatcttagccacg

SEQ ID NO: 1503787 - DNA, 15 bp, Homo sapiens
ccatcttagccacgc

SEQ ID NO: 1503788 - DNA, 15 bp, Homo sapiens
catcttagccacgca

SEQ ID NO: 1503789 - DNA, 15 bp, Homo sapiens
atcttagccacgcaa

SEQ ID NO: 1503790 - DNA, 15 bp, Homo sapiens
tcttagccacgcaat

SEQ ID NO: 1503791 - DNA, 15 bp, Homo sapiens
cttagccacgcaatt

SEQ ID NO: 1503792 - DNA, 15 bp, Homo sapiens
ttagccacgcaattt

SEQ ID NO: 1503793 - DNA, 15 bp, Homo sapiens
tagccacgcaatttc

SEQ ID NO: 1503794 - DNA, 15 bp, Homo sapiens
agccacgcaatttcc

SEQ ID NO: 1503795 - DNA, 15 bp, Homo sapiens
gccacgcaatttccc

SEQ ID NO: 1503796 - DNA, 15 bp, Homo sapiens
ccacgcaatttcccc

SEQ ID NO: 1503797 - DNA, 15 bp, Homo sapiens
cacgcaatttcccca

SEQ ID NO: 1503798 - DNA, 15 bp, Homo sapiens
acgcaatttccccat

SEQ ID NO: 1503799 - DNA, 15 bp, Homo sapiens
cgcaatttccccatc

SEQ ID NO: 1503800 - DNA, 15 bp, Homo sapiens
gcaatttccccatca

SEQ ID NO: 1503801 - DNA, 15 bp, Homo sapiens
caatttccccatcaa

SEQ ID NO: 1503802 - DNA, 15 bp, Homo sapiens
aatttccccatcaat

SEQ ID NO: 1503803 - DNA, 15 bp, Homo sapiens
atttccccatcaatt

SEQ ID NO: 1503804 - DNA, 15 bp, Homo sapiens
tttccccatcaattt

SEQ ID NO: 1503805 - DNA, 15 bp, Homo sapiens
ttccccatcaatttt

SEQ ID NO: 1503806 - DNA, 15 bp, Homo sapiens
tccccatcaattttg

SEQ ID NO: 1503807 - DNA, 15 bp, Homo sapiens
ccccatcaattttga

SEQ ID NO: 1503808 - DNA, 15 bp, Homo sapiens
cccatcaattttgaa

SEQ ID NO: 1503809 - DNA, 15 bp, Homo sapiens
ccatcaattttgaaa

SEQ ID NO: 1503810 - DNA, 15 bp, Homo sapiens
catcaattttgaaat

SEQ ID NO: 1503811 - DNA, 15 bp, Homo sapiens
atcaattttgaaatc

SEQ ID NO: 1503812 - DNA, 15 bp, Homo sapiens
tcaattttgaaatct

SEQ ID NO: 1503813 - DNA, 15 bp, Homo sapiens
caattttgaaatctg

SEQ ID NO: 1503814 - DNA, 15 bp, Homo sapiens
aattttgaaatctgc

SEQ ID NO: 1503815 - DNA, 15 bp, Homo sapiens
attttgaaatctgca

SEQ ID NO: 1503816 - DNA, 15 bp, Homo sapiens
ttttgaaatctgcaa

SEQ ID NO: 1503817 - DNA, 15 bp, Homo sapiens
tttgaaatctgcaaa

SEQ ID NO: 1503818 - DNA, 15 bp, Homo sapiens
ttgaaatctgcaaag

SEQ ID NO: 1503819 - DNA, 15 bp, Homo sapiens
tgaaatctgcaaagt

SEQ ID NO: 1503820 - DNA, 15 bp, Homo sapiens
gaaatctgcaaagta

SEQ ID NO: 1503821 - DNA, 15 bp, Homo sapiens
aaatctgcaaagtat

SEQ ID NO: 1503822 - DNA, 15 bp, Homo sapiens
aatctgcaaagtatt

SEQ ID NO: 1503823 - DNA, 15 bp, Homo sapiens
atctgcaaagtattc

SEQ ID NO: 1503824 - DNA, 15 bp, Homo sapiens
tctgcaaagtattca

SEQ ID NO: 1503825 - DNA, 15 bp, Homo sapiens
ctgcaaagtattcat

SEQ ID NO: 1503826 - DNA, 15 bp, Homo sapiens
tgcaaagtattcatt

SEQ ID NO: 1503827 - DNA, 15 bp, Homo sapiens
gcaaagtattcatta

SEQ ID NO: 1503828 - DNA, 15 bp, Homo sapiens
caaagtattcattag

SEQ ID NO: 1503829 - DNA, 15 bp, Homo sapiens
aaagtattcattagg

SEQ ID NO: 1503830 - DNA, 15 bp, Homo sapiens
aagtattcattaggg

SEQ ID NO: 1503831 - DNA, 15 bp, Homo sapiens
agtattcattaggga

SEQ ID NO: 1503832 - DNA, 15 bp, Homo sapiens
gtattcattagggaa

SEQ ID NO: 1503833 - DNA, 15 bp, Homo sapiens
tattcattagggaaa

SEQ ID NO: 1503834 - DNA, 15 bp, Homo sapiens
attcattagggaaaa

SEQ ID NO: 1503835 - DNA, 15 bp, Homo sapiens
ttcattagggaaaat

SEQ ID NO: 1503836 - DNA, 15 bp, Homo sapiens
tcattagggaaaatg

SEQ ID NO: 1503837 - DNA, 15 bp, Homo sapiens
cattagggaaaatgg

SEQ ID NO: 1503838 - DNA, 15 bp, Homo sapiens
attagggaaaatgga

SEQ ID NO: 1503839 - DNA, 15 bp, Homo sapiens
ttagggaaaatggag

SEQ ID NO: 1503840 - DNA, 15 bp, Homo sapiens
tagggaaaatggagg

SEQ ID NO: 1503841 - DNA, 15 bp, Homo sapiens
agggaaaatggaggc

SEQ ID NO: 1503842 - DNA, 15 bp, Homo sapiens
gggaaaatggaggca

SEQ ID NO: 1503843 - DNA, 15 bp, Homo sapiens
ggaaaatggaggcat

SEQ ID NO: 1503844 - DNA, 15 bp, Homo sapiens
gaaaatggaggcata

SEQ ID NO: 1503845 - DNA, 15 bp, Homo sapiens
aaaatggaggcatat

SEQ ID NO: 1503846 - DNA, 15 bp, Homo sapiens
aaatggaggcatata

SEQ ID NO: 1503847 - DNA, 15 bp, Homo sapiens
aatggaggcatatat

SEQ ID NO: 1503848 - DNA, 15 bp, Homo sapiens
atggaggcatatatt

SEQ ID NO: 1503849 - DNA, 15 bp, Homo sapiens
tggaggcatatattt

SEQ ID NO: 1503850 - DNA, 15 bp, Homo sapiens
ggaggcatatatttc

SEQ ID NO: 1503851 - DNA, 15 bp, Homo sapiens
gaggcatatatttct

SEQ ID NO: 1503852 - DNA, 15 bp, Homo sapiens
aggcatatatttctg

SEQ ID NO: 1503853 - DNA, 15 bp, Homo sapiens
ggcatatatttctga

SEQ ID NO: 1503854 - DNA, 15 bp, Homo sapiens
gcatatatttctgag

SEQ ID NO: 1503855 - DNA, 15 bp, Homo sapiens
catatatttctgagt

SEQ ID NO: 1503856 - DNA, 15 bp, Homo sapiens
atatatttctgagtg

SEQ ID NO: 1503857 - DNA, 15 bp, Homo sapiens
tatatttctgagtgc

SEQ ID NO: 1503858 - DNA, 15 bp, Homo sapiens
atatttctgagtgct

SEQ ID NO: 1503859 - DNA, 15 bp, Homo sapiens
tatttctgagtgctg

SEQ ID NO: 1503860 - DNA, 15 bp, Homo sapiens
atttctgagtgctgt

SEQ ID NO: 1503861 - DNA, 15 bp, Homo sapiens
tttctgagtgctgta

SEQ ID NO: 1503862 - DNA, 15 bp, Homo sapiens
ttctgagtgctgtaa

SEQ ID NO: 1503863 - DNA, 15 bp, Homo sapiens
tctgagtgctgtaag

SEQ ID NO: 1503864 - DNA, 15 bp, Homo sapiens
ctgagtgctgtaaga

SEQ ID NO: 1503865 - DNA, 15 bp, Homo sapiens
tgagtgctgtaagaa

SEQ ID NO: 1503866 - DNA, 15 bp, Homo sapiens
gagtgctgtaagaag

SEQ ID NO: 1503867 - DNA, 15 bp, Homo sapiens
agtgctgtaagaaga

SEQ ID NO: 1503868 - DNA, 15 bp, Homo sapiens
gtgctgtaagaagat

SEQ ID NO: 1503869 - DNA, 15 bp, Homo sapiens
tgctgtaagaagatg

SEQ ID NO: 1503870 - DNA, 15 bp, Homo sapiens
gctgtaagaagatgc

SEQ ID NO: 1503871 - DNA, 15 bp, Homo sapiens
ctgtaagaagatgct

SEQ ID NO: 1503872 - DNA, 15 bp, Homo sapiens
tgtaagaagatgctc

SEQ ID NO: 1503873 - DNA, 15 bp, Homo sapiens
gtaagaagatgctca

SEQ ID NO: 1503874 - DNA, 15 bp, Homo sapiens
taagaagatgctcag

SEQ ID NO: 1503875 - DNA, 15 bp, Homo sapiens
aagaagatgctcagc

SEQ ID NO: 1503876 - DNA, 15 bp, Homo sapiens
agaagatgctcagcc

SEQ ID NO: 1503877 - DNA, 15 bp, Homo sapiens
gaagatgctcagccc

SEQ ID NO: 1503878 - DNA, 15 bp, Homo sapiens
aagatgctcagccca

SEQ ID NO: 1503879 - DNA, 15 bp, Homo sapiens
agatgctcagcccat

SEQ ID NO: 1503880 - DNA, 15 bp, Homo sapiens
gatgctcagcccatt

SEQ ID NO: 1503881 - DNA, 15 bp, Homo sapiens
atgctcagcccatta

SEQ ID NO: 1503882 - DNA, 15 bp, Homo sapiens
tgctcagcccattag

SEQ ID NO: 1503883 - DNA, 15 bp, Homo sapiens
gctcagcccattagt

SEQ ID NO: 1503884 - DNA, 15 bp, Homo sapiens
ctcagcccattagtt

SEQ ID NO: 1503885 - DNA, 15 bp, Homo sapiens
tcagcccattagttc

SEQ ID NO: 1503886 - DNA, 15 bp, Homo sapiens
cagcccattagttca

SEQ ID NO: 1503887 - DNA, 15 bp, Homo sapiens
agcccattagttcat

SEQ ID NO: 1503888 - DNA, 15 bp, Homo sapiens
gcccattagttcatt

SEQ ID NO: 1503889 - DNA, 15 bp, Homo sapiens
cccattagttcattc

SEQ ID NO: 1503890 - DNA, 15 bp, Homo sapiens
ccattagttcattct

SEQ ID NO: 1503891 - DNA, 15 bp, Homo sapiens
cattagttcattctt

SEQ ID NO: 1503892 - DNA, 15 bp, Homo sapiens
attagttcattcttt

SEQ ID NO: 1503893 - DNA, 15 bp, Homo sapiens
ttagttcattctttt

SEQ ID NO: 1503894 - DNA, 15 bp, Homo sapiens
tagttcattctttta

SEQ ID NO: 1503895 - DNA, 15 bp, Homo sapiens
agttcattcttttaa

SEQ ID NO: 1503896 - DNA, 15 bp, Homo sapiens
gttcattcttttaaa

SEQ ID NO: 1503897 - DNA, 15 bp, Homo sapiens
ttcattcttttaaag

SEQ ID NO: 1503898 - DNA, 15 bp, Homo sapiens
tcattcttttaaagg

SEQ ID NO: 1503899 - DNA, 15 bp, Homo sapiens
cattcttttaaaggt

SEQ ID NO: 1503900 - DNA, 15 bp, Homo sapiens
attcttttaaaggtt

SEQ ID NO: 1503901 - DNA, 15 bp, Homo sapiens
ttcttttaaaggttt

SEQ ID NO: 1503902 - DNA, 15 bp, Homo sapiens
tcttttaaaggtttt

SEQ ID NO: 1503903 - DNA, 15 bp, Homo sapiens
cttttaaaggttttc

SEQ ID NO: 1503904 - DNA, 15 bp, Homo sapiens
ttttaaaggttttct

SEQ ID NO: 1503905 - DNA, 15 bp, Homo sapiens
tttaaaggttttctt

SEQ ID NO: 1503906 - DNA, 15 bp, Homo sapiens
ttaaaggttttcttt

SEQ ID NO: 1503907 - DNA, 15 bp, Homo sapiens
taaaggttttcttta

SEQ ID NO: 1503908 - DNA, 15 bp, Homo sapiens
aaaggttttctttat

SEQ ID NO: 1503909 - DNA, 15 bp, Homo sapiens
aaggttttctttatg

SEQ ID NO: 1503910 - DNA, 15 bp, Homo sapiens
aggttttctttatgt

SEQ ID NO: 1503911 - DNA, 15 bp, Homo sapiens
ggttttctttatgtg

SEQ ID NO: 1503912 - DNA, 15 bp, Homo sapiens
gttttctttatgtgt

SEQ ID NO: 1503913 - DNA, 15 bp, Homo sapiens
ttttctttatgtgtc

SEQ ID NO: 1503914 - DNA, 15 bp, Homo sapiens
tttctttatgtgtcc

SEQ ID NO: 1503915 - DNA, 15 bp, Homo sapiens
ttctttatgtgtcct

SEQ ID NO: 1503916 - DNA, 15 bp, Homo sapiens
tctttatgtgtccta

SEQ ID NO: 1503917 - DNA, 15 bp, Homo sapiens
ctttatgtgtcctac

SEQ ID NO: 1503918 - DNA, 15 bp, Homo sapiens
tttatgtgtcctact

SEQ ID NO: 1503919 - DNA, 15 bp, Homo sapiens
ttatgtgtcctactc

SEQ ID NO: 1503920 - DNA, 15 bp, Homo sapiens
tatgtgtcctactca

SEQ ID NO: 1503921 - DNA, 15 bp, Homo sapiens
atgtgtcctactcaa

SEQ ID NO: 1503922 - DNA, 15 bp, Homo sapiens
tgtgtcctactcaaa

SEQ ID NO: 1503923 - DNA, 15 bp, Homo sapiens
gtgtcctactcaaac

SEQ ID NO: 1503924 - DNA, 15 bp, Homo sapiens
tgtcctactcaaaca

SEQ ID NO: 1503925 - DNA, 15 bp, Homo sapiens
gtcctactcaaacac

SEQ ID NO: 1503926 - DNA, 15 bp, Homo sapiens
tcctactcaaacact

SEQ ID NO: 1503927 - DNA, 15 bp, Homo sapiens
cctactcaaacactg

SEQ ID NO: 1503928 - DNA, 15 bp, Homo sapiens
actcaaacactggct

SEQ ID NO: 1503929 - DNA, 15 bp, Homo sapiens
ctcaaacactggctc

SEQ ID NO: 1503930 - DNA, 15 bp, Homo sapiens
tcaaacactggctca

SEQ ID NO: 1503931 - DNA, 15 bp, Homo sapiens
caaacactggctcag

SEQ ID NO: 1503932 - DNA, 15 bp, Homo sapiens
aaacactggctcagg

SEQ ID NO: 1503933 - DNA, 15 bp, Homo sapiens
aacactggctcaggc

SEQ ID NO: 1503934 - DNA, 15 bp, Homo sapiens
acactggctcaggct

SEQ ID NO: 1503935 - DNA, 15 bp, Homo sapiens
cactggctcaggctc

SEQ ID NO: 1503936 - DNA, 15 bp, Homo sapiens
actggctcaggctca

SEQ ID NO: 1503937 - DNA, 15 bp, Homo sapiens
ctggctcaggctcat

SEQ ID NO: 1503938 - DNA, 15 bp, Homo sapiens
tggctcaggctcatc

SEQ ID NO: 1503939 - DNA, 15 bp, Homo sapiens
ggctcaggctcatct

SEQ ID NO: 1503940 - DNA, 15 bp, Homo sapiens
gctcaggctcatctt

SEQ ID NO: 1503941 - DNA, 15 bp, Homo sapiens
ctcaggctcatcttc

SEQ ID NO: 1503942 - DNA, 15 bp, Homo sapiens
caggctcatcttctc

SEQ ID NO: 1503943 - DNA, 15 bp, Homo sapiens
aggctcatcttctct

SEQ ID NO: 1503944 - DNA, 15 bp, Homo sapiens
ggctcatcttctcta

SEQ ID NO: 1503945 - DNA, 15 bp, Homo sapiens
gctcatcttctctac

SEQ ID NO: 1503946 - DNA, 15 bp, Homo sapiens
ctcatcttctctaca

SEQ ID NO: 1503947 - DNA, 15 bp, Homo sapiens
tcatcttctctacac

SEQ ID NO: 1503948 - DNA, 15 bp, Homo sapiens
catcttctctacaca

SEQ ID NO: 1503949 - DNA, 15 bp, Homo sapiens
atcttctctacacag

SEQ ID NO: 1503950 - DNA, 15 bp, Homo sapiens
tcttctctacacagt

SEQ ID NO: 1503951 - DNA, 15 bp, Homo sapiens
cttctctacacagtc

SEQ ID NO: 1503952 - DNA, 15 bp, Homo sapiens
ttctctacacagtca

SEQ ID NO: 1503953 - DNA, 15 bp, Homo sapiens
tctctacacagtcat

SEQ ID NO: 1503954 - DNA, 15 bp, Homo sapiens
ctctacacagtcata

SEQ ID NO: 1503955 - DNA, 15 bp, Homo sapiens
tctacacagtcatag

SEQ ID NO: 1503956 - DNA, 15 bp, Homo sapiens
ctacacagtcataga

SEQ ID NO: 1503957 - DNA, 15 bp, Homo sapiens
tacacagtcatagag

SEQ ID NO: 1503958 - DNA, 15 bp, Homo sapiens
acacagtcatagagc

SEQ ID NO: 1503959 - DNA, 15 bp, Homo sapiens
cacagtcatagagct

SEQ ID NO: 1503960 - DNA, 15 bp, Homo sapiens
acagtcatagagctt

SEQ ID NO: 1503961 - DNA, 15 bp, Homo sapiens
cagtcatagagcttt

SEQ ID NO: 1503962 - DNA, 15 bp, Homo sapiens
agtcatagagcttta

SEQ ID NO: 1503963 - DNA, 15 bp, Homo sapiens
gtcatagagctttag

SEQ ID NO: 1503964 - DNA, 15 bp, Homo sapiens
tcatagagctttagc

SEQ ID NO: 1503965 - DNA, 15 bp, Homo sapiens
catagagctttagcc

SEQ ID NO: 1503966 - DNA, 15 bp, Homo sapiens
atagagctttagcca

SEQ ID NO: 1503967 - DNA, 15 bp, Homo sapiens
tagagctttagccaa

SEQ ID NO: 1503968 - DNA, 15 bp, Homo sapiens
agagctttagccaaa

SEQ ID NO: 1503969 - DNA, 15 bp, Homo sapiens
gagctttagccaaat

SEQ ID NO: 1503970 - DNA, 15 bp, Homo sapiens
agctttagccaaatc

SEQ ID NO: 1503971 - DNA, 15 bp, Homo sapiens
gctttagccaaatct

SEQ ID NO: 1503972 - DNA, 15 bp, Homo sapiens
ctttagccaaatctc

SEQ ID NO: 1503973 - DNA, 15 bp, Homo sapiens
tttagccaaatctcg

SEQ ID NO: 1503974 - DNA, 15 bp, Homo sapiens
ttagccaaatctcgc

SEQ ID NO: 1503975 - DNA, 15 bp, Homo sapiens
tagccaaatctcgcc

SEQ ID NO: 1503976 - DNA, 15 bp, Homo sapiens
agccaaatctcgccc

SEQ ID NO: 1503977 - DNA, 15 bp, Homo sapiens
gccaaatctcgcccc

SEQ ID NO: 1503978 - DNA, 15 bp, Homo sapiens
ccaaatctcgccccc

SEQ ID NO: 1503979 - DNA, 15 bp, Homo sapiens
caaatctcgccccct

SEQ ID NO: 1503980 - DNA, 15 bp, Homo sapiens
aaatctcgccccctg

SEQ ID NO: 1503981 - DNA, 15 bp, Homo sapiens
aatctcgccccctga

SEQ ID NO: 1503982 - DNA, 15 bp, Homo sapiens
atctcgccccctgaa

SEQ ID NO: 1503983 - DNA, 15 bp, Homo sapiens
tctcgccccctgaat

SEQ ID NO: 1503984 - DNA, 15 bp, Homo sapiens
ctcgccccctgaata

SEQ ID NO: 1503985 - DNA, 15 bp, Homo sapiens
tcgccccctgaatat

SEQ ID NO: 1503986 - DNA, 15 bp, Homo sapiens
cgccccctgaatatg

SEQ ID NO: 1503987 - DNA, 15 bp, Homo sapiens
gccccctgaatatgt

SEQ ID NO: 1503988 - DNA, 15 bp, Homo sapiens
ccccctgaatatgtt

SEQ ID NO: 1503989 - DNA, 15 bp, Homo sapiens
cccctgaatatgttc

SEQ ID NO: 1503990 - DNA, 15 bp, Homo sapiens
ccctgaatatgttcc

SEQ ID NO: 1503991 - DNA, 15 bp, Homo sapiens
cctgaatatgttcca

SEQ ID NO: 1503992 - DNA, 15 bp, Homo sapiens
ctgaatatgttccac

SEQ ID NO: 1503993 - DNA, 15 bp, Homo sapiens
tgaatatgttccaca

SEQ ID NO: 1503994 - DNA, 15 bp, Homo sapiens
gaatatgttccacag

SEQ ID NO: 1503995 - DNA, 15 bp, Homo sapiens
aatatgttccacagt

SEQ ID NO: 1503996 - DNA, 15 bp, Homo sapiens
atatgttccacagtg

SEQ ID NO: 1503997 - DNA, 15 bp, Homo sapiens
tatgttccacagtga

SEQ ID NO: 1503998 - DNA, 15 bp, Homo sapiens
atgttccacagtgat

SEQ ID NO: 1503999 - DNA, 15 bp, Homo sapiens
tgttccacagtgatt

SEQ ID NO: 1504000 - DNA, 15 bp, Homo sapiens
gttccacagtgattt

SEQ ID NO: 1504001 - DNA, 15 bp, Homo sapiens
ttccacagtgatttg

SEQ ID NO: 1504002 - DNA, 15 bp, Homo sapiens
tccacagtgatttgt

SEQ ID NO: 1504003 - DNA, 15 bp, Homo sapiens
ccacagtgatttgtc

SEQ ID NO: 1504004 - DNA, 15 bp, Homo sapiens
cacagtgatttgtcc

SEQ ID NO: 1504005 - DNA, 15 bp, Homo sapiens
acagtgatttgtcct

SEQ ID NO: 1504006 - DNA, 15 bp, Homo sapiens
cagtgatttgtccta

SEQ ID NO: 1504007 - DNA, 15 bp, Homo sapiens
agtgatttgtcctat

SEQ ID NO: 1504008 - DNA, 15 bp, Homo sapiens
gtgatttgtcctatg

SEQ ID NO: 1504009 - DNA, 15 bp, Homo sapiens
tgatttgtcctatgc

SEQ ID NO: 1504010 - DNA, 15 bp, Homo sapiens
gatttgtcctatgcc

SEQ ID NO: 1504011 - DNA, 15 bp, Homo sapiens
atttgtcctatgcct

SEQ ID NO: 1504012 - DNA, 15 bp, Homo sapiens
tttgtcctatgcctc

SEQ ID NO: 1504013 - DNA, 15 bp, Homo sapiens
ttgtcctatgcctca

SEQ ID NO: 1504014 - DNA, 15 bp, Homo sapiens
tgtcctatgcctcag

SEQ ID NO: 1504015 - DNA, 15 bp, Homo sapiens
gtcctatgcctcaga

SEQ ID NO: 1504016 - DNA, 15 bp, Homo sapiens
tcctatgcctcagaa

SEQ ID NO: 1504017 - DNA, 15 bp, Homo sapiens
cctatgcctcagaag

SEQ ID NO: 1504018 - DNA, 15 bp, Homo sapiens
ctatgcctcagaagc

SEQ ID NO: 1504019 - DNA, 15 bp, Homo sapiens
tatgcctcagaagct

SEQ ID NO: 1504020 - DNA, 15 bp, Homo sapiens
atgcctcagaagctg

SEQ ID NO: 1504021 - DNA, 15 bp, Homo sapiens
tgcctcagaagctgg

SEQ ID NO: 1504022 - DNA, 15 bp, Homo sapiens
gcctcagaagctggc

SEQ ID NO: 1504023 - DNA, 15 bp, Homo sapiens
cctcagaagctggcc

SEQ ID NO: 1504024 - DNA, 15 bp, Homo sapiens
ctcagaagctggccc

SEQ ID NO: 1504025 - DNA, 15 bp, Homo sapiens
tcagaagctggccca

SEQ ID NO: 1504026 - DNA, 15 bp, Homo sapiens
cagaagctggcccac

SEQ ID NO: 1504027 - DNA, 15 bp, Homo sapiens
agaagctggcccact

SEQ ID NO: 1504028 - DNA, 15 bp, Homo sapiens
gaagctggcccactg

SEQ ID NO: 1504029 - DNA, 15 bp, Homo sapiens
aagctggcccactgg

SEQ ID NO: 1504030 - DNA, 15 bp, Homo sapiens
agctggcccactggc

SEQ ID NO: 1504031 - DNA, 15 bp, Homo sapiens
gctggcccactggct

SEQ ID NO: 1504032 - DNA, 15 bp, Homo sapiens
ctggcccactggctg

SEQ ID NO: 1504033 - DNA, 15 bp, Homo sapiens
tggcccactggctga

SEQ ID NO: 1504034 - DNA, 15 bp, Homo sapiens
ggcccactggctgac

SEQ ID NO: 1504035 - DNA, 15 bp, Homo sapiens
gcccactggctgaca

SEQ ID NO: 1504036 - DNA, 15 bp, Homo sapiens
cccactggctgacag

SEQ ID NO: 1504037 - DNA, 15 bp, Homo sapiens
ccactggctgacagg

SEQ ID NO: 1504038 - DNA, 15 bp, Homo sapiens
cactggctgacagga

SEQ ID NO: 1504039 - DNA, 15 bp, Homo sapiens
actggctgacaggac

SEQ ID NO: 1504040 - DNA, 15 bp, Homo sapiens
ctggctgacaggact

SEQ ID NO: 1504041 - DNA, 15 bp, Homo sapiens
tggctgacaggactg

SEQ ID NO: 1504042 - DNA, 15 bp, Homo sapiens
ggctgacaggactgg

SEQ ID NO: 1504043 - DNA, 15 bp, Homo sapiens
gctgacaggactggg

SEQ ID NO: 1504044 - DNA, 15 bp, Homo sapiens
ctgacaggactgggg

SEQ ID NO: 1504045 - DNA, 15 bp, Homo sapiens
tgacaggactggggc

SEQ ID NO: 1504046 - DNA, 15 bp, Homo sapiens
gacaggactggggca

SEQ ID NO: 1504047 - DNA, 15 bp, Homo sapiens
acaggactggggcac

SEQ ID NO: 1504048 - DNA, 15 bp, Homo sapiens
caggactggggcacc

SEQ ID NO: 1504049 - DNA, 15 bp, Homo sapiens
aggactggggcacca

SEQ ID NO: 1504050 - DNA, 15 bp, Homo sapiens
ggactggggcaccat

SEQ ID NO: 1504051 - DNA, 15 bp, Homo sapiens
gactggggcaccatt

SEQ ID NO: 1504052 - DNA, 15 bp, Homo sapiens
actggggcaccattt

SEQ ID NO: 1504053 - DNA, 15 bp, Homo sapiens
ctggggcaccatttt

SEQ ID NO: 1504054 - DNA, 15 bp, Homo sapiens
tggggcaccattttc

SEQ ID NO: 1504055 - DNA, 15 bp, Homo sapiens
ggggcaccattttct

SEQ ID NO: 1504056 - DNA, 15 bp, Homo sapiens
gggcaccattttctc

SEQ ID NO: 1504057 - DNA, 15 bp, Homo sapiens
ggcaccattttctcc

SEQ ID NO: 1504058 - DNA, 15 bp, Homo sapiens
gcaccattttctcct

SEQ ID NO: 1504059 - DNA, 15 bp, Homo sapiens
caccattttctcctc

SEQ ID NO: 1504060 - DNA, 15 bp, Homo sapiens
accattttctcctca

SEQ ID NO: 1504061 - DNA, 15 bp, Homo sapiens
ccattttctcctcat

SEQ ID NO: 1504062 - DNA, 15 bp, Homo sapiens
cattttctcctcata

SEQ ID NO: 1504063 - DNA, 15 bp, Homo sapiens
attttctcctcataa

SEQ ID NO: 1504064 - DNA, 15 bp, Homo sapiens
ttttctcctcataag

SEQ ID NO: 1504065 - DNA, 15 bp, Homo sapiens
tttctcctcataagc

SEQ ID NO: 1504066 - DNA, 15 bp, Homo sapiens
ttctcctcataagca

SEQ ID NO: 1504067 - DNA, 15 bp, Homo sapiens
tctcctcataagcat

SEQ ID NO: 1504068 - DNA, 15 bp, Homo sapiens
ctcctcataagcatt

SEQ ID NO: 1504069 - DNA, 15 bp, Homo sapiens
tcctcataagcattt

SEQ ID NO: 1504070 - DNA, 15 bp, Homo sapiens
cctcataagcatttg

SEQ ID NO: 1504071 - DNA, 15 bp, Homo sapiens
ctcataagcatttgt

SEQ ID NO: 1504072 - DNA, 15 bp, Homo sapiens
tcataagcatttgta

SEQ ID NO: 1504073 - DNA, 15 bp, Homo sapiens
cataagcatttgtac

SEQ ID NO: 1504074 - DNA, 15 bp, Homo sapiens
ataagcatttgtaca

SEQ ID NO: 1504075 - DNA, 15 bp, Homo sapiens
taagcatttgtacag

SEQ ID NO: 1504076 - DNA, 15 bp, Homo sapiens
aagcatttgtacaga

SEQ ID NO: 1504077 - DNA, 15 bp, Homo sapiens
agcatttgtacagag

SEQ ID NO: 1504078 - DNA, 15 bp, Homo sapiens
gcatttgtacagagg

SEQ ID NO: 1504079 - DNA, 15 bp, Homo sapiens
catttgtacagaggg

SEQ ID NO: 1504080 - DNA, 15 bp, Homo sapiens
atttgtacagagggg

SEQ ID NO: 1504081 - DNA, 15 bp, Homo sapiens
tttgtacagaggggg

SEQ ID NO: 1504082 - DNA, 15 bp, Homo sapiens
ttgtacagagggggc

SEQ ID NO: 1504083 - DNA, 15 bp, Homo sapiens
tgtacagagggggca

SEQ ID NO: 1504084 - DNA, 15 bp, Homo sapiens
gtacagagggggcac

SEQ ID NO: 1504085 - DNA, 15 bp, Homo sapiens
tacagagggggcact

SEQ ID NO: 1504086 - DNA, 15 bp, Homo sapiens
acagagggggcactg

SEQ ID NO: 1504087 - DNA, 15 bp, Homo sapiens
cagagggggcactgg

SEQ ID NO: 1504088 - DNA, 15 bp, Homo sapiens
agagggggcactggc

SEQ ID NO: 1504089 - DNA, 15 bp, Homo sapiens
gagggggcactggca

SEQ ID NO: 1504090 - DNA, 15 bp, Homo sapiens
tagtctgtagggaag

SEQ ID NO: 1504091 - DNA, 15 bp, Homo sapiens
agtctgtagggaaga

SEQ ID NO: 1504092 - DNA, 15 bp, Homo sapiens
gtctgtagggaagaa

SEQ ID NO: 1504093 - DNA, 15 bp, Homo sapiens
tctgtagggaagaaa

SEQ ID NO: 1504094 - DNA, 15 bp, Homo sapiens
ctgtagggaagaaat

SEQ ID NO: 1504095 - DNA, 15 bp, Homo sapiens
tgtagggaagaaata

SEQ ID NO: 1504096 - DNA, 15 bp, Homo sapiens
gtagggaagaaatat

SEQ ID NO: 1504097 - DNA, 15 bp, Homo sapiens
tagggaagaaatatg

SEQ ID NO: 1504098 - DNA, 15 bp, Homo sapiens
agggaagaaatatga

SEQ ID NO: 1504099 - DNA, 15 bp, Homo sapiens
gggaagaaatatgaa

SEQ ID NO: 1504100 - DNA, 15 bp, Homo sapiens
ggaagaaatatgaac

SEQ ID NO: 1504101 - DNA, 15 bp, Homo sapiens
gaagaaatatgaact

SEQ ID NO: 1504102 - DNA, 15 bp, Homo sapiens
aagaaatatgaactt

SEQ ID NO: 1504103 - DNA, 15 bp, Homo sapiens
agaaatatgaacttg

SEQ ID NO: 1504104 - DNA, 15 bp, Homo sapiens
gaaatatgaacttgc

SEQ ID NO: 1504105 - DNA, 15 bp, Homo sapiens
aaatatgaacttgcc

SEQ ID NO: 1504106 - DNA, 15 bp, Homo sapiens
aatatgaacttgcca

SEQ ID NO: 1504107 - DNA, 15 bp, Homo sapiens
atatgaacttgccac

SEQ ID NO: 1504108 - DNA, 15 bp, Homo sapiens
tatgaacttgccact

SEQ ID NO: 1504109 - DNA, 15 bp, Homo sapiens
atgaacttgccacta

SEQ ID NO: 1504110 - DNA, 15 bp, Homo sapiens
tgaacttgccactaa

SEQ ID NO: 1504111 - DNA, 15 bp, Homo sapiens
gaacttgccactaat

SEQ ID NO: 1504112 - DNA, 15 bp, Homo sapiens
aacttgccactaatt

SEQ ID NO: 1504113 - DNA, 15 bp, Homo sapiens
acttgccactaattt

SEQ ID NO: 1504114 - DNA, 15 bp, Homo sapiens
cttgccactaatttc

SEQ ID NO: 1504115 - DNA, 15 bp, Homo sapiens
ttgccactaatttct

SEQ ID NO: 1504116 - DNA, 15 bp, Homo sapiens
tgccactaatttctg

SEQ ID NO: 1504117 - DNA, 15 bp, Homo sapiens
gccactaatttctga

SEQ ID NO: 1504118 - DNA, 15 bp, Homo sapiens
ccactaatttctgaa

SEQ ID NO: 1504119 - DNA, 15 bp, Homo sapiens
cactaatttctgaaa

SEQ ID NO: 1504120 - DNA, 15 bp, Homo sapiens
actaatttctgaaaa

SEQ ID NO: 1504121 - DNA, 15 bp, Homo sapiens
ctaatttctgaaaag

SEQ ID NO: 1504122 - DNA, 15 bp, Homo sapiens
taatttctgaaaagc

SEQ ID NO: 1504123 - DNA, 15 bp, Homo sapiens
aatttctgaaaagca

SEQ ID NO: 1504124 - DNA, 15 bp, Homo sapiens
atttctgaaaagcaa

SEQ ID NO: 1504125 - DNA, 15 bp, Homo sapiens
tttctgaaaagcaaa

SEQ ID NO: 1504126 - DNA, 15 bp, Homo sapiens
ttctgaaaagcaaaa

SEQ ID NO: 1504127 - DNA, 15 bp, Homo sapiens
tctgaaaagcaaaat

SEQ ID NO: 1504128 - DNA, 15 bp, Homo sapiens
ctgaaaagcaaaatt

SEQ ID NO: 1504129 - DNA, 15 bp, Homo sapiens
tgaaaagcaaaatta

SEQ ID NO: 1504130 - DNA, 15 bp, Homo sapiens
gaaaagcaaaattaa

SEQ ID NO: 1504131 - DNA, 15 bp, Homo sapiens
aaaagcaaaattaat

SEQ ID NO: 1504132 - DNA, 15 bp, Homo sapiens
aaagcaaaattaatt

SEQ ID NO: 1504133 - DNA, 15 bp, Homo sapiens
aagcaaaattaattc

SEQ ID NO: 1504134 - DNA, 15 bp, Homo sapiens
agcaaaattaattca

SEQ ID NO: 1504135 - DNA, 15 bp, Homo sapiens
gcaaaattaattcag

SEQ ID NO: 1504136 - DNA, 15 bp, Homo sapiens
caaaattaattcagt

SEQ ID NO: 1504137 - DNA, 15 bp, Homo sapiens
aaaattaattcagtt

SEQ ID NO: 1504138 - DNA, 15 bp, Homo sapiens
aaattaattcagtta

SEQ ID NO: 1504139 - DNA, 15 bp, Homo sapiens
aattaattcagttat

SEQ ID NO: 1504140 - DNA, 15 bp, Homo sapiens
attaattcagttata

SEQ ID NO: 1504141 - DNA, 15 bp, Homo sapiens
ttaattcagttatag

SEQ ID NO: 1504142 - DNA, 15 bp, Homo sapiens
taattcagttatagc

SEQ ID NO: 1504143 - DNA, 15 bp, Homo sapiens
aattcagttatagct

SEQ ID NO: 1504144 - DNA, 15 bp, Homo sapiens
attcagttatagcta

SEQ ID NO: 1504145 - DNA, 15 bp, Homo sapiens
ttcagttatagctag

SEQ ID NO: 1504146 - DNA, 15 bp, Homo sapiens
tcagttatagctaga

SEQ ID NO: 1504147 - DNA, 15 bp, Homo sapiens
cagttatagctagat

SEQ ID NO: 1504148 - DNA, 15 bp, Homo sapiens
agttatagctagatc

SEQ ID NO: 1504149 - DNA, 15 bp, Homo sapiens
gttatagctagatct

SEQ ID NO: 1504150 - DNA, 15 bp, Homo sapiens
ttatagctagatctg

SEQ ID NO: 1504151 - DNA, 15 bp, Homo sapiens
tatagctagatctgc

SEQ ID NO: 1504152 - DNA, 15 bp, Homo sapiens
atagctagatctgcc

SEQ ID NO: 1504153 - DNA, 15 bp, Homo sapiens
tagctagatctgcct

SEQ ID NO: 1504154 - DNA, 15 bp, Homo sapiens
agctagatctgcctt

SEQ ID NO: 1504155 - DNA, 15 bp, Homo sapiens
gctagatctgccttc

SEQ ID NO: 1504156 - DNA, 15 bp, Homo sapiens
ctagatctgccttca

SEQ ID NO: 1504157 - DNA, 15 bp, Homo sapiens
tagatctgccttcat

SEQ ID NO: 1504158 - DNA, 15 bp, Homo sapiens
agatctgccttcata

SEQ ID NO: 1504159 - DNA, 15 bp, Homo sapiens
gatctgccttcataa

SEQ ID NO: 1504160 - DNA, 15 bp, Homo sapiens
atctgccttcataag

SEQ ID NO: 1504161 - DNA, 15 bp, Homo sapiens
tctgccttcataagg

SEQ ID NO: 1504162 - DNA, 15 bp, Homo sapiens
ctgccttcataagga

SEQ ID NO: 1504163 - DNA, 15 bp, Homo sapiens
tgccttcataaggat

SEQ ID NO: 1504164 - DNA, 15 bp, Homo sapiens
gccttcataaggata

SEQ ID NO: 1504165 - DNA, 15 bp, Homo sapiens
ccttcataaggatat

SEQ ID NO: 1504166 - DNA, 15 bp, Homo sapiens
cttcataaggatatt

SEQ ID NO: 1504167 - DNA, 15 bp, Homo sapiens
ttcataaggatattt

SEQ ID NO: 1504168 - DNA, 15 bp, Homo sapiens
tcataaggatatttc

SEQ ID NO: 1504169 - DNA, 15 bp, Homo sapiens
cataaggatatttct

SEQ ID NO: 1504170 - DNA, 15 bp, Homo sapiens
ataaggatatttctg

SEQ ID NO: 1504171 - DNA, 15 bp, Homo sapiens
taaggatatttctga

SEQ ID NO: 1504172 - DNA, 15 bp, Homo sapiens
aaggatatttctgat

SEQ ID NO: 1504173 - DNA, 15 bp, Homo sapiens
aggatatttctgatg

SEQ ID NO: 1504174 - DNA, 15 bp, Homo sapiens
ggatatttctgatgc

SEQ ID NO: 1504175 - DNA, 15 bp, Homo sapiens
gatatttctgatgct

SEQ ID NO: 1504176 - DNA, 15 bp, Homo sapiens
atatttctgatgctt

SEQ ID NO: 1504177 - DNA, 15 bp, Homo sapiens
tatttctgatgcttc

SEQ ID NO: 1504178 - DNA, 15 bp, Homo sapiens
atttctgatgcttct

SEQ ID NO: 1504179 - DNA, 15 bp, Homo sapiens
tttctgatgcttctc

SEQ ID NO: 1504180 - DNA, 15 bp, Homo sapiens
ttctgatgcttctca

SEQ ID NO: 1504181 - DNA, 15 bp, Homo sapiens
tctgatgcttctcag

SEQ ID NO: 1504182 - DNA, 15 bp, Homo sapiens
ctgatgcttctcagc

SEQ ID NO: 1504183 - DNA, 15 bp, Homo sapiens
tgatgcttctcagcc

SEQ ID NO: 1504184 - DNA, 15 bp, Homo sapiens
gatgcttctcagcct

SEQ ID NO: 1504185 - DNA, 15 bp, Homo sapiens
atgcttctcagcctg

SEQ ID NO: 1504186 - DNA, 15 bp, Homo sapiens
tgcttctcagcctgt

SEQ ID NO: 1504187 - DNA, 15 bp, Homo sapiens
gcttctcagcctgtt

SEQ ID NO: 1504188 - DNA, 15 bp, Homo sapiens
cttctcagcctgttc

SEQ ID NO: 1504189 - DNA, 15 bp, Homo sapiens
ttctcagcctgttcc

SEQ ID NO: 1504190 - DNA, 15 bp, Homo sapiens
tctcagcctgttcct

SEQ ID NO: 1504191 - DNA, 15 bp, Homo sapiens
ctcagcctgttcctt

SEQ ID NO: 1504192 - DNA, 15 bp, Homo sapiens
tcagcctgttccttt

SEQ ID NO: 1504193 - DNA, 15 bp, Homo sapiens
cagcctgttcctttt

SEQ ID NO: 1504194 - DNA, 15 bp, Homo sapiens
agcctgttcctttta

SEQ ID NO: 1504195 - DNA, 15 bp, Homo sapiens
gcctgttccttttat

SEQ ID NO: 1504196 - DNA, 15 bp, Homo sapiens
cctgttccttttata

SEQ ID NO: 1504197 - DNA, 15 bp, Homo sapiens
ctgttccttttatac

SEQ ID NO: 1504198 - DNA, 15 bp, Homo sapiens
tgttccttttatact

SEQ ID NO: 1504199 - DNA, 15 bp, Homo sapiens
gttccttttatactg

SEQ ID NO: 1504200 - DNA, 15 bp, Homo sapiens
ttccttttatactga

SEQ ID NO: 1504201 - DNA, 15 bp, Homo sapiens
tccttttatactgaa

SEQ ID NO: 1504202 - DNA, 15 bp, Homo sapiens
ccttttatactgaat

SEQ ID NO: 1504203 - DNA, 15 bp, Homo sapiens
cttttatactgaata

SEQ ID NO: 1504204 - DNA, 15 bp, Homo sapiens
ttttatactgaatat

SEQ ID NO: 1504205 - DNA, 15 bp, Homo sapiens
tttatactgaatatt

SEQ ID NO: 1504206 - DNA, 15 bp, Homo sapiens
ttatactgaatattt

SEQ ID NO: 1504207 - DNA, 15 bp, Homo sapiens
tatactgaatattta

SEQ ID NO: 1504208 - DNA, 15 bp, Homo sapiens
atactgaatatttac

SEQ ID NO: 1504209 - DNA, 15 bp, Homo sapiens
tactgaatatttaca

SEQ ID NO: 1504210 - DNA, 15 bp, Homo sapiens
actgaatatttacaa

SEQ ID NO: 1504211 - DNA, 15 bp, Homo sapiens
ctgaatatttacaaa

SEQ ID NO: 1504212 - DNA, 15 bp, Homo sapiens
tgaatatttacaaac

SEQ ID NO: 1504213 - DNA, 15 bp, Homo sapiens
gaatatttacaaact

SEQ ID NO: 1504214 - DNA, 15 bp, Homo sapiens
aatatttacaaactt

SEQ ID NO: 1504215 - DNA, 15 bp, Homo sapiens
atatttacaaacttc

SEQ ID NO: 1504216 - DNA, 15 bp, Homo sapiens
tatttacaaacttca

SEQ ID NO: 1504217 - DNA, 15 bp, Homo sapiens
atttacaaacttcag

SEQ ID NO: 1504218 - DNA, 15 bp, Homo sapiens
tttacaaacttcagt

SEQ ID NO: 1504219 - DNA, 15 bp, Homo sapiens
ttacaaacttcagtg

SEQ ID NO: 1504220 - DNA, 15 bp, Homo sapiens
tacaaacttcagtga

SEQ ID NO: 1504221 - DNA, 15 bp, Homo sapiens
acaaacttcagtgat

SEQ ID NO: 1504222 - DNA, 15 bp, Homo sapiens
caaacttcagtgatc

SEQ ID NO: 1504223 - DNA, 15 bp, Homo sapiens
aaacttcagtgatca

SEQ ID NO: 1504224 - DNA, 15 bp, Homo sapiens
aacttcagtgatcac

SEQ ID NO: 1504225 - DNA, 15 bp, Homo sapiens
acttcagtgatcacc

SEQ ID NO: 1504226 - DNA, 15 bp, Homo sapiens
cttcagtgatcacct

SEQ ID NO: 1504227 - DNA, 15 bp, Homo sapiens
ttcagtgatcacctg

SEQ ID NO: 1504228 - DNA, 15 bp, Homo sapiens
tcagtgatcacctga

SEQ ID NO: 1504229 - DNA, 15 bp, Homo sapiens
cagtgatcacctgat

SEQ ID NO: 1504230 - DNA, 15 bp, Homo sapiens
agtgatcacctgatc

SEQ ID NO: 1504231 - DNA, 15 bp, Homo sapiens
gtgatcacctgatca

SEQ ID NO: 1504232 - DNA, 15 bp, Homo sapiens
tgatcacctgatcag

SEQ ID NO: 1504233 - DNA, 15 bp, Homo sapiens
gatcacctgatcaga

SEQ ID NO: 1504234 - DNA, 15 bp, Homo sapiens
atcacctgatcagaa

SEQ ID NO: 1504235 - DNA, 15 bp, Homo sapiens
tcacctgatcagaat

SEQ ID NO: 1504236 - DNA, 15 bp, Homo sapiens
cacctgatcagaatc

SEQ ID NO: 1504237 - DNA, 15 bp, Homo sapiens
acctgatcagaatcc

SEQ ID NO: 1504238 - DNA, 15 bp, Homo sapiens
cctgatcagaatcca

SEQ ID NO: 1504239 - DNA, 15 bp, Homo sapiens
ctgatcagaatccaa

SEQ ID NO: 1504240 - DNA, 15 bp, Homo sapiens
tgatcagaatccaag

SEQ ID NO: 1504241 - DNA, 15 bp, Homo sapiens
gatcagaatccaaga

SEQ ID NO: 1504242 - DNA, 15 bp, Homo sapiens
atcagaatccaagac

SEQ ID NO: 1504243 - DNA, 15 bp, Homo sapiens
tcagaatccaagaca

SEQ ID NO: 1504244 - DNA, 15 bp, Homo sapiens
cagaatccaagacac

SEQ ID NO: 1504245 - DNA, 15 bp, Homo sapiens
agaatccaagacaca

SEQ ID NO: 1504246 - DNA, 15 bp, Homo sapiens
gaatccaagacacaa

SEQ ID NO: 1504247 - DNA, 15 bp, Homo sapiens
aatccaagacacaaa

SEQ ID NO: 1504248 - DNA, 15 bp, Homo sapiens
atccaagacacaaaa

SEQ ID NO: 1504249 - DNA, 15 bp, Homo sapiens
tccaagacacaaaac

SEQ ID NO: 1504250 - DNA, 15 bp, Homo sapiens
ccaagacacaaaact

SEQ ID NO: 1504251 - DNA, 15 bp, Homo sapiens
caagacacaaaactc

SEQ ID NO: 1504252 - DNA, 15 bp, Homo sapiens
aagacacaaaactca

SEQ ID NO: 1504253 - DNA, 15 bp, Homo sapiens
agacacaaaactcaa

SEQ ID NO: 1504254 - DNA, 15 bp, Homo sapiens
gacacaaaactcaaa

SEQ ID NO: 1504255 - DNA, 15 bp, Homo sapiens
acacaaaactcaaat

SEQ ID NO: 1504256 - DNA, 15 bp, Homo sapiens
cacaaaactcaaatg

SEQ ID NO: 1504257 - DNA, 15 bp, Homo sapiens
acaaaactcaaatga

SEQ ID NO: 1504258 - DNA, 15 bp, Homo sapiens
caaaactcaaatgaa

SEQ ID NO: 1504259 - DNA, 15 bp, Homo sapiens
aaaactcaaatgaat

SEQ ID NO: 1504260 - DNA, 15 bp, Homo sapiens
aaactcaaatgaatc

SEQ ID NO: 1504261 - DNA, 15 bp, Homo sapiens
aactcaaatgaatcc

SEQ ID NO: 1504262 - DNA, 15 bp, Homo sapiens
actcaaatgaatcca

SEQ ID NO: 1504263 - DNA, 15 bp, Homo sapiens
ctcaaatgaatccaa

SEQ ID NO: 1504264 - DNA, 15 bp, Homo sapiens
tcaaatgaatccaat

SEQ ID NO: 1504265 - DNA, 15 bp, Homo sapiens
caaatgaatccaatt

SEQ ID NO: 1504266 - DNA, 15 bp, Homo sapiens
aaatgaatccaattt

SEQ ID NO: 1504267 - DNA, 15 bp, Homo sapiens
aatgaatccaatttt

SEQ ID NO: 1504268 - DNA, 15 bp, Homo sapiens
atgaatccaattttt

SEQ ID NO: 1504269 - DNA, 15 bp, Homo sapiens
tgaatccaatttttc

SEQ ID NO: 1504270 - DNA, 15 bp, Homo sapiens
gaatccaatttttca

SEQ ID NO: 1504271 - DNA, 15 bp, Homo sapiens
aatccaatttttcaa

SEQ ID NO: 1504272 - DNA, 15 bp, Homo sapiens
atccaatttttcaag

SEQ ID NO: 1504273 - DNA, 15 bp, Homo sapiens
tccaatttttcaagt

SEQ ID NO: 1504274 - DNA, 15 bp, Homo sapiens
ccaatttttcaagtg

SEQ ID NO: 1504275 - DNA, 15 bp, Homo sapiens
caatttttcaagtgg

SEQ ID NO: 1504276 - DNA, 15 bp, Homo sapiens
aatttttcaagtggc

SEQ ID NO: 1504277 - DNA, 15 bp, Homo sapiens
atttttcaagtggct

SEQ ID NO: 1504278 - DNA, 15 bp, Homo sapiens
tttttcaagtggctt

SEQ ID NO: 1504279 - DNA, 15 bp, Homo sapiens
ttttcaagtggcttc

SEQ ID NO: 1504280 - DNA, 15 bp, Homo sapiens
tttcaagtggcttca

SEQ ID NO: 1504281 - DNA, 15 bp, Homo sapiens
ttcaagtggcttcaa

SEQ ID NO: 1504282 - DNA, 15 bp, Homo sapiens
tcaagtggcttcaac

SEQ ID NO: 1504283 - DNA, 15 bp, Homo sapiens
caagtggcttcaacc

SEQ ID NO: 1504284 - DNA, 15 bp, Homo sapiens
aagtggcttcaaccc

SEQ ID NO: 1504285 - DNA, 15 bp, Homo sapiens
agtggcttcaaccca

SEQ ID NO: 1504286 - DNA, 15 bp, Homo sapiens
gtggcttcaacccag

SEQ ID NO: 1504287 - DNA, 15 bp, Homo sapiens
tggcttcaacccagc

SEQ ID NO: 1504288 - DNA, 15 bp, Homo sapiens
ggcttcaacccagca

SEQ ID NO: 1504289 - DNA, 15 bp, Homo sapiens
gcttcaacccagcaa

SEQ ID NO: 1504290 - DNA, 15 bp, Homo sapiens
cttcaacccagcaac

SEQ ID NO: 1504291 - DNA, 15 bp, Homo sapiens
ttcaacccagcaacc

SEQ ID NO: 1504292 - DNA, 15 bp, Homo sapiens
tcaacccagcaacca

SEQ ID NO: 1504293 - DNA, 15 bp, Homo sapiens
caacccagcaaccaa

SEQ ID NO: 1504294 - DNA, 15 bp, Homo sapiens
aacccagcaaccaaa

SEQ ID NO: 1504295 - DNA, 15 bp, Homo sapiens
acccagcaaccaaat

SEQ ID NO: 1504296 - DNA, 15 bp, Homo sapiens
cccagcaaccaaatc

SEQ ID NO: 1504297 - DNA, 15 bp, Homo sapiens
ccagcaaccaaatca

SEQ ID NO: 1504298 - DNA, 15 bp, Homo sapiens
cagcaaccaaatcat

SEQ ID NO: 1504299 - DNA, 15 bp, Homo sapiens
agcaaccaaatcata

SEQ ID NO: 1504300 - DNA, 15 bp, Homo sapiens
gcaaccaaatcatag

SEQ ID NO: 1504301 - DNA, 15 bp, Homo sapiens
caaccaaatcatagg

SEQ ID NO: 1504302 - DNA, 15 bp, Homo sapiens
aaccaaatcataggg

SEQ ID NO: 1504303 - DNA, 15 bp, Homo sapiens
accaaatcatagggc

SEQ ID NO: 1504304 - DNA, 15 bp, Homo sapiens
ccaaatcatagggct

SEQ ID NO: 1504305 - DNA, 15 bp, Homo sapiens
caaatcatagggctg

SEQ ID NO: 1504306 - DNA, 15 bp, Homo sapiens
aaatcatagggctgc

SEQ ID NO: 1504307 - DNA, 15 bp, Homo sapiens
aatcatagggctgcc

SEQ ID NO: 1504308 - DNA, 15 bp, Homo sapiens
atcatagggctgcca

SEQ ID NO: 1504309 - DNA, 15 bp, Homo sapiens
tcatagggctgccat

SEQ ID NO: 1504310 - DNA, 15 bp, Homo sapiens
catagggctgccatt

SEQ ID NO: 1504311 - DNA, 15 bp, Homo sapiens
atagggctgccattt

SEQ ID NO: 1504312 - DNA, 15 bp, Homo sapiens
tagggctgccatttg

SEQ ID NO: 1504313 - DNA, 15 bp, Homo sapiens
agggctgccatttgt

SEQ ID NO: 1504314 - DNA, 15 bp, Homo sapiens
gggctgccatttgtg

SEQ ID NO: 1504315 - DNA, 15 bp, Homo sapiens
ggctgccatttgtgc

SEQ ID NO: 1504316 - DNA, 15 bp, Homo sapiens
gctgccatttgtgct

SEQ ID NO: 1504317 - DNA, 15 bp, Homo sapiens
ctgccatttgtgctc

SEQ ID NO: 1504318 - DNA, 15 bp, Homo sapiens
tgccatttgtgctca

SEQ ID NO: 1504319 - DNA, 15 bp, Homo sapiens
gccatttgtgctcaa

SEQ ID NO: 1504320 - DNA, 15 bp, Homo sapiens
ccatttgtgctcaaa

SEQ ID NO: 1504321 - DNA, 15 bp, Homo sapiens
catttgtgctcaaag

SEQ ID NO: 1504322 - DNA, 15 bp, Homo sapiens
atttgtgctcaaagc

SEQ ID NO: 1504323 - DNA, 15 bp, Homo sapiens
tttgtgctcaaagcc

SEQ ID NO: 1504324 - DNA, 15 bp, Homo sapiens
ttgtgctcaaagcca

SEQ ID NO: 1504325 - DNA, 15 bp, Homo sapiens
tgtgctcaaagccaa

SEQ ID NO: 1504326 - DNA, 15 bp, Homo sapiens
gtgctcaaagccaac

SEQ ID NO: 1504327 - DNA, 15 bp, Homo sapiens
tgctcaaagccaaca

SEQ ID NO: 1504328 - DNA, 15 bp, Homo sapiens
gctcaaagccaacac

SEQ ID NO: 1504329 - DNA, 15 bp, Homo sapiens
ctcaaagccaacact

SEQ ID NO: 1504330 - DNA, 15 bp, Homo sapiens
tcaaagccaacactc

SEQ ID NO: 1504331 - DNA, 15 bp, Homo sapiens
caaagccaacactcc

SEQ ID NO: 1504332 - DNA, 15 bp, Homo sapiens
aaagccaacactcca

SEQ ID NO: 1504333 - DNA, 15 bp, Homo sapiens
aagccaacactccaa

SEQ ID NO: 1504334 - DNA, 15 bp, Homo sapiens
agccaacactccaag

SEQ ID NO: 1504335 - DNA, 15 bp, Homo sapiens
gccaacactccaagg

SEQ ID NO: 1504336 - DNA, 15 bp, Homo sapiens
ccaacactccaaggt

SEQ ID NO: 1504337 - DNA, 15 bp, Homo sapiens
caacactccaaggtt

SEQ ID NO: 1504338 - DNA, 15 bp, Homo sapiens
aacactccaaggttt

SEQ ID NO: 1504339 - DNA, 15 bp, Homo sapiens
acactccaaggtttt

SEQ ID NO: 1504340 - DNA, 15 bp, Homo sapiens
cactccaaggttttg

SEQ ID NO: 1504341 - DNA, 15 bp, Homo sapiens
actccaaggttttgt

SEQ ID NO: 1504342 - DNA, 15 bp, Homo sapiens
ctccaaggttttgtg

SEQ ID NO: 1504343 - DNA, 15 bp, Homo sapiens
tccaaggttttgtgt

SEQ ID NO: 1504344 - DNA, 15 bp, Homo sapiens
ccaaggttttgtgta

SEQ ID NO: 1504345 - DNA, 15 bp, Homo sapiens
caaggttttgtgtag

SEQ ID NO: 1504346 - DNA, 15 bp, Homo sapiens
aaggttttgtgtaga

SEQ ID NO: 1504347 - DNA, 15 bp, Homo sapiens
aggttttgtgtagat

SEQ ID NO: 1504348 - DNA, 15 bp, Homo sapiens
ggttttgtgtagatg

SEQ ID NO: 1504349 - DNA, 15 bp, Homo sapiens
gttttgtgtagatga

SEQ ID NO: 1504350 - DNA, 15 bp, Homo sapiens
ttttgtgtagatgag

SEQ ID NO: 1504351 - DNA, 15 bp, Homo sapiens
tttgtgtagatgaga

SEQ ID NO: 1504352 - DNA, 15 bp, Homo sapiens
ttgtgtagatgagaa

SEQ ID NO: 1504353 - DNA, 15 bp, Homo sapiens
tgtgtagatgagaat

SEQ ID NO: 1504354 - DNA, 15 bp, Homo sapiens
gtgtagatgagaatg

SEQ ID NO: 1504355 - DNA, 15 bp, Homo sapiens
tgtagatgagaatga

SEQ ID NO: 1504356 - DNA, 15 bp, Homo sapiens
gtagatgagaatgaa

SEQ ID NO: 1504357 - DNA, 15 bp, Homo sapiens
tagatgagaatgaag

SEQ ID NO: 1504358 - DNA, 15 bp, Homo sapiens
agatgagaatgaaga

SEQ ID NO: 1504359 - DNA, 15 bp, Homo sapiens
gatgagaatgaagag

SEQ ID NO: 1504360 - DNA, 15 bp, Homo sapiens
atgagaatgaagagg

SEQ ID NO: 1504361 - DNA, 15 bp, Homo sapiens
tgagaatgaagaggg

SEQ ID NO: 1504362 - DNA, 15 bp, Homo sapiens
gagaatgaagaggga

SEQ ID NO: 1504363 - DNA, 15 bp, Homo sapiens
agaatgaagagggag

SEQ ID NO: 1504364 - DNA, 15 bp, Homo sapiens
gaatgaagagggaga

SEQ ID NO: 1504365 - DNA, 15 bp, Homo sapiens
aatgaagagggagaa

SEQ ID NO: 1504366 - DNA, 15 bp, Homo sapiens
atgaagagggagaag

SEQ ID NO: 1504367 - DNA, 15 bp, Homo sapiens
tgaagagggagaagg

SEQ ID NO: 1504368 - DNA, 15 bp, Homo sapiens
gaagagggagaaggc

SEQ ID NO: 1504369 - DNA, 15 bp, Homo sapiens
aagagggagaaggcg

SEQ ID NO: 1504370 - DNA, 15 bp, Homo sapiens
agagggagaaggcga

SEQ ID NO: 1504371 - DNA, 15 bp, Homo sapiens
gagggagaaggcgag

SEQ ID NO: 1504372 - DNA, 15 bp, Homo sapiens
agggagaaggcgaga

SEQ ID NO: 1504373 - DNA, 15 bp, Homo sapiens
gggagaaggcgagaa

SEQ ID NO: 1504374 - DNA, 15 bp, Homo sapiens
ggagaaggcgagaaa

SEQ ID NO: 1504375 - DNA, 15 bp, Homo sapiens
gagaaggcgagaaaa

SEQ ID NO: 1504376 - DNA, 15 bp, Homo sapiens
agaaggcgagaaaag

SEQ ID NO: 1504377 - DNA, 15 bp, Homo sapiens
gaaggcgagaaaaga

SEQ ID NO: 1504378 - DNA, 15 bp, Homo sapiens
aaggcgagaaaagaa

SEQ ID NO: 1504379 - DNA, 15 bp, Homo sapiens
aggcgagaaaagaag

SEQ ID NO: 1504380 - DNA, 15 bp, Homo sapiens
ggcgagaaaagaagc

SEQ ID NO: 1504381 - DNA, 15 bp, Homo sapiens
gcgagaaaagaagcc

SEQ ID NO: 1504382 - DNA, 15 bp, Homo sapiens
cgagaaaagaagcca

SEQ ID NO: 1504383 - DNA, 15 bp, Homo sapiens
gagaaaagaagccat

SEQ ID NO: 1504384 - DNA, 15 bp, Homo sapiens
agaaaagaagccatt

SEQ ID NO: 1504385 - DNA, 15 bp, Homo sapiens
gaaaagaagccattt

SEQ ID NO: 1504386 - DNA, 15 bp, Homo sapiens
aaaagaagccatttc

SEQ ID NO: 1504387 - DNA, 15 bp, Homo sapiens
aaagaagccatttcc

SEQ ID NO: 1504388 - DNA, 15 bp, Homo sapiens
aagaagccatttcct

SEQ ID NO: 1504389 - DNA, 15 bp, Homo sapiens
agaagccatttcctg

SEQ ID NO: 1504390 - DNA, 15 bp, Homo sapiens
gaagccatttcctgc

SEQ ID NO: 1504391 - DNA, 15 bp, Homo sapiens
aagccatttcctgcc

SEQ ID NO: 1504392 - DNA, 15 bp, Homo sapiens
agccatttcctgccg

SEQ ID NO: 1504393 - DNA, 15 bp, Homo sapiens
gccatttcctgccgg

SEQ ID NO: 1504394 - DNA, 15 bp, Homo sapiens
ccatttcctgccggg

SEQ ID NO: 1504395 - DNA, 15 bp, Homo sapiens
catttcctgccgggg

SEQ ID NO: 1504396 - DNA, 15 bp, Homo sapiens
atttcctgccggggg

SEQ ID NO: 1504397 - DNA, 15 bp, Homo sapiens
tttcctgccgggggc

SEQ ID NO: 1504398 - DNA, 15 bp, Homo sapiens
ttcctgccgggggcg

SEQ ID NO: 1504399 - DNA, 15 bp, Homo sapiens
tcctgccgggggcgg

SEQ ID NO: 1504400 - DNA, 15 bp, Homo sapiens
cctgccgggggcggt

SEQ ID NO: 1504401 - DNA, 15 bp, Homo sapiens
ctgccgggggcggtg

SEQ ID NO: 1504402 - DNA, 15 bp, Homo sapiens
tgccgggggcggtgg

SEQ ID NO: 1504403 - DNA, 15 bp, Homo sapiens
gccgggggcggtggc

SEQ ID NO: 1504404 - DNA, 15 bp, Homo sapiens
ccgggggcggtggct

SEQ ID NO: 1504405 - DNA, 15 bp, Homo sapiens
cgggggcggtggctc

SEQ ID NO: 1504406 - DNA, 15 bp, Homo sapiens
gggggcggtggctca

SEQ ID NO: 1504407 - DNA, 15 bp, Homo sapiens
ggggcggtggctcat

SEQ ID NO: 1504408 - DNA, 15 bp, Homo sapiens
gggcggtggctcatg

SEQ ID NO: 1504409 - DNA, 15 bp, Homo sapiens
ggcggtggctcatgc

SEQ ID NO: 1504410 - DNA, 15 bp, Homo sapiens
ctcatgcctggaatt

SEQ ID NO: 1504411 - DNA, 15 bp, Homo sapiens
tcatgcctggaattg

SEQ ID NO: 1504412 - DNA, 15 bp, Homo sapiens
catgcctggaattgc

SEQ ID NO: 1504413 - DNA, 15 bp, Homo sapiens
atgcctggaattgca

SEQ ID NO: 1504414 - DNA, 15 bp, Homo sapiens
tgcctggaattgcag

SEQ ID NO: 1504415 - DNA, 15 bp, Homo sapiens
gcctggaattgcagc

SEQ ID NO: 1504416 - DNA, 15 bp, Homo sapiens
cctggaattgcagca

SEQ ID NO: 1504417 - DNA, 15 bp, Homo sapiens
ctggaattgcagcac

SEQ ID NO: 1504418 - DNA, 15 bp, Homo sapiens
tggaattgcagcact

SEQ ID NO: 1504419 - DNA, 15 bp, Homo sapiens
ggaattgcagcactt

SEQ ID NO: 1504420 - DNA, 15 bp, Homo sapiens
gaattgcagcacttt

SEQ ID NO: 1504421 - DNA, 15 bp, Homo sapiens
aattgcagcactttg

SEQ ID NO: 1504422 - DNA, 15 bp, Homo sapiens
attgcagcactttgg

SEQ ID NO: 1504423 - DNA, 15 bp, Homo sapiens
ttgcagcactttggt

SEQ ID NO: 1504424 - DNA, 15 bp, Homo sapiens
tgcagcactttggta

SEQ ID NO: 1504425 - DNA, 15 bp, Homo sapiens
gcagcactttggtag

SEQ ID NO: 1504426 - DNA, 15 bp, Homo sapiens
cagcactttggtagg

SEQ ID NO: 1504427 - DNA, 15 bp, Homo sapiens
agcactttggtaggc

SEQ ID NO: 1504428 - DNA, 15 bp, Homo sapiens
gcactttggtaggct

SEQ ID NO: 1504429 - DNA, 15 bp, Homo sapiens
cactttggtaggctg

SEQ ID NO: 1504430 - DNA, 15 bp, Homo sapiens
actttggtaggctga

SEQ ID NO: 1504431 - DNA, 15 bp, Homo sapiens
ctttggtaggctgag

SEQ ID NO: 1504432 - DNA, 15 bp, Homo sapiens
tttggtaggctgagg

SEQ ID NO: 1504433 - DNA, 15 bp, Homo sapiens
ttggtaggctgaggc

SEQ ID NO: 1504434 - DNA, 15 bp, Homo sapiens
tggtaggctgaggcg

SEQ ID NO: 1504435 - DNA, 15 bp, Homo sapiens
ggtaggctgaggcgg

SEQ ID NO: 1504436 - DNA, 15 bp, Homo sapiens
gtaggctgaggcggg

SEQ ID NO: 1504437 - DNA, 15 bp, Homo sapiens
taggctgaggcgggt

SEQ ID NO: 1504438 - DNA, 15 bp, Homo sapiens
tacaaaaattagcta

SEQ ID NO: 1504439 - DNA, 15 bp, Homo sapiens
acaaaaattagctaa

SEQ ID NO: 1504440 - DNA, 15 bp, Homo sapiens
caaaaattagctaag

SEQ ID NO: 1504441 - DNA, 15 bp, Homo sapiens
aaaaattagctaagc

SEQ ID NO: 1504442 - DNA, 15 bp, Homo sapiens
aaaattagctaagcg

SEQ ID NO: 1504443 - DNA, 15 bp, Homo sapiens
aaattagctaagcgt

SEQ ID NO: 1504444 - DNA, 15 bp, Homo sapiens
aattagctaagcgtg

SEQ ID NO: 1504445 - DNA, 15 bp, Homo sapiens
attagctaagcgtgg

SEQ ID NO: 1504446 - DNA, 15 bp, Homo sapiens
ttagctaagcgtggt

SEQ ID NO: 1504447 - DNA, 15 bp, Homo sapiens
tagctaagcgtggtg

SEQ ID NO: 1504448 - DNA, 15 bp, Homo sapiens
agctaagcgtggtgg

SEQ ID NO: 1504449 - DNA, 15 bp, Homo sapiens
gctaagcgtggtggt

SEQ ID NO: 1504450 - DNA, 15 bp, Homo sapiens
ctaagcgtggtggtg

SEQ ID NO: 1504451 - DNA, 15 bp, Homo sapiens
taagcgtggtggtgc

SEQ ID NO: 1504452 - DNA, 15 bp, Homo sapiens
aagcgtggtggtgca

SEQ ID NO: 1504453 - DNA, 15 bp, Homo sapiens
agcgtggtggtgcat

SEQ ID NO: 1504454 - DNA, 15 bp, Homo sapiens
cccagctattcagga

SEQ ID NO: 1504455 - DNA, 15 bp, Homo sapiens
ccagctattcaggag

SEQ ID NO: 1504456 - DNA, 15 bp, Homo sapiens
cagctattcaggaga

SEQ ID NO: 1504457 - DNA, 15 bp, Homo sapiens
agctattcaggagat

SEQ ID NO: 1504458 - DNA, 15 bp, Homo sapiens
gctattcaggagatt

SEQ ID NO: 1504459 - DNA, 15 bp, Homo sapiens
ctattcaggagattc

SEQ ID NO: 1504460 - DNA, 15 bp, Homo sapiens
tattcaggagattca

SEQ ID NO: 1504461 - DNA, 15 bp, Homo sapiens
attcaggagattcag

SEQ ID NO: 1504462 - DNA, 15 bp, Homo sapiens
ttcaggagattcagg

SEQ ID NO: 1504463 - DNA, 15 bp, Homo sapiens
tcaggagattcagga

SEQ ID NO: 1504464 - DNA, 15 bp, Homo sapiens
caggagattcaggag

SEQ ID NO: 1504465 - DNA, 15 bp, Homo sapiens
aggagattcaggagg

SEQ ID NO: 1504466 - DNA, 15 bp, Homo sapiens
ggagattcaggaggc

SEQ ID NO: 1504467 - DNA, 15 bp, Homo sapiens
gagattcaggaggca

SEQ ID NO: 1504468 - DNA, 15 bp, Homo sapiens
agattcaggaggcaa

SEQ ID NO: 1504469 - DNA, 15 bp, Homo sapiens
gattcaggaggcaaa

SEQ ID NO: 1504470 - DNA, 15 bp, Homo sapiens
attcaggaggcaaag

SEQ ID NO: 1504471 - DNA, 15 bp, Homo sapiens
ttcaggaggcaaagg

SEQ ID NO: 1504472 - DNA, 15 bp, Homo sapiens
tcaggaggcaaaggc

SEQ ID NO: 1504473 - DNA, 15 bp, Homo sapiens
caggaggcaaaggca

SEQ ID NO: 1504474 - DNA, 15 bp, Homo sapiens
aggaggcaaaggcag

SEQ ID NO: 1504475 - DNA, 15 bp, Homo sapiens
ggaggcaaaggcagg

SEQ ID NO: 1504476 - DNA, 15 bp, Homo sapiens
gaggcaaaggcagga

SEQ ID NO: 1504477 - DNA, 15 bp, Homo sapiens
aggcaaaggcaggag

SEQ ID NO: 1504478 - DNA, 15 bp, Homo sapiens
ggcaaaggcaggagg

SEQ ID NO: 1504479 - DNA, 15 bp, Homo sapiens
gcaaaggcaggagga

SEQ ID NO: 1504480 - DNA, 15 bp, Homo sapiens
caaaggcaggaggat

SEQ ID NO: 1504481 - DNA, 15 bp, Homo sapiens
aaaggcaggaggatc

SEQ ID NO: 1504482 - DNA, 15 bp, Homo sapiens
aaggcaggaggatcg

SEQ ID NO: 1504483 - DNA, 15 bp, Homo sapiens
gaggatcgcttgaat

SEQ ID NO: 1504484 - DNA, 15 bp, Homo sapiens
aggatcgcttgaatc

SEQ ID NO: 1504485 - DNA, 15 bp, Homo sapiens
ggatcgcttgaatcc

SEQ ID NO: 1504486 - DNA, 15 bp, Homo sapiens
gatcgcttgaatccg

SEQ ID NO: 1504487 - DNA, 15 bp, Homo sapiens
atcgcttgaatccgg

SEQ ID NO: 1504488 - DNA, 15 bp, Homo sapiens
tcgcttgaatccggg

SEQ ID NO: 1504489 - DNA, 15 bp, Homo sapiens
cgcttgaatccggga

SEQ ID NO: 1504490 - DNA, 15 bp, Homo sapiens
cttgaatccgggagg

SEQ ID NO: 1504491 - DNA, 15 bp, Homo sapiens
ttgaatccgggaggt

SEQ ID NO: 1504492 - DNA, 15 bp, Homo sapiens
tgaatccgggaggtg

SEQ ID NO: 1504493 - DNA, 15 bp, Homo sapiens
gaatccgggaggtgg

SEQ ID NO: 1504494 - DNA, 15 bp, Homo sapiens
aatccgggaggtgga

SEQ ID NO: 1504495 - DNA, 15 bp, Homo sapiens
atccgggaggtggag

SEQ ID NO: 1504496 - DNA, 15 bp, Homo sapiens
tccgggaggtggagg

SEQ ID NO: 1504497 - DNA, 15 bp, Homo sapiens
agatggcaccattgt

SEQ ID NO: 1504498 - DNA, 15 bp, Homo sapiens
gatggcaccattgta

SEQ ID NO: 1504499 - DNA, 15 bp, Homo sapiens
atggcaccattgtat

SEQ ID NO: 1504500 - DNA, 15 bp, Homo sapiens
tggcaccattgtatg

SEQ ID NO: 1504501 - DNA, 15 bp, Homo sapiens
ggcaccattgtatgc

SEQ ID NO: 1504502 - DNA, 15 bp, Homo sapiens
gcaccattgtatgcc

SEQ ID NO: 1504503 - DNA, 15 bp, Homo sapiens
caccattgtatgcca

SEQ ID NO: 1504504 - DNA, 15 bp, Homo sapiens
accattgtatgccag

SEQ ID NO: 1504505 - DNA, 15 bp, Homo sapiens
ccattgtatgccagc

SEQ ID NO: 1504506 - DNA, 15 bp, Homo sapiens
cattgtatgccagcc

SEQ ID NO: 1504507 - DNA, 15 bp, Homo sapiens
attgtatgccagcct

SEQ ID NO: 1504508 - DNA, 15 bp, Homo sapiens
ttgtatgccagcctg

SEQ ID NO: 1504509 - DNA, 15 bp, Homo sapiens
tgtatgccagcctgg

SEQ ID NO: 1504510 - DNA, 15 bp, Homo sapiens
gtatgccagcctggg

SEQ ID NO: 1504511 - DNA, 15 bp, Homo sapiens
tatgccagcctgggc

SEQ ID NO: 1504512 - DNA, 15 bp, Homo sapiens
atgccagcctgggcg

SEQ ID NO: 1504513 - DNA, 15 bp, Homo sapiens
tgccagcctgggcga

SEQ ID NO: 1504514 - DNA, 15 bp, Homo sapiens
gccagcctgggcgac

SEQ ID NO: 1504515 - DNA, 15 bp, Homo sapiens
tgggcgacagagtgg

SEQ ID NO: 1504516 - DNA, 15 bp, Homo sapiens
gggcgacagagtgga

SEQ ID NO: 1504517 - DNA, 15 bp, Homo sapiens
ggcgacagagtggac

SEQ ID NO: 1504518 - DNA, 15 bp, Homo sapiens
gcgacagagtggact

SEQ ID NO: 1504519 - DNA, 15 bp, Homo sapiens
cgacagagtggactt

SEQ ID NO: 1504520 - DNA, 15 bp, Homo sapiens
gacagagtggacttg

SEQ ID NO: 1504521 - DNA, 15 bp, Homo sapiens
acagagtggacttgg

SEQ ID NO: 1504522 - DNA, 15 bp, Homo sapiens
cagagtggacttggt

SEQ ID NO: 1504523 - DNA, 15 bp, Homo sapiens
agagtggacttggtc

SEQ ID NO: 1504524 - DNA, 15 bp, Homo sapiens
gagtggacttggtct

SEQ ID NO: 1504525 - DNA, 15 bp, Homo sapiens
agtggacttggtctc

SEQ ID NO: 1504526 - DNA, 15 bp, Homo sapiens
gtggacttggtctca

SEQ ID NO: 1504527 - DNA, 15 bp, Homo sapiens
tggacttggtctcaa

SEQ ID NO: 1504528 - DNA, 15 bp, Homo sapiens
ggacttggtctcaaa

SEQ ID NO: 1504529 - DNA, 15 bp, Homo sapiens
gacttggtctcaaaa

SEQ ID NO: 1504530 - DNA, 15 bp, Homo sapiens
acttggtctcaaaaa

SEQ ID NO: 1504531 - DNA, 15 bp, Homo sapiens
cttggtctcaaaaaa

SEQ ID NO: 1504532 - DNA, 15 bp, Homo sapiens
ttggtctcaaaaaaa

SEQ ID NO: 1504533 - DNA, 15 bp, Homo sapiens
tggtctcaaaaaaaa

SEQ ID NO: 1504534 - DNA, 15 bp, Homo sapiens
ggtctcaaaaaaaaa

SEQ ID NO: 1504535 - DNA, 15 bp, Homo sapiens
ctcaaaaaaaaataa

SEQ ID NO: 1504536 - DNA, 15 bp, Homo sapiens
tcaaaaaaaaataaa

SEQ ID NO: 1504537 - DNA, 15 bp, Homo sapiens
caaaaaaaaataaaa

SEQ ID NO: 1504538 - DNA, 15 bp, Homo sapiens
aaaaaaaaataaaat

SEQ ID NO: 1504539 - DNA, 15 bp, Homo sapiens
aaaaaaaataaaata

SEQ ID NO: 1504540 - DNA, 15 bp, Homo sapiens
aataaaaaataaagg

SEQ ID NO: 1504541 - DNA, 15 bp, Homo sapiens
ataaaaaataaaggt

SEQ ID NO: 1504542 - DNA, 15 bp, Homo sapiens
taaaaaataaaggtg

SEQ ID NO: 1504543 - DNA, 15 bp, Homo sapiens
aaaaaataaaggtgt

SEQ ID NO: 1504544 - DNA, 15 bp, Homo sapiens
aaaaataaaggtgtt

SEQ ID NO: 1504545 - DNA, 15 bp, Homo sapiens
aaaataaaggtgttt

SEQ ID NO: 1504546 - DNA, 15 bp, Homo sapiens
aaataaaggtgtttc

SEQ ID NO: 1504547 - DNA, 15 bp, Homo sapiens
aataaaggtgtttcc

SEQ ID NO: 1504548 - DNA, 15 bp, Homo sapiens
ataaaggtgtttcca

SEQ ID NO: 1504549 - DNA, 15 bp, Homo sapiens
taaaggtgtttccat

SEQ ID NO: 1504550 - DNA, 15 bp, Homo sapiens
aaaggtgtttccatc

SEQ ID NO: 1504551 - DNA, 15 bp, Homo sapiens
aaggtgtttccatcc

SEQ ID NO: 1504552 - DNA, 15 bp, Homo sapiens
aggtgtttccatccc

SEQ ID NO: 1504553 - DNA, 15 bp, Homo sapiens
ggtgtttccatcccc

SEQ ID NO: 1504554 - DNA, 15 bp, Homo sapiens
gtgtttccatcccca

SEQ ID NO: 1504555 - DNA, 15 bp, Homo sapiens
tgtttccatccccac

SEQ ID NO: 1504556 - DNA, 15 bp, Homo sapiens
gtttccatccccaca

SEQ ID NO: 1504557 - DNA, 15 bp, Homo sapiens
tttccatccccacaa

SEQ ID NO: 1504558 - DNA, 15 bp, Homo sapiens
ttccatccccacaaa

SEQ ID NO: 1504559 - DNA, 15 bp, Homo sapiens
tccatccccacaaag

SEQ ID NO: 1504560 - DNA, 15 bp, Homo sapiens
ccatccccacaaaga

SEQ ID NO: 1504561 - DNA, 15 bp, Homo sapiens
catccccacaaagag

SEQ ID NO: 1504562 - DNA, 15 bp, Homo sapiens
atccccacaaagagc

SEQ ID NO: 1504563 - DNA, 15 bp, Homo sapiens
tccccacaaagagct

SEQ ID NO: 1504564 - DNA, 15 bp, Homo sapiens
ccccacaaagagcta

SEQ ID NO: 1504565 - DNA, 15 bp, Homo sapiens
cccacaaagagctat

SEQ ID NO: 1504566 - DNA, 15 bp, Homo sapiens
ccacaaagagctatg

SEQ ID NO: 1504567 - DNA, 15 bp, Homo sapiens
cacaaagagctatgt

SEQ ID NO: 1504568 - DNA, 15 bp, Homo sapiens
acaaagagctatgtc

SEQ ID NO: 1504569 - DNA, 15 bp, Homo sapiens
caaagagctatgtca

SEQ ID NO: 1504570 - DNA, 15 bp, Homo sapiens
aaagagctatgtcac

SEQ ID NO: 1504571 - DNA, 15 bp, Homo sapiens
aagagctatgtcacc

SEQ ID NO: 1504572 - DNA, 15 bp, Homo sapiens
agagctatgtcacca

SEQ ID NO: 1504573 - DNA, 15 bp, Homo sapiens
gagctatgtcaccaa

SEQ ID NO: 1504574 - DNA, 15 bp, Homo sapiens
agctatgtcaccaaa

SEQ ID NO: 1504575 - DNA, 15 bp, Homo sapiens
gctatgtcaccaaag

SEQ ID NO: 1504576 - DNA, 15 bp, Homo sapiens
ctatgtcaccaaaga

SEQ ID NO: 1504577 - DNA, 15 bp, Homo sapiens
tatgtcaccaaagac

SEQ ID NO: 1504578 - DNA, 15 bp, Homo sapiens
atgtcaccaaagaca

SEQ ID NO: 1504579 - DNA, 15 bp, Homo sapiens
tgtcaccaaagacac

SEQ ID NO: 1504580 - DNA, 15 bp, Homo sapiens
gtcaccaaagacaca

SEQ ID NO: 1504581 - DNA, 15 bp, Homo sapiens
tcaccaaagacacag

SEQ ID NO: 1504582 - DNA, 15 bp, Homo sapiens
caccaaagacacagg

SEQ ID NO: 1504583 - DNA, 15 bp, Homo sapiens
accaaagacacaggc

SEQ ID NO: 1504584 - DNA, 15 bp, Homo sapiens
ccaaagacacaggca

SEQ ID NO: 1504585 - DNA, 15 bp, Homo sapiens
caaagacacaggcac

SEQ ID NO: 1504586 - DNA, 15 bp, Homo sapiens
aaagacacaggcacc

SEQ ID NO: 1504587 - DNA, 15 bp, Homo sapiens
aagacacaggcaccc

SEQ ID NO: 1504588 - DNA, 15 bp, Homo sapiens
gacacaggcaccccc

SEQ ID NO: 1504589 - DNA, 15 bp, Homo sapiens
acacaggcaccccct

SEQ ID NO: 1504590 - DNA, 15 bp, Homo sapiens
cacaggcacccccta

SEQ ID NO: 1504591 - DNA, 15 bp, Homo sapiens
acaggcaccccctat

SEQ ID NO: 1504592 - DNA, 15 bp, Homo sapiens
caggcaccccctatg

SEQ ID NO: 1504593 - DNA, 15 bp, Homo sapiens
aggcaccccctatga

SEQ ID NO: 1504594 - DNA, 15 bp, Homo sapiens
ggcaccccctatgac

SEQ ID NO: 1504595 - DNA, 15 bp, Homo sapiens
gcaccccctatgacg

SEQ ID NO: 1504596 - DNA, 15 bp, Homo sapiens
caccccctatgacgt

SEQ ID NO: 1504597 - DNA, 15 bp, Homo sapiens
accccctatgacgtc

SEQ ID NO: 1504598 - DNA, 15 bp, Homo sapiens
ccccctatgacgtcc

SEQ ID NO: 1504599 - DNA, 15 bp, Homo sapiens
cccctatgacgtcct

SEQ ID NO: 1504600 - DNA, 15 bp, Homo sapiens
ccctatgacgtcctg

SEQ ID NO: 1504601 - DNA, 15 bp, Homo sapiens
cctatgacgtcctgc

SEQ ID NO: 1504602 - DNA, 15 bp, Homo sapiens
ctatgacgtcctgct

SEQ ID NO: 1504603 - DNA, 15 bp, Homo sapiens
tatgacgtcctgctc

SEQ ID NO: 1504604 - DNA, 15 bp, Homo sapiens
atgacgtcctgctca

SEQ ID NO: 1504605 - DNA, 15 bp, Homo sapiens
tgacgtcctgctcat

SEQ ID NO: 1504606 - DNA, 15 bp, Homo sapiens
gacgtcctgctcatt

SEQ ID NO: 1504607 - DNA, 15 bp, Homo sapiens
acgtcctgctcattt

SEQ ID NO: 1504608 - DNA, 15 bp, Homo sapiens
cgtcctgctcattta

SEQ ID NO: 1504609 - DNA, 15 bp, Homo sapiens
gtcctgctcatttag

SEQ ID NO: 1504610 - DNA, 15 bp, Homo sapiens
tcctgctcatttagg

SEQ ID NO: 1504611 - DNA, 15 bp, Homo sapiens
cctgctcatttagga

SEQ ID NO: 1504612 - DNA, 15 bp, Homo sapiens
ctgctcatttaggaa

SEQ ID NO: 1504613 - DNA, 15 bp, Homo sapiens
tgctcatttaggaaa

SEQ ID NO: 1504614 - DNA, 15 bp, Homo sapiens
gctcatttaggaaac

SEQ ID NO: 1504615 - DNA, 15 bp, Homo sapiens
ctcatttaggaaacc

SEQ ID NO: 1504616 - DNA, 15 bp, Homo sapiens
tcatttaggaaaccc

SEQ ID NO: 1504617 - DNA, 15 bp, Homo sapiens
catttaggaaaccca

SEQ ID NO: 1504618 - DNA, 15 bp, Homo sapiens
atttaggaaacccat

SEQ ID NO: 1504619 - DNA, 15 bp, Homo sapiens
tttaggaaacccata

SEQ ID NO: 1504620 - DNA, 15 bp, Homo sapiens
ttaggaaacccatat

SEQ ID NO: 1504621 - DNA, 15 bp, Homo sapiens
taggaaacccatatt

SEQ ID NO: 1504622 - DNA, 15 bp, Homo sapiens
aggaaacccatattc

SEQ ID NO: 1504623 - DNA, 15 bp, Homo sapiens
ggaaacccatattcc

SEQ ID NO: 1504624 - DNA, 15 bp, Homo sapiens
gaaacccatattcct

SEQ ID NO: 1504625 - DNA, 15 bp, Homo sapiens
aaacccatattccta

SEQ ID NO: 1504626 - DNA, 15 bp, Homo sapiens
aacccatattcctag

SEQ ID NO: 1504627 - DNA, 15 bp, Homo sapiens
acccatattcctaga

SEQ ID NO: 1504628 - DNA, 15 bp, Homo sapiens
cccatattcctagaa

SEQ ID NO: 1504629 - DNA, 15 bp, Homo sapiens
ccatattcctagaag

SEQ ID NO: 1504630 - DNA, 15 bp, Homo sapiens
catattcctagaaga

SEQ ID NO: 1504631 - DNA, 15 bp, Homo sapiens
atattcctagaagat

SEQ ID NO: 1504632 - DNA, 15 bp, Homo sapiens
tattcctagaagatc

SEQ ID NO: 1504633 - DNA, 15 bp, Homo sapiens
attcctagaagatca

SEQ ID NO: 1504634 - DNA, 15 bp, Homo sapiens
ttcctagaagatcaa

SEQ ID NO: 1504635 - DNA, 15 bp, Homo sapiens
tcctagaagatcaaa

SEQ ID NO: 1504636 - DNA, 15 bp, Homo sapiens
cctagaagatcaaag

SEQ ID NO: 1504637 - DNA, 15 bp, Homo sapiens
ctagaagatcaaagc

SEQ ID NO: 1504638 - DNA, 15 bp, Homo sapiens
tagaagatcaaagcc

SEQ ID NO: 1504639 - DNA, 15 bp, Homo sapiens
agaagatcaaagccc

SEQ ID NO: 1504640 - DNA, 15 bp, Homo sapiens
gaagatcaaagccca

SEQ ID NO: 1504641 - DNA, 15 bp, Homo sapiens
aagatcaaagcccat

SEQ ID NO: 1504642 - DNA, 15 bp, Homo sapiens
agatcaaagcccatt

SEQ ID NO: 1504643 - DNA, 15 bp, Homo sapiens
gatcaaagcccatta

SEQ ID NO: 1504644 - DNA, 15 bp, Homo sapiens
atcaaagcccattac

SEQ ID NO: 1504645 - DNA, 15 bp, Homo sapiens
tcaaagcccattacc

SEQ ID NO: 1504646 - DNA, 15 bp, Homo sapiens
caaagcccattacct

SEQ ID NO: 1504647 - DNA, 15 bp, Homo sapiens
aaagcccattacctc

SEQ ID NO: 1504648 - DNA, 15 bp, Homo sapiens
aagcccattacctct

SEQ ID NO: 1504649 - DNA, 15 bp, Homo sapiens
agcccattacctctg

SEQ ID NO: 1504650 - DNA, 15 bp, Homo sapiens
gcccattacctctgg

SEQ ID NO: 1504651 - DNA, 15 bp, Homo sapiens
cccattacctctggg

SEQ ID NO: 1504652 - DNA, 15 bp, Homo sapiens
ccattacctctgggg

SEQ ID NO: 1504653 - DNA, 15 bp, Homo sapiens
cattacctctgggga

SEQ ID NO: 1504654 - DNA, 15 bp, Homo sapiens
attacctctggggaa

SEQ ID NO: 1504655 - DNA, 15 bp, Homo sapiens
ttacctctggggaag

SEQ ID NO: 1504656 - DNA, 15 bp, Homo sapiens
tacctctggggaagt

SEQ ID NO: 1504657 - DNA, 15 bp, Homo sapiens
acctctggggaagtt

SEQ ID NO: 1504658 - DNA, 15 bp, Homo sapiens
cctctggggaagttt

SEQ ID NO: 1504659 - DNA, 15 bp, Homo sapiens
ctctggggaagtttg

SEQ ID NO: 1504660 - DNA, 15 bp, Homo sapiens
tctggggaagtttgt

SEQ ID NO: 1504661 - DNA, 15 bp, Homo sapiens
ctggggaagtttgtt

SEQ ID NO: 1504662 - DNA, 15 bp, Homo sapiens
tggggaagtttgttt

SEQ ID NO: 1504663 - DNA, 15 bp, Homo sapiens
ggggaagtttgttta

SEQ ID NO: 1504664 - DNA, 15 bp, Homo sapiens
gggaagtttgtttaa

SEQ ID NO: 1504665 - DNA, 15 bp, Homo sapiens
ggaagtttgtttaat

SEQ ID NO: 1504666 - DNA, 15 bp, Homo sapiens
gaagtttgtttaatt

SEQ ID NO: 1504667 - DNA, 15 bp, Homo sapiens
aagtttgtttaattc

SEQ ID NO: 1504668 - DNA, 15 bp, Homo sapiens
agtttgtttaattcc

SEQ ID NO: 1504669 - DNA, 15 bp, Homo sapiens
gtttgtttaattccg

SEQ ID NO: 1504670 - DNA, 15 bp, Homo sapiens
tttgtttaattccgg

SEQ ID NO: 1504671 - DNA, 15 bp, Homo sapiens
ttgtttaattccggg

SEQ ID NO: 1504672 - DNA, 15 bp, Homo sapiens
tgtttaattccggga

SEQ ID NO: 1504673 - DNA, 15 bp, Homo sapiens
gtttaattccgggag

SEQ ID NO: 1504674 - DNA, 15 bp, Homo sapiens
tttaattccgggagg

SEQ ID NO: 1504675 - DNA, 15 bp, Homo sapiens
ttaattccgggaggg

SEQ ID NO: 1504676 - DNA, 15 bp, Homo sapiens
taattccgggaggga

SEQ ID NO: 1504677 - DNA, 15 bp, Homo sapiens
aattccgggagggat

SEQ ID NO: 1504678 - DNA, 15 bp, Homo sapiens
attccgggagggata

SEQ ID NO: 1504679 - DNA, 15 bp, Homo sapiens
ttccgggagggatat

SEQ ID NO: 1504680 - DNA, 15 bp, Homo sapiens
tccgggagggatatt

SEQ ID NO: 1504681 - DNA, 15 bp, Homo sapiens
ccgggagggatatta

SEQ ID NO: 1504682 - DNA, 15 bp, Homo sapiens
cgggagggatattat

SEQ ID NO: 1504683 - DNA, 15 bp, Homo sapiens
gggagggatattatg

SEQ ID NO: 1504684 - DNA, 15 bp, Homo sapiens
ggagggatattatgg

SEQ ID NO: 1504685 - DNA, 15 bp, Homo sapiens
gagggatattatggg

SEQ ID NO: 1504686 - DNA, 15 bp, Homo sapiens
agggatattatgggc

SEQ ID NO: 1504687 - DNA, 15 bp, Homo sapiens
gggatattatgggca

SEQ ID NO: 1504688 - DNA, 15 bp, Homo sapiens
ggatattatgggcat

SEQ ID NO: 1504689 - DNA, 15 bp, Homo sapiens
gatattatgggcatt

SEQ ID NO: 1504690 - DNA, 15 bp, Homo sapiens
atattatgggcattt

SEQ ID NO: 1504691 - DNA, 15 bp, Homo sapiens
tattatgggcatttg

SEQ ID NO: 1504692 - DNA, 15 bp, Homo sapiens
attatgggcatttgt

SEQ ID NO: 1504693 - DNA, 15 bp, Homo sapiens
ttatgggcatttgtg

SEQ ID NO: 1504694 - DNA, 15 bp, Homo sapiens
tatgggcatttgtgg

SEQ ID NO: 1504695 - DNA, 15 bp, Homo sapiens
atgggcatttgtgga

SEQ ID NO: 1504696 - DNA, 15 bp, Homo sapiens
tgggcatttgtggag

SEQ ID NO: 1504697 - DNA, 15 bp, Homo sapiens
gggcatttgtggagt

SEQ ID NO: 1504698 - DNA, 15 bp, Homo sapiens
ggcatttgtggagtt

SEQ ID NO: 1504699 - DNA, 15 bp, Homo sapiens
gcatttgtggagttt

SEQ ID NO: 1504700 - DNA, 15 bp, Homo sapiens
catttgtggagtttc

SEQ ID NO: 1504701 - DNA, 15 bp, Homo sapiens
atttgtggagtttcc

SEQ ID NO: 1504702 - DNA, 15 bp, Homo sapiens
tttgtggagtttcca

SEQ ID NO: 1504703 - DNA, 15 bp, Homo sapiens
ttgtggagtttccag

SEQ ID NO: 1504704 - DNA, 15 bp, Homo sapiens
tgtggagtttccaga

SEQ ID NO: 1504705 - DNA, 15 bp, Homo sapiens
gtggagtttccagaa

SEQ ID NO: 1504706 - DNA, 15 bp, Homo sapiens
tggagtttccagaaa

SEQ ID NO: 1504707 - DNA, 15 bp, Homo sapiens
ggagtttccagaaaa

SEQ ID NO: 1504708 - DNA, 15 bp, Homo sapiens
gagtttccagaaaac

SEQ ID NO: 1504709 - DNA, 15 bp, Homo sapiens
agtttccagaaaact

SEQ ID NO: 1504710 - DNA, 15 bp, Homo sapiens
gtttccagaaaactc

SEQ ID NO: 1504711 - DNA, 15 bp, Homo sapiens
tttccagaaaactca

SEQ ID NO: 1504712 - DNA, 15 bp, Homo sapiens
ttccagaaaactcaa

SEQ ID NO: 1504713 - DNA, 15 bp, Homo sapiens
tccagaaaactcaaa

SEQ ID NO: 1504714 - DNA, 15 bp, Homo sapiens
ccagaaaactcaaaa

SEQ ID NO: 1504715 - DNA, 15 bp, Homo sapiens
cagaaaactcaaaag

SEQ ID NO: 1504716 - DNA, 15 bp, Homo sapiens
agaaaactcaaaaga

SEQ ID NO: 1504717 - DNA, 15 bp, Homo sapiens
gaaaactcaaaagag

SEQ ID NO: 1504718 - DNA, 15 bp, Homo sapiens
aaaactcaaaagagc

SEQ ID NO: 1504719 - DNA, 15 bp, Homo sapiens
aaactcaaaagagcc

SEQ ID NO: 1504720 - DNA, 15 bp, Homo sapiens
aactcaaaagagcca

SEQ ID NO: 1504721 - DNA, 15 bp, Homo sapiens
actcaaaagagccat

SEQ ID NO: 1504722 - DNA, 15 bp, Homo sapiens
ctcaaaagagccata

SEQ ID NO: 1504723 - DNA, 15 bp, Homo sapiens
tcaaaagagccataa

SEQ ID NO: 1504724 - DNA, 15 bp, Homo sapiens
caaaagagccataaa

SEQ ID NO: 1504725 - DNA, 15 bp, Homo sapiens
aaaagagccataaaa

SEQ ID NO: 1504726 - DNA, 15 bp, Homo sapiens
aaagagccataaaaa

SEQ ID NO: 1504727 - DNA, 15 bp, Homo sapiens
aagagccataaaaat

SEQ ID NO: 1504728 - DNA, 15 bp, Homo sapiens
agagccataaaaatc

SEQ ID NO: 1504729 - DNA, 15 bp, Homo sapiens
gagccataaaaatcg

SEQ ID NO: 1504730 - DNA, 15 bp, Homo sapiens
agccataaaaatcgt

SEQ ID NO: 1504731 - DNA, 15 bp, Homo sapiens
gccataaaaatcgta

SEQ ID NO: 1504732 - DNA, 15 bp, Homo sapiens
ccataaaaatcgtat

SEQ ID NO: 1504733 - DNA, 15 bp, Homo sapiens
cataaaaatcgtatt

SEQ ID NO: 1504734 - DNA, 15 bp, Homo sapiens
ataaaaatcgtattt

SEQ ID NO: 1504735 - DNA, 15 bp, Homo sapiens
taaaaatcgtattta

SEQ ID NO: 1504736 - DNA, 15 bp, Homo sapiens
aaaaatcgtatttac

SEQ ID NO: 1504737 - DNA, 15 bp, Homo sapiens
aaaatcgtatttaca

SEQ ID NO: 1504738 - DNA, 15 bp, Homo sapiens
aaatcgtatttacat

SEQ ID NO: 1504739 - DNA, 15 bp, Homo sapiens
aatcgtatttacata

SEQ ID NO: 1504740 - DNA, 15 bp, Homo sapiens
atcgtatttacatac

SEQ ID NO: 1504741 - DNA, 15 bp, Homo sapiens
tcgtatttacataca

SEQ ID NO: 1504742 - DNA, 15 bp, Homo sapiens
cgtatttacatacaa

SEQ ID NO: 1504743 - DNA, 15 bp, Homo sapiens
gtatttacatacaac

SEQ ID NO: 1504744 - DNA, 15 bp, Homo sapiens
tatttacatacaaca

SEQ ID NO: 1504745 - DNA, 15 bp, Homo sapiens
atttacatacaacat

SEQ ID NO: 1504746 - DNA, 15 bp, Homo sapiens
tttacatacaacatt

SEQ ID NO: 1504747 - DNA, 15 bp, Homo sapiens
ttacatacaacattc

SEQ ID NO: 1504748 - DNA, 15 bp, Homo sapiens
tacatacaacattca

SEQ ID NO: 1504749 - DNA, 15 bp, Homo sapiens
acatacaacattcat

SEQ ID NO: 1504750 - DNA, 15 bp, Homo sapiens
catacaacattcatc

SEQ ID NO: 1504751 - DNA, 15 bp, Homo sapiens
atacaacattcatct

SEQ ID NO: 1504752 - DNA, 15 bp, Homo sapiens
tacaacattcatcta

SEQ ID NO: 1504753 - DNA, 15 bp, Homo sapiens
acaacattcatctag

SEQ ID NO: 1504754 - DNA, 15 bp, Homo sapiens
caacattcatctagg

SEQ ID NO: 1504755 - DNA, 15 bp, Homo sapiens
aacattcatctaggt

SEQ ID NO: 1504756 - DNA, 15 bp, Homo sapiens
acattcatctaggtt

SEQ ID NO: 1504757 - DNA, 15 bp, Homo sapiens
cattcatctaggtta

SEQ ID NO: 1504758 - DNA, 15 bp, Homo sapiens
attcatctaggttaa

SEQ ID NO: 1504759 - DNA, 15 bp, Homo sapiens
ttcatctaggttaaa

SEQ ID NO: 1504760 - DNA, 15 bp, Homo sapiens
tcatctaggttaaat

SEQ ID NO: 1504761 - DNA, 15 bp, Homo sapiens
catctaggttaaatt

SEQ ID NO: 1504762 - DNA, 15 bp, Homo sapiens
atctaggttaaattt

SEQ ID NO: 1504763 - DNA, 15 bp, Homo sapiens
tctaggttaaatttc

SEQ ID NO: 1504764 - DNA, 15 bp, Homo sapiens
ctaggttaaatttct

SEQ ID NO: 1504765 - DNA, 15 bp, Homo sapiens
taggttaaatttctt

SEQ ID NO: 1504766 - DNA, 15 bp, Homo sapiens
aggttaaatttcttt

SEQ ID NO: 1504767 - DNA, 15 bp, Homo sapiens
ggttaaatttctttg

SEQ ID NO: 1504768 - DNA, 15 bp, Homo sapiens
gttaaatttctttgc

SEQ ID NO: 1504769 - DNA, 15 bp, Homo sapiens
ttaaatttctttgca

SEQ ID NO: 1504770 - DNA, 15 bp, Homo sapiens
taaatttctttgcaa

SEQ ID NO: 1504771 - DNA, 15 bp, Homo sapiens
aaatttctttgcaag

SEQ ID NO: 1504772 - DNA, 15 bp, Homo sapiens
aatttctttgcaaga

SEQ ID NO: 1504773 - DNA, 15 bp, Homo sapiens
atttctttgcaagaa

SEQ ID NO: 1504774 - DNA, 15 bp, Homo sapiens
tttctttgcaagaag

SEQ ID NO: 1504775 - DNA, 15 bp, Homo sapiens
ttctttgcaagaagt

SEQ ID NO: 1504776 - DNA, 15 bp, Homo sapiens
tctttgcaagaagtg

SEQ ID NO: 1504777 - DNA, 15 bp, Homo sapiens
ctttgcaagaagtgt

SEQ ID NO: 1504778 - DNA, 15 bp, Homo sapiens
tttgcaagaagtgtc

SEQ ID NO: 1504779 - DNA, 15 bp, Homo sapiens
ttgcaagaagtgtct

SEQ ID NO: 1504780 - DNA, 15 bp, Homo sapiens
tgcaagaagtgtcta

SEQ ID NO: 1504781 - DNA, 15 bp, Homo sapiens
gcaagaagtgtctaa

SEQ ID NO: 1504782 - DNA, 15 bp, Homo sapiens
caagaagtgtctaat

SEQ ID NO: 1504783 - DNA, 15 bp, Homo sapiens
aagaagtgtctaatt

SEQ ID NO: 1504784 - DNA, 15 bp, Homo sapiens
agaagtgtctaattc

SEQ ID NO: 1504785 - DNA, 15 bp, Homo sapiens
gaagtgtctaattct

SEQ ID NO: 1504786 - DNA, 15 bp, Homo sapiens
aagtgtctaattctc

SEQ ID NO: 1504787 - DNA, 15 bp, Homo sapiens
agtgtctaattctca

SEQ ID NO: 1504788 - DNA, 15 bp, Homo sapiens
gtgtctaattctcaa

SEQ ID NO: 1504789 - DNA, 15 bp, Homo sapiens
tgtctaattctcaag

SEQ ID NO: 1504790 - DNA, 15 bp, Homo sapiens
gtctaattctcaaga

SEQ ID NO: 1504791 - DNA, 15 bp, Homo sapiens
tctaattctcaagag

SEQ ID NO: 1504792 - DNA, 15 bp, Homo sapiens
ctaattctcaagaga

SEQ ID NO: 1504793 - DNA, 15 bp, Homo sapiens
taattctcaagagat

SEQ ID NO: 1504794 - DNA, 15 bp, Homo sapiens
aattctcaagagatc

SEQ ID NO: 1504795 - DNA, 15 bp, Homo sapiens
attctcaagagatca

SEQ ID NO: 1504796 - DNA, 15 bp, Homo sapiens
ttctcaagagatcag

SEQ ID NO: 1504797 - DNA, 15 bp, Homo sapiens
tctcaagagatcagc

SEQ ID NO: 1504798 - DNA, 15 bp, Homo sapiens
ctcaagagatcagct

SEQ ID NO: 1504799 - DNA, 15 bp, Homo sapiens
tcaagagatcagcta

SEQ ID NO: 1504800 - DNA, 15 bp, Homo sapiens
caagagatcagctat

SEQ ID NO: 1504801 - DNA, 15 bp, Homo sapiens
aagagatcagctatt

SEQ ID NO: 1504802 - DNA, 15 bp, Homo sapiens
agagatcagctattc

SEQ ID NO: 1504803 - DNA, 15 bp, Homo sapiens
gagatcagctattca

SEQ ID NO: 1504804 - DNA, 15 bp, Homo sapiens
agatcagctattcag

SEQ ID NO: 1504805 - DNA, 15 bp, Homo sapiens
gatcagctattcagc

SEQ ID NO: 1504806 - DNA, 15 bp, Homo sapiens
atcagctattcagct

SEQ ID NO: 1504807 - DNA, 15 bp, Homo sapiens
tcagctattcagctt

SEQ ID NO: 1504808 - DNA, 15 bp, Homo sapiens
cagctattcagcttg

SEQ ID NO: 1504809 - DNA, 15 bp, Homo sapiens
agctattcagcttgc

SEQ ID NO: 1504810 - DNA, 15 bp, Homo sapiens
gctattcagcttgct

SEQ ID NO: 1504811 - DNA, 15 bp, Homo sapiens
ctattcagcttgctg

SEQ ID NO: 1504812 - DNA, 15 bp, Homo sapiens
tattcagcttgctgg

SEQ ID NO: 1504813 - DNA, 15 bp, Homo sapiens
attcagcttgctggg

SEQ ID NO: 1504814 - DNA, 15 bp, Homo sapiens
ttcagcttgctggga

SEQ ID NO: 1504815 - DNA, 15 bp, Homo sapiens
tcagcttgctgggag

SEQ ID NO: 1504816 - DNA, 15 bp, Homo sapiens
cagcttgctgggagc

SEQ ID NO: 1504817 - DNA, 15 bp, Homo sapiens
agcttgctgggagct

SEQ ID NO: 1504818 - DNA, 15 bp, Homo sapiens
gcttgctgggagcta

SEQ ID NO: 1504819 - DNA, 15 bp, Homo sapiens
cttgctgggagctaa

SEQ ID NO: 1504820 - DNA, 15 bp, Homo sapiens
ttgctgggagctaat

SEQ ID NO: 1504821 - DNA, 15 bp, Homo sapiens
tgctgggagctaatt

SEQ ID NO: 1504822 - DNA, 15 bp, Homo sapiens
gctgggagctaatta

SEQ ID NO: 1504823 - DNA, 15 bp, Homo sapiens
ctgggagctaattac

SEQ ID NO: 1504824 - DNA, 15 bp, Homo sapiens
tgggagctaattaca

SEQ ID NO: 1504825 - DNA, 15 bp, Homo sapiens
gggagctaattacaa

SEQ ID NO: 1504826 - DNA, 15 bp, Homo sapiens
ggagctaattacaaa

SEQ ID NO: 1504827 - DNA, 15 bp, Homo sapiens
gagctaattacaaat

SEQ ID NO: 1504828 - DNA, 15 bp, Homo sapiens
agctaattacaaatg

SEQ ID NO: 1504829 - DNA, 15 bp, Homo sapiens
gctaattacaaatgg

SEQ ID NO: 1504830 - DNA, 15 bp, Homo sapiens
ctaattacaaatggt

SEQ ID NO: 1504831 - DNA, 15 bp, Homo sapiens
taattacaaatggtc

SEQ ID NO: 1504832 - DNA, 15 bp, Homo sapiens
aattacaaatggtcc

SEQ ID NO: 1504833 - DNA, 15 bp, Homo sapiens
attacaaatggtccc

SEQ ID NO: 1504834 - DNA, 15 bp, Homo sapiens
ttacaaatggtccct

SEQ ID NO: 1504835 - DNA, 15 bp, Homo sapiens
tacaaatggtccctt

SEQ ID NO: 1504836 - DNA, 15 bp, Homo sapiens
acaaatggtccctta

SEQ ID NO: 1504837 - DNA, 15 bp, Homo sapiens
caaatggtcccttag

SEQ ID NO: 1504838 - DNA, 15 bp, Homo sapiens
aaatggtcccttagc

SEQ ID NO: 1504839 - DNA, 15 bp, Homo sapiens
aatggtcccttagct

SEQ ID NO: 1504840 - DNA, 15 bp, Homo sapiens
atggtcccttagctt

SEQ ID NO: 1504841 - DNA, 15 bp, Homo sapiens
tggtcccttagcttt

SEQ ID NO: 1504842 - DNA, 15 bp, Homo sapiens
ggtcccttagctttg

SEQ ID NO: 1504843 - DNA, 15 bp, Homo sapiens
gtcccttagctttgc

SEQ ID NO: 1504844 - DNA, 15 bp, Homo sapiens
tcccttagctttgct

SEQ ID NO: 1504845 - DNA, 15 bp, Homo sapiens
cccttagctttgctc

SEQ ID NO: 1504846 - DNA, 15 bp, Homo sapiens
ccttagctttgctca

SEQ ID NO: 1504847 - DNA, 15 bp, Homo sapiens
cttagctttgctcag

SEQ ID NO: 1504848 - DNA, 15 bp, Homo sapiens
ttagctttgctcagt

SEQ ID NO: 1504849 - DNA, 15 bp, Homo sapiens
tagctttgctcagtc

SEQ ID NO: 1504850 - DNA, 15 bp, Homo sapiens
agctttgctcagtca

SEQ ID NO: 1504851 - DNA, 15 bp, Homo sapiens
gctttgctcagtcaa

SEQ ID NO: 1504852 - DNA, 15 bp, Homo sapiens
ctttgctcagtcaac

SEQ ID NO: 1504853 - DNA, 15 bp, Homo sapiens
tttgctcagtcaact

SEQ ID NO: 1504854 - DNA, 15 bp, Homo sapiens
ttgctcagtcaactg

SEQ ID NO: 1504855 - DNA, 15 bp, Homo sapiens
tgctcagtcaactgg

SEQ ID NO: 1504856 - DNA, 15 bp, Homo sapiens
gctcagtcaactggc

SEQ ID NO: 1504857 - DNA, 15 bp, Homo sapiens
ctcagtcaactggcc

SEQ ID NO: 1504858 - DNA, 15 bp, Homo sapiens
tcagtcaactggcca

SEQ ID NO: 1504859 - DNA, 15 bp, Homo sapiens
cagtcaactggccaa

SEQ ID NO: 1504860 - DNA, 15 bp, Homo sapiens
agtcaactggccaaa

SEQ ID NO: 1504861 - DNA, 15 bp, Homo sapiens
gtcaactggccaaaa

SEQ ID NO: 1504862 - DNA, 15 bp, Homo sapiens
tcaactggccaaaag

SEQ ID NO: 1504863 - DNA, 15 bp, Homo sapiens
caactggccaaaagg

SEQ ID NO: 1504864 - DNA, 15 bp, Homo sapiens
aactggccaaaaggc

SEQ ID NO: 1504865 - DNA, 15 bp, Homo sapiens
actggccaaaaggca

SEQ ID NO: 1504866 - DNA, 15 bp, Homo sapiens
ctggccaaaaggcaa

SEQ ID NO: 1504867 - DNA, 15 bp, Homo sapiens
tggccaaaaggcaac

SEQ ID NO: 1504868 - DNA, 15 bp, Homo sapiens
ggccaaaaggcaacg

SEQ ID NO: 1504869 - DNA, 15 bp, Homo sapiens
gccaaaaggcaacgg

SEQ ID NO: 1504870 - DNA, 15 bp, Homo sapiens
ccaaaaggcaacgga

SEQ ID NO: 1504871 - DNA, 15 bp, Homo sapiens
caaaaggcaacggag

SEQ ID NO: 1504872 - DNA, 15 bp, Homo sapiens
aaaaggcaacggaga

SEQ ID NO: 1504873 - DNA, 15 bp, Homo sapiens
aaaggcaacggagag

SEQ ID NO: 1504874 - DNA, 15 bp, Homo sapiens
aaggcaacggagagg

SEQ ID NO: 1504875 - DNA, 15 bp, Homo sapiens
aggcaacggagagga

SEQ ID NO: 1504876 - DNA, 15 bp, Homo sapiens
ggcaacggagaggaa

SEQ ID NO: 1504877 - DNA, 15 bp, Homo sapiens
gcaacggagaggaaa

SEQ ID NO: 1504878 - DNA, 15 bp, Homo sapiens
caacggagaggaaat

SEQ ID NO: 1504879 - DNA, 15 bp, Homo sapiens
aacggagaggaaatt

SEQ ID NO: 1504880 - DNA, 15 bp, Homo sapiens
acggagaggaaattg

SEQ ID NO: 1504881 - DNA, 15 bp, Homo sapiens
cggagaggaaattgg

SEQ ID NO: 1504882 - DNA, 15 bp, Homo sapiens
ggagaggaaattgga

SEQ ID NO: 1504883 - DNA, 15 bp, Homo sapiens
gagaggaaattggag

SEQ ID NO: 1504884 - DNA, 15 bp, Homo sapiens
agaggaaattggagt

SEQ ID NO: 1504885 - DNA, 15 bp, Homo sapiens
gaggaaattggagtt

SEQ ID NO: 1504886 - DNA, 15 bp, Homo sapiens
aggaaattggagtta

SEQ ID NO: 1504887 - DNA, 15 bp, Homo sapiens
ggaaattggagttaa

SEQ ID NO: 1504888 - DNA, 15 bp, Homo sapiens
gaaattggagttaag

SEQ ID NO: 1504889 - DNA, 15 bp, Homo sapiens
aaattggagttaaga

SEQ ID NO: 1504890 - DNA, 15 bp, Homo sapiens
aattggagttaagac

SEQ ID NO: 1504891 - DNA, 15 bp, Homo sapiens
attggagttaagaca

SEQ ID NO: 1504892 - DNA, 15 bp, Homo sapiens
ttggagttaagacaa

SEQ ID NO: 1504893 - DNA, 15 bp, Homo sapiens
tggagttaagacaac

SEQ ID NO: 1504894 - DNA, 15 bp, Homo sapiens
ggagttaagacaact

SEQ ID NO: 1504895 - DNA, 15 bp, Homo sapiens
gagttaagacaactg

SEQ ID NO: 1504896 - DNA, 15 bp, Homo sapiens
agttaagacaactgc

SEQ ID NO: 1504897 - DNA, 15 bp, Homo sapiens
gttaagacaactgca

SEQ ID NO: 1504898 - DNA, 15 bp, Homo sapiens
ttaagacaactgcag

SEQ ID NO: 1504899 - DNA, 15 bp, Homo sapiens
taagacaactgcagt

SEQ ID NO: 1504900 - DNA, 15 bp, Homo sapiens
aagacaactgcagtt

SEQ ID NO: 1504901 - DNA, 15 bp, Homo sapiens
agacaactgcagttg

SEQ ID NO: 1504902 - DNA, 15 bp, Homo sapiens
gacaactgcagttgg

SEQ ID NO: 1504903 - DNA, 15 bp, Homo sapiens
acaactgcagttggt

SEQ ID NO: 1504904 - DNA, 15 bp, Homo sapiens
caactgcagttggtc

SEQ ID NO: 1504905 - DNA, 15 bp, Homo sapiens
aactgcagttggtcc

SEQ ID NO: 1504906 - DNA, 15 bp, Homo sapiens
actgcagttggtccc

SEQ ID NO: 1504907 - DNA, 15 bp, Homo sapiens
ctgcagttggtccct

SEQ ID NO: 1504908 - DNA, 15 bp, Homo sapiens
tgcagttggtccctg

SEQ ID NO: 1504909 - DNA, 15 bp, Homo sapiens
gcagttggtccctgg

SEQ ID NO: 1504910 - DNA, 15 bp, Homo sapiens
cagttggtccctgga

SEQ ID NO: 1504911 - DNA, 15 bp, Homo sapiens
agttggtccctggag

SEQ ID NO: 1504912 - DNA, 15 bp, Homo sapiens
gttggtccctggagg

SEQ ID NO: 1504913 - DNA, 15 bp, Homo sapiens
ttggtccctggaggg

SEQ ID NO: 1504914 - DNA, 15 bp, Homo sapiens
tggtccctggaggga

SEQ ID NO: 1504915 - DNA, 15 bp, Homo sapiens
ggtccctggagggag

SEQ ID NO: 1504916 - DNA, 15 bp, Homo sapiens
gtccctggagggagc

SEQ ID NO: 1504917 - DNA, 15 bp, Homo sapiens
tccctggagggagcc

SEQ ID NO: 1504918 - DNA, 15 bp, Homo sapiens
ccctggagggagcct

SEQ ID NO: 1504919 - DNA, 15 bp, Homo sapiens
cctggagggagccta

SEQ ID NO: 1504920 - DNA, 15 bp, Homo sapiens
ctggagggagcctat

SEQ ID NO: 1504921 - DNA, 15 bp, Homo sapiens
tggagggagcctatt

SEQ ID NO: 1504922 - DNA, 15 bp, Homo sapiens
ggagggagcctattc

SEQ ID NO: 1504923 - DNA, 15 bp, Homo sapiens
gagggagcctattct

SEQ ID NO: 1504924 - DNA, 15 bp, Homo sapiens
agggagcctattcta

SEQ ID NO: 1504925 - DNA, 15 bp, Homo sapiens
gggagcctattctac

SEQ ID NO: 1504926 - DNA, 15 bp, Homo sapiens
ggagcctattctact

SEQ ID NO: 1504927 - DNA, 15 bp, Homo sapiens
gagcctattctactg

SEQ ID NO: 1504928 - DNA, 15 bp, Homo sapiens
agcctattctactgc

SEQ ID NO: 1504929 - DNA, 15 bp, Homo sapiens
gcctattctactgcc

SEQ ID NO: 1504930 - DNA, 15 bp, Homo sapiens
cctattctactgcca

SEQ ID NO: 1504931 - DNA, 15 bp, Homo sapiens
ctattctactgccag

SEQ ID NO: 1504932 - DNA, 15 bp, Homo sapiens
tattctactgccagc

SEQ ID NO: 1504933 - DNA, 15 bp, Homo sapiens
attctactgccagca

SEQ ID NO: 1504934 - DNA, 15 bp, Homo sapiens
ttctactgccagcat

SEQ ID NO: 1504935 - DNA, 15 bp, Homo sapiens
tctactgccagcatt

SEQ ID NO: 1504936 - DNA, 15 bp, Homo sapiens
ctactgccagcattc

SEQ ID NO: 1504937 - DNA, 15 bp, Homo sapiens
tactgccagcattct

SEQ ID NO: 1504938 - DNA, 15 bp, Homo sapiens
actgccagcattctg

SEQ ID NO: 1504939 - DNA, 15 bp, Homo sapiens
ctgccagcattctgg

SEQ ID NO: 1504940 - DNA, 15 bp, Homo sapiens
tgccagcattctggc

SEQ ID NO: 1504941 - DNA, 15 bp, Homo sapiens
gccagcattctggct

SEQ ID NO: 1504942 - DNA, 15 bp, Homo sapiens
ccagcattctggcta

SEQ ID NO: 1504943 - DNA, 15 bp, Homo sapiens
cagcattctggctaa

SEQ ID NO: 1504944 - DNA, 15 bp, Homo sapiens
agcattctggctaat

SEQ ID NO: 1504945 - DNA, 15 bp, Homo sapiens
gcattctggctaatc

SEQ ID NO: 1504946 - DNA, 15 bp, Homo sapiens
cattctggctaatca

SEQ ID NO: 1504947 - DNA, 15 bp, Homo sapiens
attctggctaatcag

SEQ ID NO: 1504948 - DNA, 15 bp, Homo sapiens
ttctggctaatcaga

SEQ ID NO: 1504949 - DNA, 15 bp, Homo sapiens
tctggctaatcagaa

SEQ ID NO: 1504950 - DNA, 15 bp, Homo sapiens
ctggctaatcagaat

SEQ ID NO: 1504951 - DNA, 15 bp, Homo sapiens
tggctaatcagaatg

SEQ ID NO: 1504952 - DNA, 15 bp, Homo sapiens
ggctaatcagaatgg

SEQ ID NO: 1504953 - DNA, 15 bp, Homo sapiens
gctaatcagaatgga

SEQ ID NO: 1504954 - DNA, 15 bp, Homo sapiens
ctaatcagaatggat

SEQ ID NO: 1504955 - DNA, 15 bp, Homo sapiens
taatcagaatggata

SEQ ID NO: 1504956 - DNA, 15 bp, Homo sapiens
aatcagaatggatac

SEQ ID NO: 1504957 - DNA, 15 bp, Homo sapiens
atcagaatggataca

SEQ ID NO: 1504958 - DNA, 15 bp, Homo sapiens
tcagaatggatacag

SEQ ID NO: 1504959 - DNA, 15 bp, Homo sapiens
cagaatggatacaga

SEQ ID NO: 1504960 - DNA, 15 bp, Homo sapiens
agaatggatacagat

SEQ ID NO: 1504961 - DNA, 15 bp, Homo sapiens
gaatggatacagatg

SEQ ID NO: 1504962 - DNA, 15 bp, Homo sapiens
aatggatacagatgg

SEQ ID NO: 1504963 - DNA, 15 bp, Homo sapiens
atggatacagatgga

SEQ ID NO: 1504964 - DNA, 15 bp, Homo sapiens
tggatacagatggac

SEQ ID NO: 1504965 - DNA, 15 bp, Homo sapiens
ggatacagatggaca

SEQ ID NO: 1504966 - DNA, 15 bp, Homo sapiens
gatacagatggacaa

SEQ ID NO: 1504967 - DNA, 15 bp, Homo sapiens
atacagatggacaag

SEQ ID NO: 1504968 - DNA, 15 bp, Homo sapiens
tacagatggacaagt

SEQ ID NO: 1504969 - DNA, 15 bp, Homo sapiens
acagatggacaagta

SEQ ID NO: 1504970 - DNA, 15 bp, Homo sapiens
cagatggacaagtat

SEQ ID NO: 1504971 - DNA, 15 bp, Homo sapiens
agatggacaagtatc

SEQ ID NO: 1504972 - DNA, 15 bp, Homo sapiens
gatggacaagtatcc

SEQ ID NO: 1504973 - DNA, 15 bp, Homo sapiens
atggacaagtatcct

SEQ ID NO: 1504974 - DNA, 15 bp, Homo sapiens
tggacaagtatcctt

SEQ ID NO: 1504975 - DNA, 15 bp, Homo sapiens
ggacaagtatccttt

SEQ ID NO: 1504976 - DNA, 15 bp, Homo sapiens
gacaagtatccttta

SEQ ID NO: 1504977 - DNA, 15 bp, Homo sapiens
acaagtatcctttat

SEQ ID NO: 1504978 - DNA, 15 bp, Homo sapiens
caagtatcctttatg

SEQ ID NO: 1504979 - DNA, 15 bp, Homo sapiens
aagtatcctttatgc

SEQ ID NO: 1504980 - DNA, 15 bp, Homo sapiens
agtatcctttatgca

SEQ ID NO: 1504981 - DNA, 15 bp, Homo sapiens
gtatcctttatgcat

SEQ ID NO: 1504982 - DNA, 15 bp, Homo sapiens
tatcctttatgcatg

SEQ ID NO: 1504983 - DNA, 15 bp, Homo sapiens
atcctttatgcatga

SEQ ID NO: 1504984 - DNA, 15 bp, Homo sapiens
tcctttatgcatgag

SEQ ID NO: 1504985 - DNA, 15 bp, Homo sapiens
cctttatgcatgagg

SEQ ID NO: 1504986 - DNA, 15 bp, Homo sapiens
ctttatgcatgaggg

SEQ ID NO: 1504987 - DNA, 15 bp, Homo sapiens
tttatgcatgagggc

SEQ ID NO: 1504988 - DNA, 15 bp, Homo sapiens
ttatgcatgagggcc

SEQ ID NO: 1504989 - DNA, 15 bp, Homo sapiens
tatgcatgagggcct

SEQ ID NO: 1504990 - DNA, 15 bp, Homo sapiens
atgcatgagggcctg

SEQ ID NO: 1504991 - DNA, 15 bp, Homo sapiens
tgcatgagggcctgc

SEQ ID NO: 1504992 - DNA, 15 bp, Homo sapiens
gcatgagggcctgct

SEQ ID NO: 1504993 - DNA, 15 bp, Homo sapiens
catgagggcctgctg

SEQ ID NO: 1504994 - DNA, 15 bp, Homo sapiens
atgagggcctgctgg

SEQ ID NO: 1504995 - DNA, 15 bp, Homo sapiens
tgagggcctgctggt

SEQ ID NO: 1504996 - DNA, 15 bp, Homo sapiens
gagggcctgctggtt

SEQ ID NO: 1504997 - DNA, 15 bp, Homo sapiens
agggcctgctggttt

SEQ ID NO: 1504998 - DNA, 15 bp, Homo sapiens
gggcctgctggtttt

SEQ ID NO: 1504999 - DNA, 15 bp, Homo sapiens
ggcctgctggttttc

SEQ ID NO: 1505000 - DNA, 15 bp, Homo sapiens
gcctgctggttttcc

SEQ ID NO: 1505001 - DNA, 15 bp, Homo sapiens
cctgctggttttcct

SEQ ID NO: 1505002 - DNA, 15 bp, Homo sapiens
ctgctggttttcctg

SEQ ID NO: 1505003 - DNA, 15 bp, Homo sapiens
tgctggttttcctgg

SEQ ID NO: 1505004 - DNA, 15 bp, Homo sapiens
gctggttttcctggg

SEQ ID NO: 1505005 - DNA, 15 bp, Homo sapiens
ctggttttcctgggc

SEQ ID NO: 1505006 - DNA, 15 bp, Homo sapiens
tggttttcctgggcg

SEQ ID NO: 1505007 - DNA, 15 bp, Homo sapiens
ggttttcctgggcga

SEQ ID NO: 1505008 - DNA, 15 bp, Homo sapiens
gttttcctgggcgag

SEQ ID NO: 1505009 - DNA, 15 bp, Homo sapiens
ttttcctgggcgaga

SEQ ID NO: 1505010 - DNA, 15 bp, Homo sapiens
tttcctgggcgagaa

SEQ ID NO: 1505011 - DNA, 15 bp, Homo sapiens
ttcctgggcgagaat

SEQ ID NO: 1505012 - DNA, 15 bp, Homo sapiens
tcctgggcgagaata

SEQ ID NO: 1505013 - DNA, 15 bp, Homo sapiens
cctgggcgagaatat

SEQ ID NO: 1505014 - DNA, 15 bp, Homo sapiens
ctgggcgagaatatg

SEQ ID NO: 1505015 - DNA, 15 bp, Homo sapiens
tgggcgagaatatga

SEQ ID NO: 1505016 - DNA, 15 bp, Homo sapiens
gggcgagaatatgac

SEQ ID NO: 1505017 - DNA, 15 bp, Homo sapiens
ggcgagaatatgaca

SEQ ID NO: 1505018 - DNA, 15 bp, Homo sapiens
gcgagaatatgacag

SEQ ID NO: 1505019 - DNA, 15 bp, Homo sapiens
cgagaatatgacaga

SEQ ID NO: 1505020 - DNA, 15 bp, Homo sapiens
gagaatatgacagaa

SEQ ID NO: 1505021 - DNA, 15 bp, Homo sapiens
agaatatgacagaaa

SEQ ID NO: 1505022 - DNA, 15 bp, Homo sapiens
gaatatgacagaaag

SEQ ID NO: 1505023 - DNA, 15 bp, Homo sapiens
aatatgacagaaagt

SEQ ID NO: 1505024 - DNA, 15 bp, Homo sapiens
atatgacagaaagtc

SEQ ID NO: 1505025 - DNA, 15 bp, Homo sapiens
tatgacagaaagtcg

SEQ ID NO: 1505026 - DNA, 15 bp, Homo sapiens
atgacagaaagtcgg

SEQ ID NO: 1505027 - DNA, 15 bp, Homo sapiens
tgacagaaagtcggg

SEQ ID NO: 1505028 - DNA, 15 bp, Homo sapiens
gacagaaagtcgggg

SEQ ID NO: 1505029 - DNA, 15 bp, Homo sapiens
acagaaagtcggggg

SEQ ID NO: 1505030 - DNA, 15 bp, Homo sapiens
cagaaagtcgggggg

SEQ ID NO: 1505031 - DNA, 15 bp, Homo sapiens
agaaagtcggggggc

SEQ ID NO: 1505032 - DNA, 15 bp, Homo sapiens
gaaagtcggggggct

SEQ ID NO: 1505033 - DNA, 15 bp, Homo sapiens
aaagtcggggggctg

SEQ ID NO: 1505034 - DNA, 15 bp, Homo sapiens
aagtcggggggctga

SEQ ID NO: 1505035 - DNA, 15 bp, Homo sapiens
agtcggggggctgat

SEQ ID NO: 1505036 - DNA, 15 bp, Homo sapiens
gtcggggggctgatg

SEQ ID NO: 1505037 - DNA, 15 bp, Homo sapiens
tcggggggctgatgc

SEQ ID NO: 1505038 - DNA, 15 bp, Homo sapiens
cggggggctgatgct

SEQ ID NO: 1505039 - DNA, 15 bp, Homo sapiens
ggggggctgatgctg

SEQ ID NO: 1505040 - DNA, 15 bp, Homo sapiens
gggggctgatgctgg

SEQ ID NO: 1505041 - DNA, 15 bp, Homo sapiens
ggggctgatgctggg

SEQ ID NO: 1505042 - DNA, 15 bp, Homo sapiens
gggctgatgctgggt

SEQ ID NO: 1505043 - DNA, 15 bp, Homo sapiens
ggctgatgctgggtt

SEQ ID NO: 1505044 - DNA, 15 bp, Homo sapiens
gctgatgctgggttt

SEQ ID NO: 1505045 - DNA, 15 bp, Homo sapiens
ctgatgctgggtttc

SEQ ID NO: 1505046 - DNA, 15 bp, Homo sapiens
tgatgctgggtttcc

SEQ ID NO: 1505047 - DNA, 15 bp, Homo sapiens
gatgctgggtttcca

SEQ ID NO: 1505048 - DNA, 15 bp, Homo sapiens
atgctgggtttccag

SEQ ID NO: 1505049 - DNA, 15 bp, Homo sapiens
tgctgggtttccagg

SEQ ID NO: 1505050 - DNA, 15 bp, Homo sapiens
gctgggtttccagga

SEQ ID NO: 1505051 - DNA, 15 bp, Homo sapiens
ctgggtttccaggaa

SEQ ID NO: 1505052 - DNA, 15 bp, Homo sapiens
tgggtttccaggaaa

SEQ ID NO: 1505053 - DNA, 15 bp, Homo sapiens
gggtttccaggaaat

SEQ ID NO: 1505054 - DNA, 15 bp, Homo sapiens
ggtttccaggaaatc

SEQ ID NO: 1505055 - DNA, 15 bp, Homo sapiens
gtttccaggaaatca

SEQ ID NO: 1505056 - DNA, 15 bp, Homo sapiens
tttccaggaaatcag

SEQ ID NO: 1505057 - DNA, 15 bp, Homo sapiens
ttccaggaaatcagc

SEQ ID NO: 1505058 - DNA, 15 bp, Homo sapiens
tccaggaaatcagct

SEQ ID NO: 1505059 - DNA, 15 bp, Homo sapiens
ccaggaaatcagctt

SEQ ID NO: 1505060 - DNA, 15 bp, Homo sapiens
caggaaatcagctta

SEQ ID NO: 1505061 - DNA, 15 bp, Homo sapiens
aggaaatcagcttaa

SEQ ID NO: 1505062 - DNA, 15 bp, Homo sapiens
ggaaatcagcttaat

SEQ ID NO: 1505063 - DNA, 15 bp, Homo sapiens
gaaatcagcttaatg

SEQ ID NO: 1505064 - DNA, 15 bp, Homo sapiens
aaatcagcttaatga

SEQ ID NO: 1505065 - DNA, 15 bp, Homo sapiens
aatcagcttaatgat

SEQ ID NO: 1505066 - DNA, 15 bp, Homo sapiens
atcagcttaatgata

SEQ ID NO: 1505067 - DNA, 15 bp, Homo sapiens
tcagcttaatgatat

SEQ ID NO: 1505068 - DNA, 15 bp, Homo sapiens
cagcttaatgatatt

SEQ ID NO: 1505069 - DNA, 15 bp, Homo sapiens
agcttaatgatatta

SEQ ID NO: 1505070 - DNA, 15 bp, Homo sapiens
gcttaatgatattaa

SEQ ID NO: 1505071 - DNA, 15 bp, Homo sapiens
cttaatgatattaat

SEQ ID NO: 1505072 - DNA, 15 bp, Homo sapiens
ttaatgatattaatg

SEQ ID NO: 1505073 - DNA, 15 bp, Homo sapiens
taatgatattaatgg

SEQ ID NO: 1505074 - DNA, 15 bp, Homo sapiens
aatgatattaatgga

SEQ ID NO: 1505075 - DNA, 15 bp, Homo sapiens
atgatattaatggaa

SEQ ID NO: 1505076 - DNA, 15 bp, Homo sapiens
tgatattaatggaaa

SEQ ID NO: 1505077 - DNA, 15 bp, Homo sapiens
gatattaatggaaaa

SEQ ID NO: 1505078 - DNA, 15 bp, Homo sapiens
atattaatggaaaaa

SEQ ID NO: 1505079 - DNA, 15 bp, Homo sapiens
tattaatggaaaaat

SEQ ID NO: 1505080 - DNA, 15 bp, Homo sapiens
attaatggaaaaata

SEQ ID NO: 1505081 - DNA, 15 bp, Homo sapiens
ttaatggaaaaatat

SEQ ID NO: 1505082 - DNA, 15 bp, Homo sapiens
taatggaaaaatata

SEQ ID NO: 1505083 - DNA, 15 bp, Homo sapiens
aatggaaaaatatag

SEQ ID NO: 1505084 - DNA, 15 bp, Homo sapiens
atggaaaaatatagt

SEQ ID NO: 1505085 - DNA, 15 bp, Homo sapiens
tggaaaaatatagtt

SEQ ID NO: 1505086 - DNA, 15 bp, Homo sapiens
ggaaaaatatagttt

SEQ ID NO: 1505087 - DNA, 15 bp, Homo sapiens
gaaaaatatagttta

SEQ ID NO: 1505088 - DNA, 15 bp, Homo sapiens
aaaaatatagtttag

SEQ ID NO: 1505089 - DNA, 15 bp, Homo sapiens
aaaatatagtttagc

SEQ ID NO: 1505090 - DNA, 15 bp, Homo sapiens
aaatatagtttagca

SEQ ID NO: 1505091 - DNA, 15 bp, Homo sapiens
aatatagtttagcaa

SEQ ID NO: 1505092 - DNA, 15 bp, Homo sapiens
atatagtttagcaag

SEQ ID NO: 1505093 - DNA, 15 bp, Homo sapiens
tatagtttagcaaga

SEQ ID NO: 1505094 - DNA, 15 bp, Homo sapiens
atagtttagcaagag

SEQ ID NO: 1505095 - DNA, 15 bp, Homo sapiens
tagtttagcaagaga

SEQ ID NO: 1505096 - DNA, 15 bp, Homo sapiens
agtttagcaagagac

SEQ ID NO: 1505097 - DNA, 15 bp, Homo sapiens
gtttagcaagagaca

SEQ ID NO: 1505098 - DNA, 15 bp, Homo sapiens
tttagcaagagacat

SEQ ID NO: 1505099 - DNA, 15 bp, Homo sapiens
ttagcaagagacata

SEQ ID NO: 1505100 - DNA, 15 bp, Homo sapiens
tagcaagagacatag

SEQ ID NO: 1505101 - DNA, 15 bp, Homo sapiens
agcaagagacatagc

SEQ ID NO: 1505102 - DNA, 15 bp, Homo sapiens
gcaagagacatagca

SEQ ID NO: 1505103 - DNA, 15 bp, Homo sapiens
caagagacatagcaa

SEQ ID NO: 1505104 - DNA, 15 bp, Homo sapiens
aagagacatagcaaa

SEQ ID NO: 1505105 - DNA, 15 bp, Homo sapiens
agagacatagcaaat

SEQ ID NO: 1505106 - DNA, 15 bp, Homo sapiens
gagacatagcaaatc

SEQ ID NO: 1505107 - DNA, 15 bp, Homo sapiens
agacatagcaaatct

SEQ ID NO: 1505108 - DNA, 15 bp, Homo sapiens
gacatagcaaatcta

SEQ ID NO: 1505109 - DNA, 15 bp, Homo sapiens
acatagcaaatctag

SEQ ID NO: 1505110 - DNA, 15 bp, Homo sapiens
catagcaaatctagg

SEQ ID NO: 1505111 - DNA, 15 bp, Homo sapiens
atagcaaatctaggt

SEQ ID NO: 1505112 - DNA, 15 bp, Homo sapiens
tagcaaatctaggtg

SEQ ID NO: 1505113 - DNA, 15 bp, Homo sapiens
agcaaatctaggtga

SEQ ID NO: 1505114 - DNA, 15 bp, Homo sapiens
gcaaatctaggtgaa

SEQ ID NO: 1505115 - DNA, 15 bp, Homo sapiens
caaatctaggtgaaa

SEQ ID NO: 1505116 - DNA, 15 bp, Homo sapiens
aaatctaggtgaaaa

SEQ ID NO: 1505117 - DNA, 15 bp, Homo sapiens
aatctaggtgaaaac

SEQ ID NO: 1505118 - DNA, 15 bp, Homo sapiens
atctaggtgaaaacc

SEQ ID NO: 1505119 - DNA, 15 bp, Homo sapiens
tctaggtgaaaaccg

SEQ ID NO: 1505120 - DNA, 15 bp, Homo sapiens
ctaggtgaaaaccgt

SEQ ID NO: 1505121 - DNA, 15 bp, Homo sapiens
taggtgaaaaccgtc

SEQ ID NO: 1505122 - DNA, 15 bp, Homo sapiens
aggtgaaaaccgtct

SEQ ID NO: 1505123 - DNA, 15 bp, Homo sapiens
ggtgaaaaccgtctc

SEQ ID NO: 1505124 - DNA, 15 bp, Homo sapiens
gtgaaaaccgtctct

SEQ ID NO: 1505125 - DNA, 15 bp, Homo sapiens
tgaaaaccgtctctc

SEQ ID NO: 1505126 - DNA, 15 bp, Homo sapiens
gaaaaccgtctctca

SEQ ID NO: 1505127 - DNA, 15 bp, Homo sapiens
aaaaccgtctctcac

SEQ ID NO: 1505128 - DNA, 15 bp, Homo sapiens
aaaccgtctctcact

SEQ ID NO: 1505129 - DNA, 15 bp, Homo sapiens
aaccgtctctcacta

SEQ ID NO: 1505130 - DNA, 15 bp, Homo sapiens
accgtctctcactaa

SEQ ID NO: 1505131 - DNA, 15 bp, Homo sapiens
ccgtctctcactaaa

SEQ ID NO: 1505132 - DNA, 15 bp, Homo sapiens
cgtctctcactaaac

SEQ ID NO: 1505133 - DNA, 15 bp, Homo sapiens
gtctctcactaaacc

SEQ ID NO: 1505134 - DNA, 15 bp, Homo sapiens
tctctcactaaaccc

SEQ ID NO: 1505135 - DNA, 15 bp, Homo sapiens
ctctcactaaaccct

SEQ ID NO: 1505136 - DNA, 15 bp, Homo sapiens
tctcactaaaccctg

SEQ ID NO: 1505137 - DNA, 15 bp, Homo sapiens
ctcactaaaccctga

SEQ ID NO: 1505138 - DNA, 15 bp, Homo sapiens
tcactaaaccctgaa

SEQ ID NO: 1505139 - DNA, 15 bp, Homo sapiens
cactaaaccctgaac

SEQ ID NO: 1505140 - DNA, 15 bp, Homo sapiens
actaaaccctgaacc

SEQ ID NO: 1505141 - DNA, 15 bp, Homo sapiens
ctaaaccctgaacca

SEQ ID NO: 1505142 - DNA, 15 bp, Homo sapiens
taaaccctgaaccat

SEQ ID NO: 1505143 - DNA, 15 bp, Homo sapiens
aaaccctgaaccatt

SEQ ID NO: 1505144 - DNA, 15 bp, Homo sapiens
aaccctgaaccattc

SEQ ID NO: 1505145 - DNA, 15 bp, Homo sapiens
accctgaaccattct

SEQ ID NO: 1505146 - DNA, 15 bp, Homo sapiens
ccctgaaccattctg

SEQ ID NO: 1505147 - DNA, 15 bp, Homo sapiens
cctgaaccattctga

SEQ ID NO: 1505148 - DNA, 15 bp, Homo sapiens
ctgaaccattctgat

SEQ ID NO: 1505149 - DNA, 15 bp, Homo sapiens
tgaaccattctgatc

SEQ ID NO: 1505150 - DNA, 15 bp, Homo sapiens
gaaccattctgatct

SEQ ID NO: 1505151 - DNA, 15 bp, Homo sapiens
aaccattctgatctc

SEQ ID NO: 1505152 - DNA, 15 bp, Homo sapiens
accattctgatctct

SEQ ID NO: 1505153 - DNA, 15 bp, Homo sapiens
ccattctgatctctg

SEQ ID NO: 1505154 - DNA, 15 bp, Homo sapiens
cattctgatctctga

SEQ ID NO: 1505155 - DNA, 15 bp, Homo sapiens
attctgatctctgag

SEQ ID NO: 1505156 - DNA, 15 bp, Homo sapiens
ttctgatctctgaga

SEQ ID NO: 1505157 - DNA, 15 bp, Homo sapiens
tctgatctctgagaa

SEQ ID NO: 1505158 - DNA, 15 bp, Homo sapiens
ctgatctctgagaaa

SEQ ID NO: 1505159 - DNA, 15 bp, Homo sapiens
tgatctctgagaaaa

SEQ ID NO: 1505160 - DNA, 15 bp, Homo sapiens
gatctctgagaaaac

SEQ ID NO: 1505161 - DNA, 15 bp, Homo sapiens
atctctgagaaaacg

SEQ ID NO: 1505162 - DNA, 15 bp, Homo sapiens
tctctgagaaaacgg

SEQ ID NO: 1505163 - DNA, 15 bp, Homo sapiens
ctctgagaaaacgga

SEQ ID NO: 1505164 - DNA, 15 bp, Homo sapiens
tctgagaaaacggaa

SEQ ID NO: 1505165 - DNA, 15 bp, Homo sapiens
ctgagaaaacggaaa

SEQ ID NO: 1505166 - DNA, 15 bp, Homo sapiens
tgagaaaacggaaag

SEQ ID NO: 1505167 - DNA, 15 bp, Homo sapiens
gagaaaacggaaaga

SEQ ID NO: 1505168 - DNA, 15 bp, Homo sapiens
agaaaacggaaagat

SEQ ID NO: 1505169 - DNA, 15 bp, Homo sapiens
gaaaacggaaagatt

SEQ ID NO: 1505170 - DNA, 15 bp, Homo sapiens
aaaacggaaagattg

SEQ ID NO: 1505171 - DNA, 15 bp, Homo sapiens
aaacggaaagattgg

SEQ ID NO: 1505172 - DNA, 15 bp, Homo sapiens
aacggaaagattggc

SEQ ID NO: 1505173 - DNA, 15 bp, Homo sapiens
acggaaagattggcc

SEQ ID NO: 1505174 - DNA, 15 bp, Homo sapiens
cggaaagattggcct

SEQ ID NO: 1505175 - DNA, 15 bp, Homo sapiens
ggaaagattggccta

SEQ ID NO: 1505176 - DNA, 15 bp, Homo sapiens
gaaagattggcctaa

SEQ ID NO: 1505177 - DNA, 15 bp, Homo sapiens
aaagattggcctaac

SEQ ID NO: 1505178 - DNA, 15 bp, Homo sapiens
aagattggcctaacc

SEQ ID NO: 1505179 - DNA, 15 bp, Homo sapiens
agattggcctaacca

SEQ ID NO: 1505180 - DNA, 15 bp, Homo sapiens
gattggcctaaccat

SEQ ID NO: 1505181 - DNA, 15 bp, Homo sapiens
attggcctaaccatg

SEQ ID NO: 1505182 - DNA, 15 bp, Homo sapiens
ttggcctaaccatgg

SEQ ID NO: 1505183 - DNA, 15 bp, Homo sapiens
tggcctaaccatgga

SEQ ID NO: 1505184 - DNA, 15 bp, Homo sapiens
ggcctaaccatggaa

SEQ ID NO: 1505185 - DNA, 15 bp, Homo sapiens
gcctaaccatggaat

SEQ ID NO: 1505186 - DNA, 15 bp, Homo sapiens
cctaaccatggaatt

SEQ ID NO: 1505187 - DNA, 15 bp, Homo sapiens
ctaaccatggaattt

SEQ ID NO: 1505188 - DNA, 15 bp, Homo sapiens
taaccatggaatttc

SEQ ID NO: 1505189 - DNA, 15 bp, Homo sapiens
aaccatggaatttcc

SEQ ID NO: 1505190 - DNA, 15 bp, Homo sapiens
accatggaatttcct

SEQ ID NO: 1505191 - DNA, 15 bp, Homo sapiens
ccatggaatttcctg

SEQ ID NO: 1505192 - DNA, 15 bp, Homo sapiens
catggaatttcctgg

SEQ ID NO: 1505193 - DNA, 15 bp, Homo sapiens
atggaatttcctggt

SEQ ID NO: 1505194 - DNA, 15 bp, Homo sapiens
tggaatttcctggtc

SEQ ID NO: 1505195 - DNA, 15 bp, Homo sapiens
ggaatttcctggtct

SEQ ID NO: 1505196 - DNA, 15 bp, Homo sapiens
gaatttcctggtctt

SEQ ID NO: 1505197 - DNA, 15 bp, Homo sapiens
aatttcctggtcttg

SEQ ID NO: 1505198 - DNA, 15 bp, Homo sapiens
atttcctggtcttgg

SEQ ID NO: 1505199 - DNA, 15 bp, Homo sapiens
tttcctggtcttggt

SEQ ID NO: 1505200 - DNA, 15 bp, Homo sapiens
ttcctggtcttggtg

SEQ ID NO: 1505201 - DNA, 15 bp, Homo sapiens
tcctggtcttggtgg

SEQ ID NO: 1505202 - DNA, 15 bp, Homo sapiens
cctggtcttggtgga

SEQ ID NO: 1505203 - DNA, 15 bp, Homo sapiens
ctggtcttggtggat

SEQ ID NO: 1505204 - DNA, 15 bp, Homo sapiens
tggtcttggtggatt

SEQ ID NO: 1505205 - DNA, 15 bp, Homo sapiens
ggtcttggtggattt

SEQ ID NO: 1505206 - DNA, 15 bp, Homo sapiens
gtcttggtggattta

SEQ ID NO: 1505207 - DNA, 15 bp, Homo sapiens
tcttggtggatttat

SEQ ID NO: 1505208 - DNA, 15 bp, Homo sapiens
cttggtggatttata

SEQ ID NO: 1505209 - DNA, 15 bp, Homo sapiens
ttggtggatttataa

SEQ ID NO: 1505210 - DNA, 15 bp, Homo sapiens
tggtggatttataac

SEQ ID NO: 1505211 - DNA, 15 bp, Homo sapiens
ggtggatttataact

SEQ ID NO: 1505212 - DNA, 15 bp, Homo sapiens
gtggatttataactg

SEQ ID NO: 1505213 - DNA, 15 bp, Homo sapiens
tggatttataactga

SEQ ID NO: 1505214 - DNA, 15 bp, Homo sapiens
ggatttataactgaa

SEQ ID NO: 1505215 - DNA, 15 bp, Homo sapiens
gatttataactgaag

SEQ ID NO: 1505216 - DNA, 15 bp, Homo sapiens
atttataactgaagc

SEQ ID NO: 1505217 - DNA, 15 bp, Homo sapiens
tttataactgaagct

SEQ ID NO: 1505218 - DNA, 15 bp, Homo sapiens
ttataactgaagctt

SEQ ID NO: 1505219 - DNA, 15 bp, Homo sapiens
tataactgaagcttc

SEQ ID NO: 1505220 - DNA, 15 bp, Homo sapiens
ataactgaagcttca

SEQ ID NO: 1505221 - DNA, 15 bp, Homo sapiens
taactgaagcttcag

SEQ ID NO: 1505222 - DNA, 15 bp, Homo sapiens
aactgaagcttcagc

SEQ ID NO: 1505223 - DNA, 15 bp, Homo sapiens
actgaagcttcagca

SEQ ID NO: 1505224 - DNA, 15 bp, Homo sapiens
ctgaagcttcagcag

SEQ ID NO: 1505225 - DNA, 15 bp, Homo sapiens
tgaagcttcagcaga

SEQ ID NO: 1505226 - DNA, 15 bp, Homo sapiens
gaagcttcagcagat

SEQ ID NO: 1505227 - DNA, 15 bp, Homo sapiens
aagcttcagcagatg

SEQ ID NO: 1505228 - DNA, 15 bp, Homo sapiens
agcttcagcagatga

SEQ ID NO: 1505229 - DNA, 15 bp, Homo sapiens
gcttcagcagatgac

SEQ ID NO: 1505230 - DNA, 15 bp, Homo sapiens
cttcagcagatgacc

SEQ ID NO: 1505231 - DNA, 15 bp, Homo sapiens
ttcagcagatgaccc

SEQ ID NO: 1505232 - DNA, 15 bp, Homo sapiens
tcagcagatgacccg

SEQ ID NO: 1505233 - DNA, 15 bp, Homo sapiens
cagcagatgacccga

SEQ ID NO: 1505234 - DNA, 15 bp, Homo sapiens
agcagatgacccgag

SEQ ID NO: 1505235 - DNA, 15 bp, Homo sapiens
gcagatgacccgagc

SEQ ID NO: 1505236 - DNA, 15 bp, Homo sapiens
cagatgacccgagcc

SEQ ID NO: 1505237 - DNA, 15 bp, Homo sapiens
agatgacccgagcca

SEQ ID NO: 1505238 - DNA, 15 bp, Homo sapiens
gatgacccgagccat

SEQ ID NO: 1505239 - DNA, 15 bp, Homo sapiens
atgacccgagccata

SEQ ID NO: 1505240 - DNA, 15 bp, Homo sapiens
tgacccgagccataa

SEQ ID NO: 1505241 - DNA, 15 bp, Homo sapiens
gacccgagccataac

SEQ ID NO: 1505242 - DNA, 15 bp, Homo sapiens
acccgagccataact

SEQ ID NO: 1505243 - DNA, 15 bp, Homo sapiens
cccgagccataactg

SEQ ID NO: 1505244 - DNA, 15 bp, Homo sapiens
ccgagccataactgc

SEQ ID NO: 1505245 - DNA, 15 bp, Homo sapiens
cgagccataactgct

SEQ ID NO: 1505246 - DNA, 15 bp, Homo sapiens
gagccataactgctg

SEQ ID NO: 1505247 - DNA, 15 bp, Homo sapiens
agccataactgctgg

SEQ ID NO: 1505248 - DNA, 15 bp, Homo sapiens
gccataactgctggc

SEQ ID NO: 1505249 - DNA, 15 bp, Homo sapiens
ccataactgctggct

SEQ ID NO: 1505250 - DNA, 15 bp, Homo sapiens
cataactgctggctg

SEQ ID NO: 1505251 - DNA, 15 bp, Homo sapiens
ataactgctggctgc

SEQ ID NO: 1505252 - DNA, 15 bp, Homo sapiens
taactgctggctgca

SEQ ID NO: 1505253 - DNA, 15 bp, Homo sapiens
aactgctggctgcac

SEQ ID NO: 1505254 - DNA, 15 bp, Homo sapiens
actgctggctgcaca

SEQ ID NO: 1505255 - DNA, 15 bp, Homo sapiens
ctgctggctgcacag

SEQ ID NO: 1505256 - DNA, 15 bp, Homo sapiens
tgctggctgcacagc

SEQ ID NO: 1505257 - DNA, 15 bp, Homo sapiens
gctggctgcacagca

SEQ ID NO: 1505258 - DNA, 15 bp, Homo sapiens
ctggctgcacagcaa

SEQ ID NO: 1505259 - DNA, 15 bp, Homo sapiens
tggctgcacagcaaa

SEQ ID NO: 1505260 - DNA, 15 bp, Homo sapiens
ggctgcacagcaaat

SEQ ID NO: 1505261 - DNA, 15 bp, Homo sapiens
gctgcacagcaaatt

SEQ ID NO: 1505262 - DNA, 15 bp, Homo sapiens
ctgcacagcaaattc

SEQ ID NO: 1505263 - DNA, 15 bp, Homo sapiens
tgcacagcaaattca

SEQ ID NO: 1505264 - DNA, 15 bp, Homo sapiens
gcacagcaaattcaa

SEQ ID NO: 1505265 - DNA, 15 bp, Homo sapiens
cacagcaaattcaat

SEQ ID NO: 1505266 - DNA, 15 bp, Homo sapiens
acagcaaattcaatt

SEQ ID NO: 1505267 - DNA, 15 bp, Homo sapiens
cagcaaattcaatta

SEQ ID NO: 1505268 - DNA, 15 bp, Homo sapiens
agcaaattcaattat

SEQ ID NO: 1505269 - DNA, 15 bp, Homo sapiens
gcaaattcaattatc

SEQ ID NO: 1505270 - DNA, 15 bp, Homo sapiens
caaattcaattatcc

SEQ ID NO: 1505271 - DNA, 15 bp, Homo sapiens
aaattcaattatccc

SEQ ID NO: 1505272 - DNA, 15 bp, Homo sapiens
aattcaattatccca

SEQ ID NO: 1505273 - DNA, 15 bp, Homo sapiens
attcaattatcccaa

SEQ ID NO: 1505274 - DNA, 15 bp, Homo sapiens
ttcaattatcccaaa

SEQ ID NO: 1505275 - DNA, 15 bp, Homo sapiens
tcaattatcccaaat

SEQ ID NO: 1505276 - DNA, 15 bp, Homo sapiens
caattatcccaaatt

SEQ ID NO: 1505277 - DNA, 15 bp, Homo sapiens
aattatcccaaattc

SEQ ID NO: 1505278 - DNA, 15 bp, Homo sapiens
attatcccaaattcc

SEQ ID NO: 1505279 - DNA, 15 bp, Homo sapiens
ttatcccaaattcca

SEQ ID NO: 1505280 - DNA, 15 bp, Homo sapiens
tatcccaaattccaa

SEQ ID NO: 1505281 - DNA, 15 bp, Homo sapiens
atcccaaattccaac

SEQ ID NO: 1505282 - DNA, 15 bp, Homo sapiens
tcccaaattccaaca

SEQ ID NO: 1505283 - DNA, 15 bp, Homo sapiens
cccaaattccaacac

SEQ ID NO: 1505284 - DNA, 15 bp, Homo sapiens
ccaaattccaacaca

SEQ ID NO: 1505285 - DNA, 15 bp, Homo sapiens
caaattccaacacac

SEQ ID NO: 1505286 - DNA, 15 bp, Homo sapiens
aaattccaacacacc

SEQ ID NO: 1505287 - DNA, 15 bp, Homo sapiens
aattccaacacacct

SEQ ID NO: 1505288 - DNA, 15 bp, Homo sapiens
attccaacacacctc

SEQ ID NO: 1505289 - DNA, 15 bp, Homo sapiens
ttccaacacacctcc

SEQ ID NO: 1505290 - DNA, 15 bp, Homo sapiens
tccaacacacctccc

SEQ ID NO: 1505291 - DNA, 15 bp, Homo sapiens
ccaacacacctcccc

SEQ ID NO: 1505292 - DNA, 15 bp, Homo sapiens
caacacacctcccct

SEQ ID NO: 1505293 - DNA, 15 bp, Homo sapiens
aacacacctcccctc

SEQ ID NO: 1505294 - DNA, 15 bp, Homo sapiens
acacacctcccctct

SEQ ID NO: 1505295 - DNA, 15 bp, Homo sapiens
cacacctcccctctt

SEQ ID NO: 1505296 - DNA, 15 bp, Homo sapiens
acacctcccctcttc

SEQ ID NO: 1505297 - DNA, 15 bp, Homo sapiens
cacctcccctcttcc

SEQ ID NO: 1505298 - DNA, 15 bp, Homo sapiens
acctcccctcttcct

SEQ ID NO: 1505299 - DNA, 15 bp, Homo sapiens
cctcccctcttcctg

SEQ ID NO: 1505300 - DNA, 15 bp, Homo sapiens
ctcccctcttcctgc

SEQ ID NO: 1505301 - DNA, 15 bp, Homo sapiens
tcccctcttcctgcc

SEQ ID NO: 1505302 - DNA, 15 bp, Homo sapiens
cccctcttcctgccc

SEQ ID NO: 1505303 - DNA, 15 bp, Homo sapiens
cctcttcctgcccct

SEQ ID NO: 1505304 - DNA, 15 bp, Homo sapiens
ctcttcctgcccctc

SEQ ID NO: 1505305 - DNA, 15 bp, Homo sapiens
tcttcctgcccctca

SEQ ID NO: 1505306 - DNA, 15 bp, Homo sapiens
cttcctgcccctcac

SEQ ID NO: 1505307 - DNA, 15 bp, Homo sapiens
ttcctgcccctcacc

SEQ ID NO: 1505308 - DNA, 15 bp, Homo sapiens
gcccctcaccccttt

SEQ ID NO: 1505309 - DNA, 15 bp, Homo sapiens
cccctcacccctttc

SEQ ID NO: 1505310 - DNA, 15 bp, Homo sapiens
ccctcacccctttct

SEQ ID NO: 1505311 - DNA, 15 bp, Homo sapiens
cctcacccctttctt

SEQ ID NO: 1505312 - DNA, 15 bp, Homo sapiens
ctcacccctttctta

SEQ ID NO: 1505313 - DNA, 15 bp, Homo sapiens
tcacccctttcttat

SEQ ID NO: 1505314 - DNA, 15 bp, Homo sapiens
cacccctttcttatc

SEQ ID NO: 1505315 - DNA, 15 bp, Homo sapiens
acccctttcttatca

SEQ ID NO: 1505316 - DNA, 15 bp, Homo sapiens
cccctttcttatcat

SEQ ID NO: 1505317 - DNA, 15 bp, Homo sapiens
ccctttcttatcata

SEQ ID NO: 1505318 - DNA, 15 bp, Homo sapiens
cctttcttatcataa

SEQ ID NO: 1505319 - DNA, 15 bp, Homo sapiens
ctttcttatcataat

SEQ ID NO: 1505320 - DNA, 15 bp, Homo sapiens
tttcttatcataatc

SEQ ID NO: 1505321 - DNA, 15 bp, Homo sapiens
ttcttatcataatct

SEQ ID NO: 1505322 - DNA, 15 bp, Homo sapiens
tcttatcataatctt

SEQ ID NO: 1505323 - DNA, 15 bp, Homo sapiens
cttatcataatcttt

SEQ ID NO: 1505324 - DNA, 15 bp, Homo sapiens
ttatcataatctttt

SEQ ID NO: 1505325 - DNA, 15 bp, Homo sapiens
tatcataatcttttc

SEQ ID NO: 1505326 - DNA, 15 bp, Homo sapiens
atcataatcttttct

SEQ ID NO: 1505327 - DNA, 15 bp, Homo sapiens
tcataatcttttctg

SEQ ID NO: 1505328 - DNA, 15 bp, Homo sapiens
cataatcttttctgg

SEQ ID NO: 1505329 - DNA, 15 bp, Homo sapiens
ataatcttttctggg

SEQ ID NO: 1505330 - DNA, 15 bp, Homo sapiens
taatcttttctgggc

SEQ ID NO: 1505331 - DNA, 15 bp, Homo sapiens
aatcttttctgggcc

SEQ ID NO: 1505332 - DNA, 15 bp, Homo sapiens
atcttttctgggcca

SEQ ID NO: 1505333 - DNA, 15 bp, Homo sapiens
tcttttctgggccat

SEQ ID NO: 1505334 - DNA, 15 bp, Homo sapiens
cttttctgggccatc

SEQ ID NO: 1505335 - DNA, 15 bp, Homo sapiens
ttttctgggccatca

SEQ ID NO: 1505336 - DNA, 15 bp, Homo sapiens
tttctgggccatcaa

SEQ ID NO: 1505337 - DNA, 15 bp, Homo sapiens
ttctgggccatcaac

SEQ ID NO: 1505338 - DNA, 15 bp, Homo sapiens
tctgggccatcaacc

SEQ ID NO: 1505339 - DNA, 15 bp, Homo sapiens
ctgggccatcaaccc

SEQ ID NO: 1505340 - DNA, 15 bp, Homo sapiens
tgggccatcaacccc

SEQ ID NO: 1505341 - DNA, 15 bp, Homo sapiens
gggccatcaaccccc

SEQ ID NO: 1505342 - DNA, 15 bp, Homo sapiens
ggccatcaaccccca

SEQ ID NO: 1505343 - DNA, 15 bp, Homo sapiens
gccatcaacccccac

SEQ ID NO: 1505344 - DNA, 15 bp, Homo sapiens
ccatcaacccccact

SEQ ID NO: 1505345 - DNA, 15 bp, Homo sapiens
catcaacccccactg

SEQ ID NO: 1505346 - DNA, 15 bp, Homo sapiens
atcaacccccactgg

SEQ ID NO: 1505347 - DNA, 15 bp, Homo sapiens
tcaacccccactggg

SEQ ID NO: 1505348 - DNA, 15 bp, Homo sapiens
caacccccactgggt

SEQ ID NO: 1505349 - DNA, 15 bp, Homo sapiens
aacccccactgggtt

SEQ ID NO: 1505350 - DNA, 15 bp, Homo sapiens
acccccactgggttg

SEQ ID NO: 1505351 - DNA, 15 bp, Homo sapiens
cccccactgggttgg

SEQ ID NO: 1505352 - DNA, 15 bp, Homo sapiens
ccccactgggttggc

SEQ ID NO: 1505353 - DNA, 15 bp, Homo sapiens
cccactgggttggct

SEQ ID NO: 1505354 - DNA, 15 bp, Homo sapiens
ccactgggttggctg

SEQ ID NO: 1505355 - DNA, 15 bp, Homo sapiens
cactgggttggctga

SEQ ID NO: 1505356 - DNA, 15 bp, Homo sapiens
actgggttggctgag

SEQ ID NO: 1505357 - DNA, 15 bp, Homo sapiens
ctgggttggctgagc

SEQ ID NO: 1505358 - DNA, 15 bp, Homo sapiens
tgggttggctgagcc

SEQ ID NO: 1505359 - DNA, 15 bp, Homo sapiens
gggttggctgagccc

SEQ ID NO: 1505360 - DNA, 15 bp, Homo sapiens
ggttggctgagccca

SEQ ID NO: 1505361 - DNA, 15 bp, Homo sapiens
gttggctgagcccaa

SEQ ID NO: 1505362 - DNA, 15 bp, Homo sapiens
ttggctgagcccaag

SEQ ID NO: 1505363 - DNA, 15 bp, Homo sapiens
tggctgagcccaagt

SEQ ID NO: 1505364 - DNA, 15 bp, Homo sapiens
ggctgagcccaagtt

SEQ ID NO: 1505365 - DNA, 15 bp, Homo sapiens
gctgagcccaagttt

SEQ ID NO: 1505366 - DNA, 15 bp, Homo sapiens
ctgagcccaagttta

SEQ ID NO: 1505367 - DNA, 15 bp, Homo sapiens
tgagcccaagtttaa

SEQ ID NO: 1505368 - DNA, 15 bp, Homo sapiens
gagcccaagtttaat

SEQ ID NO: 1505369 - DNA, 15 bp, Homo sapiens
agcccaagtttaatt

SEQ ID NO: 1505370 - DNA, 15 bp, Homo sapiens
gcccaagtttaattt

SEQ ID NO: 1505371 - DNA, 15 bp, Homo sapiens
cccaagtttaatttc

SEQ ID NO: 1505372 - DNA, 15 bp, Homo sapiens
ccaagtttaatttct

SEQ ID NO: 1505373 - DNA, 15 bp, Homo sapiens
caagtttaatttctc

SEQ ID NO: 1505374 - DNA, 15 bp, Homo sapiens
aagtttaatttctct

SEQ ID NO: 1505375 - DNA, 15 bp, Homo sapiens
agtttaatttctctg

SEQ ID NO: 1505376 - DNA, 15 bp, Homo sapiens
gtttaatttctctgc

SEQ ID NO: 1505377 - DNA, 15 bp, Homo sapiens
tttaatttctctgca

SEQ ID NO: 1505378 - DNA, 15 bp, Homo sapiens
ttaatttctctgcaa

SEQ ID NO: 1505379 - DNA, 15 bp, Homo sapiens
taatttctctgcaag

SEQ ID NO: 1505380 - DNA, 15 bp, Homo sapiens
aatttctctgcaagc

SEQ ID NO: 1505381 - DNA, 15 bp, Homo sapiens
atttctctgcaagct

SEQ ID NO: 1505382 - DNA, 15 bp, Homo sapiens
tttctctgcaagctc

SEQ ID NO: 1505383 - DNA, 15 bp, Homo sapiens
ttctctgcaagctct

SEQ ID NO: 1505384 - DNA, 15 bp, Homo sapiens
tctctgcaagctctg

SEQ ID NO: 1505385 - DNA, 15 bp, Homo sapiens
ctctgcaagctctga

SEQ ID NO: 1505386 - DNA, 15 bp, Homo sapiens
tctgcaagctctgaa

SEQ ID NO: 1505387 - DNA, 15 bp, Homo sapiens
ctgcaagctctgaac

SEQ ID NO: 1505388 - DNA, 15 bp, Homo sapiens
tgcaagctctgaact

SEQ ID NO: 1505389 - DNA, 15 bp, Homo sapiens
gcaagctctgaacta

SEQ ID NO: 1505390 - DNA, 15 bp, Homo sapiens
caagctctgaactaa

SEQ ID NO: 1505391 - DNA, 15 bp, Homo sapiens
aagctctgaactaag

SEQ ID NO: 1505392 - DNA, 15 bp, Homo sapiens
agctctgaactaaga

SEQ ID NO: 1505393 - DNA, 15 bp, Homo sapiens
gctctgaactaagaa

SEQ ID NO: 1505394 - DNA, 15 bp, Homo sapiens
ctctgaactaagaat

SEQ ID NO: 1505395 - DNA, 15 bp, Homo sapiens
tctgaactaagaatc

SEQ ID NO: 1505396 - DNA, 15 bp, Homo sapiens
ctgaactaagaatcg

SEQ ID NO: 1505397 - DNA, 15 bp, Homo sapiens
tgaactaagaatcga

SEQ ID NO: 1505398 - DNA, 15 bp, Homo sapiens
gaactaagaatcgat

SEQ ID NO: 1505399 - DNA, 15 bp, Homo sapiens
aactaagaatcgatg

SEQ ID NO: 1505400 - DNA, 15 bp, Homo sapiens
actaagaatcgatgc

SEQ ID NO: 1505401 - DNA, 15 bp, Homo sapiens
ctaagaatcgatgct

SEQ ID NO: 1505402 - DNA, 15 bp, Homo sapiens
taagaatcgatgctg

SEQ ID NO: 1505403 - DNA, 15 bp, Homo sapiens
aagaatcgatgctga

SEQ ID NO: 1505404 - DNA, 15 bp, Homo sapiens
agaatcgatgctgaa

SEQ ID NO: 1505405 - DNA, 15 bp, Homo sapiens
gaatcgatgctgaag

SEQ ID NO: 1505406 - DNA, 15 bp, Homo sapiens
aatcgatgctgaaga

SEQ ID NO: 1505407 - DNA, 15 bp, Homo sapiens
atcgatgctgaagac

SEQ ID NO: 1505408 - DNA, 15 bp, Homo sapiens
tcgatgctgaagact

SEQ ID NO: 1505409 - DNA, 15 bp, Homo sapiens
cgatgctgaagactt

SEQ ID NO: 1505410 - DNA, 15 bp, Homo sapiens
gatgctgaagacttc

SEQ ID NO: 1505411 - DNA, 15 bp, Homo sapiens
atgctgaagacttct

SEQ ID NO: 1505412 - DNA, 15 bp, Homo sapiens
tgctgaagacttctc

SEQ ID NO: 1505413 - DNA, 15 bp, Homo sapiens
gctgaagacttctca

SEQ ID NO: 1505414 - DNA, 15 bp, Homo sapiens
ctgaagacttctcat

SEQ ID NO: 1505415 - DNA, 15 bp, Homo sapiens
tgaagacttctcatc

SEQ ID NO: 1505416 - DNA, 15 bp, Homo sapiens
gaagacttctcatcg

SEQ ID NO: 1505417 - DNA, 15 bp, Homo sapiens
aagacttctcatcga

SEQ ID NO: 1505418 - DNA, 15 bp, Homo sapiens
agacttctcatcgag

SEQ ID NO: 1505419 - DNA, 15 bp, Homo sapiens
gacttctcatcgagg

SEQ ID NO: 1505420 - DNA, 15 bp, Homo sapiens
acttctcatcgagga

SEQ ID NO: 1505421 - DNA, 15 bp, Homo sapiens
cttctcatcgaggaa

SEQ ID NO: 1505422 - DNA, 15 bp, Homo sapiens
ttctcatcgaggaag

SEQ ID NO: 1505423 - DNA, 15 bp, Homo sapiens
tctcatcgaggaaga

SEQ ID NO: 1505424 - DNA, 15 bp, Homo sapiens
ctcatcgaggaagaa

SEQ ID NO: 1505425 - DNA, 15 bp, Homo sapiens
tcatcgaggaagaaa

SEQ ID NO: 1505426 - DNA, 15 bp, Homo sapiens
catcgaggaagaaag

SEQ ID NO: 1505427 - DNA, 15 bp, Homo sapiens
atcgaggaagaaagc

SEQ ID NO: 1505428 - DNA, 15 bp, Homo sapiens
tcgaggaagaaagcc

SEQ ID NO: 1505429 - DNA, 15 bp, Homo sapiens
cgaggaagaaagcca

SEQ ID NO: 1505430 - DNA, 15 bp, Homo sapiens
gaggaagaaagccac

SEQ ID NO: 1505431 - DNA, 15 bp, Homo sapiens
aggaagaaagccaca

SEQ ID NO: 1505432 - DNA, 15 bp, Homo sapiens
ggaagaaagccacat

SEQ ID NO: 1505433 - DNA, 15 bp, Homo sapiens
gaagaaagccacatt

SEQ ID NO: 1505434 - DNA, 15 bp, Homo sapiens
aagaaagccacattc

SEQ ID NO: 1505435 - DNA, 15 bp, Homo sapiens
agaaagccacattct

SEQ ID NO: 1505436 - DNA, 15 bp, Homo sapiens
gaaagccacattctt

SEQ ID NO: 1505437 - DNA, 15 bp, Homo sapiens
aaagccacattcttc

SEQ ID NO: 1505438 - DNA, 15 bp, Homo sapiens
aagccacattcttca

SEQ ID NO: 1505439 - DNA, 15 bp, Homo sapiens
agccacattcttcat

SEQ ID NO: 1505440 - DNA, 15 bp, Homo sapiens
gccacattcttcatg

SEQ ID NO: 1505441 - DNA, 15 bp, Homo sapiens
ccacattcttcatgg

SEQ ID NO: 1505442 - DNA, 15 bp, Homo sapiens
cacattcttcatgga

SEQ ID NO: 1505443 - DNA, 15 bp, Homo sapiens
acattcttcatggag

SEQ ID NO: 1505444 - DNA, 15 bp, Homo sapiens
cattcttcatggaga

SEQ ID NO: 1505445 - DNA, 15 bp, Homo sapiens
attcttcatggagag

SEQ ID NO: 1505446 - DNA, 15 bp, Homo sapiens
ttcttcatggagagc

SEQ ID NO: 1505447 - DNA, 15 bp, Homo sapiens
tcttcatggagagca

SEQ ID NO: 1505448 - DNA, 15 bp, Homo sapiens
cttcatggagagcag

SEQ ID NO: 1505449 - DNA, 15 bp, Homo sapiens
ttcatggagagcagt

SEQ ID NO: 1505450 - DNA, 15 bp, Homo sapiens
tcatggagagcagtg

SEQ ID NO: 1505451 - DNA, 15 bp, Homo sapiens
catggagagcagtga

SEQ ID NO: 1505452 - DNA, 15 bp, Homo sapiens
atggagagcagtgac

SEQ ID NO: 1505453 - DNA, 15 bp, Homo sapiens
tggagagcagtgaca

SEQ ID NO: 1505454 - DNA, 15 bp, Homo sapiens
ggagagcagtgacat

SEQ ID NO: 1505455 - DNA, 15 bp, Homo sapiens
gagagcagtgacata

SEQ ID NO: 1505456 - DNA, 15 bp, Homo sapiens
agagcagtgacataa

SEQ ID NO: 1505457 - DNA, 15 bp, Homo sapiens
gagcagtgacataat

SEQ ID NO: 1505458 - DNA, 15 bp, Homo sapiens
agcagtgacataatt

SEQ ID NO: 1505459 - DNA, 15 bp, Homo sapiens
gcagtgacataattt

SEQ ID NO: 1505460 - DNA, 15 bp, Homo sapiens
cagtgacataatttc

SEQ ID NO: 1505461 - DNA, 15 bp, Homo sapiens
agtgacataatttca

SEQ ID NO: 1505462 - DNA, 15 bp, Homo sapiens
gtgacataatttcag

SEQ ID NO: 1505463 - DNA, 15 bp, Homo sapiens
tgacataatttcaga

SEQ ID NO: 1505464 - DNA, 15 bp, Homo sapiens
gacataatttcagac

SEQ ID NO: 1505465 - DNA, 15 bp, Homo sapiens
acataatttcagacc

SEQ ID NO: 1505466 - DNA, 15 bp, Homo sapiens
cataatttcagaccc

SEQ ID NO: 1505467 - DNA, 15 bp, Homo sapiens
ataatttcagaccca

SEQ ID NO: 1505468 - DNA, 15 bp, Homo sapiens
taatttcagacccag

SEQ ID NO: 1505469 - DNA, 15 bp, Homo sapiens
aatttcagacccagc

SEQ ID NO: 1505470 - DNA, 15 bp, Homo sapiens
atttcagacccagcc

SEQ ID NO: 1505471 - DNA, 15 bp, Homo sapiens
tttcagacccagcct

SEQ ID NO: 1505472 - DNA, 15 bp, Homo sapiens
ttcagacccagcctg

SEQ ID NO: 1505473 - DNA, 15 bp, Homo sapiens
tcagacccagcctgg

SEQ ID NO: 1505474 - DNA, 15 bp, Homo sapiens
cagacccagcctggc

SEQ ID NO: 1505475 - DNA, 15 bp, Homo sapiens
agacccagcctggcc

SEQ ID NO: 1505476 - DNA, 15 bp, Homo sapiens
gacccagcctggcct

SEQ ID NO: 1505477 - DNA, 15 bp, Homo sapiens
acccagcctggccta

SEQ ID NO: 1505478 - DNA, 15 bp, Homo sapiens
cccagcctggcctaa

SEQ ID NO: 1505479 - DNA, 15 bp, Homo sapiens
ccagcctggcctaac

SEQ ID NO: 1505480 - DNA, 15 bp, Homo sapiens
cagcctggcctaacc

SEQ ID NO: 1505481 - DNA, 15 bp, Homo sapiens
agcctggcctaacca

SEQ ID NO: 1505482 - DNA, 15 bp, Homo sapiens
gcctggcctaaccag

SEQ ID NO: 1505483 - DNA, 15 bp, Homo sapiens
cctggcctaaccagt

SEQ ID NO: 1505484 - DNA, 15 bp, Homo sapiens
ctggcctaaccagta

SEQ ID NO: 1505485 - DNA, 15 bp, Homo sapiens
tggcctaaccagtac

SEQ ID NO: 1505486 - DNA, 15 bp, Homo sapiens
ggcctaaccagtaca

SEQ ID NO: 1505487 - DNA, 15 bp, Homo sapiens
gcctaaccagtacaa

SEQ ID NO: 1505488 - DNA, 15 bp, Homo sapiens
cctaaccagtacaaa

SEQ ID NO: 1505489 - DNA, 15 bp, Homo sapiens
ctaaccagtacaaag

SEQ ID NO: 1505490 - DNA, 15 bp, Homo sapiens
taaccagtacaaaga

SEQ ID NO: 1505491 - DNA, 15 bp, Homo sapiens
aaccagtacaaagag

SEQ ID NO: 1505492 - DNA, 15 bp, Homo sapiens
accagtacaaagagt

SEQ ID NO: 1505493 - DNA, 15 bp, Homo sapiens
ccagtacaaagagtt

SEQ ID NO: 1505494 - DNA, 15 bp, Homo sapiens
cagtacaaagagtta

SEQ ID NO: 1505495 - DNA, 15 bp, Homo sapiens
agtacaaagagttag

SEQ ID NO: 1505496 - DNA, 15 bp, Homo sapiens
gtacaaagagttagt

SEQ ID NO: 1505497 - DNA, 15 bp, Homo sapiens
tacaaagagttagta

SEQ ID NO: 1505498 - DNA, 15 bp, Homo sapiens
acaaagagttagtaa

SEQ ID NO: 1505499 - DNA, 15 bp, Homo sapiens
caaagagttagtaaa

SEQ ID NO: 1505500 - DNA, 15 bp, Homo sapiens
aaagagttagtaaat

SEQ ID NO: 1505501 - DNA, 15 bp, Homo sapiens
aagagttagtaaatc

SEQ ID NO: 1505502 - DNA, 15 bp, Homo sapiens
agagttagtaaatca

SEQ ID NO: 1505503 - DNA, 15 bp, Homo sapiens
gagttagtaaatcag

SEQ ID NO: 1505504 - DNA, 15 bp, Homo sapiens
agttagtaaatcagt

SEQ ID NO: 1505505 - DNA, 15 bp, Homo sapiens
gttagtaaatcagtc

SEQ ID NO: 1505506 - DNA, 15 bp, Homo sapiens
ttagtaaatcagtcc

SEQ ID NO: 1505507 - DNA, 15 bp, Homo sapiens
tagtaaatcagtcct

SEQ ID NO: 1505508 - DNA, 15 bp, Homo sapiens
agtaaatcagtcctg

SEQ ID NO: 1505509 - DNA, 15 bp, Homo sapiens
gtaaatcagtcctgt

SEQ ID NO: 1505510 - DNA, 15 bp, Homo sapiens
taaatcagtcctgtc

SEQ ID NO: 1505511 - DNA, 15 bp, Homo sapiens
aaatcagtcctgtcc

SEQ ID NO: 1505512 - DNA, 15 bp, Homo sapiens
aatcagtcctgtccc

SEQ ID NO: 1505513 - DNA, 15 bp, Homo sapiens
atcagtcctgtcccc

SEQ ID NO: 1505514 - DNA, 15 bp, Homo sapiens
tcagtcctgtcccct

SEQ ID NO: 1505515 - DNA, 15 bp, Homo sapiens
cagtcctgtcccctt

SEQ ID NO: 1505516 - DNA, 15 bp, Homo sapiens
agtcctgtccccttt

SEQ ID NO: 1505517 - DNA, 15 bp, Homo sapiens
gtcctgtcccctttt

SEQ ID NO: 1505518 - DNA, 15 bp, Homo sapiens
tcctgtccccttttt

SEQ ID NO: 1505519 - DNA, 15 bp, Homo sapiens
cctgtcccctttttt

SEQ ID NO: 1505520 - DNA, 15 bp, Homo sapiens
ctgtccccttttttc

SEQ ID NO: 1505521 - DNA, 15 bp, Homo sapiens
tgtccccttttttct

SEQ ID NO: 1505522 - DNA, 15 bp, Homo sapiens
gtccccttttttcta

SEQ ID NO: 1505523 - DNA, 15 bp, Homo sapiens
tccccttttttctag

SEQ ID NO: 1505524 - DNA, 15 bp, Homo sapiens
ccccttttttctagc

SEQ ID NO: 1505525 - DNA, 15 bp, Homo sapiens
cccttttttctagcc

SEQ ID NO: 1505526 - DNA, 15 bp, Homo sapiens
ccttttttctagcca

SEQ ID NO: 1505527 - DNA, 15 bp, Homo sapiens
cttttttctagccat

SEQ ID NO: 1505528 - DNA, 15 bp, Homo sapiens
ttttttctagccatc

SEQ ID NO: 1505529 - DNA, 15 bp, Homo sapiens
tttttctagccatct

SEQ ID NO: 1505530 - DNA, 15 bp, Homo sapiens
ttttctagccatctc

SEQ ID NO: 1505531 - DNA, 15 bp, Homo sapiens
tttctagccatctcc

SEQ ID NO: 1505532 - DNA, 15 bp, Homo sapiens
ttctagccatctcca

SEQ ID NO: 1505533 - DNA, 15 bp, Homo sapiens
tctagccatctccaa

SEQ ID NO: 1505534 - DNA, 15 bp, Homo sapiens
ctagccatctccaag

SEQ ID NO: 1505535 - DNA, 15 bp, Homo sapiens
tagccatctccaagg

SEQ ID NO: 1505536 - DNA, 15 bp, Homo sapiens
agccatctccaagga

SEQ ID NO: 1505537 - DNA, 15 bp, Homo sapiens
gccatctccaaggac

SEQ ID NO: 1505538 - DNA, 15 bp, Homo sapiens
ccatctccaaggaca

SEQ ID NO: 1505539 - DNA, 15 bp, Homo sapiens
catctccaaggacaa

SEQ ID NO: 1505540 - DNA, 15 bp, Homo sapiens
atctccaaggacaaa

SEQ ID NO: 1505541 - DNA, 15 bp, Homo sapiens
tctccaaggacaaag

SEQ ID NO: 1505542 - DNA, 15 bp, Homo sapiens
ctccaaggacaaaga

SEQ ID NO: 1505543 - DNA, 15 bp, Homo sapiens
tccaaggacaaagaa

SEQ ID NO: 1505544 - DNA, 15 bp, Homo sapiens
ccaaggacaaagaaa

SEQ ID NO: 1505545 - DNA, 15 bp, Homo sapiens
caaggacaaagaaaa

SEQ ID NO: 1505546 - DNA, 15 bp, Homo sapiens
aaggacaaagaaaac

SEQ ID NO: 1505547 - DNA, 15 bp, Homo sapiens
aggacaaagaaaaca

SEQ ID NO: 1505548 - DNA, 15 bp, Homo sapiens
ggacaaagaaaacag

SEQ ID NO: 1505549 - DNA, 15 bp, Homo sapiens
gacaaagaaaacagc

SEQ ID NO: 1505550 - DNA, 15 bp, Homo sapiens
acaaagaaaacagca

SEQ ID NO: 1505551 - DNA, 15 bp, Homo sapiens
caaagaaaacagcat

SEQ ID NO: 1505552 - DNA, 15 bp, Homo sapiens
aaagaaaacagcatt

SEQ ID NO: 1505553 - DNA, 15 bp, Homo sapiens
aagaaaacagcatta

SEQ ID NO: 1505554 - DNA, 15 bp, Homo sapiens
agaaaacagcattag

SEQ ID NO: 1505555 - DNA, 15 bp, Homo sapiens
gaaaacagcattagg

SEQ ID NO: 1505556 - DNA, 15 bp, Homo sapiens
aaaacagcattagga

SEQ ID NO: 1505557 - DNA, 15 bp, Homo sapiens
aaacagcattaggat

SEQ ID NO: 1505558 - DNA, 15 bp, Homo sapiens
aacagcattaggata

SEQ ID NO: 1505559 - DNA, 15 bp, Homo sapiens
acagcattaggatac

SEQ ID NO: 1505560 - DNA, 15 bp, Homo sapiens
cagcattaggataca

SEQ ID NO: 1505561 - DNA, 15 bp, Homo sapiens
agcattaggatacac

SEQ ID NO: 1505562 - DNA, 15 bp, Homo sapiens
gcattaggatacaca

SEQ ID NO: 1505563 - DNA, 15 bp, Homo sapiens
cattaggatacacaa

SEQ ID NO: 1505564 - DNA, 15 bp, Homo sapiens
attaggatacacaaa

SEQ ID NO: 1505565 - DNA, 15 bp, Homo sapiens
ttaggatacacaaag

SEQ ID NO: 1505566 - DNA, 15 bp, Homo sapiens
taggatacacaaagt

SEQ ID NO: 1505567 - DNA, 15 bp, Homo sapiens
aggatacacaaagta

SEQ ID NO: 1505568 - DNA, 15 bp, Homo sapiens
ggatacacaaagtaa

SEQ ID NO: 1505569 - DNA, 15 bp, Homo sapiens
gatacacaaagtaat

SEQ ID NO: 1505570 - DNA, 15 bp, Homo sapiens
atacacaaagtaatt

SEQ ID NO: 1505571 - DNA, 15 bp, Homo sapiens
tacacaaagtaattt

SEQ ID NO: 1505572 - DNA, 15 bp, Homo sapiens
acacaaagtaatttt

SEQ ID NO: 1505573 - DNA, 15 bp, Homo sapiens
cacaaagtaattttt

SEQ ID NO: 1505574 - DNA, 15 bp, Homo sapiens
acaaagtaatttttc

SEQ ID NO: 1505575 - DNA, 15 bp, Homo sapiens
caaagtaatttttct

SEQ ID NO: 1505576 - DNA, 15 bp, Homo sapiens
aaagtaatttttcta

SEQ ID NO: 1505577 - DNA, 15 bp, Homo sapiens
aagtaatttttctaa

SEQ ID NO: 1505578 - DNA, 15 bp, Homo sapiens
agtaatttttctaac

SEQ ID NO: 1505579 - DNA, 15 bp, Homo sapiens
gtaatttttctaaca

SEQ ID NO: 1505580 - DNA, 15 bp, Homo sapiens
taatttttctaacag

SEQ ID NO: 1505581 - DNA, 15 bp, Homo sapiens
aatttttctaacagc

SEQ ID NO: 1505582 - DNA, 15 bp, Homo sapiens
atttttctaacagca

SEQ ID NO: 1505583 - DNA, 15 bp, Homo sapiens
tttttctaacagcat

SEQ ID NO: 1505584 - DNA, 15 bp, Homo sapiens
ttttctaacagcatg

SEQ ID NO: 1505585 - DNA, 15 bp, Homo sapiens
tttctaacagcatgg

SEQ ID NO: 1505586 - DNA, 15 bp, Homo sapiens
ttctaacagcatgga

SEQ ID NO: 1505587 - DNA, 15 bp, Homo sapiens
tctaacagcatggag

SEQ ID NO: 1505588 - DNA, 15 bp, Homo sapiens
ctaacagcatggagg

SEQ ID NO: 1505589 - DNA, 15 bp, Homo sapiens
taacagcatggaggc

SEQ ID NO: 1505590 - DNA, 15 bp, Homo sapiens
aacagcatggaggcc

SEQ ID NO: 1505591 - DNA, 15 bp, Homo sapiens
acagcatggaggccc

SEQ ID NO: 1505592 - DNA, 15 bp, Homo sapiens
cagcatggaggccct

SEQ ID NO: 1505593 - DNA, 15 bp, Homo sapiens
agcatggaggccctt

SEQ ID NO: 1505594 - DNA, 15 bp, Homo sapiens
gcatggaggccctta

SEQ ID NO: 1505595 - DNA, 15 bp, Homo sapiens
catggaggcccttac

SEQ ID NO: 1505596 - DNA, 15 bp, Homo sapiens
atggaggcccttact

SEQ ID NO: 1505597 - DNA, 15 bp, Homo sapiens
tggaggcccttactg

SEQ ID NO: 1505598 - DNA, 15 bp, Homo sapiens
ggaggcccttactgt

SEQ ID NO: 1505599 - DNA, 15 bp, Homo sapiens
gaggcccttactgtt

SEQ ID NO: 1505600 - DNA, 15 bp, Homo sapiens
aggcccttactgtta

SEQ ID NO: 1505601 - DNA, 15 bp, Homo sapiens
ggcccttactgttaa

SEQ ID NO: 1505602 - DNA, 15 bp, Homo sapiens
gcccttactgttaat

SEQ ID NO: 1505603 - DNA, 15 bp, Homo sapiens
cccttactgttaatg

SEQ ID NO: 1505604 - DNA, 15 bp, Homo sapiens
ccttactgttaatga

SEQ ID NO: 1505605 - DNA, 15 bp, Homo sapiens
cttactgttaatgaa

SEQ ID NO: 1505606 - DNA, 15 bp, Homo sapiens
ttactgttaatgaag

SEQ ID NO: 1505607 - DNA, 15 bp, Homo sapiens
tactgttaatgaagg

SEQ ID NO: 1505608 - DNA, 15 bp, Homo sapiens
actgttaatgaaggg

SEQ ID NO: 1505609 - DNA, 15 bp, Homo sapiens
ctgttaatgaaggga

SEQ ID NO: 1505610 - DNA, 15 bp, Homo sapiens
tgttaatgaagggaa

SEQ ID NO: 1505611 - DNA, 15 bp, Homo sapiens
gttaatgaagggaaa

SEQ ID NO: 1505612 - DNA, 15 bp, Homo sapiens
ttaatgaagggaaac

SEQ ID NO: 1505613 - DNA, 15 bp, Homo sapiens
taatgaagggaaact

SEQ ID NO: 1505614 - DNA, 15 bp, Homo sapiens
aatgaagggaaactt

SEQ ID NO: 1505615 - DNA, 15 bp, Homo sapiens
atgaagggaaacttt

SEQ ID NO: 1505616 - DNA, 15 bp, Homo sapiens
tgaagggaaactttt

SEQ ID NO: 1505617 - DNA, 15 bp, Homo sapiens
gaagggaaacttttg

SEQ ID NO: 1505618 - DNA, 15 bp, Homo sapiens
aagggaaacttttga

SEQ ID NO: 1505619 - DNA, 15 bp, Homo sapiens
agggaaacttttgaa

SEQ ID NO: 1505620 - DNA, 15 bp, Homo sapiens
gggaaacttttgaaa

SEQ ID NO: 1505621 - DNA, 15 bp, Homo sapiens
ggaaacttttgaaac

SEQ ID NO: 1505622 - DNA, 15 bp, Homo sapiens
gaaacttttgaaaca

SEQ ID NO: 1505623 - DNA, 15 bp, Homo sapiens
aaacttttgaaacag

SEQ ID NO: 1505624 - DNA, 15 bp, Homo sapiens
aacttttgaaacagt

SEQ ID NO: 1505625 - DNA, 15 bp, Homo sapiens
acttttgaaacagtt

SEQ ID NO: 1505626 - DNA, 15 bp, Homo sapiens
cttttgaaacagttt

SEQ ID NO: 1505627 - DNA, 15 bp, Homo sapiens
ttttgaaacagtttt

SEQ ID NO: 1505628 - DNA, 15 bp, Homo sapiens
tttgaaacagtttta

SEQ ID NO: 1505629 - DNA, 15 bp, Homo sapiens
ttgaaacagttttat

SEQ ID NO: 1505630 - DNA, 15 bp, Homo sapiens
tgaaacagttttatc

SEQ ID NO: 1505631 - DNA, 15 bp, Homo sapiens
gaaacagttttatct

SEQ ID NO: 1505632 - DNA, 15 bp, Homo sapiens
aaacagttttatctg

SEQ ID NO: 1505633 - DNA, 15 bp, Homo sapiens
aacagttttatctgc

SEQ ID NO: 1505634 - DNA, 15 bp, Homo sapiens
acagttttatctgct

SEQ ID NO: 1505635 - DNA, 15 bp, Homo sapiens
cagttttatctgctg

SEQ ID NO: 1505636 - DNA, 15 bp, Homo sapiens
agttttatctgctga

SEQ ID NO: 1505637 - DNA, 15 bp, Homo sapiens
gttttatctgctgag

SEQ ID NO: 1505638 - DNA, 15 bp, Homo sapiens
ttttatctgctgagg

SEQ ID NO: 1505639 - DNA, 15 bp, Homo sapiens
tttatctgctgaggt

SEQ ID NO: 1505640 - DNA, 15 bp, Homo sapiens
ttatctgctgaggtt

SEQ ID NO: 1505641 - DNA, 15 bp, Homo sapiens
tatctgctgaggttt

SEQ ID NO: 1505642 - DNA, 15 bp, Homo sapiens
atctgctgaggtttt

SEQ ID NO: 1505643 - DNA, 15 bp, Homo sapiens
tctgctgaggtttta

SEQ ID NO: 1505644 - DNA, 15 bp, Homo sapiens
ctgctgaggttttaa

SEQ ID NO: 1505645 - DNA, 15 bp, Homo sapiens
gctgaggttttaatc

SEQ ID NO: 1505646 - DNA, 15 bp, Homo sapiens
ctgaggttttaatca

SEQ ID NO: 1505647 - DNA, 15 bp, Homo sapiens
tgaggttttaatcac

SEQ ID NO: 1505648 - DNA, 15 bp, Homo sapiens
gaggttttaatcacc

SEQ ID NO: 1505649 - DNA, 15 bp, Homo sapiens
aggttttaatcacca

SEQ ID NO: 1505650 - DNA, 15 bp, Homo sapiens
ggttttaatcaccat

SEQ ID NO: 1505651 - DNA, 15 bp, Homo sapiens
gttttaatcaccata

SEQ ID NO: 1505652 - DNA, 15 bp, Homo sapiens
ttttaatcaccataa

SEQ ID NO: 1505653 - DNA, 15 bp, Homo sapiens
tttaatcaccataat

SEQ ID NO: 1505654 - DNA, 15 bp, Homo sapiens
ttaatcaccataatg

SEQ ID NO: 1505655 - DNA, 15 bp, Homo sapiens
taatcaccataatgc

SEQ ID NO: 1505656 - DNA, 15 bp, Homo sapiens
aatcaccataatgca

SEQ ID NO: 1505657 - DNA, 15 bp, Homo sapiens
atcaccataatgcat

SEQ ID NO: 1505658 - DNA, 15 bp, Homo sapiens
tcaccataatgcata

SEQ ID NO: 1505659 - DNA, 15 bp, Homo sapiens
caccataatgcatac

SEQ ID NO: 1505660 - DNA, 15 bp, Homo sapiens
accataatgcatacc

SEQ ID NO: 1505661 - DNA, 15 bp, Homo sapiens
ccataatgcatacca

SEQ ID NO: 1505662 - DNA, 15 bp, Homo sapiens
cataatgcataccac

SEQ ID NO: 1505663 - DNA, 15 bp, Homo sapiens
ataatgcataccaca

SEQ ID NO: 1505664 - DNA, 15 bp, Homo sapiens
taatgcataccacat

SEQ ID NO: 1505665 - DNA, 15 bp, Homo sapiens
aatgcataccacata

SEQ ID NO: 1505666 - DNA, 15 bp, Homo sapiens
atgcataccacatac

SEQ ID NO: 1505667 - DNA, 15 bp, Homo sapiens
tgcataccacatacc

SEQ ID NO: 1505668 - DNA, 15 bp, Homo sapiens
gcataccacatacct

SEQ ID NO: 1505669 - DNA, 15 bp, Homo sapiens
cataccacataccta

SEQ ID NO: 1505670 - DNA, 15 bp, Homo sapiens
ataccacatacctat

SEQ ID NO: 1505671 - DNA, 15 bp, Homo sapiens
taccacatacctatc

SEQ ID NO: 1505672 - DNA, 15 bp, Homo sapiens
accacatacctatca

SEQ ID NO: 1505673 - DNA, 15 bp, Homo sapiens
ccacatacctatcat

SEQ ID NO: 1505674 - DNA, 15 bp, Homo sapiens
cacatacctatcatt

SEQ ID NO: 1505675 - DNA, 15 bp, Homo sapiens
acatacctatcattg

SEQ ID NO: 1505676 - DNA, 15 bp, Homo sapiens
catacctatcattgg

SEQ ID NO: 1505677 - DNA, 15 bp, Homo sapiens
atacctatcattggt

SEQ ID NO: 1505678 - DNA, 15 bp, Homo sapiens
tacctatcattggtc

SEQ ID NO: 1505679 - DNA, 15 bp, Homo sapiens
acctatcattggtct

SEQ ID NO: 1505680 - DNA, 15 bp, Homo sapiens
cctatcattggtctc

SEQ ID NO: 1505681 - DNA, 15 bp, Homo sapiens
ctatcattggtctcc

SEQ ID NO: 1505682 - DNA, 15 bp, Homo sapiens
tatcattggtctccc

SEQ ID NO: 1505683 - DNA, 15 bp, Homo sapiens
atcattggtctcccc

SEQ ID NO: 1505684 - DNA, 15 bp, Homo sapiens
tcattggtctccccg

SEQ ID NO: 1505685 - DNA, 15 bp, Homo sapiens
cattggtctccccgc

SEQ ID NO: 1505686 - DNA, 15 bp, Homo sapiens
attggtctccccgct

SEQ ID NO: 1505687 - DNA, 15 bp, Homo sapiens
ttggtctccccgctc

SEQ ID NO: 1505688 - DNA, 15 bp, Homo sapiens
tggtctccccgctct

SEQ ID NO: 1505689 - DNA, 15 bp, Homo sapiens
ggtctccccgctctc

SEQ ID NO: 1505690 - DNA, 15 bp, Homo sapiens
gtctccccgctctca

SEQ ID NO: 1505691 - DNA, 15 bp, Homo sapiens
tctccccgctctcaa

SEQ ID NO: 1505692 - DNA, 15 bp, Homo sapiens
ctccccgctctcaac

SEQ ID NO: 1505693 - DNA, 15 bp, Homo sapiens
tccccgctctcaacc

SEQ ID NO: 1505694 - DNA, 15 bp, Homo sapiens
ccccgctctcaacct

SEQ ID NO: 1505695 - DNA, 15 bp, Homo sapiens
cccgctctcaacctg

SEQ ID NO: 1505696 - DNA, 15 bp, Homo sapiens
ccgctctcaacctgg

SEQ ID NO: 1505697 - DNA, 15 bp, Homo sapiens
cgctctcaacctggc

SEQ ID NO: 1505698 - DNA, 15 bp, Homo sapiens
gctctcaacctggcc

SEQ ID NO: 1505699 - DNA, 15 bp, Homo sapiens
ctctcaacctggcca

SEQ ID NO: 1505700 - DNA, 15 bp, Homo sapiens
tctcaacctggccac

SEQ ID NO: 1505701 - DNA, 15 bp, Homo sapiens
ctcaacctggccaca

SEQ ID NO: 1505702 - DNA, 15 bp, Homo sapiens
tcaacctggccacat

SEQ ID NO: 1505703 - DNA, 15 bp, Homo sapiens
caacctggccacata

SEQ ID NO: 1505704 - DNA, 15 bp, Homo sapiens
aacctggccacatat

SEQ ID NO: 1505705 - DNA, 15 bp, Homo sapiens
acctggccacatatg

SEQ ID NO: 1505706 - DNA, 15 bp, Homo sapiens
cctggccacatatgg

SEQ ID NO: 1505707 - DNA, 15 bp, Homo sapiens
ctggccacatatggt

SEQ ID NO: 1505708 - DNA, 15 bp, Homo sapiens
tggccacatatggtc

SEQ ID NO: 1505709 - DNA, 15 bp, Homo sapiens
ggccacatatggtca

SEQ ID NO: 1505710 - DNA, 15 bp, Homo sapiens
gccacatatggtcag

SEQ ID NO: 1505711 - DNA, 15 bp, Homo sapiens
ccacatatggtcaga

SEQ ID NO: 1505712 - DNA, 15 bp, Homo sapiens
cacatatggtcagag

SEQ ID NO: 1505713 - DNA, 15 bp, Homo sapiens
acatatggtcagaga

SEQ ID NO: 1505714 - DNA, 15 bp, Homo sapiens
catatggtcagagaa

SEQ ID NO: 1505715 - DNA, 15 bp, Homo sapiens
atatggtcagagaac

SEQ ID NO: 1505716 - DNA, 15 bp, Homo sapiens
tatggtcagagaaca

SEQ ID NO: 1505717 - DNA, 15 bp, Homo sapiens
atggtcagagaacat

SEQ ID NO: 1505718 - DNA, 15 bp, Homo sapiens
tggtcagagaacatc

SEQ ID NO: 1505719 - DNA, 15 bp, Homo sapiens
ggtcagagaacatcc

SEQ ID NO: 1505720 - DNA, 15 bp, Homo sapiens
gtcagagaacatccc

SEQ ID NO: 1505721 - DNA, 15 bp, Homo sapiens
tcagagaacatccct

SEQ ID NO: 1505722 - DNA, 15 bp, Homo sapiens
cagagaacatccctt

SEQ ID NO: 1505723 - DNA, 15 bp, Homo sapiens
agagaacatcccttc

SEQ ID NO: 1505724 - DNA, 15 bp, Homo sapiens
gagaacatcccttca

SEQ ID NO: 1505725 - DNA, 15 bp, Homo sapiens
agaacatcccttcat

SEQ ID NO: 1505726 - DNA, 15 bp, Homo sapiens
gaacatcccttcatt

SEQ ID NO: 1505727 - DNA, 15 bp, Homo sapiens
aacatcccttcatta

SEQ ID NO: 1505728 - DNA, 15 bp, Homo sapiens
acatcccttcattat

SEQ ID NO: 1505729 - DNA, 15 bp, Homo sapiens
catcccttcattatt

SEQ ID NO: 1505730 - DNA, 15 bp, Homo sapiens
atcccttcattattt

SEQ ID NO: 1505731 - DNA, 15 bp, Homo sapiens
tcccttcattattta

SEQ ID NO: 1505732 - DNA, 15 bp, Homo sapiens
cccttcattatttag

SEQ ID NO: 1505733 - DNA, 15 bp, Homo sapiens
ccttcattatttaga

SEQ ID NO: 1505734 - DNA, 15 bp, Homo sapiens
cttcattatttagag

SEQ ID NO: 1505735 - DNA, 15 bp, Homo sapiens
ttcattatttagagt

SEQ ID NO: 1505736 - DNA, 15 bp, Homo sapiens
tcattatttagagtg

SEQ ID NO: 1505737 - DNA, 15 bp, Homo sapiens
cattatttagagtgg

SEQ ID NO: 1505738 - DNA, 15 bp, Homo sapiens
attatttagagtggc

SEQ ID NO: 1505739 - DNA, 15 bp, Homo sapiens
ttatttagagtggct

SEQ ID NO: 1505740 - DNA, 15 bp, Homo sapiens
tatttagagtggctt

SEQ ID NO: 1505741 - DNA, 15 bp, Homo sapiens
atttagagtggcttc

SEQ ID NO: 1505742 - DNA, 15 bp, Homo sapiens
tttagagtggcttca

SEQ ID NO: 1505743 - DNA, 15 bp, Homo sapiens
ttagagtggcttcat

SEQ ID NO: 1505744 - DNA, 15 bp, Homo sapiens
tagagtggcttcata

SEQ ID NO: 1505745 - DNA, 15 bp, Homo sapiens
agagtggcttcatag

SEQ ID NO: 1505746 - DNA, 15 bp, Homo sapiens
gagtggcttcataga

SEQ ID NO: 1505747 - DNA, 15 bp, Homo sapiens
agtggcttcatagaa

SEQ ID NO: 1505748 - DNA, 15 bp, Homo sapiens
gtggcttcatagaag

SEQ ID NO: 1505749 - DNA, 15 bp, Homo sapiens
tggcttcatagaaga

SEQ ID NO: 1505750 - DNA, 15 bp, Homo sapiens
ggcttcatagaagat

SEQ ID NO: 1505751 - DNA, 15 bp, Homo sapiens
gcttcatagaagatg

SEQ ID NO: 1505752 - DNA, 15 bp, Homo sapiens
cttcatagaagatgg

SEQ ID NO: 1505753 - DNA, 15 bp, Homo sapiens
ttcatagaagatggc

SEQ ID NO: 1505754 - DNA, 15 bp, Homo sapiens
tcatagaagatggct

SEQ ID NO: 1505755 - DNA, 15 bp, Homo sapiens
catagaagatggctc

SEQ ID NO: 1505756 - DNA, 15 bp, Homo sapiens
atagaagatggctcc

SEQ ID NO: 1505757 - DNA, 15 bp, Homo sapiens
tagaagatggctcct

SEQ ID NO: 1505758 - DNA, 15 bp, Homo sapiens
agaagatggctcctt

SEQ ID NO: 1505759 - DNA, 15 bp, Homo sapiens
gaagatggctccttt

SEQ ID NO: 1505760 - DNA, 15 bp, Homo sapiens
aagatggctcctttg

SEQ ID NO: 1505761 - DNA, 15 bp, Homo sapiens
agatggctcctttga

SEQ ID NO: 1505762 - DNA, 15 bp, Homo sapiens
gatggctcctttgag

SEQ ID NO: 1505763 - DNA, 15 bp, Homo sapiens
atggctcctttgagt

SEQ ID NO: 1505764 - DNA, 15 bp, Homo sapiens
tggctcctttgagtt

SEQ ID NO: 1505765 - DNA, 15 bp, Homo sapiens
ggctcctttgagttg

SEQ ID NO: 1505766 - DNA, 15 bp, Homo sapiens
gctcctttgagttga

SEQ ID NO: 1505767 - DNA, 15 bp, Homo sapiens
ctcctttgagttgat

SEQ ID NO: 1505768 - DNA, 15 bp, Homo sapiens
tcctttgagttgata

SEQ ID NO: 1505769 - DNA, 15 bp, Homo sapiens
cctttgagttgatag

SEQ ID NO: 1505770 - DNA, 15 bp, Homo sapiens
ctttgagttgatagg

SEQ ID NO: 1505771 - DNA, 15 bp, Homo sapiens
tttgagttgataggc

SEQ ID NO: 1505772 - DNA, 15 bp, Homo sapiens
ttgagttgataggca

SEQ ID NO: 1505773 - DNA, 15 bp, Homo sapiens
tgagttgataggcat

SEQ ID NO: 1505774 - DNA, 15 bp, Homo sapiens
gagttgataggcatt

SEQ ID NO: 1505775 - DNA, 15 bp, Homo sapiens
agttgataggcattc

SEQ ID NO: 1505776 - DNA, 15 bp, Homo sapiens
gttgataggcattca

SEQ ID NO: 1505777 - DNA, 15 bp, Homo sapiens
ttgataggcattcat

SEQ ID NO: 1505778 - DNA, 15 bp, Homo sapiens
tgataggcattcatg

SEQ ID NO: 1505779 - DNA, 15 bp, Homo sapiens
gataggcattcatgc

SEQ ID NO: 1505780 - DNA, 15 bp, Homo sapiens
ataggcattcatgca

SEQ ID NO: 1505781 - DNA, 15 bp, Homo sapiens
taggcattcatgcag

SEQ ID NO: 1505782 - DNA, 15 bp, Homo sapiens
aggcattcatgcagg

SEQ ID NO: 1505783 - DNA, 15 bp, Homo sapiens
ggcattcatgcaggc

SEQ ID NO: 1505784 - DNA, 15 bp, Homo sapiens
gcattcatgcaggct

SEQ ID NO: 1505785 - DNA, 15 bp, Homo sapiens
cattcatgcaggctt

SEQ ID NO: 1505786 - DNA, 15 bp, Homo sapiens
attcatgcaggcttc

SEQ ID NO: 1505787 - DNA, 15 bp, Homo sapiens
ttcatgcaggcttcc

SEQ ID NO: 1505788 - DNA, 15 bp, Homo sapiens
tcatgcaggcttcct

SEQ ID NO: 1505789 - DNA, 15 bp, Homo sapiens
catgcaggcttcctg

SEQ ID NO: 1505790 - DNA, 15 bp, Homo sapiens
atgcaggcttcctgg

SEQ ID NO: 1505791 - DNA, 15 bp, Homo sapiens
tgcaggcttcctgga

SEQ ID NO: 1505792 - DNA, 15 bp, Homo sapiens
gcaggcttcctggaa

SEQ ID NO: 1505793 - DNA, 15 bp, Homo sapiens
caggcttcctggaat

SEQ ID NO: 1505794 - DNA, 15 bp, Homo sapiens
aggcttcctggaata

SEQ ID NO: 1505795 - DNA, 15 bp, Homo sapiens
ggcttcctggaatac

SEQ ID NO: 1505796 - DNA, 15 bp, Homo sapiens
gcttcctggaatact

SEQ ID NO: 1505797 - DNA, 15 bp, Homo sapiens
cttcctggaatactg

SEQ ID NO: 1505798 - DNA, 15 bp, Homo sapiens
ttcctggaatactgg

SEQ ID NO: 1505799 - DNA, 15 bp, Homo sapiens
tcctggaatactggg

SEQ ID NO: 1505800 - DNA, 15 bp, Homo sapiens
cctggaatactggga

SEQ ID NO: 1505801 - DNA, 15 bp, Homo sapiens
ctggaatactgggaa

SEQ ID NO: 1505802 - DNA, 15 bp, Homo sapiens
tggaatactgggaat

SEQ ID NO: 1505803 - DNA, 15 bp, Homo sapiens
ggaatactgggaatt

SEQ ID NO: 1505804 - DNA, 15 bp, Homo sapiens
gaatactgggaattt

SEQ ID NO: 1505805 - DNA, 15 bp, Homo sapiens
aatactgggaattta

SEQ ID NO: 1505806 - DNA, 15 bp, Homo sapiens
atactgggaatttac

SEQ ID NO: 1505807 - DNA, 15 bp, Homo sapiens
tactgggaatttact

SEQ ID NO: 1505808 - DNA, 15 bp, Homo sapiens
actgggaatttactg

SEQ ID NO: 1505809 - DNA, 15 bp, Homo sapiens
ctgggaatttactgt

SEQ ID NO: 1505810 - DNA, 15 bp, Homo sapiens
tgggaatttactgtc

SEQ ID NO: 1505811 - DNA, 15 bp, Homo sapiens
gggaatttactgtca

SEQ ID NO: 1505812 - DNA, 15 bp, Homo sapiens
ggaatttactgtcaa

SEQ ID NO: 1505813 - DNA, 15 bp, Homo sapiens
gaatttactgtcaaa

SEQ ID NO: 1505814 - DNA, 15 bp, Homo sapiens
aatttactgtcaaac

SEQ ID NO: 1505815 - DNA, 15 bp, Homo sapiens
atttactgtcaaaca

SEQ ID NO: 1505816 - DNA, 15 bp, Homo sapiens
tttactgtcaaacag

SEQ ID NO: 1505817 - DNA, 15 bp, Homo sapiens
ttactgtcaaacagc

SEQ ID NO: 1505818 - DNA, 15 bp, Homo sapiens
tactgtcaaacagcc

SEQ ID NO: 1505819 - DNA, 15 bp, Homo sapiens
actgtcaaacagcca

SEQ ID NO: 1505820 - DNA, 15 bp, Homo sapiens
ctgtcaaacagccat

SEQ ID NO: 1505821 - DNA, 15 bp, Homo sapiens
tgtcaaacagccatg

SEQ ID NO: 1505822 - DNA, 15 bp, Homo sapiens
gtcaaacagccatgg

SEQ ID NO: 1505823 - DNA, 15 bp, Homo sapiens
tcaaacagccatggc

SEQ ID NO: 1505824 - DNA, 15 bp, Homo sapiens
caaacagccatggca

SEQ ID NO: 1505825 - DNA, 15 bp, Homo sapiens
aaacagccatggcaa

SEQ ID NO: 1505826 - DNA, 15 bp, Homo sapiens
aacagccatggcaat

SEQ ID NO: 1505827 - DNA, 15 bp, Homo sapiens
acagccatggcaatg

SEQ ID NO: 1505828 - DNA, 15 bp, Homo sapiens
cagccatggcaatga

SEQ ID NO: 1505829 - DNA, 15 bp, Homo sapiens
agccatggcaatgag

SEQ ID NO: 1505830 - DNA, 15 bp, Homo sapiens
gccatggcaatgagg

SEQ ID NO: 1505831 - DNA, 15 bp, Homo sapiens
ccatggcaatgaggg

SEQ ID NO: 1505832 - DNA, 15 bp, Homo sapiens
catggcaatgaggga

SEQ ID NO: 1505833 - DNA, 15 bp, Homo sapiens
atggcaatgagggag

SEQ ID NO: 1505834 - DNA, 15 bp, Homo sapiens
tggcaatgagggaga

SEQ ID NO: 1505835 - DNA, 15 bp, Homo sapiens
ggcaatgagggagac

SEQ ID NO: 1505836 - DNA, 15 bp, Homo sapiens
gcaatgagggagaca

SEQ ID NO: 1505837 - DNA, 15 bp, Homo sapiens
caatgagggagacag

SEQ ID NO: 1505838 - DNA, 15 bp, Homo sapiens
aatgagggagacagg

SEQ ID NO: 1505839 - DNA, 15 bp, Homo sapiens
atgagggagacagga

SEQ ID NO: 1505840 - DNA, 15 bp, Homo sapiens
tgagggagacaggaa

SEQ ID NO: 1505841 - DNA, 15 bp, Homo sapiens
gagggagacaggaac

SEQ ID NO: 1505842 - DNA, 15 bp, Homo sapiens
agggagacaggaacc

SEQ ID NO: 1505843 - DNA, 15 bp, Homo sapiens
gggagacaggaacct

SEQ ID NO: 1505844 - DNA, 15 bp, Homo sapiens
ggagacaggaacctc

SEQ ID NO: 1505845 - DNA, 15 bp, Homo sapiens
gagacaggaacctca

SEQ ID NO: 1505846 - DNA, 15 bp, Homo sapiens
agacaggaacctcag

SEQ ID NO: 1505847 - DNA, 15 bp, Homo sapiens
gacaggaacctcagg

SEQ ID NO: 1505848 - DNA, 15 bp, Homo sapiens
acaggaacctcagga

SEQ ID NO: 1505849 - DNA, 15 bp, Homo sapiens
caggaacctcaggag

SEQ ID NO: 1505850 - DNA, 15 bp, Homo sapiens
aggaacctcaggaga

SEQ ID NO: 1505851 - DNA, 15 bp, Homo sapiens
ggaacctcaggagaa

SEQ ID NO: 1505852 - DNA, 15 bp, Homo sapiens
gaacctcaggagaac

SEQ ID NO: 1505853 - DNA, 15 bp, Homo sapiens
aacctcaggagaaca

SEQ ID NO: 1505854 - DNA, 15 bp, Homo sapiens
acctcaggagaacag

SEQ ID NO: 1505855 - DNA, 15 bp, Homo sapiens
cctcaggagaacagg

SEQ ID NO: 1505856 - DNA, 15 bp, Homo sapiens
ctcaggagaacagga

SEQ ID NO: 1505857 - DNA, 15 bp, Homo sapiens
tcaggagaacaggaa

SEQ ID NO: 1505858 - DNA, 15 bp, Homo sapiens
caggagaacaggaac

SEQ ID NO: 1505859 - DNA, 15 bp, Homo sapiens
aggagaacaggaact

SEQ ID NO: 1505860 - DNA, 15 bp, Homo sapiens
ggagaacaggaactc

SEQ ID NO: 1505861 - DNA, 15 bp, Homo sapiens
gagaacaggaactct

SEQ ID NO: 1505862 - DNA, 15 bp, Homo sapiens
agaacaggaactctt

SEQ ID NO: 1505863 - DNA, 15 bp, Homo sapiens
gaacaggaactcttg

SEQ ID NO: 1505864 - DNA, 15 bp, Homo sapiens
aacaggaactcttgg

SEQ ID NO: 1505865 - DNA, 15 bp, Homo sapiens
acaggaactcttgga

SEQ ID NO: 1505866 - DNA, 15 bp, Homo sapiens
caggaactcttggag

SEQ ID NO: 1505867 - DNA, 15 bp, Homo sapiens
aggaactcttggagg

SEQ ID NO: 1505868 - DNA, 15 bp, Homo sapiens
ggaactcttggaggg

SEQ ID NO: 1505869 - DNA, 15 bp, Homo sapiens
gaactcttggaggga

SEQ ID NO: 1505870 - DNA, 15 bp, Homo sapiens
aactcttggagggac

SEQ ID NO: 1505871 - DNA, 15 bp, Homo sapiens
actcttggagggaca

SEQ ID NO: 1505872 - DNA, 15 bp, Homo sapiens
ctcttggagggacag

SEQ ID NO: 1505873 - DNA, 15 bp, Homo sapiens
tcttggagggacagc

SEQ ID NO: 1505874 - DNA, 15 bp, Homo sapiens
cttggagggacagcc

SEQ ID NO: 1505875 - DNA, 15 bp, Homo sapiens
ttggagggacagcct

SEQ ID NO: 1505876 - DNA, 15 bp, Homo sapiens
tggagggacagcctc

SEQ ID NO: 1505877 - DNA, 15 bp, Homo sapiens
ggagggacagcctcc

SEQ ID NO: 1505878 - DNA, 15 bp, Homo sapiens
gagggacagcctcct

SEQ ID NO: 1505879 - DNA, 15 bp, Homo sapiens
agggacagcctcctg

SEQ ID NO: 1505880 - DNA, 15 bp, Homo sapiens
gggacagcctcctgg

SEQ ID NO: 1505881 - DNA, 15 bp, Homo sapiens
ggacagcctcctggc

SEQ ID NO: 1505882 - DNA, 15 bp, Homo sapiens
gacagcctcctggcg

SEQ ID NO: 1505883 - DNA, 15 bp, Homo sapiens
acagcctcctggcgc

SEQ ID NO: 1505884 - DNA, 15 bp, Homo sapiens
cagcctcctggcgct

SEQ ID NO: 1505885 - DNA, 15 bp, Homo sapiens
agcctcctggcgctg

SEQ ID NO: 1505886 - DNA, 15 bp, Homo sapiens
gcctcctggcgctgg

SEQ ID NO: 1505887 - DNA, 15 bp, Homo sapiens
cctcctggcgctgga

SEQ ID NO: 1505888 - DNA, 15 bp, Homo sapiens
ctcctggcgctggaa

SEQ ID NO: 1505889 - DNA, 15 bp, Homo sapiens
tcctggcgctggaac

SEQ ID NO: 1505890 - DNA, 15 bp, Homo sapiens
cctggcgctggaaca

SEQ ID NO: 1505891 - DNA, 15 bp, Homo sapiens
ctggcgctggaacaa

SEQ ID NO: 1505892 - DNA, 15 bp, Homo sapiens
tggcgctggaacaaa

SEQ ID NO: 1505893 - DNA, 15 bp, Homo sapiens
ggcgctggaacaaaa

SEQ ID NO: 1505894 - DNA, 15 bp, Homo sapiens
gcgctggaacaaaaa

SEQ ID NO: 1505895 - DNA, 15 bp, Homo sapiens
cgctggaacaaaaaa

SEQ ID NO: 1505896 - DNA, 15 bp, Homo sapiens
gctggaacaaaaaag

SEQ ID NO: 1505897 - DNA, 15 bp, Homo sapiens
ctggaacaaaaaagt

SEQ ID NO: 1505898 - DNA, 15 bp, Homo sapiens
tggaacaaaaaagtt

SEQ ID NO: 1505899 - DNA, 15 bp, Homo sapiens
ggaacaaaaaagtta

SEQ ID NO: 1505900 - DNA, 15 bp, Homo sapiens
gaacaaaaaagttac

SEQ ID NO: 1505901 - DNA, 15 bp, Homo sapiens
aacaaaaaagttacc

SEQ ID NO: 1505902 - DNA, 15 bp, Homo sapiens
acaaaaaagttacca

SEQ ID NO: 1505903 - DNA, 15 bp, Homo sapiens
caaaaaagttaccag

SEQ ID NO: 1505904 - DNA, 15 bp, Homo sapiens
aaaaaagttaccagt

SEQ ID NO: 1505905 - DNA, 15 bp, Homo sapiens
aaaaagttaccagtg

SEQ ID NO: 1505906 - DNA, 15 bp, Homo sapiens
aaaagttaccagtgt

SEQ ID NO: 1505907 - DNA, 15 bp, Homo sapiens
aaagttaccagtgtc

SEQ ID NO: 1505908 - DNA, 15 bp, Homo sapiens
aagttaccagtgtcc

SEQ ID NO: 1505909 - DNA, 15 bp, Homo sapiens
agttaccagtgtcca

SEQ ID NO: 1505910 - DNA, 15 bp, Homo sapiens
gttaccagtgtccaa

SEQ ID NO: 1505911 - DNA, 15 bp, Homo sapiens
ttaccagtgtccaaa

SEQ ID NO: 1505912 - DNA, 15 bp, Homo sapiens
taccagtgtccaaag

SEQ ID NO: 1505913 - DNA, 15 bp, Homo sapiens
accagtgtccaaagt

SEQ ID NO: 1505914 - DNA, 15 bp, Homo sapiens
ccagtgtccaaagtg

SEQ ID NO: 1505915 - DNA, 15 bp, Homo sapiens
cagtgtccaaagtgg

SEQ ID NO: 1505916 - DNA, 15 bp, Homo sapiens
agtgtccaaagtggc

SEQ ID NO: 1505917 - DNA, 15 bp, Homo sapiens
gtgtccaaagtggca

SEQ ID NO: 1505918 - DNA, 15 bp, Homo sapiens
tgtccaaagtggcag

SEQ ID NO: 1505919 - DNA, 15 bp, Homo sapiens
gtccaaagtggcagg

SEQ ID NO: 1505920 - DNA, 15 bp, Homo sapiens
tccaaagtggcaggt

SEQ ID NO: 1505921 - DNA, 15 bp, Homo sapiens
ccaaagtggcaggtg

SEQ ID NO: 1505922 - DNA, 15 bp, Homo sapiens
caaagtggcaggtgt

SEQ ID NO: 1505923 - DNA, 15 bp, Homo sapiens
aaagtggcaggtgtt

SEQ ID NO: 1505924 - DNA, 15 bp, Homo sapiens
aagtggcaggtgttc

SEQ ID NO: 1505925 - DNA, 15 bp, Homo sapiens
agtggcaggtgttcc

SEQ ID NO: 1505926 - DNA, 15 bp, Homo sapiens
gtggcaggtgttcct

SEQ ID NO: 1505927 - DNA, 15 bp, Homo sapiens
tggcaggtgttcctg

SEQ ID NO: 1505928 - DNA, 15 bp, Homo sapiens
ggcaggtgttcctgg

SEQ ID NO: 1505929 - DNA, 15 bp, Homo sapiens
gcaggtgttcctggg

SEQ ID NO: 1505930 - DNA, 15 bp, Homo sapiens
caggtgttcctgggt

SEQ ID NO: 1505931 - DNA, 15 bp, Homo sapiens
aggtgttcctgggtt

SEQ ID NO: 1505932 - DNA, 15 bp, Homo sapiens
ggtgttcctgggttc

SEQ ID NO: 1505933 - DNA, 15 bp, Homo sapiens
gtgttcctgggttcc

SEQ ID NO: 1505934 - DNA, 15 bp, Homo sapiens
tgttcctgggttccc

SEQ ID NO: 1505935 - DNA, 15 bp, Homo sapiens
gttcctgggttccca

SEQ ID NO: 1505936 - DNA, 15 bp, Homo sapiens
ttcctgggttcccat

SEQ ID NO: 1505937 - DNA, 15 bp, Homo sapiens
tcctgggttcccatg

SEQ ID NO: 1505938 - DNA, 15 bp, Homo sapiens
cctgggttcccatga

SEQ ID NO: 1505939 - DNA, 15 bp, Homo sapiens
ctgggttcccatgac

SEQ ID NO: 1505940 - DNA, 15 bp, Homo sapiens
tgggttcccatgact

SEQ ID NO: 1505941 - DNA, 15 bp, Homo sapiens
gggttcccatgacta

SEQ ID NO: 1505942 - DNA, 15 bp, Homo sapiens
ggttcccatgactaa

SEQ ID NO: 1505943 - DNA, 15 bp, Homo sapiens
gttcccatgactaag

SEQ ID NO: 1505944 - DNA, 15 bp, Homo sapiens
ttcccatgactaagg

SEQ ID NO: 1505945 - DNA, 15 bp, Homo sapiens
tcccatgactaaggt

SEQ ID NO: 1505946 - DNA, 15 bp, Homo sapiens
cccatgactaaggtc

SEQ ID NO: 1505947 - DNA, 15 bp, Homo sapiens
ccatgactaaggtcc

SEQ ID NO: 1505948 - DNA, 15 bp, Homo sapiens
catgactaaggtccc

SEQ ID NO: 1505949 - DNA, 15 bp, Homo sapiens
atgactaaggtccct

SEQ ID NO: 1505950 - DNA, 15 bp, Homo sapiens
tgactaaggtccctt

SEQ ID NO: 1505951 - DNA, 15 bp, Homo sapiens
gactaaggtcccttc

SEQ ID NO: 1505952 - DNA, 15 bp, Homo sapiens
actaaggtcccttct

SEQ ID NO: 1505953 - DNA, 15 bp, Homo sapiens
ctaaggtcccttctc

SEQ ID NO: 1505954 - DNA, 15 bp, Homo sapiens
taaggtcccttctca

SEQ ID NO: 1505955 - DNA, 15 bp, Homo sapiens
aaggtcccttctcac

SEQ ID NO: 1505956 - DNA, 15 bp, Homo sapiens
aggtcccttctcaca

SEQ ID NO: 1505957 - DNA, 15 bp, Homo sapiens
ggtcccttctcacag

SEQ ID NO: 1505958 - DNA, 15 bp, Homo sapiens
gtcccttctcacagc

SEQ ID NO: 1505959 - DNA, 15 bp, Homo sapiens
tcccttctcacagct

SEQ ID NO: 1505960 - DNA, 15 bp, Homo sapiens
cccttctcacagctt

SEQ ID NO: 1505961 - DNA, 15 bp, Homo sapiens
ccttctcacagcttg

SEQ ID NO: 1505962 - DNA, 15 bp, Homo sapiens
cttctcacagcttgc

SEQ ID NO: 1505963 - DNA, 15 bp, Homo sapiens
ttctcacagcttgcc

SEQ ID NO: 1505964 - DNA, 15 bp, Homo sapiens
tctcacagcttgcca

SEQ ID NO: 1505965 - DNA, 15 bp, Homo sapiens
ctcacagcttgccac

SEQ ID NO: 1505966 - DNA, 15 bp, Homo sapiens
tcacagcttgccact

SEQ ID NO: 1505967 - DNA, 15 bp, Homo sapiens
cacagcttgccactg

SEQ ID NO: 1505968 - DNA, 15 bp, Homo sapiens
acagcttgccactgg

SEQ ID NO: 1505969 - DNA, 15 bp, Homo sapiens
cagcttgccactggt

SEQ ID NO: 1505970 - DNA, 15 bp, Homo sapiens
agcttgccactggtg

SEQ ID NO: 1505971 - DNA, 15 bp, Homo sapiens
gcttgccactggtgg

SEQ ID NO: 1505972 - DNA, 15 bp, Homo sapiens
cttgccactggtggt

SEQ ID NO: 1505973 - DNA, 15 bp, Homo sapiens
ttgccactggtggtt

SEQ ID NO: 1505974 - DNA, 15 bp, Homo sapiens
tgccactggtggttc

SEQ ID NO: 1505975 - DNA, 15 bp, Homo sapiens
gccactggtggttca

SEQ ID NO: 1505976 - DNA, 15 bp, Homo sapiens
ccactggtggttcat

SEQ ID NO: 1505977 - DNA, 15 bp, Homo sapiens
cactggtggttcatc

SEQ ID NO: 1505978 - DNA, 15 bp, Homo sapiens
actggtggttcatct

SEQ ID NO: 1505979 - DNA, 15 bp, Homo sapiens
ctggtggttcatctc

SEQ ID NO: 1505980 - DNA, 15 bp, Homo sapiens
tggtggttcatctca

SEQ ID NO: 1505981 - DNA, 15 bp, Homo sapiens
ggtggttcatctcac

SEQ ID NO: 1505982 - DNA, 15 bp, Homo sapiens
gtggttcatctcact

SEQ ID NO: 1505983 - DNA, 15 bp, Homo sapiens
tggttcatctcacta

SEQ ID NO: 1505984 - DNA, 15 bp, Homo sapiens
ggttcatctcactat

SEQ ID NO: 1505985 - DNA, 15 bp, Homo sapiens
gttcatctcactatc

SEQ ID NO: 1505986 - DNA, 15 bp, Homo sapiens
ttcatctcactatca

SEQ ID NO: 1505987 - DNA, 15 bp, Homo sapiens
tcatctcactatcat

SEQ ID NO: 1505988 - DNA, 15 bp, Homo sapiens
catctcactatcatc

SEQ ID NO: 1505989 - DNA, 15 bp, Homo sapiens
atctcactatcatct

SEQ ID NO: 1505990 - DNA, 15 bp, Homo sapiens
tctcactatcatctt

SEQ ID NO: 1505991 - DNA, 15 bp, Homo sapiens
ctcactatcatcttg

SEQ ID NO: 1505992 - DNA, 15 bp, Homo sapiens
tcactatcatcttgc

SEQ ID NO: 1505993 - DNA, 15 bp, Homo sapiens
cactatcatcttgcc

SEQ ID NO: 1505994 - DNA, 15 bp, Homo sapiens
actatcatcttgcct

SEQ ID NO: 1505995 - DNA, 15 bp, Homo sapiens
ctatcatcttgcctc

SEQ ID NO: 1505996 - DNA, 15 bp, Homo sapiens
tatcatcttgcctca

SEQ ID NO: 1505997 - DNA, 15 bp, Homo sapiens
atcatcttgcctcaa

SEQ ID NO: 1505998 - DNA, 15 bp, Homo sapiens
tcatcttgcctcaat

SEQ ID NO: 1505999 - DNA, 15 bp, Homo sapiens
catcttgcctcaatc

SEQ ID NO: 1506000 - DNA, 15 bp, Homo sapiens
atcttgcctcaatct

SEQ ID NO: 1506001 - DNA, 15 bp, Homo sapiens
tcttgcctcaatctc

SEQ ID NO: 1506002 - DNA, 15 bp, Homo sapiens
cttgcctcaatctct

SEQ ID NO: 1506003 - DNA, 15 bp, Homo sapiens
ttgcctcaatctctc

SEQ ID NO: 1506004 - DNA, 15 bp, Homo sapiens
tgcctcaatctctcc

SEQ ID NO: 1506005 - DNA, 15 bp, Homo sapiens
gcctcaatctctccg

SEQ ID NO: 1506006 - DNA, 15 bp, Homo sapiens
cctcaatctctccgt

SEQ ID NO: 1506007 - DNA, 15 bp, Homo sapiens
ctcaatctctccgta

SEQ ID NO: 1506008 - DNA, 15 bp, Homo sapiens
tcaatctctccgtat

SEQ ID NO: 1506009 - DNA, 15 bp, Homo sapiens
caatctctccgtatt

SEQ ID NO: 1506010 - DNA, 15 bp, Homo sapiens
aatctctccgtattt

SEQ ID NO: 1506011 - DNA, 15 bp, Homo sapiens
atctctccgtatttc

SEQ ID NO: 1506012 - DNA, 15 bp, Homo sapiens
tctctccgtatttcc

SEQ ID NO: 1506013 - DNA, 15 bp, Homo sapiens
ctctccgtatttccc

SEQ ID NO: 1506014 - DNA, 15 bp, Homo sapiens
tctccgtatttccca

SEQ ID NO: 1506015 - DNA, 15 bp, Homo sapiens
ctccgtatttcccag

SEQ ID NO: 1506016 - DNA, 15 bp, Homo sapiens
tccgtatttcccagt

SEQ ID NO: 1506017 - DNA, 15 bp, Homo sapiens
ccgtatttcccagtt

SEQ ID NO: 1506018 - DNA, 15 bp, Homo sapiens
cgtatttcccagtta

SEQ ID NO: 1506019 - DNA, 15 bp, Homo sapiens
gtatttcccagttaa

SEQ ID NO: 1506020 - DNA, 15 bp, Homo sapiens
tatttcccagttaaa

SEQ ID NO: 1506021 - DNA, 15 bp, Homo sapiens
atttcccagttaaaa

SEQ ID NO: 1506022 - DNA, 15 bp, Homo sapiens
tttcccagttaaaat

SEQ ID NO: 1506023 - DNA, 15 bp, Homo sapiens
ttcccagttaaaatg

SEQ ID NO: 1506024 - DNA, 15 bp, Homo sapiens
tcccagttaaaatgt

SEQ ID NO: 1506025 - DNA, 15 bp, Homo sapiens
cccagttaaaatgtt

SEQ ID NO: 1506026 - DNA, 15 bp, Homo sapiens
ccagttaaaatgttt

SEQ ID NO: 1506027 - DNA, 15 bp, Homo sapiens
cagttaaaatgtttg

SEQ ID NO: 1506028 - DNA, 15 bp, Homo sapiens
agttaaaatgtttga

SEQ ID NO: 1506029 - DNA, 15 bp, Homo sapiens
gttaaaatgtttgag

SEQ ID NO: 1506030 - DNA, 15 bp, Homo sapiens
ttaaaatgtttgagc

SEQ ID NO: 1506031 - DNA, 15 bp, Homo sapiens
taaaatgtttgagcg

SEQ ID NO: 1506032 - DNA, 15 bp, Homo sapiens
aaaatgtttgagcgg

SEQ ID NO: 1506033 - DNA, 15 bp, Homo sapiens
aaatgtttgagcggg

SEQ ID NO: 1506034 - DNA, 15 bp, Homo sapiens
aatgtttgagcggga

SEQ ID NO: 1506035 - DNA, 15 bp, Homo sapiens
atgtttgagcgggaa

SEQ ID NO: 1506036 - DNA, 15 bp, Homo sapiens
tgtttgagcgggaag

SEQ ID NO: 1506037 - DNA, 15 bp, Homo sapiens
gtttgagcgggaaga

SEQ ID NO: 1506038 - DNA, 15 bp, Homo sapiens
tttgagcgggaagat

SEQ ID NO: 1506039 - DNA, 15 bp, Homo sapiens
ttgagcgggaagatc

SEQ ID NO: 1506040 - DNA, 15 bp, Homo sapiens
tgagcgggaagatct

SEQ ID NO: 1506041 - DNA, 15 bp, Homo sapiens
gagcgggaagatctg

SEQ ID NO: 1506042 - DNA, 15 bp, Homo sapiens
agcgggaagatctgg

SEQ ID NO: 1506043 - DNA, 15 bp, Homo sapiens
gcgggaagatctggt

SEQ ID NO: 1506044 - DNA, 15 bp, Homo sapiens
cgggaagatctggtt

SEQ ID NO: 1506045 - DNA, 15 bp, Homo sapiens
gggaagatctggttt

SEQ ID NO: 1506046 - DNA, 15 bp, Homo sapiens
ggaagatctggtttg

SEQ ID NO: 1506047 - DNA, 15 bp, Homo sapiens
gaagatctggtttgc

SEQ ID NO: 1506048 - DNA, 15 bp, Homo sapiens
aagatctggtttgcc

SEQ ID NO: 1506049 - DNA, 15 bp, Homo sapiens
agatctggtttgcct

SEQ ID NO: 1506050 - DNA, 15 bp, Homo sapiens
gatctggtttgccta

SEQ ID NO: 1506051 - DNA, 15 bp, Homo sapiens
atctggtttgcctag

SEQ ID NO: 1506052 - DNA, 15 bp, Homo sapiens
tctggtttgcctaga

SEQ ID NO: 1506053 - DNA, 15 bp, Homo sapiens
ctggtttgcctagag

SEQ ID NO: 1506054 - DNA, 15 bp, Homo sapiens
tggtttgcctagaga

SEQ ID NO: 1506055 - DNA, 15 bp, Homo sapiens
ggtttgcctagagag

SEQ ID NO: 1506056 - DNA, 15 bp, Homo sapiens
gtttgcctagagagt

SEQ ID NO: 1506057 - DNA, 15 bp, Homo sapiens
tttgcctagagagtt

SEQ ID NO: 1506058 - DNA, 15 bp, Homo sapiens
ttgcctagagagtta

SEQ ID NO: 1506059 - DNA, 15 bp, Homo sapiens
tgcctagagagttac

SEQ ID NO: 1506060 - DNA, 15 bp, Homo sapiens
gcctagagagttact

SEQ ID NO: 1506061 - DNA, 15 bp, Homo sapiens
cctagagagttactg

SEQ ID NO: 1506062 - DNA, 15 bp, Homo sapiens
ctagagagttactgc

SEQ ID NO: 1506063 - DNA, 15 bp, Homo sapiens
tagagagttactgcc

SEQ ID NO: 1506064 - DNA, 15 bp, Homo sapiens
agagagttactgcca

SEQ ID NO: 1506065 - DNA, 15 bp, Homo sapiens
gagagttactgccag

SEQ ID NO: 1506066 - DNA, 15 bp, Homo sapiens
agagttactgccagt

SEQ ID NO: 1506067 - DNA, 15 bp, Homo sapiens
gagttactgccagtg

SEQ ID NO: 1506068 - DNA, 15 bp, Homo sapiens
agttactgccagtga

SEQ ID NO: 1506069 - DNA, 15 bp, Homo sapiens
gttactgccagtgag

SEQ ID NO: 1506070 - DNA, 15 bp, Homo sapiens
ttactgccagtgagg

SEQ ID NO: 1506071 - DNA, 15 bp, Homo sapiens
tactgccagtgaggt

SEQ ID NO: 1506072 - DNA, 15 bp, Homo sapiens
actgccagtgaggta

SEQ ID NO: 1506073 - DNA, 15 bp, Homo sapiens
ctgccagtgaggtac

SEQ ID NO: 1506074 - DNA, 15 bp, Homo sapiens
tgccagtgaggtacc

SEQ ID NO: 1506075 - DNA, 15 bp, Homo sapiens
gccagtgaggtaccc

SEQ ID NO: 1506076 - DNA, 15 bp, Homo sapiens
ccagtgaggtaccct

SEQ ID NO: 1506077 - DNA, 15 bp, Homo sapiens
cagtgaggtacccta

SEQ ID NO: 1506078 - DNA, 15 bp, Homo sapiens
agtgaggtaccctaa

SEQ ID NO: 1506079 - DNA, 15 bp, Homo sapiens
gtgaggtaccctaat

SEQ ID NO: 1506080 - DNA, 15 bp, Homo sapiens
tgaggtaccctaatg

SEQ ID NO: 1506081 - DNA, 15 bp, Homo sapiens
gaggtaccctaatgg

SEQ ID NO: 1506082 - DNA, 15 bp, Homo sapiens
aggtaccctaatggg

SEQ ID NO: 1506083 - DNA, 15 bp, Homo sapiens
ggtaccctaatgggc

SEQ ID NO: 1506084 - DNA, 15 bp, Homo sapiens
gtaccctaatgggcc

SEQ ID NO: 1506085 - DNA, 15 bp, Homo sapiens
taccctaatgggcca

SEQ ID NO: 1506086 - DNA, 15 bp, Homo sapiens
accctaatgggccag

SEQ ID NO: 1506087 - DNA, 15 bp, Homo sapiens
ccctaatgggccagc

SEQ ID NO: 1506088 - DNA, 15 bp, Homo sapiens
cctaatgggccagcc

SEQ ID NO: 1506089 - DNA, 15 bp, Homo sapiens
ctaatgggccagcct

SEQ ID NO: 1506090 - DNA, 15 bp, Homo sapiens
taatgggccagccta

SEQ ID NO: 1506091 - DNA, 15 bp, Homo sapiens
aatgggccagcctag

SEQ ID NO: 1506092 - DNA, 15 bp, Homo sapiens
atgggccagcctagg

SEQ ID NO: 1506093 - DNA, 15 bp, Homo sapiens
tgggccagcctaggc

SEQ ID NO: 1506094 - DNA, 15 bp, Homo sapiens
gggccagcctaggcc

SEQ ID NO: 1506095 - DNA, 15 bp, Homo sapiens
ggccagcctaggcca

SEQ ID NO: 1506096 - DNA, 15 bp, Homo sapiens
gccagcctaggccac

SEQ ID NO: 1506097 - DNA, 15 bp, Homo sapiens
ccagcctaggccacc

SEQ ID NO: 1506098 - DNA, 15 bp, Homo sapiens
cagcctaggccaccc

SEQ ID NO: 1506099 - DNA, 15 bp, Homo sapiens
agcctaggccacccc

SEQ ID NO: 1506100 - DNA, 15 bp, Homo sapiens
gcctaggccacccct

SEQ ID NO: 1506101 - DNA, 15 bp, Homo sapiens
cctaggccaccccta

SEQ ID NO: 1506102 - DNA, 15 bp, Homo sapiens
ctaggccacccctat

SEQ ID NO: 1506103 - DNA, 15 bp, Homo sapiens
taggccacccctatg

SEQ ID NO: 1506104 - DNA, 15 bp, Homo sapiens
aggccacccctatgg

SEQ ID NO: 1506105 - DNA, 15 bp, Homo sapiens
ggccacccctatggc

SEQ ID NO: 1506106 - DNA, 15 bp, Homo sapiens
gccacccctatggcc

SEQ ID NO: 1506107 - DNA, 15 bp, Homo sapiens
ccacccctatggcca

SEQ ID NO: 1506108 - DNA, 15 bp, Homo sapiens
cacccctatggccaa

SEQ ID NO: 1506109 - DNA, 15 bp, Homo sapiens
acccctatggccaaa

SEQ ID NO: 1506110 - DNA, 15 bp, Homo sapiens
cccctatggccaaaa

SEQ ID NO: 1506111 - DNA, 15 bp, Homo sapiens
ccctatggccaaaat

SEQ ID NO: 1506112 - DNA, 15 bp, Homo sapiens
cctatggccaaaatc

SEQ ID NO: 1506113 - DNA, 15 bp, Homo sapiens
ctatggccaaaatca

SEQ ID NO: 1506114 - DNA, 15 bp, Homo sapiens
tatggccaaaatcag

SEQ ID NO: 1506115 - DNA, 15 bp, Homo sapiens
atggccaaaatcagg

SEQ ID NO: 1506116 - DNA, 15 bp, Homo sapiens
tggccaaaatcagga

SEQ ID NO: 1506117 - DNA, 15 bp, Homo sapiens
ggccaaaatcaggac

SEQ ID NO: 1506118 - DNA, 15 bp, Homo sapiens
gccaaaatcaggaca

SEQ ID NO: 1506119 - DNA, 15 bp, Homo sapiens
ccaaaatcaggacag

SEQ ID NO: 1506120 - DNA, 15 bp, Homo sapiens
caaaatcaggacagc

SEQ ID NO: 1506121 - DNA, 15 bp, Homo sapiens
aaaatcaggacagca

SEQ ID NO: 1506122 - DNA, 15 bp, Homo sapiens
aaatcaggacagcac

SEQ ID NO: 1506123 - DNA, 15 bp, Homo sapiens
aatcaggacagcacc

SEQ ID NO: 1506124 - DNA, 15 bp, Homo sapiens
atcaggacagcaccg

SEQ ID NO: 1506125 - DNA, 15 bp, Homo sapiens
tcaggacagcaccga

SEQ ID NO: 1506126 - DNA, 15 bp, Homo sapiens
caggacagcaccgag

SEQ ID NO: 1506127 - DNA, 15 bp, Homo sapiens
aggacagcaccgagt

SEQ ID NO: 1506128 - DNA, 15 bp, Homo sapiens
ggacagcaccgagtg

SEQ ID NO: 1506129 - DNA, 15 bp, Homo sapiens
gacagcaccgagtga

SEQ ID NO: 1506130 - DNA, 15 bp, Homo sapiens
acagcaccgagtgag

SEQ ID NO: 1506131 - DNA, 15 bp, Homo sapiens
cagcaccgagtgaga

SEQ ID NO: 1506132 - DNA, 15 bp, Homo sapiens
agcaccgagtgagag

SEQ ID NO: 1506133 - DNA, 15 bp, Homo sapiens
gcaccgagtgagagg

SEQ ID NO: 1506134 - DNA, 15 bp, Homo sapiens
caccgagtgagaggc

SEQ ID NO: 1506135 - DNA, 15 bp, Homo sapiens
accgagtgagaggcc

SEQ ID NO: 1506136 - DNA, 15 bp, Homo sapiens
ccgagtgagaggcca

SEQ ID NO: 1506137 - DNA, 15 bp, Homo sapiens
cgagtgagaggccac

SEQ ID NO: 1506138 - DNA, 15 bp, Homo sapiens
gagtgagaggccacc

SEQ ID NO: 1506139 - DNA, 15 bp, Homo sapiens
agtgagaggccacct

SEQ ID NO: 1506140 - DNA, 15 bp, Homo sapiens
gtgagaggccaccta

SEQ ID NO: 1506141 - DNA, 15 bp, Homo sapiens
tgagaggccacctag

SEQ ID NO: 1506142 - DNA, 15 bp, Homo sapiens
gagaggccacctagg

SEQ ID NO: 1506143 - DNA, 15 bp, Homo sapiens
agaggccacctagga

SEQ ID NO: 1506144 - DNA, 15 bp, Homo sapiens
gaggccacctaggac

SEQ ID NO: 1506145 - DNA, 15 bp, Homo sapiens
aggccacctaggaca

SEQ ID NO: 1506146 - DNA, 15 bp, Homo sapiens
ggccacctaggacag

SEQ ID NO: 1506147 - DNA, 15 bp, Homo sapiens
gccacctaggacagc

SEQ ID NO: 1506148 - DNA, 15 bp, Homo sapiens
ccacctaggacagca

SEQ ID NO: 1506149 - DNA, 15 bp, Homo sapiens
cacctaggacagcat

SEQ ID NO: 1506150 - DNA, 15 bp, Homo sapiens
acctaggacagcatc

SEQ ID NO: 1506151 - DNA, 15 bp, Homo sapiens
cctaggacagcatct

SEQ ID NO: 1506152 - DNA, 15 bp, Homo sapiens
ctaggacagcatctc

SEQ ID NO: 1506153 - DNA, 15 bp, Homo sapiens
taggacagcatctcc

SEQ ID NO: 1506154 - DNA, 15 bp, Homo sapiens
aggacagcatctccc

SEQ ID NO: 1506155 - DNA, 15 bp, Homo sapiens
ggacagcatctcccc

SEQ ID NO: 1506156 - DNA, 15 bp, Homo sapiens
gacagcatctcccca

SEQ ID NO: 1506157 - DNA, 15 bp, Homo sapiens
acagcatctccccag

SEQ ID NO: 1506158 - DNA, 15 bp, Homo sapiens
cagcatctccccaga

SEQ ID NO: 1506159 - DNA, 15 bp, Homo sapiens
agcatctccccagag

SEQ ID NO: 1506160 - DNA, 15 bp, Homo sapiens
gcatctccccagagt

SEQ ID NO: 1506161 - DNA, 15 bp, Homo sapiens
catctccccagagtg

SEQ ID NO: 1506162 - DNA, 15 bp, Homo sapiens
atctccccagagtgg

SEQ ID NO: 1506163 - DNA, 15 bp, Homo sapiens
tctccccagagtggc

SEQ ID NO: 1506164 - DNA, 15 bp, Homo sapiens
ctccccagagtggcc

SEQ ID NO: 1506165 - DNA, 15 bp, Homo sapiens
tccccagagtggccc

SEQ ID NO: 1506166 - DNA, 15 bp, Homo sapiens
ccccagagtggcccc

SEQ ID NO: 1506167 - DNA, 15 bp, Homo sapiens
cccagagtggcccca

SEQ ID NO: 1506168 - DNA, 15 bp, Homo sapiens
ccagagtggccccac

SEQ ID NO: 1506169 - DNA, 15 bp, Homo sapiens
cagagtggccccact

SEQ ID NO: 1506170 - DNA, 15 bp, Homo sapiens
agagtggccccactg

SEQ ID NO: 1506171 - DNA, 15 bp, Homo sapiens
gagtggccccactgt

SEQ ID NO: 1506172 - DNA, 15 bp, Homo sapiens
agtggccccactgtc

SEQ ID NO: 1506173 - DNA, 15 bp, Homo sapiens
gtggccccactgtcc

SEQ ID NO: 1506174 - DNA, 15 bp, Homo sapiens
tggccccactgtcca

SEQ ID NO: 1506175 - DNA, 15 bp, Homo sapiens
ggccccactgtccag

SEQ ID NO: 1506176 - DNA, 15 bp, Homo sapiens
gccccactgtccagg

SEQ ID NO: 1506177 - DNA, 15 bp, Homo sapiens
ccccactgtccagga

SEQ ID NO: 1506178 - DNA, 15 bp, Homo sapiens
cccactgtccaggac

SEQ ID NO: 1506179 - DNA, 15 bp, Homo sapiens
ccactgtccaggact

SEQ ID NO: 1506180 - DNA, 15 bp, Homo sapiens
cactgtccaggactt

SEQ ID NO: 1506181 - DNA, 15 bp, Homo sapiens
actgtccaggactta

SEQ ID NO: 1506182 - DNA, 15 bp, Homo sapiens
ctgtccaggacttac

SEQ ID NO: 1506183 - DNA, 15 bp, Homo sapiens
tgtccaggacttaca

SEQ ID NO: 1506184 - DNA, 15 bp, Homo sapiens
gtccaggacttacag

SEQ ID NO: 1506185 - DNA, 15 bp, Homo sapiens
tccaggacttacagg

SEQ ID NO: 1506186 - DNA, 15 bp, Homo sapiens
ccaggacttacaggt

SEQ ID NO: 1506187 - DNA, 15 bp, Homo sapiens
caggacttacaggta

SEQ ID NO: 1506188 - DNA, 15 bp, Homo sapiens
aggacttacaggtat

SEQ ID NO: 1506189 - DNA, 15 bp, Homo sapiens
ggacttacaggtatc

SEQ ID NO: 1506190 - DNA, 15 bp, Homo sapiens
gacttacaggtatcc

SEQ ID NO: 1506191 - DNA, 15 bp, Homo sapiens
acttacaggtatcca

SEQ ID NO: 1506192 - DNA, 15 bp, Homo sapiens
cttacaggtatccat

SEQ ID NO: 1506193 - DNA, 15 bp, Homo sapiens
ttacaggtatccatg

SEQ ID NO: 1506194 - DNA, 15 bp, Homo sapiens
tacaggtatccatgc

SEQ ID NO: 1506195 - DNA, 15 bp, Homo sapiens
acaggtatccatgct

SEQ ID NO: 1506196 - DNA, 15 bp, Homo sapiens
caggtatccatgctt

SEQ ID NO: 1506197 - DNA, 15 bp, Homo sapiens
aggtatccatgcttc

SEQ ID NO: 1506198 - DNA, 15 bp, Homo sapiens
ggtatccatgcttca

SEQ ID NO: 1506199 - DNA, 15 bp, Homo sapiens
gtatccatgcttcac

SEQ ID NO: 1506200 - DNA, 15 bp, Homo sapiens
tatccatgcttcacc

SEQ ID NO: 1506201 - DNA, 15 bp, Homo sapiens
atccatgcttcaccc

SEQ ID NO: 1506202 - DNA, 15 bp, Homo sapiens
tccatgcttcaccca

SEQ ID NO: 1506203 - DNA, 15 bp, Homo sapiens
ccatgcttcacccag

SEQ ID NO: 1506204 - DNA, 15 bp, Homo sapiens
catgcttcacccaga

SEQ ID NO: 1506205 - DNA, 15 bp, Homo sapiens
atgcttcacccagaa

SEQ ID NO: 1506206 - DNA, 15 bp, Homo sapiens
tgcttcacccagaaa

SEQ ID NO: 1506207 - DNA, 15 bp, Homo sapiens
gcttcacccagaaat

SEQ ID NO: 1506208 - DNA, 15 bp, Homo sapiens
cttcacccagaaatc

SEQ ID NO: 1506209 - DNA, 15 bp, Homo sapiens
ttcacccagaaatct

SEQ ID NO: 1506210 - DNA, 15 bp, Homo sapiens
tcacccagaaatctt

SEQ ID NO: 1506211 - DNA, 15 bp, Homo sapiens
cacccagaaatctta

SEQ ID NO: 1506212 - DNA, 15 bp, Homo sapiens
acccagaaatcttat

SEQ ID NO: 1506213 - DNA, 15 bp, Homo sapiens
cccagaaatcttatg

SEQ ID NO: 1506214 - DNA, 15 bp, Homo sapiens
ccagaaatcttatgt

SEQ ID NO: 1506215 - DNA, 15 bp, Homo sapiens
cagaaatcttatgtt

SEQ ID NO: 1506216 - DNA, 15 bp, Homo sapiens
agaaatcttatgtta

SEQ ID NO: 1506217 - DNA, 15 bp, Homo sapiens
gaaatcttatgttat

SEQ ID NO: 1506218 - DNA, 15 bp, Homo sapiens
aaatcttatgttatg

SEQ ID NO: 1506219 - DNA, 15 bp, Homo sapiens
aatcttatgttatgg

SEQ ID NO: 1506220 - DNA, 15 bp, Homo sapiens
atcttatgttatgga

SEQ ID NO: 1506221 - DNA, 15 bp, Homo sapiens
tcttatgttatggaa

SEQ ID NO: 1506222 - DNA, 15 bp, Homo sapiens
cttatgttatggaaa

SEQ ID NO: 1506223 - DNA, 15 bp, Homo sapiens
ttatgttatggaaag

SEQ ID NO: 1506224 - DNA, 15 bp, Homo sapiens
tatgttatggaaagt

SEQ ID NO: 1506225 - DNA, 15 bp, Homo sapiens
atgttatggaaagtc

SEQ ID NO: 1506226 - DNA, 15 bp, Homo sapiens
tgttatggaaagtca

SEQ ID NO: 1506227 - DNA, 15 bp, Homo sapiens
gttatggaaagtcag

SEQ ID NO: 1506228 - DNA, 15 bp, Homo sapiens
ttatggaaagtcagc

SEQ ID NO: 1506229 - DNA, 15 bp, Homo sapiens
tatggaaagtcagcc

SEQ ID NO: 1506230 - DNA, 15 bp, Homo sapiens
atggaaagtcagcca

SEQ ID NO: 1506231 - DNA, 15 bp, Homo sapiens
tggaaagtcagccaa

SEQ ID NO: 1506232 - DNA, 15 bp, Homo sapiens
ggaaagtcagccaat

SEQ ID NO: 1506233 - DNA, 15 bp, Homo sapiens
gaaagtcagccaatg

SEQ ID NO: 1506234 - DNA, 15 bp, Homo sapiens
aaagtcagccaatgt

SEQ ID NO: 1506235 - DNA, 15 bp, Homo sapiens
aagtcagccaatgtc

SEQ ID NO: 1506236 - DNA, 15 bp, Homo sapiens
agtcagccaatgtca

SEQ ID NO: 1506237 - DNA, 15 bp, Homo sapiens
gtcagccaatgtcat

SEQ ID NO: 1506238 - DNA, 15 bp, Homo sapiens
tcagccaatgtcatc

SEQ ID NO: 1506239 - DNA, 15 bp, Homo sapiens
cagccaatgtcatct

SEQ ID NO: 1506240 - DNA, 15 bp, Homo sapiens
agccaatgtcatctt

SEQ ID NO: 1506241 - DNA, 15 bp, Homo sapiens
gccaatgtcatctta

SEQ ID NO: 1506242 - DNA, 15 bp, Homo sapiens
ccaatgtcatcttag

SEQ ID NO: 1506243 - DNA, 15 bp, Homo sapiens
caatgtcatcttaga

SEQ ID NO: 1506244 - DNA, 15 bp, Homo sapiens
aatgtcatcttagag

SEQ ID NO: 1506245 - DNA, 15 bp, Homo sapiens
atgtcatcttagaga

SEQ ID NO: 1506246 - DNA, 15 bp, Homo sapiens
tgtcatcttagagaa

SEQ ID NO: 1506247 - DNA, 15 bp, Homo sapiens
gtcatcttagagaag

SEQ ID NO: 1506248 - DNA, 15 bp, Homo sapiens
tcatcttagagaagg

SEQ ID NO: 1506249 - DNA, 15 bp, Homo sapiens
catcttagagaagga

SEQ ID NO: 1506250 - DNA, 15 bp, Homo sapiens
atcttagagaaggat

SEQ ID NO: 1506251 - DNA, 15 bp, Homo sapiens
tcttagagaaggatg

SEQ ID NO: 1506252 - DNA, 15 bp, Homo sapiens
cttagagaaggatgc

SEQ ID NO: 1506253 - DNA, 15 bp, Homo sapiens
ttagagaaggatgct

SEQ ID NO: 1506254 - DNA, 15 bp, Homo sapiens
tagagaaggatgcta

SEQ ID NO: 1506255 - DNA, 15 bp, Homo sapiens
agagaaggatgctac

SEQ ID NO: 1506256 - DNA, 15 bp, Homo sapiens
gagaaggatgctaca

SEQ ID NO: 1506257 - DNA, 15 bp, Homo sapiens
agaaggatgctacat

SEQ ID NO: 1506258 - DNA, 15 bp, Homo sapiens
gaaggatgctacatc

SEQ ID NO: 1506259 - DNA, 15 bp, Homo sapiens
aaggatgctacatcg

SEQ ID NO: 1506260 - DNA, 15 bp, Homo sapiens
aggatgctacatcgc

SEQ ID NO: 1506261 - DNA, 15 bp, Homo sapiens
ggatgctacatcgcc

SEQ ID NO: 1506262 - DNA, 15 bp, Homo sapiens
gatgctacatcgcca

SEQ ID NO: 1506263 - DNA, 15 bp, Homo sapiens
atgctacatcgccac

SEQ ID NO: 1506264 - DNA, 15 bp, Homo sapiens
tgctacatcgccact

SEQ ID NO: 1506265 - DNA, 15 bp, Homo sapiens
gctacatcgccactg

SEQ ID NO: 1506266 - DNA, 15 bp, Homo sapiens
ctacatcgccactgg

SEQ ID NO: 1506267 - DNA, 15 bp, Homo sapiens
tacatcgccactggg

SEQ ID NO: 1506268 - DNA, 15 bp, Homo sapiens
acatcgccactgggc

SEQ ID NO: 1506269 - DNA, 15 bp, Homo sapiens
catcgccactgggcc

SEQ ID NO: 1506270 - DNA, 15 bp, Homo sapiens
atcgccactgggcct

SEQ ID NO: 1506271 - DNA, 15 bp, Homo sapiens
tcgccactgggccta

SEQ ID NO: 1506272 - DNA, 15 bp, Homo sapiens
cgccactgggcctag

SEQ ID NO: 1506273 - DNA, 15 bp, Homo sapiens
gccactgggcctagg

SEQ ID NO: 1506274 - DNA, 15 bp, Homo sapiens
ccactgggcctaggc

SEQ ID NO: 1506275 - DNA, 15 bp, Homo sapiens
cactgggcctaggct

SEQ ID NO: 1506276 - DNA, 15 bp, Homo sapiens
actgggcctaggctg

SEQ ID NO: 1506277 - DNA, 15 bp, Homo sapiens
ctgggcctaggctga

SEQ ID NO: 1506278 - DNA, 15 bp, Homo sapiens
tgggcctaggctgaa

SEQ ID NO: 1506279 - DNA, 15 bp, Homo sapiens
gggcctaggctgaaa

SEQ ID NO: 1506280 - DNA, 15 bp, Homo sapiens
ggcctaggctgaaag

SEQ ID NO: 1506281 - DNA, 15 bp, Homo sapiens
gcctaggctgaaagg

SEQ ID NO: 1506282 - DNA, 15 bp, Homo sapiens
cctaggctgaaaggc

SEQ ID NO: 1506283 - DNA, 15 bp, Homo sapiens
ctaggctgaaaggcg

SEQ ID NO: 1506284 - DNA, 15 bp, Homo sapiens
taggctgaaaggcgg

SEQ ID NO: 1506285 - DNA, 15 bp, Homo sapiens
aggctgaaaggcggc

SEQ ID NO: 1506286 - DNA, 15 bp, Homo sapiens
ggctgaaaggcggcc

SEQ ID NO: 1506287 - DNA, 15 bp, Homo sapiens
gctgaaaggcggcct

SEQ ID NO: 1506288 - DNA, 15 bp, Homo sapiens
ctgaaaggcggcctt

SEQ ID NO: 1506289 - DNA, 15 bp, Homo sapiens
tgaaaggcggccttt

SEQ ID NO: 1506290 - DNA, 15 bp, Homo sapiens
gaaaggcggccttta

SEQ ID NO: 1506291 - DNA, 15 bp, Homo sapiens
aaaggcggcctttag

SEQ ID NO: 1506292 - DNA, 15 bp, Homo sapiens
aaggcggcctttagg

SEQ ID NO: 1506293 - DNA, 15 bp, Homo sapiens
aggcggcctttagga

SEQ ID NO: 1506294 - DNA, 15 bp, Homo sapiens
ggcggcctttaggaa

SEQ ID NO: 1506295 - DNA, 15 bp, Homo sapiens
gcggcctttaggaac

SEQ ID NO: 1506296 - DNA, 15 bp, Homo sapiens
cggcctttaggaact

SEQ ID NO: 1506297 - DNA, 15 bp, Homo sapiens
ggcctttaggaacta

SEQ ID NO: 1506298 - DNA, 15 bp, Homo sapiens
gcctttaggaactaa

SEQ ID NO: 1506299 - DNA, 15 bp, Homo sapiens
cctttaggaactaac

SEQ ID NO: 1506300 - DNA, 15 bp, Homo sapiens
ctttaggaactaaca

SEQ ID NO: 1506301 - DNA, 15 bp, Homo sapiens
tttaggaactaacac

SEQ ID NO: 1506302 - DNA, 15 bp, Homo sapiens
ttaggaactaacacc

SEQ ID NO: 1506303 - DNA, 15 bp, Homo sapiens
taggaactaacacca

SEQ ID NO: 1506304 - DNA, 15 bp, Homo sapiens
aggaactaacaccaa

SEQ ID NO: 1506305 - DNA, 15 bp, Homo sapiens
ggaactaacaccaag

SEQ ID NO: 1506306 - DNA, 15 bp, Homo sapiens
gaactaacaccaagt

SEQ ID NO: 1506307 - DNA, 15 bp, Homo sapiens
aactaacaccaagta

SEQ ID NO: 1506308 - DNA, 15 bp, Homo sapiens
actaacaccaagtac

SEQ ID NO: 1506309 - DNA, 15 bp, Homo sapiens
ctaacaccaagtact

SEQ ID NO: 1506310 - DNA, 15 bp, Homo sapiens
taacaccaagtacta

SEQ ID NO: 1506311 - DNA, 15 bp, Homo sapiens
aacaccaagtactat

SEQ ID NO: 1506312 - DNA, 15 bp, Homo sapiens
acaccaagtactatc

SEQ ID NO: 1506313 - DNA, 15 bp, Homo sapiens
caccaagtactatcg

SEQ ID NO: 1506314 - DNA, 15 bp, Homo sapiens
accaagtactatcga

SEQ ID NO: 1506315 - DNA, 15 bp, Homo sapiens
ccaagtactatcgat

SEQ ID NO: 1506316 - DNA, 15 bp, Homo sapiens
caagtactatcgatt

SEQ ID NO: 1506317 - DNA, 15 bp, Homo sapiens
aagtactatcgattt

SEQ ID NO: 1506318 - DNA, 15 bp, Homo sapiens
agtactatcgatttt

SEQ ID NO: 1506319 - DNA, 15 bp, Homo sapiens
gtactatcgattttc

SEQ ID NO: 1506320 - DNA, 15 bp, Homo sapiens
tactatcgattttca

SEQ ID NO: 1506321 - DNA, 15 bp, Homo sapiens
actatcgattttcat

SEQ ID NO: 1506322 - DNA, 15 bp, Homo sapiens
ctatcgattttcatt

SEQ ID NO: 1506323 - DNA, 15 bp, Homo sapiens
tatcgattttcattt

SEQ ID NO: 1506324 - DNA, 15 bp, Homo sapiens
atcgattttcattta

SEQ ID NO: 1506325 - DNA, 15 bp, Homo sapiens
tcgattttcatttaa

SEQ ID NO: 1506326 - DNA, 15 bp, Homo sapiens
cgattttcatttaac

SEQ ID NO: 1506327 - DNA, 15 bp, Homo sapiens
gattttcatttaacc

SEQ ID NO: 1506328 - DNA, 15 bp, Homo sapiens
attttcatttaaccc

SEQ ID NO: 1506329 - DNA, 15 bp, Homo sapiens
ttttcatttaaccct

SEQ ID NO: 1506330 - DNA, 15 bp, Homo sapiens
tttcatttaaccctc

SEQ ID NO: 1506331 - DNA, 15 bp, Homo sapiens
ttcatttaaccctcg

SEQ ID NO: 1506332 - DNA, 15 bp, Homo sapiens
tcatttaaccctcgt

SEQ ID NO: 1506333 - DNA, 15 bp, Homo sapiens
catttaaccctcgta

SEQ ID NO: 1506334 - DNA, 15 bp, Homo sapiens
atttaaccctcgtaa

SEQ ID NO: 1506335 - DNA, 15 bp, Homo sapiens
tttaaccctcgtaac

SEQ ID NO: 1506336 - DNA, 15 bp, Homo sapiens
ttaaccctcgtaaca

SEQ ID NO: 1506337 - DNA, 15 bp, Homo sapiens
taaccctcgtaacag

SEQ ID NO: 1506338 - DNA, 15 bp, Homo sapiens
aaccctcgtaacagc

SEQ ID NO: 1506339 - DNA, 15 bp, Homo sapiens
accctcgtaacagcc

SEQ ID NO: 1506340 - DNA, 15 bp, Homo sapiens
ccctcgtaacagccc

SEQ ID NO: 1506341 - DNA, 15 bp, Homo sapiens
cctcgtaacagccca

SEQ ID NO: 1506342 - DNA, 15 bp, Homo sapiens
ctcgtaacagcccaa

SEQ ID NO: 1506343 - DNA, 15 bp, Homo sapiens
tcgtaacagcccaat

SEQ ID NO: 1506344 - DNA, 15 bp, Homo sapiens
cgtaacagcccaatg

SEQ ID NO: 1506345 - DNA, 15 bp, Homo sapiens
gtaacagcccaatga

SEQ ID NO: 1506346 - DNA, 15 bp, Homo sapiens
taacagcccaatgag

SEQ ID NO: 1506347 - DNA, 15 bp, Homo sapiens
aacagcccaatgagg

SEQ ID NO: 1506348 - DNA, 15 bp, Homo sapiens
acagcccaatgaggt

SEQ ID NO: 1506349 - DNA, 15 bp, Homo sapiens
cagcccaatgaggtg

SEQ ID NO: 1506350 - DNA, 15 bp, Homo sapiens
agcccaatgaggtgg

SEQ ID NO: 1506351 - DNA, 15 bp, Homo sapiens
gcccaatgaggtggg

SEQ ID NO: 1506352 - DNA, 15 bp, Homo sapiens
cccaatgaggtgggt

SEQ ID NO: 1506353 - DNA, 15 bp, Homo sapiens
ccaatgaggtgggta

SEQ ID NO: 1506354 - DNA, 15 bp, Homo sapiens
caatgaggtgggtat

SEQ ID NO: 1506355 - DNA, 15 bp, Homo sapiens
aatgaggtgggtatt

SEQ ID NO: 1506356 - DNA, 15 bp, Homo sapiens
atgaggtgggtattg

SEQ ID NO: 1506357 - DNA, 15 bp, Homo sapiens
tgaggtgggtattgc

SEQ ID NO: 1506358 - DNA, 15 bp, Homo sapiens
gaggtgggtattgcc

SEQ ID NO: 1506359 - DNA, 15 bp, Homo sapiens
aggtgggtattgccc

SEQ ID NO: 1506360 - DNA, 15 bp, Homo sapiens
ggtgggtattgccca

SEQ ID NO: 1506361 - DNA, 15 bp, Homo sapiens
gtgggtattgcccat

SEQ ID NO: 1506362 - DNA, 15 bp, Homo sapiens
tgggtattgcccatc

SEQ ID NO: 1506363 - DNA, 15 bp, Homo sapiens
gggtattgcccatcc

SEQ ID NO: 1506364 - DNA, 15 bp, Homo sapiens
ggtattgcccatccc

SEQ ID NO: 1506365 - DNA, 15 bp, Homo sapiens
gtattgcccatccca

SEQ ID NO: 1506366 - DNA, 15 bp, Homo sapiens
tattgcccatcccag

SEQ ID NO: 1506367 - DNA, 15 bp, Homo sapiens
attgcccatcccagt

SEQ ID NO: 1506368 - DNA, 15 bp, Homo sapiens
ttgcccatcccagtt

SEQ ID NO: 1506369 - DNA, 15 bp, Homo sapiens
tgcccatcccagttc

SEQ ID NO: 1506370 - DNA, 15 bp, Homo sapiens
gcccatcccagttca

SEQ ID NO: 1506371 - DNA, 15 bp, Homo sapiens
cccatcccagttcat

SEQ ID NO: 1506372 - DNA, 15 bp, Homo sapiens
ccatcccagttcata

SEQ ID NO: 1506373 - DNA, 15 bp, Homo sapiens
catcccagttcatag

SEQ ID NO: 1506374 - DNA, 15 bp, Homo sapiens
atcccagttcatagt

SEQ ID NO: 1506375 - DNA, 15 bp, Homo sapiens
tcccagttcatagtt

SEQ ID NO: 1506376 - DNA, 15 bp, Homo sapiens
cccagttcatagttg

SEQ ID NO: 1506377 - DNA, 15 bp, Homo sapiens
ccagttcatagttga

SEQ ID NO: 1506378 - DNA, 15 bp, Homo sapiens
cagttcatagttgag

SEQ ID NO: 1506379 - DNA, 15 bp, Homo sapiens
agttcatagttgagg

SEQ ID NO: 1506380 - DNA, 15 bp, Homo sapiens
gttcatagttgagga

SEQ ID NO: 1506381 - DNA, 15 bp, Homo sapiens
ttcatagttgaggat

SEQ ID NO: 1506382 - DNA, 15 bp, Homo sapiens
tcatagttgaggatt

SEQ ID NO: 1506383 - DNA, 15 bp, Homo sapiens
catagttgaggattc

SEQ ID NO: 1506384 - DNA, 15 bp, Homo sapiens
atagttgaggattcc

SEQ ID NO: 1506385 - DNA, 15 bp, Homo sapiens
tagttgaggattccg

SEQ ID NO: 1506386 - DNA, 15 bp, Homo sapiens
agttgaggattccga

SEQ ID NO: 1506387 - DNA, 15 bp, Homo sapiens
gttgaggattccgag

SEQ ID NO: 1506388 - DNA, 15 bp, Homo sapiens
ttgaggattccgagg

SEQ ID NO: 1506389 - DNA, 15 bp, Homo sapiens
tgaggattccgaggt

SEQ ID NO: 1506390 - DNA, 15 bp, Homo sapiens
gaggattccgaggtt

SEQ ID NO: 1506391 - DNA, 15 bp, Homo sapiens
aggattccgaggttc

SEQ ID NO: 1506392 - DNA, 15 bp, Homo sapiens
ggattccgaggttct

SEQ ID NO: 1506393 - DNA, 15 bp, Homo sapiens
gattccgaggttctg

SEQ ID NO: 1506394 - DNA, 15 bp, Homo sapiens
attccgaggttctga

SEQ ID NO: 1506395 - DNA, 15 bp, Homo sapiens
ttccgaggttctgaa

SEQ ID NO: 1506396 - DNA, 15 bp, Homo sapiens
tccgaggttctgaaa

SEQ ID NO: 1506397 - DNA, 15 bp, Homo sapiens
ccgaggttctgaaag

SEQ ID NO: 1506398 - DNA, 15 bp, Homo sapiens
cgaggttctgaaagg

SEQ ID NO: 1506399 - DNA, 15 bp, Homo sapiens
gaggttctgaaagga

SEQ ID NO: 1506400 - DNA, 15 bp, Homo sapiens
aggttctgaaaggac

SEQ ID NO: 1506401 - DNA, 15 bp, Homo sapiens
ggttctgaaaggaca

SEQ ID NO: 1506402 - DNA, 15 bp, Homo sapiens
gttctgaaaggacac

SEQ ID NO: 1506403 - DNA, 15 bp, Homo sapiens
ttctgaaaggacact

SEQ ID NO: 1506404 - DNA, 15 bp, Homo sapiens
tctgaaaggacacta

SEQ ID NO: 1506405 - DNA, 15 bp, Homo sapiens
ctgaaaggacactag

SEQ ID NO: 1506406 - DNA, 15 bp, Homo sapiens
tgaaaggacactagc

SEQ ID NO: 1506407 - DNA, 15 bp, Homo sapiens
gaaaggacactagca

SEQ ID NO: 1506408 - DNA, 15 bp, Homo sapiens
aaaggacactagcag

SEQ ID NO: 1506409 - DNA, 15 bp, Homo sapiens
aaggacactagcagg

SEQ ID NO: 1506410 - DNA, 15 bp, Homo sapiens
aggacactagcaggt

SEQ ID NO: 1506411 - DNA, 15 bp, Homo sapiens
ggacactagcaggtg

SEQ ID NO: 1506412 - DNA, 15 bp, Homo sapiens
gacactagcaggtgg

SEQ ID NO: 1506413 - DNA, 15 bp, Homo sapiens
acactagcaggtgga

SEQ ID NO: 1506414 - DNA, 15 bp, Homo sapiens
cactagcaggtggac

SEQ ID NO: 1506415 - DNA, 15 bp, Homo sapiens
actagcaggtggact

SEQ ID NO: 1506416 - DNA, 15 bp, Homo sapiens
ctagcaggtggactt

SEQ ID NO: 1506417 - DNA, 15 bp, Homo sapiens
tagcaggtggacttg

SEQ ID NO: 1506418 - DNA, 15 bp, Homo sapiens
agcaggtggacttgg

SEQ ID NO: 1506419 - DNA, 15 bp, Homo sapiens
gcaggtggacttgga

SEQ ID NO: 1506420 - DNA, 15 bp, Homo sapiens
caggtggacttggaa

SEQ ID NO: 1506421 - DNA, 15 bp, Homo sapiens
aggtggacttggaac

SEQ ID NO: 1506422 - DNA, 15 bp, Homo sapiens
ggtggacttggaacc

SEQ ID NO: 1506423 - DNA, 15 bp, Homo sapiens
gtggacttggaacct

SEQ ID NO: 1506424 - DNA, 15 bp, Homo sapiens
tggacttggaacctg

SEQ ID NO: 1506425 - DNA, 15 bp, Homo sapiens
ggacttggaacctgg

SEQ ID NO: 1506426 - DNA, 15 bp, Homo sapiens
gacttggaacctggc

SEQ ID NO: 1506427 - DNA, 15 bp, Homo sapiens
acttggaacctggcc

SEQ ID NO: 1506428 - DNA, 15 bp, Homo sapiens
cttggaacctggcct

SEQ ID NO: 1506429 - DNA, 15 bp, Homo sapiens
ttggaacctggcctg

SEQ ID NO: 1506430 - DNA, 15 bp, Homo sapiens
tggaacctggcctgc

SEQ ID NO: 1506431 - DNA, 15 bp, Homo sapiens
ggaacctggcctgcc

SEQ ID NO: 1506432 - DNA, 15 bp, Homo sapiens
gaacctggcctgccg

SEQ ID NO: 1506433 - DNA, 15 bp, Homo sapiens
aacctggcctgccgg

SEQ ID NO: 1506434 - DNA, 15 bp, Homo sapiens
acctggcctgccggc

SEQ ID NO: 1506435 - DNA, 15 bp, Homo sapiens
cctggcctgccggct

SEQ ID NO: 1506436 - DNA, 15 bp, Homo sapiens
ctggcctgccggctc

SEQ ID NO: 1506437 - DNA, 15 bp, Homo sapiens
tggcctgccggctcc

SEQ ID NO: 1506438 - DNA, 15 bp, Homo sapiens
ggcctgccggctcca

SEQ ID NO: 1506439 - DNA, 15 bp, Homo sapiens
gcctgccggctccac

SEQ ID NO: 1506440 - DNA, 15 bp, Homo sapiens
cctgccggctccacc

SEQ ID NO: 1506441 - DNA, 15 bp, Homo sapiens
ctgccggctccaccc

SEQ ID NO: 1506442 - DNA, 15 bp, Homo sapiens
tgccggctccacccc

SEQ ID NO: 1506443 - DNA, 15 bp, Homo sapiens
gccggctccacccct

SEQ ID NO: 1506444 - DNA, 15 bp, Homo sapiens
ccggctccacccctg

SEQ ID NO: 1506445 - DNA, 15 bp, Homo sapiens
cggctccacccctga

SEQ ID NO: 1506446 - DNA, 15 bp, Homo sapiens
ggctccacccctgag

SEQ ID NO: 1506447 - DNA, 15 bp, Homo sapiens
gctccacccctgaga

SEQ ID NO: 1506448 - DNA, 15 bp, Homo sapiens
ctccacccctgagat

SEQ ID NO: 1506449 - DNA, 15 bp, Homo sapiens
tccacccctgagatg

SEQ ID NO: 1506450 - DNA, 15 bp, Homo sapiens
ccacccctgagatgt

SEQ ID NO: 1506451 - DNA, 15 bp, Homo sapiens
cacccctgagatgtt

SEQ ID NO: 1506452 - DNA, 15 bp, Homo sapiens
acccctgagatgttt

SEQ ID NO: 1506453 - DNA, 15 bp, Homo sapiens
cccctgagatgtttg

SEQ ID NO: 1506454 - DNA, 15 bp, Homo sapiens
ccctgagatgtttgg

SEQ ID NO: 1506455 - DNA, 15 bp, Homo sapiens
cctgagatgtttggc

SEQ ID NO: 1506456 - DNA, 15 bp, Homo sapiens
ctgagatgtttggca

SEQ ID NO: 1506457 - DNA, 15 bp, Homo sapiens
tgagatgtttggcac

SEQ ID NO: 1506458 - DNA, 15 bp, Homo sapiens
gagatgtttggcact

SEQ ID NO: 1506459 - DNA, 15 bp, Homo sapiens
agatgtttggcacta

SEQ ID NO: 1506460 - DNA, 15 bp, Homo sapiens
gatgtttggcactag

SEQ ID NO: 1506461 - DNA, 15 bp, Homo sapiens
atgtttggcactagc

SEQ ID NO: 1506462 - DNA, 15 bp, Homo sapiens
tgtttggcactagca

SEQ ID NO: 1506463 - DNA, 15 bp, Homo sapiens
gtttggcactagcag

SEQ ID NO: 1506464 - DNA, 15 bp, Homo sapiens
tttggcactagcagc

SEQ ID NO: 1506465 - DNA, 15 bp, Homo sapiens
ttggcactagcagca

SEQ ID NO: 1506466 - DNA, 15 bp, Homo sapiens
tggcactagcagcac

SEQ ID NO: 1506467 - DNA, 15 bp, Homo sapiens
ggcactagcagcacc

SEQ ID NO: 1506468 - DNA, 15 bp, Homo sapiens
gcactagcagcacct

SEQ ID NO: 1506469 - DNA, 15 bp, Homo sapiens
cactagcagcacctt

SEQ ID NO: 1506470 - DNA, 15 bp, Homo sapiens
actagcagcaccttc

SEQ ID NO: 1506471 - DNA, 15 bp, Homo sapiens
ctagcagcaccttct

SEQ ID NO: 1506472 - DNA, 15 bp, Homo sapiens
tagcagcaccttctg

SEQ ID NO: 1506473 - DNA, 15 bp, Homo sapiens
agcagcaccttctga

SEQ ID NO: 1506474 - DNA, 15 bp, Homo sapiens
gcagcaccttctgac

SEQ ID NO: 1506475 - DNA, 15 bp, Homo sapiens
cagcaccttctgact

SEQ ID NO: 1506476 - DNA, 15 bp, Homo sapiens
agcaccttctgactc

SEQ ID NO: 1506477 - DNA, 15 bp, Homo sapiens
gcaccttctgactct

SEQ ID NO: 1506478 - DNA, 15 bp, Homo sapiens
caccttctgactctt

SEQ ID NO: 1506479 - DNA, 15 bp, Homo sapiens
accttctgactcttg

SEQ ID NO: 1506480 - DNA, 15 bp, Homo sapiens
ccttctgactcttgg

SEQ ID NO: 1506481 - DNA, 15 bp, Homo sapiens
cttctgactcttggc

SEQ ID NO: 1506482 - DNA, 15 bp, Homo sapiens
ttctgactcttggcc

SEQ ID NO: 1506483 - DNA, 15 bp, Homo sapiens
tctgactcttggcct

SEQ ID NO: 1506484 - DNA, 15 bp, Homo sapiens
ctgactcttggcctt

SEQ ID NO: 1506485 - DNA, 15 bp, Homo sapiens
tgactcttggccttt

SEQ ID NO: 1506486 - DNA, 15 bp, Homo sapiens
gactcttggcctttt

SEQ ID NO: 1506487 - DNA, 15 bp, Homo sapiens
actcttggccttttc

SEQ ID NO: 1506488 - DNA, 15 bp, Homo sapiens
ctcttggccttttct

SEQ ID NO: 1506489 - DNA, 15 bp, Homo sapiens
tcttggccttttctg

SEQ ID NO: 1506490 - DNA, 15 bp, Homo sapiens
cttggccttttctgc

SEQ ID NO: 1506491 - DNA, 15 bp, Homo sapiens
ttggccttttctgcc

SEQ ID NO: 1506492 - DNA, 15 bp, Homo sapiens
tggccttttctgcct

SEQ ID NO: 1506493 - DNA, 15 bp, Homo sapiens
ggccttttctgcctg

SEQ ID NO: 1506494 - DNA, 15 bp, Homo sapiens
gccttttctgcctgc

SEQ ID NO: 1506495 - DNA, 15 bp, Homo sapiens
ccttttctgcctgct

SEQ ID NO: 1506496 - DNA, 15 bp, Homo sapiens
cttttctgcctgctc

SEQ ID NO: 1506497 - DNA, 15 bp, Homo sapiens
ttttctgcctgctcc

SEQ ID NO: 1506498 - DNA, 15 bp, Homo sapiens
tttctgcctgctcca

SEQ ID NO: 1506499 - DNA, 15 bp, Homo sapiens
ttctgcctgctccac

SEQ ID NO: 1506500 - DNA, 15 bp, Homo sapiens
tctgcctgctccacg

SEQ ID NO: 1506501 - DNA, 15 bp, Homo sapiens
ctgcctgctccacgg

SEQ ID NO: 1506502 - DNA, 15 bp, Homo sapiens
tgcctgctccacggg

SEQ ID NO: 1506503 - DNA, 15 bp, Homo sapiens
gcctgctccacggga

SEQ ID NO: 1506504 - DNA, 15 bp, Homo sapiens
cctgctccacgggag

SEQ ID NO: 1506505 - DNA, 15 bp, Homo sapiens
ctgctccacgggaga

SEQ ID NO: 1506506 - DNA, 15 bp, Homo sapiens
tgctccacgggagac

SEQ ID NO: 1506507 - DNA, 15 bp, Homo sapiens
gctccacgggagaca

SEQ ID NO: 1506508 - DNA, 15 bp, Homo sapiens
ctccacgggagacag

SEQ ID NO: 1506509 - DNA, 15 bp, Homo sapiens
tccacgggagacaga

SEQ ID NO: 1506510 - DNA, 15 bp, Homo sapiens
ccacgggagacagac

SEQ ID NO: 1506511 - DNA, 15 bp, Homo sapiens
cacgggagacagacg

SEQ ID NO: 1506512 - DNA, 15 bp, Homo sapiens
acgggagacagacga

SEQ ID NO: 1506513 - DNA, 15 bp, Homo sapiens
cgggagacagacgac

SEQ ID NO: 1506514 - DNA, 15 bp, Homo sapiens
gggagacagacgacc

SEQ ID NO: 1506515 - DNA, 15 bp, Homo sapiens
ggagacagacgaccc

SEQ ID NO: 1506516 - DNA, 15 bp, Homo sapiens
gagacagacgacccc

SEQ ID NO: 1506517 - DNA, 15 bp, Homo sapiens
agacagacgaccccg

SEQ ID NO: 1506518 - DNA, 15 bp, Homo sapiens
gacagacgaccccgg

SEQ ID NO: 1506519 - DNA, 15 bp, Homo sapiens
acagacgaccccggc

SEQ ID NO: 1506520 - DNA, 15 bp, Homo sapiens
cagacgaccccggca

SEQ ID NO: 1506521 - DNA, 15 bp, Homo sapiens
agacgaccccggcag

SEQ ID NO: 1506522 - DNA, 15 bp, Homo sapiens
gacgaccccggcaga

SEQ ID NO: 1506523 - DNA, 15 bp, Homo sapiens
acgaccccggcagag

SEQ ID NO: 1506524 - DNA, 15 bp, Homo sapiens
cgaccccggcagaga

SEQ ID NO: 1506525 - DNA, 15 bp, Homo sapiens
gaccccggcagagag

SEQ ID NO: 1506526 - DNA, 15 bp, Homo sapiens
accccggcagagagc

SEQ ID NO: 1506527 - DNA, 15 bp, Homo sapiens
ccccggcagagagct

SEQ ID NO: 1506528 - DNA, 15 bp, Homo sapiens
cccggcagagagctg

SEQ ID NO: 1506529 - DNA, 15 bp, Homo sapiens
ccggcagagagctgc

SEQ ID NO: 1506530 - DNA, 15 bp, Homo sapiens
cggcagagagctgcc

SEQ ID NO: 1506531 - DNA, 15 bp, Homo sapiens
ggcagagagctgcct

SEQ ID NO: 1506532 - DNA, 15 bp, Homo sapiens
gcagagagctgcctc

SEQ ID NO: 1506533 - DNA, 15 bp, Homo sapiens
cagagagctgcctcc

SEQ ID NO: 1506534 - DNA, 15 bp, Homo sapiens
agagagctgcctcca

SEQ ID NO: 1506535 - DNA, 15 bp, Homo sapiens
gagagctgcctccac

SEQ ID NO: 1506536 - DNA, 15 bp, Homo sapiens
agagctgcctccacc

SEQ ID NO: 1506537 - DNA, 15 bp, Homo sapiens
gagctgcctccacca

SEQ ID NO: 1506538 - DNA, 15 bp, Homo sapiens
agctgcctccaccac

SEQ ID NO: 1506539 - DNA, 15 bp, Homo sapiens
gctgcctccaccaca

SEQ ID NO: 1506540 - DNA, 15 bp, Homo sapiens
ctgcctccaccacag

SEQ ID NO: 1506541 - DNA, 15 bp, Homo sapiens
tgcctccaccacaga

SEQ ID NO: 1506542 - DNA, 15 bp, Homo sapiens
gcctccaccacagag

SEQ ID NO: 1506543 - DNA, 15 bp, Homo sapiens
cctccaccacagagc

SEQ ID NO: 1506544 - DNA, 15 bp, Homo sapiens
ctccaccacagagct

SEQ ID NO: 1506545 - DNA, 15 bp, Homo sapiens
tccaccacagagctg

SEQ ID NO: 1506546 - DNA, 15 bp, Homo sapiens
ccaccacagagctga

SEQ ID NO: 1506547 - DNA, 15 bp, Homo sapiens
caccacagagctgaa

SEQ ID NO: 1506548 - DNA, 15 bp, Homo sapiens
accacagagctgaag

SEQ ID NO: 1506549 - DNA, 15 bp, Homo sapiens
ccacagagctgaagc

SEQ ID NO: 1506550 - DNA, 15 bp, Homo sapiens
cacagagctgaagca

SEQ ID NO: 1506551 - DNA, 15 bp, Homo sapiens
acagagctgaagcac

SEQ ID NO: 1506552 - DNA, 15 bp, Homo sapiens
cagagctgaagcaca

SEQ ID NO: 1506553 - DNA, 15 bp, Homo sapiens
agagctgaagcacaa

SEQ ID NO: 1506554 - DNA, 15 bp, Homo sapiens
gagctgaagcacaaa

SEQ ID NO: 1506555 - DNA, 15 bp, Homo sapiens
agctgaagcacaaag

SEQ ID NO: 1506556 - DNA, 15 bp, Homo sapiens
gctgaagcacaaagc

SEQ ID NO: 1506557 - DNA, 15 bp, Homo sapiens
ctgaagcacaaagcc

SEQ ID NO: 1506558 - DNA, 15 bp, Homo sapiens
tgaagcacaaagccc

SEQ ID NO: 1506559 - DNA, 15 bp, Homo sapiens
gaagcacaaagccct

SEQ ID NO: 1506560 - DNA, 15 bp, Homo sapiens
aagcacaaagccctt

SEQ ID NO: 1506561 - DNA, 15 bp, Homo sapiens
agcacaaagcccttc

SEQ ID NO: 1506562 - DNA, 15 bp, Homo sapiens
gcacaaagcccttca

SEQ ID NO: 1506563 - DNA, 15 bp, Homo sapiens
cacaaagcccttcac

SEQ ID NO: 1506564 - DNA, 15 bp, Homo sapiens
acaaagcccttcaca

SEQ ID NO: 1506565 - DNA, 15 bp, Homo sapiens
caaagcccttcacag

SEQ ID NO: 1506566 - DNA, 15 bp, Homo sapiens
aaagcccttcacagt

SEQ ID NO: 1506567 - DNA, 15 bp, Homo sapiens
aagcccttcacagtt

SEQ ID NO: 1506568 - DNA, 15 bp, Homo sapiens
agcccttcacagttt

SEQ ID NO: 1506569 - DNA, 15 bp, Homo sapiens
gcccttcacagtttc

SEQ ID NO: 1506570 - DNA, 15 bp, Homo sapiens
cccttcacagtttcc

SEQ ID NO: 1506571 - DNA, 15 bp, Homo sapiens
ccttcacagtttcca

SEQ ID NO: 1506572 - DNA, 15 bp, Homo sapiens
cttcacagtttccaa

SEQ ID NO: 1506573 - DNA, 15 bp, Homo sapiens
ttcacagtttccaag

SEQ ID NO: 1506574 - DNA, 15 bp, Homo sapiens
tcacagtttccaagg

SEQ ID NO: 1506575 - DNA, 15 bp, Homo sapiens
cacagtttccaaggc

SEQ ID NO: 1506576 - DNA, 15 bp, Homo sapiens
acagtttccaaggcc

SEQ ID NO: 1506577 - DNA, 15 bp, Homo sapiens
cagtttccaaggcct

SEQ ID NO: 1506578 - DNA, 15 bp, Homo sapiens
agtttccaaggcctt

SEQ ID NO: 1506579 - DNA, 15 bp, Homo sapiens
gtttccaaggccttt

SEQ ID NO: 1506580 - DNA, 15 bp, Homo sapiens
tttccaaggcctttc

SEQ ID NO: 1506581 - DNA, 15 bp, Homo sapiens
ttccaaggcctttct

SEQ ID NO: 1506582 - DNA, 15 bp, Homo sapiens
tccaaggcctttctt

SEQ ID NO: 1506583 - DNA, 15 bp, Homo sapiens
ccaaggcctttcttt

SEQ ID NO: 1506584 - DNA, 15 bp, Homo sapiens
caaggcctttctttc

SEQ ID NO: 1506585 - DNA, 15 bp, Homo sapiens
aggcctttctttcct

SEQ ID NO: 1506586 - DNA, 15 bp, Homo sapiens
ggcctttctttcctg

SEQ ID NO: 1506587 - DNA, 15 bp, Homo sapiens
gcctttctttcctgt

SEQ ID NO: 1506588 - DNA, 15 bp, Homo sapiens
cctttctttcctgta

SEQ ID NO: 1506589 - DNA, 15 bp, Homo sapiens
ctttctttcctgtaa

SEQ ID NO: 1506590 - DNA, 15 bp, Homo sapiens
tttctttcctgtaac

SEQ ID NO: 1506591 - DNA, 15 bp, Homo sapiens
ttctttcctgtaaca

SEQ ID NO: 1506592 - DNA, 15 bp, Homo sapiens
tctttcctgtaacat

SEQ ID NO: 1506593 - DNA, 15 bp, Homo sapiens
ctttcctgtaacatt

SEQ ID NO: 1506594 - DNA, 15 bp, Homo sapiens
tttcctgtaacattc

SEQ ID NO: 1506595 - DNA, 15 bp, Homo sapiens
ttcctgtaacattcg

SEQ ID NO: 1506596 - DNA, 15 bp, Homo sapiens
tcctgtaacattcgt

SEQ ID NO: 1506597 - DNA, 15 bp, Homo sapiens
cctgtaacattcgtc

SEQ ID NO: 1506598 - DNA, 15 bp, Homo sapiens
ctgtaacattcgtca

SEQ ID NO: 1506599 - DNA, 15 bp, Homo sapiens
tgtaacattcgtcac

SEQ ID NO: 1506600 - DNA, 15 bp, Homo sapiens
gtaacattcgtcact

SEQ ID NO: 1506601 - DNA, 15 bp, Homo sapiens
taacattcgtcactg

SEQ ID NO: 1506602 - DNA, 15 bp, Homo sapiens
aacattcgtcactgc

SEQ ID NO: 1506603 - DNA, 15 bp, Homo sapiens
acattcgtcactgcc

SEQ ID NO: 1506604 - DNA, 15 bp, Homo sapiens
cattcgtcactgccc

SEQ ID NO: 1506605 - DNA, 15 bp, Homo sapiens
attcgtcactgccca

SEQ ID NO: 1506606 - DNA, 15 bp, Homo sapiens
ttcgtcactgcccat

SEQ ID NO: 1506607 - DNA, 15 bp, Homo sapiens
tcgtcactgcccatc

SEQ ID NO: 1506608 - DNA, 15 bp, Homo sapiens
cgtcactgcccatcg

SEQ ID NO: 1506609 - DNA, 15 bp, Homo sapiens
gtcactgcccatcgt

SEQ ID NO: 1506610 - DNA, 15 bp, Homo sapiens
tcactgcccatcgta

SEQ ID NO: 1506611 - DNA, 15 bp, Homo sapiens
cactgcccatcgtac

SEQ ID NO: 1506612 - DNA, 15 bp, Homo sapiens
actgcccatcgtacc

SEQ ID NO: 1506613 - DNA, 15 bp, Homo sapiens
ctgcccatcgtaccc

SEQ ID NO: 1506614 - DNA, 15 bp, Homo sapiens
tgcccatcgtaccca

SEQ ID NO: 1506615 - DNA, 15 bp, Homo sapiens
gcccatcgtacccac

SEQ ID NO: 1506616 - DNA, 15 bp, Homo sapiens
cccatcgtacccact

SEQ ID NO: 1506617 - DNA, 15 bp, Homo sapiens
ccatcgtacccactg

SEQ ID NO: 1506618 - DNA, 15 bp, Homo sapiens
catcgtacccactgg

SEQ ID NO: 1506619 - DNA, 15 bp, Homo sapiens
atcgtacccactggc

SEQ ID NO: 1506620 - DNA, 15 bp, Homo sapiens
tcgtacccactggct

SEQ ID NO: 1506621 - DNA, 15 bp, Homo sapiens
cgtacccactggctt

SEQ ID NO: 1506622 - DNA, 15 bp, Homo sapiens
gtacccactggctta

SEQ ID NO: 1506623 - DNA, 15 bp, Homo sapiens
tacccactggcttaa

SEQ ID NO: 1506624 - DNA, 15 bp, Homo sapiens
acccactggcttaat

SEQ ID NO: 1506625 - DNA, 15 bp, Homo sapiens
cccactggcttaatg

SEQ ID NO: 1506626 - DNA, 15 bp, Homo sapiens
ccactggcttaatgt

SEQ ID NO: 1506627 - DNA, 15 bp, Homo sapiens
cactggcttaatgtc

SEQ ID NO: 1506628 - DNA, 15 bp, Homo sapiens
actggcttaatgtct

SEQ ID NO: 1506629 - DNA, 15 bp, Homo sapiens
ctggcttaatgtctg

SEQ ID NO: 1506630 - DNA, 15 bp, Homo sapiens
tggcttaatgtctgt

SEQ ID NO: 1506631 - DNA, 15 bp, Homo sapiens
ggcttaatgtctgtc

SEQ ID NO: 1506632 - DNA, 15 bp, Homo sapiens
gcttaatgtctgtct

SEQ ID NO: 1506633 - DNA, 15 bp, Homo sapiens
cttaatgtctgtctc

SEQ ID NO: 1506634 - DNA, 15 bp, Homo sapiens
ttaatgtctgtctct

SEQ ID NO: 1506635 - DNA, 15 bp, Homo sapiens
taatgtctgtctctc

SEQ ID NO: 1506636 - DNA, 15 bp, Homo sapiens
aatgtctgtctctct

SEQ ID NO: 1506637 - DNA, 15 bp, Homo sapiens
atgtctgtctctctc

SEQ ID NO: 1506638 - DNA, 15 bp, Homo sapiens
tgtctgtctctctcc

SEQ ID NO: 1506639 - DNA, 15 bp, Homo sapiens
gtctgtctctctcca

SEQ ID NO: 1506640 - DNA, 15 bp, Homo sapiens
tctgtctctctccac

SEQ ID NO: 1506641 - DNA, 15 bp, Homo sapiens
ctgtctctctccact

SEQ ID NO: 1506642 - DNA, 15 bp, Homo sapiens
tgtctctctccactg

SEQ ID NO: 1506643 - DNA, 15 bp, Homo sapiens
gtctctctccactgg

SEQ ID NO: 1506644 - DNA, 15 bp, Homo sapiens
tctctctccactgga

SEQ ID NO: 1506645 - DNA, 15 bp, Homo sapiens
ctctctccactggaa

SEQ ID NO: 1506646 - DNA, 15 bp, Homo sapiens
tctctccactggaag

SEQ ID NO: 1506647 - DNA, 15 bp, Homo sapiens
ctctccactggaagg

SEQ ID NO: 1506648 - DNA, 15 bp, Homo sapiens
tctccactggaagga

SEQ ID NO: 1506649 - DNA, 15 bp, Homo sapiens
ctccactggaaggag

SEQ ID NO: 1506650 - DNA, 15 bp, Homo sapiens
tccactggaaggagg

SEQ ID NO: 1506651 - DNA, 15 bp, Homo sapiens
ccactggaaggaggc

SEQ ID NO: 1506652 - DNA, 15 bp, Homo sapiens
cactggaaggaggct

SEQ ID NO: 1506653 - DNA, 15 bp, Homo sapiens
actggaaggaggctc

SEQ ID NO: 1506654 - DNA, 15 bp, Homo sapiens
ctggaaggaggctcc

SEQ ID NO: 1506655 - DNA, 15 bp, Homo sapiens
tggaaggaggctcca

SEQ ID NO: 1506656 - DNA, 15 bp, Homo sapiens
ggaaggaggctccac

SEQ ID NO: 1506657 - DNA, 15 bp, Homo sapiens
gaaggaggctccacg

SEQ ID NO: 1506658 - DNA, 15 bp, Homo sapiens
aaggaggctccacga

SEQ ID NO: 1506659 - DNA, 15 bp, Homo sapiens
aggaggctccacgag

SEQ ID NO: 1506660 - DNA, 15 bp, Homo sapiens
ggaggctccacgagg

SEQ ID NO: 1506661 - DNA, 15 bp, Homo sapiens
gaggctccacgaggg

SEQ ID NO: 1506662 - DNA, 15 bp, Homo sapiens
aggctccacgagggc

SEQ ID NO: 1506663 - DNA, 15 bp, Homo sapiens
ggctccacgagggca

SEQ ID NO: 1506664 - DNA, 15 bp, Homo sapiens
gctccacgagggcac

SEQ ID NO: 1506665 - DNA, 15 bp, Homo sapiens
ctccacgagggcacc

SEQ ID NO: 1506666 - DNA, 15 bp, Homo sapiens
tccacgagggcaccg

SEQ ID NO: 1506667 - DNA, 15 bp, Homo sapiens
ccacgagggcaccgc

SEQ ID NO: 1506668 - DNA, 15 bp, Homo sapiens
cacgagggcaccgct

SEQ ID NO: 1506669 - DNA, 15 bp, Homo sapiens
acgagggcaccgctc

SEQ ID NO: 1506670 - DNA, 15 bp, Homo sapiens
cgagggcaccgctct

SEQ ID NO: 1506671 - DNA, 15 bp, Homo sapiens
gagggcaccgctctg

SEQ ID NO: 1506672 - DNA, 15 bp, Homo sapiens
agggcaccgctctgg

SEQ ID NO: 1506673 - DNA, 15 bp, Homo sapiens
gggcaccgctctggt

SEQ ID NO: 1506674 - DNA, 15 bp, Homo sapiens
ggcaccgctctggtt

SEQ ID NO: 1506675 - DNA, 15 bp, Homo sapiens
gcaccgctctggttt

SEQ ID NO: 1506676 - DNA, 15 bp, Homo sapiens
caccgctctggtttt

SEQ ID NO: 1506677 - DNA, 15 bp, Homo sapiens
accgctctggttttc

SEQ ID NO: 1506678 - DNA, 15 bp, Homo sapiens
ccgctctggttttct

SEQ ID NO: 1506679 - DNA, 15 bp, Homo sapiens
cgctctggttttctt

SEQ ID NO: 1506680 - DNA, 15 bp, Homo sapiens
gctctggttttcttc

SEQ ID NO: 1506681 - DNA, 15 bp, Homo sapiens
ctctggttttcttcc

SEQ ID NO: 1506682 - DNA, 15 bp, Homo sapiens
tctggttttcttccc

SEQ ID NO: 1506683 - DNA, 15 bp, Homo sapiens
ctggttttcttccct

SEQ ID NO: 1506684 - DNA, 15 bp, Homo sapiens
tggttttcttccctg

SEQ ID NO: 1506685 - DNA, 15 bp, Homo sapiens
ggttttcttccctgg

SEQ ID NO: 1506686 - DNA, 15 bp, Homo sapiens
gttttcttccctggt

SEQ ID NO: 1506687 - DNA, 15 bp, Homo sapiens
ttttcttccctggtg

SEQ ID NO: 1506688 - DNA, 15 bp, Homo sapiens
tttcttccctggtga

SEQ ID NO: 1506689 - DNA, 15 bp, Homo sapiens
ttcttccctggtgat

SEQ ID NO: 1506690 - DNA, 15 bp, Homo sapiens
tcttccctggtgatc

SEQ ID NO: 1506691 - DNA, 15 bp, Homo sapiens
cttccctggtgatcc

SEQ ID NO: 1506692 - DNA, 15 bp, Homo sapiens
ttccctggtgatccc

SEQ ID NO: 1506693 - DNA, 15 bp, Homo sapiens
tccctggtgatccca

SEQ ID NO: 1506694 - DNA, 15 bp, Homo sapiens
ccctggtgatcccag

SEQ ID NO: 1506695 - DNA, 15 bp, Homo sapiens
cctggtgatcccagc

SEQ ID NO: 1506696 - DNA, 15 bp, Homo sapiens
ctggtgatcccagca

SEQ ID NO: 1506697 - DNA, 15 bp, Homo sapiens
tggtgatcccagcac

SEQ ID NO: 1506698 - DNA, 15 bp, Homo sapiens
ggtgatcccagcacc

SEQ ID NO: 1506699 - DNA, 15 bp, Homo sapiens
gtgatcccagcacct

SEQ ID NO: 1506700 - DNA, 15 bp, Homo sapiens
tgatcccagcaccta

SEQ ID NO: 1506701 - DNA, 15 bp, Homo sapiens
gatcccagcacctag

SEQ ID NO: 1506702 - DNA, 15 bp, Homo sapiens
atcccagcacctaga

SEQ ID NO: 1506703 - DNA, 15 bp, Homo sapiens
tcccagcacctagaa

SEQ ID NO: 1506704 - DNA, 15 bp, Homo sapiens
cccagcacctagaag

SEQ ID NO: 1506705 - DNA, 15 bp, Homo sapiens
ccagcacctagaagg

SEQ ID NO: 1506706 - DNA, 15 bp, Homo sapiens
cagcacctagaagga

SEQ ID NO: 1506707 - DNA, 15 bp, Homo sapiens
agcacctagaaggac

SEQ ID NO: 1506708 - DNA, 15 bp, Homo sapiens
gcacctagaaggacg

SEQ ID NO: 1506709 - DNA, 15 bp, Homo sapiens
cacctagaaggacgc

SEQ ID NO: 1506710 - DNA, 15 bp, Homo sapiens
acctagaaggacgcc

SEQ ID NO: 1506711 - DNA, 15 bp, Homo sapiens
cctagaaggacgccc

SEQ ID NO: 1506712 - DNA, 15 bp, Homo sapiens
ctagaaggacgcccg

SEQ ID NO: 1506713 - DNA, 15 bp, Homo sapiens
tagaaggacgcccgc

SEQ ID NO: 1506714 - DNA, 15 bp, Homo sapiens
agaaggacgcccgcc

SEQ ID NO: 1506715 - DNA, 15 bp, Homo sapiens
gaaggacgcccgccc

SEQ ID NO: 1506716 - DNA, 15 bp, Homo sapiens
aaggacgcccgcccg

SEQ ID NO: 1506717 - DNA, 15 bp, Homo sapiens
aggacgcccgcccgc

SEQ ID NO: 1506718 - DNA, 15 bp, Homo sapiens
ggacgcccgcccgct

SEQ ID NO: 1506719 - DNA, 15 bp, Homo sapiens
gacgcccgcccgctg

SEQ ID NO: 1506720 - DNA, 15 bp, Homo sapiens
acgcccgcccgctgc

SEQ ID NO: 1506721 - DNA, 15 bp, Homo sapiens
cgcccgcccgctgcc

SEQ ID NO: 1506722 - DNA, 15 bp, Homo sapiens
gcccgcccgctgcct

SEQ ID NO: 1506723 - DNA, 15 bp, Homo sapiens
cccgcccgctgcctg

SEQ ID NO: 1506724 - DNA, 15 bp, Homo sapiens
ccgcccgctgcctgt

SEQ ID NO: 1506725 - DNA, 15 bp, Homo sapiens
cgcccgctgcctgtg

SEQ ID NO: 1506726 - DNA, 15 bp, Homo sapiens
gcccgctgcctgtgc

SEQ ID NO: 1506727 - DNA, 15 bp, Homo sapiens
cccgctgcctgtgct

SEQ ID NO: 1506728 - DNA, 15 bp, Homo sapiens
ccgctgcctgtgctc

SEQ ID NO: 1506729 - DNA, 15 bp, Homo sapiens
cgctgcctgtgctca

SEQ ID NO: 1506730 - DNA, 15 bp, Homo sapiens
gctgcctgtgctcag

SEQ ID NO: 1506731 - DNA, 15 bp, Homo sapiens
ctgcctgtgctcaga

SEQ ID NO: 1506732 - DNA, 15 bp, Homo sapiens
tgcctgtgctcagat

SEQ ID NO: 1506733 - DNA, 15 bp, Homo sapiens
gcctgtgctcagata

SEQ ID NO: 1506734 - DNA, 15 bp, Homo sapiens
cctgtgctcagatac

SEQ ID NO: 1506735 - DNA, 15 bp, Homo sapiens
ctgtgctcagataca

SEQ ID NO: 1506736 - DNA, 15 bp, Homo sapiens
tgtgctcagatacat

SEQ ID NO: 1506737 - DNA, 15 bp, Homo sapiens
gtgctcagatacatt

SEQ ID NO: 1506738 - DNA, 15 bp, Homo sapiens
tgctcagatacattc

SEQ ID NO: 1506739 - DNA, 15 bp, Homo sapiens
gctcagatacattct

SEQ ID NO: 1506740 - DNA, 15 bp, Homo sapiens
ctcagatacattctc

SEQ ID NO: 1506741 - DNA, 15 bp, Homo sapiens
tcagatacattctca

SEQ ID NO: 1506742 - DNA, 15 bp, Homo sapiens
cagatacattctcaa

SEQ ID NO: 1506743 - DNA, 15 bp, Homo sapiens
agatacattctcaaa

SEQ ID NO: 1506744 - DNA, 15 bp, Homo sapiens
gatacattctcaaat

SEQ ID NO: 1506745 - DNA, 15 bp, Homo sapiens
atacattctcaaatg

SEQ ID NO: 1506746 - DNA, 15 bp, Homo sapiens
tacattctcaaatga

SEQ ID NO: 1506747 - DNA, 15 bp, Homo sapiens
acattctcaaatgaa

SEQ ID NO: 1506748 - DNA, 15 bp, Homo sapiens
cattctcaaatgaac

SEQ ID NO: 1506749 - DNA, 15 bp, Homo sapiens
attctcaaatgaaca

SEQ ID NO: 1506750 - DNA, 15 bp, Homo sapiens
ttctcaaatgaacag

SEQ ID NO: 1506751 - DNA, 15 bp, Homo sapiens
tctcaaatgaacagc

SEQ ID NO: 1506752 - DNA, 15 bp, Homo sapiens
ctcaaatgaacagct

SEQ ID NO: 1506753 - DNA, 15 bp, Homo sapiens
tcaaatgaacagctc

SEQ ID NO: 1506754 - DNA, 15 bp, Homo sapiens
caaatgaacagctct

SEQ ID NO: 1506755 - DNA, 15 bp, Homo sapiens
aaatgaacagctctc

SEQ ID NO: 1506756 - DNA, 15 bp, Homo sapiens
aatgaacagctctcc

SEQ ID NO: 1506757 - DNA, 15 bp, Homo sapiens
atgaacagctctcct

SEQ ID NO: 1506758 - DNA, 15 bp, Homo sapiens
tgaacagctctcctg

SEQ ID NO: 1506759 - DNA, 15 bp, Homo sapiens
gaacagctctcctgt

SEQ ID NO: 1506760 - DNA, 15 bp, Homo sapiens
aacagctctcctgtg

SEQ ID NO: 1506761 - DNA, 15 bp, Homo sapiens
acagctctcctgtga

SEQ ID NO: 1506762 - DNA, 15 bp, Homo sapiens
cagctctcctgtgac

SEQ ID NO: 1506763 - DNA, 15 bp, Homo sapiens
agctctcctgtgaca

SEQ ID NO: 1506764 - DNA, 15 bp, Homo sapiens
gctctcctgtgacaa

SEQ ID NO: 1506765 - DNA, 15 bp, Homo sapiens
ctctcctgtgacaag

SEQ ID NO: 1506766 - DNA, 15 bp, Homo sapiens
tctcctgtgacaagg

SEQ ID NO: 1506767 - DNA, 15 bp, Homo sapiens
ctcctgtgacaagga

SEQ ID NO: 1506768 - DNA, 15 bp, Homo sapiens
tcctgtgacaaggac

SEQ ID NO: 1506769 - DNA, 15 bp, Homo sapiens
cctgtgacaaggaca

SEQ ID NO: 1506770 - DNA, 15 bp, Homo sapiens
ctgtgacaaggacac

SEQ ID NO: 1506771 - DNA, 15 bp, Homo sapiens
tgtgacaaggacacg

SEQ ID NO: 1506772 - DNA, 15 bp, Homo sapiens
gtgacaaggacacgt

SEQ ID NO: 1506773 - DNA, 15 bp, Homo sapiens
tgacaaggacacgtt

SEQ ID NO: 1506774 - DNA, 15 bp, Homo sapiens
gacaaggacacgttc

SEQ ID NO: 1506775 - DNA, 15 bp, Homo sapiens
acaaggacacgttcg

SEQ ID NO: 1506776 - DNA, 15 bp, Homo sapiens
caaggacacgttcgg

SEQ ID NO: 1506777 - DNA, 15 bp, Homo sapiens
aaggacacgttcggt

SEQ ID NO: 1506778 - DNA, 15 bp, Homo sapiens
aggacacgttcggtc

SEQ ID NO: 1506779 - DNA, 15 bp, Homo sapiens
ggacacgttcggtcc

SEQ ID NO: 1506780 - DNA, 15 bp, Homo sapiens
gacacgttcggtccc

SEQ ID NO: 1506781 - DNA, 15 bp, Homo sapiens
acacgttcggtcccc

SEQ ID NO: 1506782 - DNA, 15 bp, Homo sapiens
cacgttcggtcccca

SEQ ID NO: 1506783 - DNA, 15 bp, Homo sapiens
acgttcggtccccac

SEQ ID NO: 1506784 - DNA, 15 bp, Homo sapiens
cgttcggtccccact

SEQ ID NO: 1506785 - DNA, 15 bp, Homo sapiens
gttcggtccccactt

SEQ ID NO: 1506786 - DNA, 15 bp, Homo sapiens
ttcggtccccacttt

SEQ ID NO: 1506787 - DNA, 15 bp, Homo sapiens
tcggtccccacttta

SEQ ID NO: 1506788 - DNA, 15 bp, Homo sapiens
cggtccccactttac

SEQ ID NO: 1506789 - DNA, 15 bp, Homo sapiens
ggtccccactttaca

SEQ ID NO: 1506790 - DNA, 15 bp, Homo sapiens
gtccccactttacaa

SEQ ID NO: 1506791 - DNA, 15 bp, Homo sapiens
tccccactttacaag

SEQ ID NO: 1506792 - DNA, 15 bp, Homo sapiens
ccccactttacaagt

SEQ ID NO: 1506793 - DNA, 15 bp, Homo sapiens
cccactttacaagta

SEQ ID NO: 1506794 - DNA, 15 bp, Homo sapiens
ccactttacaagtaa

SEQ ID NO: 1506795 - DNA, 15 bp, Homo sapiens
cactttacaagtaag

SEQ ID NO: 1506796 - DNA, 15 bp, Homo sapiens
actttacaagtaagg

SEQ ID NO: 1506797 - DNA, 15 bp, Homo sapiens
ctttacaagtaaggg

SEQ ID NO: 1506798 - DNA, 15 bp, Homo sapiens
tttacaagtaaggga

SEQ ID NO: 1506799 - DNA, 15 bp, Homo sapiens
ttacaagtaagggac

SEQ ID NO: 1506800 - DNA, 15 bp, Homo sapiens
tacaagtaagggaca

SEQ ID NO: 1506801 - DNA, 15 bp, Homo sapiens
acaagtaagggacac

SEQ ID NO: 1506802 - DNA, 15 bp, Homo sapiens
caagtaagggacacg

SEQ ID NO: 1506803 - DNA, 15 bp, Homo sapiens
aagtaagggacacgg

SEQ ID NO: 1506804 - DNA, 15 bp, Homo sapiens
agtaagggacacggc

SEQ ID NO: 1506805 - DNA, 15 bp, Homo sapiens
gtaagggacacggcc

SEQ ID NO: 1506806 - DNA, 15 bp, Homo sapiens
taagggacacggcct

SEQ ID NO: 1506807 - DNA, 15 bp, Homo sapiens
aagggacacggcctc

SEQ ID NO: 1506808 - DNA, 15 bp, Homo sapiens
agggacacggcctct

SEQ ID NO: 1506809 - DNA, 15 bp, Homo sapiens
gggacacggcctctc

SEQ ID NO: 1506810 - DNA, 15 bp, Homo sapiens
ggacacggcctctca

SEQ ID NO: 1506811 - DNA, 15 bp, Homo sapiens
gacacggcctctcag

SEQ ID NO: 1506812 - DNA, 15 bp, Homo sapiens
acacggcctctcagc

SEQ ID NO: 1506813 - DNA, 15 bp, Homo sapiens
cacggcctctcagca

SEQ ID NO: 1506814 - DNA, 15 bp, Homo sapiens
acggcctctcagcaa

SEQ ID NO: 1506815 - DNA, 15 bp, Homo sapiens
cggcctctcagcaac

SEQ ID NO: 1506816 - DNA, 15 bp, Homo sapiens
ggcctctcagcaact

SEQ ID NO: 1506817 - DNA, 15 bp, Homo sapiens
gcctctcagcaactc

SEQ ID NO: 1506818 - DNA, 15 bp, Homo sapiens
cctctcagcaactcc

SEQ ID NO: 1506819 - DNA, 15 bp, Homo sapiens
ctctcagcaactccg

SEQ ID NO: 1506820 - DNA, 15 bp, Homo sapiens
tctcagcaactccgg

SEQ ID NO: 1506821 - DNA, 15 bp, Homo sapiens
ctcagcaactccggg

SEQ ID NO: 1506822 - DNA, 15 bp, Homo sapiens
tcagcaactccggga

SEQ ID NO: 1506823 - DNA, 15 bp, Homo sapiens
cagcaactccgggac

SEQ ID NO: 1506824 - DNA, 15 bp, Homo sapiens
agcaactccgggact

SEQ ID NO: 1506825 - DNA, 15 bp, Homo sapiens
gcaactccgggactg

SEQ ID NO: 1506826 - DNA, 15 bp, Homo sapiens
caactccgggactgg

SEQ ID NO: 1506827 - DNA, 15 bp, Homo sapiens
aactccgggactgga

SEQ ID NO: 1506828 - DNA, 15 bp, Homo sapiens
actccgggactggag

SEQ ID NO: 1506829 - DNA, 15 bp, Homo sapiens
ctccgggactggagg

SEQ ID NO: 1506830 - DNA, 15 bp, Homo sapiens
tccgggactggaggg

SEQ ID NO: 1506831 - DNA, 15 bp, Homo sapiens
ccgggactggagggc

SEQ ID NO: 1506832 - DNA, 15 bp, Homo sapiens
cgggactggagggct

SEQ ID NO: 1506833 - DNA, 15 bp, Homo sapiens
gggactggagggcta

SEQ ID NO: 1506834 - DNA, 15 bp, Homo sapiens
ggactggagggctag

SEQ ID NO: 1506835 - DNA, 15 bp, Homo sapiens
gactggagggctagg

SEQ ID NO: 1506836 - DNA, 15 bp, Homo sapiens
actggagggctaggg

SEQ ID NO: 1506837 - DNA, 15 bp, Homo sapiens
ctggagggctagggc

SEQ ID NO: 1506838 - DNA, 15 bp, Homo sapiens
tggagggctagggca

SEQ ID NO: 1506839 - DNA, 15 bp, Homo sapiens
ggagggctagggcag

SEQ ID NO: 1506840 - DNA, 15 bp, Homo sapiens
gagggctagggcagt

SEQ ID NO: 1506841 - DNA, 15 bp, Homo sapiens
agggctagggcagtc

SEQ ID NO: 1506842 - DNA, 15 bp, Homo sapiens
gggctagggcagtct

SEQ ID NO: 1506843 - DNA, 15 bp, Homo sapiens
ggctagggcagtctg

SEQ ID NO: 1506844 - DNA, 15 bp, Homo sapiens
gctagggcagtctgg

SEQ ID NO: 1506845 - DNA, 15 bp, Homo sapiens
ctagggcagtctggg

SEQ ID NO: 1506846 - DNA, 15 bp, Homo sapiens
tagggcagtctggga

SEQ ID NO: 1506847 - DNA, 15 bp, Homo sapiens
agggcagtctgggat

SEQ ID NO: 1506848 - DNA, 15 bp, Homo sapiens
gggcagtctgggatg

SEQ ID NO: 1506849 - DNA, 15 bp, Homo sapiens
ggcagtctgggatgc

SEQ ID NO: 1506850 - DNA, 15 bp, Homo sapiens
gcagtctgggatgcc

SEQ ID NO: 1506851 - DNA, 15 bp, Homo sapiens
cagtctgggatgcct

SEQ ID NO: 1506852 - DNA, 15 bp, Homo sapiens
agtctgggatgcctc

SEQ ID NO: 1506853 - DNA, 15 bp, Homo sapiens
gtctgggatgcctca

SEQ ID NO: 1506854 - DNA, 15 bp, Homo sapiens
tctgggatgcctcat

SEQ ID NO: 1506855 - DNA, 15 bp, Homo sapiens
ctgggatgcctcatc

SEQ ID NO: 1506856 - DNA, 15 bp, Homo sapiens
tgggatgcctcatcc

SEQ ID NO: 1506857 - DNA, 15 bp, Homo sapiens
gggatgcctcatcct

SEQ ID NO: 1506858 - DNA, 15 bp, Homo sapiens
ggatgcctcatcctg

SEQ ID NO: 1506859 - DNA, 15 bp, Homo sapiens
gatgcctcatcctgc

SEQ ID NO: 1506860 - DNA, 15 bp, Homo sapiens
atgcctcatcctgca

SEQ ID NO: 1506861 - DNA, 15 bp, Homo sapiens
tgcctcatcctgcaa

SEQ ID NO: 1506862 - DNA, 15 bp, Homo sapiens
gcctcatcctgcaat

SEQ ID NO: 1506863 - DNA, 15 bp, Homo sapiens
cctcatcctgcaatg

SEQ ID NO: 1506864 - DNA, 15 bp, Homo sapiens
ctcatcctgcaatgg

SEQ ID NO: 1506865 - DNA, 15 bp, Homo sapiens
tcatcctgcaatgga

SEQ ID NO: 1506866 - DNA, 15 bp, Homo sapiens
catcctgcaatggag

SEQ ID NO: 1506867 - DNA, 15 bp, Homo sapiens
atcctgcaatggagt

SEQ ID NO: 1506868 - DNA, 15 bp, Homo sapiens
tcctgcaatggagtc

SEQ ID NO: 1506869 - DNA, 15 bp, Homo sapiens
cctgcaatggagtcc

SEQ ID NO: 1506870 - DNA, 15 bp, Homo sapiens
ctgcaatggagtccg

SEQ ID NO: 1506871 - DNA, 15 bp, Homo sapiens
tgcaatggagtccgc

SEQ ID NO: 1506872 - DNA, 15 bp, Homo sapiens
gcaatggagtccgcc

SEQ ID NO: 1506873 - DNA, 15 bp, Homo sapiens
caatggagtccgcct

SEQ ID NO: 1506874 - DNA, 15 bp, Homo sapiens
aatggagtccgccta

SEQ ID NO: 1506875 - DNA, 15 bp, Homo sapiens
atggagtccgcctat

SEQ ID NO: 1506876 - DNA, 15 bp, Homo sapiens
tggagtccgcctatg

SEQ ID NO: 1506877 - DNA, 15 bp, Homo sapiens
ggagtccgcctatga

SEQ ID NO: 1506878 - DNA, 15 bp, Homo sapiens
gagtccgcctatgac

SEQ ID NO: 1506879 - DNA, 15 bp, Homo sapiens
agtccgcctatgaca

SEQ ID NO: 1506880 - DNA, 15 bp, Homo sapiens
gtccgcctatgacaa

SEQ ID NO: 1506881 - DNA, 15 bp, Homo sapiens
tccgcctatgacaac

SEQ ID NO: 1506882 - DNA, 15 bp, Homo sapiens
ccgcctatgacaacg

SEQ ID NO: 1506883 - DNA, 15 bp, Homo sapiens
cgcctatgacaacgt

SEQ ID NO: 1506884 - DNA, 15 bp, Homo sapiens
gcctatgacaacgta

SEQ ID NO: 1506885 - DNA, 15 bp, Homo sapiens
cctatgacaacgtag

SEQ ID NO: 1506886 - DNA, 15 bp, Homo sapiens
ctatgacaacgtaga

SEQ ID NO: 1506887 - DNA, 15 bp, Homo sapiens
tatgacaacgtagaa

SEQ ID NO: 1506888 - DNA, 15 bp, Homo sapiens
atgacaacgtagaag

SEQ ID NO: 1506889 - DNA, 15 bp, Homo sapiens
tgacaacgtagaagc

SEQ ID NO: 1506890 - DNA, 15 bp, Homo sapiens
gacaacgtagaagct

SEQ ID NO: 1506891 - DNA, 15 bp, Homo sapiens
acaacgtagaagctc

SEQ ID NO: 1506892 - DNA, 15 bp, Homo sapiens
caacgtagaagctct

SEQ ID NO: 1506893 - DNA, 15 bp, Homo sapiens
aacgtagaagctctc

SEQ ID NO: 1506894 - DNA, 15 bp, Homo sapiens
acgtagaagctctct

SEQ ID NO: 1506895 - DNA, 15 bp, Homo sapiens
cgtagaagctctctg

SEQ ID NO: 1506896 - DNA, 15 bp, Homo sapiens
gtagaagctctctgg

SEQ ID NO: 1506897 - DNA, 15 bp, Homo sapiens
tagaagctctctggg

SEQ ID NO: 1506898 - DNA, 15 bp, Homo sapiens
agaagctctctggga

SEQ ID NO: 1506899 - DNA, 15 bp, Homo sapiens
gaagctctctgggag

SEQ ID NO: 1506900 - DNA, 15 bp, Homo sapiens
aagctctctgggagg

SEQ ID NO: 1506901 - DNA, 15 bp, Homo sapiens
agctctctgggagga

SEQ ID NO: 1506902 - DNA, 15 bp, Homo sapiens
gctctctgggaggaa

SEQ ID NO: 1506903 - DNA, 15 bp, Homo sapiens
ctctctgggaggaaa

SEQ ID NO: 1506904 - DNA, 15 bp, Homo sapiens
tctctgggaggaaaa

SEQ ID NO: 1506905 - DNA, 15 bp, Homo sapiens
ctctgggaggaaaag

SEQ ID NO: 1506906 - DNA, 15 bp, Homo sapiens
tctgggaggaaaagg

SEQ ID NO: 1506907 - DNA, 15 bp, Homo sapiens
ctgggaggaaaaggg

SEQ ID NO: 1506908 - DNA, 15 bp, Homo sapiens
tgggaggaaaaggga

SEQ ID NO: 1506909 - DNA, 15 bp, Homo sapiens
gggaggaaaagggaa

SEQ ID NO: 1506910 - DNA, 15 bp, Homo sapiens
ggaggaaaagggaag

SEQ ID NO: 1506911 - DNA, 15 bp, Homo sapiens
gaggaaaagggaagc

SEQ ID NO: 1506912 - DNA, 15 bp, Homo sapiens
aggaaaagggaagcg

SEQ ID NO: 1506913 - DNA, 15 bp, Homo sapiens
ggaaaagggaagcgg

SEQ ID NO: 1506914 - DNA, 15 bp, Homo sapiens
gaaaagggaagcggt

SEQ ID NO: 1506915 - DNA, 15 bp, Homo sapiens
aaaagggaagcggtt

SEQ ID NO: 1506916 - DNA, 15 bp, Homo sapiens
aaagggaagcggttt

SEQ ID NO: 1506917 - DNA, 15 bp, Homo sapiens
aagggaagcggtttg

SEQ ID NO: 1506918 - DNA, 15 bp, Homo sapiens
agggaagcggtttgg

SEQ ID NO: 1506919 - DNA, 15 bp, Homo sapiens
gggaagcggtttggg

SEQ ID NO: 1506920 - DNA, 15 bp, Homo sapiens
ggaagcggtttggga

SEQ ID NO: 1506921 - DNA, 15 bp, Homo sapiens
gaagcggtttgggag

SEQ ID NO: 1506922 - DNA, 15 bp, Homo sapiens
aagcggtttgggagt

SEQ ID NO: 1506923 - DNA, 15 bp, Homo sapiens
agcggtttgggagtt

SEQ ID NO: 1506924 - DNA, 15 bp, Homo sapiens
gcggtttgggagttt

SEQ ID NO: 1506925 - DNA, 15 bp, Homo sapiens
cggtttgggagtttc

SEQ ID NO: 1506926 - DNA, 15 bp, Homo sapiens
ggtttgggagtttct

SEQ ID NO: 1506927 - DNA, 15 bp, Homo sapiens
gtttgggagtttcta

SEQ ID NO: 1506928 - DNA, 15 bp, Homo sapiens
tttgggagtttctag

SEQ ID NO: 1506929 - DNA, 15 bp, Homo sapiens
ttgggagtttctaga

SEQ ID NO: 1506930 - DNA, 15 bp, Homo sapiens
tgggagtttctagaa

SEQ ID NO: 1506931 - DNA, 15 bp, Homo sapiens
gggagtttctagaag

SEQ ID NO: 1506932 - DNA, 15 bp, Homo sapiens
ggagtttctagaagt

SEQ ID NO: 1506933 - DNA, 15 bp, Homo sapiens
gagtttctagaagtc

SEQ ID NO: 1506934 - DNA, 15 bp, Homo sapiens
agtttctagaagtct

SEQ ID NO: 1506935 - DNA, 15 bp, Homo sapiens
gtttctagaagtcta

SEQ ID NO: 1506936 - DNA, 15 bp, Homo sapiens
tttctagaagtctac

SEQ ID NO: 1506937 - DNA, 15 bp, Homo sapiens
ttctagaagtctacc

SEQ ID NO: 1506938 - DNA, 15 bp, Homo sapiens
tctagaagtctacct

SEQ ID NO: 1506939 - DNA, 15 bp, Homo sapiens
ctagaagtctacctc

SEQ ID NO: 1506940 - DNA, 15 bp, Homo sapiens
tagaagtctacctct

SEQ ID NO: 1506941 - DNA, 15 bp, Homo sapiens
agaagtctacctctg

SEQ ID NO: 1506942 - DNA, 15 bp, Homo sapiens
gaagtctacctctgc

SEQ ID NO: 1506943 - DNA, 15 bp, Homo sapiens
aagtctacctctgca

SEQ ID NO: 1506944 - DNA, 15 bp, Homo sapiens
agtctacctctgcag

SEQ ID NO: 1506945 - DNA, 15 bp, Homo sapiens
gtctacctctgcagc

SEQ ID NO: 1506946 - DNA, 15 bp, Homo sapiens
tctacctctgcagca

SEQ ID NO: 1506947 - DNA, 15 bp, Homo sapiens
ctacctctgcagcaa

SEQ ID NO: 1506948 - DNA, 15 bp, Homo sapiens
tacctctgcagcaac

SEQ ID NO: 1506949 - DNA, 15 bp, Homo sapiens
acctctgcagcaaca

SEQ ID NO: 1506950 - DNA, 15 bp, Homo sapiens
cctctgcagcaacat

SEQ ID NO: 1506951 - DNA, 15 bp, Homo sapiens
ctctgcagcaacatt

SEQ ID NO: 1506952 - DNA, 15 bp, Homo sapiens
tctgcagcaacattt

SEQ ID NO: 1506953 - DNA, 15 bp, Homo sapiens
ctgcagcaacatttg

SEQ ID NO: 1506954 - DNA, 15 bp, Homo sapiens
tgcagcaacatttgg

SEQ ID NO: 1506955 - DNA, 15 bp, Homo sapiens
gcagcaacatttggc

SEQ ID NO: 1506956 - DNA, 15 bp, Homo sapiens
cagcaacatttggcc

SEQ ID NO: 1506957 - DNA, 15 bp, Homo sapiens
agcaacatttggcca

SEQ ID NO: 1506958 - DNA, 15 bp, Homo sapiens
gcaacatttggccaa

SEQ ID NO: 1506959 - DNA, 15 bp, Homo sapiens
caacatttggccaac

SEQ ID NO: 1506960 - DNA, 15 bp, Homo sapiens
aacatttggccaacc

SEQ ID NO: 1506961 - DNA, 15 bp, Homo sapiens
acatttggccaacca

SEQ ID NO: 1506962 - DNA, 15 bp, Homo sapiens
catttggccaaccaa

SEQ ID NO: 1506963 - DNA, 15 bp, Homo sapiens
atttggccaaccaaa

SEQ ID NO: 1506964 - DNA, 15 bp, Homo sapiens
tttggccaaccaaag

SEQ ID NO: 1506965 - DNA, 15 bp, Homo sapiens
ttggccaaccaaaga

SEQ ID NO: 1506966 - DNA, 15 bp, Homo sapiens
tggccaaccaaagaa

SEQ ID NO: 1506967 - DNA, 15 bp, Homo sapiens
ggccaaccaaagaaa

SEQ ID NO: 1506968 - DNA, 15 bp, Homo sapiens
gccaaccaaagaaag

SEQ ID NO: 1506969 - DNA, 15 bp, Homo sapiens
ccaaccaaagaaagg

SEQ ID NO: 1506970 - DNA, 15 bp, Homo sapiens
caaccaaagaaaggt

SEQ ID NO: 1506971 - DNA, 15 bp, Homo sapiens
aaccaaagaaaggtt

SEQ ID NO: 1506972 - DNA, 15 bp, Homo sapiens
accaaagaaaggttt

SEQ ID NO: 1506973 - DNA, 15 bp, Homo sapiens
ccaaagaaaggtttt

SEQ ID NO: 1506974 - DNA, 15 bp, Homo sapiens
caaagaaaggttttc

SEQ ID NO: 1506975 - DNA, 15 bp, Homo sapiens
aaagaaaggttttcg

SEQ ID NO: 1506976 - DNA, 15 bp, Homo sapiens
aagaaaggttttcga

SEQ ID NO: 1506977 - DNA, 15 bp, Homo sapiens
agaaaggttttcgat

SEQ ID NO: 1506978 - DNA, 15 bp, Homo sapiens
gaaaggttttcgatt

SEQ ID NO: 1506979 - DNA, 15 bp, Homo sapiens
aaaggttttcgattt

SEQ ID NO: 1506980 - DNA, 15 bp, Homo sapiens
aaggttttcgatttg

SEQ ID NO: 1506981 - DNA, 15 bp, Homo sapiens
aggttttcgatttgt

SEQ ID NO: 1506982 - DNA, 15 bp, Homo sapiens
ggttttcgatttgtt

SEQ ID NO: 1506983 - DNA, 15 bp, Homo sapiens
gttttcgatttgttt

SEQ ID NO: 1506984 - DNA, 15 bp, Homo sapiens
ttttcgatttgtttt

SEQ ID NO: 1506985 - DNA, 15 bp, Homo sapiens
tttcgatttgtttta

SEQ ID NO: 1506986 - DNA, 15 bp, Homo sapiens
ttcgatttgttttat

SEQ ID NO: 1506987 - DNA, 15 bp, Homo sapiens
tcgatttgttttatt

SEQ ID NO: 1506988 - DNA, 15 bp, Homo sapiens
cgatttgttttattt

SEQ ID NO: 1506989 - DNA, 15 bp, Homo sapiens
gatttgttttatttt

SEQ ID NO: 1506990 - DNA, 15 bp, Homo sapiens
atttgttttattttg

SEQ ID NO: 1506991 - DNA, 15 bp, Homo sapiens
tttgttttattttga

SEQ ID NO: 1506992 - DNA, 15 bp, Homo sapiens
ttgttttattttgag

SEQ ID NO: 1506993 - DNA, 15 bp, Homo sapiens
tgttttattttgaga

SEQ ID NO: 1506994 - DNA, 15 bp, Homo sapiens
gttttattttgagaa

SEQ ID NO: 1506995 - DNA, 15 bp, Homo sapiens
ttttattttgagaaa

SEQ ID NO: 1506996 - DNA, 15 bp, Homo sapiens
tttattttgagaaag

SEQ ID NO: 1506997 - DNA, 15 bp, Homo sapiens
ttattttgagaaagg

SEQ ID NO: 1506998 - DNA, 15 bp, Homo sapiens
tattttgagaaaggt

SEQ ID NO: 1506999 - DNA, 15 bp, Homo sapiens
attttgagaaaggtt

SEQ ID NO: 1507000 - DNA, 15 bp, Homo sapiens
ttttgagaaaggttc

SEQ ID NO: 1507001 - DNA, 15 bp, Homo sapiens
tttgagaaaggttcc

SEQ ID NO: 1507002 - DNA, 15 bp, Homo sapiens
ttgagaaaggttcct

SEQ ID NO: 1507003 - DNA, 15 bp, Homo sapiens
tgagaaaggttcctg

SEQ ID NO: 1507004 - DNA, 15 bp, Homo sapiens
gagaaaggttcctgg

SEQ ID NO: 1507005 - DNA, 15 bp, Homo sapiens
agaaaggttcctgga

SEQ ID NO: 1507006 - DNA, 15 bp, Homo sapiens
gaaaggttcctggaa

SEQ ID NO: 1507007 - DNA, 15 bp, Homo sapiens
aaaggttcctggaag

SEQ ID NO: 1507008 - DNA, 15 bp, Homo sapiens
aaggttcctggaaga

SEQ ID NO: 1507009 - DNA, 15 bp, Homo sapiens
aggttcctggaagac

SEQ ID NO: 1507010 - DNA, 15 bp, Homo sapiens
ggttcctggaagacc

SEQ ID NO: 1507011 - DNA, 15 bp, Homo sapiens
gttcctggaagaccc

SEQ ID NO: 1507012 - DNA, 15 bp, Homo sapiens
ttcctggaagacccc

SEQ ID NO: 1507013 - DNA, 15 bp, Homo sapiens
tcctggaagaccccc

SEQ ID NO: 1507014 - DNA, 15 bp, Homo sapiens
cctggaagacccccc

SEQ ID NO: 1507015 - DNA, 15 bp, Homo sapiens
ctggaagaccccccc

SEQ ID NO: 1507016 - DNA, 15 bp, Homo sapiens
tggaagaccccccca

SEQ ID NO: 1507017 - DNA, 15 bp, Homo sapiens
ggaagacccccccac

SEQ ID NO: 1507018 - DNA, 15 bp, Homo sapiens
gaagacccccccacc

SEQ ID NO: 1507019 - DNA, 15 bp, Homo sapiens
aagacccccccaccc

SEQ ID NO: 1507020 - DNA, 15 bp, Homo sapiens
agacccccccacccc

SEQ ID NO: 1507021 - DNA, 15 bp, Homo sapiens
gacccccccacccca

SEQ ID NO: 1507022 - DNA, 15 bp, Homo sapiens
acccccccaccccac

SEQ ID NO: 1507023 - DNA, 15 bp, Homo sapiens
cccccaccccaccca

SEQ ID NO: 1507024 - DNA, 15 bp, Homo sapiens
ccccaccccacccag

SEQ ID NO: 1507025 - DNA, 15 bp, Homo sapiens
cccaccccacccagg

SEQ ID NO: 1507026 - DNA, 15 bp, Homo sapiens
ccaccccacccaggg

SEQ ID NO: 1507027 - DNA, 15 bp, Homo sapiens
caccccacccagggt

SEQ ID NO: 1507028 - DNA, 15 bp, Homo sapiens
accccacccagggtg

SEQ ID NO: 1507029 - DNA, 15 bp, Homo sapiens
ccccacccagggtgg

SEQ ID NO: 1507030 - DNA, 15 bp, Homo sapiens
cccacccagggtgga

SEQ ID NO: 1507031 - DNA, 15 bp, Homo sapiens
ccacccagggtggag

SEQ ID NO: 1507032 - DNA, 15 bp, Homo sapiens
cacccagggtggaga

SEQ ID NO: 1507033 - DNA, 15 bp, Homo sapiens
acccagggtggagac

SEQ ID NO: 1507034 - DNA, 15 bp, Homo sapiens
cccagggtggagacg

SEQ ID NO: 1507035 - DNA, 15 bp, Homo sapiens
ccagggtggagacgt

SEQ ID NO: 1507036 - DNA, 15 bp, Homo sapiens
cagggtggagacgtc

SEQ ID NO: 1507037 - DNA, 15 bp, Homo sapiens
agggtggagacgtcc

SEQ ID NO: 1507038 - DNA, 15 bp, Homo sapiens
gggtggagacgtcca

SEQ ID NO: 1507039 - DNA, 15 bp, Homo sapiens
ggtggagacgtccac

SEQ ID NO: 1507040 - DNA, 15 bp, Homo sapiens
gtggagacgtccacc

SEQ ID NO: 1507041 - DNA, 15 bp, Homo sapiens
tggagacgtccacct

SEQ ID NO: 1507042 - DNA, 15 bp, Homo sapiens
ggagacgtccacctg

SEQ ID NO: 1507043 - DNA, 15 bp, Homo sapiens
gagacgtccacctgg

SEQ ID NO: 1507044 - DNA, 15 bp, Homo sapiens
agacgtccacctggc

SEQ ID NO: 1507045 - DNA, 15 bp, Homo sapiens
gacgtccacctggca

SEQ ID NO: 1507046 - DNA, 15 bp, Homo sapiens
acgtccacctggcag

SEQ ID NO: 1507047 - DNA, 15 bp, Homo sapiens
cgtccacctggcagc

SEQ ID NO: 1507048 - DNA, 15 bp, Homo sapiens
gtccacctggcagcg

SEQ ID NO: 1507049 - DNA, 15 bp, Homo sapiens
tccacctggcagcgc

SEQ ID NO: 1507050 - DNA, 15 bp, Homo sapiens
ccacctggcagcgcc

SEQ ID NO: 1507051 - DNA, 15 bp, Homo sapiens
cacctggcagcgcct

SEQ ID NO: 1507052 - DNA, 15 bp, Homo sapiens
acctggcagcgcctc

SEQ ID NO: 1507053 - DNA, 15 bp, Homo sapiens
cctggcagcgcctcg

SEQ ID NO: 1507054 - DNA, 15 bp, Homo sapiens
ctggcagcgcctcgg

SEQ ID NO: 1507055 - DNA, 15 bp, Homo sapiens
tggcagcgcctcggc

SEQ ID NO: 1507056 - DNA, 15 bp, Homo sapiens
ggcagcgcctcggcc

SEQ ID NO: 1507057 - DNA, 15 bp, Homo sapiens
gcagcgcctcggccc

SEQ ID NO: 1507058 - DNA, 15 bp, Homo sapiens
cagcgcctcggccca

SEQ ID NO: 1507059 - DNA, 15 bp, Homo sapiens
agcgcctcggcccag

SEQ ID NO: 1507060 - DNA, 15 bp, Homo sapiens
gcgcctcggcccagc

SEQ ID NO: 1507061 - DNA, 15 bp, Homo sapiens
cgcctcggcccagct

SEQ ID NO: 1507062 - DNA, 15 bp, Homo sapiens
gcctcggcccagctc

SEQ ID NO: 1507063 - DNA, 15 bp, Homo sapiens
cctcggcccagctcc

SEQ ID NO: 1507064 - DNA, 15 bp, Homo sapiens
ctcggcccagctccg

SEQ ID NO: 1507065 - DNA, 15 bp, Homo sapiens
tcggcccagctccgg

SEQ ID NO: 1507066 - DNA, 15 bp, Homo sapiens
cggcccagctccggc

SEQ ID NO: 1507067 - DNA, 15 bp, Homo sapiens
ggcccagctccggcc

SEQ ID NO: 1507068 - DNA, 15 bp, Homo sapiens
gcccagctccggcct

SEQ ID NO: 1507069 - DNA, 15 bp, Homo sapiens
cccagctccggcctg

SEQ ID NO: 1507070 - DNA, 15 bp, Homo sapiens
ccagctccggcctga

SEQ ID NO: 1507071 - DNA, 15 bp, Homo sapiens
cagctccggcctgac

SEQ ID NO: 1507072 - DNA, 15 bp, Homo sapiens
agctccggcctgacc

SEQ ID NO: 1507073 - DNA, 15 bp, Homo sapiens
gctccggcctgacca

SEQ ID NO: 1507074 - DNA, 15 bp, Homo sapiens
ctccggcctgaccac

SEQ ID NO: 1507075 - DNA, 15 bp, Homo sapiens
tccggcctgaccacc

SEQ ID NO: 1507076 - DNA, 15 bp, Homo sapiens
ccggcctgaccaccc

SEQ ID NO: 1507077 - DNA, 15 bp, Homo sapiens
cggcctgaccaccca

SEQ ID NO: 1507078 - DNA, 15 bp, Homo sapiens
ggcctgaccacccag

SEQ ID NO: 1507079 - DNA, 15 bp, Homo sapiens
gcctgaccacccagg

SEQ ID NO: 1507080 - DNA, 15 bp, Homo sapiens
cctgaccacccaggt

SEQ ID NO: 1507081 - DNA, 15 bp, Homo sapiens
ctgaccacccaggtt

SEQ ID NO: 1507082 - DNA, 15 bp, Homo sapiens
tgaccacccaggttc

SEQ ID NO: 1507083 - DNA, 15 bp, Homo sapiens
gaccacccaggttca

SEQ ID NO: 1507084 - DNA, 15 bp, Homo sapiens
accacccaggttcat

SEQ ID NO: 1507085 - DNA, 15 bp, Homo sapiens
ccacccaggttcatc

SEQ ID NO: 1507086 - DNA, 15 bp, Homo sapiens
cacccaggttcatct

SEQ ID NO: 1507087 - DNA, 15 bp, Homo sapiens
acccaggttcatctc

SEQ ID NO: 1507088 - DNA, 15 bp, Homo sapiens
cccaggttcatctcc

SEQ ID NO: 1507089 - DNA, 15 bp, Homo sapiens
ccaggttcatctccc

SEQ ID NO: 1507090 - DNA, 15 bp, Homo sapiens
caggttcatctcccc

SEQ ID NO: 1507091 - DNA, 15 bp, Homo sapiens
aggttcatctccccc

SEQ ID NO: 1507092 - DNA, 15 bp, Homo sapiens
ggttcatctccccct

SEQ ID NO: 1507093 - DNA, 15 bp, Homo sapiens
gttcatctccccctg

SEQ ID NO: 1507094 - DNA, 15 bp, Homo sapiens
ttcatctccccctgc

SEQ ID NO: 1507095 - DNA, 15 bp, Homo sapiens
tcatctccccctgcc

SEQ ID NO: 1507096 - DNA, 15 bp, Homo sapiens
catctccccctgccc

SEQ ID NO: 1507097 - DNA, 15 bp, Homo sapiens
atctccccctgcccg

SEQ ID NO: 1507098 - DNA, 15 bp, Homo sapiens
tctccccctgcccgc

SEQ ID NO: 1507099 - DNA, 15 bp, Homo sapiens
ctccccctgcccgcc

SEQ ID NO: 1507100 - DNA, 15 bp, Homo sapiens
tccccctgcccgccg

SEQ ID NO: 1507101 - DNA, 15 bp, Homo sapiens
ccccctgcccgccgc

SEQ ID NO: 1507102 - DNA, 15 bp, Homo sapiens
cccctgcccgccgcc

SEQ ID NO: 1507103 - DNA, 15 bp, Homo sapiens
ccctgcccgccgcct

SEQ ID NO: 1507104 - DNA, 15 bp, Homo sapiens
cctgcccgccgcctc

SEQ ID NO: 1507105 - DNA, 15 bp, Homo sapiens
ctgcccgccgcctcc

SEQ ID NO: 1507106 - DNA, 15 bp, Homo sapiens
tgcccgccgcctccc

SEQ ID NO: 1507107 - DNA, 15 bp, Homo sapiens
gcccgccgcctccca

SEQ ID NO: 1507108 - DNA, 15 bp, Homo sapiens
cccgccgcctcccac

SEQ ID NO: 1507109 - DNA, 15 bp, Homo sapiens
ccgccgcctcccacc

SEQ ID NO: 1507110 - DNA, 15 bp, Homo sapiens
cgccgcctcccaccc

SEQ ID NO: 1507111 - DNA, 15 bp, Homo sapiens
gccgcctcccacccc

SEQ ID NO: 1507112 - DNA, 15 bp, Homo sapiens
ccgcctcccaccccc

SEQ ID NO: 1507113 - DNA, 15 bp, Homo sapiens
cgcctcccacccccc

SEQ ID NO: 1507114 - DNA, 15 bp, Homo sapiens
gcctcccaccccccg

SEQ ID NO: 1507115 - DNA, 15 bp, Homo sapiens
cctcccaccccccgc

SEQ ID NO: 1507116 - DNA, 15 bp, Homo sapiens
ctcccaccccccgcc

SEQ ID NO: 1507117 - DNA, 15 bp, Homo sapiens
tcccaccccccgcca

SEQ ID NO: 1507118 - DNA, 15 bp, Homo sapiens
cccaccccccgccag

SEQ ID NO: 1507119 - DNA, 15 bp, Homo sapiens
ccaccccccgccagg

SEQ ID NO: 1507120 - DNA, 15 bp, Homo sapiens
caccccccgccaggc

SEQ ID NO: 1507121 - DNA, 15 bp, Homo sapiens
accccccgccaggcc

SEQ ID NO: 1507122 - DNA, 15 bp, Homo sapiens
ccccccgccaggccc

SEQ ID NO: 1507123 - DNA, 15 bp, Homo sapiens
cccccgccaggcccc

SEQ ID NO: 1507124 - DNA, 15 bp, Homo sapiens
ccccgccaggcccct

SEQ ID NO: 1507125 - DNA, 15 bp, Homo sapiens
cccgccaggcccctc

SEQ ID NO: 1507126 - DNA, 15 bp, Homo sapiens
ccgccaggcccctcc

SEQ ID NO: 1507127 - DNA, 15 bp, Homo sapiens
cgccaggcccctcct

SEQ ID NO: 1507128 - DNA, 15 bp, Homo sapiens
gccaggcccctcctc

SEQ ID NO: 1507129 - DNA, 15 bp, Homo sapiens
ccaggcccctcctcc

SEQ ID NO: 1507130 - DNA, 15 bp, Homo sapiens
caggcccctcctcca

SEQ ID NO: 1507131 - DNA, 15 bp, Homo sapiens
aggcccctcctccag

SEQ ID NO: 1507132 - DNA, 15 bp, Homo sapiens
ggcccctcctccagc

SEQ ID NO: 1507133 - DNA, 15 bp, Homo sapiens
gcccctcctccagcc

SEQ ID NO: 1507134 - DNA, 15 bp, Homo sapiens
cccctcctccagccg

SEQ ID NO: 1507135 - DNA, 15 bp, Homo sapiens
ccctcctccagccgt

SEQ ID NO: 1507136 - DNA, 15 bp, Homo sapiens
cctcctccagccgtc

SEQ ID NO: 1507137 - DNA, 15 bp, Homo sapiens
ctcctccagccgtct

SEQ ID NO: 1507138 - DNA, 15 bp, Homo sapiens
tcctccagccgtctg

SEQ ID NO: 1507139 - DNA, 15 bp, Homo sapiens
cctccagccgtctgt

SEQ ID NO: 1507140 - DNA, 15 bp, Homo sapiens
ctccagccgtctgtg

SEQ ID NO: 1507141 - DNA, 15 bp, Homo sapiens
tccagccgtctgtga

SEQ ID NO: 1507142 - DNA, 15 bp, Homo sapiens
ccagccgtctgtgaa

SEQ ID NO: 1507143 - DNA, 15 bp, Homo sapiens
cagccgtctgtgaat

SEQ ID NO: 1507144 - DNA, 15 bp, Homo sapiens
agccgtctgtgaatc

SEQ ID NO: 1507145 - DNA, 15 bp, Homo sapiens
gccgtctgtgaatcc

SEQ ID NO: 1507146 - DNA, 15 bp, Homo sapiens
ccgtctgtgaatcca

SEQ ID NO: 1507147 - DNA, 15 bp, Homo sapiens
cgtctgtgaatccag

SEQ ID NO: 1507148 - DNA, 15 bp, Homo sapiens
gtctgtgaatccagc

SEQ ID NO: 1507149 - DNA, 15 bp, Homo sapiens
tctgtgaatccagcc

SEQ ID NO: 1507150 - DNA, 15 bp, Homo sapiens
ctgtgaatccagccc

SEQ ID NO: 1507151 - DNA, 15 bp, Homo sapiens
tgtgaatccagccca

SEQ ID NO: 1507152 - DNA, 15 bp, Homo sapiens
gtgaatccagcccat

SEQ ID NO: 1507153 - DNA, 15 bp, Homo sapiens
tgaatccagcccatt

SEQ ID NO: 1507154 - DNA, 15 bp, Homo sapiens
gaatccagcccattt

SEQ ID NO: 1507155 - DNA, 15 bp, Homo sapiens
aatccagcccattta

SEQ ID NO: 1507156 - DNA, 15 bp, Homo sapiens
atccagcccatttaa

SEQ ID NO: 1507157 - DNA, 15 bp, Homo sapiens
tccagcccatttaaa

SEQ ID NO: 1507158 - DNA, 15 bp, Homo sapiens
ccagcccatttaaaa

SEQ ID NO: 1507159 - DNA, 15 bp, Homo sapiens
cagcccatttaaaat

SEQ ID NO: 1507160 - DNA, 15 bp, Homo sapiens
agcccatttaaaatt

SEQ ID NO: 1507161 - DNA, 15 bp, Homo sapiens
gcccatttaaaattc

SEQ ID NO: 1507162 - DNA, 15 bp, Homo sapiens
cccatttaaaattcc

SEQ ID NO: 1507163 - DNA, 15 bp, Homo sapiens
ccatttaaaattccc

SEQ ID NO: 1507164 - DNA, 15 bp, Homo sapiens
catttaaaattccct

SEQ ID NO: 1507165 - DNA, 15 bp, Homo sapiens
atttaaaattccctt

SEQ ID NO: 1507166 - DNA, 15 bp, Homo sapiens
tttaaaattcccttt

SEQ ID NO: 1507167 - DNA, 15 bp, Homo sapiens
ttaaaattccctttg

SEQ ID NO: 1507168 - DNA, 15 bp, Homo sapiens
taaaattccctttga

SEQ ID NO: 1507169 - DNA, 15 bp, Homo sapiens
aaaattccctttgaa

SEQ ID NO: 1507170 - DNA, 15 bp, Homo sapiens
aaattccctttgaaa

SEQ ID NO: 1507171 - DNA, 15 bp, Homo sapiens
aattccctttgaaaa

SEQ ID NO: 1507172 - DNA, 15 bp, Homo sapiens
attccctttgaaaag

SEQ ID NO: 1507173 - DNA, 15 bp, Homo sapiens
ttccctttgaaaaga

SEQ ID NO: 1507174 - DNA, 15 bp, Homo sapiens
tccctttgaaaagat

SEQ ID NO: 1507175 - DNA, 15 bp, Homo sapiens
ccctttgaaaagatc

SEQ ID NO: 1507176 - DNA, 15 bp, Homo sapiens
cctttgaaaagatct

SEQ ID NO: 1507177 - DNA, 15 bp, Homo sapiens
ctttgaaaagatctc

SEQ ID NO: 1507178 - DNA, 15 bp, Homo sapiens
tttgaaaagatctct

SEQ ID NO: 1507179 - DNA, 15 bp, Homo sapiens
ttgaaaagatctctg

SEQ ID NO: 1507180 - DNA, 15 bp, Homo sapiens
tgaaaagatctctgt

SEQ ID NO: 1507181 - DNA, 15 bp, Homo sapiens
gaaaagatctctgtt

SEQ ID NO: 1507182 - DNA, 15 bp, Homo sapiens
aaaagatctctgttt

SEQ ID NO: 1507183 - DNA, 15 bp, Homo sapiens
aaagatctctgtttg

SEQ ID NO: 1507184 - DNA, 15 bp, Homo sapiens
aagatctctgtttgg

SEQ ID NO: 1507185 - DNA, 15 bp, Homo sapiens
agatctctgtttggg

SEQ ID NO: 1507186 - DNA, 15 bp, Homo sapiens
gatctctgtttgggt

SEQ ID NO: 1507187 - DNA, 15 bp, Homo sapiens
atctctgtttgggtg

SEQ ID NO: 1507188 - DNA, 15 bp, Homo sapiens
tctctgtttgggtga

SEQ ID NO: 1507189 - DNA, 15 bp, Homo sapiens
ctctgtttgggtgag

SEQ ID NO: 1507190 - DNA, 15 bp, Homo sapiens
tctgtttgggtgagt

SEQ ID NO: 1507191 - DNA, 15 bp, Homo sapiens
ctgtttgggtgagtt

SEQ ID NO: 1507192 - DNA, 15 bp, Homo sapiens
tgtttgggtgagttc

SEQ ID NO: 1507193 - DNA, 15 bp, Homo sapiens
gtttgggtgagttcc

SEQ ID NO: 1507194 - DNA, 15 bp, Homo sapiens
tttgggtgagttccg

SEQ ID NO: 1507195 - DNA, 15 bp, Homo sapiens
ttgggtgagttccgt

SEQ ID NO: 1507196 - DNA, 15 bp, Homo sapiens
tgggtgagttccgtg

SEQ ID NO: 1507197 - DNA, 15 bp, Homo sapiens
gggtgagttccgtgg

SEQ ID NO: 1507198 - DNA, 15 bp, Homo sapiens
ggtgagttccgtggg

SEQ ID NO: 1507199 - DNA, 15 bp, Homo sapiens
gtgagttccgtgggc

SEQ ID NO: 1507200 - DNA, 15 bp, Homo sapiens
tgagttccgtgggct

SEQ ID NO: 1507201 - DNA, 15 bp, Homo sapiens
gagttccgtgggctc

SEQ ID NO: 1507202 - DNA, 15 bp, Homo sapiens
agttccgtgggctct

SEQ ID NO: 1507203 - DNA, 15 bp, Homo sapiens
gttccgtgggctctg

SEQ ID NO: 1507204 - DNA, 15 bp, Homo sapiens
ttccgtgggctctgc

SEQ ID NO: 1507205 - DNA, 15 bp, Homo sapiens
tccgtgggctctgcc

SEQ ID NO: 1507206 - DNA, 15 bp, Homo sapiens
ccgtgggctctgccc

SEQ ID NO: 1507207 - DNA, 15 bp, Homo sapiens
cgtgggctctgccca

SEQ ID NO: 1507208 - DNA, 15 bp, Homo sapiens
gtgggctctgcccag

SEQ ID NO: 1507209 - DNA, 15 bp, Homo sapiens
tgggctctgcccaga

SEQ ID NO: 1507210 - DNA, 15 bp, Homo sapiens
gggctctgcccagag

SEQ ID NO: 1507211 - DNA, 15 bp, Homo sapiens
ggctctgcccagaga

SEQ ID NO: 1507212 - DNA, 15 bp, Homo sapiens
gctctgcccagagag

SEQ ID NO: 1507213 - DNA, 15 bp, Homo sapiens
ctctgcccagagagg

SEQ ID NO: 1507214 - DNA, 15 bp, Homo sapiens
tctgcccagagaggg

SEQ ID NO: 1507215 - DNA, 15 bp, Homo sapiens
ctgcccagagagggc

SEQ ID NO: 1507216 - DNA, 15 bp, Homo sapiens
tgcccagagagggca

SEQ ID NO: 1507217 - DNA, 15 bp, Homo sapiens
gcccagagagggcag

SEQ ID NO: 1507218 - DNA, 15 bp, Homo sapiens
cccagagagggcaga

SEQ ID NO: 1507219 - DNA, 15 bp, Homo sapiens
ccagagagggcagat

SEQ ID NO: 1507220 - DNA, 15 bp, Homo sapiens
cagagagggcagatt

SEQ ID NO: 1507221 - DNA, 15 bp, Homo sapiens
agagagggcagatta

SEQ ID NO: 1507222 - DNA, 15 bp, Homo sapiens
gagagggcagattat

SEQ ID NO: 1507223 - DNA, 15 bp, Homo sapiens
agagggcagattatc

SEQ ID NO: 1507224 - DNA, 15 bp, Homo sapiens
gagggcagattatct

SEQ ID NO: 1507225 - DNA, 15 bp, Homo sapiens
agggcagattatctg

SEQ ID NO: 1507226 - DNA, 15 bp, Homo sapiens
gggcagattatctga

SEQ ID NO: 1507227 - DNA, 15 bp, Homo sapiens
ggcagattatctgaa

SEQ ID NO: 1507228 - DNA, 15 bp, Homo sapiens
gcagattatctgaaa

SEQ ID NO: 1507229 - DNA, 15 bp, Homo sapiens
cagattatctgaaaa

SEQ ID NO: 1507230 - DNA, 15 bp, Homo sapiens
agattatctgaaaat

SEQ ID NO: 1507231 - DNA, 15 bp, Homo sapiens
gattatctgaaaata

SEQ ID NO: 1507232 - DNA, 15 bp, Homo sapiens
attatctgaaaatag

SEQ ID NO: 1507233 - DNA, 15 bp, Homo sapiens
ttatctgaaaatagg

SEQ ID NO: 1507234 - DNA, 15 bp, Homo sapiens
tatctgaaaataggt

SEQ ID NO: 1507235 - DNA, 15 bp, Homo sapiens
atctgaaaataggtg

SEQ ID NO: 1507236 - DNA, 15 bp, Homo sapiens
tctgaaaataggtgt

SEQ ID NO: 1507237 - DNA, 15 bp, Homo sapiens
ctgaaaataggtgtt

SEQ ID NO: 1507238 - DNA, 15 bp, Homo sapiens
tgaaaataggtgtta

SEQ ID NO: 1507239 - DNA, 15 bp, Homo sapiens
gaaaataggtgttat

SEQ ID NO: 1507240 - DNA, 15 bp, Homo sapiens
aaaataggtgttatt

SEQ ID NO: 1507241 - DNA, 15 bp, Homo sapiens
aaataggtgttattg

SEQ ID NO: 1507242 - DNA, 15 bp, Homo sapiens
aataggtgttattga

SEQ ID NO: 1507243 - DNA, 15 bp, Homo sapiens
ataggtgttattgat

SEQ ID NO: 1507244 - DNA, 15 bp, Homo sapiens
taggtgttattgatt

SEQ ID NO: 1507245 - DNA, 15 bp, Homo sapiens
aggtgttattgatta

SEQ ID NO: 1507246 - DNA, 15 bp, Homo sapiens
ggtgttattgattac

SEQ ID NO: 1507247 - DNA, 15 bp, Homo sapiens
gtgttattgattaca

SEQ ID NO: 1507248 - DNA, 15 bp, Homo sapiens
tgttattgattacaa

SEQ ID NO: 1507249 - DNA, 15 bp, Homo sapiens
gttattgattacaac

SEQ ID NO: 1507250 - DNA, 15 bp, Homo sapiens
ttattgattacaacc

SEQ ID NO: 1507251 - DNA, 15 bp, Homo sapiens
tattgattacaacca

SEQ ID NO: 1507252 - DNA, 15 bp, Homo sapiens
attgattacaaccaa

SEQ ID NO: 1507253 - DNA, 15 bp, Homo sapiens
ttgattacaaccaag

SEQ ID NO: 1507254 - DNA, 15 bp, Homo sapiens
tgattacaaccaagt

SEQ ID NO: 1507255 - DNA, 15 bp, Homo sapiens
gattacaaccaagtg

SEQ ID NO: 1507256 - DNA, 15 bp, Homo sapiens
attacaaccaagtgg

SEQ ID NO: 1507257 - DNA, 15 bp, Homo sapiens
ttacaaccaagtggt

SEQ ID NO: 1507258 - DNA, 15 bp, Homo sapiens
tacaaccaagtggtc

SEQ ID NO: 1507259 - DNA, 15 bp, Homo sapiens
acaaccaagtggtct

SEQ ID NO: 1507260 - DNA, 15 bp, Homo sapiens
caaccaagtggtctt

SEQ ID NO: 1507261 - DNA, 15 bp, Homo sapiens
aaccaagtggtcttt

SEQ ID NO: 1507262 - DNA, 15 bp, Homo sapiens
accaagtggtctttg

SEQ ID NO: 1507263 - DNA, 15 bp, Homo sapiens
ccaagtggtctttgt

SEQ ID NO: 1507264 - DNA, 15 bp, Homo sapiens
caagtggtctttgtg

SEQ ID NO: 1507265 - DNA, 15 bp, Homo sapiens
aagtggtctttgtgg

SEQ ID NO: 1507266 - DNA, 15 bp, Homo sapiens
agtggtctttgtgga

SEQ ID NO: 1507267 - DNA, 15 bp, Homo sapiens
gtggtctttgtggaa

SEQ ID NO: 1507268 - DNA, 15 bp, Homo sapiens
tggtctttgtggaaa

SEQ ID NO: 1507269 - DNA, 15 bp, Homo sapiens
ggtctttgtggaaag

SEQ ID NO: 1507270 - DNA, 15 bp, Homo sapiens
gtctttgtggaaagg

SEQ ID NO: 1507271 - DNA, 15 bp, Homo sapiens
tctttgtggaaaggg

SEQ ID NO: 1507272 - DNA, 15 bp, Homo sapiens
ctttgtggaaagggt

SEQ ID NO: 1507273 - DNA, 15 bp, Homo sapiens
tttgtggaaagggtt

SEQ ID NO: 1507274 - DNA, 15 bp, Homo sapiens
ttgtggaaagggttc

SEQ ID NO: 1507275 - DNA, 15 bp, Homo sapiens
tgtggaaagggttcc

SEQ ID NO: 1507276 - DNA, 15 bp, Homo sapiens
gtggaaagggttcca

SEQ ID NO: 1507277 - DNA, 15 bp, Homo sapiens
tggaaagggttccac

SEQ ID NO: 1507278 - DNA, 15 bp, Homo sapiens
ggaaagggttccact

SEQ ID NO: 1507279 - DNA, 15 bp, Homo sapiens
gaaagggttccactt

SEQ ID NO: 1507280 - DNA, 15 bp, Homo sapiens
aaagggttccacttg

SEQ ID NO: 1507281 - DNA, 15 bp, Homo sapiens
aagggttccacttga

SEQ ID NO: 1507282 - DNA, 15 bp, Homo sapiens
agggttccacttgaa

SEQ ID NO: 1507283 - DNA, 15 bp, Homo sapiens
gggttccacttgaac

SEQ ID NO: 1507284 - DNA, 15 bp, Homo sapiens
ggttccacttgaacc

SEQ ID NO: 1507285 - DNA, 15 bp, Homo sapiens
gttccacttgaacca

SEQ ID NO: 1507286 - DNA, 15 bp, Homo sapiens
ttccacttgaaccaa

SEQ ID NO: 1507287 - DNA, 15 bp, Homo sapiens
tccacttgaaccaaa

SEQ ID NO: 1507288 - DNA, 15 bp, Homo sapiens
ccacttgaaccaaaa

SEQ ID NO: 1507289 - DNA, 15 bp, Homo sapiens
cacttgaaccaaaat

SEQ ID NO: 1507290 - DNA, 15 bp, Homo sapiens
acttgaaccaaaata

SEQ ID NO: 1507291 - DNA, 15 bp, Homo sapiens
cttgaaccaaaataa

SEQ ID NO: 1507292 - DNA, 15 bp, Homo sapiens
ttgaaccaaaataaa

SEQ ID NO: 1507293 - DNA, 15 bp, Homo sapiens
tgaaccaaaataaat

SEQ ID NO: 1507294 - DNA, 15 bp, Homo sapiens
gaaccaaaataaata

SEQ ID NO: 1507295 - DNA, 15 bp, Homo sapiens
aaccaaaataaatat

SEQ ID NO: 1507296 - DNA, 15 bp, Homo sapiens
accaaaataaatatt

SEQ ID NO: 1507297 - DNA, 15 bp, Homo sapiens
ccaaaataaatattt

SEQ ID NO: 1507298 - DNA, 15 bp, Homo sapiens
caaaataaatatttg

SEQ ID NO: 1507299 - DNA, 15 bp, Homo sapiens
aaataaatatttgcc

SEQ ID NO: 1507300 - DNA, 15 bp, Homo sapiens
aataaatatttgcca

SEQ ID NO: 1507301 - DNA, 15 bp, Homo sapiens
ataaatatttgccat

SEQ ID NO: 1507302 - DNA, 15 bp, Homo sapiens
taaatatttgccatt

SEQ ID NO: 1507303 - DNA, 15 bp, Homo sapiens
aaatatttgccatta

SEQ ID NO: 1507304 - DNA, 15 bp, Homo sapiens
aatatttgccattac

SEQ ID NO: 1507305 - DNA, 15 bp, Homo sapiens
atatttgccattaca

SEQ ID NO: 1507306 - DNA, 15 bp, Homo sapiens
tatttgccattacaa

SEQ ID NO: 1507307 - DNA, 15 bp, Homo sapiens
atttgccattacaaa

SEQ ID NO: 1507308 - DNA, 15 bp, Homo sapiens
tttgccattacaaag

SEQ ID NO: 1507309 - DNA, 15 bp, Homo sapiens
ttgccattacaaaga

SEQ ID NO: 1507310 - DNA, 15 bp, Homo sapiens
tgccattacaaagaa

SEQ ID NO: 1507311 - DNA, 15 bp, Homo sapiens
gccattacaaagaac

SEQ ID NO: 1507312 - DNA, 15 bp, Homo sapiens
ccattacaaagaaca

SEQ ID NO: 1507313 - DNA, 15 bp, Homo sapiens
cattacaaagaacaa

SEQ ID NO: 1507314 - DNA, 15 bp, Homo sapiens
attacaaagaacaag

SEQ ID NO: 1507315 - DNA, 15 bp, Homo sapiens
ttacaaagaacaagc

SEQ ID NO: 1507316 - DNA, 15 bp, Homo sapiens
tacaaagaacaagcc

SEQ ID NO: 1507317 - DNA, 15 bp, Homo sapiens
acaaagaacaagccg

SEQ ID NO: 1507318 - DNA, 15 bp, Homo sapiens
caaagaacaagccgg

SEQ ID NO: 1507319 - DNA, 15 bp, Homo sapiens
aaagaacaagccggt

SEQ ID NO: 1507320 - DNA, 15 bp, Homo sapiens
aagaacaagccggtc

SEQ ID NO: 1507321 - DNA, 15 bp, Homo sapiens
agaacaagccggtcc

SEQ ID NO: 1507322 - DNA, 15 bp, Homo sapiens
gaacaagccggtccc

SEQ ID NO: 1507323 - DNA, 15 bp, Homo sapiens
aacaagccggtccct

SEQ ID NO: 1507324 - DNA, 15 bp, Homo sapiens
acaagccggtccctg

SEQ ID NO: 1507325 - DNA, 15 bp, Homo sapiens
caagccggtccctgt

SEQ ID NO: 1507326 - DNA, 15 bp, Homo sapiens
aagccggtccctgtt

SEQ ID NO: 1507327 - DNA, 15 bp, Homo sapiens
agccggtccctgttg

SEQ ID NO: 1507328 - DNA, 15 bp, Homo sapiens
gccggtccctgttgc

SEQ ID NO: 1507329 - DNA, 15 bp, Homo sapiens
ccggtccctgttgcg

SEQ ID NO: 1507330 - DNA, 15 bp, Homo sapiens
cggtccctgttgcgg

SEQ ID NO: 1507331 - DNA, 15 bp, Homo sapiens
ggtccctgttgcggg

SEQ ID NO: 1507332 - DNA, 15 bp, Homo sapiens
gtccctgttgcgggc

SEQ ID NO: 1507333 - DNA, 15 bp, Homo sapiens
tccctgttgcgggcg

SEQ ID NO: 1507334 - DNA, 15 bp, Homo sapiens
ccctgttgcgggcgg

SEQ ID NO: 1507335 - DNA, 15 bp, Homo sapiens
cctgttgcgggcggg

SEQ ID NO: 1507336 - DNA, 15 bp, Homo sapiens
ctgttgcgggcgggg

SEQ ID NO: 1507337 - DNA, 15 bp, Homo sapiens
tgttgcgggcggggg

SEQ ID NO: 1507338 - DNA, 15 bp, Homo sapiens
gttgcgggcgggggc

SEQ ID NO: 1507339 - DNA, 15 bp, Homo sapiens
ttgcgggcgggggcg

SEQ ID NO: 1507340 - DNA, 15 bp, Homo sapiens
tgcgggcgggggcgt

SEQ ID NO: 1507341 - DNA, 15 bp, Homo sapiens
gcgggcgggggcgtc

SEQ ID NO: 1507342 - DNA, 15 bp, Homo sapiens
cgggcgggggcgtcc

SEQ ID NO: 1507343 - DNA, 15 bp, Homo sapiens
gggcgggggcgtcct

SEQ ID NO: 1507344 - DNA, 15 bp, Homo sapiens
ggcgggggcgtcctc

SEQ ID NO: 1507345 - DNA, 15 bp, Homo sapiens
gcgggggcgtcctcg

SEQ ID NO: 1507346 - DNA, 15 bp, Homo sapiens
cgggggcgtcctcgg

SEQ ID NO: 1507347 - DNA, 15 bp, Homo sapiens
gggggcgtcctcggc

SEQ ID NO: 1507348 - DNA, 15 bp, Homo sapiens
ggggcgtcctcggcc

SEQ ID NO: 1507349 - DNA, 15 bp, Homo sapiens
gggcgtcctcggccc

SEQ ID NO: 1507350 - DNA, 15 bp, Homo sapiens
ggcgtcctcggccct

SEQ ID NO: 1507351 - DNA, 15 bp, Homo sapiens
gcgtcctcggccctc

SEQ ID NO: 1507352 - DNA, 15 bp, Homo sapiens
cgtcctcggccctct

SEQ ID NO: 1507353 - DNA, 15 bp, Homo sapiens
gtcctcggccctctc

SEQ ID NO: 1507354 - DNA, 15 bp, Homo sapiens
tcctcggccctctct

SEQ ID NO: 1507355 - DNA, 15 bp, Homo sapiens
cctcggccctctctg

SEQ ID NO: 1507356 - DNA, 15 bp, Homo sapiens
ctcggccctctctgg

SEQ ID NO: 1507357 - DNA, 15 bp, Homo sapiens
tcggccctctctggc

SEQ ID NO: 1507358 - DNA, 15 bp, Homo sapiens
cggccctctctggcc

SEQ ID NO: 1507359 - DNA, 15 bp, Homo sapiens
ggccctctctggccc

SEQ ID NO: 1507360 - DNA, 15 bp, Homo sapiens
gccctctctggcccc

SEQ ID NO: 1507361 - DNA, 15 bp, Homo sapiens
ccctctctggccccc

SEQ ID NO: 1507362 - DNA, 15 bp, Homo sapiens
cctctctggccccct

SEQ ID NO: 1507363 - DNA, 15 bp, Homo sapiens
ctctctggccccctc

SEQ ID NO: 1507364 - DNA, 15 bp, Homo sapiens
tctctggccccctcg

SEQ ID NO: 1507365 - DNA, 15 bp, Homo sapiens
ctctggccccctcgg

SEQ ID NO: 1507366 - DNA, 15 bp, Homo sapiens
tctggccccctcggc

SEQ ID NO: 1507367 - DNA, 15 bp, Homo sapiens
ctggccccctcggcc

SEQ ID NO: 1507368 - DNA, 15 bp, Homo sapiens
tggccccctcggccc

SEQ ID NO: 1507369 - DNA, 15 bp, Homo sapiens
ggccccctcggccca

SEQ ID NO: 1507370 - DNA, 15 bp, Homo sapiens
gccccctcggcccag

SEQ ID NO: 1507371 - DNA, 15 bp, Homo sapiens
ccccctcggcccagg

SEQ ID NO: 1507372 - DNA, 15 bp, Homo sapiens
cccctcggcccagga

SEQ ID NO: 1507373 - DNA, 15 bp, Homo sapiens
ccctcggcccaggag

SEQ ID NO: 1507374 - DNA, 15 bp, Homo sapiens
cctcggcccaggagc

SEQ ID NO: 1507375 - DNA, 15 bp, Homo sapiens
ctcggcccaggagct

SEQ ID NO: 1507376 - DNA, 15 bp, Homo sapiens
tcggcccaggagcta

SEQ ID NO: 1507377 - DNA, 15 bp, Homo sapiens
cggcccaggagctac

SEQ ID NO: 1507378 - DNA, 15 bp, Homo sapiens
ggcccaggagctacg

SEQ ID NO: 1507379 - DNA, 15 bp, Homo sapiens
gcccaggagctacgc

SEQ ID NO: 1507380 - DNA, 15 bp, Homo sapiens
cccaggagctacgcg

SEQ ID NO: 1507381 - DNA, 15 bp, Homo sapiens
ccaggagctacgcga

SEQ ID NO: 1507382 - DNA, 15 bp, Homo sapiens
caggagctacgcgag

SEQ ID NO: 1507383 - DNA, 15 bp, Homo sapiens
aggagctacgcgagc

SEQ ID NO: 1507384 - DNA, 15 bp, Homo sapiens
ggagctacgcgagct

SEQ ID NO: 1507385 - DNA, 15 bp, Homo sapiens
gagctacgcgagctc

SEQ ID NO: 1507386 - DNA, 15 bp, Homo sapiens
agctacgcgagctcg

SEQ ID NO: 1507387 - DNA, 15 bp, Homo sapiens
gctacgcgagctcgg

SEQ ID NO: 1507388 - DNA, 15 bp, Homo sapiens
ctacgcgagctcgga

SEQ ID NO: 1507389 - DNA, 15 bp, Homo sapiens
tacgcgagctcggat

SEQ ID NO: 1507390 - DNA, 15 bp, Homo sapiens
acgcgagctcggatt

SEQ ID NO: 1507391 - DNA, 15 bp, Homo sapiens
cgcgagctcggattg

SEQ ID NO: 1507392 - DNA, 15 bp, Homo sapiens
gcgagctcggattgt

SEQ ID NO: 1507393 - DNA, 15 bp, Homo sapiens
cgagctcggattgtg

SEQ ID NO: 1507394 - DNA, 15 bp, Homo sapiens
gagctcggattgtgt

SEQ ID NO: 1507395 - DNA, 15 bp, Homo sapiens
agctcggattgtgtt

SEQ ID NO: 1507396 - DNA, 15 bp, Homo sapiens
gctcggattgtgttt

SEQ ID NO: 1507397 - DNA, 15 bp, Homo sapiens
ctcggattgtgtttc

SEQ ID NO: 1507398 - DNA, 15 bp, Homo sapiens
tcggattgtgtttcc

SEQ ID NO: 1507399 - DNA, 15 bp, Homo sapiens
cggattgtgtttccc

SEQ ID NO: 1507400 - DNA, 15 bp, Homo sapiens
ggattgtgtttcccc

SEQ ID NO: 1507401 - DNA, 15 bp, Homo sapiens
gattgtgtttccccg

SEQ ID NO: 1507402 - DNA, 15 bp, Homo sapiens
attgtgtttccccgg

SEQ ID NO: 1507403 - DNA, 15 bp, Homo sapiens
ttgtgtttccccggc

SEQ ID NO: 1507404 - DNA, 15 bp, Homo sapiens
tgtgtttccccggcg

SEQ ID NO: 1507405 - DNA, 15 bp, Homo sapiens
gtgtttccccggcga

SEQ ID NO: 1507406 - DNA, 15 bp, Homo sapiens
tgtttccccggcgag

SEQ ID NO: 1507407 - DNA, 15 bp, Homo sapiens
gtttccccggcgagg

SEQ ID NO: 1507408 - DNA, 15 bp, Homo sapiens
tttccccggcgagga

SEQ ID NO: 1507409 - DNA, 15 bp, Homo sapiens
ttccccggcgaggac

SEQ ID NO: 1507410 - DNA, 15 bp, Homo sapiens
tccccggcgaggaca

SEQ ID NO: 1507411 - DNA, 15 bp, Homo sapiens
ccccggcgaggacag

SEQ ID NO: 1507412 - DNA, 15 bp, Homo sapiens
cccggcgaggacagg

SEQ ID NO: 1507413 - DNA, 15 bp, Homo sapiens
ccggcgaggacaggg

SEQ ID NO: 1507414 - DNA, 15 bp, Homo sapiens
cggcgaggacaggga

SEQ ID NO: 1507415 - DNA, 15 bp, Homo sapiens
ggcgaggacagggac

SEQ ID NO: 1507416 - DNA, 15 bp, Homo sapiens
gcgaggacagggacg

SEQ ID NO: 1507417 - DNA, 15 bp, Homo sapiens
cgaggacagggacgc

SEQ ID NO: 1507418 - DNA, 15 bp, Homo sapiens
gaggacagggacgcg

SEQ ID NO: 1507419 - DNA, 15 bp, Homo sapiens
aggacagggacgcgc

SEQ ID NO: 1507420 - DNA, 15 bp, Homo sapiens
ggacagggacgcgcg

SEQ ID NO: 1507421 - DNA, 15 bp, Homo sapiens
gacagggacgcgcgc

SEQ ID NO: 1507422 - DNA, 15 bp, Homo sapiens
acagggacgcgcgcg

SEQ ID NO: 1507423 - DNA, 15 bp, Homo sapiens
cagggacgcgcgcgg

SEQ ID NO: 1507424 - DNA, 15 bp, Homo sapiens
agggacgcgcgcggg

SEQ ID NO: 1507425 - DNA, 15 bp, Homo sapiens
gggacgcgcgcgggc

SEQ ID NO: 1507426 - DNA, 15 bp, Homo sapiens
ggacgcgcgcgggcg

SEQ ID NO: 1507427 - DNA, 15 bp, Homo sapiens
gacgcgcgcgggcgg

SEQ ID NO: 1507428 - DNA, 15 bp, Homo sapiens
acgcgcgcgggcggg

SEQ ID NO: 1507429 - DNA, 15 bp, Homo sapiens
cgcgcgcgggcgggg

SEQ ID NO: 1507430 - DNA, 15 bp, Homo sapiens
gcgcgcgggcgggga

SEQ ID NO: 1507431 - DNA, 15 bp, Homo sapiens
cgcgcgggcggggag

SEQ ID NO: 1507432 - DNA, 15 bp, Homo sapiens
gcgcgggcggggagc

SEQ ID NO: 1507433 - DNA, 15 bp, Homo sapiens
cgcgggcggggagca

SEQ ID NO: 1507434 - DNA, 15 bp, Homo sapiens
gcgggcggggagcag

SEQ ID NO: 1507435 - DNA, 15 bp, Homo sapiens
cgggcggggagcagg

SEQ ID NO: 1507436 - DNA, 15 bp, Homo sapiens
gggcggggagcaggg

SEQ ID NO: 1507437 - DNA, 15 bp, Homo sapiens
ggcggggagcagggg

SEQ ID NO: 1507438 - DNA, 15 bp, Homo sapiens
gcggggagcaggggc

SEQ ID NO: 1507439 - DNA, 15 bp, Homo sapiens
cggggagcaggggcc

SEQ ID NO: 1507440 - DNA, 15 bp, Homo sapiens
ggggagcaggggccc

SEQ ID NO: 1507441 - DNA, 15 bp, Homo sapiens
gggagcaggggcccg

SEQ ID NO: 1507442 - DNA, 15 bp, Homo sapiens
ggagcaggggcccgg

SEQ ID NO: 1507443 - DNA, 15 bp, Homo sapiens
gagcaggggcccggt

SEQ ID NO: 1507444 - DNA, 15 bp, Homo sapiens
agcaggggcccggtg

SEQ ID NO: 1507445 - DNA, 15 bp, Homo sapiens
gcaggggcccggtgg

SEQ ID NO: 1507446 - DNA, 15 bp, Homo sapiens
caggggcccggtggc

SEQ ID NO: 1507447 - DNA, 15 bp, Homo sapiens
aggggcccggtggct

SEQ ID NO: 1507448 - DNA, 15 bp, Homo sapiens
ggggcccggtggctc

SEQ ID NO: 1507449 - DNA, 15 bp, Homo sapiens
gggcccggtggctcc

SEQ ID NO: 1507450 - DNA, 15 bp, Homo sapiens
ggcccggtggctccg

SEQ ID NO: 1507451 - DNA, 15 bp, Homo sapiens
gcccggtggctccga

SEQ ID NO: 1507452 - DNA, 15 bp, Homo sapiens
cccggtggctccgac

SEQ ID NO: 1507453 - DNA, 15 bp, Homo sapiens
ccggtggctccgacg

SEQ ID NO: 1507454 - DNA, 15 bp, Homo sapiens
cggtggctccgacgc

SEQ ID NO: 1507455 - DNA, 15 bp, Homo sapiens
ggtggctccgacgcc

SEQ ID NO: 1507456 - DNA, 15 bp, Homo sapiens
gtggctccgacgccg

SEQ ID NO: 1507457 - DNA, 15 bp, Homo sapiens
tggctccgacgccgg

SEQ ID NO: 1507458 - DNA, 15 bp, Homo sapiens
ggctccgacgccgga

SEQ ID NO: 1507459 - DNA, 15 bp, Homo sapiens
gctccgacgccggag

SEQ ID NO: 1507460 - DNA, 15 bp, Homo sapiens
ctccgacgccggagg

SEQ ID NO: 1507461 - DNA, 15 bp, Homo sapiens
tccgacgccggaggc

SEQ ID NO: 1507462 - DNA, 15 bp, Homo sapiens
ccgacgccggaggct

SEQ ID NO: 1507463 - DNA, 15 bp, Homo sapiens
cgacgccggaggctt

SEQ ID NO: 1507464 - DNA, 15 bp, Homo sapiens
gacgccggaggcttg

SEQ ID NO: 1507465 - DNA, 15 bp, Homo sapiens
acgccggaggcttgc

SEQ ID NO: 1507466 - DNA, 15 bp, Homo sapiens
cgccggaggcttgcg

SEQ ID NO: 1507467 - DNA, 15 bp, Homo sapiens
gccggaggcttgcgg

SEQ ID NO: 1507468 - DNA, 15 bp, Homo sapiens
ccggaggcttgcggc

SEQ ID NO: 1507469 - DNA, 15 bp, Homo sapiens
cggaggcttgcggcc

SEQ ID NO: 1507470 - DNA, 15 bp, Homo sapiens
ggaggcttgcggccc

SEQ ID NO: 1507471 - DNA, 15 bp, Homo sapiens
gaggcttgcggccca

SEQ ID NO: 1507472 - DNA, 15 bp, Homo sapiens
aggcttgcggcccag

SEQ ID NO: 1507473 - DNA, 15 bp, Homo sapiens
ggcttgcggcccagg

SEQ ID NO: 1507474 - DNA, 15 bp, Homo sapiens
gcttgcggcccaggg

SEQ ID NO: 1507475 - DNA, 15 bp, Homo sapiens
cttgcggcccagggc

SEQ ID NO: 1507476 - DNA, 15 bp, Homo sapiens
ttgcggcccagggcc

SEQ ID NO: 1507477 - DNA, 15 bp, Homo sapiens
tgcggcccagggccg

SEQ ID NO: 1507478 - DNA, 15 bp, Homo sapiens
gcggcccagggccgg

SEQ ID NO: 1507479 - DNA, 15 bp, Homo sapiens
cggcccagggccggc

SEQ ID NO: 1507480 - DNA, 15 bp, Homo sapiens
ggcccagggccggct

SEQ ID NO: 1507481 - DNA, 15 bp, Homo sapiens
gcccagggccggctg

SEQ ID NO: 1507482 - DNA, 15 bp, Homo sapiens
cccagggccggctgc

SEQ ID NO: 1507483 - DNA, 15 bp, Homo sapiens
ccagggccggctgca

SEQ ID NO: 1507484 - DNA, 15 bp, Homo sapiens
cagggccggctgcag

SEQ ID NO: 1507485 - DNA, 15 bp, Homo sapiens
agggccggctgcagg

SEQ ID NO: 1507486 - DNA, 15 bp, Homo sapiens
gggccggctgcaggc

SEQ ID NO: 1507487 - DNA, 15 bp, Homo sapiens
ggccggctgcaggct

SEQ ID NO: 1507488 - DNA, 15 bp, Homo sapiens
gccggctgcaggctt

SEQ ID NO: 1507489 - DNA, 15 bp, Homo sapiens
ccggctgcaggcttg

SEQ ID NO: 1507490 - DNA, 15 bp, Homo sapiens
cggctgcaggcttga

SEQ ID NO: 1507491 - DNA, 15 bp, Homo sapiens
ggctgcaggcttgaa

SEQ ID NO: 1507492 - DNA, 15 bp, Homo sapiens
gctgcaggcttgaag

SEQ ID NO: 1507493 - DNA, 15 bp, Homo sapiens
ctgcaggcttgaagc

SEQ ID NO: 1507494 - DNA, 15 bp, Homo sapiens
tgcaggcttgaagcc

SEQ ID NO: 1507495 - DNA, 15 bp, Homo sapiens
gcaggcttgaagcct

SEQ ID NO: 1507496 - DNA, 15 bp, Homo sapiens
caggcttgaagcctg

SEQ ID NO: 1507497 - DNA, 15 bp, Homo sapiens
aggcttgaagcctgc

SEQ ID NO: 1507498 - DNA, 15 bp, Homo sapiens
ggcttgaagcctgct

SEQ ID NO: 1507499 - DNA, 15 bp, Homo sapiens
gcttgaagcctgctc

SEQ ID NO: 1507500 - DNA, 15 bp, Homo sapiens
cttgaagcctgctcg

SEQ ID NO: 1507501 - DNA, 15 bp, Homo sapiens
ttgaagcctgctcgg

SEQ ID NO: 1507502 - DNA, 15 bp, Homo sapiens
tgaagcctgctcgga

SEQ ID NO: 1507503 - DNA, 15 bp, Homo sapiens
gaagcctgctcggag

SEQ ID NO: 1507504 - DNA, 15 bp, Homo sapiens
aagcctgctcggagc

SEQ ID NO: 1507505 - DNA, 15 bp, Homo sapiens
agcctgctcggagct

SEQ ID NO: 1507506 - DNA, 15 bp, Homo sapiens
gcctgctcggagctt

SEQ ID NO: 1507507 - DNA, 15 bp, Homo sapiens
cctgctcggagcttg

SEQ ID NO: 1507508 - DNA, 15 bp, Homo sapiens
ctgctcggagcttgg

SEQ ID NO: 1507509 - DNA, 15 bp, Homo sapiens
tgctcggagcttggg

SEQ ID NO: 1507510 - DNA, 15 bp, Homo sapiens
gctcggagcttggga

SEQ ID NO: 1507511 - DNA, 15 bp, Homo sapiens
ctcggagcttgggat

SEQ ID NO: 1507512 - DNA, 15 bp, Homo sapiens
tcggagcttgggatt

SEQ ID NO: 1507513 - DNA, 15 bp, Homo sapiens
cggagcttgggattg

SEQ ID NO: 1507514 - DNA, 15 bp, Homo sapiens
ggagcttgggattgt

SEQ ID NO: 1507515 - DNA, 15 bp, Homo sapiens
gagcttgggattgta

SEQ ID NO: 1507516 - DNA, 15 bp, Homo sapiens
agcttgggattgtat

SEQ ID NO: 1507517 - DNA, 15 bp, Homo sapiens
gcttgggattgtatt

SEQ ID NO: 1507518 - DNA, 15 bp, Homo sapiens
cttgggattgtattt

SEQ ID NO: 1507519 - DNA, 15 bp, Homo sapiens
ttgggattgtatttt

SEQ ID NO: 1507520 - DNA, 15 bp, Homo sapiens
tgggattgtattttc

SEQ ID NO: 1507521 - DNA, 15 bp, Homo sapiens
gggattgtattttct

SEQ ID NO: 1507522 - DNA, 15 bp, Homo sapiens
ggattgtattttctt

SEQ ID NO: 1507523 - DNA, 15 bp, Homo sapiens
gattgtattttcttt

SEQ ID NO: 1507524 - DNA, 15 bp, Homo sapiens
attgtattttctttg

SEQ ID NO: 1507525 - DNA, 15 bp, Homo sapiens
ttgtattttctttgg

SEQ ID NO: 1507526 - DNA, 15 bp, Homo sapiens
tgtattttctttggc

SEQ ID NO: 1507527 - DNA, 15 bp, Homo sapiens
gtattttctttggct

SEQ ID NO: 1507528 - DNA, 15 bp, Homo sapiens
tattttctttggctt

SEQ ID NO: 1507529 - DNA, 15 bp, Homo sapiens
attttctttggcttt

SEQ ID NO: 1507530 - DNA, 15 bp, Homo sapiens
ttttctttggctttc

SEQ ID NO: 1507531 - DNA, 15 bp, Homo sapiens
tttctttggctttct

SEQ ID NO: 1507532 - DNA, 15 bp, Homo sapiens
ttctttggctttctg

SEQ ID NO: 1507533 - DNA, 15 bp, Homo sapiens
tctttggctttctgg

SEQ ID NO: 1507534 - DNA, 15 bp, Homo sapiens
ctttggctttctggc

SEQ ID NO: 1507535 - DNA, 15 bp, Homo sapiens
tttggctttctggcg

SEQ ID NO: 1507536 - DNA, 15 bp, Homo sapiens
ttggctttctggcgc

SEQ ID NO: 1507537 - DNA, 15 bp, Homo sapiens
tggctttctggcgcg

SEQ ID NO: 1507538 - DNA, 15 bp, Homo sapiens
ggctttctggcgcgc

SEQ ID NO: 1507539 - DNA, 15 bp, Homo sapiens
gctttctggcgcgct

SEQ ID NO: 1507540 - DNA, 15 bp, Homo sapiens
ctttctggcgcgctc

SEQ ID NO: 1507541 - DNA, 15 bp, Homo sapiens
tttctggcgcgctcc

SEQ ID NO: 1507542 - DNA, 15 bp, Homo sapiens
ttctggcgcgctcct

SEQ ID NO: 1507543 - DNA, 15 bp, Homo sapiens
tctggcgcgctcctt

SEQ ID NO: 1507544 - DNA, 15 bp, Homo sapiens
ctggcgcgctcctta

SEQ ID NO: 1507545 - DNA, 15 bp, Homo sapiens
tggcgcgctccttat

SEQ ID NO: 1507546 - DNA, 15 bp, Homo sapiens
ggcgcgctccttatt

SEQ ID NO: 1507547 - DNA, 15 bp, Homo sapiens
gcgcgctccttatta

SEQ ID NO: 1507548 - DNA, 15 bp, Homo sapiens
cgcgctccttattat

SEQ ID NO: 1507549 - DNA, 15 bp, Homo sapiens
gcgctccttattatt

SEQ ID NO: 1507550 - DNA, 15 bp, Homo sapiens
cgctccttattattt

SEQ ID NO: 1507551 - DNA, 15 bp, Homo sapiens
gctccttattattta

SEQ ID NO: 1507552 - DNA, 15 bp, Homo sapiens
ctccttattatttat

SEQ ID NO: 1507553 - DNA, 15 bp, Homo sapiens
tccttattatttatt

SEQ ID NO: 1507554 - DNA, 15 bp, Homo sapiens
ccttattatttattt

SEQ ID NO: 1507555 - DNA, 15 bp, Homo sapiens
cttattatttatttc

SEQ ID NO: 1507556 - DNA, 15 bp, Homo sapiens
ttattatttatttct

SEQ ID NO: 1507557 - DNA, 15 bp, Homo sapiens
tattatttatttctt

SEQ ID NO: 1507558 - DNA, 15 bp, Homo sapiens
attatttatttcttt

SEQ ID NO: 1507559 - DNA, 15 bp, Homo sapiens
ttatttatttctttt

SEQ ID NO: 1507560 - DNA, 15 bp, Homo sapiens
tatttatttcttttc

SEQ ID NO: 1507561 - DNA, 15 bp, Homo sapiens
atttatttcttttcc

SEQ ID NO: 1507562 - DNA, 15 bp, Homo sapiens
tttatttcttttccc

SEQ ID NO: 1507563 - DNA, 15 bp, Homo sapiens
ttatttcttttccct

SEQ ID NO: 1507564 - DNA, 15 bp, Homo sapiens
tatttcttttccctc

SEQ ID NO: 1507565 - DNA, 15 bp, Homo sapiens
atttcttttccctct

SEQ ID NO: 1507566 - DNA, 15 bp, Homo sapiens
tttcttttccctctg

SEQ ID NO: 1507567 - DNA, 15 bp, Homo sapiens
ttcttttccctctgt

SEQ ID NO: 1507568 - DNA, 15 bp, Homo sapiens
tcttttccctctgtt

SEQ ID NO: 1507569 - DNA, 15 bp, Homo sapiens
cttttccctctgttt

SEQ ID NO: 1507570 - DNA, 15 bp, Homo sapiens
ttttccctctgtttt

SEQ ID NO: 1507571 - DNA, 15 bp, Homo sapiens
tttccctctgtttta

SEQ ID NO: 1507572 - DNA, 15 bp, Homo sapiens
ttccctctgttttat

SEQ ID NO: 1507573 - DNA, 15 bp, Homo sapiens
tccctctgttttatt

SEQ ID NO: 1507574 - DNA, 15 bp, Homo sapiens
ccctctgttttattt

SEQ ID NO: 1507575 - DNA, 15 bp, Homo sapiens
cctctgttttatttt

SEQ ID NO: 1507576 - DNA, 15 bp, Homo sapiens
ctctgttttattttt

SEQ ID NO: 1507577 - DNA, 15 bp, Homo sapiens
tctgttttattttta

SEQ ID NO: 1507578 - DNA, 15 bp, Homo sapiens
ctgttttatttttat

SEQ ID NO: 1507579 - DNA, 15 bp, Homo sapiens
tgttttatttttatt

SEQ ID NO: 1507580 - DNA, 15 bp, Homo sapiens
tttatttttattttc

SEQ ID NO: 1507581 - DNA, 15 bp, Homo sapiens
ttatttttattttca

SEQ ID NO: 1507582 - DNA, 15 bp, Homo sapiens
tatttttattttcaa

SEQ ID NO: 1507583 - DNA, 15 bp, Homo sapiens
atttttattttcaag

SEQ ID NO: 1507584 - DNA, 15 bp, Homo sapiens
tttttattttcaagc

SEQ ID NO: 1507585 - DNA, 15 bp, Homo sapiens
ttttattttcaagct

SEQ ID NO: 1507586 - DNA, 15 bp, Homo sapiens
tttattttcaagctg

SEQ ID NO: 1507587 - DNA, 15 bp, Homo sapiens
ttattttcaagctgc

SEQ ID NO: 1507588 - DNA, 15 bp, Homo sapiens
tattttcaagctgcc

SEQ ID NO: 1507589 - DNA, 15 bp, Homo sapiens
attttcaagctgccg

SEQ ID NO: 1507590 - DNA, 15 bp, Homo sapiens
ttttcaagctgccgg

SEQ ID NO: 1507591 - DNA, 15 bp, Homo sapiens
tttcaagctgccggc

SEQ ID NO: 1507592 - DNA, 15 bp, Homo sapiens
ttcaagctgccggcc

SEQ ID NO: 1507593 - DNA, 15 bp, Homo sapiens
tcaagctgccggcca

SEQ ID NO: 1507594 - DNA, 15 bp, Homo sapiens
caagctgccggccag

SEQ ID NO: 1507595 - DNA, 15 bp, Homo sapiens
aagctgccggccagg

SEQ ID NO: 1507596 - DNA, 15 bp, Homo sapiens
agctgccggccaggc

SEQ ID NO: 1507597 - DNA, 15 bp, Homo sapiens
gctgccggccaggct

SEQ ID NO: 1507598 - DNA, 15 bp, Homo sapiens
ctgccggccaggctg

SEQ ID NO: 1507599 - DNA, 15 bp, Homo sapiens
tgccggccaggctgg

SEQ ID NO: 1507600 - DNA, 15 bp, Homo sapiens
gccggccaggctgga

SEQ ID NO: 1507601 - DNA, 15 bp, Homo sapiens
ccggccaggctggat

SEQ ID NO: 1507602 - DNA, 15 bp, Homo sapiens
cggccaggctggatg

SEQ ID NO: 1507603 - DNA, 15 bp, Homo sapiens
ggccaggctggatgc

SEQ ID NO: 1507604 - DNA, 15 bp, Homo sapiens
gccaggctggatgcc

SEQ ID NO: 1507605 - DNA, 15 bp, Homo sapiens
ccaggctggatgccg

SEQ ID NO: 1507606 - DNA, 15 bp, Homo sapiens
caggctggatgccgt

SEQ ID NO: 1507607 - DNA, 15 bp, Homo sapiens
aggctggatgccgtc

SEQ ID NO: 1507608 - DNA, 15 bp, Homo sapiens
ggctggatgccgtcc

SEQ ID NO: 1507609 - DNA, 15 bp, Homo sapiens
gctggatgccgtcca

SEQ ID NO: 1507610 - DNA, 15 bp, Homo sapiens
ctggatgccgtccat

SEQ ID NO: 1507611 - DNA, 15 bp, Homo sapiens
tggatgccgtccatt

SEQ ID NO: 1507612 - DNA, 15 bp, Homo sapiens
ggatgccgtccattc

SEQ ID NO: 1507613 - DNA, 15 bp, Homo sapiens
gatgccgtccattca

SEQ ID NO: 1507614 - DNA, 15 bp, Homo sapiens
atgccgtccattcac

SEQ ID NO: 1507615 - DNA, 15 bp, Homo sapiens
tgccgtccattcacc

SEQ ID NO: 1507616 - DNA, 15 bp, Homo sapiens
gccgtccattcaccc

SEQ ID NO: 1507617 - DNA, 15 bp, Homo sapiens
ccgtccattcacccc

SEQ ID NO: 1507618 - DNA, 15 bp, Homo sapiens
cgtccattcaccccg

SEQ ID NO: 1507619 - DNA, 15 bp, Homo sapiens
gtccattcaccccgc

SEQ ID NO: 1507620 - DNA, 15 bp, Homo sapiens
tccattcaccccgct

SEQ ID NO: 1507621 - DNA, 15 bp, Homo sapiens
ccattcaccccgctg

SEQ ID NO: 1507622 - DNA, 15 bp, Homo sapiens
cattcaccccgctgc

SEQ ID NO: 1507623 - DNA, 15 bp, Homo sapiens
attcaccccgctgcc

SEQ ID NO: 1507624 - DNA, 15 bp, Homo sapiens
ttcaccccgctgcct

SEQ ID NO: 1507625 - DNA, 15 bp, Homo sapiens
tcaccccgctgcctt

SEQ ID NO: 1507626 - DNA, 15 bp, Homo sapiens
caccccgctgccttg

SEQ ID NO: 1507627 - DNA, 15 bp, Homo sapiens
accccgctgccttgg

SEQ ID NO: 1507628 - DNA, 15 bp, Homo sapiens
ccccgctgccttgga

SEQ ID NO: 1507629 - DNA, 15 bp, Homo sapiens
cccgctgccttggag

SEQ ID NO: 1507630 - DNA, 15 bp, Homo sapiens
ccgctgccttggagc

SEQ ID NO: 1507631 - DNA, 15 bp, Homo sapiens
cgctgccttggagcg

SEQ ID NO: 1507632 - DNA, 15 bp, Homo sapiens
gctgccttggagcgc

SEQ ID NO: 1507633 - DNA, 15 bp, Homo sapiens
ctgccttggagcgct

SEQ ID NO: 1507634 - DNA, 15 bp, Homo sapiens
tgccttggagcgctg

SEQ ID NO: 1507635 - DNA, 15 bp, Homo sapiens
gccttggagcgctgc

SEQ ID NO: 1507636 - DNA, 15 bp, Homo sapiens
ccttggagcgctgcg

SEQ ID NO: 1507637 - DNA, 15 bp, Homo sapiens
cttggagcgctgcgc

SEQ ID NO: 1507638 - DNA, 15 bp, Homo sapiens
ttggagcgctgcgcg

SEQ ID NO: 1507639 - DNA, 15 bp, Homo sapiens
tggagcgctgcgcgc

SEQ ID NO: 1507640 - DNA, 15 bp, Homo sapiens
ggagcgctgcgcgca

SEQ ID NO: 1507641 - DNA, 15 bp, Homo sapiens
gagcgctgcgcgcag

SEQ ID NO: 1507642 - DNA, 15 bp, Homo sapiens
agcgctgcgcgcaga

SEQ ID NO: 1507643 - DNA, 15 bp, Homo sapiens
gcgctgcgcgcagac

SEQ ID NO: 1507644 - DNA, 15 bp, Homo sapiens
cgctgcgcgcagaca

SEQ ID NO: 1507645 - DNA, 15 bp, Homo sapiens
gctgcgcgcagacag

SEQ ID NO: 1507646 - DNA, 15 bp, Homo sapiens
ctgcgcgcagacagc

SEQ ID NO: 1507647 - DNA, 15 bp, Homo sapiens
tgcgcgcagacagcc

SEQ ID NO: 1507648 - DNA, 15 bp, Homo sapiens
gcgcgcagacagccg

SEQ ID NO: 1507649 - DNA, 15 bp, Homo sapiens
cgcgcagacagccgg

SEQ ID NO: 1507650 - DNA, 15 bp, Homo sapiens
gcgcagacagccgga

SEQ ID NO: 1507651 - DNA, 15 bp, Homo sapiens
cgcagacagccggag

SEQ ID NO: 1507652 - DNA, 15 bp, Homo sapiens
gcagacagccggagc

SEQ ID NO: 1507653 - DNA, 15 bp, Homo sapiens
cagacagccggagcc

SEQ ID NO: 1507654 - DNA, 15 bp, Homo sapiens
agacagccggagccg

SEQ ID NO: 1507655 - DNA, 15 bp, Homo sapiens
gacagccggagccgg

SEQ ID NO: 1507656 - DNA, 15 bp, Homo sapiens
acagccggagccggc

SEQ ID NO: 1507657 - DNA, 15 bp, Homo sapiens
cagccggagccggct

SEQ ID NO: 1507658 - DNA, 15 bp, Homo sapiens
agccggagccggctc

SEQ ID NO: 1507659 - DNA, 15 bp, Homo sapiens
gccggagccggctcg

SEQ ID NO: 1507660 - DNA, 15 bp, Homo sapiens
ccggagccggctcgg

SEQ ID NO: 1507661 - DNA, 15 bp, Homo sapiens
cggagccggctcggg

SEQ ID NO: 1507662 - DNA, 15 bp, Homo sapiens
ggagccggctcgggc

SEQ ID NO: 1507663 - DNA, 15 bp, Homo sapiens
gagccggctcgggct

SEQ ID NO: 1507664 - DNA, 15 bp, Homo sapiens
agccggctcgggctc

SEQ ID NO: 1507665 - DNA, 15 bp, Homo sapiens
gccggctcgggctca

SEQ ID NO: 1507666 - DNA, 15 bp, Homo sapiens
ccggctcgggctcag

SEQ ID NO: 1507667 - DNA, 15 bp, Homo sapiens
cggctcgggctcagc

SEQ ID NO: 1507668 - DNA, 15 bp, Homo sapiens
ggctcgggctcagcc

SEQ ID NO: 1507669 - DNA, 15 bp, Homo sapiens
gctcgggctcagccc

SEQ ID NO: 1507670 - DNA, 15 bp, Homo sapiens
ctcgggctcagccct

SEQ ID NO: 1507671 - DNA, 15 bp, Homo sapiens
tcgggctcagccctg

SEQ ID NO: 1507672 - DNA, 15 bp, Homo sapiens
cgggctcagccctgg

SEQ ID NO: 1507673 - DNA, 15 bp, Homo sapiens
gggctcagccctggg

SEQ ID NO: 1507674 - DNA, 15 bp, Homo sapiens
ggctcagccctgggg

SEQ ID NO: 1507675 - DNA, 15 bp, Homo sapiens
gctcagccctggggg

SEQ ID NO: 1507676 - DNA, 15 bp, Homo sapiens
ctcagccctgggggt

SEQ ID NO: 1507677 - DNA, 15 bp, Homo sapiens
tcagccctgggggtg

SEQ ID NO: 1507678 - DNA, 15 bp, Homo sapiens
cagccctgggggtgg

SEQ ID NO: 1507679 - DNA, 15 bp, Homo sapiens
agccctgggggtggg

SEQ ID NO: 1507680 - DNA, 15 bp, Homo sapiens
gccctgggggtgggg

SEQ ID NO: 1507681 - DNA, 15 bp, Homo sapiens
ctgggggtggggggc

SEQ ID NO: 1507682 - DNA, 15 bp, Homo sapiens
tgggggtggggggca

SEQ ID NO: 1507683 - DNA, 15 bp, Homo sapiens
gggggtggggggcag

SEQ ID NO: 1507684 - DNA, 15 bp, Homo sapiens
ggggtggggggcagc

SEQ ID NO: 1507685 - DNA, 15 bp, Homo sapiens
gggtggggggcagcc

SEQ ID NO: 1507686 - DNA, 15 bp, Homo sapiens
ggtggggggcagccg

SEQ ID NO: 1507687 - DNA, 15 bp, Homo sapiens
gtggggggcagccga

SEQ ID NO: 1507688 - DNA, 15 bp, Homo sapiens
ggggggcagccgagg

SEQ ID NO: 1507689 - DNA, 15 bp, Homo sapiens
gggggcagccgaggg

SEQ ID NO: 1507690 - DNA, 15 bp, Homo sapiens
ggggcagccgagggc

SEQ ID NO: 1507691 - DNA, 15 bp, Homo sapiens
gggcagccgagggcg

SEQ ID NO: 1507692 - DNA, 15 bp, Homo sapiens
ggcagccgagggcgc

SEQ ID NO: 1507693 - DNA, 15 bp, Homo sapiens
gcagccgagggcgcg

SEQ ID NO: 1507694 - DNA, 15 bp, Homo sapiens
cagccgagggcgcgg

SEQ ID NO: 1507695 - DNA, 15 bp, Homo sapiens
agccgagggcgcggg

SEQ ID NO: 1507696 - DNA, 15 bp, Homo sapiens
gccgagggcgcgggg

SEQ ID NO: 1507697 - DNA, 15 bp, Homo sapiens
ccgagggcgcggggg

SEQ ID NO: 1507698 - DNA, 15 bp, Homo sapiens
cgagggcgcgggggg

SEQ ID NO: 1507699 - DNA, 15 bp, Homo sapiens
gagggcgcggggggc

SEQ ID NO: 1507700 - DNA, 15 bp, Homo sapiens
agggcgcggggggcg

SEQ ID NO: 1507701 - DNA, 15 bp, Homo sapiens
gggcgcggggggcgg

SEQ ID NO: 1507702 - DNA, 15 bp, Homo sapiens
ggcgcggggggcggg

SEQ ID NO: 1507703 - DNA, 15 bp, Homo sapiens
gcgcggggggcgggg

SEQ ID NO: 1507704 - DNA, 15 bp, Homo sapiens
cgcggggggcggggt

SEQ ID NO: 1507705 - DNA, 15 bp, Homo sapiens
gcggggggcggggta

SEQ ID NO: 1507706 - DNA, 15 bp, Homo sapiens
cggggggcggggtac

SEQ ID NO: 1507707 - DNA, 15 bp, Homo sapiens
ggggggcggggtacg

SEQ ID NO: 1507708 - DNA, 15 bp, Homo sapiens
gggggcggggtacgc

SEQ ID NO: 1507709 - DNA, 15 bp, Homo sapiens
ggggcggggtacgcg

SEQ ID NO: 1507710 - DNA, 15 bp, Homo sapiens
gggcggggtacgcgg

SEQ ID NO: 1507711 - DNA, 15 bp, Homo sapiens
ggcggggtacgcggg

SEQ ID NO: 1507712 - DNA, 15 bp, Homo sapiens
gcggggtacgcgggt

SEQ ID NO: 1507713 - DNA, 15 bp, Homo sapiens
cggggtacgcgggta

SEQ ID NO: 1507714 - DNA, 15 bp, Homo sapiens
ggggtacgcgggtag

SEQ ID NO: 1507715 - DNA, 15 bp, Homo sapiens
gggtacgcgggtagc

SEQ ID NO: 1507716 - DNA, 15 bp, Homo sapiens
ggtacgcgggtagca

SEQ ID NO: 1507717 - DNA, 15 bp, Homo sapiens
gtacgcgggtagcag

SEQ ID NO: 1507718 - DNA, 15 bp, Homo sapiens
tacgcgggtagcagc

SEQ ID NO: 1507719 - DNA, 15 bp, Homo sapiens
acgcgggtagcagct

SEQ ID NO: 1507720 - DNA, 15 bp, Homo sapiens
cgcgggtagcagctc

SEQ ID NO: 1507721 - DNA, 15 bp, Homo sapiens
gcgggtagcagctca

SEQ ID NO: 1507722 - DNA, 15 bp, Homo sapiens
cgggtagcagctcaa

SEQ ID NO: 1507723 - DNA, 15 bp, Homo sapiens
gggtagcagctcaag

SEQ ID NO: 1507724 - DNA, 15 bp, Homo sapiens
ggtagcagctcaagg

SEQ ID NO: 1507725 - DNA, 15 bp, Homo sapiens
gtagcagctcaaggg

SEQ ID NO: 1507726 - DNA, 15 bp, Homo sapiens
tagcagctcaagggt

SEQ ID NO: 1507727 - DNA, 15 bp, Homo sapiens
agcagctcaagggtg

SEQ ID NO: 1507728 - DNA, 15 bp, Homo sapiens
gcagctcaagggtga

SEQ ID NO: 1507729 - DNA, 15 bp, Homo sapiens
cagctcaagggtgag

SEQ ID NO: 1507730 - DNA, 15 bp, Homo sapiens
agctcaagggtgagg

SEQ ID NO: 1507731 - DNA, 15 bp, Homo sapiens
gctcaagggtgaggg

SEQ ID NO: 1507732 - DNA, 15 bp, Homo sapiens
ctcaagggtgagggg

SEQ ID NO: 1507733 - DNA, 15 bp, Homo sapiens
tcaagggtgaggggc

SEQ ID NO: 1507734 - DNA, 15 bp, Homo sapiens
caagggtgaggggca

SEQ ID NO: 1507735 - DNA, 15 bp, Homo sapiens
aagggtgaggggcag

SEQ ID NO: 1507736 - DNA, 15 bp, Homo sapiens
agggtgaggggcagc

SEQ ID NO: 1507737 - DNA, 15 bp, Homo sapiens
gggtgaggggcagcc

SEQ ID NO: 1507738 - DNA, 15 bp, Homo sapiens
ggtgaggggcagccg

SEQ ID NO: 1507739 - DNA, 15 bp, Homo sapiens
gtgaggggcagccga

SEQ ID NO: 1507740 - DNA, 15 bp, Homo sapiens
tgaggggcagccgag

SEQ ID NO: 1507741 - DNA, 15 bp, Homo sapiens
gaggggcagccgaga

SEQ ID NO: 1507742 - DNA, 15 bp, Homo sapiens
aggggcagccgagag

SEQ ID NO: 1507743 - DNA, 15 bp, Homo sapiens
ggggcagccgagagc

SEQ ID NO: 1507744 - DNA, 15 bp, Homo sapiens
gggcagccgagagcg

SEQ ID NO: 1507745 - DNA, 15 bp, Homo sapiens
ggcagccgagagcgc

SEQ ID NO: 1507746 - DNA, 15 bp, Homo sapiens
gcagccgagagcgcg

SEQ ID NO: 1507747 - DNA, 15 bp, Homo sapiens
cagccgagagcgcgc

SEQ ID NO: 1507748 - DNA, 15 bp, Homo sapiens
agccgagagcgcgcg

SEQ ID NO: 1507749 - DNA, 15 bp, Homo sapiens
gccgagagcgcgcgg

SEQ ID NO: 1507750 - DNA, 15 bp, Homo sapiens
ccgagagcgcgcggg

SEQ ID NO: 1507751 - DNA, 15 bp, Homo sapiens
cgagagcgcgcgggg

SEQ ID NO: 1507752 - DNA, 15 bp, Homo sapiens
gagagcgcgcggggc

SEQ ID NO: 1507753 - DNA, 15 bp, Homo sapiens
agagcgcgcggggcg

SEQ ID NO: 1507754 - DNA, 15 bp, Homo sapiens
gagcgcgcggggcgg

SEQ ID NO: 1507755 - DNA, 15 bp, Homo sapiens
agcgcgcggggcggg

SEQ ID NO: 1507756 - DNA, 15 bp, Homo sapiens
gcgcgcggggcgggg

SEQ ID NO: 1507757 - DNA, 15 bp, Homo sapiens
cgcgcggggcggggt

SEQ ID NO: 1507758 - DNA, 15 bp, Homo sapiens
gcgcggggcggggta

SEQ ID NO: 1507759 - DNA, 15 bp, Homo sapiens
cgcggggcggggtac

SEQ ID NO: 1507760 - DNA, 15 bp, Homo sapiens
gcggggcggggtact

SEQ ID NO: 1507761 - DNA, 15 bp, Homo sapiens
cggggcggggtactc

SEQ ID NO: 1507762 - DNA, 15 bp, Homo sapiens
ggggcggggtactcc

SEQ ID NO: 1507763 - DNA, 15 bp, Homo sapiens
gggcggggtactccg

SEQ ID NO: 1507764 - DNA, 15 bp, Homo sapiens
ggcggggtactccgg

SEQ ID NO: 1507765 - DNA, 15 bp, Homo sapiens
gcggggtactccggg

SEQ ID NO: 1507766 - DNA, 15 bp, Homo sapiens
cggggtactccggga

SEQ ID NO: 1507767 - DNA, 15 bp, Homo sapiens
ggggtactccgggag

SEQ ID NO: 1507768 - DNA, 15 bp, Homo sapiens
gggtactccgggagc

SEQ ID NO: 1507769 - DNA, 15 bp, Homo sapiens
ggtactccgggagca

SEQ ID NO: 1507770 - DNA, 15 bp, Homo sapiens
gtactccgggagcag

SEQ ID NO: 1507771 - DNA, 15 bp, Homo sapiens
tactccgggagcagc

SEQ ID NO: 1507772 - DNA, 15 bp, Homo sapiens
actccgggagcagct

SEQ ID NO: 1507773 - DNA, 15 bp, Homo sapiens
ctccgggagcagctc

SEQ ID NO: 1507774 - DNA, 15 bp, Homo sapiens
tccgggagcagctcc

SEQ ID NO: 1507775 - DNA, 15 bp, Homo sapiens
ccgggagcagctccg

SEQ ID NO: 1507776 - DNA, 15 bp, Homo sapiens
cgggagcagctccgg

SEQ ID NO: 1507777 - DNA, 15 bp, Homo sapiens
gggagcagctccggg

SEQ ID NO: 1507778 - DNA, 15 bp, Homo sapiens
ggagcagctccgggt

SEQ ID NO: 1507779 - DNA, 15 bp, Homo sapiens
gagcagctccgggtg

SEQ ID NO: 1507780 - DNA, 15 bp, Homo sapiens
agcagctccgggtgg

SEQ ID NO: 1507781 - DNA, 15 bp, Homo sapiens
gcagctccgggtggg

SEQ ID NO: 1507782 - DNA, 15 bp, Homo sapiens
cagctccgggtgggg

SEQ ID NO: 1507783 - DNA, 15 bp, Homo sapiens
agctccgggtggggg

SEQ ID NO: 1507784 - DNA, 15 bp, Homo sapiens
gctccgggtgggggg

SEQ ID NO: 1507785 - DNA, 15 bp, Homo sapiens
ctccgggtggggggc

SEQ ID NO: 1507786 - DNA, 15 bp, Homo sapiens
tccgggtggggggca

SEQ ID NO: 1507787 - DNA, 15 bp, Homo sapiens
ccgggtggggggcag

SEQ ID NO: 1507788 - DNA, 15 bp, Homo sapiens
cgggtggggggcagc

SEQ ID NO: 1507789 - DNA, 15 bp, Homo sapiens
ggtggggggcagcct

SEQ ID NO: 1507790 - DNA, 15 bp, Homo sapiens
gtggggggcagcctt

SEQ ID NO: 1507791 - DNA, 15 bp, Homo sapiens
tggggggcagccttg

SEQ ID NO: 1507792 - DNA, 15 bp, Homo sapiens
ggggggcagccttgg

SEQ ID NO: 1507793 - DNA, 15 bp, Homo sapiens
gggggcagccttggg

SEQ ID NO: 1507794 - DNA, 15 bp, Homo sapiens
ggggcagccttgggc

SEQ ID NO: 1507795 - DNA, 15 bp, Homo sapiens
gggcagccttgggca

SEQ ID NO: 1507796 - DNA, 15 bp, Homo sapiens
ggcagccttgggcac

SEQ ID NO: 1507797 - DNA, 15 bp, Homo sapiens
gcagccttgggcaca

SEQ ID NO: 1507798 - DNA, 15 bp, Homo sapiens
cagccttgggcacag

SEQ ID NO: 1507799 - DNA, 15 bp, Homo sapiens
agccttgggcacagg

SEQ ID NO: 1507800 - DNA, 15 bp, Homo sapiens
gccttgggcacaggg

SEQ ID NO: 1507801 - DNA, 15 bp, Homo sapiens
ccttgggcacaggga

SEQ ID NO: 1507802 - DNA, 15 bp, Homo sapiens
cttgggcacagggag

SEQ ID NO: 1507803 - DNA, 15 bp, Homo sapiens
ttgggcacagggagg

SEQ ID NO: 1507804 - DNA, 15 bp, Homo sapiens
tgggcacagggaggt

SEQ ID NO: 1507805 - DNA, 15 bp, Homo sapiens
gggcacagggaggtg

SEQ ID NO: 1507806 - DNA, 15 bp, Homo sapiens
ggcacagggaggtgg

SEQ ID NO: 1507807 - DNA, 15 bp, Homo sapiens
gcacagggaggtggg

SEQ ID NO: 1507808 - DNA, 15 bp, Homo sapiens
cacagggaggtgggg

SEQ ID NO: 1507809 - DNA, 15 bp, Homo sapiens
acagggaggtggggg

SEQ ID NO: 1507810 - DNA, 15 bp, Homo sapiens
agggaggtgggggga

SEQ ID NO: 1507811 - DNA, 15 bp, Homo sapiens
gggaggtggggggaa

SEQ ID NO: 1507812 - DNA, 15 bp, Homo sapiens
ggaggtggggggaac

SEQ ID NO: 1507813 - DNA, 15 bp, Homo sapiens
gaggtggggggaact

SEQ ID NO: 1507814 - DNA, 15 bp, Homo sapiens
aggtggggggaactc

SEQ ID NO: 1507815 - DNA, 15 bp, Homo sapiens
ggtggggggaactca

SEQ ID NO: 1507816 - DNA, 15 bp, Homo sapiens
gtggggggaactcag

SEQ ID NO: 1507817 - DNA, 15 bp, Homo sapiens
tggggggaactcagg

SEQ ID NO: 1507818 - DNA, 15 bp, Homo sapiens
ggggggaactcaggg

SEQ ID NO: 1507819 - DNA, 15 bp, Homo sapiens
gggggaactcagggg

SEQ ID NO: 1507820 - DNA, 15 bp, Homo sapiens
ggggaactcaggggg

SEQ ID NO: 1507821 - DNA, 15 bp, Homo sapiens
gggaactcagggggc

SEQ ID NO: 1507822 - DNA, 15 bp, Homo sapiens
ggaactcagggggca

SEQ ID NO: 1507823 - DNA, 15 bp, Homo sapiens
gaactcagggggcag

SEQ ID NO: 1507824 - DNA, 15 bp, Homo sapiens
aactcagggggcagc

SEQ ID NO: 1507825 - DNA, 15 bp, Homo sapiens
actcagggggcagct

SEQ ID NO: 1507826 - DNA, 15 bp, Homo sapiens
ctcagggggcagctc

SEQ ID NO: 1507827 - DNA, 15 bp, Homo sapiens
tcagggggcagctcc

SEQ ID NO: 1507828 - DNA, 15 bp, Homo sapiens
cagggggcagctccg

SEQ ID NO: 1507829 - DNA, 15 bp, Homo sapiens
agggggcagctccgg

SEQ ID NO: 1507830 - DNA, 15 bp, Homo sapiens
gggggcagctccggg

SEQ ID NO: 1507831 - DNA, 15 bp, Homo sapiens
ggggcagctccgggt

SEQ ID NO: 1507832 - DNA, 15 bp, Homo sapiens
gggcagctccgggtg

SEQ ID NO: 1507833 - DNA, 15 bp, Homo sapiens
ggcagctccgggtgg

SEQ ID NO: 1507834 - DNA, 15 bp, Homo sapiens
ctccgggtggggggt

SEQ ID NO: 1507835 - DNA, 15 bp, Homo sapiens
tccgggtggggggtg

SEQ ID NO: 1507836 - DNA, 15 bp, Homo sapiens
ccgggtggggggtgg

SEQ ID NO: 1507837 - DNA, 15 bp, Homo sapiens
cgggtggggggtggc

SEQ ID NO: 1507838 - DNA, 15 bp, Homo sapiens
gggtggggggtggcc

SEQ ID NO: 1507839 - DNA, 15 bp, Homo sapiens
ggtggggggtggccg

SEQ ID NO: 1507840 - DNA, 15 bp, Homo sapiens
gtggggggtggccga

SEQ ID NO: 1507841 - DNA, 15 bp, Homo sapiens
tggggggtggccgag

SEQ ID NO: 1507842 - DNA, 15 bp, Homo sapiens
ggggggtggccgagg

SEQ ID NO: 1507843 - DNA, 15 bp, Homo sapiens
gggggtggccgaggg

SEQ ID NO: 1507844 - DNA, 15 bp, Homo sapiens
ggggtggccgagggc

SEQ ID NO: 1507845 - DNA, 15 bp, Homo sapiens
gggtggccgagggcg

SEQ ID NO: 1507846 - DNA, 15 bp, Homo sapiens
ggtggccgagggcgt

SEQ ID NO: 1507847 - DNA, 15 bp, Homo sapiens
gtggccgagggcgtt

SEQ ID NO: 1507848 - DNA, 15 bp, Homo sapiens
tggccgagggcgttg

SEQ ID NO: 1507849 - DNA, 15 bp, Homo sapiens
ggccgagggcgttgg

SEQ ID NO: 1507850 - DNA, 15 bp, Homo sapiens
gccgagggcgttggg

SEQ ID NO: 1507851 - DNA, 15 bp, Homo sapiens
ccgagggcgttgggg

SEQ ID NO: 1507852 - DNA, 15 bp, Homo sapiens
cgagggcgttggggg

SEQ ID NO: 1507853 - DNA, 15 bp, Homo sapiens
gagggcgttgggggc

SEQ ID NO: 1507854 - DNA, 15 bp, Homo sapiens
agggcgttgggggcc

SEQ ID NO: 1507855 - DNA, 15 bp, Homo sapiens
gggcgttgggggccg

SEQ ID NO: 1507856 - DNA, 15 bp, Homo sapiens
ggcgttgggggccgg

SEQ ID NO: 1507857 - DNA, 15 bp, Homo sapiens
gcgttgggggccggg

SEQ ID NO: 1507858 - DNA, 15 bp, Homo sapiens
cgttgggggccgggg

SEQ ID NO: 1507859 - DNA, 15 bp, Homo sapiens
gttgggggccggggg

SEQ ID NO: 1507860 - DNA, 15 bp, Homo sapiens
ttgggggccggggga

SEQ ID NO: 1507861 - DNA, 15 bp, Homo sapiens
tgggggccgggggat

SEQ ID NO: 1507862 - DNA, 15 bp, Homo sapiens
gggggccgggggata

SEQ ID NO: 1507863 - DNA, 15 bp, Homo sapiens
ggggccgggggatac

SEQ ID NO: 1507864 - DNA, 15 bp, Homo sapiens
gggccgggggataca

SEQ ID NO: 1507865 - DNA, 15 bp, Homo sapiens
ggccgggggatacag

SEQ ID NO: 1507866 - DNA, 15 bp, Homo sapiens
gccgggggatacagg

SEQ ID NO: 1507867 - DNA, 15 bp, Homo sapiens
ccgggggatacaggg

SEQ ID NO: 1507868 - DNA, 15 bp, Homo sapiens
cgggggatacagggg

SEQ ID NO: 1507869 - DNA, 15 bp, Homo sapiens
gggggatacagggga

SEQ ID NO: 1507870 - DNA, 15 bp, Homo sapiens
ggggatacaggggac

SEQ ID NO: 1507871 - DNA, 15 bp, Homo sapiens
gggatacaggggaca

SEQ ID NO: 1507872 - DNA, 15 bp, Homo sapiens
ggatacaggggacag

SEQ ID NO: 1507873 - DNA, 15 bp, Homo sapiens
gatacaggggacagc

SEQ ID NO: 1507874 - DNA, 15 bp, Homo sapiens
atacaggggacagct

SEQ ID NO: 1507875 - DNA, 15 bp, Homo sapiens
tacaggggacagctc

SEQ ID NO: 1507876 - DNA, 15 bp, Homo sapiens
acaggggacagctcg

SEQ ID NO: 1507877 - DNA, 15 bp, Homo sapiens
caggggacagctcgg

SEQ ID NO: 1507878 - DNA, 15 bp, Homo sapiens
aggggacagctcggg

SEQ ID NO: 1507879 - DNA, 15 bp, Homo sapiens
ggggacagctcggga

SEQ ID NO: 1507880 - DNA, 15 bp, Homo sapiens
gggacagctcgggag

SEQ ID NO: 1507881 - DNA, 15 bp, Homo sapiens
ggacagctcgggagc

SEQ ID NO: 1507882 - DNA, 15 bp, Homo sapiens
gacagctcgggagca

SEQ ID NO: 1507883 - DNA, 15 bp, Homo sapiens
acagctcgggagcag

SEQ ID NO: 1507884 - DNA, 15 bp, Homo sapiens
cagctcgggagcagc

SEQ ID NO: 1507885 - DNA, 15 bp, Homo sapiens
agctcgggagcagcc

SEQ ID NO: 1507886 - DNA, 15 bp, Homo sapiens
gctcgggagcagccg

SEQ ID NO: 1507887 - DNA, 15 bp, Homo sapiens
ctcgggagcagccgg

SEQ ID NO: 1507888 - DNA, 15 bp, Homo sapiens
tcgggagcagccggg

SEQ ID NO: 1507889 - DNA, 15 bp, Homo sapiens
cgggagcagccgggt

SEQ ID NO: 1507890 - DNA, 15 bp, Homo sapiens
gggagcagccgggtg

SEQ ID NO: 1507891 - DNA, 15 bp, Homo sapiens
ggagcagccgggtgg

SEQ ID NO: 1507892 - DNA, 15 bp, Homo sapiens
gagcagccgggtggg

SEQ ID NO: 1507893 - DNA, 15 bp, Homo sapiens
agcagccgggtgggg

SEQ ID NO: 1507894 - DNA, 15 bp, Homo sapiens
gcagccgggtggggg

SEQ ID NO: 1507895 - DNA, 15 bp, Homo sapiens
cagccgggtgggggt

SEQ ID NO: 1507896 - DNA, 15 bp, Homo sapiens
agccgggtgggggtg

SEQ ID NO: 1507897 - DNA, 15 bp, Homo sapiens
gccgggtgggggtgg

SEQ ID NO: 1507898 - DNA, 15 bp, Homo sapiens
ccgggtgggggtggc

SEQ ID NO: 1507899 - DNA, 15 bp, Homo sapiens
cgggtgggggtggcc

SEQ ID NO: 1507900 - DNA, 15 bp, Homo sapiens
gggtgggggtggccg

SEQ ID NO: 1507901 - DNA, 15 bp, Homo sapiens
ggtgggggtggccga

SEQ ID NO: 1507902 - DNA, 15 bp, Homo sapiens
gtgggggtggccgag

SEQ ID NO: 1507903 - DNA, 15 bp, Homo sapiens
tgggggtggccgagg

SEQ ID NO: 1507904 - DNA, 15 bp, Homo sapiens
ggtggccgagggcgc

SEQ ID NO: 1507905 - DNA, 15 bp, Homo sapiens
gtggccgagggcgcg

SEQ ID NO: 1507906 - DNA, 15 bp, Homo sapiens
tggccgagggcgcgg

SEQ ID NO: 1507907 - DNA, 15 bp, Homo sapiens
ggccgagggcgcggg

SEQ ID NO: 1507908 - DNA, 15 bp, Homo sapiens
ccgagggcgcgggga

SEQ ID NO: 1507909 - DNA, 15 bp, Homo sapiens
cgagggcgcggggag

SEQ ID NO: 1507910 - DNA, 15 bp, Homo sapiens
gagggcgcggggagc

SEQ ID NO: 1507911 - DNA, 15 bp, Homo sapiens
agggcgcggggagca

SEQ ID NO: 1507912 - DNA, 15 bp, Homo sapiens
gggcgcggggagcag

SEQ ID NO: 1507913 - DNA, 15 bp, Homo sapiens
ggcgcggggagcagc

SEQ ID NO: 1507914 - DNA, 15 bp, Homo sapiens
gcgcggggagcagct

SEQ ID NO: 1507915 - DNA, 15 bp, Homo sapiens
cgcggggagcagctt

SEQ ID NO: 1507916 - DNA, 15 bp, Homo sapiens
gcggggagcagcttg

SEQ ID NO: 1507917 - DNA, 15 bp, Homo sapiens
cggggagcagcttgg

SEQ ID NO: 1507918 - DNA, 15 bp, Homo sapiens
ggggagcagcttggg

SEQ ID NO: 1507919 - DNA, 15 bp, Homo sapiens
gggagcagcttgggg

SEQ ID NO: 1507920 - DNA, 15 bp, Homo sapiens
ggagcagcttggggg

SEQ ID NO: 1507921 - DNA, 15 bp, Homo sapiens
gagcagcttgggggt

SEQ ID NO: 1507922 - DNA, 15 bp, Homo sapiens
agcagcttgggggtt

SEQ ID NO: 1507923 - DNA, 15 bp, Homo sapiens
gcagcttgggggttg

SEQ ID NO: 1507924 - DNA, 15 bp, Homo sapiens
cagcttgggggttgg

SEQ ID NO: 1507925 - DNA, 15 bp, Homo sapiens
agcttgggggttggg

SEQ ID NO: 1507926 - DNA, 15 bp, Homo sapiens
gcttgggggttgggg

SEQ ID NO: 1507927 - DNA, 15 bp, Homo sapiens
cttgggggttggggg

SEQ ID NO: 1507928 - DNA, 15 bp, Homo sapiens
ttgggggttgggggc

SEQ ID NO: 1507929 - DNA, 15 bp, Homo sapiens
tgggggttgggggca

SEQ ID NO: 1507930 - DNA, 15 bp, Homo sapiens
gggggttgggggcag

SEQ ID NO: 1507931 - DNA, 15 bp, Homo sapiens
ggggttgggggcagc

SEQ ID NO: 1507932 - DNA, 15 bp, Homo sapiens
gggttgggggcagcc

SEQ ID NO: 1507933 - DNA, 15 bp, Homo sapiens
ggttgggggcagcct

SEQ ID NO: 1507934 - DNA, 15 bp, Homo sapiens
gttgggggcagcctt

SEQ ID NO: 1507935 - DNA, 15 bp, Homo sapiens
ttgggggcagccttg

SEQ ID NO: 1507936 - DNA, 15 bp, Homo sapiens
tgggggcagccttgg

SEQ ID NO: 1507937 - DNA, 15 bp, Homo sapiens
gggcagccttgggcg

SEQ ID NO: 1507938 - DNA, 15 bp, Homo sapiens
ggcagccttgggcga

SEQ ID NO: 1507939 - DNA, 15 bp, Homo sapiens
gcagccttgggcgag

SEQ ID NO: 1507940 - DNA, 15 bp, Homo sapiens
cagccttgggcgagg

SEQ ID NO: 1507941 - DNA, 15 bp, Homo sapiens
agccttgggcgaggg

SEQ ID NO: 1507942 - DNA, 15 bp, Homo sapiens
gccttgggcgaggga

SEQ ID NO: 1507943 - DNA, 15 bp, Homo sapiens
ccttgggcgagggaa

SEQ ID NO: 1507944 - DNA, 15 bp, Homo sapiens
cttgggcgagggaat

SEQ ID NO: 1507945 - DNA, 15 bp, Homo sapiens
ttgggcgagggaatg

SEQ ID NO: 1507946 - DNA, 15 bp, Homo sapiens
tgggcgagggaatgt

SEQ ID NO: 1507947 - DNA, 15 bp, Homo sapiens
gggcgagggaatgtt

SEQ ID NO: 1507948 - DNA, 15 bp, Homo sapiens
ggcgagggaatgttg

SEQ ID NO: 1507949 - DNA, 15 bp, Homo sapiens
gcgagggaatgttgg

SEQ ID NO: 1507950 - DNA, 15 bp, Homo sapiens
cgagggaatgttggg

SEQ ID NO: 1507951 - DNA, 15 bp, Homo sapiens
gagggaatgttgggg

SEQ ID NO: 1507952 - DNA, 15 bp, Homo sapiens
agggaatgttggggg

SEQ ID NO: 1507953 - DNA, 15 bp, Homo sapiens
gggaatgttggggga

SEQ ID NO: 1507954 - DNA, 15 bp, Homo sapiens
ggaatgttgggggac

SEQ ID NO: 1507955 - DNA, 15 bp, Homo sapiens
gaatgttgggggacg

SEQ ID NO: 1507956 - DNA, 15 bp, Homo sapiens
aatgttgggggacgc

SEQ ID NO: 1507957 - DNA, 15 bp, Homo sapiens
atgttgggggacgca

SEQ ID NO: 1507958 - DNA, 15 bp, Homo sapiens
tgttgggggacgcag

SEQ ID NO: 1507959 - DNA, 15 bp, Homo sapiens
gttgggggacgcagg

SEQ ID NO: 1507960 - DNA, 15 bp, Homo sapiens
ttgggggacgcaggg

SEQ ID NO: 1507961 - DNA, 15 bp, Homo sapiens
tgggggacgcagggg

SEQ ID NO: 1507962 - DNA, 15 bp, Homo sapiens
gggggacgcaggggg

SEQ ID NO: 1507963 - DNA, 15 bp, Homo sapiens
ggggacgcagggggc

SEQ ID NO: 1507964 - DNA, 15 bp, Homo sapiens
gggacgcagggggca

SEQ ID NO: 1507965 - DNA, 15 bp, Homo sapiens
ggacgcagggggcag

SEQ ID NO: 1507966 - DNA, 15 bp, Homo sapiens
gacgcagggggcagc

SEQ ID NO: 1507967 - DNA, 15 bp, Homo sapiens
acgcagggggcagct

SEQ ID NO: 1507968 - DNA, 15 bp, Homo sapiens
cgcagggggcagctc

SEQ ID NO: 1507969 - DNA, 15 bp, Homo sapiens
gcagggggcagctcg

SEQ ID NO: 1507970 - DNA, 15 bp, Homo sapiens
cagggggcagctcgg

SEQ ID NO: 1507971 - DNA, 15 bp, Homo sapiens
agggggcagctcggg

SEQ ID NO: 1507972 - DNA, 15 bp, Homo sapiens
gggggcagctcgggt

SEQ ID NO: 1507973 - DNA, 15 bp, Homo sapiens
ggggcagctcgggtg

SEQ ID NO: 1507974 - DNA, 15 bp, Homo sapiens
gggcagctcgggtgg

SEQ ID NO: 1507975 - DNA, 15 bp, Homo sapiens
ggcagctcgggtggg

SEQ ID NO: 1507976 - DNA, 15 bp, Homo sapiens
gcagctcgggtgggg

SEQ ID NO: 1507977 - DNA, 15 bp, Homo sapiens
cagctcgggtggggg

SEQ ID NO: 1507978 - DNA, 15 bp, Homo sapiens
agctcgggtgggggt

SEQ ID NO: 1507979 - DNA, 15 bp, Homo sapiens
gctcgggtgggggtg

SEQ ID NO: 1507980 - DNA, 15 bp, Homo sapiens
ctcgggtgggggtgg

SEQ ID NO: 1507981 - DNA, 15 bp, Homo sapiens
tcgggtgggggtggc

SEQ ID NO: 1507982 - DNA, 15 bp, Homo sapiens
ggggtggccgagggt

SEQ ID NO: 1507983 - DNA, 15 bp, Homo sapiens
gggtggccgagggtg

SEQ ID NO: 1507984 - DNA, 15 bp, Homo sapiens
ggtggccgagggtgc

SEQ ID NO: 1507985 - DNA, 15 bp, Homo sapiens
gtggccgagggtgct

SEQ ID NO: 1507986 - DNA, 15 bp, Homo sapiens
tggccgagggtgctg

SEQ ID NO: 1507987 - DNA, 15 bp, Homo sapiens
ggccgagggtgctgg

SEQ ID NO: 1507988 - DNA, 15 bp, Homo sapiens
gccgagggtgctggg

SEQ ID NO: 1507989 - DNA, 15 bp, Homo sapiens
ccgagggtgctggga

SEQ ID NO: 1507990 - DNA, 15 bp, Homo sapiens
cgagggtgctgggag

SEQ ID NO: 1507991 - DNA, 15 bp, Homo sapiens
gagggtgctgggagc

SEQ ID NO: 1507992 - DNA, 15 bp, Homo sapiens
agggtgctgggagcc

SEQ ID NO: 1507993 - DNA, 15 bp, Homo sapiens
gggtgctgggagcca

SEQ ID NO: 1507994 - DNA, 15 bp, Homo sapiens
ggtgctgggagccac

SEQ ID NO: 1507995 - DNA, 15 bp, Homo sapiens
gtgctgggagccaca

SEQ ID NO: 1507996 - DNA, 15 bp, Homo sapiens
tgctgggagccacag

SEQ ID NO: 1507997 - DNA, 15 bp, Homo sapiens
gctgggagccacagg

SEQ ID NO: 1507998 - DNA, 15 bp, Homo sapiens
ctgggagccacaggg

SEQ ID NO: 1507999 - DNA, 15 bp, Homo sapiens
tgggagccacagggg

SEQ ID NO: 1508000 - DNA, 15 bp, Homo sapiens
gggagccacaggggg

SEQ ID NO: 1508001 - DNA, 15 bp, Homo sapiens
ggagccacagggggc

SEQ ID NO: 1508002 - DNA, 15 bp, Homo sapiens
gagccacagggggcc

SEQ ID NO: 1508003 - DNA, 15 bp, Homo sapiens
agccacagggggccg

SEQ ID NO: 1508004 - DNA, 15 bp, Homo sapiens
gccacagggggccga

SEQ ID NO: 1508005 - DNA, 15 bp, Homo sapiens
ccacagggggccgag

SEQ ID NO: 1508006 - DNA, 15 bp, Homo sapiens
cacagggggccgagg

SEQ ID NO: 1508007 - DNA, 15 bp, Homo sapiens
acagggggccgaggg

SEQ ID NO: 1508008 - DNA, 15 bp, Homo sapiens
cagggggccgagggc

SEQ ID NO: 1508009 - DNA, 15 bp, Homo sapiens
agggggccgagggct

SEQ ID NO: 1508010 - DNA, 15 bp, Homo sapiens
gggggccgagggctg

SEQ ID NO: 1508011 - DNA, 15 bp, Homo sapiens
ggggccgagggctgg

SEQ ID NO: 1508012 - DNA, 15 bp, Homo sapiens
gggccgagggctggg

SEQ ID NO: 1508013 - DNA, 15 bp, Homo sapiens
ggccgagggctgggg

SEQ ID NO: 1508014 - DNA, 15 bp, Homo sapiens
gccgagggctgggga

SEQ ID NO: 1508015 - DNA, 15 bp, Homo sapiens
ccgagggctggggag

SEQ ID NO: 1508016 - DNA, 15 bp, Homo sapiens
cgagggctggggaga

SEQ ID NO: 1508017 - DNA, 15 bp, Homo sapiens
gagggctggggagaa

SEQ ID NO: 1508018 - DNA, 15 bp, Homo sapiens
agggctggggagaac

SEQ ID NO: 1508019 - DNA, 15 bp, Homo sapiens
gggctggggagaaca

SEQ ID NO: 1508020 - DNA, 15 bp, Homo sapiens
ggctggggagaacag

SEQ ID NO: 1508021 - DNA, 15 bp, Homo sapiens
gctggggagaacagg

SEQ ID NO: 1508022 - DNA, 15 bp, Homo sapiens
ctggggagaacaggg

SEQ ID NO: 1508023 - DNA, 15 bp, Homo sapiens
tggggagaacagggg

SEQ ID NO: 1508024 - DNA, 15 bp, Homo sapiens
ggggagaacaggggc

SEQ ID NO: 1508025 - DNA, 15 bp, Homo sapiens
gggagaacaggggca

SEQ ID NO: 1508026 - DNA, 15 bp, Homo sapiens
ggagaacaggggcac

SEQ ID NO: 1508027 - DNA, 15 bp, Homo sapiens
gagaacaggggcacc

SEQ ID NO: 1508028 - DNA, 15 bp, Homo sapiens
agaacaggggcaccg

SEQ ID NO: 1508029 - DNA, 15 bp, Homo sapiens
gaacaggggcaccgc

SEQ ID NO: 1508030 - DNA, 15 bp, Homo sapiens
aacaggggcaccgcg

SEQ ID NO: 1508031 - DNA, 15 bp, Homo sapiens
acaggggcaccgcgg

SEQ ID NO: 1508032 - DNA, 15 bp, Homo sapiens
caggggcaccgcggg

SEQ ID NO: 1508033 - DNA, 15 bp, Homo sapiens
aggggcaccgcgggg

SEQ ID NO: 1508034 - DNA, 15 bp, Homo sapiens
ggggcaccgcggggt

SEQ ID NO: 1508035 - DNA, 15 bp, Homo sapiens
gggcaccgcggggtt

SEQ ID NO: 1508036 - DNA, 15 bp, Homo sapiens
ggcaccgcggggttg

SEQ ID NO: 1508037 - DNA, 15 bp, Homo sapiens
gcaccgcggggttgg

SEQ ID NO: 1508038 - DNA, 15 bp, Homo sapiens
caccgcggggttgga

SEQ ID NO: 1508039 - DNA, 15 bp, Homo sapiens
accgcggggttggag

SEQ ID NO: 1508040 - DNA, 15 bp, Homo sapiens
ccgcggggttggagg

SEQ ID NO: 1508041 - DNA, 15 bp, Homo sapiens
cgcggggttggaggg

SEQ ID NO: 1508042 - DNA, 15 bp, Homo sapiens
gcggggttggaggga

SEQ ID NO: 1508043 - DNA, 15 bp, Homo sapiens
cggggttggagggag

SEQ ID NO: 1508044 - DNA, 15 bp, Homo sapiens
ggggttggagggagg

SEQ ID NO: 1508045 - DNA, 15 bp, Homo sapiens
gggttggagggagga

SEQ ID NO: 1508046 - DNA, 15 bp, Homo sapiens
ggttggagggaggac

SEQ ID NO: 1508047 - DNA, 15 bp, Homo sapiens
gttggagggaggacg

SEQ ID NO: 1508048 - DNA, 15 bp, Homo sapiens
ttggagggaggacgc

SEQ ID NO: 1508049 - DNA, 15 bp, Homo sapiens
tggagggaggacgcc

SEQ ID NO: 1508050 - DNA, 15 bp, Homo sapiens
ggagggaggacgcca

SEQ ID NO: 1508051 - DNA, 15 bp, Homo sapiens
gagggaggacgccag

SEQ ID NO: 1508052 - DNA, 15 bp, Homo sapiens
agggaggacgccagg

SEQ ID NO: 1508053 - DNA, 15 bp, Homo sapiens
gggaggacgccaggc

SEQ ID NO: 1508054 - DNA, 15 bp, Homo sapiens
ggaggacgccaggct

SEQ ID NO: 1508055 - DNA, 15 bp, Homo sapiens
gaggacgccaggctg

SEQ ID NO: 1508056 - DNA, 15 bp, Homo sapiens
aggacgccaggctgt

SEQ ID NO: 1508057 - DNA, 15 bp, Homo sapiens
ggacgccaggctgtg

SEQ ID NO: 1508058 - DNA, 15 bp, Homo sapiens
gacgccaggctgtgt

SEQ ID NO: 1508059 - DNA, 15 bp, Homo sapiens
acgccaggctgtgtg

SEQ ID NO: 1508060 - DNA, 15 bp, Homo sapiens
cgccaggctgtgtgc

SEQ ID NO: 1508061 - DNA, 15 bp, Homo sapiens
gccaggctgtgtgcc

SEQ ID NO: 1508062 - DNA, 15 bp, Homo sapiens
ccaggctgtgtgcct

SEQ ID NO: 1508063 - DNA, 15 bp, Homo sapiens
caggctgtgtgcctg

SEQ ID NO: 1508064 - DNA, 15 bp, Homo sapiens
aggctgtgtgcctgc

SEQ ID NO: 1508065 - DNA, 15 bp, Homo sapiens
ggctgtgtgcctgcc

SEQ ID NO: 1508066 - DNA, 15 bp, Homo sapiens
gctgtgtgcctgcct

SEQ ID NO: 1508067 - DNA, 15 bp, Homo sapiens
ctgtgtgcctgcctg

SEQ ID NO: 1508068 - DNA, 15 bp, Homo sapiens
tgtgtgcctgcctgg

SEQ ID NO: 1508069 - DNA, 15 bp, Homo sapiens
gtgtgcctgcctggc

SEQ ID NO: 1508070 - DNA, 15 bp, Homo sapiens
tgtgcctgcctggct

SEQ ID NO: 1508071 - DNA, 15 bp, Homo sapiens
gtgcctgcctggctg

SEQ ID NO: 1508072 - DNA, 15 bp, Homo sapiens
tgcctgcctggctgg

SEQ ID NO: 1508073 - DNA, 15 bp, Homo sapiens
gcctgcctggctggg

SEQ ID NO: 1508074 - DNA, 15 bp, Homo sapiens
cctgcctggctgggg

SEQ ID NO: 1508075 - DNA, 15 bp, Homo sapiens
ctgcctggctggggc

SEQ ID NO: 1508076 - DNA, 15 bp, Homo sapiens
tgcctggctggggcg

SEQ ID NO: 1508077 - DNA, 15 bp, Homo sapiens
gcctggctggggcga

SEQ ID NO: 1508078 - DNA, 15 bp, Homo sapiens
cctggctggggcgac

SEQ ID NO: 1508079 - DNA, 15 bp, Homo sapiens
ctggctggggcgaca

SEQ ID NO: 1508080 - DNA, 15 bp, Homo sapiens
tggctggggcgacag

SEQ ID NO: 1508081 - DNA, 15 bp, Homo sapiens
ggctggggcgacagg

SEQ ID NO: 1508082 - DNA, 15 bp, Homo sapiens
gctggggcgacagga

SEQ ID NO: 1508083 - DNA, 15 bp, Homo sapiens
ctggggcgacaggaa

SEQ ID NO: 1508084 - DNA, 15 bp, Homo sapiens
tggggcgacaggaat

SEQ ID NO: 1508085 - DNA, 15 bp, Homo sapiens
ggggcgacaggaatc

SEQ ID NO: 1508086 - DNA, 15 bp, Homo sapiens
gggcgacaggaatcc

SEQ ID NO: 1508087 - DNA, 15 bp, Homo sapiens
ggcgacaggaatcca

SEQ ID NO: 1508088 - DNA, 15 bp, Homo sapiens
gcgacaggaatccat

SEQ ID NO: 1508089 - DNA, 15 bp, Homo sapiens
cgacaggaatccatc

SEQ ID NO: 1508090 - DNA, 15 bp, Homo sapiens
gacaggaatccatct

SEQ ID NO: 1508091 - DNA, 15 bp, Homo sapiens
acaggaatccatctt

SEQ ID NO: 1508092 - DNA, 15 bp, Homo sapiens
caggaatccatcttg

SEQ ID NO: 1508093 - DNA, 15 bp, Homo sapiens
aggaatccatcttgg

SEQ ID NO: 1508094 - DNA, 15 bp, Homo sapiens
ggaatccatcttggc

SEQ ID NO: 1508095 - DNA, 15 bp, Homo sapiens
gaatccatcttggca

SEQ ID NO: 1508096 - DNA, 15 bp, Homo sapiens
aatccatcttggcag

SEQ ID NO: 1508097 - DNA, 15 bp, Homo sapiens
atccatcttggcagt

SEQ ID NO: 1508098 - DNA, 15 bp, Homo sapiens
tccatcttggcagtg

SEQ ID NO: 1508099 - DNA, 15 bp, Homo sapiens
ccatcttggcagtgg

SEQ ID NO: 1508100 - DNA, 15 bp, Homo sapiens
catcttggcagtggg

SEQ ID NO: 1508101 - DNA, 15 bp, Homo sapiens
atcttggcagtgggt

SEQ ID NO: 1508102 - DNA, 15 bp, Homo sapiens
tcttggcagtgggtg

SEQ ID NO: 1508103 - DNA, 15 bp, Homo sapiens
cttggcagtgggtgc

SEQ ID NO: 1508104 - DNA, 15 bp, Homo sapiens
ttggcagtgggtgcc

SEQ ID NO: 1508105 - DNA, 15 bp, Homo sapiens
tggcagtgggtgcct

SEQ ID NO: 1508106 - DNA, 15 bp, Homo sapiens
ggcagtgggtgcctc

SEQ ID NO: 1508107 - DNA, 15 bp, Homo sapiens
gcagtgggtgcctcc

SEQ ID NO: 1508108 - DNA, 15 bp, Homo sapiens
cagtgggtgcctccg

SEQ ID NO: 1508109 - DNA, 15 bp, Homo sapiens
agtgggtgcctccgc

SEQ ID NO: 1508110 - DNA, 15 bp, Homo sapiens
gtgggtgcctccgcg

SEQ ID NO: 1508111 - DNA, 15 bp, Homo sapiens
tgggtgcctccgcgg

SEQ ID NO: 1508112 - DNA, 15 bp, Homo sapiens
gggtgcctccgcggt

SEQ ID NO: 1508113 - DNA, 15 bp, Homo sapiens
ggtgcctccgcggtc

SEQ ID NO: 1508114 - DNA, 15 bp, Homo sapiens
gtgcctccgcggtcc

SEQ ID NO: 1508115 - DNA, 15 bp, Homo sapiens
tgcctccgcggtcca

SEQ ID NO: 1508116 - DNA, 15 bp, Homo sapiens
gcctccgcggtccag

SEQ ID NO: 1508117 - DNA, 15 bp, Homo sapiens
cctccgcggtccagg

SEQ ID NO: 1508118 - DNA, 15 bp, Homo sapiens
ctccgcggtccaggg

SEQ ID NO: 1508119 - DNA, 15 bp, Homo sapiens
tccgcggtccaggga

SEQ ID NO: 1508120 - DNA, 15 bp, Homo sapiens
ccgcggtccagggat

SEQ ID NO: 1508121 - DNA, 15 bp, Homo sapiens
cgcggtccagggatc

SEQ ID NO: 1508122 - DNA, 15 bp, Homo sapiens
gcggtccagggatct

SEQ ID NO: 1508123 - DNA, 15 bp, Homo sapiens
cggtccagggatctc

SEQ ID NO: 1508124 - DNA, 15 bp, Homo sapiens
ggtccagggatctcg

SEQ ID NO: 1508125 - DNA, 15 bp, Homo sapiens
gtccagggatctcgt

SEQ ID NO: 1508126 - DNA, 15 bp, Homo sapiens
tccagggatctcgtg

SEQ ID NO: 1508127 - DNA, 15 bp, Homo sapiens
ccagggatctcgtga

SEQ ID NO: 1508128 - DNA, 15 bp, Homo sapiens
cagggatctcgtgac

SEQ ID NO: 1508129 - DNA, 15 bp, Homo sapiens
agggatctcgtgacc

SEQ ID NO: 1508130 - DNA, 15 bp, Homo sapiens
gggatctcgtgaccc

SEQ ID NO: 1508131 - DNA, 15 bp, Homo sapiens
ggatctcgtgacccg

SEQ ID NO: 1508132 - DNA, 15 bp, Homo sapiens
gatctcgtgacccgg

SEQ ID NO: 1508133 - DNA, 15 bp, Homo sapiens
atctcgtgacccggc

SEQ ID NO: 1508134 - DNA, 15 bp, Homo sapiens
tctcgtgacccggca

SEQ ID NO: 1508135 - DNA, 15 bp, Homo sapiens
ctcgtgacccggcag

SEQ ID NO: 1508136 - DNA, 15 bp, Homo sapiens
tcgtgacccggcagt

SEQ ID NO: 1508137 - DNA, 15 bp, Homo sapiens
cgtgacccggcagta

SEQ ID NO: 1508138 - DNA, 15 bp, Homo sapiens
gtgacccggcagtaa

SEQ ID NO: 1508139 - DNA, 15 bp, Homo sapiens
tgacccggcagtaac

SEQ ID NO: 1508140 - DNA, 15 bp, Homo sapiens
gacccggcagtaaca

SEQ ID NO: 1508141 - DNA, 15 bp, Homo sapiens
acccggcagtaacaa

SEQ ID NO: 1508142 - DNA, 15 bp, Homo sapiens
cccggcagtaacaat

SEQ ID NO: 1508143 - DNA, 15 bp, Homo sapiens
ccggcagtaacaatt

SEQ ID NO: 1508144 - DNA, 15 bp, Homo sapiens
cggcagtaacaattt

SEQ ID NO: 1508145 - DNA, 15 bp, Homo sapiens
ggcagtaacaatttg

SEQ ID NO: 1508146 - DNA, 15 bp, Homo sapiens
gcagtaacaatttgg

SEQ ID NO: 1508147 - DNA, 15 bp, Homo sapiens
cagtaacaatttggt

SEQ ID NO: 1508148 - DNA, 15 bp, Homo sapiens
agtaacaatttggtt

SEQ ID NO: 1508149 - DNA, 15 bp, Homo sapiens
gtaacaatttggttt

SEQ ID NO: 1508150 - DNA, 15 bp, Homo sapiens
taacaatttggtttt

SEQ ID NO: 1508151 - DNA, 15 bp, Homo sapiens
aacaatttggttttc

SEQ ID NO: 1508152 - DNA, 15 bp, Homo sapiens
acaatttggttttcc

SEQ ID NO: 1508153 - DNA, 15 bp, Homo sapiens
caatttggttttcct

SEQ ID NO: 1508154 - DNA, 15 bp, Homo sapiens
aatttggttttcctg

SEQ ID NO: 1508155 - DNA, 15 bp, Homo sapiens
atttggttttcctga

SEQ ID NO: 1508156 - DNA, 15 bp, Homo sapiens
tttggttttcctgaa

SEQ ID NO: 1508157 - DNA, 15 bp, Homo sapiens
ttggttttcctgaaa

SEQ ID NO: 1508158 - DNA, 15 bp, Homo sapiens
tggttttcctgaaaa

SEQ ID NO: 1508159 - DNA, 15 bp, Homo sapiens
ggttttcctgaaaag

SEQ ID NO: 1508160 - DNA, 15 bp, Homo sapiens
gttttcctgaaaaga

SEQ ID NO: 1508161 - DNA, 15 bp, Homo sapiens
ttttcctgaaaagat

SEQ ID NO: 1508162 - DNA, 15 bp, Homo sapiens
tttcctgaaaagatg

SEQ ID NO: 1508163 - DNA, 15 bp, Homo sapiens
ttcctgaaaagatga

SEQ ID NO: 1508164 - DNA, 15 bp, Homo sapiens
tcctgaaaagatgat

SEQ ID NO: 1508165 - DNA, 15 bp, Homo sapiens
cctgaaaagatgatg

SEQ ID NO: 1508166 - DNA, 15 bp, Homo sapiens
ctgaaaagatgatgg

SEQ ID NO: 1508167 - DNA, 15 bp, Homo sapiens
tgaaaagatgatggt

SEQ ID NO: 1508168 - DNA, 15 bp, Homo sapiens
gaaaagatgatggta

SEQ ID NO: 1508169 - DNA, 15 bp, Homo sapiens
aaaagatgatggtaa

SEQ ID NO: 1508170 - DNA, 15 bp, Homo sapiens
aaagatgatggtaat

SEQ ID NO: 1508171 - DNA, 15 bp, Homo sapiens
aagatgatggtaatt

SEQ ID NO: 1508172 - DNA, 15 bp, Homo sapiens
agatgatggtaattc

SEQ ID NO: 1508173 - DNA, 15 bp, Homo sapiens
gatgatggtaattcg

SEQ ID NO: 1508174 - DNA, 15 bp, Homo sapiens
atgatggtaattcgg

SEQ ID NO: 1508175 - DNA, 15 bp, Homo sapiens
tgatggtaattcggt

SEQ ID NO: 1508176 - DNA, 15 bp, Homo sapiens
gatggtaattcggtg

SEQ ID NO: 1508177 - DNA, 15 bp, Homo sapiens
atggtaattcggtgt

SEQ ID NO: 1508178 - DNA, 15 bp, Homo sapiens
tggtaattcggtgta

SEQ ID NO: 1508179 - DNA, 15 bp, Homo sapiens
ggtaattcggtgtaa

SEQ ID NO: 1508180 - DNA, 15 bp, Homo sapiens
gtaattcggtgtaag

SEQ ID NO: 1508181 - DNA, 15 bp, Homo sapiens
taattcggtgtaaga

SEQ ID NO: 1508182 - DNA, 15 bp, Homo sapiens
aattcggtgtaagac

SEQ ID NO: 1508183 - DNA, 15 bp, Homo sapiens
attcggtgtaagacc

SEQ ID NO: 1508184 - DNA, 15 bp, Homo sapiens
ttcggtgtaagacct

SEQ ID NO: 1508185 - DNA, 15 bp, Homo sapiens
tcggtgtaagacctg

SEQ ID NO: 1508186 - DNA, 15 bp, Homo sapiens
cggtgtaagacctgg

SEQ ID NO: 1508187 - DNA, 15 bp, Homo sapiens
ggtgtaagacctggg

SEQ ID NO: 1508188 - DNA, 15 bp, Homo sapiens
gtgtaagacctgggg

SEQ ID NO: 1508189 - DNA, 15 bp, Homo sapiens
tgtaagacctggggg

SEQ ID NO: 1508190 - DNA, 15 bp, Homo sapiens
gtaagacctgggggt

SEQ ID NO: 1508191 - DNA, 15 bp, Homo sapiens
taagacctgggggta

SEQ ID NO: 1508192 - DNA, 15 bp, Homo sapiens
aagacctgggggtag

SEQ ID NO: 1508193 - DNA, 15 bp, Homo sapiens
agacctgggggtagg

SEQ ID NO: 1508194 - DNA, 15 bp, Homo sapiens
gacctgggggtagga

SEQ ID NO: 1508195 - DNA, 15 bp, Homo sapiens
acctgggggtaggag

SEQ ID NO: 1508196 - DNA, 15 bp, Homo sapiens
cctgggggtaggagg

SEQ ID NO: 1508197 - DNA, 15 bp, Homo sapiens
ctgggggtaggaggc

SEQ ID NO: 1508198 - DNA, 15 bp, Homo sapiens
tgggggtaggaggca

SEQ ID NO: 1508199 - DNA, 15 bp, Homo sapiens
gggggtaggaggcag

SEQ ID NO: 1508200 - DNA, 15 bp, Homo sapiens
ggggtaggaggcagc

SEQ ID NO: 1508201 - DNA, 15 bp, Homo sapiens
gggtaggaggcagct

SEQ ID NO: 1508202 - DNA, 15 bp, Homo sapiens
ggtaggaggcagctg

SEQ ID NO: 1508203 - DNA, 15 bp, Homo sapiens
gtaggaggcagctga

SEQ ID NO: 1508204 - DNA, 15 bp, Homo sapiens
taggaggcagctgaa

SEQ ID NO: 1508205 - DNA, 15 bp, Homo sapiens
aggaggcagctgaaa

SEQ ID NO: 1508206 - DNA, 15 bp, Homo sapiens
ggaggcagctgaaac

SEQ ID NO: 1508207 - DNA, 15 bp, Homo sapiens
gaggcagctgaaact

SEQ ID NO: 1508208 - DNA, 15 bp, Homo sapiens
aggcagctgaaactt

SEQ ID NO: 1508209 - DNA, 15 bp, Homo sapiens
ggcagctgaaacttg

SEQ ID NO: 1508210 - DNA, 15 bp, Homo sapiens
gcagctgaaacttgg

SEQ ID NO: 1508211 - DNA, 15 bp, Homo sapiens
cagctgaaacttgga

SEQ ID NO: 1508212 - DNA, 15 bp, Homo sapiens
agctgaaacttggac

SEQ ID NO: 1508213 - DNA, 15 bp, Homo sapiens
gctgaaacttggacc

SEQ ID NO: 1508214 - DNA, 15 bp, Homo sapiens
ctgaaacttggaccc

SEQ ID NO: 1508215 - DNA, 15 bp, Homo sapiens
tgaaacttggacccc

SEQ ID NO: 1508216 - DNA, 15 bp, Homo sapiens
gaaacttggaccccc

SEQ ID NO: 1508217 - DNA, 15 bp, Homo sapiens
aaacttggaccccca

SEQ ID NO: 1508218 - DNA, 15 bp, Homo sapiens
aacttggacccccac

SEQ ID NO: 1508219 - DNA, 15 bp, Homo sapiens
acttggacccccact

SEQ ID NO: 1508220 - DNA, 15 bp, Homo sapiens
cttggacccccactg

SEQ ID NO: 1508221 - DNA, 15 bp, Homo sapiens
ttggacccccactgg

SEQ ID NO: 1508222 - DNA, 15 bp, Homo sapiens
tggacccccactgga

SEQ ID NO: 1508223 - DNA, 15 bp, Homo sapiens
ggacccccactggag

SEQ ID NO: 1508224 - DNA, 15 bp, Homo sapiens
gacccccactggagt

SEQ ID NO: 1508225 - DNA, 15 bp, Homo sapiens
acccccactggagtc

SEQ ID NO: 1508226 - DNA, 15 bp, Homo sapiens
cccccactggagtcc

SEQ ID NO: 1508227 - DNA, 15 bp, Homo sapiens
ccccactggagtccc

SEQ ID NO: 1508228 - DNA, 15 bp, Homo sapiens
cccactggagtcccc

SEQ ID NO: 1508229 - DNA, 15 bp, Homo sapiens
ccactggagtcccct

SEQ ID NO: 1508230 - DNA, 15 bp, Homo sapiens
actggagtccccttc

SEQ ID NO: 1508231 - DNA, 15 bp, Homo sapiens
ctggagtccccttct

SEQ ID NO: 1508232 - DNA, 15 bp, Homo sapiens
tggagtccccttctt

SEQ ID NO: 1508233 - DNA, 15 bp, Homo sapiens
ggagtccccttcttc

SEQ ID NO: 1508234 - DNA, 15 bp, Homo sapiens
gagtccccttcttcc

SEQ ID NO: 1508235 - DNA, 15 bp, Homo sapiens
agtccccttcttcca

SEQ ID NO: 1508236 - DNA, 15 bp, Homo sapiens
gtccccttcttccat

SEQ ID NO: 1508237 - DNA, 15 bp, Homo sapiens
tccccttcttccatt

SEQ ID NO: 1508238 - DNA, 15 bp, Homo sapiens
ccccttcttccattc

SEQ ID NO: 1508239 - DNA, 15 bp, Homo sapiens
cccttcttccattct

SEQ ID NO: 1508240 - DNA, 15 bp, Homo sapiens
ccttcttccattctt

SEQ ID NO: 1508241 - DNA, 15 bp, Homo sapiens
cttcttccattcttt

SEQ ID NO: 1508242 - DNA, 15 bp, Homo sapiens
ttcttccattctttt

SEQ ID NO: 1508243 - DNA, 15 bp, Homo sapiens
tcttccattcttttc

SEQ ID NO: 1508244 - DNA, 15 bp, Homo sapiens
cttccattcttttct

SEQ ID NO: 1508245 - DNA, 15 bp, Homo sapiens
tccattcttttctcc

SEQ ID NO: 1508246 - DNA, 15 bp, Homo sapiens
ccattcttttctccc

SEQ ID NO: 1508247 - DNA, 15 bp, Homo sapiens
cattcttttctccct

SEQ ID NO: 1508248 - DNA, 15 bp, Homo sapiens
attcttttctccctg

SEQ ID NO: 1508249 - DNA, 15 bp, Homo sapiens
ttcttttctccctgc

SEQ ID NO: 1508250 - DNA, 15 bp, Homo sapiens
tcttttctccctgct

SEQ ID NO: 1508251 - DNA, 15 bp, Homo sapiens
cttttctccctgctt

SEQ ID NO: 1508252 - DNA, 15 bp, Homo sapiens
ttttctccctgcttt

SEQ ID NO: 1508253 - DNA, 15 bp, Homo sapiens
tttctccctgctttg

SEQ ID NO: 1508254 - DNA, 15 bp, Homo sapiens
ttctccctgctttgt

SEQ ID NO: 1508255 - DNA, 15 bp, Homo sapiens
tctccctgctttgtg

SEQ ID NO: 1508256 - DNA, 15 bp, Homo sapiens
ctccctgctttgtgc

SEQ ID NO: 1508257 - DNA, 15 bp, Homo sapiens
tccctgctttgtgcc

SEQ ID NO: 1508258 - DNA, 15 bp, Homo sapiens
cctgctttgtgccca

SEQ ID NO: 1508259 - DNA, 15 bp, Homo sapiens
ctgctttgtgcccag

SEQ ID NO: 1508260 - DNA, 15 bp, Homo sapiens
tgctttgtgcccagg

SEQ ID NO: 1508261 - DNA, 15 bp, Homo sapiens
gctttgtgcccaggg

SEQ ID NO: 1508262 - DNA, 15 bp, Homo sapiens
ctttgtgcccagggg

SEQ ID NO: 1508263 - DNA, 15 bp, Homo sapiens
tttgtgcccaggggg

SEQ ID NO: 1508264 - DNA, 15 bp, Homo sapiens
ttgtgcccaggggga

SEQ ID NO: 1508265 - DNA, 15 bp, Homo sapiens
tgtgcccagggggag

SEQ ID NO: 1508266 - DNA, 15 bp, Homo sapiens
gtgcccagggggagc

SEQ ID NO: 1508267 - DNA, 15 bp, Homo sapiens
tgcccagggggagca

SEQ ID NO: 1508268 - DNA, 15 bp, Homo sapiens
gcccagggggagcac

SEQ ID NO: 1508269 - DNA, 15 bp, Homo sapiens
cccagggggagcaca

SEQ ID NO: 1508270 - DNA, 15 bp, Homo sapiens
ccagggggagcacag

SEQ ID NO: 1508271 - DNA, 15 bp, Homo sapiens
cagggggagcacaga

SEQ ID NO: 1508272 - DNA, 15 bp, Homo sapiens
agggggagcacagac

SEQ ID NO: 1508273 - DNA, 15 bp, Homo sapiens
gggggagcacagacc

SEQ ID NO: 1508274 - DNA, 15 bp, Homo sapiens
ggggagcacagacct

SEQ ID NO: 1508275 - DNA, 15 bp, Homo sapiens
gggagcacagacctt

SEQ ID NO: 1508276 - DNA, 15 bp, Homo sapiens
ggagcacagaccttc

SEQ ID NO: 1508277 - DNA, 15 bp, Homo sapiens
gagcacagaccttcc

SEQ ID NO: 1508278 - DNA, 15 bp, Homo sapiens
agcacagaccttccc

SEQ ID NO: 1508279 - DNA, 15 bp, Homo sapiens
gcacagaccttcccc

SEQ ID NO: 1508280 - DNA, 15 bp, Homo sapiens
cacagaccttcccct

SEQ ID NO: 1508281 - DNA, 15 bp, Homo sapiens
acagaccttcccctc

SEQ ID NO: 1508282 - DNA, 15 bp, Homo sapiens
cagaccttcccctcg

SEQ ID NO: 1508283 - DNA, 15 bp, Homo sapiens
agaccttcccctcga

SEQ ID NO: 1508284 - DNA, 15 bp, Homo sapiens
gaccttcccctcgag

SEQ ID NO: 1508285 - DNA, 15 bp, Homo sapiens
accttcccctcgagg

SEQ ID NO: 1508286 - DNA, 15 bp, Homo sapiens
ccttcccctcgaggg

SEQ ID NO: 1508287 - DNA, 15 bp, Homo sapiens
cttcccctcgagggt

SEQ ID NO: 1508288 - DNA, 15 bp, Homo sapiens
ttcccctcgagggtg

SEQ ID NO: 1508289 - DNA, 15 bp, Homo sapiens
tcccctcgagggtgc

SEQ ID NO: 1508290 - DNA, 15 bp, Homo sapiens
cccctcgagggtgct

SEQ ID NO: 1508291 - DNA, 15 bp, Homo sapiens
ccctcgagggtgctc

SEQ ID NO: 1508292 - DNA, 15 bp, Homo sapiens
cctcgagggtgctcg

SEQ ID NO: 1508293 - DNA, 15 bp, Homo sapiens
ctcgagggtgctcgt

SEQ ID NO: 1508294 - DNA, 15 bp, Homo sapiens
tcgagggtgctcgtg

SEQ ID NO: 1508295 - DNA, 15 bp, Homo sapiens
cgagggtgctcgtgg

SEQ ID NO: 1508296 - DNA, 15 bp, Homo sapiens
gagggtgctcgtggg

SEQ ID NO: 1508297 - DNA, 15 bp, Homo sapiens
agggtgctcgtgggc

SEQ ID NO: 1508298 - DNA, 15 bp, Homo sapiens
gggtgctcgtgggcg

SEQ ID NO: 1508299 - DNA, 15 bp, Homo sapiens
ggtgctcgtgggcgg

SEQ ID NO: 1508300 - DNA, 15 bp, Homo sapiens
gtgctcgtgggcggc

SEQ ID NO: 1508301 - DNA, 15 bp, Homo sapiens
tgctcgtgggcggca

SEQ ID NO: 1508302 - DNA, 15 bp, Homo sapiens
gctcgtgggcggcat

SEQ ID NO: 1508303 - DNA, 15 bp, Homo sapiens
ctcgtgggcggcatc

SEQ ID NO: 1508304 - DNA, 15 bp, Homo sapiens
tcgtgggcggcatcc

SEQ ID NO: 1508305 - DNA, 15 bp, Homo sapiens
cgtgggcggcatccc

SEQ ID NO: 1508306 - DNA, 15 bp, Homo sapiens
gtgggcggcatcccg

SEQ ID NO: 1508307 - DNA, 15 bp, Homo sapiens
tgggcggcatcccgc

SEQ ID NO: 1508308 - DNA, 15 bp, Homo sapiens
gggcggcatcccgcg

SEQ ID NO: 1508309 - DNA, 15 bp, Homo sapiens
ggcggcatcccgcgg

SEQ ID NO: 1508310 - DNA, 15 bp, Homo sapiens
gcggcatcccgcggg

SEQ ID NO: 1508311 - DNA, 15 bp, Homo sapiens
cggcatcccgcggga

SEQ ID NO: 1508312 - DNA, 15 bp, Homo sapiens
ggcatcccgcgggag

SEQ ID NO: 1508313 - DNA, 15 bp, Homo sapiens
gcatcccgcgggagc

SEQ ID NO: 1508314 - DNA, 15 bp, Homo sapiens
catcccgcgggagcc

SEQ ID NO: 1508315 - DNA, 15 bp, Homo sapiens
atcccgcgggagccg

SEQ ID NO: 1508316 - DNA, 15 bp, Homo sapiens
tcccgcgggagccgg

SEQ ID NO: 1508317 - DNA, 15 bp, Homo sapiens
cccgcgggagccgga

SEQ ID NO: 1508318 - DNA, 15 bp, Homo sapiens
ccgcgggagccggag

SEQ ID NO: 1508319 - DNA, 15 bp, Homo sapiens
cgcgggagccggagc

SEQ ID NO: 1508320 - DNA, 15 bp, Homo sapiens
gcgggagccggagcc

SEQ ID NO: 1508321 - DNA, 15 bp, Homo sapiens
cgggagccggagcct

SEQ ID NO: 1508322 - DNA, 15 bp, Homo sapiens
gggagccggagcctc

SEQ ID NO: 1508323 - DNA, 15 bp, Homo sapiens
ggagccggagcctct

SEQ ID NO: 1508324 - DNA, 15 bp, Homo sapiens
gagccggagcctctg

SEQ ID NO: 1508325 - DNA, 15 bp, Homo sapiens
agccggagcctctga

SEQ ID NO: 1508326 - DNA, 15 bp, Homo sapiens
gccggagcctctgag

SEQ ID NO: 1508327 - DNA, 15 bp, Homo sapiens
ccggagcctctgaga

SEQ ID NO: 1508328 - DNA, 15 bp, Homo sapiens
cggagcctctgagag

SEQ ID NO: 1508329 - DNA, 15 bp, Homo sapiens
ggagcctctgagagg

SEQ ID NO: 1508330 - DNA, 15 bp, Homo sapiens
gagcctctgagaggt

SEQ ID NO: 1508331 - DNA, 15 bp, Homo sapiens
agcctctgagaggtc

SEQ ID NO: 1508332 - DNA, 15 bp, Homo sapiens
gcctctgagaggtct

SEQ ID NO: 1508333 - DNA, 15 bp, Homo sapiens
cctctgagaggtctc

SEQ ID NO: 1508334 - DNA, 15 bp, Homo sapiens
ctctgagaggtctcc

SEQ ID NO: 1508335 - DNA, 15 bp, Homo sapiens
tctgagaggtctcct

SEQ ID NO: 1508336 - DNA, 15 bp, Homo sapiens
ctgagaggtctcctc

SEQ ID NO: 1508337 - DNA, 15 bp, Homo sapiens
tgagaggtctcctcc

SEQ ID NO: 1508338 - DNA, 15 bp, Homo sapiens
gagaggtctcctcct

SEQ ID NO: 1508339 - DNA, 15 bp, Homo sapiens
agaggtctcctcctg

SEQ ID NO: 1508340 - DNA, 15 bp, Homo sapiens
gaggtctcctcctgc

SEQ ID NO: 1508341 - DNA, 15 bp, Homo sapiens
aggtctcctcctgcc

SEQ ID NO: 1508342 - DNA, 15 bp, Homo sapiens
ggtctcctcctgccc

SEQ ID NO: 1508343 - DNA, 15 bp, Homo sapiens
gtctcctcctgcccc

SEQ ID NO: 1508344 - DNA, 15 bp, Homo sapiens
tctcctcctgcccct

SEQ ID NO: 1508345 - DNA, 15 bp, Homo sapiens
ctcctcctgcccctg

SEQ ID NO: 1508346 - DNA, 15 bp, Homo sapiens
tcctcctgcccctgg

SEQ ID NO: 1508347 - DNA, 15 bp, Homo sapiens
cctcctgcccctgga

SEQ ID NO: 1508348 - DNA, 15 bp, Homo sapiens
ctcctgcccctggag

SEQ ID NO: 1508349 - DNA, 15 bp, Homo sapiens
tcctgcccctggaga

SEQ ID NO: 1508350 - DNA, 15 bp, Homo sapiens
cctgcccctggagat

SEQ ID NO: 1508351 - DNA, 15 bp, Homo sapiens
ctgcccctggagatc

SEQ ID NO: 1508352 - DNA, 15 bp, Homo sapiens
tgcccctggagatcc

SEQ ID NO: 1508353 - DNA, 15 bp, Homo sapiens
gcccctggagatccc

SEQ ID NO: 1508354 - DNA, 15 bp, Homo sapiens
cccctggagatccca

SEQ ID NO: 1508355 - DNA, 15 bp, Homo sapiens
ccctggagatcccac

SEQ ID NO: 1508356 - DNA, 15 bp, Homo sapiens
cctggagatcccacc

SEQ ID NO: 1508357 - DNA, 15 bp, Homo sapiens
ctggagatcccaccc

SEQ ID NO: 1508358 - DNA, 15 bp, Homo sapiens
tggagatcccaccct

SEQ ID NO: 1508359 - DNA, 15 bp, Homo sapiens
ggagatcccaccctc

SEQ ID NO: 1508360 - DNA, 15 bp, Homo sapiens
gagatcccaccctca

SEQ ID NO: 1508361 - DNA, 15 bp, Homo sapiens
agatcccaccctcac

SEQ ID NO: 1508362 - DNA, 15 bp, Homo sapiens
gatcccaccctcacc

SEQ ID NO: 1508363 - DNA, 15 bp, Homo sapiens
atcccaccctcacct

SEQ ID NO: 1508364 - DNA, 15 bp, Homo sapiens
tcccaccctcacctc

SEQ ID NO: 1508365 - DNA, 15 bp, Homo sapiens
cccaccctcacctct

SEQ ID NO: 1508366 - DNA, 15 bp, Homo sapiens
ccaccctcacctctc

SEQ ID NO: 1508367 - DNA, 15 bp, Homo sapiens
caccctcacctctct

SEQ ID NO: 1508368 - DNA, 15 bp, Homo sapiens
tttcggcgccgagcc

SEQ ID NO: 1508369 - DNA, 15 bp, Homo sapiens
ttcggcgccgagccc

SEQ ID NO: 1508370 - DNA, 15 bp, Homo sapiens
tcggcgccgagcccc

SEQ ID NO: 1508371 - DNA, 15 bp, Homo sapiens
cggcgccgagccccg

SEQ ID NO: 1508372 - DNA, 15 bp, Homo sapiens
ggcgccgagccccgc

SEQ ID NO: 1508373 - DNA, 15 bp, Homo sapiens
gcgccgagccccgcc

SEQ ID NO: 1508374 - DNA, 15 bp, Homo sapiens
cgccgagccccgccg

SEQ ID NO: 1508375 - DNA, 15 bp, Homo sapiens
gccgagccccgccgg

SEQ ID NO: 1508376 - DNA, 15 bp, Homo sapiens
ccgagccccgccggg

SEQ ID NO: 1508377 - DNA, 15 bp, Homo sapiens
cgagccccgccgggg

SEQ ID NO: 1508378 - DNA, 15 bp, Homo sapiens
gagccccgccggggt

SEQ ID NO: 1508379 - DNA, 15 bp, Homo sapiens
agccccgccggggtg

SEQ ID NO: 1508380 - DNA, 15 bp, Homo sapiens
gccccgccggggtga

SEQ ID NO: 1508381 - DNA, 15 bp, Homo sapiens
ccccgccggggtgag

SEQ ID NO: 1508382 - DNA, 15 bp, Homo sapiens
cccgccggggtgagc

SEQ ID NO: 1508383 - DNA, 15 bp, Homo sapiens
ccgccggggtgagct

SEQ ID NO: 1508384 - DNA, 15 bp, Homo sapiens
cgccggggtgagctg

SEQ ID NO: 1508385 - DNA, 15 bp, Homo sapiens
gccggggtgagctgg

SEQ ID NO: 1508386 - DNA, 15 bp, Homo sapiens
ccggggtgagctggg

SEQ ID NO: 1508387 - DNA, 15 bp, Homo sapiens
cggggtgagctgggg

SEQ ID NO: 1508388 - DNA, 15 bp, Homo sapiens
ggggtgagctgggga

SEQ ID NO: 1508389 - DNA, 15 bp, Homo sapiens
gggtgagctggggat

SEQ ID NO: 1508390 - DNA, 15 bp, Homo sapiens
ggtgagctggggatg

SEQ ID NO: 1508391 - DNA, 15 bp, Homo sapiens
gtgagctggggatgg

SEQ ID NO: 1508392 - DNA, 15 bp, Homo sapiens
tgagctggggatggg

SEQ ID NO: 1508393 - DNA, 15 bp, Homo sapiens
gagctggggatgggc

SEQ ID NO: 1508394 - DNA, 15 bp, Homo sapiens
agctggggatgggcg

SEQ ID NO: 1508395 - DNA, 15 bp, Homo sapiens
gctggggatgggcga

SEQ ID NO: 1508396 - DNA, 15 bp, Homo sapiens
ctggggatgggcgag

SEQ ID NO: 1508397 - DNA, 15 bp, Homo sapiens
tggggatgggcgagg

SEQ ID NO: 1508398 - DNA, 15 bp, Homo sapiens
ggggatgggcgaggg

SEQ ID NO: 1508399 - DNA, 15 bp, Homo sapiens
gggatgggcgagggc

SEQ ID NO: 1508400 - DNA, 15 bp, Homo sapiens
ggatgggcgagggcc

SEQ ID NO: 1508401 - DNA, 15 bp, Homo sapiens
gatgggcgagggccg

SEQ ID NO: 1508402 - DNA, 15 bp, Homo sapiens
atgggcgagggccgg

SEQ ID NO: 1508403 - DNA, 15 bp, Homo sapiens
tgggcgagggccggc

SEQ ID NO: 1508404 - DNA, 15 bp, Homo sapiens
gggcgagggccggcg

SEQ ID NO: 1508405 - DNA, 15 bp, Homo sapiens
ggcgagggccggcgg

SEQ ID NO: 1508406 - DNA, 15 bp, Homo sapiens
gcgagggccggcggc

SEQ ID NO: 1508407 - DNA, 15 bp, Homo sapiens
cgagggccggcggca

SEQ ID NO: 1508408 - DNA, 15 bp, Homo sapiens
gagggccggcggcag

SEQ ID NO: 1508409 - DNA, 15 bp, Homo sapiens
agggccggcggcagg

SEQ ID NO: 1508410 - DNA, 15 bp, Homo sapiens
gggccggcggcaggt

SEQ ID NO: 1508411 - DNA, 15 bp, Homo sapiens
ggccggcggcaggta

SEQ ID NO: 1508412 - DNA, 15 bp, Homo sapiens
gccggcggcaggtac

SEQ ID NO: 1508413 - DNA, 15 bp, Homo sapiens
ccggcggcaggtact

SEQ ID NO: 1508414 - DNA, 15 bp, Homo sapiens
cggcggcaggtacta

SEQ ID NO: 1508415 - DNA, 15 bp, Homo sapiens
ggcggcaggtactag

SEQ ID NO: 1508416 - DNA, 15 bp, Homo sapiens
gcggcaggtactaga

SEQ ID NO: 1508417 - DNA, 15 bp, Homo sapiens
cggcaggtactagag

SEQ ID NO: 1508418 - DNA, 15 bp, Homo sapiens
ggcaggtactagagc

SEQ ID NO: 1508419 - DNA, 15 bp, Homo sapiens
gcaggtactagagcc

SEQ ID NO: 1508420 - DNA, 15 bp, Homo sapiens
caggtactagagccg

SEQ ID NO: 1508421 - DNA, 15 bp, Homo sapiens
aggtactagagccgg

SEQ ID NO: 1508422 - DNA, 15 bp, Homo sapiens
ggtactagagccggg

SEQ ID NO: 1508423 - DNA, 15 bp, Homo sapiens
gtactagagccgggc

SEQ ID NO: 1508424 - DNA, 15 bp, Homo sapiens
tactagagccgggcg

SEQ ID NO: 1508425 - DNA, 15 bp, Homo sapiens
actagagccgggcgg

SEQ ID NO: 1508426 - DNA, 15 bp, Homo sapiens
ctagagccgggcggg

SEQ ID NO: 1508427 - DNA, 15 bp, Homo sapiens
tagagccgggcggga

SEQ ID NO: 1508428 - DNA, 15 bp, Homo sapiens
agagccgggcgggaa

SEQ ID NO: 1508429 - DNA, 15 bp, Homo sapiens
gagccgggcgggaag

SEQ ID NO: 1508430 - DNA, 15 bp, Homo sapiens
agccgggcgggaagg

SEQ ID NO: 1508431 - DNA, 15 bp, Homo sapiens
gccgggcgggaaggg

SEQ ID NO: 1508432 - DNA, 15 bp, Homo sapiens
ccgggcgggaagggc

SEQ ID NO: 1508433 - DNA, 15 bp, Homo sapiens
cgggcgggaagggcc

SEQ ID NO: 1508434 - DNA, 15 bp, Homo sapiens
gggcgggaagggccg

SEQ ID NO: 1508435 - DNA, 15 bp, Homo sapiens
ggcgggaagggccga

SEQ ID NO: 1508436 - DNA, 15 bp, Homo sapiens
gcgggaagggccgaa

SEQ ID NO: 1508437 - DNA, 15 bp, Homo sapiens
cgggaagggccgaaa

SEQ ID NO: 1508438 - DNA, 15 bp, Homo sapiens
gggaagggccgaaat

SEQ ID NO: 1508439 - DNA, 15 bp, Homo sapiens
ggaagggccgaaatc

SEQ ID NO: 1508440 - DNA, 15 bp, Homo sapiens
gaagggccgaaatcg

SEQ ID NO: 1508441 - DNA, 15 bp, Homo sapiens
aagggccgaaatcgg

SEQ ID NO: 1508442 - DNA, 15 bp, Homo sapiens
agggccgaaatcggc

SEQ ID NO: 1508443 - DNA, 15 bp, Homo sapiens
gggccgaaatcggcg

SEQ ID NO: 1508444 - DNA, 15 bp, Homo sapiens
ggccgaaatcggcgc

SEQ ID NO: 1508445 - DNA, 15 bp, Homo sapiens
gccgaaatcggcgct

SEQ ID NO: 1508446 - DNA, 15 bp, Homo sapiens
ccgaaatcggcgcta

SEQ ID NO: 1508447 - DNA, 15 bp, Homo sapiens
cgaaatcggcgctaa

SEQ ID NO: 1508448 - DNA, 15 bp, Homo sapiens
gaaatcggcgctaag

SEQ ID NO: 1508449 - DNA, 15 bp, Homo sapiens
aaatcggcgctaagt

SEQ ID NO: 1508450 - DNA, 15 bp, Homo sapiens
aatcggcgctaagtg

SEQ ID NO: 1508451 - DNA, 15 bp, Homo sapiens
atcggcgctaagtga

SEQ ID NO: 1508452 - DNA, 15 bp, Homo sapiens
tcggcgctaagtgac

SEQ ID NO: 1508453 - DNA, 15 bp, Homo sapiens
cggcgctaagtgacg

SEQ ID NO: 1508454 - DNA, 15 bp, Homo sapiens
ggcgctaagtgacgg

SEQ ID NO: 1508455 - DNA, 15 bp, Homo sapiens
gcgctaagtgacggc

SEQ ID NO: 1508456 - DNA, 15 bp, Homo sapiens
cgctaagtgacggcg

SEQ ID NO: 1508457 - DNA, 15 bp, Homo sapiens
gctaagtgacggcga

SEQ ID NO: 1508458 - DNA, 15 bp, Homo sapiens
ctaagtgacggcgat

SEQ ID NO: 1508459 - DNA, 15 bp, Homo sapiens
taagtgacggcgatg

SEQ ID NO: 1508460 - DNA, 15 bp, Homo sapiens
aagtgacggcgatgg

SEQ ID NO: 1508461 - DNA, 15 bp, Homo sapiens
agtgacggcgatggc

SEQ ID NO: 1508462 - DNA, 15 bp, Homo sapiens
gtgacggcgatggct

SEQ ID NO: 1508463 - DNA, 15 bp, Homo sapiens
tgacggcgatggctt

SEQ ID NO: 1508464 - DNA, 15 bp, Homo sapiens
gacggcgatggctta

SEQ ID NO: 1508465 - DNA, 15 bp, Homo sapiens
acggcgatggcttat

SEQ ID NO: 1508466 - DNA, 15 bp, Homo sapiens
cggcgatggcttatt

SEQ ID NO: 1508467 - DNA, 15 bp, Homo sapiens
ggcgatggcttattc

SEQ ID NO: 1508468 - DNA, 15 bp, Homo sapiens
gcgatggcttattcc

SEQ ID NO: 1508469 - DNA, 15 bp, Homo sapiens
cgatggcttattccc

SEQ ID NO: 1508470 - DNA, 15 bp, Homo sapiens
gatggcttattcccc

SEQ ID NO: 1508471 - DNA, 15 bp, Homo sapiens
atggcttattccccc

SEQ ID NO: 1508472 - DNA, 15 bp, Homo sapiens
tggcttattccccct

SEQ ID NO: 1508473 - DNA, 15 bp, Homo sapiens
ggcttattccccctt

SEQ ID NO: 1508474 - DNA, 15 bp, Homo sapiens
gcttattcccccttt

SEQ ID NO: 1508475 - DNA, 15 bp, Homo sapiens
cttattccccctttc

SEQ ID NO: 1508476 - DNA, 15 bp, Homo sapiens
ttattccccctttcc

SEQ ID NO: 1508477 - DNA, 15 bp, Homo sapiens
tattccccctttcct

SEQ ID NO: 1508478 - DNA, 15 bp, Homo sapiens
attccccctttccta

SEQ ID NO: 1508479 - DNA, 15 bp, Homo sapiens
ttccccctttcctaa

SEQ ID NO: 1508480 - DNA, 15 bp, Homo sapiens
tccccctttcctaaa

SEQ ID NO: 1508481 - DNA, 15 bp, Homo sapiens
ccccctttcctaaac

SEQ ID NO: 1508482 - DNA, 15 bp, Homo sapiens
cccctttcctaaaca

SEQ ID NO: 1508483 - DNA, 15 bp, Homo sapiens
ccctttcctaaacat

SEQ ID NO: 1508484 - DNA, 15 bp, Homo sapiens
cctttcctaaacatc

SEQ ID NO: 1508485 - DNA, 15 bp, Homo sapiens
ctttcctaaacatca

SEQ ID NO: 1508486 - DNA, 15 bp, Homo sapiens
tttcctaaacatcat

SEQ ID NO: 1508487 - DNA, 15 bp, Homo sapiens
ttcctaaacatcatc

SEQ ID NO: 1508488 - DNA, 15 bp, Homo sapiens
tcctaaacatcatct

SEQ ID NO: 1508489 - DNA, 15 bp, Homo sapiens
cctaaacatcatctc

SEQ ID NO: 1508490 - DNA, 15 bp, Homo sapiens
ctaaacatcatctcc

SEQ ID NO: 1508491 - DNA, 15 bp, Homo sapiens
taaacatcatctccc

SEQ ID NO: 1508492 - DNA, 15 bp, Homo sapiens
aaacatcatctccca

SEQ ID NO: 1508493 - DNA, 15 bp, Homo sapiens
aacatcatctcccag

SEQ ID NO: 1508494 - DNA, 15 bp, Homo sapiens
acatcatctcccagc

SEQ ID NO: 1508495 - DNA, 15 bp, Homo sapiens
catcatctcccagcg

SEQ ID NO: 1508496 - DNA, 15 bp, Homo sapiens
atcatctcccagcgg

SEQ ID NO: 1508497 - DNA, 15 bp, Homo sapiens
tcatctcccagcggg

SEQ ID NO: 1508498 - DNA, 15 bp, Homo sapiens
catctcccagcggga

SEQ ID NO: 1508499 - DNA, 15 bp, Homo sapiens
atctcccagcgggat

SEQ ID NO: 1508500 - DNA, 15 bp, Homo sapiens
tctcccagcgggatc

SEQ ID NO: 1508501 - DNA, 15 bp, Homo sapiens
ctcccagcgggatcc

SEQ ID NO: 1508502 - DNA, 15 bp, Homo sapiens
tcccagcgggatccg

SEQ ID NO: 1508503 - DNA, 15 bp, Homo sapiens
cccagcgggatccgg

SEQ ID NO: 1508504 - DNA, 15 bp, Homo sapiens
ccagcgggatccggg

SEQ ID NO: 1508505 - DNA, 15 bp, Homo sapiens
cagcgggatccgggc

SEQ ID NO: 1508506 - DNA, 15 bp, Homo sapiens
agcgggatccgggcc

SEQ ID NO: 1508507 - DNA, 15 bp, Homo sapiens
gcgggatccgggcct

SEQ ID NO: 1508508 - DNA, 15 bp, Homo sapiens
cgggatccgggcctg

SEQ ID NO: 1508509 - DNA, 15 bp, Homo sapiens
gggatccgggcctgt

SEQ ID NO: 1508510 - DNA, 15 bp, Homo sapiens
ggatccgggcctgtc

SEQ ID NO: 1508511 - DNA, 15 bp, Homo sapiens
gatccgggcctgtcg

SEQ ID NO: 1508512 - DNA, 15 bp, Homo sapiens
atccgggcctgtcgt

SEQ ID NO: 1508513 - DNA, 15 bp, Homo sapiens
tccgggcctgtcgtg

SEQ ID NO: 1508514 - DNA, 15 bp, Homo sapiens
ccgggcctgtcgtgt

SEQ ID NO: 1508515 - DNA, 15 bp, Homo sapiens
cgggcctgtcgtgtg

SEQ ID NO: 1508516 - DNA, 15 bp, Homo sapiens
gggcctgtcgtgtgg

SEQ ID NO: 1508517 - DNA, 15 bp, Homo sapiens
ggcctgtcgtgtggg

SEQ ID NO: 1508518 - DNA, 15 bp, Homo sapiens
gcctgtcgtgtgggt

SEQ ID NO: 1508519 - DNA, 15 bp, Homo sapiens
cctgtcgtgtgggta

SEQ ID NO: 1508520 - DNA, 15 bp, Homo sapiens
ctgtcgtgtgggtag

SEQ ID NO: 1508521 - DNA, 15 bp, Homo sapiens
tgtcgtgtgggtagt

SEQ ID NO: 1508522 - DNA, 15 bp, Homo sapiens
gtcgtgtgggtagtt

SEQ ID NO: 1508523 - DNA, 15 bp, Homo sapiens
tcgtgtgggtagttg

SEQ ID NO: 1508524 - DNA, 15 bp, Homo sapiens
cgtgtgggtagttgt

SEQ ID NO: 1508525 - DNA, 15 bp, Homo sapiens
gtgtgggtagttgtg

SEQ ID NO: 1508526 - DNA, 15 bp, Homo sapiens
tgtgggtagttgtgg

SEQ ID NO: 1508527 - DNA, 15 bp, Homo sapiens
gtgggtagttgtgga

SEQ ID NO: 1508528 - DNA, 15 bp, Homo sapiens
tgggtagttgtggag

SEQ ID NO: 1508529 - DNA, 15 bp, Homo sapiens
gggtagttgtggagg

SEQ ID NO: 1508530 - DNA, 15 bp, Homo sapiens
ggtagttgtggagga

SEQ ID NO: 1508531 - DNA, 15 bp, Homo sapiens
gtagttgtggaggag

SEQ ID NO: 1508532 - DNA, 15 bp, Homo sapiens
tagttgtggaggagc

SEQ ID NO: 1508533 - DNA, 15 bp, Homo sapiens
agttgtggaggagcg

SEQ ID NO: 1508534 - DNA, 15 bp, Homo sapiens
gttgtggaggagcgg

SEQ ID NO: 1508535 - DNA, 15 bp, Homo sapiens
ttgtggaggagcggg

SEQ ID NO: 1508536 - DNA, 15 bp, Homo sapiens
tgtggaggagcgggg

SEQ ID NO: 1508537 - DNA, 15 bp, Homo sapiens
gtggaggagcggggg

SEQ ID NO: 1508538 - DNA, 15 bp, Homo sapiens
tggaggagcgggggg

SEQ ID NO: 1508539 - DNA, 15 bp, Homo sapiens
ggaggagcggggggc

SEQ ID NO: 1508540 - DNA, 15 bp, Homo sapiens
gaggagcggggggcg

SEQ ID NO: 1508541 - DNA, 15 bp, Homo sapiens
aggagcggggggcgc

SEQ ID NO: 1508542 - DNA, 15 bp, Homo sapiens
ggagcggggggcgct

SEQ ID NO: 1508543 - DNA, 15 bp, Homo sapiens
gagcggggggcgctt

SEQ ID NO: 1508544 - DNA, 15 bp, Homo sapiens
agcggggggcgcttc

SEQ ID NO: 1508545 - DNA, 15 bp, Homo sapiens
gcggggggcgcttca

SEQ ID NO: 1508546 - DNA, 15 bp, Homo sapiens
cggggggcgcttcag

SEQ ID NO: 1508547 - DNA, 15 bp, Homo sapiens
ggggggcgcttcagc

SEQ ID NO: 1508548 - DNA, 15 bp, Homo sapiens
gggggcgcttcagcc

SEQ ID NO: 1508549 - DNA, 15 bp, Homo sapiens
ggggcgcttcagccg

SEQ ID NO: 1508550 - DNA, 15 bp, Homo sapiens
gggcgcttcagccgg

SEQ ID NO: 1508551 - DNA, 15 bp, Homo sapiens
ggcgcttcagccggg

SEQ ID NO: 1508552 - DNA, 15 bp, Homo sapiens
gcgcttcagccgggc

SEQ ID NO: 1508553 - DNA, 15 bp, Homo sapiens
cgcttcagccgggcc

SEQ ID NO: 1508554 - DNA, 15 bp, Homo sapiens
gcttcagccgggccg

SEQ ID NO: 1508555 - DNA, 15 bp, Homo sapiens
cttcagccgggccgc

SEQ ID NO: 1508556 - DNA, 15 bp, Homo sapiens
ttcagccgggccgcc

SEQ ID NO: 1508557 - DNA, 15 bp, Homo sapiens
tcagccgggccgcct

SEQ ID NO: 1508558 - DNA, 15 bp, Homo sapiens
cagccgggccgcctc

SEQ ID NO: 1508559 - DNA, 15 bp, Homo sapiens
agccgggccgcctcc

SEQ ID NO: 1508560 - DNA, 15 bp, Homo sapiens
gccgggccgcctcct

SEQ ID NO: 1508561 - DNA, 15 bp, Homo sapiens
ccgggccgcctcctg

SEQ ID NO: 1508562 - DNA, 15 bp, Homo sapiens
cgggccgcctcctgc

SEQ ID NO: 1508563 - DNA, 15 bp, Homo sapiens
gggccgcctcctgca

SEQ ID NO: 1508564 - DNA, 15 bp, Homo sapiens
gccgcctcctgcagc

SEQ ID NO: 1508565 - DNA, 15 bp, Homo sapiens
ccgcctcctgcagcg

SEQ ID NO: 1508566 - DNA, 15 bp, Homo sapiens
cgcctcctgcagcgc

SEQ ID NO: 1508567 - DNA, 15 bp, Homo sapiens
gcctcctgcagcgcc

SEQ ID NO: 1508568 - DNA, 15 bp, Homo sapiens
cctcctgcagcgcca

SEQ ID NO: 1508569 - DNA, 15 bp, Homo sapiens
ctcctgcagcgccaa

SEQ ID NO: 1508570 - DNA, 15 bp, Homo sapiens
tcctgcagcgccaag

SEQ ID NO: 1508571 - DNA, 15 bp, Homo sapiens
cctgcagcgccaaga

SEQ ID NO: 1508572 - DNA, 15 bp, Homo sapiens
ctgcagcgccaagag

SEQ ID NO: 1508573 - DNA, 15 bp, Homo sapiens
tgcagcgccaagagg

SEQ ID NO: 1508574 - DNA, 15 bp, Homo sapiens
gcagcgccaagaggg

SEQ ID NO: 1508575 - DNA, 15 bp, Homo sapiens
cagcgccaagagggc

SEQ ID NO: 1508576 - DNA, 15 bp, Homo sapiens
agcgccaagagggct

SEQ ID NO: 1508577 - DNA, 15 bp, Homo sapiens
gcgccaagagggctt

SEQ ID NO: 1508578 - DNA, 15 bp, Homo sapiens
cgccaagagggcttc

SEQ ID NO: 1508579 - DNA, 15 bp, Homo sapiens
gccaagagggcttca

SEQ ID NO: 1508580 - DNA, 15 bp, Homo sapiens
ccaagagggcttcag

SEQ ID NO: 1508581 - DNA, 15 bp, Homo sapiens
caagagggcttcagg

SEQ ID NO: 1508582 - DNA, 15 bp, Homo sapiens
aagagggcttcaggt

SEQ ID NO: 1508583 - DNA, 15 bp, Homo sapiens
agagggcttcaggtc

SEQ ID NO: 1508584 - DNA, 15 bp, Homo sapiens
gagggcttcaggtct

SEQ ID NO: 1508585 - DNA, 15 bp, Homo sapiens
agggcttcaggtctc

SEQ ID NO: 1508586 - DNA, 15 bp, Homo sapiens
gggcttcaggtctcc

SEQ ID NO: 1508587 - DNA, 15 bp, Homo sapiens
ggcttcaggtctcct

SEQ ID NO: 1508588 - DNA, 15 bp, Homo sapiens
gcttcaggtctcctt

SEQ ID NO: 1508589 - DNA, 15 bp, Homo sapiens
cttcaggtctccttt

SEQ ID NO: 1508590 - DNA, 15 bp, Homo sapiens
ttcaggtctcctttg

SEQ ID NO: 1508591 - DNA, 15 bp, Homo sapiens
tcaggtctcctttgg

SEQ ID NO: 1508592 - DNA, 15 bp, Homo sapiens
caggtctcctttggc

SEQ ID NO: 1508593 - DNA, 15 bp, Homo sapiens
aggtctcctttggct

SEQ ID NO: 1508594 - DNA, 15 bp, Homo sapiens
ggtctcctttggctt

SEQ ID NO: 1508595 - DNA, 15 bp, Homo sapiens
gtctcctttggcttc

SEQ ID NO: 1508596 - DNA, 15 bp, Homo sapiens
tctcctttggcttct

SEQ ID NO: 1508597 - DNA, 15 bp, Homo sapiens
ctcctttggcttctc

SEQ ID NO: 1508598 - DNA, 15 bp, Homo sapiens
tcctttggcttctct

SEQ ID NO: 1508599 - DNA, 15 bp, Homo sapiens
cctttggcttctctt

SEQ ID NO: 1508600 - DNA, 15 bp, Homo sapiens
ctttggcttctcttt

SEQ ID NO: 1508601 - DNA, 15 bp, Homo sapiens
tttggcttctctttt

SEQ ID NO: 1508602 - DNA, 15 bp, Homo sapiens
ttggcttctcttttc

SEQ ID NO: 1508603 - DNA, 15 bp, Homo sapiens
tggcttctcttttcc

SEQ ID NO: 1508604 - DNA, 15 bp, Homo sapiens
ggcttctcttttccg

SEQ ID NO: 1508605 - DNA, 15 bp, Homo sapiens
gcttctcttttccgg

SEQ ID NO: 1508606 - DNA, 15 bp, Homo sapiens
cttctcttttccggt

SEQ ID NO: 1508607 - DNA, 15 bp, Homo sapiens
ttctcttttccggtc

SEQ ID NO: 1508608 - DNA, 15 bp, Homo sapiens
tctcttttccggtct

SEQ ID NO: 1508609 - DNA, 15 bp, Homo sapiens
ctcttttccggtcta

SEQ ID NO: 1508610 - DNA, 15 bp, Homo sapiens
tcttttccggtctag

SEQ ID NO: 1508611 - DNA, 15 bp, Homo sapiens
cttttccggtctagc

SEQ ID NO: 1508612 - DNA, 15 bp, Homo sapiens
ttttccggtctagca

SEQ ID NO: 1508613 - DNA, 15 bp, Homo sapiens
tttccggtctagcat

SEQ ID NO: 1508614 - DNA, 15 bp, Homo sapiens
ttccggtctagcatt

SEQ ID NO: 1508615 - DNA, 15 bp, Homo sapiens
tccggtctagcattg

SEQ ID NO: 1508616 - DNA, 15 bp, Homo sapiens
ccggtctagcattgg

SEQ ID NO: 1508617 - DNA, 15 bp, Homo sapiens
cggtctagcattggg

SEQ ID NO: 1508618 - DNA, 15 bp, Homo sapiens
ggtctagcattggga

SEQ ID NO: 1508619 - DNA, 15 bp, Homo sapiens
gtctagcattgggac

SEQ ID NO: 1508620 - DNA, 15 bp, Homo sapiens
tctagcattgggact

SEQ ID NO: 1508621 - DNA, 15 bp, Homo sapiens
ctagcattgggactt

SEQ ID NO: 1508622 - DNA, 15 bp, Homo sapiens
tagcattgggacttc

SEQ ID NO: 1508623 - DNA, 15 bp, Homo sapiens
agcattgggacttcg

SEQ ID NO: 1508624 - DNA, 15 bp, Homo sapiens
gcattgggacttcgg

SEQ ID NO: 1508625 - DNA, 15 bp, Homo sapiens
cattgggacttcgga

SEQ ID NO: 1508626 - DNA, 15 bp, Homo sapiens
attgggacttcggag

SEQ ID NO: 1508627 - DNA, 15 bp, Homo sapiens
ttgggacttcggaga

SEQ ID NO: 1508628 - DNA, 15 bp, Homo sapiens
tgggacttcggagag

SEQ ID NO: 1508629 - DNA, 15 bp, Homo sapiens
gggacttcggagagc

SEQ ID NO: 1508630 - DNA, 15 bp, Homo sapiens
ggacttcggagagct

SEQ ID NO: 1508631 - DNA, 15 bp, Homo sapiens
gacttcggagagctc

SEQ ID NO: 1508632 - DNA, 15 bp, Homo sapiens
acttcggagagctcc

SEQ ID NO: 1508633 - DNA, 15 bp, Homo sapiens
cttcggagagctcca

SEQ ID NO: 1508634 - DNA, 15 bp, Homo sapiens
ttcggagagctccac

SEQ ID NO: 1508635 - DNA, 15 bp, Homo sapiens
tcggagagctccact

SEQ ID NO: 1508636 - DNA, 15 bp, Homo sapiens
cggagagctccactg

SEQ ID NO: 1508637 - DNA, 15 bp, Homo sapiens
ggagagctccactgt

SEQ ID NO: 1508638 - DNA, 15 bp, Homo sapiens
gagagctccactgtt

SEQ ID NO: 1508639 - DNA, 15 bp, Homo sapiens
agagctccactgttc

SEQ ID NO: 1508640 - DNA, 15 bp, Homo sapiens
gagctccactgttct

SEQ ID NO: 1508641 - DNA, 15 bp, Homo sapiens
agctccactgttctg

SEQ ID NO: 1508642 - DNA, 15 bp, Homo sapiens
gctccactgttctgg

SEQ ID NO: 1508643 - DNA, 15 bp, Homo sapiens
ctccactgttctggg

SEQ ID NO: 1508644 - DNA, 15 bp, Homo sapiens
tccactgttctgggc

SEQ ID NO: 1508645 - DNA, 15 bp, Homo sapiens
ccactgttctgggcg

SEQ ID NO: 1508646 - DNA, 15 bp, Homo sapiens
cactgttctgggcga

SEQ ID NO: 1508647 - DNA, 15 bp, Homo sapiens
actgttctgggcgag

SEQ ID NO: 1508648 - DNA, 15 bp, Homo sapiens
ctgttctgggcgagg

SEQ ID NO: 1508649 - DNA, 15 bp, Homo sapiens
tgttctgggcgaggg

SEQ ID NO: 1508650 - DNA, 15 bp, Homo sapiens
gttctgggcgagggc

SEQ ID NO: 1508651 - DNA, 15 bp, Homo sapiens
ttctgggcgagggct

SEQ ID NO: 1508652 - DNA, 15 bp, Homo sapiens
tctgggcgagggctg

SEQ ID NO: 1508653 - DNA, 15 bp, Homo sapiens
ctgggcgagggctgt

SEQ ID NO: 1508654 - DNA, 15 bp, Homo sapiens
tgggcgagggctgtg

SEQ ID NO: 1508655 - DNA, 15 bp, Homo sapiens
gggcgagggctgtga

SEQ ID NO: 1508656 - DNA, 15 bp, Homo sapiens
ggcgagggctgtgaa

SEQ ID NO: 1508657 - DNA, 15 bp, Homo sapiens
gcgagggctgtgaag

SEQ ID NO: 1508658 - DNA, 15 bp, Homo sapiens
cgagggctgtgaaga

SEQ ID NO: 1508659 - DNA, 15 bp, Homo sapiens
gagggctgtgaagaa

SEQ ID NO: 1508660 - DNA, 15 bp, Homo sapiens
agggctgtgaagaaa

SEQ ID NO: 1508661 - DNA, 15 bp, Homo sapiens
gggctgtgaagaaag

SEQ ID NO: 1508662 - DNA, 15 bp, Homo sapiens
ggctgtgaagaaaga

SEQ ID NO: 1508663 - DNA, 15 bp, Homo sapiens
gctgtgaagaaagag

SEQ ID NO: 1508664 - DNA, 15 bp, Homo sapiens
ctgtgaagaaagagt

SEQ ID NO: 1508665 - DNA, 15 bp, Homo sapiens
tgtgaagaaagagta

SEQ ID NO: 1508666 - DNA, 15 bp, Homo sapiens
gtgaagaaagagtag

SEQ ID NO: 1508667 - DNA, 15 bp, Homo sapiens
tgaagaaagagtagt

SEQ ID NO: 1508668 - DNA, 15 bp, Homo sapiens
gaagaaagagtagta

SEQ ID NO: 1508669 - DNA, 15 bp, Homo sapiens
aagaaagagtagtaa

SEQ ID NO: 1508670 - DNA, 15 bp, Homo sapiens
agaaagagtagtaag

SEQ ID NO: 1508671 - DNA, 15 bp, Homo sapiens
gaaagagtagtaaga

SEQ ID NO: 1508672 - DNA, 15 bp, Homo sapiens
aaagagtagtaagaa

SEQ ID NO: 1508673 - DNA, 15 bp, Homo sapiens
aagagtagtaagaag

SEQ ID NO: 1508674 - DNA, 15 bp, Homo sapiens
agagtagtaagaagc

SEQ ID NO: 1508675 - DNA, 15 bp, Homo sapiens
gagtagtaagaagcg

SEQ ID NO: 1508676 - DNA, 15 bp, Homo sapiens
agtagtaagaagcgg

SEQ ID NO: 1508677 - DNA, 15 bp, Homo sapiens
gtagtaagaagcggt

SEQ ID NO: 1508678 - DNA, 15 bp, Homo sapiens
tagtaagaagcggta

SEQ ID NO: 1508679 - DNA, 15 bp, Homo sapiens
agtaagaagcggtag

SEQ ID NO: 1508680 - DNA, 15 bp, Homo sapiens
gtaagaagcggtagt

SEQ ID NO: 1508681 - DNA, 15 bp, Homo sapiens
taagaagcggtagtc

SEQ ID NO: 1508682 - DNA, 15 bp, Homo sapiens
aagaagcggtagtcg

SEQ ID NO: 1508683 - DNA, 15 bp, Homo sapiens
agaagcggtagtcgg

SEQ ID NO: 1508684 - DNA, 15 bp, Homo sapiens
gaagcggtagtcggc

SEQ ID NO: 1508685 - DNA, 15 bp, Homo sapiens
aagcggtagtcggca

SEQ ID NO: 1508686 - DNA, 15 bp, Homo sapiens
agcggtagtcggcac

SEQ ID NO: 1508687 - DNA, 15 bp, Homo sapiens
gcggtagtcggcacc

SEQ ID NO: 1508688 - DNA, 15 bp, Homo sapiens
cggtagtcggcacca

SEQ ID NO: 1508689 - DNA, 15 bp, Homo sapiens
ggtagtcggcaccaa

SEQ ID NO: 1508690 - DNA, 15 bp, Homo sapiens
gtagtcggcaccaaa

SEQ ID NO: 1508691 - DNA, 15 bp, Homo sapiens
tagtcggcaccaaat

SEQ ID NO: 1508692 - DNA, 15 bp, Homo sapiens
agtcggcaccaaatc

SEQ ID NO: 1508693 - DNA, 15 bp, Homo sapiens
gtcggcaccaaatca

SEQ ID NO: 1508694 - DNA, 15 bp, Homo sapiens
tcggcaccaaatcac

SEQ ID NO: 1508695 - DNA, 15 bp, Homo sapiens
cggcaccaaatcaca

SEQ ID NO: 1508696 - DNA, 15 bp, Homo sapiens
ggcaccaaatcacaa

SEQ ID NO: 1508697 - DNA, 15 bp, Homo sapiens
gcaccaaatcacaat

SEQ ID NO: 1508698 - DNA, 15 bp, Homo sapiens
caccaaatcacaatg

SEQ ID NO: 1508699 - DNA, 15 bp, Homo sapiens
accaaatcacaatgg

SEQ ID NO: 1508700 - DNA, 15 bp, Homo sapiens
ccaaatcacaatggc

SEQ ID NO: 1508701 - DNA, 15 bp, Homo sapiens
caaatcacaatggca

SEQ ID NO: 1508702 - DNA, 15 bp, Homo sapiens
aaatcacaatggcaa

SEQ ID NO: 1508703 - DNA, 15 bp, Homo sapiens
aatcacaatggcaac

SEQ ID NO: 1508704 - DNA, 15 bp, Homo sapiens
atcacaatggcaact

SEQ ID NO: 1508705 - DNA, 15 bp, Homo sapiens
tcacaatggcaactg

SEQ ID NO: 1508706 - DNA, 15 bp, Homo sapiens
cacaatggcaactga

SEQ ID NO: 1508707 - DNA, 15 bp, Homo sapiens
acaatggcaactgat

SEQ ID NO: 1508708 - DNA, 15 bp, Homo sapiens
caatggcaactgatt

SEQ ID NO: 1508709 - DNA, 15 bp, Homo sapiens
aatggcaactgattt

SEQ ID NO: 1508710 - DNA, 15 bp, Homo sapiens
atggcaactgatttt

SEQ ID NO: 1508711 - DNA, 15 bp, Homo sapiens
tggcaactgattttt

SEQ ID NO: 1508712 - DNA, 15 bp, Homo sapiens
ggcaactgattttta

SEQ ID NO: 1508713 - DNA, 15 bp, Homo sapiens
gcaactgatttttag

SEQ ID NO: 1508714 - DNA, 15 bp, Homo sapiens
caactgatttttagt

SEQ ID NO: 1508715 - DNA, 15 bp, Homo sapiens
aactgatttttagtg

SEQ ID NO: 1508716 - DNA, 15 bp, Homo sapiens
actgatttttagtgg

SEQ ID NO: 1508717 - DNA, 15 bp, Homo sapiens
ctgatttttagtggc

SEQ ID NO: 1508718 - DNA, 15 bp, Homo sapiens
tgatttttagtggct

SEQ ID NO: 1508719 - DNA, 15 bp, Homo sapiens
gatttttagtggctt

SEQ ID NO: 1508720 - DNA, 15 bp, Homo sapiens
atttttagtggcttc

SEQ ID NO: 1508721 - DNA, 15 bp, Homo sapiens
tttttagtggcttct

SEQ ID NO: 1508722 - DNA, 15 bp, Homo sapiens
ttttagtggcttctc

SEQ ID NO: 1508723 - DNA, 15 bp, Homo sapiens
tttagtggcttctct

SEQ ID NO: 1508724 - DNA, 15 bp, Homo sapiens
ttagtggcttctctt

SEQ ID NO: 1508725 - DNA, 15 bp, Homo sapiens
tagtggcttctcttt

SEQ ID NO: 1508726 - DNA, 15 bp, Homo sapiens
agtggcttctctttg

SEQ ID NO: 1508727 - DNA, 15 bp, Homo sapiens
gtggcttctctttgt

SEQ ID NO: 1508728 - DNA, 15 bp, Homo sapiens
tggcttctctttgtg

SEQ ID NO: 1508729 - DNA, 15 bp, Homo sapiens
ggcttctctttgtgg

SEQ ID NO: 1508730 - DNA, 15 bp, Homo sapiens
gcttctctttgtgga

SEQ ID NO: 1508731 - DNA, 15 bp, Homo sapiens
cttctctttgtggat

SEQ ID NO: 1508732 - DNA, 15 bp, Homo sapiens
ttctctttgtggatt

SEQ ID NO: 1508733 - DNA, 15 bp, Homo sapiens
tctctttgtggattt

SEQ ID NO: 1508734 - DNA, 15 bp, Homo sapiens
ctctttgtggatttc

SEQ ID NO: 1508735 - DNA, 15 bp, Homo sapiens
tctttgtggatttcg

SEQ ID NO: 1508736 - DNA, 15 bp, Homo sapiens
ctttgtggatttcgg

SEQ ID NO: 1508737 - DNA, 15 bp, Homo sapiens
tttgtggatttcgga

SEQ ID NO: 1508738 - DNA, 15 bp, Homo sapiens
ttgtggatttcggag

SEQ ID NO: 1508739 - DNA, 15 bp, Homo sapiens
tgtggatttcggagg

SEQ ID NO: 1508740 - DNA, 15 bp, Homo sapiens
gtggatttcggagga

SEQ ID NO: 1508741 - DNA, 15 bp, Homo sapiens
tggatttcggaggag

SEQ ID NO: 1508742 - DNA, 15 bp, Homo sapiens
ggatttcggaggaga

SEQ ID NO: 1508743 - DNA, 15 bp, Homo sapiens
gatttcggaggagat

SEQ ID NO: 1508744 - DNA, 15 bp, Homo sapiens
atttcggaggagatt

SEQ ID NO: 1508745 - DNA, 15 bp, Homo sapiens
tttcggaggagattt

SEQ ID NO: 1508746 - DNA, 15 bp, Homo sapiens
ttcggaggagatttt

SEQ ID NO: 1508747 - DNA, 15 bp, Homo sapiens
tcggaggagatttta

SEQ ID NO: 1508748 - DNA, 15 bp, Homo sapiens
cggaggagattttag

SEQ ID NO: 1508749 - DNA, 15 bp, Homo sapiens
ggaggagattttaga

SEQ ID NO: 1508750 - DNA, 15 bp, Homo sapiens
gaggagattttagat

SEQ ID NO: 1508751 - DNA, 15 bp, Homo sapiens
aggagattttagatc

SEQ ID NO: 1508752 - DNA, 15 bp, Homo sapiens
ggagattttagatcc

SEQ ID NO: 1508753 - DNA, 15 bp, Homo sapiens
gagattttagatcca

SEQ ID NO: 1508754 - DNA, 15 bp, Homo sapiens
agattttagatccaa

SEQ ID NO: 1508755 - DNA, 15 bp, Homo sapiens
gattttagatccaaa

SEQ ID NO: 1508756 - DNA, 15 bp, Homo sapiens
attttagatccaaaa

SEQ ID NO: 1508757 - DNA, 15 bp, Homo sapiens
ttttagatccaaaag

SEQ ID NO: 1508758 - DNA, 15 bp, Homo sapiens
tttagatccaaaagt

SEQ ID NO: 1508759 - DNA, 15 bp, Homo sapiens
ttagatccaaaagtt

SEQ ID NO: 1508760 - DNA, 15 bp, Homo sapiens
tagatccaaaagttt

SEQ ID NO: 1508761 - DNA, 15 bp, Homo sapiens
agatccaaaagtttc

SEQ ID NO: 1508762 - DNA, 15 bp, Homo sapiens
gatccaaaagtttca

SEQ ID NO: 1508763 - DNA, 15 bp, Homo sapiens
atccaaaagtttcag

SEQ ID NO: 1508764 - DNA, 15 bp, Homo sapiens
tccaaaagtttcagg

SEQ ID NO: 1508765 - DNA, 15 bp, Homo sapiens
ccaaaagtttcagga

SEQ ID NO: 1508766 - DNA, 15 bp, Homo sapiens
caaaagtttcaggaa

SEQ ID NO: 1508767 - DNA, 15 bp, Homo sapiens
aaaagtttcaggaag

SEQ ID NO: 1508768 - DNA, 15 bp, Homo sapiens
aaagtttcaggaaga

SEQ ID NO: 1508769 - DNA, 15 bp, Homo sapiens
aagtttcaggaagac

SEQ ID NO: 1508770 - DNA, 15 bp, Homo sapiens
agtttcaggaagacc

SEQ ID NO: 1508771 - DNA, 15 bp, Homo sapiens
gtttcaggaagaccc

SEQ ID NO: 1508772 - DNA, 15 bp, Homo sapiens
tttcaggaagaccct

SEQ ID NO: 1508773 - DNA, 15 bp, Homo sapiens
ttcaggaagacccta

SEQ ID NO: 1508774 - DNA, 15 bp, Homo sapiens
tcaggaagaccctaa

SEQ ID NO: 1508775 - DNA, 15 bp, Homo sapiens
caggaagaccctaac

SEQ ID NO: 1508776 - DNA, 15 bp, Homo sapiens
aggaagaccctaaca

SEQ ID NO: 1508777 - DNA, 15 bp, Homo sapiens
ggaagaccctaacat

SEQ ID NO: 1508778 - DNA, 15 bp, Homo sapiens
gaagaccctaacatg

SEQ ID NO: 1508779 - DNA, 15 bp, Homo sapiens
aagaccctaacatgg

SEQ ID NO: 1508780 - DNA, 15 bp, Homo sapiens
agaccctaacatggc

SEQ ID NO: 1508781 - DNA, 15 bp, Homo sapiens
gaccctaacatggcc

SEQ ID NO: 1508782 - DNA, 15 bp, Homo sapiens
accctaacatggccc

SEQ ID NO: 1508783 - DNA, 15 bp, Homo sapiens
ccctaacatggccca

SEQ ID NO: 1508784 - DNA, 15 bp, Homo sapiens
cctaacatggcccag

SEQ ID NO: 1508785 - DNA, 15 bp, Homo sapiens
ctaacatggcccagc

SEQ ID NO: 1508786 - DNA, 15 bp, Homo sapiens
taacatggcccagca

SEQ ID NO: 1508787 - DNA, 15 bp, Homo sapiens
aacatggcccagcag

SEQ ID NO: 1508788 - DNA, 15 bp, Homo sapiens
acatggcccagcagt

SEQ ID NO: 1508789 - DNA, 15 bp, Homo sapiens
catggcccagcagtg

SEQ ID NO: 1508790 - DNA, 15 bp, Homo sapiens
atggcccagcagtgc

SEQ ID NO: 1508791 - DNA, 15 bp, Homo sapiens
tggcccagcagtgca

SEQ ID NO: 1508792 - DNA, 15 bp, Homo sapiens
ggcccagcagtgcat

SEQ ID NO: 1508793 - DNA, 15 bp, Homo sapiens
gcccagcagtgcatt

SEQ ID NO: 1508794 - DNA, 15 bp, Homo sapiens
cccagcagtgcattg

SEQ ID NO: 1508795 - DNA, 15 bp, Homo sapiens
ccagcagtgcattga

SEQ ID NO: 1508796 - DNA, 15 bp, Homo sapiens
cagcagtgcattgaa

SEQ ID NO: 1508797 - DNA, 15 bp, Homo sapiens
agcagtgcattgaag

SEQ ID NO: 1508798 - DNA, 15 bp, Homo sapiens
gcagtgcattgaaga

SEQ ID NO: 1508799 - DNA, 15 bp, Homo sapiens
cagtgcattgaagaa

SEQ ID NO: 1508800 - DNA, 15 bp, Homo sapiens
agtgcattgaagaag

SEQ ID NO: 1508801 - DNA, 15 bp, Homo sapiens
gtgcattgaagaagt

SEQ ID NO: 1508802 - DNA, 15 bp, Homo sapiens
tgcattgaagaagtt

SEQ ID NO: 1508803 - DNA, 15 bp, Homo sapiens
gcattgaagaagttg

SEQ ID NO: 1508804 - DNA, 15 bp, Homo sapiens
cattgaagaagttga

SEQ ID NO: 1508805 - DNA, 15 bp, Homo sapiens
attgaagaagttgat

SEQ ID NO: 1508806 - DNA, 15 bp, Homo sapiens
ttgaagaagttgatc

SEQ ID NO: 1508807 - DNA, 15 bp, Homo sapiens
tgaagaagttgatca

SEQ ID NO: 1508808 - DNA, 15 bp, Homo sapiens
gaagaagttgatcat

SEQ ID NO: 1508809 - DNA, 15 bp, Homo sapiens
aagaagttgatcatc

SEQ ID NO: 1508810 - DNA, 15 bp, Homo sapiens
agaagttgatcatcg

SEQ ID NO: 1508811 - DNA, 15 bp, Homo sapiens
gaagttgatcatcgt

SEQ ID NO: 1508812 - DNA, 15 bp, Homo sapiens
aagttgatcatcgtg

SEQ ID NO: 1508813 - DNA, 15 bp, Homo sapiens
agttgatcatcgtga

SEQ ID NO: 1508814 - DNA, 15 bp, Homo sapiens
gttgatcatcgtgaa

SEQ ID NO: 1508815 - DNA, 15 bp, Homo sapiens
ttgatcatcgtgaat

SEQ ID NO: 1508816 - DNA, 15 bp, Homo sapiens
tgatcatcgtgaata

SEQ ID NO: 1508817 - DNA, 15 bp, Homo sapiens
gatcatcgtgaatat

SEQ ID NO: 1508818 - DNA, 15 bp, Homo sapiens
atcatcgtgaatatt

SEQ ID NO: 1508819 - DNA, 15 bp, Homo sapiens
tcatcgtgaatattc

SEQ ID NO: 1508820 - DNA, 15 bp, Homo sapiens
catcgtgaatattcg

SEQ ID NO: 1508821 - DNA, 15 bp, Homo sapiens
atcgtgaatattcgc

SEQ ID NO: 1508822 - DNA, 15 bp, Homo sapiens
tcgtgaatattcgcg

SEQ ID NO: 1508823 - DNA, 15 bp, Homo sapiens
cgtgaatattcgcgt

SEQ ID NO: 1508824 - DNA, 15 bp, Homo sapiens
gtgaatattcgcgtc

SEQ ID NO: 1508825 - DNA, 15 bp, Homo sapiens
tgaatattcgcgtcc

SEQ ID NO: 1508826 - DNA, 15 bp, Homo sapiens
gaatattcgcgtccc

SEQ ID NO: 1508827 - DNA, 15 bp, Homo sapiens
aatattcgcgtcccc

SEQ ID NO: 1508828 - DNA, 15 bp, Homo sapiens
atattcgcgtccccc

SEQ ID NO: 1508829 - DNA, 15 bp, Homo sapiens
tattcgcgtccccct

SEQ ID NO: 1508830 - DNA, 15 bp, Homo sapiens
attcgcgtccccctt

SEQ ID NO: 1508831 - DNA, 15 bp, Homo sapiens
ttcgcgtcccccttt

SEQ ID NO: 1508832 - DNA, 15 bp, Homo sapiens
tcgcgtccccctttt

SEQ ID NO: 1508833 - DNA, 15 bp, Homo sapiens
cgcgtcccccttttt

SEQ ID NO: 1508834 - DNA, 15 bp, Homo sapiens
gcgtccccctttttg

SEQ ID NO: 1508835 - DNA, 15 bp, Homo sapiens
cgtccccctttttgt

SEQ ID NO: 1508836 - DNA, 15 bp, Homo sapiens
gtccccctttttgtt

SEQ ID NO: 1508837 - DNA, 15 bp, Homo sapiens
tccccctttttgtta

SEQ ID NO: 1508838 - DNA, 15 bp, Homo sapiens
ccccctttttgttaa

SEQ ID NO: 1508839 - DNA, 15 bp, Homo sapiens
cccctttttgttaaa

SEQ ID NO: 1508840 - DNA, 15 bp, Homo sapiens
ccctttttgttaaac

SEQ ID NO: 1508841 - DNA, 15 bp, Homo sapiens
cctttttgttaaacg

SEQ ID NO: 1508842 - DNA, 15 bp, Homo sapiens
ctttttgttaaacgg

SEQ ID NO: 1508843 - DNA, 15 bp, Homo sapiens
tttttgttaaacggg

SEQ ID NO: 1508844 - DNA, 15 bp, Homo sapiens
ttttgttaaacgggg

SEQ ID NO: 1508845 - DNA, 15 bp, Homo sapiens
tttgttaaacggggt

SEQ ID NO: 1508846 - DNA, 15 bp, Homo sapiens
ttgttaaacggggta

SEQ ID NO: 1508847 - DNA, 15 bp, Homo sapiens
tgttaaacggggtaa

SEQ ID NO: 1508848 - DNA, 15 bp, Homo sapiens
gttaaacggggtaaa

SEQ ID NO: 1508849 - DNA, 15 bp, Homo sapiens
ttaaacggggtaaat

SEQ ID NO: 1508850 - DNA, 15 bp, Homo sapiens
taaacggggtaaatt

SEQ ID NO: 1508851 - DNA, 15 bp, Homo sapiens
aaacggggtaaattc

SEQ ID NO: 1508852 - DNA, 15 bp, Homo sapiens
aacggggtaaattca

SEQ ID NO: 1508853 - DNA, 15 bp, Homo sapiens
acggggtaaattcag

SEQ ID NO: 1508854 - DNA, 15 bp, Homo sapiens
cggggtaaattcagg

SEQ ID NO: 1508855 - DNA, 15 bp, Homo sapiens
ggggtaaattcagga

SEQ ID NO: 1508856 - DNA, 15 bp, Homo sapiens
gggtaaattcaggaa

SEQ ID NO: 1508857 - DNA, 15 bp, Homo sapiens
ggtaaattcaggaat

SEQ ID NO: 1508858 - DNA, 15 bp, Homo sapiens
gtaaattcaggaatg

SEQ ID NO: 1508859 - DNA, 15 bp, Homo sapiens
taaattcaggaatgc

SEQ ID NO: 1508860 - DNA, 15 bp, Homo sapiens
aaattcaggaatgca

SEQ ID NO: 1508861 - DNA, 15 bp, Homo sapiens
aattcaggaatgcac

SEQ ID NO: 1508862 - DNA, 15 bp, Homo sapiens
attcaggaatgcaca

SEQ ID NO: 1508863 - DNA, 15 bp, Homo sapiens
ttcaggaatgcacat

SEQ ID NO: 1508864 - DNA, 15 bp, Homo sapiens
tcaggaatgcacatg

SEQ ID NO: 1508865 - DNA, 15 bp, Homo sapiens
caggaatgcacatgc

SEQ ID NO: 1508866 - DNA, 15 bp, Homo sapiens
aggaatgcacatgct

SEQ ID NO: 1508867 - DNA, 15 bp, Homo sapiens
ggaatgcacatgctt

SEQ ID NO: 1508868 - DNA, 15 bp, Homo sapiens
gaatgcacatgcttc

SEQ ID NO: 1508869 - DNA, 15 bp, Homo sapiens
aatgcacatgcttca

SEQ ID NO: 1508870 - DNA, 15 bp, Homo sapiens
atgcacatgcttcag

SEQ ID NO: 1508871 - DNA, 15 bp, Homo sapiens
tgcacatgcttcagc

SEQ ID NO: 1508872 - DNA, 15 bp, Homo sapiens
gcacatgcttcagcg

SEQ ID NO: 1508873 - DNA, 15 bp, Homo sapiens
cacatgcttcagcgt

SEQ ID NO: 1508874 - DNA, 15 bp, Homo sapiens
acatgcttcagcgtc

SEQ ID NO: 1508875 - DNA, 15 bp, Homo sapiens
catgcttcagcgtct

SEQ ID NO: 1508876 - DNA, 15 bp, Homo sapiens
atgcttcagcgtcta

SEQ ID NO: 1508877 - DNA, 15 bp, Homo sapiens
tgcttcagcgtctaa

SEQ ID NO: 1508878 - DNA, 15 bp, Homo sapiens
gcttcagcgtctaaa

SEQ ID NO: 1508879 - DNA, 15 bp, Homo sapiens
cttcagcgtctaaaa

SEQ ID NO: 1508880 - DNA, 15 bp, Homo sapiens
ttcagcgtctaaaac

SEQ ID NO: 1508881 - DNA, 15 bp, Homo sapiens
tcagcgtctaaaacc

SEQ ID NO: 1508882 - DNA, 15 bp, Homo sapiens
cagcgtctaaaacca

SEQ ID NO: 1508883 - DNA, 15 bp, Homo sapiens
agcgtctaaaaccat

SEQ ID NO: 1508884 - DNA, 15 bp, Homo sapiens
gcgtctaaaaccatt

SEQ ID NO: 1508885 - DNA, 15 bp, Homo sapiens
cgtctaaaaccatta

SEQ ID NO: 1508886 - DNA, 15 bp, Homo sapiens
gtctaaaaccattag

SEQ ID NO: 1508887 - DNA, 15 bp, Homo sapiens
tctaaaaccattagc

SEQ ID NO: 1508888 - DNA, 15 bp, Homo sapiens
ctaaaaccattagca

SEQ ID NO: 1508889 - DNA, 15 bp, Homo sapiens
taaaaccattagcag

SEQ ID NO: 1508890 - DNA, 15 bp, Homo sapiens
aaaaccattagcagc

SEQ ID NO: 1508891 - DNA, 15 bp, Homo sapiens
aaaccattagcagcg

SEQ ID NO: 1508892 - DNA, 15 bp, Homo sapiens
aaccattagcagcgc

SEQ ID NO: 1508893 - DNA, 15 bp, Homo sapiens
accattagcagcgct

SEQ ID NO: 1508894 - DNA, 15 bp, Homo sapiens
ccattagcagcgctg

SEQ ID NO: 1508895 - DNA, 15 bp, Homo sapiens
cattagcagcgctgc

SEQ ID NO: 1508896 - DNA, 15 bp, Homo sapiens
attagcagcgctgct

SEQ ID NO: 1508897 - DNA, 15 bp, Homo sapiens
ttagcagcgctgcta

SEQ ID NO: 1508898 - DNA, 15 bp, Homo sapiens
tagcagcgctgctac

SEQ ID NO: 1508899 - DNA, 15 bp, Homo sapiens
agcagcgctgctact

SEQ ID NO: 1508900 - DNA, 15 bp, Homo sapiens
gcagcgctgctactt

SEQ ID NO: 1508901 - DNA, 15 bp, Homo sapiens
cagcgctgctactta

SEQ ID NO: 1508902 - DNA, 15 bp, Homo sapiens
agcgctgctacttaa

SEQ ID NO: 1508903 - DNA, 15 bp, Homo sapiens
gcgctgctacttaaa

SEQ ID NO: 1508904 - DNA, 15 bp, Homo sapiens
cgctgctacttaaaa

SEQ ID NO: 1508905 - DNA, 15 bp, Homo sapiens
gctgctacttaaaaa

SEQ ID NO: 1508906 - DNA, 15 bp, Homo sapiens
ctgctacttaaaaat

SEQ ID NO: 1508907 - DNA, 15 bp, Homo sapiens
tgctacttaaaaatt

SEQ ID NO: 1508908 - DNA, 15 bp, Homo sapiens
gctacttaaaaattg

SEQ ID NO: 1508909 - DNA, 15 bp, Homo sapiens
ctacttaaaaattgt

SEQ ID NO: 1508910 - DNA, 15 bp, Homo sapiens
tacttaaaaattgtg

SEQ ID NO: 1508911 - DNA, 15 bp, Homo sapiens
acttaaaaattgtgt

SEQ ID NO: 1508912 - DNA, 15 bp, Homo sapiens
cttaaaaattgtgtg

SEQ ID NO: 1508913 - DNA, 15 bp, Homo sapiens
ttaaaaattgtgtgt

SEQ ID NO: 1508914 - DNA, 15 bp, Homo sapiens
taaaaattgtgtgtg

SEQ ID NO: 1508915 - DNA, 15 bp, Homo sapiens
aaaaattgtgtgtgt

SEQ ID NO: 1508916 - DNA, 15 bp, Homo sapiens
aaaattgtgtgtgtg

SEQ ID NO: 1508917 - DNA, 15 bp, Homo sapiens
aaattgtgtgtgtgt

SEQ ID NO: 1508918 - DNA, 15 bp, Homo sapiens
aattgtgtgtgtgtg

SEQ ID NO: 1508919 - DNA, 15 bp, Homo sapiens
ttgtgtgtgtgtgtt

SEQ ID NO: 1508920 - DNA, 15 bp, Homo sapiens
tgtgtgtgtgtttaa

SEQ ID NO: 1508921 - DNA, 15 bp, Homo sapiens
gtgtgtgtgtttaag

SEQ ID NO: 1508922 - DNA, 15 bp, Homo sapiens
tgtgtgtgtttaagt

SEQ ID NO: 1508923 - DNA, 15 bp, Homo sapiens
gtgtgtgtttaagtt

SEQ ID NO: 1508924 - DNA, 15 bp, Homo sapiens
tgtgtgtttaagttt

SEQ ID NO: 1508925 - DNA, 15 bp, Homo sapiens
gtgtgtttaagtttc

SEQ ID NO: 1508926 - DNA, 15 bp, Homo sapiens
tgtgtttaagtttcc

SEQ ID NO: 1508927 - DNA, 15 bp, Homo sapiens
gtgtttaagtttcca

SEQ ID NO: 1508928 - DNA, 15 bp, Homo sapiens
tgtttaagtttccaa

SEQ ID NO: 1508929 - DNA, 15 bp, Homo sapiens
gtttaagtttccaaa

SEQ ID NO: 1508930 - DNA, 15 bp, Homo sapiens
tttaagtttccaaag

SEQ ID NO: 1508931 - DNA, 15 bp, Homo sapiens
ttaagtttccaaaga

SEQ ID NO: 1508932 - DNA, 15 bp, Homo sapiens
taagtttccaaagac

SEQ ID NO: 1508933 - DNA, 15 bp, Homo sapiens
aagtttccaaagacc

SEQ ID NO: 1508934 - DNA, 15 bp, Homo sapiens
agtttccaaagacct

SEQ ID NO: 1508935 - DNA, 15 bp, Homo sapiens
gtttccaaagaccta

SEQ ID NO: 1508936 - DNA, 15 bp, Homo sapiens
tttccaaagacctaa

SEQ ID NO: 1508937 - DNA, 15 bp, Homo sapiens
ttccaaagacctaaa

SEQ ID NO: 1508938 - DNA, 15 bp, Homo sapiens
tccaaagacctaaat

SEQ ID NO: 1508939 - DNA, 15 bp, Homo sapiens
ccaaagacctaaata

SEQ ID NO: 1508940 - DNA, 15 bp, Homo sapiens
aagacctaaatatat

SEQ ID NO: 1508941 - DNA, 15 bp, Homo sapiens
agacctaaatatatg

SEQ ID NO: 1508942 - DNA, 15 bp, Homo sapiens
gacctaaatatatgc

SEQ ID NO: 1508943 - DNA, 15 bp, Homo sapiens
acctaaatatatgcc

SEQ ID NO: 1508944 - DNA, 15 bp, Homo sapiens
cctaaatatatgcca

SEQ ID NO: 1508945 - DNA, 15 bp, Homo sapiens
ctaaatatatgccat

SEQ ID NO: 1508946 - DNA, 15 bp, Homo sapiens
taaatatatgccatg

SEQ ID NO: 1508947 - DNA, 15 bp, Homo sapiens
aaatatatgccatga

SEQ ID NO: 1508948 - DNA, 15 bp, Homo sapiens
aatatatgccatgaa

SEQ ID NO: 1508949 - DNA, 15 bp, Homo sapiens
atatatgccatgaaa

SEQ ID NO: 1508950 - DNA, 15 bp, Homo sapiens
tatatgccatgaaac

SEQ ID NO: 1508951 - DNA, 15 bp, Homo sapiens
atatgccatgaaact

SEQ ID NO: 1508952 - DNA, 15 bp, Homo sapiens
tatgccatgaaactt

SEQ ID NO: 1508953 - DNA, 15 bp, Homo sapiens
atgccatgaaacttc

SEQ ID NO: 1508954 - DNA, 15 bp, Homo sapiens
tgccatgaaacttca

SEQ ID NO: 1508955 - DNA, 15 bp, Homo sapiens
gccatgaaacttcag

SEQ ID NO: 1508956 - DNA, 15 bp, Homo sapiens
ccatgaaacttcagg

SEQ ID NO: 1508957 - DNA, 15 bp, Homo sapiens
catgaaacttcaggt

SEQ ID NO: 1508958 - DNA, 15 bp, Homo sapiens
atgaaacttcaggta

SEQ ID NO: 1508959 - DNA, 15 bp, Homo sapiens
tgaaacttcaggtaa

SEQ ID NO: 1508960 - DNA, 15 bp, Homo sapiens
gaaacttcaggtaat

SEQ ID NO: 1508961 - DNA, 15 bp, Homo sapiens
aaacttcaggtaatt

SEQ ID NO: 1508962 - DNA, 15 bp, Homo sapiens
aacttcaggtaatta

SEQ ID NO: 1508963 - DNA, 15 bp, Homo sapiens
acttcaggtaattaa

SEQ ID NO: 1508964 - DNA, 15 bp, Homo sapiens
cttcaggtaattaac

SEQ ID NO: 1508965 - DNA, 15 bp, Homo sapiens
ttcaggtaattaact

SEQ ID NO: 1508966 - DNA, 15 bp, Homo sapiens
tcaggtaattaactg

SEQ ID NO: 1508967 - DNA, 15 bp, Homo sapiens
caggtaattaactga

SEQ ID NO: 1508968 - DNA, 15 bp, Homo sapiens
aggtaattaactgag

SEQ ID NO: 1508969 - DNA, 15 bp, Homo sapiens
ggtaattaactgaga

SEQ ID NO: 1508970 - DNA, 15 bp, Homo sapiens
gtaattaactgagag

SEQ ID NO: 1508971 - DNA, 15 bp, Homo sapiens
taattaactgagagt

SEQ ID NO: 1508972 - DNA, 15 bp, Homo sapiens
aattaactgagagta

SEQ ID NO: 1508973 - DNA, 15 bp, Homo sapiens
attaactgagagtat

SEQ ID NO: 1508974 - DNA, 15 bp, Homo sapiens
ttaactgagagtata

SEQ ID NO: 1508975 - DNA, 15 bp, Homo sapiens
taactgagagtatat

SEQ ID NO: 1508976 - DNA, 15 bp, Homo sapiens
aactgagagtatatt

SEQ ID NO: 1508977 - DNA, 15 bp, Homo sapiens
actgagagtatatta

SEQ ID NO: 1508978 - DNA, 15 bp, Homo sapiens
ctgagagtatattat

SEQ ID NO: 1508979 - DNA, 15 bp, Homo sapiens
tgagagtatattatt

SEQ ID NO: 1508980 - DNA, 15 bp, Homo sapiens
gagagtatattatta

SEQ ID NO: 1508981 - DNA, 15 bp, Homo sapiens
agagtatattattac

SEQ ID NO: 1508982 - DNA, 15 bp, Homo sapiens
gagtatattattact

SEQ ID NO: 1508983 - DNA, 15 bp, Homo sapiens
agtatattattacta

SEQ ID NO: 1508984 - DNA, 15 bp, Homo sapiens
gtatattattactag

SEQ ID NO: 1508985 - DNA, 15 bp, Homo sapiens
tatattattactagg

SEQ ID NO: 1508986 - DNA, 15 bp, Homo sapiens
atattattactaggg

SEQ ID NO: 1508987 - DNA, 15 bp, Homo sapiens
tattattactagggc

SEQ ID NO: 1508988 - DNA, 15 bp, Homo sapiens
attattactagggca

SEQ ID NO: 1508989 - DNA, 15 bp, Homo sapiens
ttattactagggcat

SEQ ID NO: 1508990 - DNA, 15 bp, Homo sapiens
tattactagggcatt

SEQ ID NO: 1508991 - DNA, 15 bp, Homo sapiens
attactagggcattt

SEQ ID NO: 1508992 - DNA, 15 bp, Homo sapiens
ttactagggcatttt

SEQ ID NO: 1508993 - DNA, 15 bp, Homo sapiens
tactagggcattttt

SEQ ID NO: 1508994 - DNA, 15 bp, Homo sapiens
actagggcatttttt

SEQ ID NO: 1508995 - DNA, 15 bp, Homo sapiens
ctagggcattttttt

SEQ ID NO: 1508996 - DNA, 15 bp, Homo sapiens
tagggcatttttttt

SEQ ID NO: 1508997 - DNA, 15 bp, Homo sapiens
agggcattttttttt

SEQ ID NO: 1508998 - DNA, 15 bp, Homo sapiens
gggcatttttttttt

SEQ ID NO: 1508999 - DNA, 15 bp, Homo sapiens
ggcatttttttttta

SEQ ID NO: 1509000 - DNA, 15 bp, Homo sapiens
gcattttttttttaa

SEQ ID NO: 1509001 - DNA, 15 bp, Homo sapiens
cattttttttttaac

SEQ ID NO: 1509002 - DNA, 15 bp, Homo sapiens
attttttttttaact

SEQ ID NO: 1509003 - DNA, 15 bp, Homo sapiens
ttttttttttaactg

SEQ ID NO: 1509004 - DNA, 15 bp, Homo sapiens
tttttttttaactga

SEQ ID NO: 1509005 - DNA, 15 bp, Homo sapiens
ttttttttaactgag

SEQ ID NO: 1509006 - DNA, 15 bp, Homo sapiens
tttttttaactgagc

SEQ ID NO: 1509007 - DNA, 15 bp, Homo sapiens
ttttttaactgagcg

SEQ ID NO: 1509008 - DNA, 15 bp, Homo sapiens
tttttaactgagcga

SEQ ID NO: 1509009 - DNA, 15 bp, Homo sapiens
ttttaactgagcgaa

SEQ ID NO: 1509010 - DNA, 15 bp, Homo sapiens
tttaactgagcgaaa

SEQ ID NO: 1509011 - DNA, 15 bp, Homo sapiens
ttaactgagcgaaaa

SEQ ID NO: 1509012 - DNA, 15 bp, Homo sapiens
taactgagcgaaaat

SEQ ID NO: 1509013 - DNA, 15 bp, Homo sapiens
aactgagcgaaaata

SEQ ID NO: 1509014 - DNA, 15 bp, Homo sapiens
actgagcgaaaatat

SEQ ID NO: 1509015 - DNA, 15 bp, Homo sapiens
ctgagcgaaaatatt

SEQ ID NO: 1509016 - DNA, 15 bp, Homo sapiens
tgagcgaaaatattt

SEQ ID NO: 1509017 - DNA, 15 bp, Homo sapiens
gagcgaaaatatttt

SEQ ID NO: 1509018 - DNA, 15 bp, Homo sapiens
agcgaaaatattttt

SEQ ID NO: 1509019 - DNA, 15 bp, Homo sapiens
gcgaaaatatttttg

SEQ ID NO: 1509020 - DNA, 15 bp, Homo sapiens
cgaaaatatttttgt

SEQ ID NO: 1509021 - DNA, 15 bp, Homo sapiens
gaaaatatttttgtg

SEQ ID NO: 1509022 - DNA, 15 bp, Homo sapiens
aaaatatttttgtgc

SEQ ID NO: 1509023 - DNA, 15 bp, Homo sapiens
aaatatttttgtgcc

SEQ ID NO: 1509024 - DNA, 15 bp, Homo sapiens
aatatttttgtgccc

SEQ ID NO: 1509025 - DNA, 15 bp, Homo sapiens
atatttttgtgcccc

SEQ ID NO: 1509026 - DNA, 15 bp, Homo sapiens
tatttttgtgcccct

SEQ ID NO: 1509027 - DNA, 15 bp, Homo sapiens
atttttgtgccccta

SEQ ID NO: 1509028 - DNA, 15 bp, Homo sapiens
tttttgtgcccctaa

SEQ ID NO: 1509029 - DNA, 15 bp, Homo sapiens
ttttgtgcccctaag

SEQ ID NO: 1509030 - DNA, 15 bp, Homo sapiens
tttgtgcccctaaga

SEQ ID NO: 1509031 - DNA, 15 bp, Homo sapiens
ttgtgcccctaagaa

SEQ ID NO: 1509032 - DNA, 15 bp, Homo sapiens
tgtgcccctaagaac

SEQ ID NO: 1509033 - DNA, 15 bp, Homo sapiens
gtgcccctaagaact

SEQ ID NO: 1509034 - DNA, 15 bp, Homo sapiens
tgcccctaagaactt

SEQ ID NO: 1509035 - DNA, 15 bp, Homo sapiens
gcccctaagaacttg

SEQ ID NO: 1509036 - DNA, 15 bp, Homo sapiens
cccctaagaacttga

SEQ ID NO: 1509037 - DNA, 15 bp, Homo sapiens
ccctaagaacttgac

SEQ ID NO: 1509038 - DNA, 15 bp, Homo sapiens
cctaagaacttgacc

SEQ ID NO: 1509039 - DNA, 15 bp, Homo sapiens
ctaagaacttgacca

SEQ ID NO: 1509040 - DNA, 15 bp, Homo sapiens
taagaacttgaccac

SEQ ID NO: 1509041 - DNA, 15 bp, Homo sapiens
aagaacttgaccaca

SEQ ID NO: 1509042 - DNA, 15 bp, Homo sapiens
agaacttgaccacat

SEQ ID NO: 1509043 - DNA, 15 bp, Homo sapiens
gaacttgaccacatt

SEQ ID NO: 1509044 - DNA, 15 bp, Homo sapiens
aacttgaccacattt

SEQ ID NO: 1509045 - DNA, 15 bp, Homo sapiens
acttgaccacatttc

SEQ ID NO: 1509046 - DNA, 15 bp, Homo sapiens
cttgaccacatttcc

SEQ ID NO: 1509047 - DNA, 15 bp, Homo sapiens
ttgaccacatttcct

SEQ ID NO: 1509048 - DNA, 15 bp, Homo sapiens
tgaccacatttcctt

SEQ ID NO: 1509049 - DNA, 15 bp, Homo sapiens
gaccacatttccttt

SEQ ID NO: 1509050 - DNA, 15 bp, Homo sapiens
accacatttcctttg

SEQ ID NO: 1509051 - DNA, 15 bp, Homo sapiens
ccacatttcctttga

SEQ ID NO: 1509052 - DNA, 15 bp, Homo sapiens
cacatttcctttgaa

SEQ ID NO: 1509053 - DNA, 15 bp, Homo sapiens
acatttcctttgaat

SEQ ID NO: 1509054 - DNA, 15 bp, Homo sapiens
catttcctttgaatt

SEQ ID NO: 1509055 - DNA, 15 bp, Homo sapiens
atttcctttgaattt

SEQ ID NO: 1509056 - DNA, 15 bp, Homo sapiens
tttcctttgaatttg

SEQ ID NO: 1509057 - DNA, 15 bp, Homo sapiens
ttcctttgaatttgt

SEQ ID NO: 1509058 - DNA, 15 bp, Homo sapiens
tcctttgaatttgtg

SEQ ID NO: 1509059 - DNA, 15 bp, Homo sapiens
cctttgaatttgtgg

SEQ ID NO: 1509060 - DNA, 15 bp, Homo sapiens
ctttgaatttgtggt

SEQ ID NO: 1509061 - DNA, 15 bp, Homo sapiens
tttgaatttgtggtg

SEQ ID NO: 1509062 - DNA, 15 bp, Homo sapiens
ttgaatttgtggtgt

SEQ ID NO: 1509063 - DNA, 15 bp, Homo sapiens
tgaatttgtggtgtt

SEQ ID NO: 1509064 - DNA, 15 bp, Homo sapiens
gaatttgtggtgttg

SEQ ID NO: 1509065 - DNA, 15 bp, Homo sapiens
aatttgtggtgttgc

SEQ ID NO: 1509066 - DNA, 15 bp, Homo sapiens
atttgtggtgttgca

SEQ ID NO: 1509067 - DNA, 15 bp, Homo sapiens
tttgtggtgttgcag

SEQ ID NO: 1509068 - DNA, 15 bp, Homo sapiens
ttgtggtgttgcagt

SEQ ID NO: 1509069 - DNA, 15 bp, Homo sapiens
tgtggtgttgcagtg

SEQ ID NO: 1509070 - DNA, 15 bp, Homo sapiens
gtggtgttgcagtgg

SEQ ID NO: 1509071 - DNA, 15 bp, Homo sapiens
tggtgttgcagtgga

SEQ ID NO: 1509072 - DNA, 15 bp, Homo sapiens
ggtgttgcagtggac

SEQ ID NO: 1509073 - DNA, 15 bp, Homo sapiens
gtgttgcagtggact

SEQ ID NO: 1509074 - DNA, 15 bp, Homo sapiens
tgttgcagtggactg

SEQ ID NO: 1509075 - DNA, 15 bp, Homo sapiens
gttgcagtggactga

SEQ ID NO: 1509076 - DNA, 15 bp, Homo sapiens
ttgcagtggactgaa

SEQ ID NO: 1509077 - DNA, 15 bp, Homo sapiens
tgcagtggactgaat

SEQ ID NO: 1509078 - DNA, 15 bp, Homo sapiens
gcagtggactgaatt

SEQ ID NO: 1509079 - DNA, 15 bp, Homo sapiens
cagtggactgaattg

SEQ ID NO: 1509080 - DNA, 15 bp, Homo sapiens
agtggactgaattgt

SEQ ID NO: 1509081 - DNA, 15 bp, Homo sapiens
gtggactgaattgtt

SEQ ID NO: 1509082 - DNA, 15 bp, Homo sapiens
tggactgaattgttg

SEQ ID NO: 1509083 - DNA, 15 bp, Homo sapiens
ggactgaattgttga

SEQ ID NO: 1509084 - DNA, 15 bp, Homo sapiens
gactgaattgttgag

SEQ ID NO: 1509085 - DNA, 15 bp, Homo sapiens
actgaattgttgagg

SEQ ID NO: 1509086 - DNA, 15 bp, Homo sapiens
ctgaattgttgaggc

SEQ ID NO: 1509087 - DNA, 15 bp, Homo sapiens
tgaattgttgaggct

SEQ ID NO: 1509088 - DNA, 15 bp, Homo sapiens
gaattgttgaggctt

SEQ ID NO: 1509089 - DNA, 15 bp, Homo sapiens
aattgttgaggcttt

SEQ ID NO: 1509090 - DNA, 15 bp, Homo sapiens
attgttgaggcttta

SEQ ID NO: 1509091 - DNA, 15 bp, Homo sapiens
ttgttgaggctttat

SEQ ID NO: 1509092 - DNA, 15 bp, Homo sapiens
tgttgaggctttata

SEQ ID NO: 1509093 - DNA, 15 bp, Homo sapiens
gttgaggctttatat

SEQ ID NO: 1509094 - DNA, 15 bp, Homo sapiens
ttgaggctttatata

SEQ ID NO: 1509095 - DNA, 15 bp, Homo sapiens
tgaggctttatatag

SEQ ID NO: 1509096 - DNA, 15 bp, Homo sapiens
gaggctttatatagg

SEQ ID NO: 1509097 - DNA, 15 bp, Homo sapiens
aggctttatataggc

SEQ ID NO: 1509098 - DNA, 15 bp, Homo sapiens
ggctttatataggca

SEQ ID NO: 1509099 - DNA, 15 bp, Homo sapiens
gctttatataggcat

SEQ ID NO: 1509100 - DNA, 15 bp, Homo sapiens
ctttatataggcatt

SEQ ID NO: 1509101 - DNA, 15 bp, Homo sapiens
tttatataggcattc

SEQ ID NO: 1509102 - DNA, 15 bp, Homo sapiens
ttatataggcattca

SEQ ID NO: 1509103 - DNA, 15 bp, Homo sapiens
tatataggcattcat

SEQ ID NO: 1509104 - DNA, 15 bp, Homo sapiens
atataggcattcatg

SEQ ID NO: 1509105 - DNA, 15 bp, Homo sapiens
tataggcattcatgg

SEQ ID NO: 1509106 - DNA, 15 bp, Homo sapiens
ataggcattcatggg

SEQ ID NO: 1509107 - DNA, 15 bp, Homo sapiens
taggcattcatgggt

SEQ ID NO: 1509108 - DNA, 15 bp, Homo sapiens
aggcattcatgggtt

SEQ ID NO: 1509109 - DNA, 15 bp, Homo sapiens
ggcattcatgggttt

SEQ ID NO: 1509110 - DNA, 15 bp, Homo sapiens
gcattcatgggttta

SEQ ID NO: 1509111 - DNA, 15 bp, Homo sapiens
cattcatgggtttac

SEQ ID NO: 1509112 - DNA, 15 bp, Homo sapiens
attcatgggtttact

SEQ ID NO: 1509113 - DNA, 15 bp, Homo sapiens
ttcatgggtttactg

SEQ ID NO: 1509114 - DNA, 15 bp, Homo sapiens
tcatgggtttactgt

SEQ ID NO: 1509115 - DNA, 15 bp, Homo sapiens
catgggtttactgtg

SEQ ID NO: 1509116 - DNA, 15 bp, Homo sapiens
atgggtttactgtgc

SEQ ID NO: 1509117 - DNA, 15 bp, Homo sapiens
tgggtttactgtgct

SEQ ID NO: 1509118 - DNA, 15 bp, Homo sapiens
gggtttactgtgctt

SEQ ID NO: 1509119 - DNA, 15 bp, Homo sapiens
ggtttactgtgcttt

SEQ ID NO: 1509120 - DNA, 15 bp, Homo sapiens
gtttactgtgctttt

SEQ ID NO: 1509121 - DNA, 15 bp, Homo sapiens
tttactgtgcttttt

SEQ ID NO: 1509122 - DNA, 15 bp, Homo sapiens
ttactgtgcttttta

SEQ ID NO: 1509123 - DNA, 15 bp, Homo sapiens
tactgtgctttttaa

SEQ ID NO: 1509124 - DNA, 15 bp, Homo sapiens
actgtgctttttaaa

SEQ ID NO: 1509125 - DNA, 15 bp, Homo sapiens
ctgtgctttttaaag

SEQ ID NO: 1509126 - DNA, 15 bp, Homo sapiens
tgtgctttttaaagt

SEQ ID NO: 1509127 - DNA, 15 bp, Homo sapiens
gtgctttttaaagtt

SEQ ID NO: 1509128 - DNA, 15 bp, Homo sapiens
tgctttttaaagtta

SEQ ID NO: 1509129 - DNA, 15 bp, Homo sapiens
gctttttaaagttac

SEQ ID NO: 1509130 - DNA, 15 bp, Homo sapiens
ctttttaaagttaca

SEQ ID NO: 1509131 - DNA, 15 bp, Homo sapiens
tttttaaagttacac

SEQ ID NO: 1509132 - DNA, 15 bp, Homo sapiens
ttttaaagttacacc

SEQ ID NO: 1509133 - DNA, 15 bp, Homo sapiens
tttaaagttacacca

SEQ ID NO: 1509134 - DNA, 15 bp, Homo sapiens
ttaaagttacaccat

SEQ ID NO: 1509135 - DNA, 15 bp, Homo sapiens
taaagttacaccatt

SEQ ID NO: 1509136 - DNA, 15 bp, Homo sapiens
aaagttacaccattg

SEQ ID NO: 1509137 - DNA, 15 bp, Homo sapiens
aagttacaccattgc

SEQ ID NO: 1509138 - DNA, 15 bp, Homo sapiens
agttacaccattgca

SEQ ID NO: 1509139 - DNA, 15 bp, Homo sapiens
gttacaccattgcag

SEQ ID NO: 1509140 - DNA, 15 bp, Homo sapiens
ttacaccattgcaga

SEQ ID NO: 1509141 - DNA, 15 bp, Homo sapiens
tacaccattgcagat

SEQ ID NO: 1509142 - DNA, 15 bp, Homo sapiens
acaccattgcagatc

SEQ ID NO: 1509143 - DNA, 15 bp, Homo sapiens
caccattgcagatca

SEQ ID NO: 1509144 - DNA, 15 bp, Homo sapiens
accattgcagatcaa

SEQ ID NO: 1509145 - DNA, 15 bp, Homo sapiens
ccattgcagatcaac

SEQ ID NO: 1509146 - DNA, 15 bp, Homo sapiens
cattgcagatcaact

SEQ ID NO: 1509147 - DNA, 15 bp, Homo sapiens
attgcagatcaacta

SEQ ID NO: 1509148 - DNA, 15 bp, Homo sapiens
ttgcagatcaactaa

SEQ ID NO: 1509149 - DNA, 15 bp, Homo sapiens
tgcagatcaactaac

SEQ ID NO: 1509150 - DNA, 15 bp, Homo sapiens
gcagatcaactaaca

SEQ ID NO: 1509151 - DNA, 15 bp, Homo sapiens
cagatcaactaacac

SEQ ID NO: 1509152 - DNA, 15 bp, Homo sapiens
agatcaactaacacc

SEQ ID NO: 1509153 - DNA, 15 bp, Homo sapiens
gatcaactaacacct

SEQ ID NO: 1509154 - DNA, 15 bp, Homo sapiens
atcaactaacacctt

SEQ ID NO: 1509155 - DNA, 15 bp, Homo sapiens
tcaactaacaccttt

SEQ ID NO: 1509156 - DNA, 15 bp, Homo sapiens
caactaacacctttc

SEQ ID NO: 1509157 - DNA, 15 bp, Homo sapiens
aactaacacctttca

SEQ ID NO: 1509158 - DNA, 15 bp, Homo sapiens
actaacacctttcag

SEQ ID NO: 1509159 - DNA, 15 bp, Homo sapiens
ctaacacctttcagt

SEQ ID NO: 1509160 - DNA, 15 bp, Homo sapiens
taacacctttcagtt

SEQ ID NO: 1509161 - DNA, 15 bp, Homo sapiens
aacacctttcagttt

SEQ ID NO: 1509162 - DNA, 15 bp, Homo sapiens
acacctttcagtttt

SEQ ID NO: 1509163 - DNA, 15 bp, Homo sapiens
cacctttcagtttta

SEQ ID NO: 1509164 - DNA, 15 bp, Homo sapiens
acctttcagttttaa

SEQ ID NO: 1509165 - DNA, 15 bp, Homo sapiens
cctttcagttttaaa

SEQ ID NO: 1509166 - DNA, 15 bp, Homo sapiens
tttcagttttaaaag

SEQ ID NO: 1509167 - DNA, 15 bp, Homo sapiens
ttcagttttaaaagg

SEQ ID NO: 1509168 - DNA, 15 bp, Homo sapiens
tcagttttaaaagga

SEQ ID NO: 1509169 - DNA, 15 bp, Homo sapiens
cagttttaaaaggaa

SEQ ID NO: 1509170 - DNA, 15 bp, Homo sapiens
agttttaaaaggaag

SEQ ID NO: 1509171 - DNA, 15 bp, Homo sapiens
gttttaaaaggaaga

SEQ ID NO: 1509172 - DNA, 15 bp, Homo sapiens
ttttaaaaggaagat

SEQ ID NO: 1509173 - DNA, 15 bp, Homo sapiens
tttaaaaggaagatt

SEQ ID NO: 1509174 - DNA, 15 bp, Homo sapiens
ttaaaaggaagattt

SEQ ID NO: 1509175 - DNA, 15 bp, Homo sapiens
taaaaggaagattta

SEQ ID NO: 1509176 - DNA, 15 bp, Homo sapiens
aaaaggaagatttac

SEQ ID NO: 1509177 - DNA, 15 bp, Homo sapiens
aaaggaagatttaca

SEQ ID NO: 1509178 - DNA, 15 bp, Homo sapiens
aaggaagatttacaa

SEQ ID NO: 1509179 - DNA, 15 bp, Homo sapiens
aggaagatttacaaa

SEQ ID NO: 1509180 - DNA, 15 bp, Homo sapiens
ggaagatttacaaat

SEQ ID NO: 1509181 - DNA, 15 bp, Homo sapiens
gaagatttacaaatt

SEQ ID NO: 1509182 - DNA, 15 bp, Homo sapiens
aagatttacaaattt

SEQ ID NO: 1509183 - DNA, 15 bp, Homo sapiens
agatttacaaatttg

SEQ ID NO: 1509184 - DNA, 15 bp, Homo sapiens
gatttacaaatttga

SEQ ID NO: 1509185 - DNA, 15 bp, Homo sapiens
atttacaaatttgat

SEQ ID NO: 1509186 - DNA, 15 bp, Homo sapiens
tttacaaatttgatg

SEQ ID NO: 1509187 - DNA, 15 bp, Homo sapiens
ttacaaatttgatgt

SEQ ID NO: 1509188 - DNA, 15 bp, Homo sapiens
tacaaatttgatgta

SEQ ID NO: 1509189 - DNA, 15 bp, Homo sapiens
acaaatttgatgtag

SEQ ID NO: 1509190 - DNA, 15 bp, Homo sapiens
caaatttgatgtagc

SEQ ID NO: 1509191 - DNA, 15 bp, Homo sapiens
aaatttgatgtagca

SEQ ID NO: 1509192 - DNA, 15 bp, Homo sapiens
aatttgatgtagcag

SEQ ID NO: 1509193 - DNA, 15 bp, Homo sapiens
atttgatgtagcagt

SEQ ID NO: 1509194 - DNA, 15 bp, Homo sapiens
tttgatgtagcagta

SEQ ID NO: 1509195 - DNA, 15 bp, Homo sapiens
ttgatgtagcagtag

SEQ ID NO: 1509196 - DNA, 15 bp, Homo sapiens
tgatgtagcagtagt

SEQ ID NO: 1509197 - DNA, 15 bp, Homo sapiens
gatgtagcagtagtg

SEQ ID NO: 1509198 - DNA, 15 bp, Homo sapiens
atgtagcagtagtgc

SEQ ID NO: 1509199 - DNA, 15 bp, Homo sapiens
tgtagcagtagtgcg

SEQ ID NO: 1509200 - DNA, 15 bp, Homo sapiens
gtagcagtagtgcgt

SEQ ID NO: 1509201 - DNA, 15 bp, Homo sapiens
tagcagtagtgcgtt

SEQ ID NO: 1509202 - DNA, 15 bp, Homo sapiens
agcagtagtgcgttt

SEQ ID NO: 1509203 - DNA, 15 bp, Homo sapiens
gcagtagtgcgtttg

SEQ ID NO: 1509204 - DNA, 15 bp, Homo sapiens
cagtagtgcgtttgt

SEQ ID NO: 1509205 - DNA, 15 bp, Homo sapiens
agtagtgcgtttgtt

SEQ ID NO: 1509206 - DNA, 15 bp, Homo sapiens
gtagtgcgtttgttg

SEQ ID NO: 1509207 - DNA, 15 bp, Homo sapiens
tagtgcgtttgttgg

SEQ ID NO: 1509208 - DNA, 15 bp, Homo sapiens
agtgcgtttgttggt

SEQ ID NO: 1509209 - DNA, 15 bp, Homo sapiens
gtgcgtttgttggta

SEQ ID NO: 1509210 - DNA, 15 bp, Homo sapiens
tgcgtttgttggtat

SEQ ID NO: 1509211 - DNA, 15 bp, Homo sapiens
gcgtttgttggtatg

SEQ ID NO: 1509212 - DNA, 15 bp, Homo sapiens
cgtttgttggtatgt

SEQ ID NO: 1509213 - DNA, 15 bp, Homo sapiens
gtttgttggtatgta

SEQ ID NO: 1509214 - DNA, 15 bp, Homo sapiens
tttgttggtatgtag

SEQ ID NO: 1509215 - DNA, 15 bp, Homo sapiens
ttgttggtatgtagg

SEQ ID NO: 1509216 - DNA, 15 bp, Homo sapiens
tgttggtatgtaggt

SEQ ID NO: 1509217 - DNA, 15 bp, Homo sapiens
gttggtatgtaggtg

SEQ ID NO: 1509218 - DNA, 15 bp, Homo sapiens
ttggtatgtaggtgc

SEQ ID NO: 1509219 - DNA, 15 bp, Homo sapiens
tggtatgtaggtgct

SEQ ID NO: 1509220 - DNA, 15 bp, Homo sapiens
ggtatgtaggtgctg

SEQ ID NO: 1509221 - DNA, 15 bp, Homo sapiens
gtatgtaggtgctgt

SEQ ID NO: 1509222 - DNA, 15 bp, Homo sapiens
tatgtaggtgctgta

SEQ ID NO: 1509223 - DNA, 15 bp, Homo sapiens
atgtaggtgctgtat

SEQ ID NO: 1509224 - DNA, 15 bp, Homo sapiens
tgtaggtgctgtata

SEQ ID NO: 1509225 - DNA, 15 bp, Homo sapiens
gtaggtgctgtataa

SEQ ID NO: 1509226 - DNA, 15 bp, Homo sapiens
taggtgctgtataaa

SEQ ID NO: 1509227 - DNA, 15 bp, Homo sapiens
aggtgctgtataaat

SEQ ID NO: 1509228 - DNA, 15 bp, Homo sapiens
ggtgctgtataaatt

SEQ ID NO: 1509229 - DNA, 15 bp, Homo sapiens
gtgctgtataaattc

SEQ ID NO: 1509230 - DNA, 15 bp, Homo sapiens
tgctgtataaattca

SEQ ID NO: 1509231 - DNA, 15 bp, Homo sapiens
gctgtataaattcat

SEQ ID NO: 1509232 - DNA, 15 bp, Homo sapiens
ctgtataaattcatc

SEQ ID NO: 1509233 - DNA, 15 bp, Homo sapiens
tgtataaattcatct

SEQ ID NO: 1509234 - DNA, 15 bp, Homo sapiens
gtataaattcatcta

SEQ ID NO: 1509235 - DNA, 15 bp, Homo sapiens
tataaattcatctat

SEQ ID NO: 1509236 - DNA, 15 bp, Homo sapiens
ataaattcatctata

SEQ ID NO: 1509237 - DNA, 15 bp, Homo sapiens
taaattcatctataa

SEQ ID NO: 1509238 - DNA, 15 bp, Homo sapiens
aaattcatctataaa

SEQ ID NO: 1509239 - DNA, 15 bp, Homo sapiens
aattcatctataaat

SEQ ID NO: 1509240 - DNA, 15 bp, Homo sapiens
attcatctataaatt

SEQ ID NO: 1509241 - DNA, 15 bp, Homo sapiens
ttcatctataaattc

SEQ ID NO: 1509242 - DNA, 15 bp, Homo sapiens
tcatctataaattct

SEQ ID NO: 1509243 - DNA, 15 bp, Homo sapiens
catctataaattctc

SEQ ID NO: 1509244 - DNA, 15 bp, Homo sapiens
atctataaattctca

SEQ ID NO: 1509245 - DNA, 15 bp, Homo sapiens
tctataaattctcat

SEQ ID NO: 1509246 - DNA, 15 bp, Homo sapiens
ctataaattctcatt

SEQ ID NO: 1509247 - DNA, 15 bp, Homo sapiens
tataaattctcattt

SEQ ID NO: 1509248 - DNA, 15 bp, Homo sapiens
ataaattctcatttc

SEQ ID NO: 1509249 - DNA, 15 bp, Homo sapiens
taaattctcatttcc

SEQ ID NO: 1509250 - DNA, 15 bp, Homo sapiens
aaattctcatttcct

SEQ ID NO: 1509251 - DNA, 15 bp, Homo sapiens
aattctcatttcctt

SEQ ID NO: 1509252 - DNA, 15 bp, Homo sapiens
attctcatttccttt

SEQ ID NO: 1509253 - DNA, 15 bp, Homo sapiens
ttctcatttcctttt

SEQ ID NO: 1509254 - DNA, 15 bp, Homo sapiens
tctcatttccttttg

SEQ ID NO: 1509255 - DNA, 15 bp, Homo sapiens
ctcatttccttttga

SEQ ID NO: 1509256 - DNA, 15 bp, Homo sapiens
tcatttccttttgaa

SEQ ID NO: 1509257 - DNA, 15 bp, Homo sapiens
catttccttttgaat

SEQ ID NO: 1509258 - DNA, 15 bp, Homo sapiens
atttccttttgaatg

SEQ ID NO: 1509259 - DNA, 15 bp, Homo sapiens
tttccttttgaatgt

SEQ ID NO: 1509260 - DNA, 15 bp, Homo sapiens
ttccttttgaatgtc

SEQ ID NO: 1509261 - DNA, 15 bp, Homo sapiens
tccttttgaatgtct

SEQ ID NO: 1509262 - DNA, 15 bp, Homo sapiens
ccttttgaatgtcta

SEQ ID NO: 1509263 - DNA, 15 bp, Homo sapiens
cttttgaatgtctat

SEQ ID NO: 1509264 - DNA, 15 bp, Homo sapiens
ttttgaatgtctata

SEQ ID NO: 1509265 - DNA, 15 bp, Homo sapiens
tttgaatgtctataa

SEQ ID NO: 1509266 - DNA, 15 bp, Homo sapiens
ttgaatgtctataac

SEQ ID NO: 1509267 - DNA, 15 bp, Homo sapiens
tgaatgtctataacc

SEQ ID NO: 1509268 - DNA, 15 bp, Homo sapiens
gaatgtctataacct

SEQ ID NO: 1509269 - DNA, 15 bp, Homo sapiens
aatgtctataacctc

SEQ ID NO: 1509270 - DNA, 15 bp, Homo sapiens
atgtctataacctct

SEQ ID NO: 1509271 - DNA, 15 bp, Homo sapiens
tgtctataacctctt

SEQ ID NO: 1509272 - DNA, 15 bp, Homo sapiens
gtctataacctcttt

SEQ ID NO: 1509273 - DNA, 15 bp, Homo sapiens
tctataacctctttc

SEQ ID NO: 1509274 - DNA, 15 bp, Homo sapiens
ctataacctctttca

SEQ ID NO: 1509275 - DNA, 15 bp, Homo sapiens
tataacctctttcaa

SEQ ID NO: 1509276 - DNA, 15 bp, Homo sapiens
ataacctctttcaat

SEQ ID NO: 1509277 - DNA, 15 bp, Homo sapiens
taacctctttcaata

SEQ ID NO: 1509278 - DNA, 15 bp, Homo sapiens
aacctctttcaataa

SEQ ID NO: 1509279 - DNA, 15 bp, Homo sapiens
acctctttcaataat

SEQ ID NO: 1509280 - DNA, 15 bp, Homo sapiens
cctctttcaataata

SEQ ID NO: 1509281 - DNA, 15 bp, Homo sapiens
ctctttcaataatat

SEQ ID NO: 1509282 - DNA, 15 bp, Homo sapiens
tctttcaataatatc

SEQ ID NO: 1509283 - DNA, 15 bp, Homo sapiens
ctttcaataatatcc

SEQ ID NO: 1509284 - DNA, 15 bp, Homo sapiens
tttcaataatatccc

SEQ ID NO: 1509285 - DNA, 15 bp, Homo sapiens
ttcaataatatccca

SEQ ID NO: 1509286 - DNA, 15 bp, Homo sapiens
tcaataatatcccac

SEQ ID NO: 1509287 - DNA, 15 bp, Homo sapiens
caataatatcccacc

SEQ ID NO: 1509288 - DNA, 15 bp, Homo sapiens
aataatatcccacct

SEQ ID NO: 1509289 - DNA, 15 bp, Homo sapiens
ataatatcccacctt

SEQ ID NO: 1509290 - DNA, 15 bp, Homo sapiens
taatatcccacctta

SEQ ID NO: 1509291 - DNA, 15 bp, Homo sapiens
aatatcccaccttac

SEQ ID NO: 1509292 - DNA, 15 bp, Homo sapiens
atatcccaccttact

SEQ ID NO: 1509293 - DNA, 15 bp, Homo sapiens
tatcccaccttacta

SEQ ID NO: 1509294 - DNA, 15 bp, Homo sapiens
atcccaccttactac

SEQ ID NO: 1509295 - DNA, 15 bp, Homo sapiens
tcccaccttactaca

SEQ ID NO: 1509296 - DNA, 15 bp, Homo sapiens
cccaccttactacag

SEQ ID NO: 1509297 - DNA, 15 bp, Homo sapiens
ccaccttactacagt

SEQ ID NO: 1509298 - DNA, 15 bp, Homo sapiens
caccttactacagta

SEQ ID NO: 1509299 - DNA, 15 bp, Homo sapiens
accttactacagtat

SEQ ID NO: 1509300 - DNA, 15 bp, Homo sapiens
ccttactacagtatt

SEQ ID NO: 1509301 - DNA, 15 bp, Homo sapiens
cttactacagtattt

SEQ ID NO: 1509302 - DNA, 15 bp, Homo sapiens
ttactacagtatttt

SEQ ID NO: 1509303 - DNA, 15 bp, Homo sapiens
tactacagtattttg

SEQ ID NO: 1509304 - DNA, 15 bp, Homo sapiens
actacagtattttgg

SEQ ID NO: 1509305 - DNA, 15 bp, Homo sapiens
ctacagtattttggc

SEQ ID NO: 1509306 - DNA, 15 bp, Homo sapiens
tacagtattttggca

SEQ ID NO: 1509307 - DNA, 15 bp, Homo sapiens
acagtattttggcaa

SEQ ID NO: 1509308 - DNA, 15 bp, Homo sapiens
cagtattttggcaat

SEQ ID NO: 1509309 - DNA, 15 bp, Homo sapiens
agtattttggcaata

SEQ ID NO: 1509310 - DNA, 15 bp, Homo sapiens
gtattttggcaatag

SEQ ID NO: 1509311 - DNA, 15 bp, Homo sapiens
tattttggcaataga

SEQ ID NO: 1509312 - DNA, 15 bp, Homo sapiens
attttggcaatagaa

SEQ ID NO: 1509313 - DNA, 15 bp, Homo sapiens
ttttggcaatagaag

SEQ ID NO: 1509314 - DNA, 15 bp, Homo sapiens
tttggcaatagaagg

SEQ ID NO: 1509315 - DNA, 15 bp, Homo sapiens
ttggcaatagaaggt

SEQ ID NO: 1509316 - DNA, 15 bp, Homo sapiens
tggcaatagaaggtg

SEQ ID NO: 1509317 - DNA, 15 bp, Homo sapiens
ggcaatagaaggtgc

SEQ ID NO: 1509318 - DNA, 15 bp, Homo sapiens
gcaatagaaggtgcg

SEQ ID NO: 1509319 - DNA, 15 bp, Homo sapiens
caatagaaggtgcgt

SEQ ID NO: 1509320 - DNA, 15 bp, Homo sapiens
aatagaaggtgcgtg

SEQ ID NO: 1509321 - DNA, 15 bp, Homo sapiens
atagaaggtgcgtgt

SEQ ID NO: 1509322 - DNA, 15 bp, Homo sapiens
aattcttaaatgtat

SEQ ID NO: 1509323 - DNA, 15 bp, Homo sapiens
attcttaaatgtatt

SEQ ID NO: 1509324 - DNA, 15 bp, Homo sapiens
ttcttaaatgtattg

SEQ ID NO: 1509325 - DNA, 15 bp, Homo sapiens
tcttaaatgtattgt

SEQ ID NO: 1509326 - DNA, 15 bp, Homo sapiens
cttaaatgtattgta

SEQ ID NO: 1509327 - DNA, 15 bp, Homo sapiens
ttaaatgtattgtag

SEQ ID NO: 1509328 - DNA, 15 bp, Homo sapiens
taaatgtattgtaga

SEQ ID NO: 1509329 - DNA, 15 bp, Homo sapiens
aaatgtattgtagaa

SEQ ID NO: 1509330 - DNA, 15 bp, Homo sapiens
aatgtattgtagaat

SEQ ID NO: 1509331 - DNA, 15 bp, Homo sapiens
atgtattgtagaatg

SEQ ID NO: 1509332 - DNA, 15 bp, Homo sapiens
tgtattgtagaatgg

SEQ ID NO: 1509333 - DNA, 15 bp, Homo sapiens
gtattgtagaatggc

SEQ ID NO: 1509334 - DNA, 15 bp, Homo sapiens
tattgtagaatggct

SEQ ID NO: 1509335 - DNA, 15 bp, Homo sapiens
attgtagaatggctt

SEQ ID NO: 1509336 - DNA, 15 bp, Homo sapiens
ttgtagaatggcttg

SEQ ID NO: 1509337 - DNA, 15 bp, Homo sapiens
tgtagaatggcttga

SEQ ID NO: 1509338 - DNA, 15 bp, Homo sapiens
gtagaatggcttgaa

SEQ ID NO: 1509339 - DNA, 15 bp, Homo sapiens
tagaatggcttgaat

SEQ ID NO: 1509340 - DNA, 15 bp, Homo sapiens
agaatggcttgaatg

SEQ ID NO: 1509341 - DNA, 15 bp, Homo sapiens
gaatggcttgaatgt

SEQ ID NO: 1509342 - DNA, 15 bp, Homo sapiens
aatggcttgaatgtt

SEQ ID NO: 1509343 - DNA, 15 bp, Homo sapiens
atggcttgaatgttt

SEQ ID NO: 1509344 - DNA, 15 bp, Homo sapiens
tggcttgaatgtttc

SEQ ID NO: 1509345 - DNA, 15 bp, Homo sapiens
ggcttgaatgtttca

SEQ ID NO: 1509346 - DNA, 15 bp, Homo sapiens
gcttgaatgtttcag

SEQ ID NO: 1509347 - DNA, 15 bp, Homo sapiens
cttgaatgtttcaga

SEQ ID NO: 1509348 - DNA, 15 bp, Homo sapiens
ttgaatgtttcagac

SEQ ID NO: 1509349 - DNA, 15 bp, Homo sapiens
tgaatgtttcagaca

SEQ ID NO: 1509350 - DNA, 15 bp, Homo sapiens
gaatgtttcagacag

SEQ ID NO: 1509351 - DNA, 15 bp, Homo sapiens
aatgtttcagacagg

SEQ ID NO: 1509352 - DNA, 15 bp, Homo sapiens
atgtttcagacagga

SEQ ID NO: 1509353 - DNA, 15 bp, Homo sapiens
tgtttcagacaggac

SEQ ID NO: 1509354 - DNA, 15 bp, Homo sapiens
gtttcagacaggaca

SEQ ID NO: 1509355 - DNA, 15 bp, Homo sapiens
tttcagacaggacac

SEQ ID NO: 1509356 - DNA, 15 bp, Homo sapiens
ttcagacaggacacg

SEQ ID NO: 1509357 - DNA, 15 bp, Homo sapiens
tcagacaggacacgt

SEQ ID NO: 1509358 - DNA, 15 bp, Homo sapiens
cagacaggacacgtt

SEQ ID NO: 1509359 - DNA, 15 bp, Homo sapiens
agacaggacacgttt

SEQ ID NO: 1509360 - DNA, 15 bp, Homo sapiens
gacaggacacgtttg

SEQ ID NO: 1509361 - DNA, 15 bp, Homo sapiens
acaggacacgtttgg

SEQ ID NO: 1509362 - DNA, 15 bp, Homo sapiens
caggacacgtttggc

SEQ ID NO: 1509363 - DNA, 15 bp, Homo sapiens
aggacacgtttggct

SEQ ID NO: 1509364 - DNA, 15 bp, Homo sapiens
ggacacgtttggcta

SEQ ID NO: 1509365 - DNA, 15 bp, Homo sapiens
gacacgtttggctat

SEQ ID NO: 1509366 - DNA, 15 bp, Homo sapiens
acacgtttggctata

SEQ ID NO: 1509367 - DNA, 15 bp, Homo sapiens
cacgtttggctatag

SEQ ID NO: 1509368 - DNA, 15 bp, Homo sapiens
acgtttggctatagg

SEQ ID NO: 1509369 - DNA, 15 bp, Homo sapiens
cgtttggctatagga

SEQ ID NO: 1509370 - DNA, 15 bp, Homo sapiens
gtttggctataggaa

SEQ ID NO: 1509371 - DNA, 15 bp, Homo sapiens
tttggctataggaaa

SEQ ID NO: 1509372 - DNA, 15 bp, Homo sapiens
ttggctataggaaaa

SEQ ID NO: 1509373 - DNA, 15 bp, Homo sapiens
tggctataggaaaat

SEQ ID NO: 1509374 - DNA, 15 bp, Homo sapiens
ggctataggaaaata

SEQ ID NO: 1509375 - DNA, 15 bp, Homo sapiens
gctataggaaaataa

SEQ ID NO: 1509376 - DNA, 15 bp, Homo sapiens
ctataggaaaataaa

SEQ ID NO: 1509377 - DNA, 15 bp, Homo sapiens
tataggaaaataaac

SEQ ID NO: 1509378 - DNA, 15 bp, Homo sapiens
ataggaaaataaaca

SEQ ID NO: 1509379 - DNA, 15 bp, Homo sapiens
taggaaaataaacaa

SEQ ID NO: 1509380 - DNA, 15 bp, Homo sapiens
aggaaaataaacaat

SEQ ID NO: 1509381 - DNA, 15 bp, Homo sapiens
ggaaaataaacaatt

SEQ ID NO: 1509382 - DNA, 15 bp, Homo sapiens
gaaaataaacaattg

SEQ ID NO: 1509383 - DNA, 15 bp, Homo sapiens
aaaataaacaattga

SEQ ID NO: 1509384 - DNA, 15 bp, Homo sapiens
aaataaacaattgac

SEQ ID NO: 1509385 - DNA, 15 bp, Homo sapiens
aataaacaattgact

SEQ ID NO: 1509386 - DNA, 15 bp, Homo sapiens
ataaacaattgactt

SEQ ID NO: 1509387 - DNA, 15 bp, Homo sapiens
taaacaattgacttt

SEQ ID NO: 1509388 - DNA, 15 bp, Homo sapiens
aaacaattgacttta

SEQ ID NO: 1509389 - DNA, 15 bp, Homo sapiens
aacaattgactttat

SEQ ID NO: 1509390 - DNA, 15 bp, Homo sapiens
acaattgactttatt

SEQ ID NO: 1509391 - DNA, 15 bp, Homo sapiens
caattgactttattc

SEQ ID NO: 1509392 - DNA, 15 bp, Homo sapiens
aattgactttattct

SEQ ID NO: 1509393 - DNA, 15 bp, Homo sapiens
attgactttattctg

SEQ ID NO: 1509394 - DNA, 15 bp, Homo sapiens
ttgactttattctgt

SEQ ID NO: 1509395 - DNA, 15 bp, Homo sapiens
tgactttattctgtg

SEQ ID NO: 1509396 - DNA, 15 bp, Homo sapiens
gactttattctgtgt

SEQ ID NO: 1509397 - DNA, 15 bp, Homo sapiens
actttattctgtgtt

SEQ ID NO: 1509398 - DNA, 15 bp, Homo sapiens
ctttattctgtgttt

SEQ ID NO: 1509399 - DNA, 15 bp, Homo sapiens
tttattctgtgttta

SEQ ID NO: 1509400 - DNA, 15 bp, Homo sapiens
ttattctgtgtttac

SEQ ID NO: 1509401 - DNA, 15 bp, Homo sapiens
tattctgtgtttacc

SEQ ID NO: 1509402 - DNA, 15 bp, Homo sapiens
attctgtgtttacca

SEQ ID NO: 1509403 - DNA, 15 bp, Homo sapiens
ttctgtgtttaccaa

SEQ ID NO: 1509404 - DNA, 15 bp, Homo sapiens
tctgtgtttaccaat

SEQ ID NO: 1509405 - DNA, 15 bp, Homo sapiens
ctgtgtttaccaatt

SEQ ID NO: 1509406 - DNA, 15 bp, Homo sapiens
tgtgtttaccaattt

SEQ ID NO: 1509407 - DNA, 15 bp, Homo sapiens
gtgtttaccaatttt

SEQ ID NO: 1509408 - DNA, 15 bp, Homo sapiens
tgtttaccaatttta

SEQ ID NO: 1509409 - DNA, 15 bp, Homo sapiens
gtttaccaattttat

SEQ ID NO: 1509410 - DNA, 15 bp, Homo sapiens
tttaccaattttatg

SEQ ID NO: 1509411 - DNA, 15 bp, Homo sapiens
ttaccaattttatga

SEQ ID NO: 1509412 - DNA, 15 bp, Homo sapiens
taccaattttatgaa

SEQ ID NO: 1509413 - DNA, 15 bp, Homo sapiens
accaattttatgaag

SEQ ID NO: 1509414 - DNA, 15 bp, Homo sapiens
ccaattttatgaaga

SEQ ID NO: 1509415 - DNA, 15 bp, Homo sapiens
caattttatgaagac

SEQ ID NO: 1509416 - DNA, 15 bp, Homo sapiens
aattttatgaagaca

SEQ ID NO: 1509417 - DNA, 15 bp, Homo sapiens
attttatgaagacat

SEQ ID NO: 1509418 - DNA, 15 bp, Homo sapiens
ttttatgaagacatt

SEQ ID NO: 1509419 - DNA, 15 bp, Homo sapiens
tttatgaagacattt

SEQ ID NO: 1509420 - DNA, 15 bp, Homo sapiens
ttatgaagacatttg

SEQ ID NO: 1509421 - DNA, 15 bp, Homo sapiens
tatgaagacatttgg

SEQ ID NO: 1509422 - DNA, 15 bp, Homo sapiens
atgaagacatttgga

SEQ ID NO: 1509423 - DNA, 15 bp, Homo sapiens
tgaagacatttggag

SEQ ID NO: 1509424 - DNA, 15 bp, Homo sapiens
gaagacatttggaga

SEQ ID NO: 1509425 - DNA, 15 bp, Homo sapiens
aagacatttggagat

SEQ ID NO: 1509426 - DNA, 15 bp, Homo sapiens
agacatttggagatc

SEQ ID NO: 1509427 - DNA, 15 bp, Homo sapiens
gacatttggagatca

SEQ ID NO: 1509428 - DNA, 15 bp, Homo sapiens
acatttggagatcag

SEQ ID NO: 1509429 - DNA, 15 bp, Homo sapiens
catttggagatcagt

SEQ ID NO: 1509430 - DNA, 15 bp, Homo sapiens
atttggagatcagta

SEQ ID NO: 1509431 - DNA, 15 bp, Homo sapiens
tttggagatcagtat

SEQ ID NO: 1509432 - DNA, 15 bp, Homo sapiens
ttggagatcagtata

SEQ ID NO: 1509433 - DNA, 15 bp, Homo sapiens
tggagatcagtatat

SEQ ID NO: 1509434 - DNA, 15 bp, Homo sapiens
ggagatcagtatatt

SEQ ID NO: 1509435 - DNA, 15 bp, Homo sapiens
gagatcagtatattt

SEQ ID NO: 1509436 - DNA, 15 bp, Homo sapiens
agatcagtatatttc

SEQ ID NO: 1509437 - DNA, 15 bp, Homo sapiens
gatcagtatatttca

SEQ ID NO: 1509438 - DNA, 15 bp, Homo sapiens
atcagtatatttcat

SEQ ID NO: 1509439 - DNA, 15 bp, Homo sapiens
tcagtatatttcata

SEQ ID NO: 1509440 - DNA, 15 bp, Homo sapiens
cagtatatttcataa

SEQ ID NO: 1509441 - DNA, 15 bp, Homo sapiens
agtatatttcataaa

SEQ ID NO: 1509442 - DNA, 15 bp, Homo sapiens
gtatatttcataaat

SEQ ID NO: 1509443 - DNA, 15 bp, Homo sapiens
tatatttcataaatg

SEQ ID NO: 1509444 - DNA, 15 bp, Homo sapiens
atatttcataaatga

SEQ ID NO: 1509445 - DNA, 15 bp, Homo sapiens
tatttcataaatgag

SEQ ID NO: 1509446 - DNA, 15 bp, Homo sapiens
atttcataaatgagt

SEQ ID NO: 1509447 - DNA, 15 bp, Homo sapiens
tttcataaatgagta

SEQ ID NO: 1509448 - DNA, 15 bp, Homo sapiens
ttcataaatgagtaa

SEQ ID NO: 1509449 - DNA, 15 bp, Homo sapiens
tcataaatgagtaaa

SEQ ID NO: 1509450 - DNA, 15 bp, Homo sapiens
cataaatgagtaaag

SEQ ID NO: 1509451 - DNA, 15 bp, Homo sapiens
ataaatgagtaaagt

SEQ ID NO: 1509452 - DNA, 15 bp, Homo sapiens
taaatgagtaaagta

SEQ ID NO: 1509453 - DNA, 15 bp, Homo sapiens
aaatgagtaaagtat

SEQ ID NO: 1509454 - DNA, 15 bp, Homo sapiens
aatgagtaaagtatg

SEQ ID NO: 1509455 - DNA, 15 bp, Homo sapiens
atgagtaaagtatgt

SEQ ID NO: 1509456 - DNA, 15 bp, Homo sapiens
tgagtaaagtatgta

SEQ ID NO: 1509457 - DNA, 15 bp, Homo sapiens
gagtaaagtatgtaa

SEQ ID NO: 1509458 - DNA, 15 bp, Homo sapiens
agtaaagtatgtaaa

SEQ ID NO: 1509459 - DNA, 15 bp, Homo sapiens
gtaaagtatgtaaac

SEQ ID NO: 1509460 - DNA, 15 bp, Homo sapiens
taaagtatgtaaact

SEQ ID NO: 1509461 - DNA, 15 bp, Homo sapiens
aaagtatgtaaactg

SEQ ID NO: 1509462 - DNA, 15 bp, Homo sapiens
aagtatgtaaactgt

SEQ ID NO: 1509463 - DNA, 15 bp, Homo sapiens
agtatgtaaactgtt

SEQ ID NO: 1509464 - DNA, 15 bp, Homo sapiens
gtatgtaaactgttc

SEQ ID NO: 1509465 - DNA, 15 bp, Homo sapiens
tatgtaaactgttcc

SEQ ID NO: 1509466 - DNA, 15 bp, Homo sapiens
atgtaaactgttcca

SEQ ID NO: 1509467 - DNA, 15 bp, Homo sapiens
tgtaaactgttccat

SEQ ID NO: 1509468 - DNA, 15 bp, Homo sapiens
gtaaactgttccata

SEQ ID NO: 1509469 - DNA, 15 bp, Homo sapiens
taaactgttccatac

SEQ ID NO: 1509470 - DNA, 15 bp, Homo sapiens
aaactgttccatact

SEQ ID NO: 1509471 - DNA, 15 bp, Homo sapiens
aactgttccatactt

SEQ ID NO: 1509472 - DNA, 15 bp, Homo sapiens
actgttccatacttt

SEQ ID NO: 1509473 - DNA, 15 bp, Homo sapiens
ctgttccatactttg

SEQ ID NO: 1509474 - DNA, 15 bp, Homo sapiens
tgttccatactttga

SEQ ID NO: 1509475 - DNA, 15 bp, Homo sapiens
gttccatactttgag

SEQ ID NO: 1509476 - DNA, 15 bp, Homo sapiens
ttccatactttgagc

SEQ ID NO: 1509477 - DNA, 15 bp, Homo sapiens
tccatactttgagca

SEQ ID NO: 1509478 - DNA, 15 bp, Homo sapiens
ccatactttgagcac

SEQ ID NO: 1509479 - DNA, 15 bp, Homo sapiens
catactttgagcaca

SEQ ID NO: 1509480 - DNA, 15 bp, Homo sapiens
atactttgagcacaa

SEQ ID NO: 1509481 - DNA, 15 bp, Homo sapiens
tactttgagcacaaa

SEQ ID NO: 1509482 - DNA, 15 bp, Homo sapiens
actttgagcacaaag

SEQ ID NO: 1509483 - DNA, 15 bp, Homo sapiens
ctttgagcacaaaga

SEQ ID NO: 1509484 - DNA, 15 bp, Homo sapiens
tttgagcacaaagat

SEQ ID NO: 1509485 - DNA, 15 bp, Homo sapiens
ttgagcacaaagata

SEQ ID NO: 1509486 - DNA, 15 bp, Homo sapiens
tgagcacaaagataa

SEQ ID NO: 1509487 - DNA, 15 bp, Homo sapiens
gagcacaaagataaa

SEQ ID NO: 1509488 - DNA, 15 bp, Homo sapiens
agcacaaagataaag

SEQ ID NO: 1509489 - DNA, 15 bp, Homo sapiens
gcacaaagataaagc

SEQ ID NO: 1509490 - DNA, 15 bp, Homo sapiens
cacaaagataaagcc

SEQ ID NO: 1509491 - DNA, 15 bp, Homo sapiens
acaaagataaagcct

SEQ ID NO: 1509492 - DNA, 15 bp, Homo sapiens
caaagataaagcctt

SEQ ID NO: 1509493 - DNA, 15 bp, Homo sapiens
aaagataaagccttt

SEQ ID NO: 1509494 - DNA, 15 bp, Homo sapiens
aagataaagcctttt

SEQ ID NO: 1509495 - DNA, 15 bp, Homo sapiens
agataaagccttttg

SEQ ID NO: 1509496 - DNA, 15 bp, Homo sapiens
gataaagccttttgc

SEQ ID NO: 1509497 - DNA, 15 bp, Homo sapiens
ataaagccttttgct

SEQ ID NO: 1509498 - DNA, 15 bp, Homo sapiens
taaagccttttgctg

SEQ ID NO: 1509499 - DNA, 15 bp, Homo sapiens
aaagccttttgctgt

SEQ ID NO: 1509500 - DNA, 15 bp, Homo sapiens
aagccttttgctgta

SEQ ID NO: 1509501 - DNA, 15 bp, Homo sapiens
agccttttgctgtaa

SEQ ID NO: 1509502 - DNA, 15 bp, Homo sapiens
gccttttgctgtaaa

SEQ ID NO: 1509503 - DNA, 15 bp, Homo sapiens
ccttttgctgtaaaa

SEQ ID NO: 1509504 - DNA, 15 bp, Homo sapiens
cttttgctgtaaaag

SEQ ID NO: 1509505 - DNA, 15 bp, Homo sapiens
ttttgctgtaaaagg

SEQ ID NO: 1509506 - DNA, 15 bp, Homo sapiens
tttgctgtaaaagga

SEQ ID NO: 1509507 - DNA, 15 bp, Homo sapiens
ttgctgtaaaaggag

SEQ ID NO: 1509508 - DNA, 15 bp, Homo sapiens
tgctgtaaaaggagg

SEQ ID NO: 1509509 - DNA, 15 bp, Homo sapiens
gctgtaaaaggaggc

SEQ ID NO: 1509510 - DNA, 15 bp, Homo sapiens
ctgtaaaaggaggca

SEQ ID NO: 1509511 - DNA, 15 bp, Homo sapiens
tgtaaaaggaggcaa

SEQ ID NO: 1509512 - DNA, 15 bp, Homo sapiens
gtaaaaggaggcaaa

SEQ ID NO: 1509513 - DNA, 15 bp, Homo sapiens
taaaaggaggcaaaa

SEQ ID NO: 1509514 - DNA, 15 bp, Homo sapiens
aaaaggaggcaaaag

SEQ ID NO: 1509515 - DNA, 15 bp, Homo sapiens
aaaggaggcaaaagg

SEQ ID NO: 1509516 - DNA, 15 bp, Homo sapiens
aaggaggcaaaaggt

SEQ ID NO: 1509517 - DNA, 15 bp, Homo sapiens
aggaggcaaaaggta

SEQ ID NO: 1509518 - DNA, 15 bp, Homo sapiens
ggaggcaaaaggtaa

SEQ ID NO: 1509519 - DNA, 15 bp, Homo sapiens
gaggcaaaaggtaac

SEQ ID NO: 1509520 - DNA, 15 bp, Homo sapiens
aggcaaaaggtaacc

SEQ ID NO: 1509521 - DNA, 15 bp, Homo sapiens
ggcaaaaggtaaccc

SEQ ID NO: 1509522 - DNA, 15 bp, Homo sapiens
gcaaaaggtaacccc

SEQ ID NO: 1509523 - DNA, 15 bp, Homo sapiens
caaaaggtaaccccg

SEQ ID NO: 1509524 - DNA, 15 bp, Homo sapiens
aaaaggtaaccccgc

SEQ ID NO: 1509525 - DNA, 15 bp, Homo sapiens
aaaggtaaccccgcg

SEQ ID NO: 1509526 - DNA, 15 bp, Homo sapiens
aaggtaaccccgcgt

SEQ ID NO: 1509527 - DNA, 15 bp, Homo sapiens
aggtaaccccgcgtt

SEQ ID NO: 1509528 - DNA, 15 bp, Homo sapiens
ggtaaccccgcgttt

SEQ ID NO: 1509529 - DNA, 15 bp, Homo sapiens
gtaaccccgcgttta

SEQ ID NO: 1509530 - DNA, 15 bp, Homo sapiens
taaccccgcgtttat

SEQ ID NO: 1509531 - DNA, 15 bp, Homo sapiens
aaccccgcgtttatg

SEQ ID NO: 1509532 - DNA, 15 bp, Homo sapiens
accccgcgtttatgt

SEQ ID NO: 1509533 - DNA, 15 bp, Homo sapiens
ccccgcgtttatgtt

SEQ ID NO: 1509534 - DNA, 15 bp, Homo sapiens
cccgcgtttatgttc

SEQ ID NO: 1509535 - DNA, 15 bp, Homo sapiens
ccgcgtttatgttct

SEQ ID NO: 1509536 - DNA, 15 bp, Homo sapiens
cgcgtttatgttctt

SEQ ID NO: 1509537 - DNA, 15 bp, Homo sapiens
gcgtttatgttctta

SEQ ID NO: 1509538 - DNA, 15 bp, Homo sapiens
cgtttatgttcttaa

SEQ ID NO: 1509539 - DNA, 15 bp, Homo sapiens
gtttatgttcttaac

SEQ ID NO: 1509540 - DNA, 15 bp, Homo sapiens
tttatgttcttaaca

SEQ ID NO: 1509541 - DNA, 15 bp, Homo sapiens
ttatgttcttaacag

SEQ ID NO: 1509542 - DNA, 15 bp, Homo sapiens
tatgttcttaacagt

SEQ ID NO: 1509543 - DNA, 15 bp, Homo sapiens
atgttcttaacagtc

SEQ ID NO: 1509544 - DNA, 15 bp, Homo sapiens
tgttcttaacagtct

SEQ ID NO: 1509545 - DNA, 15 bp, Homo sapiens
gttcttaacagtctc

SEQ ID NO: 1509546 - DNA, 15 bp, Homo sapiens
ttcttaacagtctca

SEQ ID NO: 1509547 - DNA, 15 bp, Homo sapiens
tcttaacagtctcat

SEQ ID NO: 1509548 - DNA, 15 bp, Homo sapiens
cttaacagtctcatg

SEQ ID NO: 1509549 - DNA, 15 bp, Homo sapiens
ttaacagtctcatga

SEQ ID NO: 1509550 - DNA, 15 bp, Homo sapiens
taacagtctcatgaa

SEQ ID NO: 1509551 - DNA, 15 bp, Homo sapiens
aacagtctcatgaat

SEQ ID NO: 1509552 - DNA, 15 bp, Homo sapiens
acagtctcatgaata

SEQ ID NO: 1509553 - DNA, 15 bp, Homo sapiens
cagtctcatgaatat

SEQ ID NO: 1509554 - DNA, 15 bp, Homo sapiens
agtctcatgaatatg

SEQ ID NO: 1509555 - DNA, 15 bp, Homo sapiens
gtctcatgaatatga

SEQ ID NO: 1509556 - DNA, 15 bp, Homo sapiens
tctcatgaatatgaa

SEQ ID NO: 1509557 - DNA, 15 bp, Homo sapiens
ctcatgaatatgaaa

SEQ ID NO: 1509558 - DNA, 15 bp, Homo sapiens
tcatgaatatgaaat

SEQ ID NO: 1509559 - DNA, 15 bp, Homo sapiens
catgaatatgaaatt

SEQ ID NO: 1509560 - DNA, 15 bp, Homo sapiens
atgaatatgaaattg

SEQ ID NO: 1509561 - DNA, 15 bp, Homo sapiens
tgaatatgaaattgt

SEQ ID NO: 1509562 - DNA, 15 bp, Homo sapiens
gaatatgaaattgtt

SEQ ID NO: 1509563 - DNA, 15 bp, Homo sapiens
aatatgaaattgttt

SEQ ID NO: 1509564 - DNA, 15 bp, Homo sapiens
atatgaaattgtttc

SEQ ID NO: 1509565 - DNA, 15 bp, Homo sapiens
tatgaaattgtttca

SEQ ID NO: 1509566 - DNA, 15 bp, Homo sapiens
atgaaattgtttcag

SEQ ID NO: 1509567 - DNA, 15 bp, Homo sapiens
tgaaattgtttcagt

SEQ ID NO: 1509568 - DNA, 15 bp, Homo sapiens
gaaattgtttcagtt

SEQ ID NO: 1509569 - DNA, 15 bp, Homo sapiens
aaattgtttcagttg

SEQ ID NO: 1509570 - DNA, 15 bp, Homo sapiens
aattgtttcagttga

SEQ ID NO: 1509571 - DNA, 15 bp, Homo sapiens
attgtttcagttgac

SEQ ID NO: 1509572 - DNA, 15 bp, Homo sapiens
ttgtttcagttgact

SEQ ID NO: 1509573 - DNA, 15 bp, Homo sapiens
tgtttcagttgactc

SEQ ID NO: 1509574 - DNA, 15 bp, Homo sapiens
gtttcagttgactct

SEQ ID NO: 1509575 - DNA, 15 bp, Homo sapiens
tttcagttgactctg

SEQ ID NO: 1509576 - DNA, 15 bp, Homo sapiens
ttcagttgactctgc

SEQ ID NO: 1509577 - DNA, 15 bp, Homo sapiens
tcagttgactctgca

SEQ ID NO: 1509578 - DNA, 15 bp, Homo sapiens
cagttgactctgcag

SEQ ID NO: 1509579 - DNA, 15 bp, Homo sapiens
agttgactctgcagt

SEQ ID NO: 1509580 - DNA, 15 bp, Homo sapiens
gttgactctgcagtc

SEQ ID NO: 1509581 - DNA, 15 bp, Homo sapiens
ttgactctgcagtca

SEQ ID NO: 1509582 - DNA, 15 bp, Homo sapiens
tgactctgcagtcaa

SEQ ID NO: 1509583 - DNA, 15 bp, Homo sapiens
gactctgcagtcaaa

SEQ ID NO: 1509584 - DNA, 15 bp, Homo sapiens
actctgcagtcaaaa

SEQ ID NO: 1509585 - DNA, 15 bp, Homo sapiens
ctctgcagtcaaaat

SEQ ID NO: 1509586 - DNA, 15 bp, Homo sapiens
tctgcagtcaaaatt

SEQ ID NO: 1509587 - DNA, 15 bp, Homo sapiens
ctgcagtcaaaattt

SEQ ID NO: 1509588 - DNA, 15 bp, Homo sapiens
tgcagtcaaaatttt

SEQ ID NO: 1509589 - DNA, 15 bp, Homo sapiens
gcagtcaaaatttta

SEQ ID NO: 1509590 - DNA, 15 bp, Homo sapiens
cagtcaaaattttaa

SEQ ID NO: 1509591 - DNA, 15 bp, Homo sapiens
agtcaaaattttaat

SEQ ID NO: 1509592 - DNA, 15 bp, Homo sapiens
gtcaaaattttaatt

SEQ ID NO: 1509593 - DNA, 15 bp, Homo sapiens
tcaaaattttaattt

SEQ ID NO: 1509594 - DNA, 15 bp, Homo sapiens
caaaattttaatttc

SEQ ID NO: 1509595 - DNA, 15 bp, Homo sapiens
aaaattttaatttca

SEQ ID NO: 1509596 - DNA, 15 bp, Homo sapiens
aaattttaatttcat

SEQ ID NO: 1509597 - DNA, 15 bp, Homo sapiens
aattttaatttcatt

SEQ ID NO: 1509598 - DNA, 15 bp, Homo sapiens
attttaatttcattg

SEQ ID NO: 1509599 - DNA, 15 bp, Homo sapiens
ttttaatttcattga

SEQ ID NO: 1509600 - DNA, 15 bp, Homo sapiens
tttaatttcattgat

SEQ ID NO: 1509601 - DNA, 15 bp, Homo sapiens
ttaatttcattgatt

SEQ ID NO: 1509602 - DNA, 15 bp, Homo sapiens
taatttcattgattt

SEQ ID NO: 1509603 - DNA, 15 bp, Homo sapiens
aatttcattgatttt

SEQ ID NO: 1509604 - DNA, 15 bp, Homo sapiens
atttcattgatttta

SEQ ID NO: 1509605 - DNA, 15 bp, Homo sapiens
tttcattgattttat

SEQ ID NO: 1509606 - DNA, 15 bp, Homo sapiens
ttcattgattttatt

SEQ ID NO: 1509607 - DNA, 15 bp, Homo sapiens
tcattgattttattg

SEQ ID NO: 1509608 - DNA, 15 bp, Homo sapiens
cattgattttattga

SEQ ID NO: 1509609 - DNA, 15 bp, Homo sapiens
attgattttattgat

SEQ ID NO: 1509610 - DNA, 15 bp, Homo sapiens
ttgattttattgatc

SEQ ID NO: 1509611 - DNA, 15 bp, Homo sapiens
tgattttattgatcc

SEQ ID NO: 1509612 - DNA, 15 bp, Homo sapiens
gattttattgatcca

SEQ ID NO: 1509613 - DNA, 15 bp, Homo sapiens
attttattgatccat

SEQ ID NO: 1509614 - DNA, 15 bp, Homo sapiens
ttttattgatccata

SEQ ID NO: 1509615 - DNA, 15 bp, Homo sapiens
tttattgatccataa

SEQ ID NO: 1509616 - DNA, 15 bp, Homo sapiens
ttattgatccataat

SEQ ID NO: 1509617 - DNA, 15 bp, Homo sapiens
tattgatccataatt

SEQ ID NO: 1509618 - DNA, 15 bp, Homo sapiens
attgatccataattt

SEQ ID NO: 1509619 - DNA, 15 bp, Homo sapiens
ttgatccataatttc

SEQ ID NO: 1509620 - DNA, 15 bp, Homo sapiens
tgatccataatttct

SEQ ID NO: 1509621 - DNA, 15 bp, Homo sapiens
gatccataatttctt

SEQ ID NO: 1509622 - DNA, 15 bp, Homo sapiens
atccataatttcttc

SEQ ID NO: 1509623 - DNA, 15 bp, Homo sapiens
tccataatttcttct

SEQ ID NO: 1509624 - DNA, 15 bp, Homo sapiens
ccataatttcttctg

SEQ ID NO: 1509625 - DNA, 15 bp, Homo sapiens
cataatttcttctgg

SEQ ID NO: 1509626 - DNA, 15 bp, Homo sapiens
ataatttcttctggt

SEQ ID NO: 1509627 - DNA, 15 bp, Homo sapiens
taatttcttctggtg

SEQ ID NO: 1509628 - DNA, 15 bp, Homo sapiens
aatttcttctggtga

SEQ ID NO: 1509629 - DNA, 15 bp, Homo sapiens
atttcttctggtgag

SEQ ID NO: 1509630 - DNA, 15 bp, Homo sapiens
tttcttctggtgagt

SEQ ID NO: 1509631 - DNA, 15 bp, Homo sapiens
ttcttctggtgagtt

SEQ ID NO: 1509632 - DNA, 15 bp, Homo sapiens
tcttctggtgagttt

SEQ ID NO: 1509633 - DNA, 15 bp, Homo sapiens
cttctggtgagtttg

SEQ ID NO: 1509634 - DNA, 15 bp, Homo sapiens
ttctggtgagtttgc

SEQ ID NO: 1509635 - DNA, 15 bp, Homo sapiens
tctggtgagtttgcg

SEQ ID NO: 1509636 - DNA, 15 bp, Homo sapiens
ctggtgagtttgcgt

SEQ ID NO: 1509637 - DNA, 15 bp, Homo sapiens
tggtgagtttgcgta

SEQ ID NO: 1509638 - DNA, 15 bp, Homo sapiens
ggtgagtttgcgtag

SEQ ID NO: 1509639 - DNA, 15 bp, Homo sapiens
gtgagtttgcgtaga

SEQ ID NO: 1509640 - DNA, 15 bp, Homo sapiens
tgagtttgcgtagaa

SEQ ID NO: 1509641 - DNA, 15 bp, Homo sapiens
gagtttgcgtagaat

SEQ ID NO: 1509642 - DNA, 15 bp, Homo sapiens
agtttgcgtagaatc

SEQ ID NO: 1509643 - DNA, 15 bp, Homo sapiens
gtttgcgtagaatcg

SEQ ID NO: 1509644 - DNA, 15 bp, Homo sapiens
tttgcgtagaatcgt

SEQ ID NO: 1509645 - DNA, 15 bp, Homo sapiens
ttgcgtagaatcgtt

SEQ ID NO: 1509646 - DNA, 15 bp, Homo sapiens
tgcgtagaatcgttc

SEQ ID NO: 1509647 - DNA, 15 bp, Homo sapiens
gcgtagaatcgttca

SEQ ID NO: 1509648 - DNA, 15 bp, Homo sapiens
cgtagaatcgttcac

SEQ ID NO: 1509649 - DNA, 15 bp, Homo sapiens
gtagaatcgttcacg

SEQ ID NO: 1509650 - DNA, 15 bp, Homo sapiens
tagaatcgttcacgg

SEQ ID NO: 1509651 - DNA, 15 bp, Homo sapiens
agaatcgttcacggt

SEQ ID NO: 1509652 - DNA, 15 bp, Homo sapiens
gaatcgttcacggtc

SEQ ID NO: 1509653 - DNA, 15 bp, Homo sapiens
aatcgttcacggtcc

SEQ ID NO: 1509654 - DNA, 15 bp, Homo sapiens
atcgttcacggtcct

SEQ ID NO: 1509655 - DNA, 15 bp, Homo sapiens
tcgttcacggtccta

SEQ ID NO: 1509656 - DNA, 15 bp, Homo sapiens
cgttcacggtcctag

SEQ ID NO: 1509657 - DNA, 15 bp, Homo sapiens
gttcacggtcctaga

SEQ ID NO: 1509658 - DNA, 15 bp, Homo sapiens
ttcacggtcctagat

SEQ ID NO: 1509659 - DNA, 15 bp, Homo sapiens
tcacggtcctagatt

SEQ ID NO: 1509660 - DNA, 15 bp, Homo sapiens
cacggtcctagatta

SEQ ID NO: 1509661 - DNA, 15 bp, Homo sapiens
acggtcctagattag

SEQ ID NO: 1509662 - DNA, 15 bp, Homo sapiens
cggtcctagattagt

SEQ ID NO: 1509663 - DNA, 15 bp, Homo sapiens
ggtcctagattagtg

SEQ ID NO: 1509664 - DNA, 15 bp, Homo sapiens
gtcctagattagtgg

SEQ ID NO: 1509665 - DNA, 15 bp, Homo sapiens
tcctagattagtggt

SEQ ID NO: 1509666 - DNA, 15 bp, Homo sapiens
cctagattagtggtt

SEQ ID NO: 1509667 - DNA, 15 bp, Homo sapiens
ctagattagtggttt

SEQ ID NO: 1509668 - DNA, 15 bp, Homo sapiens
tagattagtggtttt

SEQ ID NO: 1509669 - DNA, 15 bp, Homo sapiens
agattagtggttttg

SEQ ID NO: 1509670 - DNA, 15 bp, Homo sapiens
gattagtggttttgg

SEQ ID NO: 1509671 - DNA, 15 bp, Homo sapiens
attagtggttttggt

SEQ ID NO: 1509672 - DNA, 15 bp, Homo sapiens
ttagtggttttggtc

SEQ ID NO: 1509673 - DNA, 15 bp, Homo sapiens
tagtggttttggtca

SEQ ID NO: 1509674 - DNA, 15 bp, Homo sapiens
agtggttttggtcac

SEQ ID NO: 1509675 - DNA, 15 bp, Homo sapiens
gtggttttggtcact

SEQ ID NO: 1509676 - DNA, 15 bp, Homo sapiens
tggttttggtcacta

SEQ ID NO: 1509677 - DNA, 15 bp, Homo sapiens
ggttttggtcactag

SEQ ID NO: 1509678 - DNA, 15 bp, Homo sapiens
gttttggtcactaga

SEQ ID NO: 1509679 - DNA, 15 bp, Homo sapiens
ttttggtcactagat

SEQ ID NO: 1509680 - DNA, 15 bp, Homo sapiens
tttggtcactagatt

SEQ ID NO: 1509681 - DNA, 15 bp, Homo sapiens
ttggtcactagattt

SEQ ID NO: 1509682 - DNA, 15 bp, Homo sapiens
tggtcactagatttc

SEQ ID NO: 1509683 - DNA, 15 bp, Homo sapiens
ggtcactagatttct

SEQ ID NO: 1509684 - DNA, 15 bp, Homo sapiens
gtcactagatttctg

SEQ ID NO: 1509685 - DNA, 15 bp, Homo sapiens
tcactagatttctgg

SEQ ID NO: 1509686 - DNA, 15 bp, Homo sapiens
cactagatttctggc

SEQ ID NO: 1509687 - DNA, 15 bp, Homo sapiens
actagatttctggca

SEQ ID NO: 1509688 - DNA, 15 bp, Homo sapiens
ctagatttctggcac

SEQ ID NO: 1509689 - DNA, 15 bp, Homo sapiens
tagatttctggcact

SEQ ID NO: 1509690 - DNA, 15 bp, Homo sapiens
agatttctggcacta

SEQ ID NO: 1509691 - DNA, 15 bp, Homo sapiens
gatttctggcactaa

SEQ ID NO: 1509692 - DNA, 15 bp, Homo sapiens
atttctggcactaat

SEQ ID NO: 1509693 - DNA, 15 bp, Homo sapiens
tttctggcactaata

SEQ ID NO: 1509694 - DNA, 15 bp, Homo sapiens
ttctggcactaataa

SEQ ID NO: 1509695 - DNA, 15 bp, Homo sapiens
tctggcactaataac

SEQ ID NO: 1509696 - DNA, 15 bp, Homo sapiens
ctggcactaataact

SEQ ID NO: 1509697 - DNA, 15 bp, Homo sapiens
tggcactaataacta

SEQ ID NO: 1509698 - DNA, 15 bp, Homo sapiens
ggcactaataactat

SEQ ID NO: 1509699 - DNA, 15 bp, Homo sapiens
gcactaataactata

SEQ ID NO: 1509700 - DNA, 15 bp, Homo sapiens
cactaataactataa

SEQ ID NO: 1509701 - DNA, 15 bp, Homo sapiens
actaataactataat

SEQ ID NO: 1509702 - DNA, 15 bp, Homo sapiens
ctaataactataata

SEQ ID NO: 1509703 - DNA, 15 bp, Homo sapiens
taataactataatac

SEQ ID NO: 1509704 - DNA, 15 bp, Homo sapiens
aataactataataca

SEQ ID NO: 1509705 - DNA, 15 bp, Homo sapiens
ataactataatacat

SEQ ID NO: 1509706 - DNA, 15 bp, Homo sapiens
taactataatacata

SEQ ID NO: 1509707 - DNA, 15 bp, Homo sapiens
aactataatacatat

SEQ ID NO: 1509708 - DNA, 15 bp, Homo sapiens
actataatacatata

SEQ ID NO: 1509709 - DNA, 15 bp, Homo sapiens
ctataatacatatac

SEQ ID NO: 1509710 - DNA, 15 bp, Homo sapiens
tataatacatataca

SEQ ID NO: 1509711 - DNA, 15 bp, Homo sapiens
ataatacatatacat

SEQ ID NO: 1509712 - DNA, 15 bp, Homo sapiens
taatacatatacata

SEQ ID NO: 1509713 - DNA, 15 bp, Homo sapiens
aatacatatacatat

SEQ ID NO: 1509714 - DNA, 15 bp, Homo sapiens
atacatatacatata

SEQ ID NO: 1509715 - DNA, 15 bp, Homo sapiens
tacatatacatatat

SEQ ID NO: 1509716 - DNA, 15 bp, Homo sapiens
catatatatgtgtga

SEQ ID NO: 1509717 - DNA, 15 bp, Homo sapiens
atatatatgtgtgag

SEQ ID NO: 1509718 - DNA, 15 bp, Homo sapiens
tatatatgtgtgagt

SEQ ID NO: 1509719 - DNA, 15 bp, Homo sapiens
atatatgtgtgagta

SEQ ID NO: 1509720 - DNA, 15 bp, Homo sapiens
tatatgtgtgagtaa

SEQ ID NO: 1509721 - DNA, 15 bp, Homo sapiens
atatgtgtgagtaac

SEQ ID NO: 1509722 - DNA, 15 bp, Homo sapiens
tatgtgtgagtaacg

SEQ ID NO: 1509723 - DNA, 15 bp, Homo sapiens
atgtgtgagtaacgg

SEQ ID NO: 1509724 - DNA, 15 bp, Homo sapiens
tgtgtgagtaacggc

SEQ ID NO: 1509725 - DNA, 15 bp, Homo sapiens
gtgtgagtaacggct

SEQ ID NO: 1509726 - DNA, 15 bp, Homo sapiens
tgtgagtaacggcta

SEQ ID NO: 1509727 - DNA, 15 bp, Homo sapiens
gtgagtaacggctaa

SEQ ID NO: 1509728 - DNA, 15 bp, Homo sapiens
tgagtaacggctaat

SEQ ID NO: 1509729 - DNA, 15 bp, Homo sapiens
gagtaacggctaatg

SEQ ID NO: 1509730 - DNA, 15 bp, Homo sapiens
agtaacggctaatgg

SEQ ID NO: 1509731 - DNA, 15 bp, Homo sapiens
gtaacggctaatggt

SEQ ID NO: 1509732 - DNA, 15 bp, Homo sapiens
taacggctaatggtt

SEQ ID NO: 1509733 - DNA, 15 bp, Homo sapiens
aacggctaatggtta

SEQ ID NO: 1509734 - DNA, 15 bp, Homo sapiens
acggctaatggttag

SEQ ID NO: 1509735 - DNA, 15 bp, Homo sapiens
cggctaatggttagg

SEQ ID NO: 1509736 - DNA, 15 bp, Homo sapiens
ggctaatggttaggc

SEQ ID NO: 1509737 - DNA, 15 bp, Homo sapiens
gctaatggttaggca

SEQ ID NO: 1509738 - DNA, 15 bp, Homo sapiens
ctaatggttaggcaa

SEQ ID NO: 1509739 - DNA, 15 bp, Homo sapiens
taatggttaggcaag

SEQ ID NO: 1509740 - DNA, 15 bp, Homo sapiens
aatggttaggcaaga

SEQ ID NO: 1509741 - DNA, 15 bp, Homo sapiens
atggttaggcaagat

SEQ ID NO: 1509742 - DNA, 15 bp, Homo sapiens
tggttaggcaagatt

SEQ ID NO: 1509743 - DNA, 15 bp, Homo sapiens
ggttaggcaagattt

SEQ ID NO: 1509744 - DNA, 15 bp, Homo sapiens
gttaggcaagatttt

SEQ ID NO: 1509745 - DNA, 15 bp, Homo sapiens
ttaggcaagattttg

SEQ ID NO: 1509746 - DNA, 15 bp, Homo sapiens
taggcaagattttga

SEQ ID NO: 1509747 - DNA, 15 bp, Homo sapiens
aggcaagattttgat

SEQ ID NO: 1509748 - DNA, 15 bp, Homo sapiens
ggcaagattttgatt

SEQ ID NO: 1509749 - DNA, 15 bp, Homo sapiens
gcaagattttgattg

SEQ ID NO: 1509750 - DNA, 15 bp, Homo sapiens
caagattttgattga

SEQ ID NO: 1509751 - DNA, 15 bp, Homo sapiens
aagattttgattgac

SEQ ID NO: 1509752 - DNA, 15 bp, Homo sapiens
agattttgattgacc

SEQ ID NO: 1509753 - DNA, 15 bp, Homo sapiens
gattttgattgacct

SEQ ID NO: 1509754 - DNA, 15 bp, Homo sapiens
attttgattgacctg

SEQ ID NO: 1509755 - DNA, 15 bp, Homo sapiens
ttttgattgacctgt

SEQ ID NO: 1509756 - DNA, 15 bp, Homo sapiens
tttgattgacctgtg

SEQ ID NO: 1509757 - DNA, 15 bp, Homo sapiens
ttgattgacctgtga

SEQ ID NO: 1509758 - DNA, 15 bp, Homo sapiens
tgattgacctgtgat

SEQ ID NO: 1509759 - DNA, 15 bp, Homo sapiens
gattgacctgtgata

SEQ ID NO: 1509760 - DNA, 15 bp, Homo sapiens
attgacctgtgatat

SEQ ID NO: 1509761 - DNA, 15 bp, Homo sapiens
ttgacctgtgatata

SEQ ID NO: 1509762 - DNA, 15 bp, Homo sapiens
tgacctgtgatataa

SEQ ID NO: 1509763 - DNA, 15 bp, Homo sapiens
gacctgtgatataaa

SEQ ID NO: 1509764 - DNA, 15 bp, Homo sapiens
acctgtgatataaac

SEQ ID NO: 1509765 - DNA, 15 bp, Homo sapiens
cctgtgatataaact

SEQ ID NO: 1509766 - DNA, 15 bp, Homo sapiens
ctgtgatataaactt

SEQ ID NO: 1509767 - DNA, 15 bp, Homo sapiens
tgtgatataaactta

SEQ ID NO: 1509768 - DNA, 15 bp, Homo sapiens
gtgatataaacttag

SEQ ID NO: 1509769 - DNA, 15 bp, Homo sapiens
tgatataaacttaga

SEQ ID NO: 1509770 - DNA, 15 bp, Homo sapiens
gatataaacttagat

SEQ ID NO: 1509771 - DNA, 15 bp, Homo sapiens
atataaacttagatt

SEQ ID NO: 1509772 - DNA, 15 bp, Homo sapiens
tataaacttagattg

SEQ ID NO: 1509773 - DNA, 15 bp, Homo sapiens
ataaacttagattgg

SEQ ID NO: 1509774 - DNA, 15 bp, Homo sapiens
taaacttagattgga

SEQ ID NO: 1509775 - DNA, 15 bp, Homo sapiens
aaacttagattggat

SEQ ID NO: 1509776 - DNA, 15 bp, Homo sapiens
aacttagattggatg

SEQ ID NO: 1509777 - DNA, 15 bp, Homo sapiens
acttagattggatgc

SEQ ID NO: 1509778 - DNA, 15 bp, Homo sapiens
cttagattggatgcc

SEQ ID NO: 1509779 - DNA, 15 bp, Homo sapiens
ttagattggatgcca

SEQ ID NO: 1509780 - DNA, 15 bp, Homo sapiens
tagattggatgccac

SEQ ID NO: 1509781 - DNA, 15 bp, Homo sapiens
agattggatgccact

SEQ ID NO: 1509782 - DNA, 15 bp, Homo sapiens
gattggatgccacta

SEQ ID NO: 1509783 - DNA, 15 bp, Homo sapiens
attggatgccactaa

SEQ ID NO: 1509784 - DNA, 15 bp, Homo sapiens
ttggatgccactaaa

SEQ ID NO: 1509785 - DNA, 15 bp, Homo sapiens
tggatgccactaaag

SEQ ID NO: 1509786 - DNA, 15 bp, Homo sapiens
ggatgccactaaagt

SEQ ID NO: 1509787 - DNA, 15 bp, Homo sapiens
gatgccactaaagtt

SEQ ID NO: 1509788 - DNA, 15 bp, Homo sapiens
atgccactaaagttt

SEQ ID NO: 1509789 - DNA, 15 bp, Homo sapiens
tgccactaaagtttg

SEQ ID NO: 1509790 - DNA, 15 bp, Homo sapiens
gccactaaagtttgc

SEQ ID NO: 1509791 - DNA, 15 bp, Homo sapiens
ccactaaagtttgct

SEQ ID NO: 1509792 - DNA, 15 bp, Homo sapiens
cactaaagtttgctt

SEQ ID NO: 1509793 - DNA, 15 bp, Homo sapiens
actaaagtttgctta

SEQ ID NO: 1509794 - DNA, 15 bp, Homo sapiens
ctaaagtttgcttat

SEQ ID NO: 1509795 - DNA, 15 bp, Homo sapiens
taaagtttgcttatc

SEQ ID NO: 1509796 - DNA, 15 bp, Homo sapiens
aaagtttgcttatca

SEQ ID NO: 1509797 - DNA, 15 bp, Homo sapiens
aagtttgcttatcac

SEQ ID NO: 1509798 - DNA, 15 bp, Homo sapiens
agtttgcttatcaca

SEQ ID NO: 1509799 - DNA, 15 bp, Homo sapiens
gtttgcttatcacag

SEQ ID NO: 1509800 - DNA, 15 bp, Homo sapiens
tttgcttatcacaga

SEQ ID NO: 1509801 - DNA, 15 bp, Homo sapiens
ttgcttatcacagag

SEQ ID NO: 1509802 - DNA, 15 bp, Homo sapiens
tgcttatcacagagg

SEQ ID NO: 1509803 - DNA, 15 bp, Homo sapiens
gcttatcacagaggg

SEQ ID NO: 1509804 - DNA, 15 bp, Homo sapiens
cttatcacagagggc

SEQ ID NO: 1509805 - DNA, 15 bp, Homo sapiens
ttatcacagagggca

SEQ ID NO: 1509806 - DNA, 15 bp, Homo sapiens
tatcacagagggcaa

SEQ ID NO: 1509807 - DNA, 15 bp, Homo sapiens
atcacagagggcaag

SEQ ID NO: 1509808 - DNA, 15 bp, Homo sapiens
tcacagagggcaagt

SEQ ID NO: 1509809 - DNA, 15 bp, Homo sapiens
cacagagggcaagta

SEQ ID NO: 1509810 - DNA, 15 bp, Homo sapiens
acagagggcaagtag

SEQ ID NO: 1509811 - DNA, 15 bp, Homo sapiens
cagagggcaagtagc

SEQ ID NO: 1509812 - DNA, 15 bp, Homo sapiens
agagggcaagtagca

SEQ ID NO: 1509813 - DNA, 15 bp, Homo sapiens
gagggcaagtagcac

SEQ ID NO: 1509814 - DNA, 15 bp, Homo sapiens
agggcaagtagcaca

SEQ ID NO: 1509815 - DNA, 15 bp, Homo sapiens
gggcaagtagcacat

SEQ ID NO: 1509816 - DNA, 15 bp, Homo sapiens
ggcaagtagcacatt

SEQ ID NO: 1509817 - DNA, 15 bp, Homo sapiens
gcaagtagcacatta

SEQ ID NO: 1509818 - DNA, 15 bp, Homo sapiens
caagtagcacattat

SEQ ID NO: 1509819 - DNA, 15 bp, Homo sapiens
aagtagcacattatg

SEQ ID NO: 1509820 - DNA, 15 bp, Homo sapiens
agtagcacattatgg

SEQ ID NO: 1509821 - DNA, 15 bp, Homo sapiens
gtagcacattatggc

SEQ ID NO: 1509822 - DNA, 15 bp, Homo sapiens
tagcacattatggcc

SEQ ID NO: 1509823 - DNA, 15 bp, Homo sapiens
agcacattatggcct

SEQ ID NO: 1509824 - DNA, 15 bp, Homo sapiens
gcacattatggcctt

SEQ ID NO: 1509825 - DNA, 15 bp, Homo sapiens
cacattatggccttg

SEQ ID NO: 1509826 - DNA, 15 bp, Homo sapiens
acattatggccttga

SEQ ID NO: 1509827 - DNA, 15 bp, Homo sapiens
cattatggccttgaa

SEQ ID NO: 1509828 - DNA, 15 bp, Homo sapiens
attatggccttgaag

SEQ ID NO: 1509829 - DNA, 15 bp, Homo sapiens
ttatggccttgaagt

SEQ ID NO: 1509830 - DNA, 15 bp, Homo sapiens
tatggccttgaagta

SEQ ID NO: 1509831 - DNA, 15 bp, Homo sapiens
atggccttgaagtac

SEQ ID NO: 1509832 - DNA, 15 bp, Homo sapiens
tggccttgaagtact

SEQ ID NO: 1509833 - DNA, 15 bp, Homo sapiens
ggccttgaagtactt

SEQ ID NO: 1509834 - DNA, 15 bp, Homo sapiens
gccttgaagtactta

SEQ ID NO: 1509835 - DNA, 15 bp, Homo sapiens
ccttgaagtacttat

SEQ ID NO: 1509836 - DNA, 15 bp, Homo sapiens
cttgaagtacttatt

SEQ ID NO: 1509837 - DNA, 15 bp, Homo sapiens
ttgaagtacttattg

SEQ ID NO: 1509838 - DNA, 15 bp, Homo sapiens
tgaagtacttattgt

SEQ ID NO: 1509839 - DNA, 15 bp, Homo sapiens
gaagtacttattgtt

SEQ ID NO: 1509840 - DNA, 15 bp, Homo sapiens
aagtacttattgttc

SEQ ID NO: 1509841 - DNA, 15 bp, Homo sapiens
agtacttattgttct

SEQ ID NO: 1509842 - DNA, 15 bp, Homo sapiens
gtacttattgttctc

SEQ ID NO: 1509843 - DNA, 15 bp, Homo sapiens
tacttattgttctct

SEQ ID NO: 1509844 - DNA, 15 bp, Homo sapiens
acttattgttctctt

SEQ ID NO: 1509845 - DNA, 15 bp, Homo sapiens
cttattgttctcttc

SEQ ID NO: 1509846 - DNA, 15 bp, Homo sapiens
ttattgttctcttcc

SEQ ID NO: 1509847 - DNA, 15 bp, Homo sapiens
tattgttctcttcca

SEQ ID NO: 1509848 - DNA, 15 bp, Homo sapiens
attgttctcttccag

SEQ ID NO: 1509849 - DNA, 15 bp, Homo sapiens
ttgttctcttccagc

SEQ ID NO: 1509850 - DNA, 15 bp, Homo sapiens
tgttctcttccagca

SEQ ID NO: 1509851 - DNA, 15 bp, Homo sapiens
gttctcttccagcaa

SEQ ID NO: 1509852 - DNA, 15 bp, Homo sapiens
ttctcttccagcaac

SEQ ID NO: 1509853 - DNA, 15 bp, Homo sapiens
tctcttccagcaact

SEQ ID NO: 1509854 - DNA, 15 bp, Homo sapiens
ctcttccagcaactt

SEQ ID NO: 1509855 - DNA, 15 bp, Homo sapiens
tcttccagcaactta

SEQ ID NO: 1509856 - DNA, 15 bp, Homo sapiens
cttccagcaacttat

SEQ ID NO: 1509857 - DNA, 15 bp, Homo sapiens
ttccagcaacttatg

SEQ ID NO: 1509858 - DNA, 15 bp, Homo sapiens
tccagcaacttatga

SEQ ID NO: 1509859 - DNA, 15 bp, Homo sapiens
ccagcaacttatgat

SEQ ID NO: 1509860 - DNA, 15 bp, Homo sapiens
cagcaacttatgatt

SEQ ID NO: 1509861 - DNA, 15 bp, Homo sapiens
agcaacttatgattt

SEQ ID NO: 1509862 - DNA, 15 bp, Homo sapiens
gcaacttatgatttg

SEQ ID NO: 1509863 - DNA, 15 bp, Homo sapiens
caacttatgatttgc

SEQ ID NO: 1509864 - DNA, 15 bp, Homo sapiens
aacttatgatttgct

SEQ ID NO: 1509865 - DNA, 15 bp, Homo sapiens
acttatgatttgctc

SEQ ID NO: 1509866 - DNA, 15 bp, Homo sapiens
cttatgatttgctcc

SEQ ID NO: 1509867 - DNA, 15 bp, Homo sapiens
ttatgatttgctcca

SEQ ID NO: 1509868 - DNA, 15 bp, Homo sapiens
tatgatttgctccag

SEQ ID NO: 1509869 - DNA, 15 bp, Homo sapiens
atgatttgctccagt

SEQ ID NO: 1509870 - DNA, 15 bp, Homo sapiens
tgatttgctccagtg

SEQ ID NO: 1509871 - DNA, 15 bp, Homo sapiens
gatttgctccagtga

SEQ ID NO: 1509872 - DNA, 15 bp, Homo sapiens
atttgctccagtgat

SEQ ID NO: 1509873 - DNA, 15 bp, Homo sapiens
tttgctccagtgatt

SEQ ID NO: 1509874 - DNA, 15 bp, Homo sapiens
ttgctccagtgattt

SEQ ID NO: 1509875 - DNA, 15 bp, Homo sapiens
tgctccagtgatttt

SEQ ID NO: 1509876 - DNA, 15 bp, Homo sapiens
gctccagtgattttg

SEQ ID NO: 1509877 - DNA, 15 bp, Homo sapiens
ctccagtgattttgc

SEQ ID NO: 1509878 - DNA, 15 bp, Homo sapiens
tccagtgattttgct

SEQ ID NO: 1509879 - DNA, 15 bp, Homo sapiens
ccagtgattttgctt

SEQ ID NO: 1509880 - DNA, 15 bp, Homo sapiens
cagtgattttgcttg

SEQ ID NO: 1509881 - DNA, 15 bp, Homo sapiens
agtgattttgcttgc

SEQ ID NO: 1509882 - DNA, 15 bp, Homo sapiens
gtgattttgcttgca

SEQ ID NO: 1509883 - DNA, 15 bp, Homo sapiens
tgattttgcttgcac

SEQ ID NO: 1509884 - DNA, 15 bp, Homo sapiens
gattttgcttgcaca

SEQ ID NO: 1509885 - DNA, 15 bp, Homo sapiens
attttgcttgcacac

SEQ ID NO: 1509886 - DNA, 15 bp, Homo sapiens
ttttgcttgcacact

SEQ ID NO: 1509887 - DNA, 15 bp, Homo sapiens
tttgcttgcacactg

SEQ ID NO: 1509888 - DNA, 15 bp, Homo sapiens
ttgcttgcacactga

SEQ ID NO: 1509889 - DNA, 15 bp, Homo sapiens
tgcttgcacactgac

SEQ ID NO: 1509890 - DNA, 15 bp, Homo sapiens
gcttgcacactgact

SEQ ID NO: 1509891 - DNA, 15 bp, Homo sapiens
cttgcacactgactg

SEQ ID NO: 1509892 - DNA, 15 bp, Homo sapiens
ttgcacactgactgg

SEQ ID NO: 1509893 - DNA, 15 bp, Homo sapiens
tgcacactgactgga

SEQ ID NO: 1509894 - DNA, 15 bp, Homo sapiens
gcacactgactggaa

SEQ ID NO: 1509895 - DNA, 15 bp, Homo sapiens
cacactgactggaat

SEQ ID NO: 1509896 - DNA, 15 bp, Homo sapiens
acactgactggaata

SEQ ID NO: 1509897 - DNA, 15 bp, Homo sapiens
cactgactggaatat

SEQ ID NO: 1509898 - DNA, 15 bp, Homo sapiens
actgactggaatata

SEQ ID NO: 1509899 - DNA, 15 bp, Homo sapiens
ctgactggaatataa

SEQ ID NO: 1509900 - DNA, 15 bp, Homo sapiens
tgactggaatataag

SEQ ID NO: 1509901 - DNA, 15 bp, Homo sapiens
gactggaatataaga

SEQ ID NO: 1509902 - DNA, 15 bp, Homo sapiens
actggaatataagaa

SEQ ID NO: 1509903 - DNA, 15 bp, Homo sapiens
ctggaatataagaaa

SEQ ID NO: 1509904 - DNA, 15 bp, Homo sapiens
tggaatataagaaat

SEQ ID NO: 1509905 - DNA, 15 bp, Homo sapiens
ggaatataagaaatg

SEQ ID NO: 1509906 - DNA, 15 bp, Homo sapiens
gaatataagaaatgc

SEQ ID NO: 1509907 - DNA, 15 bp, Homo sapiens
aatataagaaatgcc

SEQ ID NO: 1509908 - DNA, 15 bp, Homo sapiens
atataagaaatgcct

SEQ ID NO: 1509909 - DNA, 15 bp, Homo sapiens
tataagaaatgcctt

SEQ ID NO: 1509910 - DNA, 15 bp, Homo sapiens
ataagaaatgccttc

SEQ ID NO: 1509911 - DNA, 15 bp, Homo sapiens
taagaaatgccttct

SEQ ID NO: 1509912 - DNA, 15 bp, Homo sapiens
aagaaatgccttcta

SEQ ID NO: 1509913 - DNA, 15 bp, Homo sapiens
agaaatgccttctat

SEQ ID NO: 1509914 - DNA, 15 bp, Homo sapiens
gaaatgccttctatt

SEQ ID NO: 1509915 - DNA, 15 bp, Homo sapiens
aaatgccttctattt

SEQ ID NO: 1509916 - DNA, 15 bp, Homo sapiens
aatgccttctatttt

SEQ ID NO: 1509917 - DNA, 15 bp, Homo sapiens
atgccttctattttt

SEQ ID NO: 1509918 - DNA, 15 bp, Homo sapiens
tgccttctatttttg

SEQ ID NO: 1509919 - DNA, 15 bp, Homo sapiens
gccttctatttttgc

SEQ ID NO: 1509920 - DNA, 15 bp, Homo sapiens
ccttctatttttgct

SEQ ID NO: 1509921 - DNA, 15 bp, Homo sapiens
cttctatttttgcta

SEQ ID NO: 1509922 - DNA, 15 bp, Homo sapiens
ttctatttttgctat

SEQ ID NO: 1509923 - DNA, 15 bp, Homo sapiens
tctatttttgctatt

SEQ ID NO: 1509924 - DNA, 15 bp, Homo sapiens
ctatttttgctatta

SEQ ID NO: 1509925 - DNA, 15 bp, Homo sapiens
tatttttgctattaa

SEQ ID NO: 1509926 - DNA, 15 bp, Homo sapiens
atttttgctattaat

SEQ ID NO: 1509927 - DNA, 15 bp, Homo sapiens
tttttgctattaatt

SEQ ID NO: 1509928 - DNA, 15 bp, Homo sapiens
ttttgctattaattc

SEQ ID NO: 1509929 - DNA, 15 bp, Homo sapiens
tttgctattaattcc

SEQ ID NO: 1509930 - DNA, 15 bp, Homo sapiens
ttgctattaattccc

SEQ ID NO: 1509931 - DNA, 15 bp, Homo sapiens
tgctattaattccct

SEQ ID NO: 1509932 - DNA, 15 bp, Homo sapiens
gctattaattccctc

SEQ ID NO: 1509933 - DNA, 15 bp, Homo sapiens
ctattaattccctcc

SEQ ID NO: 1509934 - DNA, 15 bp, Homo sapiens
tattaattccctcct

SEQ ID NO: 1509935 - DNA, 15 bp, Homo sapiens
attaattccctcctt

SEQ ID NO: 1509936 - DNA, 15 bp, Homo sapiens
ttaattccctccttt

SEQ ID NO: 1509937 - DNA, 15 bp, Homo sapiens
taattccctcctttt

SEQ ID NO: 1509938 - DNA, 15 bp, Homo sapiens
aattccctccttttt

SEQ ID NO: 1509939 - DNA, 15 bp, Homo sapiens
attccctcctttttt

SEQ ID NO: 1509940 - DNA, 15 bp, Homo sapiens
ttccctccttttttg

SEQ ID NO: 1509941 - DNA, 15 bp, Homo sapiens
tccctccttttttgt

SEQ ID NO: 1509942 - DNA, 15 bp, Homo sapiens
ccctccttttttgtt

SEQ ID NO: 1509943 - DNA, 15 bp, Homo sapiens
cctccttttttgttt

SEQ ID NO: 1509944 - DNA, 15 bp, Homo sapiens
ctccttttttgtttt

SEQ ID NO: 1509945 - DNA, 15 bp, Homo sapiens
tccttttttgttttg

SEQ ID NO: 1509946 - DNA, 15 bp, Homo sapiens
ccttttttgttttgt

SEQ ID NO: 1509947 - DNA, 15 bp, Homo sapiens
ttgttttgttttgta

SEQ ID NO: 1509948 - DNA, 15 bp, Homo sapiens
tgttttgttttgtaa

SEQ ID NO: 1509949 - DNA, 15 bp, Homo sapiens
gttttgttttgtaac

SEQ ID NO: 1509950 - DNA, 15 bp, Homo sapiens
ttttgttttgtaacg

SEQ ID NO: 1509951 - DNA, 15 bp, Homo sapiens
tttgttttgtaacga

SEQ ID NO: 1509952 - DNA, 15 bp, Homo sapiens
ttgttttgtaacgaa

SEQ ID NO: 1509953 - DNA, 15 bp, Homo sapiens
tgttttgtaacgaag

SEQ ID NO: 1509954 - DNA, 15 bp, Homo sapiens
gttttgtaacgaagt

SEQ ID NO: 1509955 - DNA, 15 bp, Homo sapiens
ttttgtaacgaagtt

SEQ ID NO: 1509956 - DNA, 15 bp, Homo sapiens
tttgtaacgaagttg

SEQ ID NO: 1509957 - DNA, 15 bp, Homo sapiens
ttgtaacgaagttgt

SEQ ID NO: 1509958 - DNA, 15 bp, Homo sapiens
tgtaacgaagttgtt

SEQ ID NO: 1509959 - DNA, 15 bp, Homo sapiens
gtaacgaagttgttt

SEQ ID NO: 1509960 - DNA, 15 bp, Homo sapiens
taacgaagttgttta

SEQ ID NO: 1509961 - DNA, 15 bp, Homo sapiens
aacgaagttgtttaa

SEQ ID NO: 1509962 - DNA, 15 bp, Homo sapiens
acgaagttgtttaac

SEQ ID NO: 1509963 - DNA, 15 bp, Homo sapiens
cgaagttgtttaact

SEQ ID NO: 1509964 - DNA, 15 bp, Homo sapiens
gaagttgtttaactt

SEQ ID NO: 1509965 - DNA, 15 bp, Homo sapiens
aagttgtttaacttg

SEQ ID NO: 1509966 - DNA, 15 bp, Homo sapiens
agttgtttaacttga

SEQ ID NO: 1509967 - DNA, 15 bp, Homo sapiens
gttgtttaacttgaa

SEQ ID NO: 1509968 - DNA, 15 bp, Homo sapiens
ttgtttaacttgaag

SEQ ID NO: 1509969 - DNA, 15 bp, Homo sapiens
tgtttaacttgaagg

SEQ ID NO: 1509970 - DNA, 15 bp, Homo sapiens
gtttaacttgaaggt

SEQ ID NO: 1509971 - DNA, 15 bp, Homo sapiens
tttaacttgaaggtg

SEQ ID NO: 1509972 - DNA, 15 bp, Homo sapiens
ttaacttgaaggtga

SEQ ID NO: 1509973 - DNA, 15 bp, Homo sapiens
taacttgaaggtgaa

SEQ ID NO: 1509974 - DNA, 15 bp, Homo sapiens
aacttgaaggtgaat

SEQ ID NO: 1509975 - DNA, 15 bp, Homo sapiens
acttgaaggtgaatg

SEQ ID NO: 1509976 - DNA, 15 bp, Homo sapiens
cttgaaggtgaatga

SEQ ID NO: 1509977 - DNA, 15 bp, Homo sapiens
ttgaaggtgaatgaa

SEQ ID NO: 1509978 - DNA, 15 bp, Homo sapiens
tgaaggtgaatgaag

SEQ ID NO: 1509979 - DNA, 15 bp, Homo sapiens
gaaggtgaatgaaga

SEQ ID NO: 1509980 - DNA, 15 bp, Homo sapiens
aaggtgaatgaagaa

SEQ ID NO: 1509981 - DNA, 15 bp, Homo sapiens
aggtgaatgaagaat

SEQ ID NO: 1509982 - DNA, 15 bp, Homo sapiens
ggtgaatgaagaata

SEQ ID NO: 1509983 - DNA, 15 bp, Homo sapiens
gtgaatgaagaatag

SEQ ID NO: 1509984 - DNA, 15 bp, Homo sapiens
tgaatgaagaatagg

SEQ ID NO: 1509985 - DNA, 15 bp, Homo sapiens
gaatgaagaataggt

SEQ ID NO: 1509986 - DNA, 15 bp, Homo sapiens
aatgaagaataggtt

SEQ ID NO: 1509987 - DNA, 15 bp, Homo sapiens
atgaagaataggttg

SEQ ID NO: 1509988 - DNA, 15 bp, Homo sapiens
tgaagaataggttgg

SEQ ID NO: 1509989 - DNA, 15 bp, Homo sapiens
gaagaataggttggt

SEQ ID NO: 1509990 - DNA, 15 bp, Homo sapiens
aagaataggttggtt

SEQ ID NO: 1509991 - DNA, 15 bp, Homo sapiens
agaataggttggttg

SEQ ID NO: 1509992 - DNA, 15 bp, Homo sapiens
gaataggttggttgc

SEQ ID NO: 1509993 - DNA, 15 bp, Homo sapiens
aataggttggttgcc

SEQ ID NO: 1509994 - DNA, 15 bp, Homo sapiens
ataggttggttgccc

SEQ ID NO: 1509995 - DNA, 15 bp, Homo sapiens
taggttggttgcccc

SEQ ID NO: 1509996 - DNA, 15 bp, Homo sapiens
aggttggttgcccct

SEQ ID NO: 1509997 - DNA, 15 bp, Homo sapiens
ggttggttgcccctt

SEQ ID NO: 1509998 - DNA, 15 bp, Homo sapiens
gttggttgcccctta

SEQ ID NO: 1509999 - DNA, 15 bp, Homo sapiens
ttggttgccccttag

SEQ ID NO: 1510000 - DNA, 15 bp, Homo sapiens
tggttgccccttagt

SEQ ID NO: 1510001 - DNA, 15 bp, Homo sapiens
ggttgccccttagtt

SEQ ID NO: 1510002 - DNA, 15 bp, Homo sapiens
gttgccccttagttc

SEQ ID NO: 1510003 - DNA, 15 bp, Homo sapiens
ttgccccttagttcc

SEQ ID NO: 1510004 - DNA, 15 bp, Homo sapiens
tgccccttagttccc

SEQ ID NO: 1510005 - DNA, 15 bp, Homo sapiens
gccccttagttccct

SEQ ID NO: 1510006 - DNA, 15 bp, Homo sapiens
ccccttagttccctg

SEQ ID NO: 1510007 - DNA, 15 bp, Homo sapiens
cccttagttccctga

SEQ ID NO: 1510008 - DNA, 15 bp, Homo sapiens
ccttagttccctgag

SEQ ID NO: 1510009 - DNA, 15 bp, Homo sapiens
cttagttccctgagg

SEQ ID NO: 1510010 - DNA, 15 bp, Homo sapiens
ttagttccctgagga

SEQ ID NO: 1510011 - DNA, 15 bp, Homo sapiens
tagttccctgaggag

SEQ ID NO: 1510012 - DNA, 15 bp, Homo sapiens
agttccctgaggaga

SEQ ID NO: 1510013 - DNA, 15 bp, Homo sapiens
gttccctgaggagaa

SEQ ID NO: 1510014 - DNA, 15 bp, Homo sapiens
ttccctgaggagaaa

SEQ ID NO: 1510015 - DNA, 15 bp, Homo sapiens
tccctgaggagaaat

SEQ ID NO: 1510016 - DNA, 15 bp, Homo sapiens
ccctgaggagaaatg

SEQ ID NO: 1510017 - DNA, 15 bp, Homo sapiens
cctgaggagaaatgt

SEQ ID NO: 1510018 - DNA, 15 bp, Homo sapiens
ctgaggagaaatgtt

SEQ ID NO: 1510019 - DNA, 15 bp, Homo sapiens
tgaggagaaatgtta

SEQ ID NO: 1510020 - DNA, 15 bp, Homo sapiens
gaggagaaatgttaa

SEQ ID NO: 1510021 - DNA, 15 bp, Homo sapiens
aggagaaatgttaat

SEQ ID NO: 1510022 - DNA, 15 bp, Homo sapiens
ggagaaatgttaata

SEQ ID NO: 1510023 - DNA, 15 bp, Homo sapiens
gagaaatgttaatac

SEQ ID NO: 1510024 - DNA, 15 bp, Homo sapiens
agaaatgttaatact

SEQ ID NO: 1510025 - DNA, 15 bp, Homo sapiens
gaaatgttaatactt

SEQ ID NO: 1510026 - DNA, 15 bp, Homo sapiens
aaatgttaatacttg

SEQ ID NO: 1510027 - DNA, 15 bp, Homo sapiens
aatgttaatacttga

SEQ ID NO: 1510028 - DNA, 15 bp, Homo sapiens
atgttaatacttgaa

SEQ ID NO: 1510029 - DNA, 15 bp, Homo sapiens
tgttaatacttgaac

SEQ ID NO: 1510030 - DNA, 15 bp, Homo sapiens
gttaatacttgaaca

SEQ ID NO: 1510031 - DNA, 15 bp, Homo sapiens
ttaatacttgaacaa

SEQ ID NO: 1510032 - DNA, 15 bp, Homo sapiens
taatacttgaacaag

SEQ ID NO: 1510033 - DNA, 15 bp, Homo sapiens
aatacttgaacaagt

SEQ ID NO: 1510034 - DNA, 15 bp, Homo sapiens
atacttgaacaagtg

SEQ ID NO: 1510035 - DNA, 15 bp, Homo sapiens
tacttgaacaagtgt

SEQ ID NO: 1510036 - DNA, 15 bp, Homo sapiens
acttgaacaagtgtg

SEQ ID NO: 1510037 - DNA, 15 bp, Homo sapiens
cttgaacaagtgtgt

SEQ ID NO: 1510038 - DNA, 15 bp, Homo sapiens
ttgaacaagtgtgtg

SEQ ID NO: 1510039 - DNA, 15 bp, Homo sapiens
tgaacaagtgtgtgt

SEQ ID NO: 1510040 - DNA, 15 bp, Homo sapiens
gaacaagtgtgtgtc

SEQ ID NO: 1510041 - DNA, 15 bp, Homo sapiens
aacaagtgtgtgtca

SEQ ID NO: 1510042 - DNA, 15 bp, Homo sapiens
acaagtgtgtgtcag

SEQ ID NO: 1510043 - DNA, 15 bp, Homo sapiens
caagtgtgtgtcaga

SEQ ID NO: 1510044 - DNA, 15 bp, Homo sapiens
aagtgtgtgtcagac

SEQ ID NO: 1510045 - DNA, 15 bp, Homo sapiens
agtgtgtgtcagaca

SEQ ID NO: 1510046 - DNA, 15 bp, Homo sapiens
gtgtgtgtcagacaa

SEQ ID NO: 1510047 - DNA, 15 bp, Homo sapiens
tgtgtgtcagacaaa

SEQ ID NO: 1510048 - DNA, 15 bp, Homo sapiens
gtgtgtcagacaaat

SEQ ID NO: 1510049 - DNA, 15 bp, Homo sapiens
tgtgtcagacaaatt

SEQ ID NO: 1510050 - DNA, 15 bp, Homo sapiens
gtgtcagacaaattg

SEQ ID NO: 1510051 - DNA, 15 bp, Homo sapiens
tgtcagacaaattgc

SEQ ID NO: 1510052 - DNA, 15 bp, Homo sapiens
gtcagacaaattgct

SEQ ID NO: 1510053 - DNA, 15 bp, Homo sapiens
tcagacaaattgctg

SEQ ID NO: 1510054 - DNA, 15 bp, Homo sapiens
cagacaaattgctgt

SEQ ID NO: 1510055 - DNA, 15 bp, Homo sapiens
agacaaattgctgtt

SEQ ID NO: 1510056 - DNA, 15 bp, Homo sapiens
gacaaattgctgtta

SEQ ID NO: 1510057 - DNA, 15 bp, Homo sapiens
acaaattgctgttat

SEQ ID NO: 1510058 - DNA, 15 bp, Homo sapiens
caaattgctgttatg

SEQ ID NO: 1510059 - DNA, 15 bp, Homo sapiens
aaattgctgttatgt

SEQ ID NO: 1510060 - DNA, 15 bp, Homo sapiens
aattgctgttatgtt

SEQ ID NO: 1510061 - DNA, 15 bp, Homo sapiens
attgctgttatgttt

SEQ ID NO: 1510062 - DNA, 15 bp, Homo sapiens
ttgctgttatgttta

SEQ ID NO: 1510063 - DNA, 15 bp, Homo sapiens
tgctgttatgtttat

SEQ ID NO: 1510064 - DNA, 15 bp, Homo sapiens
gctgttatgtttatt

SEQ ID NO: 1510065 - DNA, 15 bp, Homo sapiens
ctgttatgtttattt

SEQ ID NO: 1510066 - DNA, 15 bp, Homo sapiens
tgttatgtttattta

SEQ ID NO: 1510067 - DNA, 15 bp, Homo sapiens
gttatgtttatttaa

SEQ ID NO: 1510068 - DNA, 15 bp, Homo sapiens
ttatgtttatttaat

SEQ ID NO: 1510069 - DNA, 15 bp, Homo sapiens
tatgtttatttaatt

SEQ ID NO: 1510070 - DNA, 15 bp, Homo sapiens
atgtttatttaatta

SEQ ID NO: 1510071 - DNA, 15 bp, Homo sapiens
tgtttatttaattaa

SEQ ID NO: 1510072 - DNA, 15 bp, Homo sapiens
gtttatttaattaag

SEQ ID NO: 1510073 - DNA, 15 bp, Homo sapiens
tttatttaattaagt

SEQ ID NO: 1510074 - DNA, 15 bp, Homo sapiens
ttatttaattaagtt

SEQ ID NO: 1510075 - DNA, 15 bp, Homo sapiens
tatttaattaagttt

SEQ ID NO: 1510076 - DNA, 15 bp, Homo sapiens
atttaattaagtttg

SEQ ID NO: 1510077 - DNA, 15 bp, Homo sapiens
tttaattaagtttga

SEQ ID NO: 1510078 - DNA, 15 bp, Homo sapiens
ttaattaagtttgat

SEQ ID NO: 1510079 - DNA, 15 bp, Homo sapiens
taattaagtttgatt

SEQ ID NO: 1510080 - DNA, 15 bp, Homo sapiens
aattaagtttgattt

SEQ ID NO: 1510081 - DNA, 15 bp, Homo sapiens
attaagtttgatttc

SEQ ID NO: 1510082 - DNA, 15 bp, Homo sapiens
ttaagtttgatttct

SEQ ID NO: 1510083 - DNA, 15 bp, Homo sapiens
taagtttgatttcta

SEQ ID NO: 1510084 - DNA, 15 bp, Homo sapiens
aagtttgatttctaa

SEQ ID NO: 1510085 - DNA, 15 bp, Homo sapiens
agtttgatttctaag

SEQ ID NO: 1510086 - DNA, 15 bp, Homo sapiens
gtttgatttctaaga

SEQ ID NO: 1510087 - DNA, 15 bp, Homo sapiens
tttgatttctaagaa

SEQ ID NO: 1510088 - DNA, 15 bp, Homo sapiens
ttgatttctaagaaa

SEQ ID NO: 1510089 - DNA, 15 bp, Homo sapiens
tgatttctaagaaaa

SEQ ID NO: 1510090 - DNA, 15 bp, Homo sapiens
gatttctaagaaaat

SEQ ID NO: 1510091 - DNA, 15 bp, Homo sapiens
atttctaagaaaatc

SEQ ID NO: 1510092 - DNA, 15 bp, Homo sapiens
tttctaagaaaatct

SEQ ID NO: 1510093 - DNA, 15 bp, Homo sapiens
ttctaagaaaatctc

SEQ ID NO: 1510094 - DNA, 15 bp, Homo sapiens
tctaagaaaatctca

SEQ ID NO: 1510095 - DNA, 15 bp, Homo sapiens
ctaagaaaatctcaa

SEQ ID NO: 1510096 - DNA, 15 bp, Homo sapiens
taagaaaatctcaaa

SEQ ID NO: 1510097 - DNA, 15 bp, Homo sapiens
aagaaaatctcaaat

SEQ ID NO: 1510098 - DNA, 15 bp, Homo sapiens
agaaaatctcaaatg

SEQ ID NO: 1510099 - DNA, 15 bp, Homo sapiens
gaaaatctcaaatgg

SEQ ID NO: 1510100 - DNA, 15 bp, Homo sapiens
aaaatctcaaatggt

SEQ ID NO: 1510101 - DNA, 15 bp, Homo sapiens
aaatctcaaatggtc

SEQ ID NO: 1510102 - DNA, 15 bp, Homo sapiens
aatctcaaatggtct

SEQ ID NO: 1510103 - DNA, 15 bp, Homo sapiens
atctcaaatggtctg

SEQ ID NO: 1510104 - DNA, 15 bp, Homo sapiens
tctcaaatggtctgc

SEQ ID NO: 1510105 - DNA, 15 bp, Homo sapiens
ctcaaatggtctgca

SEQ ID NO: 1510106 - DNA, 15 bp, Homo sapiens
tcaaatggtctgcac

SEQ ID NO: 1510107 - DNA, 15 bp, Homo sapiens
caaatggtctgcact

SEQ ID NO: 1510108 - DNA, 15 bp, Homo sapiens
aaatggtctgcactg

SEQ ID NO: 1510109 - DNA, 15 bp, Homo sapiens
aatggtctgcactga

SEQ ID NO: 1510110 - DNA, 15 bp, Homo sapiens
atggtctgcactgat

SEQ ID NO: 1510111 - DNA, 15 bp, Homo sapiens
tggtctgcactgatg

SEQ ID NO: 1510112 - DNA, 15 bp, Homo sapiens
ggtctgcactgatgg

SEQ ID NO: 1510113 - DNA, 15 bp, Homo sapiens
gtctgcactgatgga

SEQ ID NO: 1510114 - DNA, 15 bp, Homo sapiens
tctgcactgatggaa

SEQ ID NO: 1510115 - DNA, 15 bp, Homo sapiens
ctgcactgatggaag

SEQ ID NO: 1510116 - DNA, 15 bp, Homo sapiens
tgcactgatggaaga

SEQ ID NO: 1510117 - DNA, 15 bp, Homo sapiens
gcactgatggaagaa

SEQ ID NO: 1510118 - DNA, 15 bp, Homo sapiens
cactgatggaagaac

SEQ ID NO: 1510119 - DNA, 15 bp, Homo sapiens
actgatggaagaaca

SEQ ID NO: 1510120 - DNA, 15 bp, Homo sapiens
ctgatggaagaacag

SEQ ID NO: 1510121 - DNA, 15 bp, Homo sapiens
tgatggaagaacagt

SEQ ID NO: 1510122 - DNA, 15 bp, Homo sapiens
gatggaagaacagtt

SEQ ID NO: 1510123 - DNA, 15 bp, Homo sapiens
atggaagaacagttt

SEQ ID NO: 1510124 - DNA, 15 bp, Homo sapiens
tggaagaacagtttc

SEQ ID NO: 1510125 - DNA, 15 bp, Homo sapiens
ggaagaacagtttct

SEQ ID NO: 1510126 - DNA, 15 bp, Homo sapiens
gaagaacagtttctg

SEQ ID NO: 1510127 - DNA, 15 bp, Homo sapiens
aagaacagtttctgt

SEQ ID NO: 1510128 - DNA, 15 bp, Homo sapiens
agaacagtttctgta

SEQ ID NO: 1510129 - DNA, 15 bp, Homo sapiens
gaacagtttctgtaa

SEQ ID NO: 1510130 - DNA, 15 bp, Homo sapiens
aacagtttctgtaac

SEQ ID NO: 1510131 - DNA, 15 bp, Homo sapiens
cagtttctgtaacaa

SEQ ID NO: 1510132 - DNA, 15 bp, Homo sapiens
agtttctgtaacaaa

SEQ ID NO: 1510133 - DNA, 15 bp, Homo sapiens
gtttctgtaacaaaa

SEQ ID NO: 1510134 - DNA, 15 bp, Homo sapiens
tttctgtaacaaaaa

SEQ ID NO: 1510135 - DNA, 15 bp, Homo sapiens
ttctgtaacaaaaaa

SEQ ID NO: 1510136 - DNA, 15 bp, Homo sapiens
tctgtaacaaaaaag

SEQ ID NO: 1510137 - DNA, 15 bp, Homo sapiens
ctgtaacaaaaaagc

SEQ ID NO: 1510138 - DNA, 15 bp, Homo sapiens
tgtaacaaaaaagct

SEQ ID NO: 1510139 - DNA, 15 bp, Homo sapiens
gtaacaaaaaagctt

SEQ ID NO: 1510140 - DNA, 15 bp, Homo sapiens
taacaaaaaagcttg

SEQ ID NO: 1510141 - DNA, 15 bp, Homo sapiens
aacaaaaaagcttga

SEQ ID NO: 1510142 - DNA, 15 bp, Homo sapiens
acaaaaaagcttgaa

SEQ ID NO: 1510143 - DNA, 15 bp, Homo sapiens
caaaaaagcttgaaa

SEQ ID NO: 1510144 - DNA, 15 bp, Homo sapiens
aaaaaagcttgaaat

SEQ ID NO: 1510145 - DNA, 15 bp, Homo sapiens
aaaaagcttgaaatt

SEQ ID NO: 1510146 - DNA, 15 bp, Homo sapiens
aaaagcttgaaattt

SEQ ID NO: 1510147 - DNA, 15 bp, Homo sapiens
aaagcttgaaatttt

SEQ ID NO: 1510148 - DNA, 15 bp, Homo sapiens
aagcttgaaattttt

SEQ ID NO: 1510149 - DNA, 15 bp, Homo sapiens
agcttgaaattttta

SEQ ID NO: 1510150 - DNA, 15 bp, Homo sapiens
gcttgaaatttttat

SEQ ID NO: 1510151 - DNA, 15 bp, Homo sapiens
cttgaaatttttata

SEQ ID NO: 1510152 - DNA, 15 bp, Homo sapiens
ttgaaatttttatat

SEQ ID NO: 1510153 - DNA, 15 bp, Homo sapiens
tgaaatttttatatg

SEQ ID NO: 1510154 - DNA, 15 bp, Homo sapiens
gaaatttttatatga

SEQ ID NO: 1510155 - DNA, 15 bp, Homo sapiens
aaatttttatatgac

SEQ ID NO: 1510156 - DNA, 15 bp, Homo sapiens
aatttttatatgact

SEQ ID NO: 1510157 - DNA, 15 bp, Homo sapiens
atttttatatgactt

SEQ ID NO: 1510158 - DNA, 15 bp, Homo sapiens
tttttatatgactta

SEQ ID NO: 1510159 - DNA, 15 bp, Homo sapiens
ttttatatgacttat

SEQ ID NO: 1510160 - DNA, 15 bp, Homo sapiens
tttatatgacttata

SEQ ID NO: 1510161 - DNA, 15 bp, Homo sapiens
ttatatgacttataa

SEQ ID NO: 1510162 - DNA, 15 bp, Homo sapiens
tatatgacttataat

SEQ ID NO: 1510163 - DNA, 15 bp, Homo sapiens
atatgacttataata

SEQ ID NO: 1510164 - DNA, 15 bp, Homo sapiens
tatgacttataatac

SEQ ID NO: 1510165 - DNA, 15 bp, Homo sapiens
atgacttataatact

SEQ ID NO: 1510166 - DNA, 15 bp, Homo sapiens
tgacttataatactg

SEQ ID NO: 1510167 - DNA, 15 bp, Homo sapiens
gacttataatactgc

SEQ ID NO: 1510168 - DNA, 15 bp, Homo sapiens
acttataatactgct

SEQ ID NO: 1510169 - DNA, 15 bp, Homo sapiens
cttataatactgctg

SEQ ID NO: 1510170 - DNA, 15 bp, Homo sapiens
ttataatactgctgt

SEQ ID NO: 1510171 - DNA, 15 bp, Homo sapiens
tataatactgctgtg

SEQ ID NO: 1510172 - DNA, 15 bp, Homo sapiens
ataatactgctgtga

SEQ ID NO: 1510173 - DNA, 15 bp, Homo sapiens
taatactgctgtgag

SEQ ID NO: 1510174 - DNA, 15 bp, Homo sapiens
aatactgctgtgagt

SEQ ID NO: 1510175 - DNA, 15 bp, Homo sapiens
atactgctgtgagtt

SEQ ID NO: 1510176 - DNA, 15 bp, Homo sapiens
tactgctgtgagttt

SEQ ID NO: 1510177 - DNA, 15 bp, Homo sapiens
actgctgtgagtttt

SEQ ID NO: 1510178 - DNA, 15 bp, Homo sapiens
ctgctgtgagtttta

SEQ ID NO: 1510179 - DNA, 15 bp, Homo sapiens
tgctgtgagttttaa

SEQ ID NO: 1510180 - DNA, 15 bp, Homo sapiens
gctgtgagttttaaa

SEQ ID NO: 1510181 - DNA, 15 bp, Homo sapiens
ctgtgagttttaaaa

SEQ ID NO: 1510182 - DNA, 15 bp, Homo sapiens
tgtgagttttaaaag

SEQ ID NO: 1510183 - DNA, 15 bp, Homo sapiens
gtgagttttaaaagt

SEQ ID NO: 1510184 - DNA, 15 bp, Homo sapiens
tgagttttaaaagta

SEQ ID NO: 1510185 - DNA, 15 bp, Homo sapiens
gagttttaaaagtaa

SEQ ID NO: 1510186 - DNA, 15 bp, Homo sapiens
agttttaaaagtaaa

SEQ ID NO: 1510187 - DNA, 15 bp, Homo sapiens
gttttaaaagtaaag

SEQ ID NO: 1510188 - DNA, 15 bp, Homo sapiens
ttttaaaagtaaagc

SEQ ID NO: 1510189 - DNA, 15 bp, Homo sapiens
tttaaaagtaaagca

SEQ ID NO: 1510190 - DNA, 15 bp, Homo sapiens
ttaaaagtaaagcaa

SEQ ID NO: 1510191 - DNA, 15 bp, Homo sapiens
taaaagtaaagcaaa

SEQ ID NO: 1510192 - DNA, 15 bp, Homo sapiens
aaaagtaaagcaaaa

SEQ ID NO: 1510193 - DNA, 15 bp, Homo sapiens
aaagtaaagcaaaag

SEQ ID NO: 1510194 - DNA, 15 bp, Homo sapiens
aagtaaagcaaaagt

SEQ ID NO: 1510195 - DNA, 15 bp, Homo sapiens
agtaaagcaaaagta

SEQ ID NO: 1510196 - DNA, 15 bp, Homo sapiens
gtaaagcaaaagtaa

SEQ ID NO: 1510197 - DNA, 15 bp, Homo sapiens
taaagcaaaagtaaa

SEQ ID NO: 1510198 - DNA, 15 bp, Homo sapiens
aaagcaaaagtaaac

SEQ ID NO: 1510199 - DNA, 15 bp, Homo sapiens
aagcaaaagtaaact

SEQ ID NO: 1510200 - DNA, 15 bp, Homo sapiens
agcaaaagtaaactg

SEQ ID NO: 1510201 - DNA, 15 bp, Homo sapiens
gcaaaagtaaactga

SEQ ID NO: 1510202 - DNA, 15 bp, Homo sapiens
caaaagtaaactgag

SEQ ID NO: 1510203 - DNA, 15 bp, Homo sapiens
aaaagtaaactgagt

SEQ ID NO: 1510204 - DNA, 15 bp, Homo sapiens
aaagtaaactgagtt

SEQ ID NO: 1510205 - DNA, 15 bp, Homo sapiens
aagtaaactgagttg

SEQ ID NO: 1510206 - DNA, 15 bp, Homo sapiens
agtaaactgagttgc

SEQ ID NO: 1510207 - DNA, 15 bp, Homo sapiens
gtaaactgagttgct

SEQ ID NO: 1510208 - DNA, 15 bp, Homo sapiens
taaactgagttgctt

SEQ ID NO: 1510209 - DNA, 15 bp, Homo sapiens
aaactgagttgcttg

SEQ ID NO: 1510210 - DNA, 15 bp, Homo sapiens
aactgagttgcttgt

SEQ ID NO: 1510211 - DNA, 15 bp, Homo sapiens
actgagttgcttgtc

SEQ ID NO: 1510212 - DNA, 15 bp, Homo sapiens
ctgagttgcttgtcc

SEQ ID NO: 1510213 - DNA, 15 bp, Homo sapiens
tgagttgcttgtcca

SEQ ID NO: 1510214 - DNA, 15 bp, Homo sapiens
gagttgcttgtccag

SEQ ID NO: 1510215 - DNA, 15 bp, Homo sapiens
agttgcttgtccagt

SEQ ID NO: 1510216 - DNA, 15 bp, Homo sapiens
gttgcttgtccagtg

SEQ ID NO: 1510217 - DNA, 15 bp, Homo sapiens
ttgcttgtccagtgg

SEQ ID NO: 1510218 - DNA, 15 bp, Homo sapiens
tgcttgtccagtggg

SEQ ID NO: 1510219 - DNA, 15 bp, Homo sapiens
gcttgtccagtggga

SEQ ID NO: 1510220 - DNA, 15 bp, Homo sapiens
cttgtccagtgggat

SEQ ID NO: 1510221 - DNA, 15 bp, Homo sapiens
ttgtccagtgggatg

SEQ ID NO: 1510222 - DNA, 15 bp, Homo sapiens
tgtccagtgggatgg

SEQ ID NO: 1510223 - DNA, 15 bp, Homo sapiens
gtccagtgggatgga

SEQ ID NO: 1510224 - DNA, 15 bp, Homo sapiens
tccagtgggatggac

SEQ ID NO: 1510225 - DNA, 15 bp, Homo sapiens
ccagtgggatggaca

SEQ ID NO: 1510226 - DNA, 15 bp, Homo sapiens
cagtgggatggacag

SEQ ID NO: 1510227 - DNA, 15 bp, Homo sapiens
agtgggatggacagg

SEQ ID NO: 1510228 - DNA, 15 bp, Homo sapiens
gtgggatggacagga

SEQ ID NO: 1510229 - DNA, 15 bp, Homo sapiens
tgggatggacaggaa

SEQ ID NO: 1510230 - DNA, 15 bp, Homo sapiens
gggatggacaggaaa

SEQ ID NO: 1510231 - DNA, 15 bp, Homo sapiens
ggatggacaggaaag

SEQ ID NO: 1510232 - DNA, 15 bp, Homo sapiens
gatggacaggaaaga

SEQ ID NO: 1510233 - DNA, 15 bp, Homo sapiens
atggacaggaaagat

SEQ ID NO: 1510234 - DNA, 15 bp, Homo sapiens
tggacaggaaagatg

SEQ ID NO: 1510235 - DNA, 15 bp, Homo sapiens
ggacaggaaagatgt

SEQ ID NO: 1510236 - DNA, 15 bp, Homo sapiens
gacaggaaagatgtg

SEQ ID NO: 1510237 - DNA, 15 bp, Homo sapiens
acaggaaagatgtga

SEQ ID NO: 1510238 - DNA, 15 bp, Homo sapiens
caggaaagatgtgaa

SEQ ID NO: 1510239 - DNA, 15 bp, Homo sapiens
aggaaagatgtgaaa

SEQ ID NO: 1510240 - DNA, 15 bp, Homo sapiens
ggaaagatgtgaaat

SEQ ID NO: 1510241 - DNA, 15 bp, Homo sapiens
gaaagatgtgaaata

SEQ ID NO: 1510242 - DNA, 15 bp, Homo sapiens
aaagatgtgaaataa

SEQ ID NO: 1510243 - DNA, 15 bp, Homo sapiens
aagatgtgaaataaa

SEQ ID NO: 1510244 - DNA, 15 bp, Homo sapiens
agatgtgaaataaaa

SEQ ID NO: 1510245 - DNA, 15 bp, Homo sapiens
gatgtgaaataaaaa

SEQ ID NO: 1510246 - DNA, 15 bp, Homo sapiens
atgtgaaataaaaac

SEQ ID NO: 1510247 - DNA, 15 bp, Homo sapiens
tgtgaaataaaaacc

SEQ ID NO: 1510248 - DNA, 15 bp, Homo sapiens
gtgaaataaaaacca

SEQ ID NO: 1510249 - DNA, 15 bp, Homo sapiens
tgaaataaaaaccaa

SEQ ID NO: 1510250 - DNA, 15 bp, Homo sapiens
gaaataaaaaccaat

SEQ ID NO: 1510251 - DNA, 15 bp, Homo sapiens
aaataaaaaccaatg

SEQ ID NO: 1510252 - DNA, 15 bp, Homo sapiens
aataaaaaccaatga

SEQ ID NO: 1510253 - DNA, 15 bp, Homo sapiens
ataaaaaccaatgaa

SEQ ID NO: 1510254 - DNA, 15 bp, Homo sapiens
taaaaaccaatgaaa

SEQ ID NO: 1510255 - DNA, 15 bp, Homo sapiens
aaaaaccaatgaaaa

SEQ ID NO: 1510256 - DNA, 15 bp, Homo sapiens
aaaaccaatgaaaaa

SEQ ID NO: 1510257 - DNA, 15 bp, Homo sapiens
aaaccaatgaaaaat

SEQ ID NO: 1510258 - DNA, 15 bp, Homo sapiens
aaccaatgaaaaatg

SEQ ID NO: 1510259 - DNA, 15 bp, Homo sapiens
accaatgaaaaatga

SEQ ID NO: 1510260 - DNA, 15 bp, Homo sapiens
ccaatgaaaaatgaa

SEQ ID NO: 1510261 - DNA, 15 bp, Homo sapiens
caatgaaaaatgaac

SEQ ID NO: 1510262 - DNA, 15 bp, Homo sapiens
aatgaaaaatgaact

SEQ ID NO: 1510263 - DNA, 15 bp, Homo sapiens
atgaaaaatgaactg

SEQ ID NO: 1510264 - DNA, 15 bp, Homo sapiens
tgaaaaatgaactgc

SEQ ID NO: 1510265 - DNA, 15 bp, Homo sapiens
gaaaaatgaactgct

SEQ ID NO: 1510266 - DNA, 15 bp, Homo sapiens
aaaaatgaactgctg

SEQ ID NO: 1510267 - DNA, 15 bp, Homo sapiens
aaaatgaactgctgt

SEQ ID NO: 1510268 - DNA, 15 bp, Homo sapiens
aaatgaactgctgtg

SEQ ID NO: 1510269 - DNA, 15 bp, Homo sapiens
aatgaactgctgtgg

SEQ ID NO: 1510270 - DNA, 15 bp, Homo sapiens
atgaactgctgtgga

SEQ ID NO: 1510271 - DNA, 15 bp, Homo sapiens
tgaactgctgtggag

SEQ ID NO: 1510272 - DNA, 15 bp, Homo sapiens
gaactgctgtggaga

SEQ ID NO: 1510273 - DNA, 15 bp, Homo sapiens
aactgctgtggagaa

SEQ ID NO: 1510274 - DNA, 15 bp, Homo sapiens
actgctgtggagaag

SEQ ID NO: 1510275 - DNA, 15 bp, Homo sapiens
ctgctgtggagaagt

SEQ ID NO: 1510276 - DNA, 15 bp, Homo sapiens
tgctgtggagaagtg

SEQ ID NO: 1510277 - DNA, 15 bp, Homo sapiens
gctgtggagaagtgt

SEQ ID NO: 1510278 - DNA, 15 bp, Homo sapiens
ctgtggagaagtgtt

SEQ ID NO: 1510279 - DNA, 15 bp, Homo sapiens
tgtggagaagtgtta

SEQ ID NO: 1510280 - DNA, 15 bp, Homo sapiens
gtggagaagtgttac

SEQ ID NO: 1510281 - DNA, 15 bp, Homo sapiens
tggagaagtgttaca

SEQ ID NO: 1510282 - DNA, 15 bp, Homo sapiens
ggagaagtgttacat

SEQ ID NO: 1510283 - DNA, 15 bp, Homo sapiens
gagaagtgttacatt

SEQ ID NO: 1510284 - DNA, 15 bp, Homo sapiens
agaagtgttacattt

SEQ ID NO: 1510285 - DNA, 15 bp, Homo sapiens
gaagtgttacattta

SEQ ID NO: 1510286 - DNA, 15 bp, Homo sapiens
aagtgttacatttat

SEQ ID NO: 1510287 - DNA, 15 bp, Homo sapiens
agtgttacatttatg

SEQ ID NO: 1510288 - DNA, 15 bp, Homo sapiens
gtgttacatttatgg

SEQ ID NO: 1510289 - DNA, 15 bp, Homo sapiens
tgttacatttatgga

SEQ ID NO: 1510290 - DNA, 15 bp, Homo sapiens
gttacatttatggaa

SEQ ID NO: 1510291 - DNA, 15 bp, Homo sapiens
ttacatttatggaaa

SEQ ID NO: 1510292 - DNA, 15 bp, Homo sapiens
tacatttatggaaaa

SEQ ID NO: 1510293 - DNA, 15 bp, Homo sapiens
acatttatggaaaaa

SEQ ID NO: 1510294 - DNA, 15 bp, Homo sapiens
catttatggaaaaag

SEQ ID NO: 1510295 - DNA, 15 bp, Homo sapiens
atttatggaaaaaga

SEQ ID NO: 1510296 - DNA, 15 bp, Homo sapiens
tttatggaaaaagaa

SEQ ID NO: 1510297 - DNA, 15 bp, Homo sapiens
ttatggaaaaagaaa

SEQ ID NO: 1510298 - DNA, 15 bp, Homo sapiens
tatggaaaaagaaat

SEQ ID NO: 1510299 - DNA, 15 bp, Homo sapiens
atggaaaaagaaata

SEQ ID NO: 1510300 - DNA, 15 bp, Homo sapiens
tggaaaaagaaatag

SEQ ID NO: 1510301 - DNA, 15 bp, Homo sapiens
ggaaaaagaaatagg

SEQ ID NO: 1510302 - DNA, 15 bp, Homo sapiens
gaaaaagaaatagga

SEQ ID NO: 1510303 - DNA, 15 bp, Homo sapiens
aaaaagaaataggaa

SEQ ID NO: 1510304 - DNA, 15 bp, Homo sapiens
aaaagaaataggaac

SEQ ID NO: 1510305 - DNA, 15 bp, Homo sapiens
aaagaaataggaacc

SEQ ID NO: 1510306 - DNA, 15 bp, Homo sapiens
aagaaataggaacct

SEQ ID NO: 1510307 - DNA, 15 bp, Homo sapiens
agaaataggaacctt

SEQ ID NO: 1510308 - DNA, 15 bp, Homo sapiens
gaaataggaaccttg

SEQ ID NO: 1510309 - DNA, 15 bp, Homo sapiens
aaataggaaccttgt

SEQ ID NO: 1510310 - DNA, 15 bp, Homo sapiens
aataggaaccttgtt

SEQ ID NO: 1510311 - DNA, 15 bp, Homo sapiens
ataggaaccttgttc

SEQ ID NO: 1510312 - DNA, 15 bp, Homo sapiens
taggaaccttgttca

SEQ ID NO: 1510313 - DNA, 15 bp, Homo sapiens
aggaaccttgttcat

SEQ ID NO: 1510314 - DNA, 15 bp, Homo sapiens
ggaaccttgttcatc

SEQ ID NO: 1510315 - DNA, 15 bp, Homo sapiens
gaaccttgttcatca

SEQ ID NO: 1510316 - DNA, 15 bp, Homo sapiens
aaccttgttcatcaa

SEQ ID NO: 1510317 - DNA, 15 bp, Homo sapiens
accttgttcatcaaa

SEQ ID NO: 1510318 - DNA, 15 bp, Homo sapiens
ccttgttcatcaaat

SEQ ID NO: 1510319 - DNA, 15 bp, Homo sapiens
cttgttcatcaaatt

SEQ ID NO: 1510320 - DNA, 15 bp, Homo sapiens
ttgttcatcaaattg

SEQ ID NO: 1510321 - DNA, 15 bp, Homo sapiens
tgttcatcaaattga

SEQ ID NO: 1510322 - DNA, 15 bp, Homo sapiens
gttcatcaaattgat

SEQ ID NO: 1510323 - DNA, 15 bp, Homo sapiens
ttcatcaaattgata

SEQ ID NO: 1510324 - DNA, 15 bp, Homo sapiens
tcatcaaattgatag

SEQ ID NO: 1510325 - DNA, 15 bp, Homo sapiens
catcaaattgataga

SEQ ID NO: 1510326 - DNA, 15 bp, Homo sapiens
atcaaattgatagaa

SEQ ID NO: 1510327 - DNA, 15 bp, Homo sapiens
tcaaattgatagaaa

SEQ ID NO: 1510328 - DNA, 15 bp, Homo sapiens
caaattgatagaaaa

SEQ ID NO: 1510329 - DNA, 15 bp, Homo sapiens
aaattgatagaaaag

SEQ ID NO: 1510330 - DNA, 15 bp, Homo sapiens
aattgatagaaaagc

SEQ ID NO: 1510331 - DNA, 15 bp, Homo sapiens
attgatagaaaagct

SEQ ID NO: 1510332 - DNA, 15 bp, Homo sapiens
ttgatagaaaagctt

SEQ ID NO: 1510333 - DNA, 15 bp, Homo sapiens
tgatagaaaagcttt

SEQ ID NO: 1510334 - DNA, 15 bp, Homo sapiens
gatagaaaagctttt

SEQ ID NO: 1510335 - DNA, 15 bp, Homo sapiens
atagaaaagctttta

SEQ ID NO: 1510336 - DNA, 15 bp, Homo sapiens
tagaaaagcttttaa

SEQ ID NO: 1510337 - DNA, 15 bp, Homo sapiens
agaaaagcttttaaa

SEQ ID NO: 1510338 - DNA, 15 bp, Homo sapiens
gaaaagcttttaaaa

SEQ ID NO: 1510339 - DNA, 15 bp, Homo sapiens
aaaagcttttaaaac

SEQ ID NO: 1510340 - DNA, 15 bp, Homo sapiens
aaagcttttaaaact

SEQ ID NO: 1510341 - DNA, 15 bp, Homo sapiens
aagcttttaaaacta

SEQ ID NO: 1510342 - DNA, 15 bp, Homo sapiens
agcttttaaaactaa

SEQ ID NO: 1510343 - DNA, 15 bp, Homo sapiens
gcttttaaaactaaa

SEQ ID NO: 1510344 - DNA, 15 bp, Homo sapiens
cttttaaaactaaac

SEQ ID NO: 1510345 - DNA, 15 bp, Homo sapiens
ttttaaaactaaaca

SEQ ID NO: 1510346 - DNA, 15 bp, Homo sapiens
tttaaaactaaacaa

SEQ ID NO: 1510347 - DNA, 15 bp, Homo sapiens
ttaaaactaaacaaa

SEQ ID NO: 1510348 - DNA, 15 bp, Homo sapiens
taaaactaaacaaat

SEQ ID NO: 1510349 - DNA, 15 bp, Homo sapiens
aaaactaaacaaatc

SEQ ID NO: 1510350 - DNA, 15 bp, Homo sapiens
aaactaaacaaatca

SEQ ID NO: 1510351 - DNA, 15 bp, Homo sapiens
aactaaacaaatcaa

SEQ ID NO: 1510352 - DNA, 15 bp, Homo sapiens
actaaacaaatcaaa

SEQ ID NO: 1510353 - DNA, 15 bp, Homo sapiens
ctaaacaaatcaaac

SEQ ID NO: 1510354 - DNA, 15 bp, Homo sapiens
taaacaaatcaaaca

SEQ ID NO: 1510355 - DNA, 15 bp, Homo sapiens
aaacaaatcaaacaa

SEQ ID NO: 1510356 - DNA, 15 bp, Homo sapiens
aacaaatcaaacaac

SEQ ID NO: 1510357 - DNA, 15 bp, Homo sapiens
acaaatcaaacaact

SEQ ID NO: 1510358 - DNA, 15 bp, Homo sapiens
caaatcaaacaactt

SEQ ID NO: 1510359 - DNA, 15 bp, Homo sapiens
aaatcaaacaacttg

SEQ ID NO: 1510360 - DNA, 15 bp, Homo sapiens
aatcaaacaacttga

SEQ ID NO: 1510361 - DNA, 15 bp, Homo sapiens
atcaaacaacttgag

SEQ ID NO: 1510362 - DNA, 15 bp, Homo sapiens
tcaaacaacttgagt

SEQ ID NO: 1510363 - DNA, 15 bp, Homo sapiens
caaacaacttgagta

SEQ ID NO: 1510364 - DNA, 15 bp, Homo sapiens
aaacaacttgagtat

SEQ ID NO: 1510365 - DNA, 15 bp, Homo sapiens
aacaacttgagtata

SEQ ID NO: 1510366 - DNA, 15 bp, Homo sapiens
acaacttgagtataa

SEQ ID NO: 1510367 - DNA, 15 bp, Homo sapiens
caacttgagtataat

SEQ ID NO: 1510368 - DNA, 15 bp, Homo sapiens
aacttgagtataatg

SEQ ID NO: 1510369 - DNA, 15 bp, Homo sapiens
acttgagtataatgg

SEQ ID NO: 1510370 - DNA, 15 bp, Homo sapiens
cttgagtataatgga

SEQ ID NO: 1510371 - DNA, 15 bp, Homo sapiens
ttgagtataatggaa

SEQ ID NO: 1510372 - DNA, 15 bp, Homo sapiens
tgagtataatggaat

SEQ ID NO: 1510373 - DNA, 15 bp, Homo sapiens
gagtataatggaatt

SEQ ID NO: 1510374 - DNA, 15 bp, Homo sapiens
agtataatggaattc

SEQ ID NO: 1510375 - DNA, 15 bp, Homo sapiens
gtataatggaattca

SEQ ID NO: 1510376 - DNA, 15 bp, Homo sapiens
tataatggaattcag

SEQ ID NO: 1510377 - DNA, 15 bp, Homo sapiens
ataatggaattcaga

SEQ ID NO: 1510378 - DNA, 15 bp, Homo sapiens
taatggaattcagac

SEQ ID NO: 1510379 - DNA, 15 bp, Homo sapiens
aatggaattcagact

SEQ ID NO: 1510380 - DNA, 15 bp, Homo sapiens
atggaattcagactt

SEQ ID NO: 1510381 - DNA, 15 bp, Homo sapiens
tggaattcagacttt

SEQ ID NO: 1510382 - DNA, 15 bp, Homo sapiens
ggaattcagactttg

SEQ ID NO: 1510383 - DNA, 15 bp, Homo sapiens
gaattcagactttga

SEQ ID NO: 1510384 - DNA, 15 bp, Homo sapiens
aattcagactttgat

SEQ ID NO: 1510385 - DNA, 15 bp, Homo sapiens
attcagactttgatt

SEQ ID NO: 1510386 - DNA, 15 bp, Homo sapiens
ttcagactttgattt

SEQ ID NO: 1510387 - DNA, 15 bp, Homo sapiens
tcagactttgatttg

SEQ ID NO: 1510388 - DNA, 15 bp, Homo sapiens
cagactttgatttgc

SEQ ID NO: 1510389 - DNA, 15 bp, Homo sapiens
agactttgatttgcc

SEQ ID NO: 1510390 - DNA, 15 bp, Homo sapiens
gactttgatttgcct

SEQ ID NO: 1510391 - DNA, 15 bp, Homo sapiens
actttgatttgccta

SEQ ID NO: 1510392 - DNA, 15 bp, Homo sapiens
ctttgatttgcctaa

SEQ ID NO: 1510393 - DNA, 15 bp, Homo sapiens
tttgatttgcctaac

SEQ ID NO: 1510394 - DNA, 15 bp, Homo sapiens
ttgatttgcctaaca

SEQ ID NO: 1510395 - DNA, 15 bp, Homo sapiens
tgatttgcctaacat

SEQ ID NO: 1510396 - DNA, 15 bp, Homo sapiens
gatttgcctaacata

SEQ ID NO: 1510397 - DNA, 15 bp, Homo sapiens
atttgcctaacataa

SEQ ID NO: 1510398 - DNA, 15 bp, Homo sapiens
tttgcctaacataac

SEQ ID NO: 1510399 - DNA, 15 bp, Homo sapiens
ttgcctaacataacc

SEQ ID NO: 1510400 - DNA, 15 bp, Homo sapiens
tgcctaacataacca

SEQ ID NO: 1510401 - DNA, 15 bp, Homo sapiens
gcctaacataaccac

SEQ ID NO: 1510402 - DNA, 15 bp, Homo sapiens
cctaacataaccacc

SEQ ID NO: 1510403 - DNA, 15 bp, Homo sapiens
ctaacataaccacca

SEQ ID NO: 1510404 - DNA, 15 bp, Homo sapiens
taacataaccaccat

SEQ ID NO: 1510405 - DNA, 15 bp, Homo sapiens
aacataaccaccata

SEQ ID NO: 1510406 - DNA, 15 bp, Homo sapiens
acataaccaccatat

SEQ ID NO: 1510407 - DNA, 15 bp, Homo sapiens
cataaccaccatatt

SEQ ID NO: 1510408 - DNA, 15 bp, Homo sapiens
ataaccaccatattt

SEQ ID NO: 1510409 - DNA, 15 bp, Homo sapiens
taaccaccatatttg

SEQ ID NO: 1510410 - DNA, 15 bp, Homo sapiens
aaccaccatatttgc

SEQ ID NO: 1510411 - DNA, 15 bp, Homo sapiens
accaccatatttgca

SEQ ID NO: 1510412 - DNA, 15 bp, Homo sapiens
ccaccatatttgcaa

SEQ ID NO: 1510413 - DNA, 15 bp, Homo sapiens
caccatatttgcaag

SEQ ID NO: 1510414 - DNA, 15 bp, Homo sapiens
accatatttgcaagg

SEQ ID NO: 1510415 - DNA, 15 bp, Homo sapiens
ccatatttgcaagga

SEQ ID NO: 1510416 - DNA, 15 bp, Homo sapiens
catatttgcaaggac

SEQ ID NO: 1510417 - DNA, 15 bp, Homo sapiens
atatttgcaaggaca

SEQ ID NO: 1510418 - DNA, 15 bp, Homo sapiens
tatttgcaaggacag

SEQ ID NO: 1510419 - DNA, 15 bp, Homo sapiens
atttgcaaggacagc

SEQ ID NO: 1510420 - DNA, 15 bp, Homo sapiens
tttgcaaggacagct

SEQ ID NO: 1510421 - DNA, 15 bp, Homo sapiens
ttgcaaggacagctc

SEQ ID NO: 1510422 - DNA, 15 bp, Homo sapiens
tgcaaggacagctct

SEQ ID NO: 1510423 - DNA, 15 bp, Homo sapiens
gcaaggacagctctc

SEQ ID NO: 1510424 - DNA, 15 bp, Homo sapiens
caaggacagctctct

SEQ ID NO: 1510425 - DNA, 15 bp, Homo sapiens
aaggacagctctcta

SEQ ID NO: 1510426 - DNA, 15 bp, Homo sapiens
aggacagctctctat

SEQ ID NO: 1510427 - DNA, 15 bp, Homo sapiens
ggacagctctctatc

SEQ ID NO: 1510428 - DNA, 15 bp, Homo sapiens
gacagctctctatct

SEQ ID NO: 1510429 - DNA, 15 bp, Homo sapiens
acagctctctatctt

SEQ ID NO: 1510430 - DNA, 15 bp, Homo sapiens
cagctctctatcttc

SEQ ID NO: 1510431 - DNA, 15 bp, Homo sapiens
agctctctatcttct

SEQ ID NO: 1510432 - DNA, 15 bp, Homo sapiens
gctctctatcttctg

SEQ ID NO: 1510433 - DNA, 15 bp, Homo sapiens
ctctctatcttctgg

SEQ ID NO: 1510434 - DNA, 15 bp, Homo sapiens
tctctatcttctggt

SEQ ID NO: 1510435 - DNA, 15 bp, Homo sapiens
ctctatcttctggtg

SEQ ID NO: 1510436 - DNA, 15 bp, Homo sapiens
tctatcttctggtgt

SEQ ID NO: 1510437 - DNA, 15 bp, Homo sapiens
ctatcttctggtgtt

SEQ ID NO: 1510438 - DNA, 15 bp, Homo sapiens
tatcttctggtgttt

SEQ ID NO: 1510439 - DNA, 15 bp, Homo sapiens
atcttctggtgttta

SEQ ID NO: 1510440 - DNA, 15 bp, Homo sapiens
tcttctggtgtttat

SEQ ID NO: 1510441 - DNA, 15 bp, Homo sapiens
cttctggtgtttatt

SEQ ID NO: 1510442 - DNA, 15 bp, Homo sapiens
ttctggtgtttattc

SEQ ID NO: 1510443 - DNA, 15 bp, Homo sapiens
tctggtgtttattct

SEQ ID NO: 1510444 - DNA, 15 bp, Homo sapiens
ctggtgtttattctt

SEQ ID NO: 1510445 - DNA, 15 bp, Homo sapiens
tggtgtttattctta

SEQ ID NO: 1510446 - DNA, 15 bp, Homo sapiens
ggtgtttattcttaa

SEQ ID NO: 1510447 - DNA, 15 bp, Homo sapiens
gtgtttattcttaaa

SEQ ID NO: 1510448 - DNA, 15 bp, Homo sapiens
tgtttattcttaaaa

SEQ ID NO: 1510449 - DNA, 15 bp, Homo sapiens
gtttattcttaaaaa

SEQ ID NO: 1510450 - DNA, 15 bp, Homo sapiens
tttattcttaaaaac

SEQ ID NO: 1510451 - DNA, 15 bp, Homo sapiens
ttattcttaaaaact

SEQ ID NO: 1510452 - DNA, 15 bp, Homo sapiens
tattcttaaaaactt

SEQ ID NO: 1510453 - DNA, 15 bp, Homo sapiens
attcttaaaaactta

SEQ ID NO: 1510454 - DNA, 15 bp, Homo sapiens
tcttaaaaacttaaa

SEQ ID NO: 1510455 - DNA, 15 bp, Homo sapiens
cttaaaaacttaaaa

SEQ ID NO: 1510456 - DNA, 15 bp, Homo sapiens
ttaaaaacttaaaag

SEQ ID NO: 1510457 - DNA, 15 bp, Homo sapiens
taaaaacttaaaagt

SEQ ID NO: 1510458 - DNA, 15 bp, Homo sapiens
aaaaacttaaaagtt

SEQ ID NO: 1510459 - DNA, 15 bp, Homo sapiens
aaaacttaaaagtta

SEQ ID NO: 1510460 - DNA, 15 bp, Homo sapiens
aaacttaaaagttag

SEQ ID NO: 1510461 - DNA, 15 bp, Homo sapiens
aacttaaaagttaga

SEQ ID NO: 1510462 - DNA, 15 bp, Homo sapiens
acttaaaagttagat

SEQ ID NO: 1510463 - DNA, 15 bp, Homo sapiens
cttaaaagttagatt

SEQ ID NO: 1510464 - DNA, 15 bp, Homo sapiens
ttaaaagttagattt

SEQ ID NO: 1510465 - DNA, 15 bp, Homo sapiens
taaaagttagattta

SEQ ID NO: 1510466 - DNA, 15 bp, Homo sapiens
aaaagttagatttag

SEQ ID NO: 1510467 - DNA, 15 bp, Homo sapiens
aaagttagatttagc

SEQ ID NO: 1510468 - DNA, 15 bp, Homo sapiens
aagttagatttagcg

SEQ ID NO: 1510469 - DNA, 15 bp, Homo sapiens
agttagatttagcga

SEQ ID NO: 1510470 - DNA, 15 bp, Homo sapiens
gttagatttagcgat

SEQ ID NO: 1510471 - DNA, 15 bp, Homo sapiens
ttagatttagcgatc

SEQ ID NO: 1510472 - DNA, 15 bp, Homo sapiens
tagatttagcgatca

SEQ ID NO: 1510473 - DNA, 15 bp, Homo sapiens
agatttagcgatcac

SEQ ID NO: 1510474 - DNA, 15 bp, Homo sapiens
gatttagcgatcacc

SEQ ID NO: 1510475 - DNA, 15 bp, Homo sapiens
atttagcgatcacca

SEQ ID NO: 1510476 - DNA, 15 bp, Homo sapiens
tttagcgatcaccag

SEQ ID NO: 1510477 - DNA, 15 bp, Homo sapiens
ttagcgatcaccaga

SEQ ID NO: 1510478 - DNA, 15 bp, Homo sapiens
tagcgatcaccagag

SEQ ID NO: 1510479 - DNA, 15 bp, Homo sapiens
agcgatcaccagagc

SEQ ID NO: 1510480 - DNA, 15 bp, Homo sapiens
gcgatcaccagagcc

SEQ ID NO: 1510481 - DNA, 15 bp, Homo sapiens
cgatcaccagagcca

SEQ ID NO: 1510482 - DNA, 15 bp, Homo sapiens
gatcaccagagccac

SEQ ID NO: 1510483 - DNA, 15 bp, Homo sapiens
atcaccagagccact

SEQ ID NO: 1510484 - DNA, 15 bp, Homo sapiens
tcaccagagccacta

SEQ ID NO: 1510485 - DNA, 15 bp, Homo sapiens
caccagagccactac

SEQ ID NO: 1510486 - DNA, 15 bp, Homo sapiens
accagagccactact

SEQ ID NO: 1510487 - DNA, 15 bp, Homo sapiens
ccagagccactactt

SEQ ID NO: 1510488 - DNA, 15 bp, Homo sapiens
cagagccactacttt

SEQ ID NO: 1510489 - DNA, 15 bp, Homo sapiens
agagccactactttt

SEQ ID NO: 1510490 - DNA, 15 bp, Homo sapiens
gagccactactttta

SEQ ID NO: 1510491 - DNA, 15 bp, Homo sapiens
agccactacttttat

SEQ ID NO: 1510492 - DNA, 15 bp, Homo sapiens
gccactacttttatg

SEQ ID NO: 1510493 - DNA, 15 bp, Homo sapiens
ccactacttttatgc

SEQ ID NO: 1510494 - DNA, 15 bp, Homo sapiens
cactacttttatgct

SEQ ID NO: 1510495 - DNA, 15 bp, Homo sapiens
actacttttatgctt

SEQ ID NO: 1510496 - DNA, 15 bp, Homo sapiens
ctacttttatgctta

SEQ ID NO: 1510497 - DNA, 15 bp, Homo sapiens
tacttttatgcttag

SEQ ID NO: 1510498 - DNA, 15 bp, Homo sapiens
acttttatgcttagg

SEQ ID NO: 1510499 - DNA, 15 bp, Homo sapiens
cttttatgcttaggt

SEQ ID NO: 1510500 - DNA, 15 bp, Homo sapiens
ttttatgcttaggta

SEQ ID NO: 1510501 - DNA, 15 bp, Homo sapiens
tttatgcttaggtat

SEQ ID NO: 1510502 - DNA, 15 bp, Homo sapiens
ttatgcttaggtatt

SEQ ID NO: 1510503 - DNA, 15 bp, Homo sapiens
tatgcttaggtattt

SEQ ID NO: 1510504 - DNA, 15 bp, Homo sapiens
atgcttaggtatttg

SEQ ID NO: 1510505 - DNA, 15 bp, Homo sapiens
tgcttaggtatttgt

SEQ ID NO: 1510506 - DNA, 15 bp, Homo sapiens
gcttaggtatttgtt

SEQ ID NO: 1510507 - DNA, 15 bp, Homo sapiens
cttaggtatttgttt

SEQ ID NO: 1510508 - DNA, 15 bp, Homo sapiens
ttaggtatttgtttg

SEQ ID NO: 1510509 - DNA, 15 bp, Homo sapiens
taggtatttgtttga

SEQ ID NO: 1510510 - DNA, 15 bp, Homo sapiens
aggtatttgtttgac

SEQ ID NO: 1510511 - DNA, 15 bp, Homo sapiens
ggtatttgtttgact

SEQ ID NO: 1510512 - DNA, 15 bp, Homo sapiens
gtatttgtttgactt

SEQ ID NO: 1510513 - DNA, 15 bp, Homo sapiens
tatttgtttgactta

SEQ ID NO: 1510514 - DNA, 15 bp, Homo sapiens
atttgtttgacttag

SEQ ID NO: 1510515 - DNA, 15 bp, Homo sapiens
tttgtttgacttaga

SEQ ID NO: 1510516 - DNA, 15 bp, Homo sapiens
ttgtttgacttagaa

SEQ ID NO: 1510517 - DNA, 15 bp, Homo sapiens
tgtttgacttagaaa

SEQ ID NO: 1510518 - DNA, 15 bp, Homo sapiens
gtttgacttagaaaa

SEQ ID NO: 1510519 - DNA, 15 bp, Homo sapiens
tttgacttagaaaaa

SEQ ID NO: 1510520 - DNA, 15 bp, Homo sapiens
ttgacttagaaaaaa

SEQ ID NO: 1510521 - DNA, 15 bp, Homo sapiens
tgacttagaaaaaat

SEQ ID NO: 1510522 - DNA, 15 bp, Homo sapiens
gacttagaaaaaatt

SEQ ID NO: 1510523 - DNA, 15 bp, Homo sapiens
acttagaaaaaattg

SEQ ID NO: 1510524 - DNA, 15 bp, Homo sapiens
cttagaaaaaattgg

SEQ ID NO: 1510525 - DNA, 15 bp, Homo sapiens
ttagaaaaaattggt

SEQ ID NO: 1510526 - DNA, 15 bp, Homo sapiens
tagaaaaaattggtc

SEQ ID NO: 1510527 - DNA, 15 bp, Homo sapiens
agaaaaaattggtca

SEQ ID NO: 1510528 - DNA, 15 bp, Homo sapiens
gaaaaaattggtcac

SEQ ID NO: 1510529 - DNA, 15 bp, Homo sapiens
aaaaaattggtcacg

SEQ ID NO: 1510530 - DNA, 15 bp, Homo sapiens
aaaaattggtcacgt

SEQ ID NO: 1510531 - DNA, 15 bp, Homo sapiens
aaaattggtcacgtg

SEQ ID NO: 1510532 - DNA, 15 bp, Homo sapiens
aaattggtcacgtgt

SEQ ID NO: 1510533 - DNA, 15 bp, Homo sapiens
aattggtcacgtgta

SEQ ID NO: 1510534 - DNA, 15 bp, Homo sapiens
attggtcacgtgtac

SEQ ID NO: 1510535 - DNA, 15 bp, Homo sapiens
ttggtcacgtgtacc

SEQ ID NO: 1510536 - DNA, 15 bp, Homo sapiens
tggtcacgtgtacca

SEQ ID NO: 1510537 - DNA, 15 bp, Homo sapiens
ggtcacgtgtaccac

SEQ ID NO: 1510538 - DNA, 15 bp, Homo sapiens
gtcacgtgtaccact

SEQ ID NO: 1510539 - DNA, 15 bp, Homo sapiens
tcacgtgtaccactt

SEQ ID NO: 1510540 - DNA, 15 bp, Homo sapiens
cacgtgtaccacttt

SEQ ID NO: 1510541 - DNA, 15 bp, Homo sapiens
acgtgtaccacttta

SEQ ID NO: 1510542 - DNA, 15 bp, Homo sapiens
cgtgtaccactttat

SEQ ID NO: 1510543 - DNA, 15 bp, Homo sapiens
gtgtaccactttata

SEQ ID NO: 1510544 - DNA, 15 bp, Homo sapiens
tgtaccactttatag

SEQ ID NO: 1510545 - DNA, 15 bp, Homo sapiens
gtaccactttatagt

SEQ ID NO: 1510546 - DNA, 15 bp, Homo sapiens
taccactttatagtg

SEQ ID NO: 1510547 - DNA, 15 bp, Homo sapiens
accactttatagtgc

SEQ ID NO: 1510548 - DNA, 15 bp, Homo sapiens
ccactttatagtgcc

SEQ ID NO: 1510549 - DNA, 15 bp, Homo sapiens
cactttatagtgccc

SEQ ID NO: 1510550 - DNA, 15 bp, Homo sapiens
actttatagtgccct

SEQ ID NO: 1510551 - DNA, 15 bp, Homo sapiens
ctttatagtgccctg

SEQ ID NO: 1510552 - DNA, 15 bp, Homo sapiens
tttatagtgccctgc

SEQ ID NO: 1510553 - DNA, 15 bp, Homo sapiens
ttatagtgccctgca

SEQ ID NO: 1510554 - DNA, 15 bp, Homo sapiens
tatagtgccctgcag

SEQ ID NO: 1510555 - DNA, 15 bp, Homo sapiens
atagtgccctgcagg

SEQ ID NO: 1510556 - DNA, 15 bp, Homo sapiens
tagtgccctgcaggt

SEQ ID NO: 1510557 - DNA, 15 bp, Homo sapiens
agtgccctgcaggtg

SEQ ID NO: 1510558 - DNA, 15 bp, Homo sapiens
gtgccctgcaggtgt

SEQ ID NO: 1510559 - DNA, 15 bp, Homo sapiens
tgccctgcaggtgtt

SEQ ID NO: 1510560 - DNA, 15 bp, Homo sapiens
gccctgcaggtgtta

SEQ ID NO: 1510561 - DNA, 15 bp, Homo sapiens
ccctgcaggtgttaa

SEQ ID NO: 1510562 - DNA, 15 bp, Homo sapiens
cctgcaggtgttaag

SEQ ID NO: 1510563 - DNA, 15 bp, Homo sapiens
ctgcaggtgttaaga

SEQ ID NO: 1510564 - DNA, 15 bp, Homo sapiens
tgcaggtgttaagat

SEQ ID NO: 1510565 - DNA, 15 bp, Homo sapiens
gcaggtgttaagata

SEQ ID NO: 1510566 - DNA, 15 bp, Homo sapiens
caggtgttaagatat

SEQ ID NO: 1510567 - DNA, 15 bp, Homo sapiens
aggtgttaagatatg

SEQ ID NO: 1510568 - DNA, 15 bp, Homo sapiens
ggtgttaagatatga

SEQ ID NO: 1510569 - DNA, 15 bp, Homo sapiens
gtgttaagatatgaa

SEQ ID NO: 1510570 - DNA, 15 bp, Homo sapiens
tgttaagatatgaag

SEQ ID NO: 1510571 - DNA, 15 bp, Homo sapiens
gttaagatatgaagg

SEQ ID NO: 1510572 - DNA, 15 bp, Homo sapiens
ttaagatatgaaggc

SEQ ID NO: 1510573 - DNA, 15 bp, Homo sapiens
taagatatgaaggca

SEQ ID NO: 1510574 - DNA, 15 bp, Homo sapiens
aagatatgaaggcac

SEQ ID NO: 1510575 - DNA, 15 bp, Homo sapiens
agatatgaaggcact

SEQ ID NO: 1510576 - DNA, 15 bp, Homo sapiens
gatatgaaggcactt

SEQ ID NO: 1510577 - DNA, 15 bp, Homo sapiens
atatgaaggcacttt

SEQ ID NO: 1510578 - DNA, 15 bp, Homo sapiens
tatgaaggcactttg

SEQ ID NO: 1510579 - DNA, 15 bp, Homo sapiens
atgaaggcactttga

SEQ ID NO: 1510580 - DNA, 15 bp, Homo sapiens
tgaaggcactttgac

SEQ ID NO: 1510581 - DNA, 15 bp, Homo sapiens
gaaggcactttgact

SEQ ID NO: 1510582 - DNA, 15 bp, Homo sapiens
aaggcactttgactt

SEQ ID NO: 1510583 - DNA, 15 bp, Homo sapiens
aggcactttgactta

SEQ ID NO: 1510584 - DNA, 15 bp, Homo sapiens
ggcactttgacttac

SEQ ID NO: 1510585 - DNA, 15 bp, Homo sapiens
gcactttgacttaca

SEQ ID NO: 1510586 - DNA, 15 bp, Homo sapiens
cactttgacttacac

SEQ ID NO: 1510587 - DNA, 15 bp, Homo sapiens
actttgacttacacc

SEQ ID NO: 1510588 - DNA, 15 bp, Homo sapiens
ctttgacttacacct

SEQ ID NO: 1510589 - DNA, 15 bp, Homo sapiens
tttgacttacacctc

SEQ ID NO: 1510590 - DNA, 15 bp, Homo sapiens
ttgacttacacctca

SEQ ID NO: 1510591 - DNA, 15 bp, Homo sapiens
tgacttacacctcat

SEQ ID NO: 1510592 - DNA, 15 bp, Homo sapiens
gacttacacctcata

SEQ ID NO: 1510593 - DNA, 15 bp, Homo sapiens
acttacacctcataa

SEQ ID NO: 1510594 - DNA, 15 bp, Homo sapiens
cttacacctcataaa

SEQ ID NO: 1510595 - DNA, 15 bp, Homo sapiens
ttacacctcataaaa

SEQ ID NO: 1510596 - DNA, 15 bp, Homo sapiens
tacacctcataaaat

SEQ ID NO: 1510597 - DNA, 15 bp, Homo sapiens
acacctcataaaatc

SEQ ID NO: 1510598 - DNA, 15 bp, Homo sapiens
cacctcataaaatct

SEQ ID NO: 1510599 - DNA, 15 bp, Homo sapiens
acctcataaaatctt

SEQ ID NO: 1510600 - DNA, 15 bp, Homo sapiens
cctcataaaatcttt

SEQ ID NO: 1510601 - DNA, 15 bp, Homo sapiens
ctcataaaatcttta

SEQ ID NO: 1510602 - DNA, 15 bp, Homo sapiens
tcataaaatctttac

SEQ ID NO: 1510603 - DNA, 15 bp, Homo sapiens
cataaaatctttaca

SEQ ID NO: 1510604 - DNA, 15 bp, Homo sapiens
ataaaatctttacaa

SEQ ID NO: 1510605 - DNA, 15 bp, Homo sapiens
taaaatctttacaaa

SEQ ID NO: 1510606 - DNA, 15 bp, Homo sapiens
aaaatctttacaaag

SEQ ID NO: 1510607 - DNA, 15 bp, Homo sapiens
aaatctttacaaagt

SEQ ID NO: 1510608 - DNA, 15 bp, Homo sapiens
aatctttacaaagta

SEQ ID NO: 1510609 - DNA, 15 bp, Homo sapiens
atctttacaaagtat

SEQ ID NO: 1510610 - DNA, 15 bp, Homo sapiens
tctttacaaagtatt

SEQ ID NO: 1510611 - DNA, 15 bp, Homo sapiens
ctttacaaagtattt

SEQ ID NO: 1510612 - DNA, 15 bp, Homo sapiens
tttacaaagtatttt

SEQ ID NO: 1510613 - DNA, 15 bp, Homo sapiens
ttacaaagtattttc

SEQ ID NO: 1510614 - DNA, 15 bp, Homo sapiens
tacaaagtattttct

SEQ ID NO: 1510615 - DNA, 15 bp, Homo sapiens
acaaagtattttcta

SEQ ID NO: 1510616 - DNA, 15 bp, Homo sapiens
caaagtattttctaa

SEQ ID NO: 1510617 - DNA, 15 bp, Homo sapiens
aaagtattttctaaa

SEQ ID NO: 1510618 - DNA, 15 bp, Homo sapiens
aagtattttctaaat

SEQ ID NO: 1510619 - DNA, 15 bp, Homo sapiens
agtattttctaaatg

SEQ ID NO: 1510620 - DNA, 15 bp, Homo sapiens
gtattttctaaatga

SEQ ID NO: 1510621 - DNA, 15 bp, Homo sapiens
tattttctaaatgaa

SEQ ID NO: 1510622 - DNA, 15 bp, Homo sapiens
attttctaaatgaat

SEQ ID NO: 1510623 - DNA, 15 bp, Homo sapiens
ttttctaaatgaata

SEQ ID NO: 1510624 - DNA, 15 bp, Homo sapiens
tttctaaatgaataa

SEQ ID NO: 1510625 - DNA, 15 bp, Homo sapiens
ttctaaatgaataat

SEQ ID NO: 1510626 - DNA, 15 bp, Homo sapiens
tctaaatgaataatg

SEQ ID NO: 1510627 - DNA, 15 bp, Homo sapiens
ctaaatgaataatga

SEQ ID NO: 1510628 - DNA, 15 bp, Homo sapiens
taaatgaataatgat

SEQ ID NO: 1510629 - DNA, 15 bp, Homo sapiens
aaatgaataatgatg

SEQ ID NO: 1510630 - DNA, 15 bp, Homo sapiens
atgaataatgatgaa

SEQ ID NO: 1510631 - DNA, 15 bp, Homo sapiens
tgaataatgatgaaa

SEQ ID NO: 1510632 - DNA, 15 bp, Homo sapiens
gaataatgatgaaat

SEQ ID NO: 1510633 - DNA, 15 bp, Homo sapiens
aataatgatgaaata

SEQ ID NO: 1510634 - DNA, 15 bp, Homo sapiens
ataatgatgaaataa

SEQ ID NO: 1510635 - DNA, 15 bp, Homo sapiens
taatgatgaaataaa

SEQ ID NO: 1510636 - DNA, 15 bp, Homo sapiens
aatgatgaaataaag

SEQ ID NO: 1510637 - DNA, 15 bp, Homo sapiens
atgatgaaataaagt

SEQ ID NO: 1510638 - DNA, 15 bp, Homo sapiens
tgatgaaataaagtc

SEQ ID NO: 1510639 - DNA, 15 bp, Homo sapiens
gatgaaataaagtct

SEQ ID NO: 1510640 - DNA, 15 bp, Homo sapiens
atgaaataaagtctt

SEQ ID NO: 1510641 - DNA, 15 bp, Homo sapiens
tgaaataaagtcttt

SEQ ID NO: 1510642 - DNA, 15 bp, Homo sapiens
gaaataaagtcttta

SEQ ID NO: 1510643 - DNA, 15 bp, Homo sapiens
aaataaagtctttat

SEQ ID NO: 1510644 - DNA, 15 bp, Homo sapiens
aataaagtctttatt

SEQ ID NO: 1510645 - DNA, 15 bp, Homo sapiens
ataaagtctttattc

SEQ ID NO: 1510646 - DNA, 15 bp, Homo sapiens
taaagtctttattct

SEQ ID NO: 1510647 - DNA, 15 bp, Homo sapiens
aaagtctttattcta

SEQ ID NO: 1510648 - DNA, 15 bp, Homo sapiens
aagtctttattctag

SEQ ID NO: 1510649 - DNA, 15 bp, Homo sapiens
agtctttattctagg

SEQ ID NO: 1510650 - DNA, 15 bp, Homo sapiens
gtctttattctaggt

SEQ ID NO: 1510651 - DNA, 15 bp, Homo sapiens
tctttattctaggtg

SEQ ID NO: 1510652 - DNA, 15 bp, Homo sapiens
ctttattctaggtgc

SEQ ID NO: 1510653 - DNA, 15 bp, Homo sapiens
tttattctaggtgca

SEQ ID NO: 1510654 - DNA, 15 bp, Homo sapiens
ttattctaggtgcat

SEQ ID NO: 1510655 - DNA, 15 bp, Homo sapiens
tattctaggtgcatc

SEQ ID NO: 1510656 - DNA, 15 bp, Homo sapiens
attctaggtgcatct

SEQ ID NO: 1510657 - DNA, 15 bp, Homo sapiens
ttctaggtgcatctg

SEQ ID NO: 1510658 - DNA, 15 bp, Homo sapiens
tctaggtgcatctgc

SEQ ID NO: 1510659 - DNA, 15 bp, Homo sapiens
ctaggtgcatctgcc

SEQ ID NO: 1510660 - DNA, 15 bp, Homo sapiens
taggtgcatctgccc

SEQ ID NO: 1510661 - DNA, 15 bp, Homo sapiens
aggtgcatctgcccc

SEQ ID NO: 1510662 - DNA, 15 bp, Homo sapiens
ggtgcatctgcccca

SEQ ID NO: 1510663 - DNA, 15 bp, Homo sapiens
gtgcatctgccccac

SEQ ID NO: 1510664 - DNA, 15 bp, Homo sapiens
tgcatctgccccaca

SEQ ID NO: 1510665 - DNA, 15 bp, Homo sapiens
gcatctgccccacat

SEQ ID NO: 1510666 - DNA, 15 bp, Homo sapiens
catctgccccacata

SEQ ID NO: 1510667 - DNA, 15 bp, Homo sapiens
atctgccccacataa

SEQ ID NO: 1510668 - DNA, 15 bp, Homo sapiens
tctgccccacataat

SEQ ID NO: 1510669 - DNA, 15 bp, Homo sapiens
ctgccccacataatt

SEQ ID NO: 1510670 - DNA, 15 bp, Homo sapiens
tgccccacataattt

SEQ ID NO: 1510671 - DNA, 15 bp, Homo sapiens
gccccacataatttg

SEQ ID NO: 1510672 - DNA, 15 bp, Homo sapiens
ccccacataatttgt

SEQ ID NO: 1510673 - DNA, 15 bp, Homo sapiens
cccacataatttgtt

SEQ ID NO: 1510674 - DNA, 15 bp, Homo sapiens
ccacataatttgttt

SEQ ID NO: 1510675 - DNA, 15 bp, Homo sapiens
cacataatttgtttt

SEQ ID NO: 1510676 - DNA, 15 bp, Homo sapiens
acataatttgttttc

SEQ ID NO: 1510677 - DNA, 15 bp, Homo sapiens
cataatttgttttct

SEQ ID NO: 1510678 - DNA, 15 bp, Homo sapiens
ataatttgttttctt

SEQ ID NO: 1510679 - DNA, 15 bp, Homo sapiens
taatttgttttcttt

SEQ ID NO: 1510680 - DNA, 15 bp, Homo sapiens
aatttgttttctttg

SEQ ID NO: 1510681 - DNA, 15 bp, Homo sapiens
atttgttttctttgg

SEQ ID NO: 1510682 - DNA, 15 bp, Homo sapiens
tttgttttctttgga

SEQ ID NO: 1510683 - DNA, 15 bp, Homo sapiens
ttgttttctttggac

SEQ ID NO: 1510684 - DNA, 15 bp, Homo sapiens
tgttttctttggact

SEQ ID NO: 1510685 - DNA, 15 bp, Homo sapiens
gttttctttggacta

SEQ ID NO: 1510686 - DNA, 15 bp, Homo sapiens
ttttctttggactag

SEQ ID NO: 1510687 - DNA, 15 bp, Homo sapiens
tttctttggactaga

SEQ ID NO: 1510688 - DNA, 15 bp, Homo sapiens
ttctttggactagaa

SEQ ID NO: 1510689 - DNA, 15 bp, Homo sapiens
tctttggactagaag

SEQ ID NO: 1510690 - DNA, 15 bp, Homo sapiens
ctttggactagaagt

SEQ ID NO: 1510691 - DNA, 15 bp, Homo sapiens
tttggactagaagtt

SEQ ID NO: 1510692 - DNA, 15 bp, Homo sapiens
ttggactagaagttt

SEQ ID NO: 1510693 - DNA, 15 bp, Homo sapiens
tggactagaagtttt

SEQ ID NO: 1510694 - DNA, 15 bp, Homo sapiens
ggactagaagttttg

SEQ ID NO: 1510695 - DNA, 15 bp, Homo sapiens
gactagaagttttga

SEQ ID NO: 1510696 - DNA, 15 bp, Homo sapiens
actagaagttttgat

SEQ ID NO: 1510697 - DNA, 15 bp, Homo sapiens
ctagaagttttgatg

SEQ ID NO: 1510698 - DNA, 15 bp, Homo sapiens
tagaagttttgatgt

SEQ ID NO: 1510699 - DNA, 15 bp, Homo sapiens
agaagttttgatgtg

SEQ ID NO: 1510700 - DNA, 15 bp, Homo sapiens
gaagttttgatgtgt

SEQ ID NO: 1510701 - DNA, 15 bp, Homo sapiens
aagttttgatgtgtt

SEQ ID NO: 1510702 - DNA, 15 bp, Homo sapiens
agttttgatgtgttg

SEQ ID NO: 1510703 - DNA, 15 bp, Homo sapiens
gttttgatgtgttga

SEQ ID NO: 1510704 - DNA, 15 bp, Homo sapiens
ttttgatgtgttgag

SEQ ID NO: 1510705 - DNA, 15 bp, Homo sapiens
tttgatgtgttgaga

SEQ ID NO: 1510706 - DNA, 15 bp, Homo sapiens
ttgatgtgttgagaa

SEQ ID NO: 1510707 - DNA, 15 bp, Homo sapiens
tgatgtgttgagaat

SEQ ID NO: 1510708 - DNA, 15 bp, Homo sapiens
gatgtgttgagaatg

SEQ ID NO: 1510709 - DNA, 15 bp, Homo sapiens
atgtgttgagaatgg

SEQ ID NO: 1510710 - DNA, 15 bp, Homo sapiens
tgtgttgagaatggt

SEQ ID NO: 1510711 - DNA, 15 bp, Homo sapiens
gtgttgagaatggta

SEQ ID NO: 1510712 - DNA, 15 bp, Homo sapiens
tgttgagaatggtaa

SEQ ID NO: 1510713 - DNA, 15 bp, Homo sapiens
gttgagaatggtaat

SEQ ID NO: 1510714 - DNA, 15 bp, Homo sapiens
ttgagaatggtaatg

SEQ ID NO: 1510715 - DNA, 15 bp, Homo sapiens
tgagaatggtaatga

SEQ ID NO: 1510716 - DNA, 15 bp, Homo sapiens
gagaatggtaatgaa

SEQ ID NO: 1510717 - DNA, 15 bp, Homo sapiens
agaatggtaatgaat

SEQ ID NO: 1510718 - DNA, 15 bp, Homo sapiens
gaatggtaatgaatt

SEQ ID NO: 1510719 - DNA, 15 bp, Homo sapiens
aatggtaatgaatta

SEQ ID NO: 1510720 - DNA, 15 bp, Homo sapiens
atggtaatgaattaa

SEQ ID NO: 1510721 - DNA, 15 bp, Homo sapiens
tggtaatgaattaac

SEQ ID NO: 1510722 - DNA, 15 bp, Homo sapiens
ggtaatgaattaact

SEQ ID NO: 1510723 - DNA, 15 bp, Homo sapiens
gtaatgaattaactc

SEQ ID NO: 1510724 - DNA, 15 bp, Homo sapiens
taatgaattaactcc

SEQ ID NO: 1510725 - DNA, 15 bp, Homo sapiens
aatgaattaactcca

SEQ ID NO: 1510726 - DNA, 15 bp, Homo sapiens
atgaattaactccat

SEQ ID NO: 1510727 - DNA, 15 bp, Homo sapiens
tgaattaactccatt

SEQ ID NO: 1510728 - DNA, 15 bp, Homo sapiens
gaattaactccattt

SEQ ID NO: 1510729 - DNA, 15 bp, Homo sapiens
aattaactccatttt

SEQ ID NO: 1510730 - DNA, 15 bp, Homo sapiens
attaactccatttta

SEQ ID NO: 1510731 - DNA, 15 bp, Homo sapiens
ttaactccattttaa

SEQ ID NO: 1510732 - DNA, 15 bp, Homo sapiens
taactccattttaaa

SEQ ID NO: 1510733 - DNA, 15 bp, Homo sapiens
aactccattttaaat

SEQ ID NO: 1510734 - DNA, 15 bp, Homo sapiens
actccattttaaatg

SEQ ID NO: 1510735 - DNA, 15 bp, Homo sapiens
ctccattttaaatgt

SEQ ID NO: 1510736 - DNA, 15 bp, Homo sapiens
tccattttaaatgta

SEQ ID NO: 1510737 - DNA, 15 bp, Homo sapiens
ccattttaaatgtag

SEQ ID NO: 1510738 - DNA, 15 bp, Homo sapiens
attttaaatgtagaa

SEQ ID NO: 1510739 - DNA, 15 bp, Homo sapiens
ttttaaatgtagaat

SEQ ID NO: 1510740 - DNA, 15 bp, Homo sapiens
tttaaatgtagaatg

SEQ ID NO: 1510741 - DNA, 15 bp, Homo sapiens
ttaaatgtagaatgc

SEQ ID NO: 1510742 - DNA, 15 bp, Homo sapiens
taaatgtagaatgcg

SEQ ID NO: 1510743 - DNA, 15 bp, Homo sapiens
aaatgtagaatgcgt

SEQ ID NO: 1510744 - DNA, 15 bp, Homo sapiens
aatgtagaatgcgta

SEQ ID NO: 1510745 - DNA, 15 bp, Homo sapiens
atgtagaatgcgtat

SEQ ID NO: 1510746 - DNA, 15 bp, Homo sapiens
tgtagaatgcgtatc

SEQ ID NO: 1510747 - DNA, 15 bp, Homo sapiens
gtagaatgcgtatca

SEQ ID NO: 1510748 - DNA, 15 bp, Homo sapiens
tagaatgcgtatcac

SEQ ID NO: 1510749 - DNA, 15 bp, Homo sapiens
agaatgcgtatcact

SEQ ID NO: 1510750 - DNA, 15 bp, Homo sapiens
gaatgcgtatcactc

SEQ ID NO: 1510751 - DNA, 15 bp, Homo sapiens
aatgcgtatcactcc

SEQ ID NO: 1510752 - DNA, 15 bp, Homo sapiens
atgcgtatcactcca

SEQ ID NO: 1510753 - DNA, 15 bp, Homo sapiens
tgcgtatcactccaa

SEQ ID NO: 1510754 - DNA, 15 bp, Homo sapiens
gcgtatcactccaat

SEQ ID NO: 1510755 - DNA, 15 bp, Homo sapiens
cgtatcactccaata

SEQ ID NO: 1510756 - DNA, 15 bp, Homo sapiens
gtatcactccaatat

SEQ ID NO: 1510757 - DNA, 15 bp, Homo sapiens
tatcactccaatatg

SEQ ID NO: 1510758 - DNA, 15 bp, Homo sapiens
atcactccaatatga

SEQ ID NO: 1510759 - DNA, 15 bp, Homo sapiens
tcactccaatatgaa

SEQ ID NO: 1510760 - DNA, 15 bp, Homo sapiens
cactccaatatgaat

SEQ ID NO: 1510761 - DNA, 15 bp, Homo sapiens
actccaatatgaatg

SEQ ID NO: 1510762 - DNA, 15 bp, Homo sapiens
ctccaatatgaatgc

SEQ ID NO: 1510763 - DNA, 15 bp, Homo sapiens
tccaatatgaatgcc

SEQ ID NO: 1510764 - DNA, 15 bp, Homo sapiens
ccaatatgaatgccc

SEQ ID NO: 1510765 - DNA, 15 bp, Homo sapiens
caatatgaatgccct

SEQ ID NO: 1510766 - DNA, 15 bp, Homo sapiens
aatatgaatgcccta

SEQ ID NO: 1510767 - DNA, 15 bp, Homo sapiens
atatgaatgccctaa

SEQ ID NO: 1510768 - DNA, 15 bp, Homo sapiens
tatgaatgccctaat

SEQ ID NO: 1510769 - DNA, 15 bp, Homo sapiens
atgaatgccctaatg

SEQ ID NO: 1510770 - DNA, 15 bp, Homo sapiens
tgaatgccctaatga

SEQ ID NO: 1510771 - DNA, 15 bp, Homo sapiens
gaatgccctaatgaa

SEQ ID NO: 1510772 - DNA, 15 bp, Homo sapiens
aatgccctaatgaat

SEQ ID NO: 1510773 - DNA, 15 bp, Homo sapiens
atgccctaatgaatc

SEQ ID NO: 1510774 - DNA, 15 bp, Homo sapiens
tgccctaatgaatcc

SEQ ID NO: 1510775 - DNA, 15 bp, Homo sapiens
gccctaatgaatcct

SEQ ID NO: 1510776 - DNA, 15 bp, Homo sapiens
ccctaatgaatccta

SEQ ID NO: 1510777 - DNA, 15 bp, Homo sapiens
cctaatgaatcctaa

SEQ ID NO: 1510778 - DNA, 15 bp, Homo sapiens
ctaatgaatcctaag

SEQ ID NO: 1510779 - DNA, 15 bp, Homo sapiens
taatgaatcctaaga

SEQ ID NO: 1510780 - DNA, 15 bp, Homo sapiens
aatgaatcctaagat

SEQ ID NO: 1510781 - DNA, 15 bp, Homo sapiens
atgaatcctaagatt

SEQ ID NO: 1510782 - DNA, 15 bp, Homo sapiens
tgaatcctaagattt

SEQ ID NO: 1510783 - DNA, 15 bp, Homo sapiens
gaatcctaagatttg

SEQ ID NO: 1510784 - DNA, 15 bp, Homo sapiens
aatcctaagatttgt

SEQ ID NO: 1510785 - DNA, 15 bp, Homo sapiens
atcctaagatttgta

SEQ ID NO: 1510786 - DNA, 15 bp, Homo sapiens
tcctaagatttgtag

SEQ ID NO: 1510787 - DNA, 15 bp, Homo sapiens
cctaagatttgtagg

SEQ ID NO: 1510788 - DNA, 15 bp, Homo sapiens
ctaagatttgtaggt

SEQ ID NO: 1510789 - DNA, 15 bp, Homo sapiens
taagatttgtaggtt

SEQ ID NO: 1510790 - DNA, 15 bp, Homo sapiens
aagatttgtaggttt

SEQ ID NO: 1510791 - DNA, 15 bp, Homo sapiens
agatttgtaggtttt

SEQ ID NO: 1510792 - DNA, 15 bp, Homo sapiens
gatttgtaggttttg

SEQ ID NO: 1510793 - DNA, 15 bp, Homo sapiens
atttgtaggttttgt

SEQ ID NO: 1510794 - DNA, 15 bp, Homo sapiens
tttgtaggttttgtg

SEQ ID NO: 1510795 - DNA, 15 bp, Homo sapiens
ttgtaggttttgtgt

SEQ ID NO: 1510796 - DNA, 15 bp, Homo sapiens
tgtaggttttgtgta

SEQ ID NO: 1510797 - DNA, 15 bp, Homo sapiens
gtaggttttgtgtac

SEQ ID NO: 1510798 - DNA, 15 bp, Homo sapiens
taggttttgtgtact

SEQ ID NO: 1510799 - DNA, 15 bp, Homo sapiens
aggttttgtgtacta

SEQ ID NO: 1510800 - DNA, 15 bp, Homo sapiens
ggttttgtgtactag

SEQ ID NO: 1510801 - DNA, 15 bp, Homo sapiens
gttttgtgtactagt

SEQ ID NO: 1510802 - DNA, 15 bp, Homo sapiens
ttttgtgtactagta

SEQ ID NO: 1510803 - DNA, 15 bp, Homo sapiens
tttgtgtactagtat

SEQ ID NO: 1510804 - DNA, 15 bp, Homo sapiens
ttgtgtactagtatg

SEQ ID NO: 1510805 - DNA, 15 bp, Homo sapiens
tgtgtactagtatga

SEQ ID NO: 1510806 - DNA, 15 bp, Homo sapiens
gtgtactagtatgaa

SEQ ID NO: 1510807 - DNA, 15 bp, Homo sapiens
tgtactagtatgaaa

SEQ ID NO: 1510808 - DNA, 15 bp, Homo sapiens
gtactagtatgaaaa

SEQ ID NO: 1510809 - DNA, 15 bp, Homo sapiens
tactagtatgaaaat

SEQ ID NO: 1510810 - DNA, 15 bp, Homo sapiens
actagtatgaaaatt

SEQ ID NO: 1510811 - DNA, 15 bp, Homo sapiens
ctagtatgaaaatta

SEQ ID NO: 1510812 - DNA, 15 bp, Homo sapiens
tagtatgaaaattac

SEQ ID NO: 1510813 - DNA, 15 bp, Homo sapiens
agtatgaaaattact

SEQ ID NO: 1510814 - DNA, 15 bp, Homo sapiens
gtatgaaaattacta

SEQ ID NO: 1510815 - DNA, 15 bp, Homo sapiens
tatgaaaattactaa

SEQ ID NO: 1510816 - DNA, 15 bp, Homo sapiens
atgaaaattactaaa

SEQ ID NO: 1510817 - DNA, 15 bp, Homo sapiens
tgaaaattactaaag

SEQ ID NO: 1510818 - DNA, 15 bp, Homo sapiens
gaaaattactaaaga

SEQ ID NO: 1510819 - DNA, 15 bp, Homo sapiens
aaaattactaaagat

SEQ ID NO: 1510820 - DNA, 15 bp, Homo sapiens
aaattactaaagatg

SEQ ID NO: 1510821 - DNA, 15 bp, Homo sapiens
aattactaaagatgg

SEQ ID NO: 1510822 - DNA, 15 bp, Homo sapiens
attactaaagatgga

SEQ ID NO: 1510823 - DNA, 15 bp, Homo sapiens
ttactaaagatggaa

SEQ ID NO: 1510824 - DNA, 15 bp, Homo sapiens
tactaaagatggaaa

SEQ ID NO: 1510825 - DNA, 15 bp, Homo sapiens
actaaagatggaaaa

SEQ ID NO: 1510826 - DNA, 15 bp, Homo sapiens
ctaaagatggaaaaa

SEQ ID NO: 1510827 - DNA, 15 bp, Homo sapiens
taaagatggaaaaat

SEQ ID NO: 1510828 - DNA, 15 bp, Homo sapiens
aaagatggaaaaatc

SEQ ID NO: 1510829 - DNA, 15 bp, Homo sapiens
aagatggaaaaatca

SEQ ID NO: 1510830 - DNA, 15 bp, Homo sapiens
agatggaaaaatcac

SEQ ID NO: 1510831 - DNA, 15 bp, Homo sapiens
gatggaaaaatcaca

SEQ ID NO: 1510832 - DNA, 15 bp, Homo sapiens
atggaaaaatcacat

SEQ ID NO: 1510833 - DNA, 15 bp, Homo sapiens
tggaaaaatcacatg

SEQ ID NO: 1510834 - DNA, 15 bp, Homo sapiens
ggaaaaatcacatgt

SEQ ID NO: 1510835 - DNA, 15 bp, Homo sapiens
gaaaaatcacatgtt

SEQ ID NO: 1510836 - DNA, 15 bp, Homo sapiens
aaaaatcacatgttg

SEQ ID NO: 1510837 - DNA, 15 bp, Homo sapiens
aaaatcacatgttgg

SEQ ID NO: 1510838 - DNA, 15 bp, Homo sapiens
aaatcacatgttgga

SEQ ID NO: 1510839 - DNA, 15 bp, Homo sapiens
aatcacatgttggag

SEQ ID NO: 1510840 - DNA, 15 bp, Homo sapiens
atcacatgttggaga

SEQ ID NO: 1510841 - DNA, 15 bp, Homo sapiens
tcacatgttggagac

SEQ ID NO: 1510842 - DNA, 15 bp, Homo sapiens
cacatgttggagaca

SEQ ID NO: 1510843 - DNA, 15 bp, Homo sapiens
acatgttggagacat

SEQ ID NO: 1510844 - DNA, 15 bp, Homo sapiens
catgttggagacata

SEQ ID NO: 1510845 - DNA, 15 bp, Homo sapiens
atgttggagacataa

SEQ ID NO: 1510846 - DNA, 15 bp, Homo sapiens
tgttggagacataag

SEQ ID NO: 1510847 - DNA, 15 bp, Homo sapiens
gttggagacataaga

SEQ ID NO: 1510848 - DNA, 15 bp, Homo sapiens
ttggagacataagat

SEQ ID NO: 1510849 - DNA, 15 bp, Homo sapiens
tggagacataagata

SEQ ID NO: 1510850 - DNA, 15 bp, Homo sapiens
ggagacataagatac

SEQ ID NO: 1510851 - DNA, 15 bp, Homo sapiens
gagacataagataca

SEQ ID NO: 1510852 - DNA, 15 bp, Homo sapiens
agacataagatacaa

SEQ ID NO: 1510853 - DNA, 15 bp, Homo sapiens
gacataagatacaaa

SEQ ID NO: 1510854 - DNA, 15 bp, Homo sapiens
acataagatacaaac

SEQ ID NO: 1510855 - DNA, 15 bp, Homo sapiens
cataagatacaaacc

SEQ ID NO: 1510856 - DNA, 15 bp, Homo sapiens
ataagatacaaacct

SEQ ID NO: 1510857 - DNA, 15 bp, Homo sapiens
taagatacaaacctt

SEQ ID NO: 1510858 - DNA, 15 bp, Homo sapiens
aagatacaaaccttt

SEQ ID NO: 1510859 - DNA, 15 bp, Homo sapiens
agatacaaacctttt

SEQ ID NO: 1510860 - DNA, 15 bp, Homo sapiens
gatacaaaccttttt

SEQ ID NO: 1510861 - DNA, 15 bp, Homo sapiens
atacaaacctttttg

SEQ ID NO: 1510862 - DNA, 15 bp, Homo sapiens
tacaaacctttttgt

SEQ ID NO: 1510863 - DNA, 15 bp, Homo sapiens
acaaacctttttgtt

SEQ ID NO: 1510864 - DNA, 15 bp, Homo sapiens
caaacctttttgttt

SEQ ID NO: 1510865 - DNA, 15 bp, Homo sapiens
aaacctttttgtttt

SEQ ID NO: 1510866 - DNA, 15 bp, Homo sapiens
aacctttttgttttc

SEQ ID NO: 1510867 - DNA, 15 bp, Homo sapiens
acctttttgttttct

SEQ ID NO: 1510868 - DNA, 15 bp, Homo sapiens
cctttttgttttctg

SEQ ID NO: 1510869 - DNA, 15 bp, Homo sapiens
ctttttgttttctga

SEQ ID NO: 1510870 - DNA, 15 bp, Homo sapiens
tttttgttttctgaa

SEQ ID NO: 1510871 - DNA, 15 bp, Homo sapiens
ttttgttttctgaaa

SEQ ID NO: 1510872 - DNA, 15 bp, Homo sapiens
tttgttttctgaaaa

SEQ ID NO: 1510873 - DNA, 15 bp, Homo sapiens
ttgttttctgaaaat

SEQ ID NO: 1510874 - DNA, 15 bp, Homo sapiens
tgttttctgaaaata

SEQ ID NO: 1510875 - DNA, 15 bp, Homo sapiens
gttttctgaaaatac

SEQ ID NO: 1510876 - DNA, 15 bp, Homo sapiens
ttttctgaaaataca

SEQ ID NO: 1510877 - DNA, 15 bp, Homo sapiens
tttctgaaaatacaa

SEQ ID NO: 1510878 - DNA, 15 bp, Homo sapiens
ttctgaaaatacaac

SEQ ID NO: 1510879 - DNA, 15 bp, Homo sapiens
tctgaaaatacaacc

SEQ ID NO: 1510880 - DNA, 15 bp, Homo sapiens
ctgaaaatacaacct

SEQ ID NO: 1510881 - DNA, 15 bp, Homo sapiens
tgaaaatacaacctc

SEQ ID NO: 1510882 - DNA, 15 bp, Homo sapiens
gaaaatacaacctct

SEQ ID NO: 1510883 - DNA, 15 bp, Homo sapiens
aaaatacaacctctg

SEQ ID NO: 1510884 - DNA, 15 bp, Homo sapiens
aaatacaacctctga

SEQ ID NO: 1510885 - DNA, 15 bp, Homo sapiens
aatacaacctctgat

SEQ ID NO: 1510886 - DNA, 15 bp, Homo sapiens
atacaacctctgatt

SEQ ID NO: 1510887 - DNA, 15 bp, Homo sapiens
tacaacctctgattt

SEQ ID NO: 1510888 - DNA, 15 bp, Homo sapiens
acaacctctgatttc

SEQ ID NO: 1510889 - DNA, 15 bp, Homo sapiens
caacctctgatttct

SEQ ID NO: 1510890 - DNA, 15 bp, Homo sapiens
aacctctgatttctg

SEQ ID NO: 1510891 - DNA, 15 bp, Homo sapiens
acctctgatttctga

SEQ ID NO: 1510892 - DNA, 15 bp, Homo sapiens
cctctgatttctgat

SEQ ID NO: 1510893 - DNA, 15 bp, Homo sapiens
ctctgatttctgatt

SEQ ID NO: 1510894 - DNA, 15 bp, Homo sapiens
tctgatttctgattc

SEQ ID NO: 1510895 - DNA, 15 bp, Homo sapiens
ctgatttctgattcc

SEQ ID NO: 1510896 - DNA, 15 bp, Homo sapiens
tgatttctgattcct

SEQ ID NO: 1510897 - DNA, 15 bp, Homo sapiens
gatttctgattcctt

SEQ ID NO: 1510898 - DNA, 15 bp, Homo sapiens
atttctgattccttg

SEQ ID NO: 1510899 - DNA, 15 bp, Homo sapiens
tttctgattccttgt

SEQ ID NO: 1510900 - DNA, 15 bp, Homo sapiens
ttctgattccttgtt

SEQ ID NO: 1510901 - DNA, 15 bp, Homo sapiens
tctgattccttgttg

SEQ ID NO: 1510902 - DNA, 15 bp, Homo sapiens
ctgattccttgttgt

SEQ ID NO: 1510903 - DNA, 15 bp, Homo sapiens
tgattccttgttgta

SEQ ID NO: 1510904 - DNA, 15 bp, Homo sapiens
gattccttgttgtaa

SEQ ID NO: 1510905 - DNA, 15 bp, Homo sapiens
attccttgttgtaat

SEQ ID NO: 1510906 - DNA, 15 bp, Homo sapiens
ttccttgttgtaata

SEQ ID NO: 1510907 - DNA, 15 bp, Homo sapiens
tccttgttgtaatat

SEQ ID NO: 1510908 - DNA, 15 bp, Homo sapiens
ccttgttgtaatatg

SEQ ID NO: 1510909 - DNA, 15 bp, Homo sapiens
cttgttgtaatatgg

SEQ ID NO: 1510910 - DNA, 15 bp, Homo sapiens
ttgttgtaatatggt

SEQ ID NO: 1510911 - DNA, 15 bp, Homo sapiens
tgttgtaatatggtg

SEQ ID NO: 1510912 - DNA, 15 bp, Homo sapiens
gttgtaatatggtgt

SEQ ID NO: 1510913 - DNA, 15 bp, Homo sapiens
ttgtaatatggtgta

SEQ ID NO: 1510914 - DNA, 15 bp, Homo sapiens
tgtaatatggtgtaa

SEQ ID NO: 1510915 - DNA, 15 bp, Homo sapiens
gtaatatggtgtaat

SEQ ID NO: 1510916 - DNA, 15 bp, Homo sapiens
taatatggtgtaatt

SEQ ID NO: 1510917 - DNA, 15 bp, Homo sapiens
aatatggtgtaatta

SEQ ID NO: 1510918 - DNA, 15 bp, Homo sapiens
atatggtgtaattat

SEQ ID NO: 1510919 - DNA, 15 bp, Homo sapiens
tatggtgtaattata

SEQ ID NO: 1510920 - DNA, 15 bp, Homo sapiens
atggtgtaattatac

SEQ ID NO: 1510921 - DNA, 15 bp, Homo sapiens
tggtgtaattatact

SEQ ID NO: 1510922 - DNA, 15 bp, Homo sapiens
ggtgtaattatacta

SEQ ID NO: 1510923 - DNA, 15 bp, Homo sapiens
gtgtaattatactag

SEQ ID NO: 1510924 - DNA, 15 bp, Homo sapiens
tgtaattatactaga

SEQ ID NO: 1510925 - DNA, 15 bp, Homo sapiens
gtaattatactagat

SEQ ID NO: 1510926 - DNA, 15 bp, Homo sapiens
taattatactagatt

SEQ ID NO: 1510927 - DNA, 15 bp, Homo sapiens
aattatactagattg

SEQ ID NO: 1510928 - DNA, 15 bp, Homo sapiens
attatactagattgt

SEQ ID NO: 1510929 - DNA, 15 bp, Homo sapiens
ttatactagattgta

SEQ ID NO: 1510930 - DNA, 15 bp, Homo sapiens
tatactagattgtaa

SEQ ID NO: 1510931 - DNA, 15 bp, Homo sapiens
atactagattgtaat

SEQ ID NO: 1510932 - DNA, 15 bp, Homo sapiens
tactagattgtaatt

SEQ ID NO: 1510933 - DNA, 15 bp, Homo sapiens
actagattgtaattt

SEQ ID NO: 1510934 - DNA, 15 bp, Homo sapiens
ctagattgtaatttt

SEQ ID NO: 1510935 - DNA, 15 bp, Homo sapiens
tagattgtaattttg

SEQ ID NO: 1510936 - DNA, 15 bp, Homo sapiens
agattgtaattttgt

SEQ ID NO: 1510937 - DNA, 15 bp, Homo sapiens
gattgtaattttgtt

SEQ ID NO: 1510938 - DNA, 15 bp, Homo sapiens
attgtaattttgttg

SEQ ID NO: 1510939 - DNA, 15 bp, Homo sapiens
ttgtaattttgttgt

SEQ ID NO: 1510940 - DNA, 15 bp, Homo sapiens
tgtaattttgttgtt

SEQ ID NO: 1510941 - DNA, 15 bp, Homo sapiens
gtaattttgttgtta

SEQ ID NO: 1510942 - DNA, 15 bp, Homo sapiens
taattttgttgttag

SEQ ID NO: 1510943 - DNA, 15 bp, Homo sapiens
aattttgttgttaga

SEQ ID NO: 1510944 - DNA, 15 bp, Homo sapiens
attttgttgttagat

SEQ ID NO: 1510945 - DNA, 15 bp, Homo sapiens
ttttgttgttagatt

SEQ ID NO: 1510946 - DNA, 15 bp, Homo sapiens
tttgttgttagatta

SEQ ID NO: 1510947 - DNA, 15 bp, Homo sapiens
ttgttgttagattat

SEQ ID NO: 1510948 - DNA, 15 bp, Homo sapiens
tgttgttagattata

SEQ ID NO: 1510949 - DNA, 15 bp, Homo sapiens
gttgttagattatac

SEQ ID NO: 1510950 - DNA, 15 bp, Homo sapiens
ttgttagattatact

SEQ ID NO: 1510951 - DNA, 15 bp, Homo sapiens
tgttagattatactt

SEQ ID NO: 1510952 - DNA, 15 bp, Homo sapiens
gttagattatacttt

SEQ ID NO: 1510953 - DNA, 15 bp, Homo sapiens
ttagattatactttt

SEQ ID NO: 1510954 - DNA, 15 bp, Homo sapiens
tagattatacttttt

SEQ ID NO: 1510955 - DNA, 15 bp, Homo sapiens
agattatactttttt

SEQ ID NO: 1510956 - DNA, 15 bp, Homo sapiens
gattatactttttta

SEQ ID NO: 1510957 - DNA, 15 bp, Homo sapiens
attatacttttttaa

SEQ ID NO: 1510958 - DNA, 15 bp, Homo sapiens
ttatacttttttaag

SEQ ID NO: 1510959 - DNA, 15 bp, Homo sapiens
tatacttttttaagt

SEQ ID NO: 1510960 - DNA, 15 bp, Homo sapiens
atacttttttaagtt

SEQ ID NO: 1510961 - DNA, 15 bp, Homo sapiens
tacttttttaagttc

SEQ ID NO: 1510962 - DNA, 15 bp, Homo sapiens
acttttttaagttca

SEQ ID NO: 1510963 - DNA, 15 bp, Homo sapiens
cttttttaagttcag

SEQ ID NO: 1510964 - DNA, 15 bp, Homo sapiens
ttttttaagttcagt

SEQ ID NO: 1510965 - DNA, 15 bp, Homo sapiens
tttttaagttcagtg

SEQ ID NO: 1510966 - DNA, 15 bp, Homo sapiens
ttttaagttcagtgt

SEQ ID NO: 1510967 - DNA, 15 bp, Homo sapiens
tttaagttcagtgtt

SEQ ID NO: 1510968 - DNA, 15 bp, Homo sapiens
ttaagttcagtgttt

SEQ ID NO: 1510969 - DNA, 15 bp, Homo sapiens
taagttcagtgtttg

SEQ ID NO: 1510970 - DNA, 15 bp, Homo sapiens
aagttcagtgtttga

SEQ ID NO: 1510971 - DNA, 15 bp, Homo sapiens
agttcagtgtttgag

SEQ ID NO: 1510972 - DNA, 15 bp, Homo sapiens
gttcagtgtttgagg

SEQ ID NO: 1510973 - DNA, 15 bp, Homo sapiens
ttcagtgtttgagga

SEQ ID NO: 1510974 - DNA, 15 bp, Homo sapiens
tcagtgtttgaggac

SEQ ID NO: 1510975 - DNA, 15 bp, Homo sapiens
cagtgtttgaggaca

SEQ ID NO: 1510976 - DNA, 15 bp, Homo sapiens
agtgtttgaggacag

SEQ ID NO: 1510977 - DNA, 15 bp, Homo sapiens
gtgtttgaggacaga

SEQ ID NO: 1510978 - DNA, 15 bp, Homo sapiens
tgtttgaggacagac

SEQ ID NO: 1510979 - DNA, 15 bp, Homo sapiens
gtttgaggacagact

SEQ ID NO: 1510980 - DNA, 15 bp, Homo sapiens
tttgaggacagactt

SEQ ID NO: 1510981 - DNA, 15 bp, Homo sapiens
ttgaggacagacttt

SEQ ID NO: 1510982 - DNA, 15 bp, Homo sapiens
tgaggacagactttc

SEQ ID NO: 1510983 - DNA, 15 bp, Homo sapiens
gaggacagactttca

SEQ ID NO: 1510984 - DNA, 15 bp, Homo sapiens
aggacagactttcat

SEQ ID NO: 1510985 - DNA, 15 bp, Homo sapiens
ggacagactttcatt

SEQ ID NO: 1510986 - DNA, 15 bp, Homo sapiens
gacagactttcattt

SEQ ID NO: 1510987 - DNA, 15 bp, Homo sapiens
acagactttcatttg

SEQ ID NO: 1510988 - DNA, 15 bp, Homo sapiens
cagactttcatttgg

SEQ ID NO: 1510989 - DNA, 15 bp, Homo sapiens
agactttcatttggt

SEQ ID NO: 1510990 - DNA, 15 bp, Homo sapiens
gactttcatttggtt

SEQ ID NO: 1510991 - DNA, 15 bp, Homo sapiens
actttcatttggtta

SEQ ID NO: 1510992 - DNA, 15 bp, Homo sapiens
ctttcatttggttag

SEQ ID NO: 1510993 - DNA, 15 bp, Homo sapiens
tttcatttggttagt

SEQ ID NO: 1510994 - DNA, 15 bp, Homo sapiens
ttcatttggttagta

SEQ ID NO: 1510995 - DNA, 15 bp, Homo sapiens
tcatttggttagtag

SEQ ID NO: 1510996 - DNA, 15 bp, Homo sapiens
catttggttagtagt

SEQ ID NO: 1510997 - DNA, 15 bp, Homo sapiens
atttggttagtagta

SEQ ID NO: 1510998 - DNA, 15 bp, Homo sapiens
tttggttagtagtat

SEQ ID NO: 1510999 - DNA, 15 bp, Homo sapiens
ttggttagtagtatt

SEQ ID NO: 1511000 - DNA, 15 bp, Homo sapiens
tggttagtagtatta

SEQ ID NO: 1511001 - DNA, 15 bp, Homo sapiens
ggttagtagtattat

SEQ ID NO: 1511002 - DNA, 15 bp, Homo sapiens
gttagtagtattatg

SEQ ID NO: 1511003 - DNA, 15 bp, Homo sapiens
ttagtagtattatgg

SEQ ID NO: 1511004 - DNA, 15 bp, Homo sapiens
tagtagtattatggc

SEQ ID NO: 1511005 - DNA, 15 bp, Homo sapiens
agtagtattatggca

SEQ ID NO: 1511006 - DNA, 15 bp, Homo sapiens
gtagtattatggcag

SEQ ID NO: 1511007 - DNA, 15 bp, Homo sapiens
tagtattatggcagc

SEQ ID NO: 1511008 - DNA, 15 bp, Homo sapiens
agtattatggcagct

SEQ ID NO: 1511009 - DNA, 15 bp, Homo sapiens
gtattatggcagcta

SEQ ID NO: 1511010 - DNA, 15 bp, Homo sapiens
tattatggcagctag

SEQ ID NO: 1511011 - DNA, 15 bp, Homo sapiens
attatggcagctagc

SEQ ID NO: 1511012 - DNA, 15 bp, Homo sapiens
ttatggcagctagca

SEQ ID NO: 1511013 - DNA, 15 bp, Homo sapiens
tatggcagctagcag

SEQ ID NO: 1511014 - DNA, 15 bp, Homo sapiens
atggcagctagcagc

SEQ ID NO: 1511015 - DNA, 15 bp, Homo sapiens
tggcagctagcagct

SEQ ID NO: 1511016 - DNA, 15 bp, Homo sapiens
ggcagctagcagcta

SEQ ID NO: 1511017 - DNA, 15 bp, Homo sapiens
gcagctagcagctaa

SEQ ID NO: 1511018 - DNA, 15 bp, Homo sapiens
cagctagcagctaaa

SEQ ID NO: 1511019 - DNA, 15 bp, Homo sapiens
agctagcagctaaat

SEQ ID NO: 1511020 - DNA, 15 bp, Homo sapiens
gctagcagctaaata

SEQ ID NO: 1511021 - DNA, 15 bp, Homo sapiens
ctagcagctaaatat

SEQ ID NO: 1511022 - DNA, 15 bp, Homo sapiens
tagcagctaaatatg

SEQ ID NO: 1511023 - DNA, 15 bp, Homo sapiens
agcagctaaatatga

SEQ ID NO: 1511024 - DNA, 15 bp, Homo sapiens
gcagctaaatatgat

SEQ ID NO: 1511025 - DNA, 15 bp, Homo sapiens
cagctaaatatgata

SEQ ID NO: 1511026 - DNA, 15 bp, Homo sapiens
agctaaatatgataa

SEQ ID NO: 1511027 - DNA, 15 bp, Homo sapiens
gctaaatatgataaa

SEQ ID NO: 1511028 - DNA, 15 bp, Homo sapiens
ctaaatatgataaag

SEQ ID NO: 1511029 - DNA, 15 bp, Homo sapiens
taaatatgataaagt

SEQ ID NO: 1511030 - DNA, 15 bp, Homo sapiens
aaatatgataaagtg

SEQ ID NO: 1511031 - DNA, 15 bp, Homo sapiens
aatatgataaagtgt

SEQ ID NO: 1511032 - DNA, 15 bp, Homo sapiens
atatgataaagtgta

SEQ ID NO: 1511033 - DNA, 15 bp, Homo sapiens
tatgataaagtgtac

SEQ ID NO: 1511034 - DNA, 15 bp, Homo sapiens
atgataaagtgtaca

SEQ ID NO: 1511035 - DNA, 15 bp, Homo sapiens
tgataaagtgtacaa

SEQ ID NO: 1511036 - DNA, 15 bp, Homo sapiens
gataaagtgtacaat

SEQ ID NO: 1511037 - DNA, 15 bp, Homo sapiens
ataaagtgtacaatc

SEQ ID NO: 1511038 - DNA, 15 bp, Homo sapiens
taaagtgtacaatca

SEQ ID NO: 1511039 - DNA, 15 bp, Homo sapiens
aaagtgtacaatcaa

SEQ ID NO: 1511040 - DNA, 15 bp, Homo sapiens
aagtgtacaatcaaa

SEQ ID NO: 1511041 - DNA, 15 bp, Homo sapiens
agtgtacaatcaaaa

SEQ ID NO: 1511042 - DNA, 15 bp, Homo sapiens
gtgtacaatcaaaag

SEQ ID NO: 1511043 - DNA, 15 bp, Homo sapiens
tgtacaatcaaaagg

SEQ ID NO: 1511044 - DNA, 15 bp, Homo sapiens
gtacaatcaaaagga

SEQ ID NO: 1511045 - DNA, 15 bp, Homo sapiens
tacaatcaaaaggat

SEQ ID NO: 1511046 - DNA, 15 bp, Homo sapiens
acaatcaaaaggata

SEQ ID NO: 1511047 - DNA, 15 bp, Homo sapiens
caatcaaaaggatat

SEQ ID NO: 1511048 - DNA, 15 bp, Homo sapiens
aatcaaaaggatatt

SEQ ID NO: 1511049 - DNA, 15 bp, Homo sapiens
atcaaaaggatattt

SEQ ID NO: 1511050 - DNA, 15 bp, Homo sapiens
tcaaaaggatatttt

SEQ ID NO: 1511051 - DNA, 15 bp, Homo sapiens
caaaaggatattttt

SEQ ID NO: 1511052 - DNA, 15 bp, Homo sapiens
aaaaggatattttta

SEQ ID NO: 1511053 - DNA, 15 bp, Homo sapiens
aaaggatatttttaa

SEQ ID NO: 1511054 - DNA, 15 bp, Homo sapiens
aaggatatttttaat

SEQ ID NO: 1511055 - DNA, 15 bp, Homo sapiens
aggatatttttaatg

SEQ ID NO: 1511056 - DNA, 15 bp, Homo sapiens
ggatatttttaatga

SEQ ID NO: 1511057 - DNA, 15 bp, Homo sapiens
gatatttttaatgaa

SEQ ID NO: 1511058 - DNA, 15 bp, Homo sapiens
atatttttaatgaag

SEQ ID NO: 1511059 - DNA, 15 bp, Homo sapiens
tatttttaatgaaga

SEQ ID NO: 1511060 - DNA, 15 bp, Homo sapiens
atttttaatgaagat

SEQ ID NO: 1511061 - DNA, 15 bp, Homo sapiens
tttttaatgaagata

SEQ ID NO: 1511062 - DNA, 15 bp, Homo sapiens
ttttaatgaagatat

SEQ ID NO: 1511063 - DNA, 15 bp, Homo sapiens
tttaatgaagatatt

SEQ ID NO: 1511064 - DNA, 15 bp, Homo sapiens
ttaatgaagatatta

SEQ ID NO: 1511065 - DNA, 15 bp, Homo sapiens
taatgaagatattag

SEQ ID NO: 1511066 - DNA, 15 bp, Homo sapiens
aatgaagatattagt

SEQ ID NO: 1511067 - DNA, 15 bp, Homo sapiens
atgaagatattagtg

SEQ ID NO: 1511068 - DNA, 15 bp, Homo sapiens
tgaagatattagtgg

SEQ ID NO: 1511069 - DNA, 15 bp, Homo sapiens
gaagatattagtggt

SEQ ID NO: 1511070 - DNA, 15 bp, Homo sapiens
aagatattagtggtc

SEQ ID NO: 1511071 - DNA, 15 bp, Homo sapiens
agatattagtggtct

SEQ ID NO: 1511072 - DNA, 15 bp, Homo sapiens
gatattagtggtcta

SEQ ID NO: 1511073 - DNA, 15 bp, Homo sapiens
atattagtggtctaa

SEQ ID NO: 1511074 - DNA, 15 bp, Homo sapiens
tattagtggtctaac

SEQ ID NO: 1511075 - DNA, 15 bp, Homo sapiens
attagtggtctaaca

SEQ ID NO: 1511076 - DNA, 15 bp, Homo sapiens
ttagtggtctaacat

SEQ ID NO: 1511077 - DNA, 15 bp, Homo sapiens
tagtggtctaacatg

SEQ ID NO: 1511078 - DNA, 15 bp, Homo sapiens
agtggtctaacatgt

SEQ ID NO: 1511079 - DNA, 15 bp, Homo sapiens
gtggtctaacatgtc

SEQ ID NO: 1511080 - DNA, 15 bp, Homo sapiens
tggtctaacatgtca

SEQ ID NO: 1511081 - DNA, 15 bp, Homo sapiens
ggtctaacatgtcat

SEQ ID NO: 1511082 - DNA, 15 bp, Homo sapiens
gtctaacatgtcatt

SEQ ID NO: 1511083 - DNA, 15 bp, Homo sapiens
tctaacatgtcattt

SEQ ID NO: 1511084 - DNA, 15 bp, Homo sapiens
ctaacatgtcatttc

SEQ ID NO: 1511085 - DNA, 15 bp, Homo sapiens
taacatgtcatttca

SEQ ID NO: 1511086 - DNA, 15 bp, Homo sapiens
aacatgtcatttcag

SEQ ID NO: 1511087 - DNA, 15 bp, Homo sapiens
acatgtcatttcaga

SEQ ID NO: 1511088 - DNA, 15 bp, Homo sapiens
catgtcatttcagat

SEQ ID NO: 1511089 - DNA, 15 bp, Homo sapiens
atgtcatttcagata

SEQ ID NO: 1511090 - DNA, 15 bp, Homo sapiens
tgtcatttcagatac

SEQ ID NO: 1511091 - DNA, 15 bp, Homo sapiens
gtcatttcagataca

SEQ ID NO: 1511092 - DNA, 15 bp, Homo sapiens
tcatttcagatacat

SEQ ID NO: 1511093 - DNA, 15 bp, Homo sapiens
catttcagatacata

SEQ ID NO: 1511094 - DNA, 15 bp, Homo sapiens
atttcagatacatag

SEQ ID NO: 1511095 - DNA, 15 bp, Homo sapiens
tttcagatacatagc

SEQ ID NO: 1511096 - DNA, 15 bp, Homo sapiens
ttcagatacatagct

SEQ ID NO: 1511097 - DNA, 15 bp, Homo sapiens
tcagatacatagctg

SEQ ID NO: 1511098 - DNA, 15 bp, Homo sapiens
cagatacatagctga

SEQ ID NO: 1511099 - DNA, 15 bp, Homo sapiens
agatacatagctgaa

SEQ ID NO: 1511100 - DNA, 15 bp, Homo sapiens
gatacatagctgaaa

SEQ ID NO: 1511101 - DNA, 15 bp, Homo sapiens
atacatagctgaaat

SEQ ID NO: 1511102 - DNA, 15 bp, Homo sapiens
tacatagctgaaatg

SEQ ID NO: 1511103 - DNA, 15 bp, Homo sapiens
acatagctgaaatgt

SEQ ID NO: 1511104 - DNA, 15 bp, Homo sapiens
catagctgaaatgta

SEQ ID NO: 1511105 - DNA, 15 bp, Homo sapiens
atagctgaaatgtag

SEQ ID NO: 1511106 - DNA, 15 bp, Homo sapiens
tagctgaaatgtagt

SEQ ID NO: 1511107 - DNA, 15 bp, Homo sapiens
agctgaaatgtagta

SEQ ID NO: 1511108 - DNA, 15 bp, Homo sapiens
gctgaaatgtagtaa

SEQ ID NO: 1511109 - DNA, 15 bp, Homo sapiens
ctgaaatgtagtaaa

SEQ ID NO: 1511110 - DNA, 15 bp, Homo sapiens
tgaaatgtagtaaaa

SEQ ID NO: 1511111 - DNA, 15 bp, Homo sapiens
gaaatgtagtaaaat

SEQ ID NO: 1511112 - DNA, 15 bp, Homo sapiens
aaatgtagtaaaatc

SEQ ID NO: 1511113 - DNA, 15 bp, Homo sapiens
aatgtagtaaaatca

SEQ ID NO: 1511114 - DNA, 15 bp, Homo sapiens
atgtagtaaaatcag

SEQ ID NO: 1511115 - DNA, 15 bp, Homo sapiens
tgtagtaaaatcagt

SEQ ID NO: 1511116 - DNA, 15 bp, Homo sapiens
gtagtaaaatcagtt

SEQ ID NO: 1511117 - DNA, 15 bp, Homo sapiens
tagtaaaatcagttt

SEQ ID NO: 1511118 - DNA, 15 bp, Homo sapiens
agtaaaatcagtttt

SEQ ID NO: 1511119 - DNA, 15 bp, Homo sapiens
gtaaaatcagtttta

SEQ ID NO: 1511120 - DNA, 15 bp, Homo sapiens
taaaatcagttttac

SEQ ID NO: 1511121 - DNA, 15 bp, Homo sapiens
aaaatcagttttact

SEQ ID NO: 1511122 - DNA, 15 bp, Homo sapiens
aaatcagttttacta

SEQ ID NO: 1511123 - DNA, 15 bp, Homo sapiens
aatcagttttactac

SEQ ID NO: 1511124 - DNA, 15 bp, Homo sapiens
atcagttttactaca

SEQ ID NO: 1511125 - DNA, 15 bp, Homo sapiens
tcagttttactacaa

SEQ ID NO: 1511126 - DNA, 15 bp, Homo sapiens
cagttttactacaaa

SEQ ID NO: 1511127 - DNA, 15 bp, Homo sapiens
agttttactacaaat

SEQ ID NO: 1511128 - DNA, 15 bp, Homo sapiens
gttttactacaaata

SEQ ID NO: 1511129 - DNA, 15 bp, Homo sapiens
ttttactacaaataa

SEQ ID NO: 1511130 - DNA, 15 bp, Homo sapiens
tttactacaaataaa

SEQ ID NO: 1511131 - DNA, 15 bp, Homo sapiens
ttactacaaataaac

SEQ ID NO: 1511132 - DNA, 15 bp, Homo sapiens
tactacaaataaact

SEQ ID NO: 1511133 - DNA, 15 bp, Homo sapiens
actacaaataaactt

SEQ ID NO: 1511134 - DNA, 15 bp, Homo sapiens
ctacaaataaacttg

SEQ ID NO: 1511135 - DNA, 15 bp, Homo sapiens
tacaaataaacttgc

SEQ ID NO: 1511136 - DNA, 15 bp, Homo sapiens
acaaataaacttgca

SEQ ID NO: 1511137 - DNA, 15 bp, Homo sapiens
caaataaacttgcat

SEQ ID NO: 1511138 - DNA, 15 bp, Homo sapiens
aaataaacttgcata

SEQ ID NO: 1511139 - DNA, 15 bp, Homo sapiens
aataaacttgcataa

SEQ ID NO: 1511140 - DNA, 15 bp, Homo sapiens
ataaacttgcataag

SEQ ID NO: 1511141 - DNA, 15 bp, Homo sapiens
taaacttgcataagg

SEQ ID NO: 1511142 - DNA, 15 bp, Homo sapiens
aaacttgcataaggt

SEQ ID NO: 1511143 - DNA, 15 bp, Homo sapiens
aacttgcataaggtt

SEQ ID NO: 1511144 - DNA, 15 bp, Homo sapiens
acttgcataaggttt

SEQ ID NO: 1511145 - DNA, 15 bp, Homo sapiens
cttgcataaggttta

SEQ ID NO: 1511146 - DNA, 15 bp, Homo sapiens
ttgcataaggtttat

SEQ ID NO: 1511147 - DNA, 15 bp, Homo sapiens
tgcataaggtttata

SEQ ID NO: 1511148 - DNA, 15 bp, Homo sapiens
gcataaggtttataa

SEQ ID NO: 1511149 - DNA, 15 bp, Homo sapiens
cataaggtttataaa

SEQ ID NO: 1511150 - DNA, 15 bp, Homo sapiens
ataaggtttataaat

SEQ ID NO: 1511151 - DNA, 15 bp, Homo sapiens
taaggtttataaatt

SEQ ID NO: 1511152 - DNA, 15 bp, Homo sapiens
aaggtttataaattt

SEQ ID NO: 1511153 - DNA, 15 bp, Homo sapiens
aggtttataaattta

SEQ ID NO: 1511154 - DNA, 15 bp, Homo sapiens
ggtttataaatttat

SEQ ID NO: 1511155 - DNA, 15 bp, Homo sapiens
gtttataaatttata

SEQ ID NO: 1511156 - DNA, 15 bp, Homo sapiens
tttataaatttataa

SEQ ID NO: 1511157 - DNA, 15 bp, Homo sapiens
ttataaatttataag

SEQ ID NO: 1511158 - DNA, 15 bp, Homo sapiens
tataaatttataagt

SEQ ID NO: 1511159 - DNA, 15 bp, Homo sapiens
ataaatttataagtt

SEQ ID NO: 1511160 - DNA, 15 bp, Homo sapiens
taaatttataagttt

SEQ ID NO: 1511161 - DNA, 15 bp, Homo sapiens
aaatttataagttta

SEQ ID NO: 1511162 - DNA, 15 bp, Homo sapiens
aatttataagtttat

SEQ ID NO: 1511163 - DNA, 15 bp, Homo sapiens
atttataagtttata

SEQ ID NO: 1511164 - DNA, 15 bp, Homo sapiens
tttataagtttataa

SEQ ID NO: 1511165 - DNA, 15 bp, Homo sapiens
ttataagtttataaa

SEQ ID NO: 1511166 - DNA, 15 bp, Homo sapiens
tataagtttataaat

SEQ ID NO: 1511167 - DNA, 15 bp, Homo sapiens
ataagtttataaatc

SEQ ID NO: 1511168 - DNA, 15 bp, Homo sapiens
taagtttataaatca

SEQ ID NO: 1511169 - DNA, 15 bp, Homo sapiens
aagtttataaatcaa

SEQ ID NO: 1511170 - DNA, 15 bp, Homo sapiens
agtttataaatcaac

SEQ ID NO: 1511171 - DNA, 15 bp, Homo sapiens
gtttataaatcaact

SEQ ID NO: 1511172 - DNA, 15 bp, Homo sapiens
tttataaatcaactt

SEQ ID NO: 1511173 - DNA, 15 bp, Homo sapiens
ttataaatcaacttg

SEQ ID NO: 1511174 - DNA, 15 bp, Homo sapiens
tataaatcaacttgg

SEQ ID NO: 1511175 - DNA, 15 bp, Homo sapiens
ataaatcaacttggg

SEQ ID NO: 1511176 - DNA, 15 bp, Homo sapiens
taaatcaacttgggt

SEQ ID NO: 1511177 - DNA, 15 bp, Homo sapiens
aaatcaacttgggta

SEQ ID NO: 1511178 - DNA, 15 bp, Homo sapiens
aatcaacttgggtaa

SEQ ID NO: 1511179 - DNA, 15 bp, Homo sapiens
atcaacttgggtaaa

SEQ ID NO: 1511180 - DNA, 15 bp, Homo sapiens
tcaacttgggtaaag

SEQ ID NO: 1511181 - DNA, 15 bp, Homo sapiens
caacttgggtaaagt

SEQ ID NO: 1511182 - DNA, 15 bp, Homo sapiens
aacttgggtaaagtg

SEQ ID NO: 1511183 - DNA, 15 bp, Homo sapiens
acttgggtaaagtgt

SEQ ID NO: 1511184 - DNA, 15 bp, Homo sapiens
cttgggtaaagtgta

SEQ ID NO: 1511185 - DNA, 15 bp, Homo sapiens
ttgggtaaagtgtaa

SEQ ID NO: 1511186 - DNA, 15 bp, Homo sapiens
tgggtaaagtgtaaa

SEQ ID NO: 1511187 - DNA, 15 bp, Homo sapiens
gggtaaagtgtaaat

SEQ ID NO: 1511188 - DNA, 15 bp, Homo sapiens
ggtaaagtgtaaata

SEQ ID NO: 1511189 - DNA, 15 bp, Homo sapiens
gtaaagtgtaaataa

SEQ ID NO: 1511190 - DNA, 15 bp, Homo sapiens
taaagtgtaaataaa

SEQ ID NO: 1511191 - DNA, 15 bp, Homo sapiens
aaagtgtaaataaac

SEQ ID NO: 1511192 - DNA, 15 bp, Homo sapiens
aagtgtaaataaact

SEQ ID NO: 1511193 - DNA, 15 bp, Homo sapiens
agtgtaaataaactt

SEQ ID NO: 1511194 - DNA, 15 bp, Homo sapiens
gtgtaaataaacttg

SEQ ID NO: 1511195 - DNA, 15 bp, Homo sapiens
tgtaaataaacttgc

SEQ ID NO: 1511196 - DNA, 15 bp, Homo sapiens
gtaaataaacttgca

SEQ ID NO: 1511197 - DNA, 15 bp, Homo sapiens
taaataaacttgcac

SEQ ID NO: 1511198 - DNA, 15 bp, Homo sapiens
aaataaacttgcact

SEQ ID NO: 1511199 - DNA, 15 bp, Homo sapiens
aataaacttgcactc

SEQ ID NO: 1511200 - DNA, 15 bp, Homo sapiens
ataaacttgcactcg

SEQ ID NO: 1511201 - DNA, 15 bp, Homo sapiens
taaacttgcactcgt

SEQ ID NO: 1511202 - DNA, 15 bp, Homo sapiens
aaacttgcactcgtg

SEQ ID NO: 1511203 - DNA, 15 bp, Homo sapiens
aacttgcactcgtgg

SEQ ID NO: 1511204 - DNA, 15 bp, Homo sapiens
acttgcactcgtggt

SEQ ID NO: 1511205 - DNA, 15 bp, Homo sapiens
cttgcactcgtggtt

SEQ ID NO: 1511206 - DNA, 15 bp, Homo sapiens
ttgcactcgtggttt

SEQ ID NO: 1511207 - DNA, 15 bp, Homo sapiens
tgcactcgtggtttc

SEQ ID NO: 1511208 - DNA, 15 bp, Homo sapiens
gcactcgtggtttct

SEQ ID NO: 1511209 - DNA, 15 bp, Homo sapiens
cactcgtggtttctc

SEQ ID NO: 1511210 - DNA, 15 bp, Homo sapiens
actcgtggtttctct

SEQ ID NO: 1511211 - DNA, 15 bp, Homo sapiens
ctcgtggtttctctg

SEQ ID NO: 1511212 - DNA, 15 bp, Homo sapiens
tcgtggtttctctga

SEQ ID NO: 1511213 - DNA, 15 bp, Homo sapiens
cgtggtttctctgaa

SEQ ID NO: 1511214 - DNA, 15 bp, Homo sapiens
gtggtttctctgaag

SEQ ID NO: 1511215 - DNA, 15 bp, Homo sapiens
tggtttctctgaagt

SEQ ID NO: 1511216 - DNA, 15 bp, Homo sapiens
ggtttctctgaagtc

SEQ ID NO: 1511217 - DNA, 15 bp, Homo sapiens
gtttctctgaagtct

SEQ ID NO: 1511218 - DNA, 15 bp, Homo sapiens
tttctctgaagtctc

SEQ ID NO: 1511219 - DNA, 15 bp, Homo sapiens
ttctctgaagtctcc

SEQ ID NO: 1511220 - DNA, 15 bp, Homo sapiens
tctctgaagtctcct

SEQ ID NO: 1511221 - DNA, 15 bp, Homo sapiens
ctctgaagtctcctg

SEQ ID NO: 1511222 - DNA, 15 bp, Homo sapiens
tctgaagtctcctga

SEQ ID NO: 1511223 - DNA, 15 bp, Homo sapiens
ctgaagtctcctgag

SEQ ID NO: 1511224 - DNA, 15 bp, Homo sapiens
tgaagtctcctgagc

SEQ ID NO: 1511225 - DNA, 15 bp, Homo sapiens
gaagtctcctgagct

SEQ ID NO: 1511226 - DNA, 15 bp, Homo sapiens
aagtctcctgagcta

SEQ ID NO: 1511227 - DNA, 15 bp, Homo sapiens
agtctcctgagctaa

SEQ ID NO: 1511228 - DNA, 15 bp, Homo sapiens
gtctcctgagctaac

SEQ ID NO: 1511229 - DNA, 15 bp, Homo sapiens
tctcctgagctaact

SEQ ID NO: 1511230 - DNA, 15 bp, Homo sapiens
ctcctgagctaactt

SEQ ID NO: 1511231 - DNA, 15 bp, Homo sapiens
tcctgagctaacttt

SEQ ID NO: 1511232 - DNA, 15 bp, Homo sapiens
cctgagctaactttg

SEQ ID NO: 1511233 - DNA, 15 bp, Homo sapiens
ctgagctaactttgc

SEQ ID NO: 1511234 - DNA, 15 bp, Homo sapiens
tgagctaactttgca

SEQ ID NO: 1511235 - DNA, 15 bp, Homo sapiens
gagctaactttgcat

SEQ ID NO: 1511236 - DNA, 15 bp, Homo sapiens
agctaactttgcata

SEQ ID NO: 1511237 - DNA, 15 bp, Homo sapiens
gctaactttgcataa

SEQ ID NO: 1511238 - DNA, 15 bp, Homo sapiens
ctaactttgcataaa

SEQ ID NO: 1511239 - DNA, 15 bp, Homo sapiens
taactttgcataaag

SEQ ID NO: 1511240 - DNA, 15 bp, Homo sapiens
aactttgcataaagg

SEQ ID NO: 1511241 - DNA, 15 bp, Homo sapiens
actttgcataaaggt

SEQ ID NO: 1511242 - DNA, 15 bp, Homo sapiens
ctttgcataaaggtg

SEQ ID NO: 1511243 - DNA, 15 bp, Homo sapiens
tttgcataaaggtgt

SEQ ID NO: 1511244 - DNA, 15 bp, Homo sapiens
ttgcataaaggtgtt

SEQ ID NO: 1511245 - DNA, 15 bp, Homo sapiens
tgcataaaggtgtta

SEQ ID NO: 1511246 - DNA, 15 bp, Homo sapiens
gcataaaggtgttat

SEQ ID NO: 1511247 - DNA, 15 bp, Homo sapiens
cataaaggtgttatt

SEQ ID NO: 1511248 - DNA, 15 bp, Homo sapiens
ataaaggtgttattc

SEQ ID NO: 1511249 - DNA, 15 bp, Homo sapiens
taaaggtgttattct

SEQ ID NO: 1511250 - DNA, 15 bp, Homo sapiens
aaaggtgttattctg

SEQ ID NO: 1511251 - DNA, 15 bp, Homo sapiens
aaggtgttattctgt

SEQ ID NO: 1511252 - DNA, 15 bp, Homo sapiens
aggtgttattctgta

SEQ ID NO: 1511253 - DNA, 15 bp, Homo sapiens
ggtgttattctgtac

SEQ ID NO: 1511254 - DNA, 15 bp, Homo sapiens
gtgttattctgtact

SEQ ID NO: 1511255 - DNA, 15 bp, Homo sapiens
tgttattctgtactt

SEQ ID NO: 1511256 - DNA, 15 bp, Homo sapiens
gttattctgtacttc

SEQ ID NO: 1511257 - DNA, 15 bp, Homo sapiens
ttattctgtacttcg

SEQ ID NO: 1511258 - DNA, 15 bp, Homo sapiens
tattctgtacttcga

SEQ ID NO: 1511259 - DNA, 15 bp, Homo sapiens
attctgtacttcgag

SEQ ID NO: 1511260 - DNA, 15 bp, Homo sapiens
ttctgtacttcgagg

SEQ ID NO: 1511261 - DNA, 15 bp, Homo sapiens
tctgtacttcgagga

SEQ ID NO: 1511262 - DNA, 15 bp, Homo sapiens
ctgtacttcgaggaa

SEQ ID NO: 1511263 - DNA, 15 bp, Homo sapiens
tgtacttcgaggaag

SEQ ID NO: 1511264 - DNA, 15 bp, Homo sapiens
gtacttcgaggaagt

SEQ ID NO: 1511265 - DNA, 15 bp, Homo sapiens
tacttcgaggaagtg

SEQ ID NO: 1511266 - DNA, 15 bp, Homo sapiens
acttcgaggaagtga

SEQ ID NO: 1511267 - DNA, 15 bp, Homo sapiens
gaaattggttttgta

SEQ ID NO: 1511268 - DNA, 15 bp, Homo sapiens
aaattggttttgtat

SEQ ID NO: 1511269 - DNA, 15 bp, Homo sapiens
aattggttttgtatt

SEQ ID NO: 1511270 - DNA, 15 bp, Homo sapiens
attggttttgtattt

SEQ ID NO: 1511271 - DNA, 15 bp, Homo sapiens
ttggttttgtattta

SEQ ID NO: 1511272 - DNA, 15 bp, Homo sapiens
tggttttgtatttaa

SEQ ID NO: 1511273 - DNA, 15 bp, Homo sapiens
ggttttgtatttaag

SEQ ID NO: 1511274 - DNA, 15 bp, Homo sapiens
gttttgtatttaagg

SEQ ID NO: 1511275 - DNA, 15 bp, Homo sapiens
ttttgtatttaaggc

SEQ ID NO: 1511276 - DNA, 15 bp, Homo sapiens
tttgtatttaaggcg

SEQ ID NO: 1511277 - DNA, 15 bp, Homo sapiens
ttgtatttaaggcgc

SEQ ID NO: 1511278 - DNA, 15 bp, Homo sapiens
tgtatttaaggcgct

SEQ ID NO: 1511279 - DNA, 15 bp, Homo sapiens
gtatttaaggcgctt

SEQ ID NO: 1511280 - DNA, 15 bp, Homo sapiens
tatttaaggcgctta

SEQ ID NO: 1511281 - DNA, 15 bp, Homo sapiens
atttaaggcgcttac

SEQ ID NO: 1511282 - DNA, 15 bp, Homo sapiens
tttaaggcgcttaca

SEQ ID NO: 1511283 - DNA, 15 bp, Homo sapiens
ttaaggcgcttacag

SEQ ID NO: 1511284 - DNA, 15 bp, Homo sapiens
taaggcgcttacagt

SEQ ID NO: 1511285 - DNA, 15 bp, Homo sapiens
aaggcgcttacagtg

SEQ ID NO: 1511286 - DNA, 15 bp, Homo sapiens
aggcgcttacagtgc

SEQ ID NO: 1511287 - DNA, 15 bp, Homo sapiens
ggcgcttacagtgcc

SEQ ID NO: 1511288 - DNA, 15 bp, Homo sapiens
gcgcttacagtgcct

SEQ ID NO: 1511289 - DNA, 15 bp, Homo sapiens
cgcttacagtgcctc

SEQ ID NO: 1511290 - DNA, 15 bp, Homo sapiens
gcttacagtgcctca

SEQ ID NO: 1511291 - DNA, 15 bp, Homo sapiens
cttacagtgcctcat

SEQ ID NO: 1511292 - DNA, 15 bp, Homo sapiens
ttacagtgcctcata

SEQ ID NO: 1511293 - DNA, 15 bp, Homo sapiens
tacagtgcctcatat

SEQ ID NO: 1511294 - DNA, 15 bp, Homo sapiens
acagtgcctcatata

SEQ ID NO: 1511295 - DNA, 15 bp, Homo sapiens
cagtgcctcatatag

SEQ ID NO: 1511296 - DNA, 15 bp, Homo sapiens
agtgcctcatatagt

SEQ ID NO: 1511297 - DNA, 15 bp, Homo sapiens
gtgcctcatatagtt

SEQ ID NO: 1511298 - DNA, 15 bp, Homo sapiens
tgcctcatatagttt

SEQ ID NO: 1511299 - DNA, 15 bp, Homo sapiens
gcctcatatagtttg

SEQ ID NO: 1511300 - DNA, 15 bp, Homo sapiens
cctcatatagtttgt

SEQ ID NO: 1511301 - DNA, 15 bp, Homo sapiens
ctcatatagtttgtg

SEQ ID NO: 1511302 - DNA, 15 bp, Homo sapiens
tcatatagtttgtgt

SEQ ID NO: 1511303 - DNA, 15 bp, Homo sapiens
catatagtttgtgtg

SEQ ID NO: 1511304 - DNA, 15 bp, Homo sapiens
atatagtttgtgtgg

SEQ ID NO: 1511305 - DNA, 15 bp, Homo sapiens
tatagtttgtgtggt

SEQ ID NO: 1511306 - DNA, 15 bp, Homo sapiens
atagtttgtgtggta

SEQ ID NO: 1511307 - DNA, 15 bp, Homo sapiens
tagtttgtgtggtat

SEQ ID NO: 1511308 - DNA, 15 bp, Homo sapiens
agtttgtgtggtatc

SEQ ID NO: 1511309 - DNA, 15 bp, Homo sapiens
gtttgtgtggtatct

SEQ ID NO: 1511310 - DNA, 15 bp, Homo sapiens
tttgtgtggtatctt

SEQ ID NO: 1511311 - DNA, 15 bp, Homo sapiens
ttgtgtggtatcttc

SEQ ID NO: 1511312 - DNA, 15 bp, Homo sapiens
tgtgtggtatcttct

SEQ ID NO: 1511313 - DNA, 15 bp, Homo sapiens
gtgtggtatcttctc

SEQ ID NO: 1511314 - DNA, 15 bp, Homo sapiens
tgtggtatcttctct

SEQ ID NO: 1511315 - DNA, 15 bp, Homo sapiens
gtggtatcttctctc

SEQ ID NO: 1511316 - DNA, 15 bp, Homo sapiens
tggtatcttctctcc

SEQ ID NO: 1511317 - DNA, 15 bp, Homo sapiens
ggtatcttctctcct

SEQ ID NO: 1511318 - DNA, 15 bp, Homo sapiens
gtatcttctctcctt

SEQ ID NO: 1511319 - DNA, 15 bp, Homo sapiens
tatcttctctccttt

SEQ ID NO: 1511320 - DNA, 15 bp, Homo sapiens
atcttctctcctttg

SEQ ID NO: 1511321 - DNA, 15 bp, Homo sapiens
tcttctctcctttgt

SEQ ID NO: 1511322 - DNA, 15 bp, Homo sapiens
cttctctcctttgta

SEQ ID NO: 1511323 - DNA, 15 bp, Homo sapiens
ttctctcctttgtat

SEQ ID NO: 1511324 - DNA, 15 bp, Homo sapiens
tctctcctttgtatc

SEQ ID NO: 1511325 - DNA, 15 bp, Homo sapiens
ctctcctttgtatcc

SEQ ID NO: 1511326 - DNA, 15 bp, Homo sapiens
tctcctttgtatcct

SEQ ID NO: 1511327 - DNA, 15 bp, Homo sapiens
ctcctttgtatcctt

SEQ ID NO: 1511328 - DNA, 15 bp, Homo sapiens
tcctttgtatccttt

SEQ ID NO: 1511329 - DNA, 15 bp, Homo sapiens
cctttgtatcctttc

SEQ ID NO: 1511330 - DNA, 15 bp, Homo sapiens
ctttgtatcctttca

SEQ ID NO: 1511331 - DNA, 15 bp, Homo sapiens
tttgtatcctttcac

SEQ ID NO: 1511332 - DNA, 15 bp, Homo sapiens
ttgtatcctttcaca

SEQ ID NO: 1511333 - DNA, 15 bp, Homo sapiens
tgtatcctttcacat

SEQ ID NO: 1511334 - DNA, 15 bp, Homo sapiens
gtatcctttcacata

SEQ ID NO: 1511335 - DNA, 15 bp, Homo sapiens
tatcctttcacatac

SEQ ID NO: 1511336 - DNA, 15 bp, Homo sapiens
atcctttcacatact

SEQ ID NO: 1511337 - DNA, 15 bp, Homo sapiens
tcctttcacatactc

SEQ ID NO: 1511338 - DNA, 15 bp, Homo sapiens
cctttcacatactcc

SEQ ID NO: 1511339 - DNA, 15 bp, Homo sapiens
ctttcacatactcca

SEQ ID NO: 1511340 - DNA, 15 bp, Homo sapiens
tttcacatactccat

SEQ ID NO: 1511341 - DNA, 15 bp, Homo sapiens
ttcacatactccatt

SEQ ID NO: 1511342 - DNA, 15 bp, Homo sapiens
tcacatactccattt

SEQ ID NO: 1511343 - DNA, 15 bp, Homo sapiens
cacatactccatttt

SEQ ID NO: 1511344 - DNA, 15 bp, Homo sapiens
acatactccattttg

SEQ ID NO: 1511345 - DNA, 15 bp, Homo sapiens
catactccattttga

SEQ ID NO: 1511346 - DNA, 15 bp, Homo sapiens
atactccattttgag

SEQ ID NO: 1511347 - DNA, 15 bp, Homo sapiens
tactccattttgagc

SEQ ID NO: 1511348 - DNA, 15 bp, Homo sapiens
actccattttgagct

SEQ ID NO: 1511349 - DNA, 15 bp, Homo sapiens
ctccattttgagctg

SEQ ID NO: 1511350 - DNA, 15 bp, Homo sapiens
tccattttgagctgc

SEQ ID NO: 1511351 - DNA, 15 bp, Homo sapiens
ccattttgagctgct

SEQ ID NO: 1511352 - DNA, 15 bp, Homo sapiens
cattttgagctgctt

SEQ ID NO: 1511353 - DNA, 15 bp, Homo sapiens
attttgagctgcttc

SEQ ID NO: 1511354 - DNA, 15 bp, Homo sapiens
ttttgagctgcttct

SEQ ID NO: 1511355 - DNA, 15 bp, Homo sapiens
tttgagctgcttctc

SEQ ID NO: 1511356 - DNA, 15 bp, Homo sapiens
ttgagctgcttctct

SEQ ID NO: 1511357 - DNA, 15 bp, Homo sapiens
tgagctgcttctctt

SEQ ID NO: 1511358 - DNA, 15 bp, Homo sapiens
gagctgcttctcttc

SEQ ID NO: 1511359 - DNA, 15 bp, Homo sapiens
agctgcttctcttct

SEQ ID NO: 1511360 - DNA, 15 bp, Homo sapiens
gctgcttctcttctt

SEQ ID NO: 1511361 - DNA, 15 bp, Homo sapiens
ctgcttctcttcttt

SEQ ID NO: 1511362 - DNA, 15 bp, Homo sapiens
tgcttctcttctttt

SEQ ID NO: 1511363 - DNA, 15 bp, Homo sapiens
gcttctcttcttttt

SEQ ID NO: 1511364 - DNA, 15 bp, Homo sapiens
cttctcttctttttc

SEQ ID NO: 1511365 - DNA, 15 bp, Homo sapiens
tctcttctttttcta

SEQ ID NO: 1511366 - DNA, 15 bp, Homo sapiens
ctcttctttttctac

SEQ ID NO: 1511367 - DNA, 15 bp, Homo sapiens
tcttctttttctaca

SEQ ID NO: 1511368 - DNA, 15 bp, Homo sapiens
cttctttttctacaa

SEQ ID NO: 1511369 - DNA, 15 bp, Homo sapiens
ttctttttctacaat

SEQ ID NO: 1511370 - DNA, 15 bp, Homo sapiens
tctttttctacaata

SEQ ID NO: 1511371 - DNA, 15 bp, Homo sapiens
ctttttctacaataa

SEQ ID NO: 1511372 - DNA, 15 bp, Homo sapiens
tttttctacaataat

SEQ ID NO: 1511373 - DNA, 15 bp, Homo sapiens
ttttctacaataata

SEQ ID NO: 1511374 - DNA, 15 bp, Homo sapiens
tttctacaataataa

SEQ ID NO: 1511375 - DNA, 15 bp, Homo sapiens
ttctacaataataag

SEQ ID NO: 1511376 - DNA, 15 bp, Homo sapiens
tctacaataataagc

SEQ ID NO: 1511377 - DNA, 15 bp, Homo sapiens
ctacaataataagca

SEQ ID NO: 1511378 - DNA, 15 bp, Homo sapiens
tacaataataagcat

SEQ ID NO: 1511379 - DNA, 15 bp, Homo sapiens
acaataataagcata

SEQ ID NO: 1511380 - DNA, 15 bp, Homo sapiens
caataataagcataa

SEQ ID NO: 1511381 - DNA, 15 bp, Homo sapiens
aataataagcataat

SEQ ID NO: 1511382 - DNA, 15 bp, Homo sapiens
ataataagcataatg

SEQ ID NO: 1511383 - DNA, 15 bp, Homo sapiens
taataagcataatgc

SEQ ID NO: 1511384 - DNA, 15 bp, Homo sapiens
aataagcataatgcc

SEQ ID NO: 1511385 - DNA, 15 bp, Homo sapiens
ataagcataatgcct

SEQ ID NO: 1511386 - DNA, 15 bp, Homo sapiens
taagcataatgcctt

SEQ ID NO: 1511387 - DNA, 15 bp, Homo sapiens
aagcataatgcctta

SEQ ID NO: 1511388 - DNA, 15 bp, Homo sapiens
agcataatgccttac

SEQ ID NO: 1511389 - DNA, 15 bp, Homo sapiens
gcataatgccttact

SEQ ID NO: 1511390 - DNA, 15 bp, Homo sapiens
cataatgccttacta

SEQ ID NO: 1511391 - DNA, 15 bp, Homo sapiens
ataatgccttactat

SEQ ID NO: 1511392 - DNA, 15 bp, Homo sapiens
taatgccttactatt

SEQ ID NO: 1511393 - DNA, 15 bp, Homo sapiens
aatgccttactatta

SEQ ID NO: 1511394 - DNA, 15 bp, Homo sapiens
atgccttactattag

SEQ ID NO: 1511395 - DNA, 15 bp, Homo sapiens
tgccttactattagt

SEQ ID NO: 1511396 - DNA, 15 bp, Homo sapiens
gccttactattagtt

SEQ ID NO: 1511397 - DNA, 15 bp, Homo sapiens
ccttactattagtta

SEQ ID NO: 1511398 - DNA, 15 bp, Homo sapiens
cttactattagttaa

SEQ ID NO: 1511399 - DNA, 15 bp, Homo sapiens
ttactattagttaat

SEQ ID NO: 1511400 - DNA, 15 bp, Homo sapiens
tactattagttaata

SEQ ID NO: 1511401 - DNA, 15 bp, Homo sapiens
actattagttaataa

SEQ ID NO: 1511402 - DNA, 15 bp, Homo sapiens
ctattagttaataat

SEQ ID NO: 1511403 - DNA, 15 bp, Homo sapiens
tattagttaataata

SEQ ID NO: 1511404 - DNA, 15 bp, Homo sapiens
attagttaataatag

SEQ ID NO: 1511405 - DNA, 15 bp, Homo sapiens
ttagttaataatagt

SEQ ID NO: 1511406 - DNA, 15 bp, Homo sapiens
agttaataatagttg

SEQ ID NO: 1511407 - DNA, 15 bp, Homo sapiens
gttaataatagttgc

SEQ ID NO: 1511408 - DNA, 15 bp, Homo sapiens
ttaataatagttgcc

SEQ ID NO: 1511409 - DNA, 15 bp, Homo sapiens
taataatagttgccg

SEQ ID NO: 1511410 - DNA, 15 bp, Homo sapiens
aataatagttgccgt

SEQ ID NO: 1511411 - DNA, 15 bp, Homo sapiens
ataatagttgccgtt

SEQ ID NO: 1511412 - DNA, 15 bp, Homo sapiens
taatagttgccgttc

SEQ ID NO: 1511413 - DNA, 15 bp, Homo sapiens
aatagttgccgttcc

SEQ ID NO: 1511414 - DNA, 15 bp, Homo sapiens
atagttgccgttcca

SEQ ID NO: 1511415 - DNA, 15 bp, Homo sapiens
tagttgccgttccat

SEQ ID NO: 1511416 - DNA, 15 bp, Homo sapiens
agttgccgttccatg

SEQ ID NO: 1511417 - DNA, 15 bp, Homo sapiens
gttgccgttccatga

SEQ ID NO: 1511418 - DNA, 15 bp, Homo sapiens
ttgccgttccatgaa

SEQ ID NO: 1511419 - DNA, 15 bp, Homo sapiens
tgccgttccatgaat

SEQ ID NO: 1511420 - DNA, 15 bp, Homo sapiens
gccgttccatgaata

SEQ ID NO: 1511421 - DNA, 15 bp, Homo sapiens
ccgttccatgaatat

SEQ ID NO: 1511422 - DNA, 15 bp, Homo sapiens
cgttccatgaatatt

SEQ ID NO: 1511423 - DNA, 15 bp, Homo sapiens
gttccatgaatattt

SEQ ID NO: 1511424 - DNA, 15 bp, Homo sapiens
ttccatgaatatttg

SEQ ID NO: 1511425 - DNA, 15 bp, Homo sapiens
tccatgaatatttgt

SEQ ID NO: 1511426 - DNA, 15 bp, Homo sapiens
ccatgaatatttgta

SEQ ID NO: 1511427 - DNA, 15 bp, Homo sapiens
catgaatatttgtag

SEQ ID NO: 1511428 - DNA, 15 bp, Homo sapiens
atgaatatttgtagt

SEQ ID NO: 1511429 - DNA, 15 bp, Homo sapiens
tgaatatttgtagta

SEQ ID NO: 1511430 - DNA, 15 bp, Homo sapiens
gaatatttgtagtat

SEQ ID NO: 1511431 - DNA, 15 bp, Homo sapiens
aatatttgtagtatg

SEQ ID NO: 1511432 - DNA, 15 bp, Homo sapiens
atatttgtagtatga

SEQ ID NO: 1511433 - DNA, 15 bp, Homo sapiens
tatttgtagtatgaa

SEQ ID NO: 1511434 - DNA, 15 bp, Homo sapiens
atttgtagtatgaag

SEQ ID NO: 1511435 - DNA, 15 bp, Homo sapiens
tttgtagtatgaagg

SEQ ID NO: 1511436 - DNA, 15 bp, Homo sapiens
ttgtagtatgaagga

SEQ ID NO: 1511437 - DNA, 15 bp, Homo sapiens
tgtagtatgaaggat

SEQ ID NO: 1511438 - DNA, 15 bp, Homo sapiens
gtagtatgaaggatg

SEQ ID NO: 1511439 - DNA, 15 bp, Homo sapiens
tagtatgaaggatgt

SEQ ID NO: 1511440 - DNA, 15 bp, Homo sapiens
agtatgaaggatgtc

SEQ ID NO: 1511441 - DNA, 15 bp, Homo sapiens
gtatgaaggatgtcg

SEQ ID NO: 1511442 - DNA, 15 bp, Homo sapiens
tatgaaggatgtcgc

SEQ ID NO: 1511443 - DNA, 15 bp, Homo sapiens
atgaaggatgtcgct

SEQ ID NO: 1511444 - DNA, 15 bp, Homo sapiens
tgaaggatgtcgcta

SEQ ID NO: 1511445 - DNA, 15 bp, Homo sapiens
gaaggatgtcgctaa

SEQ ID NO: 1511446 - DNA, 15 bp, Homo sapiens
aaggatgtcgctaag

SEQ ID NO: 1511447 - DNA, 15 bp, Homo sapiens
aggatgtcgctaagt

SEQ ID NO: 1511448 - DNA, 15 bp, Homo sapiens
ggatgtcgctaagta

SEQ ID NO: 1511449 - DNA, 15 bp, Homo sapiens
gatgtcgctaagtag

SEQ ID NO: 1511450 - DNA, 15 bp, Homo sapiens
atgtcgctaagtaga

SEQ ID NO: 1511451 - DNA, 15 bp, Homo sapiens
tgtcgctaagtagac

SEQ ID NO: 1511452 - DNA, 15 bp, Homo sapiens
gtcgctaagtagaca

SEQ ID NO: 1511453 - DNA, 15 bp, Homo sapiens
tcgctaagtagacat

SEQ ID NO: 1511454 - DNA, 15 bp, Homo sapiens
cgctaagtagacatt

SEQ ID NO: 1511455 - DNA, 15 bp, Homo sapiens
gctaagtagacattt

SEQ ID NO: 1511456 - DNA, 15 bp, Homo sapiens
ctaagtagacatttg

SEQ ID NO: 1511457 - DNA, 15 bp, Homo sapiens
taagtagacatttgt

SEQ ID NO: 1511458 - DNA, 15 bp, Homo sapiens
aagtagacatttgtg

SEQ ID NO: 1511459 - DNA, 15 bp, Homo sapiens
agtagacatttgtgc

SEQ ID NO: 1511460 - DNA, 15 bp, Homo sapiens
gtagacatttgtgca

SEQ ID NO: 1511461 - DNA, 15 bp, Homo sapiens
tagacatttgtgcag

SEQ ID NO: 1511462 - DNA, 15 bp, Homo sapiens
agacatttgtgcagg

SEQ ID NO: 1511463 - DNA, 15 bp, Homo sapiens
gacatttgtgcaggt

SEQ ID NO: 1511464 - DNA, 15 bp, Homo sapiens
acatttgtgcaggtg

SEQ ID NO: 1511465 - DNA, 15 bp, Homo sapiens
catttgtgcaggtga

SEQ ID NO: 1511466 - DNA, 15 bp, Homo sapiens
atttgtgcaggtgag

SEQ ID NO: 1511467 - DNA, 15 bp, Homo sapiens
tttgtgcaggtgagg

SEQ ID NO: 1511468 - DNA, 15 bp, Homo sapiens
ttgtgcaggtgaggc

SEQ ID NO: 1511469 - DNA, 15 bp, Homo sapiens
tgtgcaggtgaggca

SEQ ID NO: 1511470 - DNA, 15 bp, Homo sapiens
gtgcaggtgaggcag

SEQ ID NO: 1511471 - DNA, 15 bp, Homo sapiens
tgcaggtgaggcaga

SEQ ID NO: 1511472 - DNA, 15 bp, Homo sapiens
gcaggtgaggcagag

SEQ ID NO: 1511473 - DNA, 15 bp, Homo sapiens
caggtgaggcagagt

SEQ ID NO: 1511474 - DNA, 15 bp, Homo sapiens
aggtgaggcagagtg

SEQ ID NO: 1511475 - DNA, 15 bp, Homo sapiens
ggtgaggcagagtgg

SEQ ID NO: 1511476 - DNA, 15 bp, Homo sapiens
gtgaggcagagtggt

SEQ ID NO: 1511477 - DNA, 15 bp, Homo sapiens
tgaggcagagtggtt

SEQ ID NO: 1511478 - DNA, 15 bp, Homo sapiens
gaggcagagtggttc

SEQ ID NO: 1511479 - DNA, 15 bp, Homo sapiens
aggcagagtggttct

SEQ ID NO: 1511480 - DNA, 15 bp, Homo sapiens
ggcagagtggttcta

SEQ ID NO: 1511481 - DNA, 15 bp, Homo sapiens
gcagagtggttctag

SEQ ID NO: 1511482 - DNA, 15 bp, Homo sapiens
cagagtggttctagg

SEQ ID NO: 1511483 - DNA, 15 bp, Homo sapiens
agagtggttctaggt

SEQ ID NO: 1511484 - DNA, 15 bp, Homo sapiens
gagtggttctaggtc

SEQ ID NO: 1511485 - DNA, 15 bp, Homo sapiens
agtggttctaggtcc

SEQ ID NO: 1511486 - DNA, 15 bp, Homo sapiens
gtggttctaggtcct

SEQ ID NO: 1511487 - DNA, 15 bp, Homo sapiens
tggttctaggtcctg

SEQ ID NO: 1511488 - DNA, 15 bp, Homo sapiens
ggttctaggtcctgt

SEQ ID NO: 1511489 - DNA, 15 bp, Homo sapiens
gttctaggtcctgtc

SEQ ID NO: 1511490 - DNA, 15 bp, Homo sapiens
ttctaggtcctgtcc

SEQ ID NO: 1511491 - DNA, 15 bp, Homo sapiens
tctaggtcctgtcct

SEQ ID NO: 1511492 - DNA, 15 bp, Homo sapiens
ctaggtcctgtcctt

SEQ ID NO: 1511493 - DNA, 15 bp, Homo sapiens
taggtcctgtccttc

SEQ ID NO: 1511494 - DNA, 15 bp, Homo sapiens
aggtcctgtccttca

SEQ ID NO: 1511495 - DNA, 15 bp, Homo sapiens
ggtcctgtccttcag

SEQ ID NO: 1511496 - DNA, 15 bp, Homo sapiens
gtcctgtccttcagt

SEQ ID NO: 1511497 - DNA, 15 bp, Homo sapiens
tcctgtccttcagtt

SEQ ID NO: 1511498 - DNA, 15 bp, Homo sapiens
cctgtccttcagttc

SEQ ID NO: 1511499 - DNA, 15 bp, Homo sapiens
ctgtccttcagttct

SEQ ID NO: 1511500 - DNA, 15 bp, Homo sapiens
tgtccttcagttctt

SEQ ID NO: 1511501 - DNA, 15 bp, Homo sapiens
gtccttcagttcttt

SEQ ID NO: 1511502 - DNA, 15 bp, Homo sapiens
tccttcagttcttta

SEQ ID NO: 1511503 - DNA, 15 bp, Homo sapiens
ccttcagttctttat

SEQ ID NO: 1511504 - DNA, 15 bp, Homo sapiens
cttcagttctttatt

SEQ ID NO: 1511505 - DNA, 15 bp, Homo sapiens
ttcagttctttattt

SEQ ID NO: 1511506 - DNA, 15 bp, Homo sapiens
tcagttctttattta

SEQ ID NO: 1511507 - DNA, 15 bp, Homo sapiens
cagttctttatttat

SEQ ID NO: 1511508 - DNA, 15 bp, Homo sapiens
agttctttatttatt

SEQ ID NO: 1511509 - DNA, 15 bp, Homo sapiens
gttctttatttattt

SEQ ID NO: 1511510 - DNA, 15 bp, Homo sapiens
ttctttatttattta

SEQ ID NO: 1511511 - DNA, 15 bp, Homo sapiens
tctttatttatttat

SEQ ID NO: 1511512 - DNA, 15 bp, Homo sapiens
ctttatttatttatt

SEQ ID NO: 1511513 - DNA, 15 bp, Homo sapiens
tggagtctcactctt

SEQ ID NO: 1511514 - DNA, 15 bp, Homo sapiens
ggagtctcactcttg

SEQ ID NO: 1511515 - DNA, 15 bp, Homo sapiens
gagtctcactcttgt

SEQ ID NO: 1511516 - DNA, 15 bp, Homo sapiens
agtctcactcttgtc

SEQ ID NO: 1511517 - DNA, 15 bp, Homo sapiens
gtctcactcttgtca

SEQ ID NO: 1511518 - DNA, 15 bp, Homo sapiens
tctcactcttgtcat

SEQ ID NO: 1511519 - DNA, 15 bp, Homo sapiens
ctcactcttgtcatc

SEQ ID NO: 1511520 - DNA, 15 bp, Homo sapiens
tcactcttgtcatcc

SEQ ID NO: 1511521 - DNA, 15 bp, Homo sapiens
cactcttgtcatcca

SEQ ID NO: 1511522 - DNA, 15 bp, Homo sapiens
actcttgtcatccag

SEQ ID NO: 1511523 - DNA, 15 bp, Homo sapiens
ctcttgtcatccagg

SEQ ID NO: 1511524 - DNA, 15 bp, Homo sapiens
tcttgtcatccagga

SEQ ID NO: 1511525 - DNA, 15 bp, Homo sapiens
cttgtcatccaggag

SEQ ID NO: 1511526 - DNA, 15 bp, Homo sapiens
ttgtcatccaggagt

SEQ ID NO: 1511527 - DNA, 15 bp, Homo sapiens
tgtcatccaggagtg

SEQ ID NO: 1511528 - DNA, 15 bp, Homo sapiens
gtcatccaggagtgc

SEQ ID NO: 1511529 - DNA, 15 bp, Homo sapiens
tcatccaggagtgca

SEQ ID NO: 1511530 - DNA, 15 bp, Homo sapiens
catccaggagtgcaa

SEQ ID NO: 1511531 - DNA, 15 bp, Homo sapiens
atccaggagtgcaat

SEQ ID NO: 1511532 - DNA, 15 bp, Homo sapiens
tccaggagtgcaatg

SEQ ID NO: 1511533 - DNA, 15 bp, Homo sapiens
ccaggagtgcaatgg

SEQ ID NO: 1511534 - DNA, 15 bp, Homo sapiens
aggagtgcaatggcg

SEQ ID NO: 1511535 - DNA, 15 bp, Homo sapiens
cgcgatcttggctcc

SEQ ID NO: 1511536 - DNA, 15 bp, Homo sapiens
gcgatcttggctccc

SEQ ID NO: 1511537 - DNA, 15 bp, Homo sapiens
cgatcttggctccct

SEQ ID NO: 1511538 - DNA, 15 bp, Homo sapiens
gatcttggctccctg

SEQ ID NO: 1511539 - DNA, 15 bp, Homo sapiens
atcttggctccctgc

SEQ ID NO: 1511540 - DNA, 15 bp, Homo sapiens
tcttggctccctgca

SEQ ID NO: 1511541 - DNA, 15 bp, Homo sapiens
cttggctccctgcaa

SEQ ID NO: 1511542 - DNA, 15 bp, Homo sapiens
ttggctccctgcaac

SEQ ID NO: 1511543 - DNA, 15 bp, Homo sapiens
tggctccctgcaacc

SEQ ID NO: 1511544 - DNA, 15 bp, Homo sapiens
ggctccctgcaacct

SEQ ID NO: 1511545 - DNA, 15 bp, Homo sapiens
gctccctgcaacctc

SEQ ID NO: 1511546 - DNA, 15 bp, Homo sapiens
ctccctgcaacctcc

SEQ ID NO: 1511547 - DNA, 15 bp, Homo sapiens
tccctgcaacctccg

SEQ ID NO: 1511548 - DNA, 15 bp, Homo sapiens
ccctgcaacctccgc

SEQ ID NO: 1511549 - DNA, 15 bp, Homo sapiens
cctgcaacctccgcc

SEQ ID NO: 1511550 - DNA, 15 bp, Homo sapiens
cgcctcccgggttct

SEQ ID NO: 1511551 - DNA, 15 bp, Homo sapiens
gcctcccgggttcta

SEQ ID NO: 1511552 - DNA, 15 bp, Homo sapiens
cctcccgggttctag

SEQ ID NO: 1511553 - DNA, 15 bp, Homo sapiens
ctcccgggttctagc

SEQ ID NO: 1511554 - DNA, 15 bp, Homo sapiens
tcccgggttctagcg

SEQ ID NO: 1511555 - DNA, 15 bp, Homo sapiens
cccgggttctagcga

SEQ ID NO: 1511556 - DNA, 15 bp, Homo sapiens
ccgggttctagcgat

SEQ ID NO: 1511557 - DNA, 15 bp, Homo sapiens
cgggttctagcgatt

SEQ ID NO: 1511558 - DNA, 15 bp, Homo sapiens
gggttctagcgattc

SEQ ID NO: 1511559 - DNA, 15 bp, Homo sapiens
ggttctagcgattct

SEQ ID NO: 1511560 - DNA, 15 bp, Homo sapiens
gttctagcgattctt

SEQ ID NO: 1511561 - DNA, 15 bp, Homo sapiens
ttctagcgattcttc

SEQ ID NO: 1511562 - DNA, 15 bp, Homo sapiens
tctagcgattcttct

SEQ ID NO: 1511563 - DNA, 15 bp, Homo sapiens
ctagcgattcttctg

SEQ ID NO: 1511564 - DNA, 15 bp, Homo sapiens
tagcgattcttctgc

SEQ ID NO: 1511565 - DNA, 15 bp, Homo sapiens
agcgattcttctgcc

SEQ ID NO: 1511566 - DNA, 15 bp, Homo sapiens
gcgattcttctgcct

SEQ ID NO: 1511567 - DNA, 15 bp, Homo sapiens
cgattcttctgcctc

SEQ ID NO: 1511568 - DNA, 15 bp, Homo sapiens
agctgggattacagt

SEQ ID NO: 1511569 - DNA, 15 bp, Homo sapiens
gctgggattacagtc

SEQ ID NO: 1511570 - DNA, 15 bp, Homo sapiens
ctgggattacagtcg

SEQ ID NO: 1511571 - DNA, 15 bp, Homo sapiens
tgggattacagtcgc

SEQ ID NO: 1511572 - DNA, 15 bp, Homo sapiens
gggattacagtcgcc

SEQ ID NO: 1511573 - DNA, 15 bp, Homo sapiens
ggattacagtcgccc

SEQ ID NO: 1511574 - DNA, 15 bp, Homo sapiens
gattacagtcgccca

SEQ ID NO: 1511575 - DNA, 15 bp, Homo sapiens
attacagtcgcccac

SEQ ID NO: 1511576 - DNA, 15 bp, Homo sapiens
ttacagtcgcccacc

SEQ ID NO: 1511577 - DNA, 15 bp, Homo sapiens
tacagtcgcccacca

SEQ ID NO: 1511578 - DNA, 15 bp, Homo sapiens
acagtcgcccaccac

SEQ ID NO: 1511579 - DNA, 15 bp, Homo sapiens
cagtcgcccaccacc

SEQ ID NO: 1511580 - DNA, 15 bp, Homo sapiens
agtcgcccaccacca

SEQ ID NO: 1511581 - DNA, 15 bp, Homo sapiens
gtcgcccaccaccac

SEQ ID NO: 1511582 - DNA, 15 bp, Homo sapiens
tcgcccaccaccacg

SEQ ID NO: 1511583 - DNA, 15 bp, Homo sapiens
accaccacgcccaga

SEQ ID NO: 1511584 - DNA, 15 bp, Homo sapiens
ccaccacgcccagat

SEQ ID NO: 1511585 - DNA, 15 bp, Homo sapiens
caccacgcccagata

SEQ ID NO: 1511586 - DNA, 15 bp, Homo sapiens
accacgcccagataa

SEQ ID NO: 1511587 - DNA, 15 bp, Homo sapiens
ccacgcccagataat

SEQ ID NO: 1511588 - DNA, 15 bp, Homo sapiens
cacgcccagataatt

SEQ ID NO: 1511589 - DNA, 15 bp, Homo sapiens
acgcccagataattt

SEQ ID NO: 1511590 - DNA, 15 bp, Homo sapiens
cgcccagataatttt

SEQ ID NO: 1511591 - DNA, 15 bp, Homo sapiens
cccagataattttta

SEQ ID NO: 1511592 - DNA, 15 bp, Homo sapiens
ccagataatttttat

SEQ ID NO: 1511593 - DNA, 15 bp, Homo sapiens
cagataatttttata

SEQ ID NO: 1511594 - DNA, 15 bp, Homo sapiens
agataatttttatat

SEQ ID NO: 1511595 - DNA, 15 bp, Homo sapiens
gataatttttatatt

SEQ ID NO: 1511596 - DNA, 15 bp, Homo sapiens
ataatttttatattt

SEQ ID NO: 1511597 - DNA, 15 bp, Homo sapiens
atgttggtcaggcta

SEQ ID NO: 1511598 - DNA, 15 bp, Homo sapiens
tgttggtcaggctag

SEQ ID NO: 1511599 - DNA, 15 bp, Homo sapiens
gttggtcaggctagt

SEQ ID NO: 1511600 - DNA, 15 bp, Homo sapiens
ttggtcaggctagtc

SEQ ID NO: 1511601 - DNA, 15 bp, Homo sapiens
tggtcaggctagtct

SEQ ID NO: 1511602 - DNA, 15 bp, Homo sapiens
ggtcaggctagtctc

SEQ ID NO: 1511603 - DNA, 15 bp, Homo sapiens
gtcaggctagtctcg

SEQ ID NO: 1511604 - DNA, 15 bp, Homo sapiens
ctcaggtgatccact

SEQ ID NO: 1511605 - DNA, 15 bp, Homo sapiens
tcaggtgatccactc

SEQ ID NO: 1511606 - DNA, 15 bp, Homo sapiens
caggtgatccactcg

SEQ ID NO: 1511607 - DNA, 15 bp, Homo sapiens
aggtgatccactcgc

SEQ ID NO: 1511608 - DNA, 15 bp, Homo sapiens
ggtgatccactcgcc

SEQ ID NO: 1511609 - DNA, 15 bp, Homo sapiens
gtgatccactcgcct

SEQ ID NO: 1511610 - DNA, 15 bp, Homo sapiens
tgatccactcgcctc

SEQ ID NO: 1511611 - DNA, 15 bp, Homo sapiens
gatccactcgcctcg

SEQ ID NO: 1511612 - DNA, 15 bp, Homo sapiens
atccactcgcctcgg

SEQ ID NO: 1511613 - DNA, 15 bp, Homo sapiens
tccactcgcctcggc

SEQ ID NO: 1511614 - DNA, 15 bp, Homo sapiens
ccactcgcctcggcc

SEQ ID NO: 1511615 - DNA, 15 bp, Homo sapiens
cactcgcctcggcct

SEQ ID NO: 1511616 - DNA, 15 bp, Homo sapiens
actcgcctcggcctc

SEQ ID NO: 1511617 - DNA, 15 bp, Homo sapiens
ctcgcctcggcctcc

SEQ ID NO: 1511618 - DNA, 15 bp, Homo sapiens
tcgcctcggcctccc

SEQ ID NO: 1511619 - DNA, 15 bp, Homo sapiens
caccatgcccagctg

SEQ ID NO: 1511620 - DNA, 15 bp, Homo sapiens
accatgcccagctgg

SEQ ID NO: 1511621 - DNA, 15 bp, Homo sapiens
ccatgcccagctggt

SEQ ID NO: 1511622 - DNA, 15 bp, Homo sapiens
catgcccagctggtc

SEQ ID NO: 1511623 - DNA, 15 bp, Homo sapiens
atgcccagctggtcc

SEQ ID NO: 1511624 - DNA, 15 bp, Homo sapiens
tgcccagctggtcct

SEQ ID NO: 1511625 - DNA, 15 bp, Homo sapiens
gcccagctggtcctt

SEQ ID NO: 1511626 - DNA, 15 bp, Homo sapiens
cccagctggtccttg

SEQ ID NO: 1511627 - DNA, 15 bp, Homo sapiens
ccagctggtccttga

SEQ ID NO: 1511628 - DNA, 15 bp, Homo sapiens
cagctggtccttgaa

SEQ ID NO: 1511629 - DNA, 15 bp, Homo sapiens
agctggtccttgaat

SEQ ID NO: 1511630 - DNA, 15 bp, Homo sapiens
gctggtccttgaatt

SEQ ID NO: 1511631 - DNA, 15 bp, Homo sapiens
ctggtccttgaattc

SEQ ID NO: 1511632 - DNA, 15 bp, Homo sapiens
tggtccttgaattct

SEQ ID NO: 1511633 - DNA, 15 bp, Homo sapiens
ggtccttgaattctt

SEQ ID NO: 1511634 - DNA, 15 bp, Homo sapiens
gtccttgaattctta

SEQ ID NO: 1511635 - DNA, 15 bp, Homo sapiens
tccttgaattcttat

SEQ ID NO: 1511636 - DNA, 15 bp, Homo sapiens
ccttgaattcttatt

SEQ ID NO: 1511637 - DNA, 15 bp, Homo sapiens
cttgaattcttattt

SEQ ID NO: 1511638 - DNA, 15 bp, Homo sapiens
ttgaattcttatttg

SEQ ID NO: 1511639 - DNA, 15 bp, Homo sapiens
tgaattcttatttgc

SEQ ID NO: 1511640 - DNA, 15 bp, Homo sapiens
gaattcttatttgct

SEQ ID NO: 1511641 - DNA, 15 bp, Homo sapiens
aattcttatttgctg

SEQ ID NO: 1511642 - DNA, 15 bp, Homo sapiens
attcttatttgctgc

SEQ ID NO: 1511643 - DNA, 15 bp, Homo sapiens
ttcttatttgctgca

SEQ ID NO: 1511644 - DNA, 15 bp, Homo sapiens
tcttatttgctgcac

SEQ ID NO: 1511645 - DNA, 15 bp, Homo sapiens
cttatttgctgcact

SEQ ID NO: 1511646 - DNA, 15 bp, Homo sapiens
ttatttgctgcacta

SEQ ID NO: 1511647 - DNA, 15 bp, Homo sapiens
tatttgctgcactag

SEQ ID NO: 1511648 - DNA, 15 bp, Homo sapiens
atttgctgcactagg

SEQ ID NO: 1511649 - DNA, 15 bp, Homo sapiens
tttgctgcactaggt

SEQ ID NO: 1511650 - DNA, 15 bp, Homo sapiens
ttgctgcactaggta

SEQ ID NO: 1511651 - DNA, 15 bp, Homo sapiens
tgctgcactaggtag

SEQ ID NO: 1511652 - DNA, 15 bp, Homo sapiens
gctgcactaggtagt

SEQ ID NO: 1511653 - DNA, 15 bp, Homo sapiens
ctgcactaggtagta

SEQ ID NO: 1511654 - DNA, 15 bp, Homo sapiens
tgcactaggtagtaa

SEQ ID NO: 1511655 - DNA, 15 bp, Homo sapiens
gcactaggtagtaaa

SEQ ID NO: 1511656 - DNA, 15 bp, Homo sapiens
cactaggtagtaaag

SEQ ID NO: 1511657 - DNA, 15 bp, Homo sapiens
actaggtagtaaagg

SEQ ID NO: 1511658 - DNA, 15 bp, Homo sapiens
ctaggtagtaaaggt

SEQ ID NO: 1511659 - DNA, 15 bp, Homo sapiens
taggtagtaaaggtg

SEQ ID NO: 1511660 - DNA, 15 bp, Homo sapiens
aggtagtaaaggtgt

SEQ ID NO: 1511661 - DNA, 15 bp, Homo sapiens
ggtagtaaaggtgta

SEQ ID NO: 1511662 - DNA, 15 bp, Homo sapiens
gtagtaaaggtgtag

SEQ ID NO: 1511663 - DNA, 15 bp, Homo sapiens
tagtaaaggtgtagc

SEQ ID NO: 1511664 - DNA, 15 bp, Homo sapiens
agtaaaggtgtagca

SEQ ID NO: 1511665 - DNA, 15 bp, Homo sapiens
gtaaaggtgtagcaa

SEQ ID NO: 1511666 - DNA, 15 bp, Homo sapiens
taaaggtgtagcaaa

SEQ ID NO: 1511667 - DNA, 15 bp, Homo sapiens
aaaggtgtagcaaaa

SEQ ID NO: 1511668 - DNA, 15 bp, Homo sapiens
aaggtgtagcaaaaa

SEQ ID NO: 1511669 - DNA, 15 bp, Homo sapiens
aggtgtagcaaaaac

SEQ ID NO: 1511670 - DNA, 15 bp, Homo sapiens
ggtgtagcaaaaaca

SEQ ID NO: 1511671 - DNA, 15 bp, Homo sapiens
gtgtagcaaaaacag

SEQ ID NO: 1511672 - DNA, 15 bp, Homo sapiens
tgtagcaaaaacagg

SEQ ID NO: 1511673 - DNA, 15 bp, Homo sapiens
gtagcaaaaacagga

SEQ ID NO: 1511674 - DNA, 15 bp, Homo sapiens
tagcaaaaacaggac

SEQ ID NO: 1511675 - DNA, 15 bp, Homo sapiens
agcaaaaacaggaca

SEQ ID NO: 1511676 - DNA, 15 bp, Homo sapiens
gcaaaaacaggacag

SEQ ID NO: 1511677 - DNA, 15 bp, Homo sapiens
caaaaacaggacaga

SEQ ID NO: 1511678 - DNA, 15 bp, Homo sapiens
aaaaacaggacagaa

SEQ ID NO: 1511679 - DNA, 15 bp, Homo sapiens
aaaacaggacagaat

SEQ ID NO: 1511680 - DNA, 15 bp, Homo sapiens
aaacaggacagaatc

SEQ ID NO: 1511681 - DNA, 15 bp, Homo sapiens
aacaggacagaatct

SEQ ID NO: 1511682 - DNA, 15 bp, Homo sapiens
acaggacagaatctt

SEQ ID NO: 1511683 - DNA, 15 bp, Homo sapiens
caggacagaatcttc

SEQ ID NO: 1511684 - DNA, 15 bp, Homo sapiens
aggacagaatcttct

SEQ ID NO: 1511685 - DNA, 15 bp, Homo sapiens
ggacagaatcttctg

SEQ ID NO: 1511686 - DNA, 15 bp, Homo sapiens
gacagaatcttctgc

SEQ ID NO: 1511687 - DNA, 15 bp, Homo sapiens
acagaatcttctgcc

SEQ ID NO: 1511688 - DNA, 15 bp, Homo sapiens
cagaatcttctgcct

SEQ ID NO: 1511689 - DNA, 15 bp, Homo sapiens
agaatcttctgcctt

SEQ ID NO: 1511690 - DNA, 15 bp, Homo sapiens
gaatcttctgccttt

SEQ ID NO: 1511691 - DNA, 15 bp, Homo sapiens
aatcttctgcctttg

SEQ ID NO: 1511692 - DNA, 15 bp, Homo sapiens
atcttctgcctttga

SEQ ID NO: 1511693 - DNA, 15 bp, Homo sapiens
tcttctgcctttgat

SEQ ID NO: 1511694 - DNA, 15 bp, Homo sapiens
cttctgcctttgatg

SEQ ID NO: 1511695 - DNA, 15 bp, Homo sapiens
ttctgcctttgatga

SEQ ID NO: 1511696 - DNA, 15 bp, Homo sapiens
tctgcctttgatgaa

SEQ ID NO: 1511697 - DNA, 15 bp, Homo sapiens
ctgcctttgatgaaa

SEQ ID NO: 1511698 - DNA, 15 bp, Homo sapiens
tgcctttgatgaaat

SEQ ID NO: 1511699 - DNA, 15 bp, Homo sapiens
gcctttgatgaaatc

SEQ ID NO: 1511700 - DNA, 15 bp, Homo sapiens
cctttgatgaaatca

SEQ ID NO: 1511701 - DNA, 15 bp, Homo sapiens
ctttgatgaaatcac

SEQ ID NO: 1511702 - DNA, 15 bp, Homo sapiens
tttgatgaaatcaca

SEQ ID NO: 1511703 - DNA, 15 bp, Homo sapiens
ttgatgaaatcacat

SEQ ID NO: 1511704 - DNA, 15 bp, Homo sapiens
tgatgaaatcacatt

SEQ ID NO: 1511705 - DNA, 15 bp, Homo sapiens
gatgaaatcacattc

SEQ ID NO: 1511706 - DNA, 15 bp, Homo sapiens
atgaaatcacattcc

SEQ ID NO: 1511707 - DNA, 15 bp, Homo sapiens
tgaaatcacattcca

SEQ ID NO: 1511708 - DNA, 15 bp, Homo sapiens
gaaatcacattccag

SEQ ID NO: 1511709 - DNA, 15 bp, Homo sapiens
aaatcacattccagt

SEQ ID NO: 1511710 - DNA, 15 bp, Homo sapiens
aatcacattccagta

SEQ ID NO: 1511711 - DNA, 15 bp, Homo sapiens
atcacattccagtaa

SEQ ID NO: 1511712 - DNA, 15 bp, Homo sapiens
tcacattccagtaag

SEQ ID NO: 1511713 - DNA, 15 bp, Homo sapiens
cacattccagtaagg

SEQ ID NO: 1511714 - DNA, 15 bp, Homo sapiens
acattccagtaagga

SEQ ID NO: 1511715 - DNA, 15 bp, Homo sapiens
cattccagtaaggat

SEQ ID NO: 1511716 - DNA, 15 bp, Homo sapiens
attccagtaaggata

SEQ ID NO: 1511717 - DNA, 15 bp, Homo sapiens
ttccagtaaggatag

SEQ ID NO: 1511718 - DNA, 15 bp, Homo sapiens
tccagtaaggatagc

SEQ ID NO: 1511719 - DNA, 15 bp, Homo sapiens
ccagtaaggatagct

SEQ ID NO: 1511720 - DNA, 15 bp, Homo sapiens
cagtaaggatagcta

SEQ ID NO: 1511721 - DNA, 15 bp, Homo sapiens
agtaaggatagctaa

SEQ ID NO: 1511722 - DNA, 15 bp, Homo sapiens
gtaaggatagctaat

SEQ ID NO: 1511723 - DNA, 15 bp, Homo sapiens
taaggatagctaata

SEQ ID NO: 1511724 - DNA, 15 bp, Homo sapiens
aaggatagctaatat

SEQ ID NO: 1511725 - DNA, 15 bp, Homo sapiens
aggatagctaatatg

SEQ ID NO: 1511726 - DNA, 15 bp, Homo sapiens
ggatagctaatatga

SEQ ID NO: 1511727 - DNA, 15 bp, Homo sapiens
gatagctaatatgac

SEQ ID NO: 1511728 - DNA, 15 bp, Homo sapiens
atagctaatatgaca

SEQ ID NO: 1511729 - DNA, 15 bp, Homo sapiens
tagctaatatgacag

SEQ ID NO: 1511730 - DNA, 15 bp, Homo sapiens
agctaatatgacaga

SEQ ID NO: 1511731 - DNA, 15 bp, Homo sapiens
gctaatatgacagat

SEQ ID NO: 1511732 - DNA, 15 bp, Homo sapiens
ctaatatgacagatg

SEQ ID NO: 1511733 - DNA, 15 bp, Homo sapiens
taatatgacagatgt

SEQ ID NO: 1511734 - DNA, 15 bp, Homo sapiens
aatatgacagatgtg

SEQ ID NO: 1511735 - DNA, 15 bp, Homo sapiens
atatgacagatgtga

SEQ ID NO: 1511736 - DNA, 15 bp, Homo sapiens
tatgacagatgtgag

SEQ ID NO: 1511737 - DNA, 15 bp, Homo sapiens
atgacagatgtgagt

SEQ ID NO: 1511738 - DNA, 15 bp, Homo sapiens
tgacagatgtgagtc

SEQ ID NO: 1511739 - DNA, 15 bp, Homo sapiens
gacagatgtgagtct

SEQ ID NO: 1511740 - DNA, 15 bp, Homo sapiens
acagatgtgagtctt

SEQ ID NO: 1511741 - DNA, 15 bp, Homo sapiens
cagatgtgagtctta

SEQ ID NO: 1511742 - DNA, 15 bp, Homo sapiens
agatgtgagtcttaa

SEQ ID NO: 1511743 - DNA, 15 bp, Homo sapiens
gatgtgagtcttaaa

SEQ ID NO: 1511744 - DNA, 15 bp, Homo sapiens
atgtgagtcttaaag

SEQ ID NO: 1511745 - DNA, 15 bp, Homo sapiens
tgtgagtcttaaaga

SEQ ID NO: 1511746 - DNA, 15 bp, Homo sapiens
gtgagtcttaaagaa

SEQ ID NO: 1511747 - DNA, 15 bp, Homo sapiens
tgagtcttaaagaaa

SEQ ID NO: 1511748 - DNA, 15 bp, Homo sapiens
gagtcttaaagaaaa

SEQ ID NO: 1511749 - DNA, 15 bp, Homo sapiens
agtcttaaagaaaaa

SEQ ID NO: 1511750 - DNA, 15 bp, Homo sapiens
gtcttaaagaaaaaa

SEQ ID NO: 1511751 - DNA, 15 bp, Homo sapiens
tcttaaagaaaaaaa

SEQ ID NO: 1511752 - DNA, 15 bp, Homo sapiens
cttaaagaaaaaaaa

SEQ ID NO: 1511753 - DNA, 15 bp, Homo sapiens
taaagaaaaaaaaag

SEQ ID NO: 1511754 - DNA, 15 bp, Homo sapiens
aaagaaaaaaaaagg

SEQ ID NO: 1511755 - DNA, 15 bp, Homo sapiens
aagaaaaaaaaaggg

SEQ ID NO: 1511756 - DNA, 15 bp, Homo sapiens
agaaaaaaaaaggga

SEQ ID NO: 1511757 - DNA, 15 bp, Homo sapiens
gaaaaaaaaagggag

SEQ ID NO: 1511758 - DNA, 15 bp, Homo sapiens
aaaaaaaaagggaga

SEQ ID NO: 1511759 - DNA, 15 bp, Homo sapiens
aaaaaaaagggagag

SEQ ID NO: 1511760 - DNA, 15 bp, Homo sapiens
aaaaaaagggagagg

SEQ ID NO: 1511761 - DNA, 15 bp, Homo sapiens
aaaaaagggagagga

SEQ ID NO: 1511762 - DNA, 15 bp, Homo sapiens
aaaaagggagaggat

SEQ ID NO: 1511763 - DNA, 15 bp, Homo sapiens
aaaagggagaggatg

SEQ ID NO: 1511764 - DNA, 15 bp, Homo sapiens
aaagggagaggatga

SEQ ID NO: 1511765 - DNA, 15 bp, Homo sapiens
aagggagaggatgaa

SEQ ID NO: 1511766 - DNA, 15 bp, Homo sapiens
agggagaggatgaaa

SEQ ID NO: 1511767 - DNA, 15 bp, Homo sapiens
gggagaggatgaaag

SEQ ID NO: 1511768 - DNA, 15 bp, Homo sapiens
ggagaggatgaaagg

SEQ ID NO: 1511769 - DNA, 15 bp, Homo sapiens
gagaggatgaaaggt

SEQ ID NO: 1511770 - DNA, 15 bp, Homo sapiens
agaggatgaaaggtg

SEQ ID NO: 1511771 - DNA, 15 bp, Homo sapiens
gaggatgaaaggtga

SEQ ID NO: 1511772 - DNA, 15 bp, Homo sapiens
aggatgaaaggtgat

SEQ ID NO: 1511773 - DNA, 15 bp, Homo sapiens
ggatgaaaggtgatt

SEQ ID NO: 1511774 - DNA, 15 bp, Homo sapiens
gatgaaaggtgattt

SEQ ID NO: 1511775 - DNA, 15 bp, Homo sapiens
atgaaaggtgattta

SEQ ID NO: 1511776 - DNA, 15 bp, Homo sapiens
tgaaaggtgatttag

SEQ ID NO: 1511777 - DNA, 15 bp, Homo sapiens
gaaaggtgatttagg

SEQ ID NO: 1511778 - DNA, 15 bp, Homo sapiens
aaaggtgatttaggg

SEQ ID NO: 1511779 - DNA, 15 bp, Homo sapiens
aaggtgatttaggga

SEQ ID NO: 1511780 - DNA, 15 bp, Homo sapiens
aggtgatttagggac

SEQ ID NO: 1511781 - DNA, 15 bp, Homo sapiens
ggtgatttagggaca

SEQ ID NO: 1511782 - DNA, 15 bp, Homo sapiens
gtgatttagggacag

SEQ ID NO: 1511783 - DNA, 15 bp, Homo sapiens
tgatttagggacagg

SEQ ID NO: 1511784 - DNA, 15 bp, Homo sapiens
gatttagggacagga

SEQ ID NO: 1511785 - DNA, 15 bp, Homo sapiens
atttagggacaggat

SEQ ID NO: 1511786 - DNA, 15 bp, Homo sapiens
tttagggacaggatt

SEQ ID NO: 1511787 - DNA, 15 bp, Homo sapiens
ttagggacaggattg

SEQ ID NO: 1511788 - DNA, 15 bp, Homo sapiens
tagggacaggattgc

SEQ ID NO: 1511789 - DNA, 15 bp, Homo sapiens
agggacaggattgct

SEQ ID NO: 1511790 - DNA, 15 bp, Homo sapiens
gggacaggattgctg

SEQ ID NO: 1511791 - DNA, 15 bp, Homo sapiens
ggacaggattgctgt

SEQ ID NO: 1511792 - DNA, 15 bp, Homo sapiens
gacaggattgctgtt

SEQ ID NO: 1511793 - DNA, 15 bp, Homo sapiens
acaggattgctgttt

SEQ ID NO: 1511794 - DNA, 15 bp, Homo sapiens
caggattgctgtttc

SEQ ID NO: 1511795 - DNA, 15 bp, Homo sapiens
aggattgctgtttca

SEQ ID NO: 1511796 - DNA, 15 bp, Homo sapiens
ggattgctgtttcag

SEQ ID NO: 1511797 - DNA, 15 bp, Homo sapiens
gattgctgtttcaga

SEQ ID NO: 1511798 - DNA, 15 bp, Homo sapiens
attgctgtttcagag

SEQ ID NO: 1511799 - DNA, 15 bp, Homo sapiens
ttgctgtttcagaga

SEQ ID NO: 1511800 - DNA, 15 bp, Homo sapiens
tgctgtttcagagag

SEQ ID NO: 1511801 - DNA, 15 bp, Homo sapiens
gctgtttcagagagt

SEQ ID NO: 1511802 - DNA, 15 bp, Homo sapiens
ctgtttcagagagta

SEQ ID NO: 1511803 - DNA, 15 bp, Homo sapiens
tgtttcagagagtag

SEQ ID NO: 1511804 - DNA, 15 bp, Homo sapiens
gtttcagagagtagt

SEQ ID NO: 1511805 - DNA, 15 bp, Homo sapiens
tttcagagagtagtc

SEQ ID NO: 1511806 - DNA, 15 bp, Homo sapiens
ttcagagagtagtca

SEQ ID NO: 1511807 - DNA, 15 bp, Homo sapiens
tcagagagtagtcag

SEQ ID NO: 1511808 - DNA, 15 bp, Homo sapiens
cagagagtagtcagg

SEQ ID NO: 1511809 - DNA, 15 bp, Homo sapiens
agagagtagtcaggg

SEQ ID NO: 1511810 - DNA, 15 bp, Homo sapiens
gagagtagtcaggga

SEQ ID NO: 1511811 - DNA, 15 bp, Homo sapiens
agagtagtcagggaa

SEQ ID NO: 1511812 - DNA, 15 bp, Homo sapiens
gagtagtcagggaag

SEQ ID NO: 1511813 - DNA, 15 bp, Homo sapiens
agtagtcagggaaga

SEQ ID NO: 1511814 - DNA, 15 bp, Homo sapiens
gtagtcagggaagat

SEQ ID NO: 1511815 - DNA, 15 bp, Homo sapiens
tagtcagggaagatc

SEQ ID NO: 1511816 - DNA, 15 bp, Homo sapiens
agtcagggaagatct

SEQ ID NO: 1511817 - DNA, 15 bp, Homo sapiens
gtcagggaagatctc

SEQ ID NO: 1511818 - DNA, 15 bp, Homo sapiens
tcagggaagatctct

SEQ ID NO: 1511819 - DNA, 15 bp, Homo sapiens
cagggaagatctctc

SEQ ID NO: 1511820 - DNA, 15 bp, Homo sapiens
agggaagatctctca

SEQ ID NO: 1511821 - DNA, 15 bp, Homo sapiens
gggaagatctctcaa

SEQ ID NO: 1511822 - DNA, 15 bp, Homo sapiens
ggaagatctctcaat

SEQ ID NO: 1511823 - DNA, 15 bp, Homo sapiens
gaagatctctcaatg

SEQ ID NO: 1511824 - DNA, 15 bp, Homo sapiens
aagatctctcaatgt

SEQ ID NO: 1511825 - DNA, 15 bp, Homo sapiens
agatctctcaatgtc

SEQ ID NO: 1511826 - DNA, 15 bp, Homo sapiens
gatctctcaatgtcc

SEQ ID NO: 1511827 - DNA, 15 bp, Homo sapiens
atctctcaatgtcca

SEQ ID NO: 1511828 - DNA, 15 bp, Homo sapiens
tctctcaatgtccag

SEQ ID NO: 1511829 - DNA, 15 bp, Homo sapiens
ctctcaatgtccagg

SEQ ID NO: 1511830 - DNA, 15 bp, Homo sapiens
tctcaatgtccaggc

SEQ ID NO: 1511831 - DNA, 15 bp, Homo sapiens
ctcaatgtccaggcc

SEQ ID NO: 1511832 - DNA, 15 bp, Homo sapiens
tcaatgtccaggcct

SEQ ID NO: 1511833 - DNA, 15 bp, Homo sapiens
caatgtccaggcctg

SEQ ID NO: 1511834 - DNA, 15 bp, Homo sapiens
aatgtccaggcctgt

SEQ ID NO: 1511835 - DNA, 15 bp, Homo sapiens
atgtccaggcctgtg

SEQ ID NO: 1511836 - DNA, 15 bp, Homo sapiens
tgtccaggcctgtgt

SEQ ID NO: 1511837 - DNA, 15 bp, Homo sapiens
gtccaggcctgtgtt

SEQ ID NO: 1511838 - DNA, 15 bp, Homo sapiens
tccaggcctgtgttt

SEQ ID NO: 1511839 - DNA, 15 bp, Homo sapiens
ccaggcctgtgtttt

SEQ ID NO: 1511840 - DNA, 15 bp, Homo sapiens
caggcctgtgttttt

SEQ ID NO: 1511841 - DNA, 15 bp, Homo sapiens
aggcctgtgtttttc

SEQ ID NO: 1511842 - DNA, 15 bp, Homo sapiens
ggcctgtgtttttct

SEQ ID NO: 1511843 - DNA, 15 bp, Homo sapiens
gcctgtgtttttctc

SEQ ID NO: 1511844 - DNA, 15 bp, Homo sapiens
cctgtgtttttctct

SEQ ID NO: 1511845 - DNA, 15 bp, Homo sapiens
ctgtgtttttctctc

SEQ ID NO: 1511846 - DNA, 15 bp, Homo sapiens
tgtgtttttctctct

SEQ ID NO: 1511847 - DNA, 15 bp, Homo sapiens
gtgtttttctctcta

SEQ ID NO: 1511848 - DNA, 15 bp, Homo sapiens
tgtttttctctctac

SEQ ID NO: 1511849 - DNA, 15 bp, Homo sapiens
gtttttctctctaca

SEQ ID NO: 1511850 - DNA, 15 bp, Homo sapiens
tttttctctctacag

SEQ ID NO: 1511851 - DNA, 15 bp, Homo sapiens
ttttctctctacagt

SEQ ID NO: 1511852 - DNA, 15 bp, Homo sapiens
tttctctctacagtt

SEQ ID NO: 1511853 - DNA, 15 bp, Homo sapiens
ttctctctacagttt

SEQ ID NO: 1511854 - DNA, 15 bp, Homo sapiens
tctctctacagtttt

SEQ ID NO: 1511855 - DNA, 15 bp, Homo sapiens
ctctctacagtttta

SEQ ID NO: 1511856 - DNA, 15 bp, Homo sapiens
tctctacagttttaa

SEQ ID NO: 1511857 - DNA, 15 bp, Homo sapiens
ctctacagttttaaa

SEQ ID NO: 1511858 - DNA, 15 bp, Homo sapiens
tctacagttttaaag

SEQ ID NO: 1511859 - DNA, 15 bp, Homo sapiens
ctacagttttaaagt

SEQ ID NO: 1511860 - DNA, 15 bp, Homo sapiens
tacagttttaaagtg

SEQ ID NO: 1511861 - DNA, 15 bp, Homo sapiens
acagttttaaagtgg

SEQ ID NO: 1511862 - DNA, 15 bp, Homo sapiens
cagttttaaagtgga

SEQ ID NO: 1511863 - DNA, 15 bp, Homo sapiens
agttttaaagtggac

SEQ ID NO: 1511864 - DNA, 15 bp, Homo sapiens
gttttaaagtggaca

SEQ ID NO: 1511865 - DNA, 15 bp, Homo sapiens
ttttaaagtggacat

SEQ ID NO: 1511866 - DNA, 15 bp, Homo sapiens
tttaaagtggacata

SEQ ID NO: 1511867 - DNA, 15 bp, Homo sapiens
ttaaagtggacatag

SEQ ID NO: 1511868 - DNA, 15 bp, Homo sapiens
taaagtggacatagg

SEQ ID NO: 1511869 - DNA, 15 bp, Homo sapiens
aaagtggacatagga

SEQ ID NO: 1511870 - DNA, 15 bp, Homo sapiens
aagtggacataggat

SEQ ID NO: 1511871 - DNA, 15 bp, Homo sapiens
agtggacataggata

SEQ ID NO: 1511872 - DNA, 15 bp, Homo sapiens
gtggacataggatat

SEQ ID NO: 1511873 - DNA, 15 bp, Homo sapiens
tggacataggatata

SEQ ID NO: 1511874 - DNA, 15 bp, Homo sapiens
ggacataggatatag

SEQ ID NO: 1511875 - DNA, 15 bp, Homo sapiens
gacataggatatagt

SEQ ID NO: 1511876 - DNA, 15 bp, Homo sapiens
acataggatatagtg

SEQ ID NO: 1511877 - DNA, 15 bp, Homo sapiens
cataggatatagtgt

SEQ ID NO: 1511878 - DNA, 15 bp, Homo sapiens
ataggatatagtgtt

SEQ ID NO: 1511879 - DNA, 15 bp, Homo sapiens
taggatatagtgtta

SEQ ID NO: 1511880 - DNA, 15 bp, Homo sapiens
aggatatagtgttat

SEQ ID NO: 1511881 - DNA, 15 bp, Homo sapiens
ggatatagtgttatt

SEQ ID NO: 1511882 - DNA, 15 bp, Homo sapiens
gatatagtgttattt

SEQ ID NO: 1511883 - DNA, 15 bp, Homo sapiens
atatagtgttattta

SEQ ID NO: 1511884 - DNA, 15 bp, Homo sapiens
tatagtgttatttat

SEQ ID NO: 1511885 - DNA, 15 bp, Homo sapiens
atagtgttatttatt

SEQ ID NO: 1511886 - DNA, 15 bp, Homo sapiens
tagtgttatttattt

SEQ ID NO: 1511887 - DNA, 15 bp, Homo sapiens
agtgttatttatttt

SEQ ID NO: 1511888 - DNA, 15 bp, Homo sapiens
gtgttatttattttc

SEQ ID NO: 1511889 - DNA, 15 bp, Homo sapiens
tgttatttattttcc

SEQ ID NO: 1511890 - DNA, 15 bp, Homo sapiens
gttatttattttcca

SEQ ID NO: 1511891 - DNA, 15 bp, Homo sapiens
ttatttattttccaa

SEQ ID NO: 1511892 - DNA, 15 bp, Homo sapiens
tatttattttccaaa

SEQ ID NO: 1511893 - DNA, 15 bp, Homo sapiens
atttattttccaaaa

SEQ ID NO: 1511894 - DNA, 15 bp, Homo sapiens
tttattttccaaaaa

SEQ ID NO: 1511895 - DNA, 15 bp, Homo sapiens
ttattttccaaaaat

SEQ ID NO: 1511896 - DNA, 15 bp, Homo sapiens
tattttccaaaaatg

SEQ ID NO: 1511897 - DNA, 15 bp, Homo sapiens
attttccaaaaatgt

SEQ ID NO: 1511898 - DNA, 15 bp, Homo sapiens
ttttccaaaaatgta

SEQ ID NO: 1511899 - DNA, 15 bp, Homo sapiens
tttccaaaaatgtaa

SEQ ID NO: 1511900 - DNA, 15 bp, Homo sapiens
ttccaaaaatgtaac

SEQ ID NO: 1511901 - DNA, 15 bp, Homo sapiens
tccaaaaatgtaacc

SEQ ID NO: 1511902 - DNA, 15 bp, Homo sapiens
ccaaaaatgtaacca

SEQ ID NO: 1511903 - DNA, 15 bp, Homo sapiens
caaaaatgtaaccaa

SEQ ID NO: 1511904 - DNA, 15 bp, Homo sapiens
aaaaatgtaaccaat

SEQ ID NO: 1511905 - DNA, 15 bp, Homo sapiens
aaaatgtaaccaatc

SEQ ID NO: 1511906 - DNA, 15 bp, Homo sapiens
aaatgtaaccaatct

SEQ ID NO: 1511907 - DNA, 15 bp, Homo sapiens
aatgtaaccaatctc

SEQ ID NO: 1511908 - DNA, 15 bp, Homo sapiens
atgtaaccaatctct

SEQ ID NO: 1511909 - DNA, 15 bp, Homo sapiens
tgtaaccaatctcta

SEQ ID NO: 1511910 - DNA, 15 bp, Homo sapiens
gtaaccaatctctac

SEQ ID NO: 1511911 - DNA, 15 bp, Homo sapiens
taaccaatctctact

SEQ ID NO: 1511912 - DNA, 15 bp, Homo sapiens
aaccaatctctacta

SEQ ID NO: 1511913 - DNA, 15 bp, Homo sapiens
accaatctctactag

SEQ ID NO: 1511914 - DNA, 15 bp, Homo sapiens
ccaatctctactagg

SEQ ID NO: 1511915 - DNA, 15 bp, Homo sapiens
caatctctactaggt

SEQ ID NO: 1511916 - DNA, 15 bp, Homo sapiens
aatctctactaggtg

SEQ ID NO: 1511917 - DNA, 15 bp, Homo sapiens
atctctactaggtgt

SEQ ID NO: 1511918 - DNA, 15 bp, Homo sapiens
tctctactaggtgta

SEQ ID NO: 1511919 - DNA, 15 bp, Homo sapiens
ctctactaggtgtaa

SEQ ID NO: 1511920 - DNA, 15 bp, Homo sapiens
tctactaggtgtaag

SEQ ID NO: 1511921 - DNA, 15 bp, Homo sapiens
ctactaggtgtaagc

SEQ ID NO: 1511922 - DNA, 15 bp, Homo sapiens
tactaggtgtaagca

SEQ ID NO: 1511923 - DNA, 15 bp, Homo sapiens
actaggtgtaagcag

SEQ ID NO: 1511924 - DNA, 15 bp, Homo sapiens
ctaggtgtaagcagc

SEQ ID NO: 1511925 - DNA, 15 bp, Homo sapiens
taggtgtaagcagct

SEQ ID NO: 1511926 - DNA, 15 bp, Homo sapiens
aggtgtaagcagctg

SEQ ID NO: 1511927 - DNA, 15 bp, Homo sapiens
ggtgtaagcagctgg

SEQ ID NO: 1511928 - DNA, 15 bp, Homo sapiens
gtgtaagcagctggg

SEQ ID NO: 1511929 - DNA, 15 bp, Homo sapiens
tgtaagcagctgggc

SEQ ID NO: 1511930 - DNA, 15 bp, Homo sapiens
gtaagcagctgggct

SEQ ID NO: 1511931 - DNA, 15 bp, Homo sapiens
taagcagctgggctt

SEQ ID NO: 1511932 - DNA, 15 bp, Homo sapiens
aagcagctgggcttg

SEQ ID NO: 1511933 - DNA, 15 bp, Homo sapiens
agcagctgggcttgg

SEQ ID NO: 1511934 - DNA, 15 bp, Homo sapiens
gcagctgggcttggt

SEQ ID NO: 1511935 - DNA, 15 bp, Homo sapiens
cagctgggcttggtt

SEQ ID NO: 1511936 - DNA, 15 bp, Homo sapiens
agctgggcttggttt

SEQ ID NO: 1511937 - DNA, 15 bp, Homo sapiens
gctgggcttggtttt

SEQ ID NO: 1511938 - DNA, 15 bp, Homo sapiens
ctgggcttggttttg

SEQ ID NO: 1511939 - DNA, 15 bp, Homo sapiens
tgggcttggttttgc

SEQ ID NO: 1511940 - DNA, 15 bp, Homo sapiens
gggcttggttttgca

SEQ ID NO: 1511941 - DNA, 15 bp, Homo sapiens
ggcttggttttgcaa

SEQ ID NO: 1511942 - DNA, 15 bp, Homo sapiens
gcttggttttgcaag

SEQ ID NO: 1511943 - DNA, 15 bp, Homo sapiens
cttggttttgcaagg

SEQ ID NO: 1511944 - DNA, 15 bp, Homo sapiens
ttggttttgcaaggg

SEQ ID NO: 1511945 - DNA, 15 bp, Homo sapiens
tggttttgcaaggga

SEQ ID NO: 1511946 - DNA, 15 bp, Homo sapiens
ggttttgcaagggat

SEQ ID NO: 1511947 - DNA, 15 bp, Homo sapiens
gttttgcaagggatc

SEQ ID NO: 1511948 - DNA, 15 bp, Homo sapiens
ttttgcaagggatct

SEQ ID NO: 1511949 - DNA, 15 bp, Homo sapiens
tttgcaagggatctt

SEQ ID NO: 1511950 - DNA, 15 bp, Homo sapiens
ttgcaagggatctta

SEQ ID NO: 1511951 - DNA, 15 bp, Homo sapiens
tgcaagggatcttaa

SEQ ID NO: 1511952 - DNA, 15 bp, Homo sapiens
gcaagggatcttaat

SEQ ID NO: 1511953 - DNA, 15 bp, Homo sapiens
caagggatcttaata

SEQ ID NO: 1511954 - DNA, 15 bp, Homo sapiens
aagggatcttaatag

SEQ ID NO: 1511955 - DNA, 15 bp, Homo sapiens
agggatcttaatagg

SEQ ID NO: 1511956 - DNA, 15 bp, Homo sapiens
gggatcttaataggg

SEQ ID NO: 1511957 - DNA, 15 bp, Homo sapiens
ggatcttaataggga

SEQ ID NO: 1511958 - DNA, 15 bp, Homo sapiens
gatcttaatagggaa

SEQ ID NO: 1511959 - DNA, 15 bp, Homo sapiens
atcttaatagggaac

SEQ ID NO: 1511960 - DNA, 15 bp, Homo sapiens
tcttaatagggaaca

SEQ ID NO: 1511961 - DNA, 15 bp, Homo sapiens
cttaatagggaacag

SEQ ID NO: 1511962 - DNA, 15 bp, Homo sapiens
ttaatagggaacaga

SEQ ID NO: 1511963 - DNA, 15 bp, Homo sapiens
taatagggaacagaa

SEQ ID NO: 1511964 - DNA, 15 bp, Homo sapiens
aatagggaacagaaa

SEQ ID NO: 1511965 - DNA, 15 bp, Homo sapiens
atagggaacagaaac

SEQ ID NO: 1511966 - DNA, 15 bp, Homo sapiens
tagggaacagaaaca

SEQ ID NO: 1511967 - DNA, 15 bp, Homo sapiens
agggaacagaaacac

SEQ ID NO: 1511968 - DNA, 15 bp, Homo sapiens
gggaacagaaacact

SEQ ID NO: 1511969 - DNA, 15 bp, Homo sapiens
ggaacagaaacactg

SEQ ID NO: 1511970 - DNA, 15 bp, Homo sapiens
gaacagaaacactgt

SEQ ID NO: 1511971 - DNA, 15 bp, Homo sapiens
aacagaaacactgtg

SEQ ID NO: 1511972 - DNA, 15 bp, Homo sapiens
acagaaacactgtgt

SEQ ID NO: 1511973 - DNA, 15 bp, Homo sapiens
cagaaacactgtgta

SEQ ID NO: 1511974 - DNA, 15 bp, Homo sapiens
agaaacactgtgtat

SEQ ID NO: 1511975 - DNA, 15 bp, Homo sapiens
gaaacactgtgtatg

SEQ ID NO: 1511976 - DNA, 15 bp, Homo sapiens
aaacactgtgtatgc

SEQ ID NO: 1511977 - DNA, 15 bp, Homo sapiens
aacactgtgtatgct

SEQ ID NO: 1511978 - DNA, 15 bp, Homo sapiens
acactgtgtatgctt

SEQ ID NO: 1511979 - DNA, 15 bp, Homo sapiens
cactgtgtatgctta

SEQ ID NO: 1511980 - DNA, 15 bp, Homo sapiens
actgtgtatgcttag

SEQ ID NO: 1511981 - DNA, 15 bp, Homo sapiens
ctgtgtatgcttagc

SEQ ID NO: 1511982 - DNA, 15 bp, Homo sapiens
tgtgtatgcttagct

SEQ ID NO: 1511983 - DNA, 15 bp, Homo sapiens
gtgtatgcttagctg

SEQ ID NO: 1511984 - DNA, 15 bp, Homo sapiens
tgtatgcttagctgt

SEQ ID NO: 1511985 - DNA, 15 bp, Homo sapiens
gtatgcttagctgtc

SEQ ID NO: 1511986 - DNA, 15 bp, Homo sapiens
tatgcttagctgtcc

SEQ ID NO: 1511987 - DNA, 15 bp, Homo sapiens
atgcttagctgtcca

SEQ ID NO: 1511988 - DNA, 15 bp, Homo sapiens
tgcttagctgtccac

SEQ ID NO: 1511989 - DNA, 15 bp, Homo sapiens
gcttagctgtccact

SEQ ID NO: 1511990 - DNA, 15 bp, Homo sapiens
cttagctgtccactt

SEQ ID NO: 1511991 - DNA, 15 bp, Homo sapiens
ttagctgtccacttc

SEQ ID NO: 1511992 - DNA, 15 bp, Homo sapiens
tagctgtccacttcc

SEQ ID NO: 1511993 - DNA, 15 bp, Homo sapiens
agctgtccacttccc

SEQ ID NO: 1511994 - DNA, 15 bp, Homo sapiens
gctgtccacttcccc

SEQ ID NO: 1511995 - DNA, 15 bp, Homo sapiens
ctgtccacttcccca

SEQ ID NO: 1511996 - DNA, 15 bp, Homo sapiens
tgtccacttccccag

SEQ ID NO: 1511997 - DNA, 15 bp, Homo sapiens
gtccacttccccaga

SEQ ID NO: 1511998 - DNA, 15 bp, Homo sapiens
tccacttccccagaa

SEQ ID NO: 1511999 - DNA, 15 bp, Homo sapiens
ccacttccccagaag

SEQ ID NO: 1512000 - DNA, 15 bp, Homo sapiens
cacttccccagaaga

SEQ ID NO: 1512001 - DNA, 15 bp, Homo sapiens
acttccccagaagac

SEQ ID NO: 1512002 - DNA, 15 bp, Homo sapiens
cttccccagaagact

SEQ ID NO: 1512003 - DNA, 15 bp, Homo sapiens
ttccccagaagactg

SEQ ID NO: 1512004 - DNA, 15 bp, Homo sapiens
tccccagaagactgt

SEQ ID NO: 1512005 - DNA, 15 bp, Homo sapiens
ccccagaagactgta

SEQ ID NO: 1512006 - DNA, 15 bp, Homo sapiens
cccagaagactgtaa

SEQ ID NO: 1512007 - DNA, 15 bp, Homo sapiens
ccagaagactgtaag

SEQ ID NO: 1512008 - DNA, 15 bp, Homo sapiens
cagaagactgtaagc

SEQ ID NO: 1512009 - DNA, 15 bp, Homo sapiens
agaagactgtaagct

SEQ ID NO: 1512010 - DNA, 15 bp, Homo sapiens
gaagactgtaagctc

SEQ ID NO: 1512011 - DNA, 15 bp, Homo sapiens
aagactgtaagctct

SEQ ID NO: 1512012 - DNA, 15 bp, Homo sapiens
agactgtaagctctc

SEQ ID NO: 1512013 - DNA, 15 bp, Homo sapiens
gactgtaagctctct

SEQ ID NO: 1512014 - DNA, 15 bp, Homo sapiens
actgtaagctctctg

SEQ ID NO: 1512015 - DNA, 15 bp, Homo sapiens
ctgtaagctctctga

SEQ ID NO: 1512016 - DNA, 15 bp, Homo sapiens
tgtaagctctctgaa

SEQ ID NO: 1512017 - DNA, 15 bp, Homo sapiens
gtaagctctctgaag

SEQ ID NO: 1512018 - DNA, 15 bp, Homo sapiens
taagctctctgaagg

SEQ ID NO: 1512019 - DNA, 15 bp, Homo sapiens
aagctctctgaaggc

SEQ ID NO: 1512020 - DNA, 15 bp, Homo sapiens
agctctctgaaggca

SEQ ID NO: 1512021 - DNA, 15 bp, Homo sapiens
gctctctgaaggcaa

SEQ ID NO: 1512022 - DNA, 15 bp, Homo sapiens
ctctctgaaggcaag

SEQ ID NO: 1512023 - DNA, 15 bp, Homo sapiens
tctctgaaggcaaga

SEQ ID NO: 1512024 - DNA, 15 bp, Homo sapiens
ctctgaaggcaagac

SEQ ID NO: 1512025 - DNA, 15 bp, Homo sapiens
tctgaaggcaagacc

SEQ ID NO: 1512026 - DNA, 15 bp, Homo sapiens
ctgaaggcaagaccc

SEQ ID NO: 1512027 - DNA, 15 bp, Homo sapiens
tgaaggcaagaccca

SEQ ID NO: 1512028 - DNA, 15 bp, Homo sapiens
gaaggcaagacccag

SEQ ID NO: 1512029 - DNA, 15 bp, Homo sapiens
aaggcaagacccagg

SEQ ID NO: 1512030 - DNA, 15 bp, Homo sapiens
aggcaagacccaggt

SEQ ID NO: 1512031 - DNA, 15 bp, Homo sapiens
ggcaagacccaggtc

SEQ ID NO: 1512032 - DNA, 15 bp, Homo sapiens
gcaagacccaggtct

SEQ ID NO: 1512033 - DNA, 15 bp, Homo sapiens
caagacccaggtctt

SEQ ID NO: 1512034 - DNA, 15 bp, Homo sapiens
aagacccaggtcttt

SEQ ID NO: 1512035 - DNA, 15 bp, Homo sapiens
agacccaggtctttg

SEQ ID NO: 1512036 - DNA, 15 bp, Homo sapiens
gacccaggtctttgg

SEQ ID NO: 1512037 - DNA, 15 bp, Homo sapiens
acccaggtctttggt

SEQ ID NO: 1512038 - DNA, 15 bp, Homo sapiens
cccaggtctttggtc

SEQ ID NO: 1512039 - DNA, 15 bp, Homo sapiens
ccaggtctttggtct

SEQ ID NO: 1512040 - DNA, 15 bp, Homo sapiens
caggtctttggtctg

SEQ ID NO: 1512041 - DNA, 15 bp, Homo sapiens
aggtctttggtctgt

SEQ ID NO: 1512042 - DNA, 15 bp, Homo sapiens
ggtctttggtctgta

SEQ ID NO: 1512043 - DNA, 15 bp, Homo sapiens
gtctttggtctgtat

SEQ ID NO: 1512044 - DNA, 15 bp, Homo sapiens
tctttggtctgtatt

SEQ ID NO: 1512045 - DNA, 15 bp, Homo sapiens
ctttggtctgtatta

SEQ ID NO: 1512046 - DNA, 15 bp, Homo sapiens
tttggtctgtattag

SEQ ID NO: 1512047 - DNA, 15 bp, Homo sapiens
ttggtctgtattagg

SEQ ID NO: 1512048 - DNA, 15 bp, Homo sapiens
tggtctgtattagga

SEQ ID NO: 1512049 - DNA, 15 bp, Homo sapiens
ggtctgtattaggag

SEQ ID NO: 1512050 - DNA, 15 bp, Homo sapiens
gtctgtattaggagt

SEQ ID NO: 1512051 - DNA, 15 bp, Homo sapiens
tctgtattaggagta

SEQ ID NO: 1512052 - DNA, 15 bp, Homo sapiens
ctgtattaggagtac

SEQ ID NO: 1512053 - DNA, 15 bp, Homo sapiens
tgtattaggagtacc

SEQ ID NO: 1512054 - DNA, 15 bp, Homo sapiens
gtattaggagtaccc

SEQ ID NO: 1512055 - DNA, 15 bp, Homo sapiens
tattaggagtaccca

SEQ ID NO: 1512056 - DNA, 15 bp, Homo sapiens
attaggagtacccag

SEQ ID NO: 1512057 - DNA, 15 bp, Homo sapiens
ttaggagtacccaga

SEQ ID NO: 1512058 - DNA, 15 bp, Homo sapiens
taggagtacccagaa

SEQ ID NO: 1512059 - DNA, 15 bp, Homo sapiens
aggagtacccagaat

SEQ ID NO: 1512060 - DNA, 15 bp, Homo sapiens
ggagtacccagaata

SEQ ID NO: 1512061 - DNA, 15 bp, Homo sapiens
gagtacccagaatag

SEQ ID NO: 1512062 - DNA, 15 bp, Homo sapiens
agtacccagaatagt

SEQ ID NO: 1512063 - DNA, 15 bp, Homo sapiens
gtacccagaatagtg

SEQ ID NO: 1512064 - DNA, 15 bp, Homo sapiens
tacccagaatagtgt

SEQ ID NO: 1512065 - DNA, 15 bp, Homo sapiens
acccagaatagtgtt

SEQ ID NO: 1512066 - DNA, 15 bp, Homo sapiens
cccagaatagtgttt

SEQ ID NO: 1512067 - DNA, 15 bp, Homo sapiens
ccagaatagtgtttg

SEQ ID NO: 1512068 - DNA, 15 bp, Homo sapiens
cagaatagtgtttga

SEQ ID NO: 1512069 - DNA, 15 bp, Homo sapiens
aatagtgtttgatgg

SEQ ID NO: 1512070 - DNA, 15 bp, Homo sapiens
atagtgtttgatgga

SEQ ID NO: 1512071 - DNA, 15 bp, Homo sapiens
tagtgtttgatggag

SEQ ID NO: 1512072 - DNA, 15 bp, Homo sapiens
agtgtttgatggagg

SEQ ID NO: 1512073 - DNA, 15 bp, Homo sapiens
gtgtttgatggaggg

SEQ ID NO: 1512074 - DNA, 15 bp, Homo sapiens
tgtttgatggaggga

SEQ ID NO: 1512075 - DNA, 15 bp, Homo sapiens
gtttgatggagggat

SEQ ID NO: 1512076 - DNA, 15 bp, Homo sapiens
tttgatggagggatg

SEQ ID NO: 1512077 - DNA, 15 bp, Homo sapiens
ttgatggagggatga

SEQ ID NO: 1512078 - DNA, 15 bp, Homo sapiens
tgatggagggatgaa

SEQ ID NO: 1512079 - DNA, 15 bp, Homo sapiens
gatggagggatgaaa

SEQ ID NO: 1512080 - DNA, 15 bp, Homo sapiens
atggagggatgaaag

SEQ ID NO: 1512081 - DNA, 15 bp, Homo sapiens
tggagggatgaaagg

SEQ ID NO: 1512082 - DNA, 15 bp, Homo sapiens
ggagggatgaaaggg

SEQ ID NO: 1512083 - DNA, 15 bp, Homo sapiens
gagggatgaaaggga

SEQ ID NO: 1512084 - DNA, 15 bp, Homo sapiens
agggatgaaagggac

SEQ ID NO: 1512085 - DNA, 15 bp, Homo sapiens
gggatgaaagggact

SEQ ID NO: 1512086 - DNA, 15 bp, Homo sapiens
ggatgaaagggactt

SEQ ID NO: 1512087 - DNA, 15 bp, Homo sapiens
gatgaaagggacttt

SEQ ID NO: 1512088 - DNA, 15 bp, Homo sapiens
atgaaagggactttt

SEQ ID NO: 1512089 - DNA, 15 bp, Homo sapiens
tgaaagggacttttt

SEQ ID NO: 1512090 - DNA, 15 bp, Homo sapiens
gaaagggactttttc

SEQ ID NO: 1512091 - DNA, 15 bp, Homo sapiens
aaagggactttttct

SEQ ID NO: 1512092 - DNA, 15 bp, Homo sapiens
aagggactttttctc

SEQ ID NO: 1512093 - DNA, 15 bp, Homo sapiens
agggactttttctcc

SEQ ID NO: 1512094 - DNA, 15 bp, Homo sapiens
gggactttttctccc

SEQ ID NO: 1512095 - DNA, 15 bp, Homo sapiens
ggactttttctcccc

SEQ ID NO: 1512096 - DNA, 15 bp, Homo sapiens
gactttttctcccca

SEQ ID NO: 1512097 - DNA, 15 bp, Homo sapiens
actttttctccccag

SEQ ID NO: 1512098 - DNA, 15 bp, Homo sapiens
ctttttctccccagc

SEQ ID NO: 1512099 - DNA, 15 bp, Homo sapiens
tttttctccccagct

SEQ ID NO: 1512100 - DNA, 15 bp, Homo sapiens
ttttctccccagctt

SEQ ID NO: 1512101 - DNA, 15 bp, Homo sapiens
tttctccccagcttg

SEQ ID NO: 1512102 - DNA, 15 bp, Homo sapiens
ttctccccagcttgg

SEQ ID NO: 1512103 - DNA, 15 bp, Homo sapiens
tctccccagcttggt

SEQ ID NO: 1512104 - DNA, 15 bp, Homo sapiens
ctccccagcttggtc

SEQ ID NO: 1512105 - DNA, 15 bp, Homo sapiens
tccccagcttggtca

SEQ ID NO: 1512106 - DNA, 15 bp, Homo sapiens
ccccagcttggtcac

SEQ ID NO: 1512107 - DNA, 15 bp, Homo sapiens
cccagcttggtcact

SEQ ID NO: 1512108 - DNA, 15 bp, Homo sapiens
ccagcttggtcactt

SEQ ID NO: 1512109 - DNA, 15 bp, Homo sapiens
cagcttggtcacttg

SEQ ID NO: 1512110 - DNA, 15 bp, Homo sapiens
agcttggtcacttga

SEQ ID NO: 1512111 - DNA, 15 bp, Homo sapiens
gcttggtcacttgac

SEQ ID NO: 1512112 - DNA, 15 bp, Homo sapiens
cttggtcacttgaca

SEQ ID NO: 1512113 - DNA, 15 bp, Homo sapiens
ttggtcacttgacag

SEQ ID NO: 1512114 - DNA, 15 bp, Homo sapiens
tggtcacttgacaga

SEQ ID NO: 1512115 - DNA, 15 bp, Homo sapiens
ggtcacttgacagat

SEQ ID NO: 1512116 - DNA, 15 bp, Homo sapiens
gtcacttgacagatc

SEQ ID NO: 1512117 - DNA, 15 bp, Homo sapiens
tcacttgacagatcg

SEQ ID NO: 1512118 - DNA, 15 bp, Homo sapiens
cacttgacagatcgg

SEQ ID NO: 1512119 - DNA, 15 bp, Homo sapiens
acttgacagatcggg

SEQ ID NO: 1512120 - DNA, 15 bp, Homo sapiens
cttgacagatcggga

SEQ ID NO: 1512121 - DNA, 15 bp, Homo sapiens
ttgacagatcgggac

SEQ ID NO: 1512122 - DNA, 15 bp, Homo sapiens
tgacagatcgggacc

SEQ ID NO: 1512123 - DNA, 15 bp, Homo sapiens
gacagatcgggacca

SEQ ID NO: 1512124 - DNA, 15 bp, Homo sapiens
acagatcgggaccaa

SEQ ID NO: 1512125 - DNA, 15 bp, Homo sapiens
cagatcgggaccaat

SEQ ID NO: 1512126 - DNA, 15 bp, Homo sapiens
agatcgggaccaatg

SEQ ID NO: 1512127 - DNA, 15 bp, Homo sapiens
gatcgggaccaatga

SEQ ID NO: 1512128 - DNA, 15 bp, Homo sapiens
atcgggaccaatgag

SEQ ID NO: 1512129 - DNA, 15 bp, Homo sapiens
tcgggaccaatgaga

SEQ ID NO: 1512130 - DNA, 15 bp, Homo sapiens
cgggaccaatgagat

SEQ ID NO: 1512131 - DNA, 15 bp, Homo sapiens
gggaccaatgagata

SEQ ID NO: 1512132 - DNA, 15 bp, Homo sapiens
ggaccaatgagatac

SEQ ID NO: 1512133 - DNA, 15 bp, Homo sapiens
gaccaatgagatacc

SEQ ID NO: 1512134 - DNA, 15 bp, Homo sapiens
accaatgagatacca

SEQ ID NO: 1512135 - DNA, 15 bp, Homo sapiens
ccaatgagataccat

SEQ ID NO: 1512136 - DNA, 15 bp, Homo sapiens
caatgagataccatt

SEQ ID NO: 1512137 - DNA, 15 bp, Homo sapiens
aatgagataccattg

SEQ ID NO: 1512138 - DNA, 15 bp, Homo sapiens
atgagataccattgc

SEQ ID NO: 1512139 - DNA, 15 bp, Homo sapiens
tgagataccattgct

SEQ ID NO: 1512140 - DNA, 15 bp, Homo sapiens
gagataccattgcta

SEQ ID NO: 1512141 - DNA, 15 bp, Homo sapiens
agataccattgctag

SEQ ID NO: 1512142 - DNA, 15 bp, Homo sapiens
gataccattgctagg

SEQ ID NO: 1512143 - DNA, 15 bp, Homo sapiens
ataccattgctagga

SEQ ID NO: 1512144 - DNA, 15 bp, Homo sapiens
taccattgctaggat

SEQ ID NO: 1512145 - DNA, 15 bp, Homo sapiens
accattgctaggatg

SEQ ID NO: 1512146 - DNA, 15 bp, Homo sapiens
ccattgctaggatga

SEQ ID NO: 1512147 - DNA, 15 bp, Homo sapiens
cattgctaggatgac

SEQ ID NO: 1512148 - DNA, 15 bp, Homo sapiens
attgctaggatgacc

SEQ ID NO: 1512149 - DNA, 15 bp, Homo sapiens
ttgctaggatgacct

SEQ ID NO: 1512150 - DNA, 15 bp, Homo sapiens
tgctaggatgacctc

SEQ ID NO: 1512151 - DNA, 15 bp, Homo sapiens
gctaggatgacctca

SEQ ID NO: 1512152 - DNA, 15 bp, Homo sapiens
ctaggatgacctcac

SEQ ID NO: 1512153 - DNA, 15 bp, Homo sapiens
taggatgacctcact

SEQ ID NO: 1512154 - DNA, 15 bp, Homo sapiens
aggatgacctcactg

SEQ ID NO: 1512155 - DNA, 15 bp, Homo sapiens
ggatgacctcactgt

SEQ ID NO: 1512156 - DNA, 15 bp, Homo sapiens
gatgacctcactgtc

SEQ ID NO: 1512157 - DNA, 15 bp, Homo sapiens
atgacctcactgtct

SEQ ID NO: 1512158 - DNA, 15 bp, Homo sapiens
tgacctcactgtctt

SEQ ID NO: 1512159 - DNA, 15 bp, Homo sapiens
gacctcactgtctta

SEQ ID NO: 1512160 - DNA, 15 bp, Homo sapiens
acctcactgtcttac

SEQ ID NO: 1512161 - DNA, 15 bp, Homo sapiens
cctcactgtcttaca

SEQ ID NO: 1512162 - DNA, 15 bp, Homo sapiens
ctcactgtcttacac

SEQ ID NO: 1512163 - DNA, 15 bp, Homo sapiens
tcactgtcttacaca

SEQ ID NO: 1512164 - DNA, 15 bp, Homo sapiens
cactgtcttacacac

SEQ ID NO: 1512165 - DNA, 15 bp, Homo sapiens
actgtcttacacacc

SEQ ID NO: 1512166 - DNA, 15 bp, Homo sapiens
ctgtcttacacaccg

SEQ ID NO: 1512167 - DNA, 15 bp, Homo sapiens
tgtcttacacaccga

SEQ ID NO: 1512168 - DNA, 15 bp, Homo sapiens
gtcttacacaccgat

SEQ ID NO: 1512169 - DNA, 15 bp, Homo sapiens
tcttacacaccgatt

SEQ ID NO: 1512170 - DNA, 15 bp, Homo sapiens
cttacacaccgattc

SEQ ID NO: 1512171 - DNA, 15 bp, Homo sapiens
ttacacaccgattcg

SEQ ID NO: 1512172 - DNA, 15 bp, Homo sapiens
tacacaccgattcgt

SEQ ID NO: 1512173 - DNA, 15 bp, Homo sapiens
acacaccgattcgtt

SEQ ID NO: 1512174 - DNA, 15 bp, Homo sapiens
cacaccgattcgttg

SEQ ID NO: 1512175 - DNA, 15 bp, Homo sapiens
acaccgattcgttga

SEQ ID NO: 1512176 - DNA, 15 bp, Homo sapiens
caccgattcgttgag

SEQ ID NO: 1512177 - DNA, 15 bp, Homo sapiens
accgattcgttgagg

SEQ ID NO: 1512178 - DNA, 15 bp, Homo sapiens
ccgattcgttgaggt

SEQ ID NO: 1512179 - DNA, 15 bp, Homo sapiens
cgattcgttgaggta

SEQ ID NO: 1512180 - DNA, 15 bp, Homo sapiens
gattcgttgaggtaa

SEQ ID NO: 1512181 - DNA, 15 bp, Homo sapiens
attcgttgaggtaat

SEQ ID NO: 1512182 - DNA, 15 bp, Homo sapiens
ttcgttgaggtaatt

SEQ ID NO: 1512183 - DNA, 15 bp, Homo sapiens
tcgttgaggtaattt

SEQ ID NO: 1512184 - DNA, 15 bp, Homo sapiens
cgttgaggtaatttc

SEQ ID NO: 1512185 - DNA, 15 bp, Homo sapiens
gttgaggtaatttct

SEQ ID NO: 1512186 - DNA, 15 bp, Homo sapiens
ttgaggtaatttctc

SEQ ID NO: 1512187 - DNA, 15 bp, Homo sapiens
tgaggtaatttctct

SEQ ID NO: 1512188 - DNA, 15 bp, Homo sapiens
gaggtaatttctctg

SEQ ID NO: 1512189 - DNA, 15 bp, Homo sapiens
aggtaatttctctgg

SEQ ID NO: 1512190 - DNA, 15 bp, Homo sapiens
ggtaatttctctggc

SEQ ID NO: 1512191 - DNA, 15 bp, Homo sapiens
gtaatttctctggct

SEQ ID NO: 1512192 - DNA, 15 bp, Homo sapiens
taatttctctggcta

SEQ ID NO: 1512193 - DNA, 15 bp, Homo sapiens
aatttctctggctag

SEQ ID NO: 1512194 - DNA, 15 bp, Homo sapiens
atttctctggctaga

SEQ ID NO: 1512195 - DNA, 15 bp, Homo sapiens
tttctctggctagag

SEQ ID NO: 1512196 - DNA, 15 bp, Homo sapiens
ttctctggctagagt

SEQ ID NO: 1512197 - DNA, 15 bp, Homo sapiens
tctctggctagagta

SEQ ID NO: 1512198 - DNA, 15 bp, Homo sapiens
ctctggctagagtag

SEQ ID NO: 1512199 - DNA, 15 bp, Homo sapiens
tctggctagagtagt

SEQ ID NO: 1512200 - DNA, 15 bp, Homo sapiens
ctggctagagtagtt

SEQ ID NO: 1512201 - DNA, 15 bp, Homo sapiens
tggctagagtagttg

SEQ ID NO: 1512202 - DNA, 15 bp, Homo sapiens
ggctagagtagttga

SEQ ID NO: 1512203 - DNA, 15 bp, Homo sapiens
gctagagtagttgag

SEQ ID NO: 1512204 - DNA, 15 bp, Homo sapiens
ctagagtagttgaga

SEQ ID NO: 1512205 - DNA, 15 bp, Homo sapiens
tagagtagttgagaa

SEQ ID NO: 1512206 - DNA, 15 bp, Homo sapiens
agagtagttgagaaa

SEQ ID NO: 1512207 - DNA, 15 bp, Homo sapiens
gagtagttgagaaag

SEQ ID NO: 1512208 - DNA, 15 bp, Homo sapiens
agtagttgagaaaga

SEQ ID NO: 1512209 - DNA, 15 bp, Homo sapiens
gtagttgagaaagat

SEQ ID NO: 1512210 - DNA, 15 bp, Homo sapiens
tagttgagaaagatg

SEQ ID NO: 1512211 - DNA, 15 bp, Homo sapiens
agttgagaaagatgg

SEQ ID NO: 1512212 - DNA, 15 bp, Homo sapiens
gttgagaaagatgga

SEQ ID NO: 1512213 - DNA, 15 bp, Homo sapiens
ttgagaaagatggaa

SEQ ID NO: 1512214 - DNA, 15 bp, Homo sapiens
tgagaaagatggaag

SEQ ID NO: 1512215 - DNA, 15 bp, Homo sapiens
gagaaagatggaagc

SEQ ID NO: 1512216 - DNA, 15 bp, Homo sapiens
agaaagatggaagca

SEQ ID NO: 1512217 - DNA, 15 bp, Homo sapiens
gaaagatggaagcaa

SEQ ID NO: 1512218 - DNA, 15 bp, Homo sapiens
aaagatggaagcaag

SEQ ID NO: 1512219 - DNA, 15 bp, Homo sapiens
aagatggaagcaaga

SEQ ID NO: 1512220 - DNA, 15 bp, Homo sapiens
agatggaagcaagag

SEQ ID NO: 1512221 - DNA, 15 bp, Homo sapiens
gatggaagcaagagg

SEQ ID NO: 1512222 - DNA, 15 bp, Homo sapiens
atggaagcaagaggg

SEQ ID NO: 1512223 - DNA, 15 bp, Homo sapiens
tggaagcaagaggga

SEQ ID NO: 1512224 - DNA, 15 bp, Homo sapiens
ggaagcaagagggaa

SEQ ID NO: 1512225 - DNA, 15 bp, Homo sapiens
gaagcaagagggaaa

SEQ ID NO: 1512226 - DNA, 15 bp, Homo sapiens
aagcaagagggaaag

SEQ ID NO: 1512227 - DNA, 15 bp, Homo sapiens
agcaagagggaaagg

SEQ ID NO: 1512228 - DNA, 15 bp, Homo sapiens
gcaagagggaaaggt

SEQ ID NO: 1512229 - DNA, 15 bp, Homo sapiens
caagagggaaaggta

SEQ ID NO: 1512230 - DNA, 15 bp, Homo sapiens
aagagggaaaggtat

SEQ ID NO: 1512231 - DNA, 15 bp, Homo sapiens
agagggaaaggtatg

SEQ ID NO: 1512232 - DNA, 15 bp, Homo sapiens
gagggaaaggtatgt

SEQ ID NO: 1512233 - DNA, 15 bp, Homo sapiens
agggaaaggtatgtt

SEQ ID NO: 1512234 - DNA, 15 bp, Homo sapiens
gggaaaggtatgtta

SEQ ID NO: 1512235 - DNA, 15 bp, Homo sapiens
ggaaaggtatgttaa

SEQ ID NO: 1512236 - DNA, 15 bp, Homo sapiens
gaaaggtatgttaag

SEQ ID NO: 1512237 - DNA, 15 bp, Homo sapiens
aaaggtatgttaagt

SEQ ID NO: 1512238 - DNA, 15 bp, Homo sapiens
aaggtatgttaagtt

SEQ ID NO: 1512239 - DNA, 15 bp, Homo sapiens
aggtatgttaagttg

SEQ ID NO: 1512240 - DNA, 15 bp, Homo sapiens
ggtatgttaagttgt

SEQ ID NO: 1512241 - DNA, 15 bp, Homo sapiens
gtatgttaagttgta

SEQ ID NO: 1512242 - DNA, 15 bp, Homo sapiens
tatgttaagttgtat

SEQ ID NO: 1512243 - DNA, 15 bp, Homo sapiens
atgttaagttgtatt

SEQ ID NO: 1512244 - DNA, 15 bp, Homo sapiens
tgttaagttgtattc

SEQ ID NO: 1512245 - DNA, 15 bp, Homo sapiens
gttaagttgtattca

SEQ ID NO: 1512246 - DNA, 15 bp, Homo sapiens
ttaagttgtattcag

SEQ ID NO: 1512247 - DNA, 15 bp, Homo sapiens
taagttgtattcagt

SEQ ID NO: 1512248 - DNA, 15 bp, Homo sapiens
aagttgtattcagtc

SEQ ID NO: 1512249 - DNA, 15 bp, Homo sapiens
agttgtattcagtca

SEQ ID NO: 1512250 - DNA, 15 bp, Homo sapiens
gttgtattcagtcac

SEQ ID NO: 1512251 - DNA, 15 bp, Homo sapiens
ttgtattcagtcact

SEQ ID NO: 1512252 - DNA, 15 bp, Homo sapiens
tgtattcagtcactg

SEQ ID NO: 1512253 - DNA, 15 bp, Homo sapiens
gtattcagtcactgt

SEQ ID NO: 1512254 - DNA, 15 bp, Homo sapiens
tattcagtcactgta

SEQ ID NO: 1512255 - DNA, 15 bp, Homo sapiens
attcagtcactgtat

SEQ ID NO: 1512256 - DNA, 15 bp, Homo sapiens
ttcagtcactgtatt

SEQ ID NO: 1512257 - DNA, 15 bp, Homo sapiens
tcagtcactgtattg

SEQ ID NO: 1512258 - DNA, 15 bp, Homo sapiens
cagtcactgtattgt

SEQ ID NO: 1512259 - DNA, 15 bp, Homo sapiens
agtcactgtattgtg

SEQ ID NO: 1512260 - DNA, 15 bp, Homo sapiens
gtcactgtattgtgt

SEQ ID NO: 1512261 - DNA, 15 bp, Homo sapiens
tcactgtattgtgtg

SEQ ID NO: 1512262 - DNA, 15 bp, Homo sapiens
cactgtattgtgtga

SEQ ID NO: 1512263 - DNA, 15 bp, Homo sapiens
actgtattgtgtgat

SEQ ID NO: 1512264 - DNA, 15 bp, Homo sapiens
ctgtattgtgtgatc

SEQ ID NO: 1512265 - DNA, 15 bp, Homo sapiens
tgtattgtgtgatca

SEQ ID NO: 1512266 - DNA, 15 bp, Homo sapiens
gtattgtgtgatcat

SEQ ID NO: 1512267 - DNA, 15 bp, Homo sapiens
tattgtgtgatcatt

SEQ ID NO: 1512268 - DNA, 15 bp, Homo sapiens
attgtgtgatcatta

SEQ ID NO: 1512269 - DNA, 15 bp, Homo sapiens
ttgtgtgatcattaa

SEQ ID NO: 1512270 - DNA, 15 bp, Homo sapiens
tgtgtgatcattaac

SEQ ID NO: 1512271 - DNA, 15 bp, Homo sapiens
gtgtgatcattaact

SEQ ID NO: 1512272 - DNA, 15 bp, Homo sapiens
tgtgatcattaactt

SEQ ID NO: 1512273 - DNA, 15 bp, Homo sapiens
gtgatcattaacttt

SEQ ID NO: 1512274 - DNA, 15 bp, Homo sapiens
tgatcattaactttg

SEQ ID NO: 1512275 - DNA, 15 bp, Homo sapiens
gatcattaactttgg

SEQ ID NO: 1512276 - DNA, 15 bp, Homo sapiens
atcattaactttggt

SEQ ID NO: 1512277 - DNA, 15 bp, Homo sapiens
tcattaactttggtt

SEQ ID NO: 1512278 - DNA, 15 bp, Homo sapiens
cattaactttggttg

SEQ ID NO: 1512279 - DNA, 15 bp, Homo sapiens
attaactttggttgt

SEQ ID NO: 1512280 - DNA, 15 bp, Homo sapiens
ttaactttggttgta

SEQ ID NO: 1512281 - DNA, 15 bp, Homo sapiens
taactttggttgtaa

SEQ ID NO: 1512282 - DNA, 15 bp, Homo sapiens
aactttggttgtaaa

SEQ ID NO: 1512283 - DNA, 15 bp, Homo sapiens
actttggttgtaaaa

SEQ ID NO: 1512284 - DNA, 15 bp, Homo sapiens
ctttggttgtaaaag

SEQ ID NO: 1512285 - DNA, 15 bp, Homo sapiens
tttggttgtaaaagg

SEQ ID NO: 1512286 - DNA, 15 bp, Homo sapiens
ttggttgtaaaaggg

SEQ ID NO: 1512287 - DNA, 15 bp, Homo sapiens
tggttgtaaaaggga

SEQ ID NO: 1512288 - DNA, 15 bp, Homo sapiens
ggttgtaaaagggag

SEQ ID NO: 1512289 - DNA, 15 bp, Homo sapiens
gttgtaaaagggaga

SEQ ID NO: 1512290 - DNA, 15 bp, Homo sapiens
ttgtaaaagggagac

SEQ ID NO: 1512291 - DNA, 15 bp, Homo sapiens
tgtaaaagggagaca

SEQ ID NO: 1512292 - DNA, 15 bp, Homo sapiens
gtaaaagggagacaa

SEQ ID NO: 1512293 - DNA, 15 bp, Homo sapiens
taaaagggagacaag

SEQ ID NO: 1512294 - DNA, 15 bp, Homo sapiens
aaaagggagacaagt

SEQ ID NO: 1512295 - DNA, 15 bp, Homo sapiens
aaagggagacaagtt

SEQ ID NO: 1512296 - DNA, 15 bp, Homo sapiens
aagggagacaagttc

SEQ ID NO: 1512297 - DNA, 15 bp, Homo sapiens
agggagacaagttcg

SEQ ID NO: 1512298 - DNA, 15 bp, Homo sapiens
gggagacaagttcga

SEQ ID NO: 1512299 - DNA, 15 bp, Homo sapiens
ggagacaagttcgag

SEQ ID NO: 1512300 - DNA, 15 bp, Homo sapiens
gagacaagttcgagc

SEQ ID NO: 1512301 - DNA, 15 bp, Homo sapiens
agacaagttcgagct

SEQ ID NO: 1512302 - DNA, 15 bp, Homo sapiens
gacaagttcgagctt

SEQ ID NO: 1512303 - DNA, 15 bp, Homo sapiens
acaagttcgagcttt

SEQ ID NO: 1512304 - DNA, 15 bp, Homo sapiens
caagttcgagctttt

SEQ ID NO: 1512305 - DNA, 15 bp, Homo sapiens
aagttcgagctttta

SEQ ID NO: 1512306 - DNA, 15 bp, Homo sapiens
agttcgagcttttac

SEQ ID NO: 1512307 - DNA, 15 bp, Homo sapiens
gttcgagcttttact

SEQ ID NO: 1512308 - DNA, 15 bp, Homo sapiens
ttcgagcttttactc

SEQ ID NO: 1512309 - DNA, 15 bp, Homo sapiens
tcgagcttttactct

SEQ ID NO: 1512310 - DNA, 15 bp, Homo sapiens
cgagcttttactcta

SEQ ID NO: 1512311 - DNA, 15 bp, Homo sapiens
gagcttttactctac

SEQ ID NO: 1512312 - DNA, 15 bp, Homo sapiens
agcttttactctact

SEQ ID NO: 1512313 - DNA, 15 bp, Homo sapiens
gcttttactctactt

SEQ ID NO: 1512314 - DNA, 15 bp, Homo sapiens
cttttactctacttg

SEQ ID NO: 1512315 - DNA, 15 bp, Homo sapiens
ttttactctacttgt

SEQ ID NO: 1512316 - DNA, 15 bp, Homo sapiens
tttactctacttgtc

SEQ ID NO: 1512317 - DNA, 15 bp, Homo sapiens
ttactctacttgtca

SEQ ID NO: 1512318 - DNA, 15 bp, Homo sapiens
tactctacttgtcag

SEQ ID NO: 1512319 - DNA, 15 bp, Homo sapiens
actctacttgtcagc

SEQ ID NO: 1512320 - DNA, 15 bp, Homo sapiens
ctctacttgtcagcc

SEQ ID NO: 1512321 - DNA, 15 bp, Homo sapiens
tctacttgtcagccc

SEQ ID NO: 1512322 - DNA, 15 bp, Homo sapiens
ctacttgtcagccct

SEQ ID NO: 1512323 - DNA, 15 bp, Homo sapiens
tacttgtcagcccta

SEQ ID NO: 1512324 - DNA, 15 bp, Homo sapiens
acttgtcagccctag

SEQ ID NO: 1512325 - DNA, 15 bp, Homo sapiens
cttgtcagccctaga

SEQ ID NO: 1512326 - DNA, 15 bp, Homo sapiens
ttgtcagccctagac

SEQ ID NO: 1512327 - DNA, 15 bp, Homo sapiens
tgtcagccctagact

SEQ ID NO: 1512328 - DNA, 15 bp, Homo sapiens
gtcagccctagactt

SEQ ID NO: 1512329 - DNA, 15 bp, Homo sapiens
tcagccctagacttt

SEQ ID NO: 1512330 - DNA, 15 bp, Homo sapiens
cagccctagactttg

SEQ ID NO: 1512331 - DNA, 15 bp, Homo sapiens
agccctagactttgt

SEQ ID NO: 1512332 - DNA, 15 bp, Homo sapiens
gccctagactttgta

SEQ ID NO: 1512333 - DNA, 15 bp, Homo sapiens
ccctagactttgtac

SEQ ID NO: 1512334 - DNA, 15 bp, Homo sapiens
cctagactttgtacc

SEQ ID NO: 1512335 - DNA, 15 bp, Homo sapiens
ctagactttgtacct

SEQ ID NO: 1512336 - DNA, 15 bp, Homo sapiens
tagactttgtacctc

SEQ ID NO: 1512337 - DNA, 15 bp, Homo sapiens
agactttgtacctct

SEQ ID NO: 1512338 - DNA, 15 bp, Homo sapiens
gactttgtacctctc

SEQ ID NO: 1512339 - DNA, 15 bp, Homo sapiens
actttgtacctctct

SEQ ID NO: 1512340 - DNA, 15 bp, Homo sapiens
ctttgtacctctctt

SEQ ID NO: 1512341 - DNA, 15 bp, Homo sapiens
tttgtacctctcttg

SEQ ID NO: 1512342 - DNA, 15 bp, Homo sapiens
ttgtacctctcttgg

SEQ ID NO: 1512343 - DNA, 15 bp, Homo sapiens
tgtacctctcttggc

SEQ ID NO: 1512344 - DNA, 15 bp, Homo sapiens
gtacctctcttggcc

SEQ ID NO: 1512345 - DNA, 15 bp, Homo sapiens
tacctctcttggcct

SEQ ID NO: 1512346 - DNA, 15 bp, Homo sapiens
acctctcttggcctc

SEQ ID NO: 1512347 - DNA, 15 bp, Homo sapiens
cctctcttggcctca

SEQ ID NO: 1512348 - DNA, 15 bp, Homo sapiens
ctctcttggcctcat

SEQ ID NO: 1512349 - DNA, 15 bp, Homo sapiens
tctcttggcctcatg

SEQ ID NO: 1512350 - DNA, 15 bp, Homo sapiens
ctcttggcctcatgt

SEQ ID NO: 1512351 - DNA, 15 bp, Homo sapiens
tcttggcctcatgtc

SEQ ID NO: 1512352 - DNA, 15 bp, Homo sapiens
cttggcctcatgtct

SEQ ID NO: 1512353 - DNA, 15 bp, Homo sapiens
ttggcctcatgtctt

SEQ ID NO: 1512354 - DNA, 15 bp, Homo sapiens
tggcctcatgtcttt

SEQ ID NO: 1512355 - DNA, 15 bp, Homo sapiens
ggcctcatgtcttta

SEQ ID NO: 1512356 - DNA, 15 bp, Homo sapiens
gcctcatgtctttat

SEQ ID NO: 1512357 - DNA, 15 bp, Homo sapiens
cctcatgtctttatc

SEQ ID NO: 1512358 - DNA, 15 bp, Homo sapiens
ctcatgtctttatcc

SEQ ID NO: 1512359 - DNA, 15 bp, Homo sapiens
tcatgtctttatccc

SEQ ID NO: 1512360 - DNA, 15 bp, Homo sapiens
catgtctttatcccc

SEQ ID NO: 1512361 - DNA, 15 bp, Homo sapiens
atgtctttatccccc

SEQ ID NO: 1512362 - DNA, 15 bp, Homo sapiens
tgtctttatccccct

SEQ ID NO: 1512363 - DNA, 15 bp, Homo sapiens
gtctttatccccctt

SEQ ID NO: 1512364 - DNA, 15 bp, Homo sapiens
tctttatcccccttg

SEQ ID NO: 1512365 - DNA, 15 bp, Homo sapiens
ctttatcccccttgt

SEQ ID NO: 1512366 - DNA, 15 bp, Homo sapiens
tttatcccccttgtc

SEQ ID NO: 1512367 - DNA, 15 bp, Homo sapiens
ttatcccccttgtct

SEQ ID NO: 1512368 - DNA, 15 bp, Homo sapiens
tatcccccttgtctt

SEQ ID NO: 1512369 - DNA, 15 bp, Homo sapiens
atcccccttgtcttt

SEQ ID NO: 1512370 - DNA, 15 bp, Homo sapiens
tcccccttgtctttc

SEQ ID NO: 1512371 - DNA, 15 bp, Homo sapiens
cccccttgtctttct

SEQ ID NO: 1512372 - DNA, 15 bp, Homo sapiens
ccccttgtctttctt

SEQ ID NO: 1512373 - DNA, 15 bp, Homo sapiens
cccttgtctttctta

SEQ ID NO: 1512374 - DNA, 15 bp, Homo sapiens
ccttgtctttcttat

SEQ ID NO: 1512375 - DNA, 15 bp, Homo sapiens
cttgtctttcttatt

SEQ ID NO: 1512376 - DNA, 15 bp, Homo sapiens
ttgtctttcttattt

SEQ ID NO: 1512377 - DNA, 15 bp, Homo sapiens
tgtctttcttatttc

SEQ ID NO: 1512378 - DNA, 15 bp, Homo sapiens
gtctttcttatttct

SEQ ID NO: 1512379 - DNA, 15 bp, Homo sapiens
tctttcttatttctc

SEQ ID NO: 1512380 - DNA, 15 bp, Homo sapiens
ctttcttatttctct

SEQ ID NO: 1512381 - DNA, 15 bp, Homo sapiens
tttcttatttctctt

SEQ ID NO: 1512382 - DNA, 15 bp, Homo sapiens
ttcttatttctcttt

SEQ ID NO: 1512383 - DNA, 15 bp, Homo sapiens
tcttatttctctttt

SEQ ID NO: 1512384 - DNA, 15 bp, Homo sapiens
cttatttctcttttc

SEQ ID NO: 1512385 - DNA, 15 bp, Homo sapiens
ttatttctcttttct

SEQ ID NO: 1512386 - DNA, 15 bp, Homo sapiens
tatttctcttttctg

SEQ ID NO: 1512387 - DNA, 15 bp, Homo sapiens
atttctcttttctgc

SEQ ID NO: 1512388 - DNA, 15 bp, Homo sapiens
tttctcttttctgct

SEQ ID NO: 1512389 - DNA, 15 bp, Homo sapiens
ttctcttttctgctt

SEQ ID NO: 1512390 - DNA, 15 bp, Homo sapiens
tctcttttctgcttc

SEQ ID NO: 1512391 - DNA, 15 bp, Homo sapiens
ctcttttctgcttct

SEQ ID NO: 1512392 - DNA, 15 bp, Homo sapiens
tcttttctgcttctg

SEQ ID NO: 1512393 - DNA, 15 bp, Homo sapiens
cttttctgcttctga

SEQ ID NO: 1512394 - DNA, 15 bp, Homo sapiens
ttttctgcttctgag

SEQ ID NO: 1512395 - DNA, 15 bp, Homo sapiens
tttctgcttctgagt

SEQ ID NO: 1512396 - DNA, 15 bp, Homo sapiens
ttctgcttctgagta

SEQ ID NO: 1512397 - DNA, 15 bp, Homo sapiens
tctgcttctgagtat

SEQ ID NO: 1512398 - DNA, 15 bp, Homo sapiens
ctgcttctgagtatc

SEQ ID NO: 1512399 - DNA, 15 bp, Homo sapiens
tgcttctgagtatcc

SEQ ID NO: 1512400 - DNA, 15 bp, Homo sapiens
gcttctgagtatccc

SEQ ID NO: 1512401 - DNA, 15 bp, Homo sapiens
cttctgagtatccct

SEQ ID NO: 1512402 - DNA, 15 bp, Homo sapiens
ttctgagtatccctg

SEQ ID NO: 1512403 - DNA, 15 bp, Homo sapiens
tctgagtatccctgt

SEQ ID NO: 1512404 - DNA, 15 bp, Homo sapiens
ctgagtatccctgtc

SEQ ID NO: 1512405 - DNA, 15 bp, Homo sapiens
tgagtatccctgtct

SEQ ID NO: 1512406 - DNA, 15 bp, Homo sapiens
gagtatccctgtctc

SEQ ID NO: 1512407 - DNA, 15 bp, Homo sapiens
agtatccctgtctct

SEQ ID NO: 1512408 - DNA, 15 bp, Homo sapiens
gtatccctgtctctc

SEQ ID NO: 1512409 - DNA, 15 bp, Homo sapiens
tatccctgtctctct

SEQ ID NO: 1512410 - DNA, 15 bp, Homo sapiens
atccctgtctctctg

SEQ ID NO: 1512411 - DNA, 15 bp, Homo sapiens
tccctgtctctctgt

SEQ ID NO: 1512412 - DNA, 15 bp, Homo sapiens
ccctgtctctctgtc

SEQ ID NO: 1512413 - DNA, 15 bp, Homo sapiens
cctgtctctctgtcc

SEQ ID NO: 1512414 - DNA, 15 bp, Homo sapiens
ctgtctctctgtcca

SEQ ID NO: 1512415 - DNA, 15 bp, Homo sapiens
tgtctctctgtccat

SEQ ID NO: 1512416 - DNA, 15 bp, Homo sapiens
gtctctctgtccata

SEQ ID NO: 1512417 - DNA, 15 bp, Homo sapiens
tctctctgtccatat

SEQ ID NO: 1512418 - DNA, 15 bp, Homo sapiens
ctctctgtccatata

SEQ ID NO: 1512419 - DNA, 15 bp, Homo sapiens
tctctgtccatatat

SEQ ID NO: 1512420 - DNA, 15 bp, Homo sapiens
ctctgtccatatata

SEQ ID NO: 1512421 - DNA, 15 bp, Homo sapiens
tctgtccatatatac

SEQ ID NO: 1512422 - DNA, 15 bp, Homo sapiens
ctgtccatatatact

SEQ ID NO: 1512423 - DNA, 15 bp, Homo sapiens
tgtccatatatactc

SEQ ID NO: 1512424 - DNA, 15 bp, Homo sapiens
gtccatatatactct

SEQ ID NO: 1512425 - DNA, 15 bp, Homo sapiens
tccatatatactctg

SEQ ID NO: 1512426 - DNA, 15 bp, Homo sapiens
ccatatatactctgt

SEQ ID NO: 1512427 - DNA, 15 bp, Homo sapiens
catatatactctgtt

SEQ ID NO: 1512428 - DNA, 15 bp, Homo sapiens
atatatactctgttg

SEQ ID NO: 1512429 - DNA, 15 bp, Homo sapiens
tatatactctgttgt

SEQ ID NO: 1512430 - DNA, 15 bp, Homo sapiens
atatactctgttgtc

SEQ ID NO: 1512431 - DNA, 15 bp, Homo sapiens
tatactctgttgtct

SEQ ID NO: 1512432 - DNA, 15 bp, Homo sapiens
atactctgttgtctc

SEQ ID NO: 1512433 - DNA, 15 bp, Homo sapiens
tactctgttgtctct

SEQ ID NO: 1512434 - DNA, 15 bp, Homo sapiens
actctgttgtctctt

SEQ ID NO: 1512435 - DNA, 15 bp, Homo sapiens
ctctgttgtctcttt

SEQ ID NO: 1512436 - DNA, 15 bp, Homo sapiens
tctgttgtctctttt

SEQ ID NO: 1512437 - DNA, 15 bp, Homo sapiens
ctgttgtctcttttc

SEQ ID NO: 1512438 - DNA, 15 bp, Homo sapiens
tgttgtctcttttcc

SEQ ID NO: 1512439 - DNA, 15 bp, Homo sapiens
gttgtctcttttcct

SEQ ID NO: 1512440 - DNA, 15 bp, Homo sapiens
ttgtctcttttccta

SEQ ID NO: 1512441 - DNA, 15 bp, Homo sapiens
tgtctcttttcctat

SEQ ID NO: 1512442 - DNA, 15 bp, Homo sapiens
gtctcttttcctatt

SEQ ID NO: 1512443 - DNA, 15 bp, Homo sapiens
tctcttttcctatta

SEQ ID NO: 1512444 - DNA, 15 bp, Homo sapiens
ctcttttcctattaa

SEQ ID NO: 1512445 - DNA, 15 bp, Homo sapiens
tcttttcctattaac

SEQ ID NO: 1512446 - DNA, 15 bp, Homo sapiens
ttttcctattaacct

SEQ ID NO: 1512447 - DNA, 15 bp, Homo sapiens
tttcctattaacctt

SEQ ID NO: 1512448 - DNA, 15 bp, Homo sapiens
ttcctattaaccttg

SEQ ID NO: 1512449 - DNA, 15 bp, Homo sapiens
tcctattaaccttga

SEQ ID NO: 1512450 - DNA, 15 bp, Homo sapiens
cctattaaccttgat

SEQ ID NO: 1512451 - DNA, 15 bp, Homo sapiens
ctattaaccttgatt

SEQ ID NO: 1512452 - DNA, 15 bp, Homo sapiens
tattaaccttgattt

SEQ ID NO: 1512453 - DNA, 15 bp, Homo sapiens
attaaccttgatttg

SEQ ID NO: 1512454 - DNA, 15 bp, Homo sapiens
ttaaccttgatttgc

SEQ ID NO: 1512455 - DNA, 15 bp, Homo sapiens
taaccttgatttgct

SEQ ID NO: 1512456 - DNA, 15 bp, Homo sapiens
aaccttgatttgcta

SEQ ID NO: 1512457 - DNA, 15 bp, Homo sapiens
accttgatttgctag

SEQ ID NO: 1512458 - DNA, 15 bp, Homo sapiens
ccttgatttgctagg

SEQ ID NO: 1512459 - DNA, 15 bp, Homo sapiens
cttgatttgctaggg

SEQ ID NO: 1512460 - DNA, 15 bp, Homo sapiens
ttgatttgctagggt

SEQ ID NO: 1512461 - DNA, 15 bp, Homo sapiens
tgatttgctagggtc

SEQ ID NO: 1512462 - DNA, 15 bp, Homo sapiens
gatttgctagggtct

SEQ ID NO: 1512463 - DNA, 15 bp, Homo sapiens
atttgctagggtctt

SEQ ID NO: 1512464 - DNA, 15 bp, Homo sapiens
tttgctagggtcttc

SEQ ID NO: 1512465 - DNA, 15 bp, Homo sapiens
ttgctagggtcttca

SEQ ID NO: 1512466 - DNA, 15 bp, Homo sapiens
tgctagggtcttcat

SEQ ID NO: 1512467 - DNA, 15 bp, Homo sapiens
gctagggtcttcatg

SEQ ID NO: 1512468 - DNA, 15 bp, Homo sapiens
ctagggtcttcatga

SEQ ID NO: 1512469 - DNA, 15 bp, Homo sapiens
tagggtcttcatgaa

SEQ ID NO: 1512470 - DNA, 15 bp, Homo sapiens
agggtcttcatgaaa

SEQ ID NO: 1512471 - DNA, 15 bp, Homo sapiens
gggtcttcatgaaag

SEQ ID NO: 1512472 - DNA, 15 bp, Homo sapiens
ggtcttcatgaaagg

SEQ ID NO: 1512473 - DNA, 15 bp, Homo sapiens
gtcttcatgaaaggt

SEQ ID NO: 1512474 - DNA, 15 bp, Homo sapiens
tcttcatgaaaggtt

SEQ ID NO: 1512475 - DNA, 15 bp, Homo sapiens
cttcatgaaaggttc

SEQ ID NO: 1512476 - DNA, 15 bp, Homo sapiens
ttcatgaaaggttcc

SEQ ID NO: 1512477 - DNA, 15 bp, Homo sapiens
tcatgaaaggttcca

SEQ ID NO: 1512478 - DNA, 15 bp, Homo sapiens
catgaaaggttccat

SEQ ID NO: 1512479 - DNA, 15 bp, Homo sapiens
atgaaaggttccatg

SEQ ID NO: 1512480 - DNA, 15 bp, Homo sapiens
tgaaaggttccatgc

SEQ ID NO: 1512481 - DNA, 15 bp, Homo sapiens
gaaaggttccatgct

SEQ ID NO: 1512482 - DNA, 15 bp, Homo sapiens
aaaggttccatgctg

SEQ ID NO: 1512483 - DNA, 15 bp, Homo sapiens
aaggttccatgctgt

SEQ ID NO: 1512484 - DNA, 15 bp, Homo sapiens
aggttccatgctgta

SEQ ID NO: 1512485 - DNA, 15 bp, Homo sapiens
ggttccatgctgtac

SEQ ID NO: 1512486 - DNA, 15 bp, Homo sapiens
gttccatgctgtaca

SEQ ID NO: 1512487 - DNA, 15 bp, Homo sapiens
ttccatgctgtacat

SEQ ID NO: 1512488 - DNA, 15 bp, Homo sapiens
tccatgctgtacatc

SEQ ID NO: 1512489 - DNA, 15 bp, Homo sapiens
ccatgctgtacatct

SEQ ID NO: 1512490 - DNA, 15 bp, Homo sapiens
catgctgtacatctt

SEQ ID NO: 1512491 - DNA, 15 bp, Homo sapiens
atgctgtacatctta

SEQ ID NO: 1512492 - DNA, 15 bp, Homo sapiens
tgctgtacatcttaa

SEQ ID NO: 1512493 - DNA, 15 bp, Homo sapiens
gctgtacatcttaag

SEQ ID NO: 1512494 - DNA, 15 bp, Homo sapiens
ctgtacatcttaagt

SEQ ID NO: 1512495 - DNA, 15 bp, Homo sapiens
tgtacatcttaagtg

SEQ ID NO: 1512496 - DNA, 15 bp, Homo sapiens
gtacatcttaagtga

SEQ ID NO: 1512497 - DNA, 15 bp, Homo sapiens
tacatcttaagtgaa

SEQ ID NO: 1512498 - DNA, 15 bp, Homo sapiens
acatcttaagtgaac

SEQ ID NO: 1512499 - DNA, 15 bp, Homo sapiens
catcttaagtgaact

SEQ ID NO: 1512500 - DNA, 15 bp, Homo sapiens
atcttaagtgaactt

SEQ ID NO: 1512501 - DNA, 15 bp, Homo sapiens
tcttaagtgaacttt

SEQ ID NO: 1512502 - DNA, 15 bp, Homo sapiens
cttaagtgaactttg

SEQ ID NO: 1512503 - DNA, 15 bp, Homo sapiens
ttaagtgaactttga

SEQ ID NO: 1512504 - DNA, 15 bp, Homo sapiens
taagtgaactttgaa

SEQ ID NO: 1512505 - DNA, 15 bp, Homo sapiens
aagtgaactttgaag

SEQ ID NO: 1512506 - DNA, 15 bp, Homo sapiens
agtgaactttgaagt

SEQ ID NO: 1512507 - DNA, 15 bp, Homo sapiens
gtgaactttgaagtg

SEQ ID NO: 1512508 - DNA, 15 bp, Homo sapiens
tgaactttgaagtgg

SEQ ID NO: 1512509 - DNA, 15 bp, Homo sapiens
gaactttgaagtggt

SEQ ID NO: 1512510 - DNA, 15 bp, Homo sapiens
aactttgaagtggtc

SEQ ID NO: 1512511 - DNA, 15 bp, Homo sapiens
actttgaagtggtca

SEQ ID NO: 1512512 - DNA, 15 bp, Homo sapiens
ctttgaagtggtcat

SEQ ID NO: 1512513 - DNA, 15 bp, Homo sapiens
tttgaagtggtcatc

SEQ ID NO: 1512514 - DNA, 15 bp, Homo sapiens
ttgaagtggtcatca

SEQ ID NO: 1512515 - DNA, 15 bp, Homo sapiens
tgaagtggtcatcaa

SEQ ID NO: 1512516 - DNA, 15 bp, Homo sapiens
gaagtggtcatcaaa

SEQ ID NO: 1512517 - DNA, 15 bp, Homo sapiens
aagtggtcatcaaag

SEQ ID NO: 1512518 - DNA, 15 bp, Homo sapiens
agtggtcatcaaaga

SEQ ID NO: 1512519 - DNA, 15 bp, Homo sapiens
gtggtcatcaaagag

SEQ ID NO: 1512520 - DNA, 15 bp, Homo sapiens
tggtcatcaaagaga

SEQ ID NO: 1512521 - DNA, 15 bp, Homo sapiens
ggtcatcaaagagat

SEQ ID NO: 1512522 - DNA, 15 bp, Homo sapiens
gtcatcaaagagatc

SEQ ID NO: 1512523 - DNA, 15 bp, Homo sapiens
tcatcaaagagatca

SEQ ID NO: 1512524 - DNA, 15 bp, Homo sapiens
catcaaagagatcag

SEQ ID NO: 1512525 - DNA, 15 bp, Homo sapiens
atcaaagagatcagt

SEQ ID NO: 1512526 - DNA, 15 bp, Homo sapiens
tcaaagagatcagtt

SEQ ID NO: 1512527 - DNA, 15 bp, Homo sapiens
caaagagatcagtta

SEQ ID NO: 1512528 - DNA, 15 bp, Homo sapiens
aaagagatcagttag

SEQ ID NO: 1512529 - DNA, 15 bp, Homo sapiens
aagagatcagttaga

SEQ ID NO: 1512530 - DNA, 15 bp, Homo sapiens
agagatcagttagaa

SEQ ID NO: 1512531 - DNA, 15 bp, Homo sapiens
gagatcagttagaag

SEQ ID NO: 1512532 - DNA, 15 bp, Homo sapiens
agatcagttagaaga

SEQ ID NO: 1512533 - DNA, 15 bp, Homo sapiens
gatcagttagaagaa

SEQ ID NO: 1512534 - DNA, 15 bp, Homo sapiens
atcagttagaagaac

SEQ ID NO: 1512535 - DNA, 15 bp, Homo sapiens
tcagttagaagaact

SEQ ID NO: 1512536 - DNA, 15 bp, Homo sapiens
cagttagaagaactg

SEQ ID NO: 1512537 - DNA, 15 bp, Homo sapiens
agttagaagaactga

SEQ ID NO: 1512538 - DNA, 15 bp, Homo sapiens
gttagaagaactgat

SEQ ID NO: 1512539 - DNA, 15 bp, Homo sapiens
ttagaagaactgatc

SEQ ID NO: 1512540 - DNA, 15 bp, Homo sapiens
tagaagaactgatct

SEQ ID NO: 1512541 - DNA, 15 bp, Homo sapiens
agaagaactgatctg

SEQ ID NO: 1512542 - DNA, 15 bp, Homo sapiens
gaagaactgatctgc

SEQ ID NO: 1512543 - DNA, 15 bp, Homo sapiens
aagaactgatctgca

SEQ ID NO: 1512544 - DNA, 15 bp, Homo sapiens
agaactgatctgcag

SEQ ID NO: 1512545 - DNA, 15 bp, Homo sapiens
gaactgatctgcagt

SEQ ID NO: 1512546 - DNA, 15 bp, Homo sapiens
aactgatctgcagtg

SEQ ID NO: 1512547 - DNA, 15 bp, Homo sapiens
actgatctgcagtgt

SEQ ID NO: 1512548 - DNA, 15 bp, Homo sapiens
ctgatctgcagtgtg

SEQ ID NO: 1512549 - DNA, 15 bp, Homo sapiens
tgatctgcagtgtgt

SEQ ID NO: 1512550 - DNA, 15 bp, Homo sapiens
gatctgcagtgtgtg

SEQ ID NO: 1512551 - DNA, 15 bp, Homo sapiens
atctgcagtgtgtga

SEQ ID NO: 1512552 - DNA, 15 bp, Homo sapiens
tctgcagtgtgtgac

SEQ ID NO: 1512553 - DNA, 15 bp, Homo sapiens
ctgcagtgtgtgaca

SEQ ID NO: 1512554 - DNA, 15 bp, Homo sapiens
tgcagtgtgtgacag

SEQ ID NO: 1512555 - DNA, 15 bp, Homo sapiens
gcagtgtgtgacaga

SEQ ID NO: 1512556 - DNA, 15 bp, Homo sapiens
cagtgtgtgacagac

SEQ ID NO: 1512557 - DNA, 15 bp, Homo sapiens
agtgtgtgacagacc

SEQ ID NO: 1512558 - DNA, 15 bp, Homo sapiens
gtgtgtgacagacca

SEQ ID NO: 1512559 - DNA, 15 bp, Homo sapiens
tgtgtgacagaccag

SEQ ID NO: 1512560 - DNA, 15 bp, Homo sapiens
gtgtgacagaccagg

SEQ ID NO: 1512561 - DNA, 15 bp, Homo sapiens
tgtgacagaccagga

SEQ ID NO: 1512562 - DNA, 15 bp, Homo sapiens
gtgacagaccaggaa

SEQ ID NO: 1512563 - DNA, 15 bp, Homo sapiens
tgacagaccaggaaa

SEQ ID NO: 1512564 - DNA, 15 bp, Homo sapiens
gacagaccaggaaag

SEQ ID NO: 1512565 - DNA, 15 bp, Homo sapiens
acagaccaggaaagt

SEQ ID NO: 1512566 - DNA, 15 bp, Homo sapiens
cagaccaggaaagtg

SEQ ID NO: 1512567 - DNA, 15 bp, Homo sapiens
agaccaggaaagtga

SEQ ID NO: 1512568 - DNA, 15 bp, Homo sapiens
gaccaggaaagtgat

SEQ ID NO: 1512569 - DNA, 15 bp, Homo sapiens
accaggaaagtgata

SEQ ID NO: 1512570 - DNA, 15 bp, Homo sapiens
ccaggaaagtgatat

SEQ ID NO: 1512571 - DNA, 15 bp, Homo sapiens
caggaaagtgatatc

SEQ ID NO: 1512572 - DNA, 15 bp, Homo sapiens
aggaaagtgatatcc

SEQ ID NO: 1512573 - DNA, 15 bp, Homo sapiens
ggaaagtgatatcca

SEQ ID NO: 1512574 - DNA, 15 bp, Homo sapiens
gaaagtgatatccag

SEQ ID NO: 1512575 - DNA, 15 bp, Homo sapiens
aaagtgatatccaga

SEQ ID NO: 1512576 - DNA, 15 bp, Homo sapiens
aagtgatatccagag

SEQ ID NO: 1512577 - DNA, 15 bp, Homo sapiens
agtgatatccagagg

SEQ ID NO: 1512578 - DNA, 15 bp, Homo sapiens
gtgatatccagagga

SEQ ID NO: 1512579 - DNA, 15 bp, Homo sapiens
tgatatccagaggat

SEQ ID NO: 1512580 - DNA, 15 bp, Homo sapiens
gatatccagaggatt

SEQ ID NO: 1512581 - DNA, 15 bp, Homo sapiens
atatccagaggattg

SEQ ID NO: 1512582 - DNA, 15 bp, Homo sapiens
tatccagaggattgc

SEQ ID NO: 1512583 - DNA, 15 bp, Homo sapiens
atccagaggattgcc

SEQ ID NO: 1512584 - DNA, 15 bp, Homo sapiens
tccagaggattgcca

SEQ ID NO: 1512585 - DNA, 15 bp, Homo sapiens
ccagaggattgccac

SEQ ID NO: 1512586 - DNA, 15 bp, Homo sapiens
cagaggattgccacc

SEQ ID NO: 1512587 - DNA, 15 bp, Homo sapiens
agaggattgccacca

SEQ ID NO: 1512588 - DNA, 15 bp, Homo sapiens
gaggattgccaccat

SEQ ID NO: 1512589 - DNA, 15 bp, Homo sapiens
aggattgccaccatg

SEQ ID NO: 1512590 - DNA, 15 bp, Homo sapiens
ggattgccaccatga

SEQ ID NO: 1512591 - DNA, 15 bp, Homo sapiens
gattgccaccatgaa

SEQ ID NO: 1512592 - DNA, 15 bp, Homo sapiens
attgccaccatgaag

SEQ ID NO: 1512593 - DNA, 15 bp, Homo sapiens
ttgccaccatgaagt

SEQ ID NO: 1512594 - DNA, 15 bp, Homo sapiens
tgccaccatgaagtt

SEQ ID NO: 1512595 - DNA, 15 bp, Homo sapiens
gccaccatgaagttg

SEQ ID NO: 1512596 - DNA, 15 bp, Homo sapiens
ccaccatgaagttgt

SEQ ID NO: 1512597 - DNA, 15 bp, Homo sapiens
caccatgaagttgtc

SEQ ID NO: 1512598 - DNA, 15 bp, Homo sapiens
accatgaagttgtca

SEQ ID NO: 1512599 - DNA, 15 bp, Homo sapiens
ccatgaagttgtcat

SEQ ID NO: 1512600 - DNA, 15 bp, Homo sapiens
catgaagttgtcatt

SEQ ID NO: 1512601 - DNA, 15 bp, Homo sapiens
atgaagttgtcattt

SEQ ID NO: 1512602 - DNA, 15 bp, Homo sapiens
tgaagttgtcatttt

SEQ ID NO: 1512603 - DNA, 15 bp, Homo sapiens
gaagttgtcattttt

SEQ ID NO: 1512604 - DNA, 15 bp, Homo sapiens
aagttgtcattttta

SEQ ID NO: 1512605 - DNA, 15 bp, Homo sapiens
agttgtcatttttag

SEQ ID NO: 1512606 - DNA, 15 bp, Homo sapiens
gttgtcatttttagt

SEQ ID NO: 1512607 - DNA, 15 bp, Homo sapiens
ttgtcatttttagtg

SEQ ID NO: 1512608 - DNA, 15 bp, Homo sapiens
tgtcatttttagtgg

SEQ ID NO: 1512609 - DNA, 15 bp, Homo sapiens
gtcatttttagtgga

SEQ ID NO: 1512610 - DNA, 15 bp, Homo sapiens
tcatttttagtggag

SEQ ID NO: 1512611 - DNA, 15 bp, Homo sapiens
catttttagtggaga

SEQ ID NO: 1512612 - DNA, 15 bp, Homo sapiens
atttttagtggagag

SEQ ID NO: 1512613 - DNA, 15 bp, Homo sapiens
tttttagtggagagg

SEQ ID NO: 1512614 - DNA, 15 bp, Homo sapiens
ttttagtggagagga

SEQ ID NO: 1512615 - DNA, 15 bp, Homo sapiens
tttagtggagaggaa

SEQ ID NO: 1512616 - DNA, 15 bp, Homo sapiens
ttagtggagaggaag

SEQ ID NO: 1512617 - DNA, 15 bp, Homo sapiens
tagtggagaggaagc

SEQ ID NO: 1512618 - DNA, 15 bp, Homo sapiens
agtggagaggaagca

SEQ ID NO: 1512619 - DNA, 15 bp, Homo sapiens
gtggagaggaagcag

SEQ ID NO: 1512620 - DNA, 15 bp, Homo sapiens
tggagaggaagcagg

SEQ ID NO: 1512621 - DNA, 15 bp, Homo sapiens
ggagaggaagcagga

SEQ ID NO: 1512622 - DNA, 15 bp, Homo sapiens
gagaggaagcaggag

SEQ ID NO: 1512623 - DNA, 15 bp, Homo sapiens
agaggaagcaggaga

SEQ ID NO: 1512624 - DNA, 15 bp, Homo sapiens
aggaagcaggagacc

SEQ ID NO: 1512625 - DNA, 15 bp, Homo sapiens
ggaagcaggagacca

SEQ ID NO: 1512626 - DNA, 15 bp, Homo sapiens
gaagcaggagaccag

SEQ ID NO: 1512627 - DNA, 15 bp, Homo sapiens
aagcaggagaccaga

SEQ ID NO: 1512628 - DNA, 15 bp, Homo sapiens
agcaggagaccagaa

SEQ ID NO: 1512629 - DNA, 15 bp, Homo sapiens
gcaggagaccagaaa

SEQ ID NO: 1512630 - DNA, 15 bp, Homo sapiens
aggagaccagaaagt

SEQ ID NO: 1512631 - DNA, 15 bp, Homo sapiens
ggagaccagaaagtg

SEQ ID NO: 1512632 - DNA, 15 bp, Homo sapiens
gagaccagaaagtga

SEQ ID NO: 1512633 - DNA, 15 bp, Homo sapiens
agaccagaaagtgac

SEQ ID NO: 1512634 - DNA, 15 bp, Homo sapiens
gaccagaaagtgacc

SEQ ID NO: 1512635 - DNA, 15 bp, Homo sapiens
accagaaagtgacca

SEQ ID NO: 1512636 - DNA, 15 bp, Homo sapiens
ccagaaagtgaccaa

SEQ ID NO: 1512637 - DNA, 15 bp, Homo sapiens
cagaaagtgaccaag

SEQ ID NO: 1512638 - DNA, 15 bp, Homo sapiens
agaaagtgaccaagg

SEQ ID NO: 1512639 - DNA, 15 bp, Homo sapiens
gaaagtgaccaagga

SEQ ID NO: 1512640 - DNA, 15 bp, Homo sapiens
aaagtgaccaaggat

SEQ ID NO: 1512641 - DNA, 15 bp, Homo sapiens
aagtgaccaaggatc

SEQ ID NO: 1512642 - DNA, 15 bp, Homo sapiens
agtgaccaaggatct

SEQ ID NO: 1512643 - DNA, 15 bp, Homo sapiens
gtgaccaaggatctg

SEQ ID NO: 1512644 - DNA, 15 bp, Homo sapiens
tgaccaaggatctgt

SEQ ID NO: 1512645 - DNA, 15 bp, Homo sapiens
gaccaaggatctgtc

SEQ ID NO: 1512646 - DNA, 15 bp, Homo sapiens
accaaggatctgtcc

SEQ ID NO: 1512647 - DNA, 15 bp, Homo sapiens
ccaaggatctgtcca

SEQ ID NO: 1512648 - DNA, 15 bp, Homo sapiens
caaggatctgtccat

SEQ ID NO: 1512649 - DNA, 15 bp, Homo sapiens
aaggatctgtccatt

SEQ ID NO: 1512650 - DNA, 15 bp, Homo sapiens
aggatctgtccattt

SEQ ID NO: 1512651 - DNA, 15 bp, Homo sapiens
ggatctgtccattta

SEQ ID NO: 1512652 - DNA, 15 bp, Homo sapiens
gatctgtccatttag

SEQ ID NO: 1512653 - DNA, 15 bp, Homo sapiens
atctgtccatttagt

SEQ ID NO: 1512654 - DNA, 15 bp, Homo sapiens
tctgtccatttagtt

SEQ ID NO: 1512655 - DNA, 15 bp, Homo sapiens
ctgtccatttagttc

SEQ ID NO: 1512656 - DNA, 15 bp, Homo sapiens
tgtccatttagttcc

SEQ ID NO: 1512657 - DNA, 15 bp, Homo sapiens
gtccatttagttcca

SEQ ID NO: 1512658 - DNA, 15 bp, Homo sapiens
tccatttagttccag

SEQ ID NO: 1512659 - DNA, 15 bp, Homo sapiens
ccatttagttccagg

SEQ ID NO: 1512660 - DNA, 15 bp, Homo sapiens
catttagttccagga

SEQ ID NO: 1512661 - DNA, 15 bp, Homo sapiens
atttagttccaggag

SEQ ID NO: 1512662 - DNA, 15 bp, Homo sapiens
tttagttccaggaga

SEQ ID NO: 1512663 - DNA, 15 bp, Homo sapiens
ttagttccaggagat

SEQ ID NO: 1512664 - DNA, 15 bp, Homo sapiens
tagttccaggagata

SEQ ID NO: 1512665 - DNA, 15 bp, Homo sapiens
agttccaggagatat

SEQ ID NO: 1512666 - DNA, 15 bp, Homo sapiens
gttccaggagatatg

SEQ ID NO: 1512667 - DNA, 15 bp, Homo sapiens
ttccaggagatatga

SEQ ID NO: 1512668 - DNA, 15 bp, Homo sapiens
tccaggagatatgac

SEQ ID NO: 1512669 - DNA, 15 bp, Homo sapiens
ccaggagatatgact

SEQ ID NO: 1512670 - DNA, 15 bp, Homo sapiens
caggagatatgactg

SEQ ID NO: 1512671 - DNA, 15 bp, Homo sapiens
aggagatatgactgc

SEQ ID NO: 1512672 - DNA, 15 bp, Homo sapiens
ggagatatgactgcc

SEQ ID NO: 1512673 - DNA, 15 bp, Homo sapiens
gagatatgactgcca

SEQ ID NO: 1512674 - DNA, 15 bp, Homo sapiens
agatatgactgccag

SEQ ID NO: 1512675 - DNA, 15 bp, Homo sapiens
gatatgactgccaga

SEQ ID NO: 1512676 - DNA, 15 bp, Homo sapiens
atatgactgccagag

SEQ ID NO: 1512677 - DNA, 15 bp, Homo sapiens
tatgactgccagagt

SEQ ID NO: 1512678 - DNA, 15 bp, Homo sapiens
atgactgccagagtg

SEQ ID NO: 1512679 - DNA, 15 bp, Homo sapiens
tgactgccagagtgg

SEQ ID NO: 1512680 - DNA, 15 bp, Homo sapiens
gactgccagagtggt

SEQ ID NO: 1512681 - DNA, 15 bp, Homo sapiens
actgccagagtggta

SEQ ID NO: 1512682 - DNA, 15 bp, Homo sapiens
ctgccagagtggtat

SEQ ID NO: 1512683 - DNA, 15 bp, Homo sapiens
tgccagagtggtatc

SEQ ID NO: 1512684 - DNA, 15 bp, Homo sapiens
gccagagtggtatcc

SEQ ID NO: 1512685 - DNA, 15 bp, Homo sapiens
ccagagtggtatcct

SEQ ID NO: 1512686 - DNA, 15 bp, Homo sapiens
cagagtggtatcctt

SEQ ID NO: 1512687 - DNA, 15 bp, Homo sapiens
agagtggtatcctta

SEQ ID NO: 1512688 - DNA, 15 bp, Homo sapiens
gagtggtatccttag

SEQ ID NO: 1512689 - DNA, 15 bp, Homo sapiens
agtggtatccttagt

SEQ ID NO: 1512690 - DNA, 15 bp, Homo sapiens
gtggtatccttagtg

SEQ ID NO: 1512691 - DNA, 15 bp, Homo sapiens
tggtatccttagtgg

SEQ ID NO: 1512692 - DNA, 15 bp, Homo sapiens
ggtatccttagtggg

SEQ ID NO: 1512693 - DNA, 15 bp, Homo sapiens
gtatccttagtgggc

SEQ ID NO: 1512694 - DNA, 15 bp, Homo sapiens
tatccttagtgggct

SEQ ID NO: 1512695 - DNA, 15 bp, Homo sapiens
atccttagtgggctg

SEQ ID NO: 1512696 - DNA, 15 bp, Homo sapiens
tccttagtgggctga

SEQ ID NO: 1512697 - DNA, 15 bp, Homo sapiens
ccttagtgggctgaa

SEQ ID NO: 1512698 - DNA, 15 bp, Homo sapiens
cttagtgggctgaat

SEQ ID NO: 1512699 - DNA, 15 bp, Homo sapiens
ttagtgggctgaatg

SEQ ID NO: 1512700 - DNA, 15 bp, Homo sapiens
tagtgggctgaatgt

SEQ ID NO: 1512701 - DNA, 15 bp, Homo sapiens
agtgggctgaatgtt

SEQ ID NO: 1512702 - DNA, 15 bp, Homo sapiens
gtgggctgaatgttc

SEQ ID NO: 1512703 - DNA, 15 bp, Homo sapiens
tgggctgaatgttca

SEQ ID NO: 1512704 - DNA, 15 bp, Homo sapiens
gggctgaatgttcag

SEQ ID NO: 1512705 - DNA, 15 bp, Homo sapiens
ggctgaatgttcagt

SEQ ID NO: 1512706 - DNA, 15 bp, Homo sapiens
gctgaatgttcagtg

SEQ ID NO: 1512707 - DNA, 15 bp, Homo sapiens
ctgaatgttcagtgg

SEQ ID NO: 1512708 - DNA, 15 bp, Homo sapiens
tgaatgttcagtggt

SEQ ID NO: 1512709 - DNA, 15 bp, Homo sapiens
gaatgttcagtggtc

SEQ ID NO: 1512710 - DNA, 15 bp, Homo sapiens
aatgttcagtggtct

SEQ ID NO: 1512711 - DNA, 15 bp, Homo sapiens
atgttcagtggtctt

SEQ ID NO: 1512712 - DNA, 15 bp, Homo sapiens
tgttcagtggtctta

SEQ ID NO: 1512713 - DNA, 15 bp, Homo sapiens
gttcagtggtcttac

SEQ ID NO: 1512714 - DNA, 15 bp, Homo sapiens
ttcagtggtcttact

SEQ ID NO: 1512715 - DNA, 15 bp, Homo sapiens
tcagtggtcttactt

SEQ ID NO: 1512716 - DNA, 15 bp, Homo sapiens
cagtggtcttacttt

SEQ ID NO: 1512717 - DNA, 15 bp, Homo sapiens
agtggtcttacttta

SEQ ID NO: 1512718 - DNA, 15 bp, Homo sapiens
gtggtcttactttag

SEQ ID NO: 1512719 - DNA, 15 bp, Homo sapiens
tggtcttactttagt

SEQ ID NO: 1512720 - DNA, 15 bp, Homo sapiens
ggtcttactttagtg

SEQ ID NO: 1512721 - DNA, 15 bp, Homo sapiens
gtcttactttagtga

SEQ ID NO: 1512722 - DNA, 15 bp, Homo sapiens
tcttactttagtgac

SEQ ID NO: 1512723 - DNA, 15 bp, Homo sapiens
cttactttagtgacc

SEQ ID NO: 1512724 - DNA, 15 bp, Homo sapiens
ttactttagtgacca

SEQ ID NO: 1512725 - DNA, 15 bp, Homo sapiens
tactttagtgaccaa

SEQ ID NO: 1512726 - DNA, 15 bp, Homo sapiens
actttagtgaccaag

SEQ ID NO: 1512727 - DNA, 15 bp, Homo sapiens
ctttagtgaccaagc

SEQ ID NO: 1512728 - DNA, 15 bp, Homo sapiens
tttagtgaccaagca

SEQ ID NO: 1512729 - DNA, 15 bp, Homo sapiens
ttagtgaccaagcaa

SEQ ID NO: 1512730 - DNA, 15 bp, Homo sapiens
tagtgaccaagcaac

SEQ ID NO: 1512731 - DNA, 15 bp, Homo sapiens
agtgaccaagcaaca

SEQ ID NO: 1512732 - DNA, 15 bp, Homo sapiens
gtgaccaagcaacaa

SEQ ID NO: 1512733 - DNA, 15 bp, Homo sapiens
tgaccaagcaacaag

SEQ ID NO: 1512734 - DNA, 15 bp, Homo sapiens
gaccaagcaacaaga

SEQ ID NO: 1512735 - DNA, 15 bp, Homo sapiens
accaagcaacaagac

SEQ ID NO: 1512736 - DNA, 15 bp, Homo sapiens
ccaagcaacaagaca

SEQ ID NO: 1512737 - DNA, 15 bp, Homo sapiens
caagcaacaagacag

SEQ ID NO: 1512738 - DNA, 15 bp, Homo sapiens
aagcaacaagacagt

SEQ ID NO: 1512739 - DNA, 15 bp, Homo sapiens
agcaacaagacagta

SEQ ID NO: 1512740 - DNA, 15 bp, Homo sapiens
gcaacaagacagtag

SEQ ID NO: 1512741 - DNA, 15 bp, Homo sapiens
caacaagacagtagg

SEQ ID NO: 1512742 - DNA, 15 bp, Homo sapiens
aacaagacagtaggg

SEQ ID NO: 1512743 - DNA, 15 bp, Homo sapiens
acaagacagtagggc

SEQ ID NO: 1512744 - DNA, 15 bp, Homo sapiens
caagacagtagggca

SEQ ID NO: 1512745 - DNA, 15 bp, Homo sapiens
aagacagtagggcat

SEQ ID NO: 1512746 - DNA, 15 bp, Homo sapiens
agacagtagggcatg

SEQ ID NO: 1512747 - DNA, 15 bp, Homo sapiens
gacagtagggcatgg

SEQ ID NO: 1512748 - DNA, 15 bp, Homo sapiens
acagtagggcatggt

SEQ ID NO: 1512749 - DNA, 15 bp, Homo sapiens
cagtagggcatggtc

SEQ ID NO: 1512750 - DNA, 15 bp, Homo sapiens
agtagggcatggtca

SEQ ID NO: 1512751 - DNA, 15 bp, Homo sapiens
gtagggcatggtcag

SEQ ID NO: 1512752 - DNA, 15 bp, Homo sapiens
tagggcatggtcagt

SEQ ID NO: 1512753 - DNA, 15 bp, Homo sapiens
agggcatggtcagta

SEQ ID NO: 1512754 - DNA, 15 bp, Homo sapiens
gggcatggtcagtaa

SEQ ID NO: 1512755 - DNA, 15 bp, Homo sapiens
ggcatggtcagtaac

SEQ ID NO: 1512756 - DNA, 15 bp, Homo sapiens
gcatggtcagtaact

SEQ ID NO: 1512757 - DNA, 15 bp, Homo sapiens
catggtcagtaactt

SEQ ID NO: 1512758 - DNA, 15 bp, Homo sapiens
atggtcagtaacttt

SEQ ID NO: 1512759 - DNA, 15 bp, Homo sapiens
tggtcagtaactttc

SEQ ID NO: 1512760 - DNA, 15 bp, Homo sapiens
ggtcagtaactttca

SEQ ID NO: 1512761 - DNA, 15 bp, Homo sapiens
gtcagtaactttcag

SEQ ID NO: 1512762 - DNA, 15 bp, Homo sapiens
tcagtaactttcagt

SEQ ID NO: 1512763 - DNA, 15 bp, Homo sapiens
cagtaactttcagtc

SEQ ID NO: 1512764 - DNA, 15 bp, Homo sapiens
agtaactttcagtca

SEQ ID NO: 1512765 - DNA, 15 bp, Homo sapiens
gtaactttcagtcaa

SEQ ID NO: 1512766 - DNA, 15 bp, Homo sapiens
taactttcagtcaat

SEQ ID NO: 1512767 - DNA, 15 bp, Homo sapiens
aactttcagtcaatt

SEQ ID NO: 1512768 - DNA, 15 bp, Homo sapiens
actttcagtcaattt

SEQ ID NO: 1512769 - DNA, 15 bp, Homo sapiens
ctttcagtcaatttt

SEQ ID NO: 1512770 - DNA, 15 bp, Homo sapiens
tttcagtcaattttt

SEQ ID NO: 1512771 - DNA, 15 bp, Homo sapiens
ttcagtcaatttttg

SEQ ID NO: 1512772 - DNA, 15 bp, Homo sapiens
tcagtcaatttttgc

SEQ ID NO: 1512773 - DNA, 15 bp, Homo sapiens
cagtcaatttttgct

SEQ ID NO: 1512774 - DNA, 15 bp, Homo sapiens
agtcaatttttgctt

SEQ ID NO: 1512775 - DNA, 15 bp, Homo sapiens
gtcaatttttgctta

SEQ ID NO: 1512776 - DNA, 15 bp, Homo sapiens
tcaatttttgcttac

SEQ ID NO: 1512777 - DNA, 15 bp, Homo sapiens
caatttttgcttact

SEQ ID NO: 1512778 - DNA, 15 bp, Homo sapiens
aatttttgcttacta

SEQ ID NO: 1512779 - DNA, 15 bp, Homo sapiens
atttttgcttactag

SEQ ID NO: 1512780 - DNA, 15 bp, Homo sapiens
tttttgcttactagg

SEQ ID NO: 1512781 - DNA, 15 bp, Homo sapiens
ttttgcttactagga

SEQ ID NO: 1512782 - DNA, 15 bp, Homo sapiens
tttgcttactaggat

SEQ ID NO: 1512783 - DNA, 15 bp, Homo sapiens
ttgcttactaggata

SEQ ID NO: 1512784 - DNA, 15 bp, Homo sapiens
tgcttactaggataa

SEQ ID NO: 1512785 - DNA, 15 bp, Homo sapiens
gcttactaggataaa

SEQ ID NO: 1512786 - DNA, 15 bp, Homo sapiens
cttactaggataaag

SEQ ID NO: 1512787 - DNA, 15 bp, Homo sapiens
ttactaggataaagc

SEQ ID NO: 1512788 - DNA, 15 bp, Homo sapiens
tactaggataaagca

SEQ ID NO: 1512789 - DNA, 15 bp, Homo sapiens
actaggataaagcaa

SEQ ID NO: 1512790 - DNA, 15 bp, Homo sapiens
ctaggataaagcaaa

SEQ ID NO: 1512791 - DNA, 15 bp, Homo sapiens
taggataaagcaaaa

SEQ ID NO: 1512792 - DNA, 15 bp, Homo sapiens
aggataaagcaaaaa

SEQ ID NO: 1512793 - DNA, 15 bp, Homo sapiens
ggataaagcaaaaat

SEQ ID NO: 1512794 - DNA, 15 bp, Homo sapiens
gataaagcaaaaata

SEQ ID NO: 1512795 - DNA, 15 bp, Homo sapiens
ataaagcaaaaataa

SEQ ID NO: 1512796 - DNA, 15 bp, Homo sapiens
taaagcaaaaataag

SEQ ID NO: 1512797 - DNA, 15 bp, Homo sapiens
aaagcaaaaataagc

SEQ ID NO: 1512798 - DNA, 15 bp, Homo sapiens
aagcaaaaataagct

SEQ ID NO: 1512799 - DNA, 15 bp, Homo sapiens
agcaaaaataagctt

SEQ ID NO: 1512800 - DNA, 15 bp, Homo sapiens
gcaaaaataagctta

SEQ ID NO: 1512801 - DNA, 15 bp, Homo sapiens
caaaaataagcttat

SEQ ID NO: 1512802 - DNA, 15 bp, Homo sapiens
aaaaataagcttata

SEQ ID NO: 1512803 - DNA, 15 bp, Homo sapiens
aaaataagcttatac

SEQ ID NO: 1512804 - DNA, 15 bp, Homo sapiens
aaataagcttataca

SEQ ID NO: 1512805 - DNA, 15 bp, Homo sapiens
aataagcttatacat

SEQ ID NO: 1512806 - DNA, 15 bp, Homo sapiens
ataagcttatacatt

SEQ ID NO: 1512807 - DNA, 15 bp, Homo sapiens
taagcttatacattt

SEQ ID NO: 1512808 - DNA, 15 bp, Homo sapiens
aagcttatacatttt

SEQ ID NO: 1512809 - DNA, 15 bp, Homo sapiens
agcttatacattttt

SEQ ID NO: 1512810 - DNA, 15 bp, Homo sapiens
gcttatacattttta

SEQ ID NO: 1512811 - DNA, 15 bp, Homo sapiens
cttatacatttttag

SEQ ID NO: 1512812 - DNA, 15 bp, Homo sapiens
ttatacatttttaga

SEQ ID NO: 1512813 - DNA, 15 bp, Homo sapiens
tatacatttttagat

SEQ ID NO: 1512814 - DNA, 15 bp, Homo sapiens
atacatttttagata

SEQ ID NO: 1512815 - DNA, 15 bp, Homo sapiens
tacatttttagatac

SEQ ID NO: 1512816 - DNA, 15 bp, Homo sapiens
acatttttagataca

SEQ ID NO: 1512817 - DNA, 15 bp, Homo sapiens
catttttagatacat

SEQ ID NO: 1512818 - DNA, 15 bp, Homo sapiens
atttttagatacatt

SEQ ID NO: 1512819 - DNA, 15 bp, Homo sapiens
tttttagatacattt

SEQ ID NO: 1512820 - DNA, 15 bp, Homo sapiens
ttttagatacatttt

SEQ ID NO: 1512821 - DNA, 15 bp, Homo sapiens
tttagatacattttt

SEQ ID NO: 1512822 - DNA, 15 bp, Homo sapiens
ttagatacatttttt

SEQ ID NO: 1512823 - DNA, 15 bp, Homo sapiens
tagatacattttttg

SEQ ID NO: 1512824 - DNA, 15 bp, Homo sapiens
agatacattttttgt

SEQ ID NO: 1512825 - DNA, 15 bp, Homo sapiens
gatacattttttgta

SEQ ID NO: 1512826 - DNA, 15 bp, Homo sapiens
atacattttttgtaa

SEQ ID NO: 1512827 - DNA, 15 bp, Homo sapiens
tacattttttgtaac

SEQ ID NO: 1512828 - DNA, 15 bp, Homo sapiens
acattttttgtaact

SEQ ID NO: 1512829 - DNA, 15 bp, Homo sapiens
cattttttgtaactt

SEQ ID NO: 1512830 - DNA, 15 bp, Homo sapiens
attttttgtaacttg

SEQ ID NO: 1512831 - DNA, 15 bp, Homo sapiens
ttttttgtaacttgc

SEQ ID NO: 1512832 - DNA, 15 bp, Homo sapiens
tttttgtaacttgct

SEQ ID NO: 1512833 - DNA, 15 bp, Homo sapiens
ttttgtaacttgctg

SEQ ID NO: 1512834 - DNA, 15 bp, Homo sapiens
tttgtaacttgctga

SEQ ID NO: 1512835 - DNA, 15 bp, Homo sapiens
ttgtaacttgctgag

SEQ ID NO: 1512836 - DNA, 15 bp, Homo sapiens
tgtaacttgctgagt

SEQ ID NO: 1512837 - DNA, 15 bp, Homo sapiens
gtaacttgctgagta

SEQ ID NO: 1512838 - DNA, 15 bp, Homo sapiens
taacttgctgagtac

SEQ ID NO: 1512839 - DNA, 15 bp, Homo sapiens
aacttgctgagtacc

SEQ ID NO: 1512840 - DNA, 15 bp, Homo sapiens
acttgctgagtaccc

SEQ ID NO: 1512841 - DNA, 15 bp, Homo sapiens
cttgctgagtaccca

SEQ ID NO: 1512842 - DNA, 15 bp, Homo sapiens
ttgctgagtacccaa

SEQ ID NO: 1512843 - DNA, 15 bp, Homo sapiens
tgctgagtacccaag

SEQ ID NO: 1512844 - DNA, 15 bp, Homo sapiens
gctgagtacccaagg

SEQ ID NO: 1512845 - DNA, 15 bp, Homo sapiens
ctgagtacccaagga

SEQ ID NO: 1512846 - DNA, 15 bp, Homo sapiens
tgagtacccaaggaa

SEQ ID NO: 1512847 - DNA, 15 bp, Homo sapiens
gagtacccaaggaaa

SEQ ID NO: 1512848 - DNA, 15 bp, Homo sapiens
agtacccaaggaaag

SEQ ID NO: 1512849 - DNA, 15 bp, Homo sapiens
gtacccaaggaaagt

SEQ ID NO: 1512850 - DNA, 15 bp, Homo sapiens
tacccaaggaaagtg

SEQ ID NO: 1512851 - DNA, 15 bp, Homo sapiens
acccaaggaaagtgt

SEQ ID NO: 1512852 - DNA, 15 bp, Homo sapiens
tgtaggtgtattcca

SEQ ID NO: 1512853 - DNA, 15 bp, Homo sapiens
gtaggtgtattccag

SEQ ID NO: 1512854 - DNA, 15 bp, Homo sapiens
taggtgtattccaga

SEQ ID NO: 1512855 - DNA, 15 bp, Homo sapiens
aggtgtattccagag

SEQ ID NO: 1512856 - DNA, 15 bp, Homo sapiens
ggtgtattccagagc

SEQ ID NO: 1512857 - DNA, 15 bp, Homo sapiens
gtgtattccagagca

SEQ ID NO: 1512858 - DNA, 15 bp, Homo sapiens
tgtattccagagcaa

SEQ ID NO: 1512859 - DNA, 15 bp, Homo sapiens
gtattccagagcaaa

SEQ ID NO: 1512860 - DNA, 15 bp, Homo sapiens
tattccagagcaaat

SEQ ID NO: 1512861 - DNA, 15 bp, Homo sapiens
attccagagcaaatg

SEQ ID NO: 1512862 - DNA, 15 bp, Homo sapiens
ttccagagcaaatga

SEQ ID NO: 1512863 - DNA, 15 bp, Homo sapiens
tccagagcaaatgaa

SEQ ID NO: 1512864 - DNA, 15 bp, Homo sapiens
ccagagcaaatgaaa

SEQ ID NO: 1512865 - DNA, 15 bp, Homo sapiens
cagagcaaatgaaaa

SEQ ID NO: 1512866 - DNA, 15 bp, Homo sapiens
agagcaaatgaaaaa

SEQ ID NO: 1512867 - DNA, 15 bp, Homo sapiens
gagcaaatgaaaaag

SEQ ID NO: 1512868 - DNA, 15 bp, Homo sapiens
agcaaatgaaaaaga

SEQ ID NO: 1512869 - DNA, 15 bp, Homo sapiens
gcaaatgaaaaagag

SEQ ID NO: 1512870 - DNA, 15 bp, Homo sapiens
caaatgaaaaagagc

SEQ ID NO: 1512871 - DNA, 15 bp, Homo sapiens
aaatgaaaaagagcc

SEQ ID NO: 1512872 - DNA, 15 bp, Homo sapiens
aatgaaaaagagcct

SEQ ID NO: 1512873 - DNA, 15 bp, Homo sapiens
atgaaaaagagcctt

SEQ ID NO: 1512874 - DNA, 15 bp, Homo sapiens
tgaaaaagagccttg

SEQ ID NO: 1512875 - DNA, 15 bp, Homo sapiens
gaaaaagagccttgc

SEQ ID NO: 1512876 - DNA, 15 bp, Homo sapiens
aaaaagagccttgct

SEQ ID NO: 1512877 - DNA, 15 bp, Homo sapiens
aaaagagccttgctg

SEQ ID NO: 1512878 - DNA, 15 bp, Homo sapiens
aaagagccttgctgt

SEQ ID NO: 1512879 - DNA, 15 bp, Homo sapiens
aagagccttgctgtt

SEQ ID NO: 1512880 - DNA, 15 bp, Homo sapiens
agagccttgctgttg

SEQ ID NO: 1512881 - DNA, 15 bp, Homo sapiens
gagccttgctgttgg

SEQ ID NO: 1512882 - DNA, 15 bp, Homo sapiens
agccttgctgttggt

SEQ ID NO: 1512883 - DNA, 15 bp, Homo sapiens
gccttgctgttggtg

SEQ ID NO: 1512884 - DNA, 15 bp, Homo sapiens
ccttgctgttggtgg

SEQ ID NO: 1512885 - DNA, 15 bp, Homo sapiens
cttgctgttggtggt

SEQ ID NO: 1512886 - DNA, 15 bp, Homo sapiens
ttgctgttggtggtt

SEQ ID NO: 1512887 - DNA, 15 bp, Homo sapiens
tgctgttggtggtta

SEQ ID NO: 1512888 - DNA, 15 bp, Homo sapiens
gctgttggtggttag

SEQ ID NO: 1512889 - DNA, 15 bp, Homo sapiens
ctgttggtggttagc

SEQ ID NO: 1512890 - DNA, 15 bp, Homo sapiens
tgttggtggttagct

SEQ ID NO: 1512891 - DNA, 15 bp, Homo sapiens
gttggtggttagcta

SEQ ID NO: 1512892 - DNA, 15 bp, Homo sapiens
ttggtggttagctaa

SEQ ID NO: 1512893 - DNA, 15 bp, Homo sapiens
tggtggttagctaaa

SEQ ID NO: 1512894 - DNA, 15 bp, Homo sapiens
ggtggttagctaaag

SEQ ID NO: 1512895 - DNA, 15 bp, Homo sapiens
gtggttagctaaagt

SEQ ID NO: 1512896 - DNA, 15 bp, Homo sapiens
tggttagctaaagtg

SEQ ID NO: 1512897 - DNA, 15 bp, Homo sapiens
ggttagctaaagtga

SEQ ID NO: 1512898 - DNA, 15 bp, Homo sapiens
gttagctaaagtgag

SEQ ID NO: 1512899 - DNA, 15 bp, Homo sapiens
ttagctaaagtgagg

SEQ ID NO: 1512900 - DNA, 15 bp, Homo sapiens
tagctaaagtgagga

SEQ ID NO: 1512901 - DNA, 15 bp, Homo sapiens
agctaaagtgaggat

SEQ ID NO: 1512902 - DNA, 15 bp, Homo sapiens
gctaaagtgaggatg

SEQ ID NO: 1512903 - DNA, 15 bp, Homo sapiens
ctaaagtgaggatga

SEQ ID NO: 1512904 - DNA, 15 bp, Homo sapiens
taaagtgaggatgat

SEQ ID NO: 1512905 - DNA, 15 bp, Homo sapiens
aaagtgaggatgata

SEQ ID NO: 1512906 - DNA, 15 bp, Homo sapiens
aagtgaggatgataa

SEQ ID NO: 1512907 - DNA, 15 bp, Homo sapiens
agtgaggatgataaa

SEQ ID NO: 1512908 - DNA, 15 bp, Homo sapiens
gtgaggatgataaag

SEQ ID NO: 1512909 - DNA, 15 bp, Homo sapiens
tgaggatgataaagg

SEQ ID NO: 1512910 - DNA, 15 bp, Homo sapiens
gaggatgataaaggg

SEQ ID NO: 1512911 - DNA, 15 bp, Homo sapiens
aggatgataaagggt

SEQ ID NO: 1512912 - DNA, 15 bp, Homo sapiens
ggatgataaagggtg

SEQ ID NO: 1512913 - DNA, 15 bp, Homo sapiens
gatgataaagggtga

SEQ ID NO: 1512914 - DNA, 15 bp, Homo sapiens
atgataaagggtgag

SEQ ID NO: 1512915 - DNA, 15 bp, Homo sapiens
tgataaagggtgagg

SEQ ID NO: 1512916 - DNA, 15 bp, Homo sapiens
gataaagggtgaggt

SEQ ID NO: 1512917 - DNA, 15 bp, Homo sapiens
ataaagggtgaggta

SEQ ID NO: 1512918 - DNA, 15 bp, Homo sapiens
taaagggtgaggtag

SEQ ID NO: 1512919 - DNA, 15 bp, Homo sapiens
aaagggtgaggtagg

SEQ ID NO: 1512920 - DNA, 15 bp, Homo sapiens
aagggtgaggtagga

SEQ ID NO: 1512921 - DNA, 15 bp, Homo sapiens
agggtgaggtaggaa

SEQ ID NO: 1512922 - DNA, 15 bp, Homo sapiens
gggtgaggtaggaaa

SEQ ID NO: 1512923 - DNA, 15 bp, Homo sapiens
ggtgaggtaggaaaa

SEQ ID NO: 1512924 - DNA, 15 bp, Homo sapiens
gtgaggtaggaaaat

SEQ ID NO: 1512925 - DNA, 15 bp, Homo sapiens
tgaggtaggaaaatg

SEQ ID NO: 1512926 - DNA, 15 bp, Homo sapiens
gaggtaggaaaatgc

SEQ ID NO: 1512927 - DNA, 15 bp, Homo sapiens
aggtaggaaaatgcc

SEQ ID NO: 1512928 - DNA, 15 bp, Homo sapiens
ggtaggaaaatgcct

SEQ ID NO: 1512929 - DNA, 15 bp, Homo sapiens
gtaggaaaatgccta

SEQ ID NO: 1512930 - DNA, 15 bp, Homo sapiens
taggaaaatgcctat

SEQ ID NO: 1512931 - DNA, 15 bp, Homo sapiens
aggaaaatgcctatt

SEQ ID NO: 1512932 - DNA, 15 bp, Homo sapiens
ggaaaatgcctattt

SEQ ID NO: 1512933 - DNA, 15 bp, Homo sapiens
gaaaatgcctattta

SEQ ID NO: 1512934 - DNA, 15 bp, Homo sapiens
aaaatgcctatttaa

SEQ ID NO: 1512935 - DNA, 15 bp, Homo sapiens
aaatgcctatttaaa

SEQ ID NO: 1512936 - DNA, 15 bp, Homo sapiens
aatgcctatttaaat

SEQ ID NO: 1512937 - DNA, 15 bp, Homo sapiens
atgcctatttaaatt

SEQ ID NO: 1512938 - DNA, 15 bp, Homo sapiens
tgcctatttaaattt

SEQ ID NO: 1512939 - DNA, 15 bp, Homo sapiens
gcctatttaaatttt

SEQ ID NO: 1512940 - DNA, 15 bp, Homo sapiens
cctatttaaattttt

SEQ ID NO: 1512941 - DNA, 15 bp, Homo sapiens
ctatttaaatttttt

SEQ ID NO: 1512942 - DNA, 15 bp, Homo sapiens
tatttaaattttttt

SEQ ID NO: 1512943 - DNA, 15 bp, Homo sapiens
atttaaatttttttc

SEQ ID NO: 1512944 - DNA, 15 bp, Homo sapiens
tttaaatttttttct

SEQ ID NO: 1512945 - DNA, 15 bp, Homo sapiens
ttaaatttttttctt

SEQ ID NO: 1512946 - DNA, 15 bp, Homo sapiens
taaatttttttctta

SEQ ID NO: 1512947 - DNA, 15 bp, Homo sapiens
aaatttttttcttat

SEQ ID NO: 1512948 - DNA, 15 bp, Homo sapiens
aatttttttcttata

SEQ ID NO: 1512949 - DNA, 15 bp, Homo sapiens
atttttttcttatat

SEQ ID NO: 1512950 - DNA, 15 bp, Homo sapiens
tttttttcttatatt

SEQ ID NO: 1512951 - DNA, 15 bp, Homo sapiens
ttttttcttatattg

SEQ ID NO: 1512952 - DNA, 15 bp, Homo sapiens
tttttcttatattgt

SEQ ID NO: 1512953 - DNA, 15 bp, Homo sapiens
ttttcttatattgtt

SEQ ID NO: 1512954 - DNA, 15 bp, Homo sapiens
tttcttatattgttt

SEQ ID NO: 1512955 - DNA, 15 bp, Homo sapiens
ttcttatattgtttc

SEQ ID NO: 1512956 - DNA, 15 bp, Homo sapiens
tcttatattgtttcc

SEQ ID NO: 1512957 - DNA, 15 bp, Homo sapiens
cttatattgtttcct

SEQ ID NO: 1512958 - DNA, 15 bp, Homo sapiens
ttatattgtttcctt

SEQ ID NO: 1512959 - DNA, 15 bp, Homo sapiens
tatattgtttccttt

SEQ ID NO: 1512960 - DNA, 15 bp, Homo sapiens
atattgtttcctttt

SEQ ID NO: 1512961 - DNA, 15 bp, Homo sapiens
tattgtttccttttt

SEQ ID NO: 1512962 - DNA, 15 bp, Homo sapiens
attgtttcctttttt

SEQ ID NO: 1512963 - DNA, 15 bp, Homo sapiens
ttgtttccttttttt

SEQ ID NO: 1512964 - DNA, 15 bp, Homo sapiens
tgtttccttttttta

SEQ ID NO: 1512965 - DNA, 15 bp, Homo sapiens
gtttcctttttttaa

SEQ ID NO: 1512966 - DNA, 15 bp, Homo sapiens
tttcctttttttaaa

SEQ ID NO: 1512967 - DNA, 15 bp, Homo sapiens
ttcctttttttaaac

SEQ ID NO: 1512968 - DNA, 15 bp, Homo sapiens
tcctttttttaaacc

SEQ ID NO: 1512969 - DNA, 15 bp, Homo sapiens
cctttttttaaaccc

SEQ ID NO: 1512970 - DNA, 15 bp, Homo sapiens
ctttttttaaaccca

SEQ ID NO: 1512971 - DNA, 15 bp, Homo sapiens
tttttttaaacccag

SEQ ID NO: 1512972 - DNA, 15 bp, Homo sapiens
ttttttaaacccagg

SEQ ID NO: 1512973 - DNA, 15 bp, Homo sapiens
tttttaaacccaggt

SEQ ID NO: 1512974 - DNA, 15 bp, Homo sapiens
ttttaaacccaggtt

SEQ ID NO: 1512975 - DNA, 15 bp, Homo sapiens
tttaaacccaggttg

SEQ ID NO: 1512976 - DNA, 15 bp, Homo sapiens
ttaaacccaggttgt

SEQ ID NO: 1512977 - DNA, 15 bp, Homo sapiens
taaacccaggttgta

SEQ ID NO: 1512978 - DNA, 15 bp, Homo sapiens
aaacccaggttgtac

SEQ ID NO: 1512979 - DNA, 15 bp, Homo sapiens
aacccaggttgtaca

SEQ ID NO: 1512980 - DNA, 15 bp, Homo sapiens
acccaggttgtacat

SEQ ID NO: 1512981 - DNA, 15 bp, Homo sapiens
cccaggttgtacatt

SEQ ID NO: 1512982 - DNA, 15 bp, Homo sapiens
ccaggttgtacattc

SEQ ID NO: 1512983 - DNA, 15 bp, Homo sapiens
caggttgtacattcc

SEQ ID NO: 1512984 - DNA, 15 bp, Homo sapiens
aggttgtacattccc

SEQ ID NO: 1512985 - DNA, 15 bp, Homo sapiens
ggttgtacattcccg

SEQ ID NO: 1512986 - DNA, 15 bp, Homo sapiens
gttgtacattcccgt

SEQ ID NO: 1512987 - DNA, 15 bp, Homo sapiens
ttgtacattcccgtg

SEQ ID NO: 1512988 - DNA, 15 bp, Homo sapiens
tgtacattcccgtgt

SEQ ID NO: 1512989 - DNA, 15 bp, Homo sapiens
gtacattcccgtgtg

SEQ ID NO: 1512990 - DNA, 15 bp, Homo sapiens
tacattcccgtgtgg

SEQ ID NO: 1512991 - DNA, 15 bp, Homo sapiens
acattcccgtgtgga

SEQ ID NO: 1512992 - DNA, 15 bp, Homo sapiens
cattcccgtgtggat

SEQ ID NO: 1512993 - DNA, 15 bp, Homo sapiens
attcccgtgtggatt

SEQ ID NO: 1512994 - DNA, 15 bp, Homo sapiens
ttcccgtgtggattt

SEQ ID NO: 1512995 - DNA, 15 bp, Homo sapiens
tcccgtgtggatttc

SEQ ID NO: 1512996 - DNA, 15 bp, Homo sapiens
cccgtgtggatttct

SEQ ID NO: 1512997 - DNA, 15 bp, Homo sapiens
ccgtgtggatttcta

SEQ ID NO: 1512998 - DNA, 15 bp, Homo sapiens
cgtgtggatttctat

SEQ ID NO: 1512999 - DNA, 15 bp, Homo sapiens
gtgtggatttctatt

SEQ ID NO: 1513000 - DNA, 15 bp, Homo sapiens
tgtggatttctattt

SEQ ID NO: 1513001 - DNA, 15 bp, Homo sapiens
gtggatttctatttt

SEQ ID NO: 1513002 - DNA, 15 bp, Homo sapiens
tggatttctattttg

SEQ ID NO: 1513003 - DNA, 15 bp, Homo sapiens
ggatttctattttga

SEQ ID NO: 1513004 - DNA, 15 bp, Homo sapiens
gatttctattttgaa

SEQ ID NO: 1513005 - DNA, 15 bp, Homo sapiens
atttctattttgaag

SEQ ID NO: 1513006 - DNA, 15 bp, Homo sapiens
tttctattttgaagt

SEQ ID NO: 1513007 - DNA, 15 bp, Homo sapiens
ttctattttgaagta

SEQ ID NO: 1513008 - DNA, 15 bp, Homo sapiens
tctattttgaagtaa

SEQ ID NO: 1513009 - DNA, 15 bp, Homo sapiens
ctattttgaagtaat

SEQ ID NO: 1513010 - DNA, 15 bp, Homo sapiens
tattttgaagtaata

SEQ ID NO: 1513011 - DNA, 15 bp, Homo sapiens
attttgaagtaatat

SEQ ID NO: 1513012 - DNA, 15 bp, Homo sapiens
ttttgaagtaatatc

SEQ ID NO: 1513013 - DNA, 15 bp, Homo sapiens
tttgaagtaatatct

SEQ ID NO: 1513014 - DNA, 15 bp, Homo sapiens
ttgaagtaatatcta

SEQ ID NO: 1513015 - DNA, 15 bp, Homo sapiens
tgaagtaatatctaa

SEQ ID NO: 1513016 - DNA, 15 bp, Homo sapiens
gaagtaatatctaat

SEQ ID NO: 1513017 - DNA, 15 bp, Homo sapiens
aagtaatatctaatt

SEQ ID NO: 1513018 - DNA, 15 bp, Homo sapiens
agtaatatctaattt

SEQ ID NO: 1513019 - DNA, 15 bp, Homo sapiens
gtaatatctaatttt

SEQ ID NO: 1513020 - DNA, 15 bp, Homo sapiens
taatatctaattttg

SEQ ID NO: 1513021 - DNA, 15 bp, Homo sapiens
aatatctaattttga

SEQ ID NO: 1513022 - DNA, 15 bp, Homo sapiens
atatctaattttgag

SEQ ID NO: 1513023 - DNA, 15 bp, Homo sapiens
tatctaattttgagt

SEQ ID NO: 1513024 - DNA, 15 bp, Homo sapiens
atctaattttgagta

SEQ ID NO: 1513025 - DNA, 15 bp, Homo sapiens
tctaattttgagtaa

SEQ ID NO: 1513026 - DNA, 15 bp, Homo sapiens
ctaattttgagtaat

SEQ ID NO: 1513027 - DNA, 15 bp, Homo sapiens
taattttgagtaatt

SEQ ID NO: 1513028 - DNA, 15 bp, Homo sapiens
aattttgagtaattt

SEQ ID NO: 1513029 - DNA, 15 bp, Homo sapiens
attttgagtaattta

SEQ ID NO: 1513030 - DNA, 15 bp, Homo sapiens
ttttgagtaatttaa

SEQ ID NO: 1513031 - DNA, 15 bp, Homo sapiens
tttgagtaatttaat

SEQ ID NO: 1513032 - DNA, 15 bp, Homo sapiens
ttgagtaatttaatt

SEQ ID NO: 1513033 - DNA, 15 bp, Homo sapiens
tgagtaatttaatta

SEQ ID NO: 1513034 - DNA, 15 bp, Homo sapiens
gagtaatttaattaa

SEQ ID NO: 1513035 - DNA, 15 bp, Homo sapiens
agtaatttaattaaa

SEQ ID NO: 1513036 - DNA, 15 bp, Homo sapiens
gtaatttaattaaaa

SEQ ID NO: 1513037 - DNA, 15 bp, Homo sapiens
taatttaattaaaat

SEQ ID NO: 1513038 - DNA, 15 bp, Homo sapiens
aatttaattaaaatg

SEQ ID NO: 1513039 - DNA, 15 bp, Homo sapiens
atttaattaaaatgt

SEQ ID NO: 1513040 - DNA, 15 bp, Homo sapiens
tttaattaaaatgtt

SEQ ID NO: 1513041 - DNA, 15 bp, Homo sapiens
ttaattaaaatgttt

SEQ ID NO: 1513042 - DNA, 15 bp, Homo sapiens
taattaaaatgtttt

SEQ ID NO: 1513043 - DNA, 15 bp, Homo sapiens
aattaaaatgttttc

SEQ ID NO: 1513044 - DNA, 15 bp, Homo sapiens
attaaaatgttttca

SEQ ID NO: 1513045 - DNA, 15 bp, Homo sapiens
ttaaaatgttttcac

SEQ ID NO: 1513046 - DNA, 15 bp, Homo sapiens
taaaatgttttcact

SEQ ID NO: 1513047 - DNA, 15 bp, Homo sapiens
aaaatgttttcacta

SEQ ID NO: 1513048 - DNA, 15 bp, Homo sapiens
aaatgttttcactat

SEQ ID NO: 1513049 - DNA, 15 bp, Homo sapiens
aatgttttcactatg

SEQ ID NO: 1513050 - DNA, 15 bp, Homo sapiens
atgttttcactatgt

SEQ ID NO: 1513051 - DNA, 15 bp, Homo sapiens
tgttttcactatgtg

SEQ ID NO: 1513052 - DNA, 15 bp, Homo sapiens
gttttcactatgtgt

SEQ ID NO: 1513053 - DNA, 15 bp, Homo sapiens
ttttcactatgtgtt

SEQ ID NO: 1513054 - DNA, 15 bp, Homo sapiens
tttcactatgtgttc

SEQ ID NO: 1513055 - DNA, 15 bp, Homo sapiens
ttcactatgtgttca

SEQ ID NO: 1513056 - DNA, 15 bp, Homo sapiens
tcactatgtgttcag

SEQ ID NO: 1513057 - DNA, 15 bp, Homo sapiens
cactatgtgttcagt

SEQ ID NO: 1513058 - DNA, 15 bp, Homo sapiens
actatgtgttcagta

SEQ ID NO: 1513059 - DNA, 15 bp, Homo sapiens
ctatgtgttcagtat

SEQ ID NO: 1513060 - DNA, 15 bp, Homo sapiens
tatgtgttcagtatg

SEQ ID NO: 1513061 - DNA, 15 bp, Homo sapiens
atgtgttcagtatgt

SEQ ID NO: 1513062 - DNA, 15 bp, Homo sapiens
tgtgttcagtatgtt

SEQ ID NO: 1513063 - DNA, 15 bp, Homo sapiens
gtgttcagtatgttt

SEQ ID NO: 1513064 - DNA, 15 bp, Homo sapiens
tgttcagtatgtttc

SEQ ID NO: 1513065 - DNA, 15 bp, Homo sapiens
gttcagtatgtttct

SEQ ID NO: 1513066 - DNA, 15 bp, Homo sapiens
ttcagtatgtttctg

SEQ ID NO: 1513067 - DNA, 15 bp, Homo sapiens
tcagtatgtttctgt

SEQ ID NO: 1513068 - DNA, 15 bp, Homo sapiens
cagtatgtttctgtt

SEQ ID NO: 1513069 - DNA, 15 bp, Homo sapiens
agtatgtttctgttg

SEQ ID NO: 1513070 - DNA, 15 bp, Homo sapiens
gtatgtttctgttgg

SEQ ID NO: 1513071 - DNA, 15 bp, Homo sapiens
tatgtttctgttggt

SEQ ID NO: 1513072 - DNA, 15 bp, Homo sapiens
atgtttctgttggtc

SEQ ID NO: 1513073 - DNA, 15 bp, Homo sapiens
tgtttctgttggtca

SEQ ID NO: 1513074 - DNA, 15 bp, Homo sapiens
gtttctgttggtcat

SEQ ID NO: 1513075 - DNA, 15 bp, Homo sapiens
tttctgttggtcata

SEQ ID NO: 1513076 - DNA, 15 bp, Homo sapiens
ttctgttggtcataa

SEQ ID NO: 1513077 - DNA, 15 bp, Homo sapiens
tctgttggtcataaa

SEQ ID NO: 1513078 - DNA, 15 bp, Homo sapiens
ctgttggtcataaat

SEQ ID NO: 1513079 - DNA, 15 bp, Homo sapiens
tgttggtcataaatt

SEQ ID NO: 1513080 - DNA, 15 bp, Homo sapiens
gttggtcataaattt

SEQ ID NO: 1513081 - DNA, 15 bp, Homo sapiens
ttggtcataaatttt

SEQ ID NO: 1513082 - DNA, 15 bp, Homo sapiens
tggtcataaattttt

SEQ ID NO: 1513083 - DNA, 15 bp, Homo sapiens
ggtcataaatttttt

SEQ ID NO: 1513084 - DNA, 15 bp, Homo sapiens
gtcataaattttttc

SEQ ID NO: 1513085 - DNA, 15 bp, Homo sapiens
tcataaattttttca

SEQ ID NO: 1513086 - DNA, 15 bp, Homo sapiens
cataaattttttcac

SEQ ID NO: 1513087 - DNA, 15 bp, Homo sapiens
ataaattttttcaca

SEQ ID NO: 1513088 - DNA, 15 bp, Homo sapiens
taaattttttcacat

SEQ ID NO: 1513089 - DNA, 15 bp, Homo sapiens
aaattttttcacata

SEQ ID NO: 1513090 - DNA, 15 bp, Homo sapiens
aattttttcacatag

SEQ ID NO: 1513091 - DNA, 15 bp, Homo sapiens
attttttcacataga

SEQ ID NO: 1513092 - DNA, 15 bp, Homo sapiens
ttttttcacatagat

SEQ ID NO: 1513093 - DNA, 15 bp, Homo sapiens
tttttcacatagatt

SEQ ID NO: 1513094 - DNA, 15 bp, Homo sapiens
ttttcacatagatta

SEQ ID NO: 1513095 - DNA, 15 bp, Homo sapiens
tttcacatagattat

SEQ ID NO: 1513096 - DNA, 15 bp, Homo sapiens
ttcacatagattatt

SEQ ID NO: 1513097 - DNA, 15 bp, Homo sapiens
tcacatagattattt

SEQ ID NO: 1513098 - DNA, 15 bp, Homo sapiens
cacatagattattta

SEQ ID NO: 1513099 - DNA, 15 bp, Homo sapiens
acatagattatttat

SEQ ID NO: 1513100 - DNA, 15 bp, Homo sapiens
catagattatttatt

SEQ ID NO: 1513101 - DNA, 15 bp, Homo sapiens
atagattatttattt

SEQ ID NO: 1513102 - DNA, 15 bp, Homo sapiens
tagattatttatttt

SEQ ID NO: 1513103 - DNA, 15 bp, Homo sapiens
agattatttatttta

SEQ ID NO: 1513104 - DNA, 15 bp, Homo sapiens
gattatttattttaa

SEQ ID NO: 1513105 - DNA, 15 bp, Homo sapiens
attatttattttaaa

SEQ ID NO: 1513106 - DNA, 15 bp, Homo sapiens
ttatttattttaaaa

SEQ ID NO: 1513107 - DNA, 15 bp, Homo sapiens
tatttattttaaaat

SEQ ID NO: 1513108 - DNA, 15 bp, Homo sapiens
tttattttaaaataa

SEQ ID NO: 1513109 - DNA, 15 bp, Homo sapiens
ttattttaaaataac

SEQ ID NO: 1513110 - DNA, 15 bp, Homo sapiens
tattttaaaataact

SEQ ID NO: 1513111 - DNA, 15 bp, Homo sapiens
attttaaaataactg

SEQ ID NO: 1513112 - DNA, 15 bp, Homo sapiens
ttttaaaataactga

SEQ ID NO: 1513113 - DNA, 15 bp, Homo sapiens
tttaaaataactgaa

SEQ ID NO: 1513114 - DNA, 15 bp, Homo sapiens
ttaaaataactgaat

SEQ ID NO: 1513115 - DNA, 15 bp, Homo sapiens
taaaataactgaata

SEQ ID NO: 1513116 - DNA, 15 bp, Homo sapiens
aaaataactgaatag

SEQ ID NO: 1513117 - DNA, 15 bp, Homo sapiens
aaataactgaatagg

SEQ ID NO: 1513118 - DNA, 15 bp, Homo sapiens
aataactgaataggg

SEQ ID NO: 1513119 - DNA, 15 bp, Homo sapiens
ataactgaataggga

SEQ ID NO: 1513120 - DNA, 15 bp, Homo sapiens
taactgaatagggag

SEQ ID NO: 1513121 - DNA, 15 bp, Homo sapiens
aactgaatagggaga

SEQ ID NO: 1513122 - DNA, 15 bp, Homo sapiens
actgaatagggagaa

SEQ ID NO: 1513123 - DNA, 15 bp, Homo sapiens
ctgaatagggagaac

SEQ ID NO: 1513124 - DNA, 15 bp, Homo sapiens
tgaatagggagaact

SEQ ID NO: 1513125 - DNA, 15 bp, Homo sapiens
gaatagggagaactt

SEQ ID NO: 1513126 - DNA, 15 bp, Homo sapiens
aatagggagaacttc

SEQ ID NO: 1513127 - DNA, 15 bp, Homo sapiens
atagggagaacttct

SEQ ID NO: 1513128 - DNA, 15 bp, Homo sapiens
tagggagaacttctt

SEQ ID NO: 1513129 - DNA, 15 bp, Homo sapiens
agggagaacttctta

SEQ ID NO: 1513130 - DNA, 15 bp, Homo sapiens
gggagaacttcttat

SEQ ID NO: 1513131 - DNA, 15 bp, Homo sapiens
ggagaacttcttatt

SEQ ID NO: 1513132 - DNA, 15 bp, Homo sapiens
gagaacttcttattc

SEQ ID NO: 1513133 - DNA, 15 bp, Homo sapiens
agaacttcttattct

SEQ ID NO: 1513134 - DNA, 15 bp, Homo sapiens
gaacttcttattctt

SEQ ID NO: 1513135 - DNA, 15 bp, Homo sapiens
aacttcttattctta

SEQ ID NO: 1513136 - DNA, 15 bp, Homo sapiens
acttcttattcttac

SEQ ID NO: 1513137 - DNA, 15 bp, Homo sapiens
cttcttattcttact

SEQ ID NO: 1513138 - DNA, 15 bp, Homo sapiens
ttcttattcttactt

SEQ ID NO: 1513139 - DNA, 15 bp, Homo sapiens
tcttattcttacttt

SEQ ID NO: 1513140 - DNA, 15 bp, Homo sapiens
cttattcttacttta

SEQ ID NO: 1513141 - DNA, 15 bp, Homo sapiens
ttattcttactttaa

SEQ ID NO: 1513142 - DNA, 15 bp, Homo sapiens
tattcttactttaaa

SEQ ID NO: 1513143 - DNA, 15 bp, Homo sapiens
attcttactttaaaa

SEQ ID NO: 1513144 - DNA, 15 bp, Homo sapiens
ttcttactttaaaaa

SEQ ID NO: 1513145 - DNA, 15 bp, Homo sapiens
tcttactttaaaaat

SEQ ID NO: 1513146 - DNA, 15 bp, Homo sapiens
cttactttaaaaatt

SEQ ID NO: 1513147 - DNA, 15 bp, Homo sapiens
ttactttaaaaattg

SEQ ID NO: 1513148 - DNA, 15 bp, Homo sapiens
tactttaaaaattgt

SEQ ID NO: 1513149 - DNA, 15 bp, Homo sapiens
actttaaaaattgtg

SEQ ID NO: 1513150 - DNA, 15 bp, Homo sapiens
ctttaaaaattgtga

SEQ ID NO: 1513151 - DNA, 15 bp, Homo sapiens
ttaaaaattgtgatt

SEQ ID NO: 1513152 - DNA, 15 bp, Homo sapiens
taaaaattgtgatta

SEQ ID NO: 1513153 - DNA, 15 bp, Homo sapiens
aaaaattgtgattag

SEQ ID NO: 1513154 - DNA, 15 bp, Homo sapiens
aaaattgtgattaga

SEQ ID NO: 1513155 - DNA, 15 bp, Homo sapiens
aaattgtgattagaa

SEQ ID NO: 1513156 - DNA, 15 bp, Homo sapiens
aattgtgattagaag

SEQ ID NO: 1513157 - DNA, 15 bp, Homo sapiens
attgtgattagaagt

SEQ ID NO: 1513158 - DNA, 15 bp, Homo sapiens
ttgtgattagaagtg

SEQ ID NO: 1513159 - DNA, 15 bp, Homo sapiens
tgtgattagaagtga

SEQ ID NO: 1513160 - DNA, 15 bp, Homo sapiens
gtgattagaagtgac

SEQ ID NO: 1513161 - DNA, 15 bp, Homo sapiens
tgattagaagtgact

SEQ ID NO: 1513162 - DNA, 15 bp, Homo sapiens
gattagaagtgactt

SEQ ID NO: 1513163 - DNA, 15 bp, Homo sapiens
attagaagtgacttt

SEQ ID NO: 1513164 - DNA, 15 bp, Homo sapiens
ttagaagtgactttt

SEQ ID NO: 1513165 - DNA, 15 bp, Homo sapiens
tagaagtgactttta

SEQ ID NO: 1513166 - DNA, 15 bp, Homo sapiens
agaagtgacttttat

SEQ ID NO: 1513167 - DNA, 15 bp, Homo sapiens
gaagtgacttttatt

SEQ ID NO: 1513168 - DNA, 15 bp, Homo sapiens
aagtgacttttattt

SEQ ID NO: 1513169 - DNA, 15 bp, Homo sapiens
agtgacttttattta

SEQ ID NO: 1513170 - DNA, 15 bp, Homo sapiens
gtgacttttatttat

SEQ ID NO: 1513171 - DNA, 15 bp, Homo sapiens
tgacttttatttatt

SEQ ID NO: 1513172 - DNA, 15 bp, Homo sapiens
gacttttatttattt

SEQ ID NO: 1513173 - DNA, 15 bp, Homo sapiens
acttttatttatttc

SEQ ID NO: 1513174 - DNA, 15 bp, Homo sapiens
cttttatttatttct

SEQ ID NO: 1513175 - DNA, 15 bp, Homo sapiens
ttttatttatttctc

SEQ ID NO: 1513176 - DNA, 15 bp, Homo sapiens
tttatttatttctca

SEQ ID NO: 1513177 - DNA, 15 bp, Homo sapiens
ttatttatttctcag

SEQ ID NO: 1513178 - DNA, 15 bp, Homo sapiens
tatttatttctcagt

SEQ ID NO: 1513179 - DNA, 15 bp, Homo sapiens
atttatttctcagtt

SEQ ID NO: 1513180 - DNA, 15 bp, Homo sapiens
tttatttctcagttt

SEQ ID NO: 1513181 - DNA, 15 bp, Homo sapiens
ttatttctcagtttt

SEQ ID NO: 1513182 - DNA, 15 bp, Homo sapiens
tatttctcagtttta

SEQ ID NO: 1513183 - DNA, 15 bp, Homo sapiens
atttctcagttttat

SEQ ID NO: 1513184 - DNA, 15 bp, Homo sapiens
tttctcagttttatg

SEQ ID NO: 1513185 - DNA, 15 bp, Homo sapiens
ttctcagttttatgt

SEQ ID NO: 1513186 - DNA, 15 bp, Homo sapiens
tctcagttttatgtg

SEQ ID NO: 1513187 - DNA, 15 bp, Homo sapiens
ctcagttttatgtga

SEQ ID NO: 1513188 - DNA, 15 bp, Homo sapiens
tcagttttatgtgat

SEQ ID NO: 1513189 - DNA, 15 bp, Homo sapiens
cagttttatgtgata

SEQ ID NO: 1513190 - DNA, 15 bp, Homo sapiens
agttttatgtgatag

SEQ ID NO: 1513191 - DNA, 15 bp, Homo sapiens
gttttatgtgataga

SEQ ID NO: 1513192 - DNA, 15 bp, Homo sapiens
ttttatgtgatagaa

SEQ ID NO: 1513193 - DNA, 15 bp, Homo sapiens
tttatgtgatagaat

SEQ ID NO: 1513194 - DNA, 15 bp, Homo sapiens
ttatgtgatagaata

SEQ ID NO: 1513195 - DNA, 15 bp, Homo sapiens
tatgtgatagaatat

SEQ ID NO: 1513196 - DNA, 15 bp, Homo sapiens
atgtgatagaatatg

SEQ ID NO: 1513197 - DNA, 15 bp, Homo sapiens
tgtgatagaatatgc

SEQ ID NO: 1513198 - DNA, 15 bp, Homo sapiens
gtgatagaatatgca

SEQ ID NO: 1513199 - DNA, 15 bp, Homo sapiens
tgatagaatatgcag

SEQ ID NO: 1513200 - DNA, 15 bp, Homo sapiens
gatagaatatgcagc

SEQ ID NO: 1513201 - DNA, 15 bp, Homo sapiens
atagaatatgcagca

SEQ ID NO: 1513202 - DNA, 15 bp, Homo sapiens
tagaatatgcagcat

SEQ ID NO: 1513203 - DNA, 15 bp, Homo sapiens
agaatatgcagcatg

SEQ ID NO: 1513204 - DNA, 15 bp, Homo sapiens
gaatatgcagcatgt

SEQ ID NO: 1513205 - DNA, 15 bp, Homo sapiens
aatatgcagcatgtg

SEQ ID NO: 1513206 - DNA, 15 bp, Homo sapiens
atatgcagcatgtga

SEQ ID NO: 1513207 - DNA, 15 bp, Homo sapiens
tatgcagcatgtgat

SEQ ID NO: 1513208 - DNA, 15 bp, Homo sapiens
atgcagcatgtgatg

SEQ ID NO: 1513209 - DNA, 15 bp, Homo sapiens
tgcagcatgtgatgc

SEQ ID NO: 1513210 - DNA, 15 bp, Homo sapiens
gcagcatgtgatgca

SEQ ID NO: 1513211 - DNA, 15 bp, Homo sapiens
cagcatgtgatgcaa

SEQ ID NO: 1513212 - DNA, 15 bp, Homo sapiens
agcatgtgatgcaac

SEQ ID NO: 1513213 - DNA, 15 bp, Homo sapiens
gcatgtgatgcaact

SEQ ID NO: 1513214 - DNA, 15 bp, Homo sapiens
catgtgatgcaactt

SEQ ID NO: 1513215 - DNA, 15 bp, Homo sapiens
atgtgatgcaactta

SEQ ID NO: 1513216 - DNA, 15 bp, Homo sapiens
tgtgatgcaacttac

SEQ ID NO: 1513217 - DNA, 15 bp, Homo sapiens
gtgatgcaacttaca

SEQ ID NO: 1513218 - DNA, 15 bp, Homo sapiens
tgatgcaacttacaa

SEQ ID NO: 1513219 - DNA, 15 bp, Homo sapiens
gatgcaacttacaat

SEQ ID NO: 1513220 - DNA, 15 bp, Homo sapiens
atgcaacttacaatg

SEQ ID NO: 1513221 - DNA, 15 bp, Homo sapiens
tgcaacttacaatga

SEQ ID NO: 1513222 - DNA, 15 bp, Homo sapiens
gcaacttacaatgaa

SEQ ID NO: 1513223 - DNA, 15 bp, Homo sapiens
caacttacaatgaaa

SEQ ID NO: 1513224 - DNA, 15 bp, Homo sapiens
aacttacaatgaaat

SEQ ID NO: 1513225 - DNA, 15 bp, Homo sapiens
acttacaatgaaatt

SEQ ID NO: 1513226 - DNA, 15 bp, Homo sapiens
cttacaatgaaattg

SEQ ID NO: 1513227 - DNA, 15 bp, Homo sapiens
ttacaatgaaattgt

SEQ ID NO: 1513228 - DNA, 15 bp, Homo sapiens
tacaatgaaattgtc

SEQ ID NO: 1513229 - DNA, 15 bp, Homo sapiens
acaatgaaattgtca

SEQ ID NO: 1513230 - DNA, 15 bp, Homo sapiens
caatgaaattgtcac

SEQ ID NO: 1513231 - DNA, 15 bp, Homo sapiens
aatgaaattgtcaca

SEQ ID NO: 1513232 - DNA, 15 bp, Homo sapiens
atgaaattgtcacaa

SEQ ID NO: 1513233 - DNA, 15 bp, Homo sapiens
tgaaattgtcacaat

SEQ ID NO: 1513234 - DNA, 15 bp, Homo sapiens
gaaattgtcacaatt

SEQ ID NO: 1513235 - DNA, 15 bp, Homo sapiens
aaattgtcacaattg

SEQ ID NO: 1513236 - DNA, 15 bp, Homo sapiens
aattgtcacaattga

SEQ ID NO: 1513237 - DNA, 15 bp, Homo sapiens
attgtcacaattgaa

SEQ ID NO: 1513238 - DNA, 15 bp, Homo sapiens
ttgtcacaattgaac

SEQ ID NO: 1513239 - DNA, 15 bp, Homo sapiens
tgtcacaattgaacg

SEQ ID NO: 1513240 - DNA, 15 bp, Homo sapiens
gtcacaattgaacgt

SEQ ID NO: 1513241 - DNA, 15 bp, Homo sapiens
tcacaattgaacgtc

SEQ ID NO: 1513242 - DNA, 15 bp, Homo sapiens
cacaattgaacgtct

SEQ ID NO: 1513243 - DNA, 15 bp, Homo sapiens
acaattgaacgtcta

SEQ ID NO: 1513244 - DNA, 15 bp, Homo sapiens
caattgaacgtctaa

SEQ ID NO: 1513245 - DNA, 15 bp, Homo sapiens
aattgaacgtctaag

SEQ ID NO: 1513246 - DNA, 15 bp, Homo sapiens
attgaacgtctaaga

SEQ ID NO: 1513247 - DNA, 15 bp, Homo sapiens
ttgaacgtctaagat

SEQ ID NO: 1513248 - DNA, 15 bp, Homo sapiens
tgaacgtctaagatc

SEQ ID NO: 1513249 - DNA, 15 bp, Homo sapiens
gaacgtctaagatct

SEQ ID NO: 1513250 - DNA, 15 bp, Homo sapiens
aacgtctaagatctg

SEQ ID NO: 1513251 - DNA, 15 bp, Homo sapiens
acgtctaagatctgt

SEQ ID NO: 1513252 - DNA, 15 bp, Homo sapiens
cgtctaagatctgtt

SEQ ID NO: 1513253 - DNA, 15 bp, Homo sapiens
gtctaagatctgtta

SEQ ID NO: 1513254 - DNA, 15 bp, Homo sapiens
tctaagatctgttaa

SEQ ID NO: 1513255 - DNA, 15 bp, Homo sapiens
ctaagatctgttaat

SEQ ID NO: 1513256 - DNA, 15 bp, Homo sapiens
taagatctgttaatc

SEQ ID NO: 1513257 - DNA, 15 bp, Homo sapiens
aagatctgttaatcc

SEQ ID NO: 1513258 - DNA, 15 bp, Homo sapiens
agatctgttaatccc

SEQ ID NO: 1513259 - DNA, 15 bp, Homo sapiens
gatctgttaatccca

SEQ ID NO: 1513260 - DNA, 15 bp, Homo sapiens
atctgttaatcccaa

SEQ ID NO: 1513261 - DNA, 15 bp, Homo sapiens
tctgttaatcccaac

SEQ ID NO: 1513262 - DNA, 15 bp, Homo sapiens
ctgttaatcccaaca

SEQ ID NO: 1513263 - DNA, 15 bp, Homo sapiens
tgttaatcccaacaa

SEQ ID NO: 1513264 - DNA, 15 bp, Homo sapiens
gttaatcccaacaaa

SEQ ID NO: 1513265 - DNA, 15 bp, Homo sapiens
ttaatcccaacaaac

SEQ ID NO: 1513266 - DNA, 15 bp, Homo sapiens
taatcccaacaaacc

SEQ ID NO: 1513267 - DNA, 15 bp, Homo sapiens
aatcccaacaaacct

SEQ ID NO: 1513268 - DNA, 15 bp, Homo sapiens
atcccaacaaacctg

SEQ ID NO: 1513269 - DNA, 15 bp, Homo sapiens
tcccaacaaacctgc

SEQ ID NO: 1513270 - DNA, 15 bp, Homo sapiens
cccaacaaacctgcc

SEQ ID NO: 1513271 - DNA, 15 bp, Homo sapiens
ccaacaaacctgcca

SEQ ID NO: 1513272 - DNA, 15 bp, Homo sapiens
caacaaacctgccac

SEQ ID NO: 1513273 - DNA, 15 bp, Homo sapiens
aacaaacctgccaca

SEQ ID NO: 1513274 - DNA, 15 bp, Homo sapiens
acaaacctgccacaa

SEQ ID NO: 1513275 - DNA, 15 bp, Homo sapiens
caaacctgccacaaa

SEQ ID NO: 1513276 - DNA, 15 bp, Homo sapiens
aaacctgccacaaaa

SEQ ID NO: 1513277 - DNA, 15 bp, Homo sapiens
aacctgccacaaaag

SEQ ID NO: 1513278 - DNA, 15 bp, Homo sapiens
acctgccacaaaaga

SEQ ID NO: 1513279 - DNA, 15 bp, Homo sapiens
cctgccacaaaagat

SEQ ID NO: 1513280 - DNA, 15 bp, Homo sapiens
ctgccacaaaagata

SEQ ID NO: 1513281 - DNA, 15 bp, Homo sapiens
tgccacaaaagatac

SEQ ID NO: 1513282 - DNA, 15 bp, Homo sapiens
gccacaaaagatact

SEQ ID NO: 1513283 - DNA, 15 bp, Homo sapiens
ccacaaaagatactt

SEQ ID NO: 1513284 - DNA, 15 bp, Homo sapiens
cacaaaagatacttt

SEQ ID NO: 1513285 - DNA, 15 bp, Homo sapiens
acaaaagatactttc

SEQ ID NO: 1513286 - DNA, 15 bp, Homo sapiens
caaaagatactttcc

SEQ ID NO: 1513287 - DNA, 15 bp, Homo sapiens
aaaagatactttcca

SEQ ID NO: 1513288 - DNA, 15 bp, Homo sapiens
aaagatactttccat

SEQ ID NO: 1513289 - DNA, 15 bp, Homo sapiens
aagatactttccata

SEQ ID NO: 1513290 - DNA, 15 bp, Homo sapiens
agatactttccataa

SEQ ID NO: 1513291 - DNA, 15 bp, Homo sapiens
gatactttccataag

SEQ ID NO: 1513292 - DNA, 15 bp, Homo sapiens
atactttccataaga

SEQ ID NO: 1513293 - DNA, 15 bp, Homo sapiens
tactttccataagat

SEQ ID NO: 1513294 - DNA, 15 bp, Homo sapiens
actttccataagatc

SEQ ID NO: 1513295 - DNA, 15 bp, Homo sapiens
ctttccataagatca

SEQ ID NO: 1513296 - DNA, 15 bp, Homo sapiens
tttccataagatcaa

SEQ ID NO: 1513297 - DNA, 15 bp, Homo sapiens
ttccataagatcaag

SEQ ID NO: 1513298 - DNA, 15 bp, Homo sapiens
tccataagatcaagc

SEQ ID NO: 1513299 - DNA, 15 bp, Homo sapiens
ccataagatcaagct

SEQ ID NO: 1513300 - DNA, 15 bp, Homo sapiens
cataagatcaagctg

SEQ ID NO: 1513301 - DNA, 15 bp, Homo sapiens
ataagatcaagctgg

SEQ ID NO: 1513302 - DNA, 15 bp, Homo sapiens
taagatcaagctgga

SEQ ID NO: 1513303 - DNA, 15 bp, Homo sapiens
aagatcaagctggat

SEQ ID NO: 1513304 - DNA, 15 bp, Homo sapiens
agatcaagctggatg

SEQ ID NO: 1513305 - DNA, 15 bp, Homo sapiens
gatcaagctggatgt

SEQ ID NO: 1513306 - DNA, 15 bp, Homo sapiens
atcaagctggatgtg

SEQ ID NO: 1513307 - DNA, 15 bp, Homo sapiens
tcaagctggatgtgc

SEQ ID NO: 1513308 - DNA, 15 bp, Homo sapiens
caagctggatgtgcc

SEQ ID NO: 1513309 - DNA, 15 bp, Homo sapiens
aagctggatgtgcca

SEQ ID NO: 1513310 - DNA, 15 bp, Homo sapiens
agctggatgtgccag

SEQ ID NO: 1513311 - DNA, 15 bp, Homo sapiens
gctggatgtgccaga

SEQ ID NO: 1513312 - DNA, 15 bp, Homo sapiens
ctggatgtgccagaa

SEQ ID NO: 1513313 - DNA, 15 bp, Homo sapiens
tggatgtgccagaag

SEQ ID NO: 1513314 - DNA, 15 bp, Homo sapiens
ggatgtgccagaaga

SEQ ID NO: 1513315 - DNA, 15 bp, Homo sapiens
gatgtgccagaagac

SEQ ID NO: 1513316 - DNA, 15 bp, Homo sapiens
atgtgccagaagact

SEQ ID NO: 1513317 - DNA, 15 bp, Homo sapiens
tgtgccagaagactt

SEQ ID NO: 1513318 - DNA, 15 bp, Homo sapiens
gtgccagaagactta

SEQ ID NO: 1513319 - DNA, 15 bp, Homo sapiens
tgccagaagacttac

SEQ ID NO: 1513320 - DNA, 15 bp, Homo sapiens
gccagaagacttacg

SEQ ID NO: 1513321 - DNA, 15 bp, Homo sapiens
ccagaagacttacgg

SEQ ID NO: 1513322 - DNA, 15 bp, Homo sapiens
cagaagacttacggc

SEQ ID NO: 1513323 - DNA, 15 bp, Homo sapiens
agaagacttacggca

SEQ ID NO: 1513324 - DNA, 15 bp, Homo sapiens
gaagacttacggcaa

SEQ ID NO: 1513325 - DNA, 15 bp, Homo sapiens
aagacttacggcaaa

SEQ ID NO: 1513326 - DNA, 15 bp, Homo sapiens
agacttacggcaaat

SEQ ID NO: 1513327 - DNA, 15 bp, Homo sapiens
gacttacggcaaatg

SEQ ID NO: 1513328 - DNA, 15 bp, Homo sapiens
acttacggcaaatgt

SEQ ID NO: 1513329 - DNA, 15 bp, Homo sapiens
cttacggcaaatgta

SEQ ID NO: 1513330 - DNA, 15 bp, Homo sapiens
ttacggcaaatgtaa

SEQ ID NO: 1513331 - DNA, 15 bp, Homo sapiens
tacggcaaatgtaag

SEQ ID NO: 1513332 - DNA, 15 bp, Homo sapiens
acggcaaatgtaagt

SEQ ID NO: 1513333 - DNA, 15 bp, Homo sapiens
cggcaaatgtaagtt

SEQ ID NO: 1513334 - DNA, 15 bp, Homo sapiens
ggcaaatgtaagttg

SEQ ID NO: 1513335 - DNA, 15 bp, Homo sapiens
gcaaatgtaagttga

SEQ ID NO: 1513336 - DNA, 15 bp, Homo sapiens
caaatgtaagttgat

SEQ ID NO: 1513337 - DNA, 15 bp, Homo sapiens
aaatgtaagttgata

SEQ ID NO: 1513338 - DNA, 15 bp, Homo sapiens
aatgtaagttgatac

SEQ ID NO: 1513339 - DNA, 15 bp, Homo sapiens
atgtaagttgataca

SEQ ID NO: 1513340 - DNA, 15 bp, Homo sapiens
tgtaagttgatacac

SEQ ID NO: 1513341 - DNA, 15 bp, Homo sapiens
gtaagttgatacaca

SEQ ID NO: 1513342 - DNA, 15 bp, Homo sapiens
taagttgatacacaa

SEQ ID NO: 1513343 - DNA, 15 bp, Homo sapiens
aagttgatacacaag

SEQ ID NO: 1513344 - DNA, 15 bp, Homo sapiens
agttgatacacaaga

SEQ ID NO: 1513345 - DNA, 15 bp, Homo sapiens
gttgatacacaagaa

SEQ ID NO: 1513346 - DNA, 15 bp, Homo sapiens
ttgatacacaagaaa

SEQ ID NO: 1513347 - DNA, 15 bp, Homo sapiens
tgatacacaagaaat

SEQ ID NO: 1513348 - DNA, 15 bp, Homo sapiens
gatacacaagaaatg

SEQ ID NO: 1513349 - DNA, 15 bp, Homo sapiens
atacacaagaaatgc

SEQ ID NO: 1513350 - DNA, 15 bp, Homo sapiens
tacacaagaaatgct

SEQ ID NO: 1513351 - DNA, 15 bp, Homo sapiens
acacaagaaatgctg

SEQ ID NO: 1513352 - DNA, 15 bp, Homo sapiens
cacaagaaatgctga

SEQ ID NO: 1513353 - DNA, 15 bp, Homo sapiens
acaagaaatgctgag

SEQ ID NO: 1513354 - DNA, 15 bp, Homo sapiens
caagaaatgctgaga

SEQ ID NO: 1513355 - DNA, 15 bp, Homo sapiens
aagaaatgctgagaa

SEQ ID NO: 1513356 - DNA, 15 bp, Homo sapiens
agaaatgctgagaac

SEQ ID NO: 1513357 - DNA, 15 bp, Homo sapiens
gaaatgctgagaact

SEQ ID NO: 1513358 - DNA, 15 bp, Homo sapiens
aaatgctgagaactt

SEQ ID NO: 1513359 - DNA, 15 bp, Homo sapiens
aatgctgagaacttg

SEQ ID NO: 1513360 - DNA, 15 bp, Homo sapiens
atgctgagaacttgg

SEQ ID NO: 1513361 - DNA, 15 bp, Homo sapiens
tgctgagaacttgga

SEQ ID NO: 1513362 - DNA, 15 bp, Homo sapiens
gctgagaacttggaa

SEQ ID NO: 1513363 - DNA, 15 bp, Homo sapiens
tgagaacttggaagt

SEQ ID NO: 1513364 - DNA, 15 bp, Homo sapiens
gagaacttggaagtg

SEQ ID NO: 1513365 - DNA, 15 bp, Homo sapiens
agaacttggaagtga

SEQ ID NO: 1513366 - DNA, 15 bp, Homo sapiens
gaacttggaagtgat

SEQ ID NO: 1513367 - DNA, 15 bp, Homo sapiens
aacttggaagtgata

SEQ ID NO: 1513368 - DNA, 15 bp, Homo sapiens
acttggaagtgatat

SEQ ID NO: 1513369 - DNA, 15 bp, Homo sapiens
cttggaagtgatatg

SEQ ID NO: 1513370 - DNA, 15 bp, Homo sapiens
ttggaagtgatatgc

SEQ ID NO: 1513371 - DNA, 15 bp, Homo sapiens
tggaagtgatatgca

SEQ ID NO: 1513372 - DNA, 15 bp, Homo sapiens
ggaagtgatatgcaa

SEQ ID NO: 1513373 - DNA, 15 bp, Homo sapiens
gaagtgatatgcaat

SEQ ID NO: 1513374 - DNA, 15 bp, Homo sapiens
aagtgatatgcaatt

SEQ ID NO: 1513375 - DNA, 15 bp, Homo sapiens
agtgatatgcaatta

SEQ ID NO: 1513376 - DNA, 15 bp, Homo sapiens
gtgatatgcaattag

SEQ ID NO: 1513377 - DNA, 15 bp, Homo sapiens
tgatatgcaattagt

SEQ ID NO: 1513378 - DNA, 15 bp, Homo sapiens
gatatgcaattagtt

SEQ ID NO: 1513379 - DNA, 15 bp, Homo sapiens
atatgcaattagttt

SEQ ID NO: 1513380 - DNA, 15 bp, Homo sapiens
tatgcaattagttta

SEQ ID NO: 1513381 - DNA, 15 bp, Homo sapiens
atgcaattagtttag

SEQ ID NO: 1513382 - DNA, 15 bp, Homo sapiens
tgcaattagtttaga

SEQ ID NO: 1513383 - DNA, 15 bp, Homo sapiens
gcaattagtttagaa

SEQ ID NO: 1513384 - DNA, 15 bp, Homo sapiens
caattagtttagaag

SEQ ID NO: 1513385 - DNA, 15 bp, Homo sapiens
aattagtttagaaga

SEQ ID NO: 1513386 - DNA, 15 bp, Homo sapiens
attagtttagaagaa

SEQ ID NO: 1513387 - DNA, 15 bp, Homo sapiens
ttagtttagaagaat

SEQ ID NO: 1513388 - DNA, 15 bp, Homo sapiens
tagtttagaagaatt

SEQ ID NO: 1513389 - DNA, 15 bp, Homo sapiens
agtttagaagaattt

SEQ ID NO: 1513390 - DNA, 15 bp, Homo sapiens
gtttagaagaatttc

SEQ ID NO: 1513391 - DNA, 15 bp, Homo sapiens
tttagaagaatttct

SEQ ID NO: 1513392 - DNA, 15 bp, Homo sapiens
ttagaagaatttcta

SEQ ID NO: 1513393 - DNA, 15 bp, Homo sapiens
tagaagaatttctag

SEQ ID NO: 1513394 - DNA, 15 bp, Homo sapiens
agaagaatttctagt

SEQ ID NO: 1513395 - DNA, 15 bp, Homo sapiens
gaagaatttctagta

SEQ ID NO: 1513396 - DNA, 15 bp, Homo sapiens
aagaatttctagtag

SEQ ID NO: 1513397 - DNA, 15 bp, Homo sapiens
agaatttctagtagt

SEQ ID NO: 1513398 - DNA, 15 bp, Homo sapiens
gaatttctagtagtt

SEQ ID NO: 1513399 - DNA, 15 bp, Homo sapiens
ctagtagtttaaaat

SEQ ID NO: 1513400 - DNA, 15 bp, Homo sapiens
tagtagtttaaaatt

SEQ ID NO: 1513401 - DNA, 15 bp, Homo sapiens
agtagtttaaaattt

SEQ ID NO: 1513402 - DNA, 15 bp, Homo sapiens
gtagtttaaaatttt

SEQ ID NO: 1513403 - DNA, 15 bp, Homo sapiens
tagtttaaaattttt

SEQ ID NO: 1513404 - DNA, 15 bp, Homo sapiens
agtttaaaatttttt

SEQ ID NO: 1513405 - DNA, 15 bp, Homo sapiens
gtttaaaatttttta

SEQ ID NO: 1513406 - DNA, 15 bp, Homo sapiens
ttaaaattttttaaa

SEQ ID NO: 1513407 - DNA, 15 bp, Homo sapiens
taaaattttttaaac

SEQ ID NO: 1513408 - DNA, 15 bp, Homo sapiens
aaaattttttaaact

SEQ ID NO: 1513409 - DNA, 15 bp, Homo sapiens
aaattttttaaacta

SEQ ID NO: 1513410 - DNA, 15 bp, Homo sapiens
aattttttaaactac

SEQ ID NO: 1513411 - DNA, 15 bp, Homo sapiens
attttttaaactact

SEQ ID NO: 1513412 - DNA, 15 bp, Homo sapiens
ttttttaaactacta

SEQ ID NO: 1513413 - DNA, 15 bp, Homo sapiens
tttttaaactactag

SEQ ID NO: 1513414 - DNA, 15 bp, Homo sapiens
aactactagaaattg

SEQ ID NO: 1513415 - DNA, 15 bp, Homo sapiens
actactagaaattga

SEQ ID NO: 1513416 - DNA, 15 bp, Homo sapiens
ctactagaaattgat

SEQ ID NO: 1513417 - DNA, 15 bp, Homo sapiens
tactagaaattgatt

SEQ ID NO: 1513418 - DNA, 15 bp, Homo sapiens
actagaaattgattt

SEQ ID NO: 1513419 - DNA, 15 bp, Homo sapiens
ctagaaattgatttt

SEQ ID NO: 1513420 - DNA, 15 bp, Homo sapiens
tagaaattgatttta

SEQ ID NO: 1513421 - DNA, 15 bp, Homo sapiens
agaaattgattttaa

SEQ ID NO: 1513422 - DNA, 15 bp, Homo sapiens
gaaattgattttaaa

SEQ ID NO: 1513423 - DNA, 15 bp, Homo sapiens
aaattgattttaaat

SEQ ID NO: 1513424 - DNA, 15 bp, Homo sapiens
aattgattttaaatt

SEQ ID NO: 1513425 - DNA, 15 bp, Homo sapiens
attgattttaaattt

SEQ ID NO: 1513426 - DNA, 15 bp, Homo sapiens
ttgattttaaatttg

SEQ ID NO: 1513427 - DNA, 15 bp, Homo sapiens
tgattttaaatttgg

SEQ ID NO: 1513428 - DNA, 15 bp, Homo sapiens
gattttaaatttggt

SEQ ID NO: 1513429 - DNA, 15 bp, Homo sapiens
attttaaatttggtg

SEQ ID NO: 1513430 - DNA, 15 bp, Homo sapiens
ttttaaatttggtgg

SEQ ID NO: 1513431 - DNA, 15 bp, Homo sapiens
tttaaatttggtgga

SEQ ID NO: 1513432 - DNA, 15 bp, Homo sapiens
ttaaatttggtggac

SEQ ID NO: 1513433 - DNA, 15 bp, Homo sapiens
taaatttggtggact

SEQ ID NO: 1513434 - DNA, 15 bp, Homo sapiens
aaatttggtggactt

SEQ ID NO: 1513435 - DNA, 15 bp, Homo sapiens
aatttggtggacttt

SEQ ID NO: 1513436 - DNA, 15 bp, Homo sapiens
atttggtggactttg

SEQ ID NO: 1513437 - DNA, 15 bp, Homo sapiens
tttggtggactttgg

SEQ ID NO: 1513438 - DNA, 15 bp, Homo sapiens
ttggtggactttggc

SEQ ID NO: 1513439 - DNA, 15 bp, Homo sapiens
tggtggactttggca

SEQ ID NO: 1513440 - DNA, 15 bp, Homo sapiens
ggtggactttggcaa

SEQ ID NO: 1513441 - DNA, 15 bp, Homo sapiens
gtggactttggcaaa

SEQ ID NO: 1513442 - DNA, 15 bp, Homo sapiens
tggactttggcaaaa

SEQ ID NO: 1513443 - DNA, 15 bp, Homo sapiens
ggactttggcaaaaa

SEQ ID NO: 1513444 - DNA, 15 bp, Homo sapiens
gactttggcaaaaat

SEQ ID NO: 1513445 - DNA, 15 bp, Homo sapiens
actttggcaaaaatg

SEQ ID NO: 1513446 - DNA, 15 bp, Homo sapiens
ctttggcaaaaatgg

SEQ ID NO: 1513447 - DNA, 15 bp, Homo sapiens
tttggcaaaaatggt

SEQ ID NO: 1513448 - DNA, 15 bp, Homo sapiens
ttggcaaaaatggtt

SEQ ID NO: 1513449 - DNA, 15 bp, Homo sapiens
tggcaaaaatggttt

SEQ ID NO: 1513450 - DNA, 15 bp, Homo sapiens
ggcaaaaatggtttg

SEQ ID NO: 1513451 - DNA, 15 bp, Homo sapiens
gcaaaaatggtttgg

SEQ ID NO: 1513452 - DNA, 15 bp, Homo sapiens
caaaaatggtttggt

SEQ ID NO: 1513453 - DNA, 15 bp, Homo sapiens
aaaaatggtttggtt

SEQ ID NO: 1513454 - DNA, 15 bp, Homo sapiens
aaaatggtttggttt

SEQ ID NO: 1513455 - DNA, 15 bp, Homo sapiens
aaatggtttggtttg

SEQ ID NO: 1513456 - DNA, 15 bp, Homo sapiens
aatggtttggtttgc

SEQ ID NO: 1513457 - DNA, 15 bp, Homo sapiens
atggtttggtttgca

SEQ ID NO: 1513458 - DNA, 15 bp, Homo sapiens
tggtttggtttgcaa

SEQ ID NO: 1513459 - DNA, 15 bp, Homo sapiens
ggtttggtttgcaag

SEQ ID NO: 1513460 - DNA, 15 bp, Homo sapiens
gtttggtttgcaaga

SEQ ID NO: 1513461 - DNA, 15 bp, Homo sapiens
tttggtttgcaagag

SEQ ID NO: 1513462 - DNA, 15 bp, Homo sapiens
ttggtttgcaagagc

SEQ ID NO: 1513463 - DNA, 15 bp, Homo sapiens
tggtttgcaagagca

SEQ ID NO: 1513464 - DNA, 15 bp, Homo sapiens
ggtttgcaagagcaa

SEQ ID NO: 1513465 - DNA, 15 bp, Homo sapiens
gtttgcaagagcaat

SEQ ID NO: 1513466 - DNA, 15 bp, Homo sapiens
tttgcaagagcaatg

SEQ ID NO: 1513467 - DNA, 15 bp, Homo sapiens
ttgcaagagcaatgg

SEQ ID NO: 1513468 - DNA, 15 bp, Homo sapiens
tgcaagagcaatgga

SEQ ID NO: 1513469 - DNA, 15 bp, Homo sapiens
gcaagagcaatggag

SEQ ID NO: 1513470 - DNA, 15 bp, Homo sapiens
caagagcaatggaga

SEQ ID NO: 1513471 - DNA, 15 bp, Homo sapiens
aagagcaatggagaa

SEQ ID NO: 1513472 - DNA, 15 bp, Homo sapiens
agagcaatggagaaa

SEQ ID NO: 1513473 - DNA, 15 bp, Homo sapiens
gagcaatggagaaaa

SEQ ID NO: 1513474 - DNA, 15 bp, Homo sapiens
agcaatggagaaaaa

SEQ ID NO: 1513475 - DNA, 15 bp, Homo sapiens
gcaatggagaaaaaa

SEQ ID NO: 1513476 - DNA, 15 bp, Homo sapiens
caatggagaaaaaac

SEQ ID NO: 1513477 - DNA, 15 bp, Homo sapiens
aatggagaaaaaact

SEQ ID NO: 1513478 - DNA, 15 bp, Homo sapiens
atggagaaaaaactt

SEQ ID NO: 1513479 - DNA, 15 bp, Homo sapiens
tggagaaaaaactta

SEQ ID NO: 1513480 - DNA, 15 bp, Homo sapiens
ggagaaaaaacttat

SEQ ID NO: 1513481 - DNA, 15 bp, Homo sapiens
gagaaaaaacttatt

SEQ ID NO: 1513482 - DNA, 15 bp, Homo sapiens
agaaaaaacttattt

SEQ ID NO: 1513483 - DNA, 15 bp, Homo sapiens
gaaaaaacttattta

SEQ ID NO: 1513484 - DNA, 15 bp, Homo sapiens
aaaaaacttatttaa

SEQ ID NO: 1513485 - DNA, 15 bp, Homo sapiens
aaaaacttatttaac

SEQ ID NO: 1513486 - DNA, 15 bp, Homo sapiens
aaaacttatttaact

SEQ ID NO: 1513487 - DNA, 15 bp, Homo sapiens
aaacttatttaactt

SEQ ID NO: 1513488 - DNA, 15 bp, Homo sapiens
aacttatttaacttt

SEQ ID NO: 1513489 - DNA, 15 bp, Homo sapiens
acttatttaactttt

SEQ ID NO: 1513490 - DNA, 15 bp, Homo sapiens
cttatttaacttttc

SEQ ID NO: 1513491 - DNA, 15 bp, Homo sapiens
ttatttaacttttcc

SEQ ID NO: 1513492 - DNA, 15 bp, Homo sapiens
tatttaacttttcct

SEQ ID NO: 1513493 - DNA, 15 bp, Homo sapiens
atttaacttttccta

SEQ ID NO: 1513494 - DNA, 15 bp, Homo sapiens
tttaacttttcctac

SEQ ID NO: 1513495 - DNA, 15 bp, Homo sapiens
ttaacttttcctact

SEQ ID NO: 1513496 - DNA, 15 bp, Homo sapiens
taacttttcctactt

SEQ ID NO: 1513497 - DNA, 15 bp, Homo sapiens
aacttttcctactta

SEQ ID NO: 1513498 - DNA, 15 bp, Homo sapiens
acttttcctacttat

SEQ ID NO: 1513499 - DNA, 15 bp, Homo sapiens
cttttcctacttata

SEQ ID NO: 1513500 - DNA, 15 bp, Homo sapiens
ttttcctacttatag

SEQ ID NO: 1513501 - DNA, 15 bp, Homo sapiens
tttcctacttataga

SEQ ID NO: 1513502 - DNA, 15 bp, Homo sapiens
ttcctacttatagaa

SEQ ID NO: 1513503 - DNA, 15 bp, Homo sapiens
tcctacttatagaat

SEQ ID NO: 1513504 - DNA, 15 bp, Homo sapiens
cctacttatagaatc

SEQ ID NO: 1513505 - DNA, 15 bp, Homo sapiens
ctacttatagaatca

SEQ ID NO: 1513506 - DNA, 15 bp, Homo sapiens
tacttatagaatcaa

SEQ ID NO: 1513507 - DNA, 15 bp, Homo sapiens
acttatagaatcaag

SEQ ID NO: 1513508 - DNA, 15 bp, Homo sapiens
cttatagaatcaagg

SEQ ID NO: 1513509 - DNA, 15 bp, Homo sapiens
ttatagaatcaaggc

SEQ ID NO: 1513510 - DNA, 15 bp, Homo sapiens
tatagaatcaaggca

SEQ ID NO: 1513511 - DNA, 15 bp, Homo sapiens
atagaatcaaggcag

SEQ ID NO: 1513512 - DNA, 15 bp, Homo sapiens
tagaatcaaggcagc

SEQ ID NO: 1513513 - DNA, 15 bp, Homo sapiens
agaatcaaggcagcc

SEQ ID NO: 1513514 - DNA, 15 bp, Homo sapiens
gaatcaaggcagcct

SEQ ID NO: 1513515 - DNA, 15 bp, Homo sapiens
aatcaaggcagcctt

SEQ ID NO: 1513516 - DNA, 15 bp, Homo sapiens
atcaaggcagccttg

SEQ ID NO: 1513517 - DNA, 15 bp, Homo sapiens
tcaaggcagccttgc

SEQ ID NO: 1513518 - DNA, 15 bp, Homo sapiens
caaggcagccttgcg

SEQ ID NO: 1513519 - DNA, 15 bp, Homo sapiens
aaggcagccttgcgc

SEQ ID NO: 1513520 - DNA, 15 bp, Homo sapiens
aggcagccttgcgct

SEQ ID NO: 1513521 - DNA, 15 bp, Homo sapiens
ggcagccttgcgctt

SEQ ID NO: 1513522 - DNA, 15 bp, Homo sapiens
gcagccttgcgcttg

SEQ ID NO: 1513523 - DNA, 15 bp, Homo sapiens
cagccttgcgcttgt

SEQ ID NO: 1513524 - DNA, 15 bp, Homo sapiens
agccttgcgcttgtt

SEQ ID NO: 1513525 - DNA, 15 bp, Homo sapiens
gccttgcgcttgttt

SEQ ID NO: 1513526 - DNA, 15 bp, Homo sapiens
ccttgcgcttgttta

SEQ ID NO: 1513527 - DNA, 15 bp, Homo sapiens
cttgcgcttgtttaa

SEQ ID NO: 1513528 - DNA, 15 bp, Homo sapiens
ttgcgcttgtttaaa

SEQ ID NO: 1513529 - DNA, 15 bp, Homo sapiens
tgcgcttgtttaaac

SEQ ID NO: 1513530 - DNA, 15 bp, Homo sapiens
gcgcttgtttaaact

SEQ ID NO: 1513531 - DNA, 15 bp, Homo sapiens
cgcttgtttaaactt

SEQ ID NO: 1513532 - DNA, 15 bp, Homo sapiens
gcttgtttaaactta

SEQ ID NO: 1513533 - DNA, 15 bp, Homo sapiens
cttgtttaaacttac

SEQ ID NO: 1513534 - DNA, 15 bp, Homo sapiens
ttgtttaaacttact

SEQ ID NO: 1513535 - DNA, 15 bp, Homo sapiens
tgtttaaacttactt

SEQ ID NO: 1513536 - DNA, 15 bp, Homo sapiens
gtttaaacttacttg

SEQ ID NO: 1513537 - DNA, 15 bp, Homo sapiens
tttaaacttacttgg

SEQ ID NO: 1513538 - DNA, 15 bp, Homo sapiens
ttaaacttacttggc

SEQ ID NO: 1513539 - DNA, 15 bp, Homo sapiens
taaacttacttggct

SEQ ID NO: 1513540 - DNA, 15 bp, Homo sapiens
aaacttacttggcta

SEQ ID NO: 1513541 - DNA, 15 bp, Homo sapiens
aacttacttggctat

SEQ ID NO: 1513542 - DNA, 15 bp, Homo sapiens
acttacttggctata

SEQ ID NO: 1513543 - DNA, 15 bp, Homo sapiens
cttacttggctatac

SEQ ID NO: 1513544 - DNA, 15 bp, Homo sapiens
ttacttggctataca

SEQ ID NO: 1513545 - DNA, 15 bp, Homo sapiens
tacttggctatacac

SEQ ID NO: 1513546 - DNA, 15 bp, Homo sapiens
acttggctatacacg

SEQ ID NO: 1513547 - DNA, 15 bp, Homo sapiens
cttggctatacacgt

SEQ ID NO: 1513548 - DNA, 15 bp, Homo sapiens
ttggctatacacgtg

SEQ ID NO: 1513549 - DNA, 15 bp, Homo sapiens
tggctatacacgtgt

SEQ ID NO: 1513550 - DNA, 15 bp, Homo sapiens
ggctatacacgtgtc

SEQ ID NO: 1513551 - DNA, 15 bp, Homo sapiens
gctatacacgtgtct

SEQ ID NO: 1513552 - DNA, 15 bp, Homo sapiens
ctatacacgtgtctg

SEQ ID NO: 1513553 - DNA, 15 bp, Homo sapiens
tatacacgtgtctga

SEQ ID NO: 1513554 - DNA, 15 bp, Homo sapiens
atacacgtgtctgat

SEQ ID NO: 1513555 - DNA, 15 bp, Homo sapiens
tacacgtgtctgatg

SEQ ID NO: 1513556 - DNA, 15 bp, Homo sapiens
acacgtgtctgatgt

SEQ ID NO: 1513557 - DNA, 15 bp, Homo sapiens
cacgtgtctgatgta

SEQ ID NO: 1513558 - DNA, 15 bp, Homo sapiens
acgtgtctgatgtac

SEQ ID NO: 1513559 - DNA, 15 bp, Homo sapiens
cgtgtctgatgtaca

SEQ ID NO: 1513560 - DNA, 15 bp, Homo sapiens
gtgtctgatgtacat

SEQ ID NO: 1513561 - DNA, 15 bp, Homo sapiens
tgtctgatgtacata

SEQ ID NO: 1513562 - DNA, 15 bp, Homo sapiens
gtctgatgtacataa

SEQ ID NO: 1513563 - DNA, 15 bp, Homo sapiens
tctgatgtacataat

SEQ ID NO: 1513564 - DNA, 15 bp, Homo sapiens
ctgatgtacataatg

SEQ ID NO: 1513565 - DNA, 15 bp, Homo sapiens
tgatgtacataatgt

SEQ ID NO: 1513566 - DNA, 15 bp, Homo sapiens
gatgtacataatgta

SEQ ID NO: 1513567 - DNA, 15 bp, Homo sapiens
atgtacataatgtac

SEQ ID NO: 1513568 - DNA, 15 bp, Homo sapiens
tgtacataatgtaca

SEQ ID NO: 1513569 - DNA, 15 bp, Homo sapiens
gtacataatgtacat

SEQ ID NO: 1513570 - DNA, 15 bp, Homo sapiens
tacataatgtacatt

SEQ ID NO: 1513571 - DNA, 15 bp, Homo sapiens
acataatgtacattt

SEQ ID NO: 1513572 - DNA, 15 bp, Homo sapiens
cataatgtacatttg

SEQ ID NO: 1513573 - DNA, 15 bp, Homo sapiens
ataatgtacatttgt

SEQ ID NO: 1513574 - DNA, 15 bp, Homo sapiens
taatgtacatttgtt

SEQ ID NO: 1513575 - DNA, 15 bp, Homo sapiens
aatgtacatttgttt

SEQ ID NO: 1513576 - DNA, 15 bp, Homo sapiens
atgtacatttgtttt

SEQ ID NO: 1513577 - DNA, 15 bp, Homo sapiens
tgtacatttgttttc

SEQ ID NO: 1513578 - DNA, 15 bp, Homo sapiens
gtacatttgttttct

SEQ ID NO: 1513579 - DNA, 15 bp, Homo sapiens
tacatttgttttcta

SEQ ID NO: 1513580 - DNA, 15 bp, Homo sapiens
acatttgttttctaa

SEQ ID NO: 1513581 - DNA, 15 bp, Homo sapiens
catttgttttctaaa

SEQ ID NO: 1513582 - DNA, 15 bp, Homo sapiens
atttgttttctaaac

SEQ ID NO: 1513583 - DNA, 15 bp, Homo sapiens
tttgttttctaaact

SEQ ID NO: 1513584 - DNA, 15 bp, Homo sapiens
ttgttttctaaacta

SEQ ID NO: 1513585 - DNA, 15 bp, Homo sapiens
tgttttctaaactaa

SEQ ID NO: 1513586 - DNA, 15 bp, Homo sapiens
gttttctaaactaac

SEQ ID NO: 1513587 - DNA, 15 bp, Homo sapiens
ttttctaaactaact

SEQ ID NO: 1513588 - DNA, 15 bp, Homo sapiens
tttctaaactaactt

SEQ ID NO: 1513589 - DNA, 15 bp, Homo sapiens
ttctaaactaacttt

SEQ ID NO: 1513590 - DNA, 15 bp, Homo sapiens
tctaaactaactttg

SEQ ID NO: 1513591 - DNA, 15 bp, Homo sapiens
ctaaactaactttgt

SEQ ID NO: 1513592 - DNA, 15 bp, Homo sapiens
taaactaactttgtt

SEQ ID NO: 1513593 - DNA, 15 bp, Homo sapiens
aaactaactttgttc

SEQ ID NO: 1513594 - DNA, 15 bp, Homo sapiens
aactaactttgttca

SEQ ID NO: 1513595 - DNA, 15 bp, Homo sapiens
actaactttgttcat

SEQ ID NO: 1513596 - DNA, 15 bp, Homo sapiens
ctaactttgttcatt

SEQ ID NO: 1513597 - DNA, 15 bp, Homo sapiens
taactttgttcattc

SEQ ID NO: 1513598 - DNA, 15 bp, Homo sapiens
aactttgttcattct

SEQ ID NO: 1513599 - DNA, 15 bp, Homo sapiens
actttgttcattcta

SEQ ID NO: 1513600 - DNA, 15 bp, Homo sapiens
ctttgttcattctaa

SEQ ID NO: 1513601 - DNA, 15 bp, Homo sapiens
tttgttcattctaag

SEQ ID NO: 1513602 - DNA, 15 bp, Homo sapiens
ttgttcattctaaga

SEQ ID NO: 1513603 - DNA, 15 bp, Homo sapiens
tgttcattctaagat

SEQ ID NO: 1513604 - DNA, 15 bp, Homo sapiens
gttcattctaagatt

SEQ ID NO: 1513605 - DNA, 15 bp, Homo sapiens
ttcattctaagattt

SEQ ID NO: 1513606 - DNA, 15 bp, Homo sapiens
tcattctaagattta

SEQ ID NO: 1513607 - DNA, 15 bp, Homo sapiens
cattctaagatttaa

SEQ ID NO: 1513608 - DNA, 15 bp, Homo sapiens
attctaagatttaaa

SEQ ID NO: 1513609 - DNA, 15 bp, Homo sapiens
ttctaagatttaaaa

SEQ ID NO: 1513610 - DNA, 15 bp, Homo sapiens
tctaagatttaaaaa

SEQ ID NO: 1513611 - DNA, 15 bp, Homo sapiens
ctaagatttaaaaac

SEQ ID NO: 1513612 - DNA, 15 bp, Homo sapiens
taagatttaaaaact

SEQ ID NO: 1513613 - DNA, 15 bp, Homo sapiens
aagatttaaaaactg

SEQ ID NO: 1513614 - DNA, 15 bp, Homo sapiens
agatttaaaaactga

SEQ ID NO: 1513615 - DNA, 15 bp, Homo sapiens
gatttaaaaactgat

SEQ ID NO: 1513616 - DNA, 15 bp, Homo sapiens
atttaaaaactgatc

SEQ ID NO: 1513617 - DNA, 15 bp, Homo sapiens
tttaaaaactgatca

SEQ ID NO: 1513618 - DNA, 15 bp, Homo sapiens
ttaaaaactgatcaa

SEQ ID NO: 1513619 - DNA, 15 bp, Homo sapiens
taaaaactgatcaaa

SEQ ID NO: 1513620 - DNA, 15 bp, Homo sapiens
aaaaactgatcaaac

SEQ ID NO: 1513621 - DNA, 15 bp, Homo sapiens
aaaactgatcaaaca

SEQ ID NO: 1513622 - DNA, 15 bp, Homo sapiens
aaactgatcaaacaa

SEQ ID NO: 1513623 - DNA, 15 bp, Homo sapiens
aactgatcaaacaaa

SEQ ID NO: 1513624 - DNA, 15 bp, Homo sapiens
actgatcaaacaaat

SEQ ID NO: 1513625 - DNA, 15 bp, Homo sapiens
ctgatcaaacaaatg

SEQ ID NO: 1513626 - DNA, 15 bp, Homo sapiens
tgatcaaacaaatgt

SEQ ID NO: 1513627 - DNA, 15 bp, Homo sapiens
gatcaaacaaatgtg

SEQ ID NO: 1513628 - DNA, 15 bp, Homo sapiens
atcaaacaaatgtga

SEQ ID NO: 1513629 - DNA, 15 bp, Homo sapiens
tcaaacaaatgtgat

SEQ ID NO: 1513630 - DNA, 15 bp, Homo sapiens
caaacaaatgtgata

SEQ ID NO: 1513631 - DNA, 15 bp, Homo sapiens
aaacaaatgtgataa

SEQ ID NO: 1513632 - DNA, 15 bp, Homo sapiens
aacaaatgtgataat

SEQ ID NO: 1513633 - DNA, 15 bp, Homo sapiens
acaaatgtgataatt

SEQ ID NO: 1513634 - DNA, 15 bp, Homo sapiens
caaatgtgataattc

SEQ ID NO: 1513635 - DNA, 15 bp, Homo sapiens
aaatgtgataattct

SEQ ID NO: 1513636 - DNA, 15 bp, Homo sapiens
aatgtgataattctg

SEQ ID NO: 1513637 - DNA, 15 bp, Homo sapiens
atgtgataattctgt

SEQ ID NO: 1513638 - DNA, 15 bp, Homo sapiens
tgtgataattctgtc

SEQ ID NO: 1513639 - DNA, 15 bp, Homo sapiens
gtgataattctgtca

SEQ ID NO: 1513640 - DNA, 15 bp, Homo sapiens
tgataattctgtcat

SEQ ID NO: 1513641 - DNA, 15 bp, Homo sapiens
gataattctgtcata

SEQ ID NO: 1513642 - DNA, 15 bp, Homo sapiens
ataattctgtcataa

SEQ ID NO: 1513643 - DNA, 15 bp, Homo sapiens
taattctgtcataag

SEQ ID NO: 1513644 - DNA, 15 bp, Homo sapiens
aattctgtcataagt

SEQ ID NO: 1513645 - DNA, 15 bp, Homo sapiens
attctgtcataagtc

SEQ ID NO: 1513646 - DNA, 15 bp, Homo sapiens
ttctgtcataagtca

SEQ ID NO: 1513647 - DNA, 15 bp, Homo sapiens
tctgtcataagtcac

SEQ ID NO: 1513648 - DNA, 15 bp, Homo sapiens
ctgtcataagtcaca

SEQ ID NO: 1513649 - DNA, 15 bp, Homo sapiens
tgtcataagtcacaa

SEQ ID NO: 1513650 - DNA, 15 bp, Homo sapiens
gtcataagtcacaaa

SEQ ID NO: 1513651 - DNA, 15 bp, Homo sapiens
tcataagtcacaaac

SEQ ID NO: 1513652 - DNA, 15 bp, Homo sapiens
cataagtcacaaact

SEQ ID NO: 1513653 - DNA, 15 bp, Homo sapiens
ataagtcacaaacta

SEQ ID NO: 1513654 - DNA, 15 bp, Homo sapiens
taagtcacaaactat

SEQ ID NO: 1513655 - DNA, 15 bp, Homo sapiens
aagtcacaaactata

SEQ ID NO: 1513656 - DNA, 15 bp, Homo sapiens
agtcacaaactataa

SEQ ID NO: 1513657 - DNA, 15 bp, Homo sapiens
gtcacaaactataaa

SEQ ID NO: 1513658 - DNA, 15 bp, Homo sapiens
tcacaaactataaac

SEQ ID NO: 1513659 - DNA, 15 bp, Homo sapiens
cacaaactataaacg

SEQ ID NO: 1513660 - DNA, 15 bp, Homo sapiens
acaaactataaacga

SEQ ID NO: 1513661 - DNA, 15 bp, Homo sapiens
caaactataaacgat

SEQ ID NO: 1513662 - DNA, 15 bp, Homo sapiens
aaactataaacgatt

SEQ ID NO: 1513663 - DNA, 15 bp, Homo sapiens
aactataaacgattt

SEQ ID NO: 1513664 - DNA, 15 bp, Homo sapiens
actataaacgatttc

SEQ ID NO: 1513665 - DNA, 15 bp, Homo sapiens
ctataaacgatttct

SEQ ID NO: 1513666 - DNA, 15 bp, Homo sapiens
tataaacgatttctc

SEQ ID NO: 1513667 - DNA, 15 bp, Homo sapiens
ataaacgatttctcc

SEQ ID NO: 1513668 - DNA, 15 bp, Homo sapiens
taaacgatttctccg

SEQ ID NO: 1513669 - DNA, 15 bp, Homo sapiens
aaacgatttctccgt

SEQ ID NO: 1513670 - DNA, 15 bp, Homo sapiens
aacgatttctccgtt

SEQ ID NO: 1513671 - DNA, 15 bp, Homo sapiens
acgatttctccgttt

SEQ ID NO: 1513672 - DNA, 15 bp, Homo sapiens
cgatttctccgtttt

SEQ ID NO: 1513673 - DNA, 15 bp, Homo sapiens
gatttctccgttttt

SEQ ID NO: 1513674 - DNA, 15 bp, Homo sapiens
atttctccgtttttt

SEQ ID NO: 1513675 - DNA, 15 bp, Homo sapiens
tttctccgttttttt

SEQ ID NO: 1513676 - DNA, 15 bp, Homo sapiens
ttctccgtttttttc

SEQ ID NO: 1513677 - DNA, 15 bp, Homo sapiens
tctccgtttttttct

SEQ ID NO: 1513678 - DNA, 15 bp, Homo sapiens
ctccgtttttttctc

SEQ ID NO: 1513679 - DNA, 15 bp, Homo sapiens
tccgtttttttctct

SEQ ID NO: 1513680 - DNA, 15 bp, Homo sapiens
ccgtttttttctctt

SEQ ID NO: 1513681 - DNA, 15 bp, Homo sapiens
cgtttttttctcttt

SEQ ID NO: 1513682 - DNA, 15 bp, Homo sapiens
gtttttttctctttt

SEQ ID NO: 1513683 - DNA, 15 bp, Homo sapiens
ttttttctcttttac

SEQ ID NO: 1513684 - DNA, 15 bp, Homo sapiens
tttttctcttttacc

SEQ ID NO: 1513685 - DNA, 15 bp, Homo sapiens
ttttctcttttacct

SEQ ID NO: 1513686 - DNA, 15 bp, Homo sapiens
tttctcttttaccta

SEQ ID NO: 1513687 - DNA, 15 bp, Homo sapiens
ttctcttttacctaa

SEQ ID NO: 1513688 - DNA, 15 bp, Homo sapiens
tctcttttacctaaa

SEQ ID NO: 1513689 - DNA, 15 bp, Homo sapiens
ctcttttacctaaaa

SEQ ID NO: 1513690 - DNA, 15 bp, Homo sapiens
tcttttacctaaaat

SEQ ID NO: 1513691 - DNA, 15 bp, Homo sapiens
cttttacctaaaatg

SEQ ID NO: 1513692 - DNA, 15 bp, Homo sapiens
ttttacctaaaatgt

SEQ ID NO: 1513693 - DNA, 15 bp, Homo sapiens
tttacctaaaatgtt

SEQ ID NO: 1513694 - DNA, 15 bp, Homo sapiens
ttacctaaaatgttt

SEQ ID NO: 1513695 - DNA, 15 bp, Homo sapiens
tacctaaaatgtttt

SEQ ID NO: 1513696 - DNA, 15 bp, Homo sapiens
acctaaaatgttttc

SEQ ID NO: 1513697 - DNA, 15 bp, Homo sapiens
cctaaaatgttttca

SEQ ID NO: 1513698 - DNA, 15 bp, Homo sapiens
ctaaaatgttttcag

SEQ ID NO: 1513699 - DNA, 15 bp, Homo sapiens
taaaatgttttcaga

SEQ ID NO: 1513700 - DNA, 15 bp, Homo sapiens
aaaatgttttcagat

SEQ ID NO: 1513701 - DNA, 15 bp, Homo sapiens
aaatgttttcagata

SEQ ID NO: 1513702 - DNA, 15 bp, Homo sapiens
aatgttttcagataa

SEQ ID NO: 1513703 - DNA, 15 bp, Homo sapiens
atgttttcagataaa

SEQ ID NO: 1513704 - DNA, 15 bp, Homo sapiens
tgttttcagataaat

SEQ ID NO: 1513705 - DNA, 15 bp, Homo sapiens
gttttcagataaatg

SEQ ID NO: 1513706 - DNA, 15 bp, Homo sapiens
ttttcagataaatgt

SEQ ID NO: 1513707 - DNA, 15 bp, Homo sapiens
tttcagataaatgtg

SEQ ID NO: 1513708 - DNA, 15 bp, Homo sapiens
ttcagataaatgtgt

SEQ ID NO: 1513709 - DNA, 15 bp, Homo sapiens
tcagataaatgtgta

SEQ ID NO: 1513710 - DNA, 15 bp, Homo sapiens
cagataaatgtgtaa

SEQ ID NO: 1513711 - DNA, 15 bp, Homo sapiens
agataaatgtgtaat

SEQ ID NO: 1513712 - DNA, 15 bp, Homo sapiens
gataaatgtgtaata

SEQ ID NO: 1513713 - DNA, 15 bp, Homo sapiens
ataaatgtgtaataa

SEQ ID NO: 1513714 - DNA, 15 bp, Homo sapiens
taaatgtgtaataag

SEQ ID NO: 1513715 - DNA, 15 bp, Homo sapiens
aaatgtgtaataagt

SEQ ID NO: 1513716 - DNA, 15 bp, Homo sapiens
aatgtgtaataagta

SEQ ID NO: 1513717 - DNA, 15 bp, Homo sapiens
atgtgtaataagtag

SEQ ID NO: 1513718 - DNA, 15 bp, Homo sapiens
tgtgtaataagtaga

SEQ ID NO: 1513719 - DNA, 15 bp, Homo sapiens
gtgtaataagtagag

SEQ ID NO: 1513720 - DNA, 15 bp, Homo sapiens
tgtaataagtagagc

SEQ ID NO: 1513721 - DNA, 15 bp, Homo sapiens
gtaataagtagagcc

SEQ ID NO: 1513722 - DNA, 15 bp, Homo sapiens
taataagtagagcca

SEQ ID NO: 1513723 - DNA, 15 bp, Homo sapiens
aataagtagagccaa

SEQ ID NO: 1513724 - DNA, 15 bp, Homo sapiens
ataagtagagccaaa

SEQ ID NO: 1513725 - DNA, 15 bp, Homo sapiens
taagtagagccaaag

SEQ ID NO: 1513726 - DNA, 15 bp, Homo sapiens
aagtagagccaaaga

SEQ ID NO: 1513727 - DNA, 15 bp, Homo sapiens
agtagagccaaagaa

SEQ ID NO: 1513728 - DNA, 15 bp, Homo sapiens
gtagagccaaagaag

SEQ ID NO: 1513729 - DNA, 15 bp, Homo sapiens
tagagccaaagaagc

SEQ ID NO: 1513730 - DNA, 15 bp, Homo sapiens
agagccaaagaagct

SEQ ID NO: 1513731 - DNA, 15 bp, Homo sapiens
gagccaaagaagctt

SEQ ID NO: 1513732 - DNA, 15 bp, Homo sapiens
agccaaagaagcttt

SEQ ID NO: 1513733 - DNA, 15 bp, Homo sapiens
gccaaagaagcttta

SEQ ID NO: 1513734 - DNA, 15 bp, Homo sapiens
ccaaagaagctttaa

SEQ ID NO: 1513735 - DNA, 15 bp, Homo sapiens
caaagaagctttaaa

SEQ ID NO: 1513736 - DNA, 15 bp, Homo sapiens
aaagaagctttaaaa

SEQ ID NO: 1513737 - DNA, 15 bp, Homo sapiens
aagaagctttaaaaa

SEQ ID NO: 1513738 - DNA, 15 bp, Homo sapiens
agaagctttaaaaag

SEQ ID NO: 1513739 - DNA, 15 bp, Homo sapiens
gaagctttaaaaagt

SEQ ID NO: 1513740 - DNA, 15 bp, Homo sapiens
aagctttaaaaagtc

SEQ ID NO: 1513741 - DNA, 15 bp, Homo sapiens
agctttaaaaagtca

SEQ ID NO: 1513742 - DNA, 15 bp, Homo sapiens
gctttaaaaagtcat

SEQ ID NO: 1513743 - DNA, 15 bp, Homo sapiens
ctttaaaaagtcatc

SEQ ID NO: 1513744 - DNA, 15 bp, Homo sapiens
tttaaaaagtcatct

SEQ ID NO: 1513745 - DNA, 15 bp, Homo sapiens
ttaaaaagtcatctc

SEQ ID NO: 1513746 - DNA, 15 bp, Homo sapiens
taaaaagtcatctca

SEQ ID NO: 1513747 - DNA, 15 bp, Homo sapiens
aaaaagtcatctcat

SEQ ID NO: 1513748 - DNA, 15 bp, Homo sapiens
aaaagtcatctcatc

SEQ ID NO: 1513749 - DNA, 15 bp, Homo sapiens
aaagtcatctcatct

SEQ ID NO: 1513750 - DNA, 15 bp, Homo sapiens
aagtcatctcatctt

SEQ ID NO: 1513751 - DNA, 15 bp, Homo sapiens
agtcatctcatctta

SEQ ID NO: 1513752 - DNA, 15 bp, Homo sapiens
gtcatctcatcttac

SEQ ID NO: 1513753 - DNA, 15 bp, Homo sapiens
tcatctcatcttaca

SEQ ID NO: 1513754 - DNA, 15 bp, Homo sapiens
catctcatcttacaa

SEQ ID NO: 1513755 - DNA, 15 bp, Homo sapiens
atctcatcttacaat

SEQ ID NO: 1513756 - DNA, 15 bp, Homo sapiens
tctcatcttacaatc

SEQ ID NO: 1513757 - DNA, 15 bp, Homo sapiens
ctcatcttacaatcc

SEQ ID NO: 1513758 - DNA, 15 bp, Homo sapiens
tcatcttacaatcct

SEQ ID NO: 1513759 - DNA, 15 bp, Homo sapiens
catcttacaatcctt

SEQ ID NO: 1513760 - DNA, 15 bp, Homo sapiens
atcttacaatccttg

SEQ ID NO: 1513761 - DNA, 15 bp, Homo sapiens
tcttacaatccttga

SEQ ID NO: 1513762 - DNA, 15 bp, Homo sapiens
cttacaatccttgat

SEQ ID NO: 1513763 - DNA, 15 bp, Homo sapiens
ttacaatccttgatc

SEQ ID NO: 1513764 - DNA, 15 bp, Homo sapiens
tacaatccttgatct

SEQ ID NO: 1513765 - DNA, 15 bp, Homo sapiens
acaatccttgatctg

SEQ ID NO: 1513766 - DNA, 15 bp, Homo sapiens
caatccttgatctgg

SEQ ID NO: 1513767 - DNA, 15 bp, Homo sapiens
aatccttgatctgga

SEQ ID NO: 1513768 - DNA, 15 bp, Homo sapiens
atccttgatctggaa

SEQ ID NO: 1513769 - DNA, 15 bp, Homo sapiens
tccttgatctggaat

SEQ ID NO: 1513770 - DNA, 15 bp, Homo sapiens
ccttgatctggaata

SEQ ID NO: 1513771 - DNA, 15 bp, Homo sapiens
cttgatctggaataa

SEQ ID NO: 1513772 - DNA, 15 bp, Homo sapiens
ttgatctggaataat

SEQ ID NO: 1513773 - DNA, 15 bp, Homo sapiens
tgatctggaataatg

SEQ ID NO: 1513774 - DNA, 15 bp, Homo sapiens
gatctggaataatgc

SEQ ID NO: 1513775 - DNA, 15 bp, Homo sapiens
atctggaataatgct

SEQ ID NO: 1513776 - DNA, 15 bp, Homo sapiens
tctggaataatgctt

SEQ ID NO: 1513777 - DNA, 15 bp, Homo sapiens
ctggaataatgctta

SEQ ID NO: 1513778 - DNA, 15 bp, Homo sapiens
tggaataatgcttaa

SEQ ID NO: 1513779 - DNA, 15 bp, Homo sapiens
ggaataatgcttaaa

SEQ ID NO: 1513780 - DNA, 15 bp, Homo sapiens
gaataatgcttaaag

SEQ ID NO: 1513781 - DNA, 15 bp, Homo sapiens
aataatgcttaaaga

SEQ ID NO: 1513782 - DNA, 15 bp, Homo sapiens
ataatgcttaaagac

SEQ ID NO: 1513783 - DNA, 15 bp, Homo sapiens
taatgcttaaagact

SEQ ID NO: 1513784 - DNA, 15 bp, Homo sapiens
aatgcttaaagacta

SEQ ID NO: 1513785 - DNA, 15 bp, Homo sapiens
atgcttaaagactat

SEQ ID NO: 1513786 - DNA, 15 bp, Homo sapiens
tgcttaaagactata

SEQ ID NO: 1513787 - DNA, 15 bp, Homo sapiens
gcttaaagactatag

SEQ ID NO: 1513788 - DNA, 15 bp, Homo sapiens
cttaaagactataga

SEQ ID NO: 1513789 - DNA, 15 bp, Homo sapiens
ttaaagactatagaa

SEQ ID NO: 1513790 - DNA, 15 bp, Homo sapiens
taaagactatagaag

SEQ ID NO: 1513791 - DNA, 15 bp, Homo sapiens
aaagactatagaaga

SEQ ID NO: 1513792 - DNA, 15 bp, Homo sapiens
aagactatagaagag

SEQ ID NO: 1513793 - DNA, 15 bp, Homo sapiens
agactatagaagaga

SEQ ID NO: 1513794 - DNA, 15 bp, Homo sapiens
gactatagaagagac

SEQ ID NO: 1513795 - DNA, 15 bp, Homo sapiens
actatagaagagacg

SEQ ID NO: 1513796 - DNA, 15 bp, Homo sapiens
ctatagaagagacgc

SEQ ID NO: 1513797 - DNA, 15 bp, Homo sapiens
tatagaagagacgca

SEQ ID NO: 1513798 - DNA, 15 bp, Homo sapiens
atagaagagacgcat

SEQ ID NO: 1513799 - DNA, 15 bp, Homo sapiens
tagaagagacgcatt

SEQ ID NO: 1513800 - DNA, 15 bp, Homo sapiens
agaagagacgcattt

SEQ ID NO: 1513801 - DNA, 15 bp, Homo sapiens
gaagagacgcatttt

SEQ ID NO: 1513802 - DNA, 15 bp, Homo sapiens
aagagacgcattttt

SEQ ID NO: 1513803 - DNA, 15 bp, Homo sapiens
agagacgcattttta

SEQ ID NO: 1513804 - DNA, 15 bp, Homo sapiens
gagacgcatttttat

SEQ ID NO: 1513805 - DNA, 15 bp, Homo sapiens
agacgcatttttatt

SEQ ID NO: 1513806 - DNA, 15 bp, Homo sapiens
gacgcatttttattt

SEQ ID NO: 1513807 - DNA, 15 bp, Homo sapiens
acgcatttttatttt

SEQ ID NO: 1513808 - DNA, 15 bp, Homo sapiens
cgcatttttattttt

SEQ ID NO: 1513809 - DNA, 15 bp, Homo sapiens
gcatttttatttttt

SEQ ID NO: 1513810 - DNA, 15 bp, Homo sapiens
catttttatttttta

SEQ ID NO: 1513811 - DNA, 15 bp, Homo sapiens
atttttattttttac

SEQ ID NO: 1513812 - DNA, 15 bp, Homo sapiens
tttttattttttaca

SEQ ID NO: 1513813 - DNA, 15 bp, Homo sapiens
ttttattttttacag

SEQ ID NO: 1513814 - DNA, 15 bp, Homo sapiens
tttattttttacaga

SEQ ID NO: 1513815 - DNA, 15 bp, Homo sapiens
ttattttttacagat

SEQ ID NO: 1513816 - DNA, 15 bp, Homo sapiens
tattttttacagatt

SEQ ID NO: 1513817 - DNA, 15 bp, Homo sapiens
attttttacagattt

SEQ ID NO: 1513818 - DNA, 15 bp, Homo sapiens
ttttttacagatttt

SEQ ID NO: 1513819 - DNA, 15 bp, Homo sapiens
tttttacagatttta

SEQ ID NO: 1513820 - DNA, 15 bp, Homo sapiens
ttttacagattttat

SEQ ID NO: 1513821 - DNA, 15 bp, Homo sapiens
tttacagattttatt

SEQ ID NO: 1513822 - DNA, 15 bp, Homo sapiens
ttacagattttatta

SEQ ID NO: 1513823 - DNA, 15 bp, Homo sapiens
tacagattttattaa

SEQ ID NO: 1513824 - DNA, 15 bp, Homo sapiens
acagattttattaag

SEQ ID NO: 1513825 - DNA, 15 bp, Homo sapiens
cagattttattaagt

SEQ ID NO: 1513826 - DNA, 15 bp, Homo sapiens
agattttattaagtg

SEQ ID NO: 1513827 - DNA, 15 bp, Homo sapiens
gattttattaagtga

SEQ ID NO: 1513828 - DNA, 15 bp, Homo sapiens
attttattaagtgaa

SEQ ID NO: 1513829 - DNA, 15 bp, Homo sapiens
ttttattaagtgaat

SEQ ID NO: 1513830 - DNA, 15 bp, Homo sapiens
tttattaagtgaata

SEQ ID NO: 1513831 - DNA, 15 bp, Homo sapiens
ttattaagtgaatac

SEQ ID NO: 1513832 - DNA, 15 bp, Homo sapiens
tattaagtgaataca

SEQ ID NO: 1513833 - DNA, 15 bp, Homo sapiens
attaagtgaatacag

SEQ ID NO: 1513834 - DNA, 15 bp, Homo sapiens
ttaagtgaatacagt

SEQ ID NO: 1513835 - DNA, 15 bp, Homo sapiens
taagtgaatacagta

SEQ ID NO: 1513836 - DNA, 15 bp, Homo sapiens
aagtgaatacagtac

SEQ ID NO: 1513837 - DNA, 15 bp, Homo sapiens
agtgaatacagtacg

SEQ ID NO: 1513838 - DNA, 15 bp, Homo sapiens
gtgaatacagtacgt

SEQ ID NO: 1513839 - DNA, 15 bp, Homo sapiens
tgaatacagtacgtt

SEQ ID NO: 1513840 - DNA, 15 bp, Homo sapiens
gaatacagtacgttt

SEQ ID NO: 1513841 - DNA, 15 bp, Homo sapiens
aatacagtacgtttg

SEQ ID NO: 1513842 - DNA, 15 bp, Homo sapiens
atacagtacgtttga

SEQ ID NO: 1513843 - DNA, 15 bp, Homo sapiens
tacagtacgtttgat

SEQ ID NO: 1513844 - DNA, 15 bp, Homo sapiens
acagtacgtttgatt

SEQ ID NO: 1513845 - DNA, 15 bp, Homo sapiens
cagtacgtttgattt

SEQ ID NO: 1513846 - DNA, 15 bp, Homo sapiens
agtacgtttgatttg

SEQ ID NO: 1513847 - DNA, 15 bp, Homo sapiens
gtacgtttgatttgg

SEQ ID NO: 1513848 - DNA, 15 bp, Homo sapiens
tacgtttgatttgga

SEQ ID NO: 1513849 - DNA, 15 bp, Homo sapiens
acgtttgatttggac

SEQ ID NO: 1513850 - DNA, 15 bp, Homo sapiens
cgtttgatttggaca

SEQ ID NO: 1513851 - DNA, 15 bp, Homo sapiens
gtttgatttggacat

SEQ ID NO: 1513852 - DNA, 15 bp, Homo sapiens
tttgatttggacatg

SEQ ID NO: 1513853 - DNA, 15 bp, Homo sapiens
ttgatttggacatgt

SEQ ID NO: 1513854 - DNA, 15 bp, Homo sapiens
tgatttggacatgtt

SEQ ID NO: 1513855 - DNA, 15 bp, Homo sapiens
gatttggacatgttg

SEQ ID NO: 1513856 - DNA, 15 bp, Homo sapiens
atttggacatgttgt

SEQ ID NO: 1513857 - DNA, 15 bp, Homo sapiens
tttggacatgttgtt

SEQ ID NO: 1513858 - DNA, 15 bp, Homo sapiens
ttggacatgttgttg

SEQ ID NO: 1513859 - DNA, 15 bp, Homo sapiens
tggacatgttgttga

SEQ ID NO: 1513860 - DNA, 15 bp, Homo sapiens
ggacatgttgttgaa

SEQ ID NO: 1513861 - DNA, 15 bp, Homo sapiens
gacatgttgttgaac

SEQ ID NO: 1513862 - DNA, 15 bp, Homo sapiens
acatgttgttgaaca

SEQ ID NO: 1513863 - DNA, 15 bp, Homo sapiens
catgttgttgaacat

SEQ ID NO: 1513864 - DNA, 15 bp, Homo sapiens
atgttgttgaacatt

SEQ ID NO: 1513865 - DNA, 15 bp, Homo sapiens
tgttgttgaacatta

SEQ ID NO: 1513866 - DNA, 15 bp, Homo sapiens
gttgttgaacattaa

SEQ ID NO: 1513867 - DNA, 15 bp, Homo sapiens
ttgttgaacattaaa

SEQ ID NO: 1513868 - DNA, 15 bp, Homo sapiens
tgttgaacattaaat

SEQ ID NO: 1513869 - DNA, 15 bp, Homo sapiens
gttgaacattaaatt

SEQ ID NO: 1513870 - DNA, 15 bp, Homo sapiens
ttgaacattaaattg

SEQ ID NO: 1513871 - DNA, 15 bp, Homo sapiens
tgaacattaaattgc

SEQ ID NO: 1513872 - DNA, 15 bp, Homo sapiens
gaacattaaattgca

SEQ ID NO: 1513873 - DNA, 15 bp, Homo sapiens
aacattaaattgcag

SEQ ID NO: 1513874 - DNA, 15 bp, Homo sapiens
acattaaattgcagt

SEQ ID NO: 1513875 - DNA, 15 bp, Homo sapiens
cattaaattgcagtt

SEQ ID NO: 1513876 - DNA, 15 bp, Homo sapiens
attaaattgcagttc

SEQ ID NO: 1513877 - DNA, 15 bp, Homo sapiens
ttaaattgcagttca

SEQ ID NO: 1513878 - DNA, 15 bp, Homo sapiens
taaattgcagttcag

SEQ ID NO: 1513879 - DNA, 15 bp, Homo sapiens
aaattgcagttcaga

SEQ ID NO: 1513880 - DNA, 15 bp, Homo sapiens
aattgcagttcagaa

SEQ ID NO: 1513881 - DNA, 15 bp, Homo sapiens
attgcagttcagaat

SEQ ID NO: 1513882 - DNA, 15 bp, Homo sapiens
ttgcagttcagaata

SEQ ID NO: 1513883 - DNA, 15 bp, Homo sapiens
tgcagttcagaatac

SEQ ID NO: 1513884 - DNA, 15 bp, Homo sapiens
gcagttcagaataca

SEQ ID NO: 1513885 - DNA, 15 bp, Homo sapiens
cagttcagaatacat

SEQ ID NO: 1513886 - DNA, 15 bp, Homo sapiens
agttcagaatacata

SEQ ID NO: 1513887 - DNA, 15 bp, Homo sapiens
gttcagaatacatag

SEQ ID NO: 1513888 - DNA, 15 bp, Homo sapiens
ttcagaatacataga

SEQ ID NO: 1513889 - DNA, 15 bp, Homo sapiens
tcagaatacatagaa

SEQ ID NO: 1513890 - DNA, 15 bp, Homo sapiens
cagaatacatagaaa

SEQ ID NO: 1513891 - DNA, 15 bp, Homo sapiens
agaatacatagaaat

SEQ ID NO: 1513892 - DNA, 15 bp, Homo sapiens
gaatacatagaaatc

SEQ ID NO: 1513893 - DNA, 15 bp, Homo sapiens
aatacatagaaatcc

SEQ ID NO: 1513894 - DNA, 15 bp, Homo sapiens
atacatagaaatcct

SEQ ID NO: 1513895 - DNA, 15 bp, Homo sapiens
tacatagaaatcctc

SEQ ID NO: 1513896 - DNA, 15 bp, Homo sapiens
acatagaaatcctcc

SEQ ID NO: 1513897 - DNA, 15 bp, Homo sapiens
catagaaatcctccc

SEQ ID NO: 1513898 - DNA, 15 bp, Homo sapiens
atagaaatcctccct

SEQ ID NO: 1513899 - DNA, 15 bp, Homo sapiens
tagaaatcctccctt

SEQ ID NO: 1513900 - DNA, 15 bp, Homo sapiens
agaaatcctcccttt

SEQ ID NO: 1513901 - DNA, 15 bp, Homo sapiens
gaaatcctccctttt

SEQ ID NO: 1513902 - DNA, 15 bp, Homo sapiens
aaatcctcccttttc

SEQ ID NO: 1513903 - DNA, 15 bp, Homo sapiens
aatcctcccttttct

SEQ ID NO: 1513904 - DNA, 15 bp, Homo sapiens
atcctcccttttcta

SEQ ID NO: 1513905 - DNA, 15 bp, Homo sapiens
tcctcccttttctag

SEQ ID NO: 1513906 - DNA, 15 bp, Homo sapiens
cctcccttttctaga

SEQ ID NO: 1513907 - DNA, 15 bp, Homo sapiens
ctcccttttctagag

SEQ ID NO: 1513908 - DNA, 15 bp, Homo sapiens
tcccttttctagaga

SEQ ID NO: 1513909 - DNA, 15 bp, Homo sapiens
cccttttctagagat

SEQ ID NO: 1513910 - DNA, 15 bp, Homo sapiens
ccttttctagagatt

SEQ ID NO: 1513911 - DNA, 15 bp, Homo sapiens
cttttctagagattg

SEQ ID NO: 1513912 - DNA, 15 bp, Homo sapiens
ttttctagagattgt

SEQ ID NO: 1513913 - DNA, 15 bp, Homo sapiens
tttctagagattgtg

SEQ ID NO: 1513914 - DNA, 15 bp, Homo sapiens
ttctagagattgtgt

SEQ ID NO: 1513915 - DNA, 15 bp, Homo sapiens
tctagagattgtgta

SEQ ID NO: 1513916 - DNA, 15 bp, Homo sapiens
ctagagattgtgtat

SEQ ID NO: 1513917 - DNA, 15 bp, Homo sapiens
tagagattgtgtatg

SEQ ID NO: 1513918 - DNA, 15 bp, Homo sapiens
agagattgtgtatgt

SEQ ID NO: 1513919 - DNA, 15 bp, Homo sapiens
gagattgtgtatgtg

SEQ ID NO: 1513920 - DNA, 15 bp, Homo sapiens
agattgtgtatgtgt

SEQ ID NO: 1513921 - DNA, 15 bp, Homo sapiens
gattgtgtatgtgtg

SEQ ID NO: 1513922 - DNA, 15 bp, Homo sapiens
attgtgtatgtgtgt

SEQ ID NO: 1513923 - DNA, 15 bp, Homo sapiens
ttgtgtatgtgtgta

SEQ ID NO: 1513924 - DNA, 15 bp, Homo sapiens
tgtgtatgtgtgtaa

SEQ ID NO: 1513925 - DNA, 15 bp, Homo sapiens
gtgtatgtgtgtaaa

SEQ ID NO: 1513926 - DNA, 15 bp, Homo sapiens
tgtatgtgtgtaaat

SEQ ID NO: 1513927 - DNA, 15 bp, Homo sapiens
gtatgtgtgtaaatt

SEQ ID NO: 1513928 - DNA, 15 bp, Homo sapiens
tatgtgtgtaaattt

SEQ ID NO: 1513929 - DNA, 15 bp, Homo sapiens
atgtgtgtaaatttt

SEQ ID NO: 1513930 - DNA, 15 bp, Homo sapiens
tgtgtgtaaattttt

SEQ ID NO: 1513931 - DNA, 15 bp, Homo sapiens
gtgtgtaaatttttg

SEQ ID NO: 1513932 - DNA, 15 bp, Homo sapiens
tgtgtaaatttttgt

SEQ ID NO: 1513933 - DNA, 15 bp, Homo sapiens
gtgtaaatttttgtg

SEQ ID NO: 1513934 - DNA, 15 bp, Homo sapiens
tgtaaatttttgtgc

SEQ ID NO: 1513935 - DNA, 15 bp, Homo sapiens
gtaaatttttgtgcc

SEQ ID NO: 1513936 - DNA, 15 bp, Homo sapiens
taaatttttgtgcct

SEQ ID NO: 1513937 - DNA, 15 bp, Homo sapiens
aaatttttgtgcctt

SEQ ID NO: 1513938 - DNA, 15 bp, Homo sapiens
aatttttgtgccttc

SEQ ID NO: 1513939 - DNA, 15 bp, Homo sapiens
atttttgtgccttct

SEQ ID NO: 1513940 - DNA, 15 bp, Homo sapiens
tttttgtgccttctg

SEQ ID NO: 1513941 - DNA, 15 bp, Homo sapiens
ttttgtgccttctgg

SEQ ID NO: 1513942 - DNA, 15 bp, Homo sapiens
tttgtgccttctggt

SEQ ID NO: 1513943 - DNA, 15 bp, Homo sapiens
ttgtgccttctggtt

SEQ ID NO: 1513944 - DNA, 15 bp, Homo sapiens
tgtgccttctggttc

SEQ ID NO: 1513945 - DNA, 15 bp, Homo sapiens
gtgccttctggttca

SEQ ID NO: 1513946 - DNA, 15 bp, Homo sapiens
tgccttctggttcat

SEQ ID NO: 1513947 - DNA, 15 bp, Homo sapiens
gccttctggttcatg

SEQ ID NO: 1513948 - DNA, 15 bp, Homo sapiens
ccttctggttcatgt

SEQ ID NO: 1513949 - DNA, 15 bp, Homo sapiens
cttctggttcatgta

SEQ ID NO: 1513950 - DNA, 15 bp, Homo sapiens
ttctggttcatgtac

SEQ ID NO: 1513951 - DNA, 15 bp, Homo sapiens
tctggttcatgtacg

SEQ ID NO: 1513952 - DNA, 15 bp, Homo sapiens
ctggttcatgtacgt

SEQ ID NO: 1513953 - DNA, 15 bp, Homo sapiens
tggttcatgtacgtt

SEQ ID NO: 1513954 - DNA, 15 bp, Homo sapiens
ggttcatgtacgttt

SEQ ID NO: 1513955 - DNA, 15 bp, Homo sapiens
gttcatgtacgtttc

SEQ ID NO: 1513956 - DNA, 15 bp, Homo sapiens
ttcatgtacgtttcc

SEQ ID NO: 1513957 - DNA, 15 bp, Homo sapiens
tcatgtacgtttcct

SEQ ID NO: 1513958 - DNA, 15 bp, Homo sapiens
catgtacgtttcctt

SEQ ID NO: 1513959 - DNA, 15 bp, Homo sapiens
atgtacgtttccttc

SEQ ID NO: 1513960 - DNA, 15 bp, Homo sapiens
tgtacgtttccttct

SEQ ID NO: 1513961 - DNA, 15 bp, Homo sapiens
gtacgtttccttctc

SEQ ID NO: 1513962 - DNA, 15 bp, Homo sapiens
tacgtttccttctct

SEQ ID NO: 1513963 - DNA, 15 bp, Homo sapiens
acgtttccttctctc

SEQ ID NO: 1513964 - DNA, 15 bp, Homo sapiens
cgtttccttctctcc

SEQ ID NO: 1513965 - DNA, 15 bp, Homo sapiens
gtttccttctctccc

SEQ ID NO: 1513966 - DNA, 15 bp, Homo sapiens
tttccttctctccct

SEQ ID NO: 1513967 - DNA, 15 bp, Homo sapiens
ttccttctctccctc

SEQ ID NO: 1513968 - DNA, 15 bp, Homo sapiens
tccttctctccctca

SEQ ID NO: 1513969 - DNA, 15 bp, Homo sapiens
ccttctctccctcaa

SEQ ID NO: 1513970 - DNA, 15 bp, Homo sapiens
cttctctccctcaaa

SEQ ID NO: 1513971 - DNA, 15 bp, Homo sapiens
ttctctccctcaaat

SEQ ID NO: 1513972 - DNA, 15 bp, Homo sapiens
tctctccctcaaatc

SEQ ID NO: 1513973 - DNA, 15 bp, Homo sapiens
ctctccctcaaatcg

SEQ ID NO: 1513974 - DNA, 15 bp, Homo sapiens
tctccctcaaatcgt

SEQ ID NO: 1513975 - DNA, 15 bp, Homo sapiens
ctccctcaaatcgtt

SEQ ID NO: 1513976 - DNA, 15 bp, Homo sapiens
tccctcaaatcgttt

SEQ ID NO: 1513977 - DNA, 15 bp, Homo sapiens
ccctcaaatcgttta

SEQ ID NO: 1513978 - DNA, 15 bp, Homo sapiens
cctcaaatcgtttag

SEQ ID NO: 1513979 - DNA, 15 bp, Homo sapiens
ctcaaatcgtttagc

SEQ ID NO: 1513980 - DNA, 15 bp, Homo sapiens
tcaaatcgtttagca

SEQ ID NO: 1513981 - DNA, 15 bp, Homo sapiens
caaatcgtttagcag

SEQ ID NO: 1513982 - DNA, 15 bp, Homo sapiens
aaatcgtttagcagt

SEQ ID NO: 1513983 - DNA, 15 bp, Homo sapiens
aatcgtttagcagtt

SEQ ID NO: 1513984 - DNA, 15 bp, Homo sapiens
atcgtttagcagttt

SEQ ID NO: 1513985 - DNA, 15 bp, Homo sapiens
tcgtttagcagtttc

SEQ ID NO: 1513986 - DNA, 15 bp, Homo sapiens
cgtttagcagtttct

SEQ ID NO: 1513987 - DNA, 15 bp, Homo sapiens
gtttagcagtttctt

SEQ ID NO: 1513988 - DNA, 15 bp, Homo sapiens
tttagcagtttctta

SEQ ID NO: 1513989 - DNA, 15 bp, Homo sapiens
ttagcagtttcttac

SEQ ID NO: 1513990 - DNA, 15 bp, Homo sapiens
tagcagtttcttacc

SEQ ID NO: 1513991 - DNA, 15 bp, Homo sapiens
agcagtttcttaccc

SEQ ID NO: 1513992 - DNA, 15 bp, Homo sapiens
gcagtttcttacccc

SEQ ID NO: 1513993 - DNA, 15 bp, Homo sapiens
cagtttcttacccca

SEQ ID NO: 1513994 - DNA, 15 bp, Homo sapiens
agtttcttaccccat

SEQ ID NO: 1513995 - DNA, 15 bp, Homo sapiens
gtttcttaccccatt

SEQ ID NO: 1513996 - DNA, 15 bp, Homo sapiens
tttcttaccccattc

SEQ ID NO: 1513997 - DNA, 15 bp, Homo sapiens
ttcttaccccattct

SEQ ID NO: 1513998 - DNA, 15 bp, Homo sapiens
tcttaccccattctc

SEQ ID NO: 1513999 - DNA, 15 bp, Homo sapiens
cttaccccattctcc

SEQ ID NO: 1514000 - DNA, 15 bp, Homo sapiens
ttaccccattctccg

SEQ ID NO: 1514001 - DNA, 15 bp, Homo sapiens
taccccattctccgt

SEQ ID NO: 1514002 - DNA, 15 bp, Homo sapiens
accccattctccgtg

SEQ ID NO: 1514003 - DNA, 15 bp, Homo sapiens
ccccattctccgtga

SEQ ID NO: 1514004 - DNA, 15 bp, Homo sapiens
cccattctccgtgat

SEQ ID NO: 1514005 - DNA, 15 bp, Homo sapiens
ccattctccgtgatg

SEQ ID NO: 1514006 - DNA, 15 bp, Homo sapiens
cattctccgtgatgt

SEQ ID NO: 1514007 - DNA, 15 bp, Homo sapiens
attctccgtgatgtg

SEQ ID NO: 1514008 - DNA, 15 bp, Homo sapiens
ttctccgtgatgtgc

SEQ ID NO: 1514009 - DNA, 15 bp, Homo sapiens
tctccgtgatgtgct

SEQ ID NO: 1514010 - DNA, 15 bp, Homo sapiens
ctccgtgatgtgctt

SEQ ID NO: 1514011 - DNA, 15 bp, Homo sapiens
tccgtgatgtgctta

SEQ ID NO: 1514012 - DNA, 15 bp, Homo sapiens
ccgtgatgtgcttat

SEQ ID NO: 1514013 - DNA, 15 bp, Homo sapiens
cgtgatgtgcttatt

SEQ ID NO: 1514014 - DNA, 15 bp, Homo sapiens
gtgatgtgcttattt

SEQ ID NO: 1514015 - DNA, 15 bp, Homo sapiens
tgatgtgcttatttc

SEQ ID NO: 1514016 - DNA, 15 bp, Homo sapiens
gatgtgcttatttca

SEQ ID NO: 1514017 - DNA, 15 bp, Homo sapiens
atgtgcttatttcat

SEQ ID NO: 1514018 - DNA, 15 bp, Homo sapiens
tgtgcttatttcata

SEQ ID NO: 1514019 - DNA, 15 bp, Homo sapiens
gtgcttatttcatat

SEQ ID NO: 1514020 - DNA, 15 bp, Homo sapiens
tgcttatttcatatt

SEQ ID NO: 1514021 - DNA, 15 bp, Homo sapiens
gcttatttcatattg

SEQ ID NO: 1514022 - DNA, 15 bp, Homo sapiens
cttatttcatattgc

SEQ ID NO: 1514023 - DNA, 15 bp, Homo sapiens
ttatttcatattgca

SEQ ID NO: 1514024 - DNA, 15 bp, Homo sapiens
tatttcatattgcat

SEQ ID NO: 1514025 - DNA, 15 bp, Homo sapiens
atttcatattgcatg

SEQ ID NO: 1514026 - DNA, 15 bp, Homo sapiens
tttcatattgcatgc

SEQ ID NO: 1514027 - DNA, 15 bp, Homo sapiens
ttcatattgcatgcc

SEQ ID NO: 1514028 - DNA, 15 bp, Homo sapiens
tcatattgcatgcct

SEQ ID NO: 1514029 - DNA, 15 bp, Homo sapiens
catattgcatgcctg

SEQ ID NO: 1514030 - DNA, 15 bp, Homo sapiens
atattgcatgcctgt

SEQ ID NO: 1514031 - DNA, 15 bp, Homo sapiens
tattgcatgcctgta

SEQ ID NO: 1514032 - DNA, 15 bp, Homo sapiens
attgcatgcctgtat

SEQ ID NO: 1514033 - DNA, 15 bp, Homo sapiens
ttgcatgcctgtatc

SEQ ID NO: 1514034 - DNA, 15 bp, Homo sapiens
tgcatgcctgtatca

SEQ ID NO: 1514035 - DNA, 15 bp, Homo sapiens
gcatgcctgtatcaa

SEQ ID NO: 1514036 - DNA, 15 bp, Homo sapiens
catgcctgtatcaaa

SEQ ID NO: 1514037 - DNA, 15 bp, Homo sapiens
atgcctgtatcaaaa

SEQ ID NO: 1514038 - DNA, 15 bp, Homo sapiens
tgcctgtatcaaaac

SEQ ID NO: 1514039 - DNA, 15 bp, Homo sapiens
gcctgtatcaaaaca

SEQ ID NO: 1514040 - DNA, 15 bp, Homo sapiens
cctgtatcaaaacat

SEQ ID NO: 1514041 - DNA, 15 bp, Homo sapiens
ctgtatcaaaacatc

SEQ ID NO: 1514042 - DNA, 15 bp, Homo sapiens
tgtatcaaaacatct

SEQ ID NO: 1514043 - DNA, 15 bp, Homo sapiens
gtatcaaaacatctc

SEQ ID NO: 1514044 - DNA, 15 bp, Homo sapiens
tatcaaaacatctca

SEQ ID NO: 1514045 - DNA, 15 bp, Homo sapiens
atcaaaacatctcat

SEQ ID NO: 1514046 - DNA, 15 bp, Homo sapiens
tcaaaacatctcata

SEQ ID NO: 1514047 - DNA, 15 bp, Homo sapiens
caaaacatctcatat

SEQ ID NO: 1514048 - DNA, 15 bp, Homo sapiens
aaaacatctcatatg

SEQ ID NO: 1514049 - DNA, 15 bp, Homo sapiens
aaacatctcatatgc

SEQ ID NO: 1514050 - DNA, 15 bp, Homo sapiens
aacatctcatatgcc

SEQ ID NO: 1514051 - DNA, 15 bp, Homo sapiens
acatctcatatgccc

SEQ ID NO: 1514052 - DNA, 15 bp, Homo sapiens
catctcatatgcccc

SEQ ID NO: 1514053 - DNA, 15 bp, Homo sapiens
atctcatatgcccca

SEQ ID NO: 1514054 - DNA, 15 bp, Homo sapiens
tctcatatgccccat

SEQ ID NO: 1514055 - DNA, 15 bp, Homo sapiens
ctcatatgccccata

SEQ ID NO: 1514056 - DNA, 15 bp, Homo sapiens
tcatatgccccataa

SEQ ID NO: 1514057 - DNA, 15 bp, Homo sapiens
catatgccccataaa

SEQ ID NO: 1514058 - DNA, 15 bp, Homo sapiens
atatgccccataaat

SEQ ID NO: 1514059 - DNA, 15 bp, Homo sapiens
tatgccccataaata

SEQ ID NO: 1514060 - DNA, 15 bp, Homo sapiens
atgccccataaatat

SEQ ID NO: 1514061 - DNA, 15 bp, Homo sapiens
tgccccataaatata

SEQ ID NO: 1514062 - DNA, 15 bp, Homo sapiens
gccccataaatatat

SEQ ID NO: 1514063 - DNA, 15 bp, Homo sapiens
ccccataaatatata

SEQ ID NO: 1514064 - DNA, 15 bp, Homo sapiens
cccataaatatatat

SEQ ID NO: 1514065 - DNA, 15 bp, Homo sapiens
ccataaatatatata

SEQ ID NO: 1514066 - DNA, 15 bp, Homo sapiens
cataaatatatatac

SEQ ID NO: 1514067 - DNA, 15 bp, Homo sapiens
ataaatatatatacc

SEQ ID NO: 1514068 - DNA, 15 bp, Homo sapiens
taaatatatatacct

SEQ ID NO: 1514069 - DNA, 15 bp, Homo sapiens
aaatatatataccta

SEQ ID NO: 1514070 - DNA, 15 bp, Homo sapiens
aatatatatacctac

SEQ ID NO: 1514071 - DNA, 15 bp, Homo sapiens
atatatatacctact

SEQ ID NO: 1514072 - DNA, 15 bp, Homo sapiens
tatatatacctacta

SEQ ID NO: 1514073 - DNA, 15 bp, Homo sapiens
atatatacctactat

SEQ ID NO: 1514074 - DNA, 15 bp, Homo sapiens
tatatacctactatg

SEQ ID NO: 1514075 - DNA, 15 bp, Homo sapiens
atatacctactatgt

SEQ ID NO: 1514076 - DNA, 15 bp, Homo sapiens
tatacctactatgta

SEQ ID NO: 1514077 - DNA, 15 bp, Homo sapiens
atacctactatgtac

SEQ ID NO: 1514078 - DNA, 15 bp, Homo sapiens
tacctactatgtacc

SEQ ID NO: 1514079 - DNA, 15 bp, Homo sapiens
acctactatgtaccc

SEQ ID NO: 1514080 - DNA, 15 bp, Homo sapiens
cctactatgtaccca

SEQ ID NO: 1514081 - DNA, 15 bp, Homo sapiens
atgtacccacaaaac

SEQ ID NO: 1514082 - DNA, 15 bp, Homo sapiens
tgtacccacaaaact

SEQ ID NO: 1514083 - DNA, 15 bp, Homo sapiens
gtacccacaaaacta

SEQ ID NO: 1514084 - DNA, 15 bp, Homo sapiens
tacccacaaaactaa

SEQ ID NO: 1514085 - DNA, 15 bp, Homo sapiens
acccacaaaactaaa

SEQ ID NO: 1514086 - DNA, 15 bp, Homo sapiens
cccacaaaactaaaa

SEQ ID NO: 1514087 - DNA, 15 bp, Homo sapiens
ccacaaaactaaaaa

SEQ ID NO: 1514088 - DNA, 15 bp, Homo sapiens
cacaaaactaaaaat

SEQ ID NO: 1514089 - DNA, 15 bp, Homo sapiens
acaaaactaaaaatt

SEQ ID NO: 1514090 - DNA, 15 bp, Homo sapiens
caaaactaaaaatta

SEQ ID NO: 1514091 - DNA, 15 bp, Homo sapiens
aaaactaaaaattaa

SEQ ID NO: 1514092 - DNA, 15 bp, Homo sapiens
aaactaaaaattaaa

SEQ ID NO: 1514093 - DNA, 15 bp, Homo sapiens
aactaaaaattaaaa

SEQ ID NO: 1514094 - DNA, 15 bp, Homo sapiens
actaaaaattaaaaa

SEQ ID NO: 1514095 - DNA, 15 bp, Homo sapiens
ctaaaaattaaaaaa

SEQ ID NO: 1514096 - DNA, 15 bp, Homo sapiens
aaaaattaaaaaaaa

SEQ ID NO: 1514097 - DNA, 15 bp, Homo sapiens
aattaaaaaaaaagg

SEQ ID NO: 1514098 - DNA, 15 bp, Homo sapiens
attaaaaaaaaagga

SEQ ID NO: 1514099 - DNA, 15 bp, Homo sapiens
ttaaaaaaaaaggaa

SEQ ID NO: 1514100 - DNA, 15 bp, Homo sapiens
taaaaaaaaaggaaa

SEQ ID NO: 1514101 - DNA, 15 bp, Homo sapiens
aaggaaaaaaaaagg

SEQ ID NO: 1514102 - DNA, 15 bp, Homo sapiens
aggaaaaaaaaaggc

SEQ ID NO: 1514103 - DNA, 15 bp, Homo sapiens
ggaaaaaaaaaggcc

SEQ ID NO: 1514104 - DNA, 15 bp, Homo sapiens
gaaaaaaaaaggcct

SEQ ID NO: 1514105 - DNA, 15 bp, Homo sapiens
aaaaaaaaaggcctg

SEQ ID NO: 1514106 - DNA, 15 bp, Homo sapiens
aaaaaaaaggcctgc

SEQ ID NO: 1514107 - DNA, 15 bp, Homo sapiens
aaaaaaaggcctgca

SEQ ID NO: 1514108 - DNA, 15 bp, Homo sapiens
aaaaaaggcctgcaa

SEQ ID NO: 1514109 - DNA, 15 bp, Homo sapiens
aaaaaggcctgcaac

SEQ ID NO: 1514110 - DNA, 15 bp, Homo sapiens
aaaaggcctgcaaca

SEQ ID NO: 1514111 - DNA, 15 bp, Homo sapiens
aaaggcctgcaacaa

SEQ ID NO: 1514112 - DNA, 15 bp, Homo sapiens
aaggcctgcaacaag

SEQ ID NO: 1514113 - DNA, 15 bp, Homo sapiens
aggcctgcaacaaga

SEQ ID NO: 1514114 - DNA, 15 bp, Homo sapiens
ggcctgcaacaagag

SEQ ID NO: 1514115 - DNA, 15 bp, Homo sapiens
gcctgcaacaagaga

SEQ ID NO: 1514116 - DNA, 15 bp, Homo sapiens
cctgcaacaagagaa

SEQ ID NO: 1514117 - DNA, 15 bp, Homo sapiens
ctgcaacaagagaag

SEQ ID NO: 1514118 - DNA, 15 bp, Homo sapiens
tgcaacaagagaaga

SEQ ID NO: 1514119 - DNA, 15 bp, Homo sapiens
gcaacaagagaagaa

SEQ ID NO: 1514120 - DNA, 15 bp, Homo sapiens
caacaagagaagaag

SEQ ID NO: 1514121 - DNA, 15 bp, Homo sapiens
aacaagagaagaaga

SEQ ID NO: 1514122 - DNA, 15 bp, Homo sapiens
acaagagaagaagaa

SEQ ID NO: 1514123 - DNA, 15 bp, Homo sapiens
caagagaagaagaaa

SEQ ID NO: 1514124 - DNA, 15 bp, Homo sapiens
aagagaagaagaaag

SEQ ID NO: 1514125 - DNA, 15 bp, Homo sapiens
agagaagaagaaaga

SEQ ID NO: 1514126 - DNA, 15 bp, Homo sapiens
gagaagaagaaagaa

SEQ ID NO: 1514127 - DNA, 15 bp, Homo sapiens
gaagaagaaagaaat

SEQ ID NO: 1514128 - DNA, 15 bp, Homo sapiens
aagaagaaagaaatc

SEQ ID NO: 1514129 - DNA, 15 bp, Homo sapiens
agaagaaagaaatca

SEQ ID NO: 1514130 - DNA, 15 bp, Homo sapiens
gaagaaagaaatcag

SEQ ID NO: 1514131 - DNA, 15 bp, Homo sapiens
aagaaagaaatcaga

SEQ ID NO: 1514132 - DNA, 15 bp, Homo sapiens
agaaagaaatcagat

SEQ ID NO: 1514133 - DNA, 15 bp, Homo sapiens
gaaagaaatcagata

SEQ ID NO: 1514134 - DNA, 15 bp, Homo sapiens
aaagaaatcagatac

SEQ ID NO: 1514135 - DNA, 15 bp, Homo sapiens
aagaaatcagatacc

SEQ ID NO: 1514136 - DNA, 15 bp, Homo sapiens
agaaatcagataccc

SEQ ID NO: 1514137 - DNA, 15 bp, Homo sapiens
gaaatcagataccct

SEQ ID NO: 1514138 - DNA, 15 bp, Homo sapiens
aaatcagataccctg

SEQ ID NO: 1514139 - DNA, 15 bp, Homo sapiens
aatcagataccctgt

SEQ ID NO: 1514140 - DNA, 15 bp, Homo sapiens
atcagataccctgta

SEQ ID NO: 1514141 - DNA, 15 bp, Homo sapiens
tcagataccctgtag

SEQ ID NO: 1514142 - DNA, 15 bp, Homo sapiens
cagataccctgtagg

SEQ ID NO: 1514143 - DNA, 15 bp, Homo sapiens
agataccctgtaggt

SEQ ID NO: 1514144 - DNA, 15 bp, Homo sapiens
gataccctgtaggta

SEQ ID NO: 1514145 - DNA, 15 bp, Homo sapiens
ataccctgtaggtag

SEQ ID NO: 1514146 - DNA, 15 bp, Homo sapiens
taccctgtaggtagc

SEQ ID NO: 1514147 - DNA, 15 bp, Homo sapiens
accctgtaggtagct

SEQ ID NO: 1514148 - DNA, 15 bp, Homo sapiens
ccctgtaggtagcta

SEQ ID NO: 1514149 - DNA, 15 bp, Homo sapiens
cctgtaggtagctat

SEQ ID NO: 1514150 - DNA, 15 bp, Homo sapiens
ctgtaggtagctatc

SEQ ID NO: 1514151 - DNA, 15 bp, Homo sapiens
tgtaggtagctatct

SEQ ID NO: 1514152 - DNA, 15 bp, Homo sapiens
gtaggtagctatctc

SEQ ID NO: 1514153 - DNA, 15 bp, Homo sapiens
taggtagctatctcc

SEQ ID NO: 1514154 - DNA, 15 bp, Homo sapiens
aggtagctatctccc

SEQ ID NO: 1514155 - DNA, 15 bp, Homo sapiens
ggtagctatctccca

SEQ ID NO: 1514156 - DNA, 15 bp, Homo sapiens
gtagctatctcccaa

SEQ ID NO: 1514157 - DNA, 15 bp, Homo sapiens
tagctatctcccaaa

SEQ ID NO: 1514158 - DNA, 15 bp, Homo sapiens
agctatctcccaaaa

SEQ ID NO: 1514159 - DNA, 15 bp, Homo sapiens
gctatctcccaaaag

SEQ ID NO: 1514160 - DNA, 15 bp, Homo sapiens
ctatctcccaaaagt

SEQ ID NO: 1514161 - DNA, 15 bp, Homo sapiens
tatctcccaaaagtt

SEQ ID NO: 1514162 - DNA, 15 bp, Homo sapiens
atctcccaaaagttt

SEQ ID NO: 1514163 - DNA, 15 bp, Homo sapiens
tctcccaaaagtttt

SEQ ID NO: 1514164 - DNA, 15 bp, Homo sapiens
ctcccaaaagttttc

SEQ ID NO: 1514165 - DNA, 15 bp, Homo sapiens
tcccaaaagttttca

SEQ ID NO: 1514166 - DNA, 15 bp, Homo sapiens
cccaaaagttttcaa

SEQ ID NO: 1514167 - DNA, 15 bp, Homo sapiens
ccaaaagttttcaat

SEQ ID NO: 1514168 - DNA, 15 bp, Homo sapiens
caaaagttttcaata

SEQ ID NO: 1514169 - DNA, 15 bp, Homo sapiens
aaaagttttcaatag

SEQ ID NO: 1514170 - DNA, 15 bp, Homo sapiens
aaagttttcaatagt

SEQ ID NO: 1514171 - DNA, 15 bp, Homo sapiens
aagttttcaatagtt

SEQ ID NO: 1514172 - DNA, 15 bp, Homo sapiens
agttttcaatagttg

SEQ ID NO: 1514173 - DNA, 15 bp, Homo sapiens
gttttcaatagttga

SEQ ID NO: 1514174 - DNA, 15 bp, Homo sapiens
ttttcaatagttgac

SEQ ID NO: 1514175 - DNA, 15 bp, Homo sapiens
tttcaatagttgact

SEQ ID NO: 1514176 - DNA, 15 bp, Homo sapiens
ttcaatagttgactt

SEQ ID NO: 1514177 - DNA, 15 bp, Homo sapiens
tcaatagttgactta

SEQ ID NO: 1514178 - DNA, 15 bp, Homo sapiens
caatagttgacttaa

SEQ ID NO: 1514179 - DNA, 15 bp, Homo sapiens
aatagttgacttaag

SEQ ID NO: 1514180 - DNA, 15 bp, Homo sapiens
atagttgacttaaga

SEQ ID NO: 1514181 - DNA, 15 bp, Homo sapiens
tagttgacttaagaa

SEQ ID NO: 1514182 - DNA, 15 bp, Homo sapiens
agttgacttaagaaa

SEQ ID NO: 1514183 - DNA, 15 bp, Homo sapiens
gttgacttaagaaaa

SEQ ID NO: 1514184 - DNA, 15 bp, Homo sapiens
ttgacttaagaaaac

SEQ ID NO: 1514185 - DNA, 15 bp, Homo sapiens
tgacttaagaaaact

SEQ ID NO: 1514186 - DNA, 15 bp, Homo sapiens
gacttaagaaaacta

SEQ ID NO: 1514187 - DNA, 15 bp, Homo sapiens
acttaagaaaactac

SEQ ID NO: 1514188 - DNA, 15 bp, Homo sapiens
cttaagaaaactact

SEQ ID NO: 1514189 - DNA, 15 bp, Homo sapiens
ttaagaaaactactg

SEQ ID NO: 1514190 - DNA, 15 bp, Homo sapiens
taagaaaactactga

SEQ ID NO: 1514191 - DNA, 15 bp, Homo sapiens
aagaaaactactgac

SEQ ID NO: 1514192 - DNA, 15 bp, Homo sapiens
agaaaactactgact

SEQ ID NO: 1514193 - DNA, 15 bp, Homo sapiens
gaaaactactgactt

SEQ ID NO: 1514194 - DNA, 15 bp, Homo sapiens
aaaactactgacttg

SEQ ID NO: 1514195 - DNA, 15 bp, Homo sapiens
aaactactgacttgt

SEQ ID NO: 1514196 - DNA, 15 bp, Homo sapiens
aactactgacttgta

SEQ ID NO: 1514197 - DNA, 15 bp, Homo sapiens
actactgacttgtat

SEQ ID NO: 1514198 - DNA, 15 bp, Homo sapiens
ctactgacttgtatg

SEQ ID NO: 1514199 - DNA, 15 bp, Homo sapiens
tactgacttgtatgt

SEQ ID NO: 1514200 - DNA, 15 bp, Homo sapiens
actgacttgtatgta

SEQ ID NO: 1514201 - DNA, 15 bp, Homo sapiens
ctgacttgtatgtaa

SEQ ID NO: 1514202 - DNA, 15 bp, Homo sapiens
tgacttgtatgtaac

SEQ ID NO: 1514203 - DNA, 15 bp, Homo sapiens
gacttgtatgtaact

SEQ ID NO: 1514204 - DNA, 15 bp, Homo sapiens
acttgtatgtaactg

SEQ ID NO: 1514205 - DNA, 15 bp, Homo sapiens
cttgtatgtaactga

SEQ ID NO: 1514206 - DNA, 15 bp, Homo sapiens
ttgtatgtaactgaa

SEQ ID NO: 1514207 - DNA, 15 bp, Homo sapiens
tgtatgtaactgaaa

SEQ ID NO: 1514208 - DNA, 15 bp, Homo sapiens
gtatgtaactgaaat

SEQ ID NO: 1514209 - DNA, 15 bp, Homo sapiens
tatgtaactgaaatc

SEQ ID NO: 1514210 - DNA, 15 bp, Homo sapiens
atgtaactgaaatca

SEQ ID NO: 1514211 - DNA, 15 bp, Homo sapiens
tgtaactgaaatcag

SEQ ID NO: 1514212 - DNA, 15 bp, Homo sapiens
gtaactgaaatcagg

SEQ ID NO: 1514213 - DNA, 15 bp, Homo sapiens
taactgaaatcagga

SEQ ID NO: 1514214 - DNA, 15 bp, Homo sapiens
aactgaaatcaggaa

SEQ ID NO: 1514215 - DNA, 15 bp, Homo sapiens
actgaaatcaggaaa

SEQ ID NO: 1514216 - DNA, 15 bp, Homo sapiens
ctgaaatcaggaaac

SEQ ID NO: 1514217 - DNA, 15 bp, Homo sapiens
tgaaatcaggaaacc

SEQ ID NO: 1514218 - DNA, 15 bp, Homo sapiens
gaaatcaggaaacct

SEQ ID NO: 1514219 - DNA, 15 bp, Homo sapiens
aaatcaggaaacctg

SEQ ID NO: 1514220 - DNA, 15 bp, Homo sapiens
aatcaggaaacctgt

SEQ ID NO: 1514221 - DNA, 15 bp, Homo sapiens
atcaggaaacctgta

SEQ ID NO: 1514222 - DNA, 15 bp, Homo sapiens
tcaggaaacctgtag

SEQ ID NO: 1514223 - DNA, 15 bp, Homo sapiens
caggaaacctgtagt

SEQ ID NO: 1514224 - DNA, 15 bp, Homo sapiens
aggaaacctgtagtg

SEQ ID NO: 1514225 - DNA, 15 bp, Homo sapiens
ggaaacctgtagtgt

SEQ ID NO: 1514226 - DNA, 15 bp, Homo sapiens
gaaacctgtagtgta

SEQ ID NO: 1514227 - DNA, 15 bp, Homo sapiens
aaacctgtagtgtag

SEQ ID NO: 1514228 - DNA, 15 bp, Homo sapiens
aacctgtagtgtaga

SEQ ID NO: 1514229 - DNA, 15 bp, Homo sapiens
acctgtagtgtagag

SEQ ID NO: 1514230 - DNA, 15 bp, Homo sapiens
cctgtagtgtagagt

SEQ ID NO: 1514231 - DNA, 15 bp, Homo sapiens
ctgtagtgtagagtg

SEQ ID NO: 1514232 - DNA, 15 bp, Homo sapiens
tgtagtgtagagtgg

SEQ ID NO: 1514233 - DNA, 15 bp, Homo sapiens
gtagtgtagagtggt

SEQ ID NO: 1514234 - DNA, 15 bp, Homo sapiens
tagtgtagagtggtt

SEQ ID NO: 1514235 - DNA, 15 bp, Homo sapiens
agtgtagagtggttc

SEQ ID NO: 1514236 - DNA, 15 bp, Homo sapiens
gtgtagagtggttcc

SEQ ID NO: 1514237 - DNA, 15 bp, Homo sapiens
tgtagagtggttccc

SEQ ID NO: 1514238 - DNA, 15 bp, Homo sapiens
gtagagtggttcccc

SEQ ID NO: 1514239 - DNA, 15 bp, Homo sapiens
tagagtggttcccct

SEQ ID NO: 1514240 - DNA, 15 bp, Homo sapiens
agagtggttcccctg

SEQ ID NO: 1514241 - DNA, 15 bp, Homo sapiens
gagtggttcccctga

SEQ ID NO: 1514242 - DNA, 15 bp, Homo sapiens
agtggttcccctgaa

SEQ ID NO: 1514243 - DNA, 15 bp, Homo sapiens
gtggttcccctgaat

SEQ ID NO: 1514244 - DNA, 15 bp, Homo sapiens
tggttcccctgaata

SEQ ID NO: 1514245 - DNA, 15 bp, Homo sapiens
ggttcccctgaatat

SEQ ID NO: 1514246 - DNA, 15 bp, Homo sapiens
gttcccctgaatatg

SEQ ID NO: 1514247 - DNA, 15 bp, Homo sapiens
ttcccctgaatatgt

SEQ ID NO: 1514248 - DNA, 15 bp, Homo sapiens
tcccctgaatatgtc

SEQ ID NO: 1514249 - DNA, 15 bp, Homo sapiens
cccctgaatatgtct

SEQ ID NO: 1514250 - DNA, 15 bp, Homo sapiens
ccctgaatatgtctc

SEQ ID NO: 1514251 - DNA, 15 bp, Homo sapiens
cctgaatatgtctct

SEQ ID NO: 1514252 - DNA, 15 bp, Homo sapiens
ctgaatatgtctctt

SEQ ID NO: 1514253 - DNA, 15 bp, Homo sapiens
tgaatatgtctcttt

SEQ ID NO: 1514254 - DNA, 15 bp, Homo sapiens
gaatatgtctctttt

SEQ ID NO: 1514255 - DNA, 15 bp, Homo sapiens
aatatgtctcttttg

SEQ ID NO: 1514256 - DNA, 15 bp, Homo sapiens
atatgtctcttttgg

SEQ ID NO: 1514257 - DNA, 15 bp, Homo sapiens
tatgtctcttttggt

SEQ ID NO: 1514258 - DNA, 15 bp, Homo sapiens
atgtctcttttggta

SEQ ID NO: 1514259 - DNA, 15 bp, Homo sapiens
tgtctcttttggtaa

SEQ ID NO: 1514260 - DNA, 15 bp, Homo sapiens
gtctcttttggtaat

SEQ ID NO: 1514261 - DNA, 15 bp, Homo sapiens
tctcttttggtaatc

SEQ ID NO: 1514262 - DNA, 15 bp, Homo sapiens
ctcttttggtaatct

SEQ ID NO: 1514263 - DNA, 15 bp, Homo sapiens
tcttttggtaatcta

SEQ ID NO: 1514264 - DNA, 15 bp, Homo sapiens
cttttggtaatctaa

SEQ ID NO: 1514265 - DNA, 15 bp, Homo sapiens
ttttggtaatctaag

SEQ ID NO: 1514266 - DNA, 15 bp, Homo sapiens
tttggtaatctaagc

SEQ ID NO: 1514267 - DNA, 15 bp, Homo sapiens
ttggtaatctaagct

SEQ ID NO: 1514268 - DNA, 15 bp, Homo sapiens
tggtaatctaagctg

SEQ ID NO: 1514269 - DNA, 15 bp, Homo sapiens
ggtaatctaagctgt

SEQ ID NO: 1514270 - DNA, 15 bp, Homo sapiens
gtaatctaagctgta

SEQ ID NO: 1514271 - DNA, 15 bp, Homo sapiens
taatctaagctgtat

SEQ ID NO: 1514272 - DNA, 15 bp, Homo sapiens
aatctaagctgtatt

SEQ ID NO: 1514273 - DNA, 15 bp, Homo sapiens
atctaagctgtattt

SEQ ID NO: 1514274 - DNA, 15 bp, Homo sapiens
tctaagctgtatttc

SEQ ID NO: 1514275 - DNA, 15 bp, Homo sapiens
ctaagctgtatttca

SEQ ID NO: 1514276 - DNA, 15 bp, Homo sapiens
taagctgtatttcag

SEQ ID NO: 1514277 - DNA, 15 bp, Homo sapiens
aagctgtatttcaga

SEQ ID NO: 1514278 - DNA, 15 bp, Homo sapiens
agctgtatttcagaa

SEQ ID NO: 1514279 - DNA, 15 bp, Homo sapiens
gctgtatttcagaaa

SEQ ID NO: 1514280 - DNA, 15 bp, Homo sapiens
ctgtatttcagaaat

SEQ ID NO: 1514281 - DNA, 15 bp, Homo sapiens
tgtatttcagaaatg

SEQ ID NO: 1514282 - DNA, 15 bp, Homo sapiens
gtatttcagaaatgt

SEQ ID NO: 1514283 - DNA, 15 bp, Homo sapiens
tatttcagaaatgta

SEQ ID NO: 1514284 - DNA, 15 bp, Homo sapiens
atttcagaaatgtac

SEQ ID NO: 1514285 - DNA, 15 bp, Homo sapiens
tttcagaaatgtaca

SEQ ID NO: 1514286 - DNA, 15 bp, Homo sapiens
ttcagaaatgtacag

SEQ ID NO: 1514287 - DNA, 15 bp, Homo sapiens
tcagaaatgtacaga

SEQ ID NO: 1514288 - DNA, 15 bp, Homo sapiens
cagaaatgtacagaa

SEQ ID NO: 1514289 - DNA, 15 bp, Homo sapiens
agaaatgtacagaaa

SEQ ID NO: 1514290 - DNA, 15 bp, Homo sapiens
gaaatgtacagaaaa

SEQ ID NO: 1514291 - DNA, 15 bp, Homo sapiens
aaatgtacagaaaag

SEQ ID NO: 1514292 - DNA, 15 bp, Homo sapiens
aatgtacagaaaagg

SEQ ID NO: 1514293 - DNA, 15 bp, Homo sapiens
atgtacagaaaagga

SEQ ID NO: 1514294 - DNA, 15 bp, Homo sapiens
tgtacagaaaaggag

SEQ ID NO: 1514295 - DNA, 15 bp, Homo sapiens
gtacagaaaaggagc

SEQ ID NO: 1514296 - DNA, 15 bp, Homo sapiens
tacagaaaaggagct

SEQ ID NO: 1514297 - DNA, 15 bp, Homo sapiens
acagaaaaggagcta

SEQ ID NO: 1514298 - DNA, 15 bp, Homo sapiens
cagaaaaggagctaa

SEQ ID NO: 1514299 - DNA, 15 bp, Homo sapiens
agaaaaggagctaag

SEQ ID NO: 1514300 - DNA, 15 bp, Homo sapiens
gaaaaggagctaagc

SEQ ID NO: 1514301 - DNA, 15 bp, Homo sapiens
aaaaggagctaagct

SEQ ID NO: 1514302 - DNA, 15 bp, Homo sapiens
aaaggagctaagctt

SEQ ID NO: 1514303 - DNA, 15 bp, Homo sapiens
aaggagctaagcttc

SEQ ID NO: 1514304 - DNA, 15 bp, Homo sapiens
aggagctaagcttct

SEQ ID NO: 1514305 - DNA, 15 bp, Homo sapiens
ggagctaagcttcta

SEQ ID NO: 1514306 - DNA, 15 bp, Homo sapiens
gagctaagcttctaa

SEQ ID NO: 1514307 - DNA, 15 bp, Homo sapiens
agctaagcttctaaa

SEQ ID NO: 1514308 - DNA, 15 bp, Homo sapiens
gctaagcttctaaat

SEQ ID NO: 1514309 - DNA, 15 bp, Homo sapiens
ctaagcttctaaatg

SEQ ID NO: 1514310 - DNA, 15 bp, Homo sapiens
taagcttctaaatgg

SEQ ID NO: 1514311 - DNA, 15 bp, Homo sapiens
aagcttctaaatgga

SEQ ID NO: 1514312 - DNA, 15 bp, Homo sapiens
agcttctaaatggat

SEQ ID NO: 1514313 - DNA, 15 bp, Homo sapiens
gcttctaaatggata

SEQ ID NO: 1514314 - DNA, 15 bp, Homo sapiens
cttctaaatggatat

SEQ ID NO: 1514315 - DNA, 15 bp, Homo sapiens
ttctaaatggatata

SEQ ID NO: 1514316 - DNA, 15 bp, Homo sapiens
tctaaatggatatag

SEQ ID NO: 1514317 - DNA, 15 bp, Homo sapiens
ctaaatggatatagc

SEQ ID NO: 1514318 - DNA, 15 bp, Homo sapiens
taaatggatatagca

SEQ ID NO: 1514319 - DNA, 15 bp, Homo sapiens
aaatggatatagcat

SEQ ID NO: 1514320 - DNA, 15 bp, Homo sapiens
aatggatatagcata

SEQ ID NO: 1514321 - DNA, 15 bp, Homo sapiens
atggatatagcatat

SEQ ID NO: 1514322 - DNA, 15 bp, Homo sapiens
tggatatagcatatt

SEQ ID NO: 1514323 - DNA, 15 bp, Homo sapiens
ggatatagcatattt

SEQ ID NO: 1514324 - DNA, 15 bp, Homo sapiens
gatatagcatatttt

SEQ ID NO: 1514325 - DNA, 15 bp, Homo sapiens
tatagcatattttgc

SEQ ID NO: 1514326 - DNA, 15 bp, Homo sapiens
atagcatattttgca

SEQ ID NO: 1514327 - DNA, 15 bp, Homo sapiens
tagcatattttgcat

SEQ ID NO: 1514328 - DNA, 15 bp, Homo sapiens
agcatattttgcata

SEQ ID NO: 1514329 - DNA, 15 bp, Homo sapiens
gcatattttgcataa

SEQ ID NO: 1514330 - DNA, 15 bp, Homo sapiens
catattttgcataaa

SEQ ID NO: 1514331 - DNA, 15 bp, Homo sapiens
atattttgcataaat

SEQ ID NO: 1514332 - DNA, 15 bp, Homo sapiens
tattttgcataaatc

SEQ ID NO: 1514333 - DNA, 15 bp, Homo sapiens
attttgcataaatca

SEQ ID NO: 1514334 - DNA, 15 bp, Homo sapiens
ttttgcataaatcaa

SEQ ID NO: 1514335 - DNA, 15 bp, Homo sapiens
tttgcataaatcaaa

SEQ ID NO: 1514336 - DNA, 15 bp, Homo sapiens
ttgcataaatcaaat

SEQ ID NO: 1514337 - DNA, 15 bp, Homo sapiens
tgcataaatcaaatt

SEQ ID NO: 1514338 - DNA, 15 bp, Homo sapiens
gcataaatcaaattt

SEQ ID NO: 1514339 - DNA, 15 bp, Homo sapiens
cataaatcaaattta

SEQ ID NO: 1514340 - DNA, 15 bp, Homo sapiens
ataaatcaaatttaa

SEQ ID NO: 1514341 - DNA, 15 bp, Homo sapiens
taaatcaaatttaat

SEQ ID NO: 1514342 - DNA, 15 bp, Homo sapiens
aaatcaaatttaata

SEQ ID NO: 1514343 - DNA, 15 bp, Homo sapiens
aatcaaatttaatat

SEQ ID NO: 1514344 - DNA, 15 bp, Homo sapiens
atcaaatttaatatg

SEQ ID NO: 1514345 - DNA, 15 bp, Homo sapiens
tcaaatttaatatga

SEQ ID NO: 1514346 - DNA, 15 bp, Homo sapiens
caaatttaatatgaa

SEQ ID NO: 1514347 - DNA, 15 bp, Homo sapiens
aaatttaatatgaat

SEQ ID NO: 1514348 - DNA, 15 bp, Homo sapiens
aatttaatatgaatc

SEQ ID NO: 1514349 - DNA, 15 bp, Homo sapiens
atttaatatgaatcc

SEQ ID NO: 1514350 - DNA, 15 bp, Homo sapiens
tttaatatgaatcca

SEQ ID NO: 1514351 - DNA, 15 bp, Homo sapiens
ttaatatgaatccat

SEQ ID NO: 1514352 - DNA, 15 bp, Homo sapiens
taatatgaatccatg

SEQ ID NO: 1514353 - DNA, 15 bp, Homo sapiens
aatatgaatccatga

SEQ ID NO: 1514354 - DNA, 15 bp, Homo sapiens
atatgaatccatgat

SEQ ID NO: 1514355 - DNA, 15 bp, Homo sapiens
tatgaatccatgatt

SEQ ID NO: 1514356 - DNA, 15 bp, Homo sapiens
atgaatccatgattc

SEQ ID NO: 1514357 - DNA, 15 bp, Homo sapiens
tgaatccatgattct

SEQ ID NO: 1514358 - DNA, 15 bp, Homo sapiens
gaatccatgattctt

SEQ ID NO: 1514359 - DNA, 15 bp, Homo sapiens
aatccatgattcttg

SEQ ID NO: 1514360 - DNA, 15 bp, Homo sapiens
atccatgattcttgt

SEQ ID NO: 1514361 - DNA, 15 bp, Homo sapiens
tccatgattcttgta

SEQ ID NO: 1514362 - DNA, 15 bp, Homo sapiens
ccatgattcttgtat

SEQ ID NO: 1514363 - DNA, 15 bp, Homo sapiens
catgattcttgtatg

SEQ ID NO: 1514364 - DNA, 15 bp, Homo sapiens
atgattcttgtatgt

SEQ ID NO: 1514365 - DNA, 15 bp, Homo sapiens
tgattcttgtatgtg

SEQ ID NO: 1514366 - DNA, 15 bp, Homo sapiens
gattcttgtatgtgt

SEQ ID NO: 1514367 - DNA, 15 bp, Homo sapiens
attcttgtatgtgta

SEQ ID NO: 1514368 - DNA, 15 bp, Homo sapiens
ttcttgtatgtgtaa

SEQ ID NO: 1514369 - DNA, 15 bp, Homo sapiens
tcttgtatgtgtaaa

SEQ ID NO: 1514370 - DNA, 15 bp, Homo sapiens
cttgtatgtgtaaat

SEQ ID NO: 1514371 - DNA, 15 bp, Homo sapiens
ttgtatgtgtaaatc

SEQ ID NO: 1514372 - DNA, 15 bp, Homo sapiens
tgtatgtgtaaatct

SEQ ID NO: 1514373 - DNA, 15 bp, Homo sapiens
gtatgtgtaaatctg

SEQ ID NO: 1514374 - DNA, 15 bp, Homo sapiens
tatgtgtaaatctgc

SEQ ID NO: 1514375 - DNA, 15 bp, Homo sapiens
atgtgtaaatctgcc

SEQ ID NO: 1514376 - DNA, 15 bp, Homo sapiens
tgtgtaaatctgcct

SEQ ID NO: 1514377 - DNA, 15 bp, Homo sapiens
gtgtaaatctgcctg

SEQ ID NO: 1514378 - DNA, 15 bp, Homo sapiens
tgtaaatctgcctgc

SEQ ID NO: 1514379 - DNA, 15 bp, Homo sapiens
gtaaatctgcctgca

SEQ ID NO: 1514380 - DNA, 15 bp, Homo sapiens
taaatctgcctgcat

SEQ ID NO: 1514381 - DNA, 15 bp, Homo sapiens
aaatctgcctgcatt

SEQ ID NO: 1514382 - DNA, 15 bp, Homo sapiens
aatctgcctgcattt

SEQ ID NO: 1514383 - DNA, 15 bp, Homo sapiens
atctgcctgcattta

SEQ ID NO: 1514384 - DNA, 15 bp, Homo sapiens
tctgcctgcatttat

SEQ ID NO: 1514385 - DNA, 15 bp, Homo sapiens
ctgcctgcatttatt

SEQ ID NO: 1514386 - DNA, 15 bp, Homo sapiens
tgcctgcatttattt

SEQ ID NO: 1514387 - DNA, 15 bp, Homo sapiens
gcctgcatttattta

SEQ ID NO: 1514388 - DNA, 15 bp, Homo sapiens
cctgcatttatttat

SEQ ID NO: 1514389 - DNA, 15 bp, Homo sapiens
ctgcatttatttatg

SEQ ID NO: 1514390 - DNA, 15 bp, Homo sapiens
tgcatttatttatgt

SEQ ID NO: 1514391 - DNA, 15 bp, Homo sapiens
gcatttatttatgtc

SEQ ID NO: 1514392 - DNA, 15 bp, Homo sapiens
catttatttatgtca

SEQ ID NO: 1514393 - DNA, 15 bp, Homo sapiens
atttatttatgtcag

SEQ ID NO: 1514394 - DNA, 15 bp, Homo sapiens
tttatttatgtcagt

SEQ ID NO: 1514395 - DNA, 15 bp, Homo sapiens
ttatttatgtcagta

SEQ ID NO: 1514396 - DNA, 15 bp, Homo sapiens
tatttatgtcagtag

SEQ ID NO: 1514397 - DNA, 15 bp, Homo sapiens
atttatgtcagtagt

SEQ ID NO: 1514398 - DNA, 15 bp, Homo sapiens
tttatgtcagtagtt

SEQ ID NO: 1514399 - DNA, 15 bp, Homo sapiens
ttatgtcagtagttg

SEQ ID NO: 1514400 - DNA, 15 bp, Homo sapiens
tatgtcagtagttgg

SEQ ID NO: 1514401 - DNA, 15 bp, Homo sapiens
atgtcagtagttggt

SEQ ID NO: 1514402 - DNA, 15 bp, Homo sapiens
tgtcagtagttggta

SEQ ID NO: 1514403 - DNA, 15 bp, Homo sapiens
gtcagtagttggtaa

SEQ ID NO: 1514404 - DNA, 15 bp, Homo sapiens
tcagtagttggtaat

SEQ ID NO: 1514405 - DNA, 15 bp, Homo sapiens
cagtagttggtaatt

SEQ ID NO: 1514406 - DNA, 15 bp, Homo sapiens
agtagttggtaatta

SEQ ID NO: 1514407 - DNA, 15 bp, Homo sapiens
gtagttggtaattat

SEQ ID NO: 1514408 - DNA, 15 bp, Homo sapiens
tagttggtaattatt

SEQ ID NO: 1514409 - DNA, 15 bp, Homo sapiens
agttggtaattattc

SEQ ID NO: 1514410 - DNA, 15 bp, Homo sapiens
gttggtaattattca

SEQ ID NO: 1514411 - DNA, 15 bp, Homo sapiens
ttggtaattattcat

SEQ ID NO: 1514412 - DNA, 15 bp, Homo sapiens
tggtaattattcatc

SEQ ID NO: 1514413 - DNA, 15 bp, Homo sapiens
ggtaattattcatct

SEQ ID NO: 1514414 - DNA, 15 bp, Homo sapiens
gtaattattcatctt

SEQ ID NO: 1514415 - DNA, 15 bp, Homo sapiens
taattattcatctta

SEQ ID NO: 1514416 - DNA, 15 bp, Homo sapiens
aattattcatcttaa

SEQ ID NO: 1514417 - DNA, 15 bp, Homo sapiens
attattcatcttaat

SEQ ID NO: 1514418 - DNA, 15 bp, Homo sapiens
ttattcatcttaatt

SEQ ID NO: 1514419 - DNA, 15 bp, Homo sapiens
tattcatcttaattt

SEQ ID NO: 1514420 - DNA, 15 bp, Homo sapiens
attcatcttaatttt

SEQ ID NO: 1514421 - DNA, 15 bp, Homo sapiens
ttcatcttaattttt

SEQ ID NO: 1514422 - DNA, 15 bp, Homo sapiens
tcatcttaatttttt

SEQ ID NO: 1514423 - DNA, 15 bp, Homo sapiens
catcttaattttttt

SEQ ID NO: 1514424 - DNA, 15 bp, Homo sapiens
atcttaatttttttt

SEQ ID NO: 1514425 - DNA, 15 bp, Homo sapiens
tcttaattttttttt

SEQ ID NO: 1514426 - DNA, 15 bp, Homo sapiens
cttaatttttttttt

SEQ ID NO: 1514427 - DNA, 15 bp, Homo sapiens
taattttttttttta

SEQ ID NO: 1514428 - DNA, 15 bp, Homo sapiens
atttttttttttaaa

SEQ ID NO: 1514429 - DNA, 15 bp, Homo sapiens
tttttttttaaattt

SEQ ID NO: 1514430 - DNA, 15 bp, Homo sapiens
ttttttttaaatttc

SEQ ID NO: 1514431 - DNA, 15 bp, Homo sapiens
tttttttaaatttct

SEQ ID NO: 1514432 - DNA, 15 bp, Homo sapiens
ttttttaaatttcta

SEQ ID NO: 1514433 - DNA, 15 bp, Homo sapiens
tttttaaatttctag

SEQ ID NO: 1514434 - DNA, 15 bp, Homo sapiens
ttttaaatttctagg

SEQ ID NO: 1514435 - DNA, 15 bp, Homo sapiens
tttaaatttctaggt

SEQ ID NO: 1514436 - DNA, 15 bp, Homo sapiens
ttaaatttctaggtg

SEQ ID NO: 1514437 - DNA, 15 bp, Homo sapiens
taaatttctaggtgt

SEQ ID NO: 1514438 - DNA, 15 bp, Homo sapiens
aaatttctaggtgtg

SEQ ID NO: 1514439 - DNA, 15 bp, Homo sapiens
aatttctaggtgtgc

SEQ ID NO: 1514440 - DNA, 15 bp, Homo sapiens
atttctaggtgtgcc

SEQ ID NO: 1514441 - DNA, 15 bp, Homo sapiens
tttctaggtgtgcca

SEQ ID NO: 1514442 - DNA, 15 bp, Homo sapiens
ttctaggtgtgccaa

SEQ ID NO: 1514443 - DNA, 15 bp, Homo sapiens
tctaggtgtgccaaa

SEQ ID NO: 1514444 - DNA, 15 bp, Homo sapiens
ctaggtgtgccaaag

SEQ ID NO: 1514445 - DNA, 15 bp, Homo sapiens
taggtgtgccaaaga

SEQ ID NO: 1514446 - DNA, 15 bp, Homo sapiens
aggtgtgccaaagag

SEQ ID NO: 1514447 - DNA, 15 bp, Homo sapiens
ggtgtgccaaagagg

SEQ ID NO: 1514448 - DNA, 15 bp, Homo sapiens
gtgtgccaaagaggc

SEQ ID NO: 1514449 - DNA, 15 bp, Homo sapiens
tgtgccaaagaggcg

SEQ ID NO: 1514450 - DNA, 15 bp, Homo sapiens
gtgccaaagaggcgg

SEQ ID NO: 1514451 - DNA, 15 bp, Homo sapiens
tgccaaagaggcggc

SEQ ID NO: 1514452 - DNA, 15 bp, Homo sapiens
gccaaagaggcggca

SEQ ID NO: 1514453 - DNA, 15 bp, Homo sapiens
ccaaagaggcggcac

SEQ ID NO: 1514454 - DNA, 15 bp, Homo sapiens
caaagaggcggcaca

SEQ ID NO: 1514455 - DNA, 15 bp, Homo sapiens
aaagaggcggcacat

SEQ ID NO: 1514456 - DNA, 15 bp, Homo sapiens
aagaggcggcacata

SEQ ID NO: 1514457 - DNA, 15 bp, Homo sapiens
agaggcggcacataa

SEQ ID NO: 1514458 - DNA, 15 bp, Homo sapiens
gaggcggcacataag

SEQ ID NO: 1514459 - DNA, 15 bp, Homo sapiens
aggcggcacataagg

SEQ ID NO: 1514460 - DNA, 15 bp, Homo sapiens
ggcggcacataagga

SEQ ID NO: 1514461 - DNA, 15 bp, Homo sapiens
gcggcacataaggat

SEQ ID NO: 1514462 - DNA, 15 bp, Homo sapiens
cggcacataaggatt

SEQ ID NO: 1514463 - DNA, 15 bp, Homo sapiens
ggcacataaggattt

SEQ ID NO: 1514464 - DNA, 15 bp, Homo sapiens
gcacataaggatttt

SEQ ID NO: 1514465 - DNA, 15 bp, Homo sapiens
cacataaggatttta

SEQ ID NO: 1514466 - DNA, 15 bp, Homo sapiens
acataaggattttaa

SEQ ID NO: 1514467 - DNA, 15 bp, Homo sapiens
cataaggattttaaa

SEQ ID NO: 1514468 - DNA, 15 bp, Homo sapiens
ataaggattttaaaa

SEQ ID NO: 1514469 - DNA, 15 bp, Homo sapiens
taaggattttaaaaa

SEQ ID NO: 1514470 - DNA, 15 bp, Homo sapiens
aaggattttaaaaag

SEQ ID NO: 1514471 - DNA, 15 bp, Homo sapiens
aggattttaaaaagg

SEQ ID NO: 1514472 - DNA, 15 bp, Homo sapiens
ggattttaaaaaggc

SEQ ID NO: 1514473 - DNA, 15 bp, Homo sapiens
gattttaaaaaggca

SEQ ID NO: 1514474 - DNA, 15 bp, Homo sapiens
attttaaaaaggcag

SEQ ID NO: 1514475 - DNA, 15 bp, Homo sapiens
ttttaaaaaggcagt

SEQ ID NO: 1514476 - DNA, 15 bp, Homo sapiens
tttaaaaaggcagtt

SEQ ID NO: 1514477 - DNA, 15 bp, Homo sapiens
ttaaaaaggcagttg

SEQ ID NO: 1514478 - DNA, 15 bp, Homo sapiens
taaaaaggcagttgg

SEQ ID NO: 1514479 - DNA, 15 bp, Homo sapiens
aaaaaggcagttggt

SEQ ID NO: 1514480 - DNA, 15 bp, Homo sapiens
aaaaggcagttggtg

SEQ ID NO: 1514481 - DNA, 15 bp, Homo sapiens
aaaggcagttggtgc

SEQ ID NO: 1514482 - DNA, 15 bp, Homo sapiens
aaggcagttggtgcc

SEQ ID NO: 1514483 - DNA, 15 bp, Homo sapiens
aggcagttggtgcct

SEQ ID NO: 1514484 - DNA, 15 bp, Homo sapiens
ggcagttggtgcctt

SEQ ID NO: 1514485 - DNA, 15 bp, Homo sapiens
gcagttggtgccttt

SEQ ID NO: 1514486 - DNA, 15 bp, Homo sapiens
cagttggtgcctttt

SEQ ID NO: 1514487 - DNA, 15 bp, Homo sapiens
agttggtgccttttc

SEQ ID NO: 1514488 - DNA, 15 bp, Homo sapiens
gttggtgccttttct

SEQ ID NO: 1514489 - DNA, 15 bp, Homo sapiens
ttggtgccttttctg

SEQ ID NO: 1514490 - DNA, 15 bp, Homo sapiens
tggtgccttttctgt

SEQ ID NO: 1514491 - DNA, 15 bp, Homo sapiens
ggtgccttttctgta

SEQ ID NO: 1514492 - DNA, 15 bp, Homo sapiens
tgccttttctgtaac

SEQ ID NO: 1514493 - DNA, 15 bp, Homo sapiens
gccttttctgtaact

SEQ ID NO: 1514494 - DNA, 15 bp, Homo sapiens
ccttttctgtaactt

SEQ ID NO: 1514495 - DNA, 15 bp, Homo sapiens
cttttctgtaactta

SEQ ID NO: 1514496 - DNA, 15 bp, Homo sapiens
ttttctgtaacttat

SEQ ID NO: 1514497 - DNA, 15 bp, Homo sapiens
tttctgtaacttatg

SEQ ID NO: 1514498 - DNA, 15 bp, Homo sapiens
ttctgtaacttatga

SEQ ID NO: 1514499 - DNA, 15 bp, Homo sapiens
tctgtaacttatgat

SEQ ID NO: 1514500 - DNA, 15 bp, Homo sapiens
ctgtaacttatgatc

SEQ ID NO: 1514501 - DNA, 15 bp, Homo sapiens
tgtaacttatgatcc

SEQ ID NO: 1514502 - DNA, 15 bp, Homo sapiens
gtaacttatgatcca

SEQ ID NO: 1514503 - DNA, 15 bp, Homo sapiens
taacttatgatccag

SEQ ID NO: 1514504 - DNA, 15 bp, Homo sapiens
aacttatgatccaga

SEQ ID NO: 1514505 - DNA, 15 bp, Homo sapiens
acttatgatccagaa

SEQ ID NO: 1514506 - DNA, 15 bp, Homo sapiens
cttatgatccagaaa

SEQ ID NO: 1514507 - DNA, 15 bp, Homo sapiens
ttatgatccagaaaa

SEQ ID NO: 1514508 - DNA, 15 bp, Homo sapiens
tatgatccagaaaat

SEQ ID NO: 1514509 - DNA, 15 bp, Homo sapiens
atgatccagaaaatt

SEQ ID NO: 1514510 - DNA, 15 bp, Homo sapiens
tgatccagaaaatta

SEQ ID NO: 1514511 - DNA, 15 bp, Homo sapiens
gatccagaaaattat

SEQ ID NO: 1514512 - DNA, 15 bp, Homo sapiens
atccagaaaattatc

SEQ ID NO: 1514513 - DNA, 15 bp, Homo sapiens
tccagaaaattatca

SEQ ID NO: 1514514 - DNA, 15 bp, Homo sapiens
ccagaaaattatcag

SEQ ID NO: 1514515 - DNA, 15 bp, Homo sapiens
cagaaaattatcagc

SEQ ID NO: 1514516 - DNA, 15 bp, Homo sapiens
agaaaattatcagct

SEQ ID NO: 1514517 - DNA, 15 bp, Homo sapiens
gaaaattatcagctt

SEQ ID NO: 1514518 - DNA, 15 bp, Homo sapiens
aaaattatcagcttg

SEQ ID NO: 1514519 - DNA, 15 bp, Homo sapiens
aaattatcagcttgt

SEQ ID NO: 1514520 - DNA, 15 bp, Homo sapiens
aattatcagcttgtc

SEQ ID NO: 1514521 - DNA, 15 bp, Homo sapiens
attatcagcttgtca

SEQ ID NO: 1514522 - DNA, 15 bp, Homo sapiens
ttatcagcttgtcat

SEQ ID NO: 1514523 - DNA, 15 bp, Homo sapiens
tatcagcttgtcatt

SEQ ID NO: 1514524 - DNA, 15 bp, Homo sapiens
atcagcttgtcattt

SEQ ID NO: 1514525 - DNA, 15 bp, Homo sapiens
tcagcttgtcatttt

SEQ ID NO: 1514526 - DNA, 15 bp, Homo sapiens
cagcttgtcattttg

SEQ ID NO: 1514527 - DNA, 15 bp, Homo sapiens
agcttgtcattttgg

SEQ ID NO: 1514528 - DNA, 15 bp, Homo sapiens
gcttgtcattttggt

SEQ ID NO: 1514529 - DNA, 15 bp, Homo sapiens
cttgtcattttggtg

SEQ ID NO: 1514530 - DNA, 15 bp, Homo sapiens
ttgtcattttggtga

SEQ ID NO: 1514531 - DNA, 15 bp, Homo sapiens
tgtcattttggtgag

SEQ ID NO: 1514532 - DNA, 15 bp, Homo sapiens
gtcattttggtgagc

SEQ ID NO: 1514533 - DNA, 15 bp, Homo sapiens
tcattttggtgagca

SEQ ID NO: 1514534 - DNA, 15 bp, Homo sapiens
cattttggtgagcat

SEQ ID NO: 1514535 - DNA, 15 bp, Homo sapiens
attttggtgagcatt

SEQ ID NO: 1514536 - DNA, 15 bp, Homo sapiens
ttttggtgagcattt

SEQ ID NO: 1514537 - DNA, 15 bp, Homo sapiens
tttggtgagcatttt

SEQ ID NO: 1514538 - DNA, 15 bp, Homo sapiens
ttggtgagcattttt

SEQ ID NO: 1514539 - DNA, 15 bp, Homo sapiens
tggtgagcatttttg

SEQ ID NO: 1514540 - DNA, 15 bp, Homo sapiens
ggtgagcatttttga

SEQ ID NO: 1514541 - DNA, 15 bp, Homo sapiens
gtgagcatttttgag

SEQ ID NO: 1514542 - DNA, 15 bp, Homo sapiens
tgagcatttttgagt

SEQ ID NO: 1514543 - DNA, 15 bp, Homo sapiens
gagcatttttgagtt

SEQ ID NO: 1514544 - DNA, 15 bp, Homo sapiens
agcatttttgagttg

SEQ ID NO: 1514545 - DNA, 15 bp, Homo sapiens
gcatttttgagttgt

SEQ ID NO: 1514546 - DNA, 15 bp, Homo sapiens
catttttgagttgtt

SEQ ID NO: 1514547 - DNA, 15 bp, Homo sapiens
atttttgagttgttt

SEQ ID NO: 1514548 - DNA, 15 bp, Homo sapiens
tttttgagttgttta

SEQ ID NO: 1514549 - DNA, 15 bp, Homo sapiens
ttttgagttgtttat

SEQ ID NO: 1514550 - DNA, 15 bp, Homo sapiens
tttgagttgtttatt

SEQ ID NO: 1514551 - DNA, 15 bp, Homo sapiens
ttgagttgtttattt

SEQ ID NO: 1514552 - DNA, 15 bp, Homo sapiens
tgagttgtttatttt

SEQ ID NO: 1514553 - DNA, 15 bp, Homo sapiens
gagttgtttattttt

SEQ ID NO: 1514554 - DNA, 15 bp, Homo sapiens
agttgtttattttta

SEQ ID NO: 1514555 - DNA, 15 bp, Homo sapiens
gttgtttatttttag

SEQ ID NO: 1514556 - DNA, 15 bp, Homo sapiens
ttgtttatttttagt

SEQ ID NO: 1514557 - DNA, 15 bp, Homo sapiens
tgtttatttttagtt

SEQ ID NO: 1514558 - DNA, 15 bp, Homo sapiens
gtttatttttagttt

SEQ ID NO: 1514559 - DNA, 15 bp, Homo sapiens
tttatttttagttta

SEQ ID NO: 1514560 - DNA, 15 bp, Homo sapiens
ttatttttagtttaa

SEQ ID NO: 1514561 - DNA, 15 bp, Homo sapiens
tatttttagtttaat

SEQ ID NO: 1514562 - DNA, 15 bp, Homo sapiens
atttttagtttaatt

SEQ ID NO: 1514563 - DNA, 15 bp, Homo sapiens
tttttagtttaattc

SEQ ID NO: 1514564 - DNA, 15 bp, Homo sapiens
ttttagtttaattca

SEQ ID NO: 1514565 - DNA, 15 bp, Homo sapiens
tttagtttaattcat

SEQ ID NO: 1514566 - DNA, 15 bp, Homo sapiens
ttagtttaattcatc

SEQ ID NO: 1514567 - DNA, 15 bp, Homo sapiens
tagtttaattcatct

SEQ ID NO: 1514568 - DNA, 15 bp, Homo sapiens
agtttaattcatctg

SEQ ID NO: 1514569 - DNA, 15 bp, Homo sapiens
gtttaattcatctgg

SEQ ID NO: 1514570 - DNA, 15 bp, Homo sapiens
tttaattcatctggg

SEQ ID NO: 1514571 - DNA, 15 bp, Homo sapiens
ttaattcatctgggg

SEQ ID NO: 1514572 - DNA, 15 bp, Homo sapiens
taattcatctggggc

SEQ ID NO: 1514573 - DNA, 15 bp, Homo sapiens
aattcatctggggca

SEQ ID NO: 1514574 - DNA, 15 bp, Homo sapiens
attcatctggggcaa

SEQ ID NO: 1514575 - DNA, 15 bp, Homo sapiens
ttcatctggggcaat

SEQ ID NO: 1514576 - DNA, 15 bp, Homo sapiens
tcatctggggcaatt

SEQ ID NO: 1514577 - DNA, 15 bp, Homo sapiens
catctggggcaattg

SEQ ID NO: 1514578 - DNA, 15 bp, Homo sapiens
atctggggcaattgc

SEQ ID NO: 1514579 - DNA, 15 bp, Homo sapiens
tctggggcaattgcc

SEQ ID NO: 1514580 - DNA, 15 bp, Homo sapiens
ctggggcaattgcct

SEQ ID NO: 1514581 - DNA, 15 bp, Homo sapiens
tggggcaattgcctt

SEQ ID NO: 1514582 - DNA, 15 bp, Homo sapiens
ggggcaattgccttg

SEQ ID NO: 1514583 - DNA, 15 bp, Homo sapiens
gggcaattgccttga

SEQ ID NO: 1514584 - DNA, 15 bp, Homo sapiens
ggcaattgccttgat

SEQ ID NO: 1514585 - DNA, 15 bp, Homo sapiens
gcaattgccttgata

SEQ ID NO: 1514586 - DNA, 15 bp, Homo sapiens
caattgccttgataa

SEQ ID NO: 1514587 - DNA, 15 bp, Homo sapiens
aattgccttgataat

SEQ ID NO: 1514588 - DNA, 15 bp, Homo sapiens
attgccttgataata

SEQ ID NO: 1514589 - DNA, 15 bp, Homo sapiens
ttgccttgataataa

SEQ ID NO: 1514590 - DNA, 15 bp, Homo sapiens
tgccttgataataat

SEQ ID NO: 1514591 - DNA, 15 bp, Homo sapiens
gccttgataataatg

SEQ ID NO: 1514592 - DNA, 15 bp, Homo sapiens
ccttgataataatgt

SEQ ID NO: 1514593 - DNA, 15 bp, Homo sapiens
cttgataataatgtt

SEQ ID NO: 1514594 - DNA, 15 bp, Homo sapiens
ttgataataatgttg

SEQ ID NO: 1514595 - DNA, 15 bp, Homo sapiens
tgataataatgttgt

SEQ ID NO: 1514596 - DNA, 15 bp, Homo sapiens
gataataatgttgtt

SEQ ID NO: 1514597 - DNA, 15 bp, Homo sapiens
ataataatgttgtta

SEQ ID NO: 1514598 - DNA, 15 bp, Homo sapiens
taataatgttgttaa

SEQ ID NO: 1514599 - DNA, 15 bp, Homo sapiens
aataatgttgttaat

SEQ ID NO: 1514600 - DNA, 15 bp, Homo sapiens
ataatgttgttaatt

SEQ ID NO: 1514601 - DNA, 15 bp, Homo sapiens
taatgttgttaattt

SEQ ID NO: 1514602 - DNA, 15 bp, Homo sapiens
aatgttgttaattta

SEQ ID NO: 1514603 - DNA, 15 bp, Homo sapiens
atgttgttaatttaa

SEQ ID NO: 1514604 - DNA, 15 bp, Homo sapiens
tgttgttaatttaaa

SEQ ID NO: 1514605 - DNA, 15 bp, Homo sapiens
gttgttaatttaaat

SEQ ID NO: 1514606 - DNA, 15 bp, Homo sapiens
ttgttaatttaaatc

SEQ ID NO: 1514607 - DNA, 15 bp, Homo sapiens
tgttaatttaaatca

SEQ ID NO: 1514608 - DNA, 15 bp, Homo sapiens
gttaatttaaatcat

SEQ ID NO: 1514609 - DNA, 15 bp, Homo sapiens
ttaatttaaatcatt

SEQ ID NO: 1514610 - DNA, 15 bp, Homo sapiens
taatttaaatcattt

SEQ ID NO: 1514611 - DNA, 15 bp, Homo sapiens
aatttaaatcattta

SEQ ID NO: 1514612 - DNA, 15 bp, Homo sapiens
atttaaatcatttag

SEQ ID NO: 1514613 - DNA, 15 bp, Homo sapiens
tttaaatcatttagt

SEQ ID NO: 1514614 - DNA, 15 bp, Homo sapiens
ttaaatcatttagtc

SEQ ID NO: 1514615 - DNA, 15 bp, Homo sapiens
taaatcatttagtcc

SEQ ID NO: 1514616 - DNA, 15 bp, Homo sapiens
aaatcatttagtcca

SEQ ID NO: 1514617 - DNA, 15 bp, Homo sapiens
aatcatttagtccat

SEQ ID NO: 1514618 - DNA, 15 bp, Homo sapiens
atcatttagtccatc

SEQ ID NO: 1514619 - DNA, 15 bp, Homo sapiens
tcatttagtccatca

SEQ ID NO: 1514620 - DNA, 15 bp, Homo sapiens
catttagtccatcaa

SEQ ID NO: 1514621 - DNA, 15 bp, Homo sapiens
atttagtccatcaat

SEQ ID NO: 1514622 - DNA, 15 bp, Homo sapiens
tttagtccatcaatg

SEQ ID NO: 1514623 - DNA, 15 bp, Homo sapiens
ttagtccatcaatga

SEQ ID NO: 1514624 - DNA, 15 bp, Homo sapiens
tagtccatcaatgaa

SEQ ID NO: 1514625 - DNA, 15 bp, Homo sapiens
agtccatcaatgaag

SEQ ID NO: 1514626 - DNA, 15 bp, Homo sapiens
gtccatcaatgaagt

SEQ ID NO: 1514627 - DNA, 15 bp, Homo sapiens
tccatcaatgaagtc

SEQ ID NO: 1514628 - DNA, 15 bp, Homo sapiens
ccatcaatgaagtca

SEQ ID NO: 1514629 - DNA, 15 bp, Homo sapiens
catcaatgaagtcac

SEQ ID NO: 1514630 - DNA, 15 bp, Homo sapiens
atcaatgaagtcacc

SEQ ID NO: 1514631 - DNA, 15 bp, Homo sapiens
tcaatgaagtcacct

SEQ ID NO: 1514632 - DNA, 15 bp, Homo sapiens
caatgaagtcacctc

SEQ ID NO: 1514633 - DNA, 15 bp, Homo sapiens
aatgaagtcacctca

SEQ ID NO: 1514634 - DNA, 15 bp, Homo sapiens
atgaagtcacctcaa

SEQ ID NO: 1514635 - DNA, 15 bp, Homo sapiens
tgaagtcacctcaaa

SEQ ID NO: 1514636 - DNA, 15 bp, Homo sapiens
gaagtcacctcaaag

SEQ ID NO: 1514637 - DNA, 15 bp, Homo sapiens
aagtcacctcaaagc

SEQ ID NO: 1514638 - DNA, 15 bp, Homo sapiens
agtcacctcaaagcg

SEQ ID NO: 1514639 - DNA, 15 bp, Homo sapiens
gtcacctcaaagcga

SEQ ID NO: 1514640 - DNA, 15 bp, Homo sapiens
tcacctcaaagcgag

SEQ ID NO: 1514641 - DNA, 15 bp, Homo sapiens
cacctcaaagcgagc

SEQ ID NO: 1514642 - DNA, 15 bp, Homo sapiens
acctcaaagcgagca

SEQ ID NO: 1514643 - DNA, 15 bp, Homo sapiens
cctcaaagcgagcac

SEQ ID NO: 1514644 - DNA, 15 bp, Homo sapiens
ctcaaagcgagcaca

SEQ ID NO: 1514645 - DNA, 15 bp, Homo sapiens
tcaaagcgagcacat

SEQ ID NO: 1514646 - DNA, 15 bp, Homo sapiens
caaagcgagcacata

SEQ ID NO: 1514647 - DNA, 15 bp, Homo sapiens
aaagcgagcacatat

SEQ ID NO: 1514648 - DNA, 15 bp, Homo sapiens
aagcgagcacatatg

SEQ ID NO: 1514649 - DNA, 15 bp, Homo sapiens
agcgagcacatatgc

SEQ ID NO: 1514650 - DNA, 15 bp, Homo sapiens
gcgagcacatatgct

SEQ ID NO: 1514651 - DNA, 15 bp, Homo sapiens
cgagcacatatgctg

SEQ ID NO: 1514652 - DNA, 15 bp, Homo sapiens
gagcacatatgctga

SEQ ID NO: 1514653 - DNA, 15 bp, Homo sapiens
agcacatatgctgat

SEQ ID NO: 1514654 - DNA, 15 bp, Homo sapiens
gcacatatgctgatt

SEQ ID NO: 1514655 - DNA, 15 bp, Homo sapiens
cacatatgctgattg

SEQ ID NO: 1514656 - DNA, 15 bp, Homo sapiens
acatatgctgattga

SEQ ID NO: 1514657 - DNA, 15 bp, Homo sapiens
catatgctgattgac

SEQ ID NO: 1514658 - DNA, 15 bp, Homo sapiens
atatgctgattgaca

SEQ ID NO: 1514659 - DNA, 15 bp, Homo sapiens
tatgctgattgacat

SEQ ID NO: 1514660 - DNA, 15 bp, Homo sapiens
atgctgattgacatg

SEQ ID NO: 1514661 - DNA, 15 bp, Homo sapiens
tgctgattgacatgc

SEQ ID NO: 1514662 - DNA, 15 bp, Homo sapiens
gctgattgacatgca

SEQ ID NO: 1514663 - DNA, 15 bp, Homo sapiens
ctgattgacatgcac

SEQ ID NO: 1514664 - DNA, 15 bp, Homo sapiens
tgattgacatgcact

SEQ ID NO: 1514665 - DNA, 15 bp, Homo sapiens
gattgacatgcactt

SEQ ID NO: 1514666 - DNA, 15 bp, Homo sapiens
attgacatgcacttt

SEQ ID NO: 1514667 - DNA, 15 bp, Homo sapiens
ttgacatgcactttc

SEQ ID NO: 1514668 - DNA, 15 bp, Homo sapiens
tgacatgcactttcg

SEQ ID NO: 1514669 - DNA, 15 bp, Homo sapiens
gacatgcactttcgg

SEQ ID NO: 1514670 - DNA, 15 bp, Homo sapiens
acatgcactttcgga

SEQ ID NO: 1514671 - DNA, 15 bp, Homo sapiens
catgcactttcggag

SEQ ID NO: 1514672 - DNA, 15 bp, Homo sapiens
atgcactttcggagt

SEQ ID NO: 1514673 - DNA, 15 bp, Homo sapiens
tgcactttcggagtc

SEQ ID NO: 1514674 - DNA, 15 bp, Homo sapiens
gcactttcggagtct

SEQ ID NO: 1514675 - DNA, 15 bp, Homo sapiens
cactttcggagtctg

SEQ ID NO: 1514676 - DNA, 15 bp, Homo sapiens
actttcggagtctgc

SEQ ID NO: 1514677 - DNA, 15 bp, Homo sapiens
ctttcggagtctgcg

SEQ ID NO: 1514678 - DNA, 15 bp, Homo sapiens
tttcggagtctgcgc

SEQ ID NO: 1514679 - DNA, 15 bp, Homo sapiens
ttcggagtctgcgca

SEQ ID NO: 1514680 - DNA, 15 bp, Homo sapiens
tcggagtctgcgcac

SEQ ID NO: 1514681 - DNA, 15 bp, Homo sapiens
cggagtctgcgcact

SEQ ID NO: 1514682 - DNA, 15 bp, Homo sapiens
ggagtctgcgcacta

SEQ ID NO: 1514683 - DNA, 15 bp, Homo sapiens
gagtctgcgcactaa

SEQ ID NO: 1514684 - DNA, 15 bp, Homo sapiens
agtctgcgcactaag

SEQ ID NO: 1514685 - DNA, 15 bp, Homo sapiens
gtctgcgcactaagt

SEQ ID NO: 1514686 - DNA, 15 bp, Homo sapiens
tctgcgcactaagtt

SEQ ID NO: 1514687 - DNA, 15 bp, Homo sapiens
ctgcgcactaagttg

SEQ ID NO: 1514688 - DNA, 15 bp, Homo sapiens
tgcgcactaagttgt

SEQ ID NO: 1514689 - DNA, 15 bp, Homo sapiens
gcgcactaagttgtc

SEQ ID NO: 1514690 - DNA, 15 bp, Homo sapiens
cgcactaagttgtct

SEQ ID NO: 1514691 - DNA, 15 bp, Homo sapiens
gcactaagttgtctc

SEQ ID NO: 1514692 - DNA, 15 bp, Homo sapiens
cactaagttgtctct

SEQ ID NO: 1514693 - DNA, 15 bp, Homo sapiens
actaagttgtctctg

SEQ ID NO: 1514694 - DNA, 15 bp, Homo sapiens
ctaagttgtctctga

SEQ ID NO: 1514695 - DNA, 15 bp, Homo sapiens
taagttgtctctgat

SEQ ID NO: 1514696 - DNA, 15 bp, Homo sapiens
aagttgtctctgata

SEQ ID NO: 1514697 - DNA, 15 bp, Homo sapiens
agttgtctctgataa

SEQ ID NO: 1514698 - DNA, 15 bp, Homo sapiens
gttgtctctgataat

SEQ ID NO: 1514699 - DNA, 15 bp, Homo sapiens
ttgtctctgataatg

SEQ ID NO: 1514700 - DNA, 15 bp, Homo sapiens
tgtctctgataatga

SEQ ID NO: 1514701 - DNA, 15 bp, Homo sapiens
gtctctgataatgag

SEQ ID NO: 1514702 - DNA, 15 bp, Homo sapiens
tctctgataatgaga

SEQ ID NO: 1514703 - DNA, 15 bp, Homo sapiens
ctctgataatgagaa

SEQ ID NO: 1514704 - DNA, 15 bp, Homo sapiens
tctgataatgagaaa

SEQ ID NO: 1514705 - DNA, 15 bp, Homo sapiens
ctgataatgagaaat

SEQ ID NO: 1514706 - DNA, 15 bp, Homo sapiens
tgataatgagaaatg

SEQ ID NO: 1514707 - DNA, 15 bp, Homo sapiens
gataatgagaaatga

SEQ ID NO: 1514708 - DNA, 15 bp, Homo sapiens
ataatgagaaatgaa

SEQ ID NO: 1514709 - DNA, 15 bp, Homo sapiens
taatgagaaatgaag

SEQ ID NO: 1514710 - DNA, 15 bp, Homo sapiens
aatgagaaatgaaga

SEQ ID NO: 1514711 - DNA, 15 bp, Homo sapiens
atgagaaatgaagaa

SEQ ID NO: 1514712 - DNA, 15 bp, Homo sapiens
tgagaaatgaagaag

SEQ ID NO: 1514713 - DNA, 15 bp, Homo sapiens
gagaaatgaagaagc

SEQ ID NO: 1514714 - DNA, 15 bp, Homo sapiens
agaaatgaagaagct

SEQ ID NO: 1514715 - DNA, 15 bp, Homo sapiens
gaaatgaagaagcta

SEQ ID NO: 1514716 - DNA, 15 bp, Homo sapiens
aaatgaagaagctag

SEQ ID NO: 1514717 - DNA, 15 bp, Homo sapiens
aatgaagaagctagt

SEQ ID NO: 1514718 - DNA, 15 bp, Homo sapiens
atgaagaagctagta

SEQ ID NO: 1514719 - DNA, 15 bp, Homo sapiens
tgaagaagctagtaa

SEQ ID NO: 1514720 - DNA, 15 bp, Homo sapiens
gaagaagctagtaag

SEQ ID NO: 1514721 - DNA, 15 bp, Homo sapiens
aagaagctagtaagc

SEQ ID NO: 1514722 - DNA, 15 bp, Homo sapiens
agaagctagtaagca

SEQ ID NO: 1514723 - DNA, 15 bp, Homo sapiens
gaagctagtaagcag

SEQ ID NO: 1514724 - DNA, 15 bp, Homo sapiens
aagctagtaagcagc

SEQ ID NO: 1514725 - DNA, 15 bp, Homo sapiens
agctagtaagcagct

SEQ ID NO: 1514726 - DNA, 15 bp, Homo sapiens
gctagtaagcagctg

SEQ ID NO: 1514727 - DNA, 15 bp, Homo sapiens
ctagtaagcagctgg

SEQ ID NO: 1514728 - DNA, 15 bp, Homo sapiens
tagtaagcagctgga

SEQ ID NO: 1514729 - DNA, 15 bp, Homo sapiens
agtaagcagctggag

SEQ ID NO: 1514730 - DNA, 15 bp, Homo sapiens
gtaagcagctggagg

SEQ ID NO: 1514731 - DNA, 15 bp, Homo sapiens
taagcagctggaggt

SEQ ID NO: 1514732 - DNA, 15 bp, Homo sapiens
aagcagctggaggta

SEQ ID NO: 1514733 - DNA, 15 bp, Homo sapiens
agcagctggaggtat

SEQ ID NO: 1514734 - DNA, 15 bp, Homo sapiens
gcagctggaggtatg

SEQ ID NO: 1514735 - DNA, 15 bp, Homo sapiens
cagctggaggtatgt

SEQ ID NO: 1514736 - DNA, 15 bp, Homo sapiens
agctggaggtatgtc

SEQ ID NO: 1514737 - DNA, 15 bp, Homo sapiens
gctggaggtatgtca

SEQ ID NO: 1514738 - DNA, 15 bp, Homo sapiens
ctggaggtatgtcac

SEQ ID NO: 1514739 - DNA, 15 bp, Homo sapiens
tggaggtatgtcact

SEQ ID NO: 1514740 - DNA, 15 bp, Homo sapiens
ggaggtatgtcactt

SEQ ID NO: 1514741 - DNA, 15 bp, Homo sapiens
gaggtatgtcacttt

SEQ ID NO: 1514742 - DNA, 15 bp, Homo sapiens
aggtatgtcactttc

SEQ ID NO: 1514743 - DNA, 15 bp, Homo sapiens
ggtatgtcactttcc

SEQ ID NO: 1514744 - DNA, 15 bp, Homo sapiens
gtatgtcactttccc

SEQ ID NO: 1514745 - DNA, 15 bp, Homo sapiens
tatgtcactttccct

SEQ ID NO: 1514746 - DNA, 15 bp, Homo sapiens
atgtcactttcccta

SEQ ID NO: 1514747 - DNA, 15 bp, Homo sapiens
tgtcactttccctag

SEQ ID NO: 1514748 - DNA, 15 bp, Homo sapiens
gtcactttccctagc

SEQ ID NO: 1514749 - DNA, 15 bp, Homo sapiens
tcactttccctagca

SEQ ID NO: 1514750 - DNA, 15 bp, Homo sapiens
cactttccctagcac

SEQ ID NO: 1514751 - DNA, 15 bp, Homo sapiens
actttccctagcact

SEQ ID NO: 1514752 - DNA, 15 bp, Homo sapiens
ctttccctagcactg

SEQ ID NO: 1514753 - DNA, 15 bp, Homo sapiens
tttccctagcactgc

SEQ ID NO: 1514754 - DNA, 15 bp, Homo sapiens
ttccctagcactgct

SEQ ID NO: 1514755 - DNA, 15 bp, Homo sapiens
tccctagcactgctt

SEQ ID NO: 1514756 - DNA, 15 bp, Homo sapiens
ccctagcactgcttg

SEQ ID NO: 1514757 - DNA, 15 bp, Homo sapiens
cctagcactgcttgt

SEQ ID NO: 1514758 - DNA, 15 bp, Homo sapiens
ctagcactgcttgta

SEQ ID NO: 1514759 - DNA, 15 bp, Homo sapiens
tagcactgcttgtaa

SEQ ID NO: 1514760 - DNA, 15 bp, Homo sapiens
agcactgcttgtaag

SEQ ID NO: 1514761 - DNA, 15 bp, Homo sapiens
gcactgcttgtaagg

SEQ ID NO: 1514762 - DNA, 15 bp, Homo sapiens
cactgcttgtaaggg

SEQ ID NO: 1514763 - DNA, 15 bp, Homo sapiens
actgcttgtaagggt

SEQ ID NO: 1514764 - DNA, 15 bp, Homo sapiens
ctgcttgtaagggta

SEQ ID NO: 1514765 - DNA, 15 bp, Homo sapiens
tgcttgtaagggtac

SEQ ID NO: 1514766 - DNA, 15 bp, Homo sapiens
gcttgtaagggtacc

SEQ ID NO: 1514767 - DNA, 15 bp, Homo sapiens
cttgtaagggtacct

SEQ ID NO: 1514768 - DNA, 15 bp, Homo sapiens
ttgtaagggtaccta

SEQ ID NO: 1514769 - DNA, 15 bp, Homo sapiens
tgtaagggtacctag

SEQ ID NO: 1514770 - DNA, 15 bp, Homo sapiens
gtaagggtacctagg

SEQ ID NO: 1514771 - DNA, 15 bp, Homo sapiens
taagggtacctagga

SEQ ID NO: 1514772 - DNA, 15 bp, Homo sapiens
aagggtacctaggaa

SEQ ID NO: 1514773 - DNA, 15 bp, Homo sapiens
agggtacctaggaac

SEQ ID NO: 1514774 - DNA, 15 bp, Homo sapiens
gggtacctaggaacg

SEQ ID NO: 1514775 - DNA, 15 bp, Homo sapiens
ggtacctaggaacga

SEQ ID NO: 1514776 - DNA, 15 bp, Homo sapiens
gtacctaggaacgat

SEQ ID NO: 1514777 - DNA, 15 bp, Homo sapiens
tacctaggaacgatt

SEQ ID NO: 1514778 - DNA, 15 bp, Homo sapiens
acctaggaacgatta

SEQ ID NO: 1514779 - DNA, 15 bp, Homo sapiens
cctaggaacgattaa

SEQ ID NO: 1514780 - DNA, 15 bp, Homo sapiens
ctaggaacgattaac

SEQ ID NO: 1514781 - DNA, 15 bp, Homo sapiens
taggaacgattaact

SEQ ID NO: 1514782 - DNA, 15 bp, Homo sapiens
aggaacgattaactg

SEQ ID NO: 1514783 - DNA, 15 bp, Homo sapiens
ggaacgattaactgt

SEQ ID NO: 1514784 - DNA, 15 bp, Homo sapiens
gaacgattaactgta

SEQ ID NO: 1514785 - DNA, 15 bp, Homo sapiens
aacgattaactgtat

SEQ ID NO: 1514786 - DNA, 15 bp, Homo sapiens
acgattaactgtatc

SEQ ID NO: 1514787 - DNA, 15 bp, Homo sapiens
cgattaactgtatca

SEQ ID NO: 1514788 - DNA, 15 bp, Homo sapiens
gattaactgtatcat

SEQ ID NO: 1514789 - DNA, 15 bp, Homo sapiens
attaactgtatcatt

SEQ ID NO: 1514790 - DNA, 15 bp, Homo sapiens
ttaactgtatcattc

SEQ ID NO: 1514791 - DNA, 15 bp, Homo sapiens
taactgtatcattcc

SEQ ID NO: 1514792 - DNA, 15 bp, Homo sapiens
aactgtatcattcca

SEQ ID NO: 1514793 - DNA, 15 bp, Homo sapiens
actgtatcattccac

SEQ ID NO: 1514794 - DNA, 15 bp, Homo sapiens
ctgtatcattccaca

SEQ ID NO: 1514795 - DNA, 15 bp, Homo sapiens
tgtatcattccacaa

SEQ ID NO: 1514796 - DNA, 15 bp, Homo sapiens
gtatcattccacaac

SEQ ID NO: 1514797 - DNA, 15 bp, Homo sapiens
gagcacagatgaaac

SEQ ID NO: 1514798 - DNA, 15 bp, Homo sapiens
agcacagatgaaacg

SEQ ID NO: 1514799 - DNA, 15 bp, Homo sapiens
gcacagatgaaacgg

SEQ ID NO: 1514800 - DNA, 15 bp, Homo sapiens
cacagatgaaacgga

SEQ ID NO: 1514801 - DNA, 15 bp, Homo sapiens
acagatgaaacggac

SEQ ID NO: 1514802 - DNA, 15 bp, Homo sapiens
cagatgaaacggacc

SEQ ID NO: 1514803 - DNA, 15 bp, Homo sapiens
agatgaaacggacca

SEQ ID NO: 1514804 - DNA, 15 bp, Homo sapiens
gatgaaacggaccaa

SEQ ID NO: 1514805 - DNA, 15 bp, Homo sapiens
atgaaacggaccaaa

SEQ ID NO: 1514806 - DNA, 15 bp, Homo sapiens
tgaaacggaccaaat

SEQ ID NO: 1514807 - DNA, 15 bp, Homo sapiens
gaaacggaccaaatc

SEQ ID NO: 1514808 - DNA, 15 bp, Homo sapiens
aaacggaccaaatcc

SEQ ID NO: 1514809 - DNA, 15 bp, Homo sapiens
aacggaccaaatcct

SEQ ID NO: 1514810 - DNA, 15 bp, Homo sapiens
cggaccaaatcctta

SEQ ID NO: 1514811 - DNA, 15 bp, Homo sapiens
ggaccaaatccttac

SEQ ID NO: 1514812 - DNA, 15 bp, Homo sapiens
gaccaaatccttacc

SEQ ID NO: 1514813 - DNA, 15 bp, Homo sapiens
accaaatccttacct

SEQ ID NO: 1514814 - DNA, 15 bp, Homo sapiens
ccaaatccttacctg

SEQ ID NO: 1514815 - DNA, 15 bp, Homo sapiens
caaatccttacctga

SEQ ID NO: 1514816 - DNA, 15 bp, Homo sapiens
aaatccttacctgac

SEQ ID NO: 1514817 - DNA, 15 bp, Homo sapiens
aatccttacctgacc

SEQ ID NO: 1514818 - DNA, 15 bp, Homo sapiens
atccttacctgacct

SEQ ID NO: 1514819 - DNA, 15 bp, Homo sapiens
tccttacctgacctt

SEQ ID NO: 1514820 - DNA, 15 bp, Homo sapiens
ccttacctgaccttt

SEQ ID NO: 1514821 - DNA, 15 bp, Homo sapiens
cttacctgacctttc

SEQ ID NO: 1514822 - DNA, 15 bp, Homo sapiens
ttacctgacctttct

SEQ ID NO: 1514823 - DNA, 15 bp, Homo sapiens
tacctgacctttctt

SEQ ID NO: 1514824 - DNA, 15 bp, Homo sapiens
acctgacctttcttt

SEQ ID NO: 1514825 - DNA, 15 bp, Homo sapiens
cctgacctttctttt

SEQ ID NO: 1514826 - DNA, 15 bp, Homo sapiens
ctgacctttcttttc

SEQ ID NO: 1514827 - DNA, 15 bp, Homo sapiens
tgacctttcttttcc

SEQ ID NO: 1514828 - DNA, 15 bp, Homo sapiens
gacctttcttttcca

SEQ ID NO: 1514829 - DNA, 15 bp, Homo sapiens
acctttcttttccag

SEQ ID NO: 1514830 - DNA, 15 bp, Homo sapiens
cctttcttttccaga

SEQ ID NO: 1514831 - DNA, 15 bp, Homo sapiens
ctttcttttccagaa

SEQ ID NO: 1514832 - DNA, 15 bp, Homo sapiens
tttcttttccagaag

SEQ ID NO: 1514833 - DNA, 15 bp, Homo sapiens
ttcttttccagaagc

SEQ ID NO: 1514834 - DNA, 15 bp, Homo sapiens
tcttttccagaagct

SEQ ID NO: 1514835 - DNA, 15 bp, Homo sapiens
cttttccagaagctg

SEQ ID NO: 1514836 - DNA, 15 bp, Homo sapiens
ttttccagaagctgc

SEQ ID NO: 1514837 - DNA, 15 bp, Homo sapiens
tttccagaagctgcc

SEQ ID NO: 1514838 - DNA, 15 bp, Homo sapiens
ttccagaagctgcca

SEQ ID NO: 1514839 - DNA, 15 bp, Homo sapiens
tccagaagctgccac

SEQ ID NO: 1514840 - DNA, 15 bp, Homo sapiens
ccagaagctgccaca

SEQ ID NO: 1514841 - DNA, 15 bp, Homo sapiens
cagaagctgccacaa

SEQ ID NO: 1514842 - DNA, 15 bp, Homo sapiens
agaagctgccacaac

SEQ ID NO: 1514843 - DNA, 15 bp, Homo sapiens
gaagctgccacaacc

SEQ ID NO: 1514844 - DNA, 15 bp, Homo sapiens
aagctgccacaacca

SEQ ID NO: 1514845 - DNA, 15 bp, Homo sapiens
agctgccacaaccaa

SEQ ID NO: 1514846 - DNA, 15 bp, Homo sapiens
gctgccacaaccaag

SEQ ID NO: 1514847 - DNA, 15 bp, Homo sapiens
ctgccacaaccaaga

SEQ ID NO: 1514848 - DNA, 15 bp, Homo sapiens
tgccacaaccaagat

SEQ ID NO: 1514849 - DNA, 15 bp, Homo sapiens
gccacaaccaagatt

SEQ ID NO: 1514850 - DNA, 15 bp, Homo sapiens
ccacaaccaagattt

SEQ ID NO: 1514851 - DNA, 15 bp, Homo sapiens
cacaaccaagatttt

SEQ ID NO: 1514852 - DNA, 15 bp, Homo sapiens
acaaccaagatttta

SEQ ID NO: 1514853 - DNA, 15 bp, Homo sapiens
caaccaagattttag

SEQ ID NO: 1514854 - DNA, 15 bp, Homo sapiens
aaccaagattttaga

SEQ ID NO: 1514855 - DNA, 15 bp, Homo sapiens
accaagattttagaa

SEQ ID NO: 1514856 - DNA, 15 bp, Homo sapiens
ccaagattttagaaa

SEQ ID NO: 1514857 - DNA, 15 bp, Homo sapiens
caagattttagaaac

SEQ ID NO: 1514858 - DNA, 15 bp, Homo sapiens
aagattttagaaact

SEQ ID NO: 1514859 - DNA, 15 bp, Homo sapiens
agattttagaaactt

SEQ ID NO: 1514860 - DNA, 15 bp, Homo sapiens
gattttagaaactta

SEQ ID NO: 1514861 - DNA, 15 bp, Homo sapiens
attttagaaacttag

SEQ ID NO: 1514862 - DNA, 15 bp, Homo sapiens
ttttagaaacttagc

SEQ ID NO: 1514863 - DNA, 15 bp, Homo sapiens
tttagaaacttagct

SEQ ID NO: 1514864 - DNA, 15 bp, Homo sapiens
ttagaaacttagctt

SEQ ID NO: 1514865 - DNA, 15 bp, Homo sapiens
tagaaacttagcttt

SEQ ID NO: 1514866 - DNA, 15 bp, Homo sapiens
agaaacttagcttta

SEQ ID NO: 1514867 - DNA, 15 bp, Homo sapiens
gaaacttagctttac

SEQ ID NO: 1514868 - DNA, 15 bp, Homo sapiens
aaacttagctttaca

SEQ ID NO: 1514869 - DNA, 15 bp, Homo sapiens
aacttagctttacag

SEQ ID NO: 1514870 - DNA, 15 bp, Homo sapiens
acttagctttacagg

SEQ ID NO: 1514871 - DNA, 15 bp, Homo sapiens
cttagctttacagga

SEQ ID NO: 1514872 - DNA, 15 bp, Homo sapiens
ttagctttacaggag

SEQ ID NO: 1514873 - DNA, 15 bp, Homo sapiens
tagctttacaggagc

SEQ ID NO: 1514874 - DNA, 15 bp, Homo sapiens
agctttacaggagct

SEQ ID NO: 1514875 - DNA, 15 bp, Homo sapiens
gctttacaggagctt

SEQ ID NO: 1514876 - DNA, 15 bp, Homo sapiens
ctttacaggagcttc

SEQ ID NO: 1514877 - DNA, 15 bp, Homo sapiens
tttacaggagcttct

SEQ ID NO: 1514878 - DNA, 15 bp, Homo sapiens
ttacaggagcttctc

SEQ ID NO: 1514879 - DNA, 15 bp, Homo sapiens
tacaggagcttctcc

SEQ ID NO: 1514880 - DNA, 15 bp, Homo sapiens
acaggagcttctcca

SEQ ID NO: 1514881 - DNA, 15 bp, Homo sapiens
caggagcttctccaa

SEQ ID NO: 1514882 - DNA, 15 bp, Homo sapiens
aggagcttctccaat

SEQ ID NO: 1514883 - DNA, 15 bp, Homo sapiens
ggagcttctccaatg

SEQ ID NO: 1514884 - DNA, 15 bp, Homo sapiens
gagcttctccaatga

SEQ ID NO: 1514885 - DNA, 15 bp, Homo sapiens
agcttctccaatgac

SEQ ID NO: 1514886 - DNA, 15 bp, Homo sapiens
gcttctccaatgact

SEQ ID NO: 1514887 - DNA, 15 bp, Homo sapiens
cttctccaatgactg

SEQ ID NO: 1514888 - DNA, 15 bp, Homo sapiens
ttctccaatgactgt

SEQ ID NO: 1514889 - DNA, 15 bp, Homo sapiens
tctccaatgactgtt

SEQ ID NO: 1514890 - DNA, 15 bp, Homo sapiens
ctccaatgactgttc

SEQ ID NO: 1514891 - DNA, 15 bp, Homo sapiens
tccaatgactgttca

SEQ ID NO: 1514892 - DNA, 15 bp, Homo sapiens
ccaatgactgttcat

SEQ ID NO: 1514893 - DNA, 15 bp, Homo sapiens
caatgactgttcatg

SEQ ID NO: 1514894 - DNA, 15 bp, Homo sapiens
aatgactgttcatgt

SEQ ID NO: 1514895 - DNA, 15 bp, Homo sapiens
atgactgttcatgta

SEQ ID NO: 1514896 - DNA, 15 bp, Homo sapiens
tgactgttcatgtag

SEQ ID NO: 1514897 - DNA, 15 bp, Homo sapiens
gactgttcatgtaga

SEQ ID NO: 1514898 - DNA, 15 bp, Homo sapiens
actgttcatgtagac

SEQ ID NO: 1514899 - DNA, 15 bp, Homo sapiens
ctgttcatgtagaca

SEQ ID NO: 1514900 - DNA, 15 bp, Homo sapiens
tgttcatgtagacag

SEQ ID NO: 1514901 - DNA, 15 bp, Homo sapiens
gttcatgtagacagt

SEQ ID NO: 1514902 - DNA, 15 bp, Homo sapiens
ttcatgtagacagtc

SEQ ID NO: 1514903 - DNA, 15 bp, Homo sapiens
tcatgtagacagtct

SEQ ID NO: 1514904 - DNA, 15 bp, Homo sapiens
catgtagacagtctc

SEQ ID NO: 1514905 - DNA, 15 bp, Homo sapiens
atgtagacagtctct

SEQ ID NO: 1514906 - DNA, 15 bp, Homo sapiens
tgtagacagtctcta

SEQ ID NO: 1514907 - DNA, 15 bp, Homo sapiens
gtagacagtctctat

SEQ ID NO: 1514908 - DNA, 15 bp, Homo sapiens
tagacagtctctatg

SEQ ID NO: 1514909 - DNA, 15 bp, Homo sapiens
agacagtctctatga

SEQ ID NO: 1514910 - DNA, 15 bp, Homo sapiens
gacagtctctatgat

SEQ ID NO: 1514911 - DNA, 15 bp, Homo sapiens
acagtctctatgata

SEQ ID NO: 1514912 - DNA, 15 bp, Homo sapiens
cagtctctatgataa

SEQ ID NO: 1514913 - DNA, 15 bp, Homo sapiens
agtctctatgataac

SEQ ID NO: 1514914 - DNA, 15 bp, Homo sapiens
gtctctatgataacc

SEQ ID NO: 1514915 - DNA, 15 bp, Homo sapiens
tctctatgataacct

SEQ ID NO: 1514916 - DNA, 15 bp, Homo sapiens
ctctatgataacctc

SEQ ID NO: 1514917 - DNA, 15 bp, Homo sapiens
tctatgataacctct

SEQ ID NO: 1514918 - DNA, 15 bp, Homo sapiens
ctatgataacctctg

SEQ ID NO: 1514919 - DNA, 15 bp, Homo sapiens
tatgataacctctgc

SEQ ID NO: 1514920 - DNA, 15 bp, Homo sapiens
atgataacctctgct

SEQ ID NO: 1514921 - DNA, 15 bp, Homo sapiens
tgataacctctgctt

SEQ ID NO: 1514922 - DNA, 15 bp, Homo sapiens
gataacctctgcttc

SEQ ID NO: 1514923 - DNA, 15 bp, Homo sapiens
ataacctctgcttca

SEQ ID NO: 1514924 - DNA, 15 bp, Homo sapiens
taacctctgcttcac

SEQ ID NO: 1514925 - DNA, 15 bp, Homo sapiens
aacctctgcttcact

SEQ ID NO: 1514926 - DNA, 15 bp, Homo sapiens
acctctgcttcactg

SEQ ID NO: 1514927 - DNA, 15 bp, Homo sapiens
cctctgcttcactga

SEQ ID NO: 1514928 - DNA, 15 bp, Homo sapiens
ctctgcttcactgag

SEQ ID NO: 1514929 - DNA, 15 bp, Homo sapiens
tctgcttcactgaga

SEQ ID NO: 1514930 - DNA, 15 bp, Homo sapiens
ctgcttcactgagac

SEQ ID NO: 1514931 - DNA, 15 bp, Homo sapiens
tgcttcactgagacg

SEQ ID NO: 1514932 - DNA, 15 bp, Homo sapiens
gcttcactgagacgc

SEQ ID NO: 1514933 - DNA, 15 bp, Homo sapiens
cttcactgagacgcc

SEQ ID NO: 1514934 - DNA, 15 bp, Homo sapiens
ttcactgagacgcct

SEQ ID NO: 1514935 - DNA, 15 bp, Homo sapiens
tcactgagacgccta

SEQ ID NO: 1514936 - DNA, 15 bp, Homo sapiens
cactgagacgcctac

SEQ ID NO: 1514937 - DNA, 15 bp, Homo sapiens
actgagacgcctact

SEQ ID NO: 1514938 - DNA, 15 bp, Homo sapiens
ctgagacgcctacta

SEQ ID NO: 1514939 - DNA, 15 bp, Homo sapiens
tgagacgcctactac

SEQ ID NO: 1514940 - DNA, 15 bp, Homo sapiens
gagacgcctactact

SEQ ID NO: 1514941 - DNA, 15 bp, Homo sapiens
agacgcctactacta

SEQ ID NO: 1514942 - DNA, 15 bp, Homo sapiens
gacgcctactactac

SEQ ID NO: 1514943 - DNA, 15 bp, Homo sapiens
acgcctactactact

SEQ ID NO: 1514944 - DNA, 15 bp, Homo sapiens
cgcctactactacta

SEQ ID NO: 1514945 - DNA, 15 bp, Homo sapiens
gcctactactactat

SEQ ID NO: 1514946 - DNA, 15 bp, Homo sapiens
cctactactactata

SEQ ID NO: 1514947 - DNA, 15 bp, Homo sapiens
ctactactactatag

SEQ ID NO: 1514948 - DNA, 15 bp, Homo sapiens
tactactactatagt

SEQ ID NO: 1514949 - DNA, 15 bp, Homo sapiens
actactactatagtt

SEQ ID NO: 1514950 - DNA, 15 bp, Homo sapiens
ctactactatagtta

SEQ ID NO: 1514951 - DNA, 15 bp, Homo sapiens
tactactatagttat

SEQ ID NO: 1514952 - DNA, 15 bp, Homo sapiens
actactatagttatg

SEQ ID NO: 1514953 - DNA, 15 bp, Homo sapiens
ctactatagttatga

SEQ ID NO: 1514954 - DNA, 15 bp, Homo sapiens
tactatagttatgaa

SEQ ID NO: 1514955 - DNA, 15 bp, Homo sapiens
actatagttatgaat

SEQ ID NO: 1514956 - DNA, 15 bp, Homo sapiens
ctatagttatgaatc

SEQ ID NO: 1514957 - DNA, 15 bp, Homo sapiens
tatagttatgaatct

SEQ ID NO: 1514958 - DNA, 15 bp, Homo sapiens
atagttatgaatctg

SEQ ID NO: 1514959 - DNA, 15 bp, Homo sapiens
tagttatgaatctga

SEQ ID NO: 1514960 - DNA, 15 bp, Homo sapiens
agttatgaatctgat

SEQ ID NO: 1514961 - DNA, 15 bp, Homo sapiens
gttatgaatctgatt

SEQ ID NO: 1514962 - DNA, 15 bp, Homo sapiens
ttatgaatctgattc

SEQ ID NO: 1514963 - DNA, 15 bp, Homo sapiens
tatgaatctgattcc

SEQ ID NO: 1514964 - DNA, 15 bp, Homo sapiens
atgaatctgattccc

SEQ ID NO: 1514965 - DNA, 15 bp, Homo sapiens
tgaatctgattcccc

SEQ ID NO: 1514966 - DNA, 15 bp, Homo sapiens
gaatctgattccccg

SEQ ID NO: 1514967 - DNA, 15 bp, Homo sapiens
aatctgattccccgt

SEQ ID NO: 1514968 - DNA, 15 bp, Homo sapiens
atctgattccccgta

SEQ ID NO: 1514969 - DNA, 15 bp, Homo sapiens
tctgattccccgtag

SEQ ID NO: 1514970 - DNA, 15 bp, Homo sapiens
ctgattccccgtagc

SEQ ID NO: 1514971 - DNA, 15 bp, Homo sapiens
tgattccccgtagcc

SEQ ID NO: 1514972 - DNA, 15 bp, Homo sapiens
gattccccgtagcca

SEQ ID NO: 1514973 - DNA, 15 bp, Homo sapiens
attccccgtagccag

SEQ ID NO: 1514974 - DNA, 15 bp, Homo sapiens
ttccccgtagccagt

SEQ ID NO: 1514975 - DNA, 15 bp, Homo sapiens
tccccgtagccagta

SEQ ID NO: 1514976 - DNA, 15 bp, Homo sapiens
ccccgtagccagtaa

SEQ ID NO: 1514977 - DNA, 15 bp, Homo sapiens
cccgtagccagtaaa

SEQ ID NO: 1514978 - DNA, 15 bp, Homo sapiens
ccgtagccagtaaat

SEQ ID NO: 1514979 - DNA, 15 bp, Homo sapiens
cgtagccagtaaatg

SEQ ID NO: 1514980 - DNA, 15 bp, Homo sapiens
gtagccagtaaatga

SEQ ID NO: 1514981 - DNA, 15 bp, Homo sapiens
tagccagtaaatgag

SEQ ID NO: 1514982 - DNA, 15 bp, Homo sapiens
agccagtaaatgaga

SEQ ID NO: 1514983 - DNA, 15 bp, Homo sapiens
gccagtaaatgagat

SEQ ID NO: 1514984 - DNA, 15 bp, Homo sapiens
ccagtaaatgagatg

SEQ ID NO: 1514985 - DNA, 15 bp, Homo sapiens
cagtaaatgagatgt

SEQ ID NO: 1514986 - DNA, 15 bp, Homo sapiens
agtaaatgagatgtt

SEQ ID NO: 1514987 - DNA, 15 bp, Homo sapiens
gtaaatgagatgttt

SEQ ID NO: 1514988 - DNA, 15 bp, Homo sapiens
taaatgagatgttta

SEQ ID NO: 1514989 - DNA, 15 bp, Homo sapiens
aaatgagatgtttat

SEQ ID NO: 1514990 - DNA, 15 bp, Homo sapiens
aatgagatgtttatg

SEQ ID NO: 1514991 - DNA, 15 bp, Homo sapiens
atgagatgtttatga

SEQ ID NO: 1514992 - DNA, 15 bp, Homo sapiens
tgagatgtttatgag

SEQ ID NO: 1514993 - DNA, 15 bp, Homo sapiens
gagatgtttatgagt

SEQ ID NO: 1514994 - DNA, 15 bp, Homo sapiens
agatgtttatgagtg

SEQ ID NO: 1514995 - DNA, 15 bp, Homo sapiens
gatgtttatgagtgg

SEQ ID NO: 1514996 - DNA, 15 bp, Homo sapiens
atgtttatgagtgga

SEQ ID NO: 1514997 - DNA, 15 bp, Homo sapiens
tgtttatgagtggat

SEQ ID NO: 1514998 - DNA, 15 bp, Homo sapiens
gtttatgagtggatt

SEQ ID NO: 1514999 - DNA, 15 bp, Homo sapiens
tttatgagtggattg

SEQ ID NO: 1515000 - DNA, 15 bp, Homo sapiens
ttatgagtggattgg

SEQ ID NO: 1515001 - DNA, 15 bp, Homo sapiens
tatgagtggattgga

SEQ ID NO: 1515002 - DNA, 15 bp, Homo sapiens
atgagtggattggaa

SEQ ID NO: 1515003 - DNA, 15 bp, Homo sapiens
tgagtggattggaag

SEQ ID NO: 1515004 - DNA, 15 bp, Homo sapiens
gagtggattggaagg

SEQ ID NO: 1515005 - DNA, 15 bp, Homo sapiens
agtggattggaagga

SEQ ID NO: 1515006 - DNA, 15 bp, Homo sapiens
gtggattggaaggac

SEQ ID NO: 1515007 - DNA, 15 bp, Homo sapiens
tggattggaaggaca

SEQ ID NO: 1515008 - DNA, 15 bp, Homo sapiens
ggattggaaggacag

SEQ ID NO: 1515009 - DNA, 15 bp, Homo sapiens
gattggaaggacagt

SEQ ID NO: 1515010 - DNA, 15 bp, Homo sapiens
attggaaggacagtg

SEQ ID NO: 1515011 - DNA, 15 bp, Homo sapiens
ttggaaggacagtgg

SEQ ID NO: 1515012 - DNA, 15 bp, Homo sapiens
tggaaggacagtggt

SEQ ID NO: 1515013 - DNA, 15 bp, Homo sapiens
ggaaggacagtggtt

SEQ ID NO: 1515014 - DNA, 15 bp, Homo sapiens
gaaggacagtggtta

SEQ ID NO: 1515015 - DNA, 15 bp, Homo sapiens
aaggacagtggttag

SEQ ID NO: 1515016 - DNA, 15 bp, Homo sapiens
aggacagtggttaga

SEQ ID NO: 1515017 - DNA, 15 bp, Homo sapiens
ggacagtggttagaa

SEQ ID NO: 1515018 - DNA, 15 bp, Homo sapiens
gacagtggttagaaa

SEQ ID NO: 1515019 - DNA, 15 bp, Homo sapiens
acagtggttagaaat

SEQ ID NO: 1515020 - DNA, 15 bp, Homo sapiens
cagtggttagaaatg

SEQ ID NO: 1515021 - DNA, 15 bp, Homo sapiens
agtggttagaaatga

SEQ ID NO: 1515022 - DNA, 15 bp, Homo sapiens
gtggttagaaatgag

SEQ ID NO: 1515023 - DNA, 15 bp, Homo sapiens
tggttagaaatgagg

SEQ ID NO: 1515024 - DNA, 15 bp, Homo sapiens
ggttagaaatgaggt

SEQ ID NO: 1515025 - DNA, 15 bp, Homo sapiens
gttagaaatgaggtt

SEQ ID NO: 1515026 - DNA, 15 bp, Homo sapiens
ttagaaatgaggttt

SEQ ID NO: 1515027 - DNA, 15 bp, Homo sapiens
tagaaatgaggtttc

SEQ ID NO: 1515028 - DNA, 15 bp, Homo sapiens
agaaatgaggtttca

SEQ ID NO: 1515029 - DNA, 15 bp, Homo sapiens
gaaatgaggtttcat

SEQ ID NO: 1515030 - DNA, 15 bp, Homo sapiens
aaatgaggtttcatc

SEQ ID NO: 1515031 - DNA, 15 bp, Homo sapiens
aatgaggtttcatct

SEQ ID NO: 1515032 - DNA, 15 bp, Homo sapiens
atgaggtttcatctg

SEQ ID NO: 1515033 - DNA, 15 bp, Homo sapiens
tgaggtttcatctgg

SEQ ID NO: 1515034 - DNA, 15 bp, Homo sapiens
gaggtttcatctggt

SEQ ID NO: 1515035 - DNA, 15 bp, Homo sapiens
aggtttcatctggtt

SEQ ID NO: 1515036 - DNA, 15 bp, Homo sapiens
ggtttcatctggttt

SEQ ID NO: 1515037 - DNA, 15 bp, Homo sapiens
gtttcatctggtttt

SEQ ID NO: 1515038 - DNA, 15 bp, Homo sapiens
tttcatctggtttta

SEQ ID NO: 1515039 - DNA, 15 bp, Homo sapiens
ttcatctggttttaa

SEQ ID NO: 1515040 - DNA, 15 bp, Homo sapiens
tcatctggttttaac

SEQ ID NO: 1515041 - DNA, 15 bp, Homo sapiens
catctggttttaaca

SEQ ID NO: 1515042 - DNA, 15 bp, Homo sapiens
atctggttttaacag

SEQ ID NO: 1515043 - DNA, 15 bp, Homo sapiens
tctggttttaacaga

SEQ ID NO: 1515044 - DNA, 15 bp, Homo sapiens
ctggttttaacagaa

SEQ ID NO: 1515045 - DNA, 15 bp, Homo sapiens
tggttttaacagaac

SEQ ID NO: 1515046 - DNA, 15 bp, Homo sapiens
ggttttaacagaacc

SEQ ID NO: 1515047 - DNA, 15 bp, Homo sapiens
gttttaacagaaccc

SEQ ID NO: 1515048 - DNA, 15 bp, Homo sapiens
ttttaacagaaccca

SEQ ID NO: 1515049 - DNA, 15 bp, Homo sapiens
tttaacagaacccaa

SEQ ID NO: 1515050 - DNA, 15 bp, Homo sapiens
ttaacagaacccaac

SEQ ID NO: 1515051 - DNA, 15 bp, Homo sapiens
taacagaacccaaca

SEQ ID NO: 1515052 - DNA, 15 bp, Homo sapiens
aacagaacccaacat

SEQ ID NO: 1515053 - DNA, 15 bp, Homo sapiens
acagaacccaacata

SEQ ID NO: 1515054 - DNA, 15 bp, Homo sapiens
cagaacccaacatac

SEQ ID NO: 1515055 - DNA, 15 bp, Homo sapiens
agaacccaacatact

SEQ ID NO: 1515056 - DNA, 15 bp, Homo sapiens
gaacccaacatactg

SEQ ID NO: 1515057 - DNA, 15 bp, Homo sapiens
aacccaacatactgg

SEQ ID NO: 1515058 - DNA, 15 bp, Homo sapiens
acccaacatactgga

SEQ ID NO: 1515059 - DNA, 15 bp, Homo sapiens
cccaacatactggaa

SEQ ID NO: 1515060 - DNA, 15 bp, Homo sapiens
ccaacatactggaag

SEQ ID NO: 1515061 - DNA, 15 bp, Homo sapiens
caacatactggaagt

SEQ ID NO: 1515062 - DNA, 15 bp, Homo sapiens
aacatactggaagtg

SEQ ID NO: 1515063 - DNA, 15 bp, Homo sapiens
acatactggaagtgc

SEQ ID NO: 1515064 - DNA, 15 bp, Homo sapiens
catactggaagtgct

SEQ ID NO: 1515065 - DNA, 15 bp, Homo sapiens
atactggaagtgctt

SEQ ID NO: 1515066 - DNA, 15 bp, Homo sapiens
tactggaagtgcttt

SEQ ID NO: 1515067 - DNA, 15 bp, Homo sapiens
actggaagtgctttt

SEQ ID NO: 1515068 - DNA, 15 bp, Homo sapiens
ctggaagtgcttttt

SEQ ID NO: 1515069 - DNA, 15 bp, Homo sapiens
tggaagtgctttttg

SEQ ID NO: 1515070 - DNA, 15 bp, Homo sapiens
ggaagtgctttttgt

SEQ ID NO: 1515071 - DNA, 15 bp, Homo sapiens
gaagtgctttttgta

SEQ ID NO: 1515072 - DNA, 15 bp, Homo sapiens
aagtgctttttgtaa

SEQ ID NO: 1515073 - DNA, 15 bp, Homo sapiens
agtgctttttgtaag

SEQ ID NO: 1515074 - DNA, 15 bp, Homo sapiens
gtgctttttgtaagg

SEQ ID NO: 1515075 - DNA, 15 bp, Homo sapiens
tgctttttgtaaggg

SEQ ID NO: 1515076 - DNA, 15 bp, Homo sapiens
gctttttgtaagggt

SEQ ID NO: 1515077 - DNA, 15 bp, Homo sapiens
ctttttgtaagggtc

SEQ ID NO: 1515078 - DNA, 15 bp, Homo sapiens
tttttgtaagggtct

SEQ ID NO: 1515079 - DNA, 15 bp, Homo sapiens
ttttgtaagggtctg

SEQ ID NO: 1515080 - DNA, 15 bp, Homo sapiens
tttgtaagggtctgt

SEQ ID NO: 1515081 - DNA, 15 bp, Homo sapiens
ttgtaagggtctgtc

SEQ ID NO: 1515082 - DNA, 15 bp, Homo sapiens
tgtaagggtctgtca

SEQ ID NO: 1515083 - DNA, 15 bp, Homo sapiens
gtaagggtctgtcat

SEQ ID NO: 1515084 - DNA, 15 bp, Homo sapiens
taagggtctgtcatt

SEQ ID NO: 1515085 - DNA, 15 bp, Homo sapiens
aagggtctgtcattg

SEQ ID NO: 1515086 - DNA, 15 bp, Homo sapiens
agggtctgtcattgg

SEQ ID NO: 1515087 - DNA, 15 bp, Homo sapiens
gggtctgtcattgga

SEQ ID NO: 1515088 - DNA, 15 bp, Homo sapiens
ggtctgtcattggac

SEQ ID NO: 1515089 - DNA, 15 bp, Homo sapiens
gtctgtcattggacc

SEQ ID NO: 1515090 - DNA, 15 bp, Homo sapiens
tctgtcattggaccc

SEQ ID NO: 1515091 - DNA, 15 bp, Homo sapiens
ctgtcattggacccc

SEQ ID NO: 1515092 - DNA, 15 bp, Homo sapiens
tgtcattggacccca

SEQ ID NO: 1515093 - DNA, 15 bp, Homo sapiens
gtcattggaccccag

SEQ ID NO: 1515094 - DNA, 15 bp, Homo sapiens
tcattggaccccagg

SEQ ID NO: 1515095 - DNA, 15 bp, Homo sapiens
cattggaccccaggt

SEQ ID NO: 1515096 - DNA, 15 bp, Homo sapiens
attggaccccaggtg

SEQ ID NO: 1515097 - DNA, 15 bp, Homo sapiens
ttggaccccaggtgt

SEQ ID NO: 1515098 - DNA, 15 bp, Homo sapiens
tggaccccaggtgta

SEQ ID NO: 1515099 - DNA, 15 bp, Homo sapiens
ggaccccaggtgtat

SEQ ID NO: 1515100 - DNA, 15 bp, Homo sapiens
gaccccaggtgtata

SEQ ID NO: 1515101 - DNA, 15 bp, Homo sapiens
accccaggtgtatat

SEQ ID NO: 1515102 - DNA, 15 bp, Homo sapiens
ccccaggtgtatatt

SEQ ID NO: 1515103 - DNA, 15 bp, Homo sapiens
cccaggtgtatattt

SEQ ID NO: 1515104 - DNA, 15 bp, Homo sapiens
ccaggtgtatatttc

SEQ ID NO: 1515105 - DNA, 15 bp, Homo sapiens
caggtgtatatttct

SEQ ID NO: 1515106 - DNA, 15 bp, Homo sapiens
aggtgtatatttcta

SEQ ID NO: 1515107 - DNA, 15 bp, Homo sapiens
ggtgtatatttctat

SEQ ID NO: 1515108 - DNA, 15 bp, Homo sapiens
gtgtatatttctatc

SEQ ID NO: 1515109 - DNA, 15 bp, Homo sapiens
tgtatatttctatca

SEQ ID NO: 1515110 - DNA, 15 bp, Homo sapiens
gtatatttctatcaa

SEQ ID NO: 1515111 - DNA, 15 bp, Homo sapiens
tatatttctatcaac

SEQ ID NO: 1515112 - DNA, 15 bp, Homo sapiens
atatttctatcaact

SEQ ID NO: 1515113 - DNA, 15 bp, Homo sapiens
tatttctatcaacta

SEQ ID NO: 1515114 - DNA, 15 bp, Homo sapiens
atttctatcaactaa

SEQ ID NO: 1515115 - DNA, 15 bp, Homo sapiens
tttctatcaactaaa

SEQ ID NO: 1515116 - DNA, 15 bp, Homo sapiens
ttctatcaactaaat

SEQ ID NO: 1515117 - DNA, 15 bp, Homo sapiens
tctatcaactaaatg

SEQ ID NO: 1515118 - DNA, 15 bp, Homo sapiens
ctatcaactaaatgt

SEQ ID NO: 1515119 - DNA, 15 bp, Homo sapiens
tatcaactaaatgta

SEQ ID NO: 1515120 - DNA, 15 bp, Homo sapiens
atcaactaaatgtat

SEQ ID NO: 1515121 - DNA, 15 bp, Homo sapiens
tcaactaaatgtata

SEQ ID NO: 1515122 - DNA, 15 bp, Homo sapiens
caactaaatgtatac

SEQ ID NO: 1515123 - DNA, 15 bp, Homo sapiens
aactaaatgtatact

SEQ ID NO: 1515124 - DNA, 15 bp, Homo sapiens
actaaatgtatactg

SEQ ID NO: 1515125 - DNA, 15 bp, Homo sapiens
ctaaatgtatactgt

SEQ ID NO: 1515126 - DNA, 15 bp, Homo sapiens
taaatgtatactgtt

SEQ ID NO: 1515127 - DNA, 15 bp, Homo sapiens
aaatgtatactgttt

SEQ ID NO: 1515128 - DNA, 15 bp, Homo sapiens
aatgtatactgtttc

SEQ ID NO: 1515129 - DNA, 15 bp, Homo sapiens
atgtatactgtttct

SEQ ID NO: 1515130 - DNA, 15 bp, Homo sapiens
tgtatactgtttctc

SEQ ID NO: 1515131 - DNA, 15 bp, Homo sapiens
gtatactgtttctcg

SEQ ID NO: 1515132 - DNA, 15 bp, Homo sapiens
tatactgtttctcgt

SEQ ID NO: 1515133 - DNA, 15 bp, Homo sapiens
atactgtttctcgta

SEQ ID NO: 1515134 - DNA, 15 bp, Homo sapiens
tactgtttctcgtac

SEQ ID NO: 1515135 - DNA, 15 bp, Homo sapiens
actgtttctcgtact

SEQ ID NO: 1515136 - DNA, 15 bp, Homo sapiens
ctgtttctcgtactt

SEQ ID NO: 1515137 - DNA, 15 bp, Homo sapiens
tgtttctcgtacttg

SEQ ID NO: 1515138 - DNA, 15 bp, Homo sapiens
gtttctcgtacttgt

SEQ ID NO: 1515139 - DNA, 15 bp, Homo sapiens
tttctcgtacttgtt

SEQ ID NO: 1515140 - DNA, 15 bp, Homo sapiens
ttctcgtacttgttg

SEQ ID NO: 1515141 - DNA, 15 bp, Homo sapiens
tctcgtacttgttgt

SEQ ID NO: 1515142 - DNA, 15 bp, Homo sapiens
ctcgtacttgttgta

SEQ ID NO: 1515143 - DNA, 15 bp, Homo sapiens
tcgtacttgttgtag

SEQ ID NO: 1515144 - DNA, 15 bp, Homo sapiens
cgtacttgttgtagc

SEQ ID NO: 1515145 - DNA, 15 bp, Homo sapiens
gtacttgttgtagca

SEQ ID NO: 1515146 - DNA, 15 bp, Homo sapiens
tacttgttgtagcag

SEQ ID NO: 1515147 - DNA, 15 bp, Homo sapiens
acttgttgtagcaga

SEQ ID NO: 1515148 - DNA, 15 bp, Homo sapiens
cttgttgtagcagag

SEQ ID NO: 1515149 - DNA, 15 bp, Homo sapiens
ttgttgtagcagagt

SEQ ID NO: 1515150 - DNA, 15 bp, Homo sapiens
tgttgtagcagagtt

SEQ ID NO: 1515151 - DNA, 15 bp, Homo sapiens
gttgtagcagagttg

SEQ ID NO: 1515152 - DNA, 15 bp, Homo sapiens
ttgtagcagagttgt

SEQ ID NO: 1515153 - DNA, 15 bp, Homo sapiens
tgtagcagagttgta

SEQ ID NO: 1515154 - DNA, 15 bp, Homo sapiens
gtagcagagttgtag

SEQ ID NO: 1515155 - DNA, 15 bp, Homo sapiens
tagcagagttgtagt

SEQ ID NO: 1515156 - DNA, 15 bp, Homo sapiens
agcagagttgtagtc

SEQ ID NO: 1515157 - DNA, 15 bp, Homo sapiens
gcagagttgtagtct

SEQ ID NO: 1515158 - DNA, 15 bp, Homo sapiens
cagagttgtagtctt

SEQ ID NO: 1515159 - DNA, 15 bp, Homo sapiens
agagttgtagtcttt

SEQ ID NO: 1515160 - DNA, 15 bp, Homo sapiens
gagttgtagtcttta

SEQ ID NO: 1515161 - DNA, 15 bp, Homo sapiens
agttgtagtctttag

SEQ ID NO: 1515162 - DNA, 15 bp, Homo sapiens
gttgtagtctttagg

SEQ ID NO: 1515163 - DNA, 15 bp, Homo sapiens
ttgtagtctttagga

SEQ ID NO: 1515164 - DNA, 15 bp, Homo sapiens
tgtagtctttaggaa

SEQ ID NO: 1515165 - DNA, 15 bp, Homo sapiens
gtagtctttaggaag

SEQ ID NO: 1515166 - DNA, 15 bp, Homo sapiens
tagtctttaggaagt

SEQ ID NO: 1515167 - DNA, 15 bp, Homo sapiens
agtctttaggaagtt

SEQ ID NO: 1515168 - DNA, 15 bp, Homo sapiens
gtctttaggaagttt

SEQ ID NO: 1515169 - DNA, 15 bp, Homo sapiens
tctttaggaagtttt

SEQ ID NO: 1515170 - DNA, 15 bp, Homo sapiens
ctttaggaagttttc

SEQ ID NO: 1515171 - DNA, 15 bp, Homo sapiens
tttaggaagttttca

SEQ ID NO: 1515172 - DNA, 15 bp, Homo sapiens
ttaggaagttttcaa

SEQ ID NO: 1515173 - DNA, 15 bp, Homo sapiens
taggaagttttcaag

SEQ ID NO: 1515174 - DNA, 15 bp, Homo sapiens
aggaagttttcaagg

SEQ ID NO: 1515175 - DNA, 15 bp, Homo sapiens
ggaagttttcaaggc

SEQ ID NO: 1515176 - DNA, 15 bp, Homo sapiens
gaagttttcaaggca

SEQ ID NO: 1515177 - DNA, 15 bp, Homo sapiens
aagttttcaaggcat

SEQ ID NO: 1515178 - DNA, 15 bp, Homo sapiens
agttttcaaggcatg

SEQ ID NO: 1515179 - DNA, 15 bp, Homo sapiens
gttttcaaggcatga

SEQ ID NO: 1515180 - DNA, 15 bp, Homo sapiens
ttttcaaggcatgat

SEQ ID NO: 1515181 - DNA, 15 bp, Homo sapiens
tttcaaggcatgatg

SEQ ID NO: 1515182 - DNA, 15 bp, Homo sapiens
ttcaaggcatgatgt

SEQ ID NO: 1515183 - DNA, 15 bp, Homo sapiens
tcaaggcatgatgta

SEQ ID NO: 1515184 - DNA, 15 bp, Homo sapiens
caaggcatgatgtaa

SEQ ID NO: 1515185 - DNA, 15 bp, Homo sapiens
aaggcatgatgtaag

SEQ ID NO: 1515186 - DNA, 15 bp, Homo sapiens
aggcatgatgtaaga

SEQ ID NO: 1515187 - DNA, 15 bp, Homo sapiens
ggcatgatgtaagac

SEQ ID NO: 1515188 - DNA, 15 bp, Homo sapiens
gcatgatgtaagacc

SEQ ID NO: 1515189 - DNA, 15 bp, Homo sapiens
catgatgtaagacct

SEQ ID NO: 1515190 - DNA, 15 bp, Homo sapiens
atgatgtaagaccta

SEQ ID NO: 1515191 - DNA, 15 bp, Homo sapiens
tgatgtaagacctag

SEQ ID NO: 1515192 - DNA, 15 bp, Homo sapiens
gatgtaagacctagc

SEQ ID NO: 1515193 - DNA, 15 bp, Homo sapiens
atgtaagacctagct

SEQ ID NO: 1515194 - DNA, 15 bp, Homo sapiens
tgtaagacctagctg

SEQ ID NO: 1515195 - DNA, 15 bp, Homo sapiens
gtaagacctagctgt

SEQ ID NO: 1515196 - DNA, 15 bp, Homo sapiens
taagacctagctgtc

SEQ ID NO: 1515197 - DNA, 15 bp, Homo sapiens
aagacctagctgtct

SEQ ID NO: 1515198 - DNA, 15 bp, Homo sapiens
agacctagctgtctg

SEQ ID NO: 1515199 - DNA, 15 bp, Homo sapiens
gacctagctgtctgg

SEQ ID NO: 1515200 - DNA, 15 bp, Homo sapiens
acctagctgtctggt

SEQ ID NO: 1515201 - DNA, 15 bp, Homo sapiens
cctagctgtctggtc

SEQ ID NO: 1515202 - DNA, 15 bp, Homo sapiens
ctagctgtctggtca

SEQ ID NO: 1515203 - DNA, 15 bp, Homo sapiens
tagctgtctggtcag

SEQ ID NO: 1515204 - DNA, 15 bp, Homo sapiens
agctgtctggtcagc

SEQ ID NO: 1515205 - DNA, 15 bp, Homo sapiens
gctgtctggtcagct

SEQ ID NO: 1515206 - DNA, 15 bp, Homo sapiens
ctgtctggtcagcta

SEQ ID NO: 1515207 - DNA, 15 bp, Homo sapiens
tgtctggtcagctat

SEQ ID NO: 1515208 - DNA, 15 bp, Homo sapiens
gtctggtcagctatt

SEQ ID NO: 1515209 - DNA, 15 bp, Homo sapiens
tctggtcagctatta

SEQ ID NO: 1515210 - DNA, 15 bp, Homo sapiens
ctggtcagctattaa

SEQ ID NO: 1515211 - DNA, 15 bp, Homo sapiens
tggtcagctattaaa

SEQ ID NO: 1515212 - DNA, 15 bp, Homo sapiens
ggtcagctattaaat

SEQ ID NO: 1515213 - DNA, 15 bp, Homo sapiens
gtcagctattaaata

SEQ ID NO: 1515214 - DNA, 15 bp, Homo sapiens
tcagctattaaatag

SEQ ID NO: 1515215 - DNA, 15 bp, Homo sapiens
cagctattaaatagt

SEQ ID NO: 1515216 - DNA, 15 bp, Homo sapiens
agctattaaatagtt

SEQ ID NO: 1515217 - DNA, 15 bp, Homo sapiens
gctattaaatagttt

SEQ ID NO: 1515218 - DNA, 15 bp, Homo sapiens
ctattaaatagtttt

SEQ ID NO: 1515219 - DNA, 15 bp, Homo sapiens
tattaaatagttttg

SEQ ID NO: 1515220 - DNA, 15 bp, Homo sapiens
attaaatagttttgt

SEQ ID NO: 1515221 - DNA, 15 bp, Homo sapiens
ttaaatagttttgtt

SEQ ID NO: 1515222 - DNA, 15 bp, Homo sapiens
taaatagttttgttt

SEQ ID NO: 1515223 - DNA, 15 bp, Homo sapiens
aaatagttttgtttt

SEQ ID NO: 1515224 - DNA, 15 bp, Homo sapiens
aatagttttgttttc

SEQ ID NO: 1515225 - DNA, 15 bp, Homo sapiens
atagttttgttttcc

SEQ ID NO: 1515226 - DNA, 15 bp, Homo sapiens
tagttttgttttccc

SEQ ID NO: 1515227 - DNA, 15 bp, Homo sapiens
agttttgttttcccc

SEQ ID NO: 1515228 - DNA, 15 bp, Homo sapiens
gttttgttttcccct

SEQ ID NO: 1515229 - DNA, 15 bp, Homo sapiens
ttttgttttcccctc

SEQ ID NO: 1515230 - DNA, 15 bp, Homo sapiens
tttgttttcccctca

SEQ ID NO: 1515231 - DNA, 15 bp, Homo sapiens
ttgttttcccctcat

SEQ ID NO: 1515232 - DNA, 15 bp, Homo sapiens
tgttttcccctcatg

SEQ ID NO: 1515233 - DNA, 15 bp, Homo sapiens
gttttcccctcatga

SEQ ID NO: 1515234 - DNA, 15 bp, Homo sapiens
ttttcccctcatgag

SEQ ID NO: 1515235 - DNA, 15 bp, Homo sapiens
tttcccctcatgagg

SEQ ID NO: 1515236 - DNA, 15 bp, Homo sapiens
ttcccctcatgagga

SEQ ID NO: 1515237 - DNA, 15 bp, Homo sapiens
tcccctcatgaggaa

SEQ ID NO: 1515238 - DNA, 15 bp, Homo sapiens
cccctcatgaggaat

SEQ ID NO: 1515239 - DNA, 15 bp, Homo sapiens
ccctcatgaggaata

SEQ ID NO: 1515240 - DNA, 15 bp, Homo sapiens
cctcatgaggaatag

SEQ ID NO: 1515241 - DNA, 15 bp, Homo sapiens
ctcatgaggaatagt

SEQ ID NO: 1515242 - DNA, 15 bp, Homo sapiens
tcatgaggaatagtc

SEQ ID NO: 1515243 - DNA, 15 bp, Homo sapiens
catgaggaatagtca

SEQ ID NO: 1515244 - DNA, 15 bp, Homo sapiens
atgaggaatagtcag

SEQ ID NO: 1515245 - DNA, 15 bp, Homo sapiens
tgaggaatagtcagc

SEQ ID NO: 1515246 - DNA, 15 bp, Homo sapiens
gaggaatagtcagca

SEQ ID NO: 1515247 - DNA, 15 bp, Homo sapiens
aggaatagtcagcat

SEQ ID NO: 1515248 - DNA, 15 bp, Homo sapiens
ggaatagtcagcatt

SEQ ID NO: 1515249 - DNA, 15 bp, Homo sapiens
gaatagtcagcattt

SEQ ID NO: 1515250 - DNA, 15 bp, Homo sapiens
aatagtcagcatttt

SEQ ID NO: 1515251 - DNA, 15 bp, Homo sapiens
atagtcagcattttc

SEQ ID NO: 1515252 - DNA, 15 bp, Homo sapiens
tagtcagcattttca

SEQ ID NO: 1515253 - DNA, 15 bp, Homo sapiens
agtcagcattttcag

SEQ ID NO: 1515254 - DNA, 15 bp, Homo sapiens
gtcagcattttcagt

SEQ ID NO: 1515255 - DNA, 15 bp, Homo sapiens
tcagcattttcagtt

SEQ ID NO: 1515256 - DNA, 15 bp, Homo sapiens
cagcattttcagttg

SEQ ID NO: 1515257 - DNA, 15 bp, Homo sapiens
agcattttcagttga

SEQ ID NO: 1515258 - DNA, 15 bp, Homo sapiens
gcattttcagttgat

SEQ ID NO: 1515259 - DNA, 15 bp, Homo sapiens
cattttcagttgatg

SEQ ID NO: 1515260 - DNA, 15 bp, Homo sapiens
attttcagttgatga

SEQ ID NO: 1515261 - DNA, 15 bp, Homo sapiens
ttttcagttgatgaa

SEQ ID NO: 1515262 - DNA, 15 bp, Homo sapiens
tttcagttgatgaaa

SEQ ID NO: 1515263 - DNA, 15 bp, Homo sapiens
ttcagttgatgaaaa

SEQ ID NO: 1515264 - DNA, 15 bp, Homo sapiens
tcagttgatgaaaaa

SEQ ID NO: 1515265 - DNA, 15 bp, Homo sapiens
cagttgatgaaaaaa

SEQ ID NO: 1515266 - DNA, 15 bp, Homo sapiens
agttgatgaaaaaat

SEQ ID NO: 1515267 - DNA, 15 bp, Homo sapiens
gttgatgaaaaaatc

SEQ ID NO: 1515268 - DNA, 15 bp, Homo sapiens
ttgatgaaaaaatca

SEQ ID NO: 1515269 - DNA, 15 bp, Homo sapiens
tgatgaaaaaatcat

SEQ ID NO: 1515270 - DNA, 15 bp, Homo sapiens
gatgaaaaaatcatt

SEQ ID NO: 1515271 - DNA, 15 bp, Homo sapiens
atgaaaaaatcattg

SEQ ID NO: 1515272 - DNA, 15 bp, Homo sapiens
tgaaaaaatcattgt

SEQ ID NO: 1515273 - DNA, 15 bp, Homo sapiens
gaaaaaatcattgtt

SEQ ID NO: 1515274 - DNA, 15 bp, Homo sapiens
aaaaaatcattgttc

SEQ ID NO: 1515275 - DNA, 15 bp, Homo sapiens
aaaaatcattgttcc

SEQ ID NO: 1515276 - DNA, 15 bp, Homo sapiens
aaaatcattgttcct

SEQ ID NO: 1515277 - DNA, 15 bp, Homo sapiens
aaatcattgttcctt

SEQ ID NO: 1515278 - DNA, 15 bp, Homo sapiens
aatcattgttcctta

SEQ ID NO: 1515279 - DNA, 15 bp, Homo sapiens
atcattgttccttaa

SEQ ID NO: 1515280 - DNA, 15 bp, Homo sapiens
tcattgttccttaac

SEQ ID NO: 1515281 - DNA, 15 bp, Homo sapiens
cattgttccttaacc

SEQ ID NO: 1515282 - DNA, 15 bp, Homo sapiens
attgttccttaacca

SEQ ID NO: 1515283 - DNA, 15 bp, Homo sapiens
ttgttccttaaccat

SEQ ID NO: 1515284 - DNA, 15 bp, Homo sapiens
tgttccttaaccata

SEQ ID NO: 1515285 - DNA, 15 bp, Homo sapiens
gttccttaaccatag

SEQ ID NO: 1515286 - DNA, 15 bp, Homo sapiens
ttccttaaccatagt

SEQ ID NO: 1515287 - DNA, 15 bp, Homo sapiens
tccttaaccatagta

SEQ ID NO: 1515288 - DNA, 15 bp, Homo sapiens
ccttaaccatagtat

SEQ ID NO: 1515289 - DNA, 15 bp, Homo sapiens
cttaaccatagtata

SEQ ID NO: 1515290 - DNA, 15 bp, Homo sapiens
ttaaccatagtatat

SEQ ID NO: 1515291 - DNA, 15 bp, Homo sapiens
taaccatagtatatg

SEQ ID NO: 1515292 - DNA, 15 bp, Homo sapiens
aaccatagtatatgt

SEQ ID NO: 1515293 - DNA, 15 bp, Homo sapiens
accatagtatatgtt

SEQ ID NO: 1515294 - DNA, 15 bp, Homo sapiens
ccatagtatatgttc

SEQ ID NO: 1515295 - DNA, 15 bp, Homo sapiens
catagtatatgttct

SEQ ID NO: 1515296 - DNA, 15 bp, Homo sapiens
atagtatatgttctt

SEQ ID NO: 1515297 - DNA, 15 bp, Homo sapiens
tagtatatgttcttt

SEQ ID NO: 1515298 - DNA, 15 bp, Homo sapiens
agtatatgttctttt

SEQ ID NO: 1515299 - DNA, 15 bp, Homo sapiens
gtatatgttctttta

SEQ ID NO: 1515300 - DNA, 15 bp, Homo sapiens
tatatgttcttttaa

SEQ ID NO: 1515301 - DNA, 15 bp, Homo sapiens
atatgttcttttaaa

SEQ ID NO: 1515302 - DNA, 15 bp, Homo sapiens
tatgttcttttaaaa

SEQ ID NO: 1515303 - DNA, 15 bp, Homo sapiens
atgttcttttaaaac

SEQ ID NO: 1515304 - DNA, 15 bp, Homo sapiens
tgttcttttaaaaca

SEQ ID NO: 1515305 - DNA, 15 bp, Homo sapiens
gttcttttaaaacaa

SEQ ID NO: 1515306 - DNA, 15 bp, Homo sapiens
ttcttttaaaacaaa

SEQ ID NO: 1515307 - DNA, 15 bp, Homo sapiens
tcttttaaaacaaaa

SEQ ID NO: 1515308 - DNA, 15 bp, Homo sapiens
cttttaaaacaaaag

SEQ ID NO: 1515309 - DNA, 15 bp, Homo sapiens
ttttaaaacaaaaga

SEQ ID NO: 1515310 - DNA, 15 bp, Homo sapiens
tttaaaacaaaagat

SEQ ID NO: 1515311 - DNA, 15 bp, Homo sapiens
ttaaaacaaaagatg

SEQ ID NO: 1515312 - DNA, 15 bp, Homo sapiens
taaaacaaaagatgg

SEQ ID NO: 1515313 - DNA, 15 bp, Homo sapiens
aaaacaaaagatggc

SEQ ID NO: 1515314 - DNA, 15 bp, Homo sapiens
aaacaaaagatggcc

SEQ ID NO: 1515315 - DNA, 15 bp, Homo sapiens
aacaaaagatggccc

SEQ ID NO: 1515316 - DNA, 15 bp, Homo sapiens
acaaaagatggccca

SEQ ID NO: 1515317 - DNA, 15 bp, Homo sapiens
caaaagatggcccaa

SEQ ID NO: 1515318 - DNA, 15 bp, Homo sapiens
aaaagatggcccaaa

SEQ ID NO: 1515319 - DNA, 15 bp, Homo sapiens
aaagatggcccaaac

SEQ ID NO: 1515320 - DNA, 15 bp, Homo sapiens
aagatggcccaaact

SEQ ID NO: 1515321 - DNA, 15 bp, Homo sapiens
agatggcccaaactc

SEQ ID NO: 1515322 - DNA, 15 bp, Homo sapiens
gatggcccaaactca

SEQ ID NO: 1515323 - DNA, 15 bp, Homo sapiens
atggcccaaactcaa

SEQ ID NO: 1515324 - DNA, 15 bp, Homo sapiens
tggcccaaactcaat

SEQ ID NO: 1515325 - DNA, 15 bp, Homo sapiens
ggcccaaactcaatg

SEQ ID NO: 1515326 - DNA, 15 bp, Homo sapiens
gcccaaactcaatgc

SEQ ID NO: 1515327 - DNA, 15 bp, Homo sapiens
cccaaactcaatgct

SEQ ID NO: 1515328 - DNA, 15 bp, Homo sapiens
ccaaactcaatgctt

SEQ ID NO: 1515329 - DNA, 15 bp, Homo sapiens
caaactcaatgcttt

SEQ ID NO: 1515330 - DNA, 15 bp, Homo sapiens
aaactcaatgctttg

SEQ ID NO: 1515331 - DNA, 15 bp, Homo sapiens
aactcaatgctttgt

SEQ ID NO: 1515332 - DNA, 15 bp, Homo sapiens
actcaatgctttgta

SEQ ID NO: 1515333 - DNA, 15 bp, Homo sapiens
ctcaatgctttgtaa

SEQ ID NO: 1515334 - DNA, 15 bp, Homo sapiens
tcaatgctttgtaaa

SEQ ID NO: 1515335 - DNA, 15 bp, Homo sapiens
caatgctttgtaaat

SEQ ID NO: 1515336 - DNA, 15 bp, Homo sapiens
aatgctttgtaaatt

SEQ ID NO: 1515337 - DNA, 15 bp, Homo sapiens
atgctttgtaaatta

SEQ ID NO: 1515338 - DNA, 15 bp, Homo sapiens
tgctttgtaaattaa

SEQ ID NO: 1515339 - DNA, 15 bp, Homo sapiens
gctttgtaaattaag

SEQ ID NO: 1515340 - DNA, 15 bp, Homo sapiens
ctttgtaaattaaga

SEQ ID NO: 1515341 - DNA, 15 bp, Homo sapiens
tttgtaaattaagat

SEQ ID NO: 1515342 - DNA, 15 bp, Homo sapiens
ttgtaaattaagata

SEQ ID NO: 1515343 - DNA, 15 bp, Homo sapiens
tgtaaattaagatat

SEQ ID NO: 1515344 - DNA, 15 bp, Homo sapiens
gtaaattaagatatt

SEQ ID NO: 1515345 - DNA, 15 bp, Homo sapiens
taaattaagatatta

SEQ ID NO: 1515346 - DNA, 15 bp, Homo sapiens
aaattaagatattaa

SEQ ID NO: 1515347 - DNA, 15 bp, Homo sapiens
aattaagatattaac

SEQ ID NO: 1515348 - DNA, 15 bp, Homo sapiens
attaagatattaact

SEQ ID NO: 1515349 - DNA, 15 bp, Homo sapiens
ttaagatattaactg

SEQ ID NO: 1515350 - DNA, 15 bp, Homo sapiens
taagatattaactgg

SEQ ID NO: 1515351 - DNA, 15 bp, Homo sapiens
aagatattaactggc

SEQ ID NO: 1515352 - DNA, 15 bp, Homo sapiens
agatattaactggca

SEQ ID NO: 1515353 - DNA, 15 bp, Homo sapiens
gatattaactggcaa

SEQ ID NO: 1515354 - DNA, 15 bp, Homo sapiens
atattaactggcaaa

SEQ ID NO: 1515355 - DNA, 15 bp, Homo sapiens
tattaactggcaaat

SEQ ID NO: 1515356 - DNA, 15 bp, Homo sapiens
attaactggcaaatc

SEQ ID NO: 1515357 - DNA, 15 bp, Homo sapiens
ttaactggcaaatct

SEQ ID NO: 1515358 - DNA, 15 bp, Homo sapiens
taactggcaaatcta

SEQ ID NO: 1515359 - DNA, 15 bp, Homo sapiens
aactggcaaatctat

SEQ ID NO: 1515360 - DNA, 15 bp, Homo sapiens
actggcaaatctatt

SEQ ID NO: 1515361 - DNA, 15 bp, Homo sapiens
ctggcaaatctattt

SEQ ID NO: 1515362 - DNA, 15 bp, Homo sapiens
tggcaaatctatttt

SEQ ID NO: 1515363 - DNA, 15 bp, Homo sapiens
ggcaaatctatttta

SEQ ID NO: 1515364 - DNA, 15 bp, Homo sapiens
gcaaatctattttaa

SEQ ID NO: 1515365 - DNA, 15 bp, Homo sapiens
caaatctattttaat

SEQ ID NO: 1515366 - DNA, 15 bp, Homo sapiens
aaatctattttaatc

SEQ ID NO: 1515367 - DNA, 15 bp, Homo sapiens
aatctattttaatca

SEQ ID NO: 1515368 - DNA, 15 bp, Homo sapiens
atctattttaatcaa

SEQ ID NO: 1515369 - DNA, 15 bp, Homo sapiens
tctattttaatcaag

SEQ ID NO: 1515370 - DNA, 15 bp, Homo sapiens
ctattttaatcaaga

SEQ ID NO: 1515371 - DNA, 15 bp, Homo sapiens
tattttaatcaagat

SEQ ID NO: 1515372 - DNA, 15 bp, Homo sapiens
attttaatcaagatt

SEQ ID NO: 1515373 - DNA, 15 bp, Homo sapiens
ttttaatcaagatta

SEQ ID NO: 1515374 - DNA, 15 bp, Homo sapiens
tttaatcaagattat

SEQ ID NO: 1515375 - DNA, 15 bp, Homo sapiens
ttaatcaagattatt

SEQ ID NO: 1515376 - DNA, 15 bp, Homo sapiens
taatcaagattattt

SEQ ID NO: 1515377 - DNA, 15 bp, Homo sapiens
aatcaagattattta

SEQ ID NO: 1515378 - DNA, 15 bp, Homo sapiens
atcaagattatttac

SEQ ID NO: 1515379 - DNA, 15 bp, Homo sapiens
tcaagattatttaca

SEQ ID NO: 1515380 - DNA, 15 bp, Homo sapiens
caagattatttacaa

SEQ ID NO: 1515381 - DNA, 15 bp, Homo sapiens
aagattatttacaat

SEQ ID NO: 1515382 - DNA, 15 bp, Homo sapiens
agattatttacaatg

SEQ ID NO: 1515383 - DNA, 15 bp, Homo sapiens
gattatttacaatgt

SEQ ID NO: 1515384 - DNA, 15 bp, Homo sapiens
attatttacaatgtg

SEQ ID NO: 1515385 - DNA, 15 bp, Homo sapiens
ttatttacaatgtgt

SEQ ID NO: 1515386 - DNA, 15 bp, Homo sapiens
tatttacaatgtgtg

SEQ ID NO: 1515387 - DNA, 15 bp, Homo sapiens
atttacaatgtgtga

SEQ ID NO: 1515388 - DNA, 15 bp, Homo sapiens
tttacaatgtgtgat

SEQ ID NO: 1515389 - DNA, 15 bp, Homo sapiens
ttacaatgtgtgatt

SEQ ID NO: 1515390 - DNA, 15 bp, Homo sapiens
tacaatgtgtgattt

SEQ ID NO: 1515391 - DNA, 15 bp, Homo sapiens
acaatgtgtgatttt

SEQ ID NO: 1515392 - DNA, 15 bp, Homo sapiens
caatgtgtgattttt

SEQ ID NO: 1515393 - DNA, 15 bp, Homo sapiens
aatgtgtgatttttt

SEQ ID NO: 1515394 - DNA, 15 bp, Homo sapiens
atgtgtgatttttta

SEQ ID NO: 1515395 - DNA, 15 bp, Homo sapiens
tgtgtgattttttaa

SEQ ID NO: 1515396 - DNA, 15 bp, Homo sapiens
gtgtgattttttaag

SEQ ID NO: 1515397 - DNA, 15 bp, Homo sapiens
tgtgattttttaagg

SEQ ID NO: 1515398 - DNA, 15 bp, Homo sapiens
gtgattttttaaggt

SEQ ID NO: 1515399 - DNA, 15 bp, Homo sapiens
tgattttttaaggtt

SEQ ID NO: 1515400 - DNA, 15 bp, Homo sapiens
gattttttaaggtta

SEQ ID NO: 1515401 - DNA, 15 bp, Homo sapiens
attttttaaggttag

SEQ ID NO: 1515402 - DNA, 15 bp, Homo sapiens
ttttttaaggttagc

SEQ ID NO: 1515403 - DNA, 15 bp, Homo sapiens
tttttaaggttagct

SEQ ID NO: 1515404 - DNA, 15 bp, Homo sapiens
ttttaaggttagctg

SEQ ID NO: 1515405 - DNA, 15 bp, Homo sapiens
tttaaggttagctgg

SEQ ID NO: 1515406 - DNA, 15 bp, Homo sapiens
ttaaggttagctggt

SEQ ID NO: 1515407 - DNA, 15 bp, Homo sapiens
taaggttagctggtt

SEQ ID NO: 1515408 - DNA, 15 bp, Homo sapiens
aaggttagctggtta

SEQ ID NO: 1515409 - DNA, 15 bp, Homo sapiens
aggttagctggttat

SEQ ID NO: 1515410 - DNA, 15 bp, Homo sapiens
ggttagctggttata

SEQ ID NO: 1515411 - DNA, 15 bp, Homo sapiens
gttagctggttatac

SEQ ID NO: 1515412 - DNA, 15 bp, Homo sapiens
ttagctggttatacc

SEQ ID NO: 1515413 - DNA, 15 bp, Homo sapiens
tagctggttatacct

SEQ ID NO: 1515414 - DNA, 15 bp, Homo sapiens
agctggttatacctt

SEQ ID NO: 1515415 - DNA, 15 bp, Homo sapiens
gctggttataccttg

SEQ ID NO: 1515416 - DNA, 15 bp, Homo sapiens
ctggttataccttga

SEQ ID NO: 1515417 - DNA, 15 bp, Homo sapiens
tggttataccttgaa

SEQ ID NO: 1515418 - DNA, 15 bp, Homo sapiens
ggttataccttgaat

SEQ ID NO: 1515419 - DNA, 15 bp, Homo sapiens
gttataccttgaatg

SEQ ID NO: 1515420 - DNA, 15 bp, Homo sapiens
ttataccttgaatgt

SEQ ID NO: 1515421 - DNA, 15 bp, Homo sapiens
tataccttgaatgtc

SEQ ID NO: 1515422 - DNA, 15 bp, Homo sapiens
ataccttgaatgtca

SEQ ID NO: 1515423 - DNA, 15 bp, Homo sapiens
taccttgaatgtcat

SEQ ID NO: 1515424 - DNA, 15 bp, Homo sapiens
accttgaatgtcatt

SEQ ID NO: 1515425 - DNA, 15 bp, Homo sapiens
ccttgaatgtcattt

SEQ ID NO: 1515426 - DNA, 15 bp, Homo sapiens
cttgaatgtcattta

SEQ ID NO: 1515427 - DNA, 15 bp, Homo sapiens
ttgaatgtcatttat

SEQ ID NO: 1515428 - DNA, 15 bp, Homo sapiens
tgaatgtcatttatc

SEQ ID NO: 1515429 - DNA, 15 bp, Homo sapiens
gaatgtcatttatct

SEQ ID NO: 1515430 - DNA, 15 bp, Homo sapiens
aatgtcatttatcta

SEQ ID NO: 1515431 - DNA, 15 bp, Homo sapiens
atgtcatttatctat

SEQ ID NO: 1515432 - DNA, 15 bp, Homo sapiens
tgtcatttatctata

SEQ ID NO: 1515433 - DNA, 15 bp, Homo sapiens
gtcatttatctatat

SEQ ID NO: 1515434 - DNA, 15 bp, Homo sapiens
tcatttatctatatt

SEQ ID NO: 1515435 - DNA, 15 bp, Homo sapiens
catttatctatattc

SEQ ID NO: 1515436 - DNA, 15 bp, Homo sapiens
atttatctatattca

SEQ ID NO: 1515437 - DNA, 15 bp, Homo sapiens
tttatctatattcat

SEQ ID NO: 1515438 - DNA, 15 bp, Homo sapiens
ttatctatattcata

SEQ ID NO: 1515439 - DNA, 15 bp, Homo sapiens
tatctatattcatac

SEQ ID NO: 1515440 - DNA, 15 bp, Homo sapiens
atctatattcataca

SEQ ID NO: 1515441 - DNA, 15 bp, Homo sapiens
tctatattcatacat

SEQ ID NO: 1515442 - DNA, 15 bp, Homo sapiens
ctatattcatacatt

SEQ ID NO: 1515443 - DNA, 15 bp, Homo sapiens
tatattcatacattt

SEQ ID NO: 1515444 - DNA, 15 bp, Homo sapiens
atattcatacatttt

SEQ ID NO: 1515445 - DNA, 15 bp, Homo sapiens
tattcatacatttta

SEQ ID NO: 1515446 - DNA, 15 bp, Homo sapiens
attcatacattttag

SEQ ID NO: 1515447 - DNA, 15 bp, Homo sapiens
ttcatacattttagc

SEQ ID NO: 1515448 - DNA, 15 bp, Homo sapiens
tcatacattttagca

SEQ ID NO: 1515449 - DNA, 15 bp, Homo sapiens
catacattttagcat

SEQ ID NO: 1515450 - DNA, 15 bp, Homo sapiens
atacattttagcatg

SEQ ID NO: 1515451 - DNA, 15 bp, Homo sapiens
tacattttagcatgt

SEQ ID NO: 1515452 - DNA, 15 bp, Homo sapiens
acattttagcatgtt

SEQ ID NO: 1515453 - DNA, 15 bp, Homo sapiens
cattttagcatgttt

SEQ ID NO: 1515454 - DNA, 15 bp, Homo sapiens
attttagcatgtttt

SEQ ID NO: 1515455 - DNA, 15 bp, Homo sapiens
ttttagcatgtttta

SEQ ID NO: 1515456 - DNA, 15 bp, Homo sapiens
tttagcatgttttat

SEQ ID NO: 1515457 - DNA, 15 bp, Homo sapiens
ttagcatgttttatt

SEQ ID NO: 1515458 - DNA, 15 bp, Homo sapiens
tagcatgttttattt

SEQ ID NO: 1515459 - DNA, 15 bp, Homo sapiens
agcatgttttattta

SEQ ID NO: 1515460 - DNA, 15 bp, Homo sapiens
gcatgttttatttaa

SEQ ID NO: 1515461 - DNA, 15 bp, Homo sapiens
catgttttatttaat

SEQ ID NO: 1515462 - DNA, 15 bp, Homo sapiens
atgttttatttaata

SEQ ID NO: 1515463 - DNA, 15 bp, Homo sapiens
tgttttatttaatat

SEQ ID NO: 1515464 - DNA, 15 bp, Homo sapiens
gttttatttaatatc

SEQ ID NO: 1515465 - DNA, 15 bp, Homo sapiens
ttttatttaatatcc

SEQ ID NO: 1515466 - DNA, 15 bp, Homo sapiens
tttatttaatatcct

SEQ ID NO: 1515467 - DNA, 15 bp, Homo sapiens
ttatttaatatccta

SEQ ID NO: 1515468 - DNA, 15 bp, Homo sapiens
tatttaatatcctat

SEQ ID NO: 1515469 - DNA, 15 bp, Homo sapiens
atttaatatcctatc

SEQ ID NO: 1515470 - DNA, 15 bp, Homo sapiens
tttaatatcctatca

SEQ ID NO: 1515471 - DNA, 15 bp, Homo sapiens
ttaatatcctatcat

SEQ ID NO: 1515472 - DNA, 15 bp, Homo sapiens
taatatcctatcatg

SEQ ID NO: 1515473 - DNA, 15 bp, Homo sapiens
aatatcctatcatga

SEQ ID NO: 1515474 - DNA, 15 bp, Homo sapiens
atatcctatcatgaa

SEQ ID NO: 1515475 - DNA, 15 bp, Homo sapiens
tatcctatcatgaag

SEQ ID NO: 1515476 - DNA, 15 bp, Homo sapiens
atcctatcatgaaga

SEQ ID NO: 1515477 - DNA, 15 bp, Homo sapiens
tcctatcatgaagaa

SEQ ID NO: 1515478 - DNA, 15 bp, Homo sapiens
cctatcatgaagaag

SEQ ID NO: 1515479 - DNA, 15 bp, Homo sapiens
ctatcatgaagaagt

SEQ ID NO: 1515480 - DNA, 15 bp, Homo sapiens
tatcatgaagaagtc

SEQ ID NO: 1515481 - DNA, 15 bp, Homo sapiens
atcatgaagaagtcc

SEQ ID NO: 1515482 - DNA, 15 bp, Homo sapiens
tcatgaagaagtccc

SEQ ID NO: 1515483 - DNA, 15 bp, Homo sapiens
catgaagaagtcccc

SEQ ID NO: 1515484 - DNA, 15 bp, Homo sapiens
atgaagaagtcccca

SEQ ID NO: 1515485 - DNA, 15 bp, Homo sapiens
tgaagaagtccccaa

SEQ ID NO: 1515486 - DNA, 15 bp, Homo sapiens
gaagaagtccccaaa

SEQ ID NO: 1515487 - DNA, 15 bp, Homo sapiens
aagaagtccccaaaa

SEQ ID NO: 1515488 - DNA, 15 bp, Homo sapiens
agaagtccccaaaat

SEQ ID NO: 1515489 - DNA, 15 bp, Homo sapiens
gaagtccccaaaata

SEQ ID NO: 1515490 - DNA, 15 bp, Homo sapiens
aagtccccaaaatag

SEQ ID NO: 1515491 - DNA, 15 bp, Homo sapiens
agtccccaaaatagc

SEQ ID NO: 1515492 - DNA, 15 bp, Homo sapiens
gtccccaaaatagca

SEQ ID NO: 1515493 - DNA, 15 bp, Homo sapiens
tccccaaaatagcat

SEQ ID NO: 1515494 - DNA, 15 bp, Homo sapiens
ccccaaaatagcata

SEQ ID NO: 1515495 - DNA, 15 bp, Homo sapiens
cccaaaatagcatat

SEQ ID NO: 1515496 - DNA, 15 bp, Homo sapiens
ccaaaatagcatatc

SEQ ID NO: 1515497 - DNA, 15 bp, Homo sapiens
caaaatagcatatct

SEQ ID NO: 1515498 - DNA, 15 bp, Homo sapiens
aaaatagcatatctg

SEQ ID NO: 1515499 - DNA, 15 bp, Homo sapiens
aaatagcatatctgt

SEQ ID NO: 1515500 - DNA, 15 bp, Homo sapiens
aatagcatatctgtg

SEQ ID NO: 1515501 - DNA, 15 bp, Homo sapiens
atagcatatctgtgc

SEQ ID NO: 1515502 - DNA, 15 bp, Homo sapiens
tagcatatctgtgcc

SEQ ID NO: 1515503 - DNA, 15 bp, Homo sapiens
agcatatctgtgcct

SEQ ID NO: 1515504 - DNA, 15 bp, Homo sapiens
gcatatctgtgcctt

SEQ ID NO: 1515505 - DNA, 15 bp, Homo sapiens
catatctgtgcctta

SEQ ID NO: 1515506 - DNA, 15 bp, Homo sapiens
atatctgtgccttag

SEQ ID NO: 1515507 - DNA, 15 bp, Homo sapiens
tatctgtgccttagc

SEQ ID NO: 1515508 - DNA, 15 bp, Homo sapiens
atctgtgccttagca

SEQ ID NO: 1515509 - DNA, 15 bp, Homo sapiens
tctgtgccttagcag

SEQ ID NO: 1515510 - DNA, 15 bp, Homo sapiens
ctgtgccttagcagt

SEQ ID NO: 1515511 - DNA, 15 bp, Homo sapiens
tgtgccttagcagta

SEQ ID NO: 1515512 - DNA, 15 bp, Homo sapiens
gtgccttagcagtag

SEQ ID NO: 1515513 - DNA, 15 bp, Homo sapiens
tgccttagcagtaga

SEQ ID NO: 1515514 - DNA, 15 bp, Homo sapiens
gccttagcagtagaa

SEQ ID NO: 1515515 - DNA, 15 bp, Homo sapiens
ccttagcagtagaat

SEQ ID NO: 1515516 - DNA, 15 bp, Homo sapiens
cttagcagtagaata

SEQ ID NO: 1515517 - DNA, 15 bp, Homo sapiens
ttagcagtagaataa

SEQ ID NO: 1515518 - DNA, 15 bp, Homo sapiens
tagcagtagaataat

SEQ ID NO: 1515519 - DNA, 15 bp, Homo sapiens
agcagtagaataatt

SEQ ID NO: 1515520 - DNA, 15 bp, Homo sapiens
gcagtagaataattg

SEQ ID NO: 1515521 - DNA, 15 bp, Homo sapiens
cagtagaataattgg

SEQ ID NO: 1515522 - DNA, 15 bp, Homo sapiens
agtagaataattgga

SEQ ID NO: 1515523 - DNA, 15 bp, Homo sapiens
gtagaataattggat

SEQ ID NO: 1515524 - DNA, 15 bp, Homo sapiens
tagaataattggata

SEQ ID NO: 1515525 - DNA, 15 bp, Homo sapiens
agaataattggataa

SEQ ID NO: 1515526 - DNA, 15 bp, Homo sapiens
gaataattggataat

SEQ ID NO: 1515527 - DNA, 15 bp, Homo sapiens
aataattggataata

SEQ ID NO: 1515528 - DNA, 15 bp, Homo sapiens
ataattggataatag

SEQ ID NO: 1515529 - DNA, 15 bp, Homo sapiens
taattggataatagt

SEQ ID NO: 1515530 - DNA, 15 bp, Homo sapiens
aattggataatagtg

SEQ ID NO: 1515531 - DNA, 15 bp, Homo sapiens
attggataatagtgc

SEQ ID NO: 1515532 - DNA, 15 bp, Homo sapiens
ttggataatagtgcc

SEQ ID NO: 1515533 - DNA, 15 bp, Homo sapiens
tggataatagtgcca

SEQ ID NO: 1515534 - DNA, 15 bp, Homo sapiens
ggataatagtgccaa

SEQ ID NO: 1515535 - DNA, 15 bp, Homo sapiens
gataatagtgccaaa

SEQ ID NO: 1515536 - DNA, 15 bp, Homo sapiens
ataatagtgccaaat

SEQ ID NO: 1515537 - DNA, 15 bp, Homo sapiens
taatagtgccaaatt

SEQ ID NO: 1515538 - DNA, 15 bp, Homo sapiens
aatagtgccaaatta

SEQ ID NO: 1515539 - DNA, 15 bp, Homo sapiens
atagtgccaaattag

SEQ ID NO: 1515540 - DNA, 15 bp, Homo sapiens
tagtgccaaattaga

SEQ ID NO: 1515541 - DNA, 15 bp, Homo sapiens
agtgccaaattagac

SEQ ID NO: 1515542 - DNA, 15 bp, Homo sapiens
gtgccaaattagaca

SEQ ID NO: 1515543 - DNA, 15 bp, Homo sapiens
tgccaaattagacaa

SEQ ID NO: 1515544 - DNA, 15 bp, Homo sapiens
gccaaattagacaac

SEQ ID NO: 1515545 - DNA, 15 bp, Homo sapiens
ccaaattagacaact

SEQ ID NO: 1515546 - DNA, 15 bp, Homo sapiens
caaattagacaactt

SEQ ID NO: 1515547 - DNA, 15 bp, Homo sapiens
aaattagacaacttt

SEQ ID NO: 1515548 - DNA, 15 bp, Homo sapiens
aattagacaacttta

SEQ ID NO: 1515549 - DNA, 15 bp, Homo sapiens
attagacaactttaa

SEQ ID NO: 1515550 - DNA, 15 bp, Homo sapiens
ttagacaactttaaa

SEQ ID NO: 1515551 - DNA, 15 bp, Homo sapiens
tagacaactttaaat

SEQ ID NO: 1515552 - DNA, 15 bp, Homo sapiens
agacaactttaaatt

SEQ ID NO: 1515553 - DNA, 15 bp, Homo sapiens
gacaactttaaattt

SEQ ID NO: 1515554 - DNA, 15 bp, Homo sapiens
acaactttaaatttt

SEQ ID NO: 1515555 - DNA, 15 bp, Homo sapiens
caactttaaatttta

SEQ ID NO: 1515556 - DNA, 15 bp, Homo sapiens
aactttaaattttat

SEQ ID NO: 1515557 - DNA, 15 bp, Homo sapiens
actttaaattttatt

SEQ ID NO: 1515558 - DNA, 15 bp, Homo sapiens
ctttaaattttattc

SEQ ID NO: 1515559 - DNA, 15 bp, Homo sapiens
tttaaattttattca

SEQ ID NO: 1515560 - DNA, 15 bp, Homo sapiens
ttaaattttattcag

SEQ ID NO: 1515561 - DNA, 15 bp, Homo sapiens
taaattttattcagt

SEQ ID NO: 1515562 - DNA, 15 bp, Homo sapiens
aaattttattcagta

SEQ ID NO: 1515563 - DNA, 15 bp, Homo sapiens
aattttattcagtat

SEQ ID NO: 1515564 - DNA, 15 bp, Homo sapiens
attttattcagtata

SEQ ID NO: 1515565 - DNA, 15 bp, Homo sapiens
ttttattcagtataa

SEQ ID NO: 1515566 - DNA, 15 bp, Homo sapiens
tttattcagtataat

SEQ ID NO: 1515567 - DNA, 15 bp, Homo sapiens
ttattcagtataatt

SEQ ID NO: 1515568 - DNA, 15 bp, Homo sapiens
tattcagtataattt

SEQ ID NO: 1515569 - DNA, 15 bp, Homo sapiens
attcagtataatttt

SEQ ID NO: 1515570 - DNA, 15 bp, Homo sapiens
ttcagtataatttta

SEQ ID NO: 1515571 - DNA, 15 bp, Homo sapiens
tcagtataattttac

SEQ ID NO: 1515572 - DNA, 15 bp, Homo sapiens
cagtataattttact

SEQ ID NO: 1515573 - DNA, 15 bp, Homo sapiens
agtataattttactg

SEQ ID NO: 1515574 - DNA, 15 bp, Homo sapiens
gtataattttactgc

SEQ ID NO: 1515575 - DNA, 15 bp, Homo sapiens
tataattttactgct

SEQ ID NO: 1515576 - DNA, 15 bp, Homo sapiens
ataattttactgctg

SEQ ID NO: 1515577 - DNA, 15 bp, Homo sapiens
taattttactgctga

SEQ ID NO: 1515578 - DNA, 15 bp, Homo sapiens
aattttactgctgag

SEQ ID NO: 1515579 - DNA, 15 bp, Homo sapiens
attttactgctgagt

SEQ ID NO: 1515580 - DNA, 15 bp, Homo sapiens
ttttactgctgagtg

SEQ ID NO: 1515581 - DNA, 15 bp, Homo sapiens
tttactgctgagtgt

SEQ ID NO: 1515582 - DNA, 15 bp, Homo sapiens
ttactgctgagtgtt

SEQ ID NO: 1515583 - DNA, 15 bp, Homo sapiens
tactgctgagtgttt

SEQ ID NO: 1515584 - DNA, 15 bp, Homo sapiens
actgctgagtgtttt

SEQ ID NO: 1515585 - DNA, 15 bp, Homo sapiens
ctgctgagtgttttt

SEQ ID NO: 1515586 - DNA, 15 bp, Homo sapiens
tgctgagtgtttttg

SEQ ID NO: 1515587 - DNA, 15 bp, Homo sapiens
gctgagtgtttttgt

SEQ ID NO: 1515588 - DNA, 15 bp, Homo sapiens
ctgagtgtttttgtt

SEQ ID NO: 1515589 - DNA, 15 bp, Homo sapiens
tgagtgtttttgtta

SEQ ID NO: 1515590 - DNA, 15 bp, Homo sapiens
gagtgtttttgttat

SEQ ID NO: 1515591 - DNA, 15 bp, Homo sapiens
agtgtttttgttata

SEQ ID NO: 1515592 - DNA, 15 bp, Homo sapiens
gtgtttttgttatat

SEQ ID NO: 1515593 - DNA, 15 bp, Homo sapiens
tgtttttgttatatc

SEQ ID NO: 1515594 - DNA, 15 bp, Homo sapiens
gtttttgttatatct

SEQ ID NO: 1515595 - DNA, 15 bp, Homo sapiens
tttttgttatatctc

SEQ ID NO: 1515596 - DNA, 15 bp, Homo sapiens
ttttgttatatctct

SEQ ID NO: 1515597 - DNA, 15 bp, Homo sapiens
tttgttatatctcta

SEQ ID NO: 1515598 - DNA, 15 bp, Homo sapiens
ttgttatatctctaa

SEQ ID NO: 1515599 - DNA, 15 bp, Homo sapiens
tgttatatctctaat

SEQ ID NO: 1515600 - DNA, 15 bp, Homo sapiens
gttatatctctaatt

SEQ ID NO: 1515601 - DNA, 15 bp, Homo sapiens
ttatatctctaattc

SEQ ID NO: 1515602 - DNA, 15 bp, Homo sapiens
tatatctctaattct

SEQ ID NO: 1515603 - DNA, 15 bp, Homo sapiens
atatctctaattctt

SEQ ID NO: 1515604 - DNA, 15 bp, Homo sapiens
tatctctaattcttg

SEQ ID NO: 1515605 - DNA, 15 bp, Homo sapiens
atctctaattcttga

SEQ ID NO: 1515606 - DNA, 15 bp, Homo sapiens
tctctaattcttgac

SEQ ID NO: 1515607 - DNA, 15 bp, Homo sapiens
ctctaattcttgaca

SEQ ID NO: 1515608 - DNA, 15 bp, Homo sapiens
tctaattcttgacat

SEQ ID NO: 1515609 - DNA, 15 bp, Homo sapiens
ctaattcttgacatc

SEQ ID NO: 1515610 - DNA, 15 bp, Homo sapiens
taattcttgacatca

SEQ ID NO: 1515611 - DNA, 15 bp, Homo sapiens
aattcttgacatcaa

SEQ ID NO: 1515612 - DNA, 15 bp, Homo sapiens
attcttgacatcaat

SEQ ID NO: 1515613 - DNA, 15 bp, Homo sapiens
ttcttgacatcaata

SEQ ID NO: 1515614 - DNA, 15 bp, Homo sapiens
tcttgacatcaataa

SEQ ID NO: 1515615 - DNA, 15 bp, Homo sapiens
cttgacatcaataat

SEQ ID NO: 1515616 - DNA, 15 bp, Homo sapiens
ttgacatcaataatc

SEQ ID NO: 1515617 - DNA, 15 bp, Homo sapiens
tgacatcaataatct

SEQ ID NO: 1515618 - DNA, 15 bp, Homo sapiens
gacatcaataatctg

SEQ ID NO: 1515619 - DNA, 15 bp, Homo sapiens
acatcaataatctgt

SEQ ID NO: 1515620 - DNA, 15 bp, Homo sapiens
catcaataatctgtt

SEQ ID NO: 1515621 - DNA, 15 bp, Homo sapiens
atcaataatctgtta

SEQ ID NO: 1515622 - DNA, 15 bp, Homo sapiens
tcaataatctgttat

SEQ ID NO: 1515623 - DNA, 15 bp, Homo sapiens
caataatctgttatc

SEQ ID NO: 1515624 - DNA, 15 bp, Homo sapiens
aataatctgttatct

SEQ ID NO: 1515625 - DNA, 15 bp, Homo sapiens
ataatctgttatctg

SEQ ID NO: 1515626 - DNA, 15 bp, Homo sapiens
taatctgttatctgt

SEQ ID NO: 1515627 - DNA, 15 bp, Homo sapiens
aatctgttatctgta

SEQ ID NO: 1515628 - DNA, 15 bp, Homo sapiens
atctgttatctgtag

SEQ ID NO: 1515629 - DNA, 15 bp, Homo sapiens
tctgttatctgtagt

SEQ ID NO: 1515630 - DNA, 15 bp, Homo sapiens
ctgttatctgtagta

SEQ ID NO: 1515631 - DNA, 15 bp, Homo sapiens
tgttatctgtagtaa

SEQ ID NO: 1515632 - DNA, 15 bp, Homo sapiens
gttatctgtagtaat

SEQ ID NO: 1515633 - DNA, 15 bp, Homo sapiens
ttatctgtagtaatt

SEQ ID NO: 1515634 - DNA, 15 bp, Homo sapiens
tatctgtagtaattt

SEQ ID NO: 1515635 - DNA, 15 bp, Homo sapiens
atctgtagtaatttt

SEQ ID NO: 1515636 - DNA, 15 bp, Homo sapiens
tctgtagtaattttc

SEQ ID NO: 1515637 - DNA, 15 bp, Homo sapiens
ctgtagtaattttct

SEQ ID NO: 1515638 - DNA, 15 bp, Homo sapiens
tgtagtaattttctt

SEQ ID NO: 1515639 - DNA, 15 bp, Homo sapiens
gtagtaattttcttt

SEQ ID NO: 1515640 - DNA, 15 bp, Homo sapiens
tagtaattttctttt

SEQ ID NO: 1515641 - DNA, 15 bp, Homo sapiens
agtaattttcttttt

SEQ ID NO: 1515642 - DNA, 15 bp, Homo sapiens
gtaattttcttttta

SEQ ID NO: 1515643 - DNA, 15 bp, Homo sapiens
taattttctttttaa

SEQ ID NO: 1515644 - DNA, 15 bp, Homo sapiens
aattttctttttaag

SEQ ID NO: 1515645 - DNA, 15 bp, Homo sapiens
attttctttttaagg

SEQ ID NO: 1515646 - DNA, 15 bp, Homo sapiens
ttttctttttaagga

SEQ ID NO: 1515647 - DNA, 15 bp, Homo sapiens
tttctttttaaggag

SEQ ID NO: 1515648 - DNA, 15 bp, Homo sapiens
ttctttttaaggaga

SEQ ID NO: 1515649 - DNA, 15 bp, Homo sapiens
tctttttaaggagat

SEQ ID NO: 1515650 - DNA, 15 bp, Homo sapiens
ctttttaaggagatc

SEQ ID NO: 1515651 - DNA, 15 bp, Homo sapiens
tttttaaggagatca

SEQ ID NO: 1515652 - DNA, 15 bp, Homo sapiens
ttttaaggagatcat

SEQ ID NO: 1515653 - DNA, 15 bp, Homo sapiens
tttaaggagatcatt

SEQ ID NO: 1515654 - DNA, 15 bp, Homo sapiens
ttaaggagatcattc

SEQ ID NO: 1515655 - DNA, 15 bp, Homo sapiens
taaggagatcattca

SEQ ID NO: 1515656 - DNA, 15 bp, Homo sapiens
aaggagatcattcaa

SEQ ID NO: 1515657 - DNA, 15 bp, Homo sapiens
aggagatcattcaat

SEQ ID NO: 1515658 - DNA, 15 bp, Homo sapiens
ggagatcattcaatt

SEQ ID NO: 1515659 - DNA, 15 bp, Homo sapiens
gagatcattcaattt

SEQ ID NO: 1515660 - DNA, 15 bp, Homo sapiens
agatcattcaatttc

SEQ ID NO: 1515661 - DNA, 15 bp, Homo sapiens
gatcattcaatttcc

SEQ ID NO: 1515662 - DNA, 15 bp, Homo sapiens
atcattcaatttcct

SEQ ID NO: 1515663 - DNA, 15 bp, Homo sapiens
tcattcaatttcctg

SEQ ID NO: 1515664 - DNA, 15 bp, Homo sapiens
cattcaatttcctga

SEQ ID NO: 1515665 - DNA, 15 bp, Homo sapiens
attcaatttcctgat

SEQ ID NO: 1515666 - DNA, 15 bp, Homo sapiens
ttcaatttcctgata

SEQ ID NO: 1515667 - DNA, 15 bp, Homo sapiens
tcaatttcctgataa

SEQ ID NO: 1515668 - DNA, 15 bp, Homo sapiens
caatttcctgataat

SEQ ID NO: 1515669 - DNA, 15 bp, Homo sapiens
aatttcctgataatt

SEQ ID NO: 1515670 - DNA, 15 bp, Homo sapiens
atttcctgataattc

SEQ ID NO: 1515671 - DNA, 15 bp, Homo sapiens
tttcctgataattct

SEQ ID NO: 1515672 - DNA, 15 bp, Homo sapiens
ttcctgataattctg

SEQ ID NO: 1515673 - DNA, 15 bp, Homo sapiens
tcctgataattctgt

SEQ ID NO: 1515674 - DNA, 15 bp, Homo sapiens
cctgataattctgtg

SEQ ID NO: 1515675 - DNA, 15 bp, Homo sapiens
ctgataattctgtgt

SEQ ID NO: 1515676 - DNA, 15 bp, Homo sapiens
tgataattctgtgta

SEQ ID NO: 1515677 - DNA, 15 bp, Homo sapiens
gataattctgtgtaa

SEQ ID NO: 1515678 - DNA, 15 bp, Homo sapiens
ataattctgtgtaac

SEQ ID NO: 1515679 - DNA, 15 bp, Homo sapiens
taattctgtgtaaca

SEQ ID NO: 1515680 - DNA, 15 bp, Homo sapiens
aattctgtgtaacag

SEQ ID NO: 1515681 - DNA, 15 bp, Homo sapiens
attctgtgtaacagt

SEQ ID NO: 1515682 - DNA, 15 bp, Homo sapiens
ttctgtgtaacagtg

SEQ ID NO: 1515683 - DNA, 15 bp, Homo sapiens
tctgtgtaacagtgt

SEQ ID NO: 1515684 - DNA, 15 bp, Homo sapiens
ctgtgtaacagtgtt

SEQ ID NO: 1515685 - DNA, 15 bp, Homo sapiens
tgtgtaacagtgttt

SEQ ID NO: 1515686 - DNA, 15 bp, Homo sapiens
gtgtaacagtgttta

SEQ ID NO: 1515687 - DNA, 15 bp, Homo sapiens
tgtaacagtgtttac

SEQ ID NO: 1515688 - DNA, 15 bp, Homo sapiens
gtaacagtgtttact

SEQ ID NO: 1515689 - DNA, 15 bp, Homo sapiens
taacagtgtttactg

SEQ ID NO: 1515690 - DNA, 15 bp, Homo sapiens
aacagtgtttactgt

SEQ ID NO: 1515691 - DNA, 15 bp, Homo sapiens
acagtgtttactgta

SEQ ID NO: 1515692 - DNA, 15 bp, Homo sapiens
cagtgtttactgtaa

SEQ ID NO: 1515693 - DNA, 15 bp, Homo sapiens
agtgtttactgtaaa

SEQ ID NO: 1515694 - DNA, 15 bp, Homo sapiens
gtgtttactgtaaat

SEQ ID NO: 1515695 - DNA, 15 bp, Homo sapiens
tgtttactgtaaatt

SEQ ID NO: 1515696 - DNA, 15 bp, Homo sapiens
gtttactgtaaattt

SEQ ID NO: 1515697 - DNA, 15 bp, Homo sapiens
tttactgtaaattta

SEQ ID NO: 1515698 - DNA, 15 bp, Homo sapiens
ttactgtaaatttag

SEQ ID NO: 1515699 - DNA, 15 bp, Homo sapiens
tactgtaaatttaga

SEQ ID NO: 1515700 - DNA, 15 bp, Homo sapiens
actgtaaatttagaa

SEQ ID NO: 1515701 - DNA, 15 bp, Homo sapiens
ctgtaaatttagaac

SEQ ID NO: 1515702 - DNA, 15 bp, Homo sapiens
tgtaaatttagaact

SEQ ID NO: 1515703 - DNA, 15 bp, Homo sapiens
gtaaatttagaactg

SEQ ID NO: 1515704 - DNA, 15 bp, Homo sapiens
taaatttagaactga

SEQ ID NO: 1515705 - DNA, 15 bp, Homo sapiens
aaatttagaactgaa

SEQ ID NO: 1515706 - DNA, 15 bp, Homo sapiens
aatttagaactgaaa

SEQ ID NO: 1515707 - DNA, 15 bp, Homo sapiens
atttagaactgaaat

SEQ ID NO: 1515708 - DNA, 15 bp, Homo sapiens
tttagaactgaaatt

SEQ ID NO: 1515709 - DNA, 15 bp, Homo sapiens
ttagaactgaaattg

SEQ ID NO: 1515710 - DNA, 15 bp, Homo sapiens
tagaactgaaattga

SEQ ID NO: 1515711 - DNA, 15 bp, Homo sapiens
agaactgaaattgaa

SEQ ID NO: 1515712 - DNA, 15 bp, Homo sapiens
gaactgaaattgaaa

SEQ ID NO: 1515713 - DNA, 15 bp, Homo sapiens
aactgaaattgaaat

SEQ ID NO: 1515714 - DNA, 15 bp, Homo sapiens
actgaaattgaaata

SEQ ID NO: 1515715 - DNA, 15 bp, Homo sapiens
ctgaaattgaaatat

SEQ ID NO: 1515716 - DNA, 15 bp, Homo sapiens
tgaaattgaaatatt

SEQ ID NO: 1515717 - DNA, 15 bp, Homo sapiens
gaaattgaaatattc

SEQ ID NO: 1515718 - DNA, 15 bp, Homo sapiens
aaattgaaatattcc

SEQ ID NO: 1515719 - DNA, 15 bp, Homo sapiens
aattgaaatattcca

SEQ ID NO: 1515720 - DNA, 15 bp, Homo sapiens
attgaaatattccag

SEQ ID NO: 1515721 - DNA, 15 bp, Homo sapiens
ttgaaatattccagt

SEQ ID NO: 1515722 - DNA, 15 bp, Homo sapiens
tgaaatattccagta

SEQ ID NO: 1515723 - DNA, 15 bp, Homo sapiens
gaaatattccagtat

SEQ ID NO: 1515724 - DNA, 15 bp, Homo sapiens
aaatattccagtata

SEQ ID NO: 1515725 - DNA, 15 bp, Homo sapiens
aatattccagtatat

SEQ ID NO: 1515726 - DNA, 15 bp, Homo sapiens
atattccagtatatt

SEQ ID NO: 1515727 - DNA, 15 bp, Homo sapiens
tattccagtatattt

SEQ ID NO: 1515728 - DNA, 15 bp, Homo sapiens
attccagtatatttt

SEQ ID NO: 1515729 - DNA, 15 bp, Homo sapiens
ttccagtatattttt

SEQ ID NO: 1515730 - DNA, 15 bp, Homo sapiens
tccagtatattttta

SEQ ID NO: 1515731 - DNA, 15 bp, Homo sapiens
ccagtatatttttat

SEQ ID NO: 1515732 - DNA, 15 bp, Homo sapiens
cagtatatttttatc

SEQ ID NO: 1515733 - DNA, 15 bp, Homo sapiens
agtatatttttatct

SEQ ID NO: 1515734 - DNA, 15 bp, Homo sapiens
gtatatttttatctg

SEQ ID NO: 1515735 - DNA, 15 bp, Homo sapiens
tatatttttatctga

SEQ ID NO: 1515736 - DNA, 15 bp, Homo sapiens
atatttttatctgat

SEQ ID NO: 1515737 - DNA, 15 bp, Homo sapiens
tatttttatctgatg

SEQ ID NO: 1515738 - DNA, 15 bp, Homo sapiens
atttttatctgatga

SEQ ID NO: 1515739 - DNA, 15 bp, Homo sapiens
tttttatctgatgaa

SEQ ID NO: 1515740 - DNA, 15 bp, Homo sapiens
ttttatctgatgaaa

SEQ ID NO: 1515741 - DNA, 15 bp, Homo sapiens
tttatctgatgaaaa

SEQ ID NO: 1515742 - DNA, 15 bp, Homo sapiens
ttatctgatgaaaag

SEQ ID NO: 1515743 - DNA, 15 bp, Homo sapiens
tatctgatgaaaagg

SEQ ID NO: 1515744 - DNA, 15 bp, Homo sapiens
atctgatgaaaagga

SEQ ID NO: 1515745 - DNA, 15 bp, Homo sapiens
tctgatgaaaaggag

SEQ ID NO: 1515746 - DNA, 15 bp, Homo sapiens
ctgatgaaaaggaga

SEQ ID NO: 1515747 - DNA, 15 bp, Homo sapiens
tgatgaaaaggagaa

SEQ ID NO: 1515748 - DNA, 15 bp, Homo sapiens
gatgaaaaggagaaa

SEQ ID NO: 1515749 - DNA, 15 bp, Homo sapiens
atgaaaaggagaaag

SEQ ID NO: 1515750 - DNA, 15 bp, Homo sapiens
tgaaaaggagaaagg

SEQ ID NO: 1515751 - DNA, 15 bp, Homo sapiens
gaaaaggagaaaggt

SEQ ID NO: 1515752 - DNA, 15 bp, Homo sapiens
aaaaggagaaaggtt

SEQ ID NO: 1515753 - DNA, 15 bp, Homo sapiens
aaaggagaaaggttt

SEQ ID NO: 1515754 - DNA, 15 bp, Homo sapiens
aaggagaaaggtttt

SEQ ID NO: 1515755 - DNA, 15 bp, Homo sapiens
aggagaaaggtttta

SEQ ID NO: 1515756 - DNA, 15 bp, Homo sapiens
ggagaaaggttttat

SEQ ID NO: 1515757 - DNA, 15 bp, Homo sapiens
gagaaaggttttatt

SEQ ID NO: 1515758 - DNA, 15 bp, Homo sapiens
agaaaggttttatta

SEQ ID NO: 1515759 - DNA, 15 bp, Homo sapiens
gaaaggttttattaa

SEQ ID NO: 1515760 - DNA, 15 bp, Homo sapiens
aaaggttttattaag

SEQ ID NO: 1515761 - DNA, 15 bp, Homo sapiens
aaggttttattaagt

SEQ ID NO: 1515762 - DNA, 15 bp, Homo sapiens
aggttttattaagta

SEQ ID NO: 1515763 - DNA, 15 bp, Homo sapiens
ggttttattaagtaa

SEQ ID NO: 1515764 - DNA, 15 bp, Homo sapiens
gttttattaagtaaa

SEQ ID NO: 1515765 - DNA, 15 bp, Homo sapiens
ttttattaagtaaaa

SEQ ID NO: 1515766 - DNA, 15 bp, Homo sapiens
tttattaagtaaaat

SEQ ID NO: 1515767 - DNA, 15 bp, Homo sapiens
ttattaagtaaaatg

SEQ ID NO: 1515768 - DNA, 15 bp, Homo sapiens
tattaagtaaaatgt

SEQ ID NO: 1515769 - DNA, 15 bp, Homo sapiens
attaagtaaaatgtc

SEQ ID NO: 1515770 - DNA, 15 bp, Homo sapiens
ttaagtaaaatgtca

SEQ ID NO: 1515771 - DNA, 15 bp, Homo sapiens
taagtaaaatgtcaa

SEQ ID NO: 1515772 - DNA, 15 bp, Homo sapiens
aagtaaaatgtcaaa

SEQ ID NO: 1515773 - DNA, 15 bp, Homo sapiens
agtaaaatgtcaaat

SEQ ID NO: 1515774 - DNA, 15 bp, Homo sapiens
gtaaaatgtcaaatt

SEQ ID NO: 1515775 - DNA, 15 bp, Homo sapiens
taaaatgtcaaatta

SEQ ID NO: 1515776 - DNA, 15 bp, Homo sapiens
aaaatgtcaaattat

SEQ ID NO: 1515777 - DNA, 15 bp, Homo sapiens
aaatgtcaaattatt

SEQ ID NO: 1515778 - DNA, 15 bp, Homo sapiens
aatgtcaaattattt

SEQ ID NO: 1515779 - DNA, 15 bp, Homo sapiens
atgtcaaattatttt

SEQ ID NO: 1515780 - DNA, 15 bp, Homo sapiens
tgtcaaattattttt

SEQ ID NO: 1515781 - DNA, 15 bp, Homo sapiens
gtcaaattattttta

SEQ ID NO: 1515782 - DNA, 15 bp, Homo sapiens
tcaaattatttttac

SEQ ID NO: 1515783 - DNA, 15 bp, Homo sapiens
caaattatttttact

SEQ ID NO: 1515784 - DNA, 15 bp, Homo sapiens
aaattatttttactg

SEQ ID NO: 1515785 - DNA, 15 bp, Homo sapiens
aattatttttactgt

SEQ ID NO: 1515786 - DNA, 15 bp, Homo sapiens
attatttttactgtt

SEQ ID NO: 1515787 - DNA, 15 bp, Homo sapiens
ttatttttactgtta

SEQ ID NO: 1515788 - DNA, 15 bp, Homo sapiens
tatttttactgttat

SEQ ID NO: 1515789 - DNA, 15 bp, Homo sapiens
atttttactgttatc

SEQ ID NO: 1515790 - DNA, 15 bp, Homo sapiens
tttttactgttatct

SEQ ID NO: 1515791 - DNA, 15 bp, Homo sapiens
ttttactgttatctt

SEQ ID NO: 1515792 - DNA, 15 bp, Homo sapiens
tttactgttatcttg

SEQ ID NO: 1515793 - DNA, 15 bp, Homo sapiens
ttactgttatcttgt

SEQ ID NO: 1515794 - DNA, 15 bp, Homo sapiens
tactgttatcttgta

SEQ ID NO: 1515795 - DNA, 15 bp, Homo sapiens
actgttatcttgtat

SEQ ID NO: 1515796 - DNA, 15 bp, Homo sapiens
ctgttatcttgtata

SEQ ID NO: 1515797 - DNA, 15 bp, Homo sapiens
tgttatcttgtatat

SEQ ID NO: 1515798 - DNA, 15 bp, Homo sapiens
gttatcttgtatatt

SEQ ID NO: 1515799 - DNA, 15 bp, Homo sapiens
ttatcttgtatattt

SEQ ID NO: 1515800 - DNA, 15 bp, Homo sapiens
tatcttgtatatttt

SEQ ID NO: 1515801 - DNA, 15 bp, Homo sapiens
atcttgtatatttta

SEQ ID NO: 1515802 - DNA, 15 bp, Homo sapiens
tcttgtatattttaa

SEQ ID NO: 1515803 - DNA, 15 bp, Homo sapiens
cttgtatattttaaa

SEQ ID NO: 1515804 - DNA, 15 bp, Homo sapiens
ttgtatattttaaat

SEQ ID NO: 1515805 - DNA, 15 bp, Homo sapiens
tgtatattttaaata

SEQ ID NO: 1515806 - DNA, 15 bp, Homo sapiens
gtatattttaaatag

SEQ ID NO: 1515807 - DNA, 15 bp, Homo sapiens
tatattttaaatagg

SEQ ID NO: 1515808 - DNA, 15 bp, Homo sapiens
atattttaaatagga

SEQ ID NO: 1515809 - DNA, 15 bp, Homo sapiens
tattttaaataggaa

SEQ ID NO: 1515810 - DNA, 15 bp, Homo sapiens
attttaaataggaag

SEQ ID NO: 1515811 - DNA, 15 bp, Homo sapiens
ttttaaataggaagt

SEQ ID NO: 1515812 - DNA, 15 bp, Homo sapiens
tttaaataggaagta

SEQ ID NO: 1515813 - DNA, 15 bp, Homo sapiens
ttaaataggaagtag

SEQ ID NO: 1515814 - DNA, 15 bp, Homo sapiens
taaataggaagtaga

SEQ ID NO: 1515815 - DNA, 15 bp, Homo sapiens
aaataggaagtagac

SEQ ID NO: 1515816 - DNA, 15 bp, Homo sapiens
aataggaagtagacc

SEQ ID NO: 1515817 - DNA, 15 bp, Homo sapiens
ataggaagtagacca

SEQ ID NO: 1515818 - DNA, 15 bp, Homo sapiens
taggaagtagaccag

SEQ ID NO: 1515819 - DNA, 15 bp, Homo sapiens
aggaagtagaccagt

SEQ ID NO: 1515820 - DNA, 15 bp, Homo sapiens
ggaagtagaccagtt

SEQ ID NO: 1515821 - DNA, 15 bp, Homo sapiens
gaagtagaccagttg

SEQ ID NO: 1515822 - DNA, 15 bp, Homo sapiens
aagtagaccagttgc

SEQ ID NO: 1515823 - DNA, 15 bp, Homo sapiens
agtagaccagttgcg

SEQ ID NO: 1515824 - DNA, 15 bp, Homo sapiens
gtagaccagttgcgt

SEQ ID NO: 1515825 - DNA, 15 bp, Homo sapiens
tagaccagttgcgtt

SEQ ID NO: 1515826 - DNA, 15 bp, Homo sapiens
agaccagttgcgttt

SEQ ID NO: 1515827 - DNA, 15 bp, Homo sapiens
gaccagttgcgtttg

SEQ ID NO: 1515828 - DNA, 15 bp, Homo sapiens
accagttgcgtttgg

SEQ ID NO: 1515829 - DNA, 15 bp, Homo sapiens
ccagttgcgtttgga

SEQ ID NO: 1515830 - DNA, 15 bp, Homo sapiens
cagttgcgtttggag

SEQ ID NO: 1515831 - DNA, 15 bp, Homo sapiens
agttgcgtttggaga

SEQ ID NO: 1515832 - DNA, 15 bp, Homo sapiens
gttgcgtttggagag

SEQ ID NO: 1515833 - DNA, 15 bp, Homo sapiens
ttgcgtttggagaga

SEQ ID NO: 1515834 - DNA, 15 bp, Homo sapiens
tgcgtttggagagat

SEQ ID NO: 1515835 - DNA, 15 bp, Homo sapiens
gcgtttggagagatt

SEQ ID NO: 1515836 - DNA, 15 bp, Homo sapiens
cgtttggagagatta

SEQ ID NO: 1515837 - DNA, 15 bp, Homo sapiens
gtttggagagattac

SEQ ID NO: 1515838 - DNA, 15 bp, Homo sapiens
tttggagagattaca

SEQ ID NO: 1515839 - DNA, 15 bp, Homo sapiens
ttggagagattacaa

SEQ ID NO: 1515840 - DNA, 15 bp, Homo sapiens
tggagagattacaaa

SEQ ID NO: 1515841 - DNA, 15 bp, Homo sapiens
ggagagattacaaat

SEQ ID NO: 1515842 - DNA, 15 bp, Homo sapiens
gagagattacaaatt

SEQ ID NO: 1515843 - DNA, 15 bp, Homo sapiens
agagattacaaattg

SEQ ID NO: 1515844 - DNA, 15 bp, Homo sapiens
gagattacaaattga

SEQ ID NO: 1515845 - DNA, 15 bp, Homo sapiens
agattacaaattgat

SEQ ID NO: 1515846 - DNA, 15 bp, Homo sapiens
gattacaaattgatg

SEQ ID NO: 1515847 - DNA, 15 bp, Homo sapiens
attacaaattgatga

SEQ ID NO: 1515848 - DNA, 15 bp, Homo sapiens
ttacaaattgatgag

SEQ ID NO: 1515849 - DNA, 15 bp, Homo sapiens
tacaaattgatgagc

SEQ ID NO: 1515850 - DNA, 15 bp, Homo sapiens
acaaattgatgagca

SEQ ID NO: 1515851 - DNA, 15 bp, Homo sapiens
caaattgatgagcag

SEQ ID NO: 1515852 - DNA, 15 bp, Homo sapiens
aaattgatgagcagt

SEQ ID NO: 1515853 - DNA, 15 bp, Homo sapiens
aattgatgagcagtt

SEQ ID NO: 1515854 - DNA, 15 bp, Homo sapiens
attgatgagcagttg

SEQ ID NO: 1515855 - DNA, 15 bp, Homo sapiens
ttgatgagcagttgc

SEQ ID NO: 1515856 - DNA, 15 bp, Homo sapiens
tgatgagcagttgcg

SEQ ID NO: 1515857 - DNA, 15 bp, Homo sapiens
gatgagcagttgcga

SEQ ID NO: 1515858 - DNA, 15 bp, Homo sapiens
atgagcagttgcgac

SEQ ID NO: 1515859 - DNA, 15 bp, Homo sapiens
tgagcagttgcgaca

SEQ ID NO: 1515860 - DNA, 15 bp, Homo sapiens
gagcagttgcgacag

SEQ ID NO: 1515861 - DNA, 15 bp, Homo sapiens
agcagttgcgacaga

SEQ ID NO: 1515862 - DNA, 15 bp, Homo sapiens
gcagttgcgacagat

SEQ ID NO: 1515863 - DNA, 15 bp, Homo sapiens
cagttgcgacagatt

SEQ ID NO: 1515864 - DNA, 15 bp, Homo sapiens
agttgcgacagattg

SEQ ID NO: 1515865 - DNA, 15 bp, Homo sapiens
gttgcgacagattgg

SEQ ID NO: 1515866 - DNA, 15 bp, Homo sapiens
ttgcgacagattgga

SEQ ID NO: 1515867 - DNA, 15 bp, Homo sapiens
tgcgacagattggag

SEQ ID NO: 1515868 - DNA, 15 bp, Homo sapiens
gcgacagattggagc

SEQ ID NO: 1515869 - DNA, 15 bp, Homo sapiens
cgacagattggagct

SEQ ID NO: 1515870 - DNA, 15 bp, Homo sapiens
gacagattggagcta

SEQ ID NO: 1515871 - DNA, 15 bp, Homo sapiens
acagattggagctag

SEQ ID NO: 1515872 - DNA, 15 bp, Homo sapiens
cagattggagctagt

SEQ ID NO: 1515873 - DNA, 15 bp, Homo sapiens
agattggagctagtt

SEQ ID NO: 1515874 - DNA, 15 bp, Homo sapiens
gattggagctagttc

SEQ ID NO: 1515875 - DNA, 15 bp, Homo sapiens
attggagctagttct

SEQ ID NO: 1515876 - DNA, 15 bp, Homo sapiens
ttggagctagttcta

SEQ ID NO: 1515877 - DNA, 15 bp, Homo sapiens
tggagctagttctag

SEQ ID NO: 1515878 - DNA, 15 bp, Homo sapiens
ggagctagttctaga

SEQ ID NO: 1515879 - DNA, 15 bp, Homo sapiens
gagctagttctagac

SEQ ID NO: 1515880 - DNA, 15 bp, Homo sapiens
agctagttctagacc

SEQ ID NO: 1515881 - DNA, 15 bp, Homo sapiens
gctagttctagacca

SEQ ID NO: 1515882 - DNA, 15 bp, Homo sapiens
ctagttctagaccac

SEQ ID NO: 1515883 - DNA, 15 bp, Homo sapiens
tagttctagaccacc

SEQ ID NO: 1515884 - DNA, 15 bp, Homo sapiens
agttctagaccacca

SEQ ID NO: 1515885 - DNA, 15 bp, Homo sapiens
gttctagaccaccac

SEQ ID NO: 1515886 - DNA, 15 bp, Homo sapiens
ttctagaccaccacc

SEQ ID NO: 1515887 - DNA, 15 bp, Homo sapiens
tctagaccaccacca

SEQ ID NO: 1515888 - DNA, 15 bp, Homo sapiens
ctagaccaccaccaa

SEQ ID NO: 1515889 - DNA, 15 bp, Homo sapiens
tagaccaccaccaaa

SEQ ID NO: 1515890 - DNA, 15 bp, Homo sapiens
agaccaccaccaaat

SEQ ID NO: 1515891 - DNA, 15 bp, Homo sapiens
gaccaccaccaaatc

SEQ ID NO: 1515892 - DNA, 15 bp, Homo sapiens
accaccaccaaatcg

SEQ ID NO: 1515893 - DNA, 15 bp, Homo sapiens
ccaccaccaaatcgt

SEQ ID NO: 1515894 - DNA, 15 bp, Homo sapiens
caccaccaaatcgta

SEQ ID NO: 1515895 - DNA, 15 bp, Homo sapiens
accaccaaatcgtac

SEQ ID NO: 1515896 - DNA, 15 bp, Homo sapiens
ccaccaaatcgtaca

SEQ ID NO: 1515897 - DNA, 15 bp, Homo sapiens
caccaaatcgtacag

SEQ ID NO: 1515898 - DNA, 15 bp, Homo sapiens
accaaatcgtacaga

SEQ ID NO: 1515899 - DNA, 15 bp, Homo sapiens
ccaaatcgtacagat

SEQ ID NO: 1515900 - DNA, 15 bp, Homo sapiens
caaatcgtacagata

SEQ ID NO: 1515901 - DNA, 15 bp, Homo sapiens
aaatcgtacagataa

SEQ ID NO: 1515902 - DNA, 15 bp, Homo sapiens
aatcgtacagataag

SEQ ID NO: 1515903 - DNA, 15 bp, Homo sapiens
atcgtacagataagg

SEQ ID NO: 1515904 - DNA, 15 bp, Homo sapiens
tcgtacagataagga

SEQ ID NO: 1515905 - DNA, 15 bp, Homo sapiens
cgtacagataaggaa

SEQ ID NO: 1515906 - DNA, 15 bp, Homo sapiens
gtacagataaggaaa

SEQ ID NO: 1515907 - DNA, 15 bp, Homo sapiens
tacagataaggaaaa

SEQ ID NO: 1515908 - DNA, 15 bp, Homo sapiens
acagataaggaaaaa

SEQ ID NO: 1515909 - DNA, 15 bp, Homo sapiens
cagataaggaaaaaa

SEQ ID NO: 1515910 - DNA, 15 bp, Homo sapiens
agataaggaaaaaag

SEQ ID NO: 1515911 - DNA, 15 bp, Homo sapiens
gataaggaaaaaagc

SEQ ID NO: 1515912 - DNA, 15 bp, Homo sapiens
ataaggaaaaaagct

SEQ ID NO: 1515913 - DNA, 15 bp, Homo sapiens
taaggaaaaaagcta

SEQ ID NO: 1515914 - DNA, 15 bp, Homo sapiens
aaggaaaaaagctat

SEQ ID NO: 1515915 - DNA, 15 bp, Homo sapiens
aggaaaaaagctatg

SEQ ID NO: 1515916 - DNA, 15 bp, Homo sapiens
ggaaaaaagctatgt

SEQ ID NO: 1515917 - DNA, 15 bp, Homo sapiens
gaaaaaagctatgtg

SEQ ID NO: 1515918 - DNA, 15 bp, Homo sapiens
aaaaaagctatgtga

SEQ ID NO: 1515919 - DNA, 15 bp, Homo sapiens
aaaaagctatgtgac

SEQ ID NO: 1515920 - DNA, 15 bp, Homo sapiens
aaaagctatgtgact

SEQ ID NO: 1515921 - DNA, 15 bp, Homo sapiens
aaagctatgtgactg

SEQ ID NO: 1515922 - DNA, 15 bp, Homo sapiens
aagctatgtgactga

SEQ ID NO: 1515923 - DNA, 15 bp, Homo sapiens
agctatgtgactgat

SEQ ID NO: 1515924 - DNA, 15 bp, Homo sapiens
gctatgtgactgatg

SEQ ID NO: 1515925 - DNA, 15 bp, Homo sapiens
ctatgtgactgatga

SEQ ID NO: 1515926 - DNA, 15 bp, Homo sapiens
tatgtgactgatgat

SEQ ID NO: 1515927 - DNA, 15 bp, Homo sapiens
atgtgactgatgatg

SEQ ID NO: 1515928 - DNA, 15 bp, Homo sapiens
tgtgactgatgatgg

SEQ ID NO: 1515929 - DNA, 15 bp, Homo sapiens
gtgactgatgatggt

SEQ ID NO: 1515930 - DNA, 15 bp, Homo sapiens
tgactgatgatggtc

SEQ ID NO: 1515931 - DNA, 15 bp, Homo sapiens
gactgatgatggtca

SEQ ID NO: 1515932 - DNA, 15 bp, Homo sapiens
actgatgatggtcaa

SEQ ID NO: 1515933 - DNA, 15 bp, Homo sapiens
ctgatgatggtcaag

SEQ ID NO: 1515934 - DNA, 15 bp, Homo sapiens
tgatgatggtcaagg

SEQ ID NO: 1515935 - DNA, 15 bp, Homo sapiens
gatgatggtcaagga

SEQ ID NO: 1515936 - DNA, 15 bp, Homo sapiens
atgatggtcaaggaa

SEQ ID NO: 1515937 - DNA, 15 bp, Homo sapiens
tgatggtcaaggaat

SEQ ID NO: 1515938 - DNA, 15 bp, Homo sapiens
gatggtcaaggaatg

SEQ ID NO: 1515939 - DNA, 15 bp, Homo sapiens
atggtcaaggaatgg

SEQ ID NO: 1515940 - DNA, 15 bp, Homo sapiens
tggtcaaggaatggg

SEQ ID NO: 1515941 - DNA, 15 bp, Homo sapiens
ggtcaaggaatgggt

SEQ ID NO: 1515942 - DNA, 15 bp, Homo sapiens
gtcaaggaatgggtc

SEQ ID NO: 1515943 - DNA, 15 bp, Homo sapiens
tcaaggaatgggtcg

SEQ ID NO: 1515944 - DNA, 15 bp, Homo sapiens
caaggaatgggtcga

SEQ ID NO: 1515945 - DNA, 15 bp, Homo sapiens
aaggaatgggtcgag

SEQ ID NO: 1515946 - DNA, 15 bp, Homo sapiens
aggaatgggtcgagg

SEQ ID NO: 1515947 - DNA, 15 bp, Homo sapiens
ggaatgggtcgaggt

SEQ ID NO: 1515948 - DNA, 15 bp, Homo sapiens
gaatgggtcgaggta

SEQ ID NO: 1515949 - DNA, 15 bp, Homo sapiens
aatgggtcgaggtag

SEQ ID NO: 1515950 - DNA, 15 bp, Homo sapiens
atgggtcgaggtagt

SEQ ID NO: 1515951 - DNA, 15 bp, Homo sapiens
tgggtcgaggtagta

SEQ ID NO: 1515952 - DNA, 15 bp, Homo sapiens
gggtcgaggtagtag

SEQ ID NO: 1515953 - DNA, 15 bp, Homo sapiens
ggtcgaggtagtaga

SEQ ID NO: 1515954 - DNA, 15 bp, Homo sapiens
gtcgaggtagtagac

SEQ ID NO: 1515955 - DNA, 15 bp, Homo sapiens
tcgaggtagtagacc

SEQ ID NO: 1515956 - DNA, 15 bp, Homo sapiens
cgaggtagtagacct

SEQ ID NO: 1515957 - DNA, 15 bp, Homo sapiens
gaggtagtagacctt

SEQ ID NO: 1515958 - DNA, 15 bp, Homo sapiens
aggtagtagacctta

SEQ ID NO: 1515959 - DNA, 15 bp, Homo sapiens
ggtagtagaccttac

SEQ ID NO: 1515960 - DNA, 15 bp, Homo sapiens
gtagtagaccttaca

SEQ ID NO: 1515961 - DNA, 15 bp, Homo sapiens
tagtagaccttacag

SEQ ID NO: 1515962 - DNA, 15 bp, Homo sapiens
agtagaccttacaga

SEQ ID NO: 1515963 - DNA, 15 bp, Homo sapiens
gtagaccttacagaa

SEQ ID NO: 1515964 - DNA, 15 bp, Homo sapiens
tagaccttacagaaa

SEQ ID NO: 1515965 - DNA, 15 bp, Homo sapiens
agaccttacagaaat

SEQ ID NO: 1515966 - DNA, 15 bp, Homo sapiens
gaccttacagaaata

SEQ ID NO: 1515967 - DNA, 15 bp, Homo sapiens
accttacagaaatag

SEQ ID NO: 1515968 - DNA, 15 bp, Homo sapiens
ccttacagaaatagg

SEQ ID NO: 1515969 - DNA, 15 bp, Homo sapiens
cttacagaaataggg

SEQ ID NO: 1515970 - DNA, 15 bp, Homo sapiens
ttacagaaatagggg

SEQ ID NO: 1515971 - DNA, 15 bp, Homo sapiens
tacagaaataggggg

SEQ ID NO: 1515972 - DNA, 15 bp, Homo sapiens
acagaaatagggggc

SEQ ID NO: 1515973 - DNA, 15 bp, Homo sapiens
cagaaatagggggca

SEQ ID NO: 1515974 - DNA, 15 bp, Homo sapiens
agaaatagggggcac

SEQ ID NO: 1515975 - DNA, 15 bp, Homo sapiens
gaaatagggggcacg

SEQ ID NO: 1515976 - DNA, 15 bp, Homo sapiens
aaatagggggcacgg

SEQ ID NO: 1515977 - DNA, 15 bp, Homo sapiens
aatagggggcacggc

SEQ ID NO: 1515978 - DNA, 15 bp, Homo sapiens
atagggggcacggca

SEQ ID NO: 1515979 - DNA, 15 bp, Homo sapiens
tagggggcacggcag

SEQ ID NO: 1515980 - DNA, 15 bp, Homo sapiens
agggggcacggcaga

SEQ ID NO: 1515981 - DNA, 15 bp, Homo sapiens
gggggcacggcagac

SEQ ID NO: 1515982 - DNA, 15 bp, Homo sapiens
ggggcacggcagacg

SEQ ID NO: 1515983 - DNA, 15 bp, Homo sapiens
gggcacggcagacgc

SEQ ID NO: 1515984 - DNA, 15 bp, Homo sapiens
ggcacggcagacgcg

SEQ ID NO: 1515985 - DNA, 15 bp, Homo sapiens
gcacggcagacgcgg

SEQ ID NO: 1515986 - DNA, 15 bp, Homo sapiens
cacggcagacgcggt

SEQ ID NO: 1515987 - DNA, 15 bp, Homo sapiens
acggcagacgcggtc

SEQ ID NO: 1515988 - DNA, 15 bp, Homo sapiens
cggcagacgcggtcc

SEQ ID NO: 1515989 - DNA, 15 bp, Homo sapiens
ggcagacgcggtcct

SEQ ID NO: 1515990 - DNA, 15 bp, Homo sapiens
gcagacgcggtcctg

SEQ ID NO: 1515991 - DNA, 15 bp, Homo sapiens
cagacgcggtcctgg

SEQ ID NO: 1515992 - DNA, 15 bp, Homo sapiens
agacgcggtcctgga

SEQ ID NO: 1515993 - DNA, 15 bp, Homo sapiens
gacgcggtcctggat

SEQ ID NO: 1515994 - DNA, 15 bp, Homo sapiens
acgcggtcctggata

SEQ ID NO: 1515995 - DNA, 15 bp, Homo sapiens
cgcggtcctggatat

SEQ ID NO: 1515996 - DNA, 15 bp, Homo sapiens
gcggtcctggatata

SEQ ID NO: 1515997 - DNA, 15 bp, Homo sapiens
cggtcctggatatac

SEQ ID NO: 1515998 - DNA, 15 bp, Homo sapiens
ggtcctggatatact

SEQ ID NO: 1515999 - DNA, 15 bp, Homo sapiens
gtcctggatatactt

SEQ ID NO: 1516000 - DNA, 15 bp, Homo sapiens
tcctggatatacttc

SEQ ID NO: 1516001 - DNA, 15 bp, Homo sapiens
cctggatatacttca

SEQ ID NO: 1516002 - DNA, 15 bp, Homo sapiens
ctggatatacttcag

SEQ ID NO: 1516003 - DNA, 15 bp, Homo sapiens
tggatatacttcagg

SEQ ID NO: 1516004 - DNA, 15 bp, Homo sapiens
ggatatacttcaggt

SEQ ID NO: 1516005 - DNA, 15 bp, Homo sapiens
gatatacttcaggta

SEQ ID NO: 1516006 - DNA, 15 bp, Homo sapiens
atatacttcaggtac

SEQ ID NO: 1516007 - DNA, 15 bp, Homo sapiens
tatacttcaggtaca

SEQ ID NO: 1516008 - DNA, 15 bp, Homo sapiens
atacttcaggtacaa

SEQ ID NO: 1516009 - DNA, 15 bp, Homo sapiens
tacttcaggtacaaa

SEQ ID NO: 1516010 - DNA, 15 bp, Homo sapiens
acttcaggtacaaac

SEQ ID NO: 1516011 - DNA, 15 bp, Homo sapiens
cttcaggtacaaact

SEQ ID NO: 1516012 - DNA, 15 bp, Homo sapiens
ttcaggtacaaacta

SEQ ID NO: 1516013 - DNA, 15 bp, Homo sapiens
tcaggtacaaactaa

SEQ ID NO: 1516014 - DNA, 15 bp, Homo sapiens
caggtacaaactaag

SEQ ID NO: 1516015 - DNA, 15 bp, Homo sapiens
aggtacaaactaagc

SEQ ID NO: 1516016 - DNA, 15 bp, Homo sapiens
ggtacaaactaagca

SEQ ID NO: 1516017 - DNA, 15 bp, Homo sapiens
gtacaaactaagcat

SEQ ID NO: 1516018 - DNA, 15 bp, Homo sapiens
tacaaactaagcatt

SEQ ID NO: 1516019 - DNA, 15 bp, Homo sapiens
acaaactaagcattt

SEQ ID NO: 1516020 - DNA, 15 bp, Homo sapiens
caaactaagcatttt

SEQ ID NO: 1516021 - DNA, 15 bp, Homo sapiens
aaactaagcatttta

SEQ ID NO: 1516022 - DNA, 15 bp, Homo sapiens
aactaagcattttac

SEQ ID NO: 1516023 - DNA, 15 bp, Homo sapiens
actaagcattttact

SEQ ID NO: 1516024 - DNA, 15 bp, Homo sapiens
ctaagcattttactc

SEQ ID NO: 1516025 - DNA, 15 bp, Homo sapiens
taagcattttactca

SEQ ID NO: 1516026 - DNA, 15 bp, Homo sapiens
aagcattttactcag

SEQ ID NO: 1516027 - DNA, 15 bp, Homo sapiens
agcattttactcagt

SEQ ID NO: 1516028 - DNA, 15 bp, Homo sapiens
gcattttactcagta

SEQ ID NO: 1516029 - DNA, 15 bp, Homo sapiens
cattttactcagtaa

SEQ ID NO: 1516030 - DNA, 15 bp, Homo sapiens
attttactcagtaac

SEQ ID NO: 1516031 - DNA, 15 bp, Homo sapiens
ttttactcagtaact

SEQ ID NO: 1516032 - DNA, 15 bp, Homo sapiens
tttactcagtaactt

SEQ ID NO: 1516033 - DNA, 15 bp, Homo sapiens
ttactcagtaacttt

SEQ ID NO: 1516034 - DNA, 15 bp, Homo sapiens
tactcagtaacttta

SEQ ID NO: 1516035 - DNA, 15 bp, Homo sapiens
actcagtaactttat

SEQ ID NO: 1516036 - DNA, 15 bp, Homo sapiens
ctcagtaactttatc

SEQ ID NO: 1516037 - DNA, 15 bp, Homo sapiens
tcagtaactttatct

SEQ ID NO: 1516038 - DNA, 15 bp, Homo sapiens
cagtaactttatctg

SEQ ID NO: 1516039 - DNA, 15 bp, Homo sapiens
agtaactttatctgt

SEQ ID NO: 1516040 - DNA, 15 bp, Homo sapiens
gtaactttatctgtt

SEQ ID NO: 1516041 - DNA, 15 bp, Homo sapiens
taactttatctgttc

SEQ ID NO: 1516042 - DNA, 15 bp, Homo sapiens
aactttatctgttcc

SEQ ID NO: 1516043 - DNA, 15 bp, Homo sapiens
actttatctgttcct

SEQ ID NO: 1516044 - DNA, 15 bp, Homo sapiens
ctttatctgttccta

SEQ ID NO: 1516045 - DNA, 15 bp, Homo sapiens
tttatctgttcctag

SEQ ID NO: 1516046 - DNA, 15 bp, Homo sapiens
ttatctgttcctaga

SEQ ID NO: 1516047 - DNA, 15 bp, Homo sapiens
tatctgttcctagac

SEQ ID NO: 1516048 - DNA, 15 bp, Homo sapiens
atctgttcctagact

SEQ ID NO: 1516049 - DNA, 15 bp, Homo sapiens
tctgttcctagactt

SEQ ID NO: 1516050 - DNA, 15 bp, Homo sapiens
ctgttcctagactta

SEQ ID NO: 1516051 - DNA, 15 bp, Homo sapiens
tgttcctagacttat

SEQ ID NO: 1516052 - DNA, 15 bp, Homo sapiens
gttcctagacttata

SEQ ID NO: 1516053 - DNA, 15 bp, Homo sapiens
ttcctagacttatag

SEQ ID NO: 1516054 - DNA, 15 bp, Homo sapiens
tcctagacttatagc

SEQ ID NO: 1516055 - DNA, 15 bp, Homo sapiens
cctagacttatagct

SEQ ID NO: 1516056 - DNA, 15 bp, Homo sapiens
ctagacttatagctg

SEQ ID NO: 1516057 - DNA, 15 bp, Homo sapiens
tagacttatagctgc

SEQ ID NO: 1516058 - DNA, 15 bp, Homo sapiens
agacttatagctgct

SEQ ID NO: 1516059 - DNA, 15 bp, Homo sapiens
gacttatagctgcta

SEQ ID NO: 1516060 - DNA, 15 bp, Homo sapiens
acttatagctgctaa

SEQ ID NO: 1516061 - DNA, 15 bp, Homo sapiens
cttatagctgctaat

SEQ ID NO: 1516062 - DNA, 15 bp, Homo sapiens
ttatagctgctaatc

SEQ ID NO: 1516063 - DNA, 15 bp, Homo sapiens
tatagctgctaatct

SEQ ID NO: 1516064 - DNA, 15 bp, Homo sapiens
atagctgctaatctc

SEQ ID NO: 1516065 - DNA, 15 bp, Homo sapiens
tagctgctaatctct

SEQ ID NO: 1516066 - DNA, 15 bp, Homo sapiens
agctgctaatctcta

SEQ ID NO: 1516067 - DNA, 15 bp, Homo sapiens
gctgctaatctctaa

SEQ ID NO: 1516068 - DNA, 15 bp, Homo sapiens
ctgctaatctctaat

SEQ ID NO: 1516069 - DNA, 15 bp, Homo sapiens
tgctaatctctaata

SEQ ID NO: 1516070 - DNA, 15 bp, Homo sapiens
gctaatctctaatat

SEQ ID NO: 1516071 - DNA, 15 bp, Homo sapiens
ctaatctctaatatt

SEQ ID NO: 1516072 - DNA, 15 bp, Homo sapiens
taatctctaatattc

SEQ ID NO: 1516073 - DNA, 15 bp, Homo sapiens
aatctctaatattca

SEQ ID NO: 1516074 - DNA, 15 bp, Homo sapiens
atctctaatattcat

SEQ ID NO: 1516075 - DNA, 15 bp, Homo sapiens
tctctaatattcatt

SEQ ID NO: 1516076 - DNA, 15 bp, Homo sapiens
ctctaatattcatta

SEQ ID NO: 1516077 - DNA, 15 bp, Homo sapiens
tctaatattcattag

SEQ ID NO: 1516078 - DNA, 15 bp, Homo sapiens
ctaatattcattaga

SEQ ID NO: 1516079 - DNA, 15 bp, Homo sapiens
taatattcattagaa

SEQ ID NO: 1516080 - DNA, 15 bp, Homo sapiens
aatattcattagaac

SEQ ID NO: 1516081 - DNA, 15 bp, Homo sapiens
atattcattagaacc

SEQ ID NO: 1516082 - DNA, 15 bp, Homo sapiens
tattcattagaaccc

SEQ ID NO: 1516083 - DNA, 15 bp, Homo sapiens
attcattagaacccc

SEQ ID NO: 1516084 - DNA, 15 bp, Homo sapiens
ttcattagaacccca

SEQ ID NO: 1516085 - DNA, 15 bp, Homo sapiens
tcattagaaccccat

SEQ ID NO: 1516086 - DNA, 15 bp, Homo sapiens
cattagaaccccatt

SEQ ID NO: 1516087 - DNA, 15 bp, Homo sapiens
attagaaccccatta

SEQ ID NO: 1516088 - DNA, 15 bp, Homo sapiens
ttagaaccccattat

SEQ ID NO: 1516089 - DNA, 15 bp, Homo sapiens
tagaaccccattata

SEQ ID NO: 1516090 - DNA, 15 bp, Homo sapiens
agaaccccattataa

SEQ ID NO: 1516091 - DNA, 15 bp, Homo sapiens
gaaccccattataac

SEQ ID NO: 1516092 - DNA, 15 bp, Homo sapiens
aaccccattataaca

SEQ ID NO: 1516093 - DNA, 15 bp, Homo sapiens
accccattataacaa

SEQ ID NO: 1516094 - DNA, 15 bp, Homo sapiens
ccccattataacaat

SEQ ID NO: 1516095 - DNA, 15 bp, Homo sapiens
cccattataacaatt

SEQ ID NO: 1516096 - DNA, 15 bp, Homo sapiens
ccattataacaattt

SEQ ID NO: 1516097 - DNA, 15 bp, Homo sapiens
cattataacaatttg

SEQ ID NO: 1516098 - DNA, 15 bp, Homo sapiens
attataacaatttgc

SEQ ID NO: 1516099 - DNA, 15 bp, Homo sapiens
ttataacaatttgcc

SEQ ID NO: 1516100 - DNA, 15 bp, Homo sapiens
tataacaatttgccg

SEQ ID NO: 1516101 - DNA, 15 bp, Homo sapiens
ataacaatttgccgc

SEQ ID NO: 1516102 - DNA, 15 bp, Homo sapiens
taacaatttgccgct

SEQ ID NO: 1516103 - DNA, 15 bp, Homo sapiens
aacaatttgccgcta

SEQ ID NO: 1516104 - DNA, 15 bp, Homo sapiens
acaatttgccgctac

SEQ ID NO: 1516105 - DNA, 15 bp, Homo sapiens
caatttgccgctaca

SEQ ID NO: 1516106 - DNA, 15 bp, Homo sapiens
aatttgccgctacat

SEQ ID NO: 1516107 - DNA, 15 bp, Homo sapiens
atttgccgctacatg

SEQ ID NO: 1516108 - DNA, 15 bp, Homo sapiens
tttgccgctacatgg

SEQ ID NO: 1516109 - DNA, 15 bp, Homo sapiens
ttgccgctacatggt

SEQ ID NO: 1516110 - DNA, 15 bp, Homo sapiens
tgccgctacatggtt

SEQ ID NO: 1516111 - DNA, 15 bp, Homo sapiens
gccgctacatggttt

SEQ ID NO: 1516112 - DNA, 15 bp, Homo sapiens
ccgctacatggtttc

SEQ ID NO: 1516113 - DNA, 15 bp, Homo sapiens
cgctacatggtttcc

SEQ ID NO: 1516114 - DNA, 15 bp, Homo sapiens
gctacatggtttcca

SEQ ID NO: 1516115 - DNA, 15 bp, Homo sapiens
ctacatggtttccaa

SEQ ID NO: 1516116 - DNA, 15 bp, Homo sapiens
tacatggtttccaat

SEQ ID NO: 1516117 - DNA, 15 bp, Homo sapiens
acatggtttccaatt

SEQ ID NO: 1516118 - DNA, 15 bp, Homo sapiens
catggtttccaattc

SEQ ID NO: 1516119 - DNA, 15 bp, Homo sapiens
atggtttccaattca

SEQ ID NO: 1516120 - DNA, 15 bp, Homo sapiens
tggtttccaattcac

SEQ ID NO: 1516121 - DNA, 15 bp, Homo sapiens
ggtttccaattcaca

SEQ ID NO: 1516122 - DNA, 15 bp, Homo sapiens
gtttccaattcacag

SEQ ID NO: 1516123 - DNA, 15 bp, Homo sapiens
tttccaattcacagt

SEQ ID NO: 1516124 - DNA, 15 bp, Homo sapiens
ttccaattcacagtg

SEQ ID NO: 1516125 - DNA, 15 bp, Homo sapiens
tccaattcacagtgg

SEQ ID NO: 1516126 - DNA, 15 bp, Homo sapiens
ccaattcacagtggg

SEQ ID NO: 1516127 - DNA, 15 bp, Homo sapiens
caattcacagtgggt

SEQ ID NO: 1516128 - DNA, 15 bp, Homo sapiens
aattcacagtgggtt

SEQ ID NO: 1516129 - DNA, 15 bp, Homo sapiens
attcacagtgggtta

SEQ ID NO: 1516130 - DNA, 15 bp, Homo sapiens
ttcacagtgggttaa

SEQ ID NO: 1516131 - DNA, 15 bp, Homo sapiens
tcacagtgggttaaa

SEQ ID NO: 1516132 - DNA, 15 bp, Homo sapiens
cacagtgggttaaat

SEQ ID NO: 1516133 - DNA, 15 bp, Homo sapiens
acagtgggttaaatt

SEQ ID NO: 1516134 - DNA, 15 bp, Homo sapiens
cagtgggttaaattg

SEQ ID NO: 1516135 - DNA, 15 bp, Homo sapiens
agtgggttaaattgt

SEQ ID NO: 1516136 - DNA, 15 bp, Homo sapiens
gtgggttaaattgtg

SEQ ID NO: 1516137 - DNA, 15 bp, Homo sapiens
tgggttaaattgtgt

SEQ ID NO: 1516138 - DNA, 15 bp, Homo sapiens
gggttaaattgtgtt

SEQ ID NO: 1516139 - DNA, 15 bp, Homo sapiens
ggttaaattgtgtta

SEQ ID NO: 1516140 - DNA, 15 bp, Homo sapiens
gttaaattgtgttac

SEQ ID NO: 1516141 - DNA, 15 bp, Homo sapiens
ttaaattgtgttaca

SEQ ID NO: 1516142 - DNA, 15 bp, Homo sapiens
taaattgtgttacag

SEQ ID NO: 1516143 - DNA, 15 bp, Homo sapiens
aaattgtgttacagg

SEQ ID NO: 1516144 - DNA, 15 bp, Homo sapiens
aattgtgttacagga

SEQ ID NO: 1516145 - DNA, 15 bp, Homo sapiens
attgtgttacaggag

SEQ ID NO: 1516146 - DNA, 15 bp, Homo sapiens
ttgtgttacaggaga

SEQ ID NO: 1516147 - DNA, 15 bp, Homo sapiens
tgtgttacaggagac

SEQ ID NO: 1516148 - DNA, 15 bp, Homo sapiens
gtgttacaggagaca

SEQ ID NO: 1516149 - DNA, 15 bp, Homo sapiens
tgttacaggagacat

SEQ ID NO: 1516150 - DNA, 15 bp, Homo sapiens
gttacaggagacata

SEQ ID NO: 1516151 - DNA, 15 bp, Homo sapiens
ttacaggagacatag

SEQ ID NO: 1516152 - DNA, 15 bp, Homo sapiens
tacaggagacataga

SEQ ID NO: 1516153 - DNA, 15 bp, Homo sapiens
acaggagacatagag

SEQ ID NO: 1516154 - DNA, 15 bp, Homo sapiens
caggagacatagagt

SEQ ID NO: 1516155 - DNA, 15 bp, Homo sapiens
aggagacatagagta

SEQ ID NO: 1516156 - DNA, 15 bp, Homo sapiens
ggagacatagagtaa

SEQ ID NO: 1516157 - DNA, 15 bp, Homo sapiens
gagacatagagtaaa

SEQ ID NO: 1516158 - DNA, 15 bp, Homo sapiens
agacatagagtaaaa

SEQ ID NO: 1516159 - DNA, 15 bp, Homo sapiens
gacatagagtaaaaa

SEQ ID NO: 1516160 - DNA, 15 bp, Homo sapiens
acatagagtaaaaac

SEQ ID NO: 1516161 - DNA, 15 bp, Homo sapiens
catagagtaaaaacc

SEQ ID NO: 1516162 - DNA, 15 bp, Homo sapiens
atagagtaaaaacct

SEQ ID NO: 1516163 - DNA, 15 bp, Homo sapiens
tagagtaaaaacctg

SEQ ID NO: 1516164 - DNA, 15 bp, Homo sapiens
agagtaaaaacctga

SEQ ID NO: 1516165 - DNA, 15 bp, Homo sapiens
gagtaaaaacctgat

SEQ ID NO: 1516166 - DNA, 15 bp, Homo sapiens
agtaaaaacctgatg

SEQ ID NO: 1516167 - DNA, 15 bp, Homo sapiens
gtaaaaacctgatga

SEQ ID NO: 1516168 - DNA, 15 bp, Homo sapiens
taaaaacctgatgat

SEQ ID NO: 1516169 - DNA, 15 bp, Homo sapiens
aaaaacctgatgata

SEQ ID NO: 1516170 - DNA, 15 bp, Homo sapiens
aaaacctgatgataa

SEQ ID NO: 1516171 - DNA, 15 bp, Homo sapiens
aaacctgatgataaa

SEQ ID NO: 1516172 - DNA, 15 bp, Homo sapiens
aacctgatgataaac

SEQ ID NO: 1516173 - DNA, 15 bp, Homo sapiens
acctgatgataaaca

SEQ ID NO: 1516174 - DNA, 15 bp, Homo sapiens
cctgatgataaacac

SEQ ID NO: 1516175 - DNA, 15 bp, Homo sapiens
ctgatgataaacacg

SEQ ID NO: 1516176 - DNA, 15 bp, Homo sapiens
tgatgataaacacgt

SEQ ID NO: 1516177 - DNA, 15 bp, Homo sapiens
gatgataaacacgta

SEQ ID NO: 1516178 - DNA, 15 bp, Homo sapiens
atgataaacacgtag

SEQ ID NO: 1516179 - DNA, 15 bp, Homo sapiens
tgataaacacgtaga

SEQ ID NO: 1516180 - DNA, 15 bp, Homo sapiens
gataaacacgtagag

SEQ ID NO: 1516181 - DNA, 15 bp, Homo sapiens
ataaacacgtagagt

SEQ ID NO: 1516182 - DNA, 15 bp, Homo sapiens
taaacacgtagagtt

SEQ ID NO: 1516183 - DNA, 15 bp, Homo sapiens
aaacacgtagagttc

SEQ ID NO: 1516184 - DNA, 15 bp, Homo sapiens
aacacgtagagttca

SEQ ID NO: 1516185 - DNA, 15 bp, Homo sapiens
acacgtagagttcac

SEQ ID NO: 1516186 - DNA, 15 bp, Homo sapiens
cacgtagagttcaca

SEQ ID NO: 1516187 - DNA, 15 bp, Homo sapiens
acgtagagttcacag

SEQ ID NO: 1516188 - DNA, 15 bp, Homo sapiens
cgtagagttcacagg

SEQ ID NO: 1516189 - DNA, 15 bp, Homo sapiens
gtagagttcacaggg

SEQ ID NO: 1516190 - DNA, 15 bp, Homo sapiens
tagagttcacagggc

SEQ ID NO: 1516191 - DNA, 15 bp, Homo sapiens
agagttcacagggcc

SEQ ID NO: 1516192 - DNA, 15 bp, Homo sapiens
gagttcacagggccg

SEQ ID NO: 1516193 - DNA, 15 bp, Homo sapiens
agttcacagggccgg

SEQ ID NO: 1516194 - DNA, 15 bp, Homo sapiens
gttcacagggccggt

SEQ ID NO: 1516195 - DNA, 15 bp, Homo sapiens
ttcacagggccggtg

SEQ ID NO: 1516196 - DNA, 15 bp, Homo sapiens
tcacagggccggtgc

SEQ ID NO: 1516197 - DNA, 15 bp, Homo sapiens
cacagggccggtgca

SEQ ID NO: 1516198 - DNA, 15 bp, Homo sapiens
acagggccggtgcaa

SEQ ID NO: 1516199 - DNA, 15 bp, Homo sapiens
cagggccggtgcaag

SEQ ID NO: 1516200 - DNA, 15 bp, Homo sapiens
agggccggtgcaagt

SEQ ID NO: 1516201 - DNA, 15 bp, Homo sapiens
gggccggtgcaagtt

SEQ ID NO: 1516202 - DNA, 15 bp, Homo sapiens
ggccggtgcaagttc

SEQ ID NO: 1516203 - DNA, 15 bp, Homo sapiens
gccggtgcaagttct

SEQ ID NO: 1516204 - DNA, 15 bp, Homo sapiens
ccggtgcaagttctg

SEQ ID NO: 1516205 - DNA, 15 bp, Homo sapiens
cggtgcaagttctgt

SEQ ID NO: 1516206 - DNA, 15 bp, Homo sapiens
ggtgcaagttctgtt

SEQ ID NO: 1516207 - DNA, 15 bp, Homo sapiens
gtgcaagttctgttc

SEQ ID NO: 1516208 - DNA, 15 bp, Homo sapiens
tgcaagttctgttca

SEQ ID NO: 1516209 - DNA, 15 bp, Homo sapiens
gcaagttctgttcat

SEQ ID NO: 1516210 - DNA, 15 bp, Homo sapiens
caagttctgttcatg

SEQ ID NO: 1516211 - DNA, 15 bp, Homo sapiens
aagttctgttcatgc

SEQ ID NO: 1516212 - DNA, 15 bp, Homo sapiens
agttctgttcatgct

SEQ ID NO: 1516213 - DNA, 15 bp, Homo sapiens
gttctgttcatgctc

SEQ ID NO: 1516214 - DNA, 15 bp, Homo sapiens
ttctgttcatgctct

SEQ ID NO: 1516215 - DNA, 15 bp, Homo sapiens
tctgttcatgctctg

SEQ ID NO: 1516216 - DNA, 15 bp, Homo sapiens
ctgttcatgctctga

SEQ ID NO: 1516217 - DNA, 15 bp, Homo sapiens
tgttcatgctctgat

SEQ ID NO: 1516218 - DNA, 15 bp, Homo sapiens
gttcatgctctgatt

SEQ ID NO: 1516219 - DNA, 15 bp, Homo sapiens
ttcatgctctgattg

SEQ ID NO: 1516220 - DNA, 15 bp, Homo sapiens
tcatgctctgattgg

SEQ ID NO: 1516221 - DNA, 15 bp, Homo sapiens
catgctctgattggg

SEQ ID NO: 1516222 - DNA, 15 bp, Homo sapiens
atgctctgattgggg

SEQ ID NO: 1516223 - DNA, 15 bp, Homo sapiens
tgctctgattggggg

SEQ ID NO: 1516224 - DNA, 15 bp, Homo sapiens
gctctgattgggggt

SEQ ID NO: 1516225 - DNA, 15 bp, Homo sapiens
ctctgattgggggta

SEQ ID NO: 1516226 - DNA, 15 bp, Homo sapiens
tctgattgggggtaa

SEQ ID NO: 1516227 - DNA, 15 bp, Homo sapiens
ctgattgggggtaaa

SEQ ID NO: 1516228 - DNA, 15 bp, Homo sapiens
tgattgggggtaaat

SEQ ID NO: 1516229 - DNA, 15 bp, Homo sapiens
gattgggggtaaatc

SEQ ID NO: 1516230 - DNA, 15 bp, Homo sapiens
attgggggtaaatct

SEQ ID NO: 1516231 - DNA, 15 bp, Homo sapiens
ttgggggtaaatctg

SEQ ID NO: 1516232 - DNA, 15 bp, Homo sapiens
tgggggtaaatctgc

SEQ ID NO: 1516233 - DNA, 15 bp, Homo sapiens
gggggtaaatctgca

SEQ ID NO: 1516234 - DNA, 15 bp, Homo sapiens
ggggtaaatctgcaa

SEQ ID NO: 1516235 - DNA, 15 bp, Homo sapiens
gggtaaatctgcaaa

SEQ ID NO: 1516236 - DNA, 15 bp, Homo sapiens
ggtaaatctgcaaag

SEQ ID NO: 1516237 - DNA, 15 bp, Homo sapiens
gtaaatctgcaaagc

SEQ ID NO: 1516238 - DNA, 15 bp, Homo sapiens
taaatctgcaaagcc

SEQ ID NO: 1516239 - DNA, 15 bp, Homo sapiens
aaatctgcaaagccc

SEQ ID NO: 1516240 - DNA, 15 bp, Homo sapiens
aatctgcaaagccct

SEQ ID NO: 1516241 - DNA, 15 bp, Homo sapiens
atctgcaaagccctt

SEQ ID NO: 1516242 - DNA, 15 bp, Homo sapiens
tctgcaaagcccttg

SEQ ID NO: 1516243 - DNA, 15 bp, Homo sapiens
ctgcaaagcccttgt

SEQ ID NO: 1516244 - DNA, 15 bp, Homo sapiens
tgcaaagcccttgtg

SEQ ID NO: 1516245 - DNA, 15 bp, Homo sapiens
gcaaagcccttgtgt

SEQ ID NO: 1516246 - DNA, 15 bp, Homo sapiens
caaagcccttgtgtg

SEQ ID NO: 1516247 - DNA, 15 bp, Homo sapiens
aaagcccttgtgtgt

SEQ ID NO: 1516248 - DNA, 15 bp, Homo sapiens
aagcccttgtgtgtt

SEQ ID NO: 1516249 - DNA, 15 bp, Homo sapiens
agcccttgtgtgttg

SEQ ID NO: 1516250 - DNA, 15 bp, Homo sapiens
gcccttgtgtgttga

SEQ ID NO: 1516251 - DNA, 15 bp, Homo sapiens
cccttgtgtgttgat

SEQ ID NO: 1516252 - DNA, 15 bp, Homo sapiens
ccttgtgtgttgatg

SEQ ID NO: 1516253 - DNA, 15 bp, Homo sapiens
cttgtgtgttgatga

SEQ ID NO: 1516254 - DNA, 15 bp, Homo sapiens
ttgtgtgttgatgat

SEQ ID NO: 1516255 - DNA, 15 bp, Homo sapiens
tgtgtgttgatgatt

SEQ ID NO: 1516256 - DNA, 15 bp, Homo sapiens
gtgtgttgatgattt

SEQ ID NO: 1516257 - DNA, 15 bp, Homo sapiens
tgtgttgatgatttt

SEQ ID NO: 1516258 - DNA, 15 bp, Homo sapiens
gtgttgatgattttc

SEQ ID NO: 1516259 - DNA, 15 bp, Homo sapiens
tgttgatgattttct

SEQ ID NO: 1516260 - DNA, 15 bp, Homo sapiens
gttgatgattttctt

SEQ ID NO: 1516261 - DNA, 15 bp, Homo sapiens
ttgatgattttctta

SEQ ID NO: 1516262 - DNA, 15 bp, Homo sapiens
tgatgattttcttaa

SEQ ID NO: 1516263 - DNA, 15 bp, Homo sapiens
gatgattttcttaag

SEQ ID NO: 1516264 - DNA, 15 bp, Homo sapiens
atgattttcttaagg

SEQ ID NO: 1516265 - DNA, 15 bp, Homo sapiens
tgattttcttaaggc

SEQ ID NO: 1516266 - DNA, 15 bp, Homo sapiens
gattttcttaaggcc

SEQ ID NO: 1516267 - DNA, 15 bp, Homo sapiens
attttcttaaggcct

SEQ ID NO: 1516268 - DNA, 15 bp, Homo sapiens
ttttcttaaggcctc

SEQ ID NO: 1516269 - DNA, 15 bp, Homo sapiens
tttcttaaggcctct

SEQ ID NO: 1516270 - DNA, 15 bp, Homo sapiens
ttcttaaggcctctc

SEQ ID NO: 1516271 - DNA, 15 bp, Homo sapiens
tcttaaggcctctcc

SEQ ID NO: 1516272 - DNA, 15 bp, Homo sapiens
cttaaggcctctcct

SEQ ID NO: 1516273 - DNA, 15 bp, Homo sapiens
ttaaggcctctcctg

SEQ ID NO: 1516274 - DNA, 15 bp, Homo sapiens
taaggcctctcctga

SEQ ID NO: 1516275 - DNA, 15 bp, Homo sapiens
aaggcctctcctgat

SEQ ID NO: 1516276 - DNA, 15 bp, Homo sapiens
aggcctctcctgatt

SEQ ID NO: 1516277 - DNA, 15 bp, Homo sapiens
ggcctctcctgattt

SEQ ID NO: 1516278 - DNA, 15 bp, Homo sapiens
gcctctcctgatttt

SEQ ID NO: 1516279 - DNA, 15 bp, Homo sapiens
cctctcctgatttta

SEQ ID NO: 1516280 - DNA, 15 bp, Homo sapiens
ctctcctgattttat

SEQ ID NO: 1516281 - DNA, 15 bp, Homo sapiens
tctcctgattttata

SEQ ID NO: 1516282 - DNA, 15 bp, Homo sapiens
ctcctgattttataa

SEQ ID NO: 1516283 - DNA, 15 bp, Homo sapiens
tcctgattttataac

SEQ ID NO: 1516284 - DNA, 15 bp, Homo sapiens
cctgattttataact

SEQ ID NO: 1516285 - DNA, 15 bp, Homo sapiens
ctgattttataactg

SEQ ID NO: 1516286 - DNA, 15 bp, Homo sapiens
tgattttataactgt

SEQ ID NO: 1516287 - DNA, 15 bp, Homo sapiens
gattttataactgta

SEQ ID NO: 1516288 - DNA, 15 bp, Homo sapiens
attttataactgtat

SEQ ID NO: 1516289 - DNA, 15 bp, Homo sapiens
ttttataactgtata

SEQ ID NO: 1516290 - DNA, 15 bp, Homo sapiens
tttataactgtatag

SEQ ID NO: 1516291 - DNA, 15 bp, Homo sapiens
ttataactgtatagt

SEQ ID NO: 1516292 - DNA, 15 bp, Homo sapiens
tataactgtatagtc

SEQ ID NO: 1516293 - DNA, 15 bp, Homo sapiens
ataactgtatagtca

SEQ ID NO: 1516294 - DNA, 15 bp, Homo sapiens
taactgtatagtcaa

SEQ ID NO: 1516295 - DNA, 15 bp, Homo sapiens
aactgtatagtcaaa

SEQ ID NO: 1516296 - DNA, 15 bp, Homo sapiens
actgtatagtcaaaa

SEQ ID NO: 1516297 - DNA, 15 bp, Homo sapiens
ctgtatagtcaaaac

SEQ ID NO: 1516298 - DNA, 15 bp, Homo sapiens
tgtatagtcaaaact

SEQ ID NO: 1516299 - DNA, 15 bp, Homo sapiens
gtatagtcaaaactt

SEQ ID NO: 1516300 - DNA, 15 bp, Homo sapiens
tatagtcaaaacttt

SEQ ID NO: 1516301 - DNA, 15 bp, Homo sapiens
atagtcaaaactttt

SEQ ID NO: 1516302 - DNA, 15 bp, Homo sapiens
tagtcaaaacttttt

SEQ ID NO: 1516303 - DNA, 15 bp, Homo sapiens
agtcaaaactttttt

SEQ ID NO: 1516304 - DNA, 15 bp, Homo sapiens
gtcaaaacttttttc

SEQ ID NO: 1516305 - DNA, 15 bp, Homo sapiens
tcaaaacttttttca

SEQ ID NO: 1516306 - DNA, 15 bp, Homo sapiens
caaaacttttttcat

SEQ ID NO: 1516307 - DNA, 15 bp, Homo sapiens
aaaacttttttcatt

SEQ ID NO: 1516308 - DNA, 15 bp, Homo sapiens
aaacttttttcattt

SEQ ID NO: 1516309 - DNA, 15 bp, Homo sapiens
aacttttttcatttg

SEQ ID NO: 1516310 - DNA, 15 bp, Homo sapiens
acttttttcatttgt

SEQ ID NO: 1516311 - DNA, 15 bp, Homo sapiens
cttttttcatttgtg

SEQ ID NO: 1516312 - DNA, 15 bp, Homo sapiens
ttttttcatttgtgt

SEQ ID NO: 1516313 - DNA, 15 bp, Homo sapiens
tttttcatttgtgta

SEQ ID NO: 1516314 - DNA, 15 bp, Homo sapiens
ttttcatttgtgtac

SEQ ID NO: 1516315 - DNA, 15 bp, Homo sapiens
tttcatttgtgtact

SEQ ID NO: 1516316 - DNA, 15 bp, Homo sapiens
ttcatttgtgtactg

SEQ ID NO: 1516317 - DNA, 15 bp, Homo sapiens
tcatttgtgtactgt

SEQ ID NO: 1516318 - DNA, 15 bp, Homo sapiens
catttgtgtactgtg

SEQ ID NO: 1516319 - DNA, 15 bp, Homo sapiens
atttgtgtactgtgg

SEQ ID NO: 1516320 - DNA, 15 bp, Homo sapiens
tttgtgtactgtggc

SEQ ID NO: 1516321 - DNA, 15 bp, Homo sapiens
ttgtgtactgtggct

SEQ ID NO: 1516322 - DNA, 15 bp, Homo sapiens
tgtgtactgtggctc

SEQ ID NO: 1516323 - DNA, 15 bp, Homo sapiens
gtgtactgtggctca

SEQ ID NO: 1516324 - DNA, 15 bp, Homo sapiens
tgtactgtggctcat

SEQ ID NO: 1516325 - DNA, 15 bp, Homo sapiens
gtactgtggctcatt

SEQ ID NO: 1516326 - DNA, 15 bp, Homo sapiens
tactgtggctcattt

SEQ ID NO: 1516327 - DNA, 15 bp, Homo sapiens
actgtggctcatttt

SEQ ID NO: 1516328 - DNA, 15 bp, Homo sapiens
ctgtggctcattttt

SEQ ID NO: 1516329 - DNA, 15 bp, Homo sapiens
tgtggctcattttta

SEQ ID NO: 1516330 - DNA, 15 bp, Homo sapiens
gtggctcatttttat

SEQ ID NO: 1516331 - DNA, 15 bp, Homo sapiens
tggctcatttttatt

SEQ ID NO: 1516332 - DNA, 15 bp, Homo sapiens
ggctcatttttattt

SEQ ID NO: 1516333 - DNA, 15 bp, Homo sapiens
gctcatttttatttt

SEQ ID NO: 1516334 - DNA, 15 bp, Homo sapiens
ctcatttttattttg

SEQ ID NO: 1516335 - DNA, 15 bp, Homo sapiens
tcatttttattttgt

SEQ ID NO: 1516336 - DNA, 15 bp, Homo sapiens
catttttattttgtc

SEQ ID NO: 1516337 - DNA, 15 bp, Homo sapiens
atttttattttgtca

SEQ ID NO: 1516338 - DNA, 15 bp, Homo sapiens
tttttattttgtcag

SEQ ID NO: 1516339 - DNA, 15 bp, Homo sapiens
ttttattttgtcagg

SEQ ID NO: 1516340 - DNA, 15 bp, Homo sapiens
tttattttgtcaggt

SEQ ID NO: 1516341 - DNA, 15 bp, Homo sapiens
ttattttgtcaggta

SEQ ID NO: 1516342 - DNA, 15 bp, Homo sapiens
tattttgtcaggtat

SEQ ID NO: 1516343 - DNA, 15 bp, Homo sapiens
attttgtcaggtatg

SEQ ID NO: 1516344 - DNA, 15 bp, Homo sapiens
ttttgtcaggtatgt

SEQ ID NO: 1516345 - DNA, 15 bp, Homo sapiens
tttgtcaggtatgtg

SEQ ID NO: 1516346 - DNA, 15 bp, Homo sapiens
ttgtcaggtatgtgc

SEQ ID NO: 1516347 - DNA, 15 bp, Homo sapiens
tgtcaggtatgtgct

SEQ ID NO: 1516348 - DNA, 15 bp, Homo sapiens
gtcaggtatgtgctg

SEQ ID NO: 1516349 - DNA, 15 bp, Homo sapiens
tcaggtatgtgctgg

SEQ ID NO: 1516350 - DNA, 15 bp, Homo sapiens
caggtatgtgctggt

SEQ ID NO: 1516351 - DNA, 15 bp, Homo sapiens
aggtatgtgctggtc

SEQ ID NO: 1516352 - DNA, 15 bp, Homo sapiens
ggtatgtgctggtca

SEQ ID NO: 1516353 - DNA, 15 bp, Homo sapiens
gtatgtgctggtcat

SEQ ID NO: 1516354 - DNA, 15 bp, Homo sapiens
tatgtgctggtcata

SEQ ID NO: 1516355 - DNA, 15 bp, Homo sapiens
atgtgctggtcatac

SEQ ID NO: 1516356 - DNA, 15 bp, Homo sapiens
tgtgctggtcatact

SEQ ID NO: 1516357 - DNA, 15 bp, Homo sapiens
gtgctggtcatactt

SEQ ID NO: 1516358 - DNA, 15 bp, Homo sapiens
tgctggtcatacttg

SEQ ID NO: 1516359 - DNA, 15 bp, Homo sapiens
gctggtcatacttgc

SEQ ID NO: 1516360 - DNA, 15 bp, Homo sapiens
ctggtcatacttgct

SEQ ID NO: 1516361 - DNA, 15 bp, Homo sapiens
tggtcatacttgctg

SEQ ID NO: 1516362 - DNA, 15 bp, Homo sapiens
ggtcatacttgctgg

SEQ ID NO: 1516363 - DNA, 15 bp, Homo sapiens
gtcatacttgctgga

SEQ ID NO: 1516364 - DNA, 15 bp, Homo sapiens
tcatacttgctggat

SEQ ID NO: 1516365 - DNA, 15 bp, Homo sapiens
catacttgctggatg

SEQ ID NO: 1516366 - DNA, 15 bp, Homo sapiens
atacttgctggatgg

SEQ ID NO: 1516367 - DNA, 15 bp, Homo sapiens
tacttgctggatgga

SEQ ID NO: 1516368 - DNA, 15 bp, Homo sapiens
acttgctggatggac

SEQ ID NO: 1516369 - DNA, 15 bp, Homo sapiens
cttgctggatggact

SEQ ID NO: 1516370 - DNA, 15 bp, Homo sapiens
ttgctggatggactg

SEQ ID NO: 1516371 - DNA, 15 bp, Homo sapiens
tgctggatggactgt

SEQ ID NO: 1516372 - DNA, 15 bp, Homo sapiens
gctggatggactgtg

SEQ ID NO: 1516373 - DNA, 15 bp, Homo sapiens
ctggatggactgtgt

SEQ ID NO: 1516374 - DNA, 15 bp, Homo sapiens
tggatggactgtgta

SEQ ID NO: 1516375 - DNA, 15 bp, Homo sapiens
ggatggactgtgtaa

SEQ ID NO: 1516376 - DNA, 15 bp, Homo sapiens
gatggactgtgtaaa

SEQ ID NO: 1516377 - DNA, 15 bp, Homo sapiens
atggactgtgtaaat

SEQ ID NO: 1516378 - DNA, 15 bp, Homo sapiens
tggactgtgtaaatc

SEQ ID NO: 1516379 - DNA, 15 bp, Homo sapiens
ggactgtgtaaatca

SEQ ID NO: 1516380 - DNA, 15 bp, Homo sapiens
gactgtgtaaatcag

SEQ ID NO: 1516381 - DNA, 15 bp, Homo sapiens
actgtgtaaatcagg

SEQ ID NO: 1516382 - DNA, 15 bp, Homo sapiens
ctgtgtaaatcaggg

SEQ ID NO: 1516383 - DNA, 15 bp, Homo sapiens
tgtgtaaatcagggg

SEQ ID NO: 1516384 - DNA, 15 bp, Homo sapiens
gtgtaaatcaggggt

SEQ ID NO: 1516385 - DNA, 15 bp, Homo sapiens
tgtaaatcaggggtc

SEQ ID NO: 1516386 - DNA, 15 bp, Homo sapiens
gtaaatcaggggtct

SEQ ID NO: 1516387 - DNA, 15 bp, Homo sapiens
taaatcaggggtctg

SEQ ID NO: 1516388 - DNA, 15 bp, Homo sapiens
aaatcaggggtctgc

SEQ ID NO: 1516389 - DNA, 15 bp, Homo sapiens
aatcaggggtctgcc

SEQ ID NO: 1516390 - DNA, 15 bp, Homo sapiens
atcaggggtctgcct

SEQ ID NO: 1516391 - DNA, 15 bp, Homo sapiens
tcaggggtctgcctc

SEQ ID NO: 1516392 - DNA, 15 bp, Homo sapiens
caggggtctgcctct

SEQ ID NO: 1516393 - DNA, 15 bp, Homo sapiens
aggggtctgcctctt

SEQ ID NO: 1516394 - DNA, 15 bp, Homo sapiens
ggggtctgcctcttg

SEQ ID NO: 1516395 - DNA, 15 bp, Homo sapiens
gggtctgcctcttgt

SEQ ID NO: 1516396 - DNA, 15 bp, Homo sapiens
ggtctgcctcttgtg

SEQ ID NO: 1516397 - DNA, 15 bp, Homo sapiens
gtctgcctcttgtgg

SEQ ID NO: 1516398 - DNA, 15 bp, Homo sapiens
tctgcctcttgtggc

SEQ ID NO: 1516399 - DNA, 15 bp, Homo sapiens
ctgcctcttgtggct

SEQ ID NO: 1516400 - DNA, 15 bp, Homo sapiens
tgcctcttgtggctc

SEQ ID NO: 1516401 - DNA, 15 bp, Homo sapiens
gcctcttgtggctca

SEQ ID NO: 1516402 - DNA, 15 bp, Homo sapiens
cctcttgtggctcat

SEQ ID NO: 1516403 - DNA, 15 bp, Homo sapiens
ctcttgtggctcata

SEQ ID NO: 1516404 - DNA, 15 bp, Homo sapiens
tcttgtggctcataa

SEQ ID NO: 1516405 - DNA, 15 bp, Homo sapiens
cttgtggctcataag

SEQ ID NO: 1516406 - DNA, 15 bp, Homo sapiens
ttgtggctcataagg

SEQ ID NO: 1516407 - DNA, 15 bp, Homo sapiens
tgtggctcataaggt

SEQ ID NO: 1516408 - DNA, 15 bp, Homo sapiens
gtggctcataaggtg

SEQ ID NO: 1516409 - DNA, 15 bp, Homo sapiens
tggctcataaggtga

SEQ ID NO: 1516410 - DNA, 15 bp, Homo sapiens
ggctcataaggtgat

SEQ ID NO: 1516411 - DNA, 15 bp, Homo sapiens
gctcataaggtgatt

SEQ ID NO: 1516412 - DNA, 15 bp, Homo sapiens
ctcataaggtgattt

SEQ ID NO: 1516413 - DNA, 15 bp, Homo sapiens
tcataaggtgatttt

SEQ ID NO: 1516414 - DNA, 15 bp, Homo sapiens
cataaggtgattttg

SEQ ID NO: 1516415 - DNA, 15 bp, Homo sapiens
ataaggtgattttga

SEQ ID NO: 1516416 - DNA, 15 bp, Homo sapiens
taaggtgattttgag

SEQ ID NO: 1516417 - DNA, 15 bp, Homo sapiens
aaggtgattttgagt

SEQ ID NO: 1516418 - DNA, 15 bp, Homo sapiens
aggtgattttgagtg

SEQ ID NO: 1516419 - DNA, 15 bp, Homo sapiens
ggtgattttgagtga

SEQ ID NO: 1516420 - DNA, 15 bp, Homo sapiens
gtgattttgagtgac

SEQ ID NO: 1516421 - DNA, 15 bp, Homo sapiens
tgattttgagtgaca

SEQ ID NO: 1516422 - DNA, 15 bp, Homo sapiens
gattttgagtgacat

SEQ ID NO: 1516423 - DNA, 15 bp, Homo sapiens
attttgagtgacatg

SEQ ID NO: 1516424 - DNA, 15 bp, Homo sapiens
ttttgagtgacatgg

SEQ ID NO: 1516425 - DNA, 15 bp, Homo sapiens
tttgagtgacatggc

SEQ ID NO: 1516426 - DNA, 15 bp, Homo sapiens
ttgagtgacatggcc

SEQ ID NO: 1516427 - DNA, 15 bp, Homo sapiens
tgagtgacatggcca

SEQ ID NO: 1516428 - DNA, 15 bp, Homo sapiens
gagtgacatggccaa

SEQ ID NO: 1516429 - DNA, 15 bp, Homo sapiens
agtgacatggccaaa

SEQ ID NO: 1516430 - DNA, 15 bp, Homo sapiens
gtgacatggccaaag

SEQ ID NO: 1516431 - DNA, 15 bp, Homo sapiens
tgacatggccaaagt

SEQ ID NO: 1516432 - DNA, 15 bp, Homo sapiens
gacatggccaaagtc

SEQ ID NO: 1516433 - DNA, 15 bp, Homo sapiens
acatggccaaagtca

SEQ ID NO: 1516434 - DNA, 15 bp, Homo sapiens
catggccaaagtcag

SEQ ID NO: 1516435 - DNA, 15 bp, Homo sapiens
atggccaaagtcagc

SEQ ID NO: 1516436 - DNA, 15 bp, Homo sapiens
caccgtggagctctt

SEQ ID NO: 1516437 - DNA, 15 bp, Homo sapiens
accgtggagctcttt

SEQ ID NO: 1516438 - DNA, 15 bp, Homo sapiens
ccgtggagctctttt

SEQ ID NO: 1516439 - DNA, 15 bp, Homo sapiens
cgtggagctcttttt

SEQ ID NO: 1516440 - DNA, 15 bp, Homo sapiens
gtggagctctttttc

SEQ ID NO: 1516441 - DNA, 15 bp, Homo sapiens
tggagctctttttct

SEQ ID NO: 1516442 - DNA, 15 bp, Homo sapiens
ggagctctttttctc

SEQ ID NO: 1516443 - DNA, 15 bp, Homo sapiens
gagctctttttctcc

SEQ ID NO: 1516444 - DNA, 15 bp, Homo sapiens
agctctttttctccg

SEQ ID NO: 1516445 - DNA, 15 bp, Homo sapiens
gctctttttctccgc

SEQ ID NO: 1516446 - DNA, 15 bp, Homo sapiens
ctctttttctccgct

SEQ ID NO: 1516447 - DNA, 15 bp, Homo sapiens
tctttttctccgctc

SEQ ID NO: 1516448 - DNA, 15 bp, Homo sapiens
ctttttctccgctcc

SEQ ID NO: 1516449 - DNA, 15 bp, Homo sapiens
tttttctccgctcct

SEQ ID NO: 1516450 - DNA, 15 bp, Homo sapiens
ttttctccgctcctg

SEQ ID NO: 1516451 - DNA, 15 bp, Homo sapiens
tttctccgctcctgt

SEQ ID NO: 1516452 - DNA, 15 bp, Homo sapiens
ttctccgctcctgtc

SEQ ID NO: 1516453 - DNA, 15 bp, Homo sapiens
tctccgctcctgtcc

SEQ ID NO: 1516454 - DNA, 15 bp, Homo sapiens
ctccgctcctgtcct

SEQ ID NO: 1516455 - DNA, 15 bp, Homo sapiens
tccgctcctgtcctc

SEQ ID NO: 1516456 - DNA, 15 bp, Homo sapiens
ccgctcctgtcctct

SEQ ID NO: 1516457 - DNA, 15 bp, Homo sapiens
cgctcctgtcctcta

SEQ ID NO: 1516458 - DNA, 15 bp, Homo sapiens
gctcctgtcctctaa

SEQ ID NO: 1516459 - DNA, 15 bp, Homo sapiens
ctcctgtcctctaag

SEQ ID NO: 1516460 - DNA, 15 bp, Homo sapiens
tcctgtcctctaagt

SEQ ID NO: 1516461 - DNA, 15 bp, Homo sapiens
cctgtcctctaagtc

SEQ ID NO: 1516462 - DNA, 15 bp, Homo sapiens
ctgtcctctaagtcg

SEQ ID NO: 1516463 - DNA, 15 bp, Homo sapiens
tgtcctctaagtcgt

SEQ ID NO: 1516464 - DNA, 15 bp, Homo sapiens
gtcctctaagtcgtt

SEQ ID NO: 1516465 - DNA, 15 bp, Homo sapiens
tcctctaagtcgtta

SEQ ID NO: 1516466 - DNA, 15 bp, Homo sapiens
cctctaagtcgttaa

SEQ ID NO: 1516467 - DNA, 15 bp, Homo sapiens
ctctaagtcgttaac

SEQ ID NO: 1516468 - DNA, 15 bp, Homo sapiens
tctaagtcgttaacc

SEQ ID NO: 1516469 - DNA, 15 bp, Homo sapiens
ctaagtcgttaaccc

SEQ ID NO: 1516470 - DNA, 15 bp, Homo sapiens
taagtcgttaacccc

SEQ ID NO: 1516471 - DNA, 15 bp, Homo sapiens
aagtcgttaacccct

SEQ ID NO: 1516472 - DNA, 15 bp, Homo sapiens
agtcgttaacccctt

SEQ ID NO: 1516473 - DNA, 15 bp, Homo sapiens
gtcgttaaccccttc

SEQ ID NO: 1516474 - DNA, 15 bp, Homo sapiens
tcgttaaccccttca

SEQ ID NO: 1516475 - DNA, 15 bp, Homo sapiens
cgttaaccccttcag

SEQ ID NO: 1516476 - DNA, 15 bp, Homo sapiens
gttaaccccttcagg

SEQ ID NO: 1516477 - DNA, 15 bp, Homo sapiens
ttaaccccttcaggc

SEQ ID NO: 1516478 - DNA, 15 bp, Homo sapiens
taaccccttcaggca

SEQ ID NO: 1516479 - DNA, 15 bp, Homo sapiens
aaccccttcaggcat

SEQ ID NO: 1516480 - DNA, 15 bp, Homo sapiens
accccttcaggcata

SEQ ID NO: 1516481 - DNA, 15 bp, Homo sapiens
ccccttcaggcataa

SEQ ID NO: 1516482 - DNA, 15 bp, Homo sapiens
cccttcaggcataat

SEQ ID NO: 1516483 - DNA, 15 bp, Homo sapiens
ccttcaggcataatg

SEQ ID NO: 1516484 - DNA, 15 bp, Homo sapiens
cttcaggcataatga

SEQ ID NO: 1516485 - DNA, 15 bp, Homo sapiens
ttcaggcataatgaa

SEQ ID NO: 1516486 - DNA, 15 bp, Homo sapiens
tcaggcataatgaat

SEQ ID NO: 1516487 - DNA, 15 bp, Homo sapiens
caggcataatgaatt

SEQ ID NO: 1516488 - DNA, 15 bp, Homo sapiens
aggcataatgaattt

SEQ ID NO: 1516489 - DNA, 15 bp, Homo sapiens
ggcataatgaattta

SEQ ID NO: 1516490 - DNA, 15 bp, Homo sapiens
gcataatgaatttat

SEQ ID NO: 1516491 - DNA, 15 bp, Homo sapiens
cataatgaatttatt

SEQ ID NO: 1516492 - DNA, 15 bp, Homo sapiens
ataatgaatttatta

SEQ ID NO: 1516493 - DNA, 15 bp, Homo sapiens
taatgaatttattat

SEQ ID NO: 1516494 - DNA, 15 bp, Homo sapiens
aatgaatttattata

SEQ ID NO: 1516495 - DNA, 15 bp, Homo sapiens
atgaatttattatag

SEQ ID NO: 1516496 - DNA, 15 bp, Homo sapiens
tgaatttattatagt

SEQ ID NO: 1516497 - DNA, 15 bp, Homo sapiens
gaatttattatagta

SEQ ID NO: 1516498 - DNA, 15 bp, Homo sapiens
aatttattatagtaa

SEQ ID NO: 1516499 - DNA, 15 bp, Homo sapiens
atttattatagtaat

SEQ ID NO: 1516500 - DNA, 15 bp, Homo sapiens
tttattatagtaatt

SEQ ID NO: 1516501 - DNA, 15 bp, Homo sapiens
ttattatagtaattc

SEQ ID NO: 1516502 - DNA, 15 bp, Homo sapiens
tattatagtaattct

SEQ ID NO: 1516503 - DNA, 15 bp, Homo sapiens
attatagtaattctt

SEQ ID NO: 1516504 - DNA, 15 bp, Homo sapiens
ttatagtaattcttt

SEQ ID NO: 1516505 - DNA, 15 bp, Homo sapiens
tatagtaattcttta

SEQ ID NO: 1516506 - DNA, 15 bp, Homo sapiens
atagtaattctttat

SEQ ID NO: 1516507 - DNA, 15 bp, Homo sapiens
tagtaattctttatt

SEQ ID NO: 1516508 - DNA, 15 bp, Homo sapiens
agtaattctttatta

SEQ ID NO: 1516509 - DNA, 15 bp, Homo sapiens
gtaattctttattaa

SEQ ID NO: 1516510 - DNA, 15 bp, Homo sapiens
taattctttattaat

SEQ ID NO: 1516511 - DNA, 15 bp, Homo sapiens
aattctttattaatg

SEQ ID NO: 1516512 - DNA, 15 bp, Homo sapiens
attctttattaatga

SEQ ID NO: 1516513 - DNA, 15 bp, Homo sapiens
ttctttattaatgat

SEQ ID NO: 1516514 - DNA, 15 bp, Homo sapiens
tctttattaatgatc

SEQ ID NO: 1516515 - DNA, 15 bp, Homo sapiens
ctttattaatgatca

SEQ ID NO: 1516516 - DNA, 15 bp, Homo sapiens
tttattaatgatcaa

SEQ ID NO: 1516517 - DNA, 15 bp, Homo sapiens
ttattaatgatcaat

SEQ ID NO: 1516518 - DNA, 15 bp, Homo sapiens
tattaatgatcaatt

SEQ ID NO: 1516519 - DNA, 15 bp, Homo sapiens
attaatgatcaatta

SEQ ID NO: 1516520 - DNA, 15 bp, Homo sapiens
ttaatgatcaattat

SEQ ID NO: 1516521 - DNA, 15 bp, Homo sapiens
taatgatcaattatt

SEQ ID NO: 1516522 - DNA, 15 bp, Homo sapiens
aatgatcaattattg

SEQ ID NO: 1516523 - DNA, 15 bp, Homo sapiens
atgatcaattattgt

SEQ ID NO: 1516524 - DNA, 15 bp, Homo sapiens
tgatcaattattgta

SEQ ID NO: 1516525 - DNA, 15 bp, Homo sapiens
gatcaattattgtaa

SEQ ID NO: 1516526 - DNA, 15 bp, Homo sapiens
atcaattattgtaat

SEQ ID NO: 1516527 - DNA, 15 bp, Homo sapiens
tcaattattgtaatg

SEQ ID NO: 1516528 - DNA, 15 bp, Homo sapiens
caattattgtaatgg

SEQ ID NO: 1516529 - DNA, 15 bp, Homo sapiens
aattattgtaatggg

SEQ ID NO: 1516530 - DNA, 15 bp, Homo sapiens
attattgtaatggga

SEQ ID NO: 1516531 - DNA, 15 bp, Homo sapiens
ttattgtaatgggag

SEQ ID NO: 1516532 - DNA, 15 bp, Homo sapiens
tattgtaatgggagt

SEQ ID NO: 1516533 - DNA, 15 bp, Homo sapiens
attgtaatgggagtg

SEQ ID NO: 1516534 - DNA, 15 bp, Homo sapiens
ttgtaatgggagtgg

SEQ ID NO: 1516535 - DNA, 15 bp, Homo sapiens
tgtaatgggagtggg

SEQ ID NO: 1516536 - DNA, 15 bp, Homo sapiens
gtaatgggagtggga

SEQ ID NO: 1516537 - DNA, 15 bp, Homo sapiens
taatgggagtgggag

SEQ ID NO: 1516538 - DNA, 15 bp, Homo sapiens
aatgggagtgggagg

SEQ ID NO: 1516539 - DNA, 15 bp, Homo sapiens
atgggagtgggaggg

SEQ ID NO: 1516540 - DNA, 15 bp, Homo sapiens
tgggagtgggagggc

SEQ ID NO: 1516541 - DNA, 15 bp, Homo sapiens
gggagtgggagggca

SEQ ID NO: 1516542 - DNA, 15 bp, Homo sapiens
ggagtgggagggcag

SEQ ID NO: 1516543 - DNA, 15 bp, Homo sapiens
gagtgggagggcagg

SEQ ID NO: 1516544 - DNA, 15 bp, Homo sapiens
agtgggagggcaggt

SEQ ID NO: 1516545 - DNA, 15 bp, Homo sapiens
gtgggagggcaggtt

SEQ ID NO: 1516546 - DNA, 15 bp, Homo sapiens
tgggagggcaggttg

SEQ ID NO: 1516547 - DNA, 15 bp, Homo sapiens
gggagggcaggttgt

SEQ ID NO: 1516548 - DNA, 15 bp, Homo sapiens
ggagggcaggttgtg

SEQ ID NO: 1516549 - DNA, 15 bp, Homo sapiens
gagggcaggttgtgg

SEQ ID NO: 1516550 - DNA, 15 bp, Homo sapiens
agggcaggttgtgga

SEQ ID NO: 1516551 - DNA, 15 bp, Homo sapiens
gggcaggttgtggac

SEQ ID NO: 1516552 - DNA, 15 bp, Homo sapiens
ggcaggttgtggacc

SEQ ID NO: 1516553 - DNA, 15 bp, Homo sapiens
gcaggttgtggacca

SEQ ID NO: 1516554 - DNA, 15 bp, Homo sapiens
caggttgtggaccaa

SEQ ID NO: 1516555 - DNA, 15 bp, Homo sapiens
aggttgtggaccaaa

SEQ ID NO: 1516556 - DNA, 15 bp, Homo sapiens
ggttgtggaccaaac

SEQ ID NO: 1516557 - DNA, 15 bp, Homo sapiens
gttgtggaccaaaca

SEQ ID NO: 1516558 - DNA, 15 bp, Homo sapiens
ttgtggaccaaacat

SEQ ID NO: 1516559 - DNA, 15 bp, Homo sapiens
tgtggaccaaacatc

SEQ ID NO: 1516560 - DNA, 15 bp, Homo sapiens
gtggaccaaacatca

SEQ ID NO: 1516561 - DNA, 15 bp, Homo sapiens
tggaccaaacatcag

SEQ ID NO: 1516562 - DNA, 15 bp, Homo sapiens
ggaccaaacatcagg

SEQ ID NO: 1516563 - DNA, 15 bp, Homo sapiens
gaccaaacatcaggc

SEQ ID NO: 1516564 - DNA, 15 bp, Homo sapiens
accaaacatcaggca

SEQ ID NO: 1516565 - DNA, 15 bp, Homo sapiens
ccaaacatcaggcaa

SEQ ID NO: 1516566 - DNA, 15 bp, Homo sapiens
caaacatcaggcaag

SEQ ID NO: 1516567 - DNA, 15 bp, Homo sapiens
aaacatcaggcaagc

SEQ ID NO: 1516568 - DNA, 15 bp, Homo sapiens
aacatcaggcaagca

SEQ ID NO: 1516569 - DNA, 15 bp, Homo sapiens
acatcaggcaagcat

SEQ ID NO: 1516570 - DNA, 15 bp, Homo sapiens
catcaggcaagcatg

SEQ ID NO: 1516571 - DNA, 15 bp, Homo sapiens
atcaggcaagcatgt

SEQ ID NO: 1516572 - DNA, 15 bp, Homo sapiens
tcaggcaagcatgta

SEQ ID NO: 1516573 - DNA, 15 bp, Homo sapiens
caggcaagcatgtat

SEQ ID NO: 1516574 - DNA, 15 bp, Homo sapiens
aggcaagcatgtatc

SEQ ID NO: 1516575 - DNA, 15 bp, Homo sapiens
ggcaagcatgtatct

SEQ ID NO: 1516576 - DNA, 15 bp, Homo sapiens
gcaagcatgtatctg

SEQ ID NO: 1516577 - DNA, 15 bp, Homo sapiens
caagcatgtatctgc

SEQ ID NO: 1516578 - DNA, 15 bp, Homo sapiens
aagcatgtatctgcc

SEQ ID NO: 1516579 - DNA, 15 bp, Homo sapiens
agcatgtatctgcct

SEQ ID NO: 1516580 - DNA, 15 bp, Homo sapiens
gcatgtatctgcctt

SEQ ID NO: 1516581 - DNA, 15 bp, Homo sapiens
catgtatctgccttc

SEQ ID NO: 1516582 - DNA, 15 bp, Homo sapiens
atgtatctgccttca

SEQ ID NO: 1516583 - DNA, 15 bp, Homo sapiens
tgtatctgccttcag

SEQ ID NO: 1516584 - DNA, 15 bp, Homo sapiens
gtatctgccttcagc

SEQ ID NO: 1516585 - DNA, 15 bp, Homo sapiens
tatctgccttcagct

SEQ ID NO: 1516586 - DNA, 15 bp, Homo sapiens
atctgccttcagcta

SEQ ID NO: 1516587 - DNA, 15 bp, Homo sapiens
tctgccttcagctag

SEQ ID NO: 1516588 - DNA, 15 bp, Homo sapiens
ctgccttcagctaga

SEQ ID NO: 1516589 - DNA, 15 bp, Homo sapiens
tgccttcagctagat

SEQ ID NO: 1516590 - DNA, 15 bp, Homo sapiens
gccttcagctagatc

SEQ ID NO: 1516591 - DNA, 15 bp, Homo sapiens
ccttcagctagatcc

SEQ ID NO: 1516592 - DNA, 15 bp, Homo sapiens
cttcagctagatcca

SEQ ID NO: 1516593 - DNA, 15 bp, Homo sapiens
ttcagctagatccaa

SEQ ID NO: 1516594 - DNA, 15 bp, Homo sapiens
tcagctagatccaat

SEQ ID NO: 1516595 - DNA, 15 bp, Homo sapiens
cagctagatccaatc

SEQ ID NO: 1516596 - DNA, 15 bp, Homo sapiens
agctagatccaatcc

SEQ ID NO: 1516597 - DNA, 15 bp, Homo sapiens
gctagatccaatcca

SEQ ID NO: 1516598 - DNA, 15 bp, Homo sapiens
ctagatccaatccat

SEQ ID NO: 1516599 - DNA, 15 bp, Homo sapiens
tagatccaatccatg

SEQ ID NO: 1516600 - DNA, 15 bp, Homo sapiens
agatccaatccatga

SEQ ID NO: 1516601 - DNA, 15 bp, Homo sapiens
gatccaatccatgac

SEQ ID NO: 1516602 - DNA, 15 bp, Homo sapiens
atccaatccatgacc

SEQ ID NO: 1516603 - DNA, 15 bp, Homo sapiens
tccaatccatgaccc

SEQ ID NO: 1516604 - DNA, 15 bp, Homo sapiens
ccaatccatgaccca

SEQ ID NO: 1516605 - DNA, 15 bp, Homo sapiens
caatccatgacccac

SEQ ID NO: 1516606 - DNA, 15 bp, Homo sapiens
aatccatgacccaca

SEQ ID NO: 1516607 - DNA, 15 bp, Homo sapiens
atccatgacccacaa

SEQ ID NO: 1516608 - DNA, 15 bp, Homo sapiens
tccatgacccacaag

SEQ ID NO: 1516609 - DNA, 15 bp, Homo sapiens
ccatgacccacaaga

SEQ ID NO: 1516610 - DNA, 15 bp, Homo sapiens
catgacccacaagag

SEQ ID NO: 1516611 - DNA, 15 bp, Homo sapiens
atgacccacaagaga

SEQ ID NO: 1516612 - DNA, 15 bp, Homo sapiens
tgacccacaagagac

SEQ ID NO: 1516613 - DNA, 15 bp, Homo sapiens
gacccacaagagacc

SEQ ID NO: 1516614 - DNA, 15 bp, Homo sapiens
acccacaagagaccc

SEQ ID NO: 1516615 - DNA, 15 bp, Homo sapiens
cccacaagagaccct

SEQ ID NO: 1516616 - DNA, 15 bp, Homo sapiens
ccacaagagaccctt

SEQ ID NO: 1516617 - DNA, 15 bp, Homo sapiens
cacaagagacccttc

SEQ ID NO: 1516618 - DNA, 15 bp, Homo sapiens
acaagagacccttcc

SEQ ID NO: 1516619 - DNA, 15 bp, Homo sapiens
caagagacccttccc

SEQ ID NO: 1516620 - DNA, 15 bp, Homo sapiens
aagagacccttccct

SEQ ID NO: 1516621 - DNA, 15 bp, Homo sapiens
agagacccttccctg

SEQ ID NO: 1516622 - DNA, 15 bp, Homo sapiens
gagacccttccctga

SEQ ID NO: 1516623 - DNA, 15 bp, Homo sapiens
agacccttccctgaa

SEQ ID NO: 1516624 - DNA, 15 bp, Homo sapiens
gacccttccctgaag

SEQ ID NO: 1516625 - DNA, 15 bp, Homo sapiens
acccttccctgaagc

SEQ ID NO: 1516626 - DNA, 15 bp, Homo sapiens
cccttccctgaagca

SEQ ID NO: 1516627 - DNA, 15 bp, Homo sapiens
ccttccctgaagcag

SEQ ID NO: 1516628 - DNA, 15 bp, Homo sapiens
cttccctgaagcagt

SEQ ID NO: 1516629 - DNA, 15 bp, Homo sapiens
ttccctgaagcagtt

SEQ ID NO: 1516630 - DNA, 15 bp, Homo sapiens
tccctgaagcagttg

SEQ ID NO: 1516631 - DNA, 15 bp, Homo sapiens
ccctgaagcagttgc

SEQ ID NO: 1516632 - DNA, 15 bp, Homo sapiens
cctgaagcagttgcc

SEQ ID NO: 1516633 - DNA, 15 bp, Homo sapiens
ctgaagcagttgcca

SEQ ID NO: 1516634 - DNA, 15 bp, Homo sapiens
tgaagcagttgccat

SEQ ID NO: 1516635 - DNA, 15 bp, Homo sapiens
gaagcagttgccatg

SEQ ID NO: 1516636 - DNA, 15 bp, Homo sapiens
aagcagttgccatgg

SEQ ID NO: 1516637 - DNA, 15 bp, Homo sapiens
agcagttgccatggt

SEQ ID NO: 1516638 - DNA, 15 bp, Homo sapiens
gcagttgccatggtg

SEQ ID NO: 1516639 - DNA, 15 bp, Homo sapiens
cagttgccatggtgg

SEQ ID NO: 1516640 - DNA, 15 bp, Homo sapiens
agttgccatggtggc

SEQ ID NO: 1516641 - DNA, 15 bp, Homo sapiens
gttgccatggtggcc

SEQ ID NO: 1516642 - DNA, 15 bp, Homo sapiens
ttgccatggtggcct

SEQ ID NO: 1516643 - DNA, 15 bp, Homo sapiens
tgccatggtggcctc

SEQ ID NO: 1516644 - DNA, 15 bp, Homo sapiens
gccatggtggcctcc

SEQ ID NO: 1516645 - DNA, 15 bp, Homo sapiens
ccatggtggcctcct

SEQ ID NO: 1516646 - DNA, 15 bp, Homo sapiens
catggtggcctcctt

SEQ ID NO: 1516647 - DNA, 15 bp, Homo sapiens
atggtggcctccttt

SEQ ID NO: 1516648 - DNA, 15 bp, Homo sapiens
tggtggcctcctttg

SEQ ID NO: 1516649 - DNA, 15 bp, Homo sapiens
ggtggcctcctttgc

SEQ ID NO: 1516650 - DNA, 15 bp, Homo sapiens
gtggcctcctttgcc

SEQ ID NO: 1516651 - DNA, 15 bp, Homo sapiens
tggcctcctttgcca

SEQ ID NO: 1516652 - DNA, 15 bp, Homo sapiens
ggcctcctttgccac

SEQ ID NO: 1516653 - DNA, 15 bp, Homo sapiens
gcctcctttgccacc

SEQ ID NO: 1516654 - DNA, 15 bp, Homo sapiens
cctcctttgccaccc

SEQ ID NO: 1516655 - DNA, 15 bp, Homo sapiens
ctcctttgccaccct

SEQ ID NO: 1516656 - DNA, 15 bp, Homo sapiens
tcctttgccaccctc

SEQ ID NO: 1516657 - DNA, 15 bp, Homo sapiens
cctttgccaccctct

SEQ ID NO: 1516658 - DNA, 15 bp, Homo sapiens
ctttgccaccctctc

SEQ ID NO: 1516659 - DNA, 15 bp, Homo sapiens
tttgccaccctctca

SEQ ID NO: 1516660 - DNA, 15 bp, Homo sapiens
ttgccaccctctcag

SEQ ID NO: 1516661 - DNA, 15 bp, Homo sapiens
tgccaccctctcaga

SEQ ID NO: 1516662 - DNA, 15 bp, Homo sapiens
gccaccctctcagaa

SEQ ID NO: 1516663 - DNA, 15 bp, Homo sapiens
ccaccctctcagaaa

SEQ ID NO: 1516664 - DNA, 15 bp, Homo sapiens
caccctctcagaaat

SEQ ID NO: 1516665 - DNA, 15 bp, Homo sapiens
accctctcagaaatg

SEQ ID NO: 1516666 - DNA, 15 bp, Homo sapiens
ccctctcagaaatga

SEQ ID NO: 1516667 - DNA, 15 bp, Homo sapiens
cctctcagaaatgac

SEQ ID NO: 1516668 - DNA, 15 bp, Homo sapiens
ctctcagaaatgacc

SEQ ID NO: 1516669 - DNA, 15 bp, Homo sapiens
tctcagaaatgacca

SEQ ID NO: 1516670 - DNA, 15 bp, Homo sapiens
ctcagaaatgaccaa

SEQ ID NO: 1516671 - DNA, 15 bp, Homo sapiens
tcagaaatgaccaaa

SEQ ID NO: 1516672 - DNA, 15 bp, Homo sapiens
cagaaatgaccaaaa

SEQ ID NO: 1516673 - DNA, 15 bp, Homo sapiens
agaaatgaccaaaat

SEQ ID NO: 1516674 - DNA, 15 bp, Homo sapiens
gaaatgaccaaaata

SEQ ID NO: 1516675 - DNA, 15 bp, Homo sapiens
aaatgaccaaaatat

SEQ ID NO: 1516676 - DNA, 15 bp, Homo sapiens
aatgaccaaaatata

SEQ ID NO: 1516677 - DNA, 15 bp, Homo sapiens
atgaccaaaatatat

SEQ ID NO: 1516678 - DNA, 15 bp, Homo sapiens
tgaccaaaatatata

SEQ ID NO: 1516679 - DNA, 15 bp, Homo sapiens
gaccaaaatatatac

SEQ ID NO: 1516680 - DNA, 15 bp, Homo sapiens
accaaaatatataca

SEQ ID NO: 1516681 - DNA, 15 bp, Homo sapiens
ccaaaatatatacat

SEQ ID NO: 1516682 - DNA, 15 bp, Homo sapiens
caaaatatatacatt

SEQ ID NO: 1516683 - DNA, 15 bp, Homo sapiens
aaaatatatacattc

SEQ ID NO: 1516684 - DNA, 15 bp, Homo sapiens
aaatatatacattcc

SEQ ID NO: 1516685 - DNA, 15 bp, Homo sapiens
aatatatacattccc

SEQ ID NO: 1516686 - DNA, 15 bp, Homo sapiens
atatatacattcccc

SEQ ID NO: 1516687 - DNA, 15 bp, Homo sapiens
tatatacattcccct

SEQ ID NO: 1516688 - DNA, 15 bp, Homo sapiens
atatacattcccctc

SEQ ID NO: 1516689 - DNA, 15 bp, Homo sapiens
tatacattcccctct

SEQ ID NO: 1516690 - DNA, 15 bp, Homo sapiens
atacattcccctctg

SEQ ID NO: 1516691 - DNA, 15 bp, Homo sapiens
tacattcccctctgt

SEQ ID NO: 1516692 - DNA, 15 bp, Homo sapiens
acattcccctctgtc

SEQ ID NO: 1516693 - DNA, 15 bp, Homo sapiens
cattcccctctgtcc

SEQ ID NO: 1516694 - DNA, 15 bp, Homo sapiens
attcccctctgtcct

SEQ ID NO: 1516695 - DNA, 15 bp, Homo sapiens
ttcccctctgtcctg

SEQ ID NO: 1516696 - DNA, 15 bp, Homo sapiens
tcccctctgtcctgg

SEQ ID NO: 1516697 - DNA, 15 bp, Homo sapiens
cccctctgtcctggg

SEQ ID NO: 1516698 - DNA, 15 bp, Homo sapiens
ccctctgtcctgggc

SEQ ID NO: 1516699 - DNA, 15 bp, Homo sapiens
cctctgtcctgggcc

SEQ ID NO: 1516700 - DNA, 15 bp, Homo sapiens
ctctgtcctgggcca

SEQ ID NO: 1516701 - DNA, 15 bp, Homo sapiens
tctgtcctgggccaa

SEQ ID NO: 1516702 - DNA, 15 bp, Homo sapiens
ctgtcctgggccaaa

SEQ ID NO: 1516703 - DNA, 15 bp, Homo sapiens
tgtcctgggccaaat

SEQ ID NO: 1516704 - DNA, 15 bp, Homo sapiens
gtcctgggccaaatc

SEQ ID NO: 1516705 - DNA, 15 bp, Homo sapiens
tcctgggccaaatct

SEQ ID NO: 1516706 - DNA, 15 bp, Homo sapiens
cctgggccaaatctt

SEQ ID NO: 1516707 - DNA, 15 bp, Homo sapiens
ctgggccaaatcttg

SEQ ID NO: 1516708 - DNA, 15 bp, Homo sapiens
tgggccaaatcttgc

SEQ ID NO: 1516709 - DNA, 15 bp, Homo sapiens
gggccaaatcttgct

SEQ ID NO: 1516710 - DNA, 15 bp, Homo sapiens
ggccaaatcttgcta

SEQ ID NO: 1516711 - DNA, 15 bp, Homo sapiens
gccaaatcttgctaa

SEQ ID NO: 1516712 - DNA, 15 bp, Homo sapiens
ccaaatcttgctaaa

SEQ ID NO: 1516713 - DNA, 15 bp, Homo sapiens
caaatcttgctaaaa

SEQ ID NO: 1516714 - DNA, 15 bp, Homo sapiens
aaatcttgctaaaag

SEQ ID NO: 1516715 - DNA, 15 bp, Homo sapiens
aatcttgctaaaagg

SEQ ID NO: 1516716 - DNA, 15 bp, Homo sapiens
atcttgctaaaagga

SEQ ID NO: 1516717 - DNA, 15 bp, Homo sapiens
tcttgctaaaaggag

SEQ ID NO: 1516718 - DNA, 15 bp, Homo sapiens
cttgctaaaaggagc

SEQ ID NO: 1516719 - DNA, 15 bp, Homo sapiens
ttgctaaaaggagct

SEQ ID NO: 1516720 - DNA, 15 bp, Homo sapiens
tgctaaaaggagctc

SEQ ID NO: 1516721 - DNA, 15 bp, Homo sapiens
gctaaaaggagctct

SEQ ID NO: 1516722 - DNA, 15 bp, Homo sapiens
ctaaaaggagctctc

SEQ ID NO: 1516723 - DNA, 15 bp, Homo sapiens
taaaaggagctctct

SEQ ID NO: 1516724 - DNA, 15 bp, Homo sapiens
aaaaggagctctctt

SEQ ID NO: 1516725 - DNA, 15 bp, Homo sapiens
aaaggagctctcttt

SEQ ID NO: 1516726 - DNA, 15 bp, Homo sapiens
aaggagctctctttt

SEQ ID NO: 1516727 - DNA, 15 bp, Homo sapiens
aggagctctcttttt

SEQ ID NO: 1516728 - DNA, 15 bp, Homo sapiens
ggagctctcttttta

SEQ ID NO: 1516729 - DNA, 15 bp, Homo sapiens
gagctctctttttag

SEQ ID NO: 1516730 - DNA, 15 bp, Homo sapiens
agctctctttttaga

SEQ ID NO: 1516731 - DNA, 15 bp, Homo sapiens
gctctctttttagag

SEQ ID NO: 1516732 - DNA, 15 bp, Homo sapiens
ctctctttttagagg

SEQ ID NO: 1516733 - DNA, 15 bp, Homo sapiens
tctctttttagaggt

SEQ ID NO: 1516734 - DNA, 15 bp, Homo sapiens
ctctttttagaggtt

SEQ ID NO: 1516735 - DNA, 15 bp, Homo sapiens
tctttttagaggttt

SEQ ID NO: 1516736 - DNA, 15 bp, Homo sapiens
ctttttagaggtttt

SEQ ID NO: 1516737 - DNA, 15 bp, Homo sapiens
tttttagaggttttg

SEQ ID NO: 1516738 - DNA, 15 bp, Homo sapiens
ttttagaggttttgt

SEQ ID NO: 1516739 - DNA, 15 bp, Homo sapiens
tttagaggttttgtt

SEQ ID NO: 1516740 - DNA, 15 bp, Homo sapiens
ttagaggttttgttt

SEQ ID NO: 1516741 - DNA, 15 bp, Homo sapiens
tagaggttttgttta

SEQ ID NO: 1516742 - DNA, 15 bp, Homo sapiens
agaggttttgtttat

SEQ ID NO: 1516743 - DNA, 15 bp, Homo sapiens
gaggttttgtttatc

SEQ ID NO: 1516744 - DNA, 15 bp, Homo sapiens
aggttttgtttatca

SEQ ID NO: 1516745 - DNA, 15 bp, Homo sapiens
ggttttgtttatcag

SEQ ID NO: 1516746 - DNA, 15 bp, Homo sapiens
gttttgtttatcagg

SEQ ID NO: 1516747 - DNA, 15 bp, Homo sapiens
ttttgtttatcaggg

SEQ ID NO: 1516748 - DNA, 15 bp, Homo sapiens
tttgtttatcagggt

SEQ ID NO: 1516749 - DNA, 15 bp, Homo sapiens
ttgtttatcagggta

SEQ ID NO: 1516750 - DNA, 15 bp, Homo sapiens
tgtttatcagggtat

SEQ ID NO: 1516751 - DNA, 15 bp, Homo sapiens
gtttatcagggtatc

SEQ ID NO: 1516752 - DNA, 15 bp, Homo sapiens
tttatcagggtatca

SEQ ID NO: 1516753 - DNA, 15 bp, Homo sapiens
ttatcagggtatcac

SEQ ID NO: 1516754 - DNA, 15 bp, Homo sapiens
tatcagggtatcaca

SEQ ID NO: 1516755 - DNA, 15 bp, Homo sapiens
atcagggtatcacac

SEQ ID NO: 1516756 - DNA, 15 bp, Homo sapiens
tcagggtatcacact

SEQ ID NO: 1516757 - DNA, 15 bp, Homo sapiens
cagggtatcacactt

SEQ ID NO: 1516758 - DNA, 15 bp, Homo sapiens
agggtatcacactta

SEQ ID NO: 1516759 - DNA, 15 bp, Homo sapiens
gggtatcacacttaa

SEQ ID NO: 1516760 - DNA, 15 bp, Homo sapiens
ggtatcacacttaac

SEQ ID NO: 1516761 - DNA, 15 bp, Homo sapiens
gtatcacacttaact

SEQ ID NO: 1516762 - DNA, 15 bp, Homo sapiens
tatcacacttaactg

SEQ ID NO: 1516763 - DNA, 15 bp, Homo sapiens
atcacacttaactgt

SEQ ID NO: 1516764 - DNA, 15 bp, Homo sapiens
tcacacttaactgtc

SEQ ID NO: 1516765 - DNA, 15 bp, Homo sapiens
cacacttaactgtcg

SEQ ID NO: 1516766 - DNA, 15 bp, Homo sapiens
acacttaactgtcgt

SEQ ID NO: 1516767 - DNA, 15 bp, Homo sapiens
cacttaactgtcgtg

SEQ ID NO: 1516768 - DNA, 15 bp, Homo sapiens
acttaactgtcgtgg

SEQ ID NO: 1516769 - DNA, 15 bp, Homo sapiens
cttaactgtcgtgga

SEQ ID NO: 1516770 - DNA, 15 bp, Homo sapiens
ttaactgtcgtggat

SEQ ID NO: 1516771 - DNA, 15 bp, Homo sapiens
taactgtcgtggata

SEQ ID NO: 1516772 - DNA, 15 bp, Homo sapiens
aactgtcgtggataa

SEQ ID NO: 1516773 - DNA, 15 bp, Homo sapiens
actgtcgtggataat

SEQ ID NO: 1516774 - DNA, 15 bp, Homo sapiens
ctgtcgtggataatc

SEQ ID NO: 1516775 - DNA, 15 bp, Homo sapiens
tgtcgtggataatct

SEQ ID NO: 1516776 - DNA, 15 bp, Homo sapiens
gtcgtggataatctt

SEQ ID NO: 1516777 - DNA, 15 bp, Homo sapiens
tcgtggataatcttt

SEQ ID NO: 1516778 - DNA, 15 bp, Homo sapiens
cgtggataatctttt

SEQ ID NO: 1516779 - DNA, 15 bp, Homo sapiens
gtggataatcttttc

SEQ ID NO: 1516780 - DNA, 15 bp, Homo sapiens
tggataatcttttcc

SEQ ID NO: 1516781 - DNA, 15 bp, Homo sapiens
ggataatcttttcct

SEQ ID NO: 1516782 - DNA, 15 bp, Homo sapiens
gataatcttttcctc

SEQ ID NO: 1516783 - DNA, 15 bp, Homo sapiens
ataatcttttcctcc

SEQ ID NO: 1516784 - DNA, 15 bp, Homo sapiens
taatcttttcctcca

SEQ ID NO: 1516785 - DNA, 15 bp, Homo sapiens
aatcttttcctccag

SEQ ID NO: 1516786 - DNA, 15 bp, Homo sapiens
atcttttcctccaga

SEQ ID NO: 1516787 - DNA, 15 bp, Homo sapiens
tcttttcctccagag

SEQ ID NO: 1516788 - DNA, 15 bp, Homo sapiens
cttttcctccagaga

SEQ ID NO: 1516789 - DNA, 15 bp, Homo sapiens
ttttcctccagagag

SEQ ID NO: 1516790 - DNA, 15 bp, Homo sapiens
tttcctccagagagt

SEQ ID NO: 1516791 - DNA, 15 bp, Homo sapiens
ttcctccagagagta

SEQ ID NO: 1516792 - DNA, 15 bp, Homo sapiens
tcctccagagagtat

SEQ ID NO: 1516793 - DNA, 15 bp, Homo sapiens
cctccagagagtata

SEQ ID NO: 1516794 - DNA, 15 bp, Homo sapiens
ctccagagagtatag

SEQ ID NO: 1516795 - DNA, 15 bp, Homo sapiens
tccagagagtataga

SEQ ID NO: 1516796 - DNA, 15 bp, Homo sapiens
ccagagagtatagat

SEQ ID NO: 1516797 - DNA, 15 bp, Homo sapiens
cagagagtatagatg

SEQ ID NO: 1516798 - DNA, 15 bp, Homo sapiens
agagagtatagatgt

SEQ ID NO: 1516799 - DNA, 15 bp, Homo sapiens
gagagtatagatgtt

SEQ ID NO: 1516800 - DNA, 15 bp, Homo sapiens
agagtatagatgttt

SEQ ID NO: 1516801 - DNA, 15 bp, Homo sapiens
gagtatagatgttta

SEQ ID NO: 1516802 - DNA, 15 bp, Homo sapiens
agtatagatgtttaa

SEQ ID NO: 1516803 - DNA, 15 bp, Homo sapiens
gtatagatgtttaaa

SEQ ID NO: 1516804 - DNA, 15 bp, Homo sapiens
tatagatgtttaaag

SEQ ID NO: 1516805 - DNA, 15 bp, Homo sapiens
atagatgtttaaagg

SEQ ID NO: 1516806 - DNA, 15 bp, Homo sapiens
tagatgtttaaagga

SEQ ID NO: 1516807 - DNA, 15 bp, Homo sapiens
agatgtttaaaggaa

SEQ ID NO: 1516808 - DNA, 15 bp, Homo sapiens
gatgtttaaaggaac

SEQ ID NO: 1516809 - DNA, 15 bp, Homo sapiens
atgtttaaaggaaca

SEQ ID NO: 1516810 - DNA, 15 bp, Homo sapiens
tgtttaaaggaacac

SEQ ID NO: 1516811 - DNA, 15 bp, Homo sapiens
gtttaaaggaacaca

SEQ ID NO: 1516812 - DNA, 15 bp, Homo sapiens
tttaaaggaacacag

SEQ ID NO: 1516813 - DNA, 15 bp, Homo sapiens
ttaaaggaacacagc

SEQ ID NO: 1516814 - DNA, 15 bp, Homo sapiens
taaaggaacacagct

SEQ ID NO: 1516815 - DNA, 15 bp, Homo sapiens
aaaggaacacagcta

SEQ ID NO: 1516816 - DNA, 15 bp, Homo sapiens
aaggaacacagctat

SEQ ID NO: 1516817 - DNA, 15 bp, Homo sapiens
aggaacacagctatt

SEQ ID NO: 1516818 - DNA, 15 bp, Homo sapiens
ggaacacagctattt

SEQ ID NO: 1516819 - DNA, 15 bp, Homo sapiens
gaacacagctattta

SEQ ID NO: 1516820 - DNA, 15 bp, Homo sapiens
aacacagctatttaa

SEQ ID NO: 1516821 - DNA, 15 bp, Homo sapiens
acacagctatttaat

SEQ ID NO: 1516822 - DNA, 15 bp, Homo sapiens
cacagctatttaatg

SEQ ID NO: 1516823 - DNA, 15 bp, Homo sapiens
acagctatttaatga

SEQ ID NO: 1516824 - DNA, 15 bp, Homo sapiens
cagctatttaatgat

SEQ ID NO: 1516825 - DNA, 15 bp, Homo sapiens
agctatttaatgata

SEQ ID NO: 1516826 - DNA, 15 bp, Homo sapiens
gctatttaatgatat

SEQ ID NO: 1516827 - DNA, 15 bp, Homo sapiens
ctatttaatgatatg

SEQ ID NO: 1516828 - DNA, 15 bp, Homo sapiens
tatttaatgatatgg

SEQ ID NO: 1516829 - DNA, 15 bp, Homo sapiens
atttaatgatatggc

SEQ ID NO: 1516830 - DNA, 15 bp, Homo sapiens
tttaatgatatggca

SEQ ID NO: 1516831 - DNA, 15 bp, Homo sapiens
ttaatgatatggcac

SEQ ID NO: 1516832 - DNA, 15 bp, Homo sapiens
taatgatatggcaca

SEQ ID NO: 1516833 - DNA, 15 bp, Homo sapiens
aatgatatggcacat

SEQ ID NO: 1516834 - DNA, 15 bp, Homo sapiens
atgatatggcacatc

SEQ ID NO: 1516835 - DNA, 15 bp, Homo sapiens
tgatatggcacatca

SEQ ID NO: 1516836 - DNA, 15 bp, Homo sapiens
gatatggcacatcaa

SEQ ID NO: 1516837 - DNA, 15 bp, Homo sapiens
atatggcacatcaag

SEQ ID NO: 1516838 - DNA, 15 bp, Homo sapiens
tatggcacatcaagg

SEQ ID NO: 1516839 - DNA, 15 bp, Homo sapiens
atggcacatcaaggt

SEQ ID NO: 1516840 - DNA, 15 bp, Homo sapiens
tggcacatcaaggtt

SEQ ID NO: 1516841 - DNA, 15 bp, Homo sapiens
ggcacatcaaggttt

SEQ ID NO: 1516842 - DNA, 15 bp, Homo sapiens
gcacatcaaggtttg

SEQ ID NO: 1516843 - DNA, 15 bp, Homo sapiens
cacatcaaggtttga

SEQ ID NO: 1516844 - DNA, 15 bp, Homo sapiens
gaaacatgtttataa

SEQ ID NO: 1516845 - DNA, 15 bp, Homo sapiens
aacatgtttataacc

SEQ ID NO: 1516846 - DNA, 15 bp, Homo sapiens
acatgtttataacca

SEQ ID NO: 1516847 - DNA, 15 bp, Homo sapiens
catgtttataaccaa

SEQ ID NO: 1516848 - DNA, 15 bp, Homo sapiens
atgtttataaccaaa

SEQ ID NO: 1516849 - DNA, 15 bp, Homo sapiens
tgtttataaccaaaa

SEQ ID NO: 1516850 - DNA, 15 bp, Homo sapiens
gtttataaccaaaat

SEQ ID NO: 1516851 - DNA, 15 bp, Homo sapiens
tttataaccaaaatt

SEQ ID NO: 1516852 - DNA, 15 bp, Homo sapiens
ttataaccaaaatta

SEQ ID NO: 1516853 - DNA, 15 bp, Homo sapiens
tataaccaaaattaa

SEQ ID NO: 1516854 - DNA, 15 bp, Homo sapiens
ataaccaaaattaac

SEQ ID NO: 1516855 - DNA, 15 bp, Homo sapiens
taaccaaaattaacc

SEQ ID NO: 1516856 - DNA, 15 bp, Homo sapiens
aaccaaaattaacct

SEQ ID NO: 1516857 - DNA, 15 bp, Homo sapiens
accaaaattaacctc

SEQ ID NO: 1516858 - DNA, 15 bp, Homo sapiens
ccaaaattaacctca

SEQ ID NO: 1516859 - DNA, 15 bp, Homo sapiens
caaaattaacctcaa

SEQ ID NO: 1516860 - DNA, 15 bp, Homo sapiens
aaaattaacctcaaa

SEQ ID NO: 1516861 - DNA, 15 bp, Homo sapiens
aaattaacctcaaat

SEQ ID NO: 1516862 - DNA, 15 bp, Homo sapiens
aattaacctcaaata

SEQ ID NO: 1516863 - DNA, 15 bp, Homo sapiens
attaacctcaaatat

SEQ ID NO: 1516864 - DNA, 15 bp, Homo sapiens
ttaacctcaaatatt

SEQ ID NO: 1516865 - DNA, 15 bp, Homo sapiens
taacctcaaatattg

SEQ ID NO: 1516866 - DNA, 15 bp, Homo sapiens
aacctcaaatattgc

SEQ ID NO: 1516867 - DNA, 15 bp, Homo sapiens
acctcaaatattgca

SEQ ID NO: 1516868 - DNA, 15 bp, Homo sapiens
cctcaaatattgcaa

SEQ ID NO: 1516869 - DNA, 15 bp, Homo sapiens
ctcaaatattgcaaa

SEQ ID NO: 1516870 - DNA, 15 bp, Homo sapiens
tcaaatattgcaaag

SEQ ID NO: 1516871 - DNA, 15 bp, Homo sapiens
caaatattgcaaagc

SEQ ID NO: 1516872 - DNA, 15 bp, Homo sapiens
aaatattgcaaagcc

SEQ ID NO: 1516873 - DNA, 15 bp, Homo sapiens
aatattgcaaagccc

SEQ ID NO: 1516874 - DNA, 15 bp, Homo sapiens
atattgcaaagccct

SEQ ID NO: 1516875 - DNA, 15 bp, Homo sapiens
tattgcaaagccctt

SEQ ID NO: 1516876 - DNA, 15 bp, Homo sapiens
attgcaaagcccttc

SEQ ID NO: 1516877 - DNA, 15 bp, Homo sapiens
ttgcaaagcccttca

SEQ ID NO: 1516878 - DNA, 15 bp, Homo sapiens
tgcaaagcccttcat

SEQ ID NO: 1516879 - DNA, 15 bp, Homo sapiens
gcaaagcccttcatt

SEQ ID NO: 1516880 - DNA, 15 bp, Homo sapiens
caaagcccttcattt

SEQ ID NO: 1516881 - DNA, 15 bp, Homo sapiens
aaagcccttcatttt

SEQ ID NO: 1516882 - DNA, 15 bp, Homo sapiens
aagcccttcattttg

SEQ ID NO: 1516883 - DNA, 15 bp, Homo sapiens
agcccttcattttga

SEQ ID NO: 1516884 - DNA, 15 bp, Homo sapiens
gcccttcattttgag

SEQ ID NO: 1516885 - DNA, 15 bp, Homo sapiens
cccttcattttgagt

SEQ ID NO: 1516886 - DNA, 15 bp, Homo sapiens
ccttcattttgagtt

SEQ ID NO: 1516887 - DNA, 15 bp, Homo sapiens
cttcattttgagttt

SEQ ID NO: 1516888 - DNA, 15 bp, Homo sapiens
ttcattttgagttta

SEQ ID NO: 1516889 - DNA, 15 bp, Homo sapiens
tcattttgagtttaa

SEQ ID NO: 1516890 - DNA, 15 bp, Homo sapiens
cattttgagtttaaa

SEQ ID NO: 1516891 - DNA, 15 bp, Homo sapiens
tttgagtttaaaatt

SEQ ID NO: 1516892 - DNA, 15 bp, Homo sapiens
ttgagtttaaaattt

SEQ ID NO: 1516893 - DNA, 15 bp, Homo sapiens
tgagtttaaaatttt

SEQ ID NO: 1516894 - DNA, 15 bp, Homo sapiens
gagtttaaaattttg

SEQ ID NO: 1516895 - DNA, 15 bp, Homo sapiens
agtttaaaattttgt

SEQ ID NO: 1516896 - DNA, 15 bp, Homo sapiens
gtttaaaattttgtt

SEQ ID NO: 1516897 - DNA, 15 bp, Homo sapiens
tttaaaattttgttt

SEQ ID NO: 1516898 - DNA, 15 bp, Homo sapiens
ttaaaattttgtttt

SEQ ID NO: 1516899 - DNA, 15 bp, Homo sapiens
taaaattttgtttta

SEQ ID NO: 1516900 - DNA, 15 bp, Homo sapiens
aaaattttgttttat

SEQ ID NO: 1516901 - DNA, 15 bp, Homo sapiens
aaattttgttttatg

SEQ ID NO: 1516902 - DNA, 15 bp, Homo sapiens
aattttgttttatga

SEQ ID NO: 1516903 - DNA, 15 bp, Homo sapiens
attttgttttatgaa

SEQ ID NO: 1516904 - DNA, 15 bp, Homo sapiens
ttttgttttatgaaa

SEQ ID NO: 1516905 - DNA, 15 bp, Homo sapiens
tttgttttatgaaat

SEQ ID NO: 1516906 - DNA, 15 bp, Homo sapiens
ttgttttatgaaatg

SEQ ID NO: 1516907 - DNA, 15 bp, Homo sapiens
tgttttatgaaatgg

SEQ ID NO: 1516908 - DNA, 15 bp, Homo sapiens
gttttatgaaatgga

SEQ ID NO: 1516909 - DNA, 15 bp, Homo sapiens
ttttatgaaatggaa

SEQ ID NO: 1516910 - DNA, 15 bp, Homo sapiens
tttatgaaatggaaa

SEQ ID NO: 1516911 - DNA, 15 bp, Homo sapiens
ttatgaaatggaaag

SEQ ID NO: 1516912 - DNA, 15 bp, Homo sapiens
tatgaaatggaaagt

SEQ ID NO: 1516913 - DNA, 15 bp, Homo sapiens
atgaaatggaaagtg

SEQ ID NO: 1516914 - DNA, 15 bp, Homo sapiens
tgaaatggaaagtga

SEQ ID NO: 1516915 - DNA, 15 bp, Homo sapiens
gaaatggaaagtgat

SEQ ID NO: 1516916 - DNA, 15 bp, Homo sapiens
aaatggaaagtgata

SEQ ID NO: 1516917 - DNA, 15 bp, Homo sapiens
aatggaaagtgataa

SEQ ID NO: 1516918 - DNA, 15 bp, Homo sapiens
atggaaagtgataat

SEQ ID NO: 1516919 - DNA, 15 bp, Homo sapiens
tggaaagtgataata

SEQ ID NO: 1516920 - DNA, 15 bp, Homo sapiens
ggaaagtgataatac

SEQ ID NO: 1516921 - DNA, 15 bp, Homo sapiens
gaaagtgataatact

SEQ ID NO: 1516922 - DNA, 15 bp, Homo sapiens
aaagtgataatactc

SEQ ID NO: 1516923 - DNA, 15 bp, Homo sapiens
aagtgataatactct

SEQ ID NO: 1516924 - DNA, 15 bp, Homo sapiens
agtgataatactctt

SEQ ID NO: 1516925 - DNA, 15 bp, Homo sapiens
gtgataatactcttg

SEQ ID NO: 1516926 - DNA, 15 bp, Homo sapiens
tgataatactcttgg

SEQ ID NO: 1516927 - DNA, 15 bp, Homo sapiens
gataatactcttggt

SEQ ID NO: 1516928 - DNA, 15 bp, Homo sapiens
ataatactcttggtg

SEQ ID NO: 1516929 - DNA, 15 bp, Homo sapiens
taatactcttggtgg

SEQ ID NO: 1516930 - DNA, 15 bp, Homo sapiens
aatactcttggtggg

SEQ ID NO: 1516931 - DNA, 15 bp, Homo sapiens
atactcttggtgggc

SEQ ID NO: 1516932 - DNA, 15 bp, Homo sapiens
tactcttggtgggct

SEQ ID NO: 1516933 - DNA, 15 bp, Homo sapiens
actcttggtgggctt

SEQ ID NO: 1516934 - DNA, 15 bp, Homo sapiens
ctcttggtgggctta

SEQ ID NO: 1516935 - DNA, 15 bp, Homo sapiens
tcttggtgggcttat

SEQ ID NO: 1516936 - DNA, 15 bp, Homo sapiens
cttggtgggcttata

SEQ ID NO: 1516937 - DNA, 15 bp, Homo sapiens
ttggtgggcttataa

SEQ ID NO: 1516938 - DNA, 15 bp, Homo sapiens
tggtgggcttataaa

SEQ ID NO: 1516939 - DNA, 15 bp, Homo sapiens
ggtgggcttataaat

SEQ ID NO: 1516940 - DNA, 15 bp, Homo sapiens
gtgggcttataaatt

SEQ ID NO: 1516941 - DNA, 15 bp, Homo sapiens
tgggcttataaattg

SEQ ID NO: 1516942 - DNA, 15 bp, Homo sapiens
gggcttataaattgg

SEQ ID NO: 1516943 - DNA, 15 bp, Homo sapiens
ggcttataaattggg

SEQ ID NO: 1516944 - DNA, 15 bp, Homo sapiens
gcttataaattggga

SEQ ID NO: 1516945 - DNA, 15 bp, Homo sapiens
cttataaattgggaa

SEQ ID NO: 1516946 - DNA, 15 bp, Homo sapiens
ttataaattgggaag

SEQ ID NO: 1516947 - DNA, 15 bp, Homo sapiens
tataaattgggaaga

SEQ ID NO: 1516948 - DNA, 15 bp, Homo sapiens
ataaattgggaagag

SEQ ID NO: 1516949 - DNA, 15 bp, Homo sapiens
taaattgggaagagt

SEQ ID NO: 1516950 - DNA, 15 bp, Homo sapiens
aaattgggaagagtt

SEQ ID NO: 1516951 - DNA, 15 bp, Homo sapiens
aattgggaagagttt

SEQ ID NO: 1516952 - DNA, 15 bp, Homo sapiens
attgggaagagtttt

SEQ ID NO: 1516953 - DNA, 15 bp, Homo sapiens
ttgggaagagttttg

SEQ ID NO: 1516954 - DNA, 15 bp, Homo sapiens
tgggaagagttttgg

SEQ ID NO: 1516955 - DNA, 15 bp, Homo sapiens
gggaagagttttgga

SEQ ID NO: 1516956 - DNA, 15 bp, Homo sapiens
ggaagagttttggat

SEQ ID NO: 1516957 - DNA, 15 bp, Homo sapiens
gaagagttttggatt

SEQ ID NO: 1516958 - DNA, 15 bp, Homo sapiens
aagagttttggatta

SEQ ID NO: 1516959 - DNA, 15 bp, Homo sapiens
agagttttggattac

SEQ ID NO: 1516960 - DNA, 15 bp, Homo sapiens
gagttttggattacc

SEQ ID NO: 1516961 - DNA, 15 bp, Homo sapiens
agttttggattaccc

SEQ ID NO: 1516962 - DNA, 15 bp, Homo sapiens
gttttggattacccc

SEQ ID NO: 1516963 - DNA, 15 bp, Homo sapiens
ttttggattacccct

SEQ ID NO: 1516964 - DNA, 15 bp, Homo sapiens
tttggattacccctg

SEQ ID NO: 1516965 - DNA, 15 bp, Homo sapiens
ttggattacccctga

SEQ ID NO: 1516966 - DNA, 15 bp, Homo sapiens
tggattacccctgaa

SEQ ID NO: 1516967 - DNA, 15 bp, Homo sapiens
ggattacccctgaaa

SEQ ID NO: 1516968 - DNA, 15 bp, Homo sapiens
gattacccctgaaac

SEQ ID NO: 1516969 - DNA, 15 bp, Homo sapiens
attacccctgaaacg

SEQ ID NO: 1516970 - DNA, 15 bp, Homo sapiens
ttacccctgaaacgt

SEQ ID NO: 1516971 - DNA, 15 bp, Homo sapiens
tacccctgaaacgtc

SEQ ID NO: 1516972 - DNA, 15 bp, Homo sapiens
acccctgaaacgtct

SEQ ID NO: 1516973 - DNA, 15 bp, Homo sapiens
cccctgaaacgtctc

SEQ ID NO: 1516974 - DNA, 15 bp, Homo sapiens
ccctgaaacgtctct

SEQ ID NO: 1516975 - DNA, 15 bp, Homo sapiens
cctgaaacgtctctg

SEQ ID NO: 1516976 - DNA, 15 bp, Homo sapiens
ctgaaacgtctctgg

SEQ ID NO: 1516977 - DNA, 15 bp, Homo sapiens
tgaaacgtctctgga

SEQ ID NO: 1516978 - DNA, 15 bp, Homo sapiens
gaaacgtctctggaa

SEQ ID NO: 1516979 - DNA, 15 bp, Homo sapiens
aaacgtctctggaag

SEQ ID NO: 1516980 - DNA, 15 bp, Homo sapiens
aacgtctctggaagc

SEQ ID NO: 1516981 - DNA, 15 bp, Homo sapiens
acgtctctggaagct

SEQ ID NO: 1516982 - DNA, 15 bp, Homo sapiens
cgtctctggaagctt

SEQ ID NO: 1516983 - DNA, 15 bp, Homo sapiens
gtctctggaagcttc

SEQ ID NO: 1516984 - DNA, 15 bp, Homo sapiens
tctctggaagcttct

SEQ ID NO: 1516985 - DNA, 15 bp, Homo sapiens
ctctggaagcttctg

SEQ ID NO: 1516986 - DNA, 15 bp, Homo sapiens
tctggaagcttctgt

SEQ ID NO: 1516987 - DNA, 15 bp, Homo sapiens
ctggaagcttctgtt

SEQ ID NO: 1516988 - DNA, 15 bp, Homo sapiens
tggaagcttctgtta

SEQ ID NO: 1516989 - DNA, 15 bp, Homo sapiens
ggaagcttctgttaa

SEQ ID NO: 1516990 - DNA, 15 bp, Homo sapiens
gaagcttctgttaac

SEQ ID NO: 1516991 - DNA, 15 bp, Homo sapiens
aagcttctgttaacc

SEQ ID NO: 1516992 - DNA, 15 bp, Homo sapiens
agcttctgttaaccc

SEQ ID NO: 1516993 - DNA, 15 bp, Homo sapiens
gcttctgttaaccct

SEQ ID NO: 1516994 - DNA, 15 bp, Homo sapiens
cttctgttaaccctc

SEQ ID NO: 1516995 - DNA, 15 bp, Homo sapiens
ttctgttaaccctct

SEQ ID NO: 1516996 - DNA, 15 bp, Homo sapiens
tctgttaaccctctt

SEQ ID NO: 1516997 - DNA, 15 bp, Homo sapiens
ctgttaaccctcttt

SEQ ID NO: 1516998 - DNA, 15 bp, Homo sapiens
tgttaaccctctttt

SEQ ID NO: 1516999 - DNA, 15 bp, Homo sapiens
gttaaccctcttttt

SEQ ID NO: 1517000 - DNA, 15 bp, Homo sapiens
ttaaccctctttttt

SEQ ID NO: 1517001 - DNA, 15 bp, Homo sapiens
taaccctcttttttt

SEQ ID NO: 1517002 - DNA, 15 bp, Homo sapiens
aaccctctttttttt

SEQ ID NO: 1517003 - DNA, 15 bp, Homo sapiens
accctcttttttttt

SEQ ID NO: 1517004 - DNA, 15 bp, Homo sapiens
ccctctttttttttt

SEQ ID NO: 1517005 - DNA, 15 bp, Homo sapiens
ttttttttttaaagt

SEQ ID NO: 1517006 - DNA, 15 bp, Homo sapiens
tttttttttaaagtc

SEQ ID NO: 1517007 - DNA, 15 bp, Homo sapiens
ttttttttaaagtca

SEQ ID NO: 1517008 - DNA, 15 bp, Homo sapiens
tttttttaaagtcag

SEQ ID NO: 1517009 - DNA, 15 bp, Homo sapiens
ttttttaaagtcaga

SEQ ID NO: 1517010 - DNA, 15 bp, Homo sapiens
tttttaaagtcagac

SEQ ID NO: 1517011 - DNA, 15 bp, Homo sapiens
ttttaaagtcagaca

SEQ ID NO: 1517012 - DNA, 15 bp, Homo sapiens
tttaaagtcagacaa

SEQ ID NO: 1517013 - DNA, 15 bp, Homo sapiens
ttaaagtcagacaat

SEQ ID NO: 1517014 - DNA, 15 bp, Homo sapiens
taaagtcagacaatg

SEQ ID NO: 1517015 - DNA, 15 bp, Homo sapiens
aaagtcagacaatgg

SEQ ID NO: 1517016 - DNA, 15 bp, Homo sapiens
aagtcagacaatggt

SEQ ID NO: 1517017 - DNA, 15 bp, Homo sapiens
agtcagacaatggta

SEQ ID NO: 1517018 - DNA, 15 bp, Homo sapiens
gtcagacaatggtat

SEQ ID NO: 1517019 - DNA, 15 bp, Homo sapiens
tcagacaatggtata

SEQ ID NO: 1517020 - DNA, 15 bp, Homo sapiens
cagacaatggtatat

SEQ ID NO: 1517021 - DNA, 15 bp, Homo sapiens
agacaatggtatata

SEQ ID NO: 1517022 - DNA, 15 bp, Homo sapiens
gacaatggtatataa

SEQ ID NO: 1517023 - DNA, 15 bp, Homo sapiens
acaatggtatataac

SEQ ID NO: 1517024 - DNA, 15 bp, Homo sapiens
caatggtatataact

SEQ ID NO: 1517025 - DNA, 15 bp, Homo sapiens
aatggtatataactt

SEQ ID NO: 1517026 - DNA, 15 bp, Homo sapiens
atggtatataacttt

SEQ ID NO: 1517027 - DNA, 15 bp, Homo sapiens
tggtatataactttt

SEQ ID NO: 1517028 - DNA, 15 bp, Homo sapiens
ggtatataactttta

SEQ ID NO: 1517029 - DNA, 15 bp, Homo sapiens
gtatataacttttaa

SEQ ID NO: 1517030 - DNA, 15 bp, Homo sapiens
tatataacttttaac

SEQ ID NO: 1517031 - DNA, 15 bp, Homo sapiens
atataacttttaact

SEQ ID NO: 1517032 - DNA, 15 bp, Homo sapiens
tataacttttaactc

SEQ ID NO: 1517033 - DNA, 15 bp, Homo sapiens
ataacttttaactct

SEQ ID NO: 1517034 - DNA, 15 bp, Homo sapiens
taacttttaactctc

SEQ ID NO: 1517035 - DNA, 15 bp, Homo sapiens
aacttttaactctcg

SEQ ID NO: 1517036 - DNA, 15 bp, Homo sapiens
acttttaactctcga

SEQ ID NO: 1517037 - DNA, 15 bp, Homo sapiens
cttttaactctcgat

SEQ ID NO: 1517038 - DNA, 15 bp, Homo sapiens
ttttaactctcgata

SEQ ID NO: 1517039 - DNA, 15 bp, Homo sapiens
tttaactctcgatag

SEQ ID NO: 1517040 - DNA, 15 bp, Homo sapiens
ttaactctcgatagg

SEQ ID NO: 1517041 - DNA, 15 bp, Homo sapiens
taactctcgatagga

SEQ ID NO: 1517042 - DNA, 15 bp, Homo sapiens
aactctcgataggaa

SEQ ID NO: 1517043 - DNA, 15 bp, Homo sapiens
actctcgataggaac

SEQ ID NO: 1517044 - DNA, 15 bp, Homo sapiens
ctctcgataggaact

SEQ ID NO: 1517045 - DNA, 15 bp, Homo sapiens
tctcgataggaacta

SEQ ID NO: 1517046 - DNA, 15 bp, Homo sapiens
ctcgataggaactaa

SEQ ID NO: 1517047 - DNA, 15 bp, Homo sapiens
tcgataggaactaat

SEQ ID NO: 1517048 - DNA, 15 bp, Homo sapiens
cgataggaactaatt

SEQ ID NO: 1517049 - DNA, 15 bp, Homo sapiens
gataggaactaattc

SEQ ID NO: 1517050 - DNA, 15 bp, Homo sapiens
ataggaactaattct

SEQ ID NO: 1517051 - DNA, 15 bp, Homo sapiens
taggaactaattctg

SEQ ID NO: 1517052 - DNA, 15 bp, Homo sapiens
aggaactaattctga

SEQ ID NO: 1517053 - DNA, 15 bp, Homo sapiens
ggaactaattctgaa

SEQ ID NO: 1517054 - DNA, 15 bp, Homo sapiens
gaactaattctgaag

SEQ ID NO: 1517055 - DNA, 15 bp, Homo sapiens
aactaattctgaagc

SEQ ID NO: 1517056 - DNA, 15 bp, Homo sapiens
actaattctgaagca

SEQ ID NO: 1517057 - DNA, 15 bp, Homo sapiens
ctaattctgaagcat

SEQ ID NO: 1517058 - DNA, 15 bp, Homo sapiens
taattctgaagcatc

SEQ ID NO: 1517059 - DNA, 15 bp, Homo sapiens
aattctgaagcatca

SEQ ID NO: 1517060 - DNA, 15 bp, Homo sapiens
attctgaagcatcaa

SEQ ID NO: 1517061 - DNA, 15 bp, Homo sapiens
ttctgaagcatcaaa

SEQ ID NO: 1517062 - DNA, 15 bp, Homo sapiens
tctgaagcatcaaat

SEQ ID NO: 1517063 - DNA, 15 bp, Homo sapiens
ctgaagcatcaaatg

SEQ ID NO: 1517064 - DNA, 15 bp, Homo sapiens
tgaagcatcaaatgc

SEQ ID NO: 1517065 - DNA, 15 bp, Homo sapiens
gaagcatcaaatgct

SEQ ID NO: 1517066 - DNA, 15 bp, Homo sapiens
aagcatcaaatgctt

SEQ ID NO: 1517067 - DNA, 15 bp, Homo sapiens
agcatcaaatgcttc

SEQ ID NO: 1517068 - DNA, 15 bp, Homo sapiens
gcatcaaatgcttct

SEQ ID NO: 1517069 - DNA, 15 bp, Homo sapiens
catcaaatgcttctg

SEQ ID NO: 1517070 - DNA, 15 bp, Homo sapiens
atcaaatgcttctga

SEQ ID NO: 1517071 - DNA, 15 bp, Homo sapiens
tcaaatgcttctgaa

SEQ ID NO: 1517072 - DNA, 15 bp, Homo sapiens
caaatgcttctgaaa

SEQ ID NO: 1517073 - DNA, 15 bp, Homo sapiens
aaatgcttctgaaac

SEQ ID NO: 1517074 - DNA, 15 bp, Homo sapiens
aatgcttctgaaaca

SEQ ID NO: 1517075 - DNA, 15 bp, Homo sapiens
atgcttctgaaacag

SEQ ID NO: 1517076 - DNA, 15 bp, Homo sapiens
tgcttctgaaacaga

SEQ ID NO: 1517077 - DNA, 15 bp, Homo sapiens
gcttctgaaacagaa

SEQ ID NO: 1517078 - DNA, 15 bp, Homo sapiens
cttctgaaacagaat

SEQ ID NO: 1517079 - DNA, 15 bp, Homo sapiens
ttctgaaacagaatc

SEQ ID NO: 1517080 - DNA, 15 bp, Homo sapiens
tctgaaacagaatct

SEQ ID NO: 1517081 - DNA, 15 bp, Homo sapiens
ctgaaacagaatctg

SEQ ID NO: 1517082 - DNA, 15 bp, Homo sapiens
tgaaacagaatctga

SEQ ID NO: 1517083 - DNA, 15 bp, Homo sapiens
gaaacagaatctgac

SEQ ID NO: 1517084 - DNA, 15 bp, Homo sapiens
aaacagaatctgacc

SEQ ID NO: 1517085 - DNA, 15 bp, Homo sapiens
aacagaatctgacca

SEQ ID NO: 1517086 - DNA, 15 bp, Homo sapiens
acagaatctgaccac

SEQ ID NO: 1517087 - DNA, 15 bp, Homo sapiens
cagaatctgaccaca

SEQ ID NO: 1517088 - DNA, 15 bp, Homo sapiens
agaatctgaccacag

SEQ ID NO: 1517089 - DNA, 15 bp, Homo sapiens
gaatctgaccacaga

SEQ ID NO: 1517090 - DNA, 15 bp, Homo sapiens
aatctgaccacagag

SEQ ID NO: 1517091 - DNA, 15 bp, Homo sapiens
atctgaccacagaga

SEQ ID NO: 1517092 - DNA, 15 bp, Homo sapiens
tctgaccacagagac

SEQ ID NO: 1517093 - DNA, 15 bp, Homo sapiens
ctgaccacagagacg

SEQ ID NO: 1517094 - DNA, 15 bp, Homo sapiens
tgaccacagagacga

SEQ ID NO: 1517095 - DNA, 15 bp, Homo sapiens
gaccacagagacgaa

SEQ ID NO: 1517096 - DNA, 15 bp, Homo sapiens
accacagagacgaac

SEQ ID NO: 1517097 - DNA, 15 bp, Homo sapiens
ccacagagacgaact

SEQ ID NO: 1517098 - DNA, 15 bp, Homo sapiens
cacagagacgaactc

SEQ ID NO: 1517099 - DNA, 15 bp, Homo sapiens
acagagacgaactca

SEQ ID NO: 1517100 - DNA, 15 bp, Homo sapiens
cagagacgaactcag

SEQ ID NO: 1517101 - DNA, 15 bp, Homo sapiens
agagacgaactcagt

SEQ ID NO: 1517102 - DNA, 15 bp, Homo sapiens
gagacgaactcagtg

SEQ ID NO: 1517103 - DNA, 15 bp, Homo sapiens
agacgaactcagtga

SEQ ID NO: 1517104 - DNA, 15 bp, Homo sapiens
gacgaactcagtgat

SEQ ID NO: 1517105 - DNA, 15 bp, Homo sapiens
acgaactcagtgatt

SEQ ID NO: 1517106 - DNA, 15 bp, Homo sapiens
cgaactcagtgattg

SEQ ID NO: 1517107 - DNA, 15 bp, Homo sapiens
gaactcagtgattgg

SEQ ID NO: 1517108 - DNA, 15 bp, Homo sapiens
aactcagtgattggt

SEQ ID NO: 1517109 - DNA, 15 bp, Homo sapiens
actcagtgattggtc

SEQ ID NO: 1517110 - DNA, 15 bp, Homo sapiens
ctcagtgattggtca

SEQ ID NO: 1517111 - DNA, 15 bp, Homo sapiens
tcagtgattggtcat

SEQ ID NO: 1517112 - DNA, 15 bp, Homo sapiens
cagtgattggtcatt

SEQ ID NO: 1517113 - DNA, 15 bp, Homo sapiens
agtgattggtcatta

SEQ ID NO: 1517114 - DNA, 15 bp, Homo sapiens
gtgattggtcattag

SEQ ID NO: 1517115 - DNA, 15 bp, Homo sapiens
tgattggtcattagc

SEQ ID NO: 1517116 - DNA, 15 bp, Homo sapiens
gattggtcattagct

SEQ ID NO: 1517117 - DNA, 15 bp, Homo sapiens
acagaggaagagagg

SEQ ID NO: 1517118 - DNA, 15 bp, Homo sapiens
cagaggaagagaggg

SEQ ID NO: 1517119 - DNA, 15 bp, Homo sapiens
agaggaagagaggga

SEQ ID NO: 1517120 - DNA, 15 bp, Homo sapiens
gaggaagagagggag

SEQ ID NO: 1517121 - DNA, 15 bp, Homo sapiens
aggaagagagggaga

SEQ ID NO: 1517122 - DNA, 15 bp, Homo sapiens
ggaagagagggagag

SEQ ID NO: 1517123 - DNA, 15 bp, Homo sapiens
gaagagagggagagc

SEQ ID NO: 1517124 - DNA, 15 bp, Homo sapiens
aagagagggagagct

SEQ ID NO: 1517125 - DNA, 15 bp, Homo sapiens
agagagggagagctt

SEQ ID NO: 1517126 - DNA, 15 bp, Homo sapiens
gagagggagagcttc

SEQ ID NO: 1517127 - DNA, 15 bp, Homo sapiens
agagggagagcttcc

SEQ ID NO: 1517128 - DNA, 15 bp, Homo sapiens
gagggagagcttcct

SEQ ID NO: 1517129 - DNA, 15 bp, Homo sapiens
agggagagcttcctg

SEQ ID NO: 1517130 - DNA, 15 bp, Homo sapiens
gggagagcttcctgc

SEQ ID NO: 1517131 - DNA, 15 bp, Homo sapiens
ggagagcttcctgcg

SEQ ID NO: 1517132 - DNA, 15 bp, Homo sapiens
gagagcttcctgcgc

SEQ ID NO: 1517133 - DNA, 15 bp, Homo sapiens
agagcttcctgcgca

SEQ ID NO: 1517134 - DNA, 15 bp, Homo sapiens
gagcttcctgcgcag

SEQ ID NO: 1517135 - DNA, 15 bp, Homo sapiens
agcttcctgcgcaga

SEQ ID NO: 1517136 - DNA, 15 bp, Homo sapiens
gcttcctgcgcagag

SEQ ID NO: 1517137 - DNA, 15 bp, Homo sapiens
cttcctgcgcagagg

SEQ ID NO: 1517138 - DNA, 15 bp, Homo sapiens
ttcctgcgcagagga

SEQ ID NO: 1517139 - DNA, 15 bp, Homo sapiens
tcctgcgcagaggag

SEQ ID NO: 1517140 - DNA, 15 bp, Homo sapiens
cctgcgcagaggaga

SEQ ID NO: 1517141 - DNA, 15 bp, Homo sapiens
ctgcgcagaggagac

SEQ ID NO: 1517142 - DNA, 15 bp, Homo sapiens
tgcgcagaggagacg

SEQ ID NO: 1517143 - DNA, 15 bp, Homo sapiens
gcgcagaggagacgg

SEQ ID NO: 1517144 - DNA, 15 bp, Homo sapiens
cgcagaggagacgga

SEQ ID NO: 1517145 - DNA, 15 bp, Homo sapiens
gcagaggagacggac

SEQ ID NO: 1517146 - DNA, 15 bp, Homo sapiens
cagaggagacggacg

SEQ ID NO: 1517147 - DNA, 15 bp, Homo sapiens
agaggagacggacgg

SEQ ID NO: 1517148 - DNA, 15 bp, Homo sapiens
gaggagacggacggc

SEQ ID NO: 1517149 - DNA, 15 bp, Homo sapiens
aggagacggacggcg

SEQ ID NO: 1517150 - DNA, 15 bp, Homo sapiens
ggagacggacggcgg

SEQ ID NO: 1517151 - DNA, 15 bp, Homo sapiens
gagacggacggcggc

SEQ ID NO: 1517152 - DNA, 15 bp, Homo sapiens
agacggacggcggcg

SEQ ID NO: 1517153 - DNA, 15 bp, Homo sapiens
gacggacggcggcgt

SEQ ID NO: 1517154 - DNA, 15 bp, Homo sapiens
acggacggcggcgtg

SEQ ID NO: 1517155 - DNA, 15 bp, Homo sapiens
cggacggcggcgtgg

SEQ ID NO: 1517156 - DNA, 15 bp, Homo sapiens
ggacggcggcgtgga

SEQ ID NO: 1517157 - DNA, 15 bp, Homo sapiens
gacggcggcgtggag

SEQ ID NO: 1517158 - DNA, 15 bp, Homo sapiens
acggcggcgtggagg

SEQ ID NO: 1517159 - DNA, 15 bp, Homo sapiens
cggcggcgtggaggg

SEQ ID NO: 1517160 - DNA, 15 bp, Homo sapiens
ggcggcgtggagggg

SEQ ID NO: 1517161 - DNA, 15 bp, Homo sapiens
gcggcgtggaggggg

SEQ ID NO: 1517162 - DNA, 15 bp, Homo sapiens
cggcgtggaggggga

SEQ ID NO: 1517163 - DNA, 15 bp, Homo sapiens
ggcgtggagggggag

SEQ ID NO: 1517164 - DNA, 15 bp, Homo sapiens
gcgtggagggggagg

SEQ ID NO: 1517165 - DNA, 15 bp, Homo sapiens
cgtggagggggagga

SEQ ID NO: 1517166 - DNA, 15 bp, Homo sapiens
gtggagggggaggaa

SEQ ID NO: 1517167 - DNA, 15 bp, Homo sapiens
tggagggggaggaag

SEQ ID NO: 1517168 - DNA, 15 bp, Homo sapiens
ggagggggaggaaga

SEQ ID NO: 1517169 - DNA, 15 bp, Homo sapiens
gagggggaggaagag

SEQ ID NO: 1517170 - DNA, 15 bp, Homo sapiens
agggggaggaagagg

SEQ ID NO: 1517171 - DNA, 15 bp, Homo sapiens
gggggaggaagagga

SEQ ID NO: 1517172 - DNA, 15 bp, Homo sapiens
ggggaggaagaggac

SEQ ID NO: 1517173 - DNA, 15 bp, Homo sapiens
gggaggaagaggaca

SEQ ID NO: 1517174 - DNA, 15 bp, Homo sapiens
ggaggaagaggacaa

SEQ ID NO: 1517175 - DNA, 15 bp, Homo sapiens
gaggaagaggacaag

SEQ ID NO: 1517176 - DNA, 15 bp, Homo sapiens
aggaagaggacaagg

SEQ ID NO: 1517177 - DNA, 15 bp, Homo sapiens
ggaagaggacaagga

SEQ ID NO: 1517178 - DNA, 15 bp, Homo sapiens
gaagaggacaaggag

SEQ ID NO: 1517179 - DNA, 15 bp, Homo sapiens
aagaggacaaggagg

SEQ ID NO: 1517180 - DNA, 15 bp, Homo sapiens
agaggacaaggagga

SEQ ID NO: 1517181 - DNA, 15 bp, Homo sapiens
gaggacaaggaggaa

SEQ ID NO: 1517182 - DNA, 15 bp, Homo sapiens
aggacaaggaggaag

SEQ ID NO: 1517183 - DNA, 15 bp, Homo sapiens
ggacaaggaggaaga

SEQ ID NO: 1517184 - DNA, 15 bp, Homo sapiens
gacaaggaggaagag

SEQ ID NO: 1517185 - DNA, 15 bp, Homo sapiens
acaaggaggaagagg

SEQ ID NO: 1517186 - DNA, 15 bp, Homo sapiens
caaggaggaagagga

SEQ ID NO: 1517187 - DNA, 15 bp, Homo sapiens
aaggaggaagaggac

SEQ ID NO: 1517188 - DNA, 15 bp, Homo sapiens
aggaggaagaggacg

SEQ ID NO: 1517189 - DNA, 15 bp, Homo sapiens
ggaggaagaggacgt

SEQ ID NO: 1517190 - DNA, 15 bp, Homo sapiens
gaggaagaggacgtg

SEQ ID NO: 1517191 - DNA, 15 bp, Homo sapiens
aggaagaggacgtgg

SEQ ID NO: 1517192 - DNA, 15 bp, Homo sapiens
ggaagaggacgtgga

SEQ ID NO: 1517193 - DNA, 15 bp, Homo sapiens
gaagaggacgtggag

SEQ ID NO: 1517194 - DNA, 15 bp, Homo sapiens
aagaggacgtggagg

SEQ ID NO: 1517195 - DNA, 15 bp, Homo sapiens
agaggacgtggagga

SEQ ID NO: 1517196 - DNA, 15 bp, Homo sapiens
gaggacgtggaggag

SEQ ID NO: 1517197 - DNA, 15 bp, Homo sapiens
aggacgtggaggagg

SEQ ID NO: 1517198 - DNA, 15 bp, Homo sapiens
ggacgtggaggaggc

SEQ ID NO: 1517199 - DNA, 15 bp, Homo sapiens
gacgtggaggaggct

SEQ ID NO: 1517200 - DNA, 15 bp, Homo sapiens
acgtggaggaggctt

SEQ ID NO: 1517201 - DNA, 15 bp, Homo sapiens
cgtggaggaggcttc

SEQ ID NO: 1517202 - DNA, 15 bp, Homo sapiens
gtggaggaggcttca

SEQ ID NO: 1517203 - DNA, 15 bp, Homo sapiens
tggaggaggcttcaa

SEQ ID NO: 1517204 - DNA, 15 bp, Homo sapiens
ggaggaggcttcaaa

SEQ ID NO: 1517205 - DNA, 15 bp, Homo sapiens
gaggaggcttcaaag

SEQ ID NO: 1517206 - DNA, 15 bp, Homo sapiens
aggaggcttcaaagg

SEQ ID NO: 1517207 - DNA, 15 bp, Homo sapiens
ggaggcttcaaaggt

SEQ ID NO: 1517208 - DNA, 15 bp, Homo sapiens
gaggcttcaaaggta

SEQ ID NO: 1517209 - DNA, 15 bp, Homo sapiens
aggcttcaaaggtat

SEQ ID NO: 1517210 - DNA, 15 bp, Homo sapiens
ggcttcaaaggtatg

SEQ ID NO: 1517211 - DNA, 15 bp, Homo sapiens
gcttcaaaggtatgg

SEQ ID NO: 1517212 - DNA, 15 bp, Homo sapiens
cttcaaaggtatgga

SEQ ID NO: 1517213 - DNA, 15 bp, Homo sapiens
ttcaaaggtatggag

SEQ ID NO: 1517214 - DNA, 15 bp, Homo sapiens
tcaaaggtatggaga

SEQ ID NO: 1517215 - DNA, 15 bp, Homo sapiens
caaaggtatggagat

SEQ ID NO: 1517216 - DNA, 15 bp, Homo sapiens
aaaggtatggagatc

SEQ ID NO: 1517217 - DNA, 15 bp, Homo sapiens
aaggtatggagatct

SEQ ID NO: 1517218 - DNA, 15 bp, Homo sapiens
aggtatggagatctt

SEQ ID NO: 1517219 - DNA, 15 bp, Homo sapiens
ggtatggagatcttc

SEQ ID NO: 1517220 - DNA, 15 bp, Homo sapiens
gtatggagatcttca

SEQ ID NO: 1517221 - DNA, 15 bp, Homo sapiens
tatggagatcttcat

SEQ ID NO: 1517222 - DNA, 15 bp, Homo sapiens
atggagatcttcatt

SEQ ID NO: 1517223 - DNA, 15 bp, Homo sapiens
tggagatcttcatta

SEQ ID NO: 1517224 - DNA, 15 bp, Homo sapiens
ggagatcttcattaa

SEQ ID NO: 1517225 - DNA, 15 bp, Homo sapiens
gagatcttcattaag

SEQ ID NO: 1517226 - DNA, 15 bp, Homo sapiens
agatcttcattaaga

SEQ ID NO: 1517227 - DNA, 15 bp, Homo sapiens
gatcttcattaagaa

SEQ ID NO: 1517228 - DNA, 15 bp, Homo sapiens
atcttcattaagaaa

SEQ ID NO: 1517229 - DNA, 15 bp, Homo sapiens
tcttcattaagaaat

SEQ ID NO: 1517230 - DNA, 15 bp, Homo sapiens
cttcattaagaaatc

SEQ ID NO: 1517231 - DNA, 15 bp, Homo sapiens
ttcattaagaaatca

SEQ ID NO: 1517232 - DNA, 15 bp, Homo sapiens
tcattaagaaatcaa

SEQ ID NO: 1517233 - DNA, 15 bp, Homo sapiens
cattaagaaatcaaa

SEQ ID NO: 1517234 - DNA, 15 bp, Homo sapiens
attaagaaatcaaag

SEQ ID NO: 1517235 - DNA, 15 bp, Homo sapiens
ttaagaaatcaaagt

SEQ ID NO: 1517236 - DNA, 15 bp, Homo sapiens
taagaaatcaaagtg

SEQ ID NO: 1517237 - DNA, 15 bp, Homo sapiens
aagaaatcaaagtga

SEQ ID NO: 1517238 - DNA, 15 bp, Homo sapiens
agaaatcaaagtgaa

SEQ ID NO: 1517239 - DNA, 15 bp, Homo sapiens
gaaatcaaagtgaat

SEQ ID NO: 1517240 - DNA, 15 bp, Homo sapiens
aaatcaaagtgaatt

SEQ ID NO: 1517241 - DNA, 15 bp, Homo sapiens
aatcaaagtgaattg

SEQ ID NO: 1517242 - DNA, 15 bp, Homo sapiens
atcaaagtgaattgt

SEQ ID NO: 1517243 - DNA, 15 bp, Homo sapiens
tcaaagtgaattgta

SEQ ID NO: 1517244 - DNA, 15 bp, Homo sapiens
caaagtgaattgtaa

SEQ ID NO: 1517245 - DNA, 15 bp, Homo sapiens
aaagtgaattgtaac

SEQ ID NO: 1517246 - DNA, 15 bp, Homo sapiens
aagtgaattgtaaca

SEQ ID NO: 1517247 - DNA, 15 bp, Homo sapiens
agtgaattgtaacag

SEQ ID NO: 1517248 - DNA, 15 bp, Homo sapiens
gtgaattgtaacagc

SEQ ID NO: 1517249 - DNA, 15 bp, Homo sapiens
tgaattgtaacagct

SEQ ID NO: 1517250 - DNA, 15 bp, Homo sapiens
gaattgtaacagctg

SEQ ID NO: 1517251 - DNA, 15 bp, Homo sapiens
aattgtaacagctgt

SEQ ID NO: 1517252 - DNA, 15 bp, Homo sapiens
attgtaacagctgtc

SEQ ID NO: 1517253 - DNA, 15 bp, Homo sapiens
ttgtaacagctgtct

SEQ ID NO: 1517254 - DNA, 15 bp, Homo sapiens
tgtaacagctgtctt

SEQ ID NO: 1517255 - DNA, 15 bp, Homo sapiens
gtaacagctgtcttg

SEQ ID NO: 1517256 - DNA, 15 bp, Homo sapiens
taacagctgtcttga

SEQ ID NO: 1517257 - DNA, 15 bp, Homo sapiens
aacagctgtcttgaa

SEQ ID NO: 1517258 - DNA, 15 bp, Homo sapiens
acagctgtcttgaag

SEQ ID NO: 1517259 - DNA, 15 bp, Homo sapiens
cagctgtcttgaagt

SEQ ID NO: 1517260 - DNA, 15 bp, Homo sapiens
agctgtcttgaagtt

SEQ ID NO: 1517261 - DNA, 15 bp, Homo sapiens
gctgtcttgaagttc

SEQ ID NO: 1517262 - DNA, 15 bp, Homo sapiens
ctgtcttgaagttcc

SEQ ID NO: 1517263 - DNA, 15 bp, Homo sapiens
tgtcttgaagttcca

SEQ ID NO: 1517264 - DNA, 15 bp, Homo sapiens
gtcttgaagttccat

SEQ ID NO: 1517265 - DNA, 15 bp, Homo sapiens
tcttgaagttccatg

SEQ ID NO: 1517266 - DNA, 15 bp, Homo sapiens
cttgaagttccatga

SEQ ID NO: 1517267 - DNA, 15 bp, Homo sapiens
ttgaagttccatgag

SEQ ID NO: 1517268 - DNA, 15 bp, Homo sapiens
tgaagttccatgaga

SEQ ID NO: 1517269 - DNA, 15 bp, Homo sapiens
gaagttccatgagaa

SEQ ID NO: 1517270 - DNA, 15 bp, Homo sapiens
aagttccatgagaaa

SEQ ID NO: 1517271 - DNA, 15 bp, Homo sapiens
agttccatgagaaat

SEQ ID NO: 1517272 - DNA, 15 bp, Homo sapiens
gttccatgagaaatc

SEQ ID NO: 1517273 - DNA, 15 bp, Homo sapiens
ttccatgagaaatcc

SEQ ID NO: 1517274 - DNA, 15 bp, Homo sapiens
tccatgagaaatcct

SEQ ID NO: 1517275 - DNA, 15 bp, Homo sapiens
ccatgagaaatccta

SEQ ID NO: 1517276 - DNA, 15 bp, Homo sapiens
catgagaaatcctat

SEQ ID NO: 1517277 - DNA, 15 bp, Homo sapiens
atgagaaatcctatt

SEQ ID NO: 1517278 - DNA, 15 bp, Homo sapiens
tgagaaatcctattg

SEQ ID NO: 1517279 - DNA, 15 bp, Homo sapiens
gagaaatcctattga

SEQ ID NO: 1517280 - DNA, 15 bp, Homo sapiens
agaaatcctattgat

SEQ ID NO: 1517281 - DNA, 15 bp, Homo sapiens
gaaatcctattgatg

SEQ ID NO: 1517282 - DNA, 15 bp, Homo sapiens
aaatcctattgatgc

SEQ ID NO: 1517283 - DNA, 15 bp, Homo sapiens
aatcctattgatgca

SEQ ID NO: 1517284 - DNA, 15 bp, Homo sapiens
atcctattgatgcaa

SEQ ID NO: 1517285 - DNA, 15 bp, Homo sapiens
tcctattgatgcaat

SEQ ID NO: 1517286 - DNA, 15 bp, Homo sapiens
cctattgatgcaatg

SEQ ID NO: 1517287 - DNA, 15 bp, Homo sapiens
ctattgatgcaatga

SEQ ID NO: 1517288 - DNA, 15 bp, Homo sapiens
tattgatgcaatgaa

SEQ ID NO: 1517289 - DNA, 15 bp, Homo sapiens
attgatgcaatgaac

SEQ ID NO: 1517290 - DNA, 15 bp, Homo sapiens
ttgatgcaatgaact

SEQ ID NO: 1517291 - DNA, 15 bp, Homo sapiens
tgatgcaatgaactg

SEQ ID NO: 1517292 - DNA, 15 bp, Homo sapiens
gatgcaatgaactgt

SEQ ID NO: 1517293 - DNA, 15 bp, Homo sapiens
atgcaatgaactgtt

SEQ ID NO: 1517294 - DNA, 15 bp, Homo sapiens
tgcaatgaactgtta

SEQ ID NO: 1517295 - DNA, 15 bp, Homo sapiens
gcaatgaactgttac

SEQ ID NO: 1517296 - DNA, 15 bp, Homo sapiens
caatgaactgttacc

SEQ ID NO: 1517297 - DNA, 15 bp, Homo sapiens
aatgaactgttacca

SEQ ID NO: 1517298 - DNA, 15 bp, Homo sapiens
atgaactgttaccaa

SEQ ID NO: 1517299 - DNA, 15 bp, Homo sapiens
tgaactgttaccaag

SEQ ID NO: 1517300 - DNA, 15 bp, Homo sapiens
gaactgttaccaaga

SEQ ID NO: 1517301 - DNA, 15 bp, Homo sapiens
aactgttaccaagat

SEQ ID NO: 1517302 - DNA, 15 bp, Homo sapiens
actgttaccaagatc

SEQ ID NO: 1517303 - DNA, 15 bp, Homo sapiens
ctgttaccaagatcc

SEQ ID NO: 1517304 - DNA, 15 bp, Homo sapiens
tgttaccaagatccc

SEQ ID NO: 1517305 - DNA, 15 bp, Homo sapiens
gttaccaagatccca

SEQ ID NO: 1517306 - DNA, 15 bp, Homo sapiens
ttaccaagatcccat

SEQ ID NO: 1517307 - DNA, 15 bp, Homo sapiens
taccaagatcccatc

SEQ ID NO: 1517308 - DNA, 15 bp, Homo sapiens
accaagatcccatct

SEQ ID NO: 1517309 - DNA, 15 bp, Homo sapiens
ccaagatcccatctc

SEQ ID NO: 1517310 - DNA, 15 bp, Homo sapiens
caagatcccatctct

SEQ ID NO: 1517311 - DNA, 15 bp, Homo sapiens
aagatcccatctctc

SEQ ID NO: 1517312 - DNA, 15 bp, Homo sapiens
agatcccatctctcc

SEQ ID NO: 1517313 - DNA, 15 bp, Homo sapiens
gatcccatctctccc

SEQ ID NO: 1517314 - DNA, 15 bp, Homo sapiens
atcccatctctcccg

SEQ ID NO: 1517315 - DNA, 15 bp, Homo sapiens
tcccatctctcccgt

SEQ ID NO: 1517316 - DNA, 15 bp, Homo sapiens
cccatctctcccgtt

SEQ ID NO: 1517317 - DNA, 15 bp, Homo sapiens
ccatctctcccgttt

SEQ ID NO: 1517318 - DNA, 15 bp, Homo sapiens
catctctcccgtttt

SEQ ID NO: 1517319 - DNA, 15 bp, Homo sapiens
atctctcccgttttg

SEQ ID NO: 1517320 - DNA, 15 bp, Homo sapiens
tctctcccgttttgt

SEQ ID NO: 1517321 - DNA, 15 bp, Homo sapiens
ctctcccgttttgtg

SEQ ID NO: 1517322 - DNA, 15 bp, Homo sapiens
tctcccgttttgtgc

SEQ ID NO: 1517323 - DNA, 15 bp, Homo sapiens
ctcccgttttgtgct

SEQ ID NO: 1517324 - DNA, 15 bp, Homo sapiens
tcccgttttgtgctg

SEQ ID NO: 1517325 - DNA, 15 bp, Homo sapiens
cccgttttgtgctga

SEQ ID NO: 1517326 - DNA, 15 bp, Homo sapiens
ccgttttgtgctgat

SEQ ID NO: 1517327 - DNA, 15 bp, Homo sapiens
cgttttgtgctgata

SEQ ID NO: 1517328 - DNA, 15 bp, Homo sapiens
gttttgtgctgatac

SEQ ID NO: 1517329 - DNA, 15 bp, Homo sapiens
ttttgtgctgatacc

SEQ ID NO: 1517330 - DNA, 15 bp, Homo sapiens
tttgtgctgatacca

SEQ ID NO: 1517331 - DNA, 15 bp, Homo sapiens
ttgtgctgataccat

SEQ ID NO: 1517332 - DNA, 15 bp, Homo sapiens
tgtgctgataccata

SEQ ID NO: 1517333 - DNA, 15 bp, Homo sapiens
gtgctgataccatag

SEQ ID NO: 1517334 - DNA, 15 bp, Homo sapiens
tgctgataccatagg

SEQ ID NO: 1517335 - DNA, 15 bp, Homo sapiens
gctgataccatagga

SEQ ID NO: 1517336 - DNA, 15 bp, Homo sapiens
ctgataccataggaa

SEQ ID NO: 1517337 - DNA, 15 bp, Homo sapiens
tgataccataggaaa

SEQ ID NO: 1517338 - DNA, 15 bp, Homo sapiens
gataccataggaaag

SEQ ID NO: 1517339 - DNA, 15 bp, Homo sapiens
ataccataggaaagg

SEQ ID NO: 1517340 - DNA, 15 bp, Homo sapiens
taccataggaaagga

SEQ ID NO: 1517341 - DNA, 15 bp, Homo sapiens
accataggaaaggat

SEQ ID NO: 1517342 - DNA, 15 bp, Homo sapiens
ccataggaaaggatc

SEQ ID NO: 1517343 - DNA, 15 bp, Homo sapiens
cataggaaaggatca

SEQ ID NO: 1517344 - DNA, 15 bp, Homo sapiens
ataggaaaggatcag

SEQ ID NO: 1517345 - DNA, 15 bp, Homo sapiens
taggaaaggatcagc

SEQ ID NO: 1517346 - DNA, 15 bp, Homo sapiens
aggaaaggatcagcc

SEQ ID NO: 1517347 - DNA, 15 bp, Homo sapiens
ggaaaggatcagcct

SEQ ID NO: 1517348 - DNA, 15 bp, Homo sapiens
gaaaggatcagcctt

SEQ ID NO: 1517349 - DNA, 15 bp, Homo sapiens
aaaggatcagccttc

SEQ ID NO: 1517350 - DNA, 15 bp, Homo sapiens
aaggatcagccttcc

SEQ ID NO: 1517351 - DNA, 15 bp, Homo sapiens
aggatcagccttcca

SEQ ID NO: 1517352 - DNA, 15 bp, Homo sapiens
ggatcagccttccac

SEQ ID NO: 1517353 - DNA, 15 bp, Homo sapiens
gatcagccttccact

SEQ ID NO: 1517354 - DNA, 15 bp, Homo sapiens
atcagccttccactt

SEQ ID NO: 1517355 - DNA, 15 bp, Homo sapiens
tcagccttccacttg

SEQ ID NO: 1517356 - DNA, 15 bp, Homo sapiens
cagccttccacttgt

SEQ ID NO: 1517357 - DNA, 15 bp, Homo sapiens
agccttccacttgtg

SEQ ID NO: 1517358 - DNA, 15 bp, Homo sapiens
gccttccacttgtgt

SEQ ID NO: 1517359 - DNA, 15 bp, Homo sapiens
ccttccacttgtgta

SEQ ID NO: 1517360 - DNA, 15 bp, Homo sapiens
cttccacttgtgtag

SEQ ID NO: 1517361 - DNA, 15 bp, Homo sapiens
ttccacttgtgtaga

SEQ ID NO: 1517362 - DNA, 15 bp, Homo sapiens
tccacttgtgtagaa

SEQ ID NO: 1517363 - DNA, 15 bp, Homo sapiens
ccacttgtgtagaaa

SEQ ID NO: 1517364 - DNA, 15 bp, Homo sapiens
cacttgtgtagaaag

SEQ ID NO: 1517365 - DNA, 15 bp, Homo sapiens
acttgtgtagaaaga

SEQ ID NO: 1517366 - DNA, 15 bp, Homo sapiens
cttgtgtagaaagaa

SEQ ID NO: 1517367 - DNA, 15 bp, Homo sapiens
ttgtgtagaaagaaa

SEQ ID NO: 1517368 - DNA, 15 bp, Homo sapiens
tgtgtagaaagaaag

SEQ ID NO: 1517369 - DNA, 15 bp, Homo sapiens
gtgtagaaagaaaga

SEQ ID NO: 1517370 - DNA, 15 bp, Homo sapiens
tgtagaaagaaagaa

SEQ ID NO: 1517371 - DNA, 15 bp, Homo sapiens
gtagaaagaaagaat

SEQ ID NO: 1517372 - DNA, 15 bp, Homo sapiens
tagaaagaaagaata

SEQ ID NO: 1517373 - DNA, 15 bp, Homo sapiens
agaaagaaagaatat

SEQ ID NO: 1517374 - DNA, 15 bp, Homo sapiens
gaaagaaagaatatt

SEQ ID NO: 1517375 - DNA, 15 bp, Homo sapiens
aaagaaagaatatta

SEQ ID NO: 1517376 - DNA, 15 bp, Homo sapiens
aagaaagaatattag

SEQ ID NO: 1517377 - DNA, 15 bp, Homo sapiens
agaaagaatattagg

SEQ ID NO: 1517378 - DNA, 15 bp, Homo sapiens
gaaagaatattaggc

SEQ ID NO: 1517379 - DNA, 15 bp, Homo sapiens
aaagaatattaggca

SEQ ID NO: 1517380 - DNA, 15 bp, Homo sapiens
aagaatattaggcag

SEQ ID NO: 1517381 - DNA, 15 bp, Homo sapiens
agaatattaggcagc

SEQ ID NO: 1517382 - DNA, 15 bp, Homo sapiens
gaatattaggcagcc

SEQ ID NO: 1517383 - DNA, 15 bp, Homo sapiens
aatattaggcagcct

SEQ ID NO: 1517384 - DNA, 15 bp, Homo sapiens
atattaggcagcctt

SEQ ID NO: 1517385 - DNA, 15 bp, Homo sapiens
tattaggcagccttc

SEQ ID NO: 1517386 - DNA, 15 bp, Homo sapiens
attaggcagccttcc

SEQ ID NO: 1517387 - DNA, 15 bp, Homo sapiens
ttaggcagccttcct

SEQ ID NO: 1517388 - DNA, 15 bp, Homo sapiens
taggcagccttcctt

SEQ ID NO: 1517389 - DNA, 15 bp, Homo sapiens
aggcagccttcctta

SEQ ID NO: 1517390 - DNA, 15 bp, Homo sapiens
ggcagccttccttat

SEQ ID NO: 1517391 - DNA, 15 bp, Homo sapiens
gcagccttccttatg

SEQ ID NO: 1517392 - DNA, 15 bp, Homo sapiens
cagccttccttatgg

SEQ ID NO: 1517393 - DNA, 15 bp, Homo sapiens
agccttccttatggt

SEQ ID NO: 1517394 - DNA, 15 bp, Homo sapiens
gccttccttatggtt

SEQ ID NO: 1517395 - DNA, 15 bp, Homo sapiens
ccttccttatggttc

SEQ ID NO: 1517396 - DNA, 15 bp, Homo sapiens
cttccttatggttca

SEQ ID NO: 1517397 - DNA, 15 bp, Homo sapiens
ttccttatggttcat

SEQ ID NO: 1517398 - DNA, 15 bp, Homo sapiens
tccttatggttcata

SEQ ID NO: 1517399 - DNA, 15 bp, Homo sapiens
ccttatggttcatac

SEQ ID NO: 1517400 - DNA, 15 bp, Homo sapiens
cttatggttcataca

SEQ ID NO: 1517401 - DNA, 15 bp, Homo sapiens
ttatggttcatacag

SEQ ID NO: 1517402 - DNA, 15 bp, Homo sapiens
tatggttcatacaga

SEQ ID NO: 1517403 - DNA, 15 bp, Homo sapiens
atggttcatacagat

SEQ ID NO: 1517404 - DNA, 15 bp, Homo sapiens
tggttcatacagata

SEQ ID NO: 1517405 - DNA, 15 bp, Homo sapiens
ggttcatacagatat

SEQ ID NO: 1517406 - DNA, 15 bp, Homo sapiens
gttcatacagatata

SEQ ID NO: 1517407 - DNA, 15 bp, Homo sapiens
ttcatacagatatat

SEQ ID NO: 1517408 - DNA, 15 bp, Homo sapiens
tcatacagatatatg

SEQ ID NO: 1517409 - DNA, 15 bp, Homo sapiens
catacagatatatga

SEQ ID NO: 1517410 - DNA, 15 bp, Homo sapiens
atacagatatatgaa

SEQ ID NO: 1517411 - DNA, 15 bp, Homo sapiens
tacagatatatgaat

SEQ ID NO: 1517412 - DNA, 15 bp, Homo sapiens
acagatatatgaata

SEQ ID NO: 1517413 - DNA, 15 bp, Homo sapiens
cagatatatgaataa

SEQ ID NO: 1517414 - DNA, 15 bp, Homo sapiens
agatatatgaataaa

SEQ ID NO: 1517415 - DNA, 15 bp, Homo sapiens
gatatatgaataaat

SEQ ID NO: 1517416 - DNA, 15 bp, Homo sapiens
atatatgaataaatg

SEQ ID NO: 1517417 - DNA, 15 bp, Homo sapiens
tatatgaataaatgc

SEQ ID NO: 1517418 - DNA, 15 bp, Homo sapiens
atatgaataaatgct

SEQ ID NO: 1517419 - DNA, 15 bp, Homo sapiens
tatgaataaatgctg

SEQ ID NO: 1517420 - DNA, 15 bp, Homo sapiens
atgaataaatgctga

SEQ ID NO: 1517421 - DNA, 15 bp, Homo sapiens
tgaataaatgctgat

SEQ ID NO: 1517422 - DNA, 15 bp, Homo sapiens
gaataaatgctgata

SEQ ID NO: 1517423 - DNA, 15 bp, Homo sapiens
aataaatgctgataa

SEQ ID NO: 1517424 - DNA, 15 bp, Homo sapiens
ataaatgctgataac

SEQ ID NO: 1517425 - DNA, 15 bp, Homo sapiens
taaatgctgataact

SEQ ID NO: 1517426 - DNA, 15 bp, Homo sapiens
aaatgctgataacta

SEQ ID NO: 1517427 - DNA, 15 bp, Homo sapiens
aatgctgataactaa

SEQ ID NO: 1517428 - DNA, 15 bp, Homo sapiens
atgctgataactaat

SEQ ID NO: 1517429 - DNA, 15 bp, Homo sapiens
tgctgataactaatt

SEQ ID NO: 1517430 - DNA, 15 bp, Homo sapiens
gctgataactaattc

SEQ ID NO: 1517431 - DNA, 15 bp, Homo sapiens
ctgataactaattca

SEQ ID NO: 1517432 - DNA, 15 bp, Homo sapiens
tgataactaattcag

SEQ ID NO: 1517433 - DNA, 15 bp, Homo sapiens
gataactaattcagc

SEQ ID NO: 1517434 - DNA, 15 bp, Homo sapiens
ataactaattcagca

SEQ ID NO: 1517435 - DNA, 15 bp, Homo sapiens
taactaattcagcat

SEQ ID NO: 1517436 - DNA, 15 bp, Homo sapiens
aactaattcagcatc

SEQ ID NO: 1517437 - DNA, 15 bp, Homo sapiens
actaattcagcatct

SEQ ID NO: 1517438 - DNA, 15 bp, Homo sapiens
ctaattcagcatctt

SEQ ID NO: 1517439 - DNA, 15 bp, Homo sapiens
taattcagcatcttg

SEQ ID NO: 1517440 - DNA, 15 bp, Homo sapiens
aattcagcatcttgg

SEQ ID NO: 1517441 - DNA, 15 bp, Homo sapiens
attcagcatcttggt

SEQ ID NO: 1517442 - DNA, 15 bp, Homo sapiens
ttcagcatcttggtg

SEQ ID NO: 1517443 - DNA, 15 bp, Homo sapiens
tcagcatcttggtgg

SEQ ID NO: 1517444 - DNA, 15 bp, Homo sapiens
cagcatcttggtggg

SEQ ID NO: 1517445 - DNA, 15 bp, Homo sapiens
agcatcttggtgggt

SEQ ID NO: 1517446 - DNA, 15 bp, Homo sapiens
gcatcttggtgggtc

SEQ ID NO: 1517447 - DNA, 15 bp, Homo sapiens
catcttggtgggtct

SEQ ID NO: 1517448 - DNA, 15 bp, Homo sapiens
atcttggtgggtcta

SEQ ID NO: 1517449 - DNA, 15 bp, Homo sapiens
tcttggtgggtctaa

SEQ ID NO: 1517450 - DNA, 15 bp, Homo sapiens
cttggtgggtctaaa

SEQ ID NO: 1517451 - DNA, 15 bp, Homo sapiens
ttggtgggtctaaac

SEQ ID NO: 1517452 - DNA, 15 bp, Homo sapiens
tggtgggtctaaaca

SEQ ID NO: 1517453 - DNA, 15 bp, Homo sapiens
ggtgggtctaaacag

SEQ ID NO: 1517454 - DNA, 15 bp, Homo sapiens
gtgggtctaaacagc

SEQ ID NO: 1517455 - DNA, 15 bp, Homo sapiens
tgggtctaaacagca

SEQ ID NO: 1517456 - DNA, 15 bp, Homo sapiens
gggtctaaacagcat

SEQ ID NO: 1517457 - DNA, 15 bp, Homo sapiens
ggtctaaacagcatc

SEQ ID NO: 1517458 - DNA, 15 bp, Homo sapiens
gtctaaacagcatcc

SEQ ID NO: 1517459 - DNA, 15 bp, Homo sapiens
tctaaacagcatccc

SEQ ID NO: 1517460 - DNA, 15 bp, Homo sapiens
ctaaacagcatccct

SEQ ID NO: 1517461 - DNA, 15 bp, Homo sapiens
taaacagcatccctt

SEQ ID NO: 1517462 - DNA, 15 bp, Homo sapiens
aaacagcatcccttc

SEQ ID NO: 1517463 - DNA, 15 bp, Homo sapiens
aacagcatcccttca

SEQ ID NO: 1517464 - DNA, 15 bp, Homo sapiens
acagcatcccttcat

SEQ ID NO: 1517465 - DNA, 15 bp, Homo sapiens
cagcatcccttcatt

SEQ ID NO: 1517466 - DNA, 15 bp, Homo sapiens
agcatcccttcatta

SEQ ID NO: 1517467 - DNA, 15 bp, Homo sapiens
gcatcccttcattaa

SEQ ID NO: 1517468 - DNA, 15 bp, Homo sapiens
catcccttcattaac

SEQ ID NO: 1517469 - DNA, 15 bp, Homo sapiens
atcccttcattaact

SEQ ID NO: 1517470 - DNA, 15 bp, Homo sapiens
tcccttcattaactc

SEQ ID NO: 1517471 - DNA, 15 bp, Homo sapiens
cccttcattaactca

SEQ ID NO: 1517472 - DNA, 15 bp, Homo sapiens
ccttcattaactcac

SEQ ID NO: 1517473 - DNA, 15 bp, Homo sapiens
cttcattaactcaca

SEQ ID NO: 1517474 - DNA, 15 bp, Homo sapiens
ttcattaactcacat

SEQ ID NO: 1517475 - DNA, 15 bp, Homo sapiens
tcattaactcacatt

SEQ ID NO: 1517476 - DNA, 15 bp, Homo sapiens
cattaactcacattg

SEQ ID NO: 1517477 - DNA, 15 bp, Homo sapiens
attaactcacattga

SEQ ID NO: 1517478 - DNA, 15 bp, Homo sapiens
ttaactcacattgac

SEQ ID NO: 1517479 - DNA, 15 bp, Homo sapiens
taactcacattgacc

SEQ ID NO: 1517480 - DNA, 15 bp, Homo sapiens
aactcacattgacct

SEQ ID NO: 1517481 - DNA, 15 bp, Homo sapiens
actcacattgacctg

SEQ ID NO: 1517482 - DNA, 15 bp, Homo sapiens
ctcacattgacctgt

SEQ ID NO: 1517483 - DNA, 15 bp, Homo sapiens
tcacattgacctgta

SEQ ID NO: 1517484 - DNA, 15 bp, Homo sapiens
cacattgacctgtag

SEQ ID NO: 1517485 - DNA, 15 bp, Homo sapiens
acattgacctgtaga

SEQ ID NO: 1517486 - DNA, 15 bp, Homo sapiens
cattgacctgtagat

SEQ ID NO: 1517487 - DNA, 15 bp, Homo sapiens
attgacctgtagatg

SEQ ID NO: 1517488 - DNA, 15 bp, Homo sapiens
ttgacctgtagatgc

SEQ ID NO: 1517489 - DNA, 15 bp, Homo sapiens
tgacctgtagatgca

SEQ ID NO: 1517490 - DNA, 15 bp, Homo sapiens
gacctgtagatgcag

SEQ ID NO: 1517491 - DNA, 15 bp, Homo sapiens
acctgtagatgcaga

SEQ ID NO: 1517492 - DNA, 15 bp, Homo sapiens
cctgtagatgcagaa

SEQ ID NO: 1517493 - DNA, 15 bp, Homo sapiens
ctgtagatgcagaat

SEQ ID NO: 1517494 - DNA, 15 bp, Homo sapiens
tgtagatgcagaatt

SEQ ID NO: 1517495 - DNA, 15 bp, Homo sapiens
gtagatgcagaatta

SEQ ID NO: 1517496 - DNA, 15 bp, Homo sapiens
tagatgcagaattat

SEQ ID NO: 1517497 - DNA, 15 bp, Homo sapiens
agatgcagaattata

SEQ ID NO: 1517498 - DNA, 15 bp, Homo sapiens
gatgcagaattataa

SEQ ID NO: 1517499 - DNA, 15 bp, Homo sapiens
atgcagaattataat

SEQ ID NO: 1517500 - DNA, 15 bp, Homo sapiens
tgcagaattataata

SEQ ID NO: 1517501 - DNA, 15 bp, Homo sapiens
gcagaattataataa

SEQ ID NO: 1517502 - DNA, 15 bp, Homo sapiens
cagaattataataac

SEQ ID NO: 1517503 - DNA, 15 bp, Homo sapiens
agaattataataact

SEQ ID NO: 1517504 - DNA, 15 bp, Homo sapiens
gaattataataactg

SEQ ID NO: 1517505 - DNA, 15 bp, Homo sapiens
aattataataactgt

SEQ ID NO: 1517506 - DNA, 15 bp, Homo sapiens
attataataactgtg

SEQ ID NO: 1517507 - DNA, 15 bp, Homo sapiens
ttataataactgtga

SEQ ID NO: 1517508 - DNA, 15 bp, Homo sapiens
tataataactgtgaa

SEQ ID NO: 1517509 - DNA, 15 bp, Homo sapiens
ataataactgtgaaa

SEQ ID NO: 1517510 - DNA, 15 bp, Homo sapiens
taataactgtgaaat

SEQ ID NO: 1517511 - DNA, 15 bp, Homo sapiens
aataactgtgaaata

SEQ ID NO: 1517512 - DNA, 15 bp, Homo sapiens
ataactgtgaaatat

SEQ ID NO: 1517513 - DNA, 15 bp, Homo sapiens
taactgtgaaatatt

SEQ ID NO: 1517514 - DNA, 15 bp, Homo sapiens
aactgtgaaatattt

SEQ ID NO: 1517515 - DNA, 15 bp, Homo sapiens
actgtgaaatatttt

SEQ ID NO: 1517516 - DNA, 15 bp, Homo sapiens
ctgtgaaatattttc

SEQ ID NO: 1517517 - DNA, 15 bp, Homo sapiens
tgtgaaatattttct

SEQ ID NO: 1517518 - DNA, 15 bp, Homo sapiens
gtgaaatattttctg

SEQ ID NO: 1517519 - DNA, 15 bp, Homo sapiens
tgaaatattttctgt

SEQ ID NO: 1517520 - DNA, 15 bp, Homo sapiens
gaaatattttctgtt

SEQ ID NO: 1517521 - DNA, 15 bp, Homo sapiens
aaatattttctgtta

SEQ ID NO: 1517522 - DNA, 15 bp, Homo sapiens
aatattttctgttac

SEQ ID NO: 1517523 - DNA, 15 bp, Homo sapiens
atattttctgttact

SEQ ID NO: 1517524 - DNA, 15 bp, Homo sapiens
tattttctgttactt

SEQ ID NO: 1517525 - DNA, 15 bp, Homo sapiens
attttctgttactta

SEQ ID NO: 1517526 - DNA, 15 bp, Homo sapiens
ttttctgttacttag

SEQ ID NO: 1517527 - DNA, 15 bp, Homo sapiens
tttctgttacttagc

SEQ ID NO: 1517528 - DNA, 15 bp, Homo sapiens
ttctgttacttagca

SEQ ID NO: 1517529 - DNA, 15 bp, Homo sapiens
tctgttacttagcag

SEQ ID NO: 1517530 - DNA, 15 bp, Homo sapiens
ctgttacttagcagc

SEQ ID NO: 1517531 - DNA, 15 bp, Homo sapiens
tgttacttagcagca

SEQ ID NO: 1517532 - DNA, 15 bp, Homo sapiens
gttacttagcagcag

SEQ ID NO: 1517533 - DNA, 15 bp, Homo sapiens
ttacttagcagcagg

SEQ ID NO: 1517534 - DNA, 15 bp, Homo sapiens
tacttagcagcaggc

SEQ ID NO: 1517535 - DNA, 15 bp, Homo sapiens
acttagcagcaggct

SEQ ID NO: 1517536 - DNA, 15 bp, Homo sapiens
cttagcagcaggcta

SEQ ID NO: 1517537 - DNA, 15 bp, Homo sapiens
ttagcagcaggctag

SEQ ID NO: 1517538 - DNA, 15 bp, Homo sapiens
tagcagcaggctaga

SEQ ID NO: 1517539 - DNA, 15 bp, Homo sapiens
agcagcaggctagat

SEQ ID NO: 1517540 - DNA, 15 bp, Homo sapiens
gcagcaggctagatt

SEQ ID NO: 1517541 - DNA, 15 bp, Homo sapiens
cagcaggctagatta

SEQ ID NO: 1517542 - DNA, 15 bp, Homo sapiens
agcaggctagattat

SEQ ID NO: 1517543 - DNA, 15 bp, Homo sapiens
gcaggctagattatt

SEQ ID NO: 1517544 - DNA, 15 bp, Homo sapiens
caggctagattatta

SEQ ID NO: 1517545 - DNA, 15 bp, Homo sapiens
aggctagattattag

SEQ ID NO: 1517546 - DNA, 15 bp, Homo sapiens
ggctagattattagc

SEQ ID NO: 1517547 - DNA, 15 bp, Homo sapiens
gctagattattagcc

SEQ ID NO: 1517548 - DNA, 15 bp, Homo sapiens
ctagattattagcca

SEQ ID NO: 1517549 - DNA, 15 bp, Homo sapiens
tagattattagccat

SEQ ID NO: 1517550 - DNA, 15 bp, Homo sapiens
agattattagccatt

SEQ ID NO: 1517551 - DNA, 15 bp, Homo sapiens
gattattagccattg

SEQ ID NO: 1517552 - DNA, 15 bp, Homo sapiens
attattagccattgt

SEQ ID NO: 1517553 - DNA, 15 bp, Homo sapiens
ttattagccattgtg

SEQ ID NO: 1517554 - DNA, 15 bp, Homo sapiens
tattagccattgtgt

SEQ ID NO: 1517555 - DNA, 15 bp, Homo sapiens
attagccattgtgta

SEQ ID NO: 1517556 - DNA, 15 bp, Homo sapiens
ttagccattgtgtaa

SEQ ID NO: 1517557 - DNA, 15 bp, Homo sapiens
tagccattgtgtaac

SEQ ID NO: 1517558 - DNA, 15 bp, Homo sapiens
agccattgtgtaact

SEQ ID NO: 1517559 - DNA, 15 bp, Homo sapiens
gccattgtgtaactg

SEQ ID NO: 1517560 - DNA, 15 bp, Homo sapiens
ccattgtgtaactgg

SEQ ID NO: 1517561 - DNA, 15 bp, Homo sapiens
cattgtgtaactgga

SEQ ID NO: 1517562 - DNA, 15 bp, Homo sapiens
attgtgtaactggaa

SEQ ID NO: 1517563 - DNA, 15 bp, Homo sapiens
ttgtgtaactggaat

SEQ ID NO: 1517564 - DNA, 15 bp, Homo sapiens
tgtgtaactggaatc

SEQ ID NO: 1517565 - DNA, 15 bp, Homo sapiens
gtgtaactggaatca

SEQ ID NO: 1517566 - DNA, 15 bp, Homo sapiens
tgtaactggaatcac

SEQ ID NO: 1517567 - DNA, 15 bp, Homo sapiens
gtaactggaatcact

SEQ ID NO: 1517568 - DNA, 15 bp, Homo sapiens
taactggaatcactg

SEQ ID NO: 1517569 - DNA, 15 bp, Homo sapiens
aactggaatcactgg

SEQ ID NO: 1517570 - DNA, 15 bp, Homo sapiens
actggaatcactggg

SEQ ID NO: 1517571 - DNA, 15 bp, Homo sapiens
ctggaatcactgggg

SEQ ID NO: 1517572 - DNA, 15 bp, Homo sapiens
tggaatcactggggt

SEQ ID NO: 1517573 - DNA, 15 bp, Homo sapiens
ggaatcactggggta

SEQ ID NO: 1517574 - DNA, 15 bp, Homo sapiens
gaatcactggggtat

SEQ ID NO: 1517575 - DNA, 15 bp, Homo sapiens
aatcactggggtatt

SEQ ID NO: 1517576 - DNA, 15 bp, Homo sapiens
atcactggggtattg

SEQ ID NO: 1517577 - DNA, 15 bp, Homo sapiens
tcactggggtattga

SEQ ID NO: 1517578 - DNA, 15 bp, Homo sapiens
cactggggtattgat

SEQ ID NO: 1517579 - DNA, 15 bp, Homo sapiens
actggggtattgatt

SEQ ID NO: 1517580 - DNA, 15 bp, Homo sapiens
ctggggtattgatta

SEQ ID NO: 1517581 - DNA, 15 bp, Homo sapiens
tggggtattgattac

SEQ ID NO: 1517582 - DNA, 15 bp, Homo sapiens
ggggtattgattaca

SEQ ID NO: 1517583 - DNA, 15 bp, Homo sapiens
gggtattgattacat

SEQ ID NO: 1517584 - DNA, 15 bp, Homo sapiens
ggtattgattacatt

SEQ ID NO: 1517585 - DNA, 15 bp, Homo sapiens
gtattgattacattt

SEQ ID NO: 1517586 - DNA, 15 bp, Homo sapiens
tattgattacatttc

SEQ ID NO: 1517587 - DNA, 15 bp, Homo sapiens
attgattacatttca

SEQ ID NO: 1517588 - DNA, 15 bp, Homo sapiens
ttgattacatttcag

SEQ ID NO: 1517589 - DNA, 15 bp, Homo sapiens
tgattacatttcaga

SEQ ID NO: 1517590 - DNA, 15 bp, Homo sapiens
gattacatttcagat

SEQ ID NO: 1517591 - DNA, 15 bp, Homo sapiens
attacatttcagatt

SEQ ID NO: 1517592 - DNA, 15 bp, Homo sapiens
ttacatttcagattc

SEQ ID NO: 1517593 - DNA, 15 bp, Homo sapiens
tacatttcagattct

SEQ ID NO: 1517594 - DNA, 15 bp, Homo sapiens
acatttcagattctg

SEQ ID NO: 1517595 - DNA, 15 bp, Homo sapiens
catttcagattctgt

SEQ ID NO: 1517596 - DNA, 15 bp, Homo sapiens
atttcagattctgtg

SEQ ID NO: 1517597 - DNA, 15 bp, Homo sapiens
tttcagattctgtgg

SEQ ID NO: 1517598 - DNA, 15 bp, Homo sapiens
ttcagattctgtggt

SEQ ID NO: 1517599 - DNA, 15 bp, Homo sapiens
tcagattctgtggtt

SEQ ID NO: 1517600 - DNA, 15 bp, Homo sapiens
cagattctgtggttg

SEQ ID NO: 1517601 - DNA, 15 bp, Homo sapiens
agattctgtggttgg

SEQ ID NO: 1517602 - DNA, 15 bp, Homo sapiens
gattctgtggttggt

SEQ ID NO: 1517603 - DNA, 15 bp, Homo sapiens
attctgtggttggtt

SEQ ID NO: 1517604 - DNA, 15 bp, Homo sapiens
ttctgtggttggttt

SEQ ID NO: 1517605 - DNA, 15 bp, Homo sapiens
tctgtggttggttta

SEQ ID NO: 1517606 - DNA, 15 bp, Homo sapiens
ctgtggttggtttaa

SEQ ID NO: 1517607 - DNA, 15 bp, Homo sapiens
tgtggttggtttaaa

SEQ ID NO: 1517608 - DNA, 15 bp, Homo sapiens
gtggttggtttaaat

SEQ ID NO: 1517609 - DNA, 15 bp, Homo sapiens
tggttggtttaaata

SEQ ID NO: 1517610 - DNA, 15 bp, Homo sapiens
ggttggtttaaatag

SEQ ID NO: 1517611 - DNA, 15 bp, Homo sapiens
gttggtttaaataga

SEQ ID NO: 1517612 - DNA, 15 bp, Homo sapiens
ttggtttaaatagag

SEQ ID NO: 1517613 - DNA, 15 bp, Homo sapiens
tggtttaaatagagg

SEQ ID NO: 1517614 - DNA, 15 bp, Homo sapiens
ggtttaaatagaggg

SEQ ID NO: 1517615 - DNA, 15 bp, Homo sapiens
gtttaaatagagggt

SEQ ID NO: 1517616 - DNA, 15 bp, Homo sapiens
tttaaatagagggtg

SEQ ID NO: 1517617 - DNA, 15 bp, Homo sapiens
ttaaatagagggtgt

SEQ ID NO: 1517618 - DNA, 15 bp, Homo sapiens
taaatagagggtgtg

SEQ ID NO: 1517619 - DNA, 15 bp, Homo sapiens
aaatagagggtgtgg

SEQ ID NO: 1517620 - DNA, 15 bp, Homo sapiens
aatagagggtgtggg

SEQ ID NO: 1517621 - DNA, 15 bp, Homo sapiens
atagagggtgtggga

SEQ ID NO: 1517622 - DNA, 15 bp, Homo sapiens
tagagggtgtgggaa

SEQ ID NO: 1517623 - DNA, 15 bp, Homo sapiens
agagggtgtgggaat

SEQ ID NO: 1517624 - DNA, 15 bp, Homo sapiens
gagggtgtgggaata

SEQ ID NO: 1517625 - DNA, 15 bp, Homo sapiens
agggtgtgggaataa

SEQ ID NO: 1517626 - DNA, 15 bp, Homo sapiens
gggtgtgggaataaa

SEQ ID NO: 1517627 - DNA, 15 bp, Homo sapiens
ggtgtgggaataaag

SEQ ID NO: 1517628 - DNA, 15 bp, Homo sapiens
gtgtgggaataaaga

SEQ ID NO: 1517629 - DNA, 15 bp, Homo sapiens
tgtgggaataaagaa

SEQ ID NO: 1517630 - DNA, 15 bp, Homo sapiens
gtgggaataaagaac

SEQ ID NO: 1517631 - DNA, 15 bp, Homo sapiens
tgggaataaagaact

SEQ ID NO: 1517632 - DNA, 15 bp, Homo sapiens
gggaataaagaactt

SEQ ID NO: 1517633 - DNA, 15 bp, Homo sapiens
ggaataaagaacttc

SEQ ID NO: 1517634 - DNA, 15 bp, Homo sapiens
gaataaagaacttcc

SEQ ID NO: 1517635 - DNA, 15 bp, Homo sapiens
aataaagaacttcca

SEQ ID NO: 1517636 - DNA, 15 bp, Homo sapiens
ataaagaacttccag

SEQ ID NO: 1517637 - DNA, 15 bp, Homo sapiens
taaagaacttccagt

SEQ ID NO: 1517638 - DNA, 15 bp, Homo sapiens
aaagaacttccagta

SEQ ID NO: 1517639 - DNA, 15 bp, Homo sapiens
aagaacttccagtaa

SEQ ID NO: 1517640 - DNA, 15 bp, Homo sapiens
agaacttccagtaag

SEQ ID NO: 1517641 - DNA, 15 bp, Homo sapiens
gaacttccagtaagc

SEQ ID NO: 1517642 - DNA, 15 bp, Homo sapiens
aacttccagtaagca

SEQ ID NO: 1517643 - DNA, 15 bp, Homo sapiens
acttccagtaagcat

SEQ ID NO: 1517644 - DNA, 15 bp, Homo sapiens
cttccagtaagcatt

SEQ ID NO: 1517645 - DNA, 15 bp, Homo sapiens
ttccagtaagcattt

SEQ ID NO: 1517646 - DNA, 15 bp, Homo sapiens
tccagtaagcatttc

SEQ ID NO: 1517647 - DNA, 15 bp, Homo sapiens
ccagtaagcatttca

SEQ ID NO: 1517648 - DNA, 15 bp, Homo sapiens
cagtaagcatttcag

SEQ ID NO: 1517649 - DNA, 15 bp, Homo sapiens
agtaagcatttcaga

SEQ ID NO: 1517650 - DNA, 15 bp, Homo sapiens
gtaagcatttcagaa

SEQ ID NO: 1517651 - DNA, 15 bp, Homo sapiens
taagcatttcagaat

SEQ ID NO: 1517652 - DNA, 15 bp, Homo sapiens
aagcatttcagaatc

SEQ ID NO: 1517653 - DNA, 15 bp, Homo sapiens
agcatttcagaatca

SEQ ID NO: 1517654 - DNA, 15 bp, Homo sapiens
gcatttcagaatcag

SEQ ID NO: 1517655 - DNA, 15 bp, Homo sapiens
catttcagaatcagt

SEQ ID NO: 1517656 - DNA, 15 bp, Homo sapiens
atttcagaatcagta

SEQ ID NO: 1517657 - DNA, 15 bp, Homo sapiens
tttcagaatcagtaa

SEQ ID NO: 1517658 - DNA, 15 bp, Homo sapiens
ttcagaatcagtaac

SEQ ID NO: 1517659 - DNA, 15 bp, Homo sapiens
tcagaatcagtaact

SEQ ID NO: 1517660 - DNA, 15 bp, Homo sapiens
cagaatcagtaactg

SEQ ID NO: 1517661 - DNA, 15 bp, Homo sapiens
agaatcagtaactgt

SEQ ID NO: 1517662 - DNA, 15 bp, Homo sapiens
gaatcagtaactgtt

SEQ ID NO: 1517663 - DNA, 15 bp, Homo sapiens
aatcagtaactgttg

SEQ ID NO: 1517664 - DNA, 15 bp, Homo sapiens
atcagtaactgttga

SEQ ID NO: 1517665 - DNA, 15 bp, Homo sapiens
tcagtaactgttgaa

SEQ ID NO: 1517666 - DNA, 15 bp, Homo sapiens
cagtaactgttgaac

SEQ ID NO: 1517667 - DNA, 15 bp, Homo sapiens
agtaactgttgaacc

SEQ ID NO: 1517668 - DNA, 15 bp, Homo sapiens
gtaactgttgaacct

SEQ ID NO: 1517669 - DNA, 15 bp, Homo sapiens
taactgttgaacctt

SEQ ID NO: 1517670 - DNA, 15 bp, Homo sapiens
aactgttgaaccttt

SEQ ID NO: 1517671 - DNA, 15 bp, Homo sapiens
actgttgaacctttt

SEQ ID NO: 1517672 - DNA, 15 bp, Homo sapiens
ctgttgaaccttttg

SEQ ID NO: 1517673 - DNA, 15 bp, Homo sapiens
tgttgaaccttttga

SEQ ID NO: 1517674 - DNA, 15 bp, Homo sapiens
gttgaaccttttgaa

SEQ ID NO: 1517675 - DNA, 15 bp, Homo sapiens
ttgaaccttttgaaa

SEQ ID NO: 1517676 - DNA, 15 bp, Homo sapiens
tgaaccttttgaaaa

SEQ ID NO: 1517677 - DNA, 15 bp, Homo sapiens
gaaccttttgaaaat

SEQ ID NO: 1517678 - DNA, 15 bp, Homo sapiens
aaccttttgaaaata

SEQ ID NO: 1517679 - DNA, 15 bp, Homo sapiens
accttttgaaaatat

SEQ ID NO: 1517680 - DNA, 15 bp, Homo sapiens
ccttttgaaaatatt

SEQ ID NO: 1517681 - DNA, 15 bp, Homo sapiens
cttttgaaaatattc

SEQ ID NO: 1517682 - DNA, 15 bp, Homo sapiens
ttttgaaaatattct

SEQ ID NO: 1517683 - DNA, 15 bp, Homo sapiens
tttgaaaatattctc

SEQ ID NO: 1517684 - DNA, 15 bp, Homo sapiens
ttgaaaatattctca

SEQ ID NO: 1517685 - DNA, 15 bp, Homo sapiens
tgaaaatattctcat

SEQ ID NO: 1517686 - DNA, 15 bp, Homo sapiens
gaaaatattctcata

SEQ ID NO: 1517687 - DNA, 15 bp, Homo sapiens
aaaatattctcatag

SEQ ID NO: 1517688 - DNA, 15 bp, Homo sapiens
aaatattctcatagg

SEQ ID NO: 1517689 - DNA, 15 bp, Homo sapiens
aatattctcatagga

SEQ ID NO: 1517690 - DNA, 15 bp, Homo sapiens
atattctcataggaa

SEQ ID NO: 1517691 - DNA, 15 bp, Homo sapiens
tattctcataggaaa

SEQ ID NO: 1517692 - DNA, 15 bp, Homo sapiens
attctcataggaaac

SEQ ID NO: 1517693 - DNA, 15 bp, Homo sapiens
ttctcataggaaacg

SEQ ID NO: 1517694 - DNA, 15 bp, Homo sapiens
tctcataggaaacga

SEQ ID NO: 1517695 - DNA, 15 bp, Homo sapiens
ctcataggaaacgac

SEQ ID NO: 1517696 - DNA, 15 bp, Homo sapiens
tcataggaaacgacg

SEQ ID NO: 1517697 - DNA, 15 bp, Homo sapiens
cataggaaacgacga

SEQ ID NO: 1517698 - DNA, 15 bp, Homo sapiens
ataggaaacgacgat

SEQ ID NO: 1517699 - DNA, 15 bp, Homo sapiens
taggaaacgacgatc

SEQ ID NO: 1517700 - DNA, 15 bp, Homo sapiens
aggaaacgacgatca

SEQ ID NO: 1517701 - DNA, 15 bp, Homo sapiens
ggaaacgacgatcac

SEQ ID NO: 1517702 - DNA, 15 bp, Homo sapiens
gaaacgacgatcact

SEQ ID NO: 1517703 - DNA, 15 bp, Homo sapiens
aaacgacgatcactc

SEQ ID NO: 1517704 - DNA, 15 bp, Homo sapiens
aacgacgatcactcc

SEQ ID NO: 1517705 - DNA, 15 bp, Homo sapiens
acgacgatcactccc

SEQ ID NO: 1517706 - DNA, 15 bp, Homo sapiens
cgacgatcactcccg

SEQ ID NO: 1517707 - DNA, 15 bp, Homo sapiens
gacgatcactcccga

SEQ ID NO: 1517708 - DNA, 15 bp, Homo sapiens
acgatcactcccgaa

SEQ ID NO: 1517709 - DNA, 15 bp, Homo sapiens
cgatcactcccgaac

SEQ ID NO: 1517710 - DNA, 15 bp, Homo sapiens
gatcactcccgaaca

SEQ ID NO: 1517711 - DNA, 15 bp, Homo sapiens
atcactcccgaacag

SEQ ID NO: 1517712 - DNA, 15 bp, Homo sapiens
tcactcccgaacaga

SEQ ID NO: 1517713 - DNA, 15 bp, Homo sapiens
cactcccgaacagat

SEQ ID NO: 1517714 - DNA, 15 bp, Homo sapiens
actcccgaacagata

SEQ ID NO: 1517715 - DNA, 15 bp, Homo sapiens
ctcccgaacagataa

SEQ ID NO: 1517716 - DNA, 15 bp, Homo sapiens
tcccgaacagataat

SEQ ID NO: 1517717 - DNA, 15 bp, Homo sapiens
cccgaacagataatc

SEQ ID NO: 1517718 - DNA, 15 bp, Homo sapiens
ccgaacagataatcg

SEQ ID NO: 1517719 - DNA, 15 bp, Homo sapiens
cgaacagataatcgt

SEQ ID NO: 1517720 - DNA, 15 bp, Homo sapiens
gaacagataatcgtc

SEQ ID NO: 1517721 - DNA, 15 bp, Homo sapiens
aacagataatcgtcc

SEQ ID NO: 1517722 - DNA, 15 bp, Homo sapiens
acagataatcgtcca

SEQ ID NO: 1517723 - DNA, 15 bp, Homo sapiens
cagataatcgtccac

SEQ ID NO: 1517724 - DNA, 15 bp, Homo sapiens
agataatcgtccacg

SEQ ID NO: 1517725 - DNA, 15 bp, Homo sapiens
gataatcgtccacgt

SEQ ID NO: 1517726 - DNA, 15 bp, Homo sapiens
ataatcgtccacgta

SEQ ID NO: 1517727 - DNA, 15 bp, Homo sapiens
taatcgtccacgtaa

SEQ ID NO: 1517728 - DNA, 15 bp, Homo sapiens
aatcgtccacgtaat

SEQ ID NO: 1517729 - DNA, 15 bp, Homo sapiens
atcgtccacgtaatc

SEQ ID NO: 1517730 - DNA, 15 bp, Homo sapiens
tcgtccacgtaatcc

SEQ ID NO: 1517731 - DNA, 15 bp, Homo sapiens
cgtccacgtaatcca

SEQ ID NO: 1517732 - DNA, 15 bp, Homo sapiens
gtccacgtaatccaa

SEQ ID NO: 1517733 - DNA, 15 bp, Homo sapiens
tccacgtaatccaag

SEQ ID NO: 1517734 - DNA, 15 bp, Homo sapiens
ccacgtaatccaaga

SEQ ID NO: 1517735 - DNA, 15 bp, Homo sapiens
cacgtaatccaagag

SEQ ID NO: 1517736 - DNA, 15 bp, Homo sapiens
acgtaatccaagaga

SEQ ID NO: 1517737 - DNA, 15 bp, Homo sapiens
cgtaatccaagagag

SEQ ID NO: 1517738 - DNA, 15 bp, Homo sapiens
gtaatccaagagagg

SEQ ID NO: 1517739 - DNA, 15 bp, Homo sapiens
taatccaagagaggc

SEQ ID NO: 1517740 - DNA, 15 bp, Homo sapiens
aatccaagagaggct

SEQ ID NO: 1517741 - DNA, 15 bp, Homo sapiens
atccaagagaggcta

SEQ ID NO: 1517742 - DNA, 15 bp, Homo sapiens
tccaagagaggctaa

SEQ ID NO: 1517743 - DNA, 15 bp, Homo sapiens
ccaagagaggctaaa

SEQ ID NO: 1517744 - DNA, 15 bp, Homo sapiens
caagagaggctaaag

SEQ ID NO: 1517745 - DNA, 15 bp, Homo sapiens
aagagaggctaaagg

SEQ ID NO: 1517746 - DNA, 15 bp, Homo sapiens
agagaggctaaagga

SEQ ID NO: 1517747 - DNA, 15 bp, Homo sapiens
gagaggctaaaggaa

SEQ ID NO: 1517748 - DNA, 15 bp, Homo sapiens
agaggctaaaggaag

SEQ ID NO: 1517749 - DNA, 15 bp, Homo sapiens
gaggctaaaggaaga

SEQ ID NO: 1517750 - DNA, 15 bp, Homo sapiens
aggctaaaggaagaa

SEQ ID NO: 1517751 - DNA, 15 bp, Homo sapiens
ggctaaaggaagaac

SEQ ID NO: 1517752 - DNA, 15 bp, Homo sapiens
gctaaaggaagaaca

SEQ ID NO: 1517753 - DNA, 15 bp, Homo sapiens
ctaaaggaagaacaa

SEQ ID NO: 1517754 - DNA, 15 bp, Homo sapiens
taaaggaagaacaac

SEQ ID NO: 1517755 - DNA, 15 bp, Homo sapiens
aaaggaagaacaaca

SEQ ID NO: 1517756 - DNA, 15 bp, Homo sapiens
aaggaagaacaacag

SEQ ID NO: 1517757 - DNA, 15 bp, Homo sapiens
aggaagaacaacaga

SEQ ID NO: 1517758 - DNA, 15 bp, Homo sapiens
ggaagaacaacagat

SEQ ID NO: 1517759 - DNA, 15 bp, Homo sapiens
gaagaacaacagatg

SEQ ID NO: 1517760 - DNA, 15 bp, Homo sapiens
aagaacaacagatgg

SEQ ID NO: 1517761 - DNA, 15 bp, Homo sapiens
agaacaacagatgga

SEQ ID NO: 1517762 - DNA, 15 bp, Homo sapiens
gaacaacagatggat

SEQ ID NO: 1517763 - DNA, 15 bp, Homo sapiens
aacaacagatggatc

SEQ ID NO: 1517764 - DNA, 15 bp, Homo sapiens
acaacagatggatcc

SEQ ID NO: 1517765 - DNA, 15 bp, Homo sapiens
caacagatggatccc

SEQ ID NO: 1517766 - DNA, 15 bp, Homo sapiens
aacagatggatccct

SEQ ID NO: 1517767 - DNA, 15 bp, Homo sapiens
acagatggatccctt

SEQ ID NO: 1517768 - DNA, 15 bp, Homo sapiens
cagatggatcccttc

SEQ ID NO: 1517769 - DNA, 15 bp, Homo sapiens
agatggatcccttca

SEQ ID NO: 1517770 - DNA, 15 bp, Homo sapiens
gatggatcccttcag

SEQ ID NO: 1517771 - DNA, 15 bp, Homo sapiens
atggatcccttcagg

SEQ ID NO: 1517772 - DNA, 15 bp, Homo sapiens
tggatcccttcaggt

SEQ ID NO: 1517773 - DNA, 15 bp, Homo sapiens
ggatcccttcaggta

SEQ ID NO: 1517774 - DNA, 15 bp, Homo sapiens
gatcccttcaggtaa

SEQ ID NO: 1517775 - DNA, 15 bp, Homo sapiens
atcccttcaggtaaa

SEQ ID NO: 1517776 - DNA, 15 bp, Homo sapiens
tcccttcaggtaaaa

SEQ ID NO: 1517777 - DNA, 15 bp, Homo sapiens
cccttcaggtaaaac

SEQ ID NO: 1517778 - DNA, 15 bp, Homo sapiens
ccttcaggtaaaacc

SEQ ID NO: 1517779 - DNA, 15 bp, Homo sapiens
cttcaggtaaaacct

SEQ ID NO: 1517780 - DNA, 15 bp, Homo sapiens
ttcaggtaaaacctg

SEQ ID NO: 1517781 - DNA, 15 bp, Homo sapiens
tcaggtaaaacctgt

SEQ ID NO: 1517782 - DNA, 15 bp, Homo sapiens
caggtaaaacctgtc

SEQ ID NO: 1517783 - DNA, 15 bp, Homo sapiens
aggtaaaacctgtct

SEQ ID NO: 1517784 - DNA, 15 bp, Homo sapiens
ggtaaaacctgtctg

SEQ ID NO: 1517785 - DNA, 15 bp, Homo sapiens
gtaaaacctgtctgc

SEQ ID NO: 1517786 - DNA, 15 bp, Homo sapiens
taaaacctgtctgcc

SEQ ID NO: 1517787 - DNA, 15 bp, Homo sapiens
aaaacctgtctgcct

SEQ ID NO: 1517788 - DNA, 15 bp, Homo sapiens
aaacctgtctgcctc

SEQ ID NO: 1517789 - DNA, 15 bp, Homo sapiens
aacctgtctgcctct

SEQ ID NO: 1517790 - DNA, 15 bp, Homo sapiens
acctgtctgcctctt

SEQ ID NO: 1517791 - DNA, 15 bp, Homo sapiens
cctgtctgcctcttt

SEQ ID NO: 1517792 - DNA, 15 bp, Homo sapiens
ctgtctgcctctttt

SEQ ID NO: 1517793 - DNA, 15 bp, Homo sapiens
tgtctgcctcttttc

SEQ ID NO: 1517794 - DNA, 15 bp, Homo sapiens
gtctgcctcttttca

SEQ ID NO: 1517795 - DNA, 15 bp, Homo sapiens
tctgcctcttttcat

SEQ ID NO: 1517796 - DNA, 15 bp, Homo sapiens
ctgcctcttttcatc

SEQ ID NO: 1517797 - DNA, 15 bp, Homo sapiens
tgcctcttttcatct

SEQ ID NO: 1517798 - DNA, 15 bp, Homo sapiens
gcctcttttcatctt

SEQ ID NO: 1517799 - DNA, 15 bp, Homo sapiens
cctcttttcatctta

SEQ ID NO: 1517800 - DNA, 15 bp, Homo sapiens
ctcttttcatcttaa

SEQ ID NO: 1517801 - DNA, 15 bp, Homo sapiens
tcttttcatcttaat

SEQ ID NO: 1517802 - DNA, 15 bp, Homo sapiens
cttttcatcttaatt

SEQ ID NO: 1517803 - DNA, 15 bp, Homo sapiens
ttttcatcttaattg

SEQ ID NO: 1517804 - DNA, 15 bp, Homo sapiens
tttcatcttaattgt

SEQ ID NO: 1517805 - DNA, 15 bp, Homo sapiens
ttcatcttaattgtt

SEQ ID NO: 1517806 - DNA, 15 bp, Homo sapiens
tcatcttaattgttt

SEQ ID NO: 1517807 - DNA, 15 bp, Homo sapiens
catcttaattgtttg

SEQ ID NO: 1517808 - DNA, 15 bp, Homo sapiens
atcttaattgtttga

SEQ ID NO: 1517809 - DNA, 15 bp, Homo sapiens
tcttaattgtttgaa

SEQ ID NO: 1517810 - DNA, 15 bp, Homo sapiens
cttaattgtttgaat

SEQ ID NO: 1517811 - DNA, 15 bp, Homo sapiens
ttaattgtttgaata

SEQ ID NO: 1517812 - DNA, 15 bp, Homo sapiens
taattgtttgaatat

SEQ ID NO: 1517813 - DNA, 15 bp, Homo sapiens
aattgtttgaatatg

SEQ ID NO: 1517814 - DNA, 15 bp, Homo sapiens
attgtttgaatatgg

SEQ ID NO: 1517815 - DNA, 15 bp, Homo sapiens
ttgtttgaatatggt

SEQ ID NO: 1517816 - DNA, 15 bp, Homo sapiens
tgtttgaatatggta

SEQ ID NO: 1517817 - DNA, 15 bp, Homo sapiens
gtttgaatatggtag

SEQ ID NO: 1517818 - DNA, 15 bp, Homo sapiens
tttgaatatggtagt

SEQ ID NO: 1517819 - DNA, 15 bp, Homo sapiens
ttgaatatggtagtt

SEQ ID NO: 1517820 - DNA, 15 bp, Homo sapiens
tgaatatggtagttt

SEQ ID NO: 1517821 - DNA, 15 bp, Homo sapiens
gaatatggtagtttg

SEQ ID NO: 1517822 - DNA, 15 bp, Homo sapiens
aatatggtagtttga

SEQ ID NO: 1517823 - DNA, 15 bp, Homo sapiens
atatggtagtttgag

SEQ ID NO: 1517824 - DNA, 15 bp, Homo sapiens
tatggtagtttgaga

SEQ ID NO: 1517825 - DNA, 15 bp, Homo sapiens
atggtagtttgagat

SEQ ID NO: 1517826 - DNA, 15 bp, Homo sapiens
tggtagtttgagatt

SEQ ID NO: 1517827 - DNA, 15 bp, Homo sapiens
ggtagtttgagattt

SEQ ID NO: 1517828 - DNA, 15 bp, Homo sapiens
gtagtttgagattta

SEQ ID NO: 1517829 - DNA, 15 bp, Homo sapiens
tagtttgagatttat

SEQ ID NO: 1517830 - DNA, 15 bp, Homo sapiens
agtttgagatttatg

SEQ ID NO: 1517831 - DNA, 15 bp, Homo sapiens
gtttgagatttatga

SEQ ID NO: 1517832 - DNA, 15 bp, Homo sapiens
tttgagatttatgag

SEQ ID NO: 1517833 - DNA, 15 bp, Homo sapiens
ttgagatttatgagt

SEQ ID NO: 1517834 - DNA, 15 bp, Homo sapiens
tgagatttatgagtt

SEQ ID NO: 1517835 - DNA, 15 bp, Homo sapiens
gagatttatgagttt

SEQ ID NO: 1517836 - DNA, 15 bp, Homo sapiens
agatttatgagttta

SEQ ID NO: 1517837 - DNA, 15 bp, Homo sapiens
gatttatgagtttat

SEQ ID NO: 1517838 - DNA, 15 bp, Homo sapiens
atttatgagtttatt

SEQ ID NO: 1517839 - DNA, 15 bp, Homo sapiens
tttatgagtttattt

SEQ ID NO: 1517840 - DNA, 15 bp, Homo sapiens
ttatgagtttatttt

SEQ ID NO: 1517841 - DNA, 15 bp, Homo sapiens
tatgagtttatttta

SEQ ID NO: 1517842 - DNA, 15 bp, Homo sapiens
atgagtttattttac

SEQ ID NO: 1517843 - DNA, 15 bp, Homo sapiens
tgagtttattttact

SEQ ID NO: 1517844 - DNA, 15 bp, Homo sapiens
gagtttattttactt

SEQ ID NO: 1517845 - DNA, 15 bp, Homo sapiens
agtttattttacttt

SEQ ID NO: 1517846 - DNA, 15 bp, Homo sapiens
gtttattttacttta

SEQ ID NO: 1517847 - DNA, 15 bp, Homo sapiens
tttattttactttat

SEQ ID NO: 1517848 - DNA, 15 bp, Homo sapiens
ttattttactttatt

SEQ ID NO: 1517849 - DNA, 15 bp, Homo sapiens
tattttactttatta

SEQ ID NO: 1517850 - DNA, 15 bp, Homo sapiens
attttactttattaa

SEQ ID NO: 1517851 - DNA, 15 bp, Homo sapiens
ttttactttattaaa

SEQ ID NO: 1517852 - DNA, 15 bp, Homo sapiens
tttactttattaaaa

SEQ ID NO: 1517853 - DNA, 15 bp, Homo sapiens
ttactttattaaaaa

SEQ ID NO: 1517854 - DNA, 15 bp, Homo sapiens
tactttattaaaaac

SEQ ID NO: 1517855 - DNA, 15 bp, Homo sapiens
actttattaaaaaca

SEQ ID NO: 1517856 - DNA, 15 bp, Homo sapiens
ctttattaaaaacat

SEQ ID NO: 1517857 - DNA, 15 bp, Homo sapiens
tttattaaaaacatg

SEQ ID NO: 1517858 - DNA, 15 bp, Homo sapiens
ttattaaaaacatgt

SEQ ID NO: 1517859 - DNA, 15 bp, Homo sapiens
tattaaaaacatgtt

SEQ ID NO: 1517860 - DNA, 15 bp, Homo sapiens
attaaaaacatgttc

SEQ ID NO: 1517861 - DNA, 15 bp, Homo sapiens
ttaaaaacatgttca

SEQ ID NO: 1517862 - DNA, 15 bp, Homo sapiens
taaaaacatgttcaa

SEQ ID NO: 1517863 - DNA, 15 bp, Homo sapiens
aaaaacatgttcaaa

SEQ ID NO: 1517864 - DNA, 15 bp, Homo sapiens
aaaacatgttcaaag

SEQ ID NO: 1517865 - DNA, 15 bp, Homo sapiens
aaacatgttcaaaga

SEQ ID NO: 1517866 - DNA, 15 bp, Homo sapiens
aacatgttcaaagat

SEQ ID NO: 1517867 - DNA, 15 bp, Homo sapiens
acatgttcaaagatt

SEQ ID NO: 1517868 - DNA, 15 bp, Homo sapiens
catgttcaaagatta

SEQ ID NO: 1517869 - DNA, 15 bp, Homo sapiens
atgttcaaagattac

SEQ ID NO: 1517870 - DNA, 15 bp, Homo sapiens
tgttcaaagattaca

SEQ ID NO: 1517871 - DNA, 15 bp, Homo sapiens
gttcaaagattacaa

SEQ ID NO: 1517872 - DNA, 15 bp, Homo sapiens
ttcaaagattacaaa

SEQ ID NO: 1517873 - DNA, 15 bp, Homo sapiens
tcaaagattacaaat

SEQ ID NO: 1517874 - DNA, 15 bp, Homo sapiens
caaagattacaaatc

SEQ ID NO: 1517875 - DNA, 15 bp, Homo sapiens
aaagattacaaatcc

SEQ ID NO: 1517876 - DNA, 15 bp, Homo sapiens
aagattacaaatcca

SEQ ID NO: 1517877 - DNA, 15 bp, Homo sapiens
agattacaaatccag

SEQ ID NO: 1517878 - DNA, 15 bp, Homo sapiens
gattacaaatccagt

SEQ ID NO: 1517879 - DNA, 15 bp, Homo sapiens
attacaaatccagtt

SEQ ID NO: 1517880 - DNA, 15 bp, Homo sapiens
ttacaaatccagttt

SEQ ID NO: 1517881 - DNA, 15 bp, Homo sapiens
tacaaatccagttta

SEQ ID NO: 1517882 - DNA, 15 bp, Homo sapiens
acaaatccagtttat

SEQ ID NO: 1517883 - DNA, 15 bp, Homo sapiens
caaatccagtttatg

SEQ ID NO: 1517884 - DNA, 15 bp, Homo sapiens
aaatccagtttatgt

SEQ ID NO: 1517885 - DNA, 15 bp, Homo sapiens
aatccagtttatgtg

SEQ ID NO: 1517886 - DNA, 15 bp, Homo sapiens
atccagtttatgtga

SEQ ID NO: 1517887 - DNA, 15 bp, Homo sapiens
tccagtttatgtgaa

SEQ ID NO: 1517888 - DNA, 15 bp, Homo sapiens
ccagtttatgtgaaa

SEQ ID NO: 1517889 - DNA, 15 bp, Homo sapiens
cagtttatgtgaaat

SEQ ID NO: 1517890 - DNA, 15 bp, Homo sapiens
agtttatgtgaaata

SEQ ID NO: 1517891 - DNA, 15 bp, Homo sapiens
gtttatgtgaaatat

SEQ ID NO: 1517892 - DNA, 15 bp, Homo sapiens
tttatgtgaaatatt

SEQ ID NO: 1517893 - DNA, 15 bp, Homo sapiens
ttatgtgaaatattt

SEQ ID NO: 1517894 - DNA, 15 bp, Homo sapiens
tatgtgaaatatttt

SEQ ID NO: 1517895 - DNA, 15 bp, Homo sapiens
atgtgaaatatttta

SEQ ID NO: 1517896 - DNA, 15 bp, Homo sapiens
tgtgaaatattttac

SEQ ID NO: 1517897 - DNA, 15 bp, Homo sapiens
gtgaaatattttacc

SEQ ID NO: 1517898 - DNA, 15 bp, Homo sapiens
tgaaatattttacct

SEQ ID NO: 1517899 - DNA, 15 bp, Homo sapiens
gaaatattttacctt

SEQ ID NO: 1517900 - DNA, 15 bp, Homo sapiens
aaatattttaccttc

SEQ ID NO: 1517901 - DNA, 15 bp, Homo sapiens
aatattttaccttca

SEQ ID NO: 1517902 - DNA, 15 bp, Homo sapiens
atattttaccttcaa

SEQ ID NO: 1517903 - DNA, 15 bp, Homo sapiens
tattttaccttcaac

SEQ ID NO: 1517904 - DNA, 15 bp, Homo sapiens
attttaccttcaaca

SEQ ID NO: 1517905 - DNA, 15 bp, Homo sapiens
ttttaccttcaacat

SEQ ID NO: 1517906 - DNA, 15 bp, Homo sapiens
tttaccttcaacatt

SEQ ID NO: 1517907 - DNA, 15 bp, Homo sapiens
ttaccttcaacatta

SEQ ID NO: 1517908 - DNA, 15 bp, Homo sapiens
taccttcaacattac

SEQ ID NO: 1517909 - DNA, 15 bp, Homo sapiens
accttcaacattaca

SEQ ID NO: 1517910 - DNA, 15 bp, Homo sapiens
ccttcaacattacaa

SEQ ID NO: 1517911 - DNA, 15 bp, Homo sapiens
cttcaacattacaat

SEQ ID NO: 1517912 - DNA, 15 bp, Homo sapiens
ttcaacattacaatt

SEQ ID NO: 1517913 - DNA, 15 bp, Homo sapiens
tcaacattacaattg

SEQ ID NO: 1517914 - DNA, 15 bp, Homo sapiens
caacattacaattgt

SEQ ID NO: 1517915 - DNA, 15 bp, Homo sapiens
aacattacaattgta

SEQ ID NO: 1517916 - DNA, 15 bp, Homo sapiens
acattacaattgtag

SEQ ID NO: 1517917 - DNA, 15 bp, Homo sapiens
cattacaattgtagt

SEQ ID NO: 1517918 - DNA, 15 bp, Homo sapiens
attacaattgtagtc

SEQ ID NO: 1517919 - DNA, 15 bp, Homo sapiens
ttacaattgtagtca

SEQ ID NO: 1517920 - DNA, 15 bp, Homo sapiens
tacaattgtagtcaa

SEQ ID NO: 1517921 - DNA, 15 bp, Homo sapiens
acaattgtagtcaat

SEQ ID NO: 1517922 - DNA, 15 bp, Homo sapiens
caattgtagtcaatc

SEQ ID NO: 1517923 - DNA, 15 bp, Homo sapiens
aattgtagtcaatct

SEQ ID NO: 1517924 - DNA, 15 bp, Homo sapiens
attgtagtcaatctt

SEQ ID NO: 1517925 - DNA, 15 bp, Homo sapiens
ttgtagtcaatctta

SEQ ID NO: 1517926 - DNA, 15 bp, Homo sapiens
tgtagtcaatcttag

SEQ ID NO: 1517927 - DNA, 15 bp, Homo sapiens
gtagtcaatcttagt

SEQ ID NO: 1517928 - DNA, 15 bp, Homo sapiens
tagtcaatcttagtt

SEQ ID NO: 1517929 - DNA, 15 bp, Homo sapiens
agtcaatcttagttc

SEQ ID NO: 1517930 - DNA, 15 bp, Homo sapiens
gtcaatcttagttct

SEQ ID NO: 1517931 - DNA, 15 bp, Homo sapiens
tcaatcttagttctt

SEQ ID NO: 1517932 - DNA, 15 bp, Homo sapiens
caatcttagttcttt

SEQ ID NO: 1517933 - DNA, 15 bp, Homo sapiens
aatcttagttctttg

SEQ ID NO: 1517934 - DNA, 15 bp, Homo sapiens
atcttagttctttgt

SEQ ID NO: 1517935 - DNA, 15 bp, Homo sapiens
tcttagttctttgtg

SEQ ID NO: 1517936 - DNA, 15 bp, Homo sapiens
cttagttctttgtga

SEQ ID NO: 1517937 - DNA, 15 bp, Homo sapiens
ttagttctttgtgac

SEQ ID NO: 1517938 - DNA, 15 bp, Homo sapiens
tagttctttgtgaca

SEQ ID NO: 1517939 - DNA, 15 bp, Homo sapiens
agttctttgtgacaa

SEQ ID NO: 1517940 - DNA, 15 bp, Homo sapiens
gttctttgtgacaag

SEQ ID NO: 1517941 - DNA, 15 bp, Homo sapiens
ttctttgtgacaagt

SEQ ID NO: 1517942 - DNA, 15 bp, Homo sapiens
tctttgtgacaagta

SEQ ID NO: 1517943 - DNA, 15 bp, Homo sapiens
ctttgtgacaagtat

SEQ ID NO: 1517944 - DNA, 15 bp, Homo sapiens
tttgtgacaagtata

SEQ ID NO: 1517945 - DNA, 15 bp, Homo sapiens
ttgtgacaagtatac

SEQ ID NO: 1517946 - DNA, 15 bp, Homo sapiens
tgtgacaagtataca

SEQ ID NO: 1517947 - DNA, 15 bp, Homo sapiens
gtgacaagtatacaa

SEQ ID NO: 1517948 - DNA, 15 bp, Homo sapiens
tgacaagtatacaaa

SEQ ID NO: 1517949 - DNA, 15 bp, Homo sapiens
gacaagtatacaaat

SEQ ID NO: 1517950 - DNA, 15 bp, Homo sapiens
acaagtatacaaata

SEQ ID NO: 1517951 - DNA, 15 bp, Homo sapiens
caagtatacaaataa

SEQ ID NO: 1517952 - DNA, 15 bp, Homo sapiens
aagtatacaaataag

SEQ ID NO: 1517953 - DNA, 15 bp, Homo sapiens
agtatacaaataaga

SEQ ID NO: 1517954 - DNA, 15 bp, Homo sapiens
gtatacaaataagag

SEQ ID NO: 1517955 - DNA, 15 bp, Homo sapiens
tatacaaataagagg

SEQ ID NO: 1517956 - DNA, 15 bp, Homo sapiens
atacaaataagagga

SEQ ID NO: 1517957 - DNA, 15 bp, Homo sapiens
tacaaataagaggat

SEQ ID NO: 1517958 - DNA, 15 bp, Homo sapiens
acaaataagaggatt

SEQ ID NO: 1517959 - DNA, 15 bp, Homo sapiens
caaataagaggattt

SEQ ID NO: 1517960 - DNA, 15 bp, Homo sapiens
aaataagaggatttc

SEQ ID NO: 1517961 - DNA, 15 bp, Homo sapiens
aataagaggatttct

SEQ ID NO: 1517962 - DNA, 15 bp, Homo sapiens
ataagaggatttctc

SEQ ID NO: 1517963 - DNA, 15 bp, Homo sapiens
taagaggatttctct

SEQ ID NO: 1517964 - DNA, 15 bp, Homo sapiens
aagaggatttctcta

SEQ ID NO: 1517965 - DNA, 15 bp, Homo sapiens
agaggatttctctag

SEQ ID NO: 1517966 - DNA, 15 bp, Homo sapiens
gaggatttctctaga

SEQ ID NO: 1517967 - DNA, 15 bp, Homo sapiens
aggatttctctagag

SEQ ID NO: 1517968 - DNA, 15 bp, Homo sapiens
ggatttctctagaga

SEQ ID NO: 1517969 - DNA, 15 bp, Homo sapiens
gatttctctagagaa

SEQ ID NO: 1517970 - DNA, 15 bp, Homo sapiens
atttctctagagaat

SEQ ID NO: 1517971 - DNA, 15 bp, Homo sapiens
tttctctagagaata

SEQ ID NO: 1517972 - DNA, 15 bp, Homo sapiens
ttctctagagaatat

SEQ ID NO: 1517973 - DNA, 15 bp, Homo sapiens
tctctagagaatatg

SEQ ID NO: 1517974 - DNA, 15 bp, Homo sapiens
ctctagagaatatgc

SEQ ID NO: 1517975 - DNA, 15 bp, Homo sapiens
tctagagaatatgca

SEQ ID NO: 1517976 - DNA, 15 bp, Homo sapiens
ctagagaatatgcag

SEQ ID NO: 1517977 - DNA, 15 bp, Homo sapiens
tagagaatatgcagt

SEQ ID NO: 1517978 - DNA, 15 bp, Homo sapiens
agagaatatgcagtc

SEQ ID NO: 1517979 - DNA, 15 bp, Homo sapiens
gagaatatgcagtct

SEQ ID NO: 1517980 - DNA, 15 bp, Homo sapiens
agaatatgcagtctg

SEQ ID NO: 1517981 - DNA, 15 bp, Homo sapiens
gaatatgcagtctga

SEQ ID NO: 1517982 - DNA, 15 bp, Homo sapiens
aatatgcagtctgag

SEQ ID NO: 1517983 - DNA, 15 bp, Homo sapiens
atatgcagtctgagt

SEQ ID NO: 1517984 - DNA, 15 bp, Homo sapiens
tatgcagtctgagta

SEQ ID NO: 1517985 - DNA, 15 bp, Homo sapiens
atgcagtctgagtat

SEQ ID NO: 1517986 - DNA, 15 bp, Homo sapiens
tgcagtctgagtatt

SEQ ID NO: 1517987 - DNA, 15 bp, Homo sapiens
gcagtctgagtattt

SEQ ID NO: 1517988 - DNA, 15 bp, Homo sapiens
cagtctgagtatttg

SEQ ID NO: 1517989 - DNA, 15 bp, Homo sapiens
agtctgagtatttgt

SEQ ID NO: 1517990 - DNA, 15 bp, Homo sapiens
gtctgagtatttgtg

SEQ ID NO: 1517991 - DNA, 15 bp, Homo sapiens
tctgagtatttgtga

SEQ ID NO: 1517992 - DNA, 15 bp, Homo sapiens
ctgagtatttgtgaa

SEQ ID NO: 1517993 - DNA, 15 bp, Homo sapiens
tgagtatttgtgaag

SEQ ID NO: 1517994 - DNA, 15 bp, Homo sapiens
gagtatttgtgaaga

SEQ ID NO: 1517995 - DNA, 15 bp, Homo sapiens
agtatttgtgaagac

SEQ ID NO: 1517996 - DNA, 15 bp, Homo sapiens
gtatttgtgaagacc

SEQ ID NO: 1517997 - DNA, 15 bp, Homo sapiens
tatttgtgaagacct

SEQ ID NO: 1517998 - DNA, 15 bp, Homo sapiens
atttgtgaagacctt

SEQ ID NO: 1517999 - DNA, 15 bp, Homo sapiens
tttgtgaagaccttg

SEQ ID NO: 1518000 - DNA, 15 bp, Homo sapiens
ttgtgaagaccttga

SEQ ID NO: 1518001 - DNA, 15 bp, Homo sapiens
tgtgaagaccttgac

SEQ ID NO: 1518002 - DNA, 15 bp, Homo sapiens
gtgaagaccttgaca

SEQ ID NO: 1518003 - DNA, 15 bp, Homo sapiens
tgaagaccttgacag

SEQ ID NO: 1518004 - DNA, 15 bp, Homo sapiens
gaagaccttgacagc

SEQ ID NO: 1518005 - DNA, 15 bp, Homo sapiens
aagaccttgacagcc

SEQ ID NO: 1518006 - DNA, 15 bp, Homo sapiens
agaccttgacagcca

SEQ ID NO: 1518007 - DNA, 15 bp, Homo sapiens
gaccttgacagccac

SEQ ID NO: 1518008 - DNA, 15 bp, Homo sapiens
accttgacagccaca

SEQ ID NO: 1518009 - DNA, 15 bp, Homo sapiens
ccttgacagccacac

SEQ ID NO: 1518010 - DNA, 15 bp, Homo sapiens
cttgacagccacact

SEQ ID NO: 1518011 - DNA, 15 bp, Homo sapiens
ttgacagccacacta

SEQ ID NO: 1518012 - DNA, 15 bp, Homo sapiens
tgacagccacactat

SEQ ID NO: 1518013 - DNA, 15 bp, Homo sapiens
gacagccacactatg

SEQ ID NO: 1518014 - DNA, 15 bp, Homo sapiens
acagccacactatga

SEQ ID NO: 1518015 - DNA, 15 bp, Homo sapiens
cagccacactatgat

SEQ ID NO: 1518016 - DNA, 15 bp, Homo sapiens
agccacactatgatt

SEQ ID NO: 1518017 - DNA, 15 bp, Homo sapiens
gccacactatgattt

SEQ ID NO: 1518018 - DNA, 15 bp, Homo sapiens
ccacactatgatttt

SEQ ID NO: 1518019 - DNA, 15 bp, Homo sapiens
cacactatgatttta

SEQ ID NO: 1518020 - DNA, 15 bp, Homo sapiens
acactatgattttat

SEQ ID NO: 1518021 - DNA, 15 bp, Homo sapiens
cactatgattttatt

SEQ ID NO: 1518022 - DNA, 15 bp, Homo sapiens
actatgattttatta

SEQ ID NO: 1518023 - DNA, 15 bp, Homo sapiens
ctatgattttattat

SEQ ID NO: 1518024 - DNA, 15 bp, Homo sapiens
tatgattttattatt

SEQ ID NO: 1518025 - DNA, 15 bp, Homo sapiens
atgattttattattt

SEQ ID NO: 1518026 - DNA, 15 bp, Homo sapiens
tgattttattattta

SEQ ID NO: 1518027 - DNA, 15 bp, Homo sapiens
gattttattatttat

SEQ ID NO: 1518028 - DNA, 15 bp, Homo sapiens
attttattatttatt

SEQ ID NO: 1518029 - DNA, 15 bp, Homo sapiens
ttttattatttatta

SEQ ID NO: 1518030 - DNA, 15 bp, Homo sapiens
tttattatttattat

SEQ ID NO: 1518031 - DNA, 15 bp, Homo sapiens
ttattatttattatt

SEQ ID NO: 1518032 - DNA, 15 bp, Homo sapiens
tattatttattattt

SEQ ID NO: 1518033 - DNA, 15 bp, Homo sapiens
tttattatttatttt

SEQ ID NO: 1518034 - DNA, 15 bp, Homo sapiens
ttattatttattttt

SEQ ID NO: 1518035 - DNA, 15 bp, Homo sapiens
tattatttattttta

SEQ ID NO: 1518036 - DNA, 15 bp, Homo sapiens
attatttatttttat

SEQ ID NO: 1518037 - DNA, 15 bp, Homo sapiens
tatttttttgagacg

SEQ ID NO: 1518038 - DNA, 15 bp, Homo sapiens
atttttttgagacgg

SEQ ID NO: 1518039 - DNA, 15 bp, Homo sapiens
ttttttgagacggga

SEQ ID NO: 1518040 - DNA, 15 bp, Homo sapiens
tttttgagacgggag

SEQ ID NO: 1518041 - DNA, 15 bp, Homo sapiens
ttttgagacgggagt

SEQ ID NO: 1518042 - DNA, 15 bp, Homo sapiens
tttgagacgggagtt

SEQ ID NO: 1518043 - DNA, 15 bp, Homo sapiens
ttgagacgggagttt

SEQ ID NO: 1518044 - DNA, 15 bp, Homo sapiens
tgagacgggagtttc

SEQ ID NO: 1518045 - DNA, 15 bp, Homo sapiens
gagacgggagtttcg

SEQ ID NO: 1518046 - DNA, 15 bp, Homo sapiens
agacgggagtttcgc

SEQ ID NO: 1518047 - DNA, 15 bp, Homo sapiens
gacgggagtttcgct

SEQ ID NO: 1518048 - DNA, 15 bp, Homo sapiens
acgggagtttcgctt

SEQ ID NO: 1518049 - DNA, 15 bp, Homo sapiens
cgggagtttcgcttt

SEQ ID NO: 1518050 - DNA, 15 bp, Homo sapiens
gggagtttcgctttt

SEQ ID NO: 1518051 - DNA, 15 bp, Homo sapiens
ggagtttcgcttttg

SEQ ID NO: 1518052 - DNA, 15 bp, Homo sapiens
gagtttcgcttttgt

SEQ ID NO: 1518053 - DNA, 15 bp, Homo sapiens
agtttcgcttttgtt

SEQ ID NO: 1518054 - DNA, 15 bp, Homo sapiens
gtttcgcttttgttg

SEQ ID NO: 1518055 - DNA, 15 bp, Homo sapiens
tttcgcttttgttgc

SEQ ID NO: 1518056 - DNA, 15 bp, Homo sapiens
ttcgcttttgttgcc

SEQ ID NO: 1518057 - DNA, 15 bp, Homo sapiens
tcgcttttgttgccc

SEQ ID NO: 1518058 - DNA, 15 bp, Homo sapiens
cgcttttgttgccca

SEQ ID NO: 1518059 - DNA, 15 bp, Homo sapiens
gcttttgttgcccag

SEQ ID NO: 1518060 - DNA, 15 bp, Homo sapiens
cttttgttgcccagg

SEQ ID NO: 1518061 - DNA, 15 bp, Homo sapiens
aatggcgcaatctcg

SEQ ID NO: 1518062 - DNA, 15 bp, Homo sapiens
atggcgcaatctcgg

SEQ ID NO: 1518063 - DNA, 15 bp, Homo sapiens
tggcgcaatctcggc

SEQ ID NO: 1518064 - DNA, 15 bp, Homo sapiens
ggcgcaatctcggct

SEQ ID NO: 1518065 - DNA, 15 bp, Homo sapiens
gcgcaatctcggctc

SEQ ID NO: 1518066 - DNA, 15 bp, Homo sapiens
cgcaatctcggctca

SEQ ID NO: 1518067 - DNA, 15 bp, Homo sapiens
gcaatctcggctcag

SEQ ID NO: 1518068 - DNA, 15 bp, Homo sapiens
caatctcggctcaga

SEQ ID NO: 1518069 - DNA, 15 bp, Homo sapiens
aatctcggctcagag

SEQ ID NO: 1518070 - DNA, 15 bp, Homo sapiens
atctcggctcagagc

SEQ ID NO: 1518071 - DNA, 15 bp, Homo sapiens
tctcggctcagagca

SEQ ID NO: 1518072 - DNA, 15 bp, Homo sapiens
ctcggctcagagcaa

SEQ ID NO: 1518073 - DNA, 15 bp, Homo sapiens
tcggctcagagcaac

SEQ ID NO: 1518074 - DNA, 15 bp, Homo sapiens
cggctcagagcaacc

SEQ ID NO: 1518075 - DNA, 15 bp, Homo sapiens
ggctcagagcaacct

SEQ ID NO: 1518076 - DNA, 15 bp, Homo sapiens
gctcagagcaacctc

SEQ ID NO: 1518077 - DNA, 15 bp, Homo sapiens
ctcagagcaacctct

SEQ ID NO: 1518078 - DNA, 15 bp, Homo sapiens
tcagagcaacctctg

SEQ ID NO: 1518079 - DNA, 15 bp, Homo sapiens
cagagcaacctctgc

SEQ ID NO: 1518080 - DNA, 15 bp, Homo sapiens
agagcaacctctgcc

SEQ ID NO: 1518081 - DNA, 15 bp, Homo sapiens
gagcaacctctgcct

SEQ ID NO: 1518082 - DNA, 15 bp, Homo sapiens
ggaattacaggcatc

SEQ ID NO: 1518083 - DNA, 15 bp, Homo sapiens
gaattacaggcatcc

SEQ ID NO: 1518084 - DNA, 15 bp, Homo sapiens
aattacaggcatcca

SEQ ID NO: 1518085 - DNA, 15 bp, Homo sapiens
attacaggcatccac

SEQ ID NO: 1518086 - DNA, 15 bp, Homo sapiens
ttacaggcatccact

SEQ ID NO: 1518087 - DNA, 15 bp, Homo sapiens
tacaggcatccacta

SEQ ID NO: 1518088 - DNA, 15 bp, Homo sapiens
acaggcatccactac

SEQ ID NO: 1518089 - DNA, 15 bp, Homo sapiens
caggcatccactacc

SEQ ID NO: 1518090 - DNA, 15 bp, Homo sapiens
aggcatccactacca

SEQ ID NO: 1518091 - DNA, 15 bp, Homo sapiens
ggcatccactaccat

SEQ ID NO: 1518092 - DNA, 15 bp, Homo sapiens
gcatccactaccatg

SEQ ID NO: 1518093 - DNA, 15 bp, Homo sapiens
catccactaccatgc

SEQ ID NO: 1518094 - DNA, 15 bp, Homo sapiens
atccactaccatgcc

SEQ ID NO: 1518095 - DNA, 15 bp, Homo sapiens
tccactaccatgccc

SEQ ID NO: 1518096 - DNA, 15 bp, Homo sapiens
ccactaccatgccca

SEQ ID NO: 1518097 - DNA, 15 bp, Homo sapiens
cactaccatgcccag

SEQ ID NO: 1518098 - DNA, 15 bp, Homo sapiens
actaccatgcccagc

SEQ ID NO: 1518099 - DNA, 15 bp, Homo sapiens
tggtcttgaactccc

SEQ ID NO: 1518100 - DNA, 15 bp, Homo sapiens
ggtcttgaactccca

SEQ ID NO: 1518101 - DNA, 15 bp, Homo sapiens
gtcttgaactcccaa

SEQ ID NO: 1518102 - DNA, 15 bp, Homo sapiens
tcttgaactcccaac

SEQ ID NO: 1518103 - DNA, 15 bp, Homo sapiens
cttgaactcccaacc

SEQ ID NO: 1518104 - DNA, 15 bp, Homo sapiens
ttgaactcccaacct

SEQ ID NO: 1518105 - DNA, 15 bp, Homo sapiens
tgaactcccaacctc

SEQ ID NO: 1518106 - DNA, 15 bp, Homo sapiens
gaactcccaacctca

SEQ ID NO: 1518107 - DNA, 15 bp, Homo sapiens
aactcccaacctcag

SEQ ID NO: 1518108 - DNA, 15 bp, Homo sapiens
actcccaacctcagg

SEQ ID NO: 1518109 - DNA, 15 bp, Homo sapiens
ctcccaacctcaggt

SEQ ID NO: 1518110 - DNA, 15 bp, Homo sapiens
tcccaacctcaggtg

SEQ ID NO: 1518111 - DNA, 15 bp, Homo sapiens
cccaacctcaggtga

SEQ ID NO: 1518112 - DNA, 15 bp, Homo sapiens
ccaacctcaggtgat

SEQ ID NO: 1518113 - DNA, 15 bp, Homo sapiens
caacctcaggtgatc

SEQ ID NO: 1518114 - DNA, 15 bp, Homo sapiens
tggcctcccagtgtg

SEQ ID NO: 1518115 - DNA, 15 bp, Homo sapiens
ggcctcccagtgtgc

SEQ ID NO: 1518116 - DNA, 15 bp, Homo sapiens
gcctcccagtgtgct

SEQ ID NO: 1518117 - DNA, 15 bp, Homo sapiens
cctcccagtgtgctg

SEQ ID NO: 1518118 - DNA, 15 bp, Homo sapiens
ctcccagtgtgctgg

SEQ ID NO: 1518119 - DNA, 15 bp, Homo sapiens
tcccagtgtgctggg

SEQ ID NO: 1518120 - DNA, 15 bp, Homo sapiens
cccagtgtgctggga

SEQ ID NO: 1518121 - DNA, 15 bp, Homo sapiens
ccagtgtgctgggat

SEQ ID NO: 1518122 - DNA, 15 bp, Homo sapiens
cagtgtgctgggatt

SEQ ID NO: 1518123 - DNA, 15 bp, Homo sapiens
agtgtgctgggatta

SEQ ID NO: 1518124 - DNA, 15 bp, Homo sapiens
gtgtgctgggattac

SEQ ID NO: 1518125 - DNA, 15 bp, Homo sapiens
tgtgctgggattaca

SEQ ID NO: 1518126 - DNA, 15 bp, Homo sapiens
ttacaggcgtgagca

SEQ ID NO: 1518127 - DNA, 15 bp, Homo sapiens
acaggcgtgagcact

SEQ ID NO: 1518128 - DNA, 15 bp, Homo sapiens
caggcgtgagcactg

SEQ ID NO: 1518129 - DNA, 15 bp, Homo sapiens
aggcgtgagcactgt

SEQ ID NO: 1518130 - DNA, 15 bp, Homo sapiens
ggcgtgagcactgtg

SEQ ID NO: 1518131 - DNA, 15 bp, Homo sapiens
gcgtgagcactgtgc

SEQ ID NO: 1518132 - DNA, 15 bp, Homo sapiens
cgtgagcactgtgcc

SEQ ID NO: 1518133 - DNA, 15 bp, Homo sapiens
gtgagcactgtgccc

SEQ ID NO: 1518134 - DNA, 15 bp, Homo sapiens
tgagcactgtgccca

SEQ ID NO: 1518135 - DNA, 15 bp, Homo sapiens
gagcactgtgcccag

SEQ ID NO: 1518136 - DNA, 15 bp, Homo sapiens
agcactgtgcccagc

SEQ ID NO: 1518137 - DNA, 15 bp, Homo sapiens
gcactgtgcccagcc

SEQ ID NO: 1518138 - DNA, 15 bp, Homo sapiens
cactgtgcccagcca

SEQ ID NO: 1518139 - DNA, 15 bp, Homo sapiens
actgtgcccagccac

SEQ ID NO: 1518140 - DNA, 15 bp, Homo sapiens
ctgtgcccagccaca

SEQ ID NO: 1518141 - DNA, 15 bp, Homo sapiens
tgtgcccagccacac

SEQ ID NO: 1518142 - DNA, 15 bp, Homo sapiens
gtgcccagccacact

SEQ ID NO: 1518143 - DNA, 15 bp, Homo sapiens
tgcccagccacacta

SEQ ID NO: 1518144 - DNA, 15 bp, Homo sapiens
gcccagccacactat

SEQ ID NO: 1518145 - DNA, 15 bp, Homo sapiens
cccagccacactatg

SEQ ID NO: 1518146 - DNA, 15 bp, Homo sapiens
ccagccacactatga

SEQ ID NO: 1518147 - DNA, 15 bp, Homo sapiens
acactatgattttaa

SEQ ID NO: 1518148 - DNA, 15 bp, Homo sapiens
cactatgattttaat

SEQ ID NO: 1518149 - DNA, 15 bp, Homo sapiens
actatgattttaata

SEQ ID NO: 1518150 - DNA, 15 bp, Homo sapiens
ctatgattttaatac

SEQ ID NO: 1518151 - DNA, 15 bp, Homo sapiens
tatgattttaatacc

SEQ ID NO: 1518152 - DNA, 15 bp, Homo sapiens
atgattttaatacca

SEQ ID NO: 1518153 - DNA, 15 bp, Homo sapiens
tgattttaataccac

SEQ ID NO: 1518154 - DNA, 15 bp, Homo sapiens
gattttaataccaca

SEQ ID NO: 1518155 - DNA, 15 bp, Homo sapiens
attttaataccacat

SEQ ID NO: 1518156 - DNA, 15 bp, Homo sapiens
ttttaataccacatt

SEQ ID NO: 1518157 - DNA, 15 bp, Homo sapiens
tttaataccacattg

SEQ ID NO: 1518158 - DNA, 15 bp, Homo sapiens
ttaataccacattgg

SEQ ID NO: 1518159 - DNA, 15 bp, Homo sapiens
taataccacattggt

SEQ ID NO: 1518160 - DNA, 15 bp, Homo sapiens
aataccacattggta

SEQ ID NO: 1518161 - DNA, 15 bp, Homo sapiens
ataccacattggtag

SEQ ID NO: 1518162 - DNA, 15 bp, Homo sapiens
taccacattggtaga

SEQ ID NO: 1518163 - DNA, 15 bp, Homo sapiens
accacattggtagac

SEQ ID NO: 1518164 - DNA, 15 bp, Homo sapiens
ccacattggtagacc

SEQ ID NO: 1518165 - DNA, 15 bp, Homo sapiens
cacattggtagacct

SEQ ID NO: 1518166 - DNA, 15 bp, Homo sapiens
acattggtagacctg

SEQ ID NO: 1518167 - DNA, 15 bp, Homo sapiens
cattggtagacctgc

SEQ ID NO: 1518168 - DNA, 15 bp, Homo sapiens
attggtagacctgca

SEQ ID NO: 1518169 - DNA, 15 bp, Homo sapiens
ttggtagacctgcaa

SEQ ID NO: 1518170 - DNA, 15 bp, Homo sapiens
tggtagacctgcaat

SEQ ID NO: 1518171 - DNA, 15 bp, Homo sapiens
ggtagacctgcaatc

SEQ ID NO: 1518172 - DNA, 15 bp, Homo sapiens
gtagacctgcaatcc

SEQ ID NO: 1518173 - DNA, 15 bp, Homo sapiens
tagacctgcaatccc

SEQ ID NO: 1518174 - DNA, 15 bp, Homo sapiens
agacctgcaatcccc

SEQ ID NO: 1518175 - DNA, 15 bp, Homo sapiens
gacctgcaatccccc

SEQ ID NO: 1518176 - DNA, 15 bp, Homo sapiens
acctgcaatccccca

SEQ ID NO: 1518177 - DNA, 15 bp, Homo sapiens
cctgcaatcccccag

SEQ ID NO: 1518178 - DNA, 15 bp, Homo sapiens
ctgcaatcccccaga

SEQ ID NO: 1518179 - DNA, 15 bp, Homo sapiens
tgcaatcccccagag

SEQ ID NO: 1518180 - DNA, 15 bp, Homo sapiens
gcaatcccccagaga

SEQ ID NO: 1518181 - DNA, 15 bp, Homo sapiens
caatcccccagagaa

SEQ ID NO: 1518182 - DNA, 15 bp, Homo sapiens
aatcccccagagaag

SEQ ID NO: 1518183 - DNA, 15 bp, Homo sapiens
atcccccagagaagg

SEQ ID NO: 1518184 - DNA, 15 bp, Homo sapiens
tcccccagagaagga

SEQ ID NO: 1518185 - DNA, 15 bp, Homo sapiens
cccccagagaaggaa

SEQ ID NO: 1518186 - DNA, 15 bp, Homo sapiens
ccccagagaaggaac

SEQ ID NO: 1518187 - DNA, 15 bp, Homo sapiens
cccagagaaggaaca

SEQ ID NO: 1518188 - DNA, 15 bp, Homo sapiens
ccagagaaggaacat

SEQ ID NO: 1518189 - DNA, 15 bp, Homo sapiens
cagagaaggaacatc

SEQ ID NO: 1518190 - DNA, 15 bp, Homo sapiens
agagaaggaacatcc

SEQ ID NO: 1518191 - DNA, 15 bp, Homo sapiens
gagaaggaacatcct

SEQ ID NO: 1518192 - DNA, 15 bp, Homo sapiens
agaaggaacatcctg

SEQ ID NO: 1518193 - DNA, 15 bp, Homo sapiens
gaaggaacatcctgg

SEQ ID NO: 1518194 - DNA, 15 bp, Homo sapiens
aaggaacatcctggg

SEQ ID NO: 1518195 - DNA, 15 bp, Homo sapiens
aggaacatcctggga

SEQ ID NO: 1518196 - DNA, 15 bp, Homo sapiens
ggaacatcctgggat

SEQ ID NO: 1518197 - DNA, 15 bp, Homo sapiens
gaacatcctgggatg

SEQ ID NO: 1518198 - DNA, 15 bp, Homo sapiens
aacatcctgggatgt

SEQ ID NO: 1518199 - DNA, 15 bp, Homo sapiens
acatcctgggatgta

SEQ ID NO: 1518200 - DNA, 15 bp, Homo sapiens
catcctgggatgtac

SEQ ID NO: 1518201 - DNA, 15 bp, Homo sapiens
atcctgggatgtact

SEQ ID NO: 1518202 - DNA, 15 bp, Homo sapiens
tcctgggatgtactt

SEQ ID NO: 1518203 - DNA, 15 bp, Homo sapiens
cctgggatgtactta

SEQ ID NO: 1518204 - DNA, 15 bp, Homo sapiens
ctgggatgtacttag

SEQ ID NO: 1518205 - DNA, 15 bp, Homo sapiens
tgggatgtacttaga

SEQ ID NO: 1518206 - DNA, 15 bp, Homo sapiens
gggatgtacttagag

SEQ ID NO: 1518207 - DNA, 15 bp, Homo sapiens
ggatgtacttagaga

SEQ ID NO: 1518208 - DNA, 15 bp, Homo sapiens
gatgtacttagagac

SEQ ID NO: 1518209 - DNA, 15 bp, Homo sapiens
atgtacttagagacc

SEQ ID NO: 1518210 - DNA, 15 bp, Homo sapiens
tgtacttagagacct

SEQ ID NO: 1518211 - DNA, 15 bp, Homo sapiens
gtacttagagacctc

SEQ ID NO: 1518212 - DNA, 15 bp, Homo sapiens
tacttagagacctca

SEQ ID NO: 1518213 - DNA, 15 bp, Homo sapiens
acttagagacctcag

SEQ ID NO: 1518214 - DNA, 15 bp, Homo sapiens
cttagagacctcagt

SEQ ID NO: 1518215 - DNA, 15 bp, Homo sapiens
ttagagacctcagta

SEQ ID NO: 1518216 - DNA, 15 bp, Homo sapiens
tagagacctcagtaa

SEQ ID NO: 1518217 - DNA, 15 bp, Homo sapiens
agagacctcagtaaa

SEQ ID NO: 1518218 - DNA, 15 bp, Homo sapiens
gagacctcagtaaac

SEQ ID NO: 1518219 - DNA, 15 bp, Homo sapiens
agacctcagtaaacc

SEQ ID NO: 1518220 - DNA, 15 bp, Homo sapiens
gacctcagtaaacct

SEQ ID NO: 1518221 - DNA, 15 bp, Homo sapiens
acctcagtaaacctt

SEQ ID NO: 1518222 - DNA, 15 bp, Homo sapiens
cctcagtaaacctta

SEQ ID NO: 1518223 - DNA, 15 bp, Homo sapiens
ctcagtaaaccttat

SEQ ID NO: 1518224 - DNA, 15 bp, Homo sapiens
tcagtaaaccttatg

SEQ ID NO: 1518225 - DNA, 15 bp, Homo sapiens
cagtaaaccttatgt

SEQ ID NO: 1518226 - DNA, 15 bp, Homo sapiens
agtaaaccttatgtg

SEQ ID NO: 1518227 - DNA, 15 bp, Homo sapiens
gtaaaccttatgtgt

SEQ ID NO: 1518228 - DNA, 15 bp, Homo sapiens
taaaccttatgtgtc

SEQ ID NO: 1518229 - DNA, 15 bp, Homo sapiens
aaaccttatgtgtct

SEQ ID NO: 1518230 - DNA, 15 bp, Homo sapiens
aaccttatgtgtctt

SEQ ID NO: 1518231 - DNA, 15 bp, Homo sapiens
accttatgtgtcttt

SEQ ID NO: 1518232 - DNA, 15 bp, Homo sapiens
ccttatgtgtctttg

SEQ ID NO: 1518233 - DNA, 15 bp, Homo sapiens
cttatgtgtctttgc

SEQ ID NO: 1518234 - DNA, 15 bp, Homo sapiens
ttatgtgtctttgct

SEQ ID NO: 1518235 - DNA, 15 bp, Homo sapiens
tatgtgtctttgctc

SEQ ID NO: 1518236 - DNA, 15 bp, Homo sapiens
atgtgtctttgctcc

SEQ ID NO: 1518237 - DNA, 15 bp, Homo sapiens
tgtgtctttgctccc

SEQ ID NO: 1518238 - DNA, 15 bp, Homo sapiens
gtgtctttgctcccc

SEQ ID NO: 1518239 - DNA, 15 bp, Homo sapiens
tgtctttgctccccc

SEQ ID NO: 1518240 - DNA, 15 bp, Homo sapiens
gtctttgctccccca

SEQ ID NO: 1518241 - DNA, 15 bp, Homo sapiens
tctttgctcccccaa

SEQ ID NO: 1518242 - DNA, 15 bp, Homo sapiens
ctttgctcccccaaa

SEQ ID NO: 1518243 - DNA, 15 bp, Homo sapiens
tttgctcccccaaat

SEQ ID NO: 1518244 - DNA, 15 bp, Homo sapiens
ttgctcccccaaatt

SEQ ID NO: 1518245 - DNA, 15 bp, Homo sapiens
tgctcccccaaatta

SEQ ID NO: 1518246 - DNA, 15 bp, Homo sapiens
gctcccccaaattaa

SEQ ID NO: 1518247 - DNA, 15 bp, Homo sapiens
ctcccccaaattaac

SEQ ID NO: 1518248 - DNA, 15 bp, Homo sapiens
tcccccaaattaaca

SEQ ID NO: 1518249 - DNA, 15 bp, Homo sapiens
cccccaaattaacag

SEQ ID NO: 1518250 - DNA, 15 bp, Homo sapiens
ccccaaattaacagg

SEQ ID NO: 1518251 - DNA, 15 bp, Homo sapiens
cccaaattaacaggg

SEQ ID NO: 1518252 - DNA, 15 bp, Homo sapiens
ccaaattaacaggga

SEQ ID NO: 1518253 - DNA, 15 bp, Homo sapiens
caaattaacagggat

SEQ ID NO: 1518254 - DNA, 15 bp, Homo sapiens
aaattaacagggata

SEQ ID NO: 1518255 - DNA, 15 bp, Homo sapiens
aattaacagggatag

SEQ ID NO: 1518256 - DNA, 15 bp, Homo sapiens
attaacagggatagg

SEQ ID NO: 1518257 - DNA, 15 bp, Homo sapiens
ttaacagggataggg

SEQ ID NO: 1518258 - DNA, 15 bp, Homo sapiens
taacagggatagggt

SEQ ID NO: 1518259 - DNA, 15 bp, Homo sapiens
aacagggatagggta

SEQ ID NO: 1518260 - DNA, 15 bp, Homo sapiens
acagggatagggtat

SEQ ID NO: 1518261 - DNA, 15 bp, Homo sapiens
cagggatagggtatt

SEQ ID NO: 1518262 - DNA, 15 bp, Homo sapiens
agggatagggtattc

SEQ ID NO: 1518263 - DNA, 15 bp, Homo sapiens
gggatagggtattct

SEQ ID NO: 1518264 - DNA, 15 bp, Homo sapiens
ggatagggtattctc

SEQ ID NO: 1518265 - DNA, 15 bp, Homo sapiens
gatagggtattctct

SEQ ID NO: 1518266 - DNA, 15 bp, Homo sapiens
atagggtattctctt

SEQ ID NO: 1518267 - DNA, 15 bp, Homo sapiens
tagggtattctcttt

SEQ ID NO: 1518268 - DNA, 15 bp, Homo sapiens
agggtattctctttg

SEQ ID NO: 1518269 - DNA, 15 bp, Homo sapiens
gggtattctctttga

SEQ ID NO: 1518270 - DNA, 15 bp, Homo sapiens
ggtattctctttgaa

SEQ ID NO: 1518271 - DNA, 15 bp, Homo sapiens
gtattctctttgaat

SEQ ID NO: 1518272 - DNA, 15 bp, Homo sapiens
tattctctttgaata

SEQ ID NO: 1518273 - DNA, 15 bp, Homo sapiens
attctctttgaatag

SEQ ID NO: 1518274 - DNA, 15 bp, Homo sapiens
ttctctttgaataga

SEQ ID NO: 1518275 - DNA, 15 bp, Homo sapiens
tctctttgaatagaa

SEQ ID NO: 1518276 - DNA, 15 bp, Homo sapiens
ctctttgaatagaaa

SEQ ID NO: 1518277 - DNA, 15 bp, Homo sapiens
tctttgaatagaaaa

SEQ ID NO: 1518278 - DNA, 15 bp, Homo sapiens
ctttgaatagaaaat

SEQ ID NO: 1518279 - DNA, 15 bp, Homo sapiens
tttgaatagaaaata

SEQ ID NO: 1518280 - DNA, 15 bp, Homo sapiens
ttgaatagaaaataa

SEQ ID NO: 1518281 - DNA, 15 bp, Homo sapiens
tgaatagaaaataag

SEQ ID NO: 1518282 - DNA, 15 bp, Homo sapiens
gaatagaaaataagg

SEQ ID NO: 1518283 - DNA, 15 bp, Homo sapiens
aatagaaaataagga

SEQ ID NO: 1518284 - DNA, 15 bp, Homo sapiens
atagaaaataaggaa

SEQ ID NO: 1518285 - DNA, 15 bp, Homo sapiens
tagaaaataaggaaa

SEQ ID NO: 1518286 - DNA, 15 bp, Homo sapiens
aaaataaggaaaaga

SEQ ID NO: 1518287 - DNA, 15 bp, Homo sapiens
aaataaggaaaagaa

SEQ ID NO: 1518288 - DNA, 15 bp, Homo sapiens
aataaggaaaagaag

SEQ ID NO: 1518289 - DNA, 15 bp, Homo sapiens
ataaggaaaagaagg

SEQ ID NO: 1518290 - DNA, 15 bp, Homo sapiens
taaggaaaagaaggt

SEQ ID NO: 1518291 - DNA, 15 bp, Homo sapiens
aaggaaaagaaggtg

SEQ ID NO: 1518292 - DNA, 15 bp, Homo sapiens
aggaaaagaaggtgt

SEQ ID NO: 1518293 - DNA, 15 bp, Homo sapiens
ggaaaagaaggtgtc

SEQ ID NO: 1518294 - DNA, 15 bp, Homo sapiens
gaaaagaaggtgtct

SEQ ID NO: 1518295 - DNA, 15 bp, Homo sapiens
aaaagaaggtgtctg

SEQ ID NO: 1518296 - DNA, 15 bp, Homo sapiens
aaagaaggtgtctgt

SEQ ID NO: 1518297 - DNA, 15 bp, Homo sapiens
aagaaggtgtctgtc

SEQ ID NO: 1518298 - DNA, 15 bp, Homo sapiens
agaaggtgtctgtct

SEQ ID NO: 1518299 - DNA, 15 bp, Homo sapiens
gaaggtgtctgtctt

SEQ ID NO: 1518300 - DNA, 15 bp, Homo sapiens
aaggtgtctgtctta

SEQ ID NO: 1518301 - DNA, 15 bp, Homo sapiens
aggtgtctgtcttac

SEQ ID NO: 1518302 - DNA, 15 bp, Homo sapiens
ggtgtctgtcttaca

SEQ ID NO: 1518303 - DNA, 15 bp, Homo sapiens
gtgtctgtcttacaa

SEQ ID NO: 1518304 - DNA, 15 bp, Homo sapiens
tgtctgtcttacaac

SEQ ID NO: 1518305 - DNA, 15 bp, Homo sapiens
gtctgtcttacaact

SEQ ID NO: 1518306 - DNA, 15 bp, Homo sapiens
tctgtcttacaacta

SEQ ID NO: 1518307 - DNA, 15 bp, Homo sapiens
ctgtcttacaactaa

SEQ ID NO: 1518308 - DNA, 15 bp, Homo sapiens
tgtcttacaactaat

SEQ ID NO: 1518309 - DNA, 15 bp, Homo sapiens
gtcttacaactaata

SEQ ID NO: 1518310 - DNA, 15 bp, Homo sapiens
tcttacaactaataa

SEQ ID NO: 1518311 - DNA, 15 bp, Homo sapiens
cttacaactaataat

SEQ ID NO: 1518312 - DNA, 15 bp, Homo sapiens
ttacaactaataatc

SEQ ID NO: 1518313 - DNA, 15 bp, Homo sapiens
tacaactaataatca

SEQ ID NO: 1518314 - DNA, 15 bp, Homo sapiens
acaactaataatcat

SEQ ID NO: 1518315 - DNA, 15 bp, Homo sapiens
caactaataatcatg

SEQ ID NO: 1518316 - DNA, 15 bp, Homo sapiens
aactaataatcatga

SEQ ID NO: 1518317 - DNA, 15 bp, Homo sapiens
actaataatcatgat

SEQ ID NO: 1518318 - DNA, 15 bp, Homo sapiens
ctaataatcatgata

SEQ ID NO: 1518319 - DNA, 15 bp, Homo sapiens
taataatcatgatag

SEQ ID NO: 1518320 - DNA, 15 bp, Homo sapiens
aataatcatgataga

SEQ ID NO: 1518321 - DNA, 15 bp, Homo sapiens
ataatcatgatagac

SEQ ID NO: 1518322 - DNA, 15 bp, Homo sapiens
taatcatgatagaca

SEQ ID NO: 1518323 - DNA, 15 bp, Homo sapiens
aatcatgatagacag

SEQ ID NO: 1518324 - DNA, 15 bp, Homo sapiens
atcatgatagacaga

SEQ ID NO: 1518325 - DNA, 15 bp, Homo sapiens
tcatgatagacagag

SEQ ID NO: 1518326 - DNA, 15 bp, Homo sapiens
catgatagacagagc

SEQ ID NO: 1518327 - DNA, 15 bp, Homo sapiens
atgatagacagagct

SEQ ID NO: 1518328 - DNA, 15 bp, Homo sapiens
tgatagacagagctg

SEQ ID NO: 1518329 - DNA, 15 bp, Homo sapiens
gatagacagagctga

SEQ ID NO: 1518330 - DNA, 15 bp, Homo sapiens
atagacagagctgat

SEQ ID NO: 1518331 - DNA, 15 bp, Homo sapiens
tagacagagctgatg

SEQ ID NO: 1518332 - DNA, 15 bp, Homo sapiens
agacagagctgatga

SEQ ID NO: 1518333 - DNA, 15 bp, Homo sapiens
gacagagctgatgat

SEQ ID NO: 1518334 - DNA, 15 bp, Homo sapiens
acagagctgatgata

SEQ ID NO: 1518335 - DNA, 15 bp, Homo sapiens
cagagctgatgatat

SEQ ID NO: 1518336 - DNA, 15 bp, Homo sapiens
agagctgatgatatt

SEQ ID NO: 1518337 - DNA, 15 bp, Homo sapiens
gagctgatgatattc

SEQ ID NO: 1518338 - DNA, 15 bp, Homo sapiens
agctgatgatattca

SEQ ID NO: 1518339 - DNA, 15 bp, Homo sapiens
gctgatgatattcag

SEQ ID NO: 1518340 - DNA, 15 bp, Homo sapiens
ctgatgatattcagc

SEQ ID NO: 1518341 - DNA, 15 bp, Homo sapiens
tgatgatattcagct

SEQ ID NO: 1518342 - DNA, 15 bp, Homo sapiens
gatgatattcagcta

SEQ ID NO: 1518343 - DNA, 15 bp, Homo sapiens
atgatattcagctag

SEQ ID NO: 1518344 - DNA, 15 bp, Homo sapiens
tgatattcagctagt

SEQ ID NO: 1518345 - DNA, 15 bp, Homo sapiens
gatattcagctagtc

SEQ ID NO: 1518346 - DNA, 15 bp, Homo sapiens
atattcagctagtct

SEQ ID NO: 1518347 - DNA, 15 bp, Homo sapiens
tattcagctagtctc

SEQ ID NO: 1518348 - DNA, 15 bp, Homo sapiens
attcagctagtctcc

SEQ ID NO: 1518349 - DNA, 15 bp, Homo sapiens
ttcagctagtctcca

SEQ ID NO: 1518350 - DNA, 15 bp, Homo sapiens
tcagctagtctccat

SEQ ID NO: 1518351 - DNA, 15 bp, Homo sapiens
cagctagtctccatg

SEQ ID NO: 1518352 - DNA, 15 bp, Homo sapiens
agctagtctccatgc

SEQ ID NO: 1518353 - DNA, 15 bp, Homo sapiens
gctagtctccatgct

SEQ ID NO: 1518354 - DNA, 15 bp, Homo sapiens
ctagtctccatgctt

SEQ ID NO: 1518355 - DNA, 15 bp, Homo sapiens
tagtctccatgcttg

SEQ ID NO: 1518356 - DNA, 15 bp, Homo sapiens
agtctccatgcttgg

SEQ ID NO: 1518357 - DNA, 15 bp, Homo sapiens
gtctccatgcttggt

SEQ ID NO: 1518358 - DNA, 15 bp, Homo sapiens
tctccatgcttggtc

SEQ ID NO: 1518359 - DNA, 15 bp, Homo sapiens
ctccatgcttggtca

SEQ ID NO: 1518360 - DNA, 15 bp, Homo sapiens
tccatgcttggtcag

SEQ ID NO: 1518361 - DNA, 15 bp, Homo sapiens
ccatgcttggtcagt

SEQ ID NO: 1518362 - DNA, 15 bp, Homo sapiens
catgcttggtcagtc

SEQ ID NO: 1518363 - DNA, 15 bp, Homo sapiens
atgcttggtcagtca

SEQ ID NO: 1518364 - DNA, 15 bp, Homo sapiens
tgcttggtcagtcat

SEQ ID NO: 1518365 - DNA, 15 bp, Homo sapiens
gcttggtcagtcatc

SEQ ID NO: 1518366 - DNA, 15 bp, Homo sapiens
cttggtcagtcatct

SEQ ID NO: 1518367 - DNA, 15 bp, Homo sapiens
ttggtcagtcatctg

SEQ ID NO: 1518368 - DNA, 15 bp, Homo sapiens
tggtcagtcatctgc

SEQ ID NO: 1518369 - DNA, 15 bp, Homo sapiens
ggtcagtcatctgct

SEQ ID NO: 1518370 - DNA, 15 bp, Homo sapiens
gtcagtcatctgctt

SEQ ID NO: 1518371 - DNA, 15 bp, Homo sapiens
tcagtcatctgctta

SEQ ID NO: 1518372 - DNA, 15 bp, Homo sapiens
cagtcatctgcttat

SEQ ID NO: 1518373 - DNA, 15 bp, Homo sapiens
agtcatctgcttatt

SEQ ID NO: 1518374 - DNA, 15 bp, Homo sapiens
gtcatctgcttattt

SEQ ID NO: 1518375 - DNA, 15 bp, Homo sapiens
tcatctgcttattta

SEQ ID NO: 1518376 - DNA, 15 bp, Homo sapiens
catctgcttatttac

SEQ ID NO: 1518377 - DNA, 15 bp, Homo sapiens
atctgcttatttaca

SEQ ID NO: 1518378 - DNA, 15 bp, Homo sapiens
tctgcttatttacag

SEQ ID NO: 1518379 - DNA, 15 bp, Homo sapiens
ctgcttatttacagc

SEQ ID NO: 1518380 - DNA, 15 bp, Homo sapiens
tgcttatttacagcc

SEQ ID NO: 1518381 - DNA, 15 bp, Homo sapiens
gcttatttacagcca

SEQ ID NO: 1518382 - DNA, 15 bp, Homo sapiens
cttatttacagccag

SEQ ID NO: 1518383 - DNA, 15 bp, Homo sapiens
ttatttacagccagg

SEQ ID NO: 1518384 - DNA, 15 bp, Homo sapiens
tatttacagccagga

SEQ ID NO: 1518385 - DNA, 15 bp, Homo sapiens
atttacagccaggac

SEQ ID NO: 1518386 - DNA, 15 bp, Homo sapiens
tttacagccaggacc

SEQ ID NO: 1518387 - DNA, 15 bp, Homo sapiens
ttacagccaggacct

SEQ ID NO: 1518388 - DNA, 15 bp, Homo sapiens
tacagccaggaccta

SEQ ID NO: 1518389 - DNA, 15 bp, Homo sapiens
acagccaggacctag

SEQ ID NO: 1518390 - DNA, 15 bp, Homo sapiens
cagccaggacctagt

SEQ ID NO: 1518391 - DNA, 15 bp, Homo sapiens
agccaggacctagtc

SEQ ID NO: 1518392 - DNA, 15 bp, Homo sapiens
gccaggacctagtcc

SEQ ID NO: 1518393 - DNA, 15 bp, Homo sapiens
ccaggacctagtccg

SEQ ID NO: 1518394 - DNA, 15 bp, Homo sapiens
caggacctagtccga

SEQ ID NO: 1518395 - DNA, 15 bp, Homo sapiens
aggacctagtccgag

SEQ ID NO: 1518396 - DNA, 15 bp, Homo sapiens
ggacctagtccgagg

SEQ ID NO: 1518397 - DNA, 15 bp, Homo sapiens
gacctagtccgagga

SEQ ID NO: 1518398 - DNA, 15 bp, Homo sapiens
acctagtccgaggat

SEQ ID NO: 1518399 - DNA, 15 bp, Homo sapiens
cctagtccgaggatc

SEQ ID NO: 1518400 - DNA, 15 bp, Homo sapiens
ctagtccgaggatct

SEQ ID NO: 1518401 - DNA, 15 bp, Homo sapiens
tagtccgaggatctc

SEQ ID NO: 1518402 - DNA, 15 bp, Homo sapiens
agtccgaggatctct

SEQ ID NO: 1518403 - DNA, 15 bp, Homo sapiens
gtccgaggatctctt

SEQ ID NO: 1518404 - DNA, 15 bp, Homo sapiens
tccgaggatctcttc

SEQ ID NO: 1518405 - DNA, 15 bp, Homo sapiens
ccgaggatctcttct

SEQ ID NO: 1518406 - DNA, 15 bp, Homo sapiens
cgaggatctcttctc

SEQ ID NO: 1518407 - DNA, 15 bp, Homo sapiens
gaggatctcttctca

SEQ ID NO: 1518408 - DNA, 15 bp, Homo sapiens
aggatctcttctcaa

SEQ ID NO: 1518409 - DNA, 15 bp, Homo sapiens
ggatctcttctcaat

SEQ ID NO: 1518410 - DNA, 15 bp, Homo sapiens
gatctcttctcaatt

SEQ ID NO: 1518411 - DNA, 15 bp, Homo sapiens
atctcttctcaattg

SEQ ID NO: 1518412 - DNA, 15 bp, Homo sapiens
tctcttctcaattgg

SEQ ID NO: 1518413 - DNA, 15 bp, Homo sapiens
ctcttctcaattggc

SEQ ID NO: 1518414 - DNA, 15 bp, Homo sapiens
tcttctcaattggct

SEQ ID NO: 1518415 - DNA, 15 bp, Homo sapiens
cttctcaattggctg

SEQ ID NO: 1518416 - DNA, 15 bp, Homo sapiens
ttctcaattggctgt

SEQ ID NO: 1518417 - DNA, 15 bp, Homo sapiens
tctcaattggctgtc

SEQ ID NO: 1518418 - DNA, 15 bp, Homo sapiens
ctcaattggctgtca

SEQ ID NO: 1518419 - DNA, 15 bp, Homo sapiens
tcaattggctgtcac

SEQ ID NO: 1518420 - DNA, 15 bp, Homo sapiens
caattggctgtcacc

SEQ ID NO: 1518421 - DNA, 15 bp, Homo sapiens
aattggctgtcacca

SEQ ID NO: 1518422 - DNA, 15 bp, Homo sapiens
attggctgtcaccag

SEQ ID NO: 1518423 - DNA, 15 bp, Homo sapiens
ttggctgtcaccagt

SEQ ID NO: 1518424 - DNA, 15 bp, Homo sapiens
tggctgtcaccagtg

SEQ ID NO: 1518425 - DNA, 15 bp, Homo sapiens
ggctgtcaccagtgc

SEQ ID NO: 1518426 - DNA, 15 bp, Homo sapiens
gctgtcaccagtgct

SEQ ID NO: 1518427 - DNA, 15 bp, Homo sapiens
ctgtcaccagtgcta

SEQ ID NO: 1518428 - DNA, 15 bp, Homo sapiens
tgtcaccagtgctaa

SEQ ID NO: 1518429 - DNA, 15 bp, Homo sapiens
gtcaccagtgctaaa

SEQ ID NO: 1518430 - DNA, 15 bp, Homo sapiens
tcaccagtgctaaac

SEQ ID NO: 1518431 - DNA, 15 bp, Homo sapiens
caccagtgctaaacc

SEQ ID NO: 1518432 - DNA, 15 bp, Homo sapiens
accagtgctaaacca

SEQ ID NO: 1518433 - DNA, 15 bp, Homo sapiens
ccagtgctaaaccaa

SEQ ID NO: 1518434 - DNA, 15 bp, Homo sapiens
cagtgctaaaccaat

SEQ ID NO: 1518435 - DNA, 15 bp, Homo sapiens
agtgctaaaccaatt

SEQ ID NO: 1518436 - DNA, 15 bp, Homo sapiens
gtgctaaaccaattg

SEQ ID NO: 1518437 - DNA, 15 bp, Homo sapiens
tgctaaaccaattgt

SEQ ID NO: 1518438 - DNA, 15 bp, Homo sapiens
gctaaaccaattgtt

SEQ ID NO: 1518439 - DNA, 15 bp, Homo sapiens
ctaaaccaattgtta

SEQ ID NO: 1518440 - DNA, 15 bp, Homo sapiens
taaaccaattgttaa

SEQ ID NO: 1518441 - DNA, 15 bp, Homo sapiens
aaaccaattgttaaa

SEQ ID NO: 1518442 - DNA, 15 bp, Homo sapiens
aaccaattgttaaat

SEQ ID NO: 1518443 - DNA, 15 bp, Homo sapiens
accaattgttaaata

SEQ ID NO: 1518444 - DNA, 15 bp, Homo sapiens
ccaattgttaaataa

SEQ ID NO: 1518445 - DNA, 15 bp, Homo sapiens
caattgttaaataat

SEQ ID NO: 1518446 - DNA, 15 bp, Homo sapiens
aattgttaaataatt

SEQ ID NO: 1518447 - DNA, 15 bp, Homo sapiens
attgttaaataattt

SEQ ID NO: 1518448 - DNA, 15 bp, Homo sapiens
ttgttaaataatttt

SEQ ID NO: 1518449 - DNA, 15 bp, Homo sapiens
tgttaaataatttta

SEQ ID NO: 1518450 - DNA, 15 bp, Homo sapiens
gttaaataattttaa

SEQ ID NO: 1518451 - DNA, 15 bp, Homo sapiens
ttaaataattttaaa

SEQ ID NO: 1518452 - DNA, 15 bp, Homo sapiens
taaataattttaaaa

SEQ ID NO: 1518453 - DNA, 15 bp, Homo sapiens
aaataattttaaaat

SEQ ID NO: 1518454 - DNA, 15 bp, Homo sapiens
aattttaaaattatc

SEQ ID NO: 1518455 - DNA, 15 bp, Homo sapiens
attttaaaattatct

SEQ ID NO: 1518456 - DNA, 15 bp, Homo sapiens
ttttaaaattatctc

SEQ ID NO: 1518457 - DNA, 15 bp, Homo sapiens
tttaaaattatctcc

SEQ ID NO: 1518458 - DNA, 15 bp, Homo sapiens
ttaaaattatctcct

SEQ ID NO: 1518459 - DNA, 15 bp, Homo sapiens
taaaattatctcctg

SEQ ID NO: 1518460 - DNA, 15 bp, Homo sapiens
aaaattatctcctga

SEQ ID NO: 1518461 - DNA, 15 bp, Homo sapiens
aaattatctcctgag

SEQ ID NO: 1518462 - DNA, 15 bp, Homo sapiens
aattatctcctgagc

SEQ ID NO: 1518463 - DNA, 15 bp, Homo sapiens
attatctcctgagca

SEQ ID NO: 1518464 - DNA, 15 bp, Homo sapiens
ttatctcctgagcac

SEQ ID NO: 1518465 - DNA, 15 bp, Homo sapiens
tatctcctgagcaca

SEQ ID NO: 1518466 - DNA, 15 bp, Homo sapiens
atctcctgagcacat

SEQ ID NO: 1518467 - DNA, 15 bp, Homo sapiens
tctcctgagcacatc

SEQ ID NO: 1518468 - DNA, 15 bp, Homo sapiens
ctcctgagcacatcc

SEQ ID NO: 1518469 - DNA, 15 bp, Homo sapiens
tcctgagcacatcca

SEQ ID NO: 1518470 - DNA, 15 bp, Homo sapiens
cctgagcacatccag

SEQ ID NO: 1518471 - DNA, 15 bp, Homo sapiens
ctgagcacatccagg

SEQ ID NO: 1518472 - DNA, 15 bp, Homo sapiens
tgagcacatccaggc

SEQ ID NO: 1518473 - DNA, 15 bp, Homo sapiens
gagcacatccaggca

SEQ ID NO: 1518474 - DNA, 15 bp, Homo sapiens
agcacatccaggcac

SEQ ID NO: 1518475 - DNA, 15 bp, Homo sapiens
gcacatccaggcacc

SEQ ID NO: 1518476 - DNA, 15 bp, Homo sapiens
cacatccaggcacct

SEQ ID NO: 1518477 - DNA, 15 bp, Homo sapiens
acatccaggcacctt

SEQ ID NO: 1518478 - DNA, 15 bp, Homo sapiens
catccaggcaccttt

SEQ ID NO: 1518479 - DNA, 15 bp, Homo sapiens
atccaggcacctttg

SEQ ID NO: 1518480 - DNA, 15 bp, Homo sapiens
tccaggcacctttgc

SEQ ID NO: 1518481 - DNA, 15 bp, Homo sapiens
ccaggcacctttgct

SEQ ID NO: 1518482 - DNA, 15 bp, Homo sapiens
caggcacctttgcta

SEQ ID NO: 1518483 - DNA, 15 bp, Homo sapiens
aggcacctttgctaa

SEQ ID NO: 1518484 - DNA, 15 bp, Homo sapiens
ggcacctttgctaag

SEQ ID NO: 1518485 - DNA, 15 bp, Homo sapiens
gcacctttgctaagt

SEQ ID NO: 1518486 - DNA, 15 bp, Homo sapiens
cacctttgctaagtg

SEQ ID NO: 1518487 - DNA, 15 bp, Homo sapiens
acctttgctaagtgc

SEQ ID NO: 1518488 - DNA, 15 bp, Homo sapiens
cctttgctaagtgct

SEQ ID NO: 1518489 - DNA, 15 bp, Homo sapiens
ctttgctaagtgctt

SEQ ID NO: 1518490 - DNA, 15 bp, Homo sapiens
tttgctaagtgcttt

SEQ ID NO: 1518491 - DNA, 15 bp, Homo sapiens
ttgctaagtgctttg

SEQ ID NO: 1518492 - DNA, 15 bp, Homo sapiens
tgctaagtgctttgt

SEQ ID NO: 1518493 - DNA, 15 bp, Homo sapiens
gctaagtgctttgtg

SEQ ID NO: 1518494 - DNA, 15 bp, Homo sapiens
ctaagtgctttgtgt

SEQ ID NO: 1518495 - DNA, 15 bp, Homo sapiens
taagtgctttgtgta

SEQ ID NO: 1518496 - DNA, 15 bp, Homo sapiens
aagtgctttgtgtat

SEQ ID NO: 1518497 - DNA, 15 bp, Homo sapiens
agtgctttgtgtatg

SEQ ID NO: 1518498 - DNA, 15 bp, Homo sapiens
gtgctttgtgtatgt

SEQ ID NO: 1518499 - DNA, 15 bp, Homo sapiens
tgctttgtgtatgtt

SEQ ID NO: 1518500 - DNA, 15 bp, Homo sapiens
gctttgtgtatgttt

SEQ ID NO: 1518501 - DNA, 15 bp, Homo sapiens
ctttgtgtatgtttt

SEQ ID NO: 1518502 - DNA, 15 bp, Homo sapiens
tttgtgtatgtttta

SEQ ID NO: 1518503 - DNA, 15 bp, Homo sapiens
ttgtgtatgttttat

SEQ ID NO: 1518504 - DNA, 15 bp, Homo sapiens
tgtgtatgttttatc

SEQ ID NO: 1518505 - DNA, 15 bp, Homo sapiens
gtgtatgttttatct

SEQ ID NO: 1518506 - DNA, 15 bp, Homo sapiens
tgtatgttttatctc

SEQ ID NO: 1518507 - DNA, 15 bp, Homo sapiens
gtatgttttatctca

SEQ ID NO: 1518508 - DNA, 15 bp, Homo sapiens
tatgttttatctcat

SEQ ID NO: 1518509 - DNA, 15 bp, Homo sapiens
atgttttatctcatt

SEQ ID NO: 1518510 - DNA, 15 bp, Homo sapiens
tgttttatctcattt

SEQ ID NO: 1518511 - DNA, 15 bp, Homo sapiens
gttttatctcattta

SEQ ID NO: 1518512 - DNA, 15 bp, Homo sapiens
ttttatctcatttaa

SEQ ID NO: 1518513 - DNA, 15 bp, Homo sapiens
tttatctcatttaat

SEQ ID NO: 1518514 - DNA, 15 bp, Homo sapiens
ttatctcatttaatc

SEQ ID NO: 1518515 - DNA, 15 bp, Homo sapiens
tatctcatttaatct

SEQ ID NO: 1518516 - DNA, 15 bp, Homo sapiens
tctcatttaatctta

SEQ ID NO: 1518517 - DNA, 15 bp, Homo sapiens
ctcatttaatcttac

SEQ ID NO: 1518518 - DNA, 15 bp, Homo sapiens
tcatttaatcttaca

SEQ ID NO: 1518519 - DNA, 15 bp, Homo sapiens
catttaatcttacag

SEQ ID NO: 1518520 - DNA, 15 bp, Homo sapiens
atttaatcttacagc

SEQ ID NO: 1518521 - DNA, 15 bp, Homo sapiens
tttaatcttacagca

SEQ ID NO: 1518522 - DNA, 15 bp, Homo sapiens
ttaatcttacagcaa

SEQ ID NO: 1518523 - DNA, 15 bp, Homo sapiens
taatcttacagcaac

SEQ ID NO: 1518524 - DNA, 15 bp, Homo sapiens
aatcttacagcaacc

SEQ ID NO: 1518525 - DNA, 15 bp, Homo sapiens
atcttacagcaaccc

SEQ ID NO: 1518526 - DNA, 15 bp, Homo sapiens
tcttacagcaaccca

SEQ ID NO: 1518527 - DNA, 15 bp, Homo sapiens
cttacagcaacccac

SEQ ID NO: 1518528 - DNA, 15 bp, Homo sapiens
ttacagcaacccact

SEQ ID NO: 1518529 - DNA, 15 bp, Homo sapiens
tacagcaacccactg

SEQ ID NO: 1518530 - DNA, 15 bp, Homo sapiens
acagcaacccactga

SEQ ID NO: 1518531 - DNA, 15 bp, Homo sapiens
cagcaacccactgag

SEQ ID NO: 1518532 - DNA, 15 bp, Homo sapiens
agcaacccactgagg

SEQ ID NO: 1518533 - DNA, 15 bp, Homo sapiens
gcaacccactgaggt

SEQ ID NO: 1518534 - DNA, 15 bp, Homo sapiens
caacccactgaggta

SEQ ID NO: 1518535 - DNA, 15 bp, Homo sapiens
aacccactgaggtag

SEQ ID NO: 1518536 - DNA, 15 bp, Homo sapiens
acccactgaggtagt

SEQ ID NO: 1518537 - DNA, 15 bp, Homo sapiens
cccactgaggtagtt

SEQ ID NO: 1518538 - DNA, 15 bp, Homo sapiens
ccactgaggtagttt

SEQ ID NO: 1518539 - DNA, 15 bp, Homo sapiens
cactgaggtagtttt

SEQ ID NO: 1518540 - DNA, 15 bp, Homo sapiens
actgaggtagtttta

SEQ ID NO: 1518541 - DNA, 15 bp, Homo sapiens
ctgaggtagttttat

SEQ ID NO: 1518542 - DNA, 15 bp, Homo sapiens
tgaggtagttttatt

SEQ ID NO: 1518543 - DNA, 15 bp, Homo sapiens
gaggtagttttatta

SEQ ID NO: 1518544 - DNA, 15 bp, Homo sapiens
aggtagttttattat

SEQ ID NO: 1518545 - DNA, 15 bp, Homo sapiens
ggtagttttattatt

SEQ ID NO: 1518546 - DNA, 15 bp, Homo sapiens
gtagttttattattc

SEQ ID NO: 1518547 - DNA, 15 bp, Homo sapiens
tagttttattattcc

SEQ ID NO: 1518548 - DNA, 15 bp, Homo sapiens
agttttattattcca

SEQ ID NO: 1518549 - DNA, 15 bp, Homo sapiens
gttttattattccac

SEQ ID NO: 1518550 - DNA, 15 bp, Homo sapiens
ttttattattccact

SEQ ID NO: 1518551 - DNA, 15 bp, Homo sapiens
tttattattccactt

SEQ ID NO: 1518552 - DNA, 15 bp, Homo sapiens
ttattattccacttt

SEQ ID NO: 1518553 - DNA, 15 bp, Homo sapiens
tattattccacttta

SEQ ID NO: 1518554 - DNA, 15 bp, Homo sapiens
attattccactttat

SEQ ID NO: 1518555 - DNA, 15 bp, Homo sapiens
ttattccactttata

SEQ ID NO: 1518556 - DNA, 15 bp, Homo sapiens
tattccactttatag

SEQ ID NO: 1518557 - DNA, 15 bp, Homo sapiens
attccactttatagg

SEQ ID NO: 1518558 - DNA, 15 bp, Homo sapiens
ttccactttataggt

SEQ ID NO: 1518559 - DNA, 15 bp, Homo sapiens
tccactttataggtg

SEQ ID NO: 1518560 - DNA, 15 bp, Homo sapiens
ccactttataggtga

SEQ ID NO: 1518561 - DNA, 15 bp, Homo sapiens
cactttataggtgag

SEQ ID NO: 1518562 - DNA, 15 bp, Homo sapiens
actttataggtgagt

SEQ ID NO: 1518563 - DNA, 15 bp, Homo sapiens
ctttataggtgagtg

SEQ ID NO: 1518564 - DNA, 15 bp, Homo sapiens
tttataggtgagtgc

SEQ ID NO: 1518565 - DNA, 15 bp, Homo sapiens
ttataggtgagtgca

SEQ ID NO: 1518566 - DNA, 15 bp, Homo sapiens
tataggtgagtgcac

SEQ ID NO: 1518567 - DNA, 15 bp, Homo sapiens
ataggtgagtgcact

SEQ ID NO: 1518568 - DNA, 15 bp, Homo sapiens
taggtgagtgcactg

SEQ ID NO: 1518569 - DNA, 15 bp, Homo sapiens
aggtgagtgcactgt

SEQ ID NO: 1518570 - DNA, 15 bp, Homo sapiens
ggtgagtgcactgta

SEQ ID NO: 1518571 - DNA, 15 bp, Homo sapiens
gtgagtgcactgtag

SEQ ID NO: 1518572 - DNA, 15 bp, Homo sapiens
tgagtgcactgtagc

SEQ ID NO: 1518573 - DNA, 15 bp, Homo sapiens
gagtgcactgtagct

SEQ ID NO: 1518574 - DNA, 15 bp, Homo sapiens
agtgcactgtagctt

SEQ ID NO: 1518575 - DNA, 15 bp, Homo sapiens
gtgcactgtagcttc

SEQ ID NO: 1518576 - DNA, 15 bp, Homo sapiens
tgcactgtagcttca

SEQ ID NO: 1518577 - DNA, 15 bp, Homo sapiens
gcactgtagcttcag

SEQ ID NO: 1518578 - DNA, 15 bp, Homo sapiens
cactgtagcttcagt

SEQ ID NO: 1518579 - DNA, 15 bp, Homo sapiens
actgtagcttcagtc

SEQ ID NO: 1518580 - DNA, 15 bp, Homo sapiens
ctgtagcttcagtcc

SEQ ID NO: 1518581 - DNA, 15 bp, Homo sapiens
tgtagcttcagtcct

SEQ ID NO: 1518582 - DNA, 15 bp, Homo sapiens
gtagcttcagtcctt

SEQ ID NO: 1518583 - DNA, 15 bp, Homo sapiens
tagcttcagtccttt

SEQ ID NO: 1518584 - DNA, 15 bp, Homo sapiens
agcttcagtcctttg

SEQ ID NO: 1518585 - DNA, 15 bp, Homo sapiens
gcttcagtcctttgc

SEQ ID NO: 1518586 - DNA, 15 bp, Homo sapiens
cttcagtcctttgcc

SEQ ID NO: 1518587 - DNA, 15 bp, Homo sapiens
ttcagtcctttgccc

SEQ ID NO: 1518588 - DNA, 15 bp, Homo sapiens
tcagtcctttgccca

SEQ ID NO: 1518589 - DNA, 15 bp, Homo sapiens
cagtcctttgcccac

SEQ ID NO: 1518590 - DNA, 15 bp, Homo sapiens
agtcctttgcccaca

SEQ ID NO: 1518591 - DNA, 15 bp, Homo sapiens
gtcctttgcccacag

SEQ ID NO: 1518592 - DNA, 15 bp, Homo sapiens
tcctttgcccacagt

SEQ ID NO: 1518593 - DNA, 15 bp, Homo sapiens
cctttgcccacagtc

SEQ ID NO: 1518594 - DNA, 15 bp, Homo sapiens
ctttgcccacagtca

SEQ ID NO: 1518595 - DNA, 15 bp, Homo sapiens
tttgcccacagtcac

SEQ ID NO: 1518596 - DNA, 15 bp, Homo sapiens
ttgcccacagtcaca

SEQ ID NO: 1518597 - DNA, 15 bp, Homo sapiens
tgcccacagtcacat

SEQ ID NO: 1518598 - DNA, 15 bp, Homo sapiens
gcccacagtcacata

SEQ ID NO: 1518599 - DNA, 15 bp, Homo sapiens
cccacagtcacatag

SEQ ID NO: 1518600 - DNA, 15 bp, Homo sapiens
ccacagtcacatagc

SEQ ID NO: 1518601 - DNA, 15 bp, Homo sapiens
cacagtcacatagct

SEQ ID NO: 1518602 - DNA, 15 bp, Homo sapiens
acagtcacatagcta

SEQ ID NO: 1518603 - DNA, 15 bp, Homo sapiens
cagtcacatagctag

SEQ ID NO: 1518604 - DNA, 15 bp, Homo sapiens
agtcacatagctagc

SEQ ID NO: 1518605 - DNA, 15 bp, Homo sapiens
gtcacatagctagca

SEQ ID NO: 1518606 - DNA, 15 bp, Homo sapiens
tcacatagctagcat

SEQ ID NO: 1518607 - DNA, 15 bp, Homo sapiens
cacatagctagcata

SEQ ID NO: 1518608 - DNA, 15 bp, Homo sapiens
acatagctagcatat

SEQ ID NO: 1518609 - DNA, 15 bp, Homo sapiens
catagctagcatatg

SEQ ID NO: 1518610 - DNA, 15 bp, Homo sapiens
atagctagcatatgt

SEQ ID NO: 1518611 - DNA, 15 bp, Homo sapiens
tagctagcatatgtc

SEQ ID NO: 1518612 - DNA, 15 bp, Homo sapiens
agctagcatatgtcc

SEQ ID NO: 1518613 - DNA, 15 bp, Homo sapiens
gctagcatatgtcca

SEQ ID NO: 1518614 - DNA, 15 bp, Homo sapiens
ctagcatatgtccaa

SEQ ID NO: 1518615 - DNA, 15 bp, Homo sapiens
tagcatatgtccaaa

SEQ ID NO: 1518616 - DNA, 15 bp, Homo sapiens
agcatatgtccaaat

SEQ ID NO: 1518617 - DNA, 15 bp, Homo sapiens
gcatatgtccaaatg

SEQ ID NO: 1518618 - DNA, 15 bp, Homo sapiens
catatgtccaaatga

SEQ ID NO: 1518619 - DNA, 15 bp, Homo sapiens
atatgtccaaatgat

SEQ ID NO: 1518620 - DNA, 15 bp, Homo sapiens
tatgtccaaatgata

SEQ ID NO: 1518621 - DNA, 15 bp, Homo sapiens
atgtccaaatgatag

SEQ ID NO: 1518622 - DNA, 15 bp, Homo sapiens
tgtccaaatgatagt

SEQ ID NO: 1518623 - DNA, 15 bp, Homo sapiens
gtccaaatgatagtc

SEQ ID NO: 1518624 - DNA, 15 bp, Homo sapiens
tccaaatgatagtca

SEQ ID NO: 1518625 - DNA, 15 bp, Homo sapiens
ccaaatgatagtcaa

SEQ ID NO: 1518626 - DNA, 15 bp, Homo sapiens
caaatgatagtcaaa

SEQ ID NO: 1518627 - DNA, 15 bp, Homo sapiens
ccctcaggggctgac

SEQ ID NO: 1518628 - DNA, 15 bp, Homo sapiens
cctcaggggctgact

SEQ ID NO: 1518629 - DNA, 15 bp, Homo sapiens
ctcaggggctgactt

SEQ ID NO: 1518630 - DNA, 15 bp, Homo sapiens
tcaggggctgacttc

SEQ ID NO: 1518631 - DNA, 15 bp, Homo sapiens
caggggctgacttct

SEQ ID NO: 1518632 - DNA, 15 bp, Homo sapiens
aggggctgacttctc

SEQ ID NO: 1518633 - DNA, 15 bp, Homo sapiens
ggggctgacttctcc

SEQ ID NO: 1518634 - DNA, 15 bp, Homo sapiens
gggctgacttctccc

SEQ ID NO: 1518635 - DNA, 15 bp, Homo sapiens
ggctgacttctcccc

SEQ ID NO: 1518636 - DNA, 15 bp, Homo sapiens
gctgacttctcccca

SEQ ID NO: 1518637 - DNA, 15 bp, Homo sapiens
ctgacttctccccac

SEQ ID NO: 1518638 - DNA, 15 bp, Homo sapiens
tgacttctccccacc

SEQ ID NO: 1518639 - DNA, 15 bp, Homo sapiens
gacttctccccaccc

SEQ ID NO: 1518640 - DNA, 15 bp, Homo sapiens
acttctccccacccc

SEQ ID NO: 1518641 - DNA, 15 bp, Homo sapiens
cttctccccaccccc

SEQ ID NO: 1518642 - DNA, 15 bp, Homo sapiens
ttctccccaccccca

SEQ ID NO: 1518643 - DNA, 15 bp, Homo sapiens
tctccccacccccac

SEQ ID NO: 1518644 - DNA, 15 bp, Homo sapiens
ctccccacccccacc

SEQ ID NO: 1518645 - DNA, 15 bp, Homo sapiens
tccccacccccacca

SEQ ID NO: 1518646 - DNA, 15 bp, Homo sapiens
ccccacccccaccac

SEQ ID NO: 1518647 - DNA, 15 bp, Homo sapiens
cccacccccaccacc

SEQ ID NO: 1518648 - DNA, 15 bp, Homo sapiens
ccacccccaccacca

SEQ ID NO: 1518649 - DNA, 15 bp, Homo sapiens
cacccccaccaccaa

SEQ ID NO: 1518650 - DNA, 15 bp, Homo sapiens
acccccaccaccaac

SEQ ID NO: 1518651 - DNA, 15 bp, Homo sapiens
cccccaccaccaacc

SEQ ID NO: 1518652 - DNA, 15 bp, Homo sapiens
ccccaccaccaacca

SEQ ID NO: 1518653 - DNA, 15 bp, Homo sapiens
cccaccaccaaccac

SEQ ID NO: 1518654 - DNA, 15 bp, Homo sapiens
ccaccaccaaccacc

SEQ ID NO: 1518655 - DNA, 15 bp, Homo sapiens
caccaccaaccacct

SEQ ID NO: 1518656 - DNA, 15 bp, Homo sapiens
accaccaaccacctt

SEQ ID NO: 1518657 - DNA, 15 bp, Homo sapiens
ccaccaaccaccttt

SEQ ID NO: 1518658 - DNA, 15 bp, Homo sapiens
caccaaccacctttc

SEQ ID NO: 1518659 - DNA, 15 bp, Homo sapiens
accaaccacctttct

SEQ ID NO: 1518660 - DNA, 15 bp, Homo sapiens
ccaaccacctttctt

SEQ ID NO: 1518661 - DNA, 15 bp, Homo sapiens
caaccacctttcttc

SEQ ID NO: 1518662 - DNA, 15 bp, Homo sapiens
aaccacctttcttct

SEQ ID NO: 1518663 - DNA, 15 bp, Homo sapiens
accacctttcttctt

SEQ ID NO: 1518664 - DNA, 15 bp, Homo sapiens
ccacctttcttcttt

SEQ ID NO: 1518665 - DNA, 15 bp, Homo sapiens
cacctttcttctttg

SEQ ID NO: 1518666 - DNA, 15 bp, Homo sapiens
acctttcttctttga

SEQ ID NO: 1518667 - DNA, 15 bp, Homo sapiens
cctttcttctttgag

SEQ ID NO: 1518668 - DNA, 15 bp, Homo sapiens
ctttcttctttgagg

SEQ ID NO: 1518669 - DNA, 15 bp, Homo sapiens
tttcttctttgaggg

SEQ ID NO: 1518670 - DNA, 15 bp, Homo sapiens
ttcttctttgagggt

SEQ ID NO: 1518671 - DNA, 15 bp, Homo sapiens
tcttctttgagggtg

SEQ ID NO: 1518672 - DNA, 15 bp, Homo sapiens
cttctttgagggtga

SEQ ID NO: 1518673 - DNA, 15 bp, Homo sapiens
ttctttgagggtgac

SEQ ID NO: 1518674 - DNA, 15 bp, Homo sapiens
tctttgagggtgact

SEQ ID NO: 1518675 - DNA, 15 bp, Homo sapiens
ctttgagggtgactc

SEQ ID NO: 1518676 - DNA, 15 bp, Homo sapiens
tttgagggtgactct

SEQ ID NO: 1518677 - DNA, 15 bp, Homo sapiens
ttgagggtgactctg

SEQ ID NO: 1518678 - DNA, 15 bp, Homo sapiens
tgagggtgactctgg

SEQ ID NO: 1518679 - DNA, 15 bp, Homo sapiens
gagggtgactctggt

SEQ ID NO: 1518680 - DNA, 15 bp, Homo sapiens
agggtgactctggtg

SEQ ID NO: 1518681 - DNA, 15 bp, Homo sapiens
gggtgactctggtgc

SEQ ID NO: 1518682 - DNA, 15 bp, Homo sapiens
ggtgactctggtgcc

SEQ ID NO: 1518683 - DNA, 15 bp, Homo sapiens
gtgactctggtgccc

SEQ ID NO: 1518684 - DNA, 15 bp, Homo sapiens
tgactctggtgccct

SEQ ID NO: 1518685 - DNA, 15 bp, Homo sapiens
gactctggtgccctg

SEQ ID NO: 1518686 - DNA, 15 bp, Homo sapiens
actctggtgccctgc

SEQ ID NO: 1518687 - DNA, 15 bp, Homo sapiens
ctctggtgccctgcc

SEQ ID NO: 1518688 - DNA, 15 bp, Homo sapiens
tctggtgccctgcct

SEQ ID NO: 1518689 - DNA, 15 bp, Homo sapiens
ctggtgccctgcctt

SEQ ID NO: 1518690 - DNA, 15 bp, Homo sapiens
tggtgccctgccttc

SEQ ID NO: 1518691 - DNA, 15 bp, Homo sapiens
ggtgccctgccttcg

SEQ ID NO: 1518692 - DNA, 15 bp, Homo sapiens
gtgccctgccttcgg

SEQ ID NO: 1518693 - DNA, 15 bp, Homo sapiens
tgccctgccttcgga

SEQ ID NO: 1518694 - DNA, 15 bp, Homo sapiens
gccctgccttcggac

SEQ ID NO: 1518695 - DNA, 15 bp, Homo sapiens
ccctgccttcggacc

SEQ ID NO: 1518696 - DNA, 15 bp, Homo sapiens
cctgccttcggaccc

SEQ ID NO: 1518697 - DNA, 15 bp, Homo sapiens
ctgccttcggacccc

SEQ ID NO: 1518698 - DNA, 15 bp, Homo sapiens
tgccttcggaccccc

SEQ ID NO: 1518699 - DNA, 15 bp, Homo sapiens
gccttcggaccccca

SEQ ID NO: 1518700 - DNA, 15 bp, Homo sapiens
ccttcggacccccag

SEQ ID NO: 1518701 - DNA, 15 bp, Homo sapiens
cttcggacccccagt

SEQ ID NO: 1518702 - DNA, 15 bp, Homo sapiens
ttcggacccccagtc

SEQ ID NO: 1518703 - DNA, 15 bp, Homo sapiens
tcggacccccagtct

SEQ ID NO: 1518704 - DNA, 15 bp, Homo sapiens
cggacccccagtctg

SEQ ID NO: 1518705 - DNA, 15 bp, Homo sapiens
ggacccccagtctgt

SEQ ID NO: 1518706 - DNA, 15 bp, Homo sapiens
gacccccagtctgtg

SEQ ID NO: 1518707 - DNA, 15 bp, Homo sapiens
acccccagtctgtgt

SEQ ID NO: 1518708 - DNA, 15 bp, Homo sapiens
cccccagtctgtgtt

SEQ ID NO: 1518709 - DNA, 15 bp, Homo sapiens
ccccagtctgtgttc

SEQ ID NO: 1518710 - DNA, 15 bp, Homo sapiens
cccagtctgtgttct

SEQ ID NO: 1518711 - DNA, 15 bp, Homo sapiens
ccagtctgtgttctg

SEQ ID NO: 1518712 - DNA, 15 bp, Homo sapiens
cagtctgtgttctgt

SEQ ID NO: 1518713 - DNA, 15 bp, Homo sapiens
agtctgtgttctgtc

SEQ ID NO: 1518714 - DNA, 15 bp, Homo sapiens
gtctgtgttctgtct

SEQ ID NO: 1518715 - DNA, 15 bp, Homo sapiens
tctgtgttctgtctc

SEQ ID NO: 1518716 - DNA, 15 bp, Homo sapiens
ctgtgttctgtctcc

SEQ ID NO: 1518717 - DNA, 15 bp, Homo sapiens
tgtgttctgtctccc

SEQ ID NO: 1518718 - DNA, 15 bp, Homo sapiens
gtgttctgtctcccc

SEQ ID NO: 1518719 - DNA, 15 bp, Homo sapiens
tgttctgtctcccca

SEQ ID NO: 1518720 - DNA, 15 bp, Homo sapiens
gttctgtctccccag

SEQ ID NO: 1518721 - DNA, 15 bp, Homo sapiens
ttctgtctccccagt

SEQ ID NO: 1518722 - DNA, 15 bp, Homo sapiens
tctgtctccccagta

SEQ ID NO: 1518723 - DNA, 15 bp, Homo sapiens
ctgtctccccagtag

SEQ ID NO: 1518724 - DNA, 15 bp, Homo sapiens
tgtctccccagtaga

SEQ ID NO: 1518725 - DNA, 15 bp, Homo sapiens
gtctccccagtagat

SEQ ID NO: 1518726 - DNA, 15 bp, Homo sapiens
tctccccagtagata

SEQ ID NO: 1518727 - DNA, 15 bp, Homo sapiens
ctccccagtagatag

SEQ ID NO: 1518728 - DNA, 15 bp, Homo sapiens
tccccagtagatagg

SEQ ID NO: 1518729 - DNA, 15 bp, Homo sapiens
ccccagtagataggg

SEQ ID NO: 1518730 - DNA, 15 bp, Homo sapiens
cccagtagatagggg

SEQ ID NO: 1518731 - DNA, 15 bp, Homo sapiens
ccagtagataggggt

SEQ ID NO: 1518732 - DNA, 15 bp, Homo sapiens
cagtagataggggtt

SEQ ID NO: 1518733 - DNA, 15 bp, Homo sapiens
agtagataggggttt

SEQ ID NO: 1518734 - DNA, 15 bp, Homo sapiens
gtagataggggtttt

SEQ ID NO: 1518735 - DNA, 15 bp, Homo sapiens
tagataggggttttg

SEQ ID NO: 1518736 - DNA, 15 bp, Homo sapiens
agataggggttttgg

SEQ ID NO: 1518737 - DNA, 15 bp, Homo sapiens
gataggggttttgga

SEQ ID NO: 1518738 - DNA, 15 bp, Homo sapiens
ataggggttttggaa

SEQ ID NO: 1518739 - DNA, 15 bp, Homo sapiens
taggggttttggaag

SEQ ID NO: 1518740 - DNA, 15 bp, Homo sapiens
aggggttttggaagg

SEQ ID NO: 1518741 - DNA, 15 bp, Homo sapiens
ggggttttggaaggc

SEQ ID NO: 1518742 - DNA, 15 bp, Homo sapiens
gggttttggaaggca

SEQ ID NO: 1518743 - DNA, 15 bp, Homo sapiens
ggttttggaaggcaa

SEQ ID NO: 1518744 - DNA, 15 bp, Homo sapiens
gttttggaaggcaag

SEQ ID NO: 1518745 - DNA, 15 bp, Homo sapiens
ttttggaaggcaagg

SEQ ID NO: 1518746 - DNA, 15 bp, Homo sapiens
tttggaaggcaaggc

SEQ ID NO: 1518747 - DNA, 15 bp, Homo sapiens
ttggaaggcaaggcc

SEQ ID NO: 1518748 - DNA, 15 bp, Homo sapiens
tggaaggcaaggcca

SEQ ID NO: 1518749 - DNA, 15 bp, Homo sapiens
ggaaggcaaggccat

SEQ ID NO: 1518750 - DNA, 15 bp, Homo sapiens
gaaggcaaggccatg

SEQ ID NO: 1518751 - DNA, 15 bp, Homo sapiens
aaggcaaggccatgt

SEQ ID NO: 1518752 - DNA, 15 bp, Homo sapiens
aggcaaggccatgtc

SEQ ID NO: 1518753 - DNA, 15 bp, Homo sapiens
ggcaaggccatgtct

SEQ ID NO: 1518754 - DNA, 15 bp, Homo sapiens
gcaaggccatgtctc

SEQ ID NO: 1518755 - DNA, 15 bp, Homo sapiens
caaggccatgtctcg

SEQ ID NO: 1518756 - DNA, 15 bp, Homo sapiens
aaggccatgtctcgc

SEQ ID NO: 1518757 - DNA, 15 bp, Homo sapiens
aggccatgtctcgca

SEQ ID NO: 1518758 - DNA, 15 bp, Homo sapiens
ggccatgtctcgcat

SEQ ID NO: 1518759 - DNA, 15 bp, Homo sapiens
gccatgtctcgcatc

SEQ ID NO: 1518760 - DNA, 15 bp, Homo sapiens
ccatgtctcgcatcc

SEQ ID NO: 1518761 - DNA, 15 bp, Homo sapiens
catgtctcgcatccc

SEQ ID NO: 1518762 - DNA, 15 bp, Homo sapiens
atgtctcgcatcccc

SEQ ID NO: 1518763 - DNA, 15 bp, Homo sapiens
tgtctcgcatcccca

SEQ ID NO: 1518764 - DNA, 15 bp, Homo sapiens
gtctcgcatccccat

SEQ ID NO: 1518765 - DNA, 15 bp, Homo sapiens
tctcgcatccccatg

SEQ ID NO: 1518766 - DNA, 15 bp, Homo sapiens
ctcgcatccccatga

SEQ ID NO: 1518767 - DNA, 15 bp, Homo sapiens
tcgcatccccatgag

SEQ ID NO: 1518768 - DNA, 15 bp, Homo sapiens
cgcatccccatgagc

SEQ ID NO: 1518769 - DNA, 15 bp, Homo sapiens
gcatccccatgagcc

SEQ ID NO: 1518770 - DNA, 15 bp, Homo sapiens
catccccatgagccc

SEQ ID NO: 1518771 - DNA, 15 bp, Homo sapiens
atccccatgagcccc

SEQ ID NO: 1518772 - DNA, 15 bp, Homo sapiens
tccccatgagcccct

SEQ ID NO: 1518773 - DNA, 15 bp, Homo sapiens
ccccatgagcccctc

SEQ ID NO: 1518774 - DNA, 15 bp, Homo sapiens
cccatgagcccctcc

SEQ ID NO: 1518775 - DNA, 15 bp, Homo sapiens
ccatgagcccctcct

SEQ ID NO: 1518776 - DNA, 15 bp, Homo sapiens
catgagcccctcctg

SEQ ID NO: 1518777 - DNA, 15 bp, Homo sapiens
atgagcccctcctgc

SEQ ID NO: 1518778 - DNA, 15 bp, Homo sapiens
tgagcccctcctgcc

SEQ ID NO: 1518779 - DNA, 15 bp, Homo sapiens
gagcccctcctgcct

SEQ ID NO: 1518780 - DNA, 15 bp, Homo sapiens
agcccctcctgcctt

SEQ ID NO: 1518781 - DNA, 15 bp, Homo sapiens
gcccctcctgccttt

SEQ ID NO: 1518782 - DNA, 15 bp, Homo sapiens
cccctcctgcctttg

SEQ ID NO: 1518783 - DNA, 15 bp, Homo sapiens
ccctcctgcctttgt

SEQ ID NO: 1518784 - DNA, 15 bp, Homo sapiens
cctcctgcctttgtc

SEQ ID NO: 1518785 - DNA, 15 bp, Homo sapiens
ctcctgcctttgtct

SEQ ID NO: 1518786 - DNA, 15 bp, Homo sapiens
tcctgcctttgtctt

SEQ ID NO: 1518787 - DNA, 15 bp, Homo sapiens
cctgcctttgtcttt

SEQ ID NO: 1518788 - DNA, 15 bp, Homo sapiens
ctgcctttgtctttc

SEQ ID NO: 1518789 - DNA, 15 bp, Homo sapiens
tgcctttgtctttcc

SEQ ID NO: 1518790 - DNA, 15 bp, Homo sapiens
gcctttgtctttccc

SEQ ID NO: 1518791 - DNA, 15 bp, Homo sapiens
cctttgtctttccct

SEQ ID NO: 1518792 - DNA, 15 bp, Homo sapiens
ctttgtctttccctg

SEQ ID NO: 1518793 - DNA, 15 bp, Homo sapiens
tttgtctttccctgc

SEQ ID NO: 1518794 - DNA, 15 bp, Homo sapiens
ttgtctttccctgca

SEQ ID NO: 1518795 - DNA, 15 bp, Homo sapiens
tgtctttccctgcac

SEQ ID NO: 1518796 - DNA, 15 bp, Homo sapiens
gtctttccctgcacc

SEQ ID NO: 1518797 - DNA, 15 bp, Homo sapiens
tctttccctgcacct

SEQ ID NO: 1518798 - DNA, 15 bp, Homo sapiens
ctttccctgcaccta

SEQ ID NO: 1518799 - DNA, 15 bp, Homo sapiens
tttccctgcacctag

SEQ ID NO: 1518800 - DNA, 15 bp, Homo sapiens
ttccctgcacctaga

SEQ ID NO: 1518801 - DNA, 15 bp, Homo sapiens
tccctgcacctagac

SEQ ID NO: 1518802 - DNA, 15 bp, Homo sapiens
ccctgcacctagact

SEQ ID NO: 1518803 - DNA, 15 bp, Homo sapiens
cctgcacctagactg

SEQ ID NO: 1518804 - DNA, 15 bp, Homo sapiens
ctgcacctagactgt

SEQ ID NO: 1518805 - DNA, 15 bp, Homo sapiens
tgcacctagactgtg

SEQ ID NO: 1518806 - DNA, 15 bp, Homo sapiens
gcacctagactgtgt

SEQ ID NO: 1518807 - DNA, 15 bp, Homo sapiens
cacctagactgtgta

SEQ ID NO: 1518808 - DNA, 15 bp, Homo sapiens
acctagactgtgtag

SEQ ID NO: 1518809 - DNA, 15 bp, Homo sapiens
cctagactgtgtagg

SEQ ID NO: 1518810 - DNA, 15 bp, Homo sapiens
ctagactgtgtaggt

SEQ ID NO: 1518811 - DNA, 15 bp, Homo sapiens
tagactgtgtaggtg

SEQ ID NO: 1518812 - DNA, 15 bp, Homo sapiens
agactgtgtaggtgg

SEQ ID NO: 1518813 - DNA, 15 bp, Homo sapiens
gactgtgtaggtggt

SEQ ID NO: 1518814 - DNA, 15 bp, Homo sapiens
actgtgtaggtggtt

SEQ ID NO: 1518815 - DNA, 15 bp, Homo sapiens
ctgtgtaggtggttc

SEQ ID NO: 1518816 - DNA, 15 bp, Homo sapiens
tgtgtaggtggttct

SEQ ID NO: 1518817 - DNA, 15 bp, Homo sapiens
gtgtaggtggttctg

SEQ ID NO: 1518818 - DNA, 15 bp, Homo sapiens
tgtaggtggttctgg

SEQ ID NO: 1518819 - DNA, 15 bp, Homo sapiens
gtaggtggttctgga

SEQ ID NO: 1518820 - DNA, 15 bp, Homo sapiens
taggtggttctggag

SEQ ID NO: 1518821 - DNA, 15 bp, Homo sapiens
aggtggttctggagg

SEQ ID NO: 1518822 - DNA, 15 bp, Homo sapiens
ggtggttctggaggc

SEQ ID NO: 1518823 - DNA, 15 bp, Homo sapiens
gtggttctggaggca

SEQ ID NO: 1518824 - DNA, 15 bp, Homo sapiens
tggttctggaggcag

SEQ ID NO: 1518825 - DNA, 15 bp, Homo sapiens
ggttctggaggcaga

SEQ ID NO: 1518826 - DNA, 15 bp, Homo sapiens
gttctggaggcagag

SEQ ID NO: 1518827 - DNA, 15 bp, Homo sapiens
ttctggaggcagagt

SEQ ID NO: 1518828 - DNA, 15 bp, Homo sapiens
tctggaggcagagtg

SEQ ID NO: 1518829 - DNA, 15 bp, Homo sapiens
ctggaggcagagtgt

SEQ ID NO: 1518830 - DNA, 15 bp, Homo sapiens
tggaggcagagtgtg

SEQ ID NO: 1518831 - DNA, 15 bp, Homo sapiens
ggaggcagagtgtgg

SEQ ID NO: 1518832 - DNA, 15 bp, Homo sapiens
gaggcagagtgtggg

SEQ ID NO: 1518833 - DNA, 15 bp, Homo sapiens
aggcagagtgtgggc

SEQ ID NO: 1518834 - DNA, 15 bp, Homo sapiens
ggcagagtgtgggcc

SEQ ID NO: 1518835 - DNA, 15 bp, Homo sapiens
gcagagtgtgggccc

SEQ ID NO: 1518836 - DNA, 15 bp, Homo sapiens
cagagtgtgggccct

SEQ ID NO: 1518837 - DNA, 15 bp, Homo sapiens
agagtgtgggcccta

SEQ ID NO: 1518838 - DNA, 15 bp, Homo sapiens
gagtgtgggccctag

SEQ ID NO: 1518839 - DNA, 15 bp, Homo sapiens
agtgtgggccctagt

SEQ ID NO: 1518840 - DNA, 15 bp, Homo sapiens
gtgtgggccctagtg

SEQ ID NO: 1518841 - DNA, 15 bp, Homo sapiens
tgtgggccctagtgg

SEQ ID NO: 1518842 - DNA, 15 bp, Homo sapiens
gtgggccctagtggg

SEQ ID NO: 1518843 - DNA, 15 bp, Homo sapiens
tgggccctagtgggt

SEQ ID NO: 1518844 - DNA, 15 bp, Homo sapiens
gggccctagtgggtt

SEQ ID NO: 1518845 - DNA, 15 bp, Homo sapiens
ggccctagtgggttc

SEQ ID NO: 1518846 - DNA, 15 bp, Homo sapiens
gccctagtgggttct

SEQ ID NO: 1518847 - DNA, 15 bp, Homo sapiens
ccctagtgggttctg

SEQ ID NO: 1518848 - DNA, 15 bp, Homo sapiens
cctagtgggttctgc

SEQ ID NO: 1518849 - DNA, 15 bp, Homo sapiens
ctagtgggttctgct

SEQ ID NO: 1518850 - DNA, 15 bp, Homo sapiens
tagtgggttctgctg

SEQ ID NO: 1518851 - DNA, 15 bp, Homo sapiens
agtgggttctgctgc

SEQ ID NO: 1518852 - DNA, 15 bp, Homo sapiens
gtgggttctgctgct

SEQ ID NO: 1518853 - DNA, 15 bp, Homo sapiens
tgggttctgctgcta

SEQ ID NO: 1518854 - DNA, 15 bp, Homo sapiens
gggttctgctgctac

SEQ ID NO: 1518855 - DNA, 15 bp, Homo sapiens
ggttctgctgctact

SEQ ID NO: 1518856 - DNA, 15 bp, Homo sapiens
gttctgctgctactt

SEQ ID NO: 1518857 - DNA, 15 bp, Homo sapiens
ttctgctgctacttc

SEQ ID NO: 1518858 - DNA, 15 bp, Homo sapiens
tctgctgctacttcc

SEQ ID NO: 1518859 - DNA, 15 bp, Homo sapiens
ctgctgctacttccc

SEQ ID NO: 1518860 - DNA, 15 bp, Homo sapiens
tgctgctacttccca

SEQ ID NO: 1518861 - DNA, 15 bp, Homo sapiens
gctgctacttcccat

SEQ ID NO: 1518862 - DNA, 15 bp, Homo sapiens
ctgctacttcccatc

SEQ ID NO: 1518863 - DNA, 15 bp, Homo sapiens
tgctacttcccatca

SEQ ID NO: 1518864 - DNA, 15 bp, Homo sapiens
gctacttcccatcag

SEQ ID NO: 1518865 - DNA, 15 bp, Homo sapiens
ctacttcccatcagc

SEQ ID NO: 1518866 - DNA, 15 bp, Homo sapiens
tacttcccatcagcc

SEQ ID NO: 1518867 - DNA, 15 bp, Homo sapiens
acttcccatcagcca

SEQ ID NO: 1518868 - DNA, 15 bp, Homo sapiens
cttcccatcagccac

SEQ ID NO: 1518869 - DNA, 15 bp, Homo sapiens
ttcccatcagccacc

SEQ ID NO: 1518870 - DNA, 15 bp, Homo sapiens
tcccatcagccacct

SEQ ID NO: 1518871 - DNA, 15 bp, Homo sapiens
cccatcagccacctg

SEQ ID NO: 1518872 - DNA, 15 bp, Homo sapiens
ccatcagccacctgc

SEQ ID NO: 1518873 - DNA, 15 bp, Homo sapiens
catcagccacctgca

SEQ ID NO: 1518874 - DNA, 15 bp, Homo sapiens
atcagccacctgcac

SEQ ID NO: 1518875 - DNA, 15 bp, Homo sapiens
tcagccacctgcacc

SEQ ID NO: 1518876 - DNA, 15 bp, Homo sapiens
cagccacctgcacct

SEQ ID NO: 1518877 - DNA, 15 bp, Homo sapiens
agccacctgcacctt

SEQ ID NO: 1518878 - DNA, 15 bp, Homo sapiens
gccacctgcaccttt

SEQ ID NO: 1518879 - DNA, 15 bp, Homo sapiens
ccacctgcacctttc

SEQ ID NO: 1518880 - DNA, 15 bp, Homo sapiens
cacctgcacctttca

SEQ ID NO: 1518881 - DNA, 15 bp, Homo sapiens
acctgcacctttcag

SEQ ID NO: 1518882 - DNA, 15 bp, Homo sapiens
cctgcacctttcaga

SEQ ID NO: 1518883 - DNA, 15 bp, Homo sapiens
ctgcacctttcagag

SEQ ID NO: 1518884 - DNA, 15 bp, Homo sapiens
tgcacctttcagagg

SEQ ID NO: 1518885 - DNA, 15 bp, Homo sapiens
gcacctttcagaggg

SEQ ID NO: 1518886 - DNA, 15 bp, Homo sapiens
cacctttcagaggga

SEQ ID NO: 1518887 - DNA, 15 bp, Homo sapiens
acctttcagagggac

SEQ ID NO: 1518888 - DNA, 15 bp, Homo sapiens
cctttcagagggact

SEQ ID NO: 1518889 - DNA, 15 bp, Homo sapiens
ctttcagagggacta

SEQ ID NO: 1518890 - DNA, 15 bp, Homo sapiens
tttcagagggactaa

SEQ ID NO: 1518891 - DNA, 15 bp, Homo sapiens
ttcagagggactaag

SEQ ID NO: 1518892 - DNA, 15 bp, Homo sapiens
tcagagggactaaga

SEQ ID NO: 1518893 - DNA, 15 bp, Homo sapiens
cagagggactaagaa

SEQ ID NO: 1518894 - DNA, 15 bp, Homo sapiens
agagggactaagaag

SEQ ID NO: 1518895 - DNA, 15 bp, Homo sapiens
gagggactaagaagc

SEQ ID NO: 1518896 - DNA, 15 bp, Homo sapiens
agggactaagaagca

SEQ ID NO: 1518897 - DNA, 15 bp, Homo sapiens
gggactaagaagcat

SEQ ID NO: 1518898 - DNA, 15 bp, Homo sapiens
ggactaagaagcatt

SEQ ID NO: 1518899 - DNA, 15 bp, Homo sapiens
gactaagaagcattg

SEQ ID NO: 1518900 - DNA, 15 bp, Homo sapiens
actaagaagcattgc

SEQ ID NO: 1518901 - DNA, 15 bp, Homo sapiens
ctaagaagcattgca

SEQ ID NO: 1518902 - DNA, 15 bp, Homo sapiens
taagaagcattgcaa

SEQ ID NO: 1518903 - DNA, 15 bp, Homo sapiens
aagaagcattgcaag

SEQ ID NO: 1518904 - DNA, 15 bp, Homo sapiens
agaagcattgcaagc

SEQ ID NO: 1518905 - DNA, 15 bp, Homo sapiens
gaagcattgcaagcc

SEQ ID NO: 1518906 - DNA, 15 bp, Homo sapiens
aagcattgcaagccc

SEQ ID NO: 1518907 - DNA, 15 bp, Homo sapiens
agcattgcaagccca

SEQ ID NO: 1518908 - DNA, 15 bp, Homo sapiens
gcattgcaagcccac

SEQ ID NO: 1518909 - DNA, 15 bp, Homo sapiens
cattgcaagcccacc

SEQ ID NO: 1518910 - DNA, 15 bp, Homo sapiens
attgcaagcccaccc

SEQ ID NO: 1518911 - DNA, 15 bp, Homo sapiens
ttgcaagcccacccc

SEQ ID NO: 1518912 - DNA, 15 bp, Homo sapiens
tgcaagcccaccccc

SEQ ID NO: 1518913 - DNA, 15 bp, Homo sapiens
gcaagcccacccccc

SEQ ID NO: 1518914 - DNA, 15 bp, Homo sapiens
caagcccacccccca

SEQ ID NO: 1518915 - DNA, 15 bp, Homo sapiens
aagcccaccccccaa

SEQ ID NO: 1518916 - DNA, 15 bp, Homo sapiens
agcccaccccccaac

SEQ ID NO: 1518917 - DNA, 15 bp, Homo sapiens
gcccaccccccaaca

SEQ ID NO: 1518918 - DNA, 15 bp, Homo sapiens
cccaccccccaacag

SEQ ID NO: 1518919 - DNA, 15 bp, Homo sapiens
ccaccccccaacagc

SEQ ID NO: 1518920 - DNA, 15 bp, Homo sapiens
caccccccaacagcc

SEQ ID NO: 1518921 - DNA, 15 bp, Homo sapiens
accccccaacagcca

SEQ ID NO: 1518922 - DNA, 15 bp, Homo sapiens
ccccccaacagccaa

SEQ ID NO: 1518923 - DNA, 15 bp, Homo sapiens
cccccaacagccaaa

SEQ ID NO: 1518924 - DNA, 15 bp, Homo sapiens
ccccaacagccaaag

SEQ ID NO: 1518925 - DNA, 15 bp, Homo sapiens
cccaacagccaaaga

SEQ ID NO: 1518926 - DNA, 15 bp, Homo sapiens
ccaacagccaaagaa

SEQ ID NO: 1518927 - DNA, 15 bp, Homo sapiens
caacagccaaagaag

SEQ ID NO: 1518928 - DNA, 15 bp, Homo sapiens
aacagccaaagaagg

SEQ ID NO: 1518929 - DNA, 15 bp, Homo sapiens
acagccaaagaaggt

SEQ ID NO: 1518930 - DNA, 15 bp, Homo sapiens
cagccaaagaaggtt

SEQ ID NO: 1518931 - DNA, 15 bp, Homo sapiens
agccaaagaaggttc

SEQ ID NO: 1518932 - DNA, 15 bp, Homo sapiens
gccaaagaaggttca

SEQ ID NO: 1518933 - DNA, 15 bp, Homo sapiens
ccaaagaaggttcag

SEQ ID NO: 1518934 - DNA, 15 bp, Homo sapiens
caaagaaggttcagg

SEQ ID NO: 1518935 - DNA, 15 bp, Homo sapiens
aaagaaggttcaggg

SEQ ID NO: 1518936 - DNA, 15 bp, Homo sapiens
aagaaggttcagggc

SEQ ID NO: 1518937 - DNA, 15 bp, Homo sapiens
agaaggttcagggct

SEQ ID NO: 1518938 - DNA, 15 bp, Homo sapiens
gaaggttcagggctc

SEQ ID NO: 1518939 - DNA, 15 bp, Homo sapiens
aaggttcagggctcc

SEQ ID NO: 1518940 - DNA, 15 bp, Homo sapiens
aggttcagggctccc

SEQ ID NO: 1518941 - DNA, 15 bp, Homo sapiens
ggttcagggctcccc

SEQ ID NO: 1518942 - DNA, 15 bp, Homo sapiens
gttcagggctcccca

SEQ ID NO: 1518943 - DNA, 15 bp, Homo sapiens
ttcagggctccccac

SEQ ID NO: 1518944 - DNA, 15 bp, Homo sapiens
tcagggctccccaca

SEQ ID NO: 1518945 - DNA, 15 bp, Homo sapiens
cagggctccccacac

SEQ ID NO: 1518946 - DNA, 15 bp, Homo sapiens
agggctccccacact

SEQ ID NO: 1518947 - DNA, 15 bp, Homo sapiens
gggctccccacactg

SEQ ID NO: 1518948 - DNA, 15 bp, Homo sapiens
ggctccccacactgc

SEQ ID NO: 1518949 - DNA, 15 bp, Homo sapiens
gctccccacactgca

SEQ ID NO: 1518950 - DNA, 15 bp, Homo sapiens
ctccccacactgcac

SEQ ID NO: 1518951 - DNA, 15 bp, Homo sapiens
tccccacactgcaca

SEQ ID NO: 1518952 - DNA, 15 bp, Homo sapiens
ccccacactgcacaa

SEQ ID NO: 1518953 - DNA, 15 bp, Homo sapiens
cccacactgcacaac

SEQ ID NO: 1518954 - DNA, 15 bp, Homo sapiens
ccacactgcacaaca

SEQ ID NO: 1518955 - DNA, 15 bp, Homo sapiens
cacactgcacaacac

SEQ ID NO: 1518956 - DNA, 15 bp, Homo sapiens
acactgcacaacacg

SEQ ID NO: 1518957 - DNA, 15 bp, Homo sapiens
cactgcacaacacgg

SEQ ID NO: 1518958 - DNA, 15 bp, Homo sapiens
actgcacaacacggc

SEQ ID NO: 1518959 - DNA, 15 bp, Homo sapiens
ctgcacaacacggcc

SEQ ID NO: 1518960 - DNA, 15 bp, Homo sapiens
tgcacaacacggcct

SEQ ID NO: 1518961 - DNA, 15 bp, Homo sapiens
gcacaacacggcctt

SEQ ID NO: 1518962 - DNA, 15 bp, Homo sapiens
cacaacacggccttt

SEQ ID NO: 1518963 - DNA, 15 bp, Homo sapiens
acaacacggcctttg

SEQ ID NO: 1518964 - DNA, 15 bp, Homo sapiens
caacacggcctttgg

SEQ ID NO: 1518965 - DNA, 15 bp, Homo sapiens
aacacggcctttggt

SEQ ID NO: 1518966 - DNA, 15 bp, Homo sapiens
acacggcctttggtc

SEQ ID NO: 1518967 - DNA, 15 bp, Homo sapiens
cacggcctttggtcc

SEQ ID NO: 1518968 - DNA, 15 bp, Homo sapiens
acggcctttggtcca

SEQ ID NO: 1518969 - DNA, 15 bp, Homo sapiens
cggcctttggtccaa

SEQ ID NO: 1518970 - DNA, 15 bp, Homo sapiens
ggcctttggtccaag

SEQ ID NO: 1518971 - DNA, 15 bp, Homo sapiens
gcctttggtccaagc

SEQ ID NO: 1518972 - DNA, 15 bp, Homo sapiens
cctttggtccaagcc

SEQ ID NO: 1518973 - DNA, 15 bp, Homo sapiens
ctttggtccaagccc

SEQ ID NO: 1518974 - DNA, 15 bp, Homo sapiens
tttggtccaagccct

SEQ ID NO: 1518975 - DNA, 15 bp, Homo sapiens
ttggtccaagcccta

SEQ ID NO: 1518976 - DNA, 15 bp, Homo sapiens
tggtccaagccctag

SEQ ID NO: 1518977 - DNA, 15 bp, Homo sapiens
ggtccaagccctagt

SEQ ID NO: 1518978 - DNA, 15 bp, Homo sapiens
gtccaagccctagtg

SEQ ID NO: 1518979 - DNA, 15 bp, Homo sapiens
tccaagccctagtgc

SEQ ID NO: 1518980 - DNA, 15 bp, Homo sapiens
ccaagccctagtgct

SEQ ID NO: 1518981 - DNA, 15 bp, Homo sapiens
caagccctagtgctc

SEQ ID NO: 1518982 - DNA, 15 bp, Homo sapiens
aagccctagtgctct

SEQ ID NO: 1518983 - DNA, 15 bp, Homo sapiens
agccctagtgctcta

SEQ ID NO: 1518984 - DNA, 15 bp, Homo sapiens
gccctagtgctctaa

SEQ ID NO: 1518985 - DNA, 15 bp, Homo sapiens
ccctagtgctctaag

SEQ ID NO: 1518986 - DNA, 15 bp, Homo sapiens
cctagtgctctaaga

SEQ ID NO: 1518987 - DNA, 15 bp, Homo sapiens
ctagtgctctaagat

SEQ ID NO: 1518988 - DNA, 15 bp, Homo sapiens
tagtgctctaagata

SEQ ID NO: 1518989 - DNA, 15 bp, Homo sapiens
agtgctctaagatat

SEQ ID NO: 1518990 - DNA, 15 bp, Homo sapiens
gtgctctaagatatg

SEQ ID NO: 1518991 - DNA, 15 bp, Homo sapiens
tgctctaagatatgg

SEQ ID NO: 1518992 - DNA, 15 bp, Homo sapiens
gctctaagatatggc

SEQ ID NO: 1518993 - DNA, 15 bp, Homo sapiens
ctctaagatatggcc

SEQ ID NO: 1518994 - DNA, 15 bp, Homo sapiens
tctaagatatggcca

SEQ ID NO: 1518995 - DNA, 15 bp, Homo sapiens
ctaagatatggccat

SEQ ID NO: 1518996 - DNA, 15 bp, Homo sapiens
taagatatggccatg

SEQ ID NO: 1518997 - DNA, 15 bp, Homo sapiens
aagatatggccatga

SEQ ID NO: 1518998 - DNA, 15 bp, Homo sapiens
agatatggccatgaa

SEQ ID NO: 1518999 - DNA, 15 bp, Homo sapiens
gatatggccatgaaa

SEQ ID NO: 1519000 - DNA, 15 bp, Homo sapiens
atatggccatgaaaa

SEQ ID NO: 1519001 - DNA, 15 bp, Homo sapiens
tatggccatgaaaag

SEQ ID NO: 1519002 - DNA, 15 bp, Homo sapiens
atggccatgaaaagg

SEQ ID NO: 1519003 - DNA, 15 bp, Homo sapiens
tggccatgaaaaggg

SEQ ID NO: 1519004 - DNA, 15 bp, Homo sapiens
ggccatgaaaagggg

SEQ ID NO: 1519005 - DNA, 15 bp, Homo sapiens
gccatgaaaaggggg

SEQ ID NO: 1519006 - DNA, 15 bp, Homo sapiens
ccatgaaaagggggg

SEQ ID NO: 1519007 - DNA, 15 bp, Homo sapiens
catgaaaaggggggc

SEQ ID NO: 1519008 - DNA, 15 bp, Homo sapiens
atgaaaaggggggct

SEQ ID NO: 1519009 - DNA, 15 bp, Homo sapiens
tgaaaaggggggctg

SEQ ID NO: 1519010 - DNA, 15 bp, Homo sapiens
gaaaaggggggctga

SEQ ID NO: 1519011 - DNA, 15 bp, Homo sapiens
aaaaggggggctgag

SEQ ID NO: 1519012 - DNA, 15 bp, Homo sapiens
aaaggggggctgagg

SEQ ID NO: 1519013 - DNA, 15 bp, Homo sapiens
aaggggggctgaggg

SEQ ID NO: 1519014 - DNA, 15 bp, Homo sapiens
aggggggctgagggg

SEQ ID NO: 1519015 - DNA, 15 bp, Homo sapiens
ggggggctgaggggc

SEQ ID NO: 1519016 - DNA, 15 bp, Homo sapiens
gggggctgaggggca

SEQ ID NO: 1519017 - DNA, 15 bp, Homo sapiens
ggggctgaggggcag

SEQ ID NO: 1519018 - DNA, 15 bp, Homo sapiens
gggctgaggggcagc

SEQ ID NO: 1519019 - DNA, 15 bp, Homo sapiens
ggctgaggggcagct

SEQ ID NO: 1519020 - DNA, 15 bp, Homo sapiens
gctgaggggcagctg

SEQ ID NO: 1519021 - DNA, 15 bp, Homo sapiens
ctgaggggcagctgg

SEQ ID NO: 1519022 - DNA, 15 bp, Homo sapiens
tgaggggcagctggg

SEQ ID NO: 1519023 - DNA, 15 bp, Homo sapiens
gaggggcagctgggc

SEQ ID NO: 1519024 - DNA, 15 bp, Homo sapiens
aggggcagctgggca

SEQ ID NO: 1519025 - DNA, 15 bp, Homo sapiens
ggggcagctgggcag

SEQ ID NO: 1519026 - DNA, 15 bp, Homo sapiens
gggcagctgggcagc

SEQ ID NO: 1519027 - DNA, 15 bp, Homo sapiens
ggcagctgggcagcg

SEQ ID NO: 1519028 - DNA, 15 bp, Homo sapiens
gcagctgggcagcgg

SEQ ID NO: 1519029 - DNA, 15 bp, Homo sapiens
cagctgggcagcggg

SEQ ID NO: 1519030 - DNA, 15 bp, Homo sapiens
agctgggcagcgggc

SEQ ID NO: 1519031 - DNA, 15 bp, Homo sapiens
gctgggcagcgggcc

SEQ ID NO: 1519032 - DNA, 15 bp, Homo sapiens
ctgggcagcgggcct

SEQ ID NO: 1519033 - DNA, 15 bp, Homo sapiens
tgggcagcgggcctg

SEQ ID NO: 1519034 - DNA, 15 bp, Homo sapiens
gggcagcgggcctgg

SEQ ID NO: 1519035 - DNA, 15 bp, Homo sapiens
ggcagcgggcctggg

SEQ ID NO: 1519036 - DNA, 15 bp, Homo sapiens
gcagcgggcctgggt

SEQ ID NO: 1519037 - DNA, 15 bp, Homo sapiens
cagcgggcctgggtc

SEQ ID NO: 1519038 - DNA, 15 bp, Homo sapiens
agcgggcctgggtcc

SEQ ID NO: 1519039 - DNA, 15 bp, Homo sapiens
gcgggcctgggtccc

SEQ ID NO: 1519040 - DNA, 15 bp, Homo sapiens
cgggcctgggtccct

SEQ ID NO: 1519041 - DNA, 15 bp, Homo sapiens
gggcctgggtccctc

SEQ ID NO: 1519042 - DNA, 15 bp, Homo sapiens
ggcctgggtccctcg

SEQ ID NO: 1519043 - DNA, 15 bp, Homo sapiens
gcctgggtccctcga

SEQ ID NO: 1519044 - DNA, 15 bp, Homo sapiens
cctgggtccctcgat

SEQ ID NO: 1519045 - DNA, 15 bp, Homo sapiens
ctgggtccctcgatc

SEQ ID NO: 1519046 - DNA, 15 bp, Homo sapiens
tgggtccctcgatct

SEQ ID NO: 1519047 - DNA, 15 bp, Homo sapiens
gggtccctcgatctg

SEQ ID NO: 1519048 - DNA, 15 bp, Homo sapiens
ggtccctcgatctgg

SEQ ID NO: 1519049 - DNA, 15 bp, Homo sapiens
gtccctcgatctgga

SEQ ID NO: 1519050 - DNA, 15 bp, Homo sapiens
tccctcgatctggac

SEQ ID NO: 1519051 - DNA, 15 bp, Homo sapiens
ccctcgatctggaca

SEQ ID NO: 1519052 - DNA, 15 bp, Homo sapiens
cctcgatctggacaa

SEQ ID NO: 1519053 - DNA, 15 bp, Homo sapiens
ctcgatctggacaac

SEQ ID NO: 1519054 - DNA, 15 bp, Homo sapiens
tcgatctggacaacc

SEQ ID NO: 1519055 - DNA, 15 bp, Homo sapiens
cgatctggacaaccc

SEQ ID NO: 1519056 - DNA, 15 bp, Homo sapiens
gatctggacaaccca

SEQ ID NO: 1519057 - DNA, 15 bp, Homo sapiens
atctggacaacccag

SEQ ID NO: 1519058 - DNA, 15 bp, Homo sapiens
tctggacaacccaga

SEQ ID NO: 1519059 - DNA, 15 bp, Homo sapiens
ctggacaacccagag

SEQ ID NO: 1519060 - DNA, 15 bp, Homo sapiens
tggacaacccagagc

SEQ ID NO: 1519061 - DNA, 15 bp, Homo sapiens
ggacaacccagagca

SEQ ID NO: 1519062 - DNA, 15 bp, Homo sapiens
gacaacccagagcaa

SEQ ID NO: 1519063 - DNA, 15 bp, Homo sapiens
acaacccagagcaag

SEQ ID NO: 1519064 - DNA, 15 bp, Homo sapiens
caacccagagcaagt

SEQ ID NO: 1519065 - DNA, 15 bp, Homo sapiens
aacccagagcaagtc

SEQ ID NO: 1519066 - DNA, 15 bp, Homo sapiens
acccagagcaagtct

SEQ ID NO: 1519067 - DNA, 15 bp, Homo sapiens
cccagagcaagtctc

SEQ ID NO: 1519068 - DNA, 15 bp, Homo sapiens
ccagagcaagtctct

SEQ ID NO: 1519069 - DNA, 15 bp, Homo sapiens
cagagcaagtctctt

SEQ ID NO: 1519070 - DNA, 15 bp, Homo sapiens
agagcaagtctcttc

SEQ ID NO: 1519071 - DNA, 15 bp, Homo sapiens
gagcaagtctcttcc

SEQ ID NO: 1519072 - DNA, 15 bp, Homo sapiens
agcaagtctcttccc

SEQ ID NO: 1519073 - DNA, 15 bp, Homo sapiens
gcaagtctcttcccc

SEQ ID NO: 1519074 - DNA, 15 bp, Homo sapiens
caagtctcttcccct

SEQ ID NO: 1519075 - DNA, 15 bp, Homo sapiens
aagtctcttcccctt

SEQ ID NO: 1519076 - DNA, 15 bp, Homo sapiens
agtctcttccccttt

SEQ ID NO: 1519077 - DNA, 15 bp, Homo sapiens
gtctcttcccctttc

SEQ ID NO: 1519078 - DNA, 15 bp, Homo sapiens
tctcttcccctttct

SEQ ID NO: 1519079 - DNA, 15 bp, Homo sapiens
ctcttcccctttctg

SEQ ID NO: 1519080 - DNA, 15 bp, Homo sapiens
tcttcccctttctga

SEQ ID NO: 1519081 - DNA, 15 bp, Homo sapiens
cttcccctttctgag

SEQ ID NO: 1519082 - DNA, 15 bp, Homo sapiens
ttcccctttctgagc

SEQ ID NO: 1519083 - DNA, 15 bp, Homo sapiens
tcccctttctgagca

SEQ ID NO: 1519084 - DNA, 15 bp, Homo sapiens
cccctttctgagcag

SEQ ID NO: 1519085 - DNA, 15 bp, Homo sapiens
ccctttctgagcaga

SEQ ID NO: 1519086 - DNA, 15 bp, Homo sapiens
cctttctgagcagag

SEQ ID NO: 1519087 - DNA, 15 bp, Homo sapiens
ctttctgagcagaga

SEQ ID NO: 1519088 - DNA, 15 bp, Homo sapiens
tttctgagcagagag

SEQ ID NO: 1519089 - DNA, 15 bp, Homo sapiens
ttctgagcagagagt

SEQ ID NO: 1519090 - DNA, 15 bp, Homo sapiens
tctgagcagagagtt

SEQ ID NO: 1519091 - DNA, 15 bp, Homo sapiens
ctgagcagagagttc

SEQ ID NO: 1519092 - DNA, 15 bp, Homo sapiens
tgagcagagagttca

SEQ ID NO: 1519093 - DNA, 15 bp, Homo sapiens
gagcagagagttcag

SEQ ID NO: 1519094 - DNA, 15 bp, Homo sapiens
agcagagagttcaga

SEQ ID NO: 1519095 - DNA, 15 bp, Homo sapiens
gcagagagttcagac

SEQ ID NO: 1519096 - DNA, 15 bp, Homo sapiens
cagagagttcagaca

SEQ ID NO: 1519097 - DNA, 15 bp, Homo sapiens
agagagttcagacag

SEQ ID NO: 1519098 - DNA, 15 bp, Homo sapiens
gagagttcagacagg

SEQ ID NO: 1519099 - DNA, 15 bp, Homo sapiens
agagttcagacaggt

SEQ ID NO: 1519100 - DNA, 15 bp, Homo sapiens
gagttcagacaggtg

SEQ ID NO: 1519101 - DNA, 15 bp, Homo sapiens
agttcagacaggtga

SEQ ID NO: 1519102 - DNA, 15 bp, Homo sapiens
gttcagacaggtgat

SEQ ID NO: 1519103 - DNA, 15 bp, Homo sapiens
ttcagacaggtgatg

SEQ ID NO: 1519104 - DNA, 15 bp, Homo sapiens
tcagacaggtgatgt

SEQ ID NO: 1519105 - DNA, 15 bp, Homo sapiens
cagacaggtgatgta

SEQ ID NO: 1519106 - DNA, 15 bp, Homo sapiens
agacaggtgatgtaa

SEQ ID NO: 1519107 - DNA, 15 bp, Homo sapiens
gacaggtgatgtaag

SEQ ID NO: 1519108 - DNA, 15 bp, Homo sapiens
acaggtgatgtaagc

SEQ ID NO: 1519109 - DNA, 15 bp, Homo sapiens
caggtgatgtaagca

SEQ ID NO: 1519110 - DNA, 15 bp, Homo sapiens
aggtgatgtaagcat

SEQ ID NO: 1519111 - DNA, 15 bp, Homo sapiens
ggtgatgtaagcatg

SEQ ID NO: 1519112 - DNA, 15 bp, Homo sapiens
gtgatgtaagcatga

SEQ ID NO: 1519113 - DNA, 15 bp, Homo sapiens
tgatgtaagcatgaa

SEQ ID NO: 1519114 - DNA, 15 bp, Homo sapiens
gatgtaagcatgaat

SEQ ID NO: 1519115 - DNA, 15 bp, Homo sapiens
atgtaagcatgaatg

SEQ ID NO: 1519116 - DNA, 15 bp, Homo sapiens
tgtaagcatgaatga

SEQ ID NO: 1519117 - DNA, 15 bp, Homo sapiens
gtaagcatgaatgaa

SEQ ID NO: 1519118 - DNA, 15 bp, Homo sapiens
taagcatgaatgaat

SEQ ID NO: 1519119 - DNA, 15 bp, Homo sapiens
aagcatgaatgaatg

SEQ ID NO: 1519120 - DNA, 15 bp, Homo sapiens
agcatgaatgaatga

SEQ ID NO: 1519121 - DNA, 15 bp, Homo sapiens
gcatgaatgaatgag

SEQ ID NO: 1519122 - DNA, 15 bp, Homo sapiens
catgaatgaatgagg

SEQ ID NO: 1519123 - DNA, 15 bp, Homo sapiens
atgaatgaatgaggc

SEQ ID NO: 1519124 - DNA, 15 bp, Homo sapiens
tgaatgaatgaggcc

SEQ ID NO: 1519125 - DNA, 15 bp, Homo sapiens
gaatgaatgaggcct

SEQ ID NO: 1519126 - DNA, 15 bp, Homo sapiens
aatgaatgaggcctc

SEQ ID NO: 1519127 - DNA, 15 bp, Homo sapiens
atgaatgaggcctcc

SEQ ID NO: 1519128 - DNA, 15 bp, Homo sapiens
tgaatgaggcctcct

SEQ ID NO: 1519129 - DNA, 15 bp, Homo sapiens
gaatgaggcctcctg

SEQ ID NO: 1519130 - DNA, 15 bp, Homo sapiens
aatgaggcctcctga

SEQ ID NO: 1519131 - DNA, 15 bp, Homo sapiens
atgaggcctcctgac

SEQ ID NO: 1519132 - DNA, 15 bp, Homo sapiens
tgaggcctcctgacc

SEQ ID NO: 1519133 - DNA, 15 bp, Homo sapiens
gaggcctcctgaccc

SEQ ID NO: 1519134 - DNA, 15 bp, Homo sapiens
aggcctcctgaccct

SEQ ID NO: 1519135 - DNA, 15 bp, Homo sapiens
ggcctcctgaccctg

SEQ ID NO: 1519136 - DNA, 15 bp, Homo sapiens
gcctcctgaccctgg

SEQ ID NO: 1519137 - DNA, 15 bp, Homo sapiens
cctcctgaccctgga

SEQ ID NO: 1519138 - DNA, 15 bp, Homo sapiens
ctcctgaccctggaa

SEQ ID NO: 1519139 - DNA, 15 bp, Homo sapiens
tcctgaccctggaag

SEQ ID NO: 1519140 - DNA, 15 bp, Homo sapiens
cctgaccctggaagc

SEQ ID NO: 1519141 - DNA, 15 bp, Homo sapiens
ctgaccctggaagcc

SEQ ID NO: 1519142 - DNA, 15 bp, Homo sapiens
tgaccctggaagcct

SEQ ID NO: 1519143 - DNA, 15 bp, Homo sapiens
gaccctggaagcctc

SEQ ID NO: 1519144 - DNA, 15 bp, Homo sapiens
accctggaagcctct

SEQ ID NO: 1519145 - DNA, 15 bp, Homo sapiens
ccctggaagcctctt

SEQ ID NO: 1519146 - DNA, 15 bp, Homo sapiens
cctggaagcctcttg

SEQ ID NO: 1519147 - DNA, 15 bp, Homo sapiens
ctggaagcctcttgt

SEQ ID NO: 1519148 - DNA, 15 bp, Homo sapiens
tggaagcctcttgtg

SEQ ID NO: 1519149 - DNA, 15 bp, Homo sapiens
ggaagcctcttgtgt

SEQ ID NO: 1519150 - DNA, 15 bp, Homo sapiens
gaagcctcttgtgtg

SEQ ID NO: 1519151 - DNA, 15 bp, Homo sapiens
aagcctcttgtgtgt

SEQ ID NO: 1519152 - DNA, 15 bp, Homo sapiens
agcctcttgtgtgtg

SEQ ID NO: 1519153 - DNA, 15 bp, Homo sapiens
gcctcttgtgtgtgg

SEQ ID NO: 1519154 - DNA, 15 bp, Homo sapiens
cctcttgtgtgtggg

SEQ ID NO: 1519155 - DNA, 15 bp, Homo sapiens
ctcttgtgtgtgggg

SEQ ID NO: 1519156 - DNA, 15 bp, Homo sapiens
tcttgtgtgtggggc

SEQ ID NO: 1519157 - DNA, 15 bp, Homo sapiens
cttgtgtgtggggct

SEQ ID NO: 1519158 - DNA, 15 bp, Homo sapiens
ttgtgtgtggggctg

SEQ ID NO: 1519159 - DNA, 15 bp, Homo sapiens
tgtgtgtggggctgt

SEQ ID NO: 1519160 - DNA, 15 bp, Homo sapiens
gtgtgtggggctgtg

SEQ ID NO: 1519161 - DNA, 15 bp, Homo sapiens
tgtgtggggctgtgt

SEQ ID NO: 1519162 - DNA, 15 bp, Homo sapiens
gtgtggggctgtgtc

SEQ ID NO: 1519163 - DNA, 15 bp, Homo sapiens
tgtggggctgtgtcc

SEQ ID NO: 1519164 - DNA, 15 bp, Homo sapiens
gtggggctgtgtcct

SEQ ID NO: 1519165 - DNA, 15 bp, Homo sapiens
tggggctgtgtcctt

SEQ ID NO: 1519166 - DNA, 15 bp, Homo sapiens
ggggctgtgtccttg

SEQ ID NO: 1519167 - DNA, 15 bp, Homo sapiens
gggctgtgtccttgc

SEQ ID NO: 1519168 - DNA, 15 bp, Homo sapiens
ggctgtgtccttgct

SEQ ID NO: 1519169 - DNA, 15 bp, Homo sapiens
gctgtgtccttgctg

SEQ ID NO: 1519170 - DNA, 15 bp, Homo sapiens
ctgtgtccttgctgg

SEQ ID NO: 1519171 - DNA, 15 bp, Homo sapiens
tgtgtccttgctggt

SEQ ID NO: 1519172 - DNA, 15 bp, Homo sapiens
gtgtccttgctggtg

SEQ ID NO: 1519173 - DNA, 15 bp, Homo sapiens
tgtccttgctggtga

SEQ ID NO: 1519174 - DNA, 15 bp, Homo sapiens
gtccttgctggtgat

SEQ ID NO: 1519175 - DNA, 15 bp, Homo sapiens
tccttgctggtgata

SEQ ID NO: 1519176 - DNA, 15 bp, Homo sapiens
ccttgctggtgatac

SEQ ID NO: 1519177 - DNA, 15 bp, Homo sapiens
cttgctggtgatact

SEQ ID NO: 1519178 - DNA, 15 bp, Homo sapiens
ttgctggtgatactt

SEQ ID NO: 1519179 - DNA, 15 bp, Homo sapiens
tgctggtgatactta

SEQ ID NO: 1519180 - DNA, 15 bp, Homo sapiens
gctggtgatacttag

SEQ ID NO: 1519181 - DNA, 15 bp, Homo sapiens
ctggtgatacttagt

SEQ ID NO: 1519182 - DNA, 15 bp, Homo sapiens
tggtgatacttagtc

SEQ ID NO: 1519183 - DNA, 15 bp, Homo sapiens
ggtgatacttagtcc

SEQ ID NO: 1519184 - DNA, 15 bp, Homo sapiens
gtgatacttagtccc

SEQ ID NO: 1519185 - DNA, 15 bp, Homo sapiens
tgatacttagtccct

SEQ ID NO: 1519186 - DNA, 15 bp, Homo sapiens
gatacttagtccctc

SEQ ID NO: 1519187 - DNA, 15 bp, Homo sapiens
atacttagtccctcc

SEQ ID NO: 1519188 - DNA, 15 bp, Homo sapiens
tacttagtccctccc

SEQ ID NO: 1519189 - DNA, 15 bp, Homo sapiens
acttagtccctccca

SEQ ID NO: 1519190 - DNA, 15 bp, Homo sapiens
cttagtccctcccac

SEQ ID NO: 1519191 - DNA, 15 bp, Homo sapiens
ttagtccctcccacc

SEQ ID NO: 1519192 - DNA, 15 bp, Homo sapiens
tagtccctcccacct

SEQ ID NO: 1519193 - DNA, 15 bp, Homo sapiens
agtccctcccacctc

SEQ ID NO: 1519194 - DNA, 15 bp, Homo sapiens
gtccctcccacctca

SEQ ID NO: 1519195 - DNA, 15 bp, Homo sapiens
tccctcccacctcag

SEQ ID NO: 1519196 - DNA, 15 bp, Homo sapiens
ccctcccacctcaga

SEQ ID NO: 1519197 - DNA, 15 bp, Homo sapiens
cctcccacctcagac

SEQ ID NO: 1519198 - DNA, 15 bp, Homo sapiens
ctcccacctcagact

SEQ ID NO: 1519199 - DNA, 15 bp, Homo sapiens
tcccacctcagactg

SEQ ID NO: 1519200 - DNA, 15 bp, Homo sapiens
cccacctcagactga

SEQ ID NO: 1519201 - DNA, 15 bp, Homo sapiens
ccacctcagactgag

SEQ ID NO: 1519202 - DNA, 15 bp, Homo sapiens
cacctcagactgagg

SEQ ID NO: 1519203 - DNA, 15 bp, Homo sapiens
acctcagactgaggc

SEQ ID NO: 1519204 - DNA, 15 bp, Homo sapiens
cctcagactgaggca

SEQ ID NO: 1519205 - DNA, 15 bp, Homo sapiens
ctcagactgaggcac

SEQ ID NO: 1519206 - DNA, 15 bp, Homo sapiens
tcagactgaggcacc

SEQ ID NO: 1519207 - DNA, 15 bp, Homo sapiens
cagactgaggcaccc

SEQ ID NO: 1519208 - DNA, 15 bp, Homo sapiens
agactgaggcaccca

SEQ ID NO: 1519209 - DNA, 15 bp, Homo sapiens
gactgaggcacccag

SEQ ID NO: 1519210 - DNA, 15 bp, Homo sapiens
actgaggcacccaga

SEQ ID NO: 1519211 - DNA, 15 bp, Homo sapiens
ctgaggcacccagaa

SEQ ID NO: 1519212 - DNA, 15 bp, Homo sapiens
tgaggcacccagaag

SEQ ID NO: 1519213 - DNA, 15 bp, Homo sapiens
gaggcacccagaagg

SEQ ID NO: 1519214 - DNA, 15 bp, Homo sapiens
aggcacccagaagga

SEQ ID NO: 1519215 - DNA, 15 bp, Homo sapiens
ggcacccagaaggag

SEQ ID NO: 1519216 - DNA, 15 bp, Homo sapiens
gcacccagaaggagg

SEQ ID NO: 1519217 - DNA, 15 bp, Homo sapiens
cacccagaaggaggg

SEQ ID NO: 1519218 - DNA, 15 bp, Homo sapiens
acccagaaggaggga

SEQ ID NO: 1519219 - DNA, 15 bp, Homo sapiens
cccagaaggagggag

SEQ ID NO: 1519220 - DNA, 15 bp, Homo sapiens
ccagaaggagggaga

SEQ ID NO: 1519221 - DNA, 15 bp, Homo sapiens
cagaaggagggagag

SEQ ID NO: 1519222 - DNA, 15 bp, Homo sapiens
agaaggagggagagg

SEQ ID NO: 1519223 - DNA, 15 bp, Homo sapiens
gaaggagggagaggc

SEQ ID NO: 1519224 - DNA, 15 bp, Homo sapiens
aaggagggagaggca

SEQ ID NO: 1519225 - DNA, 15 bp, Homo sapiens
aggagggagaggcag

SEQ ID NO: 1519226 - DNA, 15 bp, Homo sapiens
ggagggagaggcagg

SEQ ID NO: 1519227 - DNA, 15 bp, Homo sapiens
gagggagaggcaggg

SEQ ID NO: 1519228 - DNA, 15 bp, Homo sapiens
agggagaggcagggg

SEQ ID NO: 1519229 - DNA, 15 bp, Homo sapiens
gggagaggcaggggt

SEQ ID NO: 1519230 - DNA, 15 bp, Homo sapiens
ggagaggcaggggtg

SEQ ID NO: 1519231 - DNA, 15 bp, Homo sapiens
gagaggcaggggtgg

SEQ ID NO: 1519232 - DNA, 15 bp, Homo sapiens
agaggcaggggtggg

SEQ ID NO: 1519233 - DNA, 15 bp, Homo sapiens
gaggcaggggtgggg

SEQ ID NO: 1519234 - DNA, 15 bp, Homo sapiens
aggcaggggtggggt

SEQ ID NO: 1519235 - DNA, 15 bp, Homo sapiens
ggcaggggtggggta

SEQ ID NO: 1519236 - DNA, 15 bp, Homo sapiens
gcaggggtggggtag

SEQ ID NO: 1519237 - DNA, 15 bp, Homo sapiens
caggggtggggtaga

SEQ ID NO: 1519238 - DNA, 15 bp, Homo sapiens
aggggtggggtagaa

SEQ ID NO: 1519239 - DNA, 15 bp, Homo sapiens
ggggtggggtagaag

SEQ ID NO: 1519240 - DNA, 15 bp, Homo sapiens
gggtggggtagaagc

SEQ ID NO: 1519241 - DNA, 15 bp, Homo sapiens
ggtggggtagaagca

SEQ ID NO: 1519242 - DNA, 15 bp, Homo sapiens
gtggggtagaagcag

SEQ ID NO: 1519243 - DNA, 15 bp, Homo sapiens
tggggtagaagcaga

SEQ ID NO: 1519244 - DNA, 15 bp, Homo sapiens
ggggtagaagcagag

SEQ ID NO: 1519245 - DNA, 15 bp, Homo sapiens
gggtagaagcagagg

SEQ ID NO: 1519246 - DNA, 15 bp, Homo sapiens
ggtagaagcagaggc

SEQ ID NO: 1519247 - DNA, 15 bp, Homo sapiens
gtagaagcagaggca

SEQ ID NO: 1519248 - DNA, 15 bp, Homo sapiens
tagaagcagaggcag

SEQ ID NO: 1519249 - DNA, 15 bp, Homo sapiens
agaagcagaggcagg

SEQ ID NO: 1519250 - DNA, 15 bp, Homo sapiens
gaagcagaggcaggt

SEQ ID NO: 1519251 - DNA, 15 bp, Homo sapiens
aagcagaggcaggta

SEQ ID NO: 1519252 - DNA, 15 bp, Homo sapiens
agcagaggcaggtaa

SEQ ID NO: 1519253 - DNA, 15 bp, Homo sapiens
gcagaggcaggtaat

SEQ ID NO: 1519254 - DNA, 15 bp, Homo sapiens
gccaattctagagtc

SEQ ID NO: 1519255 - DNA, 15 bp, Homo sapiens
ccaattctagagtct

SEQ ID NO: 1519256 - DNA, 15 bp, Homo sapiens
caattctagagtctc

SEQ ID NO: 1519257 - DNA, 15 bp, Homo sapiens
aattctagagtctca

SEQ ID NO: 1519258 - DNA, 15 bp, Homo sapiens
attctagagtctcac

SEQ ID NO: 1519259 - DNA, 15 bp, Homo sapiens
ttctagagtctcacg

SEQ ID NO: 1519260 - DNA, 15 bp, Homo sapiens
tctagagtctcacga

SEQ ID NO: 1519261 - DNA, 15 bp, Homo sapiens
ctagagtctcacgaa

SEQ ID NO: 1519262 - DNA, 15 bp, Homo sapiens
tagagtctcacgaat

SEQ ID NO: 1519263 - DNA, 15 bp, Homo sapiens
agagtctcacgaatc

SEQ ID NO: 1519264 - DNA, 15 bp, Homo sapiens
gagtctcacgaatct

SEQ ID NO: 1519265 - DNA, 15 bp, Homo sapiens
agtctcacgaatctc

SEQ ID NO: 1519266 - DNA, 15 bp, Homo sapiens
gtctcacgaatctcc

SEQ ID NO: 1519267 - DNA, 15 bp, Homo sapiens
tctcacgaatctccg

SEQ ID NO: 1519268 - DNA, 15 bp, Homo sapiens
ctcacgaatctccgg

SEQ ID NO: 1519269 - DNA, 15 bp, Homo sapiens
tcacgaatctccgga

SEQ ID NO: 1519270 - DNA, 15 bp, Homo sapiens
cacgaatctccggat

SEQ ID NO: 1519271 - DNA, 15 bp, Homo sapiens
acgaatctccggatg

SEQ ID NO: 1519272 - DNA, 15 bp, Homo sapiens
cgaatctccggatgg

SEQ ID NO: 1519273 - DNA, 15 bp, Homo sapiens
gaatctccggatggg

SEQ ID NO: 1519274 - DNA, 15 bp, Homo sapiens
aatctccggatgggt

SEQ ID NO: 1519275 - DNA, 15 bp, Homo sapiens
atctccggatgggtg

SEQ ID NO: 1519276 - DNA, 15 bp, Homo sapiens
tctccggatgggtga

SEQ ID NO: 1519277 - DNA, 15 bp, Homo sapiens
ctccggatgggtgaa

SEQ ID NO: 1519278 - DNA, 15 bp, Homo sapiens
tccggatgggtgaag

SEQ ID NO: 1519279 - DNA, 15 bp, Homo sapiens
ccggatgggtgaagt

SEQ ID NO: 1519280 - DNA, 15 bp, Homo sapiens
cggatgggtgaagtc

SEQ ID NO: 1519281 - DNA, 15 bp, Homo sapiens
ggatgggtgaagtca

SEQ ID NO: 1519282 - DNA, 15 bp, Homo sapiens
gatgggtgaagtcac

SEQ ID NO: 1519283 - DNA, 15 bp, Homo sapiens
atgggtgaagtcact

SEQ ID NO: 1519284 - DNA, 15 bp, Homo sapiens
tgggtgaagtcactc

SEQ ID NO: 1519285 - DNA, 15 bp, Homo sapiens
gggtgaagtcactct

SEQ ID NO: 1519286 - DNA, 15 bp, Homo sapiens
ggtgaagtcactctg

SEQ ID NO: 1519287 - DNA, 15 bp, Homo sapiens
gtgaagtcactctgg

SEQ ID NO: 1519288 - DNA, 15 bp, Homo sapiens
tgaagtcactctggg

SEQ ID NO: 1519289 - DNA, 15 bp, Homo sapiens
gaagtcactctgggt

SEQ ID NO: 1519290 - DNA, 15 bp, Homo sapiens
aagtcactctgggtg

SEQ ID NO: 1519291 - DNA, 15 bp, Homo sapiens
agtcactctgggtgg

SEQ ID NO: 1519292 - DNA, 15 bp, Homo sapiens
gtcactctgggtggg

SEQ ID NO: 1519293 - DNA, 15 bp, Homo sapiens
tcactctgggtgggg

SEQ ID NO: 1519294 - DNA, 15 bp, Homo sapiens
cactctgggtgggga

SEQ ID NO: 1519295 - DNA, 15 bp, Homo sapiens
actctgggtggggag

SEQ ID NO: 1519296 - DNA, 15 bp, Homo sapiens
ctctgggtggggaga

SEQ ID NO: 1519297 - DNA, 15 bp, Homo sapiens
tctgggtggggagac

SEQ ID NO: 1519298 - DNA, 15 bp, Homo sapiens
ctgggtggggagaca

SEQ ID NO: 1519299 - DNA, 15 bp, Homo sapiens
tgggtggggagacag

SEQ ID NO: 1519300 - DNA, 15 bp, Homo sapiens
gggtggggagacagt

SEQ ID NO: 1519301 - DNA, 15 bp, Homo sapiens
ggtggggagacagtt

SEQ ID NO: 1519302 - DNA, 15 bp, Homo sapiens
gtggggagacagttc

SEQ ID NO: 1519303 - DNA, 15 bp, Homo sapiens
tggggagacagttca

SEQ ID NO: 1519304 - DNA, 15 bp, Homo sapiens
ggggagacagttcag

SEQ ID NO: 1519305 - DNA, 15 bp, Homo sapiens
gggagacagttcagt

SEQ ID NO: 1519306 - DNA, 15 bp, Homo sapiens
ggagacagttcagtt

SEQ ID NO: 1519307 - DNA, 15 bp, Homo sapiens
gagacagttcagtta

SEQ ID NO: 1519308 - DNA, 15 bp, Homo sapiens
agacagttcagttaa

SEQ ID NO: 1519309 - DNA, 15 bp, Homo sapiens
gacagttcagttaag

SEQ ID NO: 1519310 - DNA, 15 bp, Homo sapiens
acagttcagttaagc

SEQ ID NO: 1519311 - DNA, 15 bp, Homo sapiens
cagttcagttaagca

SEQ ID NO: 1519312 - DNA, 15 bp, Homo sapiens
agttcagttaagcac

SEQ ID NO: 1519313 - DNA, 15 bp, Homo sapiens
gttcagttaagcaca

SEQ ID NO: 1519314 - DNA, 15 bp, Homo sapiens
ttcagttaagcacag

SEQ ID NO: 1519315 - DNA, 15 bp, Homo sapiens
tcagttaagcacagc

SEQ ID NO: 1519316 - DNA, 15 bp, Homo sapiens
cagttaagcacagct

SEQ ID NO: 1519317 - DNA, 15 bp, Homo sapiens
agttaagcacagctt

SEQ ID NO: 1519318 - DNA, 15 bp, Homo sapiens
gttaagcacagcttt

SEQ ID NO: 1519319 - DNA, 15 bp, Homo sapiens
ttaagcacagctttg

SEQ ID NO: 1519320 - DNA, 15 bp, Homo sapiens
taagcacagctttgg

SEQ ID NO: 1519321 - DNA, 15 bp, Homo sapiens
aagcacagctttggg

SEQ ID NO: 1519322 - DNA, 15 bp, Homo sapiens
agcacagctttggga

SEQ ID NO: 1519323 - DNA, 15 bp, Homo sapiens
gcacagctttgggag

SEQ ID NO: 1519324 - DNA, 15 bp, Homo sapiens
cacagctttgggagt

SEQ ID NO: 1519325 - DNA, 15 bp, Homo sapiens
acagctttgggagtc

SEQ ID NO: 1519326 - DNA, 15 bp, Homo sapiens
cagctttgggagtca

SEQ ID NO: 1519327 - DNA, 15 bp, Homo sapiens
agctttgggagtcag

SEQ ID NO: 1519328 - DNA, 15 bp, Homo sapiens
gctttgggagtcaga

SEQ ID NO: 1519329 - DNA, 15 bp, Homo sapiens
ctttgggagtcagat

SEQ ID NO: 1519330 - DNA, 15 bp, Homo sapiens
tttgggagtcagatc

SEQ ID NO: 1519331 - DNA, 15 bp, Homo sapiens
ttgggagtcagatca

SEQ ID NO: 1519332 - DNA, 15 bp, Homo sapiens
tgggagtcagatcag

SEQ ID NO: 1519333 - DNA, 15 bp, Homo sapiens
gggagtcagatcagc

SEQ ID NO: 1519334 - DNA, 15 bp, Homo sapiens
ggagtcagatcagcc

SEQ ID NO: 1519335 - DNA, 15 bp, Homo sapiens
gagtcagatcagcct

SEQ ID NO: 1519336 - DNA, 15 bp, Homo sapiens
agtcagatcagcctg

SEQ ID NO: 1519337 - DNA, 15 bp, Homo sapiens
gtcagatcagcctgt

SEQ ID NO: 1519338 - DNA, 15 bp, Homo sapiens
tcagatcagcctgtg

SEQ ID NO: 1519339 - DNA, 15 bp, Homo sapiens
cagatcagcctgtgt

SEQ ID NO: 1519340 - DNA, 15 bp, Homo sapiens
agatcagcctgtgtt

SEQ ID NO: 1519341 - DNA, 15 bp, Homo sapiens
gatcagcctgtgttc

SEQ ID NO: 1519342 - DNA, 15 bp, Homo sapiens
atcagcctgtgttca

SEQ ID NO: 1519343 - DNA, 15 bp, Homo sapiens
tcagcctgtgttcaa

SEQ ID NO: 1519344 - DNA, 15 bp, Homo sapiens
cagcctgtgttcaaa

SEQ ID NO: 1519345 - DNA, 15 bp, Homo sapiens
agcctgtgttcaaat

SEQ ID NO: 1519346 - DNA, 15 bp, Homo sapiens
gcctgtgttcaaatc

SEQ ID NO: 1519347 - DNA, 15 bp, Homo sapiens
cctgtgttcaaatcc

SEQ ID NO: 1519348 - DNA, 15 bp, Homo sapiens
ctgtgttcaaatcct

SEQ ID NO: 1519349 - DNA, 15 bp, Homo sapiens
tgtgttcaaatcctg

SEQ ID NO: 1519350 - DNA, 15 bp, Homo sapiens
gtgttcaaatcctgg

SEQ ID NO: 1519351 - DNA, 15 bp, Homo sapiens
tgttcaaatcctggc

SEQ ID NO: 1519352 - DNA, 15 bp, Homo sapiens
gttcaaatcctggct

SEQ ID NO: 1519353 - DNA, 15 bp, Homo sapiens
aatcctggctctgct

SEQ ID NO: 1519354 - DNA, 15 bp, Homo sapiens
atcctggctctgctg

SEQ ID NO: 1519355 - DNA, 15 bp, Homo sapiens
tcctggctctgctgc

SEQ ID NO: 1519356 - DNA, 15 bp, Homo sapiens
cctggctctgctgcg

SEQ ID NO: 1519357 - DNA, 15 bp, Homo sapiens
ctggctctgctgcgg

SEQ ID NO: 1519358 - DNA, 15 bp, Homo sapiens
tggctctgctgcggg

SEQ ID NO: 1519359 - DNA, 15 bp, Homo sapiens
ggctctgctgcgggt

SEQ ID NO: 1519360 - DNA, 15 bp, Homo sapiens
gctctgctgcgggtc

SEQ ID NO: 1519361 - DNA, 15 bp, Homo sapiens
ctctgctgcgggtcc

SEQ ID NO: 1519362 - DNA, 15 bp, Homo sapiens
tctgctgcgggtccc

SEQ ID NO: 1519363 - DNA, 15 bp, Homo sapiens
ctgctgcgggtccct

SEQ ID NO: 1519364 - DNA, 15 bp, Homo sapiens
tgctgcgggtccctg

SEQ ID NO: 1519365 - DNA, 15 bp, Homo sapiens
gctgcgggtccctgg

SEQ ID NO: 1519366 - DNA, 15 bp, Homo sapiens
ctgcgggtccctgga

SEQ ID NO: 1519367 - DNA, 15 bp, Homo sapiens
tgcgggtccctggac

SEQ ID NO: 1519368 - DNA, 15 bp, Homo sapiens
gcgggtccctggaca

SEQ ID NO: 1519369 - DNA, 15 bp, Homo sapiens
cgggtccctggacaa

SEQ ID NO: 1519370 - DNA, 15 bp, Homo sapiens
gggtccctggacaag

SEQ ID NO: 1519371 - DNA, 15 bp, Homo sapiens
ggtccctggacaagt

SEQ ID NO: 1519372 - DNA, 15 bp, Homo sapiens
gtccctggacaagtc

SEQ ID NO: 1519373 - DNA, 15 bp, Homo sapiens
tccctggacaagtca

SEQ ID NO: 1519374 - DNA, 15 bp, Homo sapiens
ccctggacaagtcaa

SEQ ID NO: 1519375 - DNA, 15 bp, Homo sapiens
cctggacaagtcaag

SEQ ID NO: 1519376 - DNA, 15 bp, Homo sapiens
ctggacaagtcaagt

SEQ ID NO: 1519377 - DNA, 15 bp, Homo sapiens
tggacaagtcaagta

SEQ ID NO: 1519378 - DNA, 15 bp, Homo sapiens
ggacaagtcaagtag

SEQ ID NO: 1519379 - DNA, 15 bp, Homo sapiens
gacaagtcaagtagc

SEQ ID NO: 1519380 - DNA, 15 bp, Homo sapiens
acaagtcaagtagcc

SEQ ID NO: 1519381 - DNA, 15 bp, Homo sapiens
caagtcaagtagcct

SEQ ID NO: 1519382 - DNA, 15 bp, Homo sapiens
aagtcaagtagcctg

SEQ ID NO: 1519383 - DNA, 15 bp, Homo sapiens
agtcaagtagcctgt

SEQ ID NO: 1519384 - DNA, 15 bp, Homo sapiens
gtcaagtagcctgtc

SEQ ID NO: 1519385 - DNA, 15 bp, Homo sapiens
tcaagtagcctgtcc

SEQ ID NO: 1519386 - DNA, 15 bp, Homo sapiens
caagtagcctgtcca

SEQ ID NO: 1519387 - DNA, 15 bp, Homo sapiens
aagtagcctgtccaa

SEQ ID NO: 1519388 - DNA, 15 bp, Homo sapiens
agtagcctgtccaag

SEQ ID NO: 1519389 - DNA, 15 bp, Homo sapiens
gtagcctgtccaagc

SEQ ID NO: 1519390 - DNA, 15 bp, Homo sapiens
tagcctgtccaagct

SEQ ID NO: 1519391 - DNA, 15 bp, Homo sapiens
agcctgtccaagctg

SEQ ID NO: 1519392 - DNA, 15 bp, Homo sapiens
gcctgtccaagctgc

SEQ ID NO: 1519393 - DNA, 15 bp, Homo sapiens
cctgtccaagctgca

SEQ ID NO: 1519394 - DNA, 15 bp, Homo sapiens
ctgtccaagctgcag

SEQ ID NO: 1519395 - DNA, 15 bp, Homo sapiens
tgtccaagctgcagg

SEQ ID NO: 1519396 - DNA, 15 bp, Homo sapiens
gtccaagctgcaggc

SEQ ID NO: 1519397 - DNA, 15 bp, Homo sapiens
tccaagctgcaggct

SEQ ID NO: 1519398 - DNA, 15 bp, Homo sapiens
ccaagctgcaggctc

SEQ ID NO: 1519399 - DNA, 15 bp, Homo sapiens
caagctgcaggctcc

SEQ ID NO: 1519400 - DNA, 15 bp, Homo sapiens
aagctgcaggctcct

SEQ ID NO: 1519401 - DNA, 15 bp, Homo sapiens
agctgcaggctcctc

SEQ ID NO: 1519402 - DNA, 15 bp, Homo sapiens
gctgcaggctcctcc

SEQ ID NO: 1519403 - DNA, 15 bp, Homo sapiens
ctgcaggctcctcct

SEQ ID NO: 1519404 - DNA, 15 bp, Homo sapiens
tgcaggctcctcctg

SEQ ID NO: 1519405 - DNA, 15 bp, Homo sapiens
gcaggctcctcctgt

SEQ ID NO: 1519406 - DNA, 15 bp, Homo sapiens
caggctcctcctgtg

SEQ ID NO: 1519407 - DNA, 15 bp, Homo sapiens
aggctcctcctgtgc

SEQ ID NO: 1519408 - DNA, 15 bp, Homo sapiens
ggctcctcctgtgca

SEQ ID NO: 1519409 - DNA, 15 bp, Homo sapiens
gctcctcctgtgcaa

SEQ ID NO: 1519410 - DNA, 15 bp, Homo sapiens
ctcctcctgtgcaaa

SEQ ID NO: 1519411 - DNA, 15 bp, Homo sapiens
tcctcctgtgcaaag

SEQ ID NO: 1519412 - DNA, 15 bp, Homo sapiens
cctcctgtgcaaagt

SEQ ID NO: 1519413 - DNA, 15 bp, Homo sapiens
ctcctgtgcaaagtg

SEQ ID NO: 1519414 - DNA, 15 bp, Homo sapiens
tcctgtgcaaagtgt

SEQ ID NO: 1519415 - DNA, 15 bp, Homo sapiens
cctgtgcaaagtgtg

SEQ ID NO: 1519416 - DNA, 15 bp, Homo sapiens
ctgtgcaaagtgtgc

SEQ ID NO: 1519417 - DNA, 15 bp, Homo sapiens
tgtgcaaagtgtgca

SEQ ID NO: 1519418 - DNA, 15 bp, Homo sapiens
gtgcaaagtgtgcag

SEQ ID NO: 1519419 - DNA, 15 bp, Homo sapiens
tgcaaagtgtgcaga

SEQ ID NO: 1519420 - DNA, 15 bp, Homo sapiens
gcaaagtgtgcagag

SEQ ID NO: 1519421 - DNA, 15 bp, Homo sapiens
caaagtgtgcagagt

SEQ ID NO: 1519422 - DNA, 15 bp, Homo sapiens
aaagtgtgcagagta

SEQ ID NO: 1519423 - DNA, 15 bp, Homo sapiens
aagtgtgcagagtat

SEQ ID NO: 1519424 - DNA, 15 bp, Homo sapiens
agtgtgcagagtatg

SEQ ID NO: 1519425 - DNA, 15 bp, Homo sapiens
gtgtgcagagtatga

SEQ ID NO: 1519426 - DNA, 15 bp, Homo sapiens
tgtgcagagtatgac

SEQ ID NO: 1519427 - DNA, 15 bp, Homo sapiens
gtgcagagtatgact

SEQ ID NO: 1519428 - DNA, 15 bp, Homo sapiens
tgcagagtatgactt

SEQ ID NO: 1519429 - DNA, 15 bp, Homo sapiens
gcagagtatgacttt

SEQ ID NO: 1519430 - DNA, 15 bp, Homo sapiens
cagagtatgacttta

SEQ ID NO: 1519431 - DNA, 15 bp, Homo sapiens
agagtatgactttac

SEQ ID NO: 1519432 - DNA, 15 bp, Homo sapiens
gagtatgactttaca

SEQ ID NO: 1519433 - DNA, 15 bp, Homo sapiens
agtatgactttacag

SEQ ID NO: 1519434 - DNA, 15 bp, Homo sapiens
gtatgactttacagg

SEQ ID NO: 1519435 - DNA, 15 bp, Homo sapiens
tatgactttacaggg

SEQ ID NO: 1519436 - DNA, 15 bp, Homo sapiens
atgactttacagggt

SEQ ID NO: 1519437 - DNA, 15 bp, Homo sapiens
tgactttacagggtt

SEQ ID NO: 1519438 - DNA, 15 bp, Homo sapiens
gactttacagggttg

SEQ ID NO: 1519439 - DNA, 15 bp, Homo sapiens
actttacagggttgc

SEQ ID NO: 1519440 - DNA, 15 bp, Homo sapiens
ctttacagggttgcc

SEQ ID NO: 1519441 - DNA, 15 bp, Homo sapiens
tttacagggttgccc

SEQ ID NO: 1519442 - DNA, 15 bp, Homo sapiens
ttacagggttgccct

SEQ ID NO: 1519443 - DNA, 15 bp, Homo sapiens
tacagggttgccctg

SEQ ID NO: 1519444 - DNA, 15 bp, Homo sapiens
acagggttgccctga

SEQ ID NO: 1519445 - DNA, 15 bp, Homo sapiens
cagggttgccctgag

SEQ ID NO: 1519446 - DNA, 15 bp, Homo sapiens
agggttgccctgaga

SEQ ID NO: 1519447 - DNA, 15 bp, Homo sapiens
gggttgccctgagaa

SEQ ID NO: 1519448 - DNA, 15 bp, Homo sapiens
ggttgccctgagaat

SEQ ID NO: 1519449 - DNA, 15 bp, Homo sapiens
gttgccctgagaatt

SEQ ID NO: 1519450 - DNA, 15 bp, Homo sapiens
ttgccctgagaatta

SEQ ID NO: 1519451 - DNA, 15 bp, Homo sapiens
tgccctgagaattaa

SEQ ID NO: 1519452 - DNA, 15 bp, Homo sapiens
gccctgagaattaag

SEQ ID NO: 1519453 - DNA, 15 bp, Homo sapiens
ccctgagaattaagc

SEQ ID NO: 1519454 - DNA, 15 bp, Homo sapiens
cctgagaattaagcc

SEQ ID NO: 1519455 - DNA, 15 bp, Homo sapiens
ctgagaattaagcca

SEQ ID NO: 1519456 - DNA, 15 bp, Homo sapiens
tgagaattaagccac

SEQ ID NO: 1519457 - DNA, 15 bp, Homo sapiens
gagaattaagccaca

SEQ ID NO: 1519458 - DNA, 15 bp, Homo sapiens
agaattaagccacat

SEQ ID NO: 1519459 - DNA, 15 bp, Homo sapiens
gaattaagccacata

SEQ ID NO: 1519460 - DNA, 15 bp, Homo sapiens
aattaagccacataa

SEQ ID NO: 1519461 - DNA, 15 bp, Homo sapiens
attaagccacataat

SEQ ID NO: 1519462 - DNA, 15 bp, Homo sapiens
ttaagccacataatg

SEQ ID NO: 1519463 - DNA, 15 bp, Homo sapiens
taagccacataatgc

SEQ ID NO: 1519464 - DNA, 15 bp, Homo sapiens
aagccacataatgca

SEQ ID NO: 1519465 - DNA, 15 bp, Homo sapiens
agccacataatgcaa

SEQ ID NO: 1519466 - DNA, 15 bp, Homo sapiens
gccacataatgcaaa

SEQ ID NO: 1519467 - DNA, 15 bp, Homo sapiens
ccacataatgcaaag

SEQ ID NO: 1519468 - DNA, 15 bp, Homo sapiens
cacataatgcaaaga

SEQ ID NO: 1519469 - DNA, 15 bp, Homo sapiens
acataatgcaaagaa

SEQ ID NO: 1519470 - DNA, 15 bp, Homo sapiens
cataatgcaaagaaa

SEQ ID NO: 1519471 - DNA, 15 bp, Homo sapiens
ataatgcaaagaaag

SEQ ID NO: 1519472 - DNA, 15 bp, Homo sapiens
taatgcaaagaaagc

SEQ ID NO: 1519473 - DNA, 15 bp, Homo sapiens
aatgcaaagaaagct

SEQ ID NO: 1519474 - DNA, 15 bp, Homo sapiens
atgcaaagaaagctc

SEQ ID NO: 1519475 - DNA, 15 bp, Homo sapiens
tgcaaagaaagctca

SEQ ID NO: 1519476 - DNA, 15 bp, Homo sapiens
gcaaagaaagctcag

SEQ ID NO: 1519477 - DNA, 15 bp, Homo sapiens
caaagaaagctcagc

SEQ ID NO: 1519478 - DNA, 15 bp, Homo sapiens
aaagaaagctcagca

SEQ ID NO: 1519479 - DNA, 15 bp, Homo sapiens
aagaaagctcagcat

SEQ ID NO: 1519480 - DNA, 15 bp, Homo sapiens
agaaagctcagcata

SEQ ID NO: 1519481 - DNA, 15 bp, Homo sapiens
gaaagctcagcatag

SEQ ID NO: 1519482 - DNA, 15 bp, Homo sapiens
aaagctcagcatagt

SEQ ID NO: 1519483 - DNA, 15 bp, Homo sapiens
aagctcagcatagta

SEQ ID NO: 1519484 - DNA, 15 bp, Homo sapiens
agctcagcatagtat

SEQ ID NO: 1519485 - DNA, 15 bp, Homo sapiens
gctcagcatagtatc

SEQ ID NO: 1519486 - DNA, 15 bp, Homo sapiens
ctcagcatagtatct

SEQ ID NO: 1519487 - DNA, 15 bp, Homo sapiens
tcagcatagtatctg

SEQ ID NO: 1519488 - DNA, 15 bp, Homo sapiens
cagcatagtatctgg

SEQ ID NO: 1519489 - DNA, 15 bp, Homo sapiens
agcatagtatctggc

SEQ ID NO: 1519490 - DNA, 15 bp, Homo sapiens
gcatagtatctggcc

SEQ ID NO: 1519491 - DNA, 15 bp, Homo sapiens
catagtatctggccc

SEQ ID NO: 1519492 - DNA, 15 bp, Homo sapiens
atagtatctggcccc

SEQ ID NO: 1519493 - DNA, 15 bp, Homo sapiens
tagtatctggcccct

SEQ ID NO: 1519494 - DNA, 15 bp, Homo sapiens
agtatctggcccctg

SEQ ID NO: 1519495 - DNA, 15 bp, Homo sapiens
gtatctggcccctgg

SEQ ID NO: 1519496 - DNA, 15 bp, Homo sapiens
tatctggcccctggt

SEQ ID NO: 1519497 - DNA, 15 bp, Homo sapiens
atctggcccctggta

SEQ ID NO: 1519498 - DNA, 15 bp, Homo sapiens
tctggcccctggtag

SEQ ID NO: 1519499 - DNA, 15 bp, Homo sapiens
ctggcccctggtaga

SEQ ID NO: 1519500 - DNA, 15 bp, Homo sapiens
tggcccctggtagac

SEQ ID NO: 1519501 - DNA, 15 bp, Homo sapiens
ggcccctggtagacg

SEQ ID NO: 1519502 - DNA, 15 bp, Homo sapiens
gcccctggtagacgc

SEQ ID NO: 1519503 - DNA, 15 bp, Homo sapiens
cccctggtagacgct

SEQ ID NO: 1519504 - DNA, 15 bp, Homo sapiens
ccctggtagacgctc

SEQ ID NO: 1519505 - DNA, 15 bp, Homo sapiens
cctggtagacgctca

SEQ ID NO: 1519506 - DNA, 15 bp, Homo sapiens
ctggtagacgctcat

SEQ ID NO: 1519507 - DNA, 15 bp, Homo sapiens
tggtagacgctcatt

SEQ ID NO: 1519508 - DNA, 15 bp, Homo sapiens
ggtagacgctcatta

SEQ ID NO: 1519509 - DNA, 15 bp, Homo sapiens
gtagacgctcattac

SEQ ID NO: 1519510 - DNA, 15 bp, Homo sapiens
tagacgctcattact

SEQ ID NO: 1519511 - DNA, 15 bp, Homo sapiens
agacgctcattactg

SEQ ID NO: 1519512 - DNA, 15 bp, Homo sapiens
gacgctcattactgc

SEQ ID NO: 1519513 - DNA, 15 bp, Homo sapiens
acgctcattactgcc

SEQ ID NO: 1519514 - DNA, 15 bp, Homo sapiens
cgctcattactgccc

SEQ ID NO: 1519515 - DNA, 15 bp, Homo sapiens
gctcattactgccct

SEQ ID NO: 1519516 - DNA, 15 bp, Homo sapiens
ctcattactgccctc

SEQ ID NO: 1519517 - DNA, 15 bp, Homo sapiens
tcattactgccctca

SEQ ID NO: 1519518 - DNA, 15 bp, Homo sapiens
cattactgccctcac

SEQ ID NO: 1519519 - DNA, 15 bp, Homo sapiens
attactgccctcact

SEQ ID NO: 1519520 - DNA, 15 bp, Homo sapiens
ttactgccctcacta

SEQ ID NO: 1519521 - DNA, 15 bp, Homo sapiens
tactgccctcactat

SEQ ID NO: 1519522 - DNA, 15 bp, Homo sapiens
actgccctcactatg

SEQ ID NO: 1519523 - DNA, 15 bp, Homo sapiens
ctgccctcactatgg

SEQ ID NO: 1519524 - DNA, 15 bp, Homo sapiens
tgccctcactatggg

SEQ ID NO: 1519525 - DNA, 15 bp, Homo sapiens
gccctcactatgggg

SEQ ID NO: 1519526 - DNA, 15 bp, Homo sapiens
ccctcactatgggga

SEQ ID NO: 1519527 - DNA, 15 bp, Homo sapiens
cctcactatggggat

SEQ ID NO: 1519528 - DNA, 15 bp, Homo sapiens
ctcactatggggatg

SEQ ID NO: 1519529 - DNA, 15 bp, Homo sapiens
tcactatggggatga

SEQ ID NO: 1519530 - DNA, 15 bp, Homo sapiens
cactatggggatgaa

SEQ ID NO: 1519531 - DNA, 15 bp, Homo sapiens
actatggggatgaaa

SEQ ID NO: 1519532 - DNA, 15 bp, Homo sapiens
ctatggggatgaaaa

SEQ ID NO: 1519533 - DNA, 15 bp, Homo sapiens
tatggggatgaaaat

SEQ ID NO: 1519534 - DNA, 15 bp, Homo sapiens
atggggatgaaaatg

SEQ ID NO: 1519535 - DNA, 15 bp, Homo sapiens
tggggatgaaaatga

SEQ ID NO: 1519536 - DNA, 15 bp, Homo sapiens
ggggatgaaaatgaa

SEQ ID NO: 1519537 - DNA, 15 bp, Homo sapiens
gggatgaaaatgaag

SEQ ID NO: 1519538 - DNA, 15 bp, Homo sapiens
ggatgaaaatgaagg

SEQ ID NO: 1519539 - DNA, 15 bp, Homo sapiens
gatgaaaatgaagga

SEQ ID NO: 1519540 - DNA, 15 bp, Homo sapiens
atgaaaatgaaggaa

SEQ ID NO: 1519541 - DNA, 15 bp, Homo sapiens
tgaaaatgaaggaaa

SEQ ID NO: 1519542 - DNA, 15 bp, Homo sapiens
gaaaatgaaggaaaa

SEQ ID NO: 1519543 - DNA, 15 bp, Homo sapiens
aaaatgaaggaaaag

SEQ ID NO: 1519544 - DNA, 15 bp, Homo sapiens
aaatgaaggaaaagg

SEQ ID NO: 1519545 - DNA, 15 bp, Homo sapiens
aatgaaggaaaagga

SEQ ID NO: 1519546 - DNA, 15 bp, Homo sapiens
atgaaggaaaaggac

SEQ ID NO: 1519547 - DNA, 15 bp, Homo sapiens
tgaaggaaaaggact

SEQ ID NO: 1519548 - DNA, 15 bp, Homo sapiens
gaaggaaaaggactg

SEQ ID NO: 1519549 - DNA, 15 bp, Homo sapiens
aaggaaaaggactgg

SEQ ID NO: 1519550 - DNA, 15 bp, Homo sapiens
aggaaaaggactggc

SEQ ID NO: 1519551 - DNA, 15 bp, Homo sapiens
ggaaaaggactggcc

SEQ ID NO: 1519552 - DNA, 15 bp, Homo sapiens
gaaaaggactggcct

SEQ ID NO: 1519553 - DNA, 15 bp, Homo sapiens
aaaaggactggcctg

SEQ ID NO: 1519554 - DNA, 15 bp, Homo sapiens
aaaggactggcctgg

SEQ ID NO: 1519555 - DNA, 15 bp, Homo sapiens
aaggactggcctggg

SEQ ID NO: 1519556 - DNA, 15 bp, Homo sapiens
aggactggcctgggg

SEQ ID NO: 1519557 - DNA, 15 bp, Homo sapiens
ggactggcctggggt

SEQ ID NO: 1519558 - DNA, 15 bp, Homo sapiens
gactggcctggggtc

SEQ ID NO: 1519559 - DNA, 15 bp, Homo sapiens
actggcctggggtca

SEQ ID NO: 1519560 - DNA, 15 bp, Homo sapiens
ctggcctggggtcac

SEQ ID NO: 1519561 - DNA, 15 bp, Homo sapiens
tggcctggggtcaca

SEQ ID NO: 1519562 - DNA, 15 bp, Homo sapiens
ggcctggggtcacag

SEQ ID NO: 1519563 - DNA, 15 bp, Homo sapiens
gcctggggtcacaga

SEQ ID NO: 1519564 - DNA, 15 bp, Homo sapiens
cctggggtcacagag

SEQ ID NO: 1519565 - DNA, 15 bp, Homo sapiens
ctggggtcacagagc

SEQ ID NO: 1519566 - DNA, 15 bp, Homo sapiens
tggggtcacagagct

SEQ ID NO: 1519567 - DNA, 15 bp, Homo sapiens
ggggtcacagagctg

SEQ ID NO: 1519568 - DNA, 15 bp, Homo sapiens
gggtcacagagctgg

SEQ ID NO: 1519569 - DNA, 15 bp, Homo sapiens
ggtcacagagctgga

SEQ ID NO: 1519570 - DNA, 15 bp, Homo sapiens
gtcacagagctggac

SEQ ID NO: 1519571 - DNA, 15 bp, Homo sapiens
tcacagagctggact

SEQ ID NO: 1519572 - DNA, 15 bp, Homo sapiens
cacagagctggactc

SEQ ID NO: 1519573 - DNA, 15 bp, Homo sapiens
acagagctggactct

SEQ ID NO: 1519574 - DNA, 15 bp, Homo sapiens
cagagctggactctc

SEQ ID NO: 1519575 - DNA, 15 bp, Homo sapiens
agagctggactctcc

SEQ ID NO: 1519576 - DNA, 15 bp, Homo sapiens
gagctggactctcca

SEQ ID NO: 1519577 - DNA, 15 bp, Homo sapiens
agctggactctccag

SEQ ID NO: 1519578 - DNA, 15 bp, Homo sapiens
gctggactctccagt

SEQ ID NO: 1519579 - DNA, 15 bp, Homo sapiens
ctggactctccagtg

SEQ ID NO: 1519580 - DNA, 15 bp, Homo sapiens
tggactctccagtga

SEQ ID NO: 1519581 - DNA, 15 bp, Homo sapiens
ggactctccagtgag

SEQ ID NO: 1519582 - DNA, 15 bp, Homo sapiens
gactctccagtgaga

SEQ ID NO: 1519583 - DNA, 15 bp, Homo sapiens
actctccagtgagac

SEQ ID NO: 1519584 - DNA, 15 bp, Homo sapiens
ctctccagtgagaca

SEQ ID NO: 1519585 - DNA, 15 bp, Homo sapiens
tctccagtgagacag

SEQ ID NO: 1519586 - DNA, 15 bp, Homo sapiens
ctccagtgagacaga

SEQ ID NO: 1519587 - DNA, 15 bp, Homo sapiens
tccagtgagacagag

SEQ ID NO: 1519588 - DNA, 15 bp, Homo sapiens
ccagtgagacagagc

SEQ ID NO: 1519589 - DNA, 15 bp, Homo sapiens
cagtgagacagagca

SEQ ID NO: 1519590 - DNA, 15 bp, Homo sapiens
agtgagacagagcag

SEQ ID NO: 1519591 - DNA, 15 bp, Homo sapiens
gtgagacagagcagc

SEQ ID NO: 1519592 - DNA, 15 bp, Homo sapiens
tgagacagagcagcc

SEQ ID NO: 1519593 - DNA, 15 bp, Homo sapiens
gagacagagcagcct

SEQ ID NO: 1519594 - DNA, 15 bp, Homo sapiens
agacagagcagcctc

SEQ ID NO: 1519595 - DNA, 15 bp, Homo sapiens
gacagagcagcctct

SEQ ID NO: 1519596 - DNA, 15 bp, Homo sapiens
acagagcagcctctt

SEQ ID NO: 1519597 - DNA, 15 bp, Homo sapiens
cagagcagcctcttc

SEQ ID NO: 1519598 - DNA, 15 bp, Homo sapiens
agagcagcctcttcc

SEQ ID NO: 1519599 - DNA, 15 bp, Homo sapiens
gagcagcctcttccc

SEQ ID NO: 1519600 - DNA, 15 bp, Homo sapiens
agcagcctcttccca

SEQ ID NO: 1519601 - DNA, 15 bp, Homo sapiens
gcagcctcttcccaa

SEQ ID NO: 1519602 - DNA, 15 bp, Homo sapiens
cagcctcttcccaac

SEQ ID NO: 1519603 - DNA, 15 bp, Homo sapiens
agcctcttcccaacc

SEQ ID NO: 1519604 - DNA, 15 bp, Homo sapiens
gcctcttcccaaccc

SEQ ID NO: 1519605 - DNA, 15 bp, Homo sapiens
cctcttcccaacccc

SEQ ID NO: 1519606 - DNA, 15 bp, Homo sapiens
ctcttcccaacccca

SEQ ID NO: 1519607 - DNA, 15 bp, Homo sapiens
tcttcccaaccccac

SEQ ID NO: 1519608 - DNA, 15 bp, Homo sapiens
cttcccaaccccact

SEQ ID NO: 1519609 - DNA, 15 bp, Homo sapiens
ttcccaaccccactg

SEQ ID NO: 1519610 - DNA, 15 bp, Homo sapiens
tcccaaccccactgg

SEQ ID NO: 1519611 - DNA, 15 bp, Homo sapiens
cccaaccccactgga

SEQ ID NO: 1519612 - DNA, 15 bp, Homo sapiens
ccaaccccactggaa

SEQ ID NO: 1519613 - DNA, 15 bp, Homo sapiens
caaccccactggaaa

SEQ ID NO: 1519614 - DNA, 15 bp, Homo sapiens
aaccccactggaaac

SEQ ID NO: 1519615 - DNA, 15 bp, Homo sapiens
accccactggaaaca

SEQ ID NO: 1519616 - DNA, 15 bp, Homo sapiens
ccccactggaaacac

SEQ ID NO: 1519617 - DNA, 15 bp, Homo sapiens
cccactggaaacacg

SEQ ID NO: 1519618 - DNA, 15 bp, Homo sapiens
ccactggaaacacgg

SEQ ID NO: 1519619 - DNA, 15 bp, Homo sapiens
cactggaaacacgga

SEQ ID NO: 1519620 - DNA, 15 bp, Homo sapiens
actggaaacacggag

SEQ ID NO: 1519621 - DNA, 15 bp, Homo sapiens
ctggaaacacggagc

SEQ ID NO: 1519622 - DNA, 15 bp, Homo sapiens
tggaaacacggagcc

SEQ ID NO: 1519623 - DNA, 15 bp, Homo sapiens
ggaaacacggagccc

SEQ ID NO: 1519624 - DNA, 15 bp, Homo sapiens
gaaacacggagccct

SEQ ID NO: 1519625 - DNA, 15 bp, Homo sapiens
aaacacggagcccta

SEQ ID NO: 1519626 - DNA, 15 bp, Homo sapiens
aacacggagccctag

SEQ ID NO: 1519627 - DNA, 15 bp, Homo sapiens
acacggagccctagt

SEQ ID NO: 1519628 - DNA, 15 bp, Homo sapiens
cacggagccctagtg

SEQ ID NO: 1519629 - DNA, 15 bp, Homo sapiens
acggagccctagtgt

SEQ ID NO: 1519630 - DNA, 15 bp, Homo sapiens
cggagccctagtgtc

SEQ ID NO: 1519631 - DNA, 15 bp, Homo sapiens
ggagccctagtgtcc

SEQ ID NO: 1519632 - DNA, 15 bp, Homo sapiens
gagccctagtgtcca

SEQ ID NO: 1519633 - DNA, 15 bp, Homo sapiens
agccctagtgtccac

SEQ ID NO: 1519634 - DNA, 15 bp, Homo sapiens
gccctagtgtccact

SEQ ID NO: 1519635 - DNA, 15 bp, Homo sapiens
ccctagtgtccactt

SEQ ID NO: 1519636 - DNA, 15 bp, Homo sapiens
cctagtgtccactta

SEQ ID NO: 1519637 - DNA, 15 bp, Homo sapiens
ctagtgtccacttag

SEQ ID NO: 1519638 - DNA, 15 bp, Homo sapiens
tagtgtccacttagc

SEQ ID NO: 1519639 - DNA, 15 bp, Homo sapiens
agtgtccacttagca

SEQ ID NO: 1519640 - DNA, 15 bp, Homo sapiens
gtgtccacttagcac

SEQ ID NO: 1519641 - DNA, 15 bp, Homo sapiens
tgtccacttagcact

SEQ ID NO: 1519642 - DNA, 15 bp, Homo sapiens
gtccacttagcactc

SEQ ID NO: 1519643 - DNA, 15 bp, Homo sapiens
tccacttagcactct

SEQ ID NO: 1519644 - DNA, 15 bp, Homo sapiens
ccacttagcactctc

SEQ ID NO: 1519645 - DNA, 15 bp, Homo sapiens
cacttagcactctct

SEQ ID NO: 1519646 - DNA, 15 bp, Homo sapiens
acttagcactctctg

SEQ ID NO: 1519647 - DNA, 15 bp, Homo sapiens
cttagcactctctgc

SEQ ID NO: 1519648 - DNA, 15 bp, Homo sapiens
ttagcactctctgct

SEQ ID NO: 1519649 - DNA, 15 bp, Homo sapiens
tagcactctctgctc

SEQ ID NO: 1519650 - DNA, 15 bp, Homo sapiens
agcactctctgctca

SEQ ID NO: 1519651 - DNA, 15 bp, Homo sapiens
gcactctctgctcac

SEQ ID NO: 1519652 - DNA, 15 bp, Homo sapiens
cactctctgctcacc

SEQ ID NO: 1519653 - DNA, 15 bp, Homo sapiens
actctctgctcaccc

SEQ ID NO: 1519654 - DNA, 15 bp, Homo sapiens
ctctctgctcacccc

SEQ ID NO: 1519655 - DNA, 15 bp, Homo sapiens
tctctgctcacccca

SEQ ID NO: 1519656 - DNA, 15 bp, Homo sapiens
ctctgctcaccccag

SEQ ID NO: 1519657 - DNA, 15 bp, Homo sapiens
tctgctcaccccagc

SEQ ID NO: 1519658 - DNA, 15 bp, Homo sapiens
ctgctcaccccagcc

SEQ ID NO: 1519659 - DNA, 15 bp, Homo sapiens
tgctcaccccagcct

SEQ ID NO: 1519660 - DNA, 15 bp, Homo sapiens
gctcaccccagcctt

SEQ ID NO: 1519661 - DNA, 15 bp, Homo sapiens
ctcaccccagcctta

SEQ ID NO: 1519662 - DNA, 15 bp, Homo sapiens
tcaccccagccttac

SEQ ID NO: 1519663 - DNA, 15 bp, Homo sapiens
caccccagccttact

SEQ ID NO: 1519664 - DNA, 15 bp, Homo sapiens
accccagccttactg

SEQ ID NO: 1519665 - DNA, 15 bp, Homo sapiens
ccccagccttactgt

SEQ ID NO: 1519666 - DNA, 15 bp, Homo sapiens
cccagccttactgtg

SEQ ID NO: 1519667 - DNA, 15 bp, Homo sapiens
ccagccttactgtga

SEQ ID NO: 1519668 - DNA, 15 bp, Homo sapiens
cagccttactgtgat

SEQ ID NO: 1519669 - DNA, 15 bp, Homo sapiens
agccttactgtgatc

SEQ ID NO: 1519670 - DNA, 15 bp, Homo sapiens
gccttactgtgatct

SEQ ID NO: 1519671 - DNA, 15 bp, Homo sapiens
ccttactgtgatctc

SEQ ID NO: 1519672 - DNA, 15 bp, Homo sapiens
cttactgtgatctct

SEQ ID NO: 1519673 - DNA, 15 bp, Homo sapiens
ttactgtgatctctc

SEQ ID NO: 1519674 - DNA, 15 bp, Homo sapiens
tactgtgatctctcc

SEQ ID NO: 1519675 - DNA, 15 bp, Homo sapiens
actgtgatctctccc

SEQ ID NO: 1519676 - DNA, 15 bp, Homo sapiens
ctgtgatctctcccc

SEQ ID NO: 1519677 - DNA, 15 bp, Homo sapiens
tgtgatctctcccct

SEQ ID NO: 1519678 - DNA, 15 bp, Homo sapiens
gtgatctctcccctc

SEQ ID NO: 1519679 - DNA, 15 bp, Homo sapiens
tgatctctcccctct

SEQ ID NO: 1519680 - DNA, 15 bp, Homo sapiens
gatctctcccctctg

SEQ ID NO: 1519681 - DNA, 15 bp, Homo sapiens
atctctcccctctgc

SEQ ID NO: 1519682 - DNA, 15 bp, Homo sapiens
tctcccctctgctcc

SEQ ID NO: 1519683 - DNA, 15 bp, Homo sapiens
ctcccctctgctccc

SEQ ID NO: 1519684 - DNA, 15 bp, Homo sapiens
tcccctctgctcccg

SEQ ID NO: 1519685 - DNA, 15 bp, Homo sapiens
cccctctgctcccgt

SEQ ID NO: 1519686 - DNA, 15 bp, Homo sapiens
ccctctgctcccgtc

SEQ ID NO: 1519687 - DNA, 15 bp, Homo sapiens
cctctgctcccgtct

SEQ ID NO: 1519688 - DNA, 15 bp, Homo sapiens
ctctgctcccgtctg

SEQ ID NO: 1519689 - DNA, 15 bp, Homo sapiens
tctgctcccgtctgc

SEQ ID NO: 1519690 - DNA, 15 bp, Homo sapiens
ctgctcccgtctgcc

SEQ ID NO: 1519691 - DNA, 15 bp, Homo sapiens
tgctcccgtctgccc

SEQ ID NO: 1519692 - DNA, 15 bp, Homo sapiens
gctcccgtctgcccc

SEQ ID NO: 1519693 - DNA, 15 bp, Homo sapiens
ctcccgtctgcccca

SEQ ID NO: 1519694 - DNA, 15 bp, Homo sapiens
tcccgtctgccccag

SEQ ID NO: 1519695 - DNA, 15 bp, Homo sapiens
cccgtctgccccagc

SEQ ID NO: 1519696 - DNA, 15 bp, Homo sapiens
ccgtctgccccagcc

SEQ ID NO: 1519697 - DNA, 15 bp, Homo sapiens
cgtctgccccagccg

SEQ ID NO: 1519698 - DNA, 15 bp, Homo sapiens
gtctgccccagccgc

SEQ ID NO: 1519699 - DNA, 15 bp, Homo sapiens
tctgccccagccgca

SEQ ID NO: 1519700 - DNA, 15 bp, Homo sapiens
ctgccccagccgcaa

SEQ ID NO: 1519701 - DNA, 15 bp, Homo sapiens
tgccccagccgcaag

SEQ ID NO: 1519702 - DNA, 15 bp, Homo sapiens
gccccagccgcaagg

SEQ ID NO: 1519703 - DNA, 15 bp, Homo sapiens
ccccagccgcaaggc

SEQ ID NO: 1519704 - DNA, 15 bp, Homo sapiens
cccagccgcaaggcc

SEQ ID NO: 1519705 - DNA, 15 bp, Homo sapiens
ccagccgcaaggcct

SEQ ID NO: 1519706 - DNA, 15 bp, Homo sapiens
cagccgcaaggcctc

SEQ ID NO: 1519707 - DNA, 15 bp, Homo sapiens
agccgcaaggcctcg

SEQ ID NO: 1519708 - DNA, 15 bp, Homo sapiens
gccgcaaggcctcgg

SEQ ID NO: 1519709 - DNA, 15 bp, Homo sapiens
ccgcaaggcctcggg

SEQ ID NO: 1519710 - DNA, 15 bp, Homo sapiens
cgcaaggcctcgggt

SEQ ID NO: 1519711 - DNA, 15 bp, Homo sapiens
gcaaggcctcgggtc

SEQ ID NO: 1519712 - DNA, 15 bp, Homo sapiens
caaggcctcgggtct

SEQ ID NO: 1519713 - DNA, 15 bp, Homo sapiens
aaggcctcgggtcta

SEQ ID NO: 1519714 - DNA, 15 bp, Homo sapiens
aggcctcgggtctac

SEQ ID NO: 1519715 - DNA, 15 bp, Homo sapiens
ggcctcgggtctacc

SEQ ID NO: 1519716 - DNA, 15 bp, Homo sapiens
gcctcgggtctaccg

SEQ ID NO: 1519717 - DNA, 15 bp, Homo sapiens
cctcgggtctaccgt

SEQ ID NO: 1519718 - DNA, 15 bp, Homo sapiens
ctcgggtctaccgtg

SEQ ID NO: 1519719 - DNA, 15 bp, Homo sapiens
tcgggtctaccgtgg

SEQ ID NO: 1519720 - DNA, 15 bp, Homo sapiens
cgggtctaccgtgga

SEQ ID NO: 1519721 - DNA, 15 bp, Homo sapiens
gggtctaccgtggaa

SEQ ID NO: 1519722 - DNA, 15 bp, Homo sapiens
ggtctaccgtggaat

SEQ ID NO: 1519723 - DNA, 15 bp, Homo sapiens
gtctaccgtggaatg

SEQ ID NO: 1519724 - DNA, 15 bp, Homo sapiens
tctaccgtggaatga

SEQ ID NO: 1519725 - DNA, 15 bp, Homo sapiens
ctaccgtggaatgag

SEQ ID NO: 1519726 - DNA, 15 bp, Homo sapiens
taccgtggaatgagg

SEQ ID NO: 1519727 - DNA, 15 bp, Homo sapiens
accgtggaatgaggg

SEQ ID NO: 1519728 - DNA, 15 bp, Homo sapiens
ccgtggaatgagggg

SEQ ID NO: 1519729 - DNA, 15 bp, Homo sapiens
cgtggaatgagggga

SEQ ID NO: 1519730 - DNA, 15 bp, Homo sapiens
gtggaatgaggggat

SEQ ID NO: 1519731 - DNA, 15 bp, Homo sapiens
tggaatgaggggatc

SEQ ID NO: 1519732 - DNA, 15 bp, Homo sapiens
ggaatgaggggatcc

SEQ ID NO: 1519733 - DNA, 15 bp, Homo sapiens
gaatgaggggatccc

SEQ ID NO: 1519734 - DNA, 15 bp, Homo sapiens
aatgaggggatccct

SEQ ID NO: 1519735 - DNA, 15 bp, Homo sapiens
atgaggggatcccta

SEQ ID NO: 1519736 - DNA, 15 bp, Homo sapiens
tgaggggatccctag

SEQ ID NO: 1519737 - DNA, 15 bp, Homo sapiens
gaggggatccctagg

SEQ ID NO: 1519738 - DNA, 15 bp, Homo sapiens
aggggatccctaggc

SEQ ID NO: 1519739 - DNA, 15 bp, Homo sapiens
ggggatccctaggcc

SEQ ID NO: 1519740 - DNA, 15 bp, Homo sapiens
gggatccctaggccc

SEQ ID NO: 1519741 - DNA, 15 bp, Homo sapiens
ggatccctaggccca

SEQ ID NO: 1519742 - DNA, 15 bp, Homo sapiens
gatccctaggcccag

SEQ ID NO: 1519743 - DNA, 15 bp, Homo sapiens
atccctaggcccagg

SEQ ID NO: 1519744 - DNA, 15 bp, Homo sapiens
tccctaggcccaggg

SEQ ID NO: 1519745 - DNA, 15 bp, Homo sapiens
ccctaggcccaggga

SEQ ID NO: 1519746 - DNA, 15 bp, Homo sapiens
cctaggcccagggaa

SEQ ID NO: 1519747 - DNA, 15 bp, Homo sapiens
ctaggcccagggaag

SEQ ID NO: 1519748 - DNA, 15 bp, Homo sapiens
taggcccagggaagg

SEQ ID NO: 1519749 - DNA, 15 bp, Homo sapiens
aggcccagggaaggg

SEQ ID NO: 1519750 - DNA, 15 bp, Homo sapiens
ggcccagggaaggga

SEQ ID NO: 1519751 - DNA, 15 bp, Homo sapiens
gcccagggaagggag

SEQ ID NO: 1519752 - DNA, 15 bp, Homo sapiens
cccagggaagggagg

SEQ ID NO: 1519753 - DNA, 15 bp, Homo sapiens
ccagggaagggaggc

SEQ ID NO: 1519754 - DNA, 15 bp, Homo sapiens
cagggaagggaggcg

SEQ ID NO: 1519755 - DNA, 15 bp, Homo sapiens
agggaagggaggcgc

SEQ ID NO: 1519756 - DNA, 15 bp, Homo sapiens
gggaagggaggcgcg

SEQ ID NO: 1519757 - DNA, 15 bp, Homo sapiens
ggaagggaggcgcgc

SEQ ID NO: 1519758 - DNA, 15 bp, Homo sapiens
gaagggaggcgcgct

SEQ ID NO: 1519759 - DNA, 15 bp, Homo sapiens
aagggaggcgcgctt

SEQ ID NO: 1519760 - DNA, 15 bp, Homo sapiens
agggaggcgcgctta

SEQ ID NO: 1519761 - DNA, 15 bp, Homo sapiens
gggaggcgcgcttag

SEQ ID NO: 1519762 - DNA, 15 bp, Homo sapiens
ggaggcgcgcttagg

SEQ ID NO: 1519763 - DNA, 15 bp, Homo sapiens
gaggcgcgcttaggg

SEQ ID NO: 1519764 - DNA, 15 bp, Homo sapiens
aggcgcgcttagggg

SEQ ID NO: 1519765 - DNA, 15 bp, Homo sapiens
ggcgcgcttaggggt

SEQ ID NO: 1519766 - DNA, 15 bp, Homo sapiens
gcgcgcttaggggtg

SEQ ID NO: 1519767 - DNA, 15 bp, Homo sapiens
cgcgcttaggggtgg

SEQ ID NO: 1519768 - DNA, 15 bp, Homo sapiens
gcgcttaggggtggg

SEQ ID NO: 1519769 - DNA, 15 bp, Homo sapiens
cgcttaggggtgggg

SEQ ID NO: 1519770 - DNA, 15 bp, Homo sapiens
gcttaggggtggggg

SEQ ID NO: 1519771 - DNA, 15 bp, Homo sapiens
cttaggggtgggggc

SEQ ID NO: 1519772 - DNA, 15 bp, Homo sapiens
ttaggggtgggggca

SEQ ID NO: 1519773 - DNA, 15 bp, Homo sapiens
taggggtgggggcac

SEQ ID NO: 1519774 - DNA, 15 bp, Homo sapiens
aggggtgggggcaca

SEQ ID NO: 1519775 - DNA, 15 bp, Homo sapiens
ggggtgggggcacaa

SEQ ID NO: 1519776 - DNA, 15 bp, Homo sapiens
gggtgggggcacaaa

SEQ ID NO: 1519777 - DNA, 15 bp, Homo sapiens
ggtgggggcacaaac

SEQ ID NO: 1519778 - DNA, 15 bp, Homo sapiens
gtgggggcacaaacg

SEQ ID NO: 1519779 - DNA, 15 bp, Homo sapiens
tgggggcacaaacgg

SEQ ID NO: 1519780 - DNA, 15 bp, Homo sapiens
gggggcacaaacggg

SEQ ID NO: 1519781 - DNA, 15 bp, Homo sapiens
ggggcacaaacgggc

SEQ ID NO: 1519782 - DNA, 15 bp, Homo sapiens
gggcacaaacgggca

SEQ ID NO: 1519783 - DNA, 15 bp, Homo sapiens
ggcacaaacgggcat

SEQ ID NO: 1519784 - DNA, 15 bp, Homo sapiens
gcacaaacgggcatc

SEQ ID NO: 1519785 - DNA, 15 bp, Homo sapiens
cacaaacgggcatct

SEQ ID NO: 1519786 - DNA, 15 bp, Homo sapiens
acaaacgggcatctc

SEQ ID NO: 1519787 - DNA, 15 bp, Homo sapiens
caaacgggcatctcg

SEQ ID NO: 1519788 - DNA, 15 bp, Homo sapiens
aaacgggcatctcgg

SEQ ID NO: 1519789 - DNA, 15 bp, Homo sapiens
aacgggcatctcggt

SEQ ID NO: 1519790 - DNA, 15 bp, Homo sapiens
acgggcatctcggtg

SEQ ID NO: 1519791 - DNA, 15 bp, Homo sapiens
cgggcatctcggtgg

SEQ ID NO: 1519792 - DNA, 15 bp, Homo sapiens
gggcatctcggtggc

SEQ ID NO: 1519793 - DNA, 15 bp, Homo sapiens
ggcatctcggtggca

SEQ ID NO: 1519794 - DNA, 15 bp, Homo sapiens
gcatctcggtggcac

SEQ ID NO: 1519795 - DNA, 15 bp, Homo sapiens
catctcggtggcact

SEQ ID NO: 1519796 - DNA, 15 bp, Homo sapiens
atctcggtggcactt

SEQ ID NO: 1519797 - DNA, 15 bp, Homo sapiens
tctcggtggcacttg

SEQ ID NO: 1519798 - DNA, 15 bp, Homo sapiens
ctcggtggcacttgt

SEQ ID NO: 1519799 - DNA, 15 bp, Homo sapiens
tcggtggcacttgtc

SEQ ID NO: 1519800 - DNA, 15 bp, Homo sapiens
cggtggcacttgtcc

SEQ ID NO: 1519801 - DNA, 15 bp, Homo sapiens
ggtggcacttgtcct

SEQ ID NO: 1519802 - DNA, 15 bp, Homo sapiens
gtggcacttgtcctc

SEQ ID NO: 1519803 - DNA, 15 bp, Homo sapiens
tggcacttgtcctct

SEQ ID NO: 1519804 - DNA, 15 bp, Homo sapiens
ggcacttgtcctctc

SEQ ID NO: 1519805 - DNA, 15 bp, Homo sapiens
gcacttgtcctctct

SEQ ID NO: 1519806 - DNA, 15 bp, Homo sapiens
cacttgtcctctctc

SEQ ID NO: 1519807 - DNA, 15 bp, Homo sapiens
acttgtcctctctct

SEQ ID NO: 1519808 - DNA, 15 bp, Homo sapiens
cttgtcctctctcta

SEQ ID NO: 1519809 - DNA, 15 bp, Homo sapiens
ttgtcctctctctac

SEQ ID NO: 1519810 - DNA, 15 bp, Homo sapiens
tgtcctctctctacc

SEQ ID NO: 1519811 - DNA, 15 bp, Homo sapiens
gtcctctctctaccc

SEQ ID NO: 1519812 - DNA, 15 bp, Homo sapiens
tcctctctctaccct

SEQ ID NO: 1519813 - DNA, 15 bp, Homo sapiens
cctctctctaccctg

SEQ ID NO: 1519814 - DNA, 15 bp, Homo sapiens
ctctctctaccctgg

SEQ ID NO: 1519815 - DNA, 15 bp, Homo sapiens
tctctctaccctggg

SEQ ID NO: 1519816 - DNA, 15 bp, Homo sapiens
ctctctaccctggga

SEQ ID NO: 1519817 - DNA, 15 bp, Homo sapiens
tctctaccctgggaa

SEQ ID NO: 1519818 - DNA, 15 bp, Homo sapiens
ctctaccctgggaaa

SEQ ID NO: 1519819 - DNA, 15 bp, Homo sapiens
tctaccctgggaaag

SEQ ID NO: 1519820 - DNA, 15 bp, Homo sapiens
ctaccctgggaaagg

SEQ ID NO: 1519821 - DNA, 15 bp, Homo sapiens
taccctgggaaaggg

SEQ ID NO: 1519822 - DNA, 15 bp, Homo sapiens
accctgggaaagggc

SEQ ID NO: 1519823 - DNA, 15 bp, Homo sapiens
ccctgggaaagggca

SEQ ID NO: 1519824 - DNA, 15 bp, Homo sapiens
cctgggaaagggcag

SEQ ID NO: 1519825 - DNA, 15 bp, Homo sapiens
ctgggaaagggcaga

SEQ ID NO: 1519826 - DNA, 15 bp, Homo sapiens
tgggaaagggcagaa

SEQ ID NO: 1519827 - DNA, 15 bp, Homo sapiens
gggaaagggcagaaa

SEQ ID NO: 1519828 - DNA, 15 bp, Homo sapiens
ggaaagggcagaaag

SEQ ID NO: 1519829 - DNA, 15 bp, Homo sapiens
gaaagggcagaaagc

SEQ ID NO: 1519830 - DNA, 15 bp, Homo sapiens
aaagggcagaaagcg

SEQ ID NO: 1519831 - DNA, 15 bp, Homo sapiens
aagggcagaaagcgg

SEQ ID NO: 1519832 - DNA, 15 bp, Homo sapiens
agggcagaaagcggc

SEQ ID NO: 1519833 - DNA, 15 bp, Homo sapiens
gggcagaaagcggca

SEQ ID NO: 1519834 - DNA, 15 bp, Homo sapiens
ggcagaaagcggcag

SEQ ID NO: 1519835 - DNA, 15 bp, Homo sapiens
gcagaaagcggcagc

SEQ ID NO: 1519836 - DNA, 15 bp, Homo sapiens
cagaaagcggcagcc

SEQ ID NO: 1519837 - DNA, 15 bp, Homo sapiens
agaaagcggcagcca

SEQ ID NO: 1519838 - DNA, 15 bp, Homo sapiens
gaaagcggcagccaa

SEQ ID NO: 1519839 - DNA, 15 bp, Homo sapiens
aaagcggcagccaag

SEQ ID NO: 1519840 - DNA, 15 bp, Homo sapiens
aagcggcagccaagt

SEQ ID NO: 1519841 - DNA, 15 bp, Homo sapiens
agcggcagccaagtc

SEQ ID NO: 1519842 - DNA, 15 bp, Homo sapiens
gcggcagccaagtca

SEQ ID NO: 1519843 - DNA, 15 bp, Homo sapiens
cggcagccaagtcag

SEQ ID NO: 1519844 - DNA, 15 bp, Homo sapiens
ggcagccaagtcagg

SEQ ID NO: 1519845 - DNA, 15 bp, Homo sapiens
gcagccaagtcaggg

SEQ ID NO: 1519846 - DNA, 15 bp, Homo sapiens
cagccaagtcagggc

SEQ ID NO: 1519847 - DNA, 15 bp, Homo sapiens
agccaagtcagggct

SEQ ID NO: 1519848 - DNA, 15 bp, Homo sapiens
gccaagtcagggctg

SEQ ID NO: 1519849 - DNA, 15 bp, Homo sapiens
ccaagtcagggctgt

SEQ ID NO: 1519850 - DNA, 15 bp, Homo sapiens
caagtcagggctgtg

SEQ ID NO: 1519851 - DNA, 15 bp, Homo sapiens
aagtcagggctgtgc

SEQ ID NO: 1519852 - DNA, 15 bp, Homo sapiens
agtcagggctgtgca

SEQ ID NO: 1519853 - DNA, 15 bp, Homo sapiens
gtcagggctgtgcac

SEQ ID NO: 1519854 - DNA, 15 bp, Homo sapiens
tcagggctgtgcacg

SEQ ID NO: 1519855 - DNA, 15 bp, Homo sapiens
cagggctgtgcacgg

SEQ ID NO: 1519856 - DNA, 15 bp, Homo sapiens
agggctgtgcacggg

SEQ ID NO: 1519857 - DNA, 15 bp, Homo sapiens
gggctgtgcacggga

SEQ ID NO: 1519858 - DNA, 15 bp, Homo sapiens
ggctgtgcacgggag

SEQ ID NO: 1519859 - DNA, 15 bp, Homo sapiens
gctgtgcacgggaga

SEQ ID NO: 1519860 - DNA, 15 bp, Homo sapiens
ctgtgcacgggagag

SEQ ID NO: 1519861 - DNA, 15 bp, Homo sapiens
tgtgcacgggagaga

SEQ ID NO: 1519862 - DNA, 15 bp, Homo sapiens
gtgcacgggagagag

SEQ ID NO: 1519863 - DNA, 15 bp, Homo sapiens
tgcacgggagagaga

SEQ ID NO: 1519864 - DNA, 15 bp, Homo sapiens
gcacgggagagagag

SEQ ID NO: 1519865 - DNA, 15 bp, Homo sapiens
cacgggagagagagt

SEQ ID NO: 1519866 - DNA, 15 bp, Homo sapiens
acgggagagagagtg

SEQ ID NO: 1519867 - DNA, 15 bp, Homo sapiens
cgggagagagagtga

SEQ ID NO: 1519868 - DNA, 15 bp, Homo sapiens
gggagagagagtgac

SEQ ID NO: 1519869 - DNA, 15 bp, Homo sapiens
ggagagagagtgacc

SEQ ID NO: 1519870 - DNA, 15 bp, Homo sapiens
gagagagagtgaccg

SEQ ID NO: 1519871 - DNA, 15 bp, Homo sapiens
agagagagtgaccgc

SEQ ID NO: 1519872 - DNA, 15 bp, Homo sapiens
gagagagtgaccgcg

SEQ ID NO: 1519873 - DNA, 15 bp, Homo sapiens
agagagtgaccgcgg

SEQ ID NO: 1519874 - DNA, 15 bp, Homo sapiens
gagagtgaccgcggc

SEQ ID NO: 1519875 - DNA, 15 bp, Homo sapiens
agagtgaccgcggcg

SEQ ID NO: 1519876 - DNA, 15 bp, Homo sapiens
gagtgaccgcggcgg

SEQ ID NO: 1519877 - DNA, 15 bp, Homo sapiens
agtgaccgcggcggg

SEQ ID NO: 1519878 - DNA, 15 bp, Homo sapiens
gtgaccgcggcgggg

SEQ ID NO: 1519879 - DNA, 15 bp, Homo sapiens
tgaccgcggcggggg

SEQ ID NO: 1519880 - DNA, 15 bp, Homo sapiens
gaccgcggcgggggc

SEQ ID NO: 1519881 - DNA, 15 bp, Homo sapiens
accgcggcgggggcg

SEQ ID NO: 1519882 - DNA, 15 bp, Homo sapiens
ccgcggcgggggcgc

SEQ ID NO: 1519883 - DNA, 15 bp, Homo sapiens
cgcggcgggggcgcg

SEQ ID NO: 1519884 - DNA, 15 bp, Homo sapiens
gcggcgggggcgcgg

SEQ ID NO: 1519885 - DNA, 15 bp, Homo sapiens
cggcgggggcgcgga

SEQ ID NO: 1519886 - DNA, 15 bp, Homo sapiens
ggcgggggcgcggag

SEQ ID NO: 1519887 - DNA, 15 bp, Homo sapiens
gcgggggcgcggaga

SEQ ID NO: 1519888 - DNA, 15 bp, Homo sapiens
cgggggcgcggagaa

SEQ ID NO: 1519889 - DNA, 15 bp, Homo sapiens
gggggcgcggagaac

SEQ ID NO: 1519890 - DNA, 15 bp, Homo sapiens
ggggcgcggagaacc

SEQ ID NO: 1519891 - DNA, 15 bp, Homo sapiens
gggcgcggagaaccc

SEQ ID NO: 1519892 - DNA, 15 bp, Homo sapiens
ggcgcggagaacccc

SEQ ID NO: 1519893 - DNA, 15 bp, Homo sapiens
gcgcggagaaccccg

SEQ ID NO: 1519894 - DNA, 15 bp, Homo sapiens
cgcggagaaccccgc

SEQ ID NO: 1519895 - DNA, 15 bp, Homo sapiens
gcggagaaccccgct

SEQ ID NO: 1519896 - DNA, 15 bp, Homo sapiens
cggagaaccccgctg

SEQ ID NO: 1519897 - DNA, 15 bp, Homo sapiens
ggagaaccccgctgg

SEQ ID NO: 1519898 - DNA, 15 bp, Homo sapiens
gagaaccccgctggg

SEQ ID NO: 1519899 - DNA, 15 bp, Homo sapiens
agaaccccgctgggc

SEQ ID NO: 1519900 - DNA, 15 bp, Homo sapiens
gaaccccgctgggct

SEQ ID NO: 1519901 - DNA, 15 bp, Homo sapiens
aaccccgctgggctc

SEQ ID NO: 1519902 - DNA, 15 bp, Homo sapiens
accccgctgggctcc

SEQ ID NO: 1519903 - DNA, 15 bp, Homo sapiens
ccccgctgggctccc

SEQ ID NO: 1519904 - DNA, 15 bp, Homo sapiens
cccgctgggctcccg

SEQ ID NO: 1519905 - DNA, 15 bp, Homo sapiens
ccgctgggctcccgc

SEQ ID NO: 1519906 - DNA, 15 bp, Homo sapiens
cgctgggctcccgct

SEQ ID NO: 1519907 - DNA, 15 bp, Homo sapiens
gctgggctcccgctc

SEQ ID NO: 1519908 - DNA, 15 bp, Homo sapiens
ctgggctcccgctcg

SEQ ID NO: 1519909 - DNA, 15 bp, Homo sapiens
tgggctcccgctcgg

SEQ ID NO: 1519910 - DNA, 15 bp, Homo sapiens
gggctcccgctcggt

SEQ ID NO: 1519911 - DNA, 15 bp, Homo sapiens
ggctcccgctcggtg

SEQ ID NO: 1519912 - DNA, 15 bp, Homo sapiens
gctcccgctcggtga

SEQ ID NO: 1519913 - DNA, 15 bp, Homo sapiens
ctcccgctcggtgag

SEQ ID NO: 1519914 - DNA, 15 bp, Homo sapiens
tcccgctcggtgaga

SEQ ID NO: 1519915 - DNA, 15 bp, Homo sapiens
cccgctcggtgagag

SEQ ID NO: 1519916 - DNA, 15 bp, Homo sapiens
ccgctcggtgagagg

SEQ ID NO: 1519917 - DNA, 15 bp, Homo sapiens
cgctcggtgagaggg

SEQ ID NO: 1519918 - DNA, 15 bp, Homo sapiens
gctcggtgagagggc

SEQ ID NO: 1519919 - DNA, 15 bp, Homo sapiens
ctcggtgagagggcg

SEQ ID NO: 1519920 - DNA, 15 bp, Homo sapiens
tcggtgagagggcgg

SEQ ID NO: 1519921 - DNA, 15 bp, Homo sapiens
cggtgagagggcggg

SEQ ID NO: 1519922 - DNA, 15 bp, Homo sapiens
ggtgagagggcggga

SEQ ID NO: 1519923 - DNA, 15 bp, Homo sapiens
gtgagagggcgggag

SEQ ID NO: 1519924 - DNA, 15 bp, Homo sapiens
tgagagggcgggagc

SEQ ID NO: 1519925 - DNA, 15 bp, Homo sapiens
gagagggcgggagcc

SEQ ID NO: 1519926 - DNA, 15 bp, Homo sapiens
agagggcgggagccg

SEQ ID NO: 1519927 - DNA, 15 bp, Homo sapiens
gagggcgggagccgt

SEQ ID NO: 1519928 - DNA, 15 bp, Homo sapiens
agggcgggagccgtg

SEQ ID NO: 1519929 - DNA, 15 bp, Homo sapiens
gggcgggagccgtgg

SEQ ID NO: 1519930 - DNA, 15 bp, Homo sapiens
ggcgggagccgtggg

SEQ ID NO: 1519931 - DNA, 15 bp, Homo sapiens
gcgggagccgtgggt

SEQ ID NO: 1519932 - DNA, 15 bp, Homo sapiens
cgggagccgtgggtc

SEQ ID NO: 1519933 - DNA, 15 bp, Homo sapiens
gggagccgtgggtcc

SEQ ID NO: 1519934 - DNA, 15 bp, Homo sapiens
ggagccgtgggtccg

SEQ ID NO: 1519935 - DNA, 15 bp, Homo sapiens
gagccgtgggtccgc

SEQ ID NO: 1519936 - DNA, 15 bp, Homo sapiens
agccgtgggtccgcg

SEQ ID NO: 1519937 - DNA, 15 bp, Homo sapiens
gccgtgggtccgcga

SEQ ID NO: 1519938 - DNA, 15 bp, Homo sapiens
ccgtgggtccgcgaa

SEQ ID NO: 1519939 - DNA, 15 bp, Homo sapiens
cgtgggtccgcgaag

SEQ ID NO: 1519940 - DNA, 15 bp, Homo sapiens
gtgggtccgcgaagc

SEQ ID NO: 1519941 - DNA, 15 bp, Homo sapiens
tgggtccgcgaagcc

SEQ ID NO: 1519942 - DNA, 15 bp, Homo sapiens
gggtccgcgaagccc

SEQ ID NO: 1519943 - DNA, 15 bp, Homo sapiens
ggtccgcgaagcccc

SEQ ID NO: 1519944 - DNA, 15 bp, Homo sapiens
gtccgcgaagcccct

SEQ ID NO: 1519945 - DNA, 15 bp, Homo sapiens
tccgcgaagcccctt

SEQ ID NO: 1519946 - DNA, 15 bp, Homo sapiens
ccgcgaagccccttc

SEQ ID NO: 1519947 - DNA, 15 bp, Homo sapiens
cgcgaagccccttcc

SEQ ID NO: 1519948 - DNA, 15 bp, Homo sapiens
gcgaagccccttcct

SEQ ID NO: 1519949 - DNA, 15 bp, Homo sapiens
cgaagccccttcctc

SEQ ID NO: 1519950 - DNA, 15 bp, Homo sapiens
gaagccccttcctcc

SEQ ID NO: 1519951 - DNA, 15 bp, Homo sapiens
aagccccttcctccc

SEQ ID NO: 1519952 - DNA, 15 bp, Homo sapiens
agccccttcctcccc

SEQ ID NO: 1519953 - DNA, 15 bp, Homo sapiens
gccccttcctccccg

SEQ ID NO: 1519954 - DNA, 15 bp, Homo sapiens
ccccttcctccccgg

SEQ ID NO: 1519955 - DNA, 15 bp, Homo sapiens
cccttcctccccggc

SEQ ID NO: 1519956 - DNA, 15 bp, Homo sapiens
ccttcctccccggca

SEQ ID NO: 1519957 - DNA, 15 bp, Homo sapiens
cttcctccccggcag

SEQ ID NO: 1519958 - DNA, 15 bp, Homo sapiens
ttcctccccggcaga

SEQ ID NO: 1519959 - DNA, 15 bp, Homo sapiens
tcctccccggcagag

SEQ ID NO: 1519960 - DNA, 15 bp, Homo sapiens
cctccccggcagagg

SEQ ID NO: 1519961 - DNA, 15 bp, Homo sapiens
ctccccggcagagga

SEQ ID NO: 1519962 - DNA, 15 bp, Homo sapiens
tccccggcagaggac

SEQ ID NO: 1519963 - DNA, 15 bp, Homo sapiens
ccccggcagaggacc

SEQ ID NO: 1519964 - DNA, 15 bp, Homo sapiens
cccggcagaggacct

SEQ ID NO: 1519965 - DNA, 15 bp, Homo sapiens
ccggcagaggaccta

SEQ ID NO: 1519966 - DNA, 15 bp, Homo sapiens
cggcagaggacctaa

SEQ ID NO: 1519967 - DNA, 15 bp, Homo sapiens
ggcagaggacctaat

SEQ ID NO: 1519968 - DNA, 15 bp, Homo sapiens
gcagaggacctaata

SEQ ID NO: 1519969 - DNA, 15 bp, Homo sapiens
cagaggacctaatag

SEQ ID NO: 1519970 - DNA, 15 bp, Homo sapiens
agaggacctaatagg

SEQ ID NO: 1519971 - DNA, 15 bp, Homo sapiens
gaggacctaataggc

SEQ ID NO: 1519972 - DNA, 15 bp, Homo sapiens
aggacctaataggca

SEQ ID NO: 1519973 - DNA, 15 bp, Homo sapiens
ggacctaataggcag

SEQ ID NO: 1519974 - DNA, 15 bp, Homo sapiens
gacctaataggcagc

SEQ ID NO: 1519975 - DNA, 15 bp, Homo sapiens
acctaataggcagcg

SEQ ID NO: 1519976 - DNA, 15 bp, Homo sapiens
cctaataggcagcgg

SEQ ID NO: 1519977 - DNA, 15 bp, Homo sapiens
ctaataggcagcggg

SEQ ID NO: 1519978 - DNA, 15 bp, Homo sapiens
taataggcagcgggg

SEQ ID NO: 1519979 - DNA, 15 bp, Homo sapiens
aataggcagcggggg

SEQ ID NO: 1519980 - DNA, 15 bp, Homo sapiens
ataggcagcgggggc

SEQ ID NO: 1519981 - DNA, 15 bp, Homo sapiens
taggcagcgggggcg

SEQ ID NO: 1519982 - DNA, 15 bp, Homo sapiens
aggcagcgggggcgg

SEQ ID NO: 1519983 - DNA, 15 bp, Homo sapiens
ggcagcgggggcggg

SEQ ID NO: 1519984 - DNA, 15 bp, Homo sapiens
gcagcgggggcggga

SEQ ID NO: 1519985 - DNA, 15 bp, Homo sapiens
cagcgggggcgggag

SEQ ID NO: 1519986 - DNA, 15 bp, Homo sapiens
agcgggggcgggagt

SEQ ID NO: 1519987 - DNA, 15 bp, Homo sapiens
gcgggggcgggagtg

SEQ ID NO: 1519988 - DNA, 15 bp, Homo sapiens
cgggggcgggagtgg

SEQ ID NO: 1519989 - DNA, 15 bp, Homo sapiens
gggggcgggagtggg

SEQ ID NO: 1519990 - DNA, 15 bp, Homo sapiens
ggggcgggagtgggg

SEQ ID NO: 1519991 - DNA, 15 bp, Homo sapiens
gggcgggagtggggg

SEQ ID NO: 1519992 - DNA, 15 bp, Homo sapiens
ggcgggagtgggggc

SEQ ID NO: 1519993 - DNA, 15 bp, Homo sapiens
gcgggagtgggggcg

SEQ ID NO: 1519994 - DNA, 15 bp, Homo sapiens
cgggagtgggggcgc

SEQ ID NO: 1519995 - DNA, 15 bp, Homo sapiens
gggagtgggggcgcc

SEQ ID NO: 1519996 - DNA, 15 bp, Homo sapiens
ggagtgggggcgccc

SEQ ID NO: 1519997 - DNA, 15 bp, Homo sapiens
gagtgggggcgccct

SEQ ID NO: 1519998 - DNA, 15 bp, Homo sapiens
agtgggggcgccctc

SEQ ID NO: 1519999 - DNA, 15 bp, Homo sapiens
gtgggggcgccctcc

SEQ ID NO: 1520000 - DNA, 15 bp, Homo sapiens
tgggggcgccctccg

SEQ ID NO: 1520001 - DNA, 15 bp, Homo sapiens
gggggcgccctccgg

SEQ ID NO: 1520002 - DNA, 15 bp, Homo sapiens
ggggcgccctccggt

SEQ ID NO: 1520003 - DNA, 15 bp, Homo sapiens
gggcgccctccggtc

SEQ ID NO: 1520004 - DNA, 15 bp, Homo sapiens
ggcgccctccggtcc

SEQ ID NO: 1520005 - DNA, 15 bp, Homo sapiens
gcgccctccggtcct

SEQ ID NO: 1520006 - DNA, 15 bp, Homo sapiens
cgccctccggtcctc

SEQ ID NO: 1520007 - DNA, 15 bp, Homo sapiens
gccctccggtcctca

SEQ ID NO: 1520008 - DNA, 15 bp, Homo sapiens
ccctccggtcctcac

SEQ ID NO: 1520009 - DNA, 15 bp, Homo sapiens
cctccggtcctcacc

SEQ ID NO: 1520010 - DNA, 15 bp, Homo sapiens
ctccggtcctcaccc

SEQ ID NO: 1520011 - DNA, 15 bp, Homo sapiens
tccggtcctcacccc

SEQ ID NO: 1520012 - DNA, 15 bp, Homo sapiens
ccggtcctcaccccg

SEQ ID NO: 1520013 - DNA, 15 bp, Homo sapiens
cggtcctcaccccgc

SEQ ID NO: 1520014 - DNA, 15 bp, Homo sapiens
ggtcctcaccccgcc

SEQ ID NO: 1520015 - DNA, 15 bp, Homo sapiens
gtcctcaccccgccc

SEQ ID NO: 1520016 - DNA, 15 bp, Homo sapiens
tcctcaccccgcccc

SEQ ID NO: 1520017 - DNA, 15 bp, Homo sapiens
cctcaccccgccccc

SEQ ID NO: 1520018 - DNA, 15 bp, Homo sapiens
ctcaccccgcccccg

SEQ ID NO: 1520019 - DNA, 15 bp, Homo sapiens
tcaccccgcccccgc

SEQ ID NO: 1520020 - DNA, 15 bp, Homo sapiens
caccccgcccccgca

SEQ ID NO: 1520021 - DNA, 15 bp, Homo sapiens
accccgcccccgcac

SEQ ID NO: 1520022 - DNA, 15 bp, Homo sapiens
ccccgcccccgcacc

SEQ ID NO: 1520023 - DNA, 15 bp, Homo sapiens
cccgcccccgcacct

SEQ ID NO: 1520024 - DNA, 15 bp, Homo sapiens
ccgcccccgcacctc

SEQ ID NO: 1520025 - DNA, 15 bp, Homo sapiens
cgcccccgcacctct

SEQ ID NO: 1520026 - DNA, 15 bp, Homo sapiens
gcccccgcacctctc

SEQ ID NO: 1520027 - DNA, 15 bp, Homo sapiens
cccccgcacctctcc

SEQ ID NO: 1520028 - DNA, 15 bp, Homo sapiens
ccccgcacctctccc

SEQ ID NO: 1520029 - DNA, 15 bp, Homo sapiens
cccgcacctctcccc

SEQ ID NO: 1520030 - DNA, 15 bp, Homo sapiens
ccgcacctctccccg

SEQ ID NO: 1520031 - DNA, 15 bp, Homo sapiens
cgcacctctccccgc

SEQ ID NO: 1520032 - DNA, 15 bp, Homo sapiens
gcacctctccccgca

SEQ ID NO: 1520033 - DNA, 15 bp, Homo sapiens
cacctctccccgcag

SEQ ID NO: 1520034 - DNA, 15 bp, Homo sapiens
acctctccccgcagc

SEQ ID NO: 1520035 - DNA, 15 bp, Homo sapiens
cctctccccgcagcg

SEQ ID NO: 1520036 - DNA, 15 bp, Homo sapiens
ctctccccgcagcgg

SEQ ID NO: 1520037 - DNA, 15 bp, Homo sapiens
tctccccgcagcggg

SEQ ID NO: 1520038 - DNA, 15 bp, Homo sapiens
ctccccgcagcgggg

SEQ ID NO: 1520039 - DNA, 15 bp, Homo sapiens
tccccgcagcggggg

SEQ ID NO: 1520040 - DNA, 15 bp, Homo sapiens
ccccgcagcgggggc

SEQ ID NO: 1520041 - DNA, 15 bp, Homo sapiens
cccgcagcgggggcg

SEQ ID NO: 1520042 - DNA, 15 bp, Homo sapiens
ccgcagcgggggcgc

SEQ ID NO: 1520043 - DNA, 15 bp, Homo sapiens
cgcagcgggggcgcc

SEQ ID NO: 1520044 - DNA, 15 bp, Homo sapiens
gcagcgggggcgccc

SEQ ID NO: 1520045 - DNA, 15 bp, Homo sapiens
cagcgggggcgcccc

SEQ ID NO: 1520046 - DNA, 15 bp, Homo sapiens
agcgggggcgccccg

SEQ ID NO: 1520047 - DNA, 15 bp, Homo sapiens
gcgggggcgccccgc

SEQ ID NO: 1520048 - DNA, 15 bp, Homo sapiens
cgggggcgccccgcc

SEQ ID NO: 1520049 - DNA, 15 bp, Homo sapiens
gggggcgccccgccc

SEQ ID NO: 1520050 - DNA, 15 bp, Homo sapiens
ggggcgccccgcccc

SEQ ID NO: 1520051 - DNA, 15 bp, Homo sapiens
gggcgccccgccccc

SEQ ID NO: 1520052 - DNA, 15 bp, Homo sapiens
ggcgccccgcccccc

SEQ ID NO: 1520053 - DNA, 15 bp, Homo sapiens
gcgccccgccccccg

SEQ ID NO: 1520054 - DNA, 15 bp, Homo sapiens
cgccccgccccccgg

SEQ ID NO: 1520055 - DNA, 15 bp, Homo sapiens
gccccgccccccggg

SEQ ID NO: 1520056 - DNA, 15 bp, Homo sapiens
ccccgccccccgggc

SEQ ID NO: 1520057 - DNA, 15 bp, Homo sapiens
cccgccccccgggcg

SEQ ID NO: 1520058 - DNA, 15 bp, Homo sapiens
ccgccccccgggcgc

SEQ ID NO: 1520059 - DNA, 15 bp, Homo sapiens
cgccccccgggcgcc

SEQ ID NO: 1520060 - DNA, 15 bp, Homo sapiens
gccccccgggcgccc

SEQ ID NO: 1520061 - DNA, 15 bp, Homo sapiens
ccccccgggcgcccg

SEQ ID NO: 1520062 - DNA, 15 bp, Homo sapiens
cccccgggcgcccga

SEQ ID NO: 1520063 - DNA, 15 bp, Homo sapiens
ccccgggcgcccgac

SEQ ID NO: 1520064 - DNA, 15 bp, Homo sapiens
cccgggcgcccgacg

SEQ ID NO: 1520065 - DNA, 15 bp, Homo sapiens
ccgggcgcccgacgt

SEQ ID NO: 1520066 - DNA, 15 bp, Homo sapiens
cgggcgcccgacgtg

SEQ ID NO: 1520067 - DNA, 15 bp, Homo sapiens
gggcgcccgacgtgg

SEQ ID NO: 1520068 - DNA, 15 bp, Homo sapiens
ggcgcccgacgtgga

SEQ ID NO: 1520069 - DNA, 15 bp, Homo sapiens
gcgcccgacgtggac

SEQ ID NO: 1520070 - DNA, 15 bp, Homo sapiens
cgcccgacgtggacg

SEQ ID NO: 1520071 - DNA, 15 bp, Homo sapiens
gcccgacgtggacgc

SEQ ID NO: 1520072 - DNA, 15 bp, Homo sapiens
cccgacgtggacgcg

SEQ ID NO: 1520073 - DNA, 15 bp, Homo sapiens
ccgacgtggacgcgg

SEQ ID NO: 1520074 - DNA, 15 bp, Homo sapiens
cgacgtggacgcggc

SEQ ID NO: 1520075 - DNA, 15 bp, Homo sapiens
gacgtggacgcggcc

SEQ ID NO: 1520076 - DNA, 15 bp, Homo sapiens
acgtggacgcggccg

SEQ ID NO: 1520077 - DNA, 15 bp, Homo sapiens
cgtggacgcggccgc

SEQ ID NO: 1520078 - DNA, 15 bp, Homo sapiens
gtggacgcggccgcc

SEQ ID NO: 1520079 - DNA, 15 bp, Homo sapiens
tggacgcggccgccg

SEQ ID NO: 1520080 - DNA, 15 bp, Homo sapiens
ggacgcggccgccgc

SEQ ID NO: 1520081 - DNA, 15 bp, Homo sapiens
gacgcggccgccgcc

SEQ ID NO: 1520082 - DNA, 15 bp, Homo sapiens
acgcggccgccgcca

SEQ ID NO: 1520083 - DNA, 15 bp, Homo sapiens
cgcggccgccgccac

SEQ ID NO: 1520084 - DNA, 15 bp, Homo sapiens
gcggccgccgccacc

SEQ ID NO: 1520085 - DNA, 15 bp, Homo sapiens
cggccgccgccaccg

SEQ ID NO: 1520086 - DNA, 15 bp, Homo sapiens
ggccgccgccaccgc

SEQ ID NO: 1520087 - DNA, 15 bp, Homo sapiens
gccgccgccaccgcc

SEQ ID NO: 1520088 - DNA, 15 bp, Homo sapiens
ccgccgccaccgccg

SEQ ID NO: 1520089 - DNA, 15 bp, Homo sapiens
cgccgccaccgccgc

SEQ ID NO: 1520090 - DNA, 15 bp, Homo sapiens
gccaccgccgccgcg

SEQ ID NO: 1520091 - DNA, 15 bp, Homo sapiens
ccaccgccgccgcgc

SEQ ID NO: 1520092 - DNA, 15 bp, Homo sapiens
caccgccgccgcgcg

SEQ ID NO: 1520093 - DNA, 15 bp, Homo sapiens
accgccgccgcgcgg

SEQ ID NO: 1520094 - DNA, 15 bp, Homo sapiens
ccgccgccgcgcggg

SEQ ID NO: 1520095 - DNA, 15 bp, Homo sapiens
cgccgccgcgcggga

SEQ ID NO: 1520096 - DNA, 15 bp, Homo sapiens
gccgccgcgcgggag

SEQ ID NO: 1520097 - DNA, 15 bp, Homo sapiens
ccgccgcgcgggagt

SEQ ID NO: 1520098 - DNA, 15 bp, Homo sapiens
cgccgcgcgggagtc

SEQ ID NO: 1520099 - DNA, 15 bp, Homo sapiens
gccgcgcgggagtcg

SEQ ID NO: 1520100 - DNA, 15 bp, Homo sapiens
ccgcgcgggagtcgc

SEQ ID NO: 1520101 - DNA, 15 bp, Homo sapiens
cgcgcgggagtcgct

SEQ ID NO: 1520102 - DNA, 15 bp, Homo sapiens
gcgcgggagtcgctg

SEQ ID NO: 1520103 - DNA, 15 bp, Homo sapiens
cgcgggagtcgctgt

SEQ ID NO: 1520104 - DNA, 15 bp, Homo sapiens
gcgggagtcgctgtc

SEQ ID NO: 1520105 - DNA, 15 bp, Homo sapiens
cgggagtcgctgtcc

SEQ ID NO: 1520106 - DNA, 15 bp, Homo sapiens
gggagtcgctgtccg

SEQ ID NO: 1520107 - DNA, 15 bp, Homo sapiens
ggagtcgctgtccgc

SEQ ID NO: 1520108 - DNA, 15 bp, Homo sapiens
gagtcgctgtccgcg

SEQ ID NO: 1520109 - DNA, 15 bp, Homo sapiens
agtcgctgtccgcgg

SEQ ID NO: 1520110 - DNA, 15 bp, Homo sapiens
gtcgctgtccgcgga

SEQ ID NO: 1520111 - DNA, 15 bp, Homo sapiens
tcgctgtccgcggag

SEQ ID NO: 1520112 - DNA, 15 bp, Homo sapiens
cgctgtccgcggagc

SEQ ID NO: 1520113 - DNA, 15 bp, Homo sapiens
gctgtccgcggagcc

SEQ ID NO: 1520114 - DNA, 15 bp, Homo sapiens
ctgtccgcggagccg

SEQ ID NO: 1520115 - DNA, 15 bp, Homo sapiens
tgtccgcggagccga

SEQ ID NO: 1520116 - DNA, 15 bp, Homo sapiens
gtccgcggagccgac

SEQ ID NO: 1520117 - DNA, 15 bp, Homo sapiens
tccgcggagccgaca

SEQ ID NO: 1520118 - DNA, 15 bp, Homo sapiens
ccgcggagccgacat

SEQ ID NO: 1520119 - DNA, 15 bp, Homo sapiens
cgcggagccgacatg

SEQ ID NO: 1520120 - DNA, 15 bp, Homo sapiens
gcggagccgacatgc

SEQ ID NO: 1520121 - DNA, 15 bp, Homo sapiens
cggagccgacatgca

SEQ ID NO: 1520122 - DNA, 15 bp, Homo sapiens
ggagccgacatgcag

SEQ ID NO: 1520123 - DNA, 15 bp, Homo sapiens
gagccgacatgcagg

SEQ ID NO: 1520124 - DNA, 15 bp, Homo sapiens
agccgacatgcaggc

SEQ ID NO: 1520125 - DNA, 15 bp, Homo sapiens
gccgacatgcaggcg

SEQ ID NO: 1520126 - DNA, 15 bp, Homo sapiens
ccgacatgcaggcgg

SEQ ID NO: 1520127 - DNA, 15 bp, Homo sapiens
cgacatgcaggcggc

SEQ ID NO: 1520128 - DNA, 15 bp, Homo sapiens
gacatgcaggcggct

SEQ ID NO: 1520129 - DNA, 15 bp, Homo sapiens
acatgcaggcggctc

SEQ ID NO: 1520130 - DNA, 15 bp, Homo sapiens
catgcaggcggctcg

SEQ ID NO: 1520131 - DNA, 15 bp, Homo sapiens
atgcaggcggctcgg

SEQ ID NO: 1520132 - DNA, 15 bp, Homo sapiens
tgcaggcggctcggg

SEQ ID NO: 1520133 - DNA, 15 bp, Homo sapiens
gcaggcggctcgggg

SEQ ID NO: 1520134 - DNA, 15 bp, Homo sapiens
caggcggctcggggc

SEQ ID NO: 1520135 - DNA, 15 bp, Homo sapiens
aggcggctcggggcg

SEQ ID NO: 1520136 - DNA, 15 bp, Homo sapiens
ggcggctcggggcgg

SEQ ID NO: 1520137 - DNA, 15 bp, Homo sapiens
gcggctcggggcggc

SEQ ID NO: 1520138 - DNA, 15 bp, Homo sapiens
cggctcggggcggcg

SEQ ID NO: 1520139 - DNA, 15 bp, Homo sapiens
ggctcggggcggcgc

SEQ ID NO: 1520140 - DNA, 15 bp, Homo sapiens
gctcggggcggcgca

SEQ ID NO: 1520141 - DNA, 15 bp, Homo sapiens
ctcggggcggcgcag

SEQ ID NO: 1520142 - DNA, 15 bp, Homo sapiens
tcggggcggcgcagg

SEQ ID NO: 1520143 - DNA, 15 bp, Homo sapiens
ggggcggcgcagggc

SEQ ID NO: 1520144 - DNA, 15 bp, Homo sapiens
gggcggcgcagggcg

SEQ ID NO: 1520145 - DNA, 15 bp, Homo sapiens
ggcggcgcagggcgg

SEQ ID NO: 1520146 - DNA, 15 bp, Homo sapiens
gcggcgcagggcggc

SEQ ID NO: 1520147 - DNA, 15 bp, Homo sapiens
cggcgcagggcggcc

SEQ ID NO: 1520148 - DNA, 15 bp, Homo sapiens
ggcgcagggcggccg

SEQ ID NO: 1520149 - DNA, 15 bp, Homo sapiens
gcgcagggcggccgg

SEQ ID NO: 1520150 - DNA, 15 bp, Homo sapiens
cgcagggcggccgga

SEQ ID NO: 1520151 - DNA, 15 bp, Homo sapiens
gcagggcggccggag

SEQ ID NO: 1520152 - DNA, 15 bp, Homo sapiens
cagggcggccggagc

SEQ ID NO: 1520153 - DNA, 15 bp, Homo sapiens
agggcggccggagcg

SEQ ID NO: 1520154 - DNA, 15 bp, Homo sapiens
gggcggccggagcgg

SEQ ID NO: 1520155 - DNA, 15 bp, Homo sapiens
ggcggccggagcggc

SEQ ID NO: 1520156 - DNA, 15 bp, Homo sapiens
gcggccggagcggcc

SEQ ID NO: 1520157 - DNA, 15 bp, Homo sapiens
cggccggagcggccg

SEQ ID NO: 1520158 - DNA, 15 bp, Homo sapiens
ggccggagcggccgg

SEQ ID NO: 1520159 - DNA, 15 bp, Homo sapiens
gccggagcggccggg

SEQ ID NO: 1520160 - DNA, 15 bp, Homo sapiens
ccggagcggccgggc

SEQ ID NO: 1520161 - DNA, 15 bp, Homo sapiens
cggagcggccgggcc

SEQ ID NO: 1520162 - DNA, 15 bp, Homo sapiens
ggagcggccgggccg

SEQ ID NO: 1520163 - DNA, 15 bp, Homo sapiens
gagcggccgggccgg

SEQ ID NO: 1520164 - DNA, 15 bp, Homo sapiens
agcggccgggccggc

SEQ ID NO: 1520165 - DNA, 15 bp, Homo sapiens
gcggccgggccggcc

SEQ ID NO: 1520166 - DNA, 15 bp, Homo sapiens
cggccgggccggccg

SEQ ID NO: 1520167 - DNA, 15 bp, Homo sapiens
ggccgggccggccgg

SEQ ID NO: 1520168 - DNA, 15 bp, Homo sapiens
gccgggccggccggg

SEQ ID NO: 1520169 - DNA, 15 bp, Homo sapiens
ccgggccggccgggc

SEQ ID NO: 1520170 - DNA, 15 bp, Homo sapiens
cgggccggccgggcc

SEQ ID NO: 1520171 - DNA, 15 bp, Homo sapiens
gggccggccgggccg

SEQ ID NO: 1520172 - DNA, 15 bp, Homo sapiens
ggccggccgggccgg

SEQ ID NO: 1520173 - DNA, 15 bp, Homo sapiens
gccggccgggccggg

SEQ ID NO: 1520174 - DNA, 15 bp, Homo sapiens
ccggccgggccgggg

SEQ ID NO: 1520175 - DNA, 15 bp, Homo sapiens
cggccgggccggggg

SEQ ID NO: 1520176 - DNA, 15 bp, Homo sapiens
ggccgggccgggggc

SEQ ID NO: 1520177 - DNA, 15 bp, Homo sapiens
gccgggccgggggcc

SEQ ID NO: 1520178 - DNA, 15 bp, Homo sapiens
ccgggccgggggccg

SEQ ID NO: 1520179 - DNA, 15 bp, Homo sapiens
cgggccgggggccgg

SEQ ID NO: 1520180 - DNA, 15 bp, Homo sapiens
gggccgggggccgga

SEQ ID NO: 1520181 - DNA, 15 bp, Homo sapiens
ggccgggggccggag

SEQ ID NO: 1520182 - DNA, 15 bp, Homo sapiens
gccgggggccggagc

SEQ ID NO: 1520183 - DNA, 15 bp, Homo sapiens
ccgggggccggagcg

SEQ ID NO: 1520184 - DNA, 15 bp, Homo sapiens
cgggggccggagcgc

SEQ ID NO: 1520185 - DNA, 15 bp, Homo sapiens
gggggccggagcgcg

SEQ ID NO: 1520186 - DNA, 15 bp, Homo sapiens
ggggccggagcgcga

SEQ ID NO: 1520187 - DNA, 15 bp, Homo sapiens
gggccggagcgcgag

SEQ ID NO: 1520188 - DNA, 15 bp, Homo sapiens
ggccggagcgcgagc

SEQ ID NO: 1520189 - DNA, 15 bp, Homo sapiens
gccggagcgcgagcg

SEQ ID NO: 1520190 - DNA, 15 bp, Homo sapiens
ccggagcgcgagcgc

SEQ ID NO: 1520191 - DNA, 15 bp, Homo sapiens
cggagcgcgagcgcg

SEQ ID NO: 1520192 - DNA, 15 bp, Homo sapiens
ggagcgcgagcgcga

SEQ ID NO: 1520193 - DNA, 15 bp, Homo sapiens
gagcgcgagcgcgag

SEQ ID NO: 1520194 - DNA, 15 bp, Homo sapiens
agcgcgagcgcgagc

SEQ ID NO: 1520195 - DNA, 15 bp, Homo sapiens
gcgcgagcgcgagcg

SEQ ID NO: 1520196 - DNA, 15 bp, Homo sapiens
cgcgagcgcgagcgg

SEQ ID NO: 1520197 - DNA, 15 bp, Homo sapiens
gcgagcgcgagcggc

SEQ ID NO: 1520198 - DNA, 15 bp, Homo sapiens
cgagcgcgagcggcc

SEQ ID NO: 1520199 - DNA, 15 bp, Homo sapiens
gagcgcgagcggccg

SEQ ID NO: 1520200 - DNA, 15 bp, Homo sapiens
agcgcgagcggccgc

SEQ ID NO: 1520201 - DNA, 15 bp, Homo sapiens
gcgcgagcggccgcc

SEQ ID NO: 1520202 - DNA, 15 bp, Homo sapiens
cgcgagcggccgccg

SEQ ID NO: 1520203 - DNA, 15 bp, Homo sapiens
gcgagcggccgccgg

SEQ ID NO: 1520204 - DNA, 15 bp, Homo sapiens
cgagcggccgccggg

SEQ ID NO: 1520205 - DNA, 15 bp, Homo sapiens
gagcggccgccgggc

SEQ ID NO: 1520206 - DNA, 15 bp, Homo sapiens
agcggccgccgggcg

SEQ ID NO: 1520207 - DNA, 15 bp, Homo sapiens
gcggccgccgggcgc

SEQ ID NO: 1520208 - DNA, 15 bp, Homo sapiens
cggccgccgggcgcc

SEQ ID NO: 1520209 - DNA, 15 bp, Homo sapiens
ggccgccgggcgccg

SEQ ID NO: 1520210 - DNA, 15 bp, Homo sapiens
gccgccgggcgccgg

SEQ ID NO: 1520211 - DNA, 15 bp, Homo sapiens
ccgccgggcgccgga

SEQ ID NO: 1520212 - DNA, 15 bp, Homo sapiens
cgccgggcgccggag

SEQ ID NO: 1520213 - DNA, 15 bp, Homo sapiens
gccgggcgccggagc

SEQ ID NO: 1520214 - DNA, 15 bp, Homo sapiens
ccgggcgccggagcc

SEQ ID NO: 1520215 - DNA, 15 bp, Homo sapiens
cgggcgccggagccg

SEQ ID NO: 1520216 - DNA, 15 bp, Homo sapiens
gggcgccggagccgc

SEQ ID NO: 1520217 - DNA, 15 bp, Homo sapiens
ggcgccggagccgcg

SEQ ID NO: 1520218 - DNA, 15 bp, Homo sapiens
gcgccggagccgcgt

SEQ ID NO: 1520219 - DNA, 15 bp, Homo sapiens
cgccggagccgcgtc

SEQ ID NO: 1520220 - DNA, 15 bp, Homo sapiens
gccggagccgcgtcc

SEQ ID NO: 1520221 - DNA, 15 bp, Homo sapiens
ccggagccgcgtccc

SEQ ID NO: 1520222 - DNA, 15 bp, Homo sapiens
cggagccgcgtcccc

SEQ ID NO: 1520223 - DNA, 15 bp, Homo sapiens
ggagccgcgtccccc

SEQ ID NO: 1520224 - DNA, 15 bp, Homo sapiens
gagccgcgtccccct

SEQ ID NO: 1520225 - DNA, 15 bp, Homo sapiens
agccgcgtccccctg

SEQ ID NO: 1520226 - DNA, 15 bp, Homo sapiens
gccgcgtccccctgc

SEQ ID NO: 1520227 - DNA, 15 bp, Homo sapiens
ccgcgtccccctgcg

SEQ ID NO: 1520228 - DNA, 15 bp, Homo sapiens
cgcgtccccctgcgc

SEQ ID NO: 1520229 - DNA, 15 bp, Homo sapiens
gcgtccccctgcgcc

SEQ ID NO: 1520230 - DNA, 15 bp, Homo sapiens
cgtccccctgcgccg

SEQ ID NO: 1520231 - DNA, 15 bp, Homo sapiens
gtccccctgcgccgc

SEQ ID NO: 1520232 - DNA, 15 bp, Homo sapiens
tccccctgcgccgcc

SEQ ID NO: 1520233 - DNA, 15 bp, Homo sapiens
ccccctgcgccgccc

SEQ ID NO: 1520234 - DNA, 15 bp, Homo sapiens
cccctgcgccgcccc

SEQ ID NO: 1520235 - DNA, 15 bp, Homo sapiens
cctgcgccgccccgg

SEQ ID NO: 1520236 - DNA, 15 bp, Homo sapiens
ctgcgccgccccggg

SEQ ID NO: 1520237 - DNA, 15 bp, Homo sapiens
tgcgccgccccgggc

SEQ ID NO: 1520238 - DNA, 15 bp, Homo sapiens
gcgccgccccgggcc

SEQ ID NO: 1520239 - DNA, 15 bp, Homo sapiens
cgccgccccgggcct

SEQ ID NO: 1520240 - DNA, 15 bp, Homo sapiens
gccgccccgggcctg

SEQ ID NO: 1520241 - DNA, 15 bp, Homo sapiens
ccgccccgggcctgc

SEQ ID NO: 1520242 - DNA, 15 bp, Homo sapiens
cgccccgggcctgcc

SEQ ID NO: 1520243 - DNA, 15 bp, Homo sapiens
gccccgggcctgccg

SEQ ID NO: 1520244 - DNA, 15 bp, Homo sapiens
ccccgggcctgccgg

SEQ ID NO: 1520245 - DNA, 15 bp, Homo sapiens
cccgggcctgccggc

SEQ ID NO: 1520246 - DNA, 15 bp, Homo sapiens
ccgggcctgccggcc

SEQ ID NO: 1520247 - DNA, 15 bp, Homo sapiens
cgggcctgccggccg

SEQ ID NO: 1520248 - DNA, 15 bp, Homo sapiens
gggcctgccggccgg

SEQ ID NO: 1520249 - DNA, 15 bp, Homo sapiens
ggcctgccggccgga

SEQ ID NO: 1520250 - DNA, 15 bp, Homo sapiens
gcctgccggccggag

SEQ ID NO: 1520251 - DNA, 15 bp, Homo sapiens
cctgccggccggagg

SEQ ID NO: 1520252 - DNA, 15 bp, Homo sapiens
ctgccggccggagga

SEQ ID NO: 1520253 - DNA, 15 bp, Homo sapiens
tgccggccggaggag

SEQ ID NO: 1520254 - DNA, 15 bp, Homo sapiens
gccggccggaggagc

SEQ ID NO: 1520255 - DNA, 15 bp, Homo sapiens
ccggccggaggagcc

SEQ ID NO: 1520256 - DNA, 15 bp, Homo sapiens
cggccggaggagcca

SEQ ID NO: 1520257 - DNA, 15 bp, Homo sapiens
ggccggaggagccac

SEQ ID NO: 1520258 - DNA, 15 bp, Homo sapiens
gccggaggagccacc

SEQ ID NO: 1520259 - DNA, 15 bp, Homo sapiens
ccggaggagccacca

SEQ ID NO: 1520260 - DNA, 15 bp, Homo sapiens
cggaggagccaccat

SEQ ID NO: 1520261 - DNA, 15 bp, Homo sapiens
ggaggagccaccata

SEQ ID NO: 1520262 - DNA, 15 bp, Homo sapiens
gaggagccaccatac

SEQ ID NO: 1520263 - DNA, 15 bp, Homo sapiens
aggagccaccataca

SEQ ID NO: 1520264 - DNA, 15 bp, Homo sapiens
ggagccaccatacac

SEQ ID NO: 1520265 - DNA, 15 bp, Homo sapiens
gagccaccatacacc

SEQ ID NO: 1520266 - DNA, 15 bp, Homo sapiens
agccaccatacaccc

SEQ ID NO: 1520267 - DNA, 15 bp, Homo sapiens
gccaccatacacccc

SEQ ID NO: 1520268 - DNA, 15 bp, Homo sapiens
ccaccatacaccccg

SEQ ID NO: 1520269 - DNA, 15 bp, Homo sapiens
caccatacaccccgg

SEQ ID NO: 1520270 - DNA, 15 bp, Homo sapiens
accatacaccccggg

SEQ ID NO: 1520271 - DNA, 15 bp, Homo sapiens
ccatacaccccgggt

SEQ ID NO: 1520272 - DNA, 15 bp, Homo sapiens
catacaccccgggtc

SEQ ID NO: 1520273 - DNA, 15 bp, Homo sapiens
atacaccccgggtcg

SEQ ID NO: 1520274 - DNA, 15 bp, Homo sapiens
tacaccccgggtcgc

SEQ ID NO: 1520275 - DNA, 15 bp, Homo sapiens
acaccccgggtcgcc

SEQ ID NO: 1520276 - DNA, 15 bp, Homo sapiens
caccccgggtcgccg

SEQ ID NO: 1520277 - DNA, 15 bp, Homo sapiens
accccgggtcgccga

SEQ ID NO: 1520278 - DNA, 15 bp, Homo sapiens
ccccgggtcgccgag

SEQ ID NO: 1520279 - DNA, 15 bp, Homo sapiens
cccgggtcgccgagc

SEQ ID NO: 1520280 - DNA, 15 bp, Homo sapiens
ccgggtcgccgagcg

SEQ ID NO: 1520281 - DNA, 15 bp, Homo sapiens
cgggtcgccgagcgc

SEQ ID NO: 1520282 - DNA, 15 bp, Homo sapiens
gggtcgccgagcgcc

SEQ ID NO: 1520283 - DNA, 15 bp, Homo sapiens
ggtcgccgagcgcct

SEQ ID NO: 1520284 - DNA, 15 bp, Homo sapiens
gtcgccgagcgcctg

SEQ ID NO: 1520285 - DNA, 15 bp, Homo sapiens
tcgccgagcgcctgg

SEQ ID NO: 1520286 - DNA, 15 bp, Homo sapiens
cgccgagcgcctggc

SEQ ID NO: 1520287 - DNA, 15 bp, Homo sapiens
gccgagcgcctggcc

SEQ ID NO: 1520288 - DNA, 15 bp, Homo sapiens
ccgagcgcctggccg

SEQ ID NO: 1520289 - DNA, 15 bp, Homo sapiens
cgagcgcctggccgc

SEQ ID NO: 1520290 - DNA, 15 bp, Homo sapiens
gagcgcctggccgcc

SEQ ID NO: 1520291 - DNA, 15 bp, Homo sapiens
agcgcctggccgccc

SEQ ID NO: 1520292 - DNA, 15 bp, Homo sapiens
gcgcctggccgcccc

SEQ ID NO: 1520293 - DNA, 15 bp, Homo sapiens
cgcctggccgccccg

SEQ ID NO: 1520294 - DNA, 15 bp, Homo sapiens
gcctggccgccccgc

SEQ ID NO: 1520295 - DNA, 15 bp, Homo sapiens
cctggccgccccgcg

SEQ ID NO: 1520296 - DNA, 15 bp, Homo sapiens
ctggccgccccgcgc

SEQ ID NO: 1520297 - DNA, 15 bp, Homo sapiens
tggccgccccgcgcc

SEQ ID NO: 1520298 - DNA, 15 bp, Homo sapiens
ggccgccccgcgccc

SEQ ID NO: 1520299 - DNA, 15 bp, Homo sapiens
gccgccccgcgcccg

SEQ ID NO: 1520300 - DNA, 15 bp, Homo sapiens
ccgccccgcgcccgc

SEQ ID NO: 1520301 - DNA, 15 bp, Homo sapiens
cgccccgcgcccgcg

SEQ ID NO: 1520302 - DNA, 15 bp, Homo sapiens
gccccgcgcccgcgc

SEQ ID NO: 1520303 - DNA, 15 bp, Homo sapiens
ccccgcgcccgcgcc

SEQ ID NO: 1520304 - DNA, 15 bp, Homo sapiens
cccgcgcccgcgccg

SEQ ID NO: 1520305 - DNA, 15 bp, Homo sapiens
ccgcgcccgcgccgc

SEQ ID NO: 1520306 - DNA, 15 bp, Homo sapiens
cgcgcccgcgccgcg

SEQ ID NO: 1520307 - DNA, 15 bp, Homo sapiens
gcgcccgcgccgcgc

SEQ ID NO: 1520308 - DNA, 15 bp, Homo sapiens
cgcccgcgccgcgct

SEQ ID NO: 1520309 - DNA, 15 bp, Homo sapiens
gcccgcgccgcgctc

SEQ ID NO: 1520310 - DNA, 15 bp, Homo sapiens
cccgcgccgcgctcc

SEQ ID NO: 1520311 - DNA, 15 bp, Homo sapiens
ccgcgccgcgctccg

SEQ ID NO: 1520312 - DNA, 15 bp, Homo sapiens
cgcgccgcgctccgc

SEQ ID NO: 1520313 - DNA, 15 bp, Homo sapiens
gcgccgcgctccgcc

SEQ ID NO: 1520314 - DNA, 15 bp, Homo sapiens
cgccgcgctccgcct

SEQ ID NO: 1520315 - DNA, 15 bp, Homo sapiens
gccgcgctccgcctg

SEQ ID NO: 1520316 - DNA, 15 bp, Homo sapiens
ccgcgctccgcctgt

SEQ ID NO: 1520317 - DNA, 15 bp, Homo sapiens
cgcgctccgcctgtg

SEQ ID NO: 1520318 - DNA, 15 bp, Homo sapiens
gcgctccgcctgtgg

SEQ ID NO: 1520319 - DNA, 15 bp, Homo sapiens
cgctccgcctgtggc

SEQ ID NO: 1520320 - DNA, 15 bp, Homo sapiens
gctccgcctgtggct

SEQ ID NO: 1520321 - DNA, 15 bp, Homo sapiens
ctccgcctgtggctg

SEQ ID NO: 1520322 - DNA, 15 bp, Homo sapiens
tccgcctgtggctgg

SEQ ID NO: 1520323 - DNA, 15 bp, Homo sapiens
ccgcctgtggctggg

SEQ ID NO: 1520324 - DNA, 15 bp, Homo sapiens
cgcctgtggctgggc

SEQ ID NO: 1520325 - DNA, 15 bp, Homo sapiens
gcctgtggctgggct

SEQ ID NO: 1520326 - DNA, 15 bp, Homo sapiens
cctgtggctgggctg

SEQ ID NO: 1520327 - DNA, 15 bp, Homo sapiens
ctgtggctgggctgc

SEQ ID NO: 1520328 - DNA, 15 bp, Homo sapiens
tgtggctgggctgcg

SEQ ID NO: 1520329 - DNA, 15 bp, Homo sapiens
gtggctgggctgcgt

SEQ ID NO: 1520330 - DNA, 15 bp, Homo sapiens
tggctgggctgcgtc

SEQ ID NO: 1520331 - DNA, 15 bp, Homo sapiens
ggctgggctgcgtct

SEQ ID NO: 1520332 - DNA, 15 bp, Homo sapiens
gctgggctgcgtctg

SEQ ID NO: 1520333 - DNA, 15 bp, Homo sapiens
ctgggctgcgtctgc

SEQ ID NO: 1520334 - DNA, 15 bp, Homo sapiens
tgggctgcgtctgct

SEQ ID NO: 1520335 - DNA, 15 bp, Homo sapiens
gggctgcgtctgctt

SEQ ID NO: 1520336 - DNA, 15 bp, Homo sapiens
ggctgcgtctgcttc

SEQ ID NO: 1520337 - DNA, 15 bp, Homo sapiens
gctgcgtctgcttcg

SEQ ID NO: 1520338 - DNA, 15 bp, Homo sapiens
ctgcgtctgcttcgc

SEQ ID NO: 1520339 - DNA, 15 bp, Homo sapiens
tgcgtctgcttcgcg

SEQ ID NO: 1520340 - DNA, 15 bp, Homo sapiens
gcgtctgcttcgcgc

SEQ ID NO: 1520341 - DNA, 15 bp, Homo sapiens
cgtctgcttcgcgct

SEQ ID NO: 1520342 - DNA, 15 bp, Homo sapiens
gtctgcttcgcgctg

SEQ ID NO: 1520343 - DNA, 15 bp, Homo sapiens
tctgcttcgcgctgg

SEQ ID NO: 1520344 - DNA, 15 bp, Homo sapiens
ctgcttcgcgctggt

SEQ ID NO: 1520345 - DNA, 15 bp, Homo sapiens
tgcttcgcgctggtg

SEQ ID NO: 1520346 - DNA, 15 bp, Homo sapiens
gcttcgcgctggtgc

SEQ ID NO: 1520347 - DNA, 15 bp, Homo sapiens
cttcgcgctggtgca

SEQ ID NO: 1520348 - DNA, 15 bp, Homo sapiens
ttcgcgctggtgcag

SEQ ID NO: 1520349 - DNA, 15 bp, Homo sapiens
tcgcgctggtgcagg

SEQ ID NO: 1520350 - DNA, 15 bp, Homo sapiens
cgcgctggtgcaggc

SEQ ID NO: 1520351 - DNA, 15 bp, Homo sapiens
gcgctggtgcaggcg

SEQ ID NO: 1520352 - DNA, 15 bp, Homo sapiens
cgctggtgcaggcgg

SEQ ID NO: 1520353 - DNA, 15 bp, Homo sapiens
gctggtgcaggcggg

SEQ ID NO: 1520354 - DNA, 15 bp, Homo sapiens
ctggtgcaggcgggt

SEQ ID NO: 1520355 - DNA, 15 bp, Homo sapiens
tggtgcaggcgggta

SEQ ID NO: 1520356 - DNA, 15 bp, Homo sapiens
ggtgcaggcgggtaa

SEQ ID NO: 1520357 - DNA, 15 bp, Homo sapiens
gtgcaggcgggtaag

SEQ ID NO: 1520358 - DNA, 15 bp, Homo sapiens
tgcaggcgggtaagg

SEQ ID NO: 1520359 - DNA, 15 bp, Homo sapiens
gcaggcgggtaaggg

SEQ ID NO: 1520360 - DNA, 15 bp, Homo sapiens
caggcgggtaagggg

SEQ ID NO: 1520361 - DNA, 15 bp, Homo sapiens
aggcgggtaaggggg

SEQ ID NO: 1520362 - DNA, 15 bp, Homo sapiens
ggcgggtaagggggc

SEQ ID NO: 1520363 - DNA, 15 bp, Homo sapiens
gcgggtaagggggcc

SEQ ID NO: 1520364 - DNA, 15 bp, Homo sapiens
cgggtaagggggccc

SEQ ID NO: 1520365 - DNA, 15 bp, Homo sapiens
gggtaagggggcccg

SEQ ID NO: 1520366 - DNA, 15 bp, Homo sapiens
ggtaagggggcccgg

SEQ ID NO: 1520367 - DNA, 15 bp, Homo sapiens
gtaagggggcccggg

SEQ ID NO: 1520368 - DNA, 15 bp, Homo sapiens
taagggggcccgggg

SEQ ID NO: 1520369 - DNA, 15 bp, Homo sapiens
aagggggcccggggc

SEQ ID NO: 1520370 - DNA, 15 bp, Homo sapiens
agggggcccggggcg

SEQ ID NO: 1520371 - DNA, 15 bp, Homo sapiens
gggggcccggggcgg

SEQ ID NO: 1520372 - DNA, 15 bp, Homo sapiens
ggcccggggcggggg

SEQ ID NO: 1520373 - DNA, 15 bp, Homo sapiens
gcccggggcgggggg

SEQ ID NO: 1520374 - DNA, 15 bp, Homo sapiens
cccggggcggggggc

SEQ ID NO: 1520375 - DNA, 15 bp, Homo sapiens
ccggggcggggggcc

SEQ ID NO: 1520376 - DNA, 15 bp, Homo sapiens
cggggcggggggccg

SEQ ID NO: 1520377 - DNA, 15 bp, Homo sapiens
ggggcggggggccgg

SEQ ID NO: 1520378 - DNA, 15 bp, Homo sapiens
gggcggggggccggc

SEQ ID NO: 1520379 - DNA, 15 bp, Homo sapiens
ggcggggggccggcg

SEQ ID NO: 1520380 - DNA, 15 bp, Homo sapiens
gcggggggccggcgc

SEQ ID NO: 1520381 - DNA, 15 bp, Homo sapiens
cggggggccggcgcc

SEQ ID NO: 1520382 - DNA, 15 bp, Homo sapiens
ggggggccggcgccg

SEQ ID NO: 1520383 - DNA, 15 bp, Homo sapiens
gggggccggcgccgg

SEQ ID NO: 1520384 - DNA, 15 bp, Homo sapiens
ggggccggcgccggg

SEQ ID NO: 1520385 - DNA, 15 bp, Homo sapiens
gggccggcgccgggg

SEQ ID NO: 1520386 - DNA, 15 bp, Homo sapiens
ggccggcgccggggc

SEQ ID NO: 1520387 - DNA, 15 bp, Homo sapiens
gccggcgccggggca

SEQ ID NO: 1520388 - DNA, 15 bp, Homo sapiens
ccggcgccggggcag

SEQ ID NO: 1520389 - DNA, 15 bp, Homo sapiens
cggcgccggggcagg

SEQ ID NO: 1520390 - DNA, 15 bp, Homo sapiens
ggcgccggggcaggc

SEQ ID NO: 1520391 - DNA, 15 bp, Homo sapiens
gcgccggggcaggct

SEQ ID NO: 1520392 - DNA, 15 bp, Homo sapiens
cgccggggcaggctc

SEQ ID NO: 1520393 - DNA, 15 bp, Homo sapiens
gccggggcaggctcc

SEQ ID NO: 1520394 - DNA, 15 bp, Homo sapiens
ccggggcaggctcct

SEQ ID NO: 1520395 - DNA, 15 bp, Homo sapiens
cggggcaggctcctc

SEQ ID NO: 1520396 - DNA, 15 bp, Homo sapiens
ggggcaggctcctct

SEQ ID NO: 1520397 - DNA, 15 bp, Homo sapiens
gggcaggctcctctc

SEQ ID NO: 1520398 - DNA, 15 bp, Homo sapiens
ggcaggctcctctcg

SEQ ID NO: 1520399 - DNA, 15 bp, Homo sapiens
gcaggctcctctcga

SEQ ID NO: 1520400 - DNA, 15 bp, Homo sapiens
caggctcctctcgag

SEQ ID NO: 1520401 - DNA, 15 bp, Homo sapiens
aggctcctctcgagc

SEQ ID NO: 1520402 - DNA, 15 bp, Homo sapiens
ggctcctctcgagcc

SEQ ID NO: 1520403 - DNA, 15 bp, Homo sapiens
gctcctctcgagccc

SEQ ID NO: 1520404 - DNA, 15 bp, Homo sapiens
ctcctctcgagccca

SEQ ID NO: 1520405 - DNA, 15 bp, Homo sapiens
tcctctcgagcccag

SEQ ID NO: 1520406 - DNA, 15 bp, Homo sapiens
cctctcgagcccagc

SEQ ID NO: 1520407 - DNA, 15 bp, Homo sapiens
ctctcgagcccagct

SEQ ID NO: 1520408 - DNA, 15 bp, Homo sapiens
tctcgagcccagcta

SEQ ID NO: 1520409 - DNA, 15 bp, Homo sapiens
ctcgagcccagctac

SEQ ID NO: 1520410 - DNA, 15 bp, Homo sapiens
tcgagcccagctacc

SEQ ID NO: 1520411 - DNA, 15 bp, Homo sapiens
cgagcccagctacct

SEQ ID NO: 1520412 - DNA, 15 bp, Homo sapiens
gagcccagctacctg

SEQ ID NO: 1520413 - DNA, 15 bp, Homo sapiens
agcccagctacctgg

SEQ ID NO: 1520414 - DNA, 15 bp, Homo sapiens
gcccagctacctggg

SEQ ID NO: 1520415 - DNA, 15 bp, Homo sapiens
cccagctacctggga

SEQ ID NO: 1520416 - DNA, 15 bp, Homo sapiens
ccagctacctgggag

SEQ ID NO: 1520417 - DNA, 15 bp, Homo sapiens
cagctacctgggagt

SEQ ID NO: 1520418 - DNA, 15 bp, Homo sapiens
agctacctgggagtc

SEQ ID NO: 1520419 - DNA, 15 bp, Homo sapiens
gctacctgggagtcc

SEQ ID NO: 1520420 - DNA, 15 bp, Homo sapiens
ctacctgggagtccc

SEQ ID NO: 1520421 - DNA, 15 bp, Homo sapiens
tacctgggagtcccc

SEQ ID NO: 1520422 - DNA, 15 bp, Homo sapiens
acctgggagtcccct

SEQ ID NO: 1520423 - DNA, 15 bp, Homo sapiens
cctgggagtcccctg

SEQ ID NO: 1520424 - DNA, 15 bp, Homo sapiens
ctgggagtcccctgg

SEQ ID NO: 1520425 - DNA, 15 bp, Homo sapiens
tgggagtcccctggt

SEQ ID NO: 1520426 - DNA, 15 bp, Homo sapiens
gggagtcccctggtc

SEQ ID NO: 1520427 - DNA, 15 bp, Homo sapiens
ggagtcccctggtcc

SEQ ID NO: 1520428 - DNA, 15 bp, Homo sapiens
gagtcccctggtcct

SEQ ID NO: 1520429 - DNA, 15 bp, Homo sapiens
agtcccctggtcctt

SEQ ID NO: 1520430 - DNA, 15 bp, Homo sapiens
gtcccctggtccttt

SEQ ID NO: 1520431 - DNA, 15 bp, Homo sapiens
tcccctggtcctttc

SEQ ID NO: 1520432 - DNA, 15 bp, Homo sapiens
cccctggtcctttct

SEQ ID NO: 1520433 - DNA, 15 bp, Homo sapiens
ccctggtcctttctc

SEQ ID NO: 1520434 - DNA, 15 bp, Homo sapiens
cctggtcctttctct

SEQ ID NO: 1520435 - DNA, 15 bp, Homo sapiens
ctggtcctttctctg

SEQ ID NO: 1520436 - DNA, 15 bp, Homo sapiens
tggtcctttctctgc

SEQ ID NO: 1520437 - DNA, 15 bp, Homo sapiens
ggtcctttctctgcc

SEQ ID NO: 1520438 - DNA, 15 bp, Homo sapiens
gtcctttctctgccc

SEQ ID NO: 1520439 - DNA, 15 bp, Homo sapiens
tcctttctctgcccc

SEQ ID NO: 1520440 - DNA, 15 bp, Homo sapiens
cctttctctgccccc

SEQ ID NO: 1520441 - DNA, 15 bp, Homo sapiens
ctttctctgccccct

SEQ ID NO: 1520442 - DNA, 15 bp, Homo sapiens
tttctctgcccccta

SEQ ID NO: 1520443 - DNA, 15 bp, Homo sapiens
ttctctgccccctag

SEQ ID NO: 1520444 - DNA, 15 bp, Homo sapiens
tctctgccccctagg

SEQ ID NO: 1520445 - DNA, 15 bp, Homo sapiens
ctctgccccctaggg

SEQ ID NO: 1520446 - DNA, 15 bp, Homo sapiens
tctgccccctaggga

SEQ ID NO: 1520447 - DNA, 15 bp, Homo sapiens
ctgccccctagggac

SEQ ID NO: 1520448 - DNA, 15 bp, Homo sapiens
tgccccctagggact

SEQ ID NO: 1520449 - DNA, 15 bp, Homo sapiens
gccccctagggactc

SEQ ID NO: 1520450 - DNA, 15 bp, Homo sapiens
ccccctagggactcc

SEQ ID NO: 1520451 - DNA, 15 bp, Homo sapiens
cccctagggactcct

SEQ ID NO: 1520452 - DNA, 15 bp, Homo sapiens
ccctagggactcctg

SEQ ID NO: 1520453 - DNA, 15 bp, Homo sapiens
cctagggactcctgt

SEQ ID NO: 1520454 - DNA, 15 bp, Homo sapiens
ctagggactcctgtc

SEQ ID NO: 1520455 - DNA, 15 bp, Homo sapiens
tagggactcctgtct

SEQ ID NO: 1520456 - DNA, 15 bp, Homo sapiens
agggactcctgtctc

SEQ ID NO: 1520457 - DNA, 15 bp, Homo sapiens
gggactcctgtctcg

SEQ ID NO: 1520458 - DNA, 15 bp, Homo sapiens
ggactcctgtctcgg

SEQ ID NO: 1520459 - DNA, 15 bp, Homo sapiens
gactcctgtctcggc

SEQ ID NO: 1520460 - DNA, 15 bp, Homo sapiens
actcctgtctcggcc

SEQ ID NO: 1520461 - DNA, 15 bp, Homo sapiens
ctcctgtctcggccc

SEQ ID NO: 1520462 - DNA, 15 bp, Homo sapiens
tcctgtctcggccca

SEQ ID NO: 1520463 - DNA, 15 bp, Homo sapiens
cctgtctcggcccaa

SEQ ID NO: 1520464 - DNA, 15 bp, Homo sapiens
ctgtctcggcccaaa

SEQ ID NO: 1520465 - DNA, 15 bp, Homo sapiens
tgtctcggcccaaac

SEQ ID NO: 1520466 - DNA, 15 bp, Homo sapiens
gtctcggcccaaaca

SEQ ID NO: 1520467 - DNA, 15 bp, Homo sapiens
tctcggcccaaacac

SEQ ID NO: 1520468 - DNA, 15 bp, Homo sapiens
ctcggcccaaacact

SEQ ID NO: 1520469 - DNA, 15 bp, Homo sapiens
tcggcccaaacactg

SEQ ID NO: 1520470 - DNA, 15 bp, Homo sapiens
cggcccaaacactgc

SEQ ID NO: 1520471 - DNA, 15 bp, Homo sapiens
ggcccaaacactgct

SEQ ID NO: 1520472 - DNA, 15 bp, Homo sapiens
gcccaaacactgctc

SEQ ID NO: 1520473 - DNA, 15 bp, Homo sapiens
cccaaacactgctcc

SEQ ID NO: 1520474 - DNA, 15 bp, Homo sapiens
ccaaacactgctccc

SEQ ID NO: 1520475 - DNA, 15 bp, Homo sapiens
caaacactgctcccc

SEQ ID NO: 1520476 - DNA, 15 bp, Homo sapiens
aaacactgctcccct

SEQ ID NO: 1520477 - DNA, 15 bp, Homo sapiens
aacactgctccccta

SEQ ID NO: 1520478 - DNA, 15 bp, Homo sapiens
acactgctcccctaa

SEQ ID NO: 1520479 - DNA, 15 bp, Homo sapiens
cactgctcccctaac

SEQ ID NO: 1520480 - DNA, 15 bp, Homo sapiens
actgctcccctaacc

SEQ ID NO: 1520481 - DNA, 15 bp, Homo sapiens
ctgctcccctaaccc

SEQ ID NO: 1520482 - DNA, 15 bp, Homo sapiens
tgctcccctaaccca

SEQ ID NO: 1520483 - DNA, 15 bp, Homo sapiens
gctcccctaacccag

SEQ ID NO: 1520484 - DNA, 15 bp, Homo sapiens
ctcccctaacccagc

SEQ ID NO: 1520485 - DNA, 15 bp, Homo sapiens
tcccctaacccagcc

SEQ ID NO: 1520486 - DNA, 15 bp, Homo sapiens
cccctaacccagccc

SEQ ID NO: 1520487 - DNA, 15 bp, Homo sapiens
ccctaacccagcccc

SEQ ID NO: 1520488 - DNA, 15 bp, Homo sapiens
cctaacccagccccc

SEQ ID NO: 1520489 - DNA, 15 bp, Homo sapiens
ctaacccagccccca

SEQ ID NO: 1520490 - DNA, 15 bp, Homo sapiens
taacccagcccccag

SEQ ID NO: 1520491 - DNA, 15 bp, Homo sapiens
aacccagcccccagc

SEQ ID NO: 1520492 - DNA, 15 bp, Homo sapiens
acccagcccccagcg

SEQ ID NO: 1520493 - DNA, 15 bp, Homo sapiens
cccagcccccagcgt

SEQ ID NO: 1520494 - DNA, 15 bp, Homo sapiens
ccagcccccagcgtc

SEQ ID NO: 1520495 - DNA, 15 bp, Homo sapiens
cagcccccagcgtct

SEQ ID NO: 1520496 - DNA, 15 bp, Homo sapiens
agcccccagcgtctt

SEQ ID NO: 1520497 - DNA, 15 bp, Homo sapiens
gcccccagcgtcttc

SEQ ID NO: 1520498 - DNA, 15 bp, Homo sapiens
cccccagcgtcttcc

SEQ ID NO: 1520499 - DNA, 15 bp, Homo sapiens
ccccagcgtcttcct

SEQ ID NO: 1520500 - DNA, 15 bp, Homo sapiens
cccagcgtcttccta

SEQ ID NO: 1520501 - DNA, 15 bp, Homo sapiens
ccagcgtcttcctac

SEQ ID NO: 1520502 - DNA, 15 bp, Homo sapiens
cagcgtcttcctacc

SEQ ID NO: 1520503 - DNA, 15 bp, Homo sapiens
agcgtcttcctacct

SEQ ID NO: 1520504 - DNA, 15 bp, Homo sapiens
gcgtcttcctacctc

SEQ ID NO: 1520505 - DNA, 15 bp, Homo sapiens
cgtcttcctacctcc

SEQ ID NO: 1520506 - DNA, 15 bp, Homo sapiens
gtcttcctacctcct

SEQ ID NO: 1520507 - DNA, 15 bp, Homo sapiens
tcttcctacctcctt

SEQ ID NO: 1520508 - DNA, 15 bp, Homo sapiens
cttcctacctccttg

SEQ ID NO: 1520509 - DNA, 15 bp, Homo sapiens
ttcctacctccttga

SEQ ID NO: 1520510 - DNA, 15 bp, Homo sapiens
tcctacctccttgac

SEQ ID NO: 1520511 - DNA, 15 bp, Homo sapiens
cctacctccttgacc

SEQ ID NO: 1520512 - DNA, 15 bp, Homo sapiens
ctacctccttgaccc

SEQ ID NO: 1520513 - DNA, 15 bp, Homo sapiens
tacctccttgacccc

SEQ ID NO: 1520514 - DNA, 15 bp, Homo sapiens
acctccttgaccccc

SEQ ID NO: 1520515 - DNA, 15 bp, Homo sapiens
cctccttgaccccca

SEQ ID NO: 1520516 - DNA, 15 bp, Homo sapiens
ctccttgacccccag

SEQ ID NO: 1520517 - DNA, 15 bp, Homo sapiens
tccttgacccccaga

SEQ ID NO: 1520518 - DNA, 15 bp, Homo sapiens
ccttgacccccagac

SEQ ID NO: 1520519 - DNA, 15 bp, Homo sapiens
cttgacccccagacc

SEQ ID NO: 1520520 - DNA, 15 bp, Homo sapiens
ttgacccccagacct

SEQ ID NO: 1520521 - DNA, 15 bp, Homo sapiens
tgacccccagacctg

SEQ ID NO: 1520522 - DNA, 15 bp, Homo sapiens
gacccccagacctgt

SEQ ID NO: 1520523 - DNA, 15 bp, Homo sapiens
acccccagacctgtc

SEQ ID NO: 1520524 - DNA, 15 bp, Homo sapiens
cccccagacctgtcc

SEQ ID NO: 1520525 - DNA, 15 bp, Homo sapiens
ccccagacctgtcct

SEQ ID NO: 1520526 - DNA, 15 bp, Homo sapiens
cccagacctgtcctt

SEQ ID NO: 1520527 - DNA, 15 bp, Homo sapiens
ccagacctgtccttc

SEQ ID NO: 1520528 - DNA, 15 bp, Homo sapiens
cagacctgtccttca

SEQ ID NO: 1520529 - DNA, 15 bp, Homo sapiens
agacctgtccttcag

SEQ ID NO: 1520530 - DNA, 15 bp, Homo sapiens
gacctgtccttcagt

SEQ ID NO: 1520531 - DNA, 15 bp, Homo sapiens
acctgtccttcagtt

SEQ ID NO: 1520532 - DNA, 15 bp, Homo sapiens
cctgtccttcagttt

SEQ ID NO: 1520533 - DNA, 15 bp, Homo sapiens
ctgtccttcagtttc

SEQ ID NO: 1520534 - DNA, 15 bp, Homo sapiens
tgtccttcagtttcc

SEQ ID NO: 1520535 - DNA, 15 bp, Homo sapiens
gtccttcagtttcca

SEQ ID NO: 1520536 - DNA, 15 bp, Homo sapiens
tccttcagtttccaa

SEQ ID NO: 1520537 - DNA, 15 bp, Homo sapiens
ccttcagtttccaaa

SEQ ID NO: 1520538 - DNA, 15 bp, Homo sapiens
cttcagtttccaaat

SEQ ID NO: 1520539 - DNA, 15 bp, Homo sapiens
ttcagtttccaaatc

SEQ ID NO: 1520540 - DNA, 15 bp, Homo sapiens
tcagtttccaaatct

SEQ ID NO: 1520541 - DNA, 15 bp, Homo sapiens
cagtttccaaatctc

SEQ ID NO: 1520542 - DNA, 15 bp, Homo sapiens
agtttccaaatctcc

SEQ ID NO: 1520543 - DNA, 15 bp, Homo sapiens
gtttccaaatctccc

SEQ ID NO: 1520544 - DNA, 15 bp, Homo sapiens
tttccaaatctcccc

SEQ ID NO: 1520545 - DNA, 15 bp, Homo sapiens
ttccaaatctcccct

SEQ ID NO: 1520546 - DNA, 15 bp, Homo sapiens
tccaaatctcccctg

SEQ ID NO: 1520547 - DNA, 15 bp, Homo sapiens
ccaaatctcccctgt

SEQ ID NO: 1520548 - DNA, 15 bp, Homo sapiens
caaatctcccctgtc

SEQ ID NO: 1520549 - DNA, 15 bp, Homo sapiens
aaatctcccctgtca

SEQ ID NO: 1520550 - DNA, 15 bp, Homo sapiens
aatctcccctgtcac

SEQ ID NO: 1520551 - DNA, 15 bp, Homo sapiens
atctcccctgtcacc

SEQ ID NO: 1520552 - DNA, 15 bp, Homo sapiens
tctcccctgtcacct

SEQ ID NO: 1520553 - DNA, 15 bp, Homo sapiens
ctcccctgtcacctc

SEQ ID NO: 1520554 - DNA, 15 bp, Homo sapiens
tcccctgtcacctca

SEQ ID NO: 1520555 - DNA, 15 bp, Homo sapiens
cccctgtcacctcag

SEQ ID NO: 1520556 - DNA, 15 bp, Homo sapiens
ccctgtcacctcagc

SEQ ID NO: 1520557 - DNA, 15 bp, Homo sapiens
cctgtcacctcagcc

SEQ ID NO: 1520558 - DNA, 15 bp, Homo sapiens
ctgtcacctcagccc

SEQ ID NO: 1520559 - DNA, 15 bp, Homo sapiens
tgtcacctcagccct

SEQ ID NO: 1520560 - DNA, 15 bp, Homo sapiens
gtcacctcagccctg

SEQ ID NO: 1520561 - DNA, 15 bp, Homo sapiens
tcacctcagccctgg

SEQ ID NO: 1520562 - DNA, 15 bp, Homo sapiens
cacctcagccctggg

SEQ ID NO: 1520563 - DNA, 15 bp, Homo sapiens
acctcagccctgggt

SEQ ID NO: 1520564 - DNA, 15 bp, Homo sapiens
cctcagccctgggtt

SEQ ID NO: 1520565 - DNA, 15 bp, Homo sapiens
ctcagccctgggttt

SEQ ID NO: 1520566 - DNA, 15 bp, Homo sapiens
tcagccctgggtttc

SEQ ID NO: 1520567 - DNA, 15 bp, Homo sapiens
cagccctgggtttcc

SEQ ID NO: 1520568 - DNA, 15 bp, Homo sapiens
agccctgggtttcct

SEQ ID NO: 1520569 - DNA, 15 bp, Homo sapiens
gccctgggtttccta

SEQ ID NO: 1520570 - DNA, 15 bp, Homo sapiens
ccctgggtttcctag

SEQ ID NO: 1520571 - DNA, 15 bp, Homo sapiens
cctgggtttcctagg

SEQ ID NO: 1520572 - DNA, 15 bp, Homo sapiens
ctgggtttcctaggg

SEQ ID NO: 1520573 - DNA, 15 bp, Homo sapiens
tgggtttcctagggt

SEQ ID NO: 1520574 - DNA, 15 bp, Homo sapiens
gggtttcctagggtc

SEQ ID NO: 1520575 - DNA, 15 bp, Homo sapiens
ggtttcctagggtct

SEQ ID NO: 1520576 - DNA, 15 bp, Homo sapiens
gtttcctagggtctt

SEQ ID NO: 1520577 - DNA, 15 bp, Homo sapiens
tttcctagggtcttg

SEQ ID NO: 1520578 - DNA, 15 bp, Homo sapiens
ttcctagggtcttgt

SEQ ID NO: 1520579 - DNA, 15 bp, Homo sapiens
tcctagggtcttgtg

SEQ ID NO: 1520580 - DNA, 15 bp, Homo sapiens
cctagggtcttgtgg

SEQ ID NO: 1520581 - DNA, 15 bp, Homo sapiens
ctagggtcttgtggt

SEQ ID NO: 1520582 - DNA, 15 bp, Homo sapiens
tagggtcttgtggtc

SEQ ID NO: 1520583 - DNA, 15 bp, Homo sapiens
agggtcttgtggtcc

SEQ ID NO: 1520584 - DNA, 15 bp, Homo sapiens
gggtcttgtggtccc

SEQ ID NO: 1520585 - DNA, 15 bp, Homo sapiens
ggtcttgtggtcccc

SEQ ID NO: 1520586 - DNA, 15 bp, Homo sapiens
gtcttgtggtcccca

SEQ ID NO: 1520587 - DNA, 15 bp, Homo sapiens
tcttgtggtccccag

SEQ ID NO: 1520588 - DNA, 15 bp, Homo sapiens
cttgtggtccccagt

SEQ ID NO: 1520589 - DNA, 15 bp, Homo sapiens
ttgtggtccccagtc

SEQ ID NO: 1520590 - DNA, 15 bp, Homo sapiens
tgtggtccccagtcc

SEQ ID NO: 1520591 - DNA, 15 bp, Homo sapiens
gtggtccccagtccc

SEQ ID NO: 1520592 - DNA, 15 bp, Homo sapiens
tggtccccagtcccc

SEQ ID NO: 1520593 - DNA, 15 bp, Homo sapiens
ggtccccagtcccct

SEQ ID NO: 1520594 - DNA, 15 bp, Homo sapiens
gtccccagtccccta

SEQ ID NO: 1520595 - DNA, 15 bp, Homo sapiens
tccccagtcccctaa

SEQ ID NO: 1520596 - DNA, 15 bp, Homo sapiens
ccccagtcccctaat

SEQ ID NO: 1520597 - DNA, 15 bp, Homo sapiens
cccagtcccctaatc

SEQ ID NO: 1520598 - DNA, 15 bp, Homo sapiens
ccagtcccctaatcc

SEQ ID NO: 1520599 - DNA, 15 bp, Homo sapiens
cagtcccctaatccc

SEQ ID NO: 1520600 - DNA, 15 bp, Homo sapiens
agtcccctaatccca

SEQ ID NO: 1520601 - DNA, 15 bp, Homo sapiens
gtcccctaatcccat

SEQ ID NO: 1520602 - DNA, 15 bp, Homo sapiens
tcccctaatcccatt

SEQ ID NO: 1520603 - DNA, 15 bp, Homo sapiens
cccctaatcccattc

SEQ ID NO: 1520604 - DNA, 15 bp, Homo sapiens
ccctaatcccattcc

SEQ ID NO: 1520605 - DNA, 15 bp, Homo sapiens
cctaatcccattccc

SEQ ID NO: 1520606 - DNA, 15 bp, Homo sapiens
ctaatcccattcccc

SEQ ID NO: 1520607 - DNA, 15 bp, Homo sapiens
taatcccattcccct

SEQ ID NO: 1520608 - DNA, 15 bp, Homo sapiens
aatcccattccccta

SEQ ID NO: 1520609 - DNA, 15 bp, Homo sapiens
atcccattcccctaa

SEQ ID NO: 1520610 - DNA, 15 bp, Homo sapiens
tcccattcccctaac

SEQ ID NO: 1520611 - DNA, 15 bp, Homo sapiens
cccattcccctaacc

SEQ ID NO: 1520612 - DNA, 15 bp, Homo sapiens
ccattcccctaaccc

SEQ ID NO: 1520613 - DNA, 15 bp, Homo sapiens
cattcccctaacccc

SEQ ID NO: 1520614 - DNA, 15 bp, Homo sapiens
attcccctaacccca

SEQ ID NO: 1520615 - DNA, 15 bp, Homo sapiens
ttcccctaaccccag

SEQ ID NO: 1520616 - DNA, 15 bp, Homo sapiens
tcccctaaccccagg

SEQ ID NO: 1520617 - DNA, 15 bp, Homo sapiens
cccctaaccccaggt

SEQ ID NO: 1520618 - DNA, 15 bp, Homo sapiens
ccctaaccccaggtc

SEQ ID NO: 1520619 - DNA, 15 bp, Homo sapiens
cctaaccccaggtct

SEQ ID NO: 1520620 - DNA, 15 bp, Homo sapiens
ctaaccccaggtctt

SEQ ID NO: 1520621 - DNA, 15 bp, Homo sapiens
taaccccaggtcttt

SEQ ID NO: 1520622 - DNA, 15 bp, Homo sapiens
aaccccaggtctttg

SEQ ID NO: 1520623 - DNA, 15 bp, Homo sapiens
accccaggtctttgc

SEQ ID NO: 1520624 - DNA, 15 bp, Homo sapiens
ccccaggtctttgcc

SEQ ID NO: 1520625 - DNA, 15 bp, Homo sapiens
cccaggtctttgcct

SEQ ID NO: 1520626 - DNA, 15 bp, Homo sapiens
ccaggtctttgcctc

SEQ ID NO: 1520627 - DNA, 15 bp, Homo sapiens
caggtctttgcctca

SEQ ID NO: 1520628 - DNA, 15 bp, Homo sapiens
aggtctttgcctcag

SEQ ID NO: 1520629 - DNA, 15 bp, Homo sapiens
ggtctttgcctcagc

SEQ ID NO: 1520630 - DNA, 15 bp, Homo sapiens
gtctttgcctcagct

SEQ ID NO: 1520631 - DNA, 15 bp, Homo sapiens
tctttgcctcagctt

SEQ ID NO: 1520632 - DNA, 15 bp, Homo sapiens
ctttgcctcagcttc

SEQ ID NO: 1520633 - DNA, 15 bp, Homo sapiens
tttgcctcagcttcc

SEQ ID NO: 1520634 - DNA, 15 bp, Homo sapiens
ttgcctcagcttccc

SEQ ID NO: 1520635 - DNA, 15 bp, Homo sapiens
tgcctcagcttccct

SEQ ID NO: 1520636 - DNA, 15 bp, Homo sapiens
gcctcagcttcccta

SEQ ID NO: 1520637 - DNA, 15 bp, Homo sapiens
cctcagcttccctag

SEQ ID NO: 1520638 - DNA, 15 bp, Homo sapiens
ctcagcttccctagc

SEQ ID NO: 1520639 - DNA, 15 bp, Homo sapiens
tcagcttccctagct

SEQ ID NO: 1520640 - DNA, 15 bp, Homo sapiens
cagcttccctagctc

SEQ ID NO: 1520641 - DNA, 15 bp, Homo sapiens
agcttccctagctcc

SEQ ID NO: 1520642 - DNA, 15 bp, Homo sapiens
gcttccctagctccc

SEQ ID NO: 1520643 - DNA, 15 bp, Homo sapiens
cttccctagctccct

SEQ ID NO: 1520644 - DNA, 15 bp, Homo sapiens
ttccctagctccctt

SEQ ID NO: 1520645 - DNA, 15 bp, Homo sapiens
tccctagctcccttc

SEQ ID NO: 1520646 - DNA, 15 bp, Homo sapiens
ccctagctcccttct

SEQ ID NO: 1520647 - DNA, 15 bp, Homo sapiens
cctagctcccttctt

SEQ ID NO: 1520648 - DNA, 15 bp, Homo sapiens
ctagctcccttcttt

SEQ ID NO: 1520649 - DNA, 15 bp, Homo sapiens
tagctcccttctttg

SEQ ID NO: 1520650 - DNA, 15 bp, Homo sapiens
agctcccttctttga

SEQ ID NO: 1520651 - DNA, 15 bp, Homo sapiens
gctcccttctttgac

SEQ ID NO: 1520652 - DNA, 15 bp, Homo sapiens
ctcccttctttgacc

SEQ ID NO: 1520653 - DNA, 15 bp, Homo sapiens
tcccttctttgaccc

SEQ ID NO: 1520654 - DNA, 15 bp, Homo sapiens
cccttctttgaccca

SEQ ID NO: 1520655 - DNA, 15 bp, Homo sapiens
ccttctttgacccag

SEQ ID NO: 1520656 - DNA, 15 bp, Homo sapiens
cttctttgacccagg

SEQ ID NO: 1520657 - DNA, 15 bp, Homo sapiens
ttctttgacccaggg

SEQ ID NO: 1520658 - DNA, 15 bp, Homo sapiens
tctttgacccaggga

SEQ ID NO: 1520659 - DNA, 15 bp, Homo sapiens
ctttgacccagggag

SEQ ID NO: 1520660 - DNA, 15 bp, Homo sapiens
tttgacccagggagc

SEQ ID NO: 1520661 - DNA, 15 bp, Homo sapiens
ttgacccagggagca

SEQ ID NO: 1520662 - DNA, 15 bp, Homo sapiens
tgacccagggagcag

SEQ ID NO: 1520663 - DNA, 15 bp, Homo sapiens
gacccagggagcagc

SEQ ID NO: 1520664 - DNA, 15 bp, Homo sapiens
acccagggagcagct

SEQ ID NO: 1520665 - DNA, 15 bp, Homo sapiens
cccagggagcagctg

SEQ ID NO: 1520666 - DNA, 15 bp, Homo sapiens
ccagggagcagctga

SEQ ID NO: 1520667 - DNA, 15 bp, Homo sapiens
cagggagcagctgag

SEQ ID NO: 1520668 - DNA, 15 bp, Homo sapiens
agggagcagctgagg

SEQ ID NO: 1520669 - DNA, 15 bp, Homo sapiens
gggagcagctgagga

SEQ ID NO: 1520670 - DNA, 15 bp, Homo sapiens
ggagcagctgaggac

SEQ ID NO: 1520671 - DNA, 15 bp, Homo sapiens
gagcagctgaggaca

SEQ ID NO: 1520672 - DNA, 15 bp, Homo sapiens
agcagctgaggacac

SEQ ID NO: 1520673 - DNA, 15 bp, Homo sapiens
gcagctgaggacacc

SEQ ID NO: 1520674 - DNA, 15 bp, Homo sapiens
cagctgaggacacca

SEQ ID NO: 1520675 - DNA, 15 bp, Homo sapiens
agctgaggacaccag

SEQ ID NO: 1520676 - DNA, 15 bp, Homo sapiens
gctgaggacaccagt

SEQ ID NO: 1520677 - DNA, 15 bp, Homo sapiens
ctgaggacaccagtt

SEQ ID NO: 1520678 - DNA, 15 bp, Homo sapiens
tgaggacaccagttc

SEQ ID NO: 1520679 - DNA, 15 bp, Homo sapiens
gaggacaccagttcc

SEQ ID NO: 1520680 - DNA, 15 bp, Homo sapiens
aggacaccagttccc

SEQ ID NO: 1520681 - DNA, 15 bp, Homo sapiens
ggacaccagttcccc

SEQ ID NO: 1520682 - DNA, 15 bp, Homo sapiens
gacaccagttccccc

SEQ ID NO: 1520683 - DNA, 15 bp, Homo sapiens
acaccagttccccca

SEQ ID NO: 1520684 - DNA, 15 bp, Homo sapiens
caccagttcccccac

SEQ ID NO: 1520685 - DNA, 15 bp, Homo sapiens
accagttcccccacc

SEQ ID NO: 1520686 - DNA, 15 bp, Homo sapiens
ccagttcccccacct

SEQ ID NO: 1520687 - DNA, 15 bp, Homo sapiens
cagttcccccacctg

SEQ ID NO: 1520688 - DNA, 15 bp, Homo sapiens
agttcccccacctgg

SEQ ID NO: 1520689 - DNA, 15 bp, Homo sapiens
gttcccccacctggg

SEQ ID NO: 1520690 - DNA, 15 bp, Homo sapiens
ttcccccacctgggc

SEQ ID NO: 1520691 - DNA, 15 bp, Homo sapiens
tcccccacctgggcc

SEQ ID NO: 1520692 - DNA, 15 bp, Homo sapiens
cccccacctgggcct

SEQ ID NO: 1520693 - DNA, 15 bp, Homo sapiens
ccccacctgggcctc

SEQ ID NO: 1520694 - DNA, 15 bp, Homo sapiens
cccacctgggcctct

SEQ ID NO: 1520695 - DNA, 15 bp, Homo sapiens
ccacctgggcctctc

SEQ ID NO: 1520696 - DNA, 15 bp, Homo sapiens
cacctgggcctctct

SEQ ID NO: 1520697 - DNA, 15 bp, Homo sapiens
acctgggcctctctc

SEQ ID NO: 1520698 - DNA, 15 bp, Homo sapiens
cctgggcctctctct

SEQ ID NO: 1520699 - DNA, 15 bp, Homo sapiens
ctgggcctctctctg

SEQ ID NO: 1520700 - DNA, 15 bp, Homo sapiens
tgggcctctctctgt

SEQ ID NO: 1520701 - DNA, 15 bp, Homo sapiens
gggcctctctctgtg

SEQ ID NO: 1520702 - DNA, 15 bp, Homo sapiens
ggcctctctctgtgt

SEQ ID NO: 1520703 - DNA, 15 bp, Homo sapiens
gcctctctctgtgtc

SEQ ID NO: 1520704 - DNA, 15 bp, Homo sapiens
cctctctctgtgtcc

SEQ ID NO: 1520705 - DNA, 15 bp, Homo sapiens
ctctctctgtgtccc

SEQ ID NO: 1520706 - DNA, 15 bp, Homo sapiens
tctctctgtgtcccc

SEQ ID NO: 1520707 - DNA, 15 bp, Homo sapiens
ctctctgtgtcccca

SEQ ID NO: 1520708 - DNA, 15 bp, Homo sapiens
tctctgtgtccccag

SEQ ID NO: 1520709 - DNA, 15 bp, Homo sapiens
ctctgtgtccccagg

SEQ ID NO: 1520710 - DNA, 15 bp, Homo sapiens
tctgtgtccccagga

SEQ ID NO: 1520711 - DNA, 15 bp, Homo sapiens
ctgtgtccccaggac

SEQ ID NO: 1520712 - DNA, 15 bp, Homo sapiens
tgtgtccccaggacc

SEQ ID NO: 1520713 - DNA, 15 bp, Homo sapiens
gtgtccccaggacct

SEQ ID NO: 1520714 - DNA, 15 bp, Homo sapiens
tgtccccaggacctc

SEQ ID NO: 1520715 - DNA, 15 bp, Homo sapiens
gtccccaggacctct

SEQ ID NO: 1520716 - DNA, 15 bp, Homo sapiens
ccaggacctctcaaa

SEQ ID NO: 1520717 - DNA, 15 bp, Homo sapiens
caggacctctcaaag

SEQ ID NO: 1520718 - DNA, 15 bp, Homo sapiens
aggacctctcaaagc

SEQ ID NO: 1520719 - DNA, 15 bp, Homo sapiens
ggacctctcaaagcc

SEQ ID NO: 1520720 - DNA, 15 bp, Homo sapiens
gacctctcaaagccc

SEQ ID NO: 1520721 - DNA, 15 bp, Homo sapiens
acctctcaaagccct

SEQ ID NO: 1520722 - DNA, 15 bp, Homo sapiens
cctctcaaagccctg

SEQ ID NO: 1520723 - DNA, 15 bp, Homo sapiens
ctctcaaagccctgc

SEQ ID NO: 1520724 - DNA, 15 bp, Homo sapiens
tctcaaagccctgca

SEQ ID NO: 1520725 - DNA, 15 bp, Homo sapiens
ctcaaagccctgcaa

SEQ ID NO: 1520726 - DNA, 15 bp, Homo sapiens
tcaaagccctgcaag

SEQ ID NO: 1520727 - DNA, 15 bp, Homo sapiens
caaagccctgcaagc

SEQ ID NO: 1520728 - DNA, 15 bp, Homo sapiens
aaagccctgcaagcc

SEQ ID NO: 1520729 - DNA, 15 bp, Homo sapiens
aagccctgcaagcca

SEQ ID NO: 1520730 - DNA, 15 bp, Homo sapiens
agccctgcaagccaa

SEQ ID NO: 1520731 - DNA, 15 bp, Homo sapiens
gccctgcaagccaac

SEQ ID NO: 1520732 - DNA, 15 bp, Homo sapiens
ccctgcaagccaact

SEQ ID NO: 1520733 - DNA, 15 bp, Homo sapiens
cctgcaagccaactc

SEQ ID NO: 1520734 - DNA, 15 bp, Homo sapiens
ctgcaagccaactct

SEQ ID NO: 1520735 - DNA, 15 bp, Homo sapiens
tgcaagccaactctg

SEQ ID NO: 1520736 - DNA, 15 bp, Homo sapiens
gcaagccaactctgc

SEQ ID NO: 1520737 - DNA, 15 bp, Homo sapiens
caagccaactctgca

SEQ ID NO: 1520738 - DNA, 15 bp, Homo sapiens
aagccaactctgcag

SEQ ID NO: 1520739 - DNA, 15 bp, Homo sapiens
agccaactctgcagg

SEQ ID NO: 1520740 - DNA, 15 bp, Homo sapiens
gccaactctgcaggg

SEQ ID NO: 1520741 - DNA, 15 bp, Homo sapiens
ccaactctgcagggg

SEQ ID NO: 1520742 - DNA, 15 bp, Homo sapiens
caactctgcaggggc

SEQ ID NO: 1520743 - DNA, 15 bp, Homo sapiens
aactctgcaggggca

SEQ ID NO: 1520744 - DNA, 15 bp, Homo sapiens
actctgcaggggcag

SEQ ID NO: 1520745 - DNA, 15 bp, Homo sapiens
ctctgcaggggcaga

SEQ ID NO: 1520746 - DNA, 15 bp, Homo sapiens
tctgcaggggcagat

SEQ ID NO: 1520747 - DNA, 15 bp, Homo sapiens
ctgcaggggcagatg

SEQ ID NO: 1520748 - DNA, 15 bp, Homo sapiens
tgcaggggcagatgg

SEQ ID NO: 1520749 - DNA, 15 bp, Homo sapiens
gcaggggcagatggg

SEQ ID NO: 1520750 - DNA, 15 bp, Homo sapiens
caggggcagatgggg

SEQ ID NO: 1520751 - DNA, 15 bp, Homo sapiens
aggggcagatggggt

SEQ ID NO: 1520752 - DNA, 15 bp, Homo sapiens
ggggcagatggggtc

SEQ ID NO: 1520753 - DNA, 15 bp, Homo sapiens
gggcagatggggtcc

SEQ ID NO: 1520754 - DNA, 15 bp, Homo sapiens
ggcagatggggtccc

SEQ ID NO: 1520755 - DNA, 15 bp, Homo sapiens
gcagatggggtcccg

SEQ ID NO: 1520756 - DNA, 15 bp, Homo sapiens
cagatggggtcccgc

SEQ ID NO: 1520757 - DNA, 15 bp, Homo sapiens
agatggggtcccgct

SEQ ID NO: 1520758 - DNA, 15 bp, Homo sapiens
accggcgcttgtctg

SEQ ID NO: 1520759 - DNA, 15 bp, Homo sapiens
ccggcgcttgtctgc

SEQ ID NO: 1520760 - DNA, 15 bp, Homo sapiens
cggcgcttgtctgca

SEQ ID NO: 1520761 - DNA, 15 bp, Homo sapiens
ggcgcttgtctgcag

SEQ ID NO: 1520762 - DNA, 15 bp, Homo sapiens
gcgcttgtctgcaga

SEQ ID NO: 1520763 - DNA, 15 bp, Homo sapiens
cgcttgtctgcagaa

SEQ ID NO: 1520764 - DNA, 15 bp, Homo sapiens
gcttgtctgcagaag

SEQ ID NO: 1520765 - DNA, 15 bp, Homo sapiens
cttgtctgcagaaga

SEQ ID NO: 1520766 - DNA, 15 bp, Homo sapiens
ttgtctgcagaagaa

SEQ ID NO: 1520767 - DNA, 15 bp, Homo sapiens
tgtctgcagaagaag

SEQ ID NO: 1520768 - DNA, 15 bp, Homo sapiens
gtctgcagaagaagg

SEQ ID NO: 1520769 - DNA, 15 bp, Homo sapiens
tctgcagaagaagga

SEQ ID NO: 1520770 - DNA, 15 bp, Homo sapiens
ctgcagaagaaggat

SEQ ID NO: 1520771 - DNA, 15 bp, Homo sapiens
tgcagaagaaggatg

SEQ ID NO: 1520772 - DNA, 15 bp, Homo sapiens
gcagaagaaggatgt

SEQ ID NO: 1520773 - DNA, 15 bp, Homo sapiens
cagaagaaggatgtg

SEQ ID NO: 1520774 - DNA, 15 bp, Homo sapiens
agaagaaggatgtgc

SEQ ID NO: 1520775 - DNA, 15 bp, Homo sapiens
gaagaaggatgtgcg

SEQ ID NO: 1520776 - DNA, 15 bp, Homo sapiens
aagaaggatgtgcgg

SEQ ID NO: 1520777 - DNA, 15 bp, Homo sapiens
agaaggatgtgcgga

SEQ ID NO: 1520778 - DNA, 15 bp, Homo sapiens
gaaggatgtgcggat

SEQ ID NO: 1520779 - DNA, 15 bp, Homo sapiens
aaggatgtgcggatg

SEQ ID NO: 1520780 - DNA, 15 bp, Homo sapiens
aggatgtgcggatgc

SEQ ID NO: 1520781 - DNA, 15 bp, Homo sapiens
ggatgtgcggatgct

SEQ ID NO: 1520782 - DNA, 15 bp, Homo sapiens
gatgtgcggatgctg

SEQ ID NO: 1520783 - DNA, 15 bp, Homo sapiens
atgtgcggatgctgc

SEQ ID NO: 1520784 - DNA, 15 bp, Homo sapiens
tgtgcggatgctgcg

SEQ ID NO: 1520785 - DNA, 15 bp, Homo sapiens
gtgcggatgctgcgc

SEQ ID NO: 1520786 - DNA, 15 bp, Homo sapiens
tgcggatgctgcgct

SEQ ID NO: 1520787 - DNA, 15 bp, Homo sapiens
gcggatgctgcgctt

SEQ ID NO: 1520788 - DNA, 15 bp, Homo sapiens
cggatgctgcgcttc

SEQ ID NO: 1520789 - DNA, 15 bp, Homo sapiens
ggatgctgcgcttca

SEQ ID NO: 1520790 - DNA, 15 bp, Homo sapiens
gatgctgcgcttcat

SEQ ID NO: 1520791 - DNA, 15 bp, Homo sapiens
atgctgcgcttcatc

SEQ ID NO: 1520792 - DNA, 15 bp, Homo sapiens
tgctgcgcttcatcc

SEQ ID NO: 1520793 - DNA, 15 bp, Homo sapiens
gctgcgcttcatcca

SEQ ID NO: 1520794 - DNA, 15 bp, Homo sapiens
ctgcgcttcatccag

SEQ ID NO: 1520795 - DNA, 15 bp, Homo sapiens
tgcgcttcatccagg

SEQ ID NO: 1520796 - DNA, 15 bp, Homo sapiens
gcgcttcatccagga

SEQ ID NO: 1520797 - DNA, 15 bp, Homo sapiens
cgcttcatccaggag

SEQ ID NO: 1520798 - DNA, 15 bp, Homo sapiens
gcttcatccaggagg

SEQ ID NO: 1520799 - DNA, 15 bp, Homo sapiens
cttcatccaggaggt

SEQ ID NO: 1520800 - DNA, 15 bp, Homo sapiens
ttcatccaggaggtg

SEQ ID NO: 1520801 - DNA, 15 bp, Homo sapiens
tcatccaggaggtga

SEQ ID NO: 1520802 - DNA, 15 bp, Homo sapiens
catccaggaggtgaa

SEQ ID NO: 1520803 - DNA, 15 bp, Homo sapiens
atccaggaggtgaac

SEQ ID NO: 1520804 - DNA, 15 bp, Homo sapiens
tccaggaggtgaaca

SEQ ID NO: 1520805 - DNA, 15 bp, Homo sapiens
ccaggaggtgaacac

SEQ ID NO: 1520806 - DNA, 15 bp, Homo sapiens
caggaggtgaacacc

SEQ ID NO: 1520807 - DNA, 15 bp, Homo sapiens
aggaggtgaacacca

SEQ ID NO: 1520808 - DNA, 15 bp, Homo sapiens
ggaggtgaacaccac

SEQ ID NO: 1520809 - DNA, 15 bp, Homo sapiens
gaggtgaacaccacc

SEQ ID NO: 1520810 - DNA, 15 bp, Homo sapiens
aggtgaacaccacca

SEQ ID NO: 1520811 - DNA, 15 bp, Homo sapiens
ggtgaacaccaccac

SEQ ID NO: 1520812 - DNA, 15 bp, Homo sapiens
gtgaacaccaccacc

SEQ ID NO: 1520813 - DNA, 15 bp, Homo sapiens
tgaacaccaccaccc

SEQ ID NO: 1520814 - DNA, 15 bp, Homo sapiens
gaacaccaccacccg

SEQ ID NO: 1520815 - DNA, 15 bp, Homo sapiens
aacaccaccacccgc

SEQ ID NO: 1520816 - DNA, 15 bp, Homo sapiens
acaccaccacccgct

SEQ ID NO: 1520817 - DNA, 15 bp, Homo sapiens
caccaccacccgctc

SEQ ID NO: 1520818 - DNA, 15 bp, Homo sapiens
accaccacccgctca

SEQ ID NO: 1520819 - DNA, 15 bp, Homo sapiens
ccaccacccgctcat

SEQ ID NO: 1520820 - DNA, 15 bp, Homo sapiens
caccacccgctcatg

SEQ ID NO: 1520821 - DNA, 15 bp, Homo sapiens
accacccgctcatgt

SEQ ID NO: 1520822 - DNA, 15 bp, Homo sapiens
ccacccgctcatgtg

SEQ ID NO: 1520823 - DNA, 15 bp, Homo sapiens
cacccgctcatgtgc

SEQ ID NO: 1520824 - DNA, 15 bp, Homo sapiens
acccgctcatgtgcc

SEQ ID NO: 1520825 - DNA, 15 bp, Homo sapiens
cccgctcatgtgccc

SEQ ID NO: 1520826 - DNA, 15 bp, Homo sapiens
ccgctcatgtgccct

SEQ ID NO: 1520827 - DNA, 15 bp, Homo sapiens
cgctcatgtgccctc

SEQ ID NO: 1520828 - DNA, 15 bp, Homo sapiens
gctcatgtgccctct

SEQ ID NO: 1520829 - DNA, 15 bp, Homo sapiens
ctcatgtgccctctg

SEQ ID NO: 1520830 - DNA, 15 bp, Homo sapiens
tcatgtgccctctgg

SEQ ID NO: 1520831 - DNA, 15 bp, Homo sapiens
catgtgccctctggg

SEQ ID NO: 1520832 - DNA, 15 bp, Homo sapiens
atgtgccctctggga

SEQ ID NO: 1520833 - DNA, 15 bp, Homo sapiens
tgtgccctctgggac

SEQ ID NO: 1520834 - DNA, 15 bp, Homo sapiens
ccctctgggacctgg

SEQ ID NO: 1520835 - DNA, 15 bp, Homo sapiens
cctctgggacctgga

SEQ ID NO: 1520836 - DNA, 15 bp, Homo sapiens
ctctgggacctggag

SEQ ID NO: 1520837 - DNA, 15 bp, Homo sapiens
tctgggacctggagg

SEQ ID NO: 1520838 - DNA, 15 bp, Homo sapiens
ctgggacctggagga

SEQ ID NO: 1520839 - DNA, 15 bp, Homo sapiens
tgggacctggaggag

SEQ ID NO: 1520840 - DNA, 15 bp, Homo sapiens
gggacctggaggagg

SEQ ID NO: 1520841 - DNA, 15 bp, Homo sapiens
ggacctggaggagga

SEQ ID NO: 1520842 - DNA, 15 bp, Homo sapiens
gacctggaggaggat

SEQ ID NO: 1520843 - DNA, 15 bp, Homo sapiens
acctggaggaggata

SEQ ID NO: 1520844 - DNA, 15 bp, Homo sapiens
cctggaggaggatac

SEQ ID NO: 1520845 - DNA, 15 bp, Homo sapiens
ctggaggaggatacg

SEQ ID NO: 1520846 - DNA, 15 bp, Homo sapiens
tggaggaggatacgg

SEQ ID NO: 1520847 - DNA, 15 bp, Homo sapiens
ggaggaggatacgga

SEQ ID NO: 1520848 - DNA, 15 bp, Homo sapiens
gaggaggatacggag

SEQ ID NO: 1520849 - DNA, 15 bp, Homo sapiens
aggaggatacggagt

SEQ ID NO: 1520850 - DNA, 15 bp, Homo sapiens
ggaggatacggagta

SEQ ID NO: 1520851 - DNA, 15 bp, Homo sapiens
gaggatacggagtac

SEQ ID NO: 1520852 - DNA, 15 bp, Homo sapiens
aggatacggagtaca

SEQ ID NO: 1520853 - DNA, 15 bp, Homo sapiens
ggatacggagtacat

SEQ ID NO: 1520854 - DNA, 15 bp, Homo sapiens
gatacggagtacata

SEQ ID NO: 1520855 - DNA, 15 bp, Homo sapiens
atacggagtacatag

SEQ ID NO: 1520856 - DNA, 15 bp, Homo sapiens
tacggagtacatagt

SEQ ID NO: 1520857 - DNA, 15 bp, Homo sapiens
acggagtacatagtc

SEQ ID NO: 1520858 - DNA, 15 bp, Homo sapiens
cggagtacatagtcc

SEQ ID NO: 1520859 - DNA, 15 bp, Homo sapiens
ggagtacatagtcca

SEQ ID NO: 1520860 - DNA, 15 bp, Homo sapiens
gagtacatagtccac

SEQ ID NO: 1520861 - DNA, 15 bp, Homo sapiens
agtacatagtccacg

SEQ ID NO: 1520862 - DNA, 15 bp, Homo sapiens
gtacatagtccacgt

SEQ ID NO: 1520863 - DNA, 15 bp, Homo sapiens
tacatagtccacgtg

SEQ ID NO: 1520864 - DNA, 15 bp, Homo sapiens
acatagtccacgtgc

SEQ ID NO: 1520865 - DNA, 15 bp, Homo sapiens
catagtccacgtgca

SEQ ID NO: 1520866 - DNA, 15 bp, Homo sapiens
atagtccacgtgcag

SEQ ID NO: 1520867 - DNA, 15 bp, Homo sapiens
tagtccacgtgcagg

SEQ ID NO: 1520868 - DNA, 15 bp, Homo sapiens
agtccacgtgcaggc

SEQ ID NO: 1520869 - DNA, 15 bp, Homo sapiens
gtccacgtgcaggcc

SEQ ID NO: 1520870 - DNA, 15 bp, Homo sapiens
tccacgtgcaggcca

SEQ ID NO: 1520871 - DNA, 15 bp, Homo sapiens
ccacgtgcaggccat

SEQ ID NO: 1520872 - DNA, 15 bp, Homo sapiens
cacgtgcaggccatc

SEQ ID NO: 1520873 - DNA, 15 bp, Homo sapiens
acgtgcaggccatct

SEQ ID NO: 1520874 - DNA, 15 bp, Homo sapiens
cgtgcaggccatctc

SEQ ID NO: 1520875 - DNA, 15 bp, Homo sapiens
gtgcaggccatctcc

SEQ ID NO: 1520876 - DNA, 15 bp, Homo sapiens
tgcaggccatctcca

SEQ ID NO: 1520877 - DNA, 15 bp, Homo sapiens
gcaggccatctccat

SEQ ID NO: 1520878 - DNA, 15 bp, Homo sapiens
caggccatctccatt

SEQ ID NO: 1520879 - DNA, 15 bp, Homo sapiens
aggccatctccattc

SEQ ID NO: 1520880 - DNA, 15 bp, Homo sapiens
ggccatctccattca

SEQ ID NO: 1520881 - DNA, 15 bp, Homo sapiens
gccatctccattcag

SEQ ID NO: 1520882 - DNA, 15 bp, Homo sapiens
ccatctccattcagg

SEQ ID NO: 1520883 - DNA, 15 bp, Homo sapiens
catctccattcaggg

SEQ ID NO: 1520884 - DNA, 15 bp, Homo sapiens
atctccattcagggc

SEQ ID NO: 1520885 - DNA, 15 bp, Homo sapiens
tctccattcagggcc

SEQ ID NO: 1520886 - DNA, 15 bp, Homo sapiens
ctccattcagggcca

SEQ ID NO: 1520887 - DNA, 15 bp, Homo sapiens
tccattcagggccag

SEQ ID NO: 1520888 - DNA, 15 bp, Homo sapiens
ccattcagggccaga

SEQ ID NO: 1520889 - DNA, 15 bp, Homo sapiens
cattcagggccagag

SEQ ID NO: 1520890 - DNA, 15 bp, Homo sapiens
attcagggccagagc

SEQ ID NO: 1520891 - DNA, 15 bp, Homo sapiens
ttcagggccagagcc

SEQ ID NO: 1520892 - DNA, 15 bp, Homo sapiens
tcagggccagagccc

SEQ ID NO: 1520893 - DNA, 15 bp, Homo sapiens
cagggccagagccca

SEQ ID NO: 1520894 - DNA, 15 bp, Homo sapiens
agggccagagcccag

SEQ ID NO: 1520895 - DNA, 15 bp, Homo sapiens
gggccagagcccagc

SEQ ID NO: 1520896 - DNA, 15 bp, Homo sapiens
ggccagagcccagcc

SEQ ID NO: 1520897 - DNA, 15 bp, Homo sapiens
gccagagcccagcca

SEQ ID NO: 1520898 - DNA, 15 bp, Homo sapiens
ccagagcccagccag

SEQ ID NO: 1520899 - DNA, 15 bp, Homo sapiens
cagagcccagccagc

SEQ ID NO: 1520900 - DNA, 15 bp, Homo sapiens
agagcccagccagcg

SEQ ID NO: 1520901 - DNA, 15 bp, Homo sapiens
gagcccagccagcga

SEQ ID NO: 1520902 - DNA, 15 bp, Homo sapiens
agcccagccagcgag

SEQ ID NO: 1520903 - DNA, 15 bp, Homo sapiens
gcccagccagcgagc

SEQ ID NO: 1520904 - DNA, 15 bp, Homo sapiens
cccagccagcgagcc

SEQ ID NO: 1520905 - DNA, 15 bp, Homo sapiens
ccagccagcgagcct

SEQ ID NO: 1520906 - DNA, 15 bp, Homo sapiens
cagccagcgagcctg

SEQ ID NO: 1520907 - DNA, 15 bp, Homo sapiens
agccagcgagcctgt

SEQ ID NO: 1520908 - DNA, 15 bp, Homo sapiens
gccagcgagcctgtg

SEQ ID NO: 1520909 - DNA, 15 bp, Homo sapiens
ccagcgagcctgtgc

SEQ ID NO: 1520910 - DNA, 15 bp, Homo sapiens
cagcgagcctgtgct

SEQ ID NO: 1520911 - DNA, 15 bp, Homo sapiens
agcgagcctgtgctc

SEQ ID NO: 1520912 - DNA, 15 bp, Homo sapiens
gcgagcctgtgctct

SEQ ID NO: 1520913 - DNA, 15 bp, Homo sapiens
cgagcctgtgctctt

SEQ ID NO: 1520914 - DNA, 15 bp, Homo sapiens
gagcctgtgctcttc

SEQ ID NO: 1520915 - DNA, 15 bp, Homo sapiens
agcctgtgctcttca

SEQ ID NO: 1520916 - DNA, 15 bp, Homo sapiens
gcctgtgctcttcaa

SEQ ID NO: 1520917 - DNA, 15 bp, Homo sapiens
cctgtgctcttcaag

SEQ ID NO: 1520918 - DNA, 15 bp, Homo sapiens
ctgtgctcttcaaga

SEQ ID NO: 1520919 - DNA, 15 bp, Homo sapiens
tgtgctcttcaagac

SEQ ID NO: 1520920 - DNA, 15 bp, Homo sapiens
gtgctcttcaagacc

SEQ ID NO: 1520921 - DNA, 15 bp, Homo sapiens
tgctcttcaagaccc

SEQ ID NO: 1520922 - DNA, 15 bp, Homo sapiens
gctcttcaagacccc

SEQ ID NO: 1520923 - DNA, 15 bp, Homo sapiens
ctcttcaagaccccg

SEQ ID NO: 1520924 - DNA, 15 bp, Homo sapiens
tcttcaagaccccgc

SEQ ID NO: 1520925 - DNA, 15 bp, Homo sapiens
cttcaagaccccgcg

SEQ ID NO: 1520926 - DNA, 15 bp, Homo sapiens
ttcaagaccccgcgt

SEQ ID NO: 1520927 - DNA, 15 bp, Homo sapiens
tcaagaccccgcgtg

SEQ ID NO: 1520928 - DNA, 15 bp, Homo sapiens
caagaccccgcgtga

SEQ ID NO: 1520929 - DNA, 15 bp, Homo sapiens
aagaccccgcgtgag

SEQ ID NO: 1520930 - DNA, 15 bp, Homo sapiens
agaccccgcgtgagg

SEQ ID NO: 1520931 - DNA, 15 bp, Homo sapiens
gaccccgcgtgaggc

SEQ ID NO: 1520932 - DNA, 15 bp, Homo sapiens
accccgcgtgaggct

SEQ ID NO: 1520933 - DNA, 15 bp, Homo sapiens
ccccgcgtgaggctg

SEQ ID NO: 1520934 - DNA, 15 bp, Homo sapiens
cccgcgtgaggctga

SEQ ID NO: 1520935 - DNA, 15 bp, Homo sapiens
ccgcgtgaggctgag

SEQ ID NO: 1520936 - DNA, 15 bp, Homo sapiens
cgcgtgaggctgaga

SEQ ID NO: 1520937 - DNA, 15 bp, Homo sapiens
gcgtgaggctgagaa

SEQ ID NO: 1520938 - DNA, 15 bp, Homo sapiens
cgtgaggctgagaag

SEQ ID NO: 1520939 - DNA, 15 bp, Homo sapiens
gtgaggctgagaaga

SEQ ID NO: 1520940 - DNA, 15 bp, Homo sapiens
tgaggctgagaagat

SEQ ID NO: 1520941 - DNA, 15 bp, Homo sapiens
gaggctgagaagatg

SEQ ID NO: 1520942 - DNA, 15 bp, Homo sapiens
aggctgagaagatgg

SEQ ID NO: 1520943 - DNA, 15 bp, Homo sapiens
ggctgagaagatggc

SEQ ID NO: 1520944 - DNA, 15 bp, Homo sapiens
gctgagaagatggcc

SEQ ID NO: 1520945 - DNA, 15 bp, Homo sapiens
ctgagaagatggcct

SEQ ID NO: 1520946 - DNA, 15 bp, Homo sapiens
tgagaagatggcctc

SEQ ID NO: 1520947 - DNA, 15 bp, Homo sapiens
gagaagatggcctcc

SEQ ID NO: 1520948 - DNA, 15 bp, Homo sapiens
agaagatggcctcca

SEQ ID NO: 1520949 - DNA, 15 bp, Homo sapiens
gaagatggcctccaa

SEQ ID NO: 1520950 - DNA, 15 bp, Homo sapiens
aagatggcctccaag

SEQ ID NO: 1520951 - DNA, 15 bp, Homo sapiens
agatggcctccaaga

SEQ ID NO: 1520952 - DNA, 15 bp, Homo sapiens
gatggcctccaagaa

SEQ ID NO: 1520953 - DNA, 15 bp, Homo sapiens
atggcctccaagaac

SEQ ID NO: 1520954 - DNA, 15 bp, Homo sapiens
tggcctccaagaaca

SEQ ID NO: 1520955 - DNA, 15 bp, Homo sapiens
ggcctccaagaacaa

SEQ ID NO: 1520956 - DNA, 15 bp, Homo sapiens
gcctccaagaacaaa

SEQ ID NO: 1520957 - DNA, 15 bp, Homo sapiens
cctccaagaacaaag

SEQ ID NO: 1520958 - DNA, 15 bp, Homo sapiens
ctccaagaacaaagg

SEQ ID NO: 1520959 - DNA, 15 bp, Homo sapiens
tccaagaacaaaggc

SEQ ID NO: 1520960 - DNA, 15 bp, Homo sapiens
ccaagaacaaaggca

SEQ ID NO: 1520961 - DNA, 15 bp, Homo sapiens
caagaacaaaggcag

SEQ ID NO: 1520962 - DNA, 15 bp, Homo sapiens
aagaacaaaggcagg

SEQ ID NO: 1520963 - DNA, 15 bp, Homo sapiens
agaacaaaggcaggc

SEQ ID NO: 1520964 - DNA, 15 bp, Homo sapiens
gaacaaaggcaggcc

SEQ ID NO: 1520965 - DNA, 15 bp, Homo sapiens
aacaaaggcaggccc

SEQ ID NO: 1520966 - DNA, 15 bp, Homo sapiens
acaaaggcaggcccg

SEQ ID NO: 1520967 - DNA, 15 bp, Homo sapiens
caaaggcaggcccgg

SEQ ID NO: 1520968 - DNA, 15 bp, Homo sapiens
aaaggcaggcccggg

SEQ ID NO: 1520969 - DNA, 15 bp, Homo sapiens
aaggcaggcccgggt

SEQ ID NO: 1520970 - DNA, 15 bp, Homo sapiens
aggcaggcccgggtc

SEQ ID NO: 1520971 - DNA, 15 bp, Homo sapiens
ggcaggcccgggtca

SEQ ID NO: 1520972 - DNA, 15 bp, Homo sapiens
gcaggcccgggtcac

SEQ ID NO: 1520973 - DNA, 15 bp, Homo sapiens
caggcccgggtcact

SEQ ID NO: 1520974 - DNA, 15 bp, Homo sapiens
aggcccgggtcactg

SEQ ID NO: 1520975 - DNA, 15 bp, Homo sapiens
ggcccgggtcactgt

SEQ ID NO: 1520976 - DNA, 15 bp, Homo sapiens
gcccgggtcactgtt

SEQ ID NO: 1520977 - DNA, 15 bp, Homo sapiens
cccgggtcactgtta

SEQ ID NO: 1520978 - DNA, 15 bp, Homo sapiens
ccgggtcactgttaa

SEQ ID NO: 1520979 - DNA, 15 bp, Homo sapiens
cgggtcactgttaag

SEQ ID NO: 1520980 - DNA, 15 bp, Homo sapiens
gggtcactgttaaga

SEQ ID NO: 1520981 - DNA, 15 bp, Homo sapiens
ggtcactgttaagag

SEQ ID NO: 1520982 - DNA, 15 bp, Homo sapiens
gtcactgttaagagg

SEQ ID NO: 1520983 - DNA, 15 bp, Homo sapiens
tcactgttaagagga

SEQ ID NO: 1520984 - DNA, 15 bp, Homo sapiens
cactgttaagaggaa

SEQ ID NO: 1520985 - DNA, 15 bp, Homo sapiens
actgttaagaggaat

SEQ ID NO: 1520986 - DNA, 15 bp, Homo sapiens
ctgttaagaggaatg

SEQ ID NO: 1520987 - DNA, 15 bp, Homo sapiens
tgttaagaggaatgg

SEQ ID NO: 1520988 - DNA, 15 bp, Homo sapiens
gttaagaggaatggg

SEQ ID NO: 1520989 - DNA, 15 bp, Homo sapiens
ttaagaggaatgggg

SEQ ID NO: 1520990 - DNA, 15 bp, Homo sapiens
taagaggaatggggt

SEQ ID NO: 1520991 - DNA, 15 bp, Homo sapiens
aagaggaatggggtg

SEQ ID NO: 1520992 - DNA, 15 bp, Homo sapiens
agaggaatggggtgg

SEQ ID NO: 1520993 - DNA, 15 bp, Homo sapiens
gaggaatggggtggg

SEQ ID NO: 1520994 - DNA, 15 bp, Homo sapiens
aggaatggggtgggg

SEQ ID NO: 1520995 - DNA, 15 bp, Homo sapiens
ggaatggggtggggt

SEQ ID NO: 1520996 - DNA, 15 bp, Homo sapiens
gaatggggtggggtg

SEQ ID NO: 1520997 - DNA, 15 bp, Homo sapiens
aatggggtggggtga

SEQ ID NO: 1520998 - DNA, 15 bp, Homo sapiens
atggggtggggtgag

SEQ ID NO: 1520999 - DNA, 15 bp, Homo sapiens
tggggtggggtgagg

SEQ ID NO: 1521000 - DNA, 15 bp, Homo sapiens
ggggtggggtgaggg

SEQ ID NO: 1521001 - DNA, 15 bp, Homo sapiens
gggtggggtgagggg

SEQ ID NO: 1521002 - DNA, 15 bp, Homo sapiens
ggtggggtgaggggt

SEQ ID NO: 1521003 - DNA, 15 bp, Homo sapiens
tggggtgaggggtgg

SEQ ID NO: 1521004 - DNA, 15 bp, Homo sapiens
ggggtgaggggtggt

SEQ ID NO: 1521005 - DNA, 15 bp, Homo sapiens
gggtgaggggtggtc

SEQ ID NO: 1521006 - DNA, 15 bp, Homo sapiens
ggtgaggggtggtca

SEQ ID NO: 1521007 - DNA, 15 bp, Homo sapiens
gtgaggggtggtcag

SEQ ID NO: 1521008 - DNA, 15 bp, Homo sapiens
tgaggggtggtcagg

SEQ ID NO: 1521009 - DNA, 15 bp, Homo sapiens
gaggggtggtcagga

SEQ ID NO: 1521010 - DNA, 15 bp, Homo sapiens
aggggtggtcaggac

SEQ ID NO: 1521011 - DNA, 15 bp, Homo sapiens
ggggtggtcaggacc

SEQ ID NO: 1521012 - DNA, 15 bp, Homo sapiens
gggtggtcaggacca

SEQ ID NO: 1521013 - DNA, 15 bp, Homo sapiens
ggtggtcaggaccag

SEQ ID NO: 1521014 - DNA, 15 bp, Homo sapiens
gtggtcaggaccaga

SEQ ID NO: 1521015 - DNA, 15 bp, Homo sapiens
tggtcaggaccagac

SEQ ID NO: 1521016 - DNA, 15 bp, Homo sapiens
ggtcaggaccagacc

SEQ ID NO: 1521017 - DNA, 15 bp, Homo sapiens
gtcaggaccagacca

SEQ ID NO: 1521018 - DNA, 15 bp, Homo sapiens
tcaggaccagaccag

SEQ ID NO: 1521019 - DNA, 15 bp, Homo sapiens
caggaccagaccagt

SEQ ID NO: 1521020 - DNA, 15 bp, Homo sapiens
aggaccagaccagtg

SEQ ID NO: 1521021 - DNA, 15 bp, Homo sapiens
ggaccagaccagtgg

SEQ ID NO: 1521022 - DNA, 15 bp, Homo sapiens
gaccagaccagtggg

SEQ ID NO: 1521023 - DNA, 15 bp, Homo sapiens
accagaccagtgggt

SEQ ID NO: 1521024 - DNA, 15 bp, Homo sapiens
ccagaccagtgggtg

SEQ ID NO: 1521025 - DNA, 15 bp, Homo sapiens
cagaccagtgggtgg

SEQ ID NO: 1521026 - DNA, 15 bp, Homo sapiens
agaccagtgggtggc

SEQ ID NO: 1521027 - DNA, 15 bp, Homo sapiens
gaccagtgggtggct

SEQ ID NO: 1521028 - DNA, 15 bp, Homo sapiens
accagtgggtggctt

SEQ ID NO: 1521029 - DNA, 15 bp, Homo sapiens
ccagtgggtggcttg

SEQ ID NO: 1521030 - DNA, 15 bp, Homo sapiens
cagtgggtggcttga

SEQ ID NO: 1521031 - DNA, 15 bp, Homo sapiens
agtgggtggcttgag

SEQ ID NO: 1521032 - DNA, 15 bp, Homo sapiens
gtgggtggcttgagg

SEQ ID NO: 1521033 - DNA, 15 bp, Homo sapiens
tgggtggcttgagga

SEQ ID NO: 1521034 - DNA, 15 bp, Homo sapiens
gggtggcttgaggaa

SEQ ID NO: 1521035 - DNA, 15 bp, Homo sapiens
ggtggcttgaggaaa

SEQ ID NO: 1521036 - DNA, 15 bp, Homo sapiens
gtggcttgaggaaag

SEQ ID NO: 1521037 - DNA, 15 bp, Homo sapiens
tggcttgaggaaagc

SEQ ID NO: 1521038 - DNA, 15 bp, Homo sapiens
ggcttgaggaaagct

SEQ ID NO: 1521039 - DNA, 15 bp, Homo sapiens
gcttgaggaaagctc

SEQ ID NO: 1521040 - DNA, 15 bp, Homo sapiens
cttgaggaaagctct

SEQ ID NO: 1521041 - DNA, 15 bp, Homo sapiens
ttgaggaaagctctg

SEQ ID NO: 1521042 - DNA, 15 bp, Homo sapiens
tgaggaaagctctgt

SEQ ID NO: 1521043 - DNA, 15 bp, Homo sapiens
gaggaaagctctgtc

SEQ ID NO: 1521044 - DNA, 15 bp, Homo sapiens
aggaaagctctgtct

SEQ ID NO: 1521045 - DNA, 15 bp, Homo sapiens
ggaaagctctgtctc

SEQ ID NO: 1521046 - DNA, 15 bp, Homo sapiens
gaaagctctgtctcc

SEQ ID NO: 1521047 - DNA, 15 bp, Homo sapiens
aaagctctgtctcct

SEQ ID NO: 1521048 - DNA, 15 bp, Homo sapiens
aagctctgtctcctc

SEQ ID NO: 1521049 - DNA, 15 bp, Homo sapiens
agctctgtctcctcc

SEQ ID NO: 1521050 - DNA, 15 bp, Homo sapiens
gctctgtctcctccc

SEQ ID NO: 1521051 - DNA, 15 bp, Homo sapiens
ctctgtctcctcccc

SEQ ID NO: 1521052 - DNA, 15 bp, Homo sapiens
tctgtctcctccccc

SEQ ID NO: 1521053 - DNA, 15 bp, Homo sapiens
ctgtctcctccccct

SEQ ID NO: 1521054 - DNA, 15 bp, Homo sapiens
tgtctcctccccctt

SEQ ID NO: 1521055 - DNA, 15 bp, Homo sapiens
gtctcctccccctta

SEQ ID NO: 1521056 - DNA, 15 bp, Homo sapiens
tctcctcccccttat

SEQ ID NO: 1521057 - DNA, 15 bp, Homo sapiens
ctcctcccccttatc

SEQ ID NO: 1521058 - DNA, 15 bp, Homo sapiens
tcctcccccttatcc

SEQ ID NO: 1521059 - DNA, 15 bp, Homo sapiens
cctcccccttatccc

SEQ ID NO: 1521060 - DNA, 15 bp, Homo sapiens
ctcccccttatcccc

SEQ ID NO: 1521061 - DNA, 15 bp, Homo sapiens
tcccccttatcccct

SEQ ID NO: 1521062 - DNA, 15 bp, Homo sapiens
cccccttatcccctg

SEQ ID NO: 1521063 - DNA, 15 bp, Homo sapiens
ccccttatcccctgc

SEQ ID NO: 1521064 - DNA, 15 bp, Homo sapiens
cccttatcccctgct

SEQ ID NO: 1521065 - DNA, 15 bp, Homo sapiens
ccttatcccctgctg

SEQ ID NO: 1521066 - DNA, 15 bp, Homo sapiens
cttatcccctgctgg

SEQ ID NO: 1521067 - DNA, 15 bp, Homo sapiens
ttatcccctgctggc

SEQ ID NO: 1521068 - DNA, 15 bp, Homo sapiens
tatcccctgctggca

SEQ ID NO: 1521069 - DNA, 15 bp, Homo sapiens
atcccctgctggcaa

SEQ ID NO: 1521070 - DNA, 15 bp, Homo sapiens
tcccctgctggcaag

SEQ ID NO: 1521071 - DNA, 15 bp, Homo sapiens
cccctgctggcaagt

SEQ ID NO: 1521072 - DNA, 15 bp, Homo sapiens
ccctgctggcaagta

SEQ ID NO: 1521073 - DNA, 15 bp, Homo sapiens
cctgctggcaagtaa

SEQ ID NO: 1521074 - DNA, 15 bp, Homo sapiens
ctgctggcaagtaaa

SEQ ID NO: 1521075 - DNA, 15 bp, Homo sapiens
tgctggcaagtaaag

SEQ ID NO: 1521076 - DNA, 15 bp, Homo sapiens
gctggcaagtaaagc

SEQ ID NO: 1521077 - DNA, 15 bp, Homo sapiens
ctggcaagtaaagca

SEQ ID NO: 1521078 - DNA, 15 bp, Homo sapiens
tggcaagtaaagcag

SEQ ID NO: 1521079 - DNA, 15 bp, Homo sapiens
ggcaagtaaagcagt

SEQ ID NO: 1521080 - DNA, 15 bp, Homo sapiens
gcaagtaaagcagta

SEQ ID NO: 1521081 - DNA, 15 bp, Homo sapiens
caagtaaagcagtac

SEQ ID NO: 1521082 - DNA, 15 bp, Homo sapiens
aagtaaagcagtacc

SEQ ID NO: 1521083 - DNA, 15 bp, Homo sapiens
agtaaagcagtacct

SEQ ID NO: 1521084 - DNA, 15 bp, Homo sapiens
gtaaagcagtacctg

SEQ ID NO: 1521085 - DNA, 15 bp, Homo sapiens
taaagcagtacctga

SEQ ID NO: 1521086 - DNA, 15 bp, Homo sapiens
aaagcagtacctgag

SEQ ID NO: 1521087 - DNA, 15 bp, Homo sapiens
aagcagtacctgaga

SEQ ID NO: 1521088 - DNA, 15 bp, Homo sapiens
agcagtacctgagag

SEQ ID NO: 1521089 - DNA, 15 bp, Homo sapiens
gcagtacctgagaga

SEQ ID NO: 1521090 - DNA, 15 bp, Homo sapiens
cagtacctgagagag

SEQ ID NO: 1521091 - DNA, 15 bp, Homo sapiens
agtacctgagagagg

SEQ ID NO: 1521092 - DNA, 15 bp, Homo sapiens
gtacctgagagaggg

SEQ ID NO: 1521093 - DNA, 15 bp, Homo sapiens
tacctgagagagggt

SEQ ID NO: 1521094 - DNA, 15 bp, Homo sapiens
acctgagagagggtt

SEQ ID NO: 1521095 - DNA, 15 bp, Homo sapiens
cctgagagagggttc

SEQ ID NO: 1521096 - DNA, 15 bp, Homo sapiens
ctgagagagggttca

SEQ ID NO: 1521097 - DNA, 15 bp, Homo sapiens
tgagagagggttcac

SEQ ID NO: 1521098 - DNA, 15 bp, Homo sapiens
gagagagggttcacg

SEQ ID NO: 1521099 - DNA, 15 bp, Homo sapiens
agagagggttcacgc

SEQ ID NO: 1521100 - DNA, 15 bp, Homo sapiens
gagagggttcacgct

SEQ ID NO: 1521101 - DNA, 15 bp, Homo sapiens
agagggttcacgcta

SEQ ID NO: 1521102 - DNA, 15 bp, Homo sapiens
gagggttcacgctag

SEQ ID NO: 1521103 - DNA, 15 bp, Homo sapiens
agggttcacgctagt

SEQ ID NO: 1521104 - DNA, 15 bp, Homo sapiens
gggttcacgctagtc

SEQ ID NO: 1521105 - DNA, 15 bp, Homo sapiens
ggttcacgctagtcc

SEQ ID NO: 1521106 - DNA, 15 bp, Homo sapiens
gttcacgctagtccc

SEQ ID NO: 1521107 - DNA, 15 bp, Homo sapiens
ttcacgctagtccct

SEQ ID NO: 1521108 - DNA, 15 bp, Homo sapiens
tcacgctagtccctg

SEQ ID NO: 1521109 - DNA, 15 bp, Homo sapiens
cacgctagtccctga

SEQ ID NO: 1521110 - DNA, 15 bp, Homo sapiens
acgctagtccctgac

SEQ ID NO: 1521111 - DNA, 15 bp, Homo sapiens
cgctagtccctgaca

SEQ ID NO: 1521112 - DNA, 15 bp, Homo sapiens
gctagtccctgacaa

SEQ ID NO: 1521113 - DNA, 15 bp, Homo sapiens
ctagtccctgacaag

SEQ ID NO: 1521114 - DNA, 15 bp, Homo sapiens
tagtccctgacaaga

SEQ ID NO: 1521115 - DNA, 15 bp, Homo sapiens
agtccctgacaagac

SEQ ID NO: 1521116 - DNA, 15 bp, Homo sapiens
gtccctgacaagacg

SEQ ID NO: 1521117 - DNA, 15 bp, Homo sapiens
tccctgacaagacgc

SEQ ID NO: 1521118 - DNA, 15 bp, Homo sapiens
ccctgacaagacgct

SEQ ID NO: 1521119 - DNA, 15 bp, Homo sapiens
cctgacaagacgctg

SEQ ID NO: 1521120 - DNA, 15 bp, Homo sapiens
ctgacaagacgctga

SEQ ID NO: 1521121 - DNA, 15 bp, Homo sapiens
tgacaagacgctgag

SEQ ID NO: 1521122 - DNA, 15 bp, Homo sapiens
gacaagacgctgagc

SEQ ID NO: 1521123 - DNA, 15 bp, Homo sapiens
acaagacgctgagca

SEQ ID NO: 1521124 - DNA, 15 bp, Homo sapiens
caagacgctgagcat

SEQ ID NO: 1521125 - DNA, 15 bp, Homo sapiens
aagacgctgagcata

SEQ ID NO: 1521126 - DNA, 15 bp, Homo sapiens
agacgctgagcatat

SEQ ID NO: 1521127 - DNA, 15 bp, Homo sapiens
gacgctgagcatata

SEQ ID NO: 1521128 - DNA, 15 bp, Homo sapiens
acgctgagcatataa

SEQ ID NO: 1521129 - DNA, 15 bp, Homo sapiens
cgctgagcatataaa

SEQ ID NO: 1521130 - DNA, 15 bp, Homo sapiens
gctgagcatataaac

SEQ ID NO: 1521131 - DNA, 15 bp, Homo sapiens
ctgagcatataaact

SEQ ID NO: 1521132 - DNA, 15 bp, Homo sapiens
tgagcatataaactc

SEQ ID NO: 1521133 - DNA, 15 bp, Homo sapiens
gagcatataaactcc

SEQ ID NO: 1521134 - DNA, 15 bp, Homo sapiens
agcatataaactccc

SEQ ID NO: 1521135 - DNA, 15 bp, Homo sapiens
gcatataaactccct

SEQ ID NO: 1521136 - DNA, 15 bp, Homo sapiens
catataaactccctt

SEQ ID NO: 1521137 - DNA, 15 bp, Homo sapiens
atataaactcccttt

SEQ ID NO: 1521138 - DNA, 15 bp, Homo sapiens
tataaactcccttta

SEQ ID NO: 1521139 - DNA, 15 bp, Homo sapiens
ataaactccctttag

SEQ ID NO: 1521140 - DNA, 15 bp, Homo sapiens
taaactccctttaga

SEQ ID NO: 1521141 - DNA, 15 bp, Homo sapiens
aaactccctttagac

SEQ ID NO: 1521142 - DNA, 15 bp, Homo sapiens
aactccctttagact

SEQ ID NO: 1521143 - DNA, 15 bp, Homo sapiens
actccctttagactt

SEQ ID NO: 1521144 - DNA, 15 bp, Homo sapiens
ctccctttagacttg

SEQ ID NO: 1521145 - DNA, 15 bp, Homo sapiens
tccctttagacttgg

SEQ ID NO: 1521146 - DNA, 15 bp, Homo sapiens
ccctttagacttggt

SEQ ID NO: 1521147 - DNA, 15 bp, Homo sapiens
cctttagacttggtc

SEQ ID NO: 1521148 - DNA, 15 bp, Homo sapiens
ctttagacttggtcc

SEQ ID NO: 1521149 - DNA, 15 bp, Homo sapiens
tttagacttggtcct

SEQ ID NO: 1521150 - DNA, 15 bp, Homo sapiens
ttagacttggtccta

SEQ ID NO: 1521151 - DNA, 15 bp, Homo sapiens
tagacttggtcctat

SEQ ID NO: 1521152 - DNA, 15 bp, Homo sapiens
agacttggtcctatc

SEQ ID NO: 1521153 - DNA, 15 bp, Homo sapiens
gacttggtcctatca

SEQ ID NO: 1521154 - DNA, 15 bp, Homo sapiens
acttggtcctatcac

SEQ ID NO: 1521155 - DNA, 15 bp, Homo sapiens
cttggtcctatcact

SEQ ID NO: 1521156 - DNA, 15 bp, Homo sapiens
ttggtcctatcactg

SEQ ID NO: 1521157 - DNA, 15 bp, Homo sapiens
tggtcctatcactgc

SEQ ID NO: 1521158 - DNA, 15 bp, Homo sapiens
ggtcctatcactgcc

SEQ ID NO: 1521159 - DNA, 15 bp, Homo sapiens
gtcctatcactgcca

SEQ ID NO: 1521160 - DNA, 15 bp, Homo sapiens
tcctatcactgccac

SEQ ID NO: 1521161 - DNA, 15 bp, Homo sapiens
cctatcactgccacc

SEQ ID NO: 1521162 - DNA, 15 bp, Homo sapiens
ctatcactgccaccc

SEQ ID NO: 1521163 - DNA, 15 bp, Homo sapiens
tatcactgccacccc

SEQ ID NO: 1521164 - DNA, 15 bp, Homo sapiens
atcactgccacccca

SEQ ID NO: 1521165 - DNA, 15 bp, Homo sapiens
tcactgccaccccaa

SEQ ID NO: 1521166 - DNA, 15 bp, Homo sapiens
cactgccaccccaag

SEQ ID NO: 1521167 - DNA, 15 bp, Homo sapiens
actgccaccccaagt

SEQ ID NO: 1521168 - DNA, 15 bp, Homo sapiens
ctgccaccccaagta

SEQ ID NO: 1521169 - DNA, 15 bp, Homo sapiens
tgccaccccaagtag

SEQ ID NO: 1521170 - DNA, 15 bp, Homo sapiens
gccaccccaagtagc

SEQ ID NO: 1521171 - DNA, 15 bp, Homo sapiens
ccaccccaagtagcc

SEQ ID NO: 1521172 - DNA, 15 bp, Homo sapiens
caccccaagtagcca

SEQ ID NO: 1521173 - DNA, 15 bp, Homo sapiens
accccaagtagccat

SEQ ID NO: 1521174 - DNA, 15 bp, Homo sapiens
ccccaagtagccatc

SEQ ID NO: 1521175 - DNA, 15 bp, Homo sapiens
cccaagtagccatca

SEQ ID NO: 1521176 - DNA, 15 bp, Homo sapiens
ccaagtagccatcag

SEQ ID NO: 1521177 - DNA, 15 bp, Homo sapiens
caagtagccatcagt

SEQ ID NO: 1521178 - DNA, 15 bp, Homo sapiens
aagtagccatcagtg

SEQ ID NO: 1521179 - DNA, 15 bp, Homo sapiens
agtagccatcagtgc

SEQ ID NO: 1521180 - DNA, 15 bp, Homo sapiens
gtagccatcagtgca

SEQ ID NO: 1521181 - DNA, 15 bp, Homo sapiens
tagccatcagtgcat

SEQ ID NO: 1521182 - DNA, 15 bp, Homo sapiens
agccatcagtgcatt

SEQ ID NO: 1521183 - DNA, 15 bp, Homo sapiens
gccatcagtgcattc

SEQ ID NO: 1521184 - DNA, 15 bp, Homo sapiens
ccatcagtgcattct

SEQ ID NO: 1521185 - DNA, 15 bp, Homo sapiens
catcagtgcattcta

SEQ ID NO: 1521186 - DNA, 15 bp, Homo sapiens
atcagtgcattctag

SEQ ID NO: 1521187 - DNA, 15 bp, Homo sapiens
tcagtgcattctaga

SEQ ID NO: 1521188 - DNA, 15 bp, Homo sapiens
cagtgcattctagaa

SEQ ID NO: 1521189 - DNA, 15 bp, Homo sapiens
agtgcattctagaat

SEQ ID NO: 1521190 - DNA, 15 bp, Homo sapiens
gtgcattctagaatg

SEQ ID NO: 1521191 - DNA, 15 bp, Homo sapiens
tgcattctagaatgt

SEQ ID NO: 1521192 - DNA, 15 bp, Homo sapiens
gcattctagaatgta

SEQ ID NO: 1521193 - DNA, 15 bp, Homo sapiens
cattctagaatgtat

SEQ ID NO: 1521194 - DNA, 15 bp, Homo sapiens
attctagaatgtatg

SEQ ID NO: 1521195 - DNA, 15 bp, Homo sapiens
ttctagaatgtatgt

SEQ ID NO: 1521196 - DNA, 15 bp, Homo sapiens
tctagaatgtatgtt

SEQ ID NO: 1521197 - DNA, 15 bp, Homo sapiens
ctagaatgtatgtta

SEQ ID NO: 1521198 - DNA, 15 bp, Homo sapiens
tagaatgtatgttag

SEQ ID NO: 1521199 - DNA, 15 bp, Homo sapiens
agaatgtatgttaga

SEQ ID NO: 1521200 - DNA, 15 bp, Homo sapiens
gaatgtatgttagat

SEQ ID NO: 1521201 - DNA, 15 bp, Homo sapiens
aatgtatgttagatg

SEQ ID NO: 1521202 - DNA, 15 bp, Homo sapiens
atgtatgttagatgt

SEQ ID NO: 1521203 - DNA, 15 bp, Homo sapiens
tgtatgttagatgtg

SEQ ID NO: 1521204 - DNA, 15 bp, Homo sapiens
gtatgttagatgtgt

SEQ ID NO: 1521205 - DNA, 15 bp, Homo sapiens
tatgttagatgtgtg

SEQ ID NO: 1521206 - DNA, 15 bp, Homo sapiens
atgttagatgtgtgg

SEQ ID NO: 1521207 - DNA, 15 bp, Homo sapiens
tgttagatgtgtggg

SEQ ID NO: 1521208 - DNA, 15 bp, Homo sapiens
gttagatgtgtgggc

SEQ ID NO: 1521209 - DNA, 15 bp, Homo sapiens
ttagatgtgtgggca

SEQ ID NO: 1521210 - DNA, 15 bp, Homo sapiens
tagatgtgtgggcac

SEQ ID NO: 1521211 - DNA, 15 bp, Homo sapiens
agatgtgtgggcacc

SEQ ID NO: 1521212 - DNA, 15 bp, Homo sapiens
gatgtgtgggcacct

SEQ ID NO: 1521213 - DNA, 15 bp, Homo sapiens
atgtgtgggcacctg

SEQ ID NO: 1521214 - DNA, 15 bp, Homo sapiens
tgtgtgggcacctgt

SEQ ID NO: 1521215 - DNA, 15 bp, Homo sapiens
gtgtgggcacctgta

SEQ ID NO: 1521216 - DNA, 15 bp, Homo sapiens
tgtgggcacctgtag

SEQ ID NO: 1521217 - DNA, 15 bp, Homo sapiens
gtgggcacctgtaga

SEQ ID NO: 1521218 - DNA, 15 bp, Homo sapiens
tgggcacctgtagaa

SEQ ID NO: 1521219 - DNA, 15 bp, Homo sapiens
gggcacctgtagaaa

SEQ ID NO: 1521220 - DNA, 15 bp, Homo sapiens
ggcacctgtagaaat

SEQ ID NO: 1521221 - DNA, 15 bp, Homo sapiens
gcacctgtagaaatc

SEQ ID NO: 1521222 - DNA, 15 bp, Homo sapiens
cacctgtagaaatca

SEQ ID NO: 1521223 - DNA, 15 bp, Homo sapiens
acctgtagaaatcag

SEQ ID NO: 1521224 - DNA, 15 bp, Homo sapiens
cctgtagaaatcagc

SEQ ID NO: 1521225 - DNA, 15 bp, Homo sapiens
ctgtagaaatcagca

SEQ ID NO: 1521226 - DNA, 15 bp, Homo sapiens
tgtagaaatcagcac

SEQ ID NO: 1521227 - DNA, 15 bp, Homo sapiens
gtagaaatcagcact

SEQ ID NO: 1521228 - DNA, 15 bp, Homo sapiens
tagaaatcagcactg

SEQ ID NO: 1521229 - DNA, 15 bp, Homo sapiens
agaaatcagcactgt

SEQ ID NO: 1521230 - DNA, 15 bp, Homo sapiens
gaaatcagcactgtt

SEQ ID NO: 1521231 - DNA, 15 bp, Homo sapiens
aaatcagcactgttg

SEQ ID NO: 1521232 - DNA, 15 bp, Homo sapiens
aatcagcactgttgt

SEQ ID NO: 1521233 - DNA, 15 bp, Homo sapiens
atcagcactgttgtc

SEQ ID NO: 1521234 - DNA, 15 bp, Homo sapiens
tcagcactgttgtct

SEQ ID NO: 1521235 - DNA, 15 bp, Homo sapiens
cagcactgttgtctt

SEQ ID NO: 1521236 - DNA, 15 bp, Homo sapiens
agcactgttgtcttg

SEQ ID NO: 1521237 - DNA, 15 bp, Homo sapiens
gcactgttgtcttgg

SEQ ID NO: 1521238 - DNA, 15 bp, Homo sapiens
cactgttgtcttggg

SEQ ID NO: 1521239 - DNA, 15 bp, Homo sapiens
actgttgtcttgggc

SEQ ID NO: 1521240 - DNA, 15 bp, Homo sapiens
ctgttgtcttgggct

SEQ ID NO: 1521241 - DNA, 15 bp, Homo sapiens
tgttgtcttgggctt

SEQ ID NO: 1521242 - DNA, 15 bp, Homo sapiens
gttgtcttgggcttg

SEQ ID NO: 1521243 - DNA, 15 bp, Homo sapiens
ttgtcttgggcttgg

SEQ ID NO: 1521244 - DNA, 15 bp, Homo sapiens
tgtcttgggcttggc

SEQ ID NO: 1521245 - DNA, 15 bp, Homo sapiens
gtcttgggcttggcc

SEQ ID NO: 1521246 - DNA, 15 bp, Homo sapiens
tcttgggcttggccc

SEQ ID NO: 1521247 - DNA, 15 bp, Homo sapiens
cttgggcttggccct

SEQ ID NO: 1521248 - DNA, 15 bp, Homo sapiens
ttgggcttggcccta

SEQ ID NO: 1521249 - DNA, 15 bp, Homo sapiens
tgggcttggccctag

SEQ ID NO: 1521250 - DNA, 15 bp, Homo sapiens
gggcttggccctaga

SEQ ID NO: 1521251 - DNA, 15 bp, Homo sapiens
ggcttggccctagag

SEQ ID NO: 1521252 - DNA, 15 bp, Homo sapiens
gcttggccctagagg

SEQ ID NO: 1521253 - DNA, 15 bp, Homo sapiens
cttggccctagagga

SEQ ID NO: 1521254 - DNA, 15 bp, Homo sapiens
ttggccctagaggag

SEQ ID NO: 1521255 - DNA, 15 bp, Homo sapiens
tggccctagaggagt

SEQ ID NO: 1521256 - DNA, 15 bp, Homo sapiens
ggccctagaggagtg

SEQ ID NO: 1521257 - DNA, 15 bp, Homo sapiens
gccctagaggagtgg

SEQ ID NO: 1521258 - DNA, 15 bp, Homo sapiens
ccctagaggagtggc

SEQ ID NO: 1521259 - DNA, 15 bp, Homo sapiens
cctagaggagtggct

SEQ ID NO: 1521260 - DNA, 15 bp, Homo sapiens
ctagaggagtggctg

SEQ ID NO: 1521261 - DNA, 15 bp, Homo sapiens
tagaggagtggctga

SEQ ID NO: 1521262 - DNA, 15 bp, Homo sapiens
agaggagtggctgag

SEQ ID NO: 1521263 - DNA, 15 bp, Homo sapiens
gaggagtggctgagg

SEQ ID NO: 1521264 - DNA, 15 bp, Homo sapiens
aggagtggctgaggg

SEQ ID NO: 1521265 - DNA, 15 bp, Homo sapiens
ggagtggctgaggga

SEQ ID NO: 1521266 - DNA, 15 bp, Homo sapiens
gagtggctgagggag

SEQ ID NO: 1521267 - DNA, 15 bp, Homo sapiens
agtggctgagggagg

SEQ ID NO: 1521268 - DNA, 15 bp, Homo sapiens
gtggctgagggagga

SEQ ID NO: 1521269 - DNA, 15 bp, Homo sapiens
tggctgagggaggaa

SEQ ID NO: 1521270 - DNA, 15 bp, Homo sapiens
ggctgagggaggaaa

SEQ ID NO: 1521271 - DNA, 15 bp, Homo sapiens
gctgagggaggaaag

SEQ ID NO: 1521272 - DNA, 15 bp, Homo sapiens
ctgagggaggaaagg

SEQ ID NO: 1521273 - DNA, 15 bp, Homo sapiens
tgagggaggaaagga

SEQ ID NO: 1521274 - DNA, 15 bp, Homo sapiens
gagggaggaaaggag

SEQ ID NO: 1521275 - DNA, 15 bp, Homo sapiens
agggaggaaaggagt

SEQ ID NO: 1521276 - DNA, 15 bp, Homo sapiens
gggaggaaaggagtg

SEQ ID NO: 1521277 - DNA, 15 bp, Homo sapiens
ggaggaaaggagtgc

SEQ ID NO: 1521278 - DNA, 15 bp, Homo sapiens
gaggaaaggagtgct

SEQ ID NO: 1521279 - DNA, 15 bp, Homo sapiens
aggaaaggagtgctg

SEQ ID NO: 1521280 - DNA, 15 bp, Homo sapiens
ggaaaggagtgctgg

SEQ ID NO: 1521281 - DNA, 15 bp, Homo sapiens
gaaaggagtgctgga

SEQ ID NO: 1521282 - DNA, 15 bp, Homo sapiens
aaaggagtgctggat

SEQ ID NO: 1521283 - DNA, 15 bp, Homo sapiens
aaggagtgctggatc

SEQ ID NO: 1521284 - DNA, 15 bp, Homo sapiens
aggagtgctggatct

SEQ ID NO: 1521285 - DNA, 15 bp, Homo sapiens
ggagtgctggatcta

SEQ ID NO: 1521286 - DNA, 15 bp, Homo sapiens
gagtgctggatctag

SEQ ID NO: 1521287 - DNA, 15 bp, Homo sapiens
agtgctggatctagt

SEQ ID NO: 1521288 - DNA, 15 bp, Homo sapiens
gtgctggatctagtg

SEQ ID NO: 1521289 - DNA, 15 bp, Homo sapiens
tgctggatctagtgt

SEQ ID NO: 1521290 - DNA, 15 bp, Homo sapiens
gctggatctagtgtc

SEQ ID NO: 1521291 - DNA, 15 bp, Homo sapiens
ctggatctagtgtct

SEQ ID NO: 1521292 - DNA, 15 bp, Homo sapiens
tggatctagtgtctc

SEQ ID NO: 1521293 - DNA, 15 bp, Homo sapiens
ggatctagtgtctct

SEQ ID NO: 1521294 - DNA, 15 bp, Homo sapiens
gatctagtgtctctc

SEQ ID NO: 1521295 - DNA, 15 bp, Homo sapiens
atctagtgtctctct

SEQ ID NO: 1521296 - DNA, 15 bp, Homo sapiens
tctagtgtctctctc

SEQ ID NO: 1521297 - DNA, 15 bp, Homo sapiens
ctagtgtctctctcc

SEQ ID NO: 1521298 - DNA, 15 bp, Homo sapiens
tagtgtctctctccc

SEQ ID NO: 1521299 - DNA, 15 bp, Homo sapiens
agtgtctctctccct

SEQ ID NO: 1521300 - DNA, 15 bp, Homo sapiens
gtgtctctctccctg

SEQ ID NO: 1521301 - DNA, 15 bp, Homo sapiens
tgtctctctccctgc

SEQ ID NO: 1521302 - DNA, 15 bp, Homo sapiens
gtctctctccctgca

SEQ ID NO: 1521303 - DNA, 15 bp, Homo sapiens
tctctctccctgcag

SEQ ID NO: 1521304 - DNA, 15 bp, Homo sapiens
ctctctccctgcaga

SEQ ID NO: 1521305 - DNA, 15 bp, Homo sapiens
tctctccctgcagat

SEQ ID NO: 1521306 - DNA, 15 bp, Homo sapiens
ctctccctgcagatg

SEQ ID NO: 1521307 - DNA, 15 bp, Homo sapiens
tctccctgcagatga

SEQ ID NO: 1521308 - DNA, 15 bp, Homo sapiens
ctccctgcagatgag

SEQ ID NO: 1521309 - DNA, 15 bp, Homo sapiens
tccctgcagatgagg

SEQ ID NO: 1521310 - DNA, 15 bp, Homo sapiens
ccctgcagatgaggt

SEQ ID NO: 1521311 - DNA, 15 bp, Homo sapiens
cctgcagatgaggta

SEQ ID NO: 1521312 - DNA, 15 bp, Homo sapiens
ctgcagatgaggtaa

SEQ ID NO: 1521313 - DNA, 15 bp, Homo sapiens
tgcagatgaggtaac

SEQ ID NO: 1521314 - DNA, 15 bp, Homo sapiens
gcagatgaggtaacc

SEQ ID NO: 1521315 - DNA, 15 bp, Homo sapiens
cagatgaggtaacca

SEQ ID NO: 1521316 - DNA, 15 bp, Homo sapiens
agatgaggtaaccat

SEQ ID NO: 1521317 - DNA, 15 bp, Homo sapiens
gatgaggtaaccatg

SEQ ID NO: 1521318 - DNA, 15 bp, Homo sapiens
atgaggtaaccatga

SEQ ID NO: 1521319 - DNA, 15 bp, Homo sapiens
tgaggtaaccatgaa

SEQ ID NO: 1521320 - DNA, 15 bp, Homo sapiens
gaggtaaccatgaaa

SEQ ID NO: 1521321 - DNA, 15 bp, Homo sapiens
aggtaaccatgaaag

SEQ ID NO: 1521322 - DNA, 15 bp, Homo sapiens
ggtaaccatgaaaga

SEQ ID NO: 1521323 - DNA, 15 bp, Homo sapiens
gtaaccatgaaagag

SEQ ID NO: 1521324 - DNA, 15 bp, Homo sapiens
taaccatgaaagaga

SEQ ID NO: 1521325 - DNA, 15 bp, Homo sapiens
aaccatgaaagagat

SEQ ID NO: 1521326 - DNA, 15 bp, Homo sapiens
accatgaaagagatg

SEQ ID NO: 1521327 - DNA, 15 bp, Homo sapiens
ccatgaaagagatgg

SEQ ID NO: 1521328 - DNA, 15 bp, Homo sapiens
catgaaagagatggg

SEQ ID NO: 1521329 - DNA, 15 bp, Homo sapiens
atgaaagagatgggg

SEQ ID NO: 1521330 - DNA, 15 bp, Homo sapiens
tgaaagagatgggga

SEQ ID NO: 1521331 - DNA, 15 bp, Homo sapiens
gaaagagatggggag

SEQ ID NO: 1521332 - DNA, 15 bp, Homo sapiens
aaagagatggggagg

SEQ ID NO: 1521333 - DNA, 15 bp, Homo sapiens
aagagatggggagga

SEQ ID NO: 1521334 - DNA, 15 bp, Homo sapiens
agagatggggaggaa

SEQ ID NO: 1521335 - DNA, 15 bp, Homo sapiens
gagatggggaggaac

SEQ ID NO: 1521336 - DNA, 15 bp, Homo sapiens
agatggggaggaacc

SEQ ID NO: 1521337 - DNA, 15 bp, Homo sapiens
gatggggaggaacca

SEQ ID NO: 1521338 - DNA, 15 bp, Homo sapiens
atggggaggaaccaa

SEQ ID NO: 1521339 - DNA, 15 bp, Homo sapiens
tggggaggaaccaac

SEQ ID NO: 1521340 - DNA, 15 bp, Homo sapiens
ggggaggaaccaaca

SEQ ID NO: 1521341 - DNA, 15 bp, Homo sapiens
gggaggaaccaacag

SEQ ID NO: 1521342 - DNA, 15 bp, Homo sapiens
ggaggaaccaacagc

SEQ ID NO: 1521343 - DNA, 15 bp, Homo sapiens
gaggaaccaacagct

SEQ ID NO: 1521344 - DNA, 15 bp, Homo sapiens
aggaaccaacagctg

SEQ ID NO: 1521345 - DNA, 15 bp, Homo sapiens
ggaaccaacagctgc

SEQ ID NO: 1521346 - DNA, 15 bp, Homo sapiens
gaaccaacagctgcg

SEQ ID NO: 1521347 - DNA, 15 bp, Homo sapiens
aaccaacagctgcgg

SEQ ID NO: 1521348 - DNA, 15 bp, Homo sapiens
accaacagctgcgga

SEQ ID NO: 1521349 - DNA, 15 bp, Homo sapiens
ccaacagctgcggac

SEQ ID NO: 1521350 - DNA, 15 bp, Homo sapiens
caacagctgcggaca

SEQ ID NO: 1521351 - DNA, 15 bp, Homo sapiens
aacagctgcggacag

SEQ ID NO: 1521352 - DNA, 15 bp, Homo sapiens
acagctgcggacagg

SEQ ID NO: 1521353 - DNA, 15 bp, Homo sapiens
cagctgcggacaggc

SEQ ID NO: 1521354 - DNA, 15 bp, Homo sapiens
agctgcggacaggcg

SEQ ID NO: 1521355 - DNA, 15 bp, Homo sapiens
gctgcggacaggcga

SEQ ID NO: 1521356 - DNA, 15 bp, Homo sapiens
ctgcggacaggcgag

SEQ ID NO: 1521357 - DNA, 15 bp, Homo sapiens
tgcggacaggcgagg

SEQ ID NO: 1521358 - DNA, 15 bp, Homo sapiens
gcggacaggcgaggt

SEQ ID NO: 1521359 - DNA, 15 bp, Homo sapiens
cggacaggcgaggtg

SEQ ID NO: 1521360 - DNA, 15 bp, Homo sapiens
ggacaggcgaggtgc

SEQ ID NO: 1521361 - DNA, 15 bp, Homo sapiens
gacaggcgaggtgct

SEQ ID NO: 1521362 - DNA, 15 bp, Homo sapiens
acaggcgaggtgctg

SEQ ID NO: 1521363 - DNA, 15 bp, Homo sapiens
caggcgaggtgctga

SEQ ID NO: 1521364 - DNA, 15 bp, Homo sapiens
aggcgaggtgctgat

SEQ ID NO: 1521365 - DNA, 15 bp, Homo sapiens
ggcgaggtgctgatc

SEQ ID NO: 1521366 - DNA, 15 bp, Homo sapiens
gcgaggtgctgatca

SEQ ID NO: 1521367 - DNA, 15 bp, Homo sapiens
cgaggtgctgatcat

SEQ ID NO: 1521368 - DNA, 15 bp, Homo sapiens
gaggtgctgatcatc

SEQ ID NO: 1521369 - DNA, 15 bp, Homo sapiens
aggtgctgatcatcg

SEQ ID NO: 1521370 - DNA, 15 bp, Homo sapiens
ggtgctgatcatcgt

SEQ ID NO: 1521371 - DNA, 15 bp, Homo sapiens
gtgctgatcatcgtc

SEQ ID NO: 1521372 - DNA, 15 bp, Homo sapiens
tgctgatcatcgtcg

SEQ ID NO: 1521373 - DNA, 15 bp, Homo sapiens
gctgatcatcgtcgt

SEQ ID NO: 1521374 - DNA, 15 bp, Homo sapiens
ctgatcatcgtcgtg

SEQ ID NO: 1521375 - DNA, 15 bp, Homo sapiens
tgatcatcgtcgtgg

SEQ ID NO: 1521376 - DNA, 15 bp, Homo sapiens
gatcatcgtcgtggt

SEQ ID NO: 1521377 - DNA, 15 bp, Homo sapiens
atcatcgtcgtggtc

SEQ ID NO: 1521378 - DNA, 15 bp, Homo sapiens
tcatcgtcgtggtcc

SEQ ID NO: 1521379 - DNA, 15 bp, Homo sapiens
catcgtcgtggtcct

SEQ ID NO: 1521380 - DNA, 15 bp, Homo sapiens
atcgtcgtggtcctg

SEQ ID NO: 1521381 - DNA, 15 bp, Homo sapiens
tcgtcgtggtcctgt

SEQ ID NO: 1521382 - DNA, 15 bp, Homo sapiens
cgtcgtggtcctgtt

SEQ ID NO: 1521383 - DNA, 15 bp, Homo sapiens
gtcgtggtcctgttc

SEQ ID NO: 1521384 - DNA, 15 bp, Homo sapiens
tcgtggtcctgttca

SEQ ID NO: 1521385 - DNA, 15 bp, Homo sapiens
cgtggtcctgttcat

SEQ ID NO: 1521386 - DNA, 15 bp, Homo sapiens
gtggtcctgttcatg

SEQ ID NO: 1521387 - DNA, 15 bp, Homo sapiens
tggtcctgttcatgt

SEQ ID NO: 1521388 - DNA, 15 bp, Homo sapiens
ggtcctgttcatgtg

SEQ ID NO: 1521389 - DNA, 15 bp, Homo sapiens
gtcctgttcatgtgg

SEQ ID NO: 1521390 - DNA, 15 bp, Homo sapiens
tcctgttcatgtggg

SEQ ID NO: 1521391 - DNA, 15 bp, Homo sapiens
cctgttcatgtgggc

SEQ ID NO: 1521392 - DNA, 15 bp, Homo sapiens
ctgttcatgtgggca

SEQ ID NO: 1521393 - DNA, 15 bp, Homo sapiens
tgttcatgtgggcag

SEQ ID NO: 1521394 - DNA, 15 bp, Homo sapiens
gttcatgtgggcagg

SEQ ID NO: 1521395 - DNA, 15 bp, Homo sapiens
ttcatgtgggcaggt

SEQ ID NO: 1521396 - DNA, 15 bp, Homo sapiens
tcatgtgggcaggtg

SEQ ID NO: 1521397 - DNA, 15 bp, Homo sapiens
catgtgggcaggtga

SEQ ID NO: 1521398 - DNA, 15 bp, Homo sapiens
atgtgggcaggtgag

SEQ ID NO: 1521399 - DNA, 15 bp, Homo sapiens
tgtgggcaggtgagt

SEQ ID NO: 1521400 - DNA, 15 bp, Homo sapiens
gtgggcaggtgagtc

SEQ ID NO: 1521401 - DNA, 15 bp, Homo sapiens
tgggcaggtgagtct

SEQ ID NO: 1521402 - DNA, 15 bp, Homo sapiens
gggcaggtgagtctg

SEQ ID NO: 1521403 - DNA, 15 bp, Homo sapiens
ggcaggtgagtctgg

SEQ ID NO: 1521404 - DNA, 15 bp, Homo sapiens
gcaggtgagtctggc

SEQ ID NO: 1521405 - DNA, 15 bp, Homo sapiens
caggtgagtctggcc

SEQ ID NO: 1521406 - DNA, 15 bp, Homo sapiens
aggtgagtctggcct

SEQ ID NO: 1521407 - DNA, 15 bp, Homo sapiens
ggtgagtctggcctc

SEQ ID NO: 1521408 - DNA, 15 bp, Homo sapiens
gtgagtctggcctcc

SEQ ID NO: 1521409 - DNA, 15 bp, Homo sapiens
tgagtctggcctccg

SEQ ID NO: 1521410 - DNA, 15 bp, Homo sapiens
gagtctggcctccga

SEQ ID NO: 1521411 - DNA, 15 bp, Homo sapiens
agtctggcctccgag

SEQ ID NO: 1521412 - DNA, 15 bp, Homo sapiens
gtctggcctccgaga

SEQ ID NO: 1521413 - DNA, 15 bp, Homo sapiens
tctggcctccgagac

SEQ ID NO: 1521414 - DNA, 15 bp, Homo sapiens
ctggcctccgagacc

SEQ ID NO: 1521415 - DNA, 15 bp, Homo sapiens
tggcctccgagacct

SEQ ID NO: 1521416 - DNA, 15 bp, Homo sapiens
ggcctccgagacctt

SEQ ID NO: 1521417 - DNA, 15 bp, Homo sapiens
gcctccgagaccttc

SEQ ID NO: 1521418 - DNA, 15 bp, Homo sapiens
cctccgagaccttct

SEQ ID NO: 1521419 - DNA, 15 bp, Homo sapiens
ctccgagaccttctt

SEQ ID NO: 1521420 - DNA, 15 bp, Homo sapiens
tccgagaccttcttc

SEQ ID NO: 1521421 - DNA, 15 bp, Homo sapiens
tgtcccctagttttt

SEQ ID NO: 1521422 - DNA, 15 bp, Homo sapiens
gtcccctagtttttc

SEQ ID NO: 1521423 - DNA, 15 bp, Homo sapiens
tcccctagtttttca

SEQ ID NO: 1521424 - DNA, 15 bp, Homo sapiens
cccctagtttttcag

SEQ ID NO: 1521425 - DNA, 15 bp, Homo sapiens
ccctagtttttcaga

SEQ ID NO: 1521426 - DNA, 15 bp, Homo sapiens
cctagtttttcagaa

SEQ ID NO: 1521427 - DNA, 15 bp, Homo sapiens
ctagtttttcagaat

SEQ ID NO: 1521428 - DNA, 15 bp, Homo sapiens
tagtttttcagaatg

SEQ ID NO: 1521429 - DNA, 15 bp, Homo sapiens
agtttttcagaatgg

SEQ ID NO: 1521430 - DNA, 15 bp, Homo sapiens
gtttttcagaatggg

SEQ ID NO: 1521431 - DNA, 15 bp, Homo sapiens
tttttcagaatgggc

SEQ ID NO: 1521432 - DNA, 15 bp, Homo sapiens
ttttcagaatgggcc

SEQ ID NO: 1521433 - DNA, 15 bp, Homo sapiens
tttcagaatgggcct

SEQ ID NO: 1521434 - DNA, 15 bp, Homo sapiens
ttcagaatgggcctt

SEQ ID NO: 1521435 - DNA, 15 bp, Homo sapiens
tcagaatgggccttc

SEQ ID NO: 1521436 - DNA, 15 bp, Homo sapiens
cagaatgggccttct

SEQ ID NO: 1521437 - DNA, 15 bp, Homo sapiens
agaatgggccttctc

SEQ ID NO: 1521438 - DNA, 15 bp, Homo sapiens
gaatgggccttctca

SEQ ID NO: 1521439 - DNA, 15 bp, Homo sapiens
aatgggccttctcaa

SEQ ID NO: 1521440 - DNA, 15 bp, Homo sapiens
atgggccttctcaag

SEQ ID NO: 1521441 - DNA, 15 bp, Homo sapiens
tgggccttctcaaga

SEQ ID NO: 1521442 - DNA, 15 bp, Homo sapiens
gggccttctcaagaa

SEQ ID NO: 1521443 - DNA, 15 bp, Homo sapiens
ggccttctcaagaat

SEQ ID NO: 1521444 - DNA, 15 bp, Homo sapiens
gccttctcaagaatg

SEQ ID NO: 1521445 - DNA, 15 bp, Homo sapiens
ccttctcaagaatgc

SEQ ID NO: 1521446 - DNA, 15 bp, Homo sapiens
cttctcaagaatgca

SEQ ID NO: 1521447 - DNA, 15 bp, Homo sapiens
ttctcaagaatgcat

SEQ ID NO: 1521448 - DNA, 15 bp, Homo sapiens
tctcaagaatgcatt

SEQ ID NO: 1521449 - DNA, 15 bp, Homo sapiens
ctcaagaatgcattt

SEQ ID NO: 1521450 - DNA, 15 bp, Homo sapiens
tcaagaatgcatttt

SEQ ID NO: 1521451 - DNA, 15 bp, Homo sapiens
caagaatgcattttt

SEQ ID NO: 1521452 - DNA, 15 bp, Homo sapiens
aagaatgcattttta

SEQ ID NO: 1521453 - DNA, 15 bp, Homo sapiens
agaatgcatttttaa

SEQ ID NO: 1521454 - DNA, 15 bp, Homo sapiens
gaatgcatttttaag

SEQ ID NO: 1521455 - DNA, 15 bp, Homo sapiens
aatgcatttttaaga

SEQ ID NO: 1521456 - DNA, 15 bp, Homo sapiens
atgcatttttaagag

SEQ ID NO: 1521457 - DNA, 15 bp, Homo sapiens
tgcatttttaagagt

SEQ ID NO: 1521458 - DNA, 15 bp, Homo sapiens
gcatttttaagagtt

SEQ ID NO: 1521459 - DNA, 15 bp, Homo sapiens
catttttaagagttt

SEQ ID NO: 1521460 - DNA, 15 bp, Homo sapiens
atttttaagagtttt

SEQ ID NO: 1521461 - DNA, 15 bp, Homo sapiens
tttttaagagttttg

SEQ ID NO: 1521462 - DNA, 15 bp, Homo sapiens
ttttaagagttttgg

SEQ ID NO: 1521463 - DNA, 15 bp, Homo sapiens
tttaagagttttggt

SEQ ID NO: 1521464 - DNA, 15 bp, Homo sapiens
taagagttttggttc

SEQ ID NO: 1521465 - DNA, 15 bp, Homo sapiens
aagagttttggttca

SEQ ID NO: 1521466 - DNA, 15 bp, Homo sapiens
agagttttggttcaa

SEQ ID NO: 1521467 - DNA, 15 bp, Homo sapiens
gagttttggttcaac

SEQ ID NO: 1521468 - DNA, 15 bp, Homo sapiens
agttttggttcaacc

SEQ ID NO: 1521469 - DNA, 15 bp, Homo sapiens
gttttggttcaaccc

SEQ ID NO: 1521470 - DNA, 15 bp, Homo sapiens
ttttggttcaaccct

SEQ ID NO: 1521471 - DNA, 15 bp, Homo sapiens
tttggttcaaccctt

SEQ ID NO: 1521472 - DNA, 15 bp, Homo sapiens
ttggttcaacccttt

SEQ ID NO: 1521473 - DNA, 15 bp, Homo sapiens
tggttcaacccttta

SEQ ID NO: 1521474 - DNA, 15 bp, Homo sapiens
ggttcaaccctttac

SEQ ID NO: 1521475 - DNA, 15 bp, Homo sapiens
gttcaaccctttaca

SEQ ID NO: 1521476 - DNA, 15 bp, Homo sapiens
ttcaaccctttacaa

SEQ ID NO: 1521477 - DNA, 15 bp, Homo sapiens
tcaaccctttacaaa

SEQ ID NO: 1521478 - DNA, 15 bp, Homo sapiens
caaccctttacaaaa

SEQ ID NO: 1521479 - DNA, 15 bp, Homo sapiens
aaccctttacaaaaa

SEQ ID NO: 1521480 - DNA, 15 bp, Homo sapiens
accctttacaaaaat

SEQ ID NO: 1521481 - DNA, 15 bp, Homo sapiens
ccctttacaaaaatg

SEQ ID NO: 1521482 - DNA, 15 bp, Homo sapiens
cctttacaaaaatgt

SEQ ID NO: 1521483 - DNA, 15 bp, Homo sapiens
ctttacaaaaatgtg

SEQ ID NO: 1521484 - DNA, 15 bp, Homo sapiens
tttacaaaaatgtgc

SEQ ID NO: 1521485 - DNA, 15 bp, Homo sapiens
ttacaaaaatgtgca

SEQ ID NO: 1521486 - DNA, 15 bp, Homo sapiens
tacaaaaatgtgcaa

SEQ ID NO: 1521487 - DNA, 15 bp, Homo sapiens
acaaaaatgtgcaaa

SEQ ID NO: 1521488 - DNA, 15 bp, Homo sapiens
caaaaatgtgcaaaa

SEQ ID NO: 1521489 - DNA, 15 bp, Homo sapiens
aaaaatgtgcaaaat

SEQ ID NO: 1521490 - DNA, 15 bp, Homo sapiens
aaaatgtgcaaaatc

SEQ ID NO: 1521491 - DNA, 15 bp, Homo sapiens
aaatgtgcaaaatct

SEQ ID NO: 1521492 - DNA, 15 bp, Homo sapiens
aatgtgcaaaatctc

SEQ ID NO: 1521493 - DNA, 15 bp, Homo sapiens
atgtgcaaaatctca

SEQ ID NO: 1521494 - DNA, 15 bp, Homo sapiens
tgtgcaaaatctcac

SEQ ID NO: 1521495 - DNA, 15 bp, Homo sapiens
gtgcaaaatctcacc

SEQ ID NO: 1521496 - DNA, 15 bp, Homo sapiens
tgcaaaatctcacca

SEQ ID NO: 1521497 - DNA, 15 bp, Homo sapiens
gcaaaatctcaccaa

SEQ ID NO: 1521498 - DNA, 15 bp, Homo sapiens
caaaatctcaccaac

SEQ ID NO: 1521499 - DNA, 15 bp, Homo sapiens
aaaatctcaccaacc

SEQ ID NO: 1521500 - DNA, 15 bp, Homo sapiens
aaatctcaccaaccc

SEQ ID NO: 1521501 - DNA, 15 bp, Homo sapiens
aatctcaccaaccca

SEQ ID NO: 1521502 - DNA, 15 bp, Homo sapiens
atctcaccaacccat

SEQ ID NO: 1521503 - DNA, 15 bp, Homo sapiens
tctcaccaacccatt

SEQ ID NO: 1521504 - DNA, 15 bp, Homo sapiens
ctcaccaacccatta

SEQ ID NO: 1521505 - DNA, 15 bp, Homo sapiens
tcaccaacccattaa

SEQ ID NO: 1521506 - DNA, 15 bp, Homo sapiens
caccaacccattaac

SEQ ID NO: 1521507 - DNA, 15 bp, Homo sapiens
accaacccattaaca

SEQ ID NO: 1521508 - DNA, 15 bp, Homo sapiens
ccaacccattaacat

SEQ ID NO: 1521509 - DNA, 15 bp, Homo sapiens
caacccattaacatg

SEQ ID NO: 1521510 - DNA, 15 bp, Homo sapiens
aacccattaacatga

SEQ ID NO: 1521511 - DNA, 15 bp, Homo sapiens
acccattaacatgag

SEQ ID NO: 1521512 - DNA, 15 bp, Homo sapiens
cccattaacatgagc

SEQ ID NO: 1521513 - DNA, 15 bp, Homo sapiens
ccattaacatgagct

SEQ ID NO: 1521514 - DNA, 15 bp, Homo sapiens
cattaacatgagctt

SEQ ID NO: 1521515 - DNA, 15 bp, Homo sapiens
attaacatgagcttt

SEQ ID NO: 1521516 - DNA, 15 bp, Homo sapiens
ttaacatgagcttta

SEQ ID NO: 1521517 - DNA, 15 bp, Homo sapiens
taacatgagctttag

SEQ ID NO: 1521518 - DNA, 15 bp, Homo sapiens
aacatgagctttaga

SEQ ID NO: 1521519 - DNA, 15 bp, Homo sapiens
acatgagctttagat

SEQ ID NO: 1521520 - DNA, 15 bp, Homo sapiens
catgagctttagatt

SEQ ID NO: 1521521 - DNA, 15 bp, Homo sapiens
atgagctttagattt

SEQ ID NO: 1521522 - DNA, 15 bp, Homo sapiens
tgagctttagatttc

SEQ ID NO: 1521523 - DNA, 15 bp, Homo sapiens
gagctttagatttct

SEQ ID NO: 1521524 - DNA, 15 bp, Homo sapiens
agctttagatttctg

SEQ ID NO: 1521525 - DNA, 15 bp, Homo sapiens
gctttagatttctga

SEQ ID NO: 1521526 - DNA, 15 bp, Homo sapiens
ctttagatttctgac

SEQ ID NO: 1521527 - DNA, 15 bp, Homo sapiens
tttagatttctgact

SEQ ID NO: 1521528 - DNA, 15 bp, Homo sapiens
ttagatttctgactc

SEQ ID NO: 1521529 - DNA, 15 bp, Homo sapiens
tagatttctgactct

SEQ ID NO: 1521530 - DNA, 15 bp, Homo sapiens
agatttctgactctc

SEQ ID NO: 1521531 - DNA, 15 bp, Homo sapiens
gatttctgactctct

SEQ ID NO: 1521532 - DNA, 15 bp, Homo sapiens
atttctgactctctt

SEQ ID NO: 1521533 - DNA, 15 bp, Homo sapiens
tttctgactctcttt

SEQ ID NO: 1521534 - DNA, 15 bp, Homo sapiens
ttctgactctcttta

SEQ ID NO: 1521535 - DNA, 15 bp, Homo sapiens
tctgactctctttaa

SEQ ID NO: 1521536 - DNA, 15 bp, Homo sapiens
ctgactctctttaaa

SEQ ID NO: 1521537 - DNA, 15 bp, Homo sapiens
tgactctctttaaac

SEQ ID NO: 1521538 - DNA, 15 bp, Homo sapiens
gactctctttaaacc

SEQ ID NO: 1521539 - DNA, 15 bp, Homo sapiens
actctctttaaacct

SEQ ID NO: 1521540 - DNA, 15 bp, Homo sapiens
ctctctttaaaccta

SEQ ID NO: 1521541 - DNA, 15 bp, Homo sapiens
tctctttaaacctat

SEQ ID NO: 1521542 - DNA, 15 bp, Homo sapiens
ctctttaaacctatt

SEQ ID NO: 1521543 - DNA, 15 bp, Homo sapiens
tctttaaacctattt

SEQ ID NO: 1521544 - DNA, 15 bp, Homo sapiens
ctttaaacctatttg

SEQ ID NO: 1521545 - DNA, 15 bp, Homo sapiens
tttaaacctatttga

SEQ ID NO: 1521546 - DNA, 15 bp, Homo sapiens
ttaaacctatttgat

SEQ ID NO: 1521547 - DNA, 15 bp, Homo sapiens
taaacctatttgatg

SEQ ID NO: 1521548 - DNA, 15 bp, Homo sapiens
aaacctatttgatgg

SEQ ID NO: 1521549 - DNA, 15 bp, Homo sapiens
aacctatttgatggt

SEQ ID NO: 1521550 - DNA, 15 bp, Homo sapiens
acctatttgatggtt

SEQ ID NO: 1521551 - DNA, 15 bp, Homo sapiens
cctatttgatggtta

SEQ ID NO: 1521552 - DNA, 15 bp, Homo sapiens
ctatttgatggttac

SEQ ID NO: 1521553 - DNA, 15 bp, Homo sapiens
tatttgatggttact

SEQ ID NO: 1521554 - DNA, 15 bp, Homo sapiens
atttgatggttactg

SEQ ID NO: 1521555 - DNA, 15 bp, Homo sapiens
tttgatggttactgg

SEQ ID NO: 1521556 - DNA, 15 bp, Homo sapiens
ttgatggttactgga

SEQ ID NO: 1521557 - DNA, 15 bp, Homo sapiens
tgatggttactggaa

SEQ ID NO: 1521558 - DNA, 15 bp, Homo sapiens
gatggttactggaat

SEQ ID NO: 1521559 - DNA, 15 bp, Homo sapiens
atggttactggaatg

SEQ ID NO: 1521560 - DNA, 15 bp, Homo sapiens
tggttactggaatgt

SEQ ID NO: 1521561 - DNA, 15 bp, Homo sapiens
ggttactggaatgtg

SEQ ID NO: 1521562 - DNA, 15 bp, Homo sapiens
gttactggaatgtgc

SEQ ID NO: 1521563 - DNA, 15 bp, Homo sapiens
ttactggaatgtgca

SEQ ID NO: 1521564 - DNA, 15 bp, Homo sapiens
tactggaatgtgcat

SEQ ID NO: 1521565 - DNA, 15 bp, Homo sapiens
actggaatgtgcatt

SEQ ID NO: 1521566 - DNA, 15 bp, Homo sapiens
ctggaatgtgcattt

SEQ ID NO: 1521567 - DNA, 15 bp, Homo sapiens
tggaatgtgcattta

SEQ ID NO: 1521568 - DNA, 15 bp, Homo sapiens
ggaatgtgcatttaa

SEQ ID NO: 1521569 - DNA, 15 bp, Homo sapiens
gaatgtgcatttaag

SEQ ID NO: 1521570 - DNA, 15 bp, Homo sapiens
aatgtgcatttaagt

SEQ ID NO: 1521571 - DNA, 15 bp, Homo sapiens
atgtgcatttaagta

SEQ ID NO: 1521572 - DNA, 15 bp, Homo sapiens
tgtgcatttaagtag

SEQ ID NO: 1521573 - DNA, 15 bp, Homo sapiens
gtgcatttaagtagc

SEQ ID NO: 1521574 - DNA, 15 bp, Homo sapiens
tgcatttaagtagcc

SEQ ID NO: 1521575 - DNA, 15 bp, Homo sapiens
gcatttaagtagcct

SEQ ID NO: 1521576 - DNA, 15 bp, Homo sapiens
catttaagtagcctc

SEQ ID NO: 1521577 - DNA, 15 bp, Homo sapiens
atttaagtagcctcc

SEQ ID NO: 1521578 - DNA, 15 bp, Homo sapiens
tttaagtagcctcca

SEQ ID NO: 1521579 - DNA, 15 bp, Homo sapiens
ttaagtagcctccaa

SEQ ID NO: 1521580 - DNA, 15 bp, Homo sapiens
taagtagcctccaag

SEQ ID NO: 1521581 - DNA, 15 bp, Homo sapiens
aagtagcctccaaga

SEQ ID NO: 1521582 - DNA, 15 bp, Homo sapiens
agtagcctccaagaa

SEQ ID NO: 1521583 - DNA, 15 bp, Homo sapiens
gtagcctccaagaac

SEQ ID NO: 1521584 - DNA, 15 bp, Homo sapiens
tagcctccaagaaca

SEQ ID NO: 1521585 - DNA, 15 bp, Homo sapiens
agcctccaagaacaa

SEQ ID NO: 1521586 - DNA, 15 bp, Homo sapiens
cctccaagaacaaat

SEQ ID NO: 1521587 - DNA, 15 bp, Homo sapiens
ctccaagaacaaatt

SEQ ID NO: 1521588 - DNA, 15 bp, Homo sapiens
tccaagaacaaattg

SEQ ID NO: 1521589 - DNA, 15 bp, Homo sapiens
ccaagaacaaattgc

SEQ ID NO: 1521590 - DNA, 15 bp, Homo sapiens
caagaacaaattgct

SEQ ID NO: 1521591 - DNA, 15 bp, Homo sapiens
aagaacaaattgctt

SEQ ID NO: 1521592 - DNA, 15 bp, Homo sapiens
agaacaaattgcttc

SEQ ID NO: 1521593 - DNA, 15 bp, Homo sapiens
gaacaaattgcttct

SEQ ID NO: 1521594 - DNA, 15 bp, Homo sapiens
aacaaattgcttcta

SEQ ID NO: 1521595 - DNA, 15 bp, Homo sapiens
acaaattgcttctat

SEQ ID NO: 1521596 - DNA, 15 bp, Homo sapiens
caaattgcttctata

SEQ ID NO: 1521597 - DNA, 15 bp, Homo sapiens
aaattgcttctataa

SEQ ID NO: 1521598 - DNA, 15 bp, Homo sapiens
aattgcttctataaa

SEQ ID NO: 1521599 - DNA, 15 bp, Homo sapiens
attgcttctataaat

SEQ ID NO: 1521600 - DNA, 15 bp, Homo sapiens
ttgcttctataaatg

SEQ ID NO: 1521601 - DNA, 15 bp, Homo sapiens
tgcttctataaatgg

SEQ ID NO: 1521602 - DNA, 15 bp, Homo sapiens
gcttctataaatggg

SEQ ID NO: 1521603 - DNA, 15 bp, Homo sapiens
cttctataaatggga

SEQ ID NO: 1521604 - DNA, 15 bp, Homo sapiens
ttctataaatgggac

SEQ ID NO: 1521605 - DNA, 15 bp, Homo sapiens
tctataaatgggaca

SEQ ID NO: 1521606 - DNA, 15 bp, Homo sapiens
ctataaatgggacac

SEQ ID NO: 1521607 - DNA, 15 bp, Homo sapiens
tataaatgggacacc

SEQ ID NO: 1521608 - DNA, 15 bp, Homo sapiens
ataaatgggacaccc

SEQ ID NO: 1521609 - DNA, 15 bp, Homo sapiens
taaatgggacaccct

SEQ ID NO: 1521610 - DNA, 15 bp, Homo sapiens
aaatgggacaccctg

SEQ ID NO: 1521611 - DNA, 15 bp, Homo sapiens
aatgggacaccctgc

SEQ ID NO: 1521612 - DNA, 15 bp, Homo sapiens
atgggacaccctgct

SEQ ID NO: 1521613 - DNA, 15 bp, Homo sapiens
tgggacaccctgctc

SEQ ID NO: 1521614 - DNA, 15 bp, Homo sapiens
gggacaccctgctca

SEQ ID NO: 1521615 - DNA, 15 bp, Homo sapiens
ggacaccctgctcac

SEQ ID NO: 1521616 - DNA, 15 bp, Homo sapiens
gacaccctgctcacc

SEQ ID NO: 1521617 - DNA, 15 bp, Homo sapiens
acaccctgctcaccc

SEQ ID NO: 1521618 - DNA, 15 bp, Homo sapiens
caccctgctcaccct

SEQ ID NO: 1521619 - DNA, 15 bp, Homo sapiens
accctgctcaccctc

SEQ ID NO: 1521620 - DNA, 15 bp, Homo sapiens
ccctgctcaccctcc

SEQ ID NO: 1521621 - DNA, 15 bp, Homo sapiens
cctgctcaccctcct

SEQ ID NO: 1521622 - DNA, 15 bp, Homo sapiens
ctgctcaccctcctc

SEQ ID NO: 1521623 - DNA, 15 bp, Homo sapiens
tgctcaccctcctcc

SEQ ID NO: 1521624 - DNA, 15 bp, Homo sapiens
gctcaccctcctccc

SEQ ID NO: 1521625 - DNA, 15 bp, Homo sapiens
ctcaccctcctccct

SEQ ID NO: 1521626 - DNA, 15 bp, Homo sapiens
tcaccctcctccctt

SEQ ID NO: 1521627 - DNA, 15 bp, Homo sapiens
caccctcctcccttg

SEQ ID NO: 1521628 - DNA, 15 bp, Homo sapiens
accctcctcccttgc

SEQ ID NO: 1521629 - DNA, 15 bp, Homo sapiens
ccctcctcccttgcc

SEQ ID NO: 1521630 - DNA, 15 bp, Homo sapiens
cctcctcccttgccc

SEQ ID NO: 1521631 - DNA, 15 bp, Homo sapiens
ctcctcccttgccca

SEQ ID NO: 1521632 - DNA, 15 bp, Homo sapiens
tcctcccttgcccag

SEQ ID NO: 1521633 - DNA, 15 bp, Homo sapiens
cctcccttgcccagc

SEQ ID NO: 1521634 - DNA, 15 bp, Homo sapiens
ctcccttgcccagct

SEQ ID NO: 1521635 - DNA, 15 bp, Homo sapiens
tcccttgcccagctc

SEQ ID NO: 1521636 - DNA, 15 bp, Homo sapiens
cccttgcccagctcc

SEQ ID NO: 1521637 - DNA, 15 bp, Homo sapiens
ccttgcccagctcca

SEQ ID NO: 1521638 - DNA, 15 bp, Homo sapiens
cttgcccagctccat

SEQ ID NO: 1521639 - DNA, 15 bp, Homo sapiens
ttgcccagctccatc

SEQ ID NO: 1521640 - DNA, 15 bp, Homo sapiens
tgcccagctccatca

SEQ ID NO: 1521641 - DNA, 15 bp, Homo sapiens
gcccagctccatcaa

SEQ ID NO: 1521642 - DNA, 15 bp, Homo sapiens
cccagctccatcaag

SEQ ID NO: 1521643 - DNA, 15 bp, Homo sapiens
ccagctccatcaagc

SEQ ID NO: 1521644 - DNA, 15 bp, Homo sapiens
cagctccatcaagct

SEQ ID NO: 1521645 - DNA, 15 bp, Homo sapiens
agctccatcaagctc

SEQ ID NO: 1521646 - DNA, 15 bp, Homo sapiens
gctccatcaagctcc

SEQ ID NO: 1521647 - DNA, 15 bp, Homo sapiens
ctccatcaagctcca

SEQ ID NO: 1521648 - DNA, 15 bp, Homo sapiens
tccatcaagctccat

SEQ ID NO: 1521649 - DNA, 15 bp, Homo sapiens
ccatcaagctccatc

SEQ ID NO: 1521650 - DNA, 15 bp, Homo sapiens
catcaagctccatcc

SEQ ID NO: 1521651 - DNA, 15 bp, Homo sapiens
atcaagctccatcca

SEQ ID NO: 1521652 - DNA, 15 bp, Homo sapiens
tcaagctccatccat

SEQ ID NO: 1521653 - DNA, 15 bp, Homo sapiens
caagctccatccata

SEQ ID NO: 1521654 - DNA, 15 bp, Homo sapiens
aagctccatccatac

SEQ ID NO: 1521655 - DNA, 15 bp, Homo sapiens
agctccatccataca

SEQ ID NO: 1521656 - DNA, 15 bp, Homo sapiens
gctccatccatacaa

SEQ ID NO: 1521657 - DNA, 15 bp, Homo sapiens
ctccatccatacaaa

SEQ ID NO: 1521658 - DNA, 15 bp, Homo sapiens
tccatccatacaaaa

SEQ ID NO: 1521659 - DNA, 15 bp, Homo sapiens
ccatccatacaaaat

SEQ ID NO: 1521660 - DNA, 15 bp, Homo sapiens
catccatacaaaata

SEQ ID NO: 1521661 - DNA, 15 bp, Homo sapiens
atccatacaaaatat

SEQ ID NO: 1521662 - DNA, 15 bp, Homo sapiens
tccatacaaaatatt

SEQ ID NO: 1521663 - DNA, 15 bp, Homo sapiens
ccatacaaaatatta

SEQ ID NO: 1521664 - DNA, 15 bp, Homo sapiens
catacaaaatattac

SEQ ID NO: 1521665 - DNA, 15 bp, Homo sapiens
atacaaaatattacc

SEQ ID NO: 1521666 - DNA, 15 bp, Homo sapiens
tacaaaatattacca

SEQ ID NO: 1521667 - DNA, 15 bp, Homo sapiens
acaaaatattaccaa

SEQ ID NO: 1521668 - DNA, 15 bp, Homo sapiens
caaaatattaccaaa

SEQ ID NO: 1521669 - DNA, 15 bp, Homo sapiens
aaaatattaccaaac

SEQ ID NO: 1521670 - DNA, 15 bp, Homo sapiens
aaatattaccaaacc

SEQ ID NO: 1521671 - DNA, 15 bp, Homo sapiens
aatattaccaaacct

SEQ ID NO: 1521672 - DNA, 15 bp, Homo sapiens
atattaccaaacctt

SEQ ID NO: 1521673 - DNA, 15 bp, Homo sapiens
tattaccaaaccttc

SEQ ID NO: 1521674 - DNA, 15 bp, Homo sapiens
attaccaaaccttca

SEQ ID NO: 1521675 - DNA, 15 bp, Homo sapiens
ttaccaaaccttcaa

SEQ ID NO: 1521676 - DNA, 15 bp, Homo sapiens
taccaaaccttcaaa

SEQ ID NO: 1521677 - DNA, 15 bp, Homo sapiens
accaaaccttcaaat

SEQ ID NO: 1521678 - DNA, 15 bp, Homo sapiens
ccaaaccttcaaatg

SEQ ID NO: 1521679 - DNA, 15 bp, Homo sapiens
caaaccttcaaatgt

SEQ ID NO: 1521680 - DNA, 15 bp, Homo sapiens
aaaccttcaaatgtg

SEQ ID NO: 1521681 - DNA, 15 bp, Homo sapiens
aaccttcaaatgtga

SEQ ID NO: 1521682 - DNA, 15 bp, Homo sapiens
accttcaaatgtgac

SEQ ID NO: 1521683 - DNA, 15 bp, Homo sapiens
ccttcaaatgtgact

SEQ ID NO: 1521684 - DNA, 15 bp, Homo sapiens
cttcaaatgtgactt

SEQ ID NO: 1521685 - DNA, 15 bp, Homo sapiens
aaatatcaactgaca

SEQ ID NO: 1521686 - DNA, 15 bp, Homo sapiens
aatatcaactgacac

SEQ ID NO: 1521687 - DNA, 15 bp, Homo sapiens
atatcaactgacacc

SEQ ID NO: 1521688 - DNA, 15 bp, Homo sapiens
tatcaactgacacca

SEQ ID NO: 1521689 - DNA, 15 bp, Homo sapiens
atcaactgacaccac

SEQ ID NO: 1521690 - DNA, 15 bp, Homo sapiens
tcaactgacaccaca

SEQ ID NO: 1521691 - DNA, 15 bp, Homo sapiens
caactgacaccacaa

SEQ ID NO: 1521692 - DNA, 15 bp, Homo sapiens
aactgacaccacaat

SEQ ID NO: 1521693 - DNA, 15 bp, Homo sapiens
actgacaccacaata

SEQ ID NO: 1521694 - DNA, 15 bp, Homo sapiens
ctgacaccacaatag

SEQ ID NO: 1521695 - DNA, 15 bp, Homo sapiens
tgacaccacaatagc

SEQ ID NO: 1521696 - DNA, 15 bp, Homo sapiens
gacaccacaatagca

SEQ ID NO: 1521697 - DNA, 15 bp, Homo sapiens
acaccacaatagcac

SEQ ID NO: 1521698 - DNA, 15 bp, Homo sapiens
caccacaatagcact

SEQ ID NO: 1521699 - DNA, 15 bp, Homo sapiens
accacaatagcacta

SEQ ID NO: 1521700 - DNA, 15 bp, Homo sapiens
ccacaatagcactag

SEQ ID NO: 1521701 - DNA, 15 bp, Homo sapiens
cacaatagcactagc

SEQ ID NO: 1521702 - DNA, 15 bp, Homo sapiens
acaatagcactagcc

SEQ ID NO: 1521703 - DNA, 15 bp, Homo sapiens
caatagcactagcct

SEQ ID NO: 1521704 - DNA, 15 bp, Homo sapiens
aatagcactagcctg

SEQ ID NO: 1521705 - DNA, 15 bp, Homo sapiens
atagcactagcctgc

SEQ ID NO: 1521706 - DNA, 15 bp, Homo sapiens
tagcactagcctgcc

SEQ ID NO: 1521707 - DNA, 15 bp, Homo sapiens
agcactagcctgccc

SEQ ID NO: 1521708 - DNA, 15 bp, Homo sapiens
gcactagcctgccct

SEQ ID NO: 1521709 - DNA, 15 bp, Homo sapiens
cactagcctgcccta

SEQ ID NO: 1521710 - DNA, 15 bp, Homo sapiens
actagcctgccctag

SEQ ID NO: 1521711 - DNA, 15 bp, Homo sapiens
ctagcctgccctaga

SEQ ID NO: 1521712 - DNA, 15 bp, Homo sapiens
tagcctgccctagag

SEQ ID NO: 1521713 - DNA, 15 bp, Homo sapiens
agcctgccctagagt

SEQ ID NO: 1521714 - DNA, 15 bp, Homo sapiens
gcctgccctagagtc

SEQ ID NO: 1521715 - DNA, 15 bp, Homo sapiens
cctgccctagagtca

SEQ ID NO: 1521716 - DNA, 15 bp, Homo sapiens
ctgccctagagtcaa

SEQ ID NO: 1521717 - DNA, 15 bp, Homo sapiens
tgccctagagtcaag

SEQ ID NO: 1521718 - DNA, 15 bp, Homo sapiens
gccctagagtcaaga

SEQ ID NO: 1521719 - DNA, 15 bp, Homo sapiens
ccctagagtcaagac

SEQ ID NO: 1521720 - DNA, 15 bp, Homo sapiens
cctagagtcaagact

SEQ ID NO: 1521721 - DNA, 15 bp, Homo sapiens
ctagagtcaagactc

SEQ ID NO: 1521722 - DNA, 15 bp, Homo sapiens
tagagtcaagactct

SEQ ID NO: 1521723 - DNA, 15 bp, Homo sapiens
agagtcaagactctg

SEQ ID NO: 1521724 - DNA, 15 bp, Homo sapiens
gagtcaagactctgg

SEQ ID NO: 1521725 - DNA, 15 bp, Homo sapiens
agtcaagactctggg

SEQ ID NO: 1521726 - DNA, 15 bp, Homo sapiens
gtcaagactctgggt

SEQ ID NO: 1521727 - DNA, 15 bp, Homo sapiens
tcaagactctgggtg

SEQ ID NO: 1521728 - DNA, 15 bp, Homo sapiens
caagactctgggtgg

SEQ ID NO: 1521729 - DNA, 15 bp, Homo sapiens
aagactctgggtggg

SEQ ID NO: 1521730 - DNA, 15 bp, Homo sapiens
agactctgggtgggc

SEQ ID NO: 1521731 - DNA, 15 bp, Homo sapiens
gactctgggtgggca

SEQ ID NO: 1521732 - DNA, 15 bp, Homo sapiens
actctgggtgggcag

SEQ ID NO: 1521733 - DNA, 15 bp, Homo sapiens
ctctgggtgggcagc

SEQ ID NO: 1521734 - DNA, 15 bp, Homo sapiens
tctgggtgggcagct

SEQ ID NO: 1521735 - DNA, 15 bp, Homo sapiens
ctgggtgggcagctc

SEQ ID NO: 1521736 - DNA, 15 bp, Homo sapiens
tgggtgggcagctct

SEQ ID NO: 1521737 - DNA, 15 bp, Homo sapiens
gggtgggcagctctt

SEQ ID NO: 1521738 - DNA, 15 bp, Homo sapiens
ggtgggcagctcttc

SEQ ID NO: 1521739 - DNA, 15 bp, Homo sapiens
gtgggcagctcttca

SEQ ID NO: 1521740 - DNA, 15 bp, Homo sapiens
tgggcagctcttcaa

SEQ ID NO: 1521741 - DNA, 15 bp, Homo sapiens
gggcagctcttcaat

SEQ ID NO: 1521742 - DNA, 15 bp, Homo sapiens
ggcagctcttcaata

SEQ ID NO: 1521743 - DNA, 15 bp, Homo sapiens
gcagctcttcaataa

SEQ ID NO: 1521744 - DNA, 15 bp, Homo sapiens
cagctcttcaataaa

SEQ ID NO: 1521745 - DNA, 15 bp, Homo sapiens
agctcttcaataaag

SEQ ID NO: 1521746 - DNA, 15 bp, Homo sapiens
gctcttcaataaaga

SEQ ID NO: 1521747 - DNA, 15 bp, Homo sapiens
ctcttcaataaagac

SEQ ID NO: 1521748 - DNA, 15 bp, Homo sapiens
tcttcaataaagaca

SEQ ID NO: 1521749 - DNA, 15 bp, Homo sapiens
cttcaataaagacag

SEQ ID NO: 1521750 - DNA, 15 bp, Homo sapiens
ttcaataaagacagc

SEQ ID NO: 1521751 - DNA, 15 bp, Homo sapiens
tcaataaagacagca

SEQ ID NO: 1521752 - DNA, 15 bp, Homo sapiens
caataaagacagcaa

SEQ ID NO: 1521753 - DNA, 15 bp, Homo sapiens
aataaagacagcaag

SEQ ID NO: 1521754 - DNA, 15 bp, Homo sapiens
ataaagacagcaagg

SEQ ID NO: 1521755 - DNA, 15 bp, Homo sapiens
taaagacagcaagga

SEQ ID NO: 1521756 - DNA, 15 bp, Homo sapiens
aaagacagcaaggag

SEQ ID NO: 1521757 - DNA, 15 bp, Homo sapiens
aagacagcaaggagg

SEQ ID NO: 1521758 - DNA, 15 bp, Homo sapiens
agacagcaaggaggc

SEQ ID NO: 1521759 - DNA, 15 bp, Homo sapiens
gacagcaaggaggcc

SEQ ID NO: 1521760 - DNA, 15 bp, Homo sapiens
acagcaaggaggcca

SEQ ID NO: 1521761 - DNA, 15 bp, Homo sapiens
cagcaaggaggccat

SEQ ID NO: 1521762 - DNA, 15 bp, Homo sapiens
agcaaggaggccatc

SEQ ID NO: 1521763 - DNA, 15 bp, Homo sapiens
gcaaggaggccatcc

SEQ ID NO: 1521764 - DNA, 15 bp, Homo sapiens
caaggaggccatcct

SEQ ID NO: 1521765 - DNA, 15 bp, Homo sapiens
aaggaggccatcctg

SEQ ID NO: 1521766 - DNA, 15 bp, Homo sapiens
aggaggccatcctga

SEQ ID NO: 1521767 - DNA, 15 bp, Homo sapiens
ggaggccatcctgaa

SEQ ID NO: 1521768 - DNA, 15 bp, Homo sapiens
gaggccatcctgaag

SEQ ID NO: 1521769 - DNA, 15 bp, Homo sapiens
aggccatcctgaaga

SEQ ID NO: 1521770 - DNA, 15 bp, Homo sapiens
ggccatcctgaagag

SEQ ID NO: 1521771 - DNA, 15 bp, Homo sapiens
gccatcctgaagagg

SEQ ID NO: 1521772 - DNA, 15 bp, Homo sapiens
ccatcctgaagaggt

SEQ ID NO: 1521773 - DNA, 15 bp, Homo sapiens
catcctgaagaggta

SEQ ID NO: 1521774 - DNA, 15 bp, Homo sapiens
atcctgaagaggtat

SEQ ID NO: 1521775 - DNA, 15 bp, Homo sapiens
tcctgaagaggtata

SEQ ID NO: 1521776 - DNA, 15 bp, Homo sapiens
cctgaagaggtatat

SEQ ID NO: 1521777 - DNA, 15 bp, Homo sapiens
ctgaagaggtatatc

SEQ ID NO: 1521778 - DNA, 15 bp, Homo sapiens
tgaagaggtatatcc

SEQ ID NO: 1521779 - DNA, 15 bp, Homo sapiens
gaagaggtatatcca

SEQ ID NO: 1521780 - DNA, 15 bp, Homo sapiens
aagaggtatatccac

SEQ ID NO: 1521781 - DNA, 15 bp, Homo sapiens
agaggtatatccacg

SEQ ID NO: 1521782 - DNA, 15 bp, Homo sapiens
gaggtatatccacgt

SEQ ID NO: 1521783 - DNA, 15 bp, Homo sapiens
aggtatatccacgtc

SEQ ID NO: 1521784 - DNA, 15 bp, Homo sapiens
ggtatatccacgtct

SEQ ID NO: 1521785 - DNA, 15 bp, Homo sapiens
gtatatccacgtcta

SEQ ID NO: 1521786 - DNA, 15 bp, Homo sapiens
tatatccacgtctaa

SEQ ID NO: 1521787 - DNA, 15 bp, Homo sapiens
atatccacgtctaac

SEQ ID NO: 1521788 - DNA, 15 bp, Homo sapiens
tatccacgtctaaca

SEQ ID NO: 1521789 - DNA, 15 bp, Homo sapiens
atccacgtctaacag

SEQ ID NO: 1521790 - DNA, 15 bp, Homo sapiens
tccacgtctaacagg

SEQ ID NO: 1521791 - DNA, 15 bp, Homo sapiens
ccacgtctaacaggt

SEQ ID NO: 1521792 - DNA, 15 bp, Homo sapiens
cacgtctaacaggtt

SEQ ID NO: 1521793 - DNA, 15 bp, Homo sapiens
acgtctaacaggtta

SEQ ID NO: 1521794 - DNA, 15 bp, Homo sapiens
cgtctaacaggttac

SEQ ID NO: 1521795 - DNA, 15 bp, Homo sapiens
gtctaacaggttaca

SEQ ID NO: 1521796 - DNA, 15 bp, Homo sapiens
tctaacaggttacaa

SEQ ID NO: 1521797 - DNA, 15 bp, Homo sapiens
ctaacaggttacaag

SEQ ID NO: 1521798 - DNA, 15 bp, Homo sapiens
taacaggttacaaga

SEQ ID NO: 1521799 - DNA, 15 bp, Homo sapiens
aacaggttacaagaa

SEQ ID NO: 1521800 - DNA, 15 bp, Homo sapiens
acaggttacaagaat

SEQ ID NO: 1521801 - DNA, 15 bp, Homo sapiens
caggttacaagaata

SEQ ID NO: 1521802 - DNA, 15 bp, Homo sapiens
aggttacaagaatac

SEQ ID NO: 1521803 - DNA, 15 bp, Homo sapiens
ggttacaagaatact

SEQ ID NO: 1521804 - DNA, 15 bp, Homo sapiens
gttacaagaatactg

SEQ ID NO: 1521805 - DNA, 15 bp, Homo sapiens
ttacaagaatactgc

SEQ ID NO: 1521806 - DNA, 15 bp, Homo sapiens
tacaagaatactgcc

SEQ ID NO: 1521807 - DNA, 15 bp, Homo sapiens
acaagaatactgcca

SEQ ID NO: 1521808 - DNA, 15 bp, Homo sapiens
caagaatactgccac

SEQ ID NO: 1521809 - DNA, 15 bp, Homo sapiens
aagaatactgccact

SEQ ID NO: 1521810 - DNA, 15 bp, Homo sapiens
agaatactgccacta

SEQ ID NO: 1521811 - DNA, 15 bp, Homo sapiens
gaatactgccactag

SEQ ID NO: 1521812 - DNA, 15 bp, Homo sapiens
aatactgccactaga

SEQ ID NO: 1521813 - DNA, 15 bp, Homo sapiens
atactgccactagaa

SEQ ID NO: 1521814 - DNA, 15 bp, Homo sapiens
tactgccactagaat

SEQ ID NO: 1521815 - DNA, 15 bp, Homo sapiens
actgccactagaatc

SEQ ID NO: 1521816 - DNA, 15 bp, Homo sapiens
ctgccactagaatcc

SEQ ID NO: 1521817 - DNA, 15 bp, Homo sapiens
tgccactagaatcct

SEQ ID NO: 1521818 - DNA, 15 bp, Homo sapiens
gccactagaatccta

SEQ ID NO: 1521819 - DNA, 15 bp, Homo sapiens
ccactagaatcctaa

SEQ ID NO: 1521820 - DNA, 15 bp, Homo sapiens
cactagaatcctaaa

SEQ ID NO: 1521821 - DNA, 15 bp, Homo sapiens
actagaatcctaaag

SEQ ID NO: 1521822 - DNA, 15 bp, Homo sapiens
ctagaatcctaaaga

SEQ ID NO: 1521823 - DNA, 15 bp, Homo sapiens
tagaatcctaaagag

SEQ ID NO: 1521824 - DNA, 15 bp, Homo sapiens
agaatcctaaagagc

SEQ ID NO: 1521825 - DNA, 15 bp, Homo sapiens
gaatcctaaagagca

SEQ ID NO: 1521826 - DNA, 15 bp, Homo sapiens
aatcctaaagagcag

SEQ ID NO: 1521827 - DNA, 15 bp, Homo sapiens
atcctaaagagcaga

SEQ ID NO: 1521828 - DNA, 15 bp, Homo sapiens
tcctaaagagcagag

SEQ ID NO: 1521829 - DNA, 15 bp, Homo sapiens
cctaaagagcagagt

SEQ ID NO: 1521830 - DNA, 15 bp, Homo sapiens
ctaaagagcagagtg

SEQ ID NO: 1521831 - DNA, 15 bp, Homo sapiens
taaagagcagagtgg

SEQ ID NO: 1521832 - DNA, 15 bp, Homo sapiens
aaagagcagagtggt

SEQ ID NO: 1521833 - DNA, 15 bp, Homo sapiens
aagagcagagtggtc

SEQ ID NO: 1521834 - DNA, 15 bp, Homo sapiens
agagcagagtggtca

SEQ ID NO: 1521835 - DNA, 15 bp, Homo sapiens
gagcagagtggtcac

SEQ ID NO: 1521836 - DNA, 15 bp, Homo sapiens
agcagagtggtcact

SEQ ID NO: 1521837 - DNA, 15 bp, Homo sapiens
gcagagtggtcactg

SEQ ID NO: 1521838 - DNA, 15 bp, Homo sapiens
cagagtggtcactgg

SEQ ID NO: 1521839 - DNA, 15 bp, Homo sapiens
agagtggtcactggg

SEQ ID NO: 1521840 - DNA, 15 bp, Homo sapiens
gagtggtcactgggg

SEQ ID NO: 1521841 - DNA, 15 bp, Homo sapiens
agtggtcactggggg

SEQ ID NO: 1521842 - DNA, 15 bp, Homo sapiens
gtggtcactgggggg

SEQ ID NO: 1521843 - DNA, 15 bp, Homo sapiens
tggtcactggggggt

SEQ ID NO: 1521844 - DNA, 15 bp, Homo sapiens
ggtcactggggggta

SEQ ID NO: 1521845 - DNA, 15 bp, Homo sapiens
gtcactggggggtaa

SEQ ID NO: 1521846 - DNA, 15 bp, Homo sapiens
tcactggggggtaaa

SEQ ID NO: 1521847 - DNA, 15 bp, Homo sapiens
cactggggggtaaaa

SEQ ID NO: 1521848 - DNA, 15 bp, Homo sapiens
actggggggtaaaaa

SEQ ID NO: 1521849 - DNA, 15 bp, Homo sapiens
ctggggggtaaaaag

SEQ ID NO: 1521850 - DNA, 15 bp, Homo sapiens
tggggggtaaaaaga

SEQ ID NO: 1521851 - DNA, 15 bp, Homo sapiens
ggggggtaaaaagaa

SEQ ID NO: 1521852 - DNA, 15 bp, Homo sapiens
gggggtaaaaagaaa

SEQ ID NO: 1521853 - DNA, 15 bp, Homo sapiens
ggggtaaaaagaaaa

SEQ ID NO: 1521854 - DNA, 15 bp, Homo sapiens
gggtaaaaagaaaaa

SEQ ID NO: 1521855 - DNA, 15 bp, Homo sapiens
gtaaaaagaaaaagg

SEQ ID NO: 1521856 - DNA, 15 bp, Homo sapiens
taaaaagaaaaagga

SEQ ID NO: 1521857 - DNA, 15 bp, Homo sapiens
aagaaaaaggaaaat

SEQ ID NO: 1521858 - DNA, 15 bp, Homo sapiens
agaaaaaggaaaatc

SEQ ID NO: 1521859 - DNA, 15 bp, Homo sapiens
gaaaaaggaaaatcc

SEQ ID NO: 1521860 - DNA, 15 bp, Homo sapiens
aaaaaggaaaatcct

SEQ ID NO: 1521861 - DNA, 15 bp, Homo sapiens
aaaaggaaaatcctt

SEQ ID NO: 1521862 - DNA, 15 bp, Homo sapiens
aaaggaaaatccttg

SEQ ID NO: 1521863 - DNA, 15 bp, Homo sapiens
aaggaaaatccttga

SEQ ID NO: 1521864 - DNA, 15 bp, Homo sapiens
aggaaaatccttgaa

SEQ ID NO: 1521865 - DNA, 15 bp, Homo sapiens
ggaaaatccttgaag

SEQ ID NO: 1521866 - DNA, 15 bp, Homo sapiens
gaaaatccttgaaga

SEQ ID NO: 1521867 - DNA, 15 bp, Homo sapiens
aaaatccttgaagaa

SEQ ID NO: 1521868 - DNA, 15 bp, Homo sapiens
aaatccttgaagaaa

SEQ ID NO: 1521869 - DNA, 15 bp, Homo sapiens
aatccttgaagaaag

SEQ ID NO: 1521870 - DNA, 15 bp, Homo sapiens
atccttgaagaaagg

SEQ ID NO: 1521871 - DNA, 15 bp, Homo sapiens
tccttgaagaaaggc

SEQ ID NO: 1521872 - DNA, 15 bp, Homo sapiens
ccttgaagaaaggca

SEQ ID NO: 1521873 - DNA, 15 bp, Homo sapiens
cttgaagaaaggcaa

SEQ ID NO: 1521874 - DNA, 15 bp, Homo sapiens
ttgaagaaaggcaaa

SEQ ID NO: 1521875 - DNA, 15 bp, Homo sapiens
tgaagaaaggcaaag

SEQ ID NO: 1521876 - DNA, 15 bp, Homo sapiens
gaagaaaggcaaagg

SEQ ID NO: 1521877 - DNA, 15 bp, Homo sapiens
aagaaaggcaaagga

SEQ ID NO: 1521878 - DNA, 15 bp, Homo sapiens
agaaaggcaaaggag

SEQ ID NO: 1521879 - DNA, 15 bp, Homo sapiens
gaaaggcaaaggaga

SEQ ID NO: 1521880 - DNA, 15 bp, Homo sapiens
aaaggcaaaggagac

SEQ ID NO: 1521881 - DNA, 15 bp, Homo sapiens
aaggcaaaggagaca

SEQ ID NO: 1521882 - DNA, 15 bp, Homo sapiens
aggcaaaggagacaa

SEQ ID NO: 1521883 - DNA, 15 bp, Homo sapiens
ggcaaaggagacaac

SEQ ID NO: 1521884 - DNA, 15 bp, Homo sapiens
gcaaaggagacaacc

SEQ ID NO: 1521885 - DNA, 15 bp, Homo sapiens
caaaggagacaacca

SEQ ID NO: 1521886 - DNA, 15 bp, Homo sapiens
aaaggagacaaccag

SEQ ID NO: 1521887 - DNA, 15 bp, Homo sapiens
aaggagacaaccagt

SEQ ID NO: 1521888 - DNA, 15 bp, Homo sapiens
aggagacaaccagtc

SEQ ID NO: 1521889 - DNA, 15 bp, Homo sapiens
ggagacaaccagtct

SEQ ID NO: 1521890 - DNA, 15 bp, Homo sapiens
gagacaaccagtctc

SEQ ID NO: 1521891 - DNA, 15 bp, Homo sapiens
agacaaccagtctca

SEQ ID NO: 1521892 - DNA, 15 bp, Homo sapiens
gacaaccagtctcaa

SEQ ID NO: 1521893 - DNA, 15 bp, Homo sapiens
acaaccagtctcaag

SEQ ID NO: 1521894 - DNA, 15 bp, Homo sapiens
caaccagtctcaaga

SEQ ID NO: 1521895 - DNA, 15 bp, Homo sapiens
aaccagtctcaagac

SEQ ID NO: 1521896 - DNA, 15 bp, Homo sapiens
accagtctcaagacc

SEQ ID NO: 1521897 - DNA, 15 bp, Homo sapiens
ccagtctcaagacca

SEQ ID NO: 1521898 - DNA, 15 bp, Homo sapiens
cagtctcaagaccac

SEQ ID NO: 1521899 - DNA, 15 bp, Homo sapiens
agtctcaagaccaca

SEQ ID NO: 1521900 - DNA, 15 bp, Homo sapiens
gtctcaagaccacaa

SEQ ID NO: 1521901 - DNA, 15 bp, Homo sapiens
tctcaagaccacaag

SEQ ID NO: 1521902 - DNA, 15 bp, Homo sapiens
ctcaagaccacaagg

SEQ ID NO: 1521903 - DNA, 15 bp, Homo sapiens
tcaagaccacaaggt

SEQ ID NO: 1521904 - DNA, 15 bp, Homo sapiens
caagaccacaaggta

SEQ ID NO: 1521905 - DNA, 15 bp, Homo sapiens
aagaccacaaggtat

SEQ ID NO: 1521906 - DNA, 15 bp, Homo sapiens
agaccacaaggtatt

SEQ ID NO: 1521907 - DNA, 15 bp, Homo sapiens
gaccacaaggtatta

SEQ ID NO: 1521908 - DNA, 15 bp, Homo sapiens
accacaaggtattat

SEQ ID NO: 1521909 - DNA, 15 bp, Homo sapiens
ccacaaggtattata

SEQ ID NO: 1521910 - DNA, 15 bp, Homo sapiens
cacaaggtattataa

SEQ ID NO: 1521911 - DNA, 15 bp, Homo sapiens
acaaggtattataag

SEQ ID NO: 1521912 - DNA, 15 bp, Homo sapiens
caaggtattataagt

SEQ ID NO: 1521913 - DNA, 15 bp, Homo sapiens
aaggtattataagtc

SEQ ID NO: 1521914 - DNA, 15 bp, Homo sapiens
aggtattataagtct

SEQ ID NO: 1521915 - DNA, 15 bp, Homo sapiens
ggtattataagtctt

SEQ ID NO: 1521916 - DNA, 15 bp, Homo sapiens
gtattataagtcttc

SEQ ID NO: 1521917 - DNA, 15 bp, Homo sapiens
tattataagtcttct

SEQ ID NO: 1521918 - DNA, 15 bp, Homo sapiens
attataagtcttctg

SEQ ID NO: 1521919 - DNA, 15 bp, Homo sapiens
ttataagtcttctgt

SEQ ID NO: 1521920 - DNA, 15 bp, Homo sapiens
tataagtcttctgtc

SEQ ID NO: 1521921 - DNA, 15 bp, Homo sapiens
ataagtcttctgtca

SEQ ID NO: 1521922 - DNA, 15 bp, Homo sapiens
taagtcttctgtcaa

SEQ ID NO: 1521923 - DNA, 15 bp, Homo sapiens
aagtcttctgtcaaa

SEQ ID NO: 1521924 - DNA, 15 bp, Homo sapiens
agtcttctgtcaaag

SEQ ID NO: 1521925 - DNA, 15 bp, Homo sapiens
gtcttctgtcaaagt

SEQ ID NO: 1521926 - DNA, 15 bp, Homo sapiens
tcttctgtcaaagta

SEQ ID NO: 1521927 - DNA, 15 bp, Homo sapiens
cttctgtcaaagtaa

SEQ ID NO: 1521928 - DNA, 15 bp, Homo sapiens
ttctgtcaaagtaag

SEQ ID NO: 1521929 - DNA, 15 bp, Homo sapiens
tctgtcaaagtaaga

SEQ ID NO: 1521930 - DNA, 15 bp, Homo sapiens
ctgtcaaagtaagat

SEQ ID NO: 1521931 - DNA, 15 bp, Homo sapiens
tgtcaaagtaagatg

SEQ ID NO: 1521932 - DNA, 15 bp, Homo sapiens
gtcaaagtaagatgt

SEQ ID NO: 1521933 - DNA, 15 bp, Homo sapiens
tcaaagtaagatgta

SEQ ID NO: 1521934 - DNA, 15 bp, Homo sapiens
caaagtaagatgtat

SEQ ID NO: 1521935 - DNA, 15 bp, Homo sapiens
aaagtaagatgtata

SEQ ID NO: 1521936 - DNA, 15 bp, Homo sapiens
aagtaagatgtataa

SEQ ID NO: 1521937 - DNA, 15 bp, Homo sapiens
agtaagatgtataag

SEQ ID NO: 1521938 - DNA, 15 bp, Homo sapiens
gtaagatgtataaga

SEQ ID NO: 1521939 - DNA, 15 bp, Homo sapiens
taagatgtataagat

SEQ ID NO: 1521940 - DNA, 15 bp, Homo sapiens
aagatgtataagatt

SEQ ID NO: 1521941 - DNA, 15 bp, Homo sapiens
agatgtataagattt

SEQ ID NO: 1521942 - DNA, 15 bp, Homo sapiens
gatgtataagatttg

SEQ ID NO: 1521943 - DNA, 15 bp, Homo sapiens
atgtataagatttgt

SEQ ID NO: 1521944 - DNA, 15 bp, Homo sapiens
tgtataagatttgta

SEQ ID NO: 1521945 - DNA, 15 bp, Homo sapiens
gtataagatttgtaa

SEQ ID NO: 1521946 - DNA, 15 bp, Homo sapiens
tataagatttgtaaa

SEQ ID NO: 1521947 - DNA, 15 bp, Homo sapiens
ataagatttgtaaac

SEQ ID NO: 1521948 - DNA, 15 bp, Homo sapiens
taagatttgtaaaca

SEQ ID NO: 1521949 - DNA, 15 bp, Homo sapiens
aagatttgtaaacac

SEQ ID NO: 1521950 - DNA, 15 bp, Homo sapiens
agatttgtaaacact

SEQ ID NO: 1521951 - DNA, 15 bp, Homo sapiens
gatttgtaaacacta

SEQ ID NO: 1521952 - DNA, 15 bp, Homo sapiens
atttgtaaacactat

SEQ ID NO: 1521953 - DNA, 15 bp, Homo sapiens
tttgtaaacactatt

SEQ ID NO: 1521954 - DNA, 15 bp, Homo sapiens
ttgtaaacactattg

SEQ ID NO: 1521955 - DNA, 15 bp, Homo sapiens
tgtaaacactattgt

SEQ ID NO: 1521956 - DNA, 15 bp, Homo sapiens
gtaaacactattgtg

SEQ ID NO: 1521957 - DNA, 15 bp, Homo sapiens
taaacactattgtgc

SEQ ID NO: 1521958 - DNA, 15 bp, Homo sapiens
aaacactattgtgca

SEQ ID NO: 1521959 - DNA, 15 bp, Homo sapiens
aacactattgtgcaa

SEQ ID NO: 1521960 - DNA, 15 bp, Homo sapiens
acactattgtgcaaa

SEQ ID NO: 1521961 - DNA, 15 bp, Homo sapiens
cactattgtgcaaaa

SEQ ID NO: 1521962 - DNA, 15 bp, Homo sapiens
actattgtgcaaaat

SEQ ID NO: 1521963 - DNA, 15 bp, Homo sapiens
ctattgtgcaaaata

SEQ ID NO: 1521964 - DNA, 15 bp, Homo sapiens
tattgtgcaaaataa

SEQ ID NO: 1521965 - DNA, 15 bp, Homo sapiens
attgtgcaaaataag

SEQ ID NO: 1521966 - DNA, 15 bp, Homo sapiens
ttgtgcaaaataagt

SEQ ID NO: 1521967 - DNA, 15 bp, Homo sapiens
tgtgcaaaataagtt

SEQ ID NO: 1521968 - DNA, 15 bp, Homo sapiens
gtgcaaaataagttc

SEQ ID NO: 1521969 - DNA, 15 bp, Homo sapiens
tgcaaaataagttca

SEQ ID NO: 1521970 - DNA, 15 bp, Homo sapiens
gcaaaataagttcaa

SEQ ID NO: 1521971 - DNA, 15 bp, Homo sapiens
caaaataagttcaat

SEQ ID NO: 1521972 - DNA, 15 bp, Homo sapiens
aaaataagttcaata

SEQ ID NO: 1521973 - DNA, 15 bp, Homo sapiens
aaataagttcaataa

SEQ ID NO: 1521974 - DNA, 15 bp, Homo sapiens
aataagttcaataag

SEQ ID NO: 1521975 - DNA, 15 bp, Homo sapiens
ataagttcaataagg

SEQ ID NO: 1521976 - DNA, 15 bp, Homo sapiens
taagttcaataagga

SEQ ID NO: 1521977 - DNA, 15 bp, Homo sapiens
aagttcaataaggaa

SEQ ID NO: 1521978 - DNA, 15 bp, Homo sapiens
agttcaataaggaat

SEQ ID NO: 1521979 - DNA, 15 bp, Homo sapiens
gttcaataaggaatg

SEQ ID NO: 1521980 - DNA, 15 bp, Homo sapiens
ttcaataaggaatga

SEQ ID NO: 1521981 - DNA, 15 bp, Homo sapiens
tcaataaggaatgaa

SEQ ID NO: 1521982 - DNA, 15 bp, Homo sapiens
caataaggaatgaaa

SEQ ID NO: 1521983 - DNA, 15 bp, Homo sapiens
aataaggaatgaaaa

SEQ ID NO: 1521984 - DNA, 15 bp, Homo sapiens
ataaggaatgaaaaa

SEQ ID NO: 1521985 - DNA, 15 bp, Homo sapiens
taaggaatgaaaaaa

SEQ ID NO: 1521986 - DNA, 15 bp, Homo sapiens
aaggaatgaaaaaat

SEQ ID NO: 1521987 - DNA, 15 bp, Homo sapiens
aggaatgaaaaaatc

SEQ ID NO: 1521988 - DNA, 15 bp, Homo sapiens
ggaatgaaaaaatcc

SEQ ID NO: 1521989 - DNA, 15 bp, Homo sapiens
gaatgaaaaaatccc

SEQ ID NO: 1521990 - DNA, 15 bp, Homo sapiens
aatgaaaaaatcccc

SEQ ID NO: 1521991 - DNA, 15 bp, Homo sapiens
atgaaaaaatccccc

SEQ ID NO: 1521992 - DNA, 15 bp, Homo sapiens
tgaaaaaatcccccc

SEQ ID NO: 1521993 - DNA, 15 bp, Homo sapiens
gaaaaaatccccccc

SEQ ID NO: 1521994 - DNA, 15 bp, Homo sapiens
aaaaaatccccccca

SEQ ID NO: 1521995 - DNA, 15 bp, Homo sapiens
aaaaatcccccccac

SEQ ID NO: 1521996 - DNA, 15 bp, Homo sapiens
aaaatcccccccacc

SEQ ID NO: 1521997 - DNA, 15 bp, Homo sapiens
aaatcccccccaccc

SEQ ID NO: 1521998 - DNA, 15 bp, Homo sapiens
aatcccccccaccca

SEQ ID NO: 1521999 - DNA, 15 bp, Homo sapiens
atcccccccacccac

SEQ ID NO: 1522000 - DNA, 15 bp, Homo sapiens
tcccccccacccaca

SEQ ID NO: 1522001 - DNA, 15 bp, Homo sapiens
cccccccacccacaa

SEQ ID NO: 1522002 - DNA, 15 bp, Homo sapiens
ccccccacccacaaa

SEQ ID NO: 1522003 - DNA, 15 bp, Homo sapiens
cccccacccacaaaa

SEQ ID NO: 1522004 - DNA, 15 bp, Homo sapiens
ccccacccacaaaaa

SEQ ID NO: 1522005 - DNA, 15 bp, Homo sapiens
cccacccacaaaaaa

SEQ ID NO: 1522006 - DNA, 15 bp, Homo sapiens
ccacccacaaaaaaa

SEQ ID NO: 1522007 - DNA, 15 bp, Homo sapiens
cacccacaaaaaaaa

SEQ ID NO: 1522008 - DNA, 15 bp, Homo sapiens
acccacaaaaaaaaa

SEQ ID NO: 1522009 - DNA, 15 bp, Homo sapiens
cccacaaaaaaaaat

SEQ ID NO: 1522010 - DNA, 15 bp, Homo sapiens
ccacaaaaaaaaatc

SEQ ID NO: 1522011 - DNA, 15 bp, Homo sapiens
cacaaaaaaaaatca

SEQ ID NO: 1522012 - DNA, 15 bp, Homo sapiens
caaaaaaaaatcaag

SEQ ID NO: 1522013 - DNA, 15 bp, Homo sapiens
aaaaaaaaatcaagg

SEQ ID NO: 1522014 - DNA, 15 bp, Homo sapiens
aaaaaaaatcaaggc

SEQ ID NO: 1522015 - DNA, 15 bp, Homo sapiens
aaaaaaatcaaggca

SEQ ID NO: 1522016 - DNA, 15 bp, Homo sapiens
aaaaaatcaaggcag

SEQ ID NO: 1522017 - DNA, 15 bp, Homo sapiens
aaaaatcaaggcagc

SEQ ID NO: 1522018 - DNA, 15 bp, Homo sapiens
aaaatcaaggcagct

SEQ ID NO: 1522019 - DNA, 15 bp, Homo sapiens
aaatcaaggcagcta

SEQ ID NO: 1522020 - DNA, 15 bp, Homo sapiens
aatcaaggcagctag

SEQ ID NO: 1522021 - DNA, 15 bp, Homo sapiens
atcaaggcagctagt

SEQ ID NO: 1522022 - DNA, 15 bp, Homo sapiens
tcaaggcagctagta

SEQ ID NO: 1522023 - DNA, 15 bp, Homo sapiens
caaggcagctagtac

SEQ ID NO: 1522024 - DNA, 15 bp, Homo sapiens
aaggcagctagtacc

SEQ ID NO: 1522025 - DNA, 15 bp, Homo sapiens
aggcagctagtacct

SEQ ID NO: 1522026 - DNA, 15 bp, Homo sapiens
ggcagctagtaccta

SEQ ID NO: 1522027 - DNA, 15 bp, Homo sapiens
gcagctagtacctac

SEQ ID NO: 1522028 - DNA, 15 bp, Homo sapiens
cagctagtacctaca

SEQ ID NO: 1522029 - DNA, 15 bp, Homo sapiens
agctagtacctacag

SEQ ID NO: 1522030 - DNA, 15 bp, Homo sapiens
gctagtacctacaga

SEQ ID NO: 1522031 - DNA, 15 bp, Homo sapiens
ctagtacctacagaa

SEQ ID NO: 1522032 - DNA, 15 bp, Homo sapiens
tagtacctacagaag

SEQ ID NO: 1522033 - DNA, 15 bp, Homo sapiens
agtacctacagaagg

SEQ ID NO: 1522034 - DNA, 15 bp, Homo sapiens
gtacctacagaaggg

SEQ ID NO: 1522035 - DNA, 15 bp, Homo sapiens
tacctacagaaggga

SEQ ID NO: 1522036 - DNA, 15 bp, Homo sapiens
acctacagaagggag

SEQ ID NO: 1522037 - DNA, 15 bp, Homo sapiens
cctacagaagggaga

SEQ ID NO: 1522038 - DNA, 15 bp, Homo sapiens
ctacagaagggagag

SEQ ID NO: 1522039 - DNA, 15 bp, Homo sapiens
tacagaagggagagg

SEQ ID NO: 1522040 - DNA, 15 bp, Homo sapiens
acagaagggagagga

SEQ ID NO: 1522041 - DNA, 15 bp, Homo sapiens
cagaagggagaggag

SEQ ID NO: 1522042 - DNA, 15 bp, Homo sapiens
agaagggagaggaga

SEQ ID NO: 1522043 - DNA, 15 bp, Homo sapiens
gaagggagaggagag

SEQ ID NO: 1522044 - DNA, 15 bp, Homo sapiens
aagggagaggagagg

SEQ ID NO: 1522045 - DNA, 15 bp, Homo sapiens
agggagaggagagga

SEQ ID NO: 1522046 - DNA, 15 bp, Homo sapiens
gggagaggagaggat

SEQ ID NO: 1522047 - DNA, 15 bp, Homo sapiens
ggagaggagaggatt

SEQ ID NO: 1522048 - DNA, 15 bp, Homo sapiens
gagaggagaggattt

SEQ ID NO: 1522049 - DNA, 15 bp, Homo sapiens
agaggagaggattta

SEQ ID NO: 1522050 - DNA, 15 bp, Homo sapiens
gaggagaggatttac

SEQ ID NO: 1522051 - DNA, 15 bp, Homo sapiens
aggagaggatttact

SEQ ID NO: 1522052 - DNA, 15 bp, Homo sapiens
ggagaggatttacta

SEQ ID NO: 1522053 - DNA, 15 bp, Homo sapiens
gagaggatttactat

SEQ ID NO: 1522054 - DNA, 15 bp, Homo sapiens
agaggatttactatt

SEQ ID NO: 1522055 - DNA, 15 bp, Homo sapiens
gaggatttactattt

SEQ ID NO: 1522056 - DNA, 15 bp, Homo sapiens
aggatttactatttt

SEQ ID NO: 1522057 - DNA, 15 bp, Homo sapiens
ggatttactatttta

SEQ ID NO: 1522058 - DNA, 15 bp, Homo sapiens
gatttactattttaa

SEQ ID NO: 1522059 - DNA, 15 bp, Homo sapiens
atttactattttaat

SEQ ID NO: 1522060 - DNA, 15 bp, Homo sapiens
tttactattttaatt

SEQ ID NO: 1522061 - DNA, 15 bp, Homo sapiens
ttactattttaattt

SEQ ID NO: 1522062 - DNA, 15 bp, Homo sapiens
tactattttaatttg

SEQ ID NO: 1522063 - DNA, 15 bp, Homo sapiens
actattttaatttgt

SEQ ID NO: 1522064 - DNA, 15 bp, Homo sapiens
ctattttaatttgtc

SEQ ID NO: 1522065 - DNA, 15 bp, Homo sapiens
tattttaatttgtcc

SEQ ID NO: 1522066 - DNA, 15 bp, Homo sapiens
attttaatttgtcct

SEQ ID NO: 1522067 - DNA, 15 bp, Homo sapiens
ttttaatttgtcctt

SEQ ID NO: 1522068 - DNA, 15 bp, Homo sapiens
tttaatttgtccttt

SEQ ID NO: 1522069 - DNA, 15 bp, Homo sapiens
ttaatttgtcctttc

SEQ ID NO: 1522070 - DNA, 15 bp, Homo sapiens
taatttgtcctttca

SEQ ID NO: 1522071 - DNA, 15 bp, Homo sapiens
aatttgtcctttcaa

SEQ ID NO: 1522072 - DNA, 15 bp, Homo sapiens
atttgtcctttcaat

SEQ ID NO: 1522073 - DNA, 15 bp, Homo sapiens
tttgtcctttcaata

SEQ ID NO: 1522074 - DNA, 15 bp, Homo sapiens
ttgtcctttcaatag

SEQ ID NO: 1522075 - DNA, 15 bp, Homo sapiens
tgtcctttcaatagg

SEQ ID NO: 1522076 - DNA, 15 bp, Homo sapiens
gtcctttcaatagga

SEQ ID NO: 1522077 - DNA, 15 bp, Homo sapiens
tcctttcaataggat

SEQ ID NO: 1522078 - DNA, 15 bp, Homo sapiens
cctttcaataggatt

SEQ ID NO: 1522079 - DNA, 15 bp, Homo sapiens
ctttcaataggattc

SEQ ID NO: 1522080 - DNA, 15 bp, Homo sapiens
tttcaataggattct

SEQ ID NO: 1522081 - DNA, 15 bp, Homo sapiens
ttcaataggattctt

SEQ ID NO: 1522082 - DNA, 15 bp, Homo sapiens
tcaataggattcttc

SEQ ID NO: 1522083 - DNA, 15 bp, Homo sapiens
caataggattcttct

SEQ ID NO: 1522084 - DNA, 15 bp, Homo sapiens
aataggattcttctc

SEQ ID NO: 1522085 - DNA, 15 bp, Homo sapiens
ataggattcttctcc

SEQ ID NO: 1522086 - DNA, 15 bp, Homo sapiens
taggattcttctcct

SEQ ID NO: 1522087 - DNA, 15 bp, Homo sapiens
aggattcttctcctg

SEQ ID NO: 1522088 - DNA, 15 bp, Homo sapiens
ggattcttctcctgc

SEQ ID NO: 1522089 - DNA, 15 bp, Homo sapiens
gattcttctcctgct

SEQ ID NO: 1522090 - DNA, 15 bp, Homo sapiens
attcttctcctgctc

SEQ ID NO: 1522091 - DNA, 15 bp, Homo sapiens
ttcttctcctgctcc

SEQ ID NO: 1522092 - DNA, 15 bp, Homo sapiens
tcttctcctgctcca

SEQ ID NO: 1522093 - DNA, 15 bp, Homo sapiens
cttctcctgctccat

SEQ ID NO: 1522094 - DNA, 15 bp, Homo sapiens
ttctcctgctccatc

SEQ ID NO: 1522095 - DNA, 15 bp, Homo sapiens
tctcctgctccatcc

SEQ ID NO: 1522096 - DNA, 15 bp, Homo sapiens
ctcctgctccatcct

SEQ ID NO: 1522097 - DNA, 15 bp, Homo sapiens
tcctgctccatccta

SEQ ID NO: 1522098 - DNA, 15 bp, Homo sapiens
cctgctccatcctac

SEQ ID NO: 1522099 - DNA, 15 bp, Homo sapiens
ctgctccatcctact

SEQ ID NO: 1522100 - DNA, 15 bp, Homo sapiens
tgctccatcctactt

SEQ ID NO: 1522101 - DNA, 15 bp, Homo sapiens
gctccatcctactta

SEQ ID NO: 1522102 - DNA, 15 bp, Homo sapiens
ctccatcctacttat

SEQ ID NO: 1522103 - DNA, 15 bp, Homo sapiens
tccatcctacttata

SEQ ID NO: 1522104 - DNA, 15 bp, Homo sapiens
ccatcctacttataa

SEQ ID NO: 1522105 - DNA, 15 bp, Homo sapiens
catcctacttataat

SEQ ID NO: 1522106 - DNA, 15 bp, Homo sapiens
atcctacttataatg

SEQ ID NO: 1522107 - DNA, 15 bp, Homo sapiens
tcctacttataatgt

SEQ ID NO: 1522108 - DNA, 15 bp, Homo sapiens
cctacttataatgtc

SEQ ID NO: 1522109 - DNA, 15 bp, Homo sapiens
ctacttataatgtcc

SEQ ID NO: 1522110 - DNA, 15 bp, Homo sapiens
tacttataatgtcct

SEQ ID NO: 1522111 - DNA, 15 bp, Homo sapiens
acttataatgtcctg

SEQ ID NO: 1522112 - DNA, 15 bp, Homo sapiens
cttataatgtcctgg

SEQ ID NO: 1522113 - DNA, 15 bp, Homo sapiens
ttataatgtcctgga

SEQ ID NO: 1522114 - DNA, 15 bp, Homo sapiens
tataatgtcctggat

SEQ ID NO: 1522115 - DNA, 15 bp, Homo sapiens
ataatgtcctggatt

SEQ ID NO: 1522116 - DNA, 15 bp, Homo sapiens
taatgtcctggattg

SEQ ID NO: 1522117 - DNA, 15 bp, Homo sapiens
aatgtcctggattgc

SEQ ID NO: 1522118 - DNA, 15 bp, Homo sapiens
atgtcctggattgcc

SEQ ID NO: 1522119 - DNA, 15 bp, Homo sapiens
tgtcctggattgcca

SEQ ID NO: 1522120 - DNA, 15 bp, Homo sapiens
gtcctggattgccaa

SEQ ID NO: 1522121 - DNA, 15 bp, Homo sapiens
tcctggattgccaac

SEQ ID NO: 1522122 - DNA, 15 bp, Homo sapiens
cctggattgccaact

SEQ ID NO: 1522123 - DNA, 15 bp, Homo sapiens
ctggattgccaactt

SEQ ID NO: 1522124 - DNA, 15 bp, Homo sapiens
tggattgccaacttt

SEQ ID NO: 1522125 - DNA, 15 bp, Homo sapiens
ggattgccaacttta

SEQ ID NO: 1522126 - DNA, 15 bp, Homo sapiens
gattgccaactttaa

SEQ ID NO: 1522127 - DNA, 15 bp, Homo sapiens
attgccaactttaaa

SEQ ID NO: 1522128 - DNA, 15 bp, Homo sapiens
ttgccaactttaaaa

SEQ ID NO: 1522129 - DNA, 15 bp, Homo sapiens
tgccaactttaaaat

SEQ ID NO: 1522130 - DNA, 15 bp, Homo sapiens
gccaactttaaaata

SEQ ID NO: 1522131 - DNA, 15 bp, Homo sapiens
ccaactttaaaatac

SEQ ID NO: 1522132 - DNA, 15 bp, Homo sapiens
caactttaaaatact

SEQ ID NO: 1522133 - DNA, 15 bp, Homo sapiens
aactttaaaatactg

SEQ ID NO: 1522134 - DNA, 15 bp, Homo sapiens
actttaaaatactga

SEQ ID NO: 1522135 - DNA, 15 bp, Homo sapiens
ctttaaaatactgac

SEQ ID NO: 1522136 - DNA, 15 bp, Homo sapiens
tttaaaatactgaca

SEQ ID NO: 1522137 - DNA, 15 bp, Homo sapiens
ttaaaatactgacag

SEQ ID NO: 1522138 - DNA, 15 bp, Homo sapiens
taaaatactgacagg

SEQ ID NO: 1522139 - DNA, 15 bp, Homo sapiens
aaaatactgacaggt

SEQ ID NO: 1522140 - DNA, 15 bp, Homo sapiens
aaatactgacaggta

SEQ ID NO: 1522141 - DNA, 15 bp, Homo sapiens
aatactgacaggtat

SEQ ID NO: 1522142 - DNA, 15 bp, Homo sapiens
atactgacaggtatt

SEQ ID NO: 1522143 - DNA, 15 bp, Homo sapiens
tactgacaggtattc

SEQ ID NO: 1522144 - DNA, 15 bp, Homo sapiens
actgacaggtattca

SEQ ID NO: 1522145 - DNA, 15 bp, Homo sapiens
ctgacaggtattcag

SEQ ID NO: 1522146 - DNA, 15 bp, Homo sapiens
tgacaggtattcaga

SEQ ID NO: 1522147 - DNA, 15 bp, Homo sapiens
gacaggtattcagag

SEQ ID NO: 1522148 - DNA, 15 bp, Homo sapiens
acaggtattcagagg

SEQ ID NO: 1522149 - DNA, 15 bp, Homo sapiens
caggtattcagagga

SEQ ID NO: 1522150 - DNA, 15 bp, Homo sapiens
aggtattcagaggat

SEQ ID NO: 1522151 - DNA, 15 bp, Homo sapiens
ggtattcagaggatt

SEQ ID NO: 1522152 - DNA, 15 bp, Homo sapiens
gtattcagaggattc

SEQ ID NO: 1522153 - DNA, 15 bp, Homo sapiens
tattcagaggattca

SEQ ID NO: 1522154 - DNA, 15 bp, Homo sapiens
attcagaggattcaa

SEQ ID NO: 1522155 - DNA, 15 bp, Homo sapiens
ttcagaggattcaaa

SEQ ID NO: 1522156 - DNA, 15 bp, Homo sapiens
tcagaggattcaaat

SEQ ID NO: 1522157 - DNA, 15 bp, Homo sapiens
cagaggattcaaata

SEQ ID NO: 1522158 - DNA, 15 bp, Homo sapiens
agaggattcaaataa

SEQ ID NO: 1522159 - DNA, 15 bp, Homo sapiens
gaggattcaaataaa

SEQ ID NO: 1522160 - DNA, 15 bp, Homo sapiens
gattcaaataaaaaa

SEQ ID NO: 1522161 - DNA, 15 bp, Homo sapiens
attcaaataaaaaag

SEQ ID NO: 1522162 - DNA, 15 bp, Homo sapiens
ttcaaataaaaaagt

SEQ ID NO: 1522163 - DNA, 15 bp, Homo sapiens
tcaaataaaaaagta

SEQ ID NO: 1522164 - DNA, 15 bp, Homo sapiens
caaataaaaaagtaa

SEQ ID NO: 1522165 - DNA, 15 bp, Homo sapiens
aaataaaaaagtaag

SEQ ID NO: 1522166 - DNA, 15 bp, Homo sapiens
aataaaaaagtaaga

SEQ ID NO: 1522167 - DNA, 15 bp, Homo sapiens
ataaaaaagtaagag

SEQ ID NO: 1522168 - DNA, 15 bp, Homo sapiens
taaaaaagtaagagg

SEQ ID NO: 1522169 - DNA, 15 bp, Homo sapiens
aaaaaagtaagaggg

SEQ ID NO: 1522170 - DNA, 15 bp, Homo sapiens
aaaaagtaagagggg

SEQ ID NO: 1522171 - DNA, 15 bp, Homo sapiens
aaaagtaagaggggt

SEQ ID NO: 1522172 - DNA, 15 bp, Homo sapiens
aaagtaagaggggtt

SEQ ID NO: 1522173 - DNA, 15 bp, Homo sapiens
aagtaagaggggttg

SEQ ID NO: 1522174 - DNA, 15 bp, Homo sapiens
agtaagaggggttgt

SEQ ID NO: 1522175 - DNA, 15 bp, Homo sapiens
gtaagaggggttgtt

SEQ ID NO: 1522176 - DNA, 15 bp, Homo sapiens
taagaggggttgtta

SEQ ID NO: 1522177 - DNA, 15 bp, Homo sapiens
aagaggggttgttaa

SEQ ID NO: 1522178 - DNA, 15 bp, Homo sapiens
agaggggttgttaaa

SEQ ID NO: 1522179 - DNA, 15 bp, Homo sapiens
gaggggttgttaaaa

SEQ ID NO: 1522180 - DNA, 15 bp, Homo sapiens
aggggttgttaaaag

SEQ ID NO: 1522181 - DNA, 15 bp, Homo sapiens
ggggttgttaaaagt

SEQ ID NO: 1522182 - DNA, 15 bp, Homo sapiens
gggttgttaaaagta

SEQ ID NO: 1522183 - DNA, 15 bp, Homo sapiens
ggttgttaaaagtaa

SEQ ID NO: 1522184 - DNA, 15 bp, Homo sapiens
gttgttaaaagtaac

SEQ ID NO: 1522185 - DNA, 15 bp, Homo sapiens
ttgttaaaagtaact

SEQ ID NO: 1522186 - DNA, 15 bp, Homo sapiens
tgttaaaagtaactt

SEQ ID NO: 1522187 - DNA, 15 bp, Homo sapiens
gttaaaagtaactta

SEQ ID NO: 1522188 - DNA, 15 bp, Homo sapiens
ttaaaagtaacttat

SEQ ID NO: 1522189 - DNA, 15 bp, Homo sapiens
taaaagtaacttata

SEQ ID NO: 1522190 - DNA, 15 bp, Homo sapiens
aaaagtaacttatat

SEQ ID NO: 1522191 - DNA, 15 bp, Homo sapiens
aaagtaacttatatc

SEQ ID NO: 1522192 - DNA, 15 bp, Homo sapiens
aagtaacttatatcc

SEQ ID NO: 1522193 - DNA, 15 bp, Homo sapiens
agtaacttatatcca

SEQ ID NO: 1522194 - DNA, 15 bp, Homo sapiens
gtaacttatatccat

SEQ ID NO: 1522195 - DNA, 15 bp, Homo sapiens
taacttatatccatt

SEQ ID NO: 1522196 - DNA, 15 bp, Homo sapiens
aacttatatccattc

SEQ ID NO: 1522197 - DNA, 15 bp, Homo sapiens
acttatatccattca

SEQ ID NO: 1522198 - DNA, 15 bp, Homo sapiens
cttatatccattcac

SEQ ID NO: 1522199 - DNA, 15 bp, Homo sapiens
ttatatccattcaca

SEQ ID NO: 1522200 - DNA, 15 bp, Homo sapiens
tatatccattcacaa

SEQ ID NO: 1522201 - DNA, 15 bp, Homo sapiens
atatccattcacaag

SEQ ID NO: 1522202 - DNA, 15 bp, Homo sapiens
tatccattcacaagt

SEQ ID NO: 1522203 - DNA, 15 bp, Homo sapiens
atccattcacaagtt

SEQ ID NO: 1522204 - DNA, 15 bp, Homo sapiens
tccattcacaagtta

SEQ ID NO: 1522205 - DNA, 15 bp, Homo sapiens
ccattcacaagttat

SEQ ID NO: 1522206 - DNA, 15 bp, Homo sapiens
cattcacaagttatc

SEQ ID NO: 1522207 - DNA, 15 bp, Homo sapiens
attcacaagttatct

SEQ ID NO: 1522208 - DNA, 15 bp, Homo sapiens
ttcacaagttatcta

SEQ ID NO: 1522209 - DNA, 15 bp, Homo sapiens
tcacaagttatctaa

SEQ ID NO: 1522210 - DNA, 15 bp, Homo sapiens
cacaagttatctaac

SEQ ID NO: 1522211 - DNA, 15 bp, Homo sapiens
acaagttatctaaca

SEQ ID NO: 1522212 - DNA, 15 bp, Homo sapiens
caagttatctaacac

SEQ ID NO: 1522213 - DNA, 15 bp, Homo sapiens
aagttatctaacact

SEQ ID NO: 1522214 - DNA, 15 bp, Homo sapiens
agttatctaacactg

SEQ ID NO: 1522215 - DNA, 15 bp, Homo sapiens
gttatctaacactgg

SEQ ID NO: 1522216 - DNA, 15 bp, Homo sapiens
ttatctaacactggc

SEQ ID NO: 1522217 - DNA, 15 bp, Homo sapiens
tatctaacactggct

SEQ ID NO: 1522218 - DNA, 15 bp, Homo sapiens
atctaacactggctc

SEQ ID NO: 1522219 - DNA, 15 bp, Homo sapiens
tctaacactggctca

SEQ ID NO: 1522220 - DNA, 15 bp, Homo sapiens
ctaacactggctcac

SEQ ID NO: 1522221 - DNA, 15 bp, Homo sapiens
taacactggctcaca

SEQ ID NO: 1522222 - DNA, 15 bp, Homo sapiens
aacactggctcacag

SEQ ID NO: 1522223 - DNA, 15 bp, Homo sapiens
acactggctcacagc

SEQ ID NO: 1522224 - DNA, 15 bp, Homo sapiens
cactggctcacagcc

SEQ ID NO: 1522225 - DNA, 15 bp, Homo sapiens
actggctcacagcct

SEQ ID NO: 1522226 - DNA, 15 bp, Homo sapiens
ctggctcacagcctg

SEQ ID NO: 1522227 - DNA, 15 bp, Homo sapiens
tggctcacagcctgg

SEQ ID NO: 1522228 - DNA, 15 bp, Homo sapiens
ggctcacagcctggt

SEQ ID NO: 1522229 - DNA, 15 bp, Homo sapiens
gctcacagcctggta

SEQ ID NO: 1522230 - DNA, 15 bp, Homo sapiens
ctcacagcctggtaa

SEQ ID NO: 1522231 - DNA, 15 bp, Homo sapiens
tcacagcctggtaaa

SEQ ID NO: 1522232 - DNA, 15 bp, Homo sapiens
cacagcctggtaaag

SEQ ID NO: 1522233 - DNA, 15 bp, Homo sapiens
acagcctggtaaaga

SEQ ID NO: 1522234 - DNA, 15 bp, Homo sapiens
cagcctggtaaagaa

SEQ ID NO: 1522235 - DNA, 15 bp, Homo sapiens
agcctggtaaagaat

SEQ ID NO: 1522236 - DNA, 15 bp, Homo sapiens
gcctggtaaagaatc

SEQ ID NO: 1522237 - DNA, 15 bp, Homo sapiens
cctggtaaagaatct

SEQ ID NO: 1522238 - DNA, 15 bp, Homo sapiens
ctggtaaagaatctc

SEQ ID NO: 1522239 - DNA, 15 bp, Homo sapiens
tggtaaagaatctct

SEQ ID NO: 1522240 - DNA, 15 bp, Homo sapiens
ggtaaagaatctctt

SEQ ID NO: 1522241 - DNA, 15 bp, Homo sapiens
gtaaagaatctcttc

SEQ ID NO: 1522242 - DNA, 15 bp, Homo sapiens
taaagaatctcttcc

SEQ ID NO: 1522243 - DNA, 15 bp, Homo sapiens
aaagaatctcttcct

SEQ ID NO: 1522244 - DNA, 15 bp, Homo sapiens
aagaatctcttcctt

SEQ ID NO: 1522245 - DNA, 15 bp, Homo sapiens
agaatctcttcctta

SEQ ID NO: 1522246 - DNA, 15 bp, Homo sapiens
gaatctcttccttat

SEQ ID NO: 1522247 - DNA, 15 bp, Homo sapiens
aatctcttccttatg

SEQ ID NO: 1522248 - DNA, 15 bp, Homo sapiens
atctcttccttatgg

SEQ ID NO: 1522249 - DNA, 15 bp, Homo sapiens
tctcttccttatgga

SEQ ID NO: 1522250 - DNA, 15 bp, Homo sapiens
ctcttccttatggaa

SEQ ID NO: 1522251 - DNA, 15 bp, Homo sapiens
tcttccttatggaag

SEQ ID NO: 1522252 - DNA, 15 bp, Homo sapiens
cttccttatggaaga

SEQ ID NO: 1522253 - DNA, 15 bp, Homo sapiens
ttccttatggaagat

SEQ ID NO: 1522254 - DNA, 15 bp, Homo sapiens
tccttatggaagatt

SEQ ID NO: 1522255 - DNA, 15 bp, Homo sapiens
ccttatggaagattg

SEQ ID NO: 1522256 - DNA, 15 bp, Homo sapiens
cttatggaagattga

SEQ ID NO: 1522257 - DNA, 15 bp, Homo sapiens
ttatggaagattgaa

SEQ ID NO: 1522258 - DNA, 15 bp, Homo sapiens
tatggaagattgaac

SEQ ID NO: 1522259 - DNA, 15 bp, Homo sapiens
atggaagattgaaca

SEQ ID NO: 1522260 - DNA, 15 bp, Homo sapiens
tggaagattgaacaa

SEQ ID NO: 1522261 - DNA, 15 bp, Homo sapiens
ggaagattgaacaat

SEQ ID NO: 1522262 - DNA, 15 bp, Homo sapiens
gaagattgaacaatg

SEQ ID NO: 1522263 - DNA, 15 bp, Homo sapiens
aagattgaacaatga

SEQ ID NO: 1522264 - DNA, 15 bp, Homo sapiens
agattgaacaatgat

SEQ ID NO: 1522265 - DNA, 15 bp, Homo sapiens
gattgaacaatgatt

SEQ ID NO: 1522266 - DNA, 15 bp, Homo sapiens
attgaacaatgattt

SEQ ID NO: 1522267 - DNA, 15 bp, Homo sapiens
ttgaacaatgatttc

SEQ ID NO: 1522268 - DNA, 15 bp, Homo sapiens
tgaacaatgatttct

SEQ ID NO: 1522269 - DNA, 15 bp, Homo sapiens
gaacaatgatttctt

SEQ ID NO: 1522270 - DNA, 15 bp, Homo sapiens
aacaatgatttcttt

SEQ ID NO: 1522271 - DNA, 15 bp, Homo sapiens
acaatgatttctttg

SEQ ID NO: 1522272 - DNA, 15 bp, Homo sapiens
caatgatttctttga

SEQ ID NO: 1522273 - DNA, 15 bp, Homo sapiens
aatgatttctttgag

SEQ ID NO: 1522274 - DNA, 15 bp, Homo sapiens
atgatttctttgagg

SEQ ID NO: 1522275 - DNA, 15 bp, Homo sapiens
tgatttctttgaggt

SEQ ID NO: 1522276 - DNA, 15 bp, Homo sapiens
gatttctttgaggta

SEQ ID NO: 1522277 - DNA, 15 bp, Homo sapiens
atttctttgaggtac

SEQ ID NO: 1522278 - DNA, 15 bp, Homo sapiens
tttctttgaggtacc

SEQ ID NO: 1522279 - DNA, 15 bp, Homo sapiens
ttctttgaggtacca

SEQ ID NO: 1522280 - DNA, 15 bp, Homo sapiens
tctttgaggtaccag

SEQ ID NO: 1522281 - DNA, 15 bp, Homo sapiens
ctttgaggtaccaga

SEQ ID NO: 1522282 - DNA, 15 bp, Homo sapiens
tttgaggtaccagaa

SEQ ID NO: 1522283 - DNA, 15 bp, Homo sapiens
ttgaggtaccagaaa

SEQ ID NO: 1522284 - DNA, 15 bp, Homo sapiens
tgaggtaccagaaag

SEQ ID NO: 1522285 - DNA, 15 bp, Homo sapiens
gaggtaccagaaagt

SEQ ID NO: 1522286 - DNA, 15 bp, Homo sapiens
aggtaccagaaagta

SEQ ID NO: 1522287 - DNA, 15 bp, Homo sapiens
ggtaccagaaagtag

SEQ ID NO: 1522288 - DNA, 15 bp, Homo sapiens
gtaccagaaagtaga

SEQ ID NO: 1522289 - DNA, 15 bp, Homo sapiens
taccagaaagtagac

SEQ ID NO: 1522290 - DNA, 15 bp, Homo sapiens
accagaaagtagact

SEQ ID NO: 1522291 - DNA, 15 bp, Homo sapiens
ccagaaagtagactt

SEQ ID NO: 1522292 - DNA, 15 bp, Homo sapiens
cagaaagtagacttt

SEQ ID NO: 1522293 - DNA, 15 bp, Homo sapiens
agaaagtagactttg

SEQ ID NO: 1522294 - DNA, 15 bp, Homo sapiens
gaaagtagactttgc

SEQ ID NO: 1522295 - DNA, 15 bp, Homo sapiens
aaagtagactttgcc

SEQ ID NO: 1522296 - DNA, 15 bp, Homo sapiens
aagtagactttgcct

SEQ ID NO: 1522297 - DNA, 15 bp, Homo sapiens
agtagactttgcctc

SEQ ID NO: 1522298 - DNA, 15 bp, Homo sapiens
gtagactttgcctct

SEQ ID NO: 1522299 - DNA, 15 bp, Homo sapiens
tagactttgcctctg

SEQ ID NO: 1522300 - DNA, 15 bp, Homo sapiens
agactttgcctctgc

SEQ ID NO: 1522301 - DNA, 15 bp, Homo sapiens
gactttgcctctgca

SEQ ID NO: 1522302 - DNA, 15 bp, Homo sapiens
actttgcctctgcag

SEQ ID NO: 1522303 - DNA, 15 bp, Homo sapiens
ctttgcctctgcaga

SEQ ID NO: 1522304 - DNA, 15 bp, Homo sapiens
tttgcctctgcagag

SEQ ID NO: 1522305 - DNA, 15 bp, Homo sapiens
ttgcctctgcagaga

SEQ ID NO: 1522306 - DNA, 15 bp, Homo sapiens
tgcctctgcagagag

SEQ ID NO: 1522307 - DNA, 15 bp, Homo sapiens
gcctctgcagagagg

SEQ ID NO: 1522308 - DNA, 15 bp, Homo sapiens
cctctgcagagaggt

SEQ ID NO: 1522309 - DNA, 15 bp, Homo sapiens
ctctgcagagaggtg

SEQ ID NO: 1522310 - DNA, 15 bp, Homo sapiens
tctgcagagaggtgg

SEQ ID NO: 1522311 - DNA, 15 bp, Homo sapiens
ctgcagagaggtggg

SEQ ID NO: 1522312 - DNA, 15 bp, Homo sapiens
tgcagagaggtgggt

SEQ ID NO: 1522313 - DNA, 15 bp, Homo sapiens
gcagagaggtgggtc

SEQ ID NO: 1522314 - DNA, 15 bp, Homo sapiens
cagagaggtgggtct

SEQ ID NO: 1522315 - DNA, 15 bp, Homo sapiens
agagaggtgggtctt

SEQ ID NO: 1522316 - DNA, 15 bp, Homo sapiens
gagaggtgggtcttt

SEQ ID NO: 1522317 - DNA, 15 bp, Homo sapiens
agaggtgggtctttt

SEQ ID NO: 1522318 - DNA, 15 bp, Homo sapiens
gaggtgggtcttttg

SEQ ID NO: 1522319 - DNA, 15 bp, Homo sapiens
aggtgggtcttttgc

SEQ ID NO: 1522320 - DNA, 15 bp, Homo sapiens
ggtgggtcttttgct

SEQ ID NO: 1522321 - DNA, 15 bp, Homo sapiens
gtgggtcttttgctt

SEQ ID NO: 1522322 - DNA, 15 bp, Homo sapiens
tgggtcttttgcttg

SEQ ID NO: 1522323 - DNA, 15 bp, Homo sapiens
gggtcttttgcttga

SEQ ID NO: 1522324 - DNA, 15 bp, Homo sapiens
ggtcttttgcttgaa

SEQ ID NO: 1522325 - DNA, 15 bp, Homo sapiens
gtcttttgcttgaac

SEQ ID NO: 1522326 - DNA, 15 bp, Homo sapiens
tcttttgcttgaacc

SEQ ID NO: 1522327 - DNA, 15 bp, Homo sapiens
cttttgcttgaacct

SEQ ID NO: 1522328 - DNA, 15 bp, Homo sapiens
ttttgcttgaacctg

SEQ ID NO: 1522329 - DNA, 15 bp, Homo sapiens
tttgcttgaacctgg

SEQ ID NO: 1522330 - DNA, 15 bp, Homo sapiens
tgcttgaacctgggt

SEQ ID NO: 1522331 - DNA, 15 bp, Homo sapiens
gcttgaacctgggtg

SEQ ID NO: 1522332 - DNA, 15 bp, Homo sapiens
cttgaacctgggtgt

SEQ ID NO: 1522333 - DNA, 15 bp, Homo sapiens
ttgaacctgggtgtt

SEQ ID NO: 1522334 - DNA, 15 bp, Homo sapiens
tgaacctgggtgttc

SEQ ID NO: 1522335 - DNA, 15 bp, Homo sapiens
gaacctgggtgttct

SEQ ID NO: 1522336 - DNA, 15 bp, Homo sapiens
aacctgggtgttctg

SEQ ID NO: 1522337 - DNA, 15 bp, Homo sapiens
acctgggtgttctgg

SEQ ID NO: 1522338 - DNA, 15 bp, Homo sapiens
cctgggtgttctggc

SEQ ID NO: 1522339 - DNA, 15 bp, Homo sapiens
ctgggtgttctggct

SEQ ID NO: 1522340 - DNA, 15 bp, Homo sapiens
tgggtgttctggctt

SEQ ID NO: 1522341 - DNA, 15 bp, Homo sapiens
gggtgttctggctta

SEQ ID NO: 1522342 - DNA, 15 bp, Homo sapiens
ggtgttctggcttaa

SEQ ID NO: 1522343 - DNA, 15 bp, Homo sapiens
gtgttctggcttaat

SEQ ID NO: 1522344 - DNA, 15 bp, Homo sapiens
tgttctggcttaatg

SEQ ID NO: 1522345 - DNA, 15 bp, Homo sapiens
gttctggcttaatgc

SEQ ID NO: 1522346 - DNA, 15 bp, Homo sapiens
ttctggcttaatgct

SEQ ID NO: 1522347 - DNA, 15 bp, Homo sapiens
tctggcttaatgctg

SEQ ID NO: 1522348 - DNA, 15 bp, Homo sapiens
ctggcttaatgctgg

SEQ ID NO: 1522349 - DNA, 15 bp, Homo sapiens
tggcttaatgctggc

SEQ ID NO: 1522350 - DNA, 15 bp, Homo sapiens
ggcttaatgctggct

SEQ ID NO: 1522351 - DNA, 15 bp, Homo sapiens
gcttaatgctggctt

SEQ ID NO: 1522352 - DNA, 15 bp, Homo sapiens
cttaatgctggcttt

SEQ ID NO: 1522353 - DNA, 15 bp, Homo sapiens
ttaatgctggctttc

SEQ ID NO: 1522354 - DNA, 15 bp, Homo sapiens
taatgctggctttca

SEQ ID NO: 1522355 - DNA, 15 bp, Homo sapiens
aatgctggctttcag

SEQ ID NO: 1522356 - DNA, 15 bp, Homo sapiens
atgctggctttcagg

SEQ ID NO: 1522357 - DNA, 15 bp, Homo sapiens
tgctggctttcagga

SEQ ID NO: 1522358 - DNA, 15 bp, Homo sapiens
gctggctttcaggag

SEQ ID NO: 1522359 - DNA, 15 bp, Homo sapiens
ctggctttcaggagg

SEQ ID NO: 1522360 - DNA, 15 bp, Homo sapiens
tggctttcaggaggc

SEQ ID NO: 1522361 - DNA, 15 bp, Homo sapiens
ggctttcaggaggca

SEQ ID NO: 1522362 - DNA, 15 bp, Homo sapiens
gctttcaggaggcag

SEQ ID NO: 1522363 - DNA, 15 bp, Homo sapiens
ctttcaggaggcagc

SEQ ID NO: 1522364 - DNA, 15 bp, Homo sapiens
tttcaggaggcagct

SEQ ID NO: 1522365 - DNA, 15 bp, Homo sapiens
ttcaggaggcagcta

SEQ ID NO: 1522366 - DNA, 15 bp, Homo sapiens
tcaggaggcagctac

SEQ ID NO: 1522367 - DNA, 15 bp, Homo sapiens
caggaggcagctacc

SEQ ID NO: 1522368 - DNA, 15 bp, Homo sapiens
aggaggcagctacct

SEQ ID NO: 1522369 - DNA, 15 bp, Homo sapiens
ggaggcagctacctt

SEQ ID NO: 1522370 - DNA, 15 bp, Homo sapiens
gaggcagctaccttc

SEQ ID NO: 1522371 - DNA, 15 bp, Homo sapiens
aggcagctaccttca

SEQ ID NO: 1522372 - DNA, 15 bp, Homo sapiens
ggcagctaccttcaa

SEQ ID NO: 1522373 - DNA, 15 bp, Homo sapiens
gcagctaccttcaat

SEQ ID NO: 1522374 - DNA, 15 bp, Homo sapiens
cagctaccttcaatt

SEQ ID NO: 1522375 - DNA, 15 bp, Homo sapiens
agctaccttcaattt

SEQ ID NO: 1522376 - DNA, 15 bp, Homo sapiens
gctaccttcaattta

SEQ ID NO: 1522377 - DNA, 15 bp, Homo sapiens
ctaccttcaatttaa

SEQ ID NO: 1522378 - DNA, 15 bp, Homo sapiens
taccttcaatttaaa

SEQ ID NO: 1522379 - DNA, 15 bp, Homo sapiens
accttcaatttaaat

SEQ ID NO: 1522380 - DNA, 15 bp, Homo sapiens
ccttcaatttaaatt

SEQ ID NO: 1522381 - DNA, 15 bp, Homo sapiens
cttcaatttaaatta

SEQ ID NO: 1522382 - DNA, 15 bp, Homo sapiens
ttcaatttaaattaa

SEQ ID NO: 1522383 - DNA, 15 bp, Homo sapiens
tcaatttaaattaaa

SEQ ID NO: 1522384 - DNA, 15 bp, Homo sapiens
caatttaaattaaaa

SEQ ID NO: 1522385 - DNA, 15 bp, Homo sapiens
ttaaattaaaaaaac

SEQ ID NO: 1522386 - DNA, 15 bp, Homo sapiens
taaattaaaaaaaca

SEQ ID NO: 1522387 - DNA, 15 bp, Homo sapiens
aaattaaaaaaacaa

SEQ ID NO: 1522388 - DNA, 15 bp, Homo sapiens
aattaaaaaaacaaa

SEQ ID NO: 1522389 - DNA, 15 bp, Homo sapiens
aaacaaaaaaaaact

SEQ ID NO: 1522390 - DNA, 15 bp, Homo sapiens
aacaaaaaaaaacta

SEQ ID NO: 1522391 - DNA, 15 bp, Homo sapiens
acaaaaaaaaactat

SEQ ID NO: 1522392 - DNA, 15 bp, Homo sapiens
caaaaaaaaactata

SEQ ID NO: 1522393 - DNA, 15 bp, Homo sapiens
aaaaaaaaactatac

SEQ ID NO: 1522394 - DNA, 15 bp, Homo sapiens
aaaaaaaactatacc

SEQ ID NO: 1522395 - DNA, 15 bp, Homo sapiens
aaaaaaactatacca

SEQ ID NO: 1522396 - DNA, 15 bp, Homo sapiens
aaaaaactataccaa

SEQ ID NO: 1522397 - DNA, 15 bp, Homo sapiens
aaaaactataccaac

SEQ ID NO: 1522398 - DNA, 15 bp, Homo sapiens
aaaactataccaacc

SEQ ID NO: 1522399 - DNA, 15 bp, Homo sapiens
aaactataccaaccg

SEQ ID NO: 1522400 - DNA, 15 bp, Homo sapiens
aactataccaaccga

SEQ ID NO: 1522401 - DNA, 15 bp, Homo sapiens
actataccaaccgaa

SEQ ID NO: 1522402 - DNA, 15 bp, Homo sapiens
ctataccaaccgaac

SEQ ID NO: 1522403 - DNA, 15 bp, Homo sapiens
tataccaaccgaacg

SEQ ID NO: 1522404 - DNA, 15 bp, Homo sapiens
ataccaaccgaacgc

SEQ ID NO: 1522405 - DNA, 15 bp, Homo sapiens
taccaaccgaacgct

SEQ ID NO: 1522406 - DNA, 15 bp, Homo sapiens
accaaccgaacgctt

SEQ ID NO: 1522407 - DNA, 15 bp, Homo sapiens
ccaaccgaacgcttg

SEQ ID NO: 1522408 - DNA, 15 bp, Homo sapiens
caaccgaacgcttgc

SEQ ID NO: 1522409 - DNA, 15 bp, Homo sapiens
aaccgaacgcttgct

SEQ ID NO: 1522410 - DNA, 15 bp, Homo sapiens
accgaacgcttgctt

SEQ ID NO: 1522411 - DNA, 15 bp, Homo sapiens
ccgaacgcttgctta

SEQ ID NO: 1522412 - DNA, 15 bp, Homo sapiens
cgaacgcttgcttaa

SEQ ID NO: 1522413 - DNA, 15 bp, Homo sapiens
gaacgcttgcttaaa

SEQ ID NO: 1522414 - DNA, 15 bp, Homo sapiens
aacgcttgcttaaac

SEQ ID NO: 1522415 - DNA, 15 bp, Homo sapiens
acgcttgcttaaaca

SEQ ID NO: 1522416 - DNA, 15 bp, Homo sapiens
cgcttgcttaaacac

SEQ ID NO: 1522417 - DNA, 15 bp, Homo sapiens
gcttgcttaaacaca

SEQ ID NO: 1522418 - DNA, 15 bp, Homo sapiens
cttgcttaaacacag

SEQ ID NO: 1522419 - DNA, 15 bp, Homo sapiens
ttgcttaaacacaga

SEQ ID NO: 1522420 - DNA, 15 bp, Homo sapiens
tgcttaaacacagac

SEQ ID NO: 1522421 - DNA, 15 bp, Homo sapiens
gcttaaacacagaca

SEQ ID NO: 1522422 - DNA, 15 bp, Homo sapiens
cttaaacacagacac

SEQ ID NO: 1522423 - DNA, 15 bp, Homo sapiens
ttaaacacagacaca

SEQ ID NO: 1522424 - DNA, 15 bp, Homo sapiens
taaacacagacacac

SEQ ID NO: 1522425 - DNA, 15 bp, Homo sapiens
aaacacagacacaca

SEQ ID NO: 1522426 - DNA, 15 bp, Homo sapiens
aacacagacacacac

SEQ ID NO: 1522427 - DNA, 15 bp, Homo sapiens
cagacacacacacac

SEQ ID NO: 1522428 - DNA, 15 bp, Homo sapiens
gacacacacacacaa

SEQ ID NO: 1522429 - DNA, 15 bp, Homo sapiens
cacacacacaaaatc

SEQ ID NO: 1522430 - DNA, 15 bp, Homo sapiens
acacacacaaaatca

SEQ ID NO: 1522431 - DNA, 15 bp, Homo sapiens
cacacacaaaatcag

SEQ ID NO: 1522432 - DNA, 15 bp, Homo sapiens
acacacaaaatcagg

SEQ ID NO: 1522433 - DNA, 15 bp, Homo sapiens
cacacaaaatcagga

SEQ ID NO: 1522434 - DNA, 15 bp, Homo sapiens
acacaaaatcaggag

SEQ ID NO: 1522435 - DNA, 15 bp, Homo sapiens
cacaaaatcaggagg

SEQ ID NO: 1522436 - DNA, 15 bp, Homo sapiens
acaaaatcaggaggg

SEQ ID NO: 1522437 - DNA, 15 bp, Homo sapiens
caaaatcaggaggga

SEQ ID NO: 1522438 - DNA, 15 bp, Homo sapiens
aaaatcaggagggac

SEQ ID NO: 1522439 - DNA, 15 bp, Homo sapiens
aaatcaggagggact

SEQ ID NO: 1522440 - DNA, 15 bp, Homo sapiens
aatcaggagggactt

SEQ ID NO: 1522441 - DNA, 15 bp, Homo sapiens
atcaggagggacttc

SEQ ID NO: 1522442 - DNA, 15 bp, Homo sapiens
tcaggagggacttca

SEQ ID NO: 1522443 - DNA, 15 bp, Homo sapiens
caggagggacttcat

SEQ ID NO: 1522444 - DNA, 15 bp, Homo sapiens
aggagggacttcata

SEQ ID NO: 1522445 - DNA, 15 bp, Homo sapiens
ggagggacttcatac

SEQ ID NO: 1522446 - DNA, 15 bp, Homo sapiens
gagggacttcataca

SEQ ID NO: 1522447 - DNA, 15 bp, Homo sapiens
agggacttcatacaa

SEQ ID NO: 1522448 - DNA, 15 bp, Homo sapiens
gggacttcatacaaa

SEQ ID NO: 1522449 - DNA, 15 bp, Homo sapiens
ggacttcatacaaaa

SEQ ID NO: 1522450 - DNA, 15 bp, Homo sapiens
gacttcatacaaaaa

SEQ ID NO: 1522451 - DNA, 15 bp, Homo sapiens
acttcatacaaaaaa

SEQ ID NO: 1522452 - DNA, 15 bp, Homo sapiens
cttcatacaaaaaaa

SEQ ID NO: 1522453 - DNA, 15 bp, Homo sapiens
ttcatacaaaaaaat

SEQ ID NO: 1522454 - DNA, 15 bp, Homo sapiens
tcatacaaaaaaatt

SEQ ID NO: 1522455 - DNA, 15 bp, Homo sapiens
catacaaaaaaattc

SEQ ID NO: 1522456 - DNA, 15 bp, Homo sapiens
atacaaaaaaattca

SEQ ID NO: 1522457 - DNA, 15 bp, Homo sapiens
tacaaaaaaattcaa

SEQ ID NO: 1522458 - DNA, 15 bp, Homo sapiens
acaaaaaaattcaag

SEQ ID NO: 1522459 - DNA, 15 bp, Homo sapiens
caaaaaaattcaagt

SEQ ID NO: 1522460 - DNA, 15 bp, Homo sapiens
aaaaaaattcaagtc

SEQ ID NO: 1522461 - DNA, 15 bp, Homo sapiens
aaaaaattcaagtcg

SEQ ID NO: 1522462 - DNA, 15 bp, Homo sapiens
aaaaattcaagtcgg

SEQ ID NO: 1522463 - DNA, 15 bp, Homo sapiens
aaaattcaagtcggc

SEQ ID NO: 1522464 - DNA, 15 bp, Homo sapiens
aaattcaagtcggca

SEQ ID NO: 1522465 - DNA, 15 bp, Homo sapiens
aattcaagtcggcaa

SEQ ID NO: 1522466 - DNA, 15 bp, Homo sapiens
attcaagtcggcaat

SEQ ID NO: 1522467 - DNA, 15 bp, Homo sapiens
ttcaagtcggcaatg

SEQ ID NO: 1522468 - DNA, 15 bp, Homo sapiens
tcaagtcggcaatgg

SEQ ID NO: 1522469 - DNA, 15 bp, Homo sapiens
caagtcggcaatggg

SEQ ID NO: 1522470 - DNA, 15 bp, Homo sapiens
aagtcggcaatgggc

SEQ ID NO: 1522471 - DNA, 15 bp, Homo sapiens
agtcggcaatgggca

SEQ ID NO: 1522472 - DNA, 15 bp, Homo sapiens
gtcggcaatgggcat

SEQ ID NO: 1522473 - DNA, 15 bp, Homo sapiens
tcggcaatgggcatt

SEQ ID NO: 1522474 - DNA, 15 bp, Homo sapiens
cggcaatgggcattt

SEQ ID NO: 1522475 - DNA, 15 bp, Homo sapiens
ggcaatgggcatttc

SEQ ID NO: 1522476 - DNA, 15 bp, Homo sapiens
gcaatgggcatttcc

SEQ ID NO: 1522477 - DNA, 15 bp, Homo sapiens
caatgggcatttcca

SEQ ID NO: 1522478 - DNA, 15 bp, Homo sapiens
aatgggcatttccaa

SEQ ID NO: 1522479 - DNA, 15 bp, Homo sapiens
atgggcatttccaaa

SEQ ID NO: 1522480 - DNA, 15 bp, Homo sapiens
tgggcatttccaaaa

SEQ ID NO: 1522481 - DNA, 15 bp, Homo sapiens
gggcatttccaaaag

SEQ ID NO: 1522482 - DNA, 15 bp, Homo sapiens
ggcatttccaaaagg

SEQ ID NO: 1522483 - DNA, 15 bp, Homo sapiens
gcatttccaaaaggt

SEQ ID NO: 1522484 - DNA, 15 bp, Homo sapiens
catttccaaaaggtg

SEQ ID NO: 1522485 - DNA, 15 bp, Homo sapiens
atttccaaaaggtga

SEQ ID NO: 1522486 - DNA, 15 bp, Homo sapiens
tttccaaaaggtgac

SEQ ID NO: 1522487 - DNA, 15 bp, Homo sapiens
ttccaaaaggtgacg

SEQ ID NO: 1522488 - DNA, 15 bp, Homo sapiens
tccaaaaggtgacga

SEQ ID NO: 1522489 - DNA, 15 bp, Homo sapiens
ccaaaaggtgacgag

SEQ ID NO: 1522490 - DNA, 15 bp, Homo sapiens
caaaaggtgacgagt

SEQ ID NO: 1522491 - DNA, 15 bp, Homo sapiens
aaaaggtgacgagtt

SEQ ID NO: 1522492 - DNA, 15 bp, Homo sapiens
aaaggtgacgagttt

SEQ ID NO: 1522493 - DNA, 15 bp, Homo sapiens
aaggtgacgagtttt

SEQ ID NO: 1522494 - DNA, 15 bp, Homo sapiens
aggtgacgagttttt

SEQ ID NO: 1522495 - DNA, 15 bp, Homo sapiens
ggtgacgagtttttt

SEQ ID NO: 1522496 - DNA, 15 bp, Homo sapiens
gtgacgagtttttta

SEQ ID NO: 1522497 - DNA, 15 bp, Homo sapiens
tgacgagttttttaa

SEQ ID NO: 1522498 - DNA, 15 bp, Homo sapiens
gacgagttttttaaa

SEQ ID NO: 1522499 - DNA, 15 bp, Homo sapiens
acgagttttttaaat

SEQ ID NO: 1522500 - DNA, 15 bp, Homo sapiens
cgagttttttaaata

SEQ ID NO: 1522501 - DNA, 15 bp, Homo sapiens
gagttttttaaataa

SEQ ID NO: 1522502 - DNA, 15 bp, Homo sapiens
agttttttaaataaa

SEQ ID NO: 1522503 - DNA, 15 bp, Homo sapiens
gttttttaaataaaa

SEQ ID NO: 1522504 - DNA, 15 bp, Homo sapiens
ttttttaaataaaaa

SEQ ID NO: 1522505 - DNA, 15 bp, Homo sapiens
tttttaaataaaaat

SEQ ID NO: 1522506 - DNA, 15 bp, Homo sapiens
ttttaaataaaaatt

SEQ ID NO: 1522507 - DNA, 15 bp, Homo sapiens
tttaaataaaaattt

SEQ ID NO: 1522508 - DNA, 15 bp, Homo sapiens
ttaaataaaaatttt

SEQ ID NO: 1522509 - DNA, 15 bp, Homo sapiens
taaataaaaattttg

SEQ ID NO: 1522510 - DNA, 15 bp, Homo sapiens
aaataaaaattttgt

SEQ ID NO: 1522511 - DNA, 15 bp, Homo sapiens
aataaaaattttgtg

SEQ ID NO: 1522512 - DNA, 15 bp, Homo sapiens
ataaaaattttgtga

SEQ ID NO: 1522513 - DNA, 15 bp, Homo sapiens
taaaaattttgtgaa

SEQ ID NO: 1522514 - DNA, 15 bp, Homo sapiens
aaaaattttgtgaaa

SEQ ID NO: 1522515 - DNA, 15 bp, Homo sapiens
aaaattttgtgaaaa

SEQ ID NO: 1522516 - DNA, 15 bp, Homo sapiens
aaattttgtgaaaaa

SEQ ID NO: 1522517 - DNA, 15 bp, Homo sapiens
aattttgtgaaaaat

SEQ ID NO: 1522518 - DNA, 15 bp, Homo sapiens
attttgtgaaaaata

SEQ ID NO: 1522519 - DNA, 15 bp, Homo sapiens
ttttgtgaaaaataa

SEQ ID NO: 1522520 - DNA, 15 bp, Homo sapiens
tttgtgaaaaataaa

SEQ ID NO: 1522521 - DNA, 15 bp, Homo sapiens
ttgtgaaaaataaaa

SEQ ID NO: 1522522 - DNA, 15 bp, Homo sapiens
tgtgaaaaataaaat

SEQ ID NO: 1522523 - DNA, 15 bp, Homo sapiens
gtgaaaaataaaatc

SEQ ID NO: 1522524 - DNA, 15 bp, Homo sapiens
tgaaaaataaaatcc

SEQ ID NO: 1522525 - DNA, 15 bp, Homo sapiens
gaaaaataaaatcca

SEQ ID NO: 1522526 - DNA, 15 bp, Homo sapiens
aaaaataaaatccaa

SEQ ID NO: 1522527 - DNA, 15 bp, Homo sapiens
aaaataaaatccaaa

SEQ ID NO: 1522528 - DNA, 15 bp, Homo sapiens
aaataaaatccaaaa

SEQ ID NO: 1522529 - DNA, 15 bp, Homo sapiens
aataaaatccaaaat

SEQ ID NO: 1522530 - DNA, 15 bp, Homo sapiens
ataaaatccaaaatc

SEQ ID NO: 1522531 - DNA, 15 bp, Homo sapiens
taaaatccaaaatcg

SEQ ID NO: 1522532 - DNA, 15 bp, Homo sapiens
aaaatccaaaatcgg

SEQ ID NO: 1522533 - DNA, 15 bp, Homo sapiens
aaatccaaaatcggc

SEQ ID NO: 1522534 - DNA, 15 bp, Homo sapiens
aatccaaaatcggca

SEQ ID NO: 1522535 - DNA, 15 bp, Homo sapiens
atccaaaatcggcaa

SEQ ID NO: 1522536 - DNA, 15 bp, Homo sapiens
tccaaaatcggcaaa

SEQ ID NO: 1522537 - DNA, 15 bp, Homo sapiens
ccaaaatcggcaaag

SEQ ID NO: 1522538 - DNA, 15 bp, Homo sapiens
caaaatcggcaaagc

SEQ ID NO: 1522539 - DNA, 15 bp, Homo sapiens
aaaatcggcaaagca

SEQ ID NO: 1522540 - DNA, 15 bp, Homo sapiens
aaatcggcaaagcac

SEQ ID NO: 1522541 - DNA, 15 bp, Homo sapiens
aatcggcaaagcaca

SEQ ID NO: 1522542 - DNA, 15 bp, Homo sapiens
atcggcaaagcacaa

SEQ ID NO: 1522543 - DNA, 15 bp, Homo sapiens
tcggcaaagcacaaa

SEQ ID NO: 1522544 - DNA, 15 bp, Homo sapiens
cggcaaagcacaaaa

SEQ ID NO: 1522545 - DNA, 15 bp, Homo sapiens
ggcaaagcacaaaac

SEQ ID NO: 1522546 - DNA, 15 bp, Homo sapiens
gcaaagcacaaaaca

SEQ ID NO: 1522547 - DNA, 15 bp, Homo sapiens
caaagcacaaaacag

SEQ ID NO: 1522548 - DNA, 15 bp, Homo sapiens
aaagcacaaaacagc

SEQ ID NO: 1522549 - DNA, 15 bp, Homo sapiens
aagcacaaaacagca

SEQ ID NO: 1522550 - DNA, 15 bp, Homo sapiens
agcacaaaacagcaa

SEQ ID NO: 1522551 - DNA, 15 bp, Homo sapiens
gcacaaaacagcaaa

SEQ ID NO: 1522552 - DNA, 15 bp, Homo sapiens
cacaaaacagcaaaa

SEQ ID NO: 1522553 - DNA, 15 bp, Homo sapiens
acaaaacagcaaaag

SEQ ID NO: 1522554 - DNA, 15 bp, Homo sapiens
caaaacagcaaaaga

SEQ ID NO: 1522555 - DNA, 15 bp, Homo sapiens
aaaacagcaaaagaa

SEQ ID NO: 1522556 - DNA, 15 bp, Homo sapiens
aaacagcaaaagaac

SEQ ID NO: 1522557 - DNA, 15 bp, Homo sapiens
aacagcaaaagaaca

SEQ ID NO: 1522558 - DNA, 15 bp, Homo sapiens
acagcaaaagaacat

SEQ ID NO: 1522559 - DNA, 15 bp, Homo sapiens
cagcaaaagaacatg

SEQ ID NO: 1522560 - DNA, 15 bp, Homo sapiens
agcaaaagaacatga

SEQ ID NO: 1522561 - DNA, 15 bp, Homo sapiens
gcaaaagaacatgaa

SEQ ID NO: 1522562 - DNA, 15 bp, Homo sapiens
caaaagaacatgaaa

SEQ ID NO: 1522563 - DNA, 15 bp, Homo sapiens
aaaagaacatgaaat

SEQ ID NO: 1522564 - DNA, 15 bp, Homo sapiens
aaagaacatgaaatg

SEQ ID NO: 1522565 - DNA, 15 bp, Homo sapiens
aagaacatgaaatgc

SEQ ID NO: 1522566 - DNA, 15 bp, Homo sapiens
agaacatgaaatgct

SEQ ID NO: 1522567 - DNA, 15 bp, Homo sapiens
gaacatgaaatgctg

SEQ ID NO: 1522568 - DNA, 15 bp, Homo sapiens
aacatgaaatgctgc

SEQ ID NO: 1522569 - DNA, 15 bp, Homo sapiens
acatgaaatgctgct

SEQ ID NO: 1522570 - DNA, 15 bp, Homo sapiens
catgaaatgctgctc

SEQ ID NO: 1522571 - DNA, 15 bp, Homo sapiens
atgaaatgctgctcc

SEQ ID NO: 1522572 - DNA, 15 bp, Homo sapiens
tgaaatgctgctcca

SEQ ID NO: 1522573 - DNA, 15 bp, Homo sapiens
gaaatgctgctccaa

SEQ ID NO: 1522574 - DNA, 15 bp, Homo sapiens
aaatgctgctccaag

SEQ ID NO: 1522575 - DNA, 15 bp, Homo sapiens
aatgctgctccaagc

SEQ ID NO: 1522576 - DNA, 15 bp, Homo sapiens
atgctgctccaagca

SEQ ID NO: 1522577 - DNA, 15 bp, Homo sapiens
tgctgctccaagcag

SEQ ID NO: 1522578 - DNA, 15 bp, Homo sapiens
gctgctccaagcagg

SEQ ID NO: 1522579 - DNA, 15 bp, Homo sapiens
ctgctccaagcagga

SEQ ID NO: 1522580 - DNA, 15 bp, Homo sapiens
tgctccaagcaggac

SEQ ID NO: 1522581 - DNA, 15 bp, Homo sapiens
gctccaagcaggacc

SEQ ID NO: 1522582 - DNA, 15 bp, Homo sapiens
ctccaagcaggaccc

SEQ ID NO: 1522583 - DNA, 15 bp, Homo sapiens
tccaagcaggaccct

SEQ ID NO: 1522584 - DNA, 15 bp, Homo sapiens
ccaagcaggaccctg

SEQ ID NO: 1522585 - DNA, 15 bp, Homo sapiens
caagcaggaccctgg

SEQ ID NO: 1522586 - DNA, 15 bp, Homo sapiens
aagcaggaccctgga

SEQ ID NO: 1522587 - DNA, 15 bp, Homo sapiens
agcaggaccctggat

SEQ ID NO: 1522588 - DNA, 15 bp, Homo sapiens
gcaggaccctggata

SEQ ID NO: 1522589 - DNA, 15 bp, Homo sapiens
caggaccctggatag

SEQ ID NO: 1522590 - DNA, 15 bp, Homo sapiens
aggaccctggatagg

SEQ ID NO: 1522591 - DNA, 15 bp, Homo sapiens
ggaccctggataggg

SEQ ID NO: 1522592 - DNA, 15 bp, Homo sapiens
gaccctggataggga

SEQ ID NO: 1522593 - DNA, 15 bp, Homo sapiens
accctggatagggac

SEQ ID NO: 1522594 - DNA, 15 bp, Homo sapiens
ccctggatagggacc

SEQ ID NO: 1522595 - DNA, 15 bp, Homo sapiens
cctggatagggacct

SEQ ID NO: 1522596 - DNA, 15 bp, Homo sapiens
ctggatagggacctt

SEQ ID NO: 1522597 - DNA, 15 bp, Homo sapiens
tggatagggaccttc

SEQ ID NO: 1522598 - DNA, 15 bp, Homo sapiens
ggatagggaccttca

SEQ ID NO: 1522599 - DNA, 15 bp, Homo sapiens
gatagggaccttcat

SEQ ID NO: 1522600 - DNA, 15 bp, Homo sapiens
atagggaccttcatt

SEQ ID NO: 1522601 - DNA, 15 bp, Homo sapiens
tagggaccttcattg

SEQ ID NO: 1522602 - DNA, 15 bp, Homo sapiens
agggaccttcattgc

SEQ ID NO: 1522603 - DNA, 15 bp, Homo sapiens
gggaccttcattgct

SEQ ID NO: 1522604 - DNA, 15 bp, Homo sapiens
ggaccttcattgctg

SEQ ID NO: 1522605 - DNA, 15 bp, Homo sapiens
gaccttcattgctga

SEQ ID NO: 1522606 - DNA, 15 bp, Homo sapiens
accttcattgctgat

SEQ ID NO: 1522607 - DNA, 15 bp, Homo sapiens
ccttcattgctgatg

SEQ ID NO: 1522608 - DNA, 15 bp, Homo sapiens
cttcattgctgatgg

SEQ ID NO: 1522609 - DNA, 15 bp, Homo sapiens
ttcattgctgatggg

SEQ ID NO: 1522610 - DNA, 15 bp, Homo sapiens
tcattgctgatggga

SEQ ID NO: 1522611 - DNA, 15 bp, Homo sapiens
cattgctgatgggat

SEQ ID NO: 1522612 - DNA, 15 bp, Homo sapiens
attgctgatgggatg

SEQ ID NO: 1522613 - DNA, 15 bp, Homo sapiens
ttgctgatgggatga

SEQ ID NO: 1522614 - DNA, 15 bp, Homo sapiens
tgctgatgggatgac

SEQ ID NO: 1522615 - DNA, 15 bp, Homo sapiens
gctgatgggatgaca

SEQ ID NO: 1522616 - DNA, 15 bp, Homo sapiens
ctgatgggatgacac

SEQ ID NO: 1522617 - DNA, 15 bp, Homo sapiens
tgatgggatgacaca

SEQ ID NO: 1522618 - DNA, 15 bp, Homo sapiens
gatgggatgacacaa

SEQ ID NO: 1522619 - DNA, 15 bp, Homo sapiens
atgggatgacacaaa

SEQ ID NO: 1522620 - DNA, 15 bp, Homo sapiens
tgggatgacacaaat

SEQ ID NO: 1522621 - DNA, 15 bp, Homo sapiens
gggatgacacaaatt

SEQ ID NO: 1522622 - DNA, 15 bp, Homo sapiens
ggatgacacaaatta

SEQ ID NO: 1522623 - DNA, 15 bp, Homo sapiens
gatgacacaaattaa

SEQ ID NO: 1522624 - DNA, 15 bp, Homo sapiens
atgacacaaattaac

SEQ ID NO: 1522625 - DNA, 15 bp, Homo sapiens
tgacacaaattaact

SEQ ID NO: 1522626 - DNA, 15 bp, Homo sapiens
gacacaaattaactg

SEQ ID NO: 1522627 - DNA, 15 bp, Homo sapiens
acacaaattaactgt

SEQ ID NO: 1522628 - DNA, 15 bp, Homo sapiens
cacaaattaactgta

SEQ ID NO: 1522629 - DNA, 15 bp, Homo sapiens
acaaattaactgtac

SEQ ID NO: 1522630 - DNA, 15 bp, Homo sapiens
caaattaactgtacg

SEQ ID NO: 1522631 - DNA, 15 bp, Homo sapiens
aaattaactgtacga

SEQ ID NO: 1522632 - DNA, 15 bp, Homo sapiens
aattaactgtacgag

SEQ ID NO: 1522633 - DNA, 15 bp, Homo sapiens
attaactgtacgaga

SEQ ID NO: 1522634 - DNA, 15 bp, Homo sapiens
ttaactgtacgagaa

SEQ ID NO: 1522635 - DNA, 15 bp, Homo sapiens
taactgtacgagaag

SEQ ID NO: 1522636 - DNA, 15 bp, Homo sapiens
aactgtacgagaagt

SEQ ID NO: 1522637 - DNA, 15 bp, Homo sapiens
actgtacgagaagtc

SEQ ID NO: 1522638 - DNA, 15 bp, Homo sapiens
ctgtacgagaagtct

SEQ ID NO: 1522639 - DNA, 15 bp, Homo sapiens
tgtacgagaagtctg

SEQ ID NO: 1522640 - DNA, 15 bp, Homo sapiens
gtacgagaagtctgg

SEQ ID NO: 1522641 - DNA, 15 bp, Homo sapiens
tacgagaagtctggg

SEQ ID NO: 1522642 - DNA, 15 bp, Homo sapiens
acgagaagtctggga

SEQ ID NO: 1522643 - DNA, 15 bp, Homo sapiens
cgagaagtctgggag

SEQ ID NO: 1522644 - DNA, 15 bp, Homo sapiens
gagaagtctgggaga

SEQ ID NO: 1522645 - DNA, 15 bp, Homo sapiens
agaagtctgggagac

SEQ ID NO: 1522646 - DNA, 15 bp, Homo sapiens
gatatctccacaggt

SEQ ID NO: 1522647 - DNA, 15 bp, Homo sapiens
atatctccacaggta

SEQ ID NO: 1522648 - DNA, 15 bp, Homo sapiens
tatctccacaggtaa

SEQ ID NO: 1522649 - DNA, 15 bp, Homo sapiens
atctccacaggtaat

SEQ ID NO: 1522650 - DNA, 15 bp, Homo sapiens
tctccacaggtaatt

SEQ ID NO: 1522651 - DNA, 15 bp, Homo sapiens
ctccacaggtaatta

SEQ ID NO: 1522652 - DNA, 15 bp, Homo sapiens
tccacaggtaattat

SEQ ID NO: 1522653 - DNA, 15 bp, Homo sapiens
ccacaggtaattatg

SEQ ID NO: 1522654 - DNA, 15 bp, Homo sapiens
cacaggtaattatga

SEQ ID NO: 1522655 - DNA, 15 bp, Homo sapiens
acaggtaattatgag

SEQ ID NO: 1522656 - DNA, 15 bp, Homo sapiens
caggtaattatgagt

SEQ ID NO: 1522657 - DNA, 15 bp, Homo sapiens
aggtaattatgagta

SEQ ID NO: 1522658 - DNA, 15 bp, Homo sapiens
ggtaattatgagtag

SEQ ID NO: 1522659 - DNA, 15 bp, Homo sapiens
gtaattatgagtagt

SEQ ID NO: 1522660 - DNA, 15 bp, Homo sapiens
taattatgagtagtc

SEQ ID NO: 1522661 - DNA, 15 bp, Homo sapiens
aattatgagtagtcg

SEQ ID NO: 1522662 - DNA, 15 bp, Homo sapiens
attatgagtagtcgc

SEQ ID NO: 1522663 - DNA, 15 bp, Homo sapiens
ttatgagtagtcgcc

SEQ ID NO: 1522664 - DNA, 15 bp, Homo sapiens
tatgagtagtcgcca

SEQ ID NO: 1522665 - DNA, 15 bp, Homo sapiens
atgagtagtcgccag

SEQ ID NO: 1522666 - DNA, 15 bp, Homo sapiens
tgagtagtcgccagg

SEQ ID NO: 1522667 - DNA, 15 bp, Homo sapiens
gagtagtcgccaggg

SEQ ID NO: 1522668 - DNA, 15 bp, Homo sapiens
agtagtcgccagggt

SEQ ID NO: 1522669 - DNA, 15 bp, Homo sapiens
gtagtcgccagggtt

SEQ ID NO: 1522670 - DNA, 15 bp, Homo sapiens
tagtcgccagggttg

SEQ ID NO: 1522671 - DNA, 15 bp, Homo sapiens
agtcgccagggttga

SEQ ID NO: 1522672 - DNA, 15 bp, Homo sapiens
gtcgccagggttgaa

SEQ ID NO: 1522673 - DNA, 15 bp, Homo sapiens
tcgccagggttgaaa

SEQ ID NO: 1522674 - DNA, 15 bp, Homo sapiens
cgccagggttgaaaa

SEQ ID NO: 1522675 - DNA, 15 bp, Homo sapiens
gccagggttgaaaat

SEQ ID NO: 1522676 - DNA, 15 bp, Homo sapiens
ccagggttgaaaata

SEQ ID NO: 1522677 - DNA, 15 bp, Homo sapiens
cagggttgaaaataa

SEQ ID NO: 1522678 - DNA, 15 bp, Homo sapiens
agggttgaaaataac

SEQ ID NO: 1522679 - DNA, 15 bp, Homo sapiens
gggttgaaaataact

SEQ ID NO: 1522680 - DNA, 15 bp, Homo sapiens
ggttgaaaataactg

SEQ ID NO: 1522681 - DNA, 15 bp, Homo sapiens
gttgaaaataactgt

SEQ ID NO: 1522682 - DNA, 15 bp, Homo sapiens
ttgaaaataactgta

SEQ ID NO: 1522683 - DNA, 15 bp, Homo sapiens
tgaaaataactgtaa

SEQ ID NO: 1522684 - DNA, 15 bp, Homo sapiens
gaaaataactgtaac

SEQ ID NO: 1522685 - DNA, 15 bp, Homo sapiens
aaaataactgtaaca

SEQ ID NO: 1522686 - DNA, 15 bp, Homo sapiens
aaataactgtaacag

SEQ ID NO: 1522687 - DNA, 15 bp, Homo sapiens
aataactgtaacagt

SEQ ID NO: 1522688 - DNA, 15 bp, Homo sapiens
ataactgtaacagta

SEQ ID NO: 1522689 - DNA, 15 bp, Homo sapiens
taactgtaacagtac

SEQ ID NO: 1522690 - DNA, 15 bp, Homo sapiens
aactgtaacagtacc

SEQ ID NO: 1522691 - DNA, 15 bp, Homo sapiens
actgtaacagtacct

SEQ ID NO: 1522692 - DNA, 15 bp, Homo sapiens
ctgtaacagtacctg

SEQ ID NO: 1522693 - DNA, 15 bp, Homo sapiens
tgtaacagtacctga

SEQ ID NO: 1522694 - DNA, 15 bp, Homo sapiens
gtaacagtacctgac

SEQ ID NO: 1522695 - DNA, 15 bp, Homo sapiens
taacagtacctgaca

SEQ ID NO: 1522696 - DNA, 15 bp, Homo sapiens
aacagtacctgacat

SEQ ID NO: 1522697 - DNA, 15 bp, Homo sapiens
acagtacctgacatt

SEQ ID NO: 1522698 - DNA, 15 bp, Homo sapiens
cagtacctgacattt

SEQ ID NO: 1522699 - DNA, 15 bp, Homo sapiens
agtacctgacattta

SEQ ID NO: 1522700 - DNA, 15 bp, Homo sapiens
gtacctgacatttat

SEQ ID NO: 1522701 - DNA, 15 bp, Homo sapiens
tacctgacatttatc

SEQ ID NO: 1522702 - DNA, 15 bp, Homo sapiens
acctgacatttatct

SEQ ID NO: 1522703 - DNA, 15 bp, Homo sapiens
cctgacatttatcta

SEQ ID NO: 1522704 - DNA, 15 bp, Homo sapiens
ctgacatttatctat

SEQ ID NO: 1522705 - DNA, 15 bp, Homo sapiens
tgacatttatctatc

SEQ ID NO: 1522706 - DNA, 15 bp, Homo sapiens
gacatttatctatcc

SEQ ID NO: 1522707 - DNA, 15 bp, Homo sapiens
acatttatctatccc

SEQ ID NO: 1522708 - DNA, 15 bp, Homo sapiens
catttatctatccct

SEQ ID NO: 1522709 - DNA, 15 bp, Homo sapiens
atttatctatcccta

SEQ ID NO: 1522710 - DNA, 15 bp, Homo sapiens
tttatctatccctat

SEQ ID NO: 1522711 - DNA, 15 bp, Homo sapiens
ttatctatccctata

SEQ ID NO: 1522712 - DNA, 15 bp, Homo sapiens
tatctatccctatat

SEQ ID NO: 1522713 - DNA, 15 bp, Homo sapiens
atctatccctatatg

SEQ ID NO: 1522714 - DNA, 15 bp, Homo sapiens
tctatccctatatgc

SEQ ID NO: 1522715 - DNA, 15 bp, Homo sapiens
ctatccctatatgca

SEQ ID NO: 1522716 - DNA, 15 bp, Homo sapiens
tatccctatatgcaa

SEQ ID NO: 1522717 - DNA, 15 bp, Homo sapiens
atccctatatgcaag

SEQ ID NO: 1522718 - DNA, 15 bp, Homo sapiens
tccctatatgcaagt

SEQ ID NO: 1522719 - DNA, 15 bp, Homo sapiens
ccctatatgcaagta

SEQ ID NO: 1522720 - DNA, 15 bp, Homo sapiens
cctatatgcaagtac

SEQ ID NO: 1522721 - DNA, 15 bp, Homo sapiens
ctatatgcaagtact

SEQ ID NO: 1522722 - DNA, 15 bp, Homo sapiens
tatatgcaagtactt

SEQ ID NO: 1522723 - DNA, 15 bp, Homo sapiens
atatgcaagtacttg

SEQ ID NO: 1522724 - DNA, 15 bp, Homo sapiens
tatgcaagtacttgc

SEQ ID NO: 1522725 - DNA, 15 bp, Homo sapiens
atgcaagtacttgct

SEQ ID NO: 1522726 - DNA, 15 bp, Homo sapiens
tgcaagtacttgctg

SEQ ID NO: 1522727 - DNA, 15 bp, Homo sapiens
gcaagtacttgctga

SEQ ID NO: 1522728 - DNA, 15 bp, Homo sapiens
caagtacttgctgaa

SEQ ID NO: 1522729 - DNA, 15 bp, Homo sapiens
aagtacttgctgaat

SEQ ID NO: 1522730 - DNA, 15 bp, Homo sapiens
agtacttgctgaatt

SEQ ID NO: 1522731 - DNA, 15 bp, Homo sapiens
gtacttgctgaattc

SEQ ID NO: 1522732 - DNA, 15 bp, Homo sapiens
tacttgctgaattct

SEQ ID NO: 1522733 - DNA, 15 bp, Homo sapiens
acttgctgaattctt

SEQ ID NO: 1522734 - DNA, 15 bp, Homo sapiens
cttgctgaattcttt

SEQ ID NO: 1522735 - DNA, 15 bp, Homo sapiens
ttgctgaattcttta

SEQ ID NO: 1522736 - DNA, 15 bp, Homo sapiens
tgctgaattctttaa

SEQ ID NO: 1522737 - DNA, 15 bp, Homo sapiens
gctgaattctttaaa

SEQ ID NO: 1522738 - DNA, 15 bp, Homo sapiens
ctgaattctttaaat

SEQ ID NO: 1522739 - DNA, 15 bp, Homo sapiens
tgaattctttaaata

SEQ ID NO: 1522740 - DNA, 15 bp, Homo sapiens
gaattctttaaatac

SEQ ID NO: 1522741 - DNA, 15 bp, Homo sapiens
aattctttaaatacc

SEQ ID NO: 1522742 - DNA, 15 bp, Homo sapiens
attctttaaatacct

SEQ ID NO: 1522743 - DNA, 15 bp, Homo sapiens
ttctttaaatacctc

SEQ ID NO: 1522744 - DNA, 15 bp, Homo sapiens
tctttaaatacctct

SEQ ID NO: 1522745 - DNA, 15 bp, Homo sapiens
ctttaaatacctctc

SEQ ID NO: 1522746 - DNA, 15 bp, Homo sapiens
tttaaatacctctcc

SEQ ID NO: 1522747 - DNA, 15 bp, Homo sapiens
ttaaatacctctcct

SEQ ID NO: 1522748 - DNA, 15 bp, Homo sapiens
taaatacctctcctc

SEQ ID NO: 1522749 - DNA, 15 bp, Homo sapiens
aaatacctctcctca

SEQ ID NO: 1522750 - DNA, 15 bp, Homo sapiens
aatacctctcctcac

SEQ ID NO: 1522751 - DNA, 15 bp, Homo sapiens
atacctctcctcact

SEQ ID NO: 1522752 - DNA, 15 bp, Homo sapiens
tacctctcctcactt

SEQ ID NO: 1522753 - DNA, 15 bp, Homo sapiens
acctctcctcactta

SEQ ID NO: 1522754 - DNA, 15 bp, Homo sapiens
cctctcctcacttaa

SEQ ID NO: 1522755 - DNA, 15 bp, Homo sapiens
ctctcctcacttaat

SEQ ID NO: 1522756 - DNA, 15 bp, Homo sapiens
tctcctcacttaata

SEQ ID NO: 1522757 - DNA, 15 bp, Homo sapiens
ctcctcacttaatac

SEQ ID NO: 1522758 - DNA, 15 bp, Homo sapiens
tcctcacttaatact

SEQ ID NO: 1522759 - DNA, 15 bp, Homo sapiens
cctcacttaatactg

SEQ ID NO: 1522760 - DNA, 15 bp, Homo sapiens
ctcacttaatactgt

SEQ ID NO: 1522761 - DNA, 15 bp, Homo sapiens
tcacttaatactgtg

SEQ ID NO: 1522762 - DNA, 15 bp, Homo sapiens
cacttaatactgtga

SEQ ID NO: 1522763 - DNA, 15 bp, Homo sapiens
acttaatactgtgac

SEQ ID NO: 1522764 - DNA, 15 bp, Homo sapiens
cttaatactgtgaca

SEQ ID NO: 1522765 - DNA, 15 bp, Homo sapiens
ttaatactgtgacaa

SEQ ID NO: 1522766 - DNA, 15 bp, Homo sapiens
taatactgtgacaat

SEQ ID NO: 1522767 - DNA, 15 bp, Homo sapiens
aatactgtgacaatc

SEQ ID NO: 1522768 - DNA, 15 bp, Homo sapiens
atactgtgacaatcc

SEQ ID NO: 1522769 - DNA, 15 bp, Homo sapiens
tactgtgacaatcct

SEQ ID NO: 1522770 - DNA, 15 bp, Homo sapiens
actgtgacaatccta

SEQ ID NO: 1522771 - DNA, 15 bp, Homo sapiens
ctgtgacaatcctac

SEQ ID NO: 1522772 - DNA, 15 bp, Homo sapiens
tgtgacaatcctact

SEQ ID NO: 1522773 - DNA, 15 bp, Homo sapiens
gtgacaatcctacta

SEQ ID NO: 1522774 - DNA, 15 bp, Homo sapiens
tgacaatcctactag

SEQ ID NO: 1522775 - DNA, 15 bp, Homo sapiens
gacaatcctactagt

SEQ ID NO: 1522776 - DNA, 15 bp, Homo sapiens
acaatcctactagta

SEQ ID NO: 1522777 - DNA, 15 bp, Homo sapiens
caatcctactagtat

SEQ ID NO: 1522778 - DNA, 15 bp, Homo sapiens
aatcctactagtatt

SEQ ID NO: 1522779 - DNA, 15 bp, Homo sapiens
atcctactagtattt

SEQ ID NO: 1522780 - DNA, 15 bp, Homo sapiens
tcctactagtatttt

SEQ ID NO: 1522781 - DNA, 15 bp, Homo sapiens
cctactagtattttc

SEQ ID NO: 1522782 - DNA, 15 bp, Homo sapiens
ctactagtattttca

SEQ ID NO: 1522783 - DNA, 15 bp, Homo sapiens
tactagtattttcat

SEQ ID NO: 1522784 - DNA, 15 bp, Homo sapiens
actagtattttcatt

SEQ ID NO: 1522785 - DNA, 15 bp, Homo sapiens
ctagtattttcatta

SEQ ID NO: 1522786 - DNA, 15 bp, Homo sapiens
tagtattttcattaa

SEQ ID NO: 1522787 - DNA, 15 bp, Homo sapiens
agtattttcattaag

SEQ ID NO: 1522788 - DNA, 15 bp, Homo sapiens
gtattttcattaagt

SEQ ID NO: 1522789 - DNA, 15 bp, Homo sapiens
tattttcattaagtc

SEQ ID NO: 1522790 - DNA, 15 bp, Homo sapiens
attttcattaagtcc

SEQ ID NO: 1522791 - DNA, 15 bp, Homo sapiens
ttttcattaagtcct

SEQ ID NO: 1522792 - DNA, 15 bp, Homo sapiens
tttcattaagtcctt

SEQ ID NO: 1522793 - DNA, 15 bp, Homo sapiens
ttcattaagtccttg

SEQ ID NO: 1522794 - DNA, 15 bp, Homo sapiens
tcattaagtccttgt

SEQ ID NO: 1522795 - DNA, 15 bp, Homo sapiens
cattaagtccttgta

SEQ ID NO: 1522796 - DNA, 15 bp, Homo sapiens
attaagtccttgtat

SEQ ID NO: 1522797 - DNA, 15 bp, Homo sapiens
ttaagtccttgtata

SEQ ID NO: 1522798 - DNA, 15 bp, Homo sapiens
taagtccttgtatag

SEQ ID NO: 1522799 - DNA, 15 bp, Homo sapiens
aagtccttgtatagg

SEQ ID NO: 1522800 - DNA, 15 bp, Homo sapiens
agtccttgtataggt

SEQ ID NO: 1522801 - DNA, 15 bp, Homo sapiens
gtccttgtataggta

SEQ ID NO: 1522802 - DNA, 15 bp, Homo sapiens
tccttgtataggtaa

SEQ ID NO: 1522803 - DNA, 15 bp, Homo sapiens
ccttgtataggtaag

SEQ ID NO: 1522804 - DNA, 15 bp, Homo sapiens
cttgtataggtaagg

SEQ ID NO: 1522805 - DNA, 15 bp, Homo sapiens
ttgtataggtaagga

SEQ ID NO: 1522806 - DNA, 15 bp, Homo sapiens
tgtataggtaaggaa

SEQ ID NO: 1522807 - DNA, 15 bp, Homo sapiens
gtataggtaaggaaa

SEQ ID NO: 1522808 - DNA, 15 bp, Homo sapiens
tataggtaaggaaat

SEQ ID NO: 1522809 - DNA, 15 bp, Homo sapiens
ataggtaaggaaatt

SEQ ID NO: 1522810 - DNA, 15 bp, Homo sapiens
taggtaaggaaattg

SEQ ID NO: 1522811 - DNA, 15 bp, Homo sapiens
aggtaaggaaattga

SEQ ID NO: 1522812 - DNA, 15 bp, Homo sapiens
ggtaaggaaattgat

SEQ ID NO: 1522813 - DNA, 15 bp, Homo sapiens
gtaaggaaattgatt

SEQ ID NO: 1522814 - DNA, 15 bp, Homo sapiens
taaggaaattgattg

SEQ ID NO: 1522815 - DNA, 15 bp, Homo sapiens
aaggaaattgattga

SEQ ID NO: 1522816 - DNA, 15 bp, Homo sapiens
aggaaattgattgag

SEQ ID NO: 1522817 - DNA, 15 bp, Homo sapiens
ggaaattgattgagc

SEQ ID NO: 1522818 - DNA, 15 bp, Homo sapiens
gaaattgattgagcc

SEQ ID NO: 1522819 - DNA, 15 bp, Homo sapiens
aaattgattgagcct

SEQ ID NO: 1522820 - DNA, 15 bp, Homo sapiens
aattgattgagcctc

SEQ ID NO: 1522821 - DNA, 15 bp, Homo sapiens
attgattgagcctca

SEQ ID NO: 1522822 - DNA, 15 bp, Homo sapiens
ttgattgagcctcag

SEQ ID NO: 1522823 - DNA, 15 bp, Homo sapiens
tgattgagcctcagg

SEQ ID NO: 1522824 - DNA, 15 bp, Homo sapiens
gattgagcctcaggt

SEQ ID NO: 1522825 - DNA, 15 bp, Homo sapiens
attgagcctcaggtt

SEQ ID NO: 1522826 - DNA, 15 bp, Homo sapiens
ttgagcctcaggtta

SEQ ID NO: 1522827 - DNA, 15 bp, Homo sapiens
tgagcctcaggttaa

SEQ ID NO: 1522828 - DNA, 15 bp, Homo sapiens
gagcctcaggttaat

SEQ ID NO: 1522829 - DNA, 15 bp, Homo sapiens
agcctcaggttaata

SEQ ID NO: 1522830 - DNA, 15 bp, Homo sapiens
gcctcaggttaataa

SEQ ID NO: 1522831 - DNA, 15 bp, Homo sapiens
cctcaggttaataat

SEQ ID NO: 1522832 - DNA, 15 bp, Homo sapiens
ctcaggttaataatt

SEQ ID NO: 1522833 - DNA, 15 bp, Homo sapiens
tcaggttaataattt

SEQ ID NO: 1522834 - DNA, 15 bp, Homo sapiens
caggttaataattta

SEQ ID NO: 1522835 - DNA, 15 bp, Homo sapiens
aggttaataatttac

SEQ ID NO: 1522836 - DNA, 15 bp, Homo sapiens
ggttaataatttacc

SEQ ID NO: 1522837 - DNA, 15 bp, Homo sapiens
gttaataatttaccc

SEQ ID NO: 1522838 - DNA, 15 bp, Homo sapiens
ttaataatttaccca

SEQ ID NO: 1522839 - DNA, 15 bp, Homo sapiens
taataatttacccaa

SEQ ID NO: 1522840 - DNA, 15 bp, Homo sapiens
aataatttacccaag

SEQ ID NO: 1522841 - DNA, 15 bp, Homo sapiens
ataatttacccaagg

SEQ ID NO: 1522842 - DNA, 15 bp, Homo sapiens
taatttacccaaggt

SEQ ID NO: 1522843 - DNA, 15 bp, Homo sapiens
aatttacccaaggtc

SEQ ID NO: 1522844 - DNA, 15 bp, Homo sapiens
atttacccaaggtca

SEQ ID NO: 1522845 - DNA, 15 bp, Homo sapiens
tttacccaaggtcat

SEQ ID NO: 1522846 - DNA, 15 bp, Homo sapiens
ttacccaaggtcata

SEQ ID NO: 1522847 - DNA, 15 bp, Homo sapiens
tacccaaggtcatag

SEQ ID NO: 1522848 - DNA, 15 bp, Homo sapiens
acccaaggtcataga

SEQ ID NO: 1522849 - DNA, 15 bp, Homo sapiens
cccaaggtcatagag

SEQ ID NO: 1522850 - DNA, 15 bp, Homo sapiens
ccaaggtcatagagt

SEQ ID NO: 1522851 - DNA, 15 bp, Homo sapiens
caaggtcatagagta

SEQ ID NO: 1522852 - DNA, 15 bp, Homo sapiens
aaggtcatagagtag

SEQ ID NO: 1522853 - DNA, 15 bp, Homo sapiens
aggtcatagagtaga

SEQ ID NO: 1522854 - DNA, 15 bp, Homo sapiens
ggtcatagagtagag

SEQ ID NO: 1522855 - DNA, 15 bp, Homo sapiens
gtcatagagtagagt

SEQ ID NO: 1522856 - DNA, 15 bp, Homo sapiens
tcatagagtagagta

SEQ ID NO: 1522857 - DNA, 15 bp, Homo sapiens
catagagtagagtaa

SEQ ID NO: 1522858 - DNA, 15 bp, Homo sapiens
atagagtagagtaag

SEQ ID NO: 1522859 - DNA, 15 bp, Homo sapiens
tagagtagagtaagc

SEQ ID NO: 1522860 - DNA, 15 bp, Homo sapiens
agagtagagtaagca

SEQ ID NO: 1522861 - DNA, 15 bp, Homo sapiens
gagtagagtaagcag

SEQ ID NO: 1522862 - DNA, 15 bp, Homo sapiens
agtagagtaagcaga

SEQ ID NO: 1522863 - DNA, 15 bp, Homo sapiens
gtagagtaagcagaa

SEQ ID NO: 1522864 - DNA, 15 bp, Homo sapiens
tagagtaagcagaac

SEQ ID NO: 1522865 - DNA, 15 bp, Homo sapiens
agagtaagcagaact

SEQ ID NO: 1522866 - DNA, 15 bp, Homo sapiens
gagtaagcagaactg

SEQ ID NO: 1522867 - DNA, 15 bp, Homo sapiens
agtaagcagaactgg

SEQ ID NO: 1522868 - DNA, 15 bp, Homo sapiens
gtaagcagaactgga

SEQ ID NO: 1522869 - DNA, 15 bp, Homo sapiens
taagcagaactggat

SEQ ID NO: 1522870 - DNA, 15 bp, Homo sapiens
aagcagaactggatt

SEQ ID NO: 1522871 - DNA, 15 bp, Homo sapiens
agcagaactggattt

SEQ ID NO: 1522872 - DNA, 15 bp, Homo sapiens
gcagaactggatttg

SEQ ID NO: 1522873 - DNA, 15 bp, Homo sapiens
cagaactggatttga

SEQ ID NO: 1522874 - DNA, 15 bp, Homo sapiens
agaactggatttgaa

SEQ ID NO: 1522875 - DNA, 15 bp, Homo sapiens
gaactggatttgaat

SEQ ID NO: 1522876 - DNA, 15 bp, Homo sapiens
aactggatttgaatt

SEQ ID NO: 1522877 - DNA, 15 bp, Homo sapiens
actggatttgaattc

SEQ ID NO: 1522878 - DNA, 15 bp, Homo sapiens
ctggatttgaattca

SEQ ID NO: 1522879 - DNA, 15 bp, Homo sapiens
tggatttgaattcac

SEQ ID NO: 1522880 - DNA, 15 bp, Homo sapiens
ggatttgaattcaca

SEQ ID NO: 1522881 - DNA, 15 bp, Homo sapiens
gatttgaattcacat

SEQ ID NO: 1522882 - DNA, 15 bp, Homo sapiens
atttgaattcacatc

SEQ ID NO: 1522883 - DNA, 15 bp, Homo sapiens
tttgaattcacatct

SEQ ID NO: 1522884 - DNA, 15 bp, Homo sapiens
ttgaattcacatctg

SEQ ID NO: 1522885 - DNA, 15 bp, Homo sapiens
tgaattcacatctga

SEQ ID NO: 1522886 - DNA, 15 bp, Homo sapiens
gaattcacatctgac

SEQ ID NO: 1522887 - DNA, 15 bp, Homo sapiens
aattcacatctgact

SEQ ID NO: 1522888 - DNA, 15 bp, Homo sapiens
attcacatctgactc

SEQ ID NO: 1522889 - DNA, 15 bp, Homo sapiens
ttcacatctgactcc

SEQ ID NO: 1522890 - DNA, 15 bp, Homo sapiens
tcacatctgactcca

SEQ ID NO: 1522891 - DNA, 15 bp, Homo sapiens
cacatctgactccag

SEQ ID NO: 1522892 - DNA, 15 bp, Homo sapiens
acatctgactccaga

SEQ ID NO: 1522893 - DNA, 15 bp, Homo sapiens
catctgactccagaa

SEQ ID NO: 1522894 - DNA, 15 bp, Homo sapiens
atctgactccagaat

SEQ ID NO: 1522895 - DNA, 15 bp, Homo sapiens
tctgactccagaatt

SEQ ID NO: 1522896 - DNA, 15 bp, Homo sapiens
ctgactccagaattt

SEQ ID NO: 1522897 - DNA, 15 bp, Homo sapiens
tgactccagaattta

SEQ ID NO: 1522898 - DNA, 15 bp, Homo sapiens
gactccagaatttat

SEQ ID NO: 1522899 - DNA, 15 bp, Homo sapiens
actccagaatttatc

SEQ ID NO: 1522900 - DNA, 15 bp, Homo sapiens
ctccagaatttatct

SEQ ID NO: 1522901 - DNA, 15 bp, Homo sapiens
tccagaatttatcta

SEQ ID NO: 1522902 - DNA, 15 bp, Homo sapiens
ccagaatttatctat

SEQ ID NO: 1522903 - DNA, 15 bp, Homo sapiens
cagaatttatctatt

SEQ ID NO: 1522904 - DNA, 15 bp, Homo sapiens
agaatttatctatta

SEQ ID NO: 1522905 - DNA, 15 bp, Homo sapiens
gaatttatctattaa

SEQ ID NO: 1522906 - DNA, 15 bp, Homo sapiens
aatttatctattaac

SEQ ID NO: 1522907 - DNA, 15 bp, Homo sapiens
atttatctattaaca

SEQ ID NO: 1522908 - DNA, 15 bp, Homo sapiens
tttatctattaacaa

SEQ ID NO: 1522909 - DNA, 15 bp, Homo sapiens
ttatctattaacaat

SEQ ID NO: 1522910 - DNA, 15 bp, Homo sapiens
tatctattaacaatt

SEQ ID NO: 1522911 - DNA, 15 bp, Homo sapiens
atctattaacaatta

SEQ ID NO: 1522912 - DNA, 15 bp, Homo sapiens
tctattaacaattac

SEQ ID NO: 1522913 - DNA, 15 bp, Homo sapiens
ctattaacaattaca

SEQ ID NO: 1522914 - DNA, 15 bp, Homo sapiens
tattaacaattacac

SEQ ID NO: 1522915 - DNA, 15 bp, Homo sapiens
attaacaattacact

SEQ ID NO: 1522916 - DNA, 15 bp, Homo sapiens
ttaacaattacacta

SEQ ID NO: 1522917 - DNA, 15 bp, Homo sapiens
taacaattacactac

SEQ ID NO: 1522918 - DNA, 15 bp, Homo sapiens
aacaattacactaca

SEQ ID NO: 1522919 - DNA, 15 bp, Homo sapiens
acaattacactacac

SEQ ID NO: 1522920 - DNA, 15 bp, Homo sapiens
caattacactacact

SEQ ID NO: 1522921 - DNA, 15 bp, Homo sapiens
aattacactacactg

SEQ ID NO: 1522922 - DNA, 15 bp, Homo sapiens
attacactacactgc

SEQ ID NO: 1522923 - DNA, 15 bp, Homo sapiens
ttacactacactgcc

SEQ ID NO: 1522924 - DNA, 15 bp, Homo sapiens
tacactacactgcct

SEQ ID NO: 1522925 - DNA, 15 bp, Homo sapiens
acactacactgcctt

SEQ ID NO: 1522926 - DNA, 15 bp, Homo sapiens
cactacactgccttt

SEQ ID NO: 1522927 - DNA, 15 bp, Homo sapiens
actacactgcctttc

SEQ ID NO: 1522928 - DNA, 15 bp, Homo sapiens
ctacactgcctttcc

SEQ ID NO: 1522929 - DNA, 15 bp, Homo sapiens
tacactgcctttcct

SEQ ID NO: 1522930 - DNA, 15 bp, Homo sapiens
acactgcctttcctt

SEQ ID NO: 1522931 - DNA, 15 bp, Homo sapiens
cactgcctttccttc

SEQ ID NO: 1522932 - DNA, 15 bp, Homo sapiens
actgcctttccttct

SEQ ID NO: 1522933 - DNA, 15 bp, Homo sapiens
ctgcctttccttctg

SEQ ID NO: 1522934 - DNA, 15 bp, Homo sapiens
tgcctttccttctga

SEQ ID NO: 1522935 - DNA, 15 bp, Homo sapiens
gcctttccttctgag

SEQ ID NO: 1522936 - DNA, 15 bp, Homo sapiens
cctttccttctgaga

SEQ ID NO: 1522937 - DNA, 15 bp, Homo sapiens
ctttccttctgagaa

SEQ ID NO: 1522938 - DNA, 15 bp, Homo sapiens
tttccttctgagaaa

SEQ ID NO: 1522939 - DNA, 15 bp, Homo sapiens
ttccttctgagaaat

SEQ ID NO: 1522940 - DNA, 15 bp, Homo sapiens
tccttctgagaaatg

SEQ ID NO: 1522941 - DNA, 15 bp, Homo sapiens
ccttctgagaaatgc

SEQ ID NO: 1522942 - DNA, 15 bp, Homo sapiens
cttctgagaaatgct

SEQ ID NO: 1522943 - DNA, 15 bp, Homo sapiens
ttctgagaaatgcta

SEQ ID NO: 1522944 - DNA, 15 bp, Homo sapiens
tctgagaaatgctat

SEQ ID NO: 1522945 - DNA, 15 bp, Homo sapiens
ctgagaaatgctatg

SEQ ID NO: 1522946 - DNA, 15 bp, Homo sapiens
tgagaaatgctatga

SEQ ID NO: 1522947 - DNA, 15 bp, Homo sapiens
gagaaatgctatgat

SEQ ID NO: 1522948 - DNA, 15 bp, Homo sapiens
agaaatgctatgatt

SEQ ID NO: 1522949 - DNA, 15 bp, Homo sapiens
gaaatgctatgattt

SEQ ID NO: 1522950 - DNA, 15 bp, Homo sapiens
aaatgctatgatttt

SEQ ID NO: 1522951 - DNA, 15 bp, Homo sapiens
aatgctatgattttg

SEQ ID NO: 1522952 - DNA, 15 bp, Homo sapiens
atgctatgattttga

SEQ ID NO: 1522953 - DNA, 15 bp, Homo sapiens
tgctatgattttgac

SEQ ID NO: 1522954 - DNA, 15 bp, Homo sapiens
gctatgattttgaca

SEQ ID NO: 1522955 - DNA, 15 bp, Homo sapiens
ctatgattttgacaa

SEQ ID NO: 1522956 - DNA, 15 bp, Homo sapiens
tatgattttgacaac

SEQ ID NO: 1522957 - DNA, 15 bp, Homo sapiens
atgattttgacaact

SEQ ID NO: 1522958 - DNA, 15 bp, Homo sapiens
tgattttgacaacta

SEQ ID NO: 1522959 - DNA, 15 bp, Homo sapiens
gattttgacaactac

SEQ ID NO: 1522960 - DNA, 15 bp, Homo sapiens
attttgacaactaca

SEQ ID NO: 1522961 - DNA, 15 bp, Homo sapiens
ttttgacaactacag

SEQ ID NO: 1522962 - DNA, 15 bp, Homo sapiens
tttgacaactacaga

SEQ ID NO: 1522963 - DNA, 15 bp, Homo sapiens
ttgacaactacagag

SEQ ID NO: 1522964 - DNA, 15 bp, Homo sapiens
tgacaactacagagg

SEQ ID NO: 1522965 - DNA, 15 bp, Homo sapiens
gacaactacagaggg

SEQ ID NO: 1522966 - DNA, 15 bp, Homo sapiens
acaactacagaggga

SEQ ID NO: 1522967 - DNA, 15 bp, Homo sapiens
caactacagagggaa

SEQ ID NO: 1522968 - DNA, 15 bp, Homo sapiens
aactacagagggaat

SEQ ID NO: 1522969 - DNA, 15 bp, Homo sapiens
actacagagggaata

SEQ ID NO: 1522970 - DNA, 15 bp, Homo sapiens
ctacagagggaatat

SEQ ID NO: 1522971 - DNA, 15 bp, Homo sapiens
tacagagggaatatg

SEQ ID NO: 1522972 - DNA, 15 bp, Homo sapiens
acagagggaatatga

SEQ ID NO: 1522973 - DNA, 15 bp, Homo sapiens
cagagggaatatgac

SEQ ID NO: 1522974 - DNA, 15 bp, Homo sapiens
agagggaatatgact

SEQ ID NO: 1522975 - DNA, 15 bp, Homo sapiens
gagggaatatgactg

SEQ ID NO: 1522976 - DNA, 15 bp, Homo sapiens
agggaatatgactgt

SEQ ID NO: 1522977 - DNA, 15 bp, Homo sapiens
gggaatatgactgta

SEQ ID NO: 1522978 - DNA, 15 bp, Homo sapiens
ggaatatgactgtaa

SEQ ID NO: 1522979 - DNA, 15 bp, Homo sapiens
gaatatgactgtaaa

SEQ ID NO: 1522980 - DNA, 15 bp, Homo sapiens
aatatgactgtaaag

SEQ ID NO: 1522981 - DNA, 15 bp, Homo sapiens
atatgactgtaaagg

SEQ ID NO: 1522982 - DNA, 15 bp, Homo sapiens
tatgactgtaaaggc

SEQ ID NO: 1522983 - DNA, 15 bp, Homo sapiens
atgactgtaaaggcc

SEQ ID NO: 1522984 - DNA, 15 bp, Homo sapiens
tgactgtaaaggccc

SEQ ID NO: 1522985 - DNA, 15 bp, Homo sapiens
gactgtaaaggccct

SEQ ID NO: 1522986 - DNA, 15 bp, Homo sapiens
actgtaaaggccctg

SEQ ID NO: 1522987 - DNA, 15 bp, Homo sapiens
ctgtaaaggccctga

SEQ ID NO: 1522988 - DNA, 15 bp, Homo sapiens
tgtaaaggccctgaa

SEQ ID NO: 1522989 - DNA, 15 bp, Homo sapiens
gtaaaggccctgaag

SEQ ID NO: 1522990 - DNA, 15 bp, Homo sapiens
taaaggccctgaagc

SEQ ID NO: 1522991 - DNA, 15 bp, Homo sapiens
aaaggccctgaagca

SEQ ID NO: 1522992 - DNA, 15 bp, Homo sapiens
aaggccctgaagcaa

SEQ ID NO: 1522993 - DNA, 15 bp, Homo sapiens
aggccctgaagcaag

SEQ ID NO: 1522994 - DNA, 15 bp, Homo sapiens
ggccctgaagcaaga

SEQ ID NO: 1522995 - DNA, 15 bp, Homo sapiens
gccctgaagcaagag

SEQ ID NO: 1522996 - DNA, 15 bp, Homo sapiens
ccctgaagcaagagg

SEQ ID NO: 1522997 - DNA, 15 bp, Homo sapiens
cctgaagcaagagga

SEQ ID NO: 1522998 - DNA, 15 bp, Homo sapiens
ctgaagcaagaggaa

SEQ ID NO: 1522999 - DNA, 15 bp, Homo sapiens
tgaagcaagaggaag

SEQ ID NO: 1523000 - DNA, 15 bp, Homo sapiens
gaagcaagaggaaga

SEQ ID NO: 1523001 - DNA, 15 bp, Homo sapiens
aagcaagaggaagag

SEQ ID NO: 1523002 - DNA, 15 bp, Homo sapiens
agcaagaggaagagt

SEQ ID NO: 1523003 - DNA, 15 bp, Homo sapiens
gcaagaggaagagta

SEQ ID NO: 1523004 - DNA, 15 bp, Homo sapiens
caagaggaagagtat

SEQ ID NO: 1523005 - DNA, 15 bp, Homo sapiens
aagaggaagagtatt

SEQ ID NO: 1523006 - DNA, 15 bp, Homo sapiens
agaggaagagtatta

SEQ ID NO: 1523007 - DNA, 15 bp, Homo sapiens
gaggaagagtattag

SEQ ID NO: 1523008 - DNA, 15 bp, Homo sapiens
aggaagagtattagg

SEQ ID NO: 1523009 - DNA, 15 bp, Homo sapiens
ggaagagtattagga

SEQ ID NO: 1523010 - DNA, 15 bp, Homo sapiens
gaagagtattaggag

SEQ ID NO: 1523011 - DNA, 15 bp, Homo sapiens
aagagtattaggaga

SEQ ID NO: 1523012 - DNA, 15 bp, Homo sapiens
agagtattaggagat

SEQ ID NO: 1523013 - DNA, 15 bp, Homo sapiens
gagtattaggagatg

SEQ ID NO: 1523014 - DNA, 15 bp, Homo sapiens
agtattaggagatga

SEQ ID NO: 1523015 - DNA, 15 bp, Homo sapiens
gtattaggagatgag

SEQ ID NO: 1523016 - DNA, 15 bp, Homo sapiens
tattaggagatgagg

SEQ ID NO: 1523017 - DNA, 15 bp, Homo sapiens
attaggagatgaggt

SEQ ID NO: 1523018 - DNA, 15 bp, Homo sapiens
ttaggagatgaggtc

SEQ ID NO: 1523019 - DNA, 15 bp, Homo sapiens
taggagatgaggtcg

SEQ ID NO: 1523020 - DNA, 15 bp, Homo sapiens
aggagatgaggtcgg

SEQ ID NO: 1523021 - DNA, 15 bp, Homo sapiens
ggagatgaggtcggt

SEQ ID NO: 1523022 - DNA, 15 bp, Homo sapiens
gagatgaggtcggtg

SEQ ID NO: 1523023 - DNA, 15 bp, Homo sapiens
agatgaggtcggtga

SEQ ID NO: 1523024 - DNA, 15 bp, Homo sapiens
gatgaggtcggtgag

SEQ ID NO: 1523025 - DNA, 15 bp, Homo sapiens
atgaggtcggtgagc

SEQ ID NO: 1523026 - DNA, 15 bp, Homo sapiens
tgaggtcggtgagca

SEQ ID NO: 1523027 - DNA, 15 bp, Homo sapiens
gaggtcggtgagcat

SEQ ID NO: 1523028 - DNA, 15 bp, Homo sapiens
aggtcggtgagcata

SEQ ID NO: 1523029 - DNA, 15 bp, Homo sapiens
ggtcggtgagcatag

SEQ ID NO: 1523030 - DNA, 15 bp, Homo sapiens
gtcggtgagcatagg

SEQ ID NO: 1523031 - DNA, 15 bp, Homo sapiens
tcggtgagcataggc

SEQ ID NO: 1523032 - DNA, 15 bp, Homo sapiens
cggtgagcataggcc

SEQ ID NO: 1523033 - DNA, 15 bp, Homo sapiens
ggtgagcataggcca

SEQ ID NO: 1523034 - DNA, 15 bp, Homo sapiens
gtgagcataggccaa

SEQ ID NO: 1523035 - DNA, 15 bp, Homo sapiens
tgagcataggccaaa

SEQ ID NO: 1523036 - DNA, 15 bp, Homo sapiens
gagcataggccaaag

SEQ ID NO: 1523037 - DNA, 15 bp, Homo sapiens
agcataggccaaagc

SEQ ID NO: 1523038 - DNA, 15 bp, Homo sapiens
gcataggccaaagca

SEQ ID NO: 1523039 - DNA, 15 bp, Homo sapiens
cataggccaaagcat

SEQ ID NO: 1523040 - DNA, 15 bp, Homo sapiens
ataggccaaagcata

SEQ ID NO: 1523041 - DNA, 15 bp, Homo sapiens
taggccaaagcatat

SEQ ID NO: 1523042 - DNA, 15 bp, Homo sapiens
aggccaaagcatata

SEQ ID NO: 1523043 - DNA, 15 bp, Homo sapiens
ggccaaagcatatag

SEQ ID NO: 1523044 - DNA, 15 bp, Homo sapiens
gccaaagcatatagg

SEQ ID NO: 1523045 - DNA, 15 bp, Homo sapiens
ccaaagcatataggc

SEQ ID NO: 1523046 - DNA, 15 bp, Homo sapiens
caaagcatataggcc

SEQ ID NO: 1523047 - DNA, 15 bp, Homo sapiens
aaagcatataggcct

SEQ ID NO: 1523048 - DNA, 15 bp, Homo sapiens
aagcatataggcctt

SEQ ID NO: 1523049 - DNA, 15 bp, Homo sapiens
agcatataggccttt

SEQ ID NO: 1523050 - DNA, 15 bp, Homo sapiens
gcatataggcctttg

SEQ ID NO: 1523051 - DNA, 15 bp, Homo sapiens
catataggcctttgt

SEQ ID NO: 1523052 - DNA, 15 bp, Homo sapiens
atataggcctttgta

SEQ ID NO: 1523053 - DNA, 15 bp, Homo sapiens
tataggcctttgtag

SEQ ID NO: 1523054 - DNA, 15 bp, Homo sapiens
ataggcctttgtagg

SEQ ID NO: 1523055 - DNA, 15 bp, Homo sapiens
taggcctttgtaggg

SEQ ID NO: 1523056 - DNA, 15 bp, Homo sapiens
aggcctttgtagggg

SEQ ID NO: 1523057 - DNA, 15 bp, Homo sapiens
ggcctttgtagggga

SEQ ID NO: 1523058 - DNA, 15 bp, Homo sapiens
gcctttgtaggggat

SEQ ID NO: 1523059 - DNA, 15 bp, Homo sapiens
cctttgtaggggatt

SEQ ID NO: 1523060 - DNA, 15 bp, Homo sapiens
ctttgtaggggatta

SEQ ID NO: 1523061 - DNA, 15 bp, Homo sapiens
tttgtaggggattac

SEQ ID NO: 1523062 - DNA, 15 bp, Homo sapiens
ttgtaggggattacg

SEQ ID NO: 1523063 - DNA, 15 bp, Homo sapiens
tgtaggggattacga

SEQ ID NO: 1523064 - DNA, 15 bp, Homo sapiens
gtaggggattacgag

SEQ ID NO: 1523065 - DNA, 15 bp, Homo sapiens
taggggattacgaga

SEQ ID NO: 1523066 - DNA, 15 bp, Homo sapiens
aggggattacgagaa

SEQ ID NO: 1523067 - DNA, 15 bp, Homo sapiens
ggggattacgagaat

SEQ ID NO: 1523068 - DNA, 15 bp, Homo sapiens
gggattacgagaatg

SEQ ID NO: 1523069 - DNA, 15 bp, Homo sapiens
ggattacgagaatgg

SEQ ID NO: 1523070 - DNA, 15 bp, Homo sapiens
gattacgagaatggg

SEQ ID NO: 1523071 - DNA, 15 bp, Homo sapiens
attacgagaatggga

SEQ ID NO: 1523072 - DNA, 15 bp, Homo sapiens
ttacgagaatgggaa

SEQ ID NO: 1523073 - DNA, 15 bp, Homo sapiens
tacgagaatgggaag

SEQ ID NO: 1523074 - DNA, 15 bp, Homo sapiens
acgagaatgggaaga

SEQ ID NO: 1523075 - DNA, 15 bp, Homo sapiens
cgagaatgggaagat

SEQ ID NO: 1523076 - DNA, 15 bp, Homo sapiens
gagaatgggaagatg

SEQ ID NO: 1523077 - DNA, 15 bp, Homo sapiens
agaatgggaagatgt

SEQ ID NO: 1523078 - DNA, 15 bp, Homo sapiens
gaatgggaagatgtg

SEQ ID NO: 1523079 - DNA, 15 bp, Homo sapiens
aatgggaagatgtga

SEQ ID NO: 1523080 - DNA, 15 bp, Homo sapiens
atgggaagatgtgag

SEQ ID NO: 1523081 - DNA, 15 bp, Homo sapiens
tgggaagatgtgaga

SEQ ID NO: 1523082 - DNA, 15 bp, Homo sapiens
gggaagatgtgagat

SEQ ID NO: 1523083 - DNA, 15 bp, Homo sapiens
ggaagatgtgagatg

SEQ ID NO: 1523084 - DNA, 15 bp, Homo sapiens
gaagatgtgagatgg

SEQ ID NO: 1523085 - DNA, 15 bp, Homo sapiens
aagatgtgagatggg

SEQ ID NO: 1523086 - DNA, 15 bp, Homo sapiens
agatgtgagatggga

SEQ ID NO: 1523087 - DNA, 15 bp, Homo sapiens
gatgtgagatgggaa

SEQ ID NO: 1523088 - DNA, 15 bp, Homo sapiens
atgtgagatgggaag

SEQ ID NO: 1523089 - DNA, 15 bp, Homo sapiens
tgtgagatgggaagc

SEQ ID NO: 1523090 - DNA, 15 bp, Homo sapiens
gtgagatgggaagcc

SEQ ID NO: 1523091 - DNA, 15 bp, Homo sapiens
tgagatgggaagcca

SEQ ID NO: 1523092 - DNA, 15 bp, Homo sapiens
gagatgggaagccac

SEQ ID NO: 1523093 - DNA, 15 bp, Homo sapiens
agatgggaagccact

SEQ ID NO: 1523094 - DNA, 15 bp, Homo sapiens
gatgggaagccactg

SEQ ID NO: 1523095 - DNA, 15 bp, Homo sapiens
atgggaagccactgg

SEQ ID NO: 1523096 - DNA, 15 bp, Homo sapiens
tgggaagccactggg

SEQ ID NO: 1523097 - DNA, 15 bp, Homo sapiens
gggaagccactggga

SEQ ID NO: 1523098 - DNA, 15 bp, Homo sapiens
ggaagccactgggaa

SEQ ID NO: 1523099 - DNA, 15 bp, Homo sapiens
gaagccactgggaaa

SEQ ID NO: 1523100 - DNA, 15 bp, Homo sapiens
aagccactgggaaat

SEQ ID NO: 1523101 - DNA, 15 bp, Homo sapiens
agccactgggaaata

SEQ ID NO: 1523102 - DNA, 15 bp, Homo sapiens
gccactgggaaatat

SEQ ID NO: 1523103 - DNA, 15 bp, Homo sapiens
ccactgggaaatatt

SEQ ID NO: 1523104 - DNA, 15 bp, Homo sapiens
cactgggaaatattg

SEQ ID NO: 1523105 - DNA, 15 bp, Homo sapiens
actgggaaatattga

SEQ ID NO: 1523106 - DNA, 15 bp, Homo sapiens
ctgggaaatattgag

SEQ ID NO: 1523107 - DNA, 15 bp, Homo sapiens
tgggaaatattgagc

SEQ ID NO: 1523108 - DNA, 15 bp, Homo sapiens
gggaaatattgagca

SEQ ID NO: 1523109 - DNA, 15 bp, Homo sapiens
ggaaatattgagcaa

SEQ ID NO: 1523110 - DNA, 15 bp, Homo sapiens
gaaatattgagcaaa

SEQ ID NO: 1523111 - DNA, 15 bp, Homo sapiens
aaatattgagcaaat

SEQ ID NO: 1523112 - DNA, 15 bp, Homo sapiens
aatattgagcaaatg

SEQ ID NO: 1523113 - DNA, 15 bp, Homo sapiens
atattgagcaaatgt

SEQ ID NO: 1523114 - DNA, 15 bp, Homo sapiens
tattgagcaaatgtg

SEQ ID NO: 1523115 - DNA, 15 bp, Homo sapiens
attgagcaaatgtga

SEQ ID NO: 1523116 - DNA, 15 bp, Homo sapiens
ttgagcaaatgtgat

SEQ ID NO: 1523117 - DNA, 15 bp, Homo sapiens
tgagcaaatgtgatt

SEQ ID NO: 1523118 - DNA, 15 bp, Homo sapiens
gagcaaatgtgattt

SEQ ID NO: 1523119 - DNA, 15 bp, Homo sapiens
agcaaatgtgattta

SEQ ID NO: 1523120 - DNA, 15 bp, Homo sapiens
gcaaatgtgatttat

SEQ ID NO: 1523121 - DNA, 15 bp, Homo sapiens
caaatgtgatttatg

SEQ ID NO: 1523122 - DNA, 15 bp, Homo sapiens
aaatgtgatttatgc

SEQ ID NO: 1523123 - DNA, 15 bp, Homo sapiens
aatgtgatttatgct

SEQ ID NO: 1523124 - DNA, 15 bp, Homo sapiens
atgtgatttatgctt

SEQ ID NO: 1523125 - DNA, 15 bp, Homo sapiens
tgtgatttatgcttt

SEQ ID NO: 1523126 - DNA, 15 bp, Homo sapiens
gtgatttatgcttta

SEQ ID NO: 1523127 - DNA, 15 bp, Homo sapiens
tgatttatgctttaa

SEQ ID NO: 1523128 - DNA, 15 bp, Homo sapiens
gatttatgctttaaa

SEQ ID NO: 1523129 - DNA, 15 bp, Homo sapiens
atttatgctttaaaa

SEQ ID NO: 1523130 - DNA, 15 bp, Homo sapiens
tttatgctttaaaag

SEQ ID NO: 1523131 - DNA, 15 bp, Homo sapiens
ttatgctttaaaaga

SEQ ID NO: 1523132 - DNA, 15 bp, Homo sapiens
tatgctttaaaagaa

SEQ ID NO: 1523133 - DNA, 15 bp, Homo sapiens
atgctttaaaagaat

SEQ ID NO: 1523134 - DNA, 15 bp, Homo sapiens
tgctttaaaagaatc

SEQ ID NO: 1523135 - DNA, 15 bp, Homo sapiens
gctttaaaagaatct

SEQ ID NO: 1523136 - DNA, 15 bp, Homo sapiens
ctttaaaagaatctc

SEQ ID NO: 1523137 - DNA, 15 bp, Homo sapiens
tttaaaagaatctct

SEQ ID NO: 1523138 - DNA, 15 bp, Homo sapiens
ttaaaagaatctctt

SEQ ID NO: 1523139 - DNA, 15 bp, Homo sapiens
taaaagaatctcttt

SEQ ID NO: 1523140 - DNA, 15 bp, Homo sapiens
aaaagaatctctttc

SEQ ID NO: 1523141 - DNA, 15 bp, Homo sapiens
aaagaatctctttct

SEQ ID NO: 1523142 - DNA, 15 bp, Homo sapiens
aagaatctctttctt

SEQ ID NO: 1523143 - DNA, 15 bp, Homo sapiens
agaatctctttcttt

SEQ ID NO: 1523144 - DNA, 15 bp, Homo sapiens
gaatctctttctttg

SEQ ID NO: 1523145 - DNA, 15 bp, Homo sapiens
aatctctttctttgg

SEQ ID NO: 1523146 - DNA, 15 bp, Homo sapiens
atctctttctttggc

SEQ ID NO: 1523147 - DNA, 15 bp, Homo sapiens
tctctttctttggct

SEQ ID NO: 1523148 - DNA, 15 bp, Homo sapiens
ctctttctttggctg

SEQ ID NO: 1523149 - DNA, 15 bp, Homo sapiens
tctttctttggctgc

SEQ ID NO: 1523150 - DNA, 15 bp, Homo sapiens
ctttctttggctgct

SEQ ID NO: 1523151 - DNA, 15 bp, Homo sapiens
tttctttggctgctg

SEQ ID NO: 1523152 - DNA, 15 bp, Homo sapiens
ttctttggctgctga

SEQ ID NO: 1523153 - DNA, 15 bp, Homo sapiens
tctttggctgctgag

SEQ ID NO: 1523154 - DNA, 15 bp, Homo sapiens
ctttggctgctgagt

SEQ ID NO: 1523155 - DNA, 15 bp, Homo sapiens
tttggctgctgagtt

SEQ ID NO: 1523156 - DNA, 15 bp, Homo sapiens
ttggctgctgagttg

SEQ ID NO: 1523157 - DNA, 15 bp, Homo sapiens
tggctgctgagttgt

SEQ ID NO: 1523158 - DNA, 15 bp, Homo sapiens
ggctgctgagttgtg

SEQ ID NO: 1523159 - DNA, 15 bp, Homo sapiens
gctgctgagttgtga

SEQ ID NO: 1523160 - DNA, 15 bp, Homo sapiens
ctgctgagttgtgaa

SEQ ID NO: 1523161 - DNA, 15 bp, Homo sapiens
tgctgagttgtgaac

SEQ ID NO: 1523162 - DNA, 15 bp, Homo sapiens
gctgagttgtgaaca

SEQ ID NO: 1523163 - DNA, 15 bp, Homo sapiens
ctgagttgtgaacag

SEQ ID NO: 1523164 - DNA, 15 bp, Homo sapiens
tgagttgtgaacagt

SEQ ID NO: 1523165 - DNA, 15 bp, Homo sapiens
gagttgtgaacagtg

SEQ ID NO: 1523166 - DNA, 15 bp, Homo sapiens
agttgtgaacagtgc

SEQ ID NO: 1523167 - DNA, 15 bp, Homo sapiens
gttgtgaacagtgca

SEQ ID NO: 1523168 - DNA, 15 bp, Homo sapiens
ttgtgaacagtgcac

SEQ ID NO: 1523169 - DNA, 15 bp, Homo sapiens
tgtgaacagtgcact

SEQ ID NO: 1523170 - DNA, 15 bp, Homo sapiens
gtgaacagtgcactg

SEQ ID NO: 1523171 - DNA, 15 bp, Homo sapiens
tgaacagtgcactgg

SEQ ID NO: 1523172 - DNA, 15 bp, Homo sapiens
gaacagtgcactggc

SEQ ID NO: 1523173 - DNA, 15 bp, Homo sapiens
aacagtgcactggca

SEQ ID NO: 1523174 - DNA, 15 bp, Homo sapiens
acagtgcactggcaa

SEQ ID NO: 1523175 - DNA, 15 bp, Homo sapiens
cagtgcactggcaag

SEQ ID NO: 1523176 - DNA, 15 bp, Homo sapiens
agtgcactggcaagg

SEQ ID NO: 1523177 - DNA, 15 bp, Homo sapiens
gtgcactggcaaggg

SEQ ID NO: 1523178 - DNA, 15 bp, Homo sapiens
tgcactggcaagggc

SEQ ID NO: 1523179 - DNA, 15 bp, Homo sapiens
gcactggcaagggca

SEQ ID NO: 1523180 - DNA, 15 bp, Homo sapiens
cactggcaagggcag

SEQ ID NO: 1523181 - DNA, 15 bp, Homo sapiens
actggcaagggcaga

SEQ ID NO: 1523182 - DNA, 15 bp, Homo sapiens
ctggcaagggcagaa

SEQ ID NO: 1523183 - DNA, 15 bp, Homo sapiens
tggcaagggcagaag

SEQ ID NO: 1523184 - DNA, 15 bp, Homo sapiens
ggcaagggcagaagc

SEQ ID NO: 1523185 - DNA, 15 bp, Homo sapiens
gcaagggcagaagca

SEQ ID NO: 1523186 - DNA, 15 bp, Homo sapiens
caagggcagaagcag

SEQ ID NO: 1523187 - DNA, 15 bp, Homo sapiens
aagggcagaagcagg

SEQ ID NO: 1523188 - DNA, 15 bp, Homo sapiens
agggcagaagcaggg

SEQ ID NO: 1523189 - DNA, 15 bp, Homo sapiens
gggcagaagcaggga

SEQ ID NO: 1523190 - DNA, 15 bp, Homo sapiens
ggcagaagcagggag

SEQ ID NO: 1523191 - DNA, 15 bp, Homo sapiens
gcagaagcagggagg

SEQ ID NO: 1523192 - DNA, 15 bp, Homo sapiens
cagaagcagggaggc

SEQ ID NO: 1523193 - DNA, 15 bp, Homo sapiens
agaagcagggaggcc

SEQ ID NO: 1523194 - DNA, 15 bp, Homo sapiens
gaagcagggaggcca

SEQ ID NO: 1523195 - DNA, 15 bp, Homo sapiens
aagcagggaggccat

SEQ ID NO: 1523196 - DNA, 15 bp, Homo sapiens
agcagggaggccatt

SEQ ID NO: 1523197 - DNA, 15 bp, Homo sapiens
gcagggaggccattt

SEQ ID NO: 1523198 - DNA, 15 bp, Homo sapiens
cagggaggccattta

SEQ ID NO: 1523199 - DNA, 15 bp, Homo sapiens
agggaggccatttag

SEQ ID NO: 1523200 - DNA, 15 bp, Homo sapiens
gggaggccatttagg

SEQ ID NO: 1523201 - DNA, 15 bp, Homo sapiens
ggaggccatttagga

SEQ ID NO: 1523202 - DNA, 15 bp, Homo sapiens
gaggccatttaggag

SEQ ID NO: 1523203 - DNA, 15 bp, Homo sapiens
aggccatttaggaga

SEQ ID NO: 1523204 - DNA, 15 bp, Homo sapiens
ggccatttaggagac

SEQ ID NO: 1523205 - DNA, 15 bp, Homo sapiens
gccatttaggagact

SEQ ID NO: 1523206 - DNA, 15 bp, Homo sapiens
ccatttaggagactt

SEQ ID NO: 1523207 - DNA, 15 bp, Homo sapiens
catttaggagacttg

SEQ ID NO: 1523208 - DNA, 15 bp, Homo sapiens
atttaggagacttgc

SEQ ID NO: 1523209 - DNA, 15 bp, Homo sapiens
tttaggagacttgca

SEQ ID NO: 1523210 - DNA, 15 bp, Homo sapiens
ttaggagacttgcaa

SEQ ID NO: 1523211 - DNA, 15 bp, Homo sapiens
taggagacttgcaac

SEQ ID NO: 1523212 - DNA, 15 bp, Homo sapiens
aggagacttgcaaca

SEQ ID NO: 1523213 - DNA, 15 bp, Homo sapiens
ggagacttgcaacaa

SEQ ID NO: 1523214 - DNA, 15 bp, Homo sapiens
gagacttgcaacaat

SEQ ID NO: 1523215 - DNA, 15 bp, Homo sapiens
agacttgcaacaatc

SEQ ID NO: 1523216 - DNA, 15 bp, Homo sapiens
gacttgcaacaatcc

SEQ ID NO: 1523217 - DNA, 15 bp, Homo sapiens
acttgcaacaatcca

SEQ ID NO: 1523218 - DNA, 15 bp, Homo sapiens
cttgcaacaatccag

SEQ ID NO: 1523219 - DNA, 15 bp, Homo sapiens
ttgcaacaatccagg

SEQ ID NO: 1523220 - DNA, 15 bp, Homo sapiens
tgcaacaatccaggt

SEQ ID NO: 1523221 - DNA, 15 bp, Homo sapiens
gcaacaatccaggtc

SEQ ID NO: 1523222 - DNA, 15 bp, Homo sapiens
caacaatccaggtca

SEQ ID NO: 1523223 - DNA, 15 bp, Homo sapiens
aacaatccaggtcaa

SEQ ID NO: 1523224 - DNA, 15 bp, Homo sapiens
acaatccaggtcaaa

SEQ ID NO: 1523225 - DNA, 15 bp, Homo sapiens
caatccaggtcaaat

SEQ ID NO: 1523226 - DNA, 15 bp, Homo sapiens
aatccaggtcaaatg

SEQ ID NO: 1523227 - DNA, 15 bp, Homo sapiens
atccaggtcaaatga

SEQ ID NO: 1523228 - DNA, 15 bp, Homo sapiens
tccaggtcaaatgat

SEQ ID NO: 1523229 - DNA, 15 bp, Homo sapiens
ccaggtcaaatgatg

SEQ ID NO: 1523230 - DNA, 15 bp, Homo sapiens
caggtcaaatgatga

SEQ ID NO: 1523231 - DNA, 15 bp, Homo sapiens
aggtcaaatgatgag

SEQ ID NO: 1523232 - DNA, 15 bp, Homo sapiens
ggtcaaatgatgaga

SEQ ID NO: 1523233 - DNA, 15 bp, Homo sapiens
gtcaaatgatgagaa

SEQ ID NO: 1523234 - DNA, 15 bp, Homo sapiens
tcaaatgatgagaaa

SEQ ID NO: 1523235 - DNA, 15 bp, Homo sapiens
caaatgatgagaaat

SEQ ID NO: 1523236 - DNA, 15 bp, Homo sapiens
aaatgatgagaaata

SEQ ID NO: 1523237 - DNA, 15 bp, Homo sapiens
aatgatgagaaatag

SEQ ID NO: 1523238 - DNA, 15 bp, Homo sapiens
atgatgagaaatagt

SEQ ID NO: 1523239 - DNA, 15 bp, Homo sapiens
tgatgagaaatagtt

SEQ ID NO: 1523240 - DNA, 15 bp, Homo sapiens
gatgagaaatagtta

SEQ ID NO: 1523241 - DNA, 15 bp, Homo sapiens
atgagaaatagttag

SEQ ID NO: 1523242 - DNA, 15 bp, Homo sapiens
tgagaaatagttagg

SEQ ID NO: 1523243 - DNA, 15 bp, Homo sapiens
gagaaatagttaggc

SEQ ID NO: 1523244 - DNA, 15 bp, Homo sapiens
agaaatagttaggct

SEQ ID NO: 1523245 - DNA, 15 bp, Homo sapiens
gaaatagttaggctt

SEQ ID NO: 1523246 - DNA, 15 bp, Homo sapiens
aaatagttaggcttt

SEQ ID NO: 1523247 - DNA, 15 bp, Homo sapiens
aatagttaggctttg

SEQ ID NO: 1523248 - DNA, 15 bp, Homo sapiens
atagttaggctttgg

SEQ ID NO: 1523249 - DNA, 15 bp, Homo sapiens
tagttaggctttgga

SEQ ID NO: 1523250 - DNA, 15 bp, Homo sapiens
agttaggctttggat

SEQ ID NO: 1523251 - DNA, 15 bp, Homo sapiens
gttaggctttggata

SEQ ID NO: 1523252 - DNA, 15 bp, Homo sapiens
ccgcctctgactcgg

SEQ ID NO: 1523253 - DNA, 15 bp, Homo sapiens
cgcctctgactcgga

SEQ ID NO: 1523254 - DNA, 15 bp, Homo sapiens
gcctctgactcggac

SEQ ID NO: 1523255 - DNA, 15 bp, Homo sapiens
cctctgactcggaca

SEQ ID NO: 1523256 - DNA, 15 bp, Homo sapiens
ctctgactcggacac

SEQ ID NO: 1523257 - DNA, 15 bp, Homo sapiens
tctgactcggacacc

SEQ ID NO: 1523258 - DNA, 15 bp, Homo sapiens
ctgactcggacacca

SEQ ID NO: 1523259 - DNA, 15 bp, Homo sapiens
tgactcggacaccag

SEQ ID NO: 1523260 - DNA, 15 bp, Homo sapiens
gactcggacaccagc

SEQ ID NO: 1523261 - DNA, 15 bp, Homo sapiens
actcggacaccagcc

SEQ ID NO: 1523262 - DNA, 15 bp, Homo sapiens
ctcggacaccagcct

SEQ ID NO: 1523263 - DNA, 15 bp, Homo sapiens
tcggacaccagcctt

SEQ ID NO: 1523264 - DNA, 15 bp, Homo sapiens
cggacaccagccttc

SEQ ID NO: 1523265 - DNA, 15 bp, Homo sapiens
ggacaccagccttct

SEQ ID NO: 1523266 - DNA, 15 bp, Homo sapiens
gacaccagccttctc

SEQ ID NO: 1523267 - DNA, 15 bp, Homo sapiens
acaccagccttctca

SEQ ID NO: 1523268 - DNA, 15 bp, Homo sapiens
caccagccttctcag

SEQ ID NO: 1523269 - DNA, 15 bp, Homo sapiens
accagccttctcaga

SEQ ID NO: 1523270 - DNA, 15 bp, Homo sapiens
ccagccttctcagac

SEQ ID NO: 1523271 - DNA, 15 bp, Homo sapiens
cagccttctcagacc

SEQ ID NO: 1523272 - DNA, 15 bp, Homo sapiens
agccttctcagaccc

SEQ ID NO: 1523273 - DNA, 15 bp, Homo sapiens
gccttctcagacccc

SEQ ID NO: 1523274 - DNA, 15 bp, Homo sapiens
ccttctcagaccccg

SEQ ID NO: 1523275 - DNA, 15 bp, Homo sapiens
cttctcagaccccgg

SEQ ID NO: 1523276 - DNA, 15 bp, Homo sapiens
ttctcagaccccggg

SEQ ID NO: 1523277 - DNA, 15 bp, Homo sapiens
tctcagaccccgggc

SEQ ID NO: 1523278 - DNA, 15 bp, Homo sapiens
ctcagaccccgggca

SEQ ID NO: 1523279 - DNA, 15 bp, Homo sapiens
tcagaccccgggcac

SEQ ID NO: 1523280 - DNA, 15 bp, Homo sapiens
cagaccccgggcact

SEQ ID NO: 1523281 - DNA, 15 bp, Homo sapiens
agaccccgggcactc

SEQ ID NO: 1523282 - DNA, 15 bp, Homo sapiens
gaccccgggcactcg

SEQ ID NO: 1523283 - DNA, 15 bp, Homo sapiens
accccgggcactcgg

SEQ ID NO: 1523284 - DNA, 15 bp, Homo sapiens
ccccgggcactcggc

SEQ ID NO: 1523285 - DNA, 15 bp, Homo sapiens
cccgggcactcggcc

SEQ ID NO: 1523286 - DNA, 15 bp, Homo sapiens
ccgggcactcggcca

SEQ ID NO: 1523287 - DNA, 15 bp, Homo sapiens
cgggcactcggccac

SEQ ID NO: 1523288 - DNA, 15 bp, Homo sapiens
gggcactcggccacc

SEQ ID NO: 1523289 - DNA, 15 bp, Homo sapiens
ggcactcggccaccc

SEQ ID NO: 1523290 - DNA, 15 bp, Homo sapiens
gcactcggccacccc

SEQ ID NO: 1523291 - DNA, 15 bp, Homo sapiens
cactcggccaccccg

SEQ ID NO: 1523292 - DNA, 15 bp, Homo sapiens
actcggccaccccgc

SEQ ID NO: 1523293 - DNA, 15 bp, Homo sapiens
ctcggccaccccgcc

SEQ ID NO: 1523294 - DNA, 15 bp, Homo sapiens
tcggccaccccgccc

SEQ ID NO: 1523295 - DNA, 15 bp, Homo sapiens
cggccaccccgccct

SEQ ID NO: 1523296 - DNA, 15 bp, Homo sapiens
ggccaccccgccctg

SEQ ID NO: 1523297 - DNA, 15 bp, Homo sapiens
gccaccccgccctgc

SEQ ID NO: 1523298 - DNA, 15 bp, Homo sapiens
ccaccccgccctgcc

SEQ ID NO: 1523299 - DNA, 15 bp, Homo sapiens
caccccgccctgccc

SEQ ID NO: 1523300 - DNA, 15 bp, Homo sapiens
accccgccctgcccc

SEQ ID NO: 1523301 - DNA, 15 bp, Homo sapiens
ccccgccctgcccct

SEQ ID NO: 1523302 - DNA, 15 bp, Homo sapiens
cccgccctgccccta

SEQ ID NO: 1523303 - DNA, 15 bp, Homo sapiens
ccgccctgcccctac

SEQ ID NO: 1523304 - DNA, 15 bp, Homo sapiens
cgccctgcccctacc

SEQ ID NO: 1523305 - DNA, 15 bp, Homo sapiens
gccctgcccctaccc

SEQ ID NO: 1523306 - DNA, 15 bp, Homo sapiens
ccctgcccctaccct

SEQ ID NO: 1523307 - DNA, 15 bp, Homo sapiens
cctgcccctaccctt

SEQ ID NO: 1523308 - DNA, 15 bp, Homo sapiens
ctgcccctacccttg

SEQ ID NO: 1523309 - DNA, 15 bp, Homo sapiens
tgcccctacccttgg

SEQ ID NO: 1523310 - DNA, 15 bp, Homo sapiens
gcccctacccttggc

SEQ ID NO: 1523311 - DNA, 15 bp, Homo sapiens
cccctacccttggcc

SEQ ID NO: 1523312 - DNA, 15 bp, Homo sapiens
ccctacccttggcct

SEQ ID NO: 1523313 - DNA, 15 bp, Homo sapiens
cctacccttggcctc

SEQ ID NO: 1523314 - DNA, 15 bp, Homo sapiens
ctacccttggcctcc

SEQ ID NO: 1523315 - DNA, 15 bp, Homo sapiens
tacccttggcctcct

SEQ ID NO: 1523316 - DNA, 15 bp, Homo sapiens
acccttggcctcctc

SEQ ID NO: 1523317 - DNA, 15 bp, Homo sapiens
cccttggcctcctcc

SEQ ID NO: 1523318 - DNA, 15 bp, Homo sapiens
ccttggcctcctcca

SEQ ID NO: 1523319 - DNA, 15 bp, Homo sapiens
cttggcctcctccac

SEQ ID NO: 1523320 - DNA, 15 bp, Homo sapiens
ttggcctcctccacc

SEQ ID NO: 1523321 - DNA, 15 bp, Homo sapiens
tggcctcctccaccc

SEQ ID NO: 1523322 - DNA, 15 bp, Homo sapiens
ggcctcctccaccct

SEQ ID NO: 1523323 - DNA, 15 bp, Homo sapiens
gcctcctccaccctc

SEQ ID NO: 1523324 - DNA, 15 bp, Homo sapiens
cctcctccaccctcc

SEQ ID NO: 1523325 - DNA, 15 bp, Homo sapiens
ctcctccaccctccc

SEQ ID NO: 1523326 - DNA, 15 bp, Homo sapiens
tcctccaccctcccc

SEQ ID NO: 1523327 - DNA, 15 bp, Homo sapiens
cctccaccctcccct

SEQ ID NO: 1523328 - DNA, 15 bp, Homo sapiens
ctccaccctcccctc

SEQ ID NO: 1523329 - DNA, 15 bp, Homo sapiens
tccaccctcccctca

SEQ ID NO: 1523330 - DNA, 15 bp, Homo sapiens
ccaccctcccctcat

SEQ ID NO: 1523331 - DNA, 15 bp, Homo sapiens
caccctcccctcatc

SEQ ID NO: 1523332 - DNA, 15 bp, Homo sapiens
accctcccctcatcc

SEQ ID NO: 1523333 - DNA, 15 bp, Homo sapiens
ccctcccctcatccc

SEQ ID NO: 1523334 - DNA, 15 bp, Homo sapiens
cctcccctcatccct

SEQ ID NO: 1523335 - DNA, 15 bp, Homo sapiens
ctcccctcatccctc

SEQ ID NO: 1523336 - DNA, 15 bp, Homo sapiens
tcccctcatccctcc

SEQ ID NO: 1523337 - DNA, 15 bp, Homo sapiens
cccctcatccctccg

SEQ ID NO: 1523338 - DNA, 15 bp, Homo sapiens
ccctcatccctccgc

SEQ ID NO: 1523339 - DNA, 15 bp, Homo sapiens
cctcatccctccgcc

SEQ ID NO: 1523340 - DNA, 15 bp, Homo sapiens
ctcatccctccgccg

SEQ ID NO: 1523341 - DNA, 15 bp, Homo sapiens
tcatccctccgccga

SEQ ID NO: 1523342 - DNA, 15 bp, Homo sapiens
catccctccgccgac

SEQ ID NO: 1523343 - DNA, 15 bp, Homo sapiens
atccctccgccgacc

SEQ ID NO: 1523344 - DNA, 15 bp, Homo sapiens
tccctccgccgaccc

SEQ ID NO: 1523345 - DNA, 15 bp, Homo sapiens
ccctccgccgacccc

SEQ ID NO: 1523346 - DNA, 15 bp, Homo sapiens
cctccgccgacccca

SEQ ID NO: 1523347 - DNA, 15 bp, Homo sapiens
ctccgccgaccccag

SEQ ID NO: 1523348 - DNA, 15 bp, Homo sapiens
tccgccgaccccagg

SEQ ID NO: 1523349 - DNA, 15 bp, Homo sapiens
ccgccgaccccaggc

SEQ ID NO: 1523350 - DNA, 15 bp, Homo sapiens
cgccgaccccaggcc

SEQ ID NO: 1523351 - DNA, 15 bp, Homo sapiens
gccgaccccaggccc

SEQ ID NO: 1523352 - DNA, 15 bp, Homo sapiens
ccgaccccaggccca

SEQ ID NO: 1523353 - DNA, 15 bp, Homo sapiens
cgaccccaggcccac

SEQ ID NO: 1523354 - DNA, 15 bp, Homo sapiens
gaccccaggcccact

SEQ ID NO: 1523355 - DNA, 15 bp, Homo sapiens
accccaggcccactc

SEQ ID NO: 1523356 - DNA, 15 bp, Homo sapiens
ccccaggcccactcc

SEQ ID NO: 1523357 - DNA, 15 bp, Homo sapiens
cccaggcccactccg

SEQ ID NO: 1523358 - DNA, 15 bp, Homo sapiens
ccaggcccactccga

SEQ ID NO: 1523359 - DNA, 15 bp, Homo sapiens
caggcccactccgac

SEQ ID NO: 1523360 - DNA, 15 bp, Homo sapiens
aggcccactccgact

SEQ ID NO: 1523361 - DNA, 15 bp, Homo sapiens
ggcccactccgactc

SEQ ID NO: 1523362 - DNA, 15 bp, Homo sapiens
gcccactccgactcg

SEQ ID NO: 1523363 - DNA, 15 bp, Homo sapiens
cccactccgactcgg

SEQ ID NO: 1523364 - DNA, 15 bp, Homo sapiens
ccactccgactcgga

SEQ ID NO: 1523365 - DNA, 15 bp, Homo sapiens
cactccgactcggac

SEQ ID NO: 1523366 - DNA, 15 bp, Homo sapiens
actccgactcggacc

SEQ ID NO: 1523367 - DNA, 15 bp, Homo sapiens
ctccgactcggaccc

SEQ ID NO: 1523368 - DNA, 15 bp, Homo sapiens
tccgactcggacccc

SEQ ID NO: 1523369 - DNA, 15 bp, Homo sapiens
ccgactcggaccccc

SEQ ID NO: 1523370 - DNA, 15 bp, Homo sapiens
cgactcggaccccca

SEQ ID NO: 1523371 - DNA, 15 bp, Homo sapiens
gactcggacccccac

SEQ ID NO: 1523372 - DNA, 15 bp, Homo sapiens
actcggacccccacc

SEQ ID NO: 1523373 - DNA, 15 bp, Homo sapiens
ctcggacccccaccc

SEQ ID NO: 1523374 - DNA, 15 bp, Homo sapiens
tcggacccccacccc

SEQ ID NO: 1523375 - DNA, 15 bp, Homo sapiens
cggacccccacccca

SEQ ID NO: 1523376 - DNA, 15 bp, Homo sapiens
ggacccccaccccag

SEQ ID NO: 1523377 - DNA, 15 bp, Homo sapiens
gacccccaccccagt

SEQ ID NO: 1523378 - DNA, 15 bp, Homo sapiens
acccccaccccagtc

SEQ ID NO: 1523379 - DNA, 15 bp, Homo sapiens
cccccaccccagtcc

SEQ ID NO: 1523380 - DNA, 15 bp, Homo sapiens
ccccaccccagtcct

SEQ ID NO: 1523381 - DNA, 15 bp, Homo sapiens
cccaccccagtcctc

SEQ ID NO: 1523382 - DNA, 15 bp, Homo sapiens
ccaccccagtcctct

SEQ ID NO: 1523383 - DNA, 15 bp, Homo sapiens
caccccagtcctctc

SEQ ID NO: 1523384 - DNA, 15 bp, Homo sapiens
accccagtcctctcc

SEQ ID NO: 1523385 - DNA, 15 bp, Homo sapiens
ccccagtcctctccg

SEQ ID NO: 1523386 - DNA, 15 bp, Homo sapiens
cccagtcctctccgc

SEQ ID NO: 1523387 - DNA, 15 bp, Homo sapiens
ccagtcctctccgcc

SEQ ID NO: 1523388 - DNA, 15 bp, Homo sapiens
cagtcctctccgccc

SEQ ID NO: 1523389 - DNA, 15 bp, Homo sapiens
agtcctctccgcccg

SEQ ID NO: 1523390 - DNA, 15 bp, Homo sapiens
gtcctctccgcccga

SEQ ID NO: 1523391 - DNA, 15 bp, Homo sapiens
tcctctccgcccgac

SEQ ID NO: 1523392 - DNA, 15 bp, Homo sapiens
cctctccgcccgacc

SEQ ID NO: 1523393 - DNA, 15 bp, Homo sapiens
ctctccgcccgaccg

SEQ ID NO: 1523394 - DNA, 15 bp, Homo sapiens
tctccgcccgaccgc

SEQ ID NO: 1523395 - DNA, 15 bp, Homo sapiens
ctccgcccgaccgcc

SEQ ID NO: 1523396 - DNA, 15 bp, Homo sapiens
tccgcccgaccgcca

SEQ ID NO: 1523397 - DNA, 15 bp, Homo sapiens
ccgcccgaccgccac

SEQ ID NO: 1523398 - DNA, 15 bp, Homo sapiens
cgcccgaccgccacg

SEQ ID NO: 1523399 - DNA, 15 bp, Homo sapiens
gcccgaccgccacgg

SEQ ID NO: 1523400 - DNA, 15 bp, Homo sapiens
cccgaccgccacggc

SEQ ID NO: 1523401 - DNA, 15 bp, Homo sapiens
ccgaccgccacggcc

SEQ ID NO: 1523402 - DNA, 15 bp, Homo sapiens
cgaccgccacggccc

SEQ ID NO: 1523403 - DNA, 15 bp, Homo sapiens
gaccgccacggccca

SEQ ID NO: 1523404 - DNA, 15 bp, Homo sapiens
accgccacggcccac

SEQ ID NO: 1523405 - DNA, 15 bp, Homo sapiens
ccgccacggcccacc

SEQ ID NO: 1523406 - DNA, 15 bp, Homo sapiens
cgccacggcccacca

SEQ ID NO: 1523407 - DNA, 15 bp, Homo sapiens
gccacggcccaccag

SEQ ID NO: 1523408 - DNA, 15 bp, Homo sapiens
ccacggcccaccagc

SEQ ID NO: 1523409 - DNA, 15 bp, Homo sapiens
cacggcccaccagcc

SEQ ID NO: 1523410 - DNA, 15 bp, Homo sapiens
acggcccaccagcct

SEQ ID NO: 1523411 - DNA, 15 bp, Homo sapiens
cggcccaccagcctg

SEQ ID NO: 1523412 - DNA, 15 bp, Homo sapiens
ggcccaccagcctgt

SEQ ID NO: 1523413 - DNA, 15 bp, Homo sapiens
gcccaccagcctgtg

SEQ ID NO: 1523414 - DNA, 15 bp, Homo sapiens
cccaccagcctgtgc

SEQ ID NO: 1523415 - DNA, 15 bp, Homo sapiens
ccaccagcctgtgcc

SEQ ID NO: 1523416 - DNA, 15 bp, Homo sapiens
caccagcctgtgccg

SEQ ID NO: 1523417 - DNA, 15 bp, Homo sapiens
accagcctgtgccgc

SEQ ID NO: 1523418 - DNA, 15 bp, Homo sapiens
ccagcctgtgccgct

SEQ ID NO: 1523419 - DNA, 15 bp, Homo sapiens
cagcctgtgccgctc

SEQ ID NO: 1523420 - DNA, 15 bp, Homo sapiens
agcctgtgccgctca

SEQ ID NO: 1523421 - DNA, 15 bp, Homo sapiens
gcctgtgccgctcac

SEQ ID NO: 1523422 - DNA, 15 bp, Homo sapiens
cctgtgccgctcacc

SEQ ID NO: 1523423 - DNA, 15 bp, Homo sapiens
ctgtgccgctcacct

SEQ ID NO: 1523424 - DNA, 15 bp, Homo sapiens
tgtgccgctcacctg

SEQ ID NO: 1523425 - DNA, 15 bp, Homo sapiens
gtgccgctcacctgg

SEQ ID NO: 1523426 - DNA, 15 bp, Homo sapiens
tgccgctcacctgga

SEQ ID NO: 1523427 - DNA, 15 bp, Homo sapiens
gccgctcacctggat

SEQ ID NO: 1523428 - DNA, 15 bp, Homo sapiens
ccgctcacctggatc

SEQ ID NO: 1523429 - DNA, 15 bp, Homo sapiens
cgctcacctggatct

SEQ ID NO: 1523430 - DNA, 15 bp, Homo sapiens
gctcacctggatctc

SEQ ID NO: 1523431 - DNA, 15 bp, Homo sapiens
ctcacctggatctct

SEQ ID NO: 1523432 - DNA, 15 bp, Homo sapiens
tcacctggatctctg

SEQ ID NO: 1523433 - DNA, 15 bp, Homo sapiens
cacctggatctctgg

SEQ ID NO: 1523434 - DNA, 15 bp, Homo sapiens
acctggatctctgga

SEQ ID NO: 1523435 - DNA, 15 bp, Homo sapiens
cctggatctctggaa

SEQ ID NO: 1523436 - DNA, 15 bp, Homo sapiens
ctggatctctggaaa

SEQ ID NO: 1523437 - DNA, 15 bp, Homo sapiens
tggatctctggaaaa

SEQ ID NO: 1523438 - DNA, 15 bp, Homo sapiens
ggatctctggaaaaa

SEQ ID NO: 1523439 - DNA, 15 bp, Homo sapiens
gatctctggaaaaag

SEQ ID NO: 1523440 - DNA, 15 bp, Homo sapiens
atctctggaaaaagc

SEQ ID NO: 1523441 - DNA, 15 bp, Homo sapiens
tctctggaaaaagct

SEQ ID NO: 1523442 - DNA, 15 bp, Homo sapiens
ctctggaaaaagctg

SEQ ID NO: 1523443 - DNA, 15 bp, Homo sapiens
tctggaaaaagctga

SEQ ID NO: 1523444 - DNA, 15 bp, Homo sapiens
ctggaaaaagctgaa

SEQ ID NO: 1523445 - DNA, 15 bp, Homo sapiens
tggaaaaagctgaag

SEQ ID NO: 1523446 - DNA, 15 bp, Homo sapiens
ggaaaaagctgaagg

SEQ ID NO: 1523447 - DNA, 15 bp, Homo sapiens
gaaaaagctgaagga

SEQ ID NO: 1523448 - DNA, 15 bp, Homo sapiens
aaaaagctgaaggaa

SEQ ID NO: 1523449 - DNA, 15 bp, Homo sapiens
aaaagctgaaggaag

SEQ ID NO: 1523450 - DNA, 15 bp, Homo sapiens
aaagctgaaggaaga

SEQ ID NO: 1523451 - DNA, 15 bp, Homo sapiens
aagctgaaggaagac

SEQ ID NO: 1523452 - DNA, 15 bp, Homo sapiens
agctgaaggaagaca

SEQ ID NO: 1523453 - DNA, 15 bp, Homo sapiens
gctgaaggaagacac

SEQ ID NO: 1523454 - DNA, 15 bp, Homo sapiens
ctgaaggaagacaca

SEQ ID NO: 1523455 - DNA, 15 bp, Homo sapiens
tgaaggaagacacat

SEQ ID NO: 1523456 - DNA, 15 bp, Homo sapiens
gaaggaagacacatc

SEQ ID NO: 1523457 - DNA, 15 bp, Homo sapiens
aaggaagacacatcg

SEQ ID NO: 1523458 - DNA, 15 bp, Homo sapiens
aggaagacacatcgt

SEQ ID NO: 1523459 - DNA, 15 bp, Homo sapiens
ggaagacacatcgta

SEQ ID NO: 1523460 - DNA, 15 bp, Homo sapiens
gaagacacatcgtat

SEQ ID NO: 1523461 - DNA, 15 bp, Homo sapiens
aagacacatcgtatg

SEQ ID NO: 1523462 - DNA, 15 bp, Homo sapiens
agacacatcgtatgc

SEQ ID NO: 1523463 - DNA, 15 bp, Homo sapiens
gacacatcgtatgcg

SEQ ID NO: 1523464 - DNA, 15 bp, Homo sapiens
acacatcgtatgcgg

SEQ ID NO: 1523465 - DNA, 15 bp, Homo sapiens
cacatcgtatgcggc

SEQ ID NO: 1523466 - DNA, 15 bp, Homo sapiens
acatcgtatgcggct

SEQ ID NO: 1523467 - DNA, 15 bp, Homo sapiens
catcgtatgcggctt

SEQ ID NO: 1523468 - DNA, 15 bp, Homo sapiens
atcgtatgcggcttt

SEQ ID NO: 1523469 - DNA, 15 bp, Homo sapiens
tcgtatgcggctttg

SEQ ID NO: 1523470 - DNA, 15 bp, Homo sapiens
cgtatgcggctttga

SEQ ID NO: 1523471 - DNA, 15 bp, Homo sapiens
gtatgcggctttgag

SEQ ID NO: 1523472 - DNA, 15 bp, Homo sapiens
tatgcggctttgagc

SEQ ID NO: 1523473 - DNA, 15 bp, Homo sapiens
atgcggctttgagca

SEQ ID NO: 1523474 - DNA, 15 bp, Homo sapiens
tgcggctttgagcag

SEQ ID NO: 1523475 - DNA, 15 bp, Homo sapiens
gcggctttgagcagc

SEQ ID NO: 1523476 - DNA, 15 bp, Homo sapiens
cggctttgagcagca

SEQ ID NO: 1523477 - DNA, 15 bp, Homo sapiens
ggctttgagcagcac

SEQ ID NO: 1523478 - DNA, 15 bp, Homo sapiens
gctttgagcagcacc

SEQ ID NO: 1523479 - DNA, 15 bp, Homo sapiens
ctttgagcagcacca

SEQ ID NO: 1523480 - DNA, 15 bp, Homo sapiens
tttgagcagcaccac

SEQ ID NO: 1523481 - DNA, 15 bp, Homo sapiens
ttgagcagcaccacc

SEQ ID NO: 1523482 - DNA, 15 bp, Homo sapiens
tgagcagcaccacct

SEQ ID NO: 1523483 - DNA, 15 bp, Homo sapiens
gagcagcaccacctt

SEQ ID NO: 1523484 - DNA, 15 bp, Homo sapiens
agcagcaccaccttg

SEQ ID NO: 1523485 - DNA, 15 bp, Homo sapiens
gcagcaccaccttgg

SEQ ID NO: 1523486 - DNA, 15 bp, Homo sapiens
cagcaccaccttggc

SEQ ID NO: 1523487 - DNA, 15 bp, Homo sapiens
agcaccaccttggcc

SEQ ID NO: 1523488 - DNA, 15 bp, Homo sapiens
gcaccaccttggcct

SEQ ID NO: 1523489 - DNA, 15 bp, Homo sapiens
caccaccttggcctc

SEQ ID NO: 1523490 - DNA, 15 bp, Homo sapiens
accaccttggcctcg

SEQ ID NO: 1523491 - DNA, 15 bp, Homo sapiens
ccaccttggcctcgc

SEQ ID NO: 1523492 - DNA, 15 bp, Homo sapiens
caccttggcctcgcc

SEQ ID NO: 1523493 - DNA, 15 bp, Homo sapiens
accttggcctcgcct

SEQ ID NO: 1523494 - DNA, 15 bp, Homo sapiens
ccttggcctcgcctt

SEQ ID NO: 1523495 - DNA, 15 bp, Homo sapiens
cttggcctcgccttt

SEQ ID NO: 1523496 - DNA, 15 bp, Homo sapiens
ttggcctcgcctttg

SEQ ID NO: 1523497 - DNA, 15 bp, Homo sapiens
tggcctcgcctttgt

SEQ ID NO: 1523498 - DNA, 15 bp, Homo sapiens
ggcctcgcctttgta

SEQ ID NO: 1523499 - DNA, 15 bp, Homo sapiens
gcctcgcctttgtag

SEQ ID NO: 1523500 - DNA, 15 bp, Homo sapiens
cctcgcctttgtaga

SEQ ID NO: 1523501 - DNA, 15 bp, Homo sapiens
ctcgcctttgtagag

SEQ ID NO: 1523502 - DNA, 15 bp, Homo sapiens
tcgcctttgtagagg

SEQ ID NO: 1523503 - DNA, 15 bp, Homo sapiens
cgcctttgtagagga

SEQ ID NO: 1523504 - DNA, 15 bp, Homo sapiens
gcctttgtagaggac

SEQ ID NO: 1523505 - DNA, 15 bp, Homo sapiens
cctttgtagaggacg

SEQ ID NO: 1523506 - DNA, 15 bp, Homo sapiens
ctttgtagaggacgc

SEQ ID NO: 1523507 - DNA, 15 bp, Homo sapiens
tttgtagaggacgct

SEQ ID NO: 1523508 - DNA, 15 bp, Homo sapiens
ttgtagaggacgctg

SEQ ID NO: 1523509 - DNA, 15 bp, Homo sapiens
tgtagaggacgctga

SEQ ID NO: 1523510 - DNA, 15 bp, Homo sapiens
gtagaggacgctgag

SEQ ID NO: 1523511 - DNA, 15 bp, Homo sapiens
tagaggacgctgagg

SEQ ID NO: 1523512 - DNA, 15 bp, Homo sapiens
agaggacgctgaggc

SEQ ID NO: 1523513 - DNA, 15 bp, Homo sapiens
gaggacgctgaggct

SEQ ID NO: 1523514 - DNA, 15 bp, Homo sapiens
aggacgctgaggctg

SEQ ID NO: 1523515 - DNA, 15 bp, Homo sapiens
ggacgctgaggctgt

SEQ ID NO: 1523516 - DNA, 15 bp, Homo sapiens
gacgctgaggctgta

SEQ ID NO: 1523517 - DNA, 15 bp, Homo sapiens
acgctgaggctgtac

SEQ ID NO: 1523518 - DNA, 15 bp, Homo sapiens
cgctgaggctgtaca

SEQ ID NO: 1523519 - DNA, 15 bp, Homo sapiens
gctgaggctgtacag

SEQ ID NO: 1523520 - DNA, 15 bp, Homo sapiens
ctgaggctgtacagc

SEQ ID NO: 1523521 - DNA, 15 bp, Homo sapiens
tgaggctgtacagct

SEQ ID NO: 1523522 - DNA, 15 bp, Homo sapiens
gaggctgtacagctt

SEQ ID NO: 1523523 - DNA, 15 bp, Homo sapiens
aggctgtacagcttc

SEQ ID NO: 1523524 - DNA, 15 bp, Homo sapiens
ggctgtacagcttca

SEQ ID NO: 1523525 - DNA, 15 bp, Homo sapiens
gctgtacagcttcat

SEQ ID NO: 1523526 - DNA, 15 bp, Homo sapiens
ctgtacagcttcatg

SEQ ID NO: 1523527 - DNA, 15 bp, Homo sapiens
tgtacagcttcatgg

SEQ ID NO: 1523528 - DNA, 15 bp, Homo sapiens
gtacagcttcatggc

SEQ ID NO: 1523529 - DNA, 15 bp, Homo sapiens
tacagcttcatggct

SEQ ID NO: 1523530 - DNA, 15 bp, Homo sapiens
acagcttcatggctc

SEQ ID NO: 1523531 - DNA, 15 bp, Homo sapiens
cagcttcatggctcc

SEQ ID NO: 1523532 - DNA, 15 bp, Homo sapiens
agcttcatggctccg

SEQ ID NO: 1523533 - DNA, 15 bp, Homo sapiens
gcttcatggctccgc

SEQ ID NO: 1523534 - DNA, 15 bp, Homo sapiens
cttcatggctccgcg

SEQ ID NO: 1523535 - DNA, 15 bp, Homo sapiens
ttcatggctccgcgc

SEQ ID NO: 1523536 - DNA, 15 bp, Homo sapiens
tcatggctccgcgcc

SEQ ID NO: 1523537 - DNA, 15 bp, Homo sapiens
catggctccgcgccc

SEQ ID NO: 1523538 - DNA, 15 bp, Homo sapiens
atggctccgcgccct

SEQ ID NO: 1523539 - DNA, 15 bp, Homo sapiens
tggctccgcgccctc

SEQ ID NO: 1523540 - DNA, 15 bp, Homo sapiens
ggctccgcgccctca

SEQ ID NO: 1523541 - DNA, 15 bp, Homo sapiens
gctccgcgccctcag

SEQ ID NO: 1523542 - DNA, 15 bp, Homo sapiens
ctccgcgccctcagg

SEQ ID NO: 1523543 - DNA, 15 bp, Homo sapiens
tccgcgccctcaggc

SEQ ID NO: 1523544 - DNA, 15 bp, Homo sapiens
ccgcgccctcaggcc

SEQ ID NO: 1523545 - DNA, 15 bp, Homo sapiens
cgcgccctcaggccg

SEQ ID NO: 1523546 - DNA, 15 bp, Homo sapiens
gcgccctcaggccgc

SEQ ID NO: 1523547 - DNA, 15 bp, Homo sapiens
cgccctcaggccgcc

SEQ ID NO: 1523548 - DNA, 15 bp, Homo sapiens
gccctcaggccgccc

SEQ ID NO: 1523549 - DNA, 15 bp, Homo sapiens
ccctcaggccgcccg

SEQ ID NO: 1523550 - DNA, 15 bp, Homo sapiens
cctcaggccgcccgc

SEQ ID NO: 1523551 - DNA, 15 bp, Homo sapiens
ctcaggccgcccgcc

SEQ ID NO: 1523552 - DNA, 15 bp, Homo sapiens
tcaggccgcccgcct

SEQ ID NO: 1523553 - DNA, 15 bp, Homo sapiens
caggccgcccgcctg

SEQ ID NO: 1523554 - DNA, 15 bp, Homo sapiens
aggccgcccgcctgc

SEQ ID NO: 1523555 - DNA, 15 bp, Homo sapiens
ggccgcccgcctgcc

SEQ ID NO: 1523556 - DNA, 15 bp, Homo sapiens
gccgcccgcctgccc

SEQ ID NO: 1523557 - DNA, 15 bp, Homo sapiens
ccgcccgcctgccca

SEQ ID NO: 1523558 - DNA, 15 bp, Homo sapiens
cgcccgcctgcccag

SEQ ID NO: 1523559 - DNA, 15 bp, Homo sapiens
gcccgcctgcccagc

SEQ ID NO: 1523560 - DNA, 15 bp, Homo sapiens
cccgcctgcccagct

SEQ ID NO: 1523561 - DNA, 15 bp, Homo sapiens
ccgcctgcccagctg

SEQ ID NO: 1523562 - DNA, 15 bp, Homo sapiens
cgcctgcccagctgc

SEQ ID NO: 1523563 - DNA, 15 bp, Homo sapiens
gcctgcccagctgcg

SEQ ID NO: 1523564 - DNA, 15 bp, Homo sapiens
cctgcccagctgcgg

SEQ ID NO: 1523565 - DNA, 15 bp, Homo sapiens
ctgcccagctgcggg

SEQ ID NO: 1523566 - DNA, 15 bp, Homo sapiens
tgcccagctgcggga

SEQ ID NO: 1523567 - DNA, 15 bp, Homo sapiens
gcccagctgcgggac

SEQ ID NO: 1523568 - DNA, 15 bp, Homo sapiens
cccagctgcgggacc

SEQ ID NO: 1523569 - DNA, 15 bp, Homo sapiens
ccagctgcgggaccc

SEQ ID NO: 1523570 - DNA, 15 bp, Homo sapiens
cagctgcgggacccg

SEQ ID NO: 1523571 - DNA, 15 bp, Homo sapiens
agctgcgggacccgt

SEQ ID NO: 1523572 - DNA, 15 bp, Homo sapiens
gctgcgggacccgtt

SEQ ID NO: 1523573 - DNA, 15 bp, Homo sapiens
ctgcgggacccgttc

SEQ ID NO: 1523574 - DNA, 15 bp, Homo sapiens
tgcgggacccgttct

SEQ ID NO: 1523575 - DNA, 15 bp, Homo sapiens
gcgggacccgttctc

SEQ ID NO: 1523576 - DNA, 15 bp, Homo sapiens
cgggacccgttctca

SEQ ID NO: 1523577 - DNA, 15 bp, Homo sapiens
gggacccgttctcag

SEQ ID NO: 1523578 - DNA, 15 bp, Homo sapiens
ggacccgttctcagg

SEQ ID NO: 1523579 - DNA, 15 bp, Homo sapiens
gacccgttctcaggg

SEQ ID NO: 1523580 - DNA, 15 bp, Homo sapiens
acccgttctcaggga

SEQ ID NO: 1523581 - DNA, 15 bp, Homo sapiens
cccgttctcagggag

SEQ ID NO: 1523582 - DNA, 15 bp, Homo sapiens
ccgttctcagggagc

SEQ ID NO: 1523583 - DNA, 15 bp, Homo sapiens
cgttctcagggagca

SEQ ID NO: 1523584 - DNA, 15 bp, Homo sapiens
gttctcagggagcag

SEQ ID NO: 1523585 - DNA, 15 bp, Homo sapiens
ttctcagggagcagc

SEQ ID NO: 1523586 - DNA, 15 bp, Homo sapiens
tctcagggagcagcg

SEQ ID NO: 1523587 - DNA, 15 bp, Homo sapiens
ctcagggagcagcgc

SEQ ID NO: 1523588 - DNA, 15 bp, Homo sapiens
tcagggagcagcgcg

SEQ ID NO: 1523589 - DNA, 15 bp, Homo sapiens
cagggagcagcgcgg

SEQ ID NO: 1523590 - DNA, 15 bp, Homo sapiens
agggagcagcgcggc

SEQ ID NO: 1523591 - DNA, 15 bp, Homo sapiens
gggagcagcgcggcc

SEQ ID NO: 1523592 - DNA, 15 bp, Homo sapiens
ggagcagcgcggccg

SEQ ID NO: 1523593 - DNA, 15 bp, Homo sapiens
gagcagcgcggccgc

SEQ ID NO: 1523594 - DNA, 15 bp, Homo sapiens
agcagcgcggccgcc

SEQ ID NO: 1523595 - DNA, 15 bp, Homo sapiens
gcagcgcggccgccg

SEQ ID NO: 1523596 - DNA, 15 bp, Homo sapiens
cagcgcggccgccgc

SEQ ID NO: 1523597 - DNA, 15 bp, Homo sapiens
agcgcggccgccgcc

SEQ ID NO: 1523598 - DNA, 15 bp, Homo sapiens
gcgcggccgccgccc

SEQ ID NO: 1523599 - DNA, 15 bp, Homo sapiens
cgcggccgccgcccc

SEQ ID NO: 1523600 - DNA, 15 bp, Homo sapiens
gcggccgccgcccct

SEQ ID NO: 1523601 - DNA, 15 bp, Homo sapiens
cggccgccgcccctc

SEQ ID NO: 1523602 - DNA, 15 bp, Homo sapiens
ggccgccgcccctcg

SEQ ID NO: 1523603 - DNA, 15 bp, Homo sapiens
gccgccgcccctcgg

SEQ ID NO: 1523604 - DNA, 15 bp, Homo sapiens
ccgccgcccctcggg

SEQ ID NO: 1523605 - DNA, 15 bp, Homo sapiens
cgccgcccctcggga

SEQ ID NO: 1523606 - DNA, 15 bp, Homo sapiens
gccgcccctcgggac

SEQ ID NO: 1523607 - DNA, 15 bp, Homo sapiens
ccgcccctcgggacc

SEQ ID NO: 1523608 - DNA, 15 bp, Homo sapiens
cgcccctcgggaccg

SEQ ID NO: 1523609 - DNA, 15 bp, Homo sapiens
gcccctcgggaccgc

SEQ ID NO: 1523610 - DNA, 15 bp, Homo sapiens
cccctcgggaccgcc

SEQ ID NO: 1523611 - DNA, 15 bp, Homo sapiens
ccctcgggaccgccg

SEQ ID NO: 1523612 - DNA, 15 bp, Homo sapiens
cctcgggaccgccgc

SEQ ID NO: 1523613 - DNA, 15 bp, Homo sapiens
ctcgggaccgccgcc

SEQ ID NO: 1523614 - DNA, 15 bp, Homo sapiens
tcgggaccgccgccg

SEQ ID NO: 1523615 - DNA, 15 bp, Homo sapiens
cgggaccgccgccgc

SEQ ID NO: 1523616 - DNA, 15 bp, Homo sapiens
gggaccgccgccgcc

SEQ ID NO: 1523617 - DNA, 15 bp, Homo sapiens
ggaccgccgccgcct

SEQ ID NO: 1523618 - DNA, 15 bp, Homo sapiens
gaccgccgccgccta

SEQ ID NO: 1523619 - DNA, 15 bp, Homo sapiens
accgccgccgcctac

SEQ ID NO: 1523620 - DNA, 15 bp, Homo sapiens
ccgccgccgcctacc

SEQ ID NO: 1523621 - DNA, 15 bp, Homo sapiens
cgccgccgcctaccg

SEQ ID NO: 1523622 - DNA, 15 bp, Homo sapiens
gccgccgcctaccgg

SEQ ID NO: 1523623 - DNA, 15 bp, Homo sapiens
ccgccgcctaccggc

SEQ ID NO: 1523624 - DNA, 15 bp, Homo sapiens
cgccgcctaccggcc

SEQ ID NO: 1523625 - DNA, 15 bp, Homo sapiens
gccgcctaccggcct

SEQ ID NO: 1523626 - DNA, 15 bp, Homo sapiens
ccgcctaccggcctc

SEQ ID NO: 1523627 - DNA, 15 bp, Homo sapiens
cgcctaccggcctct

SEQ ID NO: 1523628 - DNA, 15 bp, Homo sapiens
gcctaccggcctctc

SEQ ID NO: 1523629 - DNA, 15 bp, Homo sapiens
cctaccggcctctca

SEQ ID NO: 1523630 - DNA, 15 bp, Homo sapiens
ctaccggcctctcag

SEQ ID NO: 1523631 - DNA, 15 bp, Homo sapiens
taccggcctctcagc

SEQ ID NO: 1523632 - DNA, 15 bp, Homo sapiens
accggcctctcagca

SEQ ID NO: 1523633 - DNA, 15 bp, Homo sapiens
ccggcctctcagcag

SEQ ID NO: 1523634 - DNA, 15 bp, Homo sapiens
cggcctctcagcagc

SEQ ID NO: 1523635 - DNA, 15 bp, Homo sapiens
ggcctctcagcagcc

SEQ ID NO: 1523636 - DNA, 15 bp, Homo sapiens
gcctctcagcagccg

SEQ ID NO: 1523637 - DNA, 15 bp, Homo sapiens
cctctcagcagccgg

SEQ ID NO: 1523638 - DNA, 15 bp, Homo sapiens
ctctcagcagccggc

SEQ ID NO: 1523639 - DNA, 15 bp, Homo sapiens
tctcagcagccggct

SEQ ID NO: 1523640 - DNA, 15 bp, Homo sapiens
ctcagcagccggctg

SEQ ID NO: 1523641 - DNA, 15 bp, Homo sapiens
tcagcagccggctgc

SEQ ID NO: 1523642 - DNA, 15 bp, Homo sapiens
cagcagccggctgct

SEQ ID NO: 1523643 - DNA, 15 bp, Homo sapiens
agcagccggctgctg

SEQ ID NO: 1523644 - DNA, 15 bp, Homo sapiens
gcagccggctgctga

SEQ ID NO: 1523645 - DNA, 15 bp, Homo sapiens
cagccggctgctgac

SEQ ID NO: 1523646 - DNA, 15 bp, Homo sapiens
agccggctgctgacg

SEQ ID NO: 1523647 - DNA, 15 bp, Homo sapiens
gccggctgctgacgg

SEQ ID NO: 1523648 - DNA, 15 bp, Homo sapiens
ccggctgctgacggg

SEQ ID NO: 1523649 - DNA, 15 bp, Homo sapiens
cggctgctgacgggg

SEQ ID NO: 1523650 - DNA, 15 bp, Homo sapiens
ggctgctgacggggc

SEQ ID NO: 1523651 - DNA, 15 bp, Homo sapiens
gctgctgacggggcc

SEQ ID NO: 1523652 - DNA, 15 bp, Homo sapiens
ctgctgacggggcca

SEQ ID NO: 1523653 - DNA, 15 bp, Homo sapiens
tgctgacggggccac

SEQ ID NO: 1523654 - DNA, 15 bp, Homo sapiens
gctgacggggccacc

SEQ ID NO: 1523655 - DNA, 15 bp, Homo sapiens
ctgacggggccaccg

SEQ ID NO: 1523656 - DNA, 15 bp, Homo sapiens
tgacggggccaccgc

SEQ ID NO: 1523657 - DNA, 15 bp, Homo sapiens
gacggggccaccgcc

SEQ ID NO: 1523658 - DNA, 15 bp, Homo sapiens
acggggccaccgccg

SEQ ID NO: 1523659 - DNA, 15 bp, Homo sapiens
cggggccaccgccgg

SEQ ID NO: 1523660 - DNA, 15 bp, Homo sapiens
ggggccaccgccggc

SEQ ID NO: 1523661 - DNA, 15 bp, Homo sapiens
gggccaccgccggct

SEQ ID NO: 1523662 - DNA, 15 bp, Homo sapiens
ggccaccgccggctt

SEQ ID NO: 1523663 - DNA, 15 bp, Homo sapiens
gccaccgccggcttc

SEQ ID NO: 1523664 - DNA, 15 bp, Homo sapiens
ccaccgccggcttcc

SEQ ID NO: 1523665 - DNA, 15 bp, Homo sapiens
caccgccggcttcct

SEQ ID NO: 1523666 - DNA, 15 bp, Homo sapiens
accgccggcttcctc

SEQ ID NO: 1523667 - DNA, 15 bp, Homo sapiens
ccgccggcttcctcc

SEQ ID NO: 1523668 - DNA, 15 bp, Homo sapiens
cgccggcttcctcct

SEQ ID NO: 1523669 - DNA, 15 bp, Homo sapiens
gccggcttcctcctc

SEQ ID NO: 1523670 - DNA, 15 bp, Homo sapiens
gcttcctcctcctgg

SEQ ID NO: 1523671 - DNA, 15 bp, Homo sapiens
cttcctcctcctggc

SEQ ID NO: 1523672 - DNA, 15 bp, Homo sapiens
ttcctcctcctggct

SEQ ID NO: 1523673 - DNA, 15 bp, Homo sapiens
tcctcctcctggctc

SEQ ID NO: 1523674 - DNA, 15 bp, Homo sapiens
cctcctcctggctcg

SEQ ID NO: 1523675 - DNA, 15 bp, Homo sapiens
ctcctcctggctcgc

SEQ ID NO: 1523676 - DNA, 15 bp, Homo sapiens
tcctcctggctcgca

SEQ ID NO: 1523677 - DNA, 15 bp, Homo sapiens
cctcctggctcgcaa

SEQ ID NO: 1523678 - DNA, 15 bp, Homo sapiens
ctcctggctcgcaat

SEQ ID NO: 1523679 - DNA, 15 bp, Homo sapiens
tcctggctcgcaatc

SEQ ID NO: 1523680 - DNA, 15 bp, Homo sapiens
cctggctcgcaatcc

SEQ ID NO: 1523681 - DNA, 15 bp, Homo sapiens
ctggctcgcaatcca

SEQ ID NO: 1523682 - DNA, 15 bp, Homo sapiens
tggctcgcaatccac

SEQ ID NO: 1523683 - DNA, 15 bp, Homo sapiens
ggctcgcaatccact

SEQ ID NO: 1523684 - DNA, 15 bp, Homo sapiens
gctcgcaatccactt

SEQ ID NO: 1523685 - DNA, 15 bp, Homo sapiens
ctcgcaatccacttc

SEQ ID NO: 1523686 - DNA, 15 bp, Homo sapiens
tcgcaatccacttcc

SEQ ID NO: 1523687 - DNA, 15 bp, Homo sapiens
cgcaatccacttccg

SEQ ID NO: 1523688 - DNA, 15 bp, Homo sapiens
gcaatccacttccgg

SEQ ID NO: 1523689 - DNA, 15 bp, Homo sapiens
caatccacttccgga

SEQ ID NO: 1523690 - DNA, 15 bp, Homo sapiens
aatccacttccggat

SEQ ID NO: 1523691 - DNA, 15 bp, Homo sapiens
atccacttccggatc

SEQ ID NO: 1523692 - DNA, 15 bp, Homo sapiens
tccacttccggatcc

SEQ ID NO: 1523693 - DNA, 15 bp, Homo sapiens
ccacttccggatccg

SEQ ID NO: 1523694 - DNA, 15 bp, Homo sapiens
cacttccggatccgg

SEQ ID NO: 1523695 - DNA, 15 bp, Homo sapiens
acttccggatccggt

SEQ ID NO: 1523696 - DNA, 15 bp, Homo sapiens
cttccggatccggtc

SEQ ID NO: 1523697 - DNA, 15 bp, Homo sapiens
ttccggatccggtca

SEQ ID NO: 1523698 - DNA, 15 bp, Homo sapiens
tccggatccggtcag

SEQ ID NO: 1523699 - DNA, 15 bp, Homo sapiens
ccggatccggtcagc

SEQ ID NO: 1523700 - DNA, 15 bp, Homo sapiens
cggatccggtcagcc

SEQ ID NO: 1523701 - DNA, 15 bp, Homo sapiens
ggatccggtcagcct

SEQ ID NO: 1523702 - DNA, 15 bp, Homo sapiens
gatccggtcagcctg

SEQ ID NO: 1523703 - DNA, 15 bp, Homo sapiens
atccggtcagcctgg

SEQ ID NO: 1523704 - DNA, 15 bp, Homo sapiens
tccggtcagcctggt

SEQ ID NO: 1523705 - DNA, 15 bp, Homo sapiens
ccggtcagcctggtt

SEQ ID NO: 1523706 - DNA, 15 bp, Homo sapiens
cggtcagcctggttg

SEQ ID NO: 1523707 - DNA, 15 bp, Homo sapiens
ggtcagcctggttga

SEQ ID NO: 1523708 - DNA, 15 bp, Homo sapiens
gtcagcctggttgag

SEQ ID NO: 1523709 - DNA, 15 bp, Homo sapiens
tcagcctggttgagg

SEQ ID NO: 1523710 - DNA, 15 bp, Homo sapiens
cagcctggttgaggg

SEQ ID NO: 1523711 - DNA, 15 bp, Homo sapiens
agcctggttgagggt

SEQ ID NO: 1523712 - DNA, 15 bp, Homo sapiens
gcctggttgagggtt

SEQ ID NO: 1523713 - DNA, 15 bp, Homo sapiens
cctggttgagggttc

SEQ ID NO: 1523714 - DNA, 15 bp, Homo sapiens
ctggttgagggttct

SEQ ID NO: 1523715 - DNA, 15 bp, Homo sapiens
tggttgagggttctc

SEQ ID NO: 1523716 - DNA, 15 bp, Homo sapiens
ggttgagggttctca

SEQ ID NO: 1523717 - DNA, 15 bp, Homo sapiens
gttgagggttctcat

SEQ ID NO: 1523718 - DNA, 15 bp, Homo sapiens
ttgagggttctcata

SEQ ID NO: 1523719 - DNA, 15 bp, Homo sapiens
tgagggttctcatac

SEQ ID NO: 1523720 - DNA, 15 bp, Homo sapiens
gagggttctcatact

SEQ ID NO: 1523721 - DNA, 15 bp, Homo sapiens
agggttctcatactc

SEQ ID NO: 1523722 - DNA, 15 bp, Homo sapiens
gggttctcatactcc

SEQ ID NO: 1523723 - DNA, 15 bp, Homo sapiens
ggttctcatactccg

SEQ ID NO: 1523724 - DNA, 15 bp, Homo sapiens
gttctcatactccgg

SEQ ID NO: 1523725 - DNA, 15 bp, Homo sapiens
ttctcatactccgga

SEQ ID NO: 1523726 - DNA, 15 bp, Homo sapiens
tctcatactccggat

SEQ ID NO: 1523727 - DNA, 15 bp, Homo sapiens
ctcatactccggatg

SEQ ID NO: 1523728 - DNA, 15 bp, Homo sapiens
tcatactccggatgc

SEQ ID NO: 1523729 - DNA, 15 bp, Homo sapiens
catactccggatgca

SEQ ID NO: 1523730 - DNA, 15 bp, Homo sapiens
atactccggatgcag

SEQ ID NO: 1523731 - DNA, 15 bp, Homo sapiens
tactccggatgcaga

SEQ ID NO: 1523732 - DNA, 15 bp, Homo sapiens
actccggatgcagaa

SEQ ID NO: 1523733 - DNA, 15 bp, Homo sapiens
ctccggatgcagaaa

SEQ ID NO: 1523734 - DNA, 15 bp, Homo sapiens
tccggatgcagaaat

SEQ ID NO: 1523735 - DNA, 15 bp, Homo sapiens
ccggatgcagaaatg

SEQ ID NO: 1523736 - DNA, 15 bp, Homo sapiens
cggatgcagaaatgt

SEQ ID NO: 1523737 - DNA, 15 bp, Homo sapiens
ggatgcagaaatgtg

SEQ ID NO: 1523738 - DNA, 15 bp, Homo sapiens
gatgcagaaatgtga

SEQ ID NO: 1523739 - DNA, 15 bp, Homo sapiens
atgcagaaatgtgag

SEQ ID NO: 1523740 - DNA, 15 bp, Homo sapiens
tgcagaaatgtgagc

SEQ ID NO: 1523741 - DNA, 15 bp, Homo sapiens
gcagaaatgtgagcc

SEQ ID NO: 1523742 - DNA, 15 bp, Homo sapiens
cagaaatgtgagccc

SEQ ID NO: 1523743 - DNA, 15 bp, Homo sapiens
agaaatgtgagcccg

SEQ ID NO: 1523744 - DNA, 15 bp, Homo sapiens
gaaatgtgagcccgg

SEQ ID NO: 1523745 - DNA, 15 bp, Homo sapiens
aaatgtgagcccgga

SEQ ID NO: 1523746 - DNA, 15 bp, Homo sapiens
aatgtgagcccggaa

SEQ ID NO: 1523747 - DNA, 15 bp, Homo sapiens
atgtgagcccggaag

SEQ ID NO: 1523748 - DNA, 15 bp, Homo sapiens
tgtgagcccggaagt

SEQ ID NO: 1523749 - DNA, 15 bp, Homo sapiens
gtgagcccggaagta

SEQ ID NO: 1523750 - DNA, 15 bp, Homo sapiens
tgagcccggaagtac

SEQ ID NO: 1523751 - DNA, 15 bp, Homo sapiens
gagcccggaagtaca

SEQ ID NO: 1523752 - DNA, 15 bp, Homo sapiens
agcccggaagtacaa

SEQ ID NO: 1523753 - DNA, 15 bp, Homo sapiens
gcccggaagtacaat

SEQ ID NO: 1523754 - DNA, 15 bp, Homo sapiens
cccggaagtacaatg

SEQ ID NO: 1523755 - DNA, 15 bp, Homo sapiens
ccggaagtacaatgc

SEQ ID NO: 1523756 - DNA, 15 bp, Homo sapiens
cggaagtacaatgca

SEQ ID NO: 1523757 - DNA, 15 bp, Homo sapiens
ggaagtacaatgcag

SEQ ID NO: 1523758 - DNA, 15 bp, Homo sapiens
gaagtacaatgcagc

SEQ ID NO: 1523759 - DNA, 15 bp, Homo sapiens
aagtacaatgcagcg

SEQ ID NO: 1523760 - DNA, 15 bp, Homo sapiens
agtacaatgcagcga

SEQ ID NO: 1523761 - DNA, 15 bp, Homo sapiens
gtacaatgcagcgag

SEQ ID NO: 1523762 - DNA, 15 bp, Homo sapiens
tacaatgcagcgagg

SEQ ID NO: 1523763 - DNA, 15 bp, Homo sapiens
acaatgcagcgaggg

SEQ ID NO: 1523764 - DNA, 15 bp, Homo sapiens
caatgcagcgagggg

SEQ ID NO: 1523765 - DNA, 15 bp, Homo sapiens
aatgcagcgaggggc

SEQ ID NO: 1523766 - DNA, 15 bp, Homo sapiens
atgcagcgaggggcg

SEQ ID NO: 1523767 - DNA, 15 bp, Homo sapiens
tgcagcgaggggcgg

SEQ ID NO: 1523768 - DNA, 15 bp, Homo sapiens
gcagcgaggggcggg

SEQ ID NO: 1523769 - DNA, 15 bp, Homo sapiens
cagcgaggggcggga

SEQ ID NO: 1523770 - DNA, 15 bp, Homo sapiens
agcgaggggcgggat

SEQ ID NO: 1523771 - DNA, 15 bp, Homo sapiens
gcgaggggcgggatg

SEQ ID NO: 1523772 - DNA, 15 bp, Homo sapiens
cgaggggcgggatgc

SEQ ID NO: 1523773 - DNA, 15 bp, Homo sapiens
gaggggcgggatgcc

SEQ ID NO: 1523774 - DNA, 15 bp, Homo sapiens
aggggcgggatgcca

SEQ ID NO: 1523775 - DNA, 15 bp, Homo sapiens
ggggcgggatgccac

SEQ ID NO: 1523776 - DNA, 15 bp, Homo sapiens
gggcgggatgccacg

SEQ ID NO: 1523777 - DNA, 15 bp, Homo sapiens
ggcgggatgccacgc

SEQ ID NO: 1523778 - DNA, 15 bp, Homo sapiens
gcgggatgccacgcc

SEQ ID NO: 1523779 - DNA, 15 bp, Homo sapiens
cgggatgccacgcct

SEQ ID NO: 1523780 - DNA, 15 bp, Homo sapiens
gggatgccacgcctc

SEQ ID NO: 1523781 - DNA, 15 bp, Homo sapiens
ggatgccacgcctcg

SEQ ID NO: 1523782 - DNA, 15 bp, Homo sapiens
gatgccacgcctcgc

SEQ ID NO: 1523783 - DNA, 15 bp, Homo sapiens
atgccacgcctcgcg

SEQ ID NO: 1523784 - DNA, 15 bp, Homo sapiens
tgccacgcctcgcgt

SEQ ID NO: 1523785 - DNA, 15 bp, Homo sapiens
gccacgcctcgcgta

SEQ ID NO: 1523786 - DNA, 15 bp, Homo sapiens
ccacgcctcgcgtaa

SEQ ID NO: 1523787 - DNA, 15 bp, Homo sapiens
cacgcctcgcgtaag

SEQ ID NO: 1523788 - DNA, 15 bp, Homo sapiens
acgcctcgcgtaagc

SEQ ID NO: 1523789 - DNA, 15 bp, Homo sapiens
cgcctcgcgtaagct

SEQ ID NO: 1523790 - DNA, 15 bp, Homo sapiens
gcctcgcgtaagctt

SEQ ID NO: 1523791 - DNA, 15 bp, Homo sapiens
cctcgcgtaagcttg

SEQ ID NO: 1523792 - DNA, 15 bp, Homo sapiens
ctcgcgtaagcttgg

SEQ ID NO: 1523793 - DNA, 15 bp, Homo sapiens
tcgcgtaagcttggc

SEQ ID NO: 1523794 - DNA, 15 bp, Homo sapiens
cgcgtaagcttggcc

SEQ ID NO: 1523795 - DNA, 15 bp, Homo sapiens
gcgtaagcttggccc

SEQ ID NO: 1523796 - DNA, 15 bp, Homo sapiens
cgtaagcttggcccc

SEQ ID NO: 1523797 - DNA, 15 bp, Homo sapiens
gtaagcttggcccct

SEQ ID NO: 1523798 - DNA, 15 bp, Homo sapiens
taagcttggcccctc

SEQ ID NO: 1523799 - DNA, 15 bp, Homo sapiens
aagcttggcccctcc

SEQ ID NO: 1523800 - DNA, 15 bp, Homo sapiens
agcttggcccctccc

SEQ ID NO: 1523801 - DNA, 15 bp, Homo sapiens
gcttggcccctccct

SEQ ID NO: 1523802 - DNA, 15 bp, Homo sapiens
cttggcccctccctg

SEQ ID NO: 1523803 - DNA, 15 bp, Homo sapiens
ttggcccctccctgc

SEQ ID NO: 1523804 - DNA, 15 bp, Homo sapiens
tggcccctccctgct

SEQ ID NO: 1523805 - DNA, 15 bp, Homo sapiens
ggcccctccctgctc

SEQ ID NO: 1523806 - DNA, 15 bp, Homo sapiens
gcccctccctgctcg

SEQ ID NO: 1523807 - DNA, 15 bp, Homo sapiens
cccctccctgctcgc

SEQ ID NO: 1523808 - DNA, 15 bp, Homo sapiens
ccctccctgctcgcc

SEQ ID NO: 1523809 - DNA, 15 bp, Homo sapiens
cctccctgctcgcca

SEQ ID NO: 1523810 - DNA, 15 bp, Homo sapiens
ctccctgctcgccag

SEQ ID NO: 1523811 - DNA, 15 bp, Homo sapiens
tccctgctcgccagg

SEQ ID NO: 1523812 - DNA, 15 bp, Homo sapiens
ccctgctcgccaggt

SEQ ID NO: 1523813 - DNA, 15 bp, Homo sapiens
cctgctcgccaggtg

SEQ ID NO: 1523814 - DNA, 15 bp, Homo sapiens
ctgctcgccaggtgg

SEQ ID NO: 1523815 - DNA, 15 bp, Homo sapiens
tgctcgccaggtgga

SEQ ID NO: 1523816 - DNA, 15 bp, Homo sapiens
gctcgccaggtggag

SEQ ID NO: 1523817 - DNA, 15 bp, Homo sapiens
ctcgccaggtggagt

SEQ ID NO: 1523818 - DNA, 15 bp, Homo sapiens
tcgccaggtggagtc

SEQ ID NO: 1523819 - DNA, 15 bp, Homo sapiens
cgccaggtggagtcg

SEQ ID NO: 1523820 - DNA, 15 bp, Homo sapiens
gccaggtggagtcgg

SEQ ID NO: 1523821 - DNA, 15 bp, Homo sapiens
ccaggtggagtcggg

SEQ ID NO: 1523822 - DNA, 15 bp, Homo sapiens
caggtggagtcgggc

SEQ ID NO: 1523823 - DNA, 15 bp, Homo sapiens
aggtggagtcgggcg

SEQ ID NO: 1523824 - DNA, 15 bp, Homo sapiens
ggtggagtcgggcgc

SEQ ID NO: 1523825 - DNA, 15 bp, Homo sapiens
gtggagtcgggcgcg

SEQ ID NO: 1523826 - DNA, 15 bp, Homo sapiens
tggagtcgggcgcgc

SEQ ID NO: 1523827 - DNA, 15 bp, Homo sapiens
ggagtcgggcgcgcg

SEQ ID NO: 1523828 - DNA, 15 bp, Homo sapiens
gagtcgggcgcgcgg

SEQ ID NO: 1523829 - DNA, 15 bp, Homo sapiens
agtcgggcgcgcggc

SEQ ID NO: 1523830 - DNA, 15 bp, Homo sapiens
gtcgggcgcgcggcg

SEQ ID NO: 1523831 - DNA, 15 bp, Homo sapiens
tcgggcgcgcggcgg

SEQ ID NO: 1523832 - DNA, 15 bp, Homo sapiens
cgggcgcgcggcggg

SEQ ID NO: 1523833 - DNA, 15 bp, Homo sapiens
gggcgcgcggcggga

SEQ ID NO: 1523834 - DNA, 15 bp, Homo sapiens
ggcgcgcggcgggat

SEQ ID NO: 1523835 - DNA, 15 bp, Homo sapiens
gcgcgcggcgggata

SEQ ID NO: 1523836 - DNA, 15 bp, Homo sapiens
cgcgcggcgggatac

SEQ ID NO: 1523837 - DNA, 15 bp, Homo sapiens
gcgcggcgggatacc

SEQ ID NO: 1523838 - DNA, 15 bp, Homo sapiens
cgcggcgggataccg

SEQ ID NO: 1523839 - DNA, 15 bp, Homo sapiens
gcggcgggataccgt

SEQ ID NO: 1523840 - DNA, 15 bp, Homo sapiens
cggcgggataccgta

SEQ ID NO: 1523841 - DNA, 15 bp, Homo sapiens
ggcgggataccgtac

SEQ ID NO: 1523842 - DNA, 15 bp, Homo sapiens
gcgggataccgtact

SEQ ID NO: 1523843 - DNA, 15 bp, Homo sapiens
cgggataccgtactg

SEQ ID NO: 1523844 - DNA, 15 bp, Homo sapiens
gggataccgtactgt

SEQ ID NO: 1523845 - DNA, 15 bp, Homo sapiens
ggataccgtactgtc

SEQ ID NO: 1523846 - DNA, 15 bp, Homo sapiens
gataccgtactgtct

SEQ ID NO: 1523847 - DNA, 15 bp, Homo sapiens
ataccgtactgtctt

SEQ ID NO: 1523848 - DNA, 15 bp, Homo sapiens
taccgtactgtcttg

SEQ ID NO: 1523849 - DNA, 15 bp, Homo sapiens
accgtactgtcttgt

SEQ ID NO: 1523850 - DNA, 15 bp, Homo sapiens
ccgtactgtcttgtg

SEQ ID NO: 1523851 - DNA, 15 bp, Homo sapiens
cgtactgtcttgtgc

SEQ ID NO: 1523852 - DNA, 15 bp, Homo sapiens
gtactgtcttgtgct

SEQ ID NO: 1523853 - DNA, 15 bp, Homo sapiens
tactgtcttgtgctg

SEQ ID NO: 1523854 - DNA, 15 bp, Homo sapiens
actgtcttgtgctgg

SEQ ID NO: 1523855 - DNA, 15 bp, Homo sapiens
ctgtcttgtgctggg

SEQ ID NO: 1523856 - DNA, 15 bp, Homo sapiens
tgtcttgtgctgggt

SEQ ID NO: 1523857 - DNA, 15 bp, Homo sapiens
gtcttgtgctgggtg

SEQ ID NO: 1523858 - DNA, 15 bp, Homo sapiens
tcttgtgctgggtgg

SEQ ID NO: 1523859 - DNA, 15 bp, Homo sapiens
cttgtgctgggtggt

SEQ ID NO: 1523860 - DNA, 15 bp, Homo sapiens
ttgtgctgggtggtg

SEQ ID NO: 1523861 - DNA, 15 bp, Homo sapiens
tgtgctgggtggtgc

SEQ ID NO: 1523862 - DNA, 15 bp, Homo sapiens
gtgctgggtggtgct

SEQ ID NO: 1523863 - DNA, 15 bp, Homo sapiens
tgctgggtggtgctg

SEQ ID NO: 1523864 - DNA, 15 bp, Homo sapiens
gctgggtggtgctgg

SEQ ID NO: 1523865 - DNA, 15 bp, Homo sapiens
ctgggtggtgctggg

SEQ ID NO: 1523866 - DNA, 15 bp, Homo sapiens
tgggtggtgctgggc

SEQ ID NO: 1523867 - DNA, 15 bp, Homo sapiens
gggtggtgctgggcc

SEQ ID NO: 1523868 - DNA, 15 bp, Homo sapiens
ggtggtgctgggcct

SEQ ID NO: 1523869 - DNA, 15 bp, Homo sapiens
gtggtgctgggcctc

SEQ ID NO: 1523870 - DNA, 15 bp, Homo sapiens
tggtgctgggcctcc

SEQ ID NO: 1523871 - DNA, 15 bp, Homo sapiens
ggtgctgggcctccc

SEQ ID NO: 1523872 - DNA, 15 bp, Homo sapiens
gtgctgggcctccca

SEQ ID NO: 1523873 - DNA, 15 bp, Homo sapiens
tgctgggcctcccac

SEQ ID NO: 1523874 - DNA, 15 bp, Homo sapiens
gctgggcctcccaca

SEQ ID NO: 1523875 - DNA, 15 bp, Homo sapiens
ctgggcctcccacag

SEQ ID NO: 1523876 - DNA, 15 bp, Homo sapiens
tgggcctcccacagc

SEQ ID NO: 1523877 - DNA, 15 bp, Homo sapiens
gggcctcccacagcg

SEQ ID NO: 1523878 - DNA, 15 bp, Homo sapiens
ggcctcccacagcgg

SEQ ID NO: 1523879 - DNA, 15 bp, Homo sapiens
gcctcccacagcggc

SEQ ID NO: 1523880 - DNA, 15 bp, Homo sapiens
cctcccacagcggcc

SEQ ID NO: 1523881 - DNA, 15 bp, Homo sapiens
ctcccacagcggcct

SEQ ID NO: 1523882 - DNA, 15 bp, Homo sapiens
tcccacagcggcctg

SEQ ID NO: 1523883 - DNA, 15 bp, Homo sapiens
cccacagcggcctga

SEQ ID NO: 1523884 - DNA, 15 bp, Homo sapiens
ccacagcggcctgaa

SEQ ID NO: 1523885 - DNA, 15 bp, Homo sapiens
cacagcggcctgaac

SEQ ID NO: 1523886 - DNA, 15 bp, Homo sapiens
acagcggcctgaacc

SEQ ID NO: 1523887 - DNA, 15 bp, Homo sapiens
cagcggcctgaaccc

SEQ ID NO: 1523888 - DNA, 15 bp, Homo sapiens
agcggcctgaaccct

SEQ ID NO: 1523889 - DNA, 15 bp, Homo sapiens
gcggcctgaaccctt

SEQ ID NO: 1523890 - DNA, 15 bp, Homo sapiens
cggcctgaacccttc

SEQ ID NO: 1523891 - DNA, 15 bp, Homo sapiens
ggcctgaacccttct

SEQ ID NO: 1523892 - DNA, 15 bp, Homo sapiens
gcctgaacccttctt

SEQ ID NO: 1523893 - DNA, 15 bp, Homo sapiens
cctgaacccttcttt

SEQ ID NO: 1523894 - DNA, 15 bp, Homo sapiens
ctgaacccttctttt

SEQ ID NO: 1523895 - DNA, 15 bp, Homo sapiens
tgaacccttcttttt

SEQ ID NO: 1523896 - DNA, 15 bp, Homo sapiens
gaacccttctttttt

SEQ ID NO: 1523897 - DNA, 15 bp, Homo sapiens
aacccttcttttttt

SEQ ID NO: 1523898 - DNA, 15 bp, Homo sapiens
acccttctttttttt

SEQ ID NO: 1523899 - DNA, 15 bp, Homo sapiens
cccttcttttttttt

SEQ ID NO: 1523900 - DNA, 15 bp, Homo sapiens
tttttcttttctttc

SEQ ID NO: 1523901 - DNA, 15 bp, Homo sapiens
cttttctttcttttt

SEQ ID NO: 1523902 - DNA, 15 bp, Homo sapiens
ttctttcttttttta

SEQ ID NO: 1523903 - DNA, 15 bp, Homo sapiens
tctttctttttttaa

SEQ ID NO: 1523904 - DNA, 15 bp, Homo sapiens
ctttctttttttaaa

SEQ ID NO: 1523905 - DNA, 15 bp, Homo sapiens
tttctttttttaaag

SEQ ID NO: 1523906 - DNA, 15 bp, Homo sapiens
ttctttttttaaagt

SEQ ID NO: 1523907 - DNA, 15 bp, Homo sapiens
tctttttttaaagta

SEQ ID NO: 1523908 - DNA, 15 bp, Homo sapiens
ctttttttaaagtaa

SEQ ID NO: 1523909 - DNA, 15 bp, Homo sapiens
tttttttaaagtaag

SEQ ID NO: 1523910 - DNA, 15 bp, Homo sapiens
ttttttaaagtaagc

SEQ ID NO: 1523911 - DNA, 15 bp, Homo sapiens
tttttaaagtaagca

SEQ ID NO: 1523912 - DNA, 15 bp, Homo sapiens
ttttaaagtaagcat

SEQ ID NO: 1523913 - DNA, 15 bp, Homo sapiens
tttaaagtaagcatt

SEQ ID NO: 1523914 - DNA, 15 bp, Homo sapiens
ttaaagtaagcattt

SEQ ID NO: 1523915 - DNA, 15 bp, Homo sapiens
taaagtaagcatttt

SEQ ID NO: 1523916 - DNA, 15 bp, Homo sapiens
aaagtaagcattttt

SEQ ID NO: 1523917 - DNA, 15 bp, Homo sapiens
aagtaagcatttttt

SEQ ID NO: 1523918 - DNA, 15 bp, Homo sapiens
agtaagcattttttt

SEQ ID NO: 1523919 - DNA, 15 bp, Homo sapiens
gtaagcatttttttt

SEQ ID NO: 1523920 - DNA, 15 bp, Homo sapiens
taagcatttttttta

SEQ ID NO: 1523921 - DNA, 15 bp, Homo sapiens
aagcattttttttat

SEQ ID NO: 1523922 - DNA, 15 bp, Homo sapiens
agcattttttttatt

SEQ ID NO: 1523923 - DNA, 15 bp, Homo sapiens
gcattttttttatta

SEQ ID NO: 1523924 - DNA, 15 bp, Homo sapiens
cattttttttattat

SEQ ID NO: 1523925 - DNA, 15 bp, Homo sapiens
attttttttattatt

SEQ ID NO: 1523926 - DNA, 15 bp, Homo sapiens
ttttttttattatta

SEQ ID NO: 1523927 - DNA, 15 bp, Homo sapiens
tttttttattattat

SEQ ID NO: 1523928 - DNA, 15 bp, Homo sapiens
ttttttattattata

SEQ ID NO: 1523929 - DNA, 15 bp, Homo sapiens
tttttattattatac

SEQ ID NO: 1523930 - DNA, 15 bp, Homo sapiens
ttttattattatact

SEQ ID NO: 1523931 - DNA, 15 bp, Homo sapiens
tttattattatactt

SEQ ID NO: 1523932 - DNA, 15 bp, Homo sapiens
gtgcaggtttgttac

SEQ ID NO: 1523933 - DNA, 15 bp, Homo sapiens
tgcaggtttgttaca

SEQ ID NO: 1523934 - DNA, 15 bp, Homo sapiens
atacatgtgccatgt

SEQ ID NO: 1523935 - DNA, 15 bp, Homo sapiens
tacatgtgccatgtt

SEQ ID NO: 1523936 - DNA, 15 bp, Homo sapiens
acatgtgccatgttg

SEQ ID NO: 1523937 - DNA, 15 bp, Homo sapiens
catgtgccatgttgg

SEQ ID NO: 1523938 - DNA, 15 bp, Homo sapiens
atgtgccatgttggt

SEQ ID NO: 1523939 - DNA, 15 bp, Homo sapiens
tgtgccatgttggtg

SEQ ID NO: 1523940 - DNA, 15 bp, Homo sapiens
gtgccatgttggtgt

SEQ ID NO: 1523941 - DNA, 15 bp, Homo sapiens
tgccatgttggtgtg

SEQ ID NO: 1523942 - DNA, 15 bp, Homo sapiens
gccatgttggtgtgc

SEQ ID NO: 1523943 - DNA, 15 bp, Homo sapiens
ccatgttggtgtgct

SEQ ID NO: 1523944 - DNA, 15 bp, Homo sapiens
catgttggtgtgctg

SEQ ID NO: 1523945 - DNA, 15 bp, Homo sapiens
atgttggtgtgctgc

SEQ ID NO: 1523946 - DNA, 15 bp, Homo sapiens
tgttggtgtgctgca

SEQ ID NO: 1523947 - DNA, 15 bp, Homo sapiens
gttggtgtgctgcac

SEQ ID NO: 1523948 - DNA, 15 bp, Homo sapiens
tgcacccattaactc

SEQ ID NO: 1523949 - DNA, 15 bp, Homo sapiens
gcacccattaactcg

SEQ ID NO: 1523950 - DNA, 15 bp, Homo sapiens
cacccattaactcgt

SEQ ID NO: 1523951 - DNA, 15 bp, Homo sapiens
acccattaactcgtc

SEQ ID NO: 1523952 - DNA, 15 bp, Homo sapiens
cccattaactcgtca

SEQ ID NO: 1523953 - DNA, 15 bp, Homo sapiens
ccattaactcgtcat

SEQ ID NO: 1523954 - DNA, 15 bp, Homo sapiens
cattaactcgtcatt

SEQ ID NO: 1523955 - DNA, 15 bp, Homo sapiens
attaactcgtcattt

SEQ ID NO: 1523956 - DNA, 15 bp, Homo sapiens
ttaactcgtcattta

SEQ ID NO: 1523957 - DNA, 15 bp, Homo sapiens
taactcgtcatttag

SEQ ID NO: 1523958 - DNA, 15 bp, Homo sapiens
aactcgtcatttagc

SEQ ID NO: 1523959 - DNA, 15 bp, Homo sapiens
actcgtcatttagca

SEQ ID NO: 1523960 - DNA, 15 bp, Homo sapiens
ctcgtcatttagcat

SEQ ID NO: 1523961 - DNA, 15 bp, Homo sapiens
tcgtcatttagcatt

SEQ ID NO: 1523962 - DNA, 15 bp, Homo sapiens
cgtcatttagcatta

SEQ ID NO: 1523963 - DNA, 15 bp, Homo sapiens
gtcatttagcattaa

SEQ ID NO: 1523964 - DNA, 15 bp, Homo sapiens
tcatttagcattaag

SEQ ID NO: 1523965 - DNA, 15 bp, Homo sapiens
catttagcattaagt

SEQ ID NO: 1523966 - DNA, 15 bp, Homo sapiens
atttagcattaagta

SEQ ID NO: 1523967 - DNA, 15 bp, Homo sapiens
tttagcattaagtat

SEQ ID NO: 1523968 - DNA, 15 bp, Homo sapiens
ttagcattaagtata

SEQ ID NO: 1523969 - DNA, 15 bp, Homo sapiens
tagcattaagtatat

SEQ ID NO: 1523970 - DNA, 15 bp, Homo sapiens
agcattaagtatatc

SEQ ID NO: 1523971 - DNA, 15 bp, Homo sapiens
gcattaagtatatct

SEQ ID NO: 1523972 - DNA, 15 bp, Homo sapiens
cattaagtatatctc

SEQ ID NO: 1523973 - DNA, 15 bp, Homo sapiens
attaagtatatctcc

SEQ ID NO: 1523974 - DNA, 15 bp, Homo sapiens
ttaagtatatctcct

SEQ ID NO: 1523975 - DNA, 15 bp, Homo sapiens
taagtatatctccta

SEQ ID NO: 1523976 - DNA, 15 bp, Homo sapiens
aagtatatctcctaa

SEQ ID NO: 1523977 - DNA, 15 bp, Homo sapiens
agtatatctcctaat

SEQ ID NO: 1523978 - DNA, 15 bp, Homo sapiens
gtatatctcctaatg

SEQ ID NO: 1523979 - DNA, 15 bp, Homo sapiens
atgctatccctcccc

SEQ ID NO: 1523980 - DNA, 15 bp, Homo sapiens
ccacaacagtccccg

SEQ ID NO: 1523981 - DNA, 15 bp, Homo sapiens
cacaacagtccccgg

SEQ ID NO: 1523982 - DNA, 15 bp, Homo sapiens
acaacagtccccggt

SEQ ID NO: 1523983 - DNA, 15 bp, Homo sapiens
caacagtccccggtg

SEQ ID NO: 1523984 - DNA, 15 bp, Homo sapiens
aacagtccccggtgt

SEQ ID NO: 1523985 - DNA, 15 bp, Homo sapiens
acagtccccggtgtg

SEQ ID NO: 1523986 - DNA, 15 bp, Homo sapiens
cagtccccggtgtgt

SEQ ID NO: 1523987 - DNA, 15 bp, Homo sapiens
agtccccggtgtgtg

SEQ ID NO: 1523988 - DNA, 15 bp, Homo sapiens
gtccccggtgtgtga

SEQ ID NO: 1523989 - DNA, 15 bp, Homo sapiens
tccccggtgtgtgat

SEQ ID NO: 1523990 - DNA, 15 bp, Homo sapiens
ccccggtgtgtgatg

SEQ ID NO: 1523991 - DNA, 15 bp, Homo sapiens
cccggtgtgtgatgt

SEQ ID NO: 1523992 - DNA, 15 bp, Homo sapiens
ccggtgtgtgatgtt

SEQ ID NO: 1523993 - DNA, 15 bp, Homo sapiens
cggtgtgtgatgttc

SEQ ID NO: 1523994 - DNA, 15 bp, Homo sapiens
ggtgtgtgatgttcg

SEQ ID NO: 1523995 - DNA, 15 bp, Homo sapiens
gtgtgtgatgttcgc

SEQ ID NO: 1523996 - DNA, 15 bp, Homo sapiens
tgtgtgatgttcgcc

SEQ ID NO: 1523997 - DNA, 15 bp, Homo sapiens
gtgtgatgttcgcct

SEQ ID NO: 1523998 - DNA, 15 bp, Homo sapiens
tgtgatgttcgcctt

SEQ ID NO: 1523999 - DNA, 15 bp, Homo sapiens
gtgatgttcgccttc

SEQ ID NO: 1524000 - DNA, 15 bp, Homo sapiens
tgatgttcgccttcc

SEQ ID NO: 1524001 - DNA, 15 bp, Homo sapiens
gatgttcgccttcct

SEQ ID NO: 1524002 - DNA, 15 bp, Homo sapiens
atgttcgccttcctg

SEQ ID NO: 1524003 - DNA, 15 bp, Homo sapiens
tgttcgccttcctgt

SEQ ID NO: 1524004 - DNA, 15 bp, Homo sapiens
gttcgccttcctgtg

SEQ ID NO: 1524005 - DNA, 15 bp, Homo sapiens
ttcgccttcctgtgt

SEQ ID NO: 1524006 - DNA, 15 bp, Homo sapiens
tcgccttcctgtgtc

SEQ ID NO: 1524007 - DNA, 15 bp, Homo sapiens
cgccttcctgtgtcc

SEQ ID NO: 1524008 - DNA, 15 bp, Homo sapiens
gccttcctgtgtcca

SEQ ID NO: 1524009 - DNA, 15 bp, Homo sapiens
ttcttattgttcaat

SEQ ID NO: 1524010 - DNA, 15 bp, Homo sapiens
tcttattgttcaatt

SEQ ID NO: 1524011 - DNA, 15 bp, Homo sapiens
cttattgttcaattc

SEQ ID NO: 1524012 - DNA, 15 bp, Homo sapiens
ttattgttcaattcc

SEQ ID NO: 1524013 - DNA, 15 bp, Homo sapiens
tattgttcaattccc

SEQ ID NO: 1524014 - DNA, 15 bp, Homo sapiens
gagtgagaacatgcg

SEQ ID NO: 1524015 - DNA, 15 bp, Homo sapiens
agtgagaacatgcgg

SEQ ID NO: 1524016 - DNA, 15 bp, Homo sapiens
gtgagaacatgcggt

SEQ ID NO: 1524017 - DNA, 15 bp, Homo sapiens
tgagaacatgcggtg

SEQ ID NO: 1524018 - DNA, 15 bp, Homo sapiens
gagaacatgcggtgt

SEQ ID NO: 1524019 - DNA, 15 bp, Homo sapiens
agaacatgcggtgtt

SEQ ID NO: 1524020 - DNA, 15 bp, Homo sapiens
gaacatgcggtgttt

SEQ ID NO: 1524021 - DNA, 15 bp, Homo sapiens
aacatgcggtgtttg

SEQ ID NO: 1524022 - DNA, 15 bp, Homo sapiens
acatgcggtgtttgg

SEQ ID NO: 1524023 - DNA, 15 bp, Homo sapiens
catgcggtgtttggt

SEQ ID NO: 1524024 - DNA, 15 bp, Homo sapiens
atgcggtgtttggtt

SEQ ID NO: 1524025 - DNA, 15 bp, Homo sapiens
tgcggtgtttggttt

SEQ ID NO: 1524026 - DNA, 15 bp, Homo sapiens
gcggtgtttggtttt

SEQ ID NO: 1524027 - DNA, 15 bp, Homo sapiens
cggtgtttggttttt

SEQ ID NO: 1524028 - DNA, 15 bp, Homo sapiens
ggtgtttggtttttt

SEQ ID NO: 1524029 - DNA, 15 bp, Homo sapiens
gtttggttttttgtc

SEQ ID NO: 1524030 - DNA, 15 bp, Homo sapiens
tttggttttttgtcc

SEQ ID NO: 1524031 - DNA, 15 bp, Homo sapiens
ttggttttttgtcct

SEQ ID NO: 1524032 - DNA, 15 bp, Homo sapiens
tggttttttgtcctt

SEQ ID NO: 1524033 - DNA, 15 bp, Homo sapiens
ggttttttgtccttg

SEQ ID NO: 1524034 - DNA, 15 bp, Homo sapiens
gttttttgtccttgc

SEQ ID NO: 1524035 - DNA, 15 bp, Homo sapiens
ttttttgtccttgca

SEQ ID NO: 1524036 - DNA, 15 bp, Homo sapiens
tttttgtccttgcaa

SEQ ID NO: 1524037 - DNA, 15 bp, Homo sapiens
ttttgtccttgcaat

SEQ ID NO: 1524038 - DNA, 15 bp, Homo sapiens
tttgtccttgcaata

SEQ ID NO: 1524039 - DNA, 15 bp, Homo sapiens
ttgtccttgcaatag

SEQ ID NO: 1524040 - DNA, 15 bp, Homo sapiens
tgtccttgcaatagt

SEQ ID NO: 1524041 - DNA, 15 bp, Homo sapiens
gtccttgcaatagtt

SEQ ID NO: 1524042 - DNA, 15 bp, Homo sapiens
tccttgcaatagttt

SEQ ID NO: 1524043 - DNA, 15 bp, Homo sapiens
ccttgcaatagtttg

SEQ ID NO: 1524044 - DNA, 15 bp, Homo sapiens
cttgcaatagtttgc

SEQ ID NO: 1524045 - DNA, 15 bp, Homo sapiens
ttgcaatagtttgct

SEQ ID NO: 1524046 - DNA, 15 bp, Homo sapiens
tgcaatagtttgctg

SEQ ID NO: 1524047 - DNA, 15 bp, Homo sapiens
gcaatagtttgctga

SEQ ID NO: 1524048 - DNA, 15 bp, Homo sapiens
caatagtttgctgag

SEQ ID NO: 1524049 - DNA, 15 bp, Homo sapiens
aatagtttgctgaga

SEQ ID NO: 1524050 - DNA, 15 bp, Homo sapiens
atagtttgctgagaa

SEQ ID NO: 1524051 - DNA, 15 bp, Homo sapiens
tagtttgctgagaat

SEQ ID NO: 1524052 - DNA, 15 bp, Homo sapiens
agtttgctgagaatg

SEQ ID NO: 1524053 - DNA, 15 bp, Homo sapiens
gtttgctgagaatga

SEQ ID NO: 1524054 - DNA, 15 bp, Homo sapiens
tttgctgagaatgat

SEQ ID NO: 1524055 - DNA, 15 bp, Homo sapiens
ttgctgagaatgatg

SEQ ID NO: 1524056 - DNA, 15 bp, Homo sapiens
tgctgagaatgatgg

SEQ ID NO: 1524057 - DNA, 15 bp, Homo sapiens
gctgagaatgatggt

SEQ ID NO: 1524058 - DNA, 15 bp, Homo sapiens
ctgagaatgatggtt

SEQ ID NO: 1524059 - DNA, 15 bp, Homo sapiens
tgagaatgatggttt

SEQ ID NO: 1524060 - DNA, 15 bp, Homo sapiens
gagaatgatggtttc

SEQ ID NO: 1524061 - DNA, 15 bp, Homo sapiens
atgtgccacatttta

SEQ ID NO: 1524062 - DNA, 15 bp, Homo sapiens
tgtgccacattttag

SEQ ID NO: 1524063 - DNA, 15 bp, Homo sapiens
gtgccacattttagg

SEQ ID NO: 1524064 - DNA, 15 bp, Homo sapiens
tgccacattttagga

SEQ ID NO: 1524065 - DNA, 15 bp, Homo sapiens
gccacattttaggag

SEQ ID NO: 1524066 - DNA, 15 bp, Homo sapiens
ccacattttaggagg

SEQ ID NO: 1524067 - DNA, 15 bp, Homo sapiens
cacattttaggagga

SEQ ID NO: 1524068 - DNA, 15 bp, Homo sapiens
acattttaggaggag

SEQ ID NO: 1524069 - DNA, 15 bp, Homo sapiens
cattttaggaggagc

SEQ ID NO: 1524070 - DNA, 15 bp, Homo sapiens
attttaggaggagct

SEQ ID NO: 1524071 - DNA, 15 bp, Homo sapiens
ttttaggaggagctt

SEQ ID NO: 1524072 - DNA, 15 bp, Homo sapiens
tttaggaggagcttg

SEQ ID NO: 1524073 - DNA, 15 bp, Homo sapiens
ttaggaggagcttgt

SEQ ID NO: 1524074 - DNA, 15 bp, Homo sapiens
taggaggagcttgta

SEQ ID NO: 1524075 - DNA, 15 bp, Homo sapiens
aggaggagcttgtac

SEQ ID NO: 1524076 - DNA, 15 bp, Homo sapiens
ggaggagcttgtacc

SEQ ID NO: 1524077 - DNA, 15 bp, Homo sapiens
gaggagcttgtacca

SEQ ID NO: 1524078 - DNA, 15 bp, Homo sapiens
aggagcttgtaccat

SEQ ID NO: 1524079 - DNA, 15 bp, Homo sapiens
ggagcttgtaccatt

SEQ ID NO: 1524080 - DNA, 15 bp, Homo sapiens
gagcttgtaccattc

SEQ ID NO: 1524081 - DNA, 15 bp, Homo sapiens
agcttgtaccattcc

SEQ ID NO: 1524082 - DNA, 15 bp, Homo sapiens
gcttgtaccattcct

SEQ ID NO: 1524083 - DNA, 15 bp, Homo sapiens
cttgtaccattcctt

SEQ ID NO: 1524084 - DNA, 15 bp, Homo sapiens
ttgtaccattccttc

SEQ ID NO: 1524085 - DNA, 15 bp, Homo sapiens
tgtaccattccttct

SEQ ID NO: 1524086 - DNA, 15 bp, Homo sapiens
gtaccattccttctg

SEQ ID NO: 1524087 - DNA, 15 bp, Homo sapiens
taccattccttctga

SEQ ID NO: 1524088 - DNA, 15 bp, Homo sapiens
accattccttctgaa

SEQ ID NO: 1524089 - DNA, 15 bp, Homo sapiens
ccattccttctgaaa

SEQ ID NO: 1524090 - DNA, 15 bp, Homo sapiens
cattccttctgaaac

SEQ ID NO: 1524091 - DNA, 15 bp, Homo sapiens
attccttctgaaact

SEQ ID NO: 1524092 - DNA, 15 bp, Homo sapiens
ttccttctgaaacta

SEQ ID NO: 1524093 - DNA, 15 bp, Homo sapiens
tccttctgaaactat

SEQ ID NO: 1524094 - DNA, 15 bp, Homo sapiens
ccttctgaaactatt

SEQ ID NO: 1524095 - DNA, 15 bp, Homo sapiens
cttctgaaactattc

SEQ ID NO: 1524096 - DNA, 15 bp, Homo sapiens
ttctgaaactattcc

SEQ ID NO: 1524097 - DNA, 15 bp, Homo sapiens
tctgaaactattcca

SEQ ID NO: 1524098 - DNA, 15 bp, Homo sapiens
ctgaaactattccaa

SEQ ID NO: 1524099 - DNA, 15 bp, Homo sapiens
tgaaactattccaat

SEQ ID NO: 1524100 - DNA, 15 bp, Homo sapiens
gaaactattccaatc

SEQ ID NO: 1524101 - DNA, 15 bp, Homo sapiens
aaactattccaatca

SEQ ID NO: 1524102 - DNA, 15 bp, Homo sapiens
aactattccaatcaa

SEQ ID NO: 1524103 - DNA, 15 bp, Homo sapiens
actattccaatcaaa

SEQ ID NO: 1524104 - DNA, 15 bp, Homo sapiens
ctattccaatcaaaa

SEQ ID NO: 1524105 - DNA, 15 bp, Homo sapiens
tattccaatcaaaag

SEQ ID NO: 1524106 - DNA, 15 bp, Homo sapiens
attccaatcaaaaga

SEQ ID NO: 1524107 - DNA, 15 bp, Homo sapiens
ttccaatcaaaagaa

SEQ ID NO: 1524108 - DNA, 15 bp, Homo sapiens
tccaatcaaaagaaa

SEQ ID NO: 1524109 - DNA, 15 bp, Homo sapiens
ccaatcaaaagaaaa

SEQ ID NO: 1524110 - DNA, 15 bp, Homo sapiens
caatcaaaagaaaaa

SEQ ID NO: 1524111 - DNA, 15 bp, Homo sapiens
aatcaaaagaaaaag

SEQ ID NO: 1524112 - DNA, 15 bp, Homo sapiens
atcaaaagaaaaaga

SEQ ID NO: 1524113 - DNA, 15 bp, Homo sapiens
tcaaaagaaaaagag

SEQ ID NO: 1524114 - DNA, 15 bp, Homo sapiens
caaaagaaaaagaga

SEQ ID NO: 1524115 - DNA, 15 bp, Homo sapiens
aaaagaaaaagagag

SEQ ID NO: 1524116 - DNA, 15 bp, Homo sapiens
aaagaaaaagagaga

SEQ ID NO: 1524117 - DNA, 15 bp, Homo sapiens
aagaaaaagagagaa

SEQ ID NO: 1524118 - DNA, 15 bp, Homo sapiens
agaaaaagagagaat

SEQ ID NO: 1524119 - DNA, 15 bp, Homo sapiens
gaaaaagagagaatc

SEQ ID NO: 1524120 - DNA, 15 bp, Homo sapiens
aaaaagagagaatcc

SEQ ID NO: 1524121 - DNA, 15 bp, Homo sapiens
aaaagagagaatcct

SEQ ID NO: 1524122 - DNA, 15 bp, Homo sapiens
aaagagagaatcctc

SEQ ID NO: 1524123 - DNA, 15 bp, Homo sapiens
aagagagaatcctcc

SEQ ID NO: 1524124 - DNA, 15 bp, Homo sapiens
agagagaatcctccc

SEQ ID NO: 1524125 - DNA, 15 bp, Homo sapiens
gagagaatcctccct

SEQ ID NO: 1524126 - DNA, 15 bp, Homo sapiens
agagaatcctcccta

SEQ ID NO: 1524127 - DNA, 15 bp, Homo sapiens
gagaatcctccctaa

SEQ ID NO: 1524128 - DNA, 15 bp, Homo sapiens
agaatcctccctaac

SEQ ID NO: 1524129 - DNA, 15 bp, Homo sapiens
gaatcctccctaact

SEQ ID NO: 1524130 - DNA, 15 bp, Homo sapiens
aatcctccctaactc

SEQ ID NO: 1524131 - DNA, 15 bp, Homo sapiens
atcctccctaactca

SEQ ID NO: 1524132 - DNA, 15 bp, Homo sapiens
tcctccctaactcat

SEQ ID NO: 1524133 - DNA, 15 bp, Homo sapiens
cctccctaactcatt

SEQ ID NO: 1524134 - DNA, 15 bp, Homo sapiens
ctccctaactcattt

SEQ ID NO: 1524135 - DNA, 15 bp, Homo sapiens
tccctaactcatttt

SEQ ID NO: 1524136 - DNA, 15 bp, Homo sapiens
ccctaactcatttta

SEQ ID NO: 1524137 - DNA, 15 bp, Homo sapiens
cctaactcattttat

SEQ ID NO: 1524138 - DNA, 15 bp, Homo sapiens
ctaactcattttatg

SEQ ID NO: 1524139 - DNA, 15 bp, Homo sapiens
taactcattttatga

SEQ ID NO: 1524140 - DNA, 15 bp, Homo sapiens
aactcattttatgag

SEQ ID NO: 1524141 - DNA, 15 bp, Homo sapiens
actcattttatgagg

SEQ ID NO: 1524142 - DNA, 15 bp, Homo sapiens
ctcattttatgaggc

SEQ ID NO: 1524143 - DNA, 15 bp, Homo sapiens
tcattttatgaggcc

SEQ ID NO: 1524144 - DNA, 15 bp, Homo sapiens
cattttatgaggcca

SEQ ID NO: 1524145 - DNA, 15 bp, Homo sapiens
attttatgaggccag

SEQ ID NO: 1524146 - DNA, 15 bp, Homo sapiens
ttttatgaggccagc

SEQ ID NO: 1524147 - DNA, 15 bp, Homo sapiens
tttatgaggccagca

SEQ ID NO: 1524148 - DNA, 15 bp, Homo sapiens
ttatgaggccagcat

SEQ ID NO: 1524149 - DNA, 15 bp, Homo sapiens
tatgaggccagcatc

SEQ ID NO: 1524150 - DNA, 15 bp, Homo sapiens
atgaggccagcatca

SEQ ID NO: 1524151 - DNA, 15 bp, Homo sapiens
tgaggccagcatcat

SEQ ID NO: 1524152 - DNA, 15 bp, Homo sapiens
gaggccagcatcatc

SEQ ID NO: 1524153 - DNA, 15 bp, Homo sapiens
aggccagcatcatcc

SEQ ID NO: 1524154 - DNA, 15 bp, Homo sapiens
ggccagcatcatcct

SEQ ID NO: 1524155 - DNA, 15 bp, Homo sapiens
gccagcatcatcctg

SEQ ID NO: 1524156 - DNA, 15 bp, Homo sapiens
ccagcatcatcctga

SEQ ID NO: 1524157 - DNA, 15 bp, Homo sapiens
cagcatcatcctgat

SEQ ID NO: 1524158 - DNA, 15 bp, Homo sapiens
agcatcatcctgata

SEQ ID NO: 1524159 - DNA, 15 bp, Homo sapiens
gcatcatcctgatac

SEQ ID NO: 1524160 - DNA, 15 bp, Homo sapiens
catcatcctgatacc

SEQ ID NO: 1524161 - DNA, 15 bp, Homo sapiens
atcatcctgatacca

SEQ ID NO: 1524162 - DNA, 15 bp, Homo sapiens
tcatcctgataccaa

SEQ ID NO: 1524163 - DNA, 15 bp, Homo sapiens
catcctgataccaaa

SEQ ID NO: 1524164 - DNA, 15 bp, Homo sapiens
atcctgataccaaag

SEQ ID NO: 1524165 - DNA, 15 bp, Homo sapiens
tcctgataccaaagg

SEQ ID NO: 1524166 - DNA, 15 bp, Homo sapiens
cctgataccaaaggg

SEQ ID NO: 1524167 - DNA, 15 bp, Homo sapiens
ctgataccaaagggt

SEQ ID NO: 1524168 - DNA, 15 bp, Homo sapiens
tgataccaaagggtg

SEQ ID NO: 1524169 - DNA, 15 bp, Homo sapiens
gataccaaagggtgg

SEQ ID NO: 1524170 - DNA, 15 bp, Homo sapiens
ataccaaagggtggc

SEQ ID NO: 1524171 - DNA, 15 bp, Homo sapiens
taccaaagggtggca

SEQ ID NO: 1524172 - DNA, 15 bp, Homo sapiens
accaaagggtggcag

SEQ ID NO: 1524173 - DNA, 15 bp, Homo sapiens
ccaaagggtggcaga

SEQ ID NO: 1524174 - DNA, 15 bp, Homo sapiens
caaagggtggcagag

SEQ ID NO: 1524175 - DNA, 15 bp, Homo sapiens
aaagggtggcagaga

SEQ ID NO: 1524176 - DNA, 15 bp, Homo sapiens
aagggtggcagagag

SEQ ID NO: 1524177 - DNA, 15 bp, Homo sapiens
agggtggcagagaga

SEQ ID NO: 1524178 - DNA, 15 bp, Homo sapiens
gggtggcagagagag

SEQ ID NO: 1524179 - DNA, 15 bp, Homo sapiens
ggtggcagagagaga

SEQ ID NO: 1524180 - DNA, 15 bp, Homo sapiens
gtggcagagagagac

SEQ ID NO: 1524181 - DNA, 15 bp, Homo sapiens
tggcagagagagaca

SEQ ID NO: 1524182 - DNA, 15 bp, Homo sapiens
ggcagagagagacac

SEQ ID NO: 1524183 - DNA, 15 bp, Homo sapiens
gcagagagagacaca

SEQ ID NO: 1524184 - DNA, 15 bp, Homo sapiens
cagagagagacacaa

SEQ ID NO: 1524185 - DNA, 15 bp, Homo sapiens
agagagagacacaac

SEQ ID NO: 1524186 - DNA, 15 bp, Homo sapiens
gagagagacacaaca

SEQ ID NO: 1524187 - DNA, 15 bp, Homo sapiens
agagagacacaacaa

SEQ ID NO: 1524188 - DNA, 15 bp, Homo sapiens
gagagacacaacaaa

SEQ ID NO: 1524189 - DNA, 15 bp, Homo sapiens
agagacacaacaaaa

SEQ ID NO: 1524190 - DNA, 15 bp, Homo sapiens
gagacacaacaaaaa

SEQ ID NO: 1524191 - DNA, 15 bp, Homo sapiens
agacacaacaaaaaa

SEQ ID NO: 1524192 - DNA, 15 bp, Homo sapiens
gacacaacaaaaaaa

SEQ ID NO: 1524193 - DNA, 15 bp, Homo sapiens
acacaacaaaaaaag

SEQ ID NO: 1524194 - DNA, 15 bp, Homo sapiens
cacaacaaaaaaaga

SEQ ID NO: 1524195 - DNA, 15 bp, Homo sapiens
acaacaaaaaaagaa

SEQ ID NO: 1524196 - DNA, 15 bp, Homo sapiens
caacaaaaaaagaat

SEQ ID NO: 1524197 - DNA, 15 bp, Homo sapiens
aacaaaaaaagaatt

SEQ ID NO: 1524198 - DNA, 15 bp, Homo sapiens
acaaaaaaagaattt

SEQ ID NO: 1524199 - DNA, 15 bp, Homo sapiens
caaaaaaagaatttt

SEQ ID NO: 1524200 - DNA, 15 bp, Homo sapiens
aaaaaaagaatttta

SEQ ID NO: 1524201 - DNA, 15 bp, Homo sapiens
aaaaaagaattttag

SEQ ID NO: 1524202 - DNA, 15 bp, Homo sapiens
aaaaagaattttaga

SEQ ID NO: 1524203 - DNA, 15 bp, Homo sapiens
aaaagaattttagac

SEQ ID NO: 1524204 - DNA, 15 bp, Homo sapiens
aaagaattttagacc

SEQ ID NO: 1524205 - DNA, 15 bp, Homo sapiens
aagaattttagacca

SEQ ID NO: 1524206 - DNA, 15 bp, Homo sapiens
agaattttagaccaa

SEQ ID NO: 1524207 - DNA, 15 bp, Homo sapiens
gaattttagaccaat

SEQ ID NO: 1524208 - DNA, 15 bp, Homo sapiens
aattttagaccaata

SEQ ID NO: 1524209 - DNA, 15 bp, Homo sapiens
attttagaccaatat

SEQ ID NO: 1524210 - DNA, 15 bp, Homo sapiens
ttttagaccaatatc

SEQ ID NO: 1524211 - DNA, 15 bp, Homo sapiens
tttagaccaatatcc

SEQ ID NO: 1524212 - DNA, 15 bp, Homo sapiens
ttagaccaatatcct

SEQ ID NO: 1524213 - DNA, 15 bp, Homo sapiens
tagaccaatatcctt

SEQ ID NO: 1524214 - DNA, 15 bp, Homo sapiens
agaccaatatccttg

SEQ ID NO: 1524215 - DNA, 15 bp, Homo sapiens
gaccaatatccttga

SEQ ID NO: 1524216 - DNA, 15 bp, Homo sapiens
accaatatccttgat

SEQ ID NO: 1524217 - DNA, 15 bp, Homo sapiens
ccaatatccttgatg

SEQ ID NO: 1524218 - DNA, 15 bp, Homo sapiens
caatatccttgatga

SEQ ID NO: 1524219 - DNA, 15 bp, Homo sapiens
aatatccttgatgaa

SEQ ID NO: 1524220 - DNA, 15 bp, Homo sapiens
atatccttgatgaac

SEQ ID NO: 1524221 - DNA, 15 bp, Homo sapiens
tatccttgatgaaca

SEQ ID NO: 1524222 - DNA, 15 bp, Homo sapiens
atccttgatgaacat

SEQ ID NO: 1524223 - DNA, 15 bp, Homo sapiens
tccttgatgaacatt

SEQ ID NO: 1524224 - DNA, 15 bp, Homo sapiens
ccttgatgaacattg

SEQ ID NO: 1524225 - DNA, 15 bp, Homo sapiens
cttgatgaacattga

SEQ ID NO: 1524226 - DNA, 15 bp, Homo sapiens
ttgatgaacattgaa

SEQ ID NO: 1524227 - DNA, 15 bp, Homo sapiens
tgatgaacattgaag

SEQ ID NO: 1524228 - DNA, 15 bp, Homo sapiens
gatgaacattgaagc

SEQ ID NO: 1524229 - DNA, 15 bp, Homo sapiens
atgaacattgaagca

SEQ ID NO: 1524230 - DNA, 15 bp, Homo sapiens
tgaacattgaagcaa

SEQ ID NO: 1524231 - DNA, 15 bp, Homo sapiens
gaacattgaagcaaa

SEQ ID NO: 1524232 - DNA, 15 bp, Homo sapiens
aacattgaagcaaaa

SEQ ID NO: 1524233 - DNA, 15 bp, Homo sapiens
acattgaagcaaaaa

SEQ ID NO: 1524234 - DNA, 15 bp, Homo sapiens
cattgaagcaaaaat

SEQ ID NO: 1524235 - DNA, 15 bp, Homo sapiens
attgaagcaaaaatc

SEQ ID NO: 1524236 - DNA, 15 bp, Homo sapiens
ttgaagcaaaaatcc

SEQ ID NO: 1524237 - DNA, 15 bp, Homo sapiens
tgaagcaaaaatcct

SEQ ID NO: 1524238 - DNA, 15 bp, Homo sapiens
gaagcaaaaatcctc

SEQ ID NO: 1524239 - DNA, 15 bp, Homo sapiens
aagcaaaaatcctca

SEQ ID NO: 1524240 - DNA, 15 bp, Homo sapiens
agcaaaaatcctcag

SEQ ID NO: 1524241 - DNA, 15 bp, Homo sapiens
gcaaaaatcctcagt

SEQ ID NO: 1524242 - DNA, 15 bp, Homo sapiens
caaaaatcctcagta

SEQ ID NO: 1524243 - DNA, 15 bp, Homo sapiens
aaaaatcctcagtaa

SEQ ID NO: 1524244 - DNA, 15 bp, Homo sapiens
aaaatcctcagtaaa

SEQ ID NO: 1524245 - DNA, 15 bp, Homo sapiens
aaatcctcagtaaaa

SEQ ID NO: 1524246 - DNA, 15 bp, Homo sapiens
aatcctcagtaaaat

SEQ ID NO: 1524247 - DNA, 15 bp, Homo sapiens
atcctcagtaaaata

SEQ ID NO: 1524248 - DNA, 15 bp, Homo sapiens
tcctcagtaaaatac

SEQ ID NO: 1524249 - DNA, 15 bp, Homo sapiens
cctcagtaaaatact

SEQ ID NO: 1524250 - DNA, 15 bp, Homo sapiens
ctcagtaaaatactg

SEQ ID NO: 1524251 - DNA, 15 bp, Homo sapiens
tcagtaaaatactgg

SEQ ID NO: 1524252 - DNA, 15 bp, Homo sapiens
cagtaaaatactggc

SEQ ID NO: 1524253 - DNA, 15 bp, Homo sapiens
agtaaaatactggca

SEQ ID NO: 1524254 - DNA, 15 bp, Homo sapiens
gtaaaatactggcaa

SEQ ID NO: 1524255 - DNA, 15 bp, Homo sapiens
taaaatactggcaaa

SEQ ID NO: 1524256 - DNA, 15 bp, Homo sapiens
aaaatactggcaaac

SEQ ID NO: 1524257 - DNA, 15 bp, Homo sapiens
aaatactggcaaacc

SEQ ID NO: 1524258 - DNA, 15 bp, Homo sapiens
aatactggcaaaccg

SEQ ID NO: 1524259 - DNA, 15 bp, Homo sapiens
atactggcaaaccga

SEQ ID NO: 1524260 - DNA, 15 bp, Homo sapiens
tactggcaaaccgaa

SEQ ID NO: 1524261 - DNA, 15 bp, Homo sapiens
actggcaaaccgaat

SEQ ID NO: 1524262 - DNA, 15 bp, Homo sapiens
ctggcaaaccgaatc

SEQ ID NO: 1524263 - DNA, 15 bp, Homo sapiens
tggcaaaccgaatcc

SEQ ID NO: 1524264 - DNA, 15 bp, Homo sapiens
ggcaaaccgaatcca

SEQ ID NO: 1524265 - DNA, 15 bp, Homo sapiens
gcaaaccgaatccag

SEQ ID NO: 1524266 - DNA, 15 bp, Homo sapiens
caaaccgaatccagc

SEQ ID NO: 1524267 - DNA, 15 bp, Homo sapiens
aaaccgaatccagca

SEQ ID NO: 1524268 - DNA, 15 bp, Homo sapiens
aaccgaatccagcaa

SEQ ID NO: 1524269 - DNA, 15 bp, Homo sapiens
accgaatccagcaac

SEQ ID NO: 1524270 - DNA, 15 bp, Homo sapiens
ccgaatccagcaaca

SEQ ID NO: 1524271 - DNA, 15 bp, Homo sapiens
cgaatccagcaacac

SEQ ID NO: 1524272 - DNA, 15 bp, Homo sapiens
gaatccagcaacaca

SEQ ID NO: 1524273 - DNA, 15 bp, Homo sapiens
aatccagcaacacat

SEQ ID NO: 1524274 - DNA, 15 bp, Homo sapiens
atccagcaacacatc

SEQ ID NO: 1524275 - DNA, 15 bp, Homo sapiens
tccagcaacacatca

SEQ ID NO: 1524276 - DNA, 15 bp, Homo sapiens
ccagcaacacatcaa

SEQ ID NO: 1524277 - DNA, 15 bp, Homo sapiens
cagcaacacatcaaa

SEQ ID NO: 1524278 - DNA, 15 bp, Homo sapiens
agcaacacatcaaaa

SEQ ID NO: 1524279 - DNA, 15 bp, Homo sapiens
gcaacacatcaaaaa

SEQ ID NO: 1524280 - DNA, 15 bp, Homo sapiens
caacacatcaaaaag

SEQ ID NO: 1524281 - DNA, 15 bp, Homo sapiens
aacacatcaaaaagc

SEQ ID NO: 1524282 - DNA, 15 bp, Homo sapiens
acacatcaaaaagct

SEQ ID NO: 1524283 - DNA, 15 bp, Homo sapiens
cacatcaaaaagctt

SEQ ID NO: 1524284 - DNA, 15 bp, Homo sapiens
acatcaaaaagctta

SEQ ID NO: 1524285 - DNA, 15 bp, Homo sapiens
catcaaaaagcttat

SEQ ID NO: 1524286 - DNA, 15 bp, Homo sapiens
atcaaaaagcttatc

SEQ ID NO: 1524287 - DNA, 15 bp, Homo sapiens
tcaaaaagcttatcc

SEQ ID NO: 1524288 - DNA, 15 bp, Homo sapiens
caaaaagcttatcca

SEQ ID NO: 1524289 - DNA, 15 bp, Homo sapiens
aaaaagcttatccac

SEQ ID NO: 1524290 - DNA, 15 bp, Homo sapiens
aaaagcttatccacc

SEQ ID NO: 1524291 - DNA, 15 bp, Homo sapiens
aaagcttatccacca

SEQ ID NO: 1524292 - DNA, 15 bp, Homo sapiens
aagcttatccaccat

SEQ ID NO: 1524293 - DNA, 15 bp, Homo sapiens
agcttatccaccatg

SEQ ID NO: 1524294 - DNA, 15 bp, Homo sapiens
gcttatccaccatga

SEQ ID NO: 1524295 - DNA, 15 bp, Homo sapiens
cttatccaccatgat

SEQ ID NO: 1524296 - DNA, 15 bp, Homo sapiens
ttatccaccatgatc

SEQ ID NO: 1524297 - DNA, 15 bp, Homo sapiens
tatccaccatgatca

SEQ ID NO: 1524298 - DNA, 15 bp, Homo sapiens
atccaccatgatcaa

SEQ ID NO: 1524299 - DNA, 15 bp, Homo sapiens
tccaccatgatcaag

SEQ ID NO: 1524300 - DNA, 15 bp, Homo sapiens
ccaccatgatcaagt

SEQ ID NO: 1524301 - DNA, 15 bp, Homo sapiens
caccatgatcaagtg

SEQ ID NO: 1524302 - DNA, 15 bp, Homo sapiens
accatgatcaagtgg

SEQ ID NO: 1524303 - DNA, 15 bp, Homo sapiens
ccatgatcaagtggg

SEQ ID NO: 1524304 - DNA, 15 bp, Homo sapiens
catgatcaagtgggc

SEQ ID NO: 1524305 - DNA, 15 bp, Homo sapiens
atgatcaagtgggct

SEQ ID NO: 1524306 - DNA, 15 bp, Homo sapiens
tgatcaagtgggctt

SEQ ID NO: 1524307 - DNA, 15 bp, Homo sapiens
gatcaagtgggcttc

SEQ ID NO: 1524308 - DNA, 15 bp, Homo sapiens
atcaagtgggcttca

SEQ ID NO: 1524309 - DNA, 15 bp, Homo sapiens
tcaagtgggcttcat

SEQ ID NO: 1524310 - DNA, 15 bp, Homo sapiens
caagtgggcttcatc

SEQ ID NO: 1524311 - DNA, 15 bp, Homo sapiens
aagtgggcttcatcc

SEQ ID NO: 1524312 - DNA, 15 bp, Homo sapiens
agtgggcttcatccc

SEQ ID NO: 1524313 - DNA, 15 bp, Homo sapiens
gtgggcttcatccct

SEQ ID NO: 1524314 - DNA, 15 bp, Homo sapiens
tgggcttcatccctg

SEQ ID NO: 1524315 - DNA, 15 bp, Homo sapiens
gggcttcatccctgg

SEQ ID NO: 1524316 - DNA, 15 bp, Homo sapiens
ggcttcatccctggg

SEQ ID NO: 1524317 - DNA, 15 bp, Homo sapiens
gcttcatccctggga

SEQ ID NO: 1524318 - DNA, 15 bp, Homo sapiens
cttcatccctgggat

SEQ ID NO: 1524319 - DNA, 15 bp, Homo sapiens
ttcatccctgggatg

SEQ ID NO: 1524320 - DNA, 15 bp, Homo sapiens
tcatccctgggatgc

SEQ ID NO: 1524321 - DNA, 15 bp, Homo sapiens
catccctgggatgca

SEQ ID NO: 1524322 - DNA, 15 bp, Homo sapiens
atccctgggatgcaa

SEQ ID NO: 1524323 - DNA, 15 bp, Homo sapiens
tccctgggatgcaag

SEQ ID NO: 1524324 - DNA, 15 bp, Homo sapiens
ccctgggatgcaagg

SEQ ID NO: 1524325 - DNA, 15 bp, Homo sapiens
cctgggatgcaaggc

SEQ ID NO: 1524326 - DNA, 15 bp, Homo sapiens
ctgggatgcaaggct

SEQ ID NO: 1524327 - DNA, 15 bp, Homo sapiens
tgggatgcaaggctg

SEQ ID NO: 1524328 - DNA, 15 bp, Homo sapiens
gggatgcaaggctgg

SEQ ID NO: 1524329 - DNA, 15 bp, Homo sapiens
ggatgcaaggctggt

SEQ ID NO: 1524330 - DNA, 15 bp, Homo sapiens
gatgcaaggctggtt

SEQ ID NO: 1524331 - DNA, 15 bp, Homo sapiens
atgcaaggctggttc

SEQ ID NO: 1524332 - DNA, 15 bp, Homo sapiens
tgcaaggctggttca

SEQ ID NO: 1524333 - DNA, 15 bp, Homo sapiens
gcaaggctggttcaa

SEQ ID NO: 1524334 - DNA, 15 bp, Homo sapiens
caaggctggttcaac

SEQ ID NO: 1524335 - DNA, 15 bp, Homo sapiens
aaggctggttcaaca

SEQ ID NO: 1524336 - DNA, 15 bp, Homo sapiens
aggctggttcaacat

SEQ ID NO: 1524337 - DNA, 15 bp, Homo sapiens
ggctggttcaacata

SEQ ID NO: 1524338 - DNA, 15 bp, Homo sapiens
gctggttcaacatac

SEQ ID NO: 1524339 - DNA, 15 bp, Homo sapiens
ctggttcaacatacg

SEQ ID NO: 1524340 - DNA, 15 bp, Homo sapiens
tggttcaacatacga

SEQ ID NO: 1524341 - DNA, 15 bp, Homo sapiens
ggttcaacatacgaa

SEQ ID NO: 1524342 - DNA, 15 bp, Homo sapiens
gttcaacatacgaaa

SEQ ID NO: 1524343 - DNA, 15 bp, Homo sapiens
ttcaacatacgaaaa

SEQ ID NO: 1524344 - DNA, 15 bp, Homo sapiens
tcaacatacgaaaat

SEQ ID NO: 1524345 - DNA, 15 bp, Homo sapiens
caacatacgaaaatc

SEQ ID NO: 1524346 - DNA, 15 bp, Homo sapiens
aacatacgaaaatca

SEQ ID NO: 1524347 - DNA, 15 bp, Homo sapiens
acatacgaaaatcag

SEQ ID NO: 1524348 - DNA, 15 bp, Homo sapiens
catacgaaaatcagt

SEQ ID NO: 1524349 - DNA, 15 bp, Homo sapiens
atacgaaaatcagta

SEQ ID NO: 1524350 - DNA, 15 bp, Homo sapiens
tacgaaaatcagtaa

SEQ ID NO: 1524351 - DNA, 15 bp, Homo sapiens
acgaaaatcagtaaa

SEQ ID NO: 1524352 - DNA, 15 bp, Homo sapiens
cgaaaatcagtaaac

SEQ ID NO: 1524353 - DNA, 15 bp, Homo sapiens
gaaaatcagtaaacg

SEQ ID NO: 1524354 - DNA, 15 bp, Homo sapiens
aaaatcagtaaacgt

SEQ ID NO: 1524355 - DNA, 15 bp, Homo sapiens
aaatcagtaaacgta

SEQ ID NO: 1524356 - DNA, 15 bp, Homo sapiens
aatcagtaaacgtaa

SEQ ID NO: 1524357 - DNA, 15 bp, Homo sapiens
atcagtaaacgtaat

SEQ ID NO: 1524358 - DNA, 15 bp, Homo sapiens
tcagtaaacgtaatc

SEQ ID NO: 1524359 - DNA, 15 bp, Homo sapiens
cagtaaacgtaatcc

SEQ ID NO: 1524360 - DNA, 15 bp, Homo sapiens
agtaaacgtaatcca

SEQ ID NO: 1524361 - DNA, 15 bp, Homo sapiens
gtaaacgtaatccag

SEQ ID NO: 1524362 - DNA, 15 bp, Homo sapiens
taaacgtaatccagc

SEQ ID NO: 1524363 - DNA, 15 bp, Homo sapiens
aaacgtaatccagca

SEQ ID NO: 1524364 - DNA, 15 bp, Homo sapiens
aacgtaatccagcat

SEQ ID NO: 1524365 - DNA, 15 bp, Homo sapiens
acgtaatccagcata

SEQ ID NO: 1524366 - DNA, 15 bp, Homo sapiens
cgtaatccagcatat

SEQ ID NO: 1524367 - DNA, 15 bp, Homo sapiens
gtaatccagcatata

SEQ ID NO: 1524368 - DNA, 15 bp, Homo sapiens
taatccagcatataa

SEQ ID NO: 1524369 - DNA, 15 bp, Homo sapiens
aatccagcatataaa

SEQ ID NO: 1524370 - DNA, 15 bp, Homo sapiens
atccagcatataaac

SEQ ID NO: 1524371 - DNA, 15 bp, Homo sapiens
tccagcatataaaca

SEQ ID NO: 1524372 - DNA, 15 bp, Homo sapiens
ccagcatataaacag

SEQ ID NO: 1524373 - DNA, 15 bp, Homo sapiens
cagcatataaacaga

SEQ ID NO: 1524374 - DNA, 15 bp, Homo sapiens
agcatataaacagaa

SEQ ID NO: 1524375 - DNA, 15 bp, Homo sapiens
gcatataaacagaac

SEQ ID NO: 1524376 - DNA, 15 bp, Homo sapiens
catataaacagaacc

SEQ ID NO: 1524377 - DNA, 15 bp, Homo sapiens
atataaacagaacca

SEQ ID NO: 1524378 - DNA, 15 bp, Homo sapiens
tataaacagaaccaa

SEQ ID NO: 1524379 - DNA, 15 bp, Homo sapiens
ataaacagaaccaaa

SEQ ID NO: 1524380 - DNA, 15 bp, Homo sapiens
taaacagaaccaaag

SEQ ID NO: 1524381 - DNA, 15 bp, Homo sapiens
aaacagaaccaaaga

SEQ ID NO: 1524382 - DNA, 15 bp, Homo sapiens
aacagaaccaaagac

SEQ ID NO: 1524383 - DNA, 15 bp, Homo sapiens
acagaaccaaagaca

SEQ ID NO: 1524384 - DNA, 15 bp, Homo sapiens
cagaaccaaagacaa

SEQ ID NO: 1524385 - DNA, 15 bp, Homo sapiens
agaaccaaagacaaa

SEQ ID NO: 1524386 - DNA, 15 bp, Homo sapiens
gaaccaaagacaaaa

SEQ ID NO: 1524387 - DNA, 15 bp, Homo sapiens
aaccaaagacaaaaa

SEQ ID NO: 1524388 - DNA, 15 bp, Homo sapiens
accaaagacaaaaac

SEQ ID NO: 1524389 - DNA, 15 bp, Homo sapiens
ccaaagacaaaaacc

SEQ ID NO: 1524390 - DNA, 15 bp, Homo sapiens
caaagacaaaaacca

SEQ ID NO: 1524391 - DNA, 15 bp, Homo sapiens
aaagacaaaaaccac

SEQ ID NO: 1524392 - DNA, 15 bp, Homo sapiens
aagacaaaaaccaca

SEQ ID NO: 1524393 - DNA, 15 bp, Homo sapiens
agacaaaaaccacat

SEQ ID NO: 1524394 - DNA, 15 bp, Homo sapiens
gacaaaaaccacatg

SEQ ID NO: 1524395 - DNA, 15 bp, Homo sapiens
acaaaaaccacatga

SEQ ID NO: 1524396 - DNA, 15 bp, Homo sapiens
caaaaaccacatgat

SEQ ID NO: 1524397 - DNA, 15 bp, Homo sapiens
aaaaaccacatgatt

SEQ ID NO: 1524398 - DNA, 15 bp, Homo sapiens
aaaaccacatgatta

SEQ ID NO: 1524399 - DNA, 15 bp, Homo sapiens
aaaccacatgattat

SEQ ID NO: 1524400 - DNA, 15 bp, Homo sapiens
aaccacatgattatc

SEQ ID NO: 1524401 - DNA, 15 bp, Homo sapiens
accacatgattatct

SEQ ID NO: 1524402 - DNA, 15 bp, Homo sapiens
ccacatgattatctc

SEQ ID NO: 1524403 - DNA, 15 bp, Homo sapiens
cacatgattatctca

SEQ ID NO: 1524404 - DNA, 15 bp, Homo sapiens
acatgattatctcaa

SEQ ID NO: 1524405 - DNA, 15 bp, Homo sapiens
catgattatctcaat

SEQ ID NO: 1524406 - DNA, 15 bp, Homo sapiens
atgattatctcaata

SEQ ID NO: 1524407 - DNA, 15 bp, Homo sapiens
tgattatctcaatag

SEQ ID NO: 1524408 - DNA, 15 bp, Homo sapiens
gattatctcaataga

SEQ ID NO: 1524409 - DNA, 15 bp, Homo sapiens
attatctcaatagat

SEQ ID NO: 1524410 - DNA, 15 bp, Homo sapiens
ttatctcaatagatg

SEQ ID NO: 1524411 - DNA, 15 bp, Homo sapiens
tatctcaatagatgc

SEQ ID NO: 1524412 - DNA, 15 bp, Homo sapiens
atctcaatagatgca

SEQ ID NO: 1524413 - DNA, 15 bp, Homo sapiens
tctcaatagatgcag

SEQ ID NO: 1524414 - DNA, 15 bp, Homo sapiens
ctcaatagatgcaga

SEQ ID NO: 1524415 - DNA, 15 bp, Homo sapiens
tcaatagatgcagaa

SEQ ID NO: 1524416 - DNA, 15 bp, Homo sapiens
caatagatgcagaaa

SEQ ID NO: 1524417 - DNA, 15 bp, Homo sapiens
aatagatgcagaaaa

SEQ ID NO: 1524418 - DNA, 15 bp, Homo sapiens
atagatgcagaaaag

SEQ ID NO: 1524419 - DNA, 15 bp, Homo sapiens
tagatgcagaaaagg

SEQ ID NO: 1524420 - DNA, 15 bp, Homo sapiens
agatgcagaaaaggc

SEQ ID NO: 1524421 - DNA, 15 bp, Homo sapiens
gatgcagaaaaggcc

SEQ ID NO: 1524422 - DNA, 15 bp, Homo sapiens
atgcagaaaaggcct

SEQ ID NO: 1524423 - DNA, 15 bp, Homo sapiens
tgcagaaaaggcctt

SEQ ID NO: 1524424 - DNA, 15 bp, Homo sapiens
gcagaaaaggccttt

SEQ ID NO: 1524425 - DNA, 15 bp, Homo sapiens
cagaaaaggcctttg

SEQ ID NO: 1524426 - DNA, 15 bp, Homo sapiens
agaaaaggcctttga

SEQ ID NO: 1524427 - DNA, 15 bp, Homo sapiens
gaaaaggcctttgac

SEQ ID NO: 1524428 - DNA, 15 bp, Homo sapiens
aaaaggcctttgaca

SEQ ID NO: 1524429 - DNA, 15 bp, Homo sapiens
aaaggcctttgacaa

SEQ ID NO: 1524430 - DNA, 15 bp, Homo sapiens
aaggcctttgacaaa

SEQ ID NO: 1524431 - DNA, 15 bp, Homo sapiens
aggcctttgacaaaa

SEQ ID NO: 1524432 - DNA, 15 bp, Homo sapiens
ggcctttgacaaaat

SEQ ID NO: 1524433 - DNA, 15 bp, Homo sapiens
gcctttgacaaaatt

SEQ ID NO: 1524434 - DNA, 15 bp, Homo sapiens
cctttgacaaaattc

SEQ ID NO: 1524435 - DNA, 15 bp, Homo sapiens
ctttgacaaaattca

SEQ ID NO: 1524436 - DNA, 15 bp, Homo sapiens
tttgacaaaattcaa

SEQ ID NO: 1524437 - DNA, 15 bp, Homo sapiens
ttgacaaaattcaac

SEQ ID NO: 1524438 - DNA, 15 bp, Homo sapiens
tgacaaaattcaaca

SEQ ID NO: 1524439 - DNA, 15 bp, Homo sapiens
gacaaaattcaacaa

SEQ ID NO: 1524440 - DNA, 15 bp, Homo sapiens
acaaaattcaacaac

SEQ ID NO: 1524441 - DNA, 15 bp, Homo sapiens
caaaattcaacaacc

SEQ ID NO: 1524442 - DNA, 15 bp, Homo sapiens
aaaattcaacaaccc

SEQ ID NO: 1524443 - DNA, 15 bp, Homo sapiens
aaattcaacaaccct

SEQ ID NO: 1524444 - DNA, 15 bp, Homo sapiens
aattcaacaaccctc

SEQ ID NO: 1524445 - DNA, 15 bp, Homo sapiens
attcaacaaccctca

SEQ ID NO: 1524446 - DNA, 15 bp, Homo sapiens
ttcaacaaccctcat

SEQ ID NO: 1524447 - DNA, 15 bp, Homo sapiens
tcaacaaccctcatg

SEQ ID NO: 1524448 - DNA, 15 bp, Homo sapiens
caacaaccctcatgc

SEQ ID NO: 1524449 - DNA, 15 bp, Homo sapiens
aacaaccctcatgct

SEQ ID NO: 1524450 - DNA, 15 bp, Homo sapiens
acaaccctcatgcta

SEQ ID NO: 1524451 - DNA, 15 bp, Homo sapiens
caaccctcatgctaa

SEQ ID NO: 1524452 - DNA, 15 bp, Homo sapiens
aaccctcatgctaaa

SEQ ID NO: 1524453 - DNA, 15 bp, Homo sapiens
accctcatgctaaaa

SEQ ID NO: 1524454 - DNA, 15 bp, Homo sapiens
ccctcatgctaaaaa

SEQ ID NO: 1524455 - DNA, 15 bp, Homo sapiens
cctcatgctaaaaac

SEQ ID NO: 1524456 - DNA, 15 bp, Homo sapiens
ctcatgctaaaaact

SEQ ID NO: 1524457 - DNA, 15 bp, Homo sapiens
tcatgctaaaaactc

SEQ ID NO: 1524458 - DNA, 15 bp, Homo sapiens
catgctaaaaactct

SEQ ID NO: 1524459 - DNA, 15 bp, Homo sapiens
atgctaaaaactctc

SEQ ID NO: 1524460 - DNA, 15 bp, Homo sapiens
tgctaaaaactctca

SEQ ID NO: 1524461 - DNA, 15 bp, Homo sapiens
gctaaaaactctcaa

SEQ ID NO: 1524462 - DNA, 15 bp, Homo sapiens
ctaaaaactctcaat

SEQ ID NO: 1524463 - DNA, 15 bp, Homo sapiens
taaaaactctcaata

SEQ ID NO: 1524464 - DNA, 15 bp, Homo sapiens
aaaaactctcaataa

SEQ ID NO: 1524465 - DNA, 15 bp, Homo sapiens
aaaactctcaataaa

SEQ ID NO: 1524466 - DNA, 15 bp, Homo sapiens
aaactctcaataaat

SEQ ID NO: 1524467 - DNA, 15 bp, Homo sapiens
aactctcaataaatt

SEQ ID NO: 1524468 - DNA, 15 bp, Homo sapiens
actctcaataaatta

SEQ ID NO: 1524469 - DNA, 15 bp, Homo sapiens
ctctcaataaattag

SEQ ID NO: 1524470 - DNA, 15 bp, Homo sapiens
tctcaataaattagg

SEQ ID NO: 1524471 - DNA, 15 bp, Homo sapiens
ctcaataaattaggt

SEQ ID NO: 1524472 - DNA, 15 bp, Homo sapiens
tcaataaattaggta

SEQ ID NO: 1524473 - DNA, 15 bp, Homo sapiens
caataaattaggtat

SEQ ID NO: 1524474 - DNA, 15 bp, Homo sapiens
aataaattaggtatt

SEQ ID NO: 1524475 - DNA, 15 bp, Homo sapiens
ataaattaggtattg

SEQ ID NO: 1524476 - DNA, 15 bp, Homo sapiens
taaattaggtattga

SEQ ID NO: 1524477 - DNA, 15 bp, Homo sapiens
aaattaggtattgat

SEQ ID NO: 1524478 - DNA, 15 bp, Homo sapiens
aattaggtattgatg

SEQ ID NO: 1524479 - DNA, 15 bp, Homo sapiens
attaggtattgatgg

SEQ ID NO: 1524480 - DNA, 15 bp, Homo sapiens
ttaggtattgatggg

SEQ ID NO: 1524481 - DNA, 15 bp, Homo sapiens
taggtattgatggga

SEQ ID NO: 1524482 - DNA, 15 bp, Homo sapiens
aggtattgatgggac

SEQ ID NO: 1524483 - DNA, 15 bp, Homo sapiens
ggtattgatgggacg

SEQ ID NO: 1524484 - DNA, 15 bp, Homo sapiens
gtattgatgggacgt

SEQ ID NO: 1524485 - DNA, 15 bp, Homo sapiens
tattgatgggacgta

SEQ ID NO: 1524486 - DNA, 15 bp, Homo sapiens
attgatgggacgtat

SEQ ID NO: 1524487 - DNA, 15 bp, Homo sapiens
ttgatgggacgtatc

SEQ ID NO: 1524488 - DNA, 15 bp, Homo sapiens
tgatgggacgtatct

SEQ ID NO: 1524489 - DNA, 15 bp, Homo sapiens
gatgggacgtatctc

SEQ ID NO: 1524490 - DNA, 15 bp, Homo sapiens
atgggacgtatctca

SEQ ID NO: 1524491 - DNA, 15 bp, Homo sapiens
tgggacgtatctcaa

SEQ ID NO: 1524492 - DNA, 15 bp, Homo sapiens
gggacgtatctcaaa

SEQ ID NO: 1524493 - DNA, 15 bp, Homo sapiens
ggacgtatctcaaaa

SEQ ID NO: 1524494 - DNA, 15 bp, Homo sapiens
gacgtatctcaaaat

SEQ ID NO: 1524495 - DNA, 15 bp, Homo sapiens
acgtatctcaaaata

SEQ ID NO: 1524496 - DNA, 15 bp, Homo sapiens
cgtatctcaaaataa

SEQ ID NO: 1524497 - DNA, 15 bp, Homo sapiens
gtatctcaaaataat

SEQ ID NO: 1524498 - DNA, 15 bp, Homo sapiens
tatctcaaaataata

SEQ ID NO: 1524499 - DNA, 15 bp, Homo sapiens
atctcaaaataataa

SEQ ID NO: 1524500 - DNA, 15 bp, Homo sapiens
tctcaaaataataag

SEQ ID NO: 1524501 - DNA, 15 bp, Homo sapiens
ctcaaaataataaga

SEQ ID NO: 1524502 - DNA, 15 bp, Homo sapiens
tcaaaataataagag

SEQ ID NO: 1524503 - DNA, 15 bp, Homo sapiens
caaaataataagagc

SEQ ID NO: 1524504 - DNA, 15 bp, Homo sapiens
aaaataataagagct

SEQ ID NO: 1524505 - DNA, 15 bp, Homo sapiens
aaataataagagcta

SEQ ID NO: 1524506 - DNA, 15 bp, Homo sapiens
aataataagagctat

SEQ ID NO: 1524507 - DNA, 15 bp, Homo sapiens
ataataagagctatc

SEQ ID NO: 1524508 - DNA, 15 bp, Homo sapiens
taataagagctatct

SEQ ID NO: 1524509 - DNA, 15 bp, Homo sapiens
aataagagctatcta

SEQ ID NO: 1524510 - DNA, 15 bp, Homo sapiens
ataagagctatctat

SEQ ID NO: 1524511 - DNA, 15 bp, Homo sapiens
taagagctatctatg

SEQ ID NO: 1524512 - DNA, 15 bp, Homo sapiens
aagagctatctatga

SEQ ID NO: 1524513 - DNA, 15 bp, Homo sapiens
agagctatctatgac

SEQ ID NO: 1524514 - DNA, 15 bp, Homo sapiens
gagctatctatgaca

SEQ ID NO: 1524515 - DNA, 15 bp, Homo sapiens
agctatctatgacaa

SEQ ID NO: 1524516 - DNA, 15 bp, Homo sapiens
gctatctatgacaaa

SEQ ID NO: 1524517 - DNA, 15 bp, Homo sapiens
ctatctatgacaaac

SEQ ID NO: 1524518 - DNA, 15 bp, Homo sapiens
tatctatgacaaacc

SEQ ID NO: 1524519 - DNA, 15 bp, Homo sapiens
atctatgacaaaccc

SEQ ID NO: 1524520 - DNA, 15 bp, Homo sapiens
tctatgacaaaccca

SEQ ID NO: 1524521 - DNA, 15 bp, Homo sapiens
ctatgacaaacccac

SEQ ID NO: 1524522 - DNA, 15 bp, Homo sapiens
tatgacaaacccaca

SEQ ID NO: 1524523 - DNA, 15 bp, Homo sapiens
atgacaaacccacag

SEQ ID NO: 1524524 - DNA, 15 bp, Homo sapiens
tgacaaacccacagc

SEQ ID NO: 1524525 - DNA, 15 bp, Homo sapiens
gacaaacccacagcc

SEQ ID NO: 1524526 - DNA, 15 bp, Homo sapiens
acaaacccacagcca

SEQ ID NO: 1524527 - DNA, 15 bp, Homo sapiens
caaacccacagccaa

SEQ ID NO: 1524528 - DNA, 15 bp, Homo sapiens
aaacccacagccaat

SEQ ID NO: 1524529 - DNA, 15 bp, Homo sapiens
aacccacagccaata

SEQ ID NO: 1524530 - DNA, 15 bp, Homo sapiens
acccacagccaatat

SEQ ID NO: 1524531 - DNA, 15 bp, Homo sapiens
cccacagccaatatc

SEQ ID NO: 1524532 - DNA, 15 bp, Homo sapiens
ccacagccaatatca

SEQ ID NO: 1524533 - DNA, 15 bp, Homo sapiens
cacagccaatatcat

SEQ ID NO: 1524534 - DNA, 15 bp, Homo sapiens
acagccaatatcata

SEQ ID NO: 1524535 - DNA, 15 bp, Homo sapiens
cagccaatatcatac

SEQ ID NO: 1524536 - DNA, 15 bp, Homo sapiens
agccaatatcatact

SEQ ID NO: 1524537 - DNA, 15 bp, Homo sapiens
gccaatatcatactg

SEQ ID NO: 1524538 - DNA, 15 bp, Homo sapiens
ccaatatcatactga

SEQ ID NO: 1524539 - DNA, 15 bp, Homo sapiens
caatatcatactgaa

SEQ ID NO: 1524540 - DNA, 15 bp, Homo sapiens
aatatcatactgaat

SEQ ID NO: 1524541 - DNA, 15 bp, Homo sapiens
atatcatactgaatg

SEQ ID NO: 1524542 - DNA, 15 bp, Homo sapiens
tatcatactgaatgg

SEQ ID NO: 1524543 - DNA, 15 bp, Homo sapiens
atcatactgaatgga

SEQ ID NO: 1524544 - DNA, 15 bp, Homo sapiens
tcatactgaatggac

SEQ ID NO: 1524545 - DNA, 15 bp, Homo sapiens
catactgaatggaca

SEQ ID NO: 1524546 - DNA, 15 bp, Homo sapiens
atactgaatggacaa

SEQ ID NO: 1524547 - DNA, 15 bp, Homo sapiens
tactgaatggacaaa

SEQ ID NO: 1524548 - DNA, 15 bp, Homo sapiens
actgaatggacaaaa

SEQ ID NO: 1524549 - DNA, 15 bp, Homo sapiens
ctgaatggacaaaaa

SEQ ID NO: 1524550 - DNA, 15 bp, Homo sapiens
tgaatggacaaaaac

SEQ ID NO: 1524551 - DNA, 15 bp, Homo sapiens
gaatggacaaaaact

SEQ ID NO: 1524552 - DNA, 15 bp, Homo sapiens
aatggacaaaaactg

SEQ ID NO: 1524553 - DNA, 15 bp, Homo sapiens
atggacaaaaactgg

SEQ ID NO: 1524554 - DNA, 15 bp, Homo sapiens
gacaaaaactggaag

SEQ ID NO: 1524555 - DNA, 15 bp, Homo sapiens
acaaaaactggaagc

SEQ ID NO: 1524556 - DNA, 15 bp, Homo sapiens
caaaaactggaagca

SEQ ID NO: 1524557 - DNA, 15 bp, Homo sapiens
aaaaactggaagcat

SEQ ID NO: 1524558 - DNA, 15 bp, Homo sapiens
aaaactggaagcatt

SEQ ID NO: 1524559 - DNA, 15 bp, Homo sapiens
aaactggaagcattc

SEQ ID NO: 1524560 - DNA, 15 bp, Homo sapiens
aactggaagcattcc

SEQ ID NO: 1524561 - DNA, 15 bp, Homo sapiens
actggaagcattccc

SEQ ID NO: 1524562 - DNA, 15 bp, Homo sapiens
ctggaagcattccct

SEQ ID NO: 1524563 - DNA, 15 bp, Homo sapiens
tggaagcattccctt

SEQ ID NO: 1524564 - DNA, 15 bp, Homo sapiens
ggaagcattcccttt

SEQ ID NO: 1524565 - DNA, 15 bp, Homo sapiens
gaagcattccctttg

SEQ ID NO: 1524566 - DNA, 15 bp, Homo sapiens
aagcattccctttga

SEQ ID NO: 1524567 - DNA, 15 bp, Homo sapiens
agcattccctttgaa

SEQ ID NO: 1524568 - DNA, 15 bp, Homo sapiens
gcattccctttgaaa

SEQ ID NO: 1524569 - DNA, 15 bp, Homo sapiens
cattccctttgaaaa

SEQ ID NO: 1524570 - DNA, 15 bp, Homo sapiens
attccctttgaaaac

SEQ ID NO: 1524571 - DNA, 15 bp, Homo sapiens
ttccctttgaaaact

SEQ ID NO: 1524572 - DNA, 15 bp, Homo sapiens
tccctttgaaaactg

SEQ ID NO: 1524573 - DNA, 15 bp, Homo sapiens
ccctttgaaaactgg

SEQ ID NO: 1524574 - DNA, 15 bp, Homo sapiens
cctttgaaaactggc

SEQ ID NO: 1524575 - DNA, 15 bp, Homo sapiens
ctttgaaaactggca

SEQ ID NO: 1524576 - DNA, 15 bp, Homo sapiens
tttgaaaactggcac

SEQ ID NO: 1524577 - DNA, 15 bp, Homo sapiens
ttgaaaactggcaca

SEQ ID NO: 1524578 - DNA, 15 bp, Homo sapiens
tgaaaactggcacaa

SEQ ID NO: 1524579 - DNA, 15 bp, Homo sapiens
gaaaactggcacaag

SEQ ID NO: 1524580 - DNA, 15 bp, Homo sapiens
aaaactggcacaaga

SEQ ID NO: 1524581 - DNA, 15 bp, Homo sapiens
aaactggcacaagac

SEQ ID NO: 1524582 - DNA, 15 bp, Homo sapiens
aactggcacaagact

SEQ ID NO: 1524583 - DNA, 15 bp, Homo sapiens
actggcacaagactg

SEQ ID NO: 1524584 - DNA, 15 bp, Homo sapiens
ctggcacaagactgg

SEQ ID NO: 1524585 - DNA, 15 bp, Homo sapiens
tggcacaagactggg

SEQ ID NO: 1524586 - DNA, 15 bp, Homo sapiens
ggcacaagactggga

SEQ ID NO: 1524587 - DNA, 15 bp, Homo sapiens
gcacaagactgggat

SEQ ID NO: 1524588 - DNA, 15 bp, Homo sapiens
cacaagactgggatg

SEQ ID NO: 1524589 - DNA, 15 bp, Homo sapiens
acaagactgggatgc

SEQ ID NO: 1524590 - DNA, 15 bp, Homo sapiens
caagactgggatgcc

SEQ ID NO: 1524591 - DNA, 15 bp, Homo sapiens
aagactgggatgccc

SEQ ID NO: 1524592 - DNA, 15 bp, Homo sapiens
agactgggatgccct

SEQ ID NO: 1524593 - DNA, 15 bp, Homo sapiens
gactgggatgccctc

SEQ ID NO: 1524594 - DNA, 15 bp, Homo sapiens
actgggatgccctct

SEQ ID NO: 1524595 - DNA, 15 bp, Homo sapiens
ctgggatgccctctc

SEQ ID NO: 1524596 - DNA, 15 bp, Homo sapiens
tgggatgccctctct

SEQ ID NO: 1524597 - DNA, 15 bp, Homo sapiens
gggatgccctctctc

SEQ ID NO: 1524598 - DNA, 15 bp, Homo sapiens
ggatgccctctctca

SEQ ID NO: 1524599 - DNA, 15 bp, Homo sapiens
gatgccctctctcac

SEQ ID NO: 1524600 - DNA, 15 bp, Homo sapiens
atgccctctctcacc

SEQ ID NO: 1524601 - DNA, 15 bp, Homo sapiens
tgccctctctcacca

SEQ ID NO: 1524602 - DNA, 15 bp, Homo sapiens
gccctctctcaccac

SEQ ID NO: 1524603 - DNA, 15 bp, Homo sapiens
ccctctctcaccact

SEQ ID NO: 1524604 - DNA, 15 bp, Homo sapiens
cctctctcaccactc

SEQ ID NO: 1524605 - DNA, 15 bp, Homo sapiens
ctctctcaccactcc

SEQ ID NO: 1524606 - DNA, 15 bp, Homo sapiens
tctctcaccactcct

SEQ ID NO: 1524607 - DNA, 15 bp, Homo sapiens
ctctcaccactcctt

SEQ ID NO: 1524608 - DNA, 15 bp, Homo sapiens
tctcaccactccttt

SEQ ID NO: 1524609 - DNA, 15 bp, Homo sapiens
ctcaccactcctttt

SEQ ID NO: 1524610 - DNA, 15 bp, Homo sapiens
tcaccactccttttc

SEQ ID NO: 1524611 - DNA, 15 bp, Homo sapiens
caccactccttttca

SEQ ID NO: 1524612 - DNA, 15 bp, Homo sapiens
accactccttttcaa

SEQ ID NO: 1524613 - DNA, 15 bp, Homo sapiens
ccactccttttcaac

SEQ ID NO: 1524614 - DNA, 15 bp, Homo sapiens
cactccttttcaaca

SEQ ID NO: 1524615 - DNA, 15 bp, Homo sapiens
actccttttcaacat

SEQ ID NO: 1524616 - DNA, 15 bp, Homo sapiens
ctccttttcaacata

SEQ ID NO: 1524617 - DNA, 15 bp, Homo sapiens
tccttttcaacatag

SEQ ID NO: 1524618 - DNA, 15 bp, Homo sapiens
ccttttcaacatagt

SEQ ID NO: 1524619 - DNA, 15 bp, Homo sapiens
cttttcaacatagtg

SEQ ID NO: 1524620 - DNA, 15 bp, Homo sapiens
ttttcaacatagtgt

SEQ ID NO: 1524621 - DNA, 15 bp, Homo sapiens
tttcaacatagtgtt

SEQ ID NO: 1524622 - DNA, 15 bp, Homo sapiens
ttcaacatagtgttg

SEQ ID NO: 1524623 - DNA, 15 bp, Homo sapiens
tcaacatagtgttgg

SEQ ID NO: 1524624 - DNA, 15 bp, Homo sapiens
caacatagtgttgga

SEQ ID NO: 1524625 - DNA, 15 bp, Homo sapiens
aacatagtgttggaa

SEQ ID NO: 1524626 - DNA, 15 bp, Homo sapiens
acatagtgttggaag

SEQ ID NO: 1524627 - DNA, 15 bp, Homo sapiens
catagtgttggaagt

SEQ ID NO: 1524628 - DNA, 15 bp, Homo sapiens
atagtgttggaagtt

SEQ ID NO: 1524629 - DNA, 15 bp, Homo sapiens
tagtgttggaagttc

SEQ ID NO: 1524630 - DNA, 15 bp, Homo sapiens
agtgttggaagttct

SEQ ID NO: 1524631 - DNA, 15 bp, Homo sapiens
gtgttggaagttctg

SEQ ID NO: 1524632 - DNA, 15 bp, Homo sapiens
tgttggaagttctgg

SEQ ID NO: 1524633 - DNA, 15 bp, Homo sapiens
gttggaagttctggc

SEQ ID NO: 1524634 - DNA, 15 bp, Homo sapiens
ttggaagttctggcc

SEQ ID NO: 1524635 - DNA, 15 bp, Homo sapiens
tggaagttctggcca

SEQ ID NO: 1524636 - DNA, 15 bp, Homo sapiens
ggaagttctggccag

SEQ ID NO: 1524637 - DNA, 15 bp, Homo sapiens
gaagttctggccagg

SEQ ID NO: 1524638 - DNA, 15 bp, Homo sapiens
aagttctggccaggg

SEQ ID NO: 1524639 - DNA, 15 bp, Homo sapiens
agttctggccagggc

SEQ ID NO: 1524640 - DNA, 15 bp, Homo sapiens
gttctggccagggca

SEQ ID NO: 1524641 - DNA, 15 bp, Homo sapiens
ttctggccagggcaa

SEQ ID NO: 1524642 - DNA, 15 bp, Homo sapiens
tctggccagggcaat

SEQ ID NO: 1524643 - DNA, 15 bp, Homo sapiens
ctggccagggcaatc

SEQ ID NO: 1524644 - DNA, 15 bp, Homo sapiens
tggccagggcaatca

SEQ ID NO: 1524645 - DNA, 15 bp, Homo sapiens
ggccagggcaatcag

SEQ ID NO: 1524646 - DNA, 15 bp, Homo sapiens
gccagggcaatcagg

SEQ ID NO: 1524647 - DNA, 15 bp, Homo sapiens
ccagggcaatcaggt

SEQ ID NO: 1524648 - DNA, 15 bp, Homo sapiens
cagggcaatcaggta

SEQ ID NO: 1524649 - DNA, 15 bp, Homo sapiens
agggcaatcaggtag

SEQ ID NO: 1524650 - DNA, 15 bp, Homo sapiens
gggcaatcaggtagg

SEQ ID NO: 1524651 - DNA, 15 bp, Homo sapiens
ggcaatcaggtagga

SEQ ID NO: 1524652 - DNA, 15 bp, Homo sapiens
gcaatcaggtaggag

SEQ ID NO: 1524653 - DNA, 15 bp, Homo sapiens
caatcaggtaggaga

SEQ ID NO: 1524654 - DNA, 15 bp, Homo sapiens
aatcaggtaggagaa

SEQ ID NO: 1524655 - DNA, 15 bp, Homo sapiens
atcaggtaggagaag

SEQ ID NO: 1524656 - DNA, 15 bp, Homo sapiens
tcaggtaggagaagg

SEQ ID NO: 1524657 - DNA, 15 bp, Homo sapiens
caggtaggagaagga

SEQ ID NO: 1524658 - DNA, 15 bp, Homo sapiens
aggtaggagaaggaa

SEQ ID NO: 1524659 - DNA, 15 bp, Homo sapiens
ggtaggagaaggaaa

SEQ ID NO: 1524660 - DNA, 15 bp, Homo sapiens
gtaggagaaggaaat

SEQ ID NO: 1524661 - DNA, 15 bp, Homo sapiens
taggagaaggaaata

SEQ ID NO: 1524662 - DNA, 15 bp, Homo sapiens
aggagaaggaaataa

SEQ ID NO: 1524663 - DNA, 15 bp, Homo sapiens
ggagaaggaaataaa

SEQ ID NO: 1524664 - DNA, 15 bp, Homo sapiens
gagaaggaaataaag

SEQ ID NO: 1524665 - DNA, 15 bp, Homo sapiens
agaaggaaataaagg

SEQ ID NO: 1524666 - DNA, 15 bp, Homo sapiens
gaaggaaataaaggg

SEQ ID NO: 1524667 - DNA, 15 bp, Homo sapiens
aaggaaataaagggt

SEQ ID NO: 1524668 - DNA, 15 bp, Homo sapiens
aggaaataaagggta

SEQ ID NO: 1524669 - DNA, 15 bp, Homo sapiens
ggaaataaagggtat

SEQ ID NO: 1524670 - DNA, 15 bp, Homo sapiens
gaaataaagggtatt

SEQ ID NO: 1524671 - DNA, 15 bp, Homo sapiens
aaataaagggtattc

SEQ ID NO: 1524672 - DNA, 15 bp, Homo sapiens
aataaagggtattca

SEQ ID NO: 1524673 - DNA, 15 bp, Homo sapiens
ataaagggtattcaa

SEQ ID NO: 1524674 - DNA, 15 bp, Homo sapiens
taaagggtattcaat

SEQ ID NO: 1524675 - DNA, 15 bp, Homo sapiens
aaagggtattcaatt

SEQ ID NO: 1524676 - DNA, 15 bp, Homo sapiens
aagggtattcaatta

SEQ ID NO: 1524677 - DNA, 15 bp, Homo sapiens
agggtattcaattaa

SEQ ID NO: 1524678 - DNA, 15 bp, Homo sapiens
gggtattcaattaag

SEQ ID NO: 1524679 - DNA, 15 bp, Homo sapiens
ggtattcaattaaga

SEQ ID NO: 1524680 - DNA, 15 bp, Homo sapiens
gtattcaattaagaa

SEQ ID NO: 1524681 - DNA, 15 bp, Homo sapiens
tattcaattaagaaa

SEQ ID NO: 1524682 - DNA, 15 bp, Homo sapiens
attcaattaagaaaa

SEQ ID NO: 1524683 - DNA, 15 bp, Homo sapiens
ttcaattaagaaaag

SEQ ID NO: 1524684 - DNA, 15 bp, Homo sapiens
tcaattaagaaaaga

SEQ ID NO: 1524685 - DNA, 15 bp, Homo sapiens
caattaagaaaagag

SEQ ID NO: 1524686 - DNA, 15 bp, Homo sapiens
aattaagaaaagagg

SEQ ID NO: 1524687 - DNA, 15 bp, Homo sapiens
taagaaaagaggaag

SEQ ID NO: 1524688 - DNA, 15 bp, Homo sapiens
aagaaaagaggaagt

SEQ ID NO: 1524689 - DNA, 15 bp, Homo sapiens
agaaaagaggaagtc

SEQ ID NO: 1524690 - DNA, 15 bp, Homo sapiens
gaaaagaggaagtca

SEQ ID NO: 1524691 - DNA, 15 bp, Homo sapiens
aaaagaggaagtcaa

SEQ ID NO: 1524692 - DNA, 15 bp, Homo sapiens
aaagaggaagtcaaa

SEQ ID NO: 1524693 - DNA, 15 bp, Homo sapiens
aagaggaagtcaaat

SEQ ID NO: 1524694 - DNA, 15 bp, Homo sapiens
agaggaagtcaaatt

SEQ ID NO: 1524695 - DNA, 15 bp, Homo sapiens
gaggaagtcaaattg

SEQ ID NO: 1524696 - DNA, 15 bp, Homo sapiens
aggaagtcaaattgt

SEQ ID NO: 1524697 - DNA, 15 bp, Homo sapiens
ggaagtcaaattgtc

SEQ ID NO: 1524698 - DNA, 15 bp, Homo sapiens
gaagtcaaattgtcc

SEQ ID NO: 1524699 - DNA, 15 bp, Homo sapiens
aagtcaaattgtccc

SEQ ID NO: 1524700 - DNA, 15 bp, Homo sapiens
agtcaaattgtccct

SEQ ID NO: 1524701 - DNA, 15 bp, Homo sapiens
gtcaaattgtccctg

SEQ ID NO: 1524702 - DNA, 15 bp, Homo sapiens
tcaaattgtccctgt

SEQ ID NO: 1524703 - DNA, 15 bp, Homo sapiens
caaattgtccctgtt

SEQ ID NO: 1524704 - DNA, 15 bp, Homo sapiens
aaattgtccctgttt

SEQ ID NO: 1524705 - DNA, 15 bp, Homo sapiens
aattgtccctgtttg

SEQ ID NO: 1524706 - DNA, 15 bp, Homo sapiens
attgtccctgtttgc

SEQ ID NO: 1524707 - DNA, 15 bp, Homo sapiens
ttgtccctgtttgca

SEQ ID NO: 1524708 - DNA, 15 bp, Homo sapiens
tgtccctgtttgcag

SEQ ID NO: 1524709 - DNA, 15 bp, Homo sapiens
gtccctgtttgcaga

SEQ ID NO: 1524710 - DNA, 15 bp, Homo sapiens
tccctgtttgcagat

SEQ ID NO: 1524711 - DNA, 15 bp, Homo sapiens
ccctgtttgcagatg

SEQ ID NO: 1524712 - DNA, 15 bp, Homo sapiens
cctgtttgcagatga

SEQ ID NO: 1524713 - DNA, 15 bp, Homo sapiens
ctgtttgcagatgac

SEQ ID NO: 1524714 - DNA, 15 bp, Homo sapiens
tgtttgcagatgaca

SEQ ID NO: 1524715 - DNA, 15 bp, Homo sapiens
gtttgcagatgacat

SEQ ID NO: 1524716 - DNA, 15 bp, Homo sapiens
tttgcagatgacatg

SEQ ID NO: 1524717 - DNA, 15 bp, Homo sapiens
ttgcagatgacatga

SEQ ID NO: 1524718 - DNA, 15 bp, Homo sapiens
tgcagatgacatgat

SEQ ID NO: 1524719 - DNA, 15 bp, Homo sapiens
gcagatgacatgatt

SEQ ID NO: 1524720 - DNA, 15 bp, Homo sapiens
cagatgacatgattg

SEQ ID NO: 1524721 - DNA, 15 bp, Homo sapiens
agatgacatgattgt

SEQ ID NO: 1524722 - DNA, 15 bp, Homo sapiens
gatgacatgattgta

SEQ ID NO: 1524723 - DNA, 15 bp, Homo sapiens
atgacatgattgtat

SEQ ID NO: 1524724 - DNA, 15 bp, Homo sapiens
tgacatgattgtata

SEQ ID NO: 1524725 - DNA, 15 bp, Homo sapiens
gacatgattgtatat

SEQ ID NO: 1524726 - DNA, 15 bp, Homo sapiens
acatgattgtatatc

SEQ ID NO: 1524727 - DNA, 15 bp, Homo sapiens
catgattgtatatct

SEQ ID NO: 1524728 - DNA, 15 bp, Homo sapiens
atgattgtatatcta

SEQ ID NO: 1524729 - DNA, 15 bp, Homo sapiens
tgattgtatatctag

SEQ ID NO: 1524730 - DNA, 15 bp, Homo sapiens
gattgtatatctaga

SEQ ID NO: 1524731 - DNA, 15 bp, Homo sapiens
attgtatatctagaa

SEQ ID NO: 1524732 - DNA, 15 bp, Homo sapiens
ttgtatatctagaaa

SEQ ID NO: 1524733 - DNA, 15 bp, Homo sapiens
tgtatatctagaaaa

SEQ ID NO: 1524734 - DNA, 15 bp, Homo sapiens
gtatatctagaaaac

SEQ ID NO: 1524735 - DNA, 15 bp, Homo sapiens
tatatctagaaaacc

SEQ ID NO: 1524736 - DNA, 15 bp, Homo sapiens
atatctagaaaaccc

SEQ ID NO: 1524737 - DNA, 15 bp, Homo sapiens
tatctagaaaacccc

SEQ ID NO: 1524738 - DNA, 15 bp, Homo sapiens
atctagaaaacccca

SEQ ID NO: 1524739 - DNA, 15 bp, Homo sapiens
tctagaaaaccccat

SEQ ID NO: 1524740 - DNA, 15 bp, Homo sapiens
ctagaaaaccccatc

SEQ ID NO: 1524741 - DNA, 15 bp, Homo sapiens
tagaaaaccccatcg

SEQ ID NO: 1524742 - DNA, 15 bp, Homo sapiens
agaaaaccccatcgt

SEQ ID NO: 1524743 - DNA, 15 bp, Homo sapiens
gaaaaccccatcgtc

SEQ ID NO: 1524744 - DNA, 15 bp, Homo sapiens
aaaaccccatcgtct

SEQ ID NO: 1524745 - DNA, 15 bp, Homo sapiens
aaaccccatcgtctc

SEQ ID NO: 1524746 - DNA, 15 bp, Homo sapiens
aaccccatcgtctca

SEQ ID NO: 1524747 - DNA, 15 bp, Homo sapiens
accccatcgtctcag

SEQ ID NO: 1524748 - DNA, 15 bp, Homo sapiens
ccccatcgtctcagc

SEQ ID NO: 1524749 - DNA, 15 bp, Homo sapiens
cccatcgtctcagcc

SEQ ID NO: 1524750 - DNA, 15 bp, Homo sapiens
ccatcgtctcagccc

SEQ ID NO: 1524751 - DNA, 15 bp, Homo sapiens
catcgtctcagccca

SEQ ID NO: 1524752 - DNA, 15 bp, Homo sapiens
atcgtctcagcccaa

SEQ ID NO: 1524753 - DNA, 15 bp, Homo sapiens
tcgtctcagcccaaa

SEQ ID NO: 1524754 - DNA, 15 bp, Homo sapiens
cgtctcagcccaaaa

SEQ ID NO: 1524755 - DNA, 15 bp, Homo sapiens
gtctcagcccaaaat

SEQ ID NO: 1524756 - DNA, 15 bp, Homo sapiens
tctcagcccaaaatc

SEQ ID NO: 1524757 - DNA, 15 bp, Homo sapiens
ctcagcccaaaatct

SEQ ID NO: 1524758 - DNA, 15 bp, Homo sapiens
tcagcccaaaatctc

SEQ ID NO: 1524759 - DNA, 15 bp, Homo sapiens
cagcccaaaatctcc

SEQ ID NO: 1524760 - DNA, 15 bp, Homo sapiens
agcccaaaatctcct

SEQ ID NO: 1524761 - DNA, 15 bp, Homo sapiens
gcccaaaatctcctt

SEQ ID NO: 1524762 - DNA, 15 bp, Homo sapiens
cccaaaatctcctta

SEQ ID NO: 1524763 - DNA, 15 bp, Homo sapiens
ccaaaatctccttaa

SEQ ID NO: 1524764 - DNA, 15 bp, Homo sapiens
caaaatctccttaag

SEQ ID NO: 1524765 - DNA, 15 bp, Homo sapiens
aaaatctccttaagc

SEQ ID NO: 1524766 - DNA, 15 bp, Homo sapiens
aaatctccttaagct

SEQ ID NO: 1524767 - DNA, 15 bp, Homo sapiens
aatctccttaagctg

SEQ ID NO: 1524768 - DNA, 15 bp, Homo sapiens
atctccttaagctga

SEQ ID NO: 1524769 - DNA, 15 bp, Homo sapiens
tctccttaagctgat

SEQ ID NO: 1524770 - DNA, 15 bp, Homo sapiens
ctccttaagctgata

SEQ ID NO: 1524771 - DNA, 15 bp, Homo sapiens
tccttaagctgataa

SEQ ID NO: 1524772 - DNA, 15 bp, Homo sapiens
ccttaagctgataag

SEQ ID NO: 1524773 - DNA, 15 bp, Homo sapiens
cttaagctgataagc

SEQ ID NO: 1524774 - DNA, 15 bp, Homo sapiens
ttaagctgataagca

SEQ ID NO: 1524775 - DNA, 15 bp, Homo sapiens
taagctgataagcaa

SEQ ID NO: 1524776 - DNA, 15 bp, Homo sapiens
aagctgataagcaac

SEQ ID NO: 1524777 - DNA, 15 bp, Homo sapiens
agctgataagcaact

SEQ ID NO: 1524778 - DNA, 15 bp, Homo sapiens
gctgataagcaactt

SEQ ID NO: 1524779 - DNA, 15 bp, Homo sapiens
ctgataagcaacttc

SEQ ID NO: 1524780 - DNA, 15 bp, Homo sapiens
tgataagcaacttca

SEQ ID NO: 1524781 - DNA, 15 bp, Homo sapiens
gataagcaacttcag

SEQ ID NO: 1524782 - DNA, 15 bp, Homo sapiens
ataagcaacttcagc

SEQ ID NO: 1524783 - DNA, 15 bp, Homo sapiens
taagcaacttcagca

SEQ ID NO: 1524784 - DNA, 15 bp, Homo sapiens
aagcaacttcagcaa

SEQ ID NO: 1524785 - DNA, 15 bp, Homo sapiens
agcaacttcagcaaa

SEQ ID NO: 1524786 - DNA, 15 bp, Homo sapiens
gcaacttcagcaaag

SEQ ID NO: 1524787 - DNA, 15 bp, Homo sapiens
caacttcagcaaagt

SEQ ID NO: 1524788 - DNA, 15 bp, Homo sapiens
aacttcagcaaagtc

SEQ ID NO: 1524789 - DNA, 15 bp, Homo sapiens
acttcagcaaagtct

SEQ ID NO: 1524790 - DNA, 15 bp, Homo sapiens
cttcagcaaagtctc

SEQ ID NO: 1524791 - DNA, 15 bp, Homo sapiens
ttcagcaaagtctca

SEQ ID NO: 1524792 - DNA, 15 bp, Homo sapiens
tcagcaaagtctcag

SEQ ID NO: 1524793 - DNA, 15 bp, Homo sapiens
cagcaaagtctcagg

SEQ ID NO: 1524794 - DNA, 15 bp, Homo sapiens
agcaaagtctcagga

SEQ ID NO: 1524795 - DNA, 15 bp, Homo sapiens
gcaaagtctcaggat

SEQ ID NO: 1524796 - DNA, 15 bp, Homo sapiens
caaagtctcaggata

SEQ ID NO: 1524797 - DNA, 15 bp, Homo sapiens
aaagtctcaggatac

SEQ ID NO: 1524798 - DNA, 15 bp, Homo sapiens
aagtctcaggataca

SEQ ID NO: 1524799 - DNA, 15 bp, Homo sapiens
agtctcaggatacaa

SEQ ID NO: 1524800 - DNA, 15 bp, Homo sapiens
gtctcaggatacaaa

SEQ ID NO: 1524801 - DNA, 15 bp, Homo sapiens
tctcaggatacaaaa

SEQ ID NO: 1524802 - DNA, 15 bp, Homo sapiens
ctcaggatacaaaat

SEQ ID NO: 1524803 - DNA, 15 bp, Homo sapiens
tcaggatacaaaatc

SEQ ID NO: 1524804 - DNA, 15 bp, Homo sapiens
caggatacaaaatca

SEQ ID NO: 1524805 - DNA, 15 bp, Homo sapiens
aggatacaaaatcaa

SEQ ID NO: 1524806 - DNA, 15 bp, Homo sapiens
ggatacaaaatcaat

SEQ ID NO: 1524807 - DNA, 15 bp, Homo sapiens
gatacaaaatcaatg

SEQ ID NO: 1524808 - DNA, 15 bp, Homo sapiens
atacaaaatcaatgt

SEQ ID NO: 1524809 - DNA, 15 bp, Homo sapiens
tacaaaatcaatgtg

SEQ ID NO: 1524810 - DNA, 15 bp, Homo sapiens
acaaaatcaatgtgc

SEQ ID NO: 1524811 - DNA, 15 bp, Homo sapiens
caaaatcaatgtgca

SEQ ID NO: 1524812 - DNA, 15 bp, Homo sapiens
aaaatcaatgtgcaa

SEQ ID NO: 1524813 - DNA, 15 bp, Homo sapiens
aaatcaatgtgcaaa

SEQ ID NO: 1524814 - DNA, 15 bp, Homo sapiens
aatcaatgtgcaaaa

SEQ ID NO: 1524815 - DNA, 15 bp, Homo sapiens
atcaatgtgcaaaaa

SEQ ID NO: 1524816 - DNA, 15 bp, Homo sapiens
tcaatgtgcaaaaat

SEQ ID NO: 1524817 - DNA, 15 bp, Homo sapiens
caatgtgcaaaaatc

SEQ ID NO: 1524818 - DNA, 15 bp, Homo sapiens
aatgtgcaaaaatca

SEQ ID NO: 1524819 - DNA, 15 bp, Homo sapiens
atgtgcaaaaatcac

SEQ ID NO: 1524820 - DNA, 15 bp, Homo sapiens
tgtgcaaaaatcaca

SEQ ID NO: 1524821 - DNA, 15 bp, Homo sapiens
gtgcaaaaatcacaa

SEQ ID NO: 1524822 - DNA, 15 bp, Homo sapiens
tgcaaaaatcacaag

SEQ ID NO: 1524823 - DNA, 15 bp, Homo sapiens
gcaaaaatcacaagc

SEQ ID NO: 1524824 - DNA, 15 bp, Homo sapiens
caaaaatcacaagca

SEQ ID NO: 1524825 - DNA, 15 bp, Homo sapiens
aaaaatcacaagcag

SEQ ID NO: 1524826 - DNA, 15 bp, Homo sapiens
aaaatcacaagcagt

SEQ ID NO: 1524827 - DNA, 15 bp, Homo sapiens
aaatcacaagcagtc

SEQ ID NO: 1524828 - DNA, 15 bp, Homo sapiens
aatcacaagcagtct

SEQ ID NO: 1524829 - DNA, 15 bp, Homo sapiens
atcacaagcagtctt

SEQ ID NO: 1524830 - DNA, 15 bp, Homo sapiens
tcacaagcagtctta

SEQ ID NO: 1524831 - DNA, 15 bp, Homo sapiens
cacaagcagtcttat

SEQ ID NO: 1524832 - DNA, 15 bp, Homo sapiens
acaagcagtcttata

SEQ ID NO: 1524833 - DNA, 15 bp, Homo sapiens
caagcagtcttatac

SEQ ID NO: 1524834 - DNA, 15 bp, Homo sapiens
aagcagtcttataca

SEQ ID NO: 1524835 - DNA, 15 bp, Homo sapiens
agcagtcttatacac

SEQ ID NO: 1524836 - DNA, 15 bp, Homo sapiens
gcagtcttatacacc

SEQ ID NO: 1524837 - DNA, 15 bp, Homo sapiens
cagtcttatacacca

SEQ ID NO: 1524838 - DNA, 15 bp, Homo sapiens
agtcttatacaccaa

SEQ ID NO: 1524839 - DNA, 15 bp, Homo sapiens
gtcttatacaccaat

SEQ ID NO: 1524840 - DNA, 15 bp, Homo sapiens
tcttatacaccaata

SEQ ID NO: 1524841 - DNA, 15 bp, Homo sapiens
cttatacaccaataa

SEQ ID NO: 1524842 - DNA, 15 bp, Homo sapiens
ttatacaccaataac

SEQ ID NO: 1524843 - DNA, 15 bp, Homo sapiens
tatacaccaataaca

SEQ ID NO: 1524844 - DNA, 15 bp, Homo sapiens
atacaccaataacag

SEQ ID NO: 1524845 - DNA, 15 bp, Homo sapiens
tacaccaataacaga

SEQ ID NO: 1524846 - DNA, 15 bp, Homo sapiens
acaccaataacagac

SEQ ID NO: 1524847 - DNA, 15 bp, Homo sapiens
caccaataacagaca

SEQ ID NO: 1524848 - DNA, 15 bp, Homo sapiens
accaataacagacag

SEQ ID NO: 1524849 - DNA, 15 bp, Homo sapiens
ccaataacagacaga

SEQ ID NO: 1524850 - DNA, 15 bp, Homo sapiens
caataacagacagag

SEQ ID NO: 1524851 - DNA, 15 bp, Homo sapiens
aataacagacagaga

SEQ ID NO: 1524852 - DNA, 15 bp, Homo sapiens
ataacagacagagag

SEQ ID NO: 1524853 - DNA, 15 bp, Homo sapiens
taacagacagagagc

SEQ ID NO: 1524854 - DNA, 15 bp, Homo sapiens
aacagacagagagcc

SEQ ID NO: 1524855 - DNA, 15 bp, Homo sapiens
acagacagagagcca

SEQ ID NO: 1524856 - DNA, 15 bp, Homo sapiens
cagacagagagccaa

SEQ ID NO: 1524857 - DNA, 15 bp, Homo sapiens
agacagagagccaaa

SEQ ID NO: 1524858 - DNA, 15 bp, Homo sapiens
gacagagagccaaat

SEQ ID NO: 1524859 - DNA, 15 bp, Homo sapiens
acagagagccaaatc

SEQ ID NO: 1524860 - DNA, 15 bp, Homo sapiens
cagagagccaaatca

SEQ ID NO: 1524861 - DNA, 15 bp, Homo sapiens
agagagccaaatcat

SEQ ID NO: 1524862 - DNA, 15 bp, Homo sapiens
gagagccaaatcatg

SEQ ID NO: 1524863 - DNA, 15 bp, Homo sapiens
agagccaaatcatga

SEQ ID NO: 1524864 - DNA, 15 bp, Homo sapiens
gagccaaatcatgag

SEQ ID NO: 1524865 - DNA, 15 bp, Homo sapiens
agccaaatcatgagt

SEQ ID NO: 1524866 - DNA, 15 bp, Homo sapiens
gccaaatcatgagtg

SEQ ID NO: 1524867 - DNA, 15 bp, Homo sapiens
ccaaatcatgagtga

SEQ ID NO: 1524868 - DNA, 15 bp, Homo sapiens
caaatcatgagtgaa

SEQ ID NO: 1524869 - DNA, 15 bp, Homo sapiens
aaatcatgagtgaac

SEQ ID NO: 1524870 - DNA, 15 bp, Homo sapiens
aatcatgagtgaact

SEQ ID NO: 1524871 - DNA, 15 bp, Homo sapiens
atcatgagtgaactc

SEQ ID NO: 1524872 - DNA, 15 bp, Homo sapiens
tcatgagtgaactcc

SEQ ID NO: 1524873 - DNA, 15 bp, Homo sapiens
catgagtgaactccc

SEQ ID NO: 1524874 - DNA, 15 bp, Homo sapiens
atgagtgaactccca

SEQ ID NO: 1524875 - DNA, 15 bp, Homo sapiens
tgagtgaactcccat

SEQ ID NO: 1524876 - DNA, 15 bp, Homo sapiens
gagtgaactcccatt

SEQ ID NO: 1524877 - DNA, 15 bp, Homo sapiens
agtgaactcccattc

SEQ ID NO: 1524878 - DNA, 15 bp, Homo sapiens
gtgaactcccattca

SEQ ID NO: 1524879 - DNA, 15 bp, Homo sapiens
tgaactcccattcac

SEQ ID NO: 1524880 - DNA, 15 bp, Homo sapiens
gaactcccattcaca

SEQ ID NO: 1524881 - DNA, 15 bp, Homo sapiens
aactcccattcacaa

SEQ ID NO: 1524882 - DNA, 15 bp, Homo sapiens
actcccattcacaat

SEQ ID NO: 1524883 - DNA, 15 bp, Homo sapiens
ctcccattcacaatt

SEQ ID NO: 1524884 - DNA, 15 bp, Homo sapiens
tcccattcacaattg

SEQ ID NO: 1524885 - DNA, 15 bp, Homo sapiens
cccattcacaattgc

SEQ ID NO: 1524886 - DNA, 15 bp, Homo sapiens
ccattcacaattgct

SEQ ID NO: 1524887 - DNA, 15 bp, Homo sapiens
cattcacaattgctt

SEQ ID NO: 1524888 - DNA, 15 bp, Homo sapiens
attcacaattgcttc

SEQ ID NO: 1524889 - DNA, 15 bp, Homo sapiens
ttcacaattgcttca

SEQ ID NO: 1524890 - DNA, 15 bp, Homo sapiens
tcacaattgcttcaa

SEQ ID NO: 1524891 - DNA, 15 bp, Homo sapiens
cacaattgcttcaaa

SEQ ID NO: 1524892 - DNA, 15 bp, Homo sapiens
acaattgcttcaaag

SEQ ID NO: 1524893 - DNA, 15 bp, Homo sapiens
caattgcttcaaaga

SEQ ID NO: 1524894 - DNA, 15 bp, Homo sapiens
aattgcttcaaagag

SEQ ID NO: 1524895 - DNA, 15 bp, Homo sapiens
attgcttcaaagaga

SEQ ID NO: 1524896 - DNA, 15 bp, Homo sapiens
ttgcttcaaagagaa

SEQ ID NO: 1524897 - DNA, 15 bp, Homo sapiens
tgcttcaaagagaat

SEQ ID NO: 1524898 - DNA, 15 bp, Homo sapiens
gcttcaaagagaata

SEQ ID NO: 1524899 - DNA, 15 bp, Homo sapiens
cttcaaagagaataa

SEQ ID NO: 1524900 - DNA, 15 bp, Homo sapiens
ttcaaagagaataaa

SEQ ID NO: 1524901 - DNA, 15 bp, Homo sapiens
tcaaagagaataaaa

SEQ ID NO: 1524902 - DNA, 15 bp, Homo sapiens
caaagagaataaaat

SEQ ID NO: 1524903 - DNA, 15 bp, Homo sapiens
aaagagaataaaata

SEQ ID NO: 1524904 - DNA, 15 bp, Homo sapiens
aagagaataaaatac

SEQ ID NO: 1524905 - DNA, 15 bp, Homo sapiens
agagaataaaatacc

SEQ ID NO: 1524906 - DNA, 15 bp, Homo sapiens
gagaataaaatacct

SEQ ID NO: 1524907 - DNA, 15 bp, Homo sapiens
agaataaaataccta

SEQ ID NO: 1524908 - DNA, 15 bp, Homo sapiens
gaataaaatacctag

SEQ ID NO: 1524909 - DNA, 15 bp, Homo sapiens
aataaaatacctagg

SEQ ID NO: 1524910 - DNA, 15 bp, Homo sapiens
ataaaatacctagga

SEQ ID NO: 1524911 - DNA, 15 bp, Homo sapiens
taaaatacctaggaa

SEQ ID NO: 1524912 - DNA, 15 bp, Homo sapiens
aaaatacctaggaat

SEQ ID NO: 1524913 - DNA, 15 bp, Homo sapiens
aaatacctaggaatc

SEQ ID NO: 1524914 - DNA, 15 bp, Homo sapiens
aatacctaggaatcc

SEQ ID NO: 1524915 - DNA, 15 bp, Homo sapiens
atacctaggaatcca

SEQ ID NO: 1524916 - DNA, 15 bp, Homo sapiens
tacctaggaatccaa

SEQ ID NO: 1524917 - DNA, 15 bp, Homo sapiens
acctaggaatccaac

SEQ ID NO: 1524918 - DNA, 15 bp, Homo sapiens
cctaggaatccaact

SEQ ID NO: 1524919 - DNA, 15 bp, Homo sapiens
ctaggaatccaactt

SEQ ID NO: 1524920 - DNA, 15 bp, Homo sapiens
taggaatccaactta

SEQ ID NO: 1524921 - DNA, 15 bp, Homo sapiens
aggaatccaacttac

SEQ ID NO: 1524922 - DNA, 15 bp, Homo sapiens
ggaatccaacttaca

SEQ ID NO: 1524923 - DNA, 15 bp, Homo sapiens
gaatccaacttacaa

SEQ ID NO: 1524924 - DNA, 15 bp, Homo sapiens
aatccaacttacaag

SEQ ID NO: 1524925 - DNA, 15 bp, Homo sapiens
atccaacttacaagg

SEQ ID NO: 1524926 - DNA, 15 bp, Homo sapiens
tccaacttacaaggg

SEQ ID NO: 1524927 - DNA, 15 bp, Homo sapiens
ccaacttacaaggga

SEQ ID NO: 1524928 - DNA, 15 bp, Homo sapiens
caacttacaagggat

SEQ ID NO: 1524929 - DNA, 15 bp, Homo sapiens
aacttacaagggatg

SEQ ID NO: 1524930 - DNA, 15 bp, Homo sapiens
acttacaagggatgt

SEQ ID NO: 1524931 - DNA, 15 bp, Homo sapiens
cttacaagggatgtg

SEQ ID NO: 1524932 - DNA, 15 bp, Homo sapiens
ttacaagggatgtga

SEQ ID NO: 1524933 - DNA, 15 bp, Homo sapiens
tacaagggatgtgaa

SEQ ID NO: 1524934 - DNA, 15 bp, Homo sapiens
acaagggatgtgaag

SEQ ID NO: 1524935 - DNA, 15 bp, Homo sapiens
caagggatgtgaagg

SEQ ID NO: 1524936 - DNA, 15 bp, Homo sapiens
aagggatgtgaagga

SEQ ID NO: 1524937 - DNA, 15 bp, Homo sapiens
agggatgtgaaggac

SEQ ID NO: 1524938 - DNA, 15 bp, Homo sapiens
gggatgtgaaggacc

SEQ ID NO: 1524939 - DNA, 15 bp, Homo sapiens
ggatgtgaaggacct

SEQ ID NO: 1524940 - DNA, 15 bp, Homo sapiens
gatgtgaaggacctc

SEQ ID NO: 1524941 - DNA, 15 bp, Homo sapiens
atgtgaaggacctct

SEQ ID NO: 1524942 - DNA, 15 bp, Homo sapiens
tgtgaaggacctctt

SEQ ID NO: 1524943 - DNA, 15 bp, Homo sapiens
gtgaaggacctcttc

SEQ ID NO: 1524944 - DNA, 15 bp, Homo sapiens
tgaaggacctcttca

SEQ ID NO: 1524945 - DNA, 15 bp, Homo sapiens
gaaggacctcttcaa

SEQ ID NO: 1524946 - DNA, 15 bp, Homo sapiens
aaggacctcttcaag

SEQ ID NO: 1524947 - DNA, 15 bp, Homo sapiens
aggacctcttcaagg

SEQ ID NO: 1524948 - DNA, 15 bp, Homo sapiens
ggacctcttcaagga

SEQ ID NO: 1524949 - DNA, 15 bp, Homo sapiens
gacctcttcaaggag

SEQ ID NO: 1524950 - DNA, 15 bp, Homo sapiens
acctcttcaaggaga

SEQ ID NO: 1524951 - DNA, 15 bp, Homo sapiens
cctcttcaaggagaa

SEQ ID NO: 1524952 - DNA, 15 bp, Homo sapiens
ctcttcaaggagaac

SEQ ID NO: 1524953 - DNA, 15 bp, Homo sapiens
tcttcaaggagaact

SEQ ID NO: 1524954 - DNA, 15 bp, Homo sapiens
cttcaaggagaacta

SEQ ID NO: 1524955 - DNA, 15 bp, Homo sapiens
ttcaaggagaactac

SEQ ID NO: 1524956 - DNA, 15 bp, Homo sapiens
tcaaggagaactaca

SEQ ID NO: 1524957 - DNA, 15 bp, Homo sapiens
caaggagaactacaa

SEQ ID NO: 1524958 - DNA, 15 bp, Homo sapiens
aaggagaactacaaa

SEQ ID NO: 1524959 - DNA, 15 bp, Homo sapiens
aggagaactacaaac

SEQ ID NO: 1524960 - DNA, 15 bp, Homo sapiens
ggagaactacaaacg

SEQ ID NO: 1524961 - DNA, 15 bp, Homo sapiens
gagaactacaaacga

SEQ ID NO: 1524962 - DNA, 15 bp, Homo sapiens
agaactacaaacgac

SEQ ID NO: 1524963 - DNA, 15 bp, Homo sapiens
gaactacaaacgact

SEQ ID NO: 1524964 - DNA, 15 bp, Homo sapiens
aactacaaacgactg

SEQ ID NO: 1524965 - DNA, 15 bp, Homo sapiens
actacaaacgactgc

SEQ ID NO: 1524966 - DNA, 15 bp, Homo sapiens
ctacaaacgactgct

SEQ ID NO: 1524967 - DNA, 15 bp, Homo sapiens
tacaaacgactgctc

SEQ ID NO: 1524968 - DNA, 15 bp, Homo sapiens
acaaacgactgctca

SEQ ID NO: 1524969 - DNA, 15 bp, Homo sapiens
caaacgactgctcaa

SEQ ID NO: 1524970 - DNA, 15 bp, Homo sapiens
aaacgactgctcaat

SEQ ID NO: 1524971 - DNA, 15 bp, Homo sapiens
aacgactgctcaatg

SEQ ID NO: 1524972 - DNA, 15 bp, Homo sapiens
acgactgctcaatga

SEQ ID NO: 1524973 - DNA, 15 bp, Homo sapiens
cgactgctcaatgaa

SEQ ID NO: 1524974 - DNA, 15 bp, Homo sapiens
gactgctcaatgaaa

SEQ ID NO: 1524975 - DNA, 15 bp, Homo sapiens
actgctcaatgaaat

SEQ ID NO: 1524976 - DNA, 15 bp, Homo sapiens
ctgctcaatgaaata

SEQ ID NO: 1524977 - DNA, 15 bp, Homo sapiens
tgctcaatgaaataa

SEQ ID NO: 1524978 - DNA, 15 bp, Homo sapiens
gctcaatgaaataaa

SEQ ID NO: 1524979 - DNA, 15 bp, Homo sapiens
ctcaatgaaataaaa

SEQ ID NO: 1524980 - DNA, 15 bp, Homo sapiens
tcaatgaaataaaag

SEQ ID NO: 1524981 - DNA, 15 bp, Homo sapiens
caatgaaataaaaga

SEQ ID NO: 1524982 - DNA, 15 bp, Homo sapiens
aatgaaataaaagag

SEQ ID NO: 1524983 - DNA, 15 bp, Homo sapiens
atgaaataaaagagg

SEQ ID NO: 1524984 - DNA, 15 bp, Homo sapiens
tgaaataaaagagga

SEQ ID NO: 1524985 - DNA, 15 bp, Homo sapiens
gaaataaaagaggat

SEQ ID NO: 1524986 - DNA, 15 bp, Homo sapiens
aaataaaagaggata

SEQ ID NO: 1524987 - DNA, 15 bp, Homo sapiens
aataaaagaggatac

SEQ ID NO: 1524988 - DNA, 15 bp, Homo sapiens
ataaaagaggataca

SEQ ID NO: 1524989 - DNA, 15 bp, Homo sapiens
taaaagaggatacaa

SEQ ID NO: 1524990 - DNA, 15 bp, Homo sapiens
aaaagaggatacaaa

SEQ ID NO: 1524991 - DNA, 15 bp, Homo sapiens
aaagaggatacaaac

SEQ ID NO: 1524992 - DNA, 15 bp, Homo sapiens
aagaggatacaaaca

SEQ ID NO: 1524993 - DNA, 15 bp, Homo sapiens
agaggatacaaacaa

SEQ ID NO: 1524994 - DNA, 15 bp, Homo sapiens
gaggatacaaacaaa

SEQ ID NO: 1524995 - DNA, 15 bp, Homo sapiens
aggatacaaacaaat

SEQ ID NO: 1524996 - DNA, 15 bp, Homo sapiens
ggatacaaacaaatg

SEQ ID NO: 1524997 - DNA, 15 bp, Homo sapiens
gatacaaacaaatgg

SEQ ID NO: 1524998 - DNA, 15 bp, Homo sapiens
atacaaacaaatgga

SEQ ID NO: 1524999 - DNA, 15 bp, Homo sapiens
tacaaacaaatggaa

SEQ ID NO: 1525000 - DNA, 15 bp, Homo sapiens
acaaacaaatggaag

SEQ ID NO: 1525001 - DNA, 15 bp, Homo sapiens
caaacaaatggaaga

SEQ ID NO: 1525002 - DNA, 15 bp, Homo sapiens
aaacaaatggaagaa

SEQ ID NO: 1525003 - DNA, 15 bp, Homo sapiens
aacaaatggaagaac

SEQ ID NO: 1525004 - DNA, 15 bp, Homo sapiens
acaaatggaagaaca

SEQ ID NO: 1525005 - DNA, 15 bp, Homo sapiens
caaatggaagaacat

SEQ ID NO: 1525006 - DNA, 15 bp, Homo sapiens
aaatggaagaacatt

SEQ ID NO: 1525007 - DNA, 15 bp, Homo sapiens
aatggaagaacattc

SEQ ID NO: 1525008 - DNA, 15 bp, Homo sapiens
atggaagaacattcc

SEQ ID NO: 1525009 - DNA, 15 bp, Homo sapiens
tggaagaacattcca

SEQ ID NO: 1525010 - DNA, 15 bp, Homo sapiens
ggaagaacattccat

SEQ ID NO: 1525011 - DNA, 15 bp, Homo sapiens
gaagaacattccatg

SEQ ID NO: 1525012 - DNA, 15 bp, Homo sapiens
aagaacattccatgc

SEQ ID NO: 1525013 - DNA, 15 bp, Homo sapiens
agaacattccatgct

SEQ ID NO: 1525014 - DNA, 15 bp, Homo sapiens
gaacattccatgctc

SEQ ID NO: 1525015 - DNA, 15 bp, Homo sapiens
aacattccatgctca

SEQ ID NO: 1525016 - DNA, 15 bp, Homo sapiens
acattccatgctcat

SEQ ID NO: 1525017 - DNA, 15 bp, Homo sapiens
cattccatgctcatg

SEQ ID NO: 1525018 - DNA, 15 bp, Homo sapiens
attccatgctcatgg

SEQ ID NO: 1525019 - DNA, 15 bp, Homo sapiens
ttccatgctcatggg

SEQ ID NO: 1525020 - DNA, 15 bp, Homo sapiens
tccatgctcatgggt

SEQ ID NO: 1525021 - DNA, 15 bp, Homo sapiens
ccatgctcatgggta

SEQ ID NO: 1525022 - DNA, 15 bp, Homo sapiens
catgctcatgggtag

SEQ ID NO: 1525023 - DNA, 15 bp, Homo sapiens
atgctcatgggtagg

SEQ ID NO: 1525024 - DNA, 15 bp, Homo sapiens
tgctcatgggtagga

SEQ ID NO: 1525025 - DNA, 15 bp, Homo sapiens
gctcatgggtaggaa

SEQ ID NO: 1525026 - DNA, 15 bp, Homo sapiens
ctcatgggtaggaag

SEQ ID NO: 1525027 - DNA, 15 bp, Homo sapiens
tcatgggtaggaaga

SEQ ID NO: 1525028 - DNA, 15 bp, Homo sapiens
catgggtaggaagaa

SEQ ID NO: 1525029 - DNA, 15 bp, Homo sapiens
atgggtaggaagaat

SEQ ID NO: 1525030 - DNA, 15 bp, Homo sapiens
tgggtaggaagaatc

SEQ ID NO: 1525031 - DNA, 15 bp, Homo sapiens
gggtaggaagaatca

SEQ ID NO: 1525032 - DNA, 15 bp, Homo sapiens
ggtaggaagaatcag

SEQ ID NO: 1525033 - DNA, 15 bp, Homo sapiens
gtaggaagaatcagt

SEQ ID NO: 1525034 - DNA, 15 bp, Homo sapiens
taggaagaatcagta

SEQ ID NO: 1525035 - DNA, 15 bp, Homo sapiens
aggaagaatcagtat

SEQ ID NO: 1525036 - DNA, 15 bp, Homo sapiens
ggaagaatcagtatc

SEQ ID NO: 1525037 - DNA, 15 bp, Homo sapiens
gaagaatcagtatcg

SEQ ID NO: 1525038 - DNA, 15 bp, Homo sapiens
aagaatcagtatcgt

SEQ ID NO: 1525039 - DNA, 15 bp, Homo sapiens
agaatcagtatcgtg

SEQ ID NO: 1525040 - DNA, 15 bp, Homo sapiens
gaatcagtatcgtga

SEQ ID NO: 1525041 - DNA, 15 bp, Homo sapiens
aatcagtatcgtgaa

SEQ ID NO: 1525042 - DNA, 15 bp, Homo sapiens
atcagtatcgtgaaa

SEQ ID NO: 1525043 - DNA, 15 bp, Homo sapiens
tcagtatcgtgaaaa

SEQ ID NO: 1525044 - DNA, 15 bp, Homo sapiens
cagtatcgtgaaaat

SEQ ID NO: 1525045 - DNA, 15 bp, Homo sapiens
agtatcgtgaaaatg

SEQ ID NO: 1525046 - DNA, 15 bp, Homo sapiens
gtatcgtgaaaatgg

SEQ ID NO: 1525047 - DNA, 15 bp, Homo sapiens
tatcgtgaaaatggc

SEQ ID NO: 1525048 - DNA, 15 bp, Homo sapiens
atcgtgaaaatggcc

SEQ ID NO: 1525049 - DNA, 15 bp, Homo sapiens
tcgtgaaaatggcca

SEQ ID NO: 1525050 - DNA, 15 bp, Homo sapiens
cgtgaaaatggccat

SEQ ID NO: 1525051 - DNA, 15 bp, Homo sapiens
gtgaaaatggccata

SEQ ID NO: 1525052 - DNA, 15 bp, Homo sapiens
tgaaaatggccatac

SEQ ID NO: 1525053 - DNA, 15 bp, Homo sapiens
gaaaatggccatact

SEQ ID NO: 1525054 - DNA, 15 bp, Homo sapiens
aaaatggccatactg

SEQ ID NO: 1525055 - DNA, 15 bp, Homo sapiens
aaatggccatactgc

SEQ ID NO: 1525056 - DNA, 15 bp, Homo sapiens
aatggccatactgcc

SEQ ID NO: 1525057 - DNA, 15 bp, Homo sapiens
atggccatactgccc

SEQ ID NO: 1525058 - DNA, 15 bp, Homo sapiens
tggccatactgccca

SEQ ID NO: 1525059 - DNA, 15 bp, Homo sapiens
ggccatactgcccaa

SEQ ID NO: 1525060 - DNA, 15 bp, Homo sapiens
gccatactgcccaag

SEQ ID NO: 1525061 - DNA, 15 bp, Homo sapiens
ccatactgcccaagg

SEQ ID NO: 1525062 - DNA, 15 bp, Homo sapiens
catactgcccaaggt

SEQ ID NO: 1525063 - DNA, 15 bp, Homo sapiens
atactgcccaaggta

SEQ ID NO: 1525064 - DNA, 15 bp, Homo sapiens
tactgcccaaggtaa

SEQ ID NO: 1525065 - DNA, 15 bp, Homo sapiens
actgcccaaggtaat

SEQ ID NO: 1525066 - DNA, 15 bp, Homo sapiens
ctgcccaaggtaatt

SEQ ID NO: 1525067 - DNA, 15 bp, Homo sapiens
tgcccaaggtaattt

SEQ ID NO: 1525068 - DNA, 15 bp, Homo sapiens
gcccaaggtaattta

SEQ ID NO: 1525069 - DNA, 15 bp, Homo sapiens
cccaaggtaatttat

SEQ ID NO: 1525070 - DNA, 15 bp, Homo sapiens
ccaaggtaatttata

SEQ ID NO: 1525071 - DNA, 15 bp, Homo sapiens
caaggtaatttatag

SEQ ID NO: 1525072 - DNA, 15 bp, Homo sapiens
aaggtaatttataga

SEQ ID NO: 1525073 - DNA, 15 bp, Homo sapiens
aggtaatttatagat

SEQ ID NO: 1525074 - DNA, 15 bp, Homo sapiens
ggtaatttatagatt

SEQ ID NO: 1525075 - DNA, 15 bp, Homo sapiens
gtaatttatagattc

SEQ ID NO: 1525076 - DNA, 15 bp, Homo sapiens
taatttatagattca

SEQ ID NO: 1525077 - DNA, 15 bp, Homo sapiens
aatttatagattcaa

SEQ ID NO: 1525078 - DNA, 15 bp, Homo sapiens
atttatagattcaat

SEQ ID NO: 1525079 - DNA, 15 bp, Homo sapiens
tttatagattcaatg

SEQ ID NO: 1525080 - DNA, 15 bp, Homo sapiens
ttatagattcaatgc

SEQ ID NO: 1525081 - DNA, 15 bp, Homo sapiens
tatagattcaatgcc

SEQ ID NO: 1525082 - DNA, 15 bp, Homo sapiens
atagattcaatgcca

SEQ ID NO: 1525083 - DNA, 15 bp, Homo sapiens
tagattcaatgccat

SEQ ID NO: 1525084 - DNA, 15 bp, Homo sapiens
agattcaatgccatc

SEQ ID NO: 1525085 - DNA, 15 bp, Homo sapiens
gattcaatgccatcc

SEQ ID NO: 1525086 - DNA, 15 bp, Homo sapiens
attcaatgccatccc

SEQ ID NO: 1525087 - DNA, 15 bp, Homo sapiens
ttcaatgccatccct

SEQ ID NO: 1525088 - DNA, 15 bp, Homo sapiens
tcaatgccatcccta

SEQ ID NO: 1525089 - DNA, 15 bp, Homo sapiens
caatgccatccctat

SEQ ID NO: 1525090 - DNA, 15 bp, Homo sapiens
aatgccatccctatc

SEQ ID NO: 1525091 - DNA, 15 bp, Homo sapiens
atgccatccctatca

SEQ ID NO: 1525092 - DNA, 15 bp, Homo sapiens
tgccatccctatcaa

SEQ ID NO: 1525093 - DNA, 15 bp, Homo sapiens
gccatccctatcaag

SEQ ID NO: 1525094 - DNA, 15 bp, Homo sapiens
ccatccctatcaagc

SEQ ID NO: 1525095 - DNA, 15 bp, Homo sapiens
catccctatcaagct

SEQ ID NO: 1525096 - DNA, 15 bp, Homo sapiens
atccctatcaagcta

SEQ ID NO: 1525097 - DNA, 15 bp, Homo sapiens
tccctatcaagctac

SEQ ID NO: 1525098 - DNA, 15 bp, Homo sapiens
ccctatcaagctacc

SEQ ID NO: 1525099 - DNA, 15 bp, Homo sapiens
cctatcaagctacca

SEQ ID NO: 1525100 - DNA, 15 bp, Homo sapiens
ctatcaagctaccaa

SEQ ID NO: 1525101 - DNA, 15 bp, Homo sapiens
tatcaagctaccaat

SEQ ID NO: 1525102 - DNA, 15 bp, Homo sapiens
atcaagctaccaatg

SEQ ID NO: 1525103 - DNA, 15 bp, Homo sapiens
tcaagctaccaatga

SEQ ID NO: 1525104 - DNA, 15 bp, Homo sapiens
caagctaccaatgac

SEQ ID NO: 1525105 - DNA, 15 bp, Homo sapiens
aagctaccaatgact

SEQ ID NO: 1525106 - DNA, 15 bp, Homo sapiens
agctaccaatgactt

SEQ ID NO: 1525107 - DNA, 15 bp, Homo sapiens
gctaccaatgacttt

SEQ ID NO: 1525108 - DNA, 15 bp, Homo sapiens
ctaccaatgactttc

SEQ ID NO: 1525109 - DNA, 15 bp, Homo sapiens
taccaatgactttct

SEQ ID NO: 1525110 - DNA, 15 bp, Homo sapiens
accaatgactttctt

SEQ ID NO: 1525111 - DNA, 15 bp, Homo sapiens
ccaatgactttcttc

SEQ ID NO: 1525112 - DNA, 15 bp, Homo sapiens
caatgactttcttca

SEQ ID NO: 1525113 - DNA, 15 bp, Homo sapiens
aatgactttcttcac

SEQ ID NO: 1525114 - DNA, 15 bp, Homo sapiens
atgactttcttcaca

SEQ ID NO: 1525115 - DNA, 15 bp, Homo sapiens
tgactttcttcacag

SEQ ID NO: 1525116 - DNA, 15 bp, Homo sapiens
gactttcttcacaga

SEQ ID NO: 1525117 - DNA, 15 bp, Homo sapiens
actttcttcacagaa

SEQ ID NO: 1525118 - DNA, 15 bp, Homo sapiens
ctttcttcacagaat

SEQ ID NO: 1525119 - DNA, 15 bp, Homo sapiens
tttcttcacagaatt

SEQ ID NO: 1525120 - DNA, 15 bp, Homo sapiens
ttcttcacagaattg

SEQ ID NO: 1525121 - DNA, 15 bp, Homo sapiens
tcttcacagaattgg

SEQ ID NO: 1525122 - DNA, 15 bp, Homo sapiens
cttcacagaattgga

SEQ ID NO: 1525123 - DNA, 15 bp, Homo sapiens
ttcacagaattggaa

SEQ ID NO: 1525124 - DNA, 15 bp, Homo sapiens
tcacagaattggaaa

SEQ ID NO: 1525125 - DNA, 15 bp, Homo sapiens
cacagaattggaaaa

SEQ ID NO: 1525126 - DNA, 15 bp, Homo sapiens
acagaattggaaaaa

SEQ ID NO: 1525127 - DNA, 15 bp, Homo sapiens
cagaattggaaaaaa

SEQ ID NO: 1525128 - DNA, 15 bp, Homo sapiens
agaattggaaaaaac

SEQ ID NO: 1525129 - DNA, 15 bp, Homo sapiens
gaattggaaaaaact

SEQ ID NO: 1525130 - DNA, 15 bp, Homo sapiens
aattggaaaaaacta

SEQ ID NO: 1525131 - DNA, 15 bp, Homo sapiens
attggaaaaaactaa

SEQ ID NO: 1525132 - DNA, 15 bp, Homo sapiens
ttggaaaaaactaaa

SEQ ID NO: 1525133 - DNA, 15 bp, Homo sapiens
tggaaaaaactaaag

SEQ ID NO: 1525134 - DNA, 15 bp, Homo sapiens
ggaaaaaactaaagt

SEQ ID NO: 1525135 - DNA, 15 bp, Homo sapiens
gaaaaaactaaagtt

SEQ ID NO: 1525136 - DNA, 15 bp, Homo sapiens
aaaaaactaaagttc

SEQ ID NO: 1525137 - DNA, 15 bp, Homo sapiens
aaaaactaaagttca

SEQ ID NO: 1525138 - DNA, 15 bp, Homo sapiens
aaaactaaagttcat

SEQ ID NO: 1525139 - DNA, 15 bp, Homo sapiens
aaactaaagttcata

SEQ ID NO: 1525140 - DNA, 15 bp, Homo sapiens
aactaaagttcatat

SEQ ID NO: 1525141 - DNA, 15 bp, Homo sapiens
actaaagttcatatg

SEQ ID NO: 1525142 - DNA, 15 bp, Homo sapiens
ctaaagttcatatgg

SEQ ID NO: 1525143 - DNA, 15 bp, Homo sapiens
taaagttcatatgga

SEQ ID NO: 1525144 - DNA, 15 bp, Homo sapiens
aaagttcatatggaa

SEQ ID NO: 1525145 - DNA, 15 bp, Homo sapiens
aagttcatatggaac

SEQ ID NO: 1525146 - DNA, 15 bp, Homo sapiens
agttcatatggaacc

SEQ ID NO: 1525147 - DNA, 15 bp, Homo sapiens
gttcatatggaacca

SEQ ID NO: 1525148 - DNA, 15 bp, Homo sapiens
ttcatatggaaccaa

SEQ ID NO: 1525149 - DNA, 15 bp, Homo sapiens
tcatatggaaccaaa

SEQ ID NO: 1525150 - DNA, 15 bp, Homo sapiens
catatggaaccaaaa

SEQ ID NO: 1525151 - DNA, 15 bp, Homo sapiens
atatggaaccaaaaa

SEQ ID NO: 1525152 - DNA, 15 bp, Homo sapiens
tatggaaccaaaaaa

SEQ ID NO: 1525153 - DNA, 15 bp, Homo sapiens
atggaaccaaaaaag

SEQ ID NO: 1525154 - DNA, 15 bp, Homo sapiens
tggaaccaaaaaaga

SEQ ID NO: 1525155 - DNA, 15 bp, Homo sapiens
ggaaccaaaaaagag

SEQ ID NO: 1525156 - DNA, 15 bp, Homo sapiens
gaaccaaaaaagagc

SEQ ID NO: 1525157 - DNA, 15 bp, Homo sapiens
aaccaaaaaagagcc

SEQ ID NO: 1525158 - DNA, 15 bp, Homo sapiens
accaaaaaagagccc

SEQ ID NO: 1525159 - DNA, 15 bp, Homo sapiens
ccaaaaaagagcccg

SEQ ID NO: 1525160 - DNA, 15 bp, Homo sapiens
aaaaagagcccgcat

SEQ ID NO: 1525161 - DNA, 15 bp, Homo sapiens
aaaagagcccgcatt

SEQ ID NO: 1525162 - DNA, 15 bp, Homo sapiens
aaagagcccgcattg

SEQ ID NO: 1525163 - DNA, 15 bp, Homo sapiens
aagagcccgcattgc

SEQ ID NO: 1525164 - DNA, 15 bp, Homo sapiens
agagcccgcattgcc

SEQ ID NO: 1525165 - DNA, 15 bp, Homo sapiens
gagcccgcattgcca

SEQ ID NO: 1525166 - DNA, 15 bp, Homo sapiens
agcccgcattgccaa

SEQ ID NO: 1525167 - DNA, 15 bp, Homo sapiens
gcccgcattgccaag

SEQ ID NO: 1525168 - DNA, 15 bp, Homo sapiens
cccgcattgccaagt

SEQ ID NO: 1525169 - DNA, 15 bp, Homo sapiens
ccgcattgccaagtc

SEQ ID NO: 1525170 - DNA, 15 bp, Homo sapiens
cgcattgccaagtca

SEQ ID NO: 1525171 - DNA, 15 bp, Homo sapiens
gcattgccaagtcaa

SEQ ID NO: 1525172 - DNA, 15 bp, Homo sapiens
cattgccaagtcaat

SEQ ID NO: 1525173 - DNA, 15 bp, Homo sapiens
attgccaagtcaatc

SEQ ID NO: 1525174 - DNA, 15 bp, Homo sapiens
ttgccaagtcaatcc

SEQ ID NO: 1525175 - DNA, 15 bp, Homo sapiens
tgccaagtcaatcct

SEQ ID NO: 1525176 - DNA, 15 bp, Homo sapiens
gccaagtcaatccta

SEQ ID NO: 1525177 - DNA, 15 bp, Homo sapiens
ccaagtcaatcctaa

SEQ ID NO: 1525178 - DNA, 15 bp, Homo sapiens
caagtcaatcctaag

SEQ ID NO: 1525179 - DNA, 15 bp, Homo sapiens
aagtcaatcctaagc

SEQ ID NO: 1525180 - DNA, 15 bp, Homo sapiens
agtcaatcctaagcc

SEQ ID NO: 1525181 - DNA, 15 bp, Homo sapiens
gtcaatcctaagcca

SEQ ID NO: 1525182 - DNA, 15 bp, Homo sapiens
tcaatcctaagccaa

SEQ ID NO: 1525183 - DNA, 15 bp, Homo sapiens
caatcctaagccaaa

SEQ ID NO: 1525184 - DNA, 15 bp, Homo sapiens
aatcctaagccaaaa

SEQ ID NO: 1525185 - DNA, 15 bp, Homo sapiens
atcctaagccaaaag

SEQ ID NO: 1525186 - DNA, 15 bp, Homo sapiens
tcctaagccaaaaga

SEQ ID NO: 1525187 - DNA, 15 bp, Homo sapiens
cctaagccaaaagaa

SEQ ID NO: 1525188 - DNA, 15 bp, Homo sapiens
ctaagccaaaagaac

SEQ ID NO: 1525189 - DNA, 15 bp, Homo sapiens
taagccaaaagaaca

SEQ ID NO: 1525190 - DNA, 15 bp, Homo sapiens
aagccaaaagaacaa

SEQ ID NO: 1525191 - DNA, 15 bp, Homo sapiens
agccaaaagaacaaa

SEQ ID NO: 1525192 - DNA, 15 bp, Homo sapiens
gccaaaagaacaaag

SEQ ID NO: 1525193 - DNA, 15 bp, Homo sapiens
ccaaaagaacaaagc

SEQ ID NO: 1525194 - DNA, 15 bp, Homo sapiens
caaaagaacaaagct

SEQ ID NO: 1525195 - DNA, 15 bp, Homo sapiens
aaaagaacaaagctg

SEQ ID NO: 1525196 - DNA, 15 bp, Homo sapiens
aaagaacaaagctgg

SEQ ID NO: 1525197 - DNA, 15 bp, Homo sapiens
aagaacaaagctgga

SEQ ID NO: 1525198 - DNA, 15 bp, Homo sapiens
agaacaaagctggag

SEQ ID NO: 1525199 - DNA, 15 bp, Homo sapiens
gaacaaagctggagg

SEQ ID NO: 1525200 - DNA, 15 bp, Homo sapiens
aacaaagctggaggc

SEQ ID NO: 1525201 - DNA, 15 bp, Homo sapiens
agctggaggcatcac

SEQ ID NO: 1525202 - DNA, 15 bp, Homo sapiens
gctggaggcatcaca

SEQ ID NO: 1525203 - DNA, 15 bp, Homo sapiens
ctggaggcatcacac

SEQ ID NO: 1525204 - DNA, 15 bp, Homo sapiens
tggaggcatcacact

SEQ ID NO: 1525205 - DNA, 15 bp, Homo sapiens
ggaggcatcacacta

SEQ ID NO: 1525206 - DNA, 15 bp, Homo sapiens
gaggcatcacactac

SEQ ID NO: 1525207 - DNA, 15 bp, Homo sapiens
aggcatcacactacc

SEQ ID NO: 1525208 - DNA, 15 bp, Homo sapiens
ggcatcacactacct

SEQ ID NO: 1525209 - DNA, 15 bp, Homo sapiens
gcatcacactacctg

SEQ ID NO: 1525210 - DNA, 15 bp, Homo sapiens
catcacactacctga

SEQ ID NO: 1525211 - DNA, 15 bp, Homo sapiens
atcacactacctgac

SEQ ID NO: 1525212 - DNA, 15 bp, Homo sapiens
tcacactacctgact

SEQ ID NO: 1525213 - DNA, 15 bp, Homo sapiens
cacactacctgactt

SEQ ID NO: 1525214 - DNA, 15 bp, Homo sapiens
acactacctgacttc

SEQ ID NO: 1525215 - DNA, 15 bp, Homo sapiens
cactacctgacttct

SEQ ID NO: 1525216 - DNA, 15 bp, Homo sapiens
actacctgacttcta

SEQ ID NO: 1525217 - DNA, 15 bp, Homo sapiens
ctacctgacttctaa

SEQ ID NO: 1525218 - DNA, 15 bp, Homo sapiens
tacctgacttctaac

SEQ ID NO: 1525219 - DNA, 15 bp, Homo sapiens
acctgacttctaact

SEQ ID NO: 1525220 - DNA, 15 bp, Homo sapiens
cctgacttctaacta

SEQ ID NO: 1525221 - DNA, 15 bp, Homo sapiens
ctgacttctaactat

SEQ ID NO: 1525222 - DNA, 15 bp, Homo sapiens
tgacttctaactata

SEQ ID NO: 1525223 - DNA, 15 bp, Homo sapiens
gacttctaactatac

SEQ ID NO: 1525224 - DNA, 15 bp, Homo sapiens
acttctaactatact

SEQ ID NO: 1525225 - DNA, 15 bp, Homo sapiens
cttctaactatacta

SEQ ID NO: 1525226 - DNA, 15 bp, Homo sapiens
ttctaactatactac

SEQ ID NO: 1525227 - DNA, 15 bp, Homo sapiens
tctaactatactaca

SEQ ID NO: 1525228 - DNA, 15 bp, Homo sapiens
ctaactatactacaa

SEQ ID NO: 1525229 - DNA, 15 bp, Homo sapiens
taactatactacaag

SEQ ID NO: 1525230 - DNA, 15 bp, Homo sapiens
aactatactacaagg

SEQ ID NO: 1525231 - DNA, 15 bp, Homo sapiens
actatactacaaggc

SEQ ID NO: 1525232 - DNA, 15 bp, Homo sapiens
ctatactacaaggct

SEQ ID NO: 1525233 - DNA, 15 bp, Homo sapiens
tatactacaaggcta

SEQ ID NO: 1525234 - DNA, 15 bp, Homo sapiens
atactacaaggctac

SEQ ID NO: 1525235 - DNA, 15 bp, Homo sapiens
tactacaaggctaca

SEQ ID NO: 1525236 - DNA, 15 bp, Homo sapiens
actacaaggctacag

SEQ ID NO: 1525237 - DNA, 15 bp, Homo sapiens
ctacaaggctacagt

SEQ ID NO: 1525238 - DNA, 15 bp, Homo sapiens
tacaaggctacagta

SEQ ID NO: 1525239 - DNA, 15 bp, Homo sapiens
acaaggctacagtaa

SEQ ID NO: 1525240 - DNA, 15 bp, Homo sapiens
caaggctacagtaac

SEQ ID NO: 1525241 - DNA, 15 bp, Homo sapiens
aaggctacagtaacc

SEQ ID NO: 1525242 - DNA, 15 bp, Homo sapiens
aggctacagtaacca

SEQ ID NO: 1525243 - DNA, 15 bp, Homo sapiens
acgaagcaatagggg

SEQ ID NO: 1525244 - DNA, 15 bp, Homo sapiens
cgaagcaatagggga

SEQ ID NO: 1525245 - DNA, 15 bp, Homo sapiens
gaagcaataggggat

SEQ ID NO: 1525246 - DNA, 15 bp, Homo sapiens
aagcaataggggatg

SEQ ID NO: 1525247 - DNA, 15 bp, Homo sapiens
agcaataggggatgt

SEQ ID NO: 1525248 - DNA, 15 bp, Homo sapiens
gcaataggggatgtc

SEQ ID NO: 1525249 - DNA, 15 bp, Homo sapiens
caataggggatgtca

SEQ ID NO: 1525250 - DNA, 15 bp, Homo sapiens
aataggggatgtcag

SEQ ID NO: 1525251 - DNA, 15 bp, Homo sapiens
ataggggatgtcaga

SEQ ID NO: 1525252 - DNA, 15 bp, Homo sapiens
taggggatgtcagag

SEQ ID NO: 1525253 - DNA, 15 bp, Homo sapiens
aggggatgtcagagc

SEQ ID NO: 1525254 - DNA, 15 bp, Homo sapiens
ggggatgtcagagca

SEQ ID NO: 1525255 - DNA, 15 bp, Homo sapiens
gggatgtcagagcaa

SEQ ID NO: 1525256 - DNA, 15 bp, Homo sapiens
ggatgtcagagcaag

SEQ ID NO: 1525257 - DNA, 15 bp, Homo sapiens
gatgtcagagcaagg

SEQ ID NO: 1525258 - DNA, 15 bp, Homo sapiens
atgtcagagcaaggg

SEQ ID NO: 1525259 - DNA, 15 bp, Homo sapiens
tgtcagagcaaggga

SEQ ID NO: 1525260 - DNA, 15 bp, Homo sapiens
gtcagagcaagggag

SEQ ID NO: 1525261 - DNA, 15 bp, Homo sapiens
tcagagcaagggagg

SEQ ID NO: 1525262 - DNA, 15 bp, Homo sapiens
cagagcaagggagga

SEQ ID NO: 1525263 - DNA, 15 bp, Homo sapiens
agagcaagggaggaa

SEQ ID NO: 1525264 - DNA, 15 bp, Homo sapiens
gagcaagggaggaac

SEQ ID NO: 1525265 - DNA, 15 bp, Homo sapiens
agcaagggaggaaca

SEQ ID NO: 1525266 - DNA, 15 bp, Homo sapiens
gcaagggaggaacag

SEQ ID NO: 1525267 - DNA, 15 bp, Homo sapiens
caagggaggaacagg

SEQ ID NO: 1525268 - DNA, 15 bp, Homo sapiens
aagggaggaacagga

SEQ ID NO: 1525269 - DNA, 15 bp, Homo sapiens
agggaggaacaggac

SEQ ID NO: 1525270 - DNA, 15 bp, Homo sapiens
gggaggaacaggaca

SEQ ID NO: 1525271 - DNA, 15 bp, Homo sapiens
ggaggaacaggacag

SEQ ID NO: 1525272 - DNA, 15 bp, Homo sapiens
gaggaacaggacagg

SEQ ID NO: 1525273 - DNA, 15 bp, Homo sapiens
aggaacaggacagga

SEQ ID NO: 1525274 - DNA, 15 bp, Homo sapiens
ggaacaggacaggag

SEQ ID NO: 1525275 - DNA, 15 bp, Homo sapiens
gaacaggacaggagt

SEQ ID NO: 1525276 - DNA, 15 bp, Homo sapiens
aacaggacaggagta

SEQ ID NO: 1525277 - DNA, 15 bp, Homo sapiens
acaggacaggagtat

SEQ ID NO: 1525278 - DNA, 15 bp, Homo sapiens
caggacaggagtata

SEQ ID NO: 1525279 - DNA, 15 bp, Homo sapiens
aggacaggagtatac

SEQ ID NO: 1525280 - DNA, 15 bp, Homo sapiens
ggacaggagtatacg

SEQ ID NO: 1525281 - DNA, 15 bp, Homo sapiens
gacaggagtatacgt

SEQ ID NO: 1525282 - DNA, 15 bp, Homo sapiens
acaggagtatacgtg

SEQ ID NO: 1525283 - DNA, 15 bp, Homo sapiens
caggagtatacgtgg

SEQ ID NO: 1525284 - DNA, 15 bp, Homo sapiens
aggagtatacgtggg

SEQ ID NO: 1525285 - DNA, 15 bp, Homo sapiens
ggagtatacgtgggc

SEQ ID NO: 1525286 - DNA, 15 bp, Homo sapiens
gagtatacgtgggca

SEQ ID NO: 1525287 - DNA, 15 bp, Homo sapiens
agtatacgtgggcag

SEQ ID NO: 1525288 - DNA, 15 bp, Homo sapiens
gtatacgtgggcagg

SEQ ID NO: 1525289 - DNA, 15 bp, Homo sapiens
tatacgtgggcagga

SEQ ID NO: 1525290 - DNA, 15 bp, Homo sapiens
atacgtgggcaggaa

SEQ ID NO: 1525291 - DNA, 15 bp, Homo sapiens
tacgtgggcaggaag

SEQ ID NO: 1525292 - DNA, 15 bp, Homo sapiens
acgtgggcaggaagg

SEQ ID NO: 1525293 - DNA, 15 bp, Homo sapiens
cgtgggcaggaaggg

SEQ ID NO: 1525294 - DNA, 15 bp, Homo sapiens
gtgggcaggaaggga

SEQ ID NO: 1525295 - DNA, 15 bp, Homo sapiens
tgggcaggaagggat

SEQ ID NO: 1525296 - DNA, 15 bp, Homo sapiens
gggcaggaagggatt

SEQ ID NO: 1525297 - DNA, 15 bp, Homo sapiens
ggcaggaagggatta

SEQ ID NO: 1525298 - DNA, 15 bp, Homo sapiens
gcaggaagggattac

SEQ ID NO: 1525299 - DNA, 15 bp, Homo sapiens
caggaagggattaca

SEQ ID NO: 1525300 - DNA, 15 bp, Homo sapiens
aggaagggattacag

SEQ ID NO: 1525301 - DNA, 15 bp, Homo sapiens
ggaagggattacagc

SEQ ID NO: 1525302 - DNA, 15 bp, Homo sapiens
gaagggattacagcc

SEQ ID NO: 1525303 - DNA, 15 bp, Homo sapiens
aagggattacagcca

SEQ ID NO: 1525304 - DNA, 15 bp, Homo sapiens
agggattacagccaa

SEQ ID NO: 1525305 - DNA, 15 bp, Homo sapiens
gggattacagccaag

SEQ ID NO: 1525306 - DNA, 15 bp, Homo sapiens
ggattacagccaagg

SEQ ID NO: 1525307 - DNA, 15 bp, Homo sapiens
gattacagccaagga

SEQ ID NO: 1525308 - DNA, 15 bp, Homo sapiens
attacagccaaggaa

SEQ ID NO: 1525309 - DNA, 15 bp, Homo sapiens
ttacagccaaggaag

SEQ ID NO: 1525310 - DNA, 15 bp, Homo sapiens
tacagccaaggaaga

SEQ ID NO: 1525311 - DNA, 15 bp, Homo sapiens
acagccaaggaagac

SEQ ID NO: 1525312 - DNA, 15 bp, Homo sapiens
cagccaaggaagaca

SEQ ID NO: 1525313 - DNA, 15 bp, Homo sapiens
agccaaggaagacag

SEQ ID NO: 1525314 - DNA, 15 bp, Homo sapiens
gccaaggaagacagg

SEQ ID NO: 1525315 - DNA, 15 bp, Homo sapiens
ccaaggaagacagga

SEQ ID NO: 1525316 - DNA, 15 bp, Homo sapiens
caaggaagacaggag

SEQ ID NO: 1525317 - DNA, 15 bp, Homo sapiens
aaggaagacaggagg

SEQ ID NO: 1525318 - DNA, 15 bp, Homo sapiens
aggaagacaggaggc

SEQ ID NO: 1525319 - DNA, 15 bp, Homo sapiens
ggaagacaggaggca

SEQ ID NO: 1525320 - DNA, 15 bp, Homo sapiens
gaagacaggaggcag

SEQ ID NO: 1525321 - DNA, 15 bp, Homo sapiens
aagacaggaggcagg

SEQ ID NO: 1525322 - DNA, 15 bp, Homo sapiens
agacaggaggcaggt

SEQ ID NO: 1525323 - DNA, 15 bp, Homo sapiens
gacaggaggcaggtg

SEQ ID NO: 1525324 - DNA, 15 bp, Homo sapiens
acaggaggcaggtgc

SEQ ID NO: 1525325 - DNA, 15 bp, Homo sapiens
caggaggcaggtgcc

SEQ ID NO: 1525326 - DNA, 15 bp, Homo sapiens
aggaggcaggtgccc

SEQ ID NO: 1525327 - DNA, 15 bp, Homo sapiens
ggaggcaggtgccct

SEQ ID NO: 1525328 - DNA, 15 bp, Homo sapiens
gaggcaggtgccctg

SEQ ID NO: 1525329 - DNA, 15 bp, Homo sapiens
aggcaggtgccctga

SEQ ID NO: 1525330 - DNA, 15 bp, Homo sapiens
ggcaggtgccctgat

SEQ ID NO: 1525331 - DNA, 15 bp, Homo sapiens
gcaggtgccctgatt

SEQ ID NO: 1525332 - DNA, 15 bp, Homo sapiens
caggtgccctgattt

SEQ ID NO: 1525333 - DNA, 15 bp, Homo sapiens
aggtgccctgatttt

SEQ ID NO: 1525334 - DNA, 15 bp, Homo sapiens
ggtgccctgattttg

SEQ ID NO: 1525335 - DNA, 15 bp, Homo sapiens
gtgccctgattttga

SEQ ID NO: 1525336 - DNA, 15 bp, Homo sapiens
tgccctgattttgag

SEQ ID NO: 1525337 - DNA, 15 bp, Homo sapiens
gccctgattttgagg

SEQ ID NO: 1525338 - DNA, 15 bp, Homo sapiens
ccctgattttgaggc

SEQ ID NO: 1525339 - DNA, 15 bp, Homo sapiens
cctgattttgaggct

SEQ ID NO: 1525340 - DNA, 15 bp, Homo sapiens
ctgattttgaggctg

SEQ ID NO: 1525341 - DNA, 15 bp, Homo sapiens
tgattttgaggctgt

SEQ ID NO: 1525342 - DNA, 15 bp, Homo sapiens
gattttgaggctgtg

SEQ ID NO: 1525343 - DNA, 15 bp, Homo sapiens
attttgaggctgtgc

SEQ ID NO: 1525344 - DNA, 15 bp, Homo sapiens
ttttgaggctgtgcc

SEQ ID NO: 1525345 - DNA, 15 bp, Homo sapiens
tttgaggctgtgccc

SEQ ID NO: 1525346 - DNA, 15 bp, Homo sapiens
ttgaggctgtgcccc

SEQ ID NO: 1525347 - DNA, 15 bp, Homo sapiens
tgaggctgtgcccca

SEQ ID NO: 1525348 - DNA, 15 bp, Homo sapiens
gaggctgtgccccag

SEQ ID NO: 1525349 - DNA, 15 bp, Homo sapiens
aggctgtgccccagc

SEQ ID NO: 1525350 - DNA, 15 bp, Homo sapiens
ggctgtgccccagca

SEQ ID NO: 1525351 - DNA, 15 bp, Homo sapiens
gctgtgccccagcag

SEQ ID NO: 1525352 - DNA, 15 bp, Homo sapiens
ctgtgccccagcagg

SEQ ID NO: 1525353 - DNA, 15 bp, Homo sapiens
tgtgccccagcaggg

SEQ ID NO: 1525354 - DNA, 15 bp, Homo sapiens
gtgccccagcagggg

SEQ ID NO: 1525355 - DNA, 15 bp, Homo sapiens
tgccccagcaggggc

SEQ ID NO: 1525356 - DNA, 15 bp, Homo sapiens
gccccagcaggggct

SEQ ID NO: 1525357 - DNA, 15 bp, Homo sapiens
ccccagcaggggctt

SEQ ID NO: 1525358 - DNA, 15 bp, Homo sapiens
cccagcaggggcttc

SEQ ID NO: 1525359 - DNA, 15 bp, Homo sapiens
cagcaggggcttccc

SEQ ID NO: 1525360 - DNA, 15 bp, Homo sapiens
agcaggggcttccca

SEQ ID NO: 1525361 - DNA, 15 bp, Homo sapiens
gcaggggcttcccag

SEQ ID NO: 1525362 - DNA, 15 bp, Homo sapiens
caggggcttcccaga

SEQ ID NO: 1525363 - DNA, 15 bp, Homo sapiens
aggggcttcccagaa

SEQ ID NO: 1525364 - DNA, 15 bp, Homo sapiens
ggggcttcccagaag

SEQ ID NO: 1525365 - DNA, 15 bp, Homo sapiens
gggcttcccagaagc

SEQ ID NO: 1525366 - DNA, 15 bp, Homo sapiens
ggcttcccagaagct

SEQ ID NO: 1525367 - DNA, 15 bp, Homo sapiens
gcttcccagaagctg

SEQ ID NO: 1525368 - DNA, 15 bp, Homo sapiens
cttcccagaagctgt

SEQ ID NO: 1525369 - DNA, 15 bp, Homo sapiens
ttcccagaagctgta

SEQ ID NO: 1525370 - DNA, 15 bp, Homo sapiens
tcccagaagctgtat

SEQ ID NO: 1525371 - DNA, 15 bp, Homo sapiens
cccagaagctgtatt

SEQ ID NO: 1525372 - DNA, 15 bp, Homo sapiens
ccagaagctgtattt

SEQ ID NO: 1525373 - DNA, 15 bp, Homo sapiens
cagaagctgtatttg

SEQ ID NO: 1525374 - DNA, 15 bp, Homo sapiens
agaagctgtatttgt

SEQ ID NO: 1525375 - DNA, 15 bp, Homo sapiens
gaagctgtatttgtc

SEQ ID NO: 1525376 - DNA, 15 bp, Homo sapiens
aagctgtatttgtcc

SEQ ID NO: 1525377 - DNA, 15 bp, Homo sapiens
agctgtatttgtcct

SEQ ID NO: 1525378 - DNA, 15 bp, Homo sapiens
gctgtatttgtccta

SEQ ID NO: 1525379 - DNA, 15 bp, Homo sapiens
ctgtatttgtcctaa

SEQ ID NO: 1525380 - DNA, 15 bp, Homo sapiens
tgtatttgtcctaag

SEQ ID NO: 1525381 - DNA, 15 bp, Homo sapiens
gtatttgtcctaaga

SEQ ID NO: 1525382 - DNA, 15 bp, Homo sapiens
tatttgtcctaagac

SEQ ID NO: 1525383 - DNA, 15 bp, Homo sapiens
atttgtcctaagaca

SEQ ID NO: 1525384 - DNA, 15 bp, Homo sapiens
tttgtcctaagacac

SEQ ID NO: 1525385 - DNA, 15 bp, Homo sapiens
ttgtcctaagacacc

SEQ ID NO: 1525386 - DNA, 15 bp, Homo sapiens
tgtcctaagacaccc

SEQ ID NO: 1525387 - DNA, 15 bp, Homo sapiens
gtcctaagacacccc

SEQ ID NO: 1525388 - DNA, 15 bp, Homo sapiens
tcctaagacacccct

SEQ ID NO: 1525389 - DNA, 15 bp, Homo sapiens
cctaagacacccctc

SEQ ID NO: 1525390 - DNA, 15 bp, Homo sapiens
ctaagacacccctct

SEQ ID NO: 1525391 - DNA, 15 bp, Homo sapiens
taagacacccctctg

SEQ ID NO: 1525392 - DNA, 15 bp, Homo sapiens
aagacacccctctgc

SEQ ID NO: 1525393 - DNA, 15 bp, Homo sapiens
agacacccctctgca

SEQ ID NO: 1525394 - DNA, 15 bp, Homo sapiens
gacacccctctgcag

SEQ ID NO: 1525395 - DNA, 15 bp, Homo sapiens
acacccctctgcagc

SEQ ID NO: 1525396 - DNA, 15 bp, Homo sapiens
cacccctctgcagct

SEQ ID NO: 1525397 - DNA, 15 bp, Homo sapiens
acccctctgcagctg

SEQ ID NO: 1525398 - DNA, 15 bp, Homo sapiens
cccctctgcagctga

SEQ ID NO: 1525399 - DNA, 15 bp, Homo sapiens
ccctctgcagctgag

SEQ ID NO: 1525400 - DNA, 15 bp, Homo sapiens
cctctgcagctgagg

SEQ ID NO: 1525401 - DNA, 15 bp, Homo sapiens
ctctgcagctgaggg

SEQ ID NO: 1525402 - DNA, 15 bp, Homo sapiens
tctgcagctgagggg

SEQ ID NO: 1525403 - DNA, 15 bp, Homo sapiens
ctgcagctgaggggc

SEQ ID NO: 1525404 - DNA, 15 bp, Homo sapiens
tgcagctgaggggct

SEQ ID NO: 1525405 - DNA, 15 bp, Homo sapiens
gcagctgaggggcta

SEQ ID NO: 1525406 - DNA, 15 bp, Homo sapiens
cagctgaggggctag

SEQ ID NO: 1525407 - DNA, 15 bp, Homo sapiens
agctgaggggctaga

SEQ ID NO: 1525408 - DNA, 15 bp, Homo sapiens
gctgaggggctagag

SEQ ID NO: 1525409 - DNA, 15 bp, Homo sapiens
ctgaggggctagaga

SEQ ID NO: 1525410 - DNA, 15 bp, Homo sapiens
tgaggggctagagat

SEQ ID NO: 1525411 - DNA, 15 bp, Homo sapiens
gaggggctagagatg

SEQ ID NO: 1525412 - DNA, 15 bp, Homo sapiens
aggggctagagatgg

SEQ ID NO: 1525413 - DNA, 15 bp, Homo sapiens
ggggctagagatgga

SEQ ID NO: 1525414 - DNA, 15 bp, Homo sapiens
gggctagagatggat

SEQ ID NO: 1525415 - DNA, 15 bp, Homo sapiens
ggctagagatggata

SEQ ID NO: 1525416 - DNA, 15 bp, Homo sapiens
gctagagatggatat

SEQ ID NO: 1525417 - DNA, 15 bp, Homo sapiens
ctagagatggatatg

SEQ ID NO: 1525418 - DNA, 15 bp, Homo sapiens
tagagatggatatgt

SEQ ID NO: 1525419 - DNA, 15 bp, Homo sapiens
agagatggatatgta

SEQ ID NO: 1525420 - DNA, 15 bp, Homo sapiens
gagatggatatgtag

SEQ ID NO: 1525421 - DNA, 15 bp, Homo sapiens
agatggatatgtagc

SEQ ID NO: 1525422 - DNA, 15 bp, Homo sapiens
gatggatatgtagct

SEQ ID NO: 1525423 - DNA, 15 bp, Homo sapiens
atggatatgtagctg

SEQ ID NO: 1525424 - DNA, 15 bp, Homo sapiens
tggatatgtagctgt

SEQ ID NO: 1525425 - DNA, 15 bp, Homo sapiens
ggatatgtagctgtg

SEQ ID NO: 1525426 - DNA, 15 bp, Homo sapiens
gatatgtagctgtgt

SEQ ID NO: 1525427 - DNA, 15 bp, Homo sapiens
atatgtagctgtgtt

SEQ ID NO: 1525428 - DNA, 15 bp, Homo sapiens
tatgtagctgtgtta

SEQ ID NO: 1525429 - DNA, 15 bp, Homo sapiens
atgtagctgtgttag

SEQ ID NO: 1525430 - DNA, 15 bp, Homo sapiens
tgtagctgtgttagg

SEQ ID NO: 1525431 - DNA, 15 bp, Homo sapiens
gtagctgtgttaggc

SEQ ID NO: 1525432 - DNA, 15 bp, Homo sapiens
tagctgtgttaggcc

SEQ ID NO: 1525433 - DNA, 15 bp, Homo sapiens
agctgtgttaggcca

SEQ ID NO: 1525434 - DNA, 15 bp, Homo sapiens
gctgtgttaggccat

SEQ ID NO: 1525435 - DNA, 15 bp, Homo sapiens
ctgtgttaggccatt

SEQ ID NO: 1525436 - DNA, 15 bp, Homo sapiens
tgtgttaggccattc

SEQ ID NO: 1525437 - DNA, 15 bp, Homo sapiens
gtgttaggccattct

SEQ ID NO: 1525438 - DNA, 15 bp, Homo sapiens
tgttaggccattctt

SEQ ID NO: 1525439 - DNA, 15 bp, Homo sapiens
gttaggccattcttg

SEQ ID NO: 1525440 - DNA, 15 bp, Homo sapiens
ttaggccattcttgc

SEQ ID NO: 1525441 - DNA, 15 bp, Homo sapiens
taggccattcttgca

SEQ ID NO: 1525442 - DNA, 15 bp, Homo sapiens
aggccattcttgcat

SEQ ID NO: 1525443 - DNA, 15 bp, Homo sapiens
ggccattcttgcatt

SEQ ID NO: 1525444 - DNA, 15 bp, Homo sapiens
gccattcttgcattg

SEQ ID NO: 1525445 - DNA, 15 bp, Homo sapiens
ccattcttgcattgc

SEQ ID NO: 1525446 - DNA, 15 bp, Homo sapiens
cattcttgcattgct

SEQ ID NO: 1525447 - DNA, 15 bp, Homo sapiens
attcttgcattgcta

SEQ ID NO: 1525448 - DNA, 15 bp, Homo sapiens
ttcttgcattgctat

SEQ ID NO: 1525449 - DNA, 15 bp, Homo sapiens
tcttgcattgctata

SEQ ID NO: 1525450 - DNA, 15 bp, Homo sapiens
cttgcattgctataa

SEQ ID NO: 1525451 - DNA, 15 bp, Homo sapiens
ttgcattgctataaa

SEQ ID NO: 1525452 - DNA, 15 bp, Homo sapiens
tgcattgctataaag

SEQ ID NO: 1525453 - DNA, 15 bp, Homo sapiens
gcattgctataaaga

SEQ ID NO: 1525454 - DNA, 15 bp, Homo sapiens
cattgctataaagaa

SEQ ID NO: 1525455 - DNA, 15 bp, Homo sapiens
attgctataaagaaa

SEQ ID NO: 1525456 - DNA, 15 bp, Homo sapiens
ttgctataaagaaat

SEQ ID NO: 1525457 - DNA, 15 bp, Homo sapiens
tgctataaagaaata

SEQ ID NO: 1525458 - DNA, 15 bp, Homo sapiens
gctataaagaaatac

SEQ ID NO: 1525459 - DNA, 15 bp, Homo sapiens
ctataaagaaatacc

SEQ ID NO: 1525460 - DNA, 15 bp, Homo sapiens
tataaagaaatacct

SEQ ID NO: 1525461 - DNA, 15 bp, Homo sapiens
ataaagaaatacctg

SEQ ID NO: 1525462 - DNA, 15 bp, Homo sapiens
taaagaaatacctga

SEQ ID NO: 1525463 - DNA, 15 bp, Homo sapiens
aaagaaatacctgag

SEQ ID NO: 1525464 - DNA, 15 bp, Homo sapiens
aagaaatacctgaga

SEQ ID NO: 1525465 - DNA, 15 bp, Homo sapiens
agaaatacctgagac

SEQ ID NO: 1525466 - DNA, 15 bp, Homo sapiens
gaaatacctgagacc

SEQ ID NO: 1525467 - DNA, 15 bp, Homo sapiens
aaatacctgagacca

SEQ ID NO: 1525468 - DNA, 15 bp, Homo sapiens
aatacctgagaccag

SEQ ID NO: 1525469 - DNA, 15 bp, Homo sapiens
atacctgagaccagg

SEQ ID NO: 1525470 - DNA, 15 bp, Homo sapiens
tacctgagaccaggt

SEQ ID NO: 1525471 - DNA, 15 bp, Homo sapiens
acctgagaccaggta

SEQ ID NO: 1525472 - DNA, 15 bp, Homo sapiens
cctgagaccaggtaa

SEQ ID NO: 1525473 - DNA, 15 bp, Homo sapiens
ctgagaccaggtaat

SEQ ID NO: 1525474 - DNA, 15 bp, Homo sapiens
tgagaccaggtaatt

SEQ ID NO: 1525475 - DNA, 15 bp, Homo sapiens
gagaccaggtaattt

SEQ ID NO: 1525476 - DNA, 15 bp, Homo sapiens
agaccaggtaattta

SEQ ID NO: 1525477 - DNA, 15 bp, Homo sapiens
gaccaggtaatttat

SEQ ID NO: 1525478 - DNA, 15 bp, Homo sapiens
accaggtaatttata

SEQ ID NO: 1525479 - DNA, 15 bp, Homo sapiens
ccaggtaatttataa

SEQ ID NO: 1525480 - DNA, 15 bp, Homo sapiens
caggtaatttataaa

SEQ ID NO: 1525481 - DNA, 15 bp, Homo sapiens
tttataaagaaaaga

SEQ ID NO: 1525482 - DNA, 15 bp, Homo sapiens
ttataaagaaaagag

SEQ ID NO: 1525483 - DNA, 15 bp, Homo sapiens
tataaagaaaagagg

SEQ ID NO: 1525484 - DNA, 15 bp, Homo sapiens
ataaagaaaagaggt

SEQ ID NO: 1525485 - DNA, 15 bp, Homo sapiens
taaagaaaagaggtt

SEQ ID NO: 1525486 - DNA, 15 bp, Homo sapiens
aaagaaaagaggttt

SEQ ID NO: 1525487 - DNA, 15 bp, Homo sapiens
aagaaaagaggtttc

SEQ ID NO: 1525488 - DNA, 15 bp, Homo sapiens
agaaaagaggtttca

SEQ ID NO: 1525489 - DNA, 15 bp, Homo sapiens
gaaaagaggtttcat

SEQ ID NO: 1525490 - DNA, 15 bp, Homo sapiens
aaaagaggtttcatt

SEQ ID NO: 1525491 - DNA, 15 bp, Homo sapiens
aaagaggtttcattg

SEQ ID NO: 1525492 - DNA, 15 bp, Homo sapiens
aagaggtttcattgg

SEQ ID NO: 1525493 - DNA, 15 bp, Homo sapiens
agaggtttcattggt

SEQ ID NO: 1525494 - DNA, 15 bp, Homo sapiens
gaggtttcattggtt

SEQ ID NO: 1525495 - DNA, 15 bp, Homo sapiens
aggtttcattggttc

SEQ ID NO: 1525496 - DNA, 15 bp, Homo sapiens
ggtttcattggttca

SEQ ID NO: 1525497 - DNA, 15 bp, Homo sapiens
gtttcattggttcac

SEQ ID NO: 1525498 - DNA, 15 bp, Homo sapiens
tttcattggttcaca

SEQ ID NO: 1525499 - DNA, 15 bp, Homo sapiens
ttcattggttcacag

SEQ ID NO: 1525500 - DNA, 15 bp, Homo sapiens
tcattggttcacagt

SEQ ID NO: 1525501 - DNA, 15 bp, Homo sapiens
cattggttcacagtt

SEQ ID NO: 1525502 - DNA, 15 bp, Homo sapiens
attggttcacagttc

SEQ ID NO: 1525503 - DNA, 15 bp, Homo sapiens
ttggttcacagttct

SEQ ID NO: 1525504 - DNA, 15 bp, Homo sapiens
tggttcacagttctg

SEQ ID NO: 1525505 - DNA, 15 bp, Homo sapiens
ggttcacagttctgc

SEQ ID NO: 1525506 - DNA, 15 bp, Homo sapiens
gttcacagttctgct

SEQ ID NO: 1525507 - DNA, 15 bp, Homo sapiens
ttcacagttctgctg

SEQ ID NO: 1525508 - DNA, 15 bp, Homo sapiens
tcacagttctgctgg

SEQ ID NO: 1525509 - DNA, 15 bp, Homo sapiens
cacagttctgctggc

SEQ ID NO: 1525510 - DNA, 15 bp, Homo sapiens
acagttctgctggct

SEQ ID NO: 1525511 - DNA, 15 bp, Homo sapiens
cagttctgctggctt

SEQ ID NO: 1525512 - DNA, 15 bp, Homo sapiens
agttctgctggcttt

SEQ ID NO: 1525513 - DNA, 15 bp, Homo sapiens
gttctgctggctttg

SEQ ID NO: 1525514 - DNA, 15 bp, Homo sapiens
ttctgctggctttgc

SEQ ID NO: 1525515 - DNA, 15 bp, Homo sapiens
tctgctggctttgca

SEQ ID NO: 1525516 - DNA, 15 bp, Homo sapiens
ctgctggctttgcaa

SEQ ID NO: 1525517 - DNA, 15 bp, Homo sapiens
tgctggctttgcaag

SEQ ID NO: 1525518 - DNA, 15 bp, Homo sapiens
gctggctttgcaaga

SEQ ID NO: 1525519 - DNA, 15 bp, Homo sapiens
ctggctttgcaagag

SEQ ID NO: 1525520 - DNA, 15 bp, Homo sapiens
tggctttgcaagagg

SEQ ID NO: 1525521 - DNA, 15 bp, Homo sapiens
ggctttgcaagaggc

SEQ ID NO: 1525522 - DNA, 15 bp, Homo sapiens
gctttgcaagaggca

SEQ ID NO: 1525523 - DNA, 15 bp, Homo sapiens
ctttgcaagaggcat

SEQ ID NO: 1525524 - DNA, 15 bp, Homo sapiens
tttgcaagaggcatg

SEQ ID NO: 1525525 - DNA, 15 bp, Homo sapiens
ttgcaagaggcatgg

SEQ ID NO: 1525526 - DNA, 15 bp, Homo sapiens
tgcaagaggcatggt

SEQ ID NO: 1525527 - DNA, 15 bp, Homo sapiens
gcaagaggcatggtg

SEQ ID NO: 1525528 - DNA, 15 bp, Homo sapiens
caagaggcatggtgc

SEQ ID NO: 1525529 - DNA, 15 bp, Homo sapiens
aagaggcatggtgct

SEQ ID NO: 1525530 - DNA, 15 bp, Homo sapiens
agaggcatggtgctg

SEQ ID NO: 1525531 - DNA, 15 bp, Homo sapiens
gaggcatggtgctgg

SEQ ID NO: 1525532 - DNA, 15 bp, Homo sapiens
aggcatggtgctggc

SEQ ID NO: 1525533 - DNA, 15 bp, Homo sapiens
ggcatggtgctggca

SEQ ID NO: 1525534 - DNA, 15 bp, Homo sapiens
gcatggtgctggcat

SEQ ID NO: 1525535 - DNA, 15 bp, Homo sapiens
catggtgctggcatc

SEQ ID NO: 1525536 - DNA, 15 bp, Homo sapiens
atggtgctggcatct

SEQ ID NO: 1525537 - DNA, 15 bp, Homo sapiens
tggtgctggcatctg

SEQ ID NO: 1525538 - DNA, 15 bp, Homo sapiens
ggtgctggcatctgc

SEQ ID NO: 1525539 - DNA, 15 bp, Homo sapiens
gtgctggcatctgct

SEQ ID NO: 1525540 - DNA, 15 bp, Homo sapiens
tgctggcatctgctc

SEQ ID NO: 1525541 - DNA, 15 bp, Homo sapiens
gctggcatctgctca

SEQ ID NO: 1525542 - DNA, 15 bp, Homo sapiens
ctggcatctgctcag

SEQ ID NO: 1525543 - DNA, 15 bp, Homo sapiens
tggcatctgctcagc

SEQ ID NO: 1525544 - DNA, 15 bp, Homo sapiens
ggcatctgctcagcc

SEQ ID NO: 1525545 - DNA, 15 bp, Homo sapiens
gcatctgctcagcct

SEQ ID NO: 1525546 - DNA, 15 bp, Homo sapiens
catctgctcagcctt

SEQ ID NO: 1525547 - DNA, 15 bp, Homo sapiens
atctgctcagccttt

SEQ ID NO: 1525548 - DNA, 15 bp, Homo sapiens
tctgctcagcctttg

SEQ ID NO: 1525549 - DNA, 15 bp, Homo sapiens
ctgctcagcctttga

SEQ ID NO: 1525550 - DNA, 15 bp, Homo sapiens
tgctcagcctttgag

SEQ ID NO: 1525551 - DNA, 15 bp, Homo sapiens
gctcagcctttgagg

SEQ ID NO: 1525552 - DNA, 15 bp, Homo sapiens
ctcagcctttgagga

SEQ ID NO: 1525553 - DNA, 15 bp, Homo sapiens
tcagcctttgaggag

SEQ ID NO: 1525554 - DNA, 15 bp, Homo sapiens
cagcctttgaggagg

SEQ ID NO: 1525555 - DNA, 15 bp, Homo sapiens
agcctttgaggaggc

SEQ ID NO: 1525556 - DNA, 15 bp, Homo sapiens
gcctttgaggaggcc

SEQ ID NO: 1525557 - DNA, 15 bp, Homo sapiens
cctttgaggaggcct

SEQ ID NO: 1525558 - DNA, 15 bp, Homo sapiens
ctttgaggaggcctc

SEQ ID NO: 1525559 - DNA, 15 bp, Homo sapiens
tttgaggaggcctca

SEQ ID NO: 1525560 - DNA, 15 bp, Homo sapiens
ttgaggaggcctcag

SEQ ID NO: 1525561 - DNA, 15 bp, Homo sapiens
tgaggaggcctcagg

SEQ ID NO: 1525562 - DNA, 15 bp, Homo sapiens
gaggaggcctcagga

SEQ ID NO: 1525563 - DNA, 15 bp, Homo sapiens
aggaggcctcaggaa

SEQ ID NO: 1525564 - DNA, 15 bp, Homo sapiens
ggaggcctcaggaaa

SEQ ID NO: 1525565 - DNA, 15 bp, Homo sapiens
gaggcctcaggaaac

SEQ ID NO: 1525566 - DNA, 15 bp, Homo sapiens
aggcctcaggaaact

SEQ ID NO: 1525567 - DNA, 15 bp, Homo sapiens
ggcctcaggaaactt

SEQ ID NO: 1525568 - DNA, 15 bp, Homo sapiens
gcctcaggaaactta

SEQ ID NO: 1525569 - DNA, 15 bp, Homo sapiens
cctcaggaaacttac

SEQ ID NO: 1525570 - DNA, 15 bp, Homo sapiens
ctcaggaaacttaca

SEQ ID NO: 1525571 - DNA, 15 bp, Homo sapiens
tcaggaaacttacag

SEQ ID NO: 1525572 - DNA, 15 bp, Homo sapiens
caggaaacttacagt

SEQ ID NO: 1525573 - DNA, 15 bp, Homo sapiens
aggaaacttacagtc

SEQ ID NO: 1525574 - DNA, 15 bp, Homo sapiens
ggaaacttacagtca

SEQ ID NO: 1525575 - DNA, 15 bp, Homo sapiens
gaaacttacagtcat

SEQ ID NO: 1525576 - DNA, 15 bp, Homo sapiens
aaacttacagtcatg

SEQ ID NO: 1525577 - DNA, 15 bp, Homo sapiens
aacttacagtcatgg

SEQ ID NO: 1525578 - DNA, 15 bp, Homo sapiens
acttacagtcatggc

SEQ ID NO: 1525579 - DNA, 15 bp, Homo sapiens
cttacagtcatggcg

SEQ ID NO: 1525580 - DNA, 15 bp, Homo sapiens
ttacagtcatggcgg

SEQ ID NO: 1525581 - DNA, 15 bp, Homo sapiens
tacagtcatggcgga

SEQ ID NO: 1525582 - DNA, 15 bp, Homo sapiens
acagtcatggcggaa

SEQ ID NO: 1525583 - DNA, 15 bp, Homo sapiens
cagtcatggcggaag

SEQ ID NO: 1525584 - DNA, 15 bp, Homo sapiens
agtcatggcggaagg

SEQ ID NO: 1525585 - DNA, 15 bp, Homo sapiens
gtcatggcggaaggc

SEQ ID NO: 1525586 - DNA, 15 bp, Homo sapiens
tcatggcggaaggca

SEQ ID NO: 1525587 - DNA, 15 bp, Homo sapiens
catggcggaaggcaa

SEQ ID NO: 1525588 - DNA, 15 bp, Homo sapiens
atggcggaaggcaaa

SEQ ID NO: 1525589 - DNA, 15 bp, Homo sapiens
tggcggaaggcaaag

SEQ ID NO: 1525590 - DNA, 15 bp, Homo sapiens
ggcggaaggcaaagg

SEQ ID NO: 1525591 - DNA, 15 bp, Homo sapiens
gcggaaggcaaaggg

SEQ ID NO: 1525592 - DNA, 15 bp, Homo sapiens
cggaaggcaaagggg

SEQ ID NO: 1525593 - DNA, 15 bp, Homo sapiens
ggaaggcaaagggga

SEQ ID NO: 1525594 - DNA, 15 bp, Homo sapiens
gaaggcaaaggggaa

SEQ ID NO: 1525595 - DNA, 15 bp, Homo sapiens
aaggcaaaggggaag

SEQ ID NO: 1525596 - DNA, 15 bp, Homo sapiens
aggcaaaggggaagc

SEQ ID NO: 1525597 - DNA, 15 bp, Homo sapiens
ggcaaaggggaagca

SEQ ID NO: 1525598 - DNA, 15 bp, Homo sapiens
gcaaaggggaagcag

SEQ ID NO: 1525599 - DNA, 15 bp, Homo sapiens
caaaggggaagcagg

SEQ ID NO: 1525600 - DNA, 15 bp, Homo sapiens
aaaggggaagcaggc

SEQ ID NO: 1525601 - DNA, 15 bp, Homo sapiens
aaggggaagcaggca

SEQ ID NO: 1525602 - DNA, 15 bp, Homo sapiens
aggggaagcaggcac

SEQ ID NO: 1525603 - DNA, 15 bp, Homo sapiens
ggggaagcaggcaca

SEQ ID NO: 1525604 - DNA, 15 bp, Homo sapiens
gggaagcaggcacat

SEQ ID NO: 1525605 - DNA, 15 bp, Homo sapiens
ggaagcaggcacatc

SEQ ID NO: 1525606 - DNA, 15 bp, Homo sapiens
gaagcaggcacatca

SEQ ID NO: 1525607 - DNA, 15 bp, Homo sapiens
aagcaggcacatcac

SEQ ID NO: 1525608 - DNA, 15 bp, Homo sapiens
agcaggcacatcaca

SEQ ID NO: 1525609 - DNA, 15 bp, Homo sapiens
gcaggcacatcacac

SEQ ID NO: 1525610 - DNA, 15 bp, Homo sapiens
caggcacatcacaca

SEQ ID NO: 1525611 - DNA, 15 bp, Homo sapiens
aggcacatcacacag

SEQ ID NO: 1525612 - DNA, 15 bp, Homo sapiens
ggcacatcacacagt

SEQ ID NO: 1525613 - DNA, 15 bp, Homo sapiens
gcacatcacacagtg

SEQ ID NO: 1525614 - DNA, 15 bp, Homo sapiens
cacatcacacagtgg

SEQ ID NO: 1525615 - DNA, 15 bp, Homo sapiens
acatcacacagtgga

SEQ ID NO: 1525616 - DNA, 15 bp, Homo sapiens
catcacacagtggaa

SEQ ID NO: 1525617 - DNA, 15 bp, Homo sapiens
atcacacagtggaag

SEQ ID NO: 1525618 - DNA, 15 bp, Homo sapiens
tcacacagtggaagc

SEQ ID NO: 1525619 - DNA, 15 bp, Homo sapiens
cacacagtggaagca

SEQ ID NO: 1525620 - DNA, 15 bp, Homo sapiens
acacagtggaagcag

SEQ ID NO: 1525621 - DNA, 15 bp, Homo sapiens
cacagtggaagcagg

SEQ ID NO: 1525622 - DNA, 15 bp, Homo sapiens
acagtggaagcagga

SEQ ID NO: 1525623 - DNA, 15 bp, Homo sapiens
cagtggaagcaggag

SEQ ID NO: 1525624 - DNA, 15 bp, Homo sapiens
agtggaagcaggagt

SEQ ID NO: 1525625 - DNA, 15 bp, Homo sapiens
gtggaagcaggagtg

SEQ ID NO: 1525626 - DNA, 15 bp, Homo sapiens
tggaagcaggagtga

SEQ ID NO: 1525627 - DNA, 15 bp, Homo sapiens
ggaagcaggagtgag

SEQ ID NO: 1525628 - DNA, 15 bp, Homo sapiens
gaagcaggagtgaga

SEQ ID NO: 1525629 - DNA, 15 bp, Homo sapiens
aagcaggagtgagag

SEQ ID NO: 1525630 - DNA, 15 bp, Homo sapiens
agcaggagtgagaga

SEQ ID NO: 1525631 - DNA, 15 bp, Homo sapiens
gcaggagtgagagag

SEQ ID NO: 1525632 - DNA, 15 bp, Homo sapiens
caggagtgagagaga

SEQ ID NO: 1525633 - DNA, 15 bp, Homo sapiens
aggagtgagagagag

SEQ ID NO: 1525634 - DNA, 15 bp, Homo sapiens
ggagtgagagagaga

SEQ ID NO: 1525635 - DNA, 15 bp, Homo sapiens
gagtgagagagagag

SEQ ID NO: 1525636 - DNA, 15 bp, Homo sapiens
agtgagagagagaga

SEQ ID NO: 1525637 - DNA, 15 bp, Homo sapiens
agagagagagaggca

SEQ ID NO: 1525638 - DNA, 15 bp, Homo sapiens
gagagagagaggcac

SEQ ID NO: 1525639 - DNA, 15 bp, Homo sapiens
agagagagaggcact

SEQ ID NO: 1525640 - DNA, 15 bp, Homo sapiens
gagagagaggcactg

SEQ ID NO: 1525641 - DNA, 15 bp, Homo sapiens
agagagaggcactgg

SEQ ID NO: 1525642 - DNA, 15 bp, Homo sapiens
gagagaggcactggg

SEQ ID NO: 1525643 - DNA, 15 bp, Homo sapiens
agagaggcactggga

SEQ ID NO: 1525644 - DNA, 15 bp, Homo sapiens
gagaggcactgggag

SEQ ID NO: 1525645 - DNA, 15 bp, Homo sapiens
agaggcactgggagg

SEQ ID NO: 1525646 - DNA, 15 bp, Homo sapiens
gaggcactgggaggt

SEQ ID NO: 1525647 - DNA, 15 bp, Homo sapiens
aggcactgggaggtg

SEQ ID NO: 1525648 - DNA, 15 bp, Homo sapiens
ggcactgggaggtgc

SEQ ID NO: 1525649 - DNA, 15 bp, Homo sapiens
gcactgggaggtgcc

SEQ ID NO: 1525650 - DNA, 15 bp, Homo sapiens
cactgggaggtgcca

SEQ ID NO: 1525651 - DNA, 15 bp, Homo sapiens
actgggaggtgccac

SEQ ID NO: 1525652 - DNA, 15 bp, Homo sapiens
ctgggaggtgccaca

SEQ ID NO: 1525653 - DNA, 15 bp, Homo sapiens
tgggaggtgccacac

SEQ ID NO: 1525654 - DNA, 15 bp, Homo sapiens
gggaggtgccacact

SEQ ID NO: 1525655 - DNA, 15 bp, Homo sapiens
ggaggtgccacactt

SEQ ID NO: 1525656 - DNA, 15 bp, Homo sapiens
gaggtgccacacttt

SEQ ID NO: 1525657 - DNA, 15 bp, Homo sapiens
aggtgccacactttt

SEQ ID NO: 1525658 - DNA, 15 bp, Homo sapiens
ggtgccacactttta

SEQ ID NO: 1525659 - DNA, 15 bp, Homo sapiens
gtgccacacttttaa

SEQ ID NO: 1525660 - DNA, 15 bp, Homo sapiens
tgccacacttttaaa

SEQ ID NO: 1525661 - DNA, 15 bp, Homo sapiens
gccacacttttaaac

SEQ ID NO: 1525662 - DNA, 15 bp, Homo sapiens
ccacacttttaaaca

SEQ ID NO: 1525663 - DNA, 15 bp, Homo sapiens
cacacttttaaacaa

SEQ ID NO: 1525664 - DNA, 15 bp, Homo sapiens
acacttttaaacaac

SEQ ID NO: 1525665 - DNA, 15 bp, Homo sapiens
cacttttaaacaacc

SEQ ID NO: 1525666 - DNA, 15 bp, Homo sapiens
acttttaaacaacca

SEQ ID NO: 1525667 - DNA, 15 bp, Homo sapiens
cttttaaacaaccag

SEQ ID NO: 1525668 - DNA, 15 bp, Homo sapiens
ttttaaacaaccaga

SEQ ID NO: 1525669 - DNA, 15 bp, Homo sapiens
tttaaacaaccagat

SEQ ID NO: 1525670 - DNA, 15 bp, Homo sapiens
ttaaacaaccagatc

SEQ ID NO: 1525671 - DNA, 15 bp, Homo sapiens
taaacaaccagatct

SEQ ID NO: 1525672 - DNA, 15 bp, Homo sapiens
aaacaaccagatctc

SEQ ID NO: 1525673 - DNA, 15 bp, Homo sapiens
aacaaccagatctcg

SEQ ID NO: 1525674 - DNA, 15 bp, Homo sapiens
acaaccagatctcgt

SEQ ID NO: 1525675 - DNA, 15 bp, Homo sapiens
caaccagatctcgtg

SEQ ID NO: 1525676 - DNA, 15 bp, Homo sapiens
aaccagatctcgtgt

SEQ ID NO: 1525677 - DNA, 15 bp, Homo sapiens
accagatctcgtgtg

SEQ ID NO: 1525678 - DNA, 15 bp, Homo sapiens
ccagatctcgtgtga

SEQ ID NO: 1525679 - DNA, 15 bp, Homo sapiens
cagatctcgtgtgaa

SEQ ID NO: 1525680 - DNA, 15 bp, Homo sapiens
agatctcgtgtgaac

SEQ ID NO: 1525681 - DNA, 15 bp, Homo sapiens
gatctcgtgtgaact

SEQ ID NO: 1525682 - DNA, 15 bp, Homo sapiens
atctcgtgtgaactc

SEQ ID NO: 1525683 - DNA, 15 bp, Homo sapiens
tctcgtgtgaactca

SEQ ID NO: 1525684 - DNA, 15 bp, Homo sapiens
ctcgtgtgaactcag

SEQ ID NO: 1525685 - DNA, 15 bp, Homo sapiens
tcgtgtgaactcaga

SEQ ID NO: 1525686 - DNA, 15 bp, Homo sapiens
cgtgtgaactcagag

SEQ ID NO: 1525687 - DNA, 15 bp, Homo sapiens
gtgtgaactcagagc

SEQ ID NO: 1525688 - DNA, 15 bp, Homo sapiens
tgtgaactcagagca

SEQ ID NO: 1525689 - DNA, 15 bp, Homo sapiens
gtgaactcagagcaa

SEQ ID NO: 1525690 - DNA, 15 bp, Homo sapiens
tgaactcagagcaag

SEQ ID NO: 1525691 - DNA, 15 bp, Homo sapiens
gaactcagagcaaga

SEQ ID NO: 1525692 - DNA, 15 bp, Homo sapiens
aactcagagcaagag

SEQ ID NO: 1525693 - DNA, 15 bp, Homo sapiens
actcagagcaagagc

SEQ ID NO: 1525694 - DNA, 15 bp, Homo sapiens
ctcagagcaagagct

SEQ ID NO: 1525695 - DNA, 15 bp, Homo sapiens
tcagagcaagagctg

SEQ ID NO: 1525696 - DNA, 15 bp, Homo sapiens
cagagcaagagctga

SEQ ID NO: 1525697 - DNA, 15 bp, Homo sapiens
agagcaagagctgac

SEQ ID NO: 1525698 - DNA, 15 bp, Homo sapiens
gagcaagagctgact

SEQ ID NO: 1525699 - DNA, 15 bp, Homo sapiens
agcaagagctgactc

SEQ ID NO: 1525700 - DNA, 15 bp, Homo sapiens
gcaagagctgactca

SEQ ID NO: 1525701 - DNA, 15 bp, Homo sapiens
caagagctgactcat

SEQ ID NO: 1525702 - DNA, 15 bp, Homo sapiens
aagagctgactcatc

SEQ ID NO: 1525703 - DNA, 15 bp, Homo sapiens
agagctgactcatca

SEQ ID NO: 1525704 - DNA, 15 bp, Homo sapiens
gagctgactcatcac

SEQ ID NO: 1525705 - DNA, 15 bp, Homo sapiens
agctgactcatcacc

SEQ ID NO: 1525706 - DNA, 15 bp, Homo sapiens
gctgactcatcacca

SEQ ID NO: 1525707 - DNA, 15 bp, Homo sapiens
ctgactcatcaccaa

SEQ ID NO: 1525708 - DNA, 15 bp, Homo sapiens
tgactcatcaccaag

SEQ ID NO: 1525709 - DNA, 15 bp, Homo sapiens
gactcatcaccaagg

SEQ ID NO: 1525710 - DNA, 15 bp, Homo sapiens
actcatcaccaaggg

SEQ ID NO: 1525711 - DNA, 15 bp, Homo sapiens
ctcatcaccaagggg

SEQ ID NO: 1525712 - DNA, 15 bp, Homo sapiens
tcatcaccaagggga

SEQ ID NO: 1525713 - DNA, 15 bp, Homo sapiens
catcaccaaggggat

SEQ ID NO: 1525714 - DNA, 15 bp, Homo sapiens
atcaccaaggggatg

SEQ ID NO: 1525715 - DNA, 15 bp, Homo sapiens
tcaccaaggggatgg

SEQ ID NO: 1525716 - DNA, 15 bp, Homo sapiens
caccaaggggatggc

SEQ ID NO: 1525717 - DNA, 15 bp, Homo sapiens
accaaggggatggcc

SEQ ID NO: 1525718 - DNA, 15 bp, Homo sapiens
ccaaggggatggccc

SEQ ID NO: 1525719 - DNA, 15 bp, Homo sapiens
caaggggatggccca

SEQ ID NO: 1525720 - DNA, 15 bp, Homo sapiens
aaggggatggcccaa

SEQ ID NO: 1525721 - DNA, 15 bp, Homo sapiens
aggggatggcccaag

SEQ ID NO: 1525722 - DNA, 15 bp, Homo sapiens
ggggatggcccaagc

SEQ ID NO: 1525723 - DNA, 15 bp, Homo sapiens
gggatggcccaagcc

SEQ ID NO: 1525724 - DNA, 15 bp, Homo sapiens
ggatggcccaagcca

SEQ ID NO: 1525725 - DNA, 15 bp, Homo sapiens
gatggcccaagccat

SEQ ID NO: 1525726 - DNA, 15 bp, Homo sapiens
atggcccaagccatt

SEQ ID NO: 1525727 - DNA, 15 bp, Homo sapiens
tggcccaagccattc

SEQ ID NO: 1525728 - DNA, 15 bp, Homo sapiens
ggcccaagccattca

SEQ ID NO: 1525729 - DNA, 15 bp, Homo sapiens
gcccaagccattcat

SEQ ID NO: 1525730 - DNA, 15 bp, Homo sapiens
cccaagccattcatg

SEQ ID NO: 1525731 - DNA, 15 bp, Homo sapiens
ccaagccattcatga

SEQ ID NO: 1525732 - DNA, 15 bp, Homo sapiens
caagccattcatgag

SEQ ID NO: 1525733 - DNA, 15 bp, Homo sapiens
aagccattcatgagg

SEQ ID NO: 1525734 - DNA, 15 bp, Homo sapiens
agccattcatgaggg

SEQ ID NO: 1525735 - DNA, 15 bp, Homo sapiens
gccattcatgaggga

SEQ ID NO: 1525736 - DNA, 15 bp, Homo sapiens
ccattcatgagggat

SEQ ID NO: 1525737 - DNA, 15 bp, Homo sapiens
cattcatgagggatc

SEQ ID NO: 1525738 - DNA, 15 bp, Homo sapiens
attcatgagggatcc

SEQ ID NO: 1525739 - DNA, 15 bp, Homo sapiens
ttcatgagggatcca

SEQ ID NO: 1525740 - DNA, 15 bp, Homo sapiens
tcatgagggatccac

SEQ ID NO: 1525741 - DNA, 15 bp, Homo sapiens
catgagggatccacc

SEQ ID NO: 1525742 - DNA, 15 bp, Homo sapiens
atgagggatccaccc

SEQ ID NO: 1525743 - DNA, 15 bp, Homo sapiens
tgagggatccacccc

SEQ ID NO: 1525744 - DNA, 15 bp, Homo sapiens
gagggatccaccccc

SEQ ID NO: 1525745 - DNA, 15 bp, Homo sapiens
agggatccaccccca

SEQ ID NO: 1525746 - DNA, 15 bp, Homo sapiens
gggatccacccccat

SEQ ID NO: 1525747 - DNA, 15 bp, Homo sapiens
ggatccacccccatg

SEQ ID NO: 1525748 - DNA, 15 bp, Homo sapiens
gatccacccccatga

SEQ ID NO: 1525749 - DNA, 15 bp, Homo sapiens
atccacccccatgac

SEQ ID NO: 1525750 - DNA, 15 bp, Homo sapiens
tccacccccatgact

SEQ ID NO: 1525751 - DNA, 15 bp, Homo sapiens
ccacccccatgactc

SEQ ID NO: 1525752 - DNA, 15 bp, Homo sapiens
cacccccatgactca

SEQ ID NO: 1525753 - DNA, 15 bp, Homo sapiens
acccccatgactcag

SEQ ID NO: 1525754 - DNA, 15 bp, Homo sapiens
cccccatgactcaga

SEQ ID NO: 1525755 - DNA, 15 bp, Homo sapiens
ccccatgactcagac

SEQ ID NO: 1525756 - DNA, 15 bp, Homo sapiens
cccatgactcagaca

SEQ ID NO: 1525757 - DNA, 15 bp, Homo sapiens
ccatgactcagacac

SEQ ID NO: 1525758 - DNA, 15 bp, Homo sapiens
catgactcagacacc

SEQ ID NO: 1525759 - DNA, 15 bp, Homo sapiens
atgactcagacacct

SEQ ID NO: 1525760 - DNA, 15 bp, Homo sapiens
tgactcagacacctc

SEQ ID NO: 1525761 - DNA, 15 bp, Homo sapiens
gactcagacacctcc

SEQ ID NO: 1525762 - DNA, 15 bp, Homo sapiens
actcagacacctccc

SEQ ID NO: 1525763 - DNA, 15 bp, Homo sapiens
ctcagacacctccca

SEQ ID NO: 1525764 - DNA, 15 bp, Homo sapiens
tcagacacctcccac

SEQ ID NO: 1525765 - DNA, 15 bp, Homo sapiens
cagacacctcccacc

SEQ ID NO: 1525766 - DNA, 15 bp, Homo sapiens
agacacctcccacca

SEQ ID NO: 1525767 - DNA, 15 bp, Homo sapiens
gacacctcccaccag

SEQ ID NO: 1525768 - DNA, 15 bp, Homo sapiens
acctcccaccaggcc

SEQ ID NO: 1525769 - DNA, 15 bp, Homo sapiens
cctcccaccaggccc

SEQ ID NO: 1525770 - DNA, 15 bp, Homo sapiens
ctcccaccaggcccc

SEQ ID NO: 1525771 - DNA, 15 bp, Homo sapiens
tcccaccaggcccca

SEQ ID NO: 1525772 - DNA, 15 bp, Homo sapiens
cccaccaggccccac

SEQ ID NO: 1525773 - DNA, 15 bp, Homo sapiens
ccaccaggccccacc

SEQ ID NO: 1525774 - DNA, 15 bp, Homo sapiens
caccaggccccacct

SEQ ID NO: 1525775 - DNA, 15 bp, Homo sapiens
accaggccccacctc

SEQ ID NO: 1525776 - DNA, 15 bp, Homo sapiens
ccaggccccacctcc

SEQ ID NO: 1525777 - DNA, 15 bp, Homo sapiens
caggccccacctcca

SEQ ID NO: 1525778 - DNA, 15 bp, Homo sapiens
aggccccacctccaa

SEQ ID NO: 1525779 - DNA, 15 bp, Homo sapiens
ggccccacctccaat

SEQ ID NO: 1525780 - DNA, 15 bp, Homo sapiens
gccccacctccaata

SEQ ID NO: 1525781 - DNA, 15 bp, Homo sapiens
ccccacctccaatat

SEQ ID NO: 1525782 - DNA, 15 bp, Homo sapiens
cccacctccaatatt

SEQ ID NO: 1525783 - DNA, 15 bp, Homo sapiens
ccacctccaatattg

SEQ ID NO: 1525784 - DNA, 15 bp, Homo sapiens
cacctccaatattgg

SEQ ID NO: 1525785 - DNA, 15 bp, Homo sapiens
acctccaatattggg

SEQ ID NO: 1525786 - DNA, 15 bp, Homo sapiens
cctccaatattgggg

SEQ ID NO: 1525787 - DNA, 15 bp, Homo sapiens
ctccaatattgggga

SEQ ID NO: 1525788 - DNA, 15 bp, Homo sapiens
tccaatattggggat

SEQ ID NO: 1525789 - DNA, 15 bp, Homo sapiens
ccaatattggggatt

SEQ ID NO: 1525790 - DNA, 15 bp, Homo sapiens
caatattggggatta

SEQ ID NO: 1525791 - DNA, 15 bp, Homo sapiens
aatattggggattac

SEQ ID NO: 1525792 - DNA, 15 bp, Homo sapiens
atattggggattaca

SEQ ID NO: 1525793 - DNA, 15 bp, Homo sapiens
tattggggattacaa

SEQ ID NO: 1525794 - DNA, 15 bp, Homo sapiens
attggggattacaat

SEQ ID NO: 1525795 - DNA, 15 bp, Homo sapiens
ttggggattacaatt

SEQ ID NO: 1525796 - DNA, 15 bp, Homo sapiens
tggggattacaattc

SEQ ID NO: 1525797 - DNA, 15 bp, Homo sapiens
ggggattacaattca

SEQ ID NO: 1525798 - DNA, 15 bp, Homo sapiens
gggattacaattcag

SEQ ID NO: 1525799 - DNA, 15 bp, Homo sapiens
ggattacaattcaga

SEQ ID NO: 1525800 - DNA, 15 bp, Homo sapiens
gattacaattcagat

SEQ ID NO: 1525801 - DNA, 15 bp, Homo sapiens
attacaattcagatg

SEQ ID NO: 1525802 - DNA, 15 bp, Homo sapiens
ttacaattcagatga

SEQ ID NO: 1525803 - DNA, 15 bp, Homo sapiens
tacaattcagatgag

SEQ ID NO: 1525804 - DNA, 15 bp, Homo sapiens
acaattcagatgaga

SEQ ID NO: 1525805 - DNA, 15 bp, Homo sapiens
caattcagatgagat

SEQ ID NO: 1525806 - DNA, 15 bp, Homo sapiens
aattcagatgagatt

SEQ ID NO: 1525807 - DNA, 15 bp, Homo sapiens
attcagatgagattt

SEQ ID NO: 1525808 - DNA, 15 bp, Homo sapiens
ttcagatgagatttg

SEQ ID NO: 1525809 - DNA, 15 bp, Homo sapiens
tcagatgagatttgg

SEQ ID NO: 1525810 - DNA, 15 bp, Homo sapiens
cagatgagatttggt

SEQ ID NO: 1525811 - DNA, 15 bp, Homo sapiens
agatgagatttggtg

SEQ ID NO: 1525812 - DNA, 15 bp, Homo sapiens
gatgagatttggtgg

SEQ ID NO: 1525813 - DNA, 15 bp, Homo sapiens
atgagatttggtggg

SEQ ID NO: 1525814 - DNA, 15 bp, Homo sapiens
tgagatttggtgggg

SEQ ID NO: 1525815 - DNA, 15 bp, Homo sapiens
gagatttggtgggga

SEQ ID NO: 1525816 - DNA, 15 bp, Homo sapiens
agatttggtggggac

SEQ ID NO: 1525817 - DNA, 15 bp, Homo sapiens
gatttggtggggaca

SEQ ID NO: 1525818 - DNA, 15 bp, Homo sapiens
atttggtggggacac

SEQ ID NO: 1525819 - DNA, 15 bp, Homo sapiens
ttggtggggacacat

SEQ ID NO: 1525820 - DNA, 15 bp, Homo sapiens
tggtggggacacata

SEQ ID NO: 1525821 - DNA, 15 bp, Homo sapiens
ggtggggacacatat

SEQ ID NO: 1525822 - DNA, 15 bp, Homo sapiens
gtggggacacatatc

SEQ ID NO: 1525823 - DNA, 15 bp, Homo sapiens
tggggacacatatcc

SEQ ID NO: 1525824 - DNA, 15 bp, Homo sapiens
ggggacacatatcca

SEQ ID NO: 1525825 - DNA, 15 bp, Homo sapiens
gggacacatatccaa

SEQ ID NO: 1525826 - DNA, 15 bp, Homo sapiens
ggacacatatccaaa

SEQ ID NO: 1525827 - DNA, 15 bp, Homo sapiens
gacacatatccaaac

SEQ ID NO: 1525828 - DNA, 15 bp, Homo sapiens
acacatatccaaacc

SEQ ID NO: 1525829 - DNA, 15 bp, Homo sapiens
cacatatccaaacca

SEQ ID NO: 1525830 - DNA, 15 bp, Homo sapiens
acatatccaaaccat

SEQ ID NO: 1525831 - DNA, 15 bp, Homo sapiens
catatccaaaccata

SEQ ID NO: 1525832 - DNA, 15 bp, Homo sapiens
atatccaaaccatat

SEQ ID NO: 1525833 - DNA, 15 bp, Homo sapiens
tatccaaaccatatc

SEQ ID NO: 1525834 - DNA, 15 bp, Homo sapiens
atccaaaccatatca

SEQ ID NO: 1525835 - DNA, 15 bp, Homo sapiens
tccaaaccatatcag

SEQ ID NO: 1525836 - DNA, 15 bp, Homo sapiens
ccaaaccatatcagt

SEQ ID NO: 1525837 - DNA, 15 bp, Homo sapiens
caaaccatatcagtt

SEQ ID NO: 1525838 - DNA, 15 bp, Homo sapiens
aaaccatatcagtta

SEQ ID NO: 1525839 - DNA, 15 bp, Homo sapiens
aaccatatcagttat

SEQ ID NO: 1525840 - DNA, 15 bp, Homo sapiens
accatatcagttatc

SEQ ID NO: 1525841 - DNA, 15 bp, Homo sapiens
ccatatcagttatca

SEQ ID NO: 1525842 - DNA, 15 bp, Homo sapiens
catatcagttatcag

SEQ ID NO: 1525843 - DNA, 15 bp, Homo sapiens
atatcagttatcagt

SEQ ID NO: 1525844 - DNA, 15 bp, Homo sapiens
tatcagttatcagta

SEQ ID NO: 1525845 - DNA, 15 bp, Homo sapiens
atcagttatcagtag

SEQ ID NO: 1525846 - DNA, 15 bp, Homo sapiens
tcagttatcagtagc

SEQ ID NO: 1525847 - DNA, 15 bp, Homo sapiens
cagttatcagtagcc

SEQ ID NO: 1525848 - DNA, 15 bp, Homo sapiens
agttatcagtagcca

SEQ ID NO: 1525849 - DNA, 15 bp, Homo sapiens
gttatcagtagccat

SEQ ID NO: 1525850 - DNA, 15 bp, Homo sapiens
ttatcagtagccata

SEQ ID NO: 1525851 - DNA, 15 bp, Homo sapiens
tatcagtagccatac

SEQ ID NO: 1525852 - DNA, 15 bp, Homo sapiens
atcagtagccatact

SEQ ID NO: 1525853 - DNA, 15 bp, Homo sapiens
tcagtagccatactg

SEQ ID NO: 1525854 - DNA, 15 bp, Homo sapiens
cagtagccatactgg

SEQ ID NO: 1525855 - DNA, 15 bp, Homo sapiens
agtagccatactgga

SEQ ID NO: 1525856 - DNA, 15 bp, Homo sapiens
gtagccatactggat

SEQ ID NO: 1525857 - DNA, 15 bp, Homo sapiens
tagccatactggatg

SEQ ID NO: 1525858 - DNA, 15 bp, Homo sapiens
agccatactggatga

SEQ ID NO: 1525859 - DNA, 15 bp, Homo sapiens
gccatactggatgaa

SEQ ID NO: 1525860 - DNA, 15 bp, Homo sapiens
ccatactggatgaat

SEQ ID NO: 1525861 - DNA, 15 bp, Homo sapiens
catactggatgaatg

SEQ ID NO: 1525862 - DNA, 15 bp, Homo sapiens
atactggatgaatgc

SEQ ID NO: 1525863 - DNA, 15 bp, Homo sapiens
tactggatgaatgcc

SEQ ID NO: 1525864 - DNA, 15 bp, Homo sapiens
actggatgaatgcca

SEQ ID NO: 1525865 - DNA, 15 bp, Homo sapiens
ctggatgaatgccag

SEQ ID NO: 1525866 - DNA, 15 bp, Homo sapiens
tggatgaatgccagg

SEQ ID NO: 1525867 - DNA, 15 bp, Homo sapiens
ggatgaatgccagga

SEQ ID NO: 1525868 - DNA, 15 bp, Homo sapiens
gatgaatgccaggaa

SEQ ID NO: 1525869 - DNA, 15 bp, Homo sapiens
atgaatgccaggaac

SEQ ID NO: 1525870 - DNA, 15 bp, Homo sapiens
tgaatgccaggaact

SEQ ID NO: 1525871 - DNA, 15 bp, Homo sapiens
gaatgccaggaactt

SEQ ID NO: 1525872 - DNA, 15 bp, Homo sapiens
aatgccaggaactta

SEQ ID NO: 1525873 - DNA, 15 bp, Homo sapiens
atgccaggaacttag

SEQ ID NO: 1525874 - DNA, 15 bp, Homo sapiens
tgccaggaacttaga

SEQ ID NO: 1525875 - DNA, 15 bp, Homo sapiens
gccaggaacttagaa

SEQ ID NO: 1525876 - DNA, 15 bp, Homo sapiens
ccaggaacttagaat

SEQ ID NO: 1525877 - DNA, 15 bp, Homo sapiens
caggaacttagaatt

SEQ ID NO: 1525878 - DNA, 15 bp, Homo sapiens
aggaacttagaatta

SEQ ID NO: 1525879 - DNA, 15 bp, Homo sapiens
ggaacttagaattag

SEQ ID NO: 1525880 - DNA, 15 bp, Homo sapiens
gaacttagaattagg

SEQ ID NO: 1525881 - DNA, 15 bp, Homo sapiens
aacttagaattagga

SEQ ID NO: 1525882 - DNA, 15 bp, Homo sapiens
acttagaattaggac

SEQ ID NO: 1525883 - DNA, 15 bp, Homo sapiens
cttagaattaggaca

SEQ ID NO: 1525884 - DNA, 15 bp, Homo sapiens
ttagaattaggacac

SEQ ID NO: 1525885 - DNA, 15 bp, Homo sapiens
tagaattaggacaca

SEQ ID NO: 1525886 - DNA, 15 bp, Homo sapiens
agaattaggacacat

SEQ ID NO: 1525887 - DNA, 15 bp, Homo sapiens
gaattaggacacatg

SEQ ID NO: 1525888 - DNA, 15 bp, Homo sapiens
aattaggacacatgg

SEQ ID NO: 1525889 - DNA, 15 bp, Homo sapiens
attaggacacatggt

SEQ ID NO: 1525890 - DNA, 15 bp, Homo sapiens
ttaggacacatggtc

SEQ ID NO: 1525891 - DNA, 15 bp, Homo sapiens
taggacacatggtca

SEQ ID NO: 1525892 - DNA, 15 bp, Homo sapiens
aggacacatggtcat

SEQ ID NO: 1525893 - DNA, 15 bp, Homo sapiens
ggacacatggtcatt

SEQ ID NO: 1525894 - DNA, 15 bp, Homo sapiens
gacacatggtcattt

SEQ ID NO: 1525895 - DNA, 15 bp, Homo sapiens
acacatggtcattta

SEQ ID NO: 1525896 - DNA, 15 bp, Homo sapiens
cacatggtcatttag

SEQ ID NO: 1525897 - DNA, 15 bp, Homo sapiens
acatggtcatttagg

SEQ ID NO: 1525898 - DNA, 15 bp, Homo sapiens
catggtcatttaggc

SEQ ID NO: 1525899 - DNA, 15 bp, Homo sapiens
atggtcatttaggca

SEQ ID NO: 1525900 - DNA, 15 bp, Homo sapiens
tggtcatttaggcaa

SEQ ID NO: 1525901 - DNA, 15 bp, Homo sapiens
ggtcatttaggcaag

SEQ ID NO: 1525902 - DNA, 15 bp, Homo sapiens
gtcatttaggcaagt

SEQ ID NO: 1525903 - DNA, 15 bp, Homo sapiens
tcatttaggcaagtg

SEQ ID NO: 1525904 - DNA, 15 bp, Homo sapiens
catttaggcaagtgg

SEQ ID NO: 1525905 - DNA, 15 bp, Homo sapiens
atttaggcaagtggc

SEQ ID NO: 1525906 - DNA, 15 bp, Homo sapiens
tttaggcaagtggct

SEQ ID NO: 1525907 - DNA, 15 bp, Homo sapiens
ttaggcaagtggctt

SEQ ID NO: 1525908 - DNA, 15 bp, Homo sapiens
taggcaagtggcttg

SEQ ID NO: 1525909 - DNA, 15 bp, Homo sapiens
aggcaagtggcttgt

SEQ ID NO: 1525910 - DNA, 15 bp, Homo sapiens
ggcaagtggcttgtc

SEQ ID NO: 1525911 - DNA, 15 bp, Homo sapiens
gcaagtggcttgtcc

SEQ ID NO: 1525912 - DNA, 15 bp, Homo sapiens
caagtggcttgtcct

SEQ ID NO: 1525913 - DNA, 15 bp, Homo sapiens
aagtggcttgtcctg

SEQ ID NO: 1525914 - DNA, 15 bp, Homo sapiens
agtggcttgtcctgt

SEQ ID NO: 1525915 - DNA, 15 bp, Homo sapiens
gtggcttgtcctgtc

SEQ ID NO: 1525916 - DNA, 15 bp, Homo sapiens
tggcttgtcctgtca

SEQ ID NO: 1525917 - DNA, 15 bp, Homo sapiens
ggcttgtcctgtcaa

SEQ ID NO: 1525918 - DNA, 15 bp, Homo sapiens
gcttgtcctgtcaat

SEQ ID NO: 1525919 - DNA, 15 bp, Homo sapiens
cttgtcctgtcaatg

SEQ ID NO: 1525920 - DNA, 15 bp, Homo sapiens
ttgtcctgtcaatgg

SEQ ID NO: 1525921 - DNA, 15 bp, Homo sapiens
tgtcctgtcaatggt

SEQ ID NO: 1525922 - DNA, 15 bp, Homo sapiens
gtcctgtcaatggta

SEQ ID NO: 1525923 - DNA, 15 bp, Homo sapiens
tcctgtcaatggtac

SEQ ID NO: 1525924 - DNA, 15 bp, Homo sapiens
cctgtcaatggtacc

SEQ ID NO: 1525925 - DNA, 15 bp, Homo sapiens
ctgtcaatggtaccc

SEQ ID NO: 1525926 - DNA, 15 bp, Homo sapiens
tgtcaatggtaccct

SEQ ID NO: 1525927 - DNA, 15 bp, Homo sapiens
gtcaatggtaccctg

SEQ ID NO: 1525928 - DNA, 15 bp, Homo sapiens
tcaatggtaccctga

SEQ ID NO: 1525929 - DNA, 15 bp, Homo sapiens
caatggtaccctgat

SEQ ID NO: 1525930 - DNA, 15 bp, Homo sapiens
aatggtaccctgata

SEQ ID NO: 1525931 - DNA, 15 bp, Homo sapiens
atggtaccctgatag

SEQ ID NO: 1525932 - DNA, 15 bp, Homo sapiens
tggtaccctgatagt

SEQ ID NO: 1525933 - DNA, 15 bp, Homo sapiens
ggtaccctgatagtc

SEQ ID NO: 1525934 - DNA, 15 bp, Homo sapiens
gtaccctgatagtcg

SEQ ID NO: 1525935 - DNA, 15 bp, Homo sapiens
taccctgatagtcgt

SEQ ID NO: 1525936 - DNA, 15 bp, Homo sapiens
accctgatagtcgtg

SEQ ID NO: 1525937 - DNA, 15 bp, Homo sapiens
ccctgatagtcgtgg

SEQ ID NO: 1525938 - DNA, 15 bp, Homo sapiens
cctgatagtcgtggg

SEQ ID NO: 1525939 - DNA, 15 bp, Homo sapiens
ctgatagtcgtgggg

SEQ ID NO: 1525940 - DNA, 15 bp, Homo sapiens
tgatagtcgtggggt

SEQ ID NO: 1525941 - DNA, 15 bp, Homo sapiens
gatagtcgtggggtt

SEQ ID NO: 1525942 - DNA, 15 bp, Homo sapiens
atagtcgtggggttg

SEQ ID NO: 1525943 - DNA, 15 bp, Homo sapiens
tagtcgtggggttgc

SEQ ID NO: 1525944 - DNA, 15 bp, Homo sapiens
agtcgtggggttgcc

SEQ ID NO: 1525945 - DNA, 15 bp, Homo sapiens
gtcgtggggttgccc

SEQ ID NO: 1525946 - DNA, 15 bp, Homo sapiens
tcgtggggttgcccc

SEQ ID NO: 1525947 - DNA, 15 bp, Homo sapiens
cgtggggttgccccg

SEQ ID NO: 1525948 - DNA, 15 bp, Homo sapiens
gtggggttgccccgt

SEQ ID NO: 1525949 - DNA, 15 bp, Homo sapiens
tggggttgccccgta

SEQ ID NO: 1525950 - DNA, 15 bp, Homo sapiens
ggggttgccccgtac

SEQ ID NO: 1525951 - DNA, 15 bp, Homo sapiens
gggttgccccgtaca

SEQ ID NO: 1525952 - DNA, 15 bp, Homo sapiens
ggttgccccgtacaa

SEQ ID NO: 1525953 - DNA, 15 bp, Homo sapiens
gttgccccgtacaaa

SEQ ID NO: 1525954 - DNA, 15 bp, Homo sapiens
ttgccccgtacaaaa

SEQ ID NO: 1525955 - DNA, 15 bp, Homo sapiens
tgccccgtacaaaaa

SEQ ID NO: 1525956 - DNA, 15 bp, Homo sapiens
gccccgtacaaaaag

SEQ ID NO: 1525957 - DNA, 15 bp, Homo sapiens
ccccgtacaaaaagc

SEQ ID NO: 1525958 - DNA, 15 bp, Homo sapiens
cccgtacaaaaagcg

SEQ ID NO: 1525959 - DNA, 15 bp, Homo sapiens
ccgtacaaaaagcga

SEQ ID NO: 1525960 - DNA, 15 bp, Homo sapiens
cgtacaaaaagcgag

SEQ ID NO: 1525961 - DNA, 15 bp, Homo sapiens
gtacaaaaagcgaga

SEQ ID NO: 1525962 - DNA, 15 bp, Homo sapiens
tacaaaaagcgagag

SEQ ID NO: 1525963 - DNA, 15 bp, Homo sapiens
acaaaaagcgagagg

SEQ ID NO: 1525964 - DNA, 15 bp, Homo sapiens
caaaaagcgagagga

SEQ ID NO: 1525965 - DNA, 15 bp, Homo sapiens
aaaaagcgagaggaa

SEQ ID NO: 1525966 - DNA, 15 bp, Homo sapiens
aaaagcgagaggaag

SEQ ID NO: 1525967 - DNA, 15 bp, Homo sapiens
aaagcgagaggaagt

SEQ ID NO: 1525968 - DNA, 15 bp, Homo sapiens
aagcgagaggaagtc

SEQ ID NO: 1525969 - DNA, 15 bp, Homo sapiens
agcgagaggaagtct

SEQ ID NO: 1525970 - DNA, 15 bp, Homo sapiens
gcgagaggaagtcta

SEQ ID NO: 1525971 - DNA, 15 bp, Homo sapiens
cgagaggaagtctac

SEQ ID NO: 1525972 - DNA, 15 bp, Homo sapiens
gagaggaagtctaca

SEQ ID NO: 1525973 - DNA, 15 bp, Homo sapiens
agaggaagtctacag

SEQ ID NO: 1525974 - DNA, 15 bp, Homo sapiens
aggaagtctacagag

SEQ ID NO: 1525975 - DNA, 15 bp, Homo sapiens
ggaagtctacagagc

SEQ ID NO: 1525976 - DNA, 15 bp, Homo sapiens
gaagtctacagagct

SEQ ID NO: 1525977 - DNA, 15 bp, Homo sapiens
aagtctacagagctg

SEQ ID NO: 1525978 - DNA, 15 bp, Homo sapiens
agtctacagagctgt

SEQ ID NO: 1525979 - DNA, 15 bp, Homo sapiens
gtctacagagctgtc

SEQ ID NO: 1525980 - DNA, 15 bp, Homo sapiens
tctacagagctgtca

SEQ ID NO: 1525981 - DNA, 15 bp, Homo sapiens
ctacagagctgtcaa

SEQ ID NO: 1525982 - DNA, 15 bp, Homo sapiens
tacagagctgtcaaa

SEQ ID NO: 1525983 - DNA, 15 bp, Homo sapiens
acagagctgtcaaag

SEQ ID NO: 1525984 - DNA, 15 bp, Homo sapiens
cagagctgtcaaaga

SEQ ID NO: 1525985 - DNA, 15 bp, Homo sapiens
agagctgtcaaagag

SEQ ID NO: 1525986 - DNA, 15 bp, Homo sapiens
gagctgtcaaagagg

SEQ ID NO: 1525987 - DNA, 15 bp, Homo sapiens
agctgtcaaagaggg

SEQ ID NO: 1525988 - DNA, 15 bp, Homo sapiens
gctgtcaaagagggg

SEQ ID NO: 1525989 - DNA, 15 bp, Homo sapiens
ctgtcaaagaggggc

SEQ ID NO: 1525990 - DNA, 15 bp, Homo sapiens
tgtcaaagaggggca

SEQ ID NO: 1525991 - DNA, 15 bp, Homo sapiens
gtcaaagaggggcag

SEQ ID NO: 1525992 - DNA, 15 bp, Homo sapiens
tcaaagaggggcagg

SEQ ID NO: 1525993 - DNA, 15 bp, Homo sapiens
caaagaggggcaggt

SEQ ID NO: 1525994 - DNA, 15 bp, Homo sapiens
aaagaggggcaggtg

SEQ ID NO: 1525995 - DNA, 15 bp, Homo sapiens
aagaggggcaggtgg

SEQ ID NO: 1525996 - DNA, 15 bp, Homo sapiens
agaggggcaggtgga

SEQ ID NO: 1525997 - DNA, 15 bp, Homo sapiens
gaggggcaggtggaa

SEQ ID NO: 1525998 - DNA, 15 bp, Homo sapiens
aggggcaggtggaaa

SEQ ID NO: 1525999 - DNA, 15 bp, Homo sapiens
ggggcaggtggaaag

SEQ ID NO: 1526000 - DNA, 15 bp, Homo sapiens
gggcaggtggaaagg

SEQ ID NO: 1526001 - DNA, 15 bp, Homo sapiens
ggcaggtggaaaggc

SEQ ID NO: 1526002 - DNA, 15 bp, Homo sapiens
gcaggtggaaaggcc

SEQ ID NO: 1526003 - DNA, 15 bp, Homo sapiens
caggtggaaaggcct

SEQ ID NO: 1526004 - DNA, 15 bp, Homo sapiens
aggtggaaaggcctg

SEQ ID NO: 1526005 - DNA, 15 bp, Homo sapiens
ggtggaaaggcctgc

SEQ ID NO: 1526006 - DNA, 15 bp, Homo sapiens
gtggaaaggcctgca

SEQ ID NO: 1526007 - DNA, 15 bp, Homo sapiens
tggaaaggcctgcag

SEQ ID NO: 1526008 - DNA, 15 bp, Homo sapiens
ggaaaggcctgcaga

SEQ ID NO: 1526009 - DNA, 15 bp, Homo sapiens
gaaaggcctgcagag

SEQ ID NO: 1526010 - DNA, 15 bp, Homo sapiens
aaaggcctgcagagg

SEQ ID NO: 1526011 - DNA, 15 bp, Homo sapiens
aaggcctgcagagga

SEQ ID NO: 1526012 - DNA, 15 bp, Homo sapiens
aggcctgcagaggag

SEQ ID NO: 1526013 - DNA, 15 bp, Homo sapiens
ggcctgcagaggagt

SEQ ID NO: 1526014 - DNA, 15 bp, Homo sapiens
gcctgcagaggagtc

SEQ ID NO: 1526015 - DNA, 15 bp, Homo sapiens
cctgcagaggagtcc

SEQ ID NO: 1526016 - DNA, 15 bp, Homo sapiens
ctgcagaggagtccc

SEQ ID NO: 1526017 - DNA, 15 bp, Homo sapiens
tgcagaggagtcccc

SEQ ID NO: 1526018 - DNA, 15 bp, Homo sapiens
gcagaggagtcccct

SEQ ID NO: 1526019 - DNA, 15 bp, Homo sapiens
cagaggagtcccctg

SEQ ID NO: 1526020 - DNA, 15 bp, Homo sapiens
agaggagtcccctgc

SEQ ID NO: 1526021 - DNA, 15 bp, Homo sapiens
gaggagtcccctgct

SEQ ID NO: 1526022 - DNA, 15 bp, Homo sapiens
aggagtcccctgctc

SEQ ID NO: 1526023 - DNA, 15 bp, Homo sapiens
ggagtcccctgctcc

SEQ ID NO: 1526024 - DNA, 15 bp, Homo sapiens
gagtcccctgctcca

SEQ ID NO: 1526025 - DNA, 15 bp, Homo sapiens
agtcccctgctccac

SEQ ID NO: 1526026 - DNA, 15 bp, Homo sapiens
gtcccctgctccaca

SEQ ID NO: 1526027 - DNA, 15 bp, Homo sapiens
tcccctgctccacaa

SEQ ID NO: 1526028 - DNA, 15 bp, Homo sapiens
cccctgctccacaac

SEQ ID NO: 1526029 - DNA, 15 bp, Homo sapiens
ccctgctccacaacc

SEQ ID NO: 1526030 - DNA, 15 bp, Homo sapiens
cctgctccacaacca

SEQ ID NO: 1526031 - DNA, 15 bp, Homo sapiens
ctgctccacaaccag

SEQ ID NO: 1526032 - DNA, 15 bp, Homo sapiens
tgctccacaaccagg

SEQ ID NO: 1526033 - DNA, 15 bp, Homo sapiens
gctccacaaccaggc

SEQ ID NO: 1526034 - DNA, 15 bp, Homo sapiens
ctccacaaccaggcg

SEQ ID NO: 1526035 - DNA, 15 bp, Homo sapiens
tccacaaccaggcgt

SEQ ID NO: 1526036 - DNA, 15 bp, Homo sapiens
ccacaaccaggcgtg

SEQ ID NO: 1526037 - DNA, 15 bp, Homo sapiens
cacaaccaggcgtgc

SEQ ID NO: 1526038 - DNA, 15 bp, Homo sapiens
acaaccaggcgtgca

SEQ ID NO: 1526039 - DNA, 15 bp, Homo sapiens
caaccaggcgtgcac

SEQ ID NO: 1526040 - DNA, 15 bp, Homo sapiens
aaccaggcgtgcacc

SEQ ID NO: 1526041 - DNA, 15 bp, Homo sapiens
accaggcgtgcacct

SEQ ID NO: 1526042 - DNA, 15 bp, Homo sapiens
ccaggcgtgcacctc

SEQ ID NO: 1526043 - DNA, 15 bp, Homo sapiens
caggcgtgcacctcc

SEQ ID NO: 1526044 - DNA, 15 bp, Homo sapiens
aggcgtgcacctccc

SEQ ID NO: 1526045 - DNA, 15 bp, Homo sapiens
ggcgtgcacctccca

SEQ ID NO: 1526046 - DNA, 15 bp, Homo sapiens
gcgtgcacctcccac

SEQ ID NO: 1526047 - DNA, 15 bp, Homo sapiens
cgtgcacctcccaca

SEQ ID NO: 1526048 - DNA, 15 bp, Homo sapiens
gtgcacctcccacat

SEQ ID NO: 1526049 - DNA, 15 bp, Homo sapiens
tgcacctcccacatc

SEQ ID NO: 1526050 - DNA, 15 bp, Homo sapiens
gcacctcccacatcc

SEQ ID NO: 1526051 - DNA, 15 bp, Homo sapiens
cacctcccacatcct

SEQ ID NO: 1526052 - DNA, 15 bp, Homo sapiens
acctcccacatcctc

SEQ ID NO: 1526053 - DNA, 15 bp, Homo sapiens
cctcccacatcctcg

SEQ ID NO: 1526054 - DNA, 15 bp, Homo sapiens
ctcccacatcctcgg

SEQ ID NO: 1526055 - DNA, 15 bp, Homo sapiens
tcccacatcctcggg

SEQ ID NO: 1526056 - DNA, 15 bp, Homo sapiens
cccacatcctcgggg

SEQ ID NO: 1526057 - DNA, 15 bp, Homo sapiens
ccacatcctcggggc

SEQ ID NO: 1526058 - DNA, 15 bp, Homo sapiens
cacatcctcggggct

SEQ ID NO: 1526059 - DNA, 15 bp, Homo sapiens
acatcctcggggctg

SEQ ID NO: 1526060 - DNA, 15 bp, Homo sapiens
catcctcggggctgt

SEQ ID NO: 1526061 - DNA, 15 bp, Homo sapiens
atcctcggggctgta

SEQ ID NO: 1526062 - DNA, 15 bp, Homo sapiens
tcctcggggctgtag

SEQ ID NO: 1526063 - DNA, 15 bp, Homo sapiens
cctcggggctgtagg

SEQ ID NO: 1526064 - DNA, 15 bp, Homo sapiens
ctcggggctgtaggc

SEQ ID NO: 1526065 - DNA, 15 bp, Homo sapiens
tcggggctgtaggcc

SEQ ID NO: 1526066 - DNA, 15 bp, Homo sapiens
cggggctgtaggccc

SEQ ID NO: 1526067 - DNA, 15 bp, Homo sapiens
ggggctgtaggcccc

SEQ ID NO: 1526068 - DNA, 15 bp, Homo sapiens
gggctgtaggcccca

SEQ ID NO: 1526069 - DNA, 15 bp, Homo sapiens
ggctgtaggccccac

SEQ ID NO: 1526070 - DNA, 15 bp, Homo sapiens
gctgtaggccccaca

SEQ ID NO: 1526071 - DNA, 15 bp, Homo sapiens
ctgtaggccccacat

SEQ ID NO: 1526072 - DNA, 15 bp, Homo sapiens
tgtaggccccacatg

SEQ ID NO: 1526073 - DNA, 15 bp, Homo sapiens
gtaggccccacatga

SEQ ID NO: 1526074 - DNA, 15 bp, Homo sapiens
taggccccacatgag

SEQ ID NO: 1526075 - DNA, 15 bp, Homo sapiens
aggccccacatgaga

SEQ ID NO: 1526076 - DNA, 15 bp, Homo sapiens
ggccccacatgagag

SEQ ID NO: 1526077 - DNA, 15 bp, Homo sapiens
gccccacatgagagc

SEQ ID NO: 1526078 - DNA, 15 bp, Homo sapiens
ccccacatgagagca

SEQ ID NO: 1526079 - DNA, 15 bp, Homo sapiens
cccacatgagagcag

SEQ ID NO: 1526080 - DNA, 15 bp, Homo sapiens
ccacatgagagcaga

SEQ ID NO: 1526081 - DNA, 15 bp, Homo sapiens
cacatgagagcagaa

SEQ ID NO: 1526082 - DNA, 15 bp, Homo sapiens
acatgagagcagaaa

SEQ ID NO: 1526083 - DNA, 15 bp, Homo sapiens
catgagagcagaaag

SEQ ID NO: 1526084 - DNA, 15 bp, Homo sapiens
atgagagcagaaaga

SEQ ID NO: 1526085 - DNA, 15 bp, Homo sapiens
tgagagcagaaagaa

SEQ ID NO: 1526086 - DNA, 15 bp, Homo sapiens
gagagcagaaagaag

SEQ ID NO: 1526087 - DNA, 15 bp, Homo sapiens
agagcagaaagaagg

SEQ ID NO: 1526088 - DNA, 15 bp, Homo sapiens
gagcagaaagaagga

SEQ ID NO: 1526089 - DNA, 15 bp, Homo sapiens
agcagaaagaaggat

SEQ ID NO: 1526090 - DNA, 15 bp, Homo sapiens
gcagaaagaaggatg

SEQ ID NO: 1526091 - DNA, 15 bp, Homo sapiens
cagaaagaaggatgc

SEQ ID NO: 1526092 - DNA, 15 bp, Homo sapiens
agaaagaaggatgca

SEQ ID NO: 1526093 - DNA, 15 bp, Homo sapiens
gaaagaaggatgcag

SEQ ID NO: 1526094 - DNA, 15 bp, Homo sapiens
aaagaaggatgcaga

SEQ ID NO: 1526095 - DNA, 15 bp, Homo sapiens
aagaaggatgcagag

SEQ ID NO: 1526096 - DNA, 15 bp, Homo sapiens
agaaggatgcagagg

SEQ ID NO: 1526097 - DNA, 15 bp, Homo sapiens
gaaggatgcagagga

SEQ ID NO: 1526098 - DNA, 15 bp, Homo sapiens
aaggatgcagaggaa

SEQ ID NO: 1526099 - DNA, 15 bp, Homo sapiens
aggatgcagaggaag

SEQ ID NO: 1526100 - DNA, 15 bp, Homo sapiens
ggatgcagaggaagg

SEQ ID NO: 1526101 - DNA, 15 bp, Homo sapiens
gatgcagaggaaggc

SEQ ID NO: 1526102 - DNA, 15 bp, Homo sapiens
atgcagaggaaggcc

SEQ ID NO: 1526103 - DNA, 15 bp, Homo sapiens
tgcagaggaaggcca

SEQ ID NO: 1526104 - DNA, 15 bp, Homo sapiens
gcagaggaaggccaa

SEQ ID NO: 1526105 - DNA, 15 bp, Homo sapiens
cagaggaaggccaag

SEQ ID NO: 1526106 - DNA, 15 bp, Homo sapiens
agaggaaggccaaga

SEQ ID NO: 1526107 - DNA, 15 bp, Homo sapiens
gaggaaggccaagaa

SEQ ID NO: 1526108 - DNA, 15 bp, Homo sapiens
aggaaggccaagaac

SEQ ID NO: 1526109 - DNA, 15 bp, Homo sapiens
ggaaggccaagaaca

SEQ ID NO: 1526110 - DNA, 15 bp, Homo sapiens
gaaggccaagaacac

SEQ ID NO: 1526111 - DNA, 15 bp, Homo sapiens
aaggccaagaacaca

SEQ ID NO: 1526112 - DNA, 15 bp, Homo sapiens
aggccaagaacacaa

SEQ ID NO: 1526113 - DNA, 15 bp, Homo sapiens
ggccaagaacacaag

SEQ ID NO: 1526114 - DNA, 15 bp, Homo sapiens
gccaagaacacaagg

SEQ ID NO: 1526115 - DNA, 15 bp, Homo sapiens
ccaagaacacaaggt

SEQ ID NO: 1526116 - DNA, 15 bp, Homo sapiens
caagaacacaaggtg

SEQ ID NO: 1526117 - DNA, 15 bp, Homo sapiens
aagaacacaaggtgt

SEQ ID NO: 1526118 - DNA, 15 bp, Homo sapiens
agaacacaaggtgtg

SEQ ID NO: 1526119 - DNA, 15 bp, Homo sapiens
gaacacaaggtgtgc

SEQ ID NO: 1526120 - DNA, 15 bp, Homo sapiens
aacacaaggtgtgcc

SEQ ID NO: 1526121 - DNA, 15 bp, Homo sapiens
acacaaggtgtgccc

SEQ ID NO: 1526122 - DNA, 15 bp, Homo sapiens
cacaaggtgtgccct

SEQ ID NO: 1526123 - DNA, 15 bp, Homo sapiens
acaaggtgtgccctt

SEQ ID NO: 1526124 - DNA, 15 bp, Homo sapiens
caaggtgtgcccttg

SEQ ID NO: 1526125 - DNA, 15 bp, Homo sapiens
aaggtgtgcccttgg

SEQ ID NO: 1526126 - DNA, 15 bp, Homo sapiens
aggtgtgcccttgga

SEQ ID NO: 1526127 - DNA, 15 bp, Homo sapiens
ggtgtgcccttggaa

SEQ ID NO: 1526128 - DNA, 15 bp, Homo sapiens
gtgtgcccttggaaa

SEQ ID NO: 1526129 - DNA, 15 bp, Homo sapiens
tgtgcccttggaaag

SEQ ID NO: 1526130 - DNA, 15 bp, Homo sapiens
gtgcccttggaaagg

SEQ ID NO: 1526131 - DNA, 15 bp, Homo sapiens
tgcccttggaaaggc

SEQ ID NO: 1526132 - DNA, 15 bp, Homo sapiens
gcccttggaaaggct

SEQ ID NO: 1526133 - DNA, 15 bp, Homo sapiens
cccttggaaaggctg

SEQ ID NO: 1526134 - DNA, 15 bp, Homo sapiens
ccttggaaaggctgg

SEQ ID NO: 1526135 - DNA, 15 bp, Homo sapiens
cttggaaaggctggg

SEQ ID NO: 1526136 - DNA, 15 bp, Homo sapiens
ttggaaaggctgggc

SEQ ID NO: 1526137 - DNA, 15 bp, Homo sapiens
tggaaaggctgggca

SEQ ID NO: 1526138 - DNA, 15 bp, Homo sapiens
ggaaaggctgggcac

SEQ ID NO: 1526139 - DNA, 15 bp, Homo sapiens
gaaaggctgggcaca

SEQ ID NO: 1526140 - DNA, 15 bp, Homo sapiens
aaaggctgggcacac

SEQ ID NO: 1526141 - DNA, 15 bp, Homo sapiens
aaggctgggcacacc

SEQ ID NO: 1526142 - DNA, 15 bp, Homo sapiens
aggctgggcacacca

SEQ ID NO: 1526143 - DNA, 15 bp, Homo sapiens
ggctgggcacaccaa

SEQ ID NO: 1526144 - DNA, 15 bp, Homo sapiens
gctgggcacaccaaa

SEQ ID NO: 1526145 - DNA, 15 bp, Homo sapiens
ctgggcacaccaaac

SEQ ID NO: 1526146 - DNA, 15 bp, Homo sapiens
tgggcacaccaaaca

SEQ ID NO: 1526147 - DNA, 15 bp, Homo sapiens
gggcacaccaaacac

SEQ ID NO: 1526148 - DNA, 15 bp, Homo sapiens
ggcacaccaaacaca

SEQ ID NO: 1526149 - DNA, 15 bp, Homo sapiens
gcacaccaaacacaa

SEQ ID NO: 1526150 - DNA, 15 bp, Homo sapiens
cacaccaaacacaac

SEQ ID NO: 1526151 - DNA, 15 bp, Homo sapiens
acaccaaacacaacc

SEQ ID NO: 1526152 - DNA, 15 bp, Homo sapiens
caccaaacacaacct

SEQ ID NO: 1526153 - DNA, 15 bp, Homo sapiens
accaaacacaaccta

SEQ ID NO: 1526154 - DNA, 15 bp, Homo sapiens
ccaaacacaacctaa

SEQ ID NO: 1526155 - DNA, 15 bp, Homo sapiens
caaacacaacctaat

SEQ ID NO: 1526156 - DNA, 15 bp, Homo sapiens
aaacacaacctaata

SEQ ID NO: 1526157 - DNA, 15 bp, Homo sapiens
aacacaacctaataa

SEQ ID NO: 1526158 - DNA, 15 bp, Homo sapiens
acacaacctaataaa

SEQ ID NO: 1526159 - DNA, 15 bp, Homo sapiens
cacaacctaataaac

SEQ ID NO: 1526160 - DNA, 15 bp, Homo sapiens
acaacctaataaaca

SEQ ID NO: 1526161 - DNA, 15 bp, Homo sapiens
caacctaataaacaa

SEQ ID NO: 1526162 - DNA, 15 bp, Homo sapiens
aacctaataaacaac

SEQ ID NO: 1526163 - DNA, 15 bp, Homo sapiens
acctaataaacaaca

SEQ ID NO: 1526164 - DNA, 15 bp, Homo sapiens
cctaataaacaacag

SEQ ID NO: 1526165 - DNA, 15 bp, Homo sapiens
ctaataaacaacagc

SEQ ID NO: 1526166 - DNA, 15 bp, Homo sapiens
taataaacaacagca

SEQ ID NO: 1526167 - DNA, 15 bp, Homo sapiens
aataaacaacagcaa

SEQ ID NO: 1526168 - DNA, 15 bp, Homo sapiens
ataaacaacagcaat

SEQ ID NO: 1526169 - DNA, 15 bp, Homo sapiens
taaacaacagcaatg

SEQ ID NO: 1526170 - DNA, 15 bp, Homo sapiens
aaacaacagcaatga

SEQ ID NO: 1526171 - DNA, 15 bp, Homo sapiens
aacaacagcaatgag

SEQ ID NO: 1526172 - DNA, 15 bp, Homo sapiens
acaacagcaatgagc

SEQ ID NO: 1526173 - DNA, 15 bp, Homo sapiens
caacagcaatgagca

SEQ ID NO: 1526174 - DNA, 15 bp, Homo sapiens
aacagcaatgagcac

SEQ ID NO: 1526175 - DNA, 15 bp, Homo sapiens
acagcaatgagcaca

SEQ ID NO: 1526176 - DNA, 15 bp, Homo sapiens
cagcaatgagcacac

SEQ ID NO: 1526177 - DNA, 15 bp, Homo sapiens
agcaatgagcacaca

SEQ ID NO: 1526178 - DNA, 15 bp, Homo sapiens
gcaatgagcacacag

SEQ ID NO: 1526179 - DNA, 15 bp, Homo sapiens
caatgagcacacagg

SEQ ID NO: 1526180 - DNA, 15 bp, Homo sapiens
aatgagcacacaggg

SEQ ID NO: 1526181 - DNA, 15 bp, Homo sapiens
atgagcacacaggga

SEQ ID NO: 1526182 - DNA, 15 bp, Homo sapiens
tgagcacacagggaa

SEQ ID NO: 1526183 - DNA, 15 bp, Homo sapiens
gagcacacagggaaa

SEQ ID NO: 1526184 - DNA, 15 bp, Homo sapiens
agcacacagggaaag

SEQ ID NO: 1526185 - DNA, 15 bp, Homo sapiens
gcacacagggaaagt

SEQ ID NO: 1526186 - DNA, 15 bp, Homo sapiens
cacacagggaaagta

SEQ ID NO: 1526187 - DNA, 15 bp, Homo sapiens
acacagggaaagtac

SEQ ID NO: 1526188 - DNA, 15 bp, Homo sapiens
cacagggaaagtact

SEQ ID NO: 1526189 - DNA, 15 bp, Homo sapiens
acagggaaagtactc

SEQ ID NO: 1526190 - DNA, 15 bp, Homo sapiens
cagggaaagtactca

SEQ ID NO: 1526191 - DNA, 15 bp, Homo sapiens
agggaaagtactcac

SEQ ID NO: 1526192 - DNA, 15 bp, Homo sapiens
gggaaagtactcaca

SEQ ID NO: 1526193 - DNA, 15 bp, Homo sapiens
ggaaagtactcacag

SEQ ID NO: 1526194 - DNA, 15 bp, Homo sapiens
gaaagtactcacagg

SEQ ID NO: 1526195 - DNA, 15 bp, Homo sapiens
aaagtactcacaggg

SEQ ID NO: 1526196 - DNA, 15 bp, Homo sapiens
aagtactcacaggga

SEQ ID NO: 1526197 - DNA, 15 bp, Homo sapiens
agtactcacagggaa

SEQ ID NO: 1526198 - DNA, 15 bp, Homo sapiens
gtactcacagggaaa

SEQ ID NO: 1526199 - DNA, 15 bp, Homo sapiens
tactcacagggaaac

SEQ ID NO: 1526200 - DNA, 15 bp, Homo sapiens
actcacagggaaacc

SEQ ID NO: 1526201 - DNA, 15 bp, Homo sapiens
ctcacagggaaacca

SEQ ID NO: 1526202 - DNA, 15 bp, Homo sapiens
tcacagggaaaccat

SEQ ID NO: 1526203 - DNA, 15 bp, Homo sapiens
cacagggaaaccatc

SEQ ID NO: 1526204 - DNA, 15 bp, Homo sapiens
acagggaaaccatca

SEQ ID NO: 1526205 - DNA, 15 bp, Homo sapiens
cagggaaaccatcat

SEQ ID NO: 1526206 - DNA, 15 bp, Homo sapiens
agggaaaccatcatg

SEQ ID NO: 1526207 - DNA, 15 bp, Homo sapiens
gggaaaccatcatga

SEQ ID NO: 1526208 - DNA, 15 bp, Homo sapiens
ggaaaccatcatgaa

SEQ ID NO: 1526209 - DNA, 15 bp, Homo sapiens
gaaaccatcatgaac

SEQ ID NO: 1526210 - DNA, 15 bp, Homo sapiens
aaaccatcatgaact

SEQ ID NO: 1526211 - DNA, 15 bp, Homo sapiens
aaccatcatgaacta

SEQ ID NO: 1526212 - DNA, 15 bp, Homo sapiens
accatcatgaactag

SEQ ID NO: 1526213 - DNA, 15 bp, Homo sapiens
ccatcatgaactaga

SEQ ID NO: 1526214 - DNA, 15 bp, Homo sapiens
catcatgaactagag

SEQ ID NO: 1526215 - DNA, 15 bp, Homo sapiens
atcatgaactagagg

SEQ ID NO: 1526216 - DNA, 15 bp, Homo sapiens
tcatgaactagaggc

SEQ ID NO: 1526217 - DNA, 15 bp, Homo sapiens
catgaactagaggct

SEQ ID NO: 1526218 - DNA, 15 bp, Homo sapiens
atgaactagaggctg

SEQ ID NO: 1526219 - DNA, 15 bp, Homo sapiens
tgaactagaggctga

SEQ ID NO: 1526220 - DNA, 15 bp, Homo sapiens
gaactagaggctgat

SEQ ID NO: 1526221 - DNA, 15 bp, Homo sapiens
aactagaggctgatc

SEQ ID NO: 1526222 - DNA, 15 bp, Homo sapiens
actagaggctgatcc

SEQ ID NO: 1526223 - DNA, 15 bp, Homo sapiens
ctagaggctgatccc

SEQ ID NO: 1526224 - DNA, 15 bp, Homo sapiens
tagaggctgatccca

SEQ ID NO: 1526225 - DNA, 15 bp, Homo sapiens
agaggctgatcccac

SEQ ID NO: 1526226 - DNA, 15 bp, Homo sapiens
gaggctgatcccaca

SEQ ID NO: 1526227 - DNA, 15 bp, Homo sapiens
aggctgatcccacac

SEQ ID NO: 1526228 - DNA, 15 bp, Homo sapiens
ggctgatcccacacc

SEQ ID NO: 1526229 - DNA, 15 bp, Homo sapiens
gctgatcccacaccc

SEQ ID NO: 1526230 - DNA, 15 bp, Homo sapiens
ctgatcccacaccct

SEQ ID NO: 1526231 - DNA, 15 bp, Homo sapiens
tgatcccacaccctg

SEQ ID NO: 1526232 - DNA, 15 bp, Homo sapiens
gatcccacaccctgc

SEQ ID NO: 1526233 - DNA, 15 bp, Homo sapiens
atcccacaccctgcc

SEQ ID NO: 1526234 - DNA, 15 bp, Homo sapiens
tcccacaccctgcca

SEQ ID NO: 1526235 - DNA, 15 bp, Homo sapiens
cccacaccctgccac

SEQ ID NO: 1526236 - DNA, 15 bp, Homo sapiens
ccacaccctgccaca

SEQ ID NO: 1526237 - DNA, 15 bp, Homo sapiens
cacaccctgccacat

SEQ ID NO: 1526238 - DNA, 15 bp, Homo sapiens
acaccctgccacatg

SEQ ID NO: 1526239 - DNA, 15 bp, Homo sapiens
caccctgccacatgg

SEQ ID NO: 1526240 - DNA, 15 bp, Homo sapiens
accctgccacatggg

SEQ ID NO: 1526241 - DNA, 15 bp, Homo sapiens
ccctgccacatgggg

SEQ ID NO: 1526242 - DNA, 15 bp, Homo sapiens
cctgccacatggggc

SEQ ID NO: 1526243 - DNA, 15 bp, Homo sapiens
ctgccacatggggcc

SEQ ID NO: 1526244 - DNA, 15 bp, Homo sapiens
tgccacatggggccc

SEQ ID NO: 1526245 - DNA, 15 bp, Homo sapiens
gccacatggggcccc

SEQ ID NO: 1526246 - DNA, 15 bp, Homo sapiens
ccacatggggcccca

SEQ ID NO: 1526247 - DNA, 15 bp, Homo sapiens
cacatggggccccag

SEQ ID NO: 1526248 - DNA, 15 bp, Homo sapiens
acatggggccccagg

SEQ ID NO: 1526249 - DNA, 15 bp, Homo sapiens
catggggccccaggc

SEQ ID NO: 1526250 - DNA, 15 bp, Homo sapiens
atggggccccaggcc

SEQ ID NO: 1526251 - DNA, 15 bp, Homo sapiens
tggggccccaggccc

SEQ ID NO: 1526252 - DNA, 15 bp, Homo sapiens
ggggccccaggcccc

SEQ ID NO: 1526253 - DNA, 15 bp, Homo sapiens
gggccccaggcccca

SEQ ID NO: 1526254 - DNA, 15 bp, Homo sapiens
ggccccaggccccag

SEQ ID NO: 1526255 - DNA, 15 bp, Homo sapiens
gccccaggccccagc

SEQ ID NO: 1526256 - DNA, 15 bp, Homo sapiens
ccccaggccccagcc

SEQ ID NO: 1526257 - DNA, 15 bp, Homo sapiens
cccaggccccagcct

SEQ ID NO: 1526258 - DNA, 15 bp, Homo sapiens
ccaggccccagccta

SEQ ID NO: 1526259 - DNA, 15 bp, Homo sapiens
caggccccagcctat

SEQ ID NO: 1526260 - DNA, 15 bp, Homo sapiens
aggccccagcctatc

SEQ ID NO: 1526261 - DNA, 15 bp, Homo sapiens
ggccccagcctatca

SEQ ID NO: 1526262 - DNA, 15 bp, Homo sapiens
gccccagcctatcaa

SEQ ID NO: 1526263 - DNA, 15 bp, Homo sapiens
ccccagcctatcaac

SEQ ID NO: 1526264 - DNA, 15 bp, Homo sapiens
cccagcctatcaacc

SEQ ID NO: 1526265 - DNA, 15 bp, Homo sapiens
ccagcctatcaacca

SEQ ID NO: 1526266 - DNA, 15 bp, Homo sapiens
cagcctatcaaccag

SEQ ID NO: 1526267 - DNA, 15 bp, Homo sapiens
agcctatcaaccagt

SEQ ID NO: 1526268 - DNA, 15 bp, Homo sapiens
gcctatcaaccagtg

SEQ ID NO: 1526269 - DNA, 15 bp, Homo sapiens
cctatcaaccagtgg

SEQ ID NO: 1526270 - DNA, 15 bp, Homo sapiens
ctatcaaccagtggt

SEQ ID NO: 1526271 - DNA, 15 bp, Homo sapiens
tatcaaccagtggtc

SEQ ID NO: 1526272 - DNA, 15 bp, Homo sapiens
atcaaccagtggtcc

SEQ ID NO: 1526273 - DNA, 15 bp, Homo sapiens
tcaaccagtggtcct

SEQ ID NO: 1526274 - DNA, 15 bp, Homo sapiens
caaccagtggtcctt

SEQ ID NO: 1526275 - DNA, 15 bp, Homo sapiens
aaccagtggtcctta

SEQ ID NO: 1526276 - DNA, 15 bp, Homo sapiens
accagtggtccttat

SEQ ID NO: 1526277 - DNA, 15 bp, Homo sapiens
ccagtggtccttatt

SEQ ID NO: 1526278 - DNA, 15 bp, Homo sapiens
cagtggtccttattg

SEQ ID NO: 1526279 - DNA, 15 bp, Homo sapiens
agtggtccttattgc

SEQ ID NO: 1526280 - DNA, 15 bp, Homo sapiens
gtggtccttattgcc

SEQ ID NO: 1526281 - DNA, 15 bp, Homo sapiens
tggtccttattgcca

SEQ ID NO: 1526282 - DNA, 15 bp, Homo sapiens
ggtccttattgccac

SEQ ID NO: 1526283 - DNA, 15 bp, Homo sapiens
gtccttattgccaca

SEQ ID NO: 1526284 - DNA, 15 bp, Homo sapiens
tccttattgccacag

SEQ ID NO: 1526285 - DNA, 15 bp, Homo sapiens
ccttattgccacagc

SEQ ID NO: 1526286 - DNA, 15 bp, Homo sapiens
cttattgccacagcg

SEQ ID NO: 1526287 - DNA, 15 bp, Homo sapiens
ttattgccacagcga

SEQ ID NO: 1526288 - DNA, 15 bp, Homo sapiens
tattgccacagcgat

SEQ ID NO: 1526289 - DNA, 15 bp, Homo sapiens
attgccacagcgatt

SEQ ID NO: 1526290 - DNA, 15 bp, Homo sapiens
ttgccacagcgattg

SEQ ID NO: 1526291 - DNA, 15 bp, Homo sapiens
tgccacagcgattgg

SEQ ID NO: 1526292 - DNA, 15 bp, Homo sapiens
gccacagcgattggt

SEQ ID NO: 1526293 - DNA, 15 bp, Homo sapiens
ccacagcgattggtc

SEQ ID NO: 1526294 - DNA, 15 bp, Homo sapiens
cacagcgattggtct

SEQ ID NO: 1526295 - DNA, 15 bp, Homo sapiens
acagcgattggtctt

SEQ ID NO: 1526296 - DNA, 15 bp, Homo sapiens
cagcgattggtcttt

SEQ ID NO: 1526297 - DNA, 15 bp, Homo sapiens
agcgattggtctttg

SEQ ID NO: 1526298 - DNA, 15 bp, Homo sapiens
gcgattggtctttgg

SEQ ID NO: 1526299 - DNA, 15 bp, Homo sapiens
cgattggtctttgga

SEQ ID NO: 1526300 - DNA, 15 bp, Homo sapiens
gattggtctttggat

SEQ ID NO: 1526301 - DNA, 15 bp, Homo sapiens
attggtctttggata

SEQ ID NO: 1526302 - DNA, 15 bp, Homo sapiens
ttggtctttggatag

SEQ ID NO: 1526303 - DNA, 15 bp, Homo sapiens
tggtctttggatagg

SEQ ID NO: 1526304 - DNA, 15 bp, Homo sapiens
ggtctttggataggc

SEQ ID NO: 1526305 - DNA, 15 bp, Homo sapiens
gtctttggataggca

SEQ ID NO: 1526306 - DNA, 15 bp, Homo sapiens
tctttggataggcac

SEQ ID NO: 1526307 - DNA, 15 bp, Homo sapiens
ctttggataggcacc

SEQ ID NO: 1526308 - DNA, 15 bp, Homo sapiens
tttggataggcacct

SEQ ID NO: 1526309 - DNA, 15 bp, Homo sapiens
ttggataggcacctg

SEQ ID NO: 1526310 - DNA, 15 bp, Homo sapiens
tggataggcacctga

SEQ ID NO: 1526311 - DNA, 15 bp, Homo sapiens
ggataggcacctgat

SEQ ID NO: 1526312 - DNA, 15 bp, Homo sapiens
gataggcacctgatg

SEQ ID NO: 1526313 - DNA, 15 bp, Homo sapiens
ataggcacctgatgc

SEQ ID NO: 1526314 - DNA, 15 bp, Homo sapiens
taggcacctgatgca

SEQ ID NO: 1526315 - DNA, 15 bp, Homo sapiens
aggcacctgatgcaa

SEQ ID NO: 1526316 - DNA, 15 bp, Homo sapiens
ggcacctgatgcaag

SEQ ID NO: 1526317 - DNA, 15 bp, Homo sapiens
gcacctgatgcaagc

SEQ ID NO: 1526318 - DNA, 15 bp, Homo sapiens
cacctgatgcaagct

SEQ ID NO: 1526319 - DNA, 15 bp, Homo sapiens
acctgatgcaagctt

SEQ ID NO: 1526320 - DNA, 15 bp, Homo sapiens
cctgatgcaagcttc

SEQ ID NO: 1526321 - DNA, 15 bp, Homo sapiens
ctgatgcaagcttca

SEQ ID NO: 1526322 - DNA, 15 bp, Homo sapiens
tgatgcaagcttcag

SEQ ID NO: 1526323 - DNA, 15 bp, Homo sapiens
gatgcaagcttcagc

SEQ ID NO: 1526324 - DNA, 15 bp, Homo sapiens
atgcaagcttcagcc

SEQ ID NO: 1526325 - DNA, 15 bp, Homo sapiens
tgcaagcttcagcca

SEQ ID NO: 1526326 - DNA, 15 bp, Homo sapiens
gcaagcttcagccaa

SEQ ID NO: 1526327 - DNA, 15 bp, Homo sapiens
caagcttcagccaat

SEQ ID NO: 1526328 - DNA, 15 bp, Homo sapiens
aagcttcagccaatc

SEQ ID NO: 1526329 - DNA, 15 bp, Homo sapiens
agcttcagccaatca

SEQ ID NO: 1526330 - DNA, 15 bp, Homo sapiens
gcttcagccaatcaa

SEQ ID NO: 1526331 - DNA, 15 bp, Homo sapiens
cttcagccaatcaac

SEQ ID NO: 1526332 - DNA, 15 bp, Homo sapiens
ttcagccaatcaaca

SEQ ID NO: 1526333 - DNA, 15 bp, Homo sapiens
tcagccaatcaacag

SEQ ID NO: 1526334 - DNA, 15 bp, Homo sapiens
cagccaatcaacagg

SEQ ID NO: 1526335 - DNA, 15 bp, Homo sapiens
agccaatcaacaggc

SEQ ID NO: 1526336 - DNA, 15 bp, Homo sapiens
gccaatcaacaggcc

SEQ ID NO: 1526337 - DNA, 15 bp, Homo sapiens
ccaatcaacaggcca

SEQ ID NO: 1526338 - DNA, 15 bp, Homo sapiens
caatcaacaggccac

SEQ ID NO: 1526339 - DNA, 15 bp, Homo sapiens
aatcaacaggccact

SEQ ID NO: 1526340 - DNA, 15 bp, Homo sapiens
atcaacaggccactc

SEQ ID NO: 1526341 - DNA, 15 bp, Homo sapiens
tcaacaggccactca

SEQ ID NO: 1526342 - DNA, 15 bp, Homo sapiens
caacaggccactcag

SEQ ID NO: 1526343 - DNA, 15 bp, Homo sapiens
aacaggccactcagc

SEQ ID NO: 1526344 - DNA, 15 bp, Homo sapiens
acaggccactcagct

SEQ ID NO: 1526345 - DNA, 15 bp, Homo sapiens
caggccactcagctg

SEQ ID NO: 1526346 - DNA, 15 bp, Homo sapiens
aggccactcagctgg

SEQ ID NO: 1526347 - DNA, 15 bp, Homo sapiens
ggccactcagctggc

SEQ ID NO: 1526348 - DNA, 15 bp, Homo sapiens
gccactcagctggcc

SEQ ID NO: 1526349 - DNA, 15 bp, Homo sapiens
ccactcagctggcca

SEQ ID NO: 1526350 - DNA, 15 bp, Homo sapiens
cactcagctggccat

SEQ ID NO: 1526351 - DNA, 15 bp, Homo sapiens
actcagctggccatc

SEQ ID NO: 1526352 - DNA, 15 bp, Homo sapiens
ctcagctggccatca

SEQ ID NO: 1526353 - DNA, 15 bp, Homo sapiens
tcagctggccatcag

SEQ ID NO: 1526354 - DNA, 15 bp, Homo sapiens
cagctggccatcagt

SEQ ID NO: 1526355 - DNA, 15 bp, Homo sapiens
agctggccatcagta

SEQ ID NO: 1526356 - DNA, 15 bp, Homo sapiens
gctggccatcagtag

SEQ ID NO: 1526357 - DNA, 15 bp, Homo sapiens
ctggccatcagtagg

SEQ ID NO: 1526358 - DNA, 15 bp, Homo sapiens
tggccatcagtaggc

SEQ ID NO: 1526359 - DNA, 15 bp, Homo sapiens
ggccatcagtaggcc

SEQ ID NO: 1526360 - DNA, 15 bp, Homo sapiens
gccatcagtaggcca

SEQ ID NO: 1526361 - DNA, 15 bp, Homo sapiens
ccatcagtaggccat

SEQ ID NO: 1526362 - DNA, 15 bp, Homo sapiens
catcagtaggccatc

SEQ ID NO: 1526363 - DNA, 15 bp, Homo sapiens
atcagtaggccatcc

SEQ ID NO: 1526364 - DNA, 15 bp, Homo sapiens
tcagtaggccatcca

SEQ ID NO: 1526365 - DNA, 15 bp, Homo sapiens
cagtaggccatccaa

SEQ ID NO: 1526366 - DNA, 15 bp, Homo sapiens
agtaggccatccaat

SEQ ID NO: 1526367 - DNA, 15 bp, Homo sapiens
gtaggccatccaatc

SEQ ID NO: 1526368 - DNA, 15 bp, Homo sapiens
taggccatccaatca

SEQ ID NO: 1526369 - DNA, 15 bp, Homo sapiens
aggccatccaatcag

SEQ ID NO: 1526370 - DNA, 15 bp, Homo sapiens
ggccatccaatcaga

SEQ ID NO: 1526371 - DNA, 15 bp, Homo sapiens
gccatccaatcagag

SEQ ID NO: 1526372 - DNA, 15 bp, Homo sapiens
ccatccaatcagagc

SEQ ID NO: 1526373 - DNA, 15 bp, Homo sapiens
catccaatcagagca

SEQ ID NO: 1526374 - DNA, 15 bp, Homo sapiens
atccaatcagagcaa

SEQ ID NO: 1526375 - DNA, 15 bp, Homo sapiens
tccaatcagagcaaa

SEQ ID NO: 1526376 - DNA, 15 bp, Homo sapiens
ccaatcagagcaaag

SEQ ID NO: 1526377 - DNA, 15 bp, Homo sapiens
caatcagagcaaagc

SEQ ID NO: 1526378 - DNA, 15 bp, Homo sapiens
aatcagagcaaagcc

SEQ ID NO: 1526379 - DNA, 15 bp, Homo sapiens
atcagagcaaagccc

SEQ ID NO: 1526380 - DNA, 15 bp, Homo sapiens
tcagagcaaagccca

SEQ ID NO: 1526381 - DNA, 15 bp, Homo sapiens
cagagcaaagcccag

SEQ ID NO: 1526382 - DNA, 15 bp, Homo sapiens
agagcaaagcccagg

SEQ ID NO: 1526383 - DNA, 15 bp, Homo sapiens
gagcaaagcccagga

SEQ ID NO: 1526384 - DNA, 15 bp, Homo sapiens
agcaaagcccaggac

SEQ ID NO: 1526385 - DNA, 15 bp, Homo sapiens
gcaaagcccaggact

SEQ ID NO: 1526386 - DNA, 15 bp, Homo sapiens
caaagcccaggactt

SEQ ID NO: 1526387 - DNA, 15 bp, Homo sapiens
aaagcccaggacttt

SEQ ID NO: 1526388 - DNA, 15 bp, Homo sapiens
aagcccaggactttc

SEQ ID NO: 1526389 - DNA, 15 bp, Homo sapiens
agcccaggactttct

SEQ ID NO: 1526390 - DNA, 15 bp, Homo sapiens
gcccaggactttctt

SEQ ID NO: 1526391 - DNA, 15 bp, Homo sapiens
cccaggactttcttc

SEQ ID NO: 1526392 - DNA, 15 bp, Homo sapiens
ccaggactttcttcg

SEQ ID NO: 1526393 - DNA, 15 bp, Homo sapiens
caggactttcttcga

SEQ ID NO: 1526394 - DNA, 15 bp, Homo sapiens
aggactttcttcgac

SEQ ID NO: 1526395 - DNA, 15 bp, Homo sapiens
ggactttcttcgact

SEQ ID NO: 1526396 - DNA, 15 bp, Homo sapiens
gactttcttcgactc

SEQ ID NO: 1526397 - DNA, 15 bp, Homo sapiens
actttcttcgactct

SEQ ID NO: 1526398 - DNA, 15 bp, Homo sapiens
ctttcttcgactctt

SEQ ID NO: 1526399 - DNA, 15 bp, Homo sapiens
tttcttcgactctta

SEQ ID NO: 1526400 - DNA, 15 bp, Homo sapiens
ttcttcgactcttaa

SEQ ID NO: 1526401 - DNA, 15 bp, Homo sapiens
tcttcgactcttaag

SEQ ID NO: 1526402 - DNA, 15 bp, Homo sapiens
cttcgactcttaaga

SEQ ID NO: 1526403 - DNA, 15 bp, Homo sapiens
ttcgactcttaagaa

SEQ ID NO: 1526404 - DNA, 15 bp, Homo sapiens
tcgactcttaagaaa

SEQ ID NO: 1526405 - DNA, 15 bp, Homo sapiens
cgactcttaagaaaa

SEQ ID NO: 1526406 - DNA, 15 bp, Homo sapiens
gactcttaagaaaag

SEQ ID NO: 1526407 - DNA, 15 bp, Homo sapiens
actcttaagaaaaga

SEQ ID NO: 1526408 - DNA, 15 bp, Homo sapiens
ctcttaagaaaagag

SEQ ID NO: 1526409 - DNA, 15 bp, Homo sapiens
tcttaagaaaagaga

SEQ ID NO: 1526410 - DNA, 15 bp, Homo sapiens
cttaagaaaagagaa

SEQ ID NO: 1526411 - DNA, 15 bp, Homo sapiens
ttaagaaaagagaag

SEQ ID NO: 1526412 - DNA, 15 bp, Homo sapiens
taagaaaagagaagc

SEQ ID NO: 1526413 - DNA, 15 bp, Homo sapiens
aagaaaagagaagca

SEQ ID NO: 1526414 - DNA, 15 bp, Homo sapiens
agaaaagagaagcaa

SEQ ID NO: 1526415 - DNA, 15 bp, Homo sapiens
gaaaagagaagcaaa

SEQ ID NO: 1526416 - DNA, 15 bp, Homo sapiens
aaaagagaagcaaag

SEQ ID NO: 1526417 - DNA, 15 bp, Homo sapiens
aaagagaagcaaagt

SEQ ID NO: 1526418 - DNA, 15 bp, Homo sapiens
aagagaagcaaagta

SEQ ID NO: 1526419 - DNA, 15 bp, Homo sapiens
agagaagcaaagtaa

SEQ ID NO: 1526420 - DNA, 15 bp, Homo sapiens
gagaagcaaagtaac

SEQ ID NO: 1526421 - DNA, 15 bp, Homo sapiens
agaagcaaagtaact

SEQ ID NO: 1526422 - DNA, 15 bp, Homo sapiens
gaagcaaagtaactg

SEQ ID NO: 1526423 - DNA, 15 bp, Homo sapiens
aagcaaagtaactgg

SEQ ID NO: 1526424 - DNA, 15 bp, Homo sapiens
agcaaagtaactggc

SEQ ID NO: 1526425 - DNA, 15 bp, Homo sapiens
gcaaagtaactggca

SEQ ID NO: 1526426 - DNA, 15 bp, Homo sapiens
caaagtaactggcac

SEQ ID NO: 1526427 - DNA, 15 bp, Homo sapiens
aaagtaactggcaca

SEQ ID NO: 1526428 - DNA, 15 bp, Homo sapiens
aagtaactggcacag

SEQ ID NO: 1526429 - DNA, 15 bp, Homo sapiens
agtaactggcacaga

SEQ ID NO: 1526430 - DNA, 15 bp, Homo sapiens
gtaactggcacagat

SEQ ID NO: 1526431 - DNA, 15 bp, Homo sapiens
taactggcacagatt

SEQ ID NO: 1526432 - DNA, 15 bp, Homo sapiens
aactggcacagattg

SEQ ID NO: 1526433 - DNA, 15 bp, Homo sapiens
actggcacagattgg

SEQ ID NO: 1526434 - DNA, 15 bp, Homo sapiens
ctggcacagattgga

SEQ ID NO: 1526435 - DNA, 15 bp, Homo sapiens
tggcacagattggag

SEQ ID NO: 1526436 - DNA, 15 bp, Homo sapiens
ggcacagattggaga

SEQ ID NO: 1526437 - DNA, 15 bp, Homo sapiens
gcacagattggagag

SEQ ID NO: 1526438 - DNA, 15 bp, Homo sapiens
cacagattggagagg

SEQ ID NO: 1526439 - DNA, 15 bp, Homo sapiens
acagattggagagga

SEQ ID NO: 1526440 - DNA, 15 bp, Homo sapiens
cagattggagaggat

SEQ ID NO: 1526441 - DNA, 15 bp, Homo sapiens
agattggagaggatc

SEQ ID NO: 1526442 - DNA, 15 bp, Homo sapiens
gattggagaggatca

SEQ ID NO: 1526443 - DNA, 15 bp, Homo sapiens
attggagaggatcaa

SEQ ID NO: 1526444 - DNA, 15 bp, Homo sapiens
ttggagaggatcaag

SEQ ID NO: 1526445 - DNA, 15 bp, Homo sapiens
tggagaggatcaagg

SEQ ID NO: 1526446 - DNA, 15 bp, Homo sapiens
ggagaggatcaagga

SEQ ID NO: 1526447 - DNA, 15 bp, Homo sapiens
gagaggatcaaggaa

SEQ ID NO: 1526448 - DNA, 15 bp, Homo sapiens
agaggatcaaggaac

SEQ ID NO: 1526449 - DNA, 15 bp, Homo sapiens
gaggatcaaggaacc

SEQ ID NO: 1526450 - DNA, 15 bp, Homo sapiens
aggatcaaggaaccc

SEQ ID NO: 1526451 - DNA, 15 bp, Homo sapiens
ggatcaaggaacccc

SEQ ID NO: 1526452 - DNA, 15 bp, Homo sapiens
gatcaaggaaccccg

SEQ ID NO: 1526453 - DNA, 15 bp, Homo sapiens
atcaaggaaccccga

SEQ ID NO: 1526454 - DNA, 15 bp, Homo sapiens
tcaaggaaccccgag

SEQ ID NO: 1526455 - DNA, 15 bp, Homo sapiens
caaggaaccccgagc

SEQ ID NO: 1526456 - DNA, 15 bp, Homo sapiens
aaggaaccccgagct

SEQ ID NO: 1526457 - DNA, 15 bp, Homo sapiens
aggaaccccgagctg

SEQ ID NO: 1526458 - DNA, 15 bp, Homo sapiens
ggaaccccgagctgg

SEQ ID NO: 1526459 - DNA, 15 bp, Homo sapiens
gaaccccgagctgga

SEQ ID NO: 1526460 - DNA, 15 bp, Homo sapiens
aaccccgagctggat

SEQ ID NO: 1526461 - DNA, 15 bp, Homo sapiens
accccgagctggata

SEQ ID NO: 1526462 - DNA, 15 bp, Homo sapiens
ccccgagctggatac

SEQ ID NO: 1526463 - DNA, 15 bp, Homo sapiens
cccgagctggataca

SEQ ID NO: 1526464 - DNA, 15 bp, Homo sapiens
ccgagctggatacat

SEQ ID NO: 1526465 - DNA, 15 bp, Homo sapiens
cgagctggatacata

SEQ ID NO: 1526466 - DNA, 15 bp, Homo sapiens
gagctggatacatac

SEQ ID NO: 1526467 - DNA, 15 bp, Homo sapiens
agctggatacataca

SEQ ID NO: 1526468 - DNA, 15 bp, Homo sapiens
gctggatacatacaa

SEQ ID NO: 1526469 - DNA, 15 bp, Homo sapiens
ctggatacatacaaa

SEQ ID NO: 1526470 - DNA, 15 bp, Homo sapiens
tggatacatacaaac

SEQ ID NO: 1526471 - DNA, 15 bp, Homo sapiens
ggatacatacaaact

SEQ ID NO: 1526472 - DNA, 15 bp, Homo sapiens
gatacatacaaactt

SEQ ID NO: 1526473 - DNA, 15 bp, Homo sapiens
atacatacaaacttt

SEQ ID NO: 1526474 - DNA, 15 bp, Homo sapiens
tacatacaaactttg

SEQ ID NO: 1526475 - DNA, 15 bp, Homo sapiens
acatacaaactttgg

SEQ ID NO: 1526476 - DNA, 15 bp, Homo sapiens
catacaaactttggg

SEQ ID NO: 1526477 - DNA, 15 bp, Homo sapiens
atacaaactttgggt

SEQ ID NO: 1526478 - DNA, 15 bp, Homo sapiens
tacaaactttgggtt

SEQ ID NO: 1526479 - DNA, 15 bp, Homo sapiens
acaaactttgggtta

SEQ ID NO: 1526480 - DNA, 15 bp, Homo sapiens
caaactttgggttaa

SEQ ID NO: 1526481 - DNA, 15 bp, Homo sapiens
aaactttgggttaac

SEQ ID NO: 1526482 - DNA, 15 bp, Homo sapiens
aactttgggttaaca

SEQ ID NO: 1526483 - DNA, 15 bp, Homo sapiens
actttgggttaacat

SEQ ID NO: 1526484 - DNA, 15 bp, Homo sapiens
ctttgggttaacatg

SEQ ID NO: 1526485 - DNA, 15 bp, Homo sapiens
tttgggttaacatgg

SEQ ID NO: 1526486 - DNA, 15 bp, Homo sapiens
ttgggttaacatgga

SEQ ID NO: 1526487 - DNA, 15 bp, Homo sapiens
tgggttaacatggat

SEQ ID NO: 1526488 - DNA, 15 bp, Homo sapiens
gggttaacatggatg

SEQ ID NO: 1526489 - DNA, 15 bp, Homo sapiens
ggttaacatggatga

SEQ ID NO: 1526490 - DNA, 15 bp, Homo sapiens
gttaacatggatgat

SEQ ID NO: 1526491 - DNA, 15 bp, Homo sapiens
ttaacatggatgatt

SEQ ID NO: 1526492 - DNA, 15 bp, Homo sapiens
taacatggatgatta

SEQ ID NO: 1526493 - DNA, 15 bp, Homo sapiens
aacatggatgattaa

SEQ ID NO: 1526494 - DNA, 15 bp, Homo sapiens
acatggatgattaaa

SEQ ID NO: 1526495 - DNA, 15 bp, Homo sapiens
catggatgattaaat

SEQ ID NO: 1526496 - DNA, 15 bp, Homo sapiens
atggatgattaaata

SEQ ID NO: 1526497 - DNA, 15 bp, Homo sapiens
tggatgattaaatac

SEQ ID NO: 1526498 - DNA, 15 bp, Homo sapiens
ggatgattaaataca

SEQ ID NO: 1526499 - DNA, 15 bp, Homo sapiens
gatgattaaatacat

SEQ ID NO: 1526500 - DNA, 15 bp, Homo sapiens
atgattaaatacata

SEQ ID NO: 1526501 - DNA, 15 bp, Homo sapiens
tgattaaatacatat

SEQ ID NO: 1526502 - DNA, 15 bp, Homo sapiens
gattaaatacatatg

SEQ ID NO: 1526503 - DNA, 15 bp, Homo sapiens
attaaatacatatgt

SEQ ID NO: 1526504 - DNA, 15 bp, Homo sapiens
ttaaatacatatgtt

SEQ ID NO: 1526505 - DNA, 15 bp, Homo sapiens
taaatacatatgttt

SEQ ID NO: 1526506 - DNA, 15 bp, Homo sapiens
aaatacatatgttta

SEQ ID NO: 1526507 - DNA, 15 bp, Homo sapiens
aatacatatgtttat

SEQ ID NO: 1526508 - DNA, 15 bp, Homo sapiens
atacatatgtttatg

SEQ ID NO: 1526509 - DNA, 15 bp, Homo sapiens
tacatatgtttatgt

SEQ ID NO: 1526510 - DNA, 15 bp, Homo sapiens
acatatgtttatgtg

SEQ ID NO: 1526511 - DNA, 15 bp, Homo sapiens
catatgtttatgtga

SEQ ID NO: 1526512 - DNA, 15 bp, Homo sapiens
atatgtttatgtgaa

SEQ ID NO: 1526513 - DNA, 15 bp, Homo sapiens
tatgtttatgtgaac

SEQ ID NO: 1526514 - DNA, 15 bp, Homo sapiens
atgtttatgtgaacc

SEQ ID NO: 1526515 - DNA, 15 bp, Homo sapiens
tgtttatgtgaacca

SEQ ID NO: 1526516 - DNA, 15 bp, Homo sapiens
gtttatgtgaaccac

SEQ ID NO: 1526517 - DNA, 15 bp, Homo sapiens
tttatgtgaaccacc

SEQ ID NO: 1526518 - DNA, 15 bp, Homo sapiens
ttatgtgaaccacct

SEQ ID NO: 1526519 - DNA, 15 bp, Homo sapiens
tatgtgaaccacctc

SEQ ID NO: 1526520 - DNA, 15 bp, Homo sapiens
atgtgaaccacctcc

SEQ ID NO: 1526521 - DNA, 15 bp, Homo sapiens
tgtgaaccacctccc

SEQ ID NO: 1526522 - DNA, 15 bp, Homo sapiens
gtgaaccacctccca

SEQ ID NO: 1526523 - DNA, 15 bp, Homo sapiens
tgaaccacctcccaa

SEQ ID NO: 1526524 - DNA, 15 bp, Homo sapiens
gaaccacctcccaaa

SEQ ID NO: 1526525 - DNA, 15 bp, Homo sapiens
aaccacctcccaaat

SEQ ID NO: 1526526 - DNA, 15 bp, Homo sapiens
accacctcccaaata

SEQ ID NO: 1526527 - DNA, 15 bp, Homo sapiens
ccacctcccaaatat

SEQ ID NO: 1526528 - DNA, 15 bp, Homo sapiens
cacctcccaaatatg

SEQ ID NO: 1526529 - DNA, 15 bp, Homo sapiens
acctcccaaatatgc

SEQ ID NO: 1526530 - DNA, 15 bp, Homo sapiens
cctcccaaatatgct

SEQ ID NO: 1526531 - DNA, 15 bp, Homo sapiens
ctcccaaatatgctc

SEQ ID NO: 1526532 - DNA, 15 bp, Homo sapiens
tcccaaatatgctcc

SEQ ID NO: 1526533 - DNA, 15 bp, Homo sapiens
cccaaatatgctcca

SEQ ID NO: 1526534 - DNA, 15 bp, Homo sapiens
ccaaatatgctccac

SEQ ID NO: 1526535 - DNA, 15 bp, Homo sapiens
caaatatgctccact

SEQ ID NO: 1526536 - DNA, 15 bp, Homo sapiens
aaatatgctccacta

SEQ ID NO: 1526537 - DNA, 15 bp, Homo sapiens
aatatgctccactat

SEQ ID NO: 1526538 - DNA, 15 bp, Homo sapiens
atatgctccactata

SEQ ID NO: 1526539 - DNA, 15 bp, Homo sapiens
tatgctccactataa

SEQ ID NO: 1526540 - DNA, 15 bp, Homo sapiens
atgctccactataat

SEQ ID NO: 1526541 - DNA, 15 bp, Homo sapiens
tgctccactataatg

SEQ ID NO: 1526542 - DNA, 15 bp, Homo sapiens
gctccactataatga

SEQ ID NO: 1526543 - DNA, 15 bp, Homo sapiens
ctccactataatgac

SEQ ID NO: 1526544 - DNA, 15 bp, Homo sapiens
tccactataatgaca

SEQ ID NO: 1526545 - DNA, 15 bp, Homo sapiens
ccactataatgacac

SEQ ID NO: 1526546 - DNA, 15 bp, Homo sapiens
cactataatgacaca

SEQ ID NO: 1526547 - DNA, 15 bp, Homo sapiens
actataatgacacaa

SEQ ID NO: 1526548 - DNA, 15 bp, Homo sapiens
ctataatgacacaag

SEQ ID NO: 1526549 - DNA, 15 bp, Homo sapiens
tataatgacacaaga

SEQ ID NO: 1526550 - DNA, 15 bp, Homo sapiens
ataatgacacaagac

SEQ ID NO: 1526551 - DNA, 15 bp, Homo sapiens
taatgacacaagaca

SEQ ID NO: 1526552 - DNA, 15 bp, Homo sapiens
aatgacacaagacaa

SEQ ID NO: 1526553 - DNA, 15 bp, Homo sapiens
atgacacaagacaaa

SEQ ID NO: 1526554 - DNA, 15 bp, Homo sapiens
tgacacaagacaaag

SEQ ID NO: 1526555 - DNA, 15 bp, Homo sapiens
gacacaagacaaagg

SEQ ID NO: 1526556 - DNA, 15 bp, Homo sapiens
acacaagacaaaggg

SEQ ID NO: 1526557 - DNA, 15 bp, Homo sapiens
cacaagacaaagggc

SEQ ID NO: 1526558 - DNA, 15 bp, Homo sapiens
acaagacaaagggca

SEQ ID NO: 1526559 - DNA, 15 bp, Homo sapiens
caagacaaagggcag

SEQ ID NO: 1526560 - DNA, 15 bp, Homo sapiens
aagacaaagggcagg

SEQ ID NO: 1526561 - DNA, 15 bp, Homo sapiens
agacaaagggcaggg

SEQ ID NO: 1526562 - DNA, 15 bp, Homo sapiens
gacaaagggcagggg

SEQ ID NO: 1526563 - DNA, 15 bp, Homo sapiens
acaaagggcaggggg

SEQ ID NO: 1526564 - DNA, 15 bp, Homo sapiens
caaagggcaggggga

SEQ ID NO: 1526565 - DNA, 15 bp, Homo sapiens
aaagggcagggggag

SEQ ID NO: 1526566 - DNA, 15 bp, Homo sapiens
aagggcagggggaga

SEQ ID NO: 1526567 - DNA, 15 bp, Homo sapiens
agggcagggggagac

SEQ ID NO: 1526568 - DNA, 15 bp, Homo sapiens
gggcagggggagacc

SEQ ID NO: 1526569 - DNA, 15 bp, Homo sapiens
ggcagggggagacca

SEQ ID NO: 1526570 - DNA, 15 bp, Homo sapiens
gcagggggagaccaa

SEQ ID NO: 1526571 - DNA, 15 bp, Homo sapiens
cagggggagaccaat

SEQ ID NO: 1526572 - DNA, 15 bp, Homo sapiens
agggggagaccaatt

SEQ ID NO: 1526573 - DNA, 15 bp, Homo sapiens
gggggagaccaattg

SEQ ID NO: 1526574 - DNA, 15 bp, Homo sapiens
ggggagaccaattgc

SEQ ID NO: 1526575 - DNA, 15 bp, Homo sapiens
gggagaccaattgca

SEQ ID NO: 1526576 - DNA, 15 bp, Homo sapiens
ggagaccaattgcaa

SEQ ID NO: 1526577 - DNA, 15 bp, Homo sapiens
gagaccaattgcaag

SEQ ID NO: 1526578 - DNA, 15 bp, Homo sapiens
agaccaattgcaagg

SEQ ID NO: 1526579 - DNA, 15 bp, Homo sapiens
gaccaattgcaaggt

SEQ ID NO: 1526580 - DNA, 15 bp, Homo sapiens
accaattgcaaggtg

SEQ ID NO: 1526581 - DNA, 15 bp, Homo sapiens
ccaattgcaaggtgg

SEQ ID NO: 1526582 - DNA, 15 bp, Homo sapiens
caattgcaaggtggc

SEQ ID NO: 1526583 - DNA, 15 bp, Homo sapiens
aattgcaaggtggcg

SEQ ID NO: 1526584 - DNA, 15 bp, Homo sapiens
attgcaaggtggcgc

SEQ ID NO: 1526585 - DNA, 15 bp, Homo sapiens
ttgcaaggtggcgca

SEQ ID NO: 1526586 - DNA, 15 bp, Homo sapiens
tgcaaggtggcgcaa

SEQ ID NO: 1526587 - DNA, 15 bp, Homo sapiens
gcaaggtggcgcaaa

SEQ ID NO: 1526588 - DNA, 15 bp, Homo sapiens
caaggtggcgcaaat

SEQ ID NO: 1526589 - DNA, 15 bp, Homo sapiens
aaggtggcgcaaatg

SEQ ID NO: 1526590 - DNA, 15 bp, Homo sapiens
aggtggcgcaaatga

SEQ ID NO: 1526591 - DNA, 15 bp, Homo sapiens
ggtggcgcaaatgag

SEQ ID NO: 1526592 - DNA, 15 bp, Homo sapiens
gtggcgcaaatgaga

SEQ ID NO: 1526593 - DNA, 15 bp, Homo sapiens
tggcgcaaatgagag

SEQ ID NO: 1526594 - DNA, 15 bp, Homo sapiens
ggcgcaaatgagaga

SEQ ID NO: 1526595 - DNA, 15 bp, Homo sapiens
gcgcaaatgagagat

SEQ ID NO: 1526596 - DNA, 15 bp, Homo sapiens
cgcaaatgagagatg

SEQ ID NO: 1526597 - DNA, 15 bp, Homo sapiens
gcaaatgagagatgc

SEQ ID NO: 1526598 - DNA, 15 bp, Homo sapiens
caaatgagagatgct

SEQ ID NO: 1526599 - DNA, 15 bp, Homo sapiens
aaatgagagatgcta

SEQ ID NO: 1526600 - DNA, 15 bp, Homo sapiens
aatgagagatgctac

SEQ ID NO: 1526601 - DNA, 15 bp, Homo sapiens
atgagagatgctacc

SEQ ID NO: 1526602 - DNA, 15 bp, Homo sapiens
tgagagatgctacca

SEQ ID NO: 1526603 - DNA, 15 bp, Homo sapiens
gagagatgctaccaa

SEQ ID NO: 1526604 - DNA, 15 bp, Homo sapiens
agagatgctaccaag

SEQ ID NO: 1526605 - DNA, 15 bp, Homo sapiens
gagatgctaccaagg

SEQ ID NO: 1526606 - DNA, 15 bp, Homo sapiens
agatgctaccaaggg

SEQ ID NO: 1526607 - DNA, 15 bp, Homo sapiens
gatgctaccaagggt

SEQ ID NO: 1526608 - DNA, 15 bp, Homo sapiens
atgctaccaagggtg

SEQ ID NO: 1526609 - DNA, 15 bp, Homo sapiens
tgctaccaagggtgg

SEQ ID NO: 1526610 - DNA, 15 bp, Homo sapiens
gctaccaagggtggc

SEQ ID NO: 1526611 - DNA, 15 bp, Homo sapiens
ctaccaagggtggcg

SEQ ID NO: 1526612 - DNA, 15 bp, Homo sapiens
taccaagggtggcgg

SEQ ID NO: 1526613 - DNA, 15 bp, Homo sapiens
accaagggtggcggg

SEQ ID NO: 1526614 - DNA, 15 bp, Homo sapiens
ccaagggtggcgggg

SEQ ID NO: 1526615 - DNA, 15 bp, Homo sapiens
caagggtggcggggg

SEQ ID NO: 1526616 - DNA, 15 bp, Homo sapiens
aagggtggcggggga

SEQ ID NO: 1526617 - DNA, 15 bp, Homo sapiens
agggtggcgggggag

SEQ ID NO: 1526618 - DNA, 15 bp, Homo sapiens
gggtggcgggggaga

SEQ ID NO: 1526619 - DNA, 15 bp, Homo sapiens
ggtggcgggggagag

SEQ ID NO: 1526620 - DNA, 15 bp, Homo sapiens
gtggcgggggagaga

SEQ ID NO: 1526621 - DNA, 15 bp, Homo sapiens
tggcgggggagagag

SEQ ID NO: 1526622 - DNA, 15 bp, Homo sapiens
ggcgggggagagagg

SEQ ID NO: 1526623 - DNA, 15 bp, Homo sapiens
gcgggggagagaggg

SEQ ID NO: 1526624 - DNA, 15 bp, Homo sapiens
cgggggagagagggg

SEQ ID NO: 1526625 - DNA, 15 bp, Homo sapiens
gggggagagagggga

SEQ ID NO: 1526626 - DNA, 15 bp, Homo sapiens
ggggagagaggggag

SEQ ID NO: 1526627 - DNA, 15 bp, Homo sapiens
gggagagaggggagc

SEQ ID NO: 1526628 - DNA, 15 bp, Homo sapiens
ggagagaggggagca

SEQ ID NO: 1526629 - DNA, 15 bp, Homo sapiens
gagagaggggagcag

SEQ ID NO: 1526630 - DNA, 15 bp, Homo sapiens
agagaggggagcagt

SEQ ID NO: 1526631 - DNA, 15 bp, Homo sapiens
gagaggggagcagtt

SEQ ID NO: 1526632 - DNA, 15 bp, Homo sapiens
agaggggagcagttg

SEQ ID NO: 1526633 - DNA, 15 bp, Homo sapiens
gaggggagcagttgt

SEQ ID NO: 1526634 - DNA, 15 bp, Homo sapiens
aggggagcagttgtc

SEQ ID NO: 1526635 - DNA, 15 bp, Homo sapiens
ggggagcagttgtca

SEQ ID NO: 1526636 - DNA, 15 bp, Homo sapiens
gggagcagttgtcaa

SEQ ID NO: 1526637 - DNA, 15 bp, Homo sapiens
ggagcagttgtcaag

SEQ ID NO: 1526638 - DNA, 15 bp, Homo sapiens
gagcagttgtcaagt

SEQ ID NO: 1526639 - DNA, 15 bp, Homo sapiens
agcagttgtcaagtt

SEQ ID NO: 1526640 - DNA, 15 bp, Homo sapiens
gcagttgtcaagtta

SEQ ID NO: 1526641 - DNA, 15 bp, Homo sapiens
cagttgtcaagttag

SEQ ID NO: 1526642 - DNA, 15 bp, Homo sapiens
agttgtcaagttagg

SEQ ID NO: 1526643 - DNA, 15 bp, Homo sapiens
gttgtcaagttagga

SEQ ID NO: 1526644 - DNA, 15 bp, Homo sapiens
ttgtcaagttaggag

SEQ ID NO: 1526645 - DNA, 15 bp, Homo sapiens
tgtcaagttaggagg

SEQ ID NO: 1526646 - DNA, 15 bp, Homo sapiens
gtcaagttaggaggc

SEQ ID NO: 1526647 - DNA, 15 bp, Homo sapiens
tcaagttaggaggca

SEQ ID NO: 1526648 - DNA, 15 bp, Homo sapiens
caagttaggaggcaa

SEQ ID NO: 1526649 - DNA, 15 bp, Homo sapiens
aagttaggaggcaac

SEQ ID NO: 1526650 - DNA, 15 bp, Homo sapiens
agttaggaggcaaca

SEQ ID NO: 1526651 - DNA, 15 bp, Homo sapiens
gttaggaggcaacag

SEQ ID NO: 1526652 - DNA, 15 bp, Homo sapiens
ttaggaggcaacagg

SEQ ID NO: 1526653 - DNA, 15 bp, Homo sapiens
taggaggcaacaggc

SEQ ID NO: 1526654 - DNA, 15 bp, Homo sapiens
aggaggcaacaggct

SEQ ID NO: 1526655 - DNA, 15 bp, Homo sapiens
ggaggcaacaggctg

SEQ ID NO: 1526656 - DNA, 15 bp, Homo sapiens
gaggcaacaggctga

SEQ ID NO: 1526657 - DNA, 15 bp, Homo sapiens
aggcaacaggctgag

SEQ ID NO: 1526658 - DNA, 15 bp, Homo sapiens
ggcaacaggctgagg

SEQ ID NO: 1526659 - DNA, 15 bp, Homo sapiens
gcaacaggctgaggg

SEQ ID NO: 1526660 - DNA, 15 bp, Homo sapiens
caacaggctgaggga

SEQ ID NO: 1526661 - DNA, 15 bp, Homo sapiens
aacaggctgagggac

SEQ ID NO: 1526662 - DNA, 15 bp, Homo sapiens
acaggctgagggaca

SEQ ID NO: 1526663 - DNA, 15 bp, Homo sapiens
caggctgagggacag

SEQ ID NO: 1526664 - DNA, 15 bp, Homo sapiens
aggctgagggacagg

SEQ ID NO: 1526665 - DNA, 15 bp, Homo sapiens
ggctgagggacaggg

SEQ ID NO: 1526666 - DNA, 15 bp, Homo sapiens
gctgagggacaggga

SEQ ID NO: 1526667 - DNA, 15 bp, Homo sapiens
ctgagggacagggac

SEQ ID NO: 1526668 - DNA, 15 bp, Homo sapiens
tgagggacagggacc

SEQ ID NO: 1526669 - DNA, 15 bp, Homo sapiens
gagggacagggacca

SEQ ID NO: 1526670 - DNA, 15 bp, Homo sapiens
agggacagggaccag

SEQ ID NO: 1526671 - DNA, 15 bp, Homo sapiens
gggacagggaccagc

SEQ ID NO: 1526672 - DNA, 15 bp, Homo sapiens
ggacagggaccagca

SEQ ID NO: 1526673 - DNA, 15 bp, Homo sapiens
gacagggaccagcag

SEQ ID NO: 1526674 - DNA, 15 bp, Homo sapiens
acagggaccagcaga

SEQ ID NO: 1526675 - DNA, 15 bp, Homo sapiens
cagggaccagcagac

SEQ ID NO: 1526676 - DNA, 15 bp, Homo sapiens
agggaccagcagacg

SEQ ID NO: 1526677 - DNA, 15 bp, Homo sapiens
gggaccagcagacgg

SEQ ID NO: 1526678 - DNA, 15 bp, Homo sapiens
ggaccagcagacggg

SEQ ID NO: 1526679 - DNA, 15 bp, Homo sapiens
gaccagcagacgggg

SEQ ID NO: 1526680 - DNA, 15 bp, Homo sapiens
accagcagacgggga

SEQ ID NO: 1526681 - DNA, 15 bp, Homo sapiens
ccagcagacggggag

SEQ ID NO: 1526682 - DNA, 15 bp, Homo sapiens
cagcagacggggagg

SEQ ID NO: 1526683 - DNA, 15 bp, Homo sapiens
agcagacggggaggg

SEQ ID NO: 1526684 - DNA, 15 bp, Homo sapiens
gcagacggggaggga

SEQ ID NO: 1526685 - DNA, 15 bp, Homo sapiens
cagacggggagggag

SEQ ID NO: 1526686 - DNA, 15 bp, Homo sapiens
agacggggagggagg

SEQ ID NO: 1526687 - DNA, 15 bp, Homo sapiens
gacggggagggaggg

SEQ ID NO: 1526688 - DNA, 15 bp, Homo sapiens
acggggagggagggg

SEQ ID NO: 1526689 - DNA, 15 bp, Homo sapiens
cggggagggaggggc

SEQ ID NO: 1526690 - DNA, 15 bp, Homo sapiens
ggggagggaggggct

SEQ ID NO: 1526691 - DNA, 15 bp, Homo sapiens
gggagggaggggctg

SEQ ID NO: 1526692 - DNA, 15 bp, Homo sapiens
ggagggaggggctga

SEQ ID NO: 1526693 - DNA, 15 bp, Homo sapiens
gagggaggggctgaa

SEQ ID NO: 1526694 - DNA, 15 bp, Homo sapiens
agggaggggctgaag

SEQ ID NO: 1526695 - DNA, 15 bp, Homo sapiens
gggaggggctgaagc

SEQ ID NO: 1526696 - DNA, 15 bp, Homo sapiens
ggaggggctgaagca

SEQ ID NO: 1526697 - DNA, 15 bp, Homo sapiens
gaggggctgaagcag

SEQ ID NO: 1526698 - DNA, 15 bp, Homo sapiens
aggggctgaagcaga

SEQ ID NO: 1526699 - DNA, 15 bp, Homo sapiens
ggggctgaagcagaa

SEQ ID NO: 1526700 - DNA, 15 bp, Homo sapiens
gggctgaagcagaag

SEQ ID NO: 1526701 - DNA, 15 bp, Homo sapiens
ggctgaagcagaagt

SEQ ID NO: 1526702 - DNA, 15 bp, Homo sapiens
gctgaagcagaagtg

SEQ ID NO: 1526703 - DNA, 15 bp, Homo sapiens
ctgaagcagaagtgt

SEQ ID NO: 1526704 - DNA, 15 bp, Homo sapiens
tgaagcagaagtgtc

SEQ ID NO: 1526705 - DNA, 15 bp, Homo sapiens
gaagcagaagtgtcc

SEQ ID NO: 1526706 - DNA, 15 bp, Homo sapiens
aagcagaagtgtcca

SEQ ID NO: 1526707 - DNA, 15 bp, Homo sapiens
agcagaagtgtccag

SEQ ID NO: 1526708 - DNA, 15 bp, Homo sapiens
gcagaagtgtccagt

SEQ ID NO: 1526709 - DNA, 15 bp, Homo sapiens
cagaagtgtccagtg

SEQ ID NO: 1526710 - DNA, 15 bp, Homo sapiens
agaagtgtccagtgt

SEQ ID NO: 1526711 - DNA, 15 bp, Homo sapiens
gaagtgtccagtgtc

SEQ ID NO: 1526712 - DNA, 15 bp, Homo sapiens
aagtgtccagtgtct

SEQ ID NO: 1526713 - DNA, 15 bp, Homo sapiens
agtgtccagtgtctg

SEQ ID NO: 1526714 - DNA, 15 bp, Homo sapiens
gtgtccagtgtctgg

SEQ ID NO: 1526715 - DNA, 15 bp, Homo sapiens
tgtccagtgtctgga

SEQ ID NO: 1526716 - DNA, 15 bp, Homo sapiens
gtccagtgtctggag

SEQ ID NO: 1526717 - DNA, 15 bp, Homo sapiens
tccagtgtctggagg

SEQ ID NO: 1526718 - DNA, 15 bp, Homo sapiens
ccagtgtctggaggg

SEQ ID NO: 1526719 - DNA, 15 bp, Homo sapiens
cagtgtctggaggga

SEQ ID NO: 1526720 - DNA, 15 bp, Homo sapiens
agtgtctggagggat

SEQ ID NO: 1526721 - DNA, 15 bp, Homo sapiens
gtgtctggagggatg

SEQ ID NO: 1526722 - DNA, 15 bp, Homo sapiens
tgtctggagggatgg

SEQ ID NO: 1526723 - DNA, 15 bp, Homo sapiens
gtctggagggatggg

SEQ ID NO: 1526724 - DNA, 15 bp, Homo sapiens
tctggagggatgggg

SEQ ID NO: 1526725 - DNA, 15 bp, Homo sapiens
ctggagggatggggc

SEQ ID NO: 1526726 - DNA, 15 bp, Homo sapiens
tggagggatggggcc

SEQ ID NO: 1526727 - DNA, 15 bp, Homo sapiens
ggagggatggggcca

SEQ ID NO: 1526728 - DNA, 15 bp, Homo sapiens
gagggatggggccag

SEQ ID NO: 1526729 - DNA, 15 bp, Homo sapiens
agggatggggccaga

SEQ ID NO: 1526730 - DNA, 15 bp, Homo sapiens
gggatggggccagaa

SEQ ID NO: 1526731 - DNA, 15 bp, Homo sapiens
ggatggggccagaaa

SEQ ID NO: 1526732 - DNA, 15 bp, Homo sapiens
gatggggccagaaag

SEQ ID NO: 1526733 - DNA, 15 bp, Homo sapiens
atggggccagaaagg

SEQ ID NO: 1526734 - DNA, 15 bp, Homo sapiens
tggggccagaaaggc

SEQ ID NO: 1526735 - DNA, 15 bp, Homo sapiens
ggggccagaaaggca

SEQ ID NO: 1526736 - DNA, 15 bp, Homo sapiens
gggccagaaaggcaa

SEQ ID NO: 1526737 - DNA, 15 bp, Homo sapiens
ggccagaaaggcaag

SEQ ID NO: 1526738 - DNA, 15 bp, Homo sapiens
gccagaaaggcaagg

SEQ ID NO: 1526739 - DNA, 15 bp, Homo sapiens
ccagaaaggcaaggg

SEQ ID NO: 1526740 - DNA, 15 bp, Homo sapiens
cagaaaggcaagggg

SEQ ID NO: 1526741 - DNA, 15 bp, Homo sapiens
agaaaggcaaggggc

SEQ ID NO: 1526742 - DNA, 15 bp, Homo sapiens
gaaaggcaaggggca

SEQ ID NO: 1526743 - DNA, 15 bp, Homo sapiens
aaaggcaaggggcat

SEQ ID NO: 1526744 - DNA, 15 bp, Homo sapiens
aaggcaaggggcatc

SEQ ID NO: 1526745 - DNA, 15 bp, Homo sapiens
aggcaaggggcatcc

SEQ ID NO: 1526746 - DNA, 15 bp, Homo sapiens
ggcaaggggcatcct

SEQ ID NO: 1526747 - DNA, 15 bp, Homo sapiens
gcaaggggcatcctg

SEQ ID NO: 1526748 - DNA, 15 bp, Homo sapiens
caaggggcatcctga

SEQ ID NO: 1526749 - DNA, 15 bp, Homo sapiens
aaggggcatcctgaa

SEQ ID NO: 1526750 - DNA, 15 bp, Homo sapiens
aggggcatcctgaag

SEQ ID NO: 1526751 - DNA, 15 bp, Homo sapiens
ggggcatcctgaaga

SEQ ID NO: 1526752 - DNA, 15 bp, Homo sapiens
gggcatcctgaagaa

SEQ ID NO: 1526753 - DNA, 15 bp, Homo sapiens
ggcatcctgaagaag

SEQ ID NO: 1526754 - DNA, 15 bp, Homo sapiens
gcatcctgaagaagc

SEQ ID NO: 1526755 - DNA, 15 bp, Homo sapiens
catcctgaagaagct

SEQ ID NO: 1526756 - DNA, 15 bp, Homo sapiens
atcctgaagaagcta

SEQ ID NO: 1526757 - DNA, 15 bp, Homo sapiens
tcctgaagaagctat

SEQ ID NO: 1526758 - DNA, 15 bp, Homo sapiens
cctgaagaagctata

SEQ ID NO: 1526759 - DNA, 15 bp, Homo sapiens
ctgaagaagctatac

SEQ ID NO: 1526760 - DNA, 15 bp, Homo sapiens
tgaagaagctatacc

SEQ ID NO: 1526761 - DNA, 15 bp, Homo sapiens
gaagaagctatacct

SEQ ID NO: 1526762 - DNA, 15 bp, Homo sapiens
aagaagctatacctg

SEQ ID NO: 1526763 - DNA, 15 bp, Homo sapiens
agaagctatacctgg

SEQ ID NO: 1526764 - DNA, 15 bp, Homo sapiens
gaagctatacctggg

SEQ ID NO: 1526765 - DNA, 15 bp, Homo sapiens
aagctatacctgggg

SEQ ID NO: 1526766 - DNA, 15 bp, Homo sapiens
agctatacctgggga

SEQ ID NO: 1526767 - DNA, 15 bp, Homo sapiens
gctatacctggggag

SEQ ID NO: 1526768 - DNA, 15 bp, Homo sapiens
ctatacctggggagg

SEQ ID NO: 1526769 - DNA, 15 bp, Homo sapiens
tatacctggggaggg

SEQ ID NO: 1526770 - DNA, 15 bp, Homo sapiens
atacctggggagggc

SEQ ID NO: 1526771 - DNA, 15 bp, Homo sapiens
tacctggggagggca

SEQ ID NO: 1526772 - DNA, 15 bp, Homo sapiens
acctggggagggcag

SEQ ID NO: 1526773 - DNA, 15 bp, Homo sapiens
cctggggagggcagc

SEQ ID NO: 1526774 - DNA, 15 bp, Homo sapiens
ctggggagggcagct

SEQ ID NO: 1526775 - DNA, 15 bp, Homo sapiens
tggggagggcagctc

SEQ ID NO: 1526776 - DNA, 15 bp, Homo sapiens
ggggagggcagctct

SEQ ID NO: 1526777 - DNA, 15 bp, Homo sapiens
gggagggcagctctc

SEQ ID NO: 1526778 - DNA, 15 bp, Homo sapiens
ggagggcagctctct

SEQ ID NO: 1526779 - DNA, 15 bp, Homo sapiens
gagggcagctctctc

SEQ ID NO: 1526780 - DNA, 15 bp, Homo sapiens
agggcagctctctcc

SEQ ID NO: 1526781 - DNA, 15 bp, Homo sapiens
gggcagctctctccc

SEQ ID NO: 1526782 - DNA, 15 bp, Homo sapiens
ggcagctctctcccc

SEQ ID NO: 1526783 - DNA, 15 bp, Homo sapiens
gcagctctctcccca

SEQ ID NO: 1526784 - DNA, 15 bp, Homo sapiens
cagctctctccccac

SEQ ID NO: 1526785 - DNA, 15 bp, Homo sapiens
agctctctccccacc

SEQ ID NO: 1526786 - DNA, 15 bp, Homo sapiens
gctctctccccacct

SEQ ID NO: 1526787 - DNA, 15 bp, Homo sapiens
ctctctccccacctg

SEQ ID NO: 1526788 - DNA, 15 bp, Homo sapiens
tctctccccacctgc

SEQ ID NO: 1526789 - DNA, 15 bp, Homo sapiens
ctctccccacctgct

SEQ ID NO: 1526790 - DNA, 15 bp, Homo sapiens
tctccccacctgctc

SEQ ID NO: 1526791 - DNA, 15 bp, Homo sapiens
ctccccacctgctcc

SEQ ID NO: 1526792 - DNA, 15 bp, Homo sapiens
tccccacctgctccc

SEQ ID NO: 1526793 - DNA, 15 bp, Homo sapiens
ccccacctgctcccc

SEQ ID NO: 1526794 - DNA, 15 bp, Homo sapiens
cccacctgctcccca

SEQ ID NO: 1526795 - DNA, 15 bp, Homo sapiens
ccacctgctccccaa

SEQ ID NO: 1526796 - DNA, 15 bp, Homo sapiens
cacctgctccccaat

SEQ ID NO: 1526797 - DNA, 15 bp, Homo sapiens
acctgctccccaatt

SEQ ID NO: 1526798 - DNA, 15 bp, Homo sapiens
cctgctccccaattc

SEQ ID NO: 1526799 - DNA, 15 bp, Homo sapiens
ctgctccccaattca

SEQ ID NO: 1526800 - DNA, 15 bp, Homo sapiens
tgctccccaattcat

SEQ ID NO: 1526801 - DNA, 15 bp, Homo sapiens
gctccccaattcatc

SEQ ID NO: 1526802 - DNA, 15 bp, Homo sapiens
ctccccaattcatca

SEQ ID NO: 1526803 - DNA, 15 bp, Homo sapiens
tccccaattcatcag

SEQ ID NO: 1526804 - DNA, 15 bp, Homo sapiens
ccccaattcatcagc

SEQ ID NO: 1526805 - DNA, 15 bp, Homo sapiens
cccaattcatcagcc

SEQ ID NO: 1526806 - DNA, 15 bp, Homo sapiens
ccaattcatcagcca

SEQ ID NO: 1526807 - DNA, 15 bp, Homo sapiens
caattcatcagccag

SEQ ID NO: 1526808 - DNA, 15 bp, Homo sapiens
aattcatcagccagg

SEQ ID NO: 1526809 - DNA, 15 bp, Homo sapiens
attcatcagccagga

SEQ ID NO: 1526810 - DNA, 15 bp, Homo sapiens
ttcatcagccaggaa

SEQ ID NO: 1526811 - DNA, 15 bp, Homo sapiens
tcatcagccaggaat

SEQ ID NO: 1526812 - DNA, 15 bp, Homo sapiens
catcagccaggaatg

SEQ ID NO: 1526813 - DNA, 15 bp, Homo sapiens
atcagccaggaatgc

SEQ ID NO: 1526814 - DNA, 15 bp, Homo sapiens
tcagccaggaatgcc

SEQ ID NO: 1526815 - DNA, 15 bp, Homo sapiens
cagccaggaatgccc

SEQ ID NO: 1526816 - DNA, 15 bp, Homo sapiens
agccaggaatgcccc

SEQ ID NO: 1526817 - DNA, 15 bp, Homo sapiens
gccaggaatgcccca

SEQ ID NO: 1526818 - DNA, 15 bp, Homo sapiens
ccaggaatgccccat

SEQ ID NO: 1526819 - DNA, 15 bp, Homo sapiens
caggaatgccccatc

SEQ ID NO: 1526820 - DNA, 15 bp, Homo sapiens
aggaatgccccatcc

SEQ ID NO: 1526821 - DNA, 15 bp, Homo sapiens
ggaatgccccatcca

SEQ ID NO: 1526822 - DNA, 15 bp, Homo sapiens
gaatgccccatccac

SEQ ID NO: 1526823 - DNA, 15 bp, Homo sapiens
aatgccccatccacc

SEQ ID NO: 1526824 - DNA, 15 bp, Homo sapiens
atgccccatccaccc

SEQ ID NO: 1526825 - DNA, 15 bp, Homo sapiens
tgccccatccacccc

SEQ ID NO: 1526826 - DNA, 15 bp, Homo sapiens
gccccatccacccca

SEQ ID NO: 1526827 - DNA, 15 bp, Homo sapiens
ccccatccaccccac

SEQ ID NO: 1526828 - DNA, 15 bp, Homo sapiens
cccatccaccccacc

SEQ ID NO: 1526829 - DNA, 15 bp, Homo sapiens
ccatccaccccaccc

SEQ ID NO: 1526830 - DNA, 15 bp, Homo sapiens
catccaccccacccc

SEQ ID NO: 1526831 - DNA, 15 bp, Homo sapiens
atccaccccacccca

SEQ ID NO: 1526832 - DNA, 15 bp, Homo sapiens
tccaccccaccccag

SEQ ID NO: 1526833 - DNA, 15 bp, Homo sapiens
ccaccccaccccagg

SEQ ID NO: 1526834 - DNA, 15 bp, Homo sapiens
caccccaccccaggg

SEQ ID NO: 1526835 - DNA, 15 bp, Homo sapiens
accccaccccaggga

SEQ ID NO: 1526836 - DNA, 15 bp, Homo sapiens
ccccaccccagggag

SEQ ID NO: 1526837 - DNA, 15 bp, Homo sapiens
cccaccccagggagg

SEQ ID NO: 1526838 - DNA, 15 bp, Homo sapiens
ccaccccagggagga

SEQ ID NO: 1526839 - DNA, 15 bp, Homo sapiens
caccccagggaggag

SEQ ID NO: 1526840 - DNA, 15 bp, Homo sapiens
accccagggaggagg

SEQ ID NO: 1526841 - DNA, 15 bp, Homo sapiens
ccccagggaggagga

SEQ ID NO: 1526842 - DNA, 15 bp, Homo sapiens
cccagggaggaggac

SEQ ID NO: 1526843 - DNA, 15 bp, Homo sapiens
ccagggaggaggaca

SEQ ID NO: 1526844 - DNA, 15 bp, Homo sapiens
cagggaggaggacag

SEQ ID NO: 1526845 - DNA, 15 bp, Homo sapiens
agggaggaggacaga

SEQ ID NO: 1526846 - DNA, 15 bp, Homo sapiens
gggaggaggacagag

SEQ ID NO: 1526847 - DNA, 15 bp, Homo sapiens
ggaggaggacagagg

SEQ ID NO: 1526848 - DNA, 15 bp, Homo sapiens
gaggaggacagagga

SEQ ID NO: 1526849 - DNA, 15 bp, Homo sapiens
aggaggacagaggac

SEQ ID NO: 1526850 - DNA, 15 bp, Homo sapiens
ggaggacagaggact

SEQ ID NO: 1526851 - DNA, 15 bp, Homo sapiens
gaggacagaggactt

SEQ ID NO: 1526852 - DNA, 15 bp, Homo sapiens
aggacagaggacttt

SEQ ID NO: 1526853 - DNA, 15 bp, Homo sapiens
ggacagaggactttc

SEQ ID NO: 1526854 - DNA, 15 bp, Homo sapiens
gacagaggactttcg

SEQ ID NO: 1526855 - DNA, 15 bp, Homo sapiens
acagaggactttcgt

SEQ ID NO: 1526856 - DNA, 15 bp, Homo sapiens
cagaggactttcgtt

SEQ ID NO: 1526857 - DNA, 15 bp, Homo sapiens
agaggactttcgttt

SEQ ID NO: 1526858 - DNA, 15 bp, Homo sapiens
gaggactttcgtttg

SEQ ID NO: 1526859 - DNA, 15 bp, Homo sapiens
aggactttcgtttgg

SEQ ID NO: 1526860 - DNA, 15 bp, Homo sapiens
ggactttcgtttggg

SEQ ID NO: 1526861 - DNA, 15 bp, Homo sapiens
gactttcgtttggga

SEQ ID NO: 1526862 - DNA, 15 bp, Homo sapiens
actttcgtttgggag

SEQ ID NO: 1526863 - DNA, 15 bp, Homo sapiens
ctttcgtttgggagc

SEQ ID NO: 1526864 - DNA, 15 bp, Homo sapiens
tttcgtttgggagca

SEQ ID NO: 1526865 - DNA, 15 bp, Homo sapiens
ttcgtttgggagcat

SEQ ID NO: 1526866 - DNA, 15 bp, Homo sapiens
tcgtttgggagcatt

SEQ ID NO: 1526867 - DNA, 15 bp, Homo sapiens
cgtttgggagcattg

SEQ ID NO: 1526868 - DNA, 15 bp, Homo sapiens
gtttgggagcattga

SEQ ID NO: 1526869 - DNA, 15 bp, Homo sapiens
tttgggagcattgaa

SEQ ID NO: 1526870 - DNA, 15 bp, Homo sapiens
ttgggagcattgaat

SEQ ID NO: 1526871 - DNA, 15 bp, Homo sapiens
tgggagcattgaatg

SEQ ID NO: 1526872 - DNA, 15 bp, Homo sapiens
gggagcattgaatgg

SEQ ID NO: 1526873 - DNA, 15 bp, Homo sapiens
ggagcattgaatggt

SEQ ID NO: 1526874 - DNA, 15 bp, Homo sapiens
gagcattgaatggtt

SEQ ID NO: 1526875 - DNA, 15 bp, Homo sapiens
agcattgaatggttc

SEQ ID NO: 1526876 - DNA, 15 bp, Homo sapiens
gcattgaatggttca

SEQ ID NO: 1526877 - DNA, 15 bp, Homo sapiens
cattgaatggttcag

SEQ ID NO: 1526878 - DNA, 15 bp, Homo sapiens
attgaatggttcaga

SEQ ID NO: 1526879 - DNA, 15 bp, Homo sapiens
ttgaatggttcagag

SEQ ID NO: 1526880 - DNA, 15 bp, Homo sapiens
tgaatggttcagaga

SEQ ID NO: 1526881 - DNA, 15 bp, Homo sapiens
gaatggttcagagat

SEQ ID NO: 1526882 - DNA, 15 bp, Homo sapiens
aatggttcagagatt

SEQ ID NO: 1526883 - DNA, 15 bp, Homo sapiens
atggttcagagattc

SEQ ID NO: 1526884 - DNA, 15 bp, Homo sapiens
tggttcagagattct

SEQ ID NO: 1526885 - DNA, 15 bp, Homo sapiens
ggttcagagattctg

SEQ ID NO: 1526886 - DNA, 15 bp, Homo sapiens
gttcagagattctgc

SEQ ID NO: 1526887 - DNA, 15 bp, Homo sapiens
ttcagagattctgca

SEQ ID NO: 1526888 - DNA, 15 bp, Homo sapiens
tcagagattctgcaa

SEQ ID NO: 1526889 - DNA, 15 bp, Homo sapiens
cagagattctgcaac

SEQ ID NO: 1526890 - DNA, 15 bp, Homo sapiens
agagattctgcaact

SEQ ID NO: 1526891 - DNA, 15 bp, Homo sapiens
gagattctgcaactc

SEQ ID NO: 1526892 - DNA, 15 bp, Homo sapiens
agattctgcaactct

SEQ ID NO: 1526893 - DNA, 15 bp, Homo sapiens
gattctgcaactctg

SEQ ID NO: 1526894 - DNA, 15 bp, Homo sapiens
attctgcaactctgc

SEQ ID NO: 1526895 - DNA, 15 bp, Homo sapiens
ttctgcaactctgcg

SEQ ID NO: 1526896 - DNA, 15 bp, Homo sapiens
tctgcaactctgcgg

SEQ ID NO: 1526897 - DNA, 15 bp, Homo sapiens
ctgcaactctgcggt

SEQ ID NO: 1526898 - DNA, 15 bp, Homo sapiens
tgcaactctgcggtc

SEQ ID NO: 1526899 - DNA, 15 bp, Homo sapiens
gcaactctgcggtcc

SEQ ID NO: 1526900 - DNA, 15 bp, Homo sapiens
caactctgcggtccc

SEQ ID NO: 1526901 - DNA, 15 bp, Homo sapiens
aactctgcggtcccc

SEQ ID NO: 1526902 - DNA, 15 bp, Homo sapiens
actctgcggtcccca

SEQ ID NO: 1526903 - DNA, 15 bp, Homo sapiens
ctctgcggtccccaa

SEQ ID NO: 1526904 - DNA, 15 bp, Homo sapiens
tctgcggtccccaac

SEQ ID NO: 1526905 - DNA, 15 bp, Homo sapiens
ctgcggtccccaact

SEQ ID NO: 1526906 - DNA, 15 bp, Homo sapiens
tgcggtccccaacta

SEQ ID NO: 1526907 - DNA, 15 bp, Homo sapiens
gcggtccccaactaa

SEQ ID NO: 1526908 - DNA, 15 bp, Homo sapiens
cggtccccaactaaa

SEQ ID NO: 1526909 - DNA, 15 bp, Homo sapiens
ggtccccaactaaac

SEQ ID NO: 1526910 - DNA, 15 bp, Homo sapiens
gtccccaactaaact

SEQ ID NO: 1526911 - DNA, 15 bp, Homo sapiens
tccccaactaaactg

SEQ ID NO: 1526912 - DNA, 15 bp, Homo sapiens
ccccaactaaactgc

SEQ ID NO: 1526913 - DNA, 15 bp, Homo sapiens
cccaactaaactgct

SEQ ID NO: 1526914 - DNA, 15 bp, Homo sapiens
ccaactaaactgctc

SEQ ID NO: 1526915 - DNA, 15 bp, Homo sapiens
caactaaactgctca

SEQ ID NO: 1526916 - DNA, 15 bp, Homo sapiens
aactaaactgctcat

SEQ ID NO: 1526917 - DNA, 15 bp, Homo sapiens
actaaactgctcatt

SEQ ID NO: 1526918 - DNA, 15 bp, Homo sapiens
ctaaactgctcattg

SEQ ID NO: 1526919 - DNA, 15 bp, Homo sapiens
taaactgctcattgt

SEQ ID NO: 1526920 - DNA, 15 bp, Homo sapiens
aaactgctcattgtt

SEQ ID NO: 1526921 - DNA, 15 bp, Homo sapiens
aactgctcattgttt

SEQ ID NO: 1526922 - DNA, 15 bp, Homo sapiens
actgctcattgtttc

SEQ ID NO: 1526923 - DNA, 15 bp, Homo sapiens
ctgctcattgtttca

SEQ ID NO: 1526924 - DNA, 15 bp, Homo sapiens
tgctcattgtttcaa

SEQ ID NO: 1526925 - DNA, 15 bp, Homo sapiens
gctcattgtttcaag

SEQ ID NO: 1526926 - DNA, 15 bp, Homo sapiens
ctcattgtttcaagc

SEQ ID NO: 1526927 - DNA, 15 bp, Homo sapiens
tcattgtttcaagca

SEQ ID NO: 1526928 - DNA, 15 bp, Homo sapiens
cattgtttcaagcag

SEQ ID NO: 1526929 - DNA, 15 bp, Homo sapiens
attgtttcaagcagt

SEQ ID NO: 1526930 - DNA, 15 bp, Homo sapiens
ttgtttcaagcagtc

SEQ ID NO: 1526931 - DNA, 15 bp, Homo sapiens
tgtttcaagcagtcc

SEQ ID NO: 1526932 - DNA, 15 bp, Homo sapiens
gtttcaagcagtccc

SEQ ID NO: 1526933 - DNA, 15 bp, Homo sapiens
tttcaagcagtccct

SEQ ID NO: 1526934 - DNA, 15 bp, Homo sapiens
ttcaagcagtccctg

SEQ ID NO: 1526935 - DNA, 15 bp, Homo sapiens
tcaagcagtccctgt

SEQ ID NO: 1526936 - DNA, 15 bp, Homo sapiens
caagcagtccctgtt

SEQ ID NO: 1526937 - DNA, 15 bp, Homo sapiens
aagcagtccctgttg

SEQ ID NO: 1526938 - DNA, 15 bp, Homo sapiens
agcagtccctgttgg

SEQ ID NO: 1526939 - DNA, 15 bp, Homo sapiens
gcagtccctgttggg

SEQ ID NO: 1526940 - DNA, 15 bp, Homo sapiens
cagtccctgttgggt

SEQ ID NO: 1526941 - DNA, 15 bp, Homo sapiens
agtccctgttgggta

SEQ ID NO: 1526942 - DNA, 15 bp, Homo sapiens
gtccctgttgggtaa

SEQ ID NO: 1526943 - DNA, 15 bp, Homo sapiens
tccctgttgggtaaa

SEQ ID NO: 1526944 - DNA, 15 bp, Homo sapiens
ccctgttgggtaaat

SEQ ID NO: 1526945 - DNA, 15 bp, Homo sapiens
cctgttgggtaaatg

SEQ ID NO: 1526946 - DNA, 15 bp, Homo sapiens
ctgttgggtaaatgt

SEQ ID NO: 1526947 - DNA, 15 bp, Homo sapiens
tgttgggtaaatgtc

SEQ ID NO: 1526948 - DNA, 15 bp, Homo sapiens
gttgggtaaatgtcc

SEQ ID NO: 1526949 - DNA, 15 bp, Homo sapiens
ttgggtaaatgtccc

SEQ ID NO: 1526950 - DNA, 15 bp, Homo sapiens
tgggtaaatgtcccc

SEQ ID NO: 1526951 - DNA, 15 bp, Homo sapiens
gggtaaatgtccccc

SEQ ID NO: 1526952 - DNA, 15 bp, Homo sapiens
ggtaaatgtccccca

SEQ ID NO: 1526953 - DNA, 15 bp, Homo sapiens
gtaaatgtcccccat

SEQ ID NO: 1526954 - DNA, 15 bp, Homo sapiens
taaatgtcccccatt

SEQ ID NO: 1526955 - DNA, 15 bp, Homo sapiens
aaatgtcccccattg

SEQ ID NO: 1526956 - DNA, 15 bp, Homo sapiens
aatgtcccccattgt

SEQ ID NO: 1526957 - DNA, 15 bp, Homo sapiens
atgtcccccattgta

SEQ ID NO: 1526958 - DNA, 15 bp, Homo sapiens
tgtcccccattgtaa

SEQ ID NO: 1526959 - DNA, 15 bp, Homo sapiens
gtcccccattgtaac

SEQ ID NO: 1526960 - DNA, 15 bp, Homo sapiens
tcccccattgtaacc

SEQ ID NO: 1526961 - DNA, 15 bp, Homo sapiens
cccccattgtaaccg

SEQ ID NO: 1526962 - DNA, 15 bp, Homo sapiens
ccccattgtaaccgg

SEQ ID NO: 1526963 - DNA, 15 bp, Homo sapiens
cccattgtaaccgga

SEQ ID NO: 1526964 - DNA, 15 bp, Homo sapiens
ccattgtaaccggac

SEQ ID NO: 1526965 - DNA, 15 bp, Homo sapiens
cattgtaaccggact

SEQ ID NO: 1526966 - DNA, 15 bp, Homo sapiens
attgtaaccggactc

SEQ ID NO: 1526967 - DNA, 15 bp, Homo sapiens
ttgtaaccggactcg

SEQ ID NO: 1526968 - DNA, 15 bp, Homo sapiens
tgtaaccggactcgg

SEQ ID NO: 1526969 - DNA, 15 bp, Homo sapiens
gtaaccggactcgga

SEQ ID NO: 1526970 - DNA, 15 bp, Homo sapiens
taaccggactcggat

SEQ ID NO: 1526971 - DNA, 15 bp, Homo sapiens
aaccggactcggatt

SEQ ID NO: 1526972 - DNA, 15 bp, Homo sapiens
accggactcggattc

SEQ ID NO: 1526973 - DNA, 15 bp, Homo sapiens
ccggactcggattcc

SEQ ID NO: 1526974 - DNA, 15 bp, Homo sapiens
cggactcggattcca

SEQ ID NO: 1526975 - DNA, 15 bp, Homo sapiens
ggactcggattccac

SEQ ID NO: 1526976 - DNA, 15 bp, Homo sapiens
gactcggattccacc

SEQ ID NO: 1526977 - DNA, 15 bp, Homo sapiens
actcggattccaccg

SEQ ID NO: 1526978 - DNA, 15 bp, Homo sapiens
ctcggattccaccgc

SEQ ID NO: 1526979 - DNA, 15 bp, Homo sapiens
tcggattccaccgct

SEQ ID NO: 1526980 - DNA, 15 bp, Homo sapiens
cggattccaccgctt

SEQ ID NO: 1526981 - DNA, 15 bp, Homo sapiens
ggattccaccgcttg

SEQ ID NO: 1526982 - DNA, 15 bp, Homo sapiens
gattccaccgcttga

SEQ ID NO: 1526983 - DNA, 15 bp, Homo sapiens
attccaccgcttgaa

SEQ ID NO: 1526984 - DNA, 15 bp, Homo sapiens
ttccaccgcttgaaa

SEQ ID NO: 1526985 - DNA, 15 bp, Homo sapiens
tccaccgcttgaaag

SEQ ID NO: 1526986 - DNA, 15 bp, Homo sapiens
ccaccgcttgaaagc

SEQ ID NO: 1526987 - DNA, 15 bp, Homo sapiens
caccgcttgaaagcc

SEQ ID NO: 1526988 - DNA, 15 bp, Homo sapiens
accgcttgaaagcca

SEQ ID NO: 1526989 - DNA, 15 bp, Homo sapiens
ccgcttgaaagccaa

SEQ ID NO: 1526990 - DNA, 15 bp, Homo sapiens
cgcttgaaagccaaa

SEQ ID NO: 1526991 - DNA, 15 bp, Homo sapiens
gcttgaaagccaaat

SEQ ID NO: 1526992 - DNA, 15 bp, Homo sapiens
cttgaaagccaaata

SEQ ID NO: 1526993 - DNA, 15 bp, Homo sapiens
ttgaaagccaaatac

SEQ ID NO: 1526994 - DNA, 15 bp, Homo sapiens
tgaaagccaaataca

SEQ ID NO: 1526995 - DNA, 15 bp, Homo sapiens
gaaagccaaatacaa

SEQ ID NO: 1526996 - DNA, 15 bp, Homo sapiens
aaagccaaatacaag

SEQ ID NO: 1526997 - DNA, 15 bp, Homo sapiens
aagccaaatacaaga

SEQ ID NO: 1526998 - DNA, 15 bp, Homo sapiens
agccaaatacaagag

SEQ ID NO: 1526999 - DNA, 15 bp, Homo sapiens
gccaaatacaagagg

SEQ ID NO: 1527000 - DNA, 15 bp, Homo sapiens
ccaaatacaagagga

SEQ ID NO: 1527001 - DNA, 15 bp, Homo sapiens
caaatacaagaggag

SEQ ID NO: 1527002 - DNA, 15 bp, Homo sapiens
aaatacaagaggaga

SEQ ID NO: 1527003 - DNA, 15 bp, Homo sapiens
aatacaagaggagag

SEQ ID NO: 1527004 - DNA, 15 bp, Homo sapiens
atacaagaggagagg

SEQ ID NO: 1527005 - DNA, 15 bp, Homo sapiens
tacaagaggagaggt

SEQ ID NO: 1527006 - DNA, 15 bp, Homo sapiens
acaagaggagaggtt

SEQ ID NO: 1527007 - DNA, 15 bp, Homo sapiens
caagaggagaggttt

SEQ ID NO: 1527008 - DNA, 15 bp, Homo sapiens
aagaggagaggtttg

SEQ ID NO: 1527009 - DNA, 15 bp, Homo sapiens
agaggagaggtttgg

SEQ ID NO: 1527010 - DNA, 15 bp, Homo sapiens
gaggagaggtttggt

SEQ ID NO: 1527011 - DNA, 15 bp, Homo sapiens
aggagaggtttggtg

SEQ ID NO: 1527012 - DNA, 15 bp, Homo sapiens
ggagaggtttggtgg

SEQ ID NO: 1527013 - DNA, 15 bp, Homo sapiens
gagaggtttggtggg

SEQ ID NO: 1527014 - DNA, 15 bp, Homo sapiens
agaggtttggtggga

SEQ ID NO: 1527015 - DNA, 15 bp, Homo sapiens
gaggtttggtgggag

SEQ ID NO: 1527016 - DNA, 15 bp, Homo sapiens
aggtttggtgggagg

SEQ ID NO: 1527017 - DNA, 15 bp, Homo sapiens
ggtttggtgggagga

SEQ ID NO: 1527018 - DNA, 15 bp, Homo sapiens
gtttggtgggaggaa

SEQ ID NO: 1527019 - DNA, 15 bp, Homo sapiens
tttggtgggaggaaa

SEQ ID NO: 1527020 - DNA, 15 bp, Homo sapiens
ttggtgggaggaaaa

SEQ ID NO: 1527021 - DNA, 15 bp, Homo sapiens
tggtgggaggaaaag

SEQ ID NO: 1527022 - DNA, 15 bp, Homo sapiens
ggtgggaggaaaagt

SEQ ID NO: 1527023 - DNA, 15 bp, Homo sapiens
gtgggaggaaaagtg

SEQ ID NO: 1527024 - DNA, 15 bp, Homo sapiens
tgggaggaaaagtgg

SEQ ID NO: 1527025 - DNA, 15 bp, Homo sapiens
gggaggaaaagtggt

SEQ ID NO: 1527026 - DNA, 15 bp, Homo sapiens
ggaggaaaagtggtt

SEQ ID NO: 1527027 - DNA, 15 bp, Homo sapiens
gaggaaaagtggttt

SEQ ID NO: 1527028 - DNA, 15 bp, Homo sapiens
aggaaaagtggtttt

SEQ ID NO: 1527029 - DNA, 15 bp, Homo sapiens
ggaaaagtggtttta

SEQ ID NO: 1527030 - DNA, 15 bp, Homo sapiens
gaaaagtggttttaa

SEQ ID NO: 1527031 - DNA, 15 bp, Homo sapiens
aaaagtggttttaac

SEQ ID NO: 1527032 - DNA, 15 bp, Homo sapiens
aaagtggttttaact

SEQ ID NO: 1527033 - DNA, 15 bp, Homo sapiens
aagtggttttaacta

SEQ ID NO: 1527034 - DNA, 15 bp, Homo sapiens
agtggttttaactag

SEQ ID NO: 1527035 - DNA, 15 bp, Homo sapiens
gtggttttaactaga

SEQ ID NO: 1527036 - DNA, 15 bp, Homo sapiens
tggttttaactagag

SEQ ID NO: 1527037 - DNA, 15 bp, Homo sapiens
ggttttaactagagc

SEQ ID NO: 1527038 - DNA, 15 bp, Homo sapiens
gttttaactagagcc

SEQ ID NO: 1527039 - DNA, 15 bp, Homo sapiens
ttttaactagagcca

SEQ ID NO: 1527040 - DNA, 15 bp, Homo sapiens
tttaactagagccag

SEQ ID NO: 1527041 - DNA, 15 bp, Homo sapiens
ttaactagagccagc

SEQ ID NO: 1527042 - DNA, 15 bp, Homo sapiens
taactagagccagca

SEQ ID NO: 1527043 - DNA, 15 bp, Homo sapiens
aactagagccagcaa

SEQ ID NO: 1527044 - DNA, 15 bp, Homo sapiens
actagagccagcaaa

SEQ ID NO: 1527045 - DNA, 15 bp, Homo sapiens
ctagagccagcaaac

SEQ ID NO: 1527046 - DNA, 15 bp, Homo sapiens
tagagccagcaaacc

SEQ ID NO: 1527047 - DNA, 15 bp, Homo sapiens
agagccagcaaacca

SEQ ID NO: 1527048 - DNA, 15 bp, Homo sapiens
gagccagcaaaccaa

SEQ ID NO: 1527049 - DNA, 15 bp, Homo sapiens
agccagcaaaccaag

SEQ ID NO: 1527050 - DNA, 15 bp, Homo sapiens
gccagcaaaccaaga

SEQ ID NO: 1527051 - DNA, 15 bp, Homo sapiens
ccagcaaaccaagaa

SEQ ID NO: 1527052 - DNA, 15 bp, Homo sapiens
cagcaaaccaagaag

SEQ ID NO: 1527053 - DNA, 15 bp, Homo sapiens
agcaaaccaagaaga

SEQ ID NO: 1527054 - DNA, 15 bp, Homo sapiens
gcaaaccaagaagat

SEQ ID NO: 1527055 - DNA, 15 bp, Homo sapiens
caaaccaagaagatg

SEQ ID NO: 1527056 - DNA, 15 bp, Homo sapiens
aaaccaagaagatgg

SEQ ID NO: 1527057 - DNA, 15 bp, Homo sapiens
aaccaagaagatggt

SEQ ID NO: 1527058 - DNA, 15 bp, Homo sapiens
accaagaagatggtg

SEQ ID NO: 1527059 - DNA, 15 bp, Homo sapiens
ccaagaagatggtga

SEQ ID NO: 1527060 - DNA, 15 bp, Homo sapiens
caagaagatggtgaa

SEQ ID NO: 1527061 - DNA, 15 bp, Homo sapiens
aagaagatggtgaat

SEQ ID NO: 1527062 - DNA, 15 bp, Homo sapiens
agaagatggtgaatt

SEQ ID NO: 1527063 - DNA, 15 bp, Homo sapiens
gaagatggtgaattg

SEQ ID NO: 1527064 - DNA, 15 bp, Homo sapiens
aagatggtgaattgt

SEQ ID NO: 1527065 - DNA, 15 bp, Homo sapiens
agatggtgaattgtt

SEQ ID NO: 1527066 - DNA, 15 bp, Homo sapiens
gatggtgaattgttg

SEQ ID NO: 1527067 - DNA, 15 bp, Homo sapiens
atggtgaattgttgt

SEQ ID NO: 1527068 - DNA, 15 bp, Homo sapiens
tggtgaattgttgtt

SEQ ID NO: 1527069 - DNA, 15 bp, Homo sapiens
ggtgaattgttgttt

SEQ ID NO: 1527070 - DNA, 15 bp, Homo sapiens
gtgaattgttgtttt

SEQ ID NO: 1527071 - DNA, 15 bp, Homo sapiens
tgaattgttgtttta

SEQ ID NO: 1527072 - DNA, 15 bp, Homo sapiens
gaattgttgttttaa

SEQ ID NO: 1527073 - DNA, 15 bp, Homo sapiens
aattgttgttttaaa

SEQ ID NO: 1527074 - DNA, 15 bp, Homo sapiens
attgttgttttaaag

SEQ ID NO: 1527075 - DNA, 15 bp, Homo sapiens
ttgttgttttaaagc

SEQ ID NO: 1527076 - DNA, 15 bp, Homo sapiens
tgttgttttaaagca

SEQ ID NO: 1527077 - DNA, 15 bp, Homo sapiens
gttgttttaaagcat

SEQ ID NO: 1527078 - DNA, 15 bp, Homo sapiens
ttgttttaaagcatt

SEQ ID NO: 1527079 - DNA, 15 bp, Homo sapiens
tgttttaaagcattc

SEQ ID NO: 1527080 - DNA, 15 bp, Homo sapiens
gttttaaagcattca

SEQ ID NO: 1527081 - DNA, 15 bp, Homo sapiens
ttttaaagcattcaa

SEQ ID NO: 1527082 - DNA, 15 bp, Homo sapiens
tttaaagcattcaat

SEQ ID NO: 1527083 - DNA, 15 bp, Homo sapiens
ttaaagcattcaatt

SEQ ID NO: 1527084 - DNA, 15 bp, Homo sapiens
taaagcattcaatta

SEQ ID NO: 1527085 - DNA, 15 bp, Homo sapiens
aaagcattcaattat

SEQ ID NO: 1527086 - DNA, 15 bp, Homo sapiens
aagcattcaattatc

SEQ ID NO: 1527087 - DNA, 15 bp, Homo sapiens
agcattcaattatct

SEQ ID NO: 1527088 - DNA, 15 bp, Homo sapiens
gcattcaattatctc

SEQ ID NO: 1527089 - DNA, 15 bp, Homo sapiens
cattcaattatctca

SEQ ID NO: 1527090 - DNA, 15 bp, Homo sapiens
attcaattatctcaa

SEQ ID NO: 1527091 - DNA, 15 bp, Homo sapiens
ttcaattatctcaaa

SEQ ID NO: 1527092 - DNA, 15 bp, Homo sapiens
tcaattatctcaaat

SEQ ID NO: 1527093 - DNA, 15 bp, Homo sapiens
caattatctcaaatt

SEQ ID NO: 1527094 - DNA, 15 bp, Homo sapiens
aattatctcaaattt

SEQ ID NO: 1527095 - DNA, 15 bp, Homo sapiens
attatctcaaatttt

SEQ ID NO: 1527096 - DNA, 15 bp, Homo sapiens
ttatctcaaatttta

SEQ ID NO: 1527097 - DNA, 15 bp, Homo sapiens
tatctcaaattttaa

SEQ ID NO: 1527098 - DNA, 15 bp, Homo sapiens
atctcaaattttaaa

SEQ ID NO: 1527099 - DNA, 15 bp, Homo sapiens
tctcaaattttaaaa

SEQ ID NO: 1527100 - DNA, 15 bp, Homo sapiens
ctcaaattttaaaat

SEQ ID NO: 1527101 - DNA, 15 bp, Homo sapiens
tcaaattttaaaatt

SEQ ID NO: 1527102 - DNA, 15 bp, Homo sapiens
caaattttaaaattt

SEQ ID NO: 1527103 - DNA, 15 bp, Homo sapiens
aaattttaaaattta

SEQ ID NO: 1527104 - DNA, 15 bp, Homo sapiens
aattttaaaatttat

SEQ ID NO: 1527105 - DNA, 15 bp, Homo sapiens
attttaaaatttatc

SEQ ID NO: 1527106 - DNA, 15 bp, Homo sapiens
ttttaaaatttatca

SEQ ID NO: 1527107 - DNA, 15 bp, Homo sapiens
tttaaaatttatcat

SEQ ID NO: 1527108 - DNA, 15 bp, Homo sapiens
ttaaaatttatcata

SEQ ID NO: 1527109 - DNA, 15 bp, Homo sapiens
taaaatttatcatag

SEQ ID NO: 1527110 - DNA, 15 bp, Homo sapiens
aaaatttatcatagg

SEQ ID NO: 1527111 - DNA, 15 bp, Homo sapiens
aaatttatcatagga

SEQ ID NO: 1527112 - DNA, 15 bp, Homo sapiens
aatttatcataggat

SEQ ID NO: 1527113 - DNA, 15 bp, Homo sapiens
atttatcataggatt

SEQ ID NO: 1527114 - DNA, 15 bp, Homo sapiens
tttatcataggattc

SEQ ID NO: 1527115 - DNA, 15 bp, Homo sapiens
ttatcataggattct

SEQ ID NO: 1527116 - DNA, 15 bp, Homo sapiens
tatcataggattctg

SEQ ID NO: 1527117 - DNA, 15 bp, Homo sapiens
atcataggattctga

SEQ ID NO: 1527118 - DNA, 15 bp, Homo sapiens
tcataggattctgaa

SEQ ID NO: 1527119 - DNA, 15 bp, Homo sapiens
cataggattctgaaa

SEQ ID NO: 1527120 - DNA, 15 bp, Homo sapiens
ataggattctgaaag

SEQ ID NO: 1527121 - DNA, 15 bp, Homo sapiens
taggattctgaaagg

SEQ ID NO: 1527122 - DNA, 15 bp, Homo sapiens
aggattctgaaagga

SEQ ID NO: 1527123 - DNA, 15 bp, Homo sapiens
ggattctgaaaggaa

SEQ ID NO: 1527124 - DNA, 15 bp, Homo sapiens
gattctgaaaggaaa

SEQ ID NO: 1527125 - DNA, 15 bp, Homo sapiens
attctgaaaggaaaa

SEQ ID NO: 1527126 - DNA, 15 bp, Homo sapiens
ttctgaaaggaaaac

SEQ ID NO: 1527127 - DNA, 15 bp, Homo sapiens
tctgaaaggaaaact

SEQ ID NO: 1527128 - DNA, 15 bp, Homo sapiens
ctgaaaggaaaactt

SEQ ID NO: 1527129 - DNA, 15 bp, Homo sapiens
tgaaaggaaaacttg

SEQ ID NO: 1527130 - DNA, 15 bp, Homo sapiens
gaaaggaaaacttgg

SEQ ID NO: 1527131 - DNA, 15 bp, Homo sapiens
aaaggaaaacttggt

SEQ ID NO: 1527132 - DNA, 15 bp, Homo sapiens
aaggaaaacttggta

SEQ ID NO: 1527133 - DNA, 15 bp, Homo sapiens
aggaaaacttggtat

SEQ ID NO: 1527134 - DNA, 15 bp, Homo sapiens
ggaaaacttggtatg

SEQ ID NO: 1527135 - DNA, 15 bp, Homo sapiens
gaaaacttggtatgg

SEQ ID NO: 1527136 - DNA, 15 bp, Homo sapiens
aaaacttggtatggg

SEQ ID NO: 1527137 - DNA, 15 bp, Homo sapiens
aaacttggtatggga

SEQ ID NO: 1527138 - DNA, 15 bp, Homo sapiens
aacttggtatgggac

SEQ ID NO: 1527139 - DNA, 15 bp, Homo sapiens
acttggtatgggaca

SEQ ID NO: 1527140 - DNA, 15 bp, Homo sapiens
cttggtatgggacat

SEQ ID NO: 1527141 - DNA, 15 bp, Homo sapiens
ttggtatgggacata

SEQ ID NO: 1527142 - DNA, 15 bp, Homo sapiens
tggtatgggacatac

SEQ ID NO: 1527143 - DNA, 15 bp, Homo sapiens
ggtatgggacatacg

SEQ ID NO: 1527144 - DNA, 15 bp, Homo sapiens
gtatgggacatacgt

SEQ ID NO: 1527145 - DNA, 15 bp, Homo sapiens
tatgggacatacgtg

SEQ ID NO: 1527146 - DNA, 15 bp, Homo sapiens
atgggacatacgtgg

SEQ ID NO: 1527147 - DNA, 15 bp, Homo sapiens
tgggacatacgtggg

SEQ ID NO: 1527148 - DNA, 15 bp, Homo sapiens
gggacatacgtggga

SEQ ID NO: 1527149 - DNA, 15 bp, Homo sapiens
ggacatacgtgggag

SEQ ID NO: 1527150 - DNA, 15 bp, Homo sapiens
gacatacgtgggagc

SEQ ID NO: 1527151 - DNA, 15 bp, Homo sapiens
acatacgtgggagca

SEQ ID NO: 1527152 - DNA, 15 bp, Homo sapiens
catacgtgggagcag

SEQ ID NO: 1527153 - DNA, 15 bp, Homo sapiens
atacgtgggagcagt

SEQ ID NO: 1527154 - DNA, 15 bp, Homo sapiens
tacgtgggagcagtg

SEQ ID NO: 1527155 - DNA, 15 bp, Homo sapiens
acgtgggagcagtgc

SEQ ID NO: 1527156 - DNA, 15 bp, Homo sapiens
cgtgggagcagtgca

SEQ ID NO: 1527157 - DNA, 15 bp, Homo sapiens
gtgggagcagtgcag

SEQ ID NO: 1527158 - DNA, 15 bp, Homo sapiens
tgggagcagtgcagg

SEQ ID NO: 1527159 - DNA, 15 bp, Homo sapiens
gggagcagtgcaggg

SEQ ID NO: 1527160 - DNA, 15 bp, Homo sapiens
ggagcagtgcagggt

SEQ ID NO: 1527161 - DNA, 15 bp, Homo sapiens
gagcagtgcagggta

SEQ ID NO: 1527162 - DNA, 15 bp, Homo sapiens
agcagtgcagggtac

SEQ ID NO: 1527163 - DNA, 15 bp, Homo sapiens
gcagtgcagggtaca

SEQ ID NO: 1527164 - DNA, 15 bp, Homo sapiens
cagtgcagggtacag

SEQ ID NO: 1527165 - DNA, 15 bp, Homo sapiens
agtgcagggtacagg

SEQ ID NO: 1527166 - DNA, 15 bp, Homo sapiens
gtgcagggtacaggg

SEQ ID NO: 1527167 - DNA, 15 bp, Homo sapiens
tgcagggtacagggt

SEQ ID NO: 1527168 - DNA, 15 bp, Homo sapiens
gcagggtacagggtc

SEQ ID NO: 1527169 - DNA, 15 bp, Homo sapiens
cagggtacagggtct

SEQ ID NO: 1527170 - DNA, 15 bp, Homo sapiens
agggtacagggtcta

SEQ ID NO: 1527171 - DNA, 15 bp, Homo sapiens
gggtacagggtctat

SEQ ID NO: 1527172 - DNA, 15 bp, Homo sapiens
ggtacagggtctatg

SEQ ID NO: 1527173 - DNA, 15 bp, Homo sapiens
gtacagggtctatgt

SEQ ID NO: 1527174 - DNA, 15 bp, Homo sapiens
tacagggtctatgtg

SEQ ID NO: 1527175 - DNA, 15 bp, Homo sapiens
acagggtctatgtgt

SEQ ID NO: 1527176 - DNA, 15 bp, Homo sapiens
cagggtctatgtgtc

SEQ ID NO: 1527177 - DNA, 15 bp, Homo sapiens
agggtctatgtgtct

SEQ ID NO: 1527178 - DNA, 15 bp, Homo sapiens
gggtctatgtgtctt

SEQ ID NO: 1527179 - DNA, 15 bp, Homo sapiens
ggtctatgtgtcttg

SEQ ID NO: 1527180 - DNA, 15 bp, Homo sapiens
gtctatgtgtcttga

SEQ ID NO: 1527181 - DNA, 15 bp, Homo sapiens
tctatgtgtcttgat

SEQ ID NO: 1527182 - DNA, 15 bp, Homo sapiens
ctatgtgtcttgatc

SEQ ID NO: 1527183 - DNA, 15 bp, Homo sapiens
tatgtgtcttgatcc

SEQ ID NO: 1527184 - DNA, 15 bp, Homo sapiens
atgtgtcttgatcca

SEQ ID NO: 1527185 - DNA, 15 bp, Homo sapiens
tgtgtcttgatccaa

SEQ ID NO: 1527186 - DNA, 15 bp, Homo sapiens
gtgtcttgatccaat

SEQ ID NO: 1527187 - DNA, 15 bp, Homo sapiens
tgtcttgatccaatg

SEQ ID NO: 1527188 - DNA, 15 bp, Homo sapiens
gtcttgatccaatgg

SEQ ID NO: 1527189 - DNA, 15 bp, Homo sapiens
tcttgatccaatggc

SEQ ID NO: 1527190 - DNA, 15 bp, Homo sapiens
cttgatccaatggct

SEQ ID NO: 1527191 - DNA, 15 bp, Homo sapiens
ttgatccaatggctg

SEQ ID NO: 1527192 - DNA, 15 bp, Homo sapiens
tgatccaatggctgt

SEQ ID NO: 1527193 - DNA, 15 bp, Homo sapiens
gatccaatggctgtc

SEQ ID NO: 1527194 - DNA, 15 bp, Homo sapiens
atccaatggctgtct

SEQ ID NO: 1527195 - DNA, 15 bp, Homo sapiens
tccaatggctgtctt

SEQ ID NO: 1527196 - DNA, 15 bp, Homo sapiens
ccaatggctgtcttg

SEQ ID NO: 1527197 - DNA, 15 bp, Homo sapiens
caatggctgtcttga

SEQ ID NO: 1527198 - DNA, 15 bp, Homo sapiens
aatggctgtcttgag

SEQ ID NO: 1527199 - DNA, 15 bp, Homo sapiens
atggctgtcttgagt

SEQ ID NO: 1527200 - DNA, 15 bp, Homo sapiens
tggctgtcttgagta

SEQ ID NO: 1527201 - DNA, 15 bp, Homo sapiens
ggctgtcttgagtat

SEQ ID NO: 1527202 - DNA, 15 bp, Homo sapiens
gctgtcttgagtatc

SEQ ID NO: 1527203 - DNA, 15 bp, Homo sapiens
ctgtcttgagtatca

SEQ ID NO: 1527204 - DNA, 15 bp, Homo sapiens
tgtcttgagtatcac

SEQ ID NO: 1527205 - DNA, 15 bp, Homo sapiens
gtcttgagtatcacc

SEQ ID NO: 1527206 - DNA, 15 bp, Homo sapiens
tcttgagtatcacct

SEQ ID NO: 1527207 - DNA, 15 bp, Homo sapiens
cttgagtatcaccta

SEQ ID NO: 1527208 - DNA, 15 bp, Homo sapiens
ttgagtatcacctat

SEQ ID NO: 1527209 - DNA, 15 bp, Homo sapiens
tgagtatcacctatc

SEQ ID NO: 1527210 - DNA, 15 bp, Homo sapiens
gagtatcacctatcc

SEQ ID NO: 1527211 - DNA, 15 bp, Homo sapiens
agtatcacctatcct

SEQ ID NO: 1527212 - DNA, 15 bp, Homo sapiens
gtatcacctatcctg

SEQ ID NO: 1527213 - DNA, 15 bp, Homo sapiens
tatcacctatcctga

SEQ ID NO: 1527214 - DNA, 15 bp, Homo sapiens
atcacctatcctgag

SEQ ID NO: 1527215 - DNA, 15 bp, Homo sapiens
tcacctatcctgagg

SEQ ID NO: 1527216 - DNA, 15 bp, Homo sapiens
cacctatcctgaggt

SEQ ID NO: 1527217 - DNA, 15 bp, Homo sapiens
acctatcctgaggtc

SEQ ID NO: 1527218 - DNA, 15 bp, Homo sapiens
cctatcctgaggtct

SEQ ID NO: 1527219 - DNA, 15 bp, Homo sapiens
ctatcctgaggtctg

SEQ ID NO: 1527220 - DNA, 15 bp, Homo sapiens
tatcctgaggtctgg

SEQ ID NO: 1527221 - DNA, 15 bp, Homo sapiens
atcctgaggtctggt

SEQ ID NO: 1527222 - DNA, 15 bp, Homo sapiens
tcctgaggtctggtt

SEQ ID NO: 1527223 - DNA, 15 bp, Homo sapiens
cctgaggtctggttg

SEQ ID NO: 1527224 - DNA, 15 bp, Homo sapiens
ctgaggtctggttgg

SEQ ID NO: 1527225 - DNA, 15 bp, Homo sapiens
tgaggtctggttggt

SEQ ID NO: 1527226 - DNA, 15 bp, Homo sapiens
gaggtctggttggtg

SEQ ID NO: 1527227 - DNA, 15 bp, Homo sapiens
aggtctggttggtgt

SEQ ID NO: 1527228 - DNA, 15 bp, Homo sapiens
ggtctggttggtgtt

SEQ ID NO: 1527229 - DNA, 15 bp, Homo sapiens
gtctggttggtgtta

SEQ ID NO: 1527230 - DNA, 15 bp, Homo sapiens
tctggttggtgttat

SEQ ID NO: 1527231 - DNA, 15 bp, Homo sapiens
ctggttggtgttatc

SEQ ID NO: 1527232 - DNA, 15 bp, Homo sapiens
tggttggtgttatct

SEQ ID NO: 1527233 - DNA, 15 bp, Homo sapiens
ggttggtgttatctt

SEQ ID NO: 1527234 - DNA, 15 bp, Homo sapiens
gttggtgttatcttt

SEQ ID NO: 1527235 - DNA, 15 bp, Homo sapiens
ttggtgttatctttc

SEQ ID NO: 1527236 - DNA, 15 bp, Homo sapiens
tggtgttatctttcc

SEQ ID NO: 1527237 - DNA, 15 bp, Homo sapiens
ggtgttatctttcct

SEQ ID NO: 1527238 - DNA, 15 bp, Homo sapiens
gtgttatctttcctt

SEQ ID NO: 1527239 - DNA, 15 bp, Homo sapiens
tgttatctttccttc

SEQ ID NO: 1527240 - DNA, 15 bp, Homo sapiens
gttatctttccttcg

SEQ ID NO: 1527241 - DNA, 15 bp, Homo sapiens
ttatctttccttcgg

SEQ ID NO: 1527242 - DNA, 15 bp, Homo sapiens
tatctttccttcggc

SEQ ID NO: 1527243 - DNA, 15 bp, Homo sapiens
atctttccttcggcc

SEQ ID NO: 1527244 - DNA, 15 bp, Homo sapiens
tctttccttcggcca

SEQ ID NO: 1527245 - DNA, 15 bp, Homo sapiens
ctttccttcggccag

SEQ ID NO: 1527246 - DNA, 15 bp, Homo sapiens
tttccttcggccaga

SEQ ID NO: 1527247 - DNA, 15 bp, Homo sapiens
ttccttcggccagat

SEQ ID NO: 1527248 - DNA, 15 bp, Homo sapiens
tccttcggccagatg

SEQ ID NO: 1527249 - DNA, 15 bp, Homo sapiens
ccttcggccagatgg

SEQ ID NO: 1527250 - DNA, 15 bp, Homo sapiens
cttcggccagatggt

SEQ ID NO: 1527251 - DNA, 15 bp, Homo sapiens
ttcggccagatggtg

SEQ ID NO: 1527252 - DNA, 15 bp, Homo sapiens
tcggccagatggtgg

SEQ ID NO: 1527253 - DNA, 15 bp, Homo sapiens
cggccagatggtggt

SEQ ID NO: 1527254 - DNA, 15 bp, Homo sapiens
ggccagatggtggtg

SEQ ID NO: 1527255 - DNA, 15 bp, Homo sapiens
gccagatggtggtgg

SEQ ID NO: 1527256 - DNA, 15 bp, Homo sapiens
ccagatggtggtggg

SEQ ID NO: 1527257 - DNA, 15 bp, Homo sapiens
cagatggtggtgggt

SEQ ID NO: 1527258 - DNA, 15 bp, Homo sapiens
agatggtggtgggtg

SEQ ID NO: 1527259 - DNA, 15 bp, Homo sapiens
gatggtggtgggtga

SEQ ID NO: 1527260 - DNA, 15 bp, Homo sapiens
atggtggtgggtgaa

SEQ ID NO: 1527261 - DNA, 15 bp, Homo sapiens
tggtggtgggtgaat

SEQ ID NO: 1527262 - DNA, 15 bp, Homo sapiens
ggtggtgggtgaatt

SEQ ID NO: 1527263 - DNA, 15 bp, Homo sapiens
gtggtgggtgaattg

SEQ ID NO: 1527264 - DNA, 15 bp, Homo sapiens
tggtgggtgaattgt

SEQ ID NO: 1527265 - DNA, 15 bp, Homo sapiens
ggtgggtgaattgtt

SEQ ID NO: 1527266 - DNA, 15 bp, Homo sapiens
gtgggtgaattgttt

SEQ ID NO: 1527267 - DNA, 15 bp, Homo sapiens
tgggtgaattgtttc

SEQ ID NO: 1527268 - DNA, 15 bp, Homo sapiens
gggtgaattgtttcg

SEQ ID NO: 1527269 - DNA, 15 bp, Homo sapiens
ggtgaattgtttcga

SEQ ID NO: 1527270 - DNA, 15 bp, Homo sapiens
gtgaattgtttcgac

SEQ ID NO: 1527271 - DNA, 15 bp, Homo sapiens
tgaattgtttcgact

SEQ ID NO: 1527272 - DNA, 15 bp, Homo sapiens
gaattgtttcgactc

SEQ ID NO: 1527273 - DNA, 15 bp, Homo sapiens
aattgtttcgactcc

SEQ ID NO: 1527274 - DNA, 15 bp, Homo sapiens
attgtttcgactccc

SEQ ID NO: 1527275 - DNA, 15 bp, Homo sapiens
ttgtttcgactcccc

SEQ ID NO: 1527276 - DNA, 15 bp, Homo sapiens
tgtttcgactccccc

SEQ ID NO: 1527277 - DNA, 15 bp, Homo sapiens
gtttcgactccccct

SEQ ID NO: 1527278 - DNA, 15 bp, Homo sapiens
tttcgactcccccta

SEQ ID NO: 1527279 - DNA, 15 bp, Homo sapiens
ttcgactccccctaa

SEQ ID NO: 1527280 - DNA, 15 bp, Homo sapiens
tcgactccccctaag

SEQ ID NO: 1527281 - DNA, 15 bp, Homo sapiens
cgactccccctaagt

SEQ ID NO: 1527282 - DNA, 15 bp, Homo sapiens
gactccccctaagtt

SEQ ID NO: 1527283 - DNA, 15 bp, Homo sapiens
actccccctaagttg

SEQ ID NO: 1527284 - DNA, 15 bp, Homo sapiens
ctccccctaagttgg

SEQ ID NO: 1527285 - DNA, 15 bp, Homo sapiens
tccccctaagttgga

SEQ ID NO: 1527286 - DNA, 15 bp, Homo sapiens
ccccctaagttggag

SEQ ID NO: 1527287 - DNA, 15 bp, Homo sapiens
cccctaagttggagg

SEQ ID NO: 1527288 - DNA, 15 bp, Homo sapiens
ccctaagttggagga

SEQ ID NO: 1527289 - DNA, 15 bp, Homo sapiens
cctaagttggaggat

SEQ ID NO: 1527290 - DNA, 15 bp, Homo sapiens
ctaagttggaggatt

SEQ ID NO: 1527291 - DNA, 15 bp, Homo sapiens
taagttggaggattc

SEQ ID NO: 1527292 - DNA, 15 bp, Homo sapiens
aagttggaggattcc

SEQ ID NO: 1527293 - DNA, 15 bp, Homo sapiens
agttggaggattccg

SEQ ID NO: 1527294 - DNA, 15 bp, Homo sapiens
gttggaggattccgc

SEQ ID NO: 1527295 - DNA, 15 bp, Homo sapiens
ttggaggattccgca

SEQ ID NO: 1527296 - DNA, 15 bp, Homo sapiens
tggaggattccgcag

SEQ ID NO: 1527297 - DNA, 15 bp, Homo sapiens
ggaggattccgcagg

SEQ ID NO: 1527298 - DNA, 15 bp, Homo sapiens
gaggattccgcaggg

SEQ ID NO: 1527299 - DNA, 15 bp, Homo sapiens
aggattccgcagggg

SEQ ID NO: 1527300 - DNA, 15 bp, Homo sapiens
ggattccgcaggggt

SEQ ID NO: 1527301 - DNA, 15 bp, Homo sapiens
gattccgcaggggtt

SEQ ID NO: 1527302 - DNA, 15 bp, Homo sapiens
attccgcaggggttc

SEQ ID NO: 1527303 - DNA, 15 bp, Homo sapiens
ttccgcaggggttcc

SEQ ID NO: 1527304 - DNA, 15 bp, Homo sapiens
tccgcaggggttccg

SEQ ID NO: 1527305 - DNA, 15 bp, Homo sapiens
ccgcaggggttccgt

SEQ ID NO: 1527306 - DNA, 15 bp, Homo sapiens
cgcaggggttccgtg

SEQ ID NO: 1527307 - DNA, 15 bp, Homo sapiens
gcaggggttccgtgt

SEQ ID NO: 1527308 - DNA, 15 bp, Homo sapiens
caggggttccgtgtc

SEQ ID NO: 1527309 - DNA, 15 bp, Homo sapiens
aggggttccgtgtct

SEQ ID NO: 1527310 - DNA, 15 bp, Homo sapiens
ggggttccgtgtctg

SEQ ID NO: 1527311 - DNA, 15 bp, Homo sapiens
gggttccgtgtctgg

SEQ ID NO: 1527312 - DNA, 15 bp, Homo sapiens
ggttccgtgtctggt

SEQ ID NO: 1527313 - DNA, 15 bp, Homo sapiens
gttccgtgtctggtt

SEQ ID NO: 1527314 - DNA, 15 bp, Homo sapiens
ttccgtgtctggttt

SEQ ID NO: 1527315 - DNA, 15 bp, Homo sapiens
tccgtgtctggtttt

SEQ ID NO: 1527316 - DNA, 15 bp, Homo sapiens
ccgtgtctggttttt

SEQ ID NO: 1527317 - DNA, 15 bp, Homo sapiens
cgtgtctggtttttg

SEQ ID NO: 1527318 - DNA, 15 bp, Homo sapiens
gtgtctggtttttgt

SEQ ID NO: 1527319 - DNA, 15 bp, Homo sapiens
tgtctggtttttgtt

SEQ ID NO: 1527320 - DNA, 15 bp, Homo sapiens
gtctggtttttgttt

SEQ ID NO: 1527321 - DNA, 15 bp, Homo sapiens
tctggtttttgtttc

SEQ ID NO: 1527322 - DNA, 15 bp, Homo sapiens
ctggtttttgtttca

SEQ ID NO: 1527323 - DNA, 15 bp, Homo sapiens
tggtttttgtttcaa

SEQ ID NO: 1527324 - DNA, 15 bp, Homo sapiens
ggtttttgtttcaag

SEQ ID NO: 1527325 - DNA, 15 bp, Homo sapiens
gtttttgtttcaaga

SEQ ID NO: 1527326 - DNA, 15 bp, Homo sapiens
tttttgtttcaagat

SEQ ID NO: 1527327 - DNA, 15 bp, Homo sapiens
ttttgtttcaagatt

SEQ ID NO: 1527328 - DNA, 15 bp, Homo sapiens
tttgtttcaagatta

SEQ ID NO: 1527329 - DNA, 15 bp, Homo sapiens
ttgtttcaagattag

SEQ ID NO: 1527330 - DNA, 15 bp, Homo sapiens
tgtttcaagattagc

SEQ ID NO: 1527331 - DNA, 15 bp, Homo sapiens
gtttcaagattagcc

SEQ ID NO: 1527332 - DNA, 15 bp, Homo sapiens
tttcaagattagccc

SEQ ID NO: 1527333 - DNA, 15 bp, Homo sapiens
ttcaagattagcccc

SEQ ID NO: 1527334 - DNA, 15 bp, Homo sapiens
tcaagattagcccct

SEQ ID NO: 1527335 - DNA, 15 bp, Homo sapiens
caagattagcccctg

SEQ ID NO: 1527336 - DNA, 15 bp, Homo sapiens
aagattagcccctgg

SEQ ID NO: 1527337 - DNA, 15 bp, Homo sapiens
agattagcccctgga

SEQ ID NO: 1527338 - DNA, 15 bp, Homo sapiens
gattagcccctggaa

SEQ ID NO: 1527339 - DNA, 15 bp, Homo sapiens
attagcccctggaat

SEQ ID NO: 1527340 - DNA, 15 bp, Homo sapiens
ttagcccctggaatt

SEQ ID NO: 1527341 - DNA, 15 bp, Homo sapiens
tagcccctggaattc

SEQ ID NO: 1527342 - DNA, 15 bp, Homo sapiens
agcccctggaattcc

SEQ ID NO: 1527343 - DNA, 15 bp, Homo sapiens
gcccctggaattccc

SEQ ID NO: 1527344 - DNA, 15 bp, Homo sapiens
cccctggaattccca

SEQ ID NO: 1527345 - DNA, 15 bp, Homo sapiens
ccctggaattcccaa

SEQ ID NO: 1527346 - DNA, 15 bp, Homo sapiens
cctggaattcccaaa

SEQ ID NO: 1527347 - DNA, 15 bp, Homo sapiens
ctggaattcccaaat

SEQ ID NO: 1527348 - DNA, 15 bp, Homo sapiens
tggaattcccaaata

SEQ ID NO: 1527349 - DNA, 15 bp, Homo sapiens
ggaattcccaaataa

SEQ ID NO: 1527350 - DNA, 15 bp, Homo sapiens
gaattcccaaataag

SEQ ID NO: 1527351 - DNA, 15 bp, Homo sapiens
aattcccaaataagc

SEQ ID NO: 1527352 - DNA, 15 bp, Homo sapiens
attcccaaataagca

SEQ ID NO: 1527353 - DNA, 15 bp, Homo sapiens
ttcccaaataagcat

SEQ ID NO: 1527354 - DNA, 15 bp, Homo sapiens
tcccaaataagcata

SEQ ID NO: 1527355 - DNA, 15 bp, Homo sapiens
cccaaataagcatag

SEQ ID NO: 1527356 - DNA, 15 bp, Homo sapiens
ccaaataagcataga

SEQ ID NO: 1527357 - DNA, 15 bp, Homo sapiens
caaataagcatagag

SEQ ID NO: 1527358 - DNA, 15 bp, Homo sapiens
aaataagcatagagt

SEQ ID NO: 1527359 - DNA, 15 bp, Homo sapiens
aataagcatagagtt

SEQ ID NO: 1527360 - DNA, 15 bp, Homo sapiens
ataagcatagagtta

SEQ ID NO: 1527361 - DNA, 15 bp, Homo sapiens
taagcatagagttag

SEQ ID NO: 1527362 - DNA, 15 bp, Homo sapiens
aagcatagagttaga

SEQ ID NO: 1527363 - DNA, 15 bp, Homo sapiens
agcatagagttagat

SEQ ID NO: 1527364 - DNA, 15 bp, Homo sapiens
gcatagagttagata

SEQ ID NO: 1527365 - DNA, 15 bp, Homo sapiens
catagagttagataa

SEQ ID NO: 1527366 - DNA, 15 bp, Homo sapiens
atagagttagataag

SEQ ID NO: 1527367 - DNA, 15 bp, Homo sapiens
tagagttagataagc

SEQ ID NO: 1527368 - DNA, 15 bp, Homo sapiens
agagttagataagcg

SEQ ID NO: 1527369 - DNA, 15 bp, Homo sapiens
gagttagataagcgg

SEQ ID NO: 1527370 - DNA, 15 bp, Homo sapiens
agttagataagcggg

SEQ ID NO: 1527371 - DNA, 15 bp, Homo sapiens
gttagataagcgggc

SEQ ID NO: 1527372 - DNA, 15 bp, Homo sapiens
ttagataagcgggca

SEQ ID NO: 1527373 - DNA, 15 bp, Homo sapiens
tagataagcgggcat

SEQ ID NO: 1527374 - DNA, 15 bp, Homo sapiens
agataagcgggcatg

SEQ ID NO: 1527375 - DNA, 15 bp, Homo sapiens
gataagcgggcatgg

SEQ ID NO: 1527376 - DNA, 15 bp, Homo sapiens
ataagcgggcatggt

SEQ ID NO: 1527377 - DNA, 15 bp, Homo sapiens
taagcgggcatggtg

SEQ ID NO: 1527378 - DNA, 15 bp, Homo sapiens
aagcgggcatggtgc

SEQ ID NO: 1527379 - DNA, 15 bp, Homo sapiens
agcgggcatggtgca

SEQ ID NO: 1527380 - DNA, 15 bp, Homo sapiens
gcgggcatggtgcaa

SEQ ID NO: 1527381 - DNA, 15 bp, Homo sapiens
cgggcatggtgcaaa

SEQ ID NO: 1527382 - DNA, 15 bp, Homo sapiens
gggcatggtgcaaag

SEQ ID NO: 1527383 - DNA, 15 bp, Homo sapiens
ggcatggtgcaaagg

SEQ ID NO: 1527384 - DNA, 15 bp, Homo sapiens
gcatggtgcaaagga

SEQ ID NO: 1527385 - DNA, 15 bp, Homo sapiens
catggtgcaaaggag

SEQ ID NO: 1527386 - DNA, 15 bp, Homo sapiens
atggtgcaaaggagt

SEQ ID NO: 1527387 - DNA, 15 bp, Homo sapiens
tggtgcaaaggagtg

SEQ ID NO: 1527388 - DNA, 15 bp, Homo sapiens
ggtgcaaaggagtgt

SEQ ID NO: 1527389 - DNA, 15 bp, Homo sapiens
gtgcaaaggagtgtc

SEQ ID NO: 1527390 - DNA, 15 bp, Homo sapiens
tgcaaaggagtgtct

SEQ ID NO: 1527391 - DNA, 15 bp, Homo sapiens
gcaaaggagtgtcta

SEQ ID NO: 1527392 - DNA, 15 bp, Homo sapiens
caaaggagtgtctag

SEQ ID NO: 1527393 - DNA, 15 bp, Homo sapiens
aaaggagtgtctagt

SEQ ID NO: 1527394 - DNA, 15 bp, Homo sapiens
aaggagtgtctagtg

SEQ ID NO: 1527395 - DNA, 15 bp, Homo sapiens
aggagtgtctagtgg

SEQ ID NO: 1527396 - DNA, 15 bp, Homo sapiens
ggagtgtctagtggg

SEQ ID NO: 1527397 - DNA, 15 bp, Homo sapiens
gagtgtctagtggga

SEQ ID NO: 1527398 - DNA, 15 bp, Homo sapiens
agtgtctagtgggaa

SEQ ID NO: 1527399 - DNA, 15 bp, Homo sapiens
gtgtctagtgggaaa

SEQ ID NO: 1527400 - DNA, 15 bp, Homo sapiens
tgtctagtgggaaag

SEQ ID NO: 1527401 - DNA, 15 bp, Homo sapiens
gtctagtgggaaagg

SEQ ID NO: 1527402 - DNA, 15 bp, Homo sapiens
tctagtgggaaaggg

SEQ ID NO: 1527403 - DNA, 15 bp, Homo sapiens
ctagtgggaaaggga

SEQ ID NO: 1527404 - DNA, 15 bp, Homo sapiens
tagtgggaaagggag

SEQ ID NO: 1527405 - DNA, 15 bp, Homo sapiens
agtgggaaagggaga

SEQ ID NO: 1527406 - DNA, 15 bp, Homo sapiens
gtgggaaagggagag

SEQ ID NO: 1527407 - DNA, 15 bp, Homo sapiens
tgggaaagggagaga

SEQ ID NO: 1527408 - DNA, 15 bp, Homo sapiens
gggaaagggagagaa

SEQ ID NO: 1527409 - DNA, 15 bp, Homo sapiens
ggaaagggagagaag

SEQ ID NO: 1527410 - DNA, 15 bp, Homo sapiens
gaaagggagagaagc

SEQ ID NO: 1527411 - DNA, 15 bp, Homo sapiens
aaagggagagaagca

SEQ ID NO: 1527412 - DNA, 15 bp, Homo sapiens
aagggagagaagcag

SEQ ID NO: 1527413 - DNA, 15 bp, Homo sapiens
agggagagaagcaga

SEQ ID NO: 1527414 - DNA, 15 bp, Homo sapiens
gggagagaagcagag

SEQ ID NO: 1527415 - DNA, 15 bp, Homo sapiens
ggagagaagcagagt

SEQ ID NO: 1527416 - DNA, 15 bp, Homo sapiens
gagagaagcagagtt

SEQ ID NO: 1527417 - DNA, 15 bp, Homo sapiens
agagaagcagagttt

SEQ ID NO: 1527418 - DNA, 15 bp, Homo sapiens
gagaagcagagtttc

SEQ ID NO: 1527419 - DNA, 15 bp, Homo sapiens
agaagcagagtttca

SEQ ID NO: 1527420 - DNA, 15 bp, Homo sapiens
gaagcagagtttcaa

SEQ ID NO: 1527421 - DNA, 15 bp, Homo sapiens
aagcagagtttcaaa

SEQ ID NO: 1527422 - DNA, 15 bp, Homo sapiens
agcagagtttcaaag

SEQ ID NO: 1527423 - DNA, 15 bp, Homo sapiens
gcagagtttcaaagt

SEQ ID NO: 1527424 - DNA, 15 bp, Homo sapiens
cagagtttcaaagta

SEQ ID NO: 1527425 - DNA, 15 bp, Homo sapiens
agagtttcaaagtac

SEQ ID NO: 1527426 - DNA, 15 bp, Homo sapiens
gagtttcaaagtaca

SEQ ID NO: 1527427 - DNA, 15 bp, Homo sapiens
agtttcaaagtacat

SEQ ID NO: 1527428 - DNA, 15 bp, Homo sapiens
gtttcaaagtacatt

SEQ ID NO: 1527429 - DNA, 15 bp, Homo sapiens
tttcaaagtacattt

SEQ ID NO: 1527430 - DNA, 15 bp, Homo sapiens
ttcaaagtacatttc

SEQ ID NO: 1527431 - DNA, 15 bp, Homo sapiens
tcaaagtacatttca

SEQ ID NO: 1527432 - DNA, 15 bp, Homo sapiens
caaagtacatttcaa

SEQ ID NO: 1527433 - DNA, 15 bp, Homo sapiens
aaagtacatttcaag

SEQ ID NO: 1527434 - DNA, 15 bp, Homo sapiens
aagtacatttcaagg

SEQ ID NO: 1527435 - DNA, 15 bp, Homo sapiens
agtacatttcaaggt

SEQ ID NO: 1527436 - DNA, 15 bp, Homo sapiens
gtacatttcaaggtt

SEQ ID NO: 1527437 - DNA, 15 bp, Homo sapiens
tacatttcaaggtta

SEQ ID NO: 1527438 - DNA, 15 bp, Homo sapiens
acatttcaaggttac

SEQ ID NO: 1527439 - DNA, 15 bp, Homo sapiens
catttcaaggttaca

SEQ ID NO: 1527440 - DNA, 15 bp, Homo sapiens
atttcaaggttacat

SEQ ID NO: 1527441 - DNA, 15 bp, Homo sapiens
tttcaaggttacatt

SEQ ID NO: 1527442 - DNA, 15 bp, Homo sapiens
ttcaaggttacattt

SEQ ID NO: 1527443 - DNA, 15 bp, Homo sapiens
tcaaggttacatttt

SEQ ID NO: 1527444 - DNA, 15 bp, Homo sapiens
caaggttacatttta

SEQ ID NO: 1527445 - DNA, 15 bp, Homo sapiens
aaggttacattttaa

SEQ ID NO: 1527446 - DNA, 15 bp, Homo sapiens
aggttacattttaag

SEQ ID NO: 1527447 - DNA, 15 bp, Homo sapiens
ggttacattttaaga

SEQ ID NO: 1527448 - DNA, 15 bp, Homo sapiens
gttacattttaagac

SEQ ID NO: 1527449 - DNA, 15 bp, Homo sapiens
ttacattttaagact

SEQ ID NO: 1527450 - DNA, 15 bp, Homo sapiens
tacattttaagacta

SEQ ID NO: 1527451 - DNA, 15 bp, Homo sapiens
acattttaagactaa

SEQ ID NO: 1527452 - DNA, 15 bp, Homo sapiens
cattttaagactaaa

SEQ ID NO: 1527453 - DNA, 15 bp, Homo sapiens
attttaagactaaag

SEQ ID NO: 1527454 - DNA, 15 bp, Homo sapiens
ttttaagactaaaga

SEQ ID NO: 1527455 - DNA, 15 bp, Homo sapiens
tttaagactaaagaa

SEQ ID NO: 1527456 - DNA, 15 bp, Homo sapiens
ttaagactaaagaaa

SEQ ID NO: 1527457 - DNA, 15 bp, Homo sapiens
taagactaaagaaaa

SEQ ID NO: 1527458 - DNA, 15 bp, Homo sapiens
aagactaaagaaaaa

SEQ ID NO: 1527459 - DNA, 15 bp, Homo sapiens
agactaaagaaaaag

SEQ ID NO: 1527460 - DNA, 15 bp, Homo sapiens
gactaaagaaaaagc

SEQ ID NO: 1527461 - DNA, 15 bp, Homo sapiens
actaaagaaaaagcc

SEQ ID NO: 1527462 - DNA, 15 bp, Homo sapiens
ctaaagaaaaagcct

SEQ ID NO: 1527463 - DNA, 15 bp, Homo sapiens
taaagaaaaagcctt

SEQ ID NO: 1527464 - DNA, 15 bp, Homo sapiens
aaagaaaaagcctta

SEQ ID NO: 1527465 - DNA, 15 bp, Homo sapiens
aagaaaaagccttaa

SEQ ID NO: 1527466 - DNA, 15 bp, Homo sapiens
agaaaaagccttaaa

SEQ ID NO: 1527467 - DNA, 15 bp, Homo sapiens
aaaaagccttaaaat

SEQ ID NO: 1527468 - DNA, 15 bp, Homo sapiens
aaaagccttaaaatg

SEQ ID NO: 1527469 - DNA, 15 bp, Homo sapiens
aaagccttaaaatgc

SEQ ID NO: 1527470 - DNA, 15 bp, Homo sapiens
aagccttaaaatgca

SEQ ID NO: 1527471 - DNA, 15 bp, Homo sapiens
agccttaaaatgcat

SEQ ID NO: 1527472 - DNA, 15 bp, Homo sapiens
gccttaaaatgcatt

SEQ ID NO: 1527473 - DNA, 15 bp, Homo sapiens
ccttaaaatgcattt

SEQ ID NO: 1527474 - DNA, 15 bp, Homo sapiens
cttaaaatgcatttt

SEQ ID NO: 1527475 - DNA, 15 bp, Homo sapiens
ttaaaatgcattttt

SEQ ID NO: 1527476 - DNA, 15 bp, Homo sapiens
taaaatgcattttta

SEQ ID NO: 1527477 - DNA, 15 bp, Homo sapiens
aaaatgcatttttaa

SEQ ID NO: 1527478 - DNA, 15 bp, Homo sapiens
aaatgcatttttaaa

SEQ ID NO: 1527479 - DNA, 15 bp, Homo sapiens
aatgcatttttaaag

SEQ ID NO: 1527480 - DNA, 15 bp, Homo sapiens
atgcatttttaaagc

SEQ ID NO: 1527481 - DNA, 15 bp, Homo sapiens
tgcatttttaaagct

SEQ ID NO: 1527482 - DNA, 15 bp, Homo sapiens
gcatttttaaagctg

SEQ ID NO: 1527483 - DNA, 15 bp, Homo sapiens
catttttaaagctga

SEQ ID NO: 1527484 - DNA, 15 bp, Homo sapiens
atttttaaagctgat

SEQ ID NO: 1527485 - DNA, 15 bp, Homo sapiens
tttttaaagctgatt

SEQ ID NO: 1527486 - DNA, 15 bp, Homo sapiens
ttttaaagctgattt

SEQ ID NO: 1527487 - DNA, 15 bp, Homo sapiens
tttaaagctgattta

SEQ ID NO: 1527488 - DNA, 15 bp, Homo sapiens
ttaaagctgatttaa

SEQ ID NO: 1527489 - DNA, 15 bp, Homo sapiens
taaagctgatttaat

SEQ ID NO: 1527490 - DNA, 15 bp, Homo sapiens
aaagctgatttaatg

SEQ ID NO: 1527491 - DNA, 15 bp, Homo sapiens
aagctgatttaatgc

SEQ ID NO: 1527492 - DNA, 15 bp, Homo sapiens
agctgatttaatgct

SEQ ID NO: 1527493 - DNA, 15 bp, Homo sapiens
gctgatttaatgctt

SEQ ID NO: 1527494 - DNA, 15 bp, Homo sapiens
ctgatttaatgcttg

SEQ ID NO: 1527495 - DNA, 15 bp, Homo sapiens
tgatttaatgcttgg

SEQ ID NO: 1527496 - DNA, 15 bp, Homo sapiens
gatttaatgcttggc

SEQ ID NO: 1527497 - DNA, 15 bp, Homo sapiens
atttaatgcttggct

SEQ ID NO: 1527498 - DNA, 15 bp, Homo sapiens
tttaatgcttggcta

SEQ ID NO: 1527499 - DNA, 15 bp, Homo sapiens
ttaatgcttggctac

SEQ ID NO: 1527500 - DNA, 15 bp, Homo sapiens
taatgcttggctaca

SEQ ID NO: 1527501 - DNA, 15 bp, Homo sapiens
aatgcttggctacac

SEQ ID NO: 1527502 - DNA, 15 bp, Homo sapiens
atgcttggctacact

SEQ ID NO: 1527503 - DNA, 15 bp, Homo sapiens
tgcttggctacacta

SEQ ID NO: 1527504 - DNA, 15 bp, Homo sapiens
gcttggctacactag

SEQ ID NO: 1527505 - DNA, 15 bp, Homo sapiens
cttggctacactagg

SEQ ID NO: 1527506 - DNA, 15 bp, Homo sapiens
ttggctacactaggc

SEQ ID NO: 1527507 - DNA, 15 bp, Homo sapiens
tggctacactaggct

SEQ ID NO: 1527508 - DNA, 15 bp, Homo sapiens
ggctacactaggctg

SEQ ID NO: 1527509 - DNA, 15 bp, Homo sapiens
gctacactaggctgt

SEQ ID NO: 1527510 - DNA, 15 bp, Homo sapiens
ctacactaggctgtg

SEQ ID NO: 1527511 - DNA, 15 bp, Homo sapiens
tacactaggctgtgg

SEQ ID NO: 1527512 - DNA, 15 bp, Homo sapiens
acactaggctgtggc

SEQ ID NO: 1527513 - DNA, 15 bp, Homo sapiens
cactaggctgtggcc

SEQ ID NO: 1527514 - DNA, 15 bp, Homo sapiens
actaggctgtggcca

SEQ ID NO: 1527515 - DNA, 15 bp, Homo sapiens
ctaggctgtggccag

SEQ ID NO: 1527516 - DNA, 15 bp, Homo sapiens
taggctgtggccagt

SEQ ID NO: 1527517 - DNA, 15 bp, Homo sapiens
aggctgtggccagtg

SEQ ID NO: 1527518 - DNA, 15 bp, Homo sapiens
ggctgtggccagtgt

SEQ ID NO: 1527519 - DNA, 15 bp, Homo sapiens
gctgtggccagtgtg

SEQ ID NO: 1527520 - DNA, 15 bp, Homo sapiens
ctgtggccagtgtgc

SEQ ID NO: 1527521 - DNA, 15 bp, Homo sapiens
tgtggccagtgtgca

SEQ ID NO: 1527522 - DNA, 15 bp, Homo sapiens
gtggccagtgtgcag

SEQ ID NO: 1527523 - DNA, 15 bp, Homo sapiens
tggccagtgtgcagt

SEQ ID NO: 1527524 - DNA, 15 bp, Homo sapiens
ggccagtgtgcagtg

SEQ ID NO: 1527525 - DNA, 15 bp, Homo sapiens
gccagtgtgcagtgt

SEQ ID NO: 1527526 - DNA, 15 bp, Homo sapiens
ccagtgtgcagtgtg

SEQ ID NO: 1527527 - DNA, 15 bp, Homo sapiens
cagtgtgcagtgtgg

SEQ ID NO: 1527528 - DNA, 15 bp, Homo sapiens
agtgtgcagtgtggc

SEQ ID NO: 1527529 - DNA, 15 bp, Homo sapiens
gtgtgcagtgtggct

SEQ ID NO: 1527530 - DNA, 15 bp, Homo sapiens
tgtgcagtgtggctg

SEQ ID NO: 1527531 - DNA, 15 bp, Homo sapiens
gtgcagtgtggctgc

SEQ ID NO: 1527532 - DNA, 15 bp, Homo sapiens
tgcagtgtggctgct

SEQ ID NO: 1527533 - DNA, 15 bp, Homo sapiens
gcagtgtggctgctc

SEQ ID NO: 1527534 - DNA, 15 bp, Homo sapiens
cagtgtggctgctct

SEQ ID NO: 1527535 - DNA, 15 bp, Homo sapiens
agtgtggctgctctt

SEQ ID NO: 1527536 - DNA, 15 bp, Homo sapiens
gtgtggctgctcttg

SEQ ID NO: 1527537 - DNA, 15 bp, Homo sapiens
tgtggctgctcttgg

SEQ ID NO: 1527538 - DNA, 15 bp, Homo sapiens
gtggctgctcttgga

SEQ ID NO: 1527539 - DNA, 15 bp, Homo sapiens
tggctgctcttggat

SEQ ID NO: 1527540 - DNA, 15 bp, Homo sapiens
ggctgctcttggatc

SEQ ID NO: 1527541 - DNA, 15 bp, Homo sapiens
gctgctcttggatca

SEQ ID NO: 1527542 - DNA, 15 bp, Homo sapiens
ctgctcttggatcag

SEQ ID NO: 1527543 - DNA, 15 bp, Homo sapiens
tgctcttggatcagg

SEQ ID NO: 1527544 - DNA, 15 bp, Homo sapiens
gctcttggatcaggt

SEQ ID NO: 1527545 - DNA, 15 bp, Homo sapiens
ctcttggatcaggtg

SEQ ID NO: 1527546 - DNA, 15 bp, Homo sapiens
tcttggatcaggtga

SEQ ID NO: 1527547 - DNA, 15 bp, Homo sapiens
cttggatcaggtgat

SEQ ID NO: 1527548 - DNA, 15 bp, Homo sapiens
ttggatcaggtgatg

SEQ ID NO: 1527549 - DNA, 15 bp, Homo sapiens
tggatcaggtgatgt

SEQ ID NO: 1527550 - DNA, 15 bp, Homo sapiens
ggatcaggtgatgtt

SEQ ID NO: 1527551 - DNA, 15 bp, Homo sapiens
gatcaggtgatgttt

SEQ ID NO: 1527552 - DNA, 15 bp, Homo sapiens
atcaggtgatgtttc

SEQ ID NO: 1527553 - DNA, 15 bp, Homo sapiens
tcaggtgatgtttca

SEQ ID NO: 1527554 - DNA, 15 bp, Homo sapiens
caggtgatgtttcat

SEQ ID NO: 1527555 - DNA, 15 bp, Homo sapiens
aggtgatgtttcatc

SEQ ID NO: 1527556 - DNA, 15 bp, Homo sapiens
ggtgatgtttcatca

SEQ ID NO: 1527557 - DNA, 15 bp, Homo sapiens
gtgatgtttcatcag

SEQ ID NO: 1527558 - DNA, 15 bp, Homo sapiens
tgatgtttcatcagc

SEQ ID NO: 1527559 - DNA, 15 bp, Homo sapiens
gatgtttcatcagct

SEQ ID NO: 1527560 - DNA, 15 bp, Homo sapiens
atgtttcatcagctg

SEQ ID NO: 1527561 - DNA, 15 bp, Homo sapiens
tgtttcatcagctgt

SEQ ID NO: 1527562 - DNA, 15 bp, Homo sapiens
gtttcatcagctgtg

SEQ ID NO: 1527563 - DNA, 15 bp, Homo sapiens
tttcatcagctgtgt

SEQ ID NO: 1527564 - DNA, 15 bp, Homo sapiens
ttcatcagctgtgtc

SEQ ID NO: 1527565 - DNA, 15 bp, Homo sapiens
tcatcagctgtgtcc

SEQ ID NO: 1527566 - DNA, 15 bp, Homo sapiens
catcagctgtgtcca

SEQ ID NO: 1527567 - DNA, 15 bp, Homo sapiens
atcagctgtgtccag

SEQ ID NO: 1527568 - DNA, 15 bp, Homo sapiens
tcagctgtgtccagg

SEQ ID NO: 1527569 - DNA, 15 bp, Homo sapiens
cagctgtgtccaggg

SEQ ID NO: 1527570 - DNA, 15 bp, Homo sapiens
agctgtgtccaggga

SEQ ID NO: 1527571 - DNA, 15 bp, Homo sapiens
gctgtgtccagggag

SEQ ID NO: 1527572 - DNA, 15 bp, Homo sapiens
ctgtgtccagggagg

SEQ ID NO: 1527573 - DNA, 15 bp, Homo sapiens
tgtgtccagggaggg

SEQ ID NO: 1527574 - DNA, 15 bp, Homo sapiens
gtgtccagggagggc

SEQ ID NO: 1527575 - DNA, 15 bp, Homo sapiens
tgtccagggagggca

SEQ ID NO: 1527576 - DNA, 15 bp, Homo sapiens
gtccagggagggcag

SEQ ID NO: 1527577 - DNA, 15 bp, Homo sapiens
tccagggagggcagg

SEQ ID NO: 1527578 - DNA, 15 bp, Homo sapiens
ccagggagggcaggg

SEQ ID NO: 1527579 - DNA, 15 bp, Homo sapiens
cagggagggcagggc

SEQ ID NO: 1527580 - DNA, 15 bp, Homo sapiens
agggagggcagggcc

SEQ ID NO: 1527581 - DNA, 15 bp, Homo sapiens
gggagggcagggcca

SEQ ID NO: 1527582 - DNA, 15 bp, Homo sapiens
ggagggcagggccat

SEQ ID NO: 1527583 - DNA, 15 bp, Homo sapiens
gagggcagggccatg

SEQ ID NO: 1527584 - DNA, 15 bp, Homo sapiens
agggcagggccatgt

SEQ ID NO: 1527585 - DNA, 15 bp, Homo sapiens
gggcagggccatgtg

SEQ ID NO: 1527586 - DNA, 15 bp, Homo sapiens
ggcagggccatgtgg

SEQ ID NO: 1527587 - DNA, 15 bp, Homo sapiens
gcagggccatgtggc

SEQ ID NO: 1527588 - DNA, 15 bp, Homo sapiens
cagggccatgtggca

SEQ ID NO: 1527589 - DNA, 15 bp, Homo sapiens
agggccatgtggcag

SEQ ID NO: 1527590 - DNA, 15 bp, Homo sapiens
gggccatgtggcaga

SEQ ID NO: 1527591 - DNA, 15 bp, Homo sapiens
ggccatgtggcagaa

SEQ ID NO: 1527592 - DNA, 15 bp, Homo sapiens
gccatgtggcagaac

SEQ ID NO: 1527593 - DNA, 15 bp, Homo sapiens
ccatgtggcagaacc

SEQ ID NO: 1527594 - DNA, 15 bp, Homo sapiens
catgtggcagaacct

SEQ ID NO: 1527595 - DNA, 15 bp, Homo sapiens
atgtggcagaacctg

SEQ ID NO: 1527596 - DNA, 15 bp, Homo sapiens
tgtggcagaacctgg

SEQ ID NO: 1527597 - DNA, 15 bp, Homo sapiens
gtggcagaacctggg

SEQ ID NO: 1527598 - DNA, 15 bp, Homo sapiens
tggcagaacctggga

SEQ ID NO: 1527599 - DNA, 15 bp, Homo sapiens
ggcagaacctgggac

SEQ ID NO: 1527600 - DNA, 15 bp, Homo sapiens
gcagaacctgggacc

SEQ ID NO: 1527601 - DNA, 15 bp, Homo sapiens
cagaacctgggacct

SEQ ID NO: 1527602 - DNA, 15 bp, Homo sapiens
agaacctgggacctc

SEQ ID NO: 1527603 - DNA, 15 bp, Homo sapiens
gaacctgggacctct

SEQ ID NO: 1527604 - DNA, 15 bp, Homo sapiens
aacctgggacctctg

SEQ ID NO: 1527605 - DNA, 15 bp, Homo sapiens
acctgggacctctgt

SEQ ID NO: 1527606 - DNA, 15 bp, Homo sapiens
cctgggacctctgtg

SEQ ID NO: 1527607 - DNA, 15 bp, Homo sapiens
ctgggacctctgtgt

SEQ ID NO: 1527608 - DNA, 15 bp, Homo sapiens
tgggacctctgtgtg

SEQ ID NO: 1527609 - DNA, 15 bp, Homo sapiens
gggacctctgtgtga

SEQ ID NO: 1527610 - DNA, 15 bp, Homo sapiens
ggacctctgtgtgag

SEQ ID NO: 1527611 - DNA, 15 bp, Homo sapiens
gacctctgtgtgagg

SEQ ID NO: 1527612 - DNA, 15 bp, Homo sapiens
acctctgtgtgaggg

SEQ ID NO: 1527613 - DNA, 15 bp, Homo sapiens
cctctgtgtgaggga

SEQ ID NO: 1527614 - DNA, 15 bp, Homo sapiens
ctctgtgtgagggac

SEQ ID NO: 1527615 - DNA, 15 bp, Homo sapiens
tctgtgtgagggact

SEQ ID NO: 1527616 - DNA, 15 bp, Homo sapiens
ctgtgtgagggacta

SEQ ID NO: 1527617 - DNA, 15 bp, Homo sapiens
tgtgtgagggactac

SEQ ID NO: 1527618 - DNA, 15 bp, Homo sapiens
gtgtgagggactacc

SEQ ID NO: 1527619 - DNA, 15 bp, Homo sapiens
tgtgagggactacct

SEQ ID NO: 1527620 - DNA, 15 bp, Homo sapiens
gtgagggactacctt

SEQ ID NO: 1527621 - DNA, 15 bp, Homo sapiens
tgagggactaccttg

SEQ ID NO: 1527622 - DNA, 15 bp, Homo sapiens
gagggactaccttgg

SEQ ID NO: 1527623 - DNA, 15 bp, Homo sapiens
agggactaccttggc

SEQ ID NO: 1527624 - DNA, 15 bp, Homo sapiens
gggactaccttggcc

SEQ ID NO: 1527625 - DNA, 15 bp, Homo sapiens
ggactaccttggccc

SEQ ID NO: 1527626 - DNA, 15 bp, Homo sapiens
gactaccttggcccc

SEQ ID NO: 1527627 - DNA, 15 bp, Homo sapiens
actaccttggcccct

SEQ ID NO: 1527628 - DNA, 15 bp, Homo sapiens
ctaccttggcccctg

SEQ ID NO: 1527629 - DNA, 15 bp, Homo sapiens
taccttggcccctgt

SEQ ID NO: 1527630 - DNA, 15 bp, Homo sapiens
accttggcccctgtc

SEQ ID NO: 1527631 - DNA, 15 bp, Homo sapiens
ccttggcccctgtcc

SEQ ID NO: 1527632 - DNA, 15 bp, Homo sapiens
cttggcccctgtcct

SEQ ID NO: 1527633 - DNA, 15 bp, Homo sapiens
ttggcccctgtcctt

SEQ ID NO: 1527634 - DNA, 15 bp, Homo sapiens
tggcccctgtcctta

SEQ ID NO: 1527635 - DNA, 15 bp, Homo sapiens
ggcccctgtccttag

SEQ ID NO: 1527636 - DNA, 15 bp, Homo sapiens
gcccctgtccttagc

SEQ ID NO: 1527637 - DNA, 15 bp, Homo sapiens
cccctgtccttagca

SEQ ID NO: 1527638 - DNA, 15 bp, Homo sapiens
ccctgtccttagcag

SEQ ID NO: 1527639 - DNA, 15 bp, Homo sapiens
cctgtccttagcagg

SEQ ID NO: 1527640 - DNA, 15 bp, Homo sapiens
ctgtccttagcagga

SEQ ID NO: 1527641 - DNA, 15 bp, Homo sapiens
tgtccttagcaggaa

SEQ ID NO: 1527642 - DNA, 15 bp, Homo sapiens
gtccttagcaggaag

SEQ ID NO: 1527643 - DNA, 15 bp, Homo sapiens
tccttagcaggaagc

SEQ ID NO: 1527644 - DNA, 15 bp, Homo sapiens
ccttagcaggaagct

SEQ ID NO: 1527645 - DNA, 15 bp, Homo sapiens
cttagcaggaagcta

SEQ ID NO: 1527646 - DNA, 15 bp, Homo sapiens
ttagcaggaagctat

SEQ ID NO: 1527647 - DNA, 15 bp, Homo sapiens
tagcaggaagctatg

SEQ ID NO: 1527648 - DNA, 15 bp, Homo sapiens
agcaggaagctatgg

SEQ ID NO: 1527649 - DNA, 15 bp, Homo sapiens
gcaggaagctatggt

SEQ ID NO: 1527650 - DNA, 15 bp, Homo sapiens
caggaagctatggta

SEQ ID NO: 1527651 - DNA, 15 bp, Homo sapiens
aggaagctatggtaa

SEQ ID NO: 1527652 - DNA, 15 bp, Homo sapiens
ggaagctatggtaag

SEQ ID NO: 1527653 - DNA, 15 bp, Homo sapiens
gaagctatggtaagg

SEQ ID NO: 1527654 - DNA, 15 bp, Homo sapiens
aagctatggtaagga

SEQ ID NO: 1527655 - DNA, 15 bp, Homo sapiens
agctatggtaaggaa

SEQ ID NO: 1527656 - DNA, 15 bp, Homo sapiens
gctatggtaaggaac

SEQ ID NO: 1527657 - DNA, 15 bp, Homo sapiens
ctatggtaaggaacc

SEQ ID NO: 1527658 - DNA, 15 bp, Homo sapiens
tatggtaaggaaccc

SEQ ID NO: 1527659 - DNA, 15 bp, Homo sapiens
atggtaaggaaccct

SEQ ID NO: 1527660 - DNA, 15 bp, Homo sapiens
tggtaaggaaccctt

SEQ ID NO: 1527661 - DNA, 15 bp, Homo sapiens
ggtaaggaaccctta

SEQ ID NO: 1527662 - DNA, 15 bp, Homo sapiens
gtaaggaacccttag

SEQ ID NO: 1527663 - DNA, 15 bp, Homo sapiens
taaggaacccttagg

SEQ ID NO: 1527664 - DNA, 15 bp, Homo sapiens
aaggaacccttaggg

SEQ ID NO: 1527665 - DNA, 15 bp, Homo sapiens
aggaacccttaggga

SEQ ID NO: 1527666 - DNA, 15 bp, Homo sapiens
ggaacccttagggag

SEQ ID NO: 1527667 - DNA, 15 bp, Homo sapiens
gaacccttagggaga

SEQ ID NO: 1527668 - DNA, 15 bp, Homo sapiens
aacccttagggagac

SEQ ID NO: 1527669 - DNA, 15 bp, Homo sapiens
acccttagggagaca

SEQ ID NO: 1527670 - DNA, 15 bp, Homo sapiens
cccttagggagacat

SEQ ID NO: 1527671 - DNA, 15 bp, Homo sapiens
ccttagggagacatt

SEQ ID NO: 1527672 - DNA, 15 bp, Homo sapiens
cttagggagacatta

SEQ ID NO: 1527673 - DNA, 15 bp, Homo sapiens
ttagggagacattaa

SEQ ID NO: 1527674 - DNA, 15 bp, Homo sapiens
tagggagacattaaa

SEQ ID NO: 1527675 - DNA, 15 bp, Homo sapiens
agggagacattaaat

SEQ ID NO: 1527676 - DNA, 15 bp, Homo sapiens
gggagacattaaatt

SEQ ID NO: 1527677 - DNA, 15 bp, Homo sapiens
ggagacattaaattg

SEQ ID NO: 1527678 - DNA, 15 bp, Homo sapiens
gagacattaaattgg

SEQ ID NO: 1527679 - DNA, 15 bp, Homo sapiens
agacattaaattggg

SEQ ID NO: 1527680 - DNA, 15 bp, Homo sapiens
gacattaaattgggg

SEQ ID NO: 1527681 - DNA, 15 bp, Homo sapiens
acattaaattgggga

SEQ ID NO: 1527682 - DNA, 15 bp, Homo sapiens
cattaaattggggag

SEQ ID NO: 1527683 - DNA, 15 bp, Homo sapiens
attaaattggggaga

SEQ ID NO: 1527684 - DNA, 15 bp, Homo sapiens
ttaaattggggagac

SEQ ID NO: 1527685 - DNA, 15 bp, Homo sapiens
taaattggggagacc

SEQ ID NO: 1527686 - DNA, 15 bp, Homo sapiens
aaattggggagaccg

SEQ ID NO: 1527687 - DNA, 15 bp, Homo sapiens
aattggggagaccgt

SEQ ID NO: 1527688 - DNA, 15 bp, Homo sapiens
attggggagaccgtc

SEQ ID NO: 1527689 - DNA, 15 bp, Homo sapiens
ttggggagaccgtcc

SEQ ID NO: 1527690 - DNA, 15 bp, Homo sapiens
tggggagaccgtccc

SEQ ID NO: 1527691 - DNA, 15 bp, Homo sapiens
ggggagaccgtccct

SEQ ID NO: 1527692 - DNA, 15 bp, Homo sapiens
gggagaccgtccctg

SEQ ID NO: 1527693 - DNA, 15 bp, Homo sapiens
ggagaccgtccctgc

SEQ ID NO: 1527694 - DNA, 15 bp, Homo sapiens
gagaccgtccctgcc

SEQ ID NO: 1527695 - DNA, 15 bp, Homo sapiens
agaccgtccctgcca

SEQ ID NO: 1527696 - DNA, 15 bp, Homo sapiens
gaccgtccctgccaa

SEQ ID NO: 1527697 - DNA, 15 bp, Homo sapiens
accgtccctgccaat

SEQ ID NO: 1527698 - DNA, 15 bp, Homo sapiens
ccgtccctgccaatc

SEQ ID NO: 1527699 - DNA, 15 bp, Homo sapiens
cgtccctgccaatcc

SEQ ID NO: 1527700 - DNA, 15 bp, Homo sapiens
gtccctgccaatcct

SEQ ID NO: 1527701 - DNA, 15 bp, Homo sapiens
tccctgccaatcctt

SEQ ID NO: 1527702 - DNA, 15 bp, Homo sapiens
ccctgccaatccttt

SEQ ID NO: 1527703 - DNA, 15 bp, Homo sapiens
cctgccaatccttta

SEQ ID NO: 1527704 - DNA, 15 bp, Homo sapiens
ctgccaatcctttaa

SEQ ID NO: 1527705 - DNA, 15 bp, Homo sapiens
tgccaatcctttaac

SEQ ID NO: 1527706 - DNA, 15 bp, Homo sapiens
gccaatcctttaacc

SEQ ID NO: 1527707 - DNA, 15 bp, Homo sapiens
ccaatcctttaacct

SEQ ID NO: 1527708 - DNA, 15 bp, Homo sapiens
caatcctttaacctc

SEQ ID NO: 1527709 - DNA, 15 bp, Homo sapiens
aatcctttaacctcc

SEQ ID NO: 1527710 - DNA, 15 bp, Homo sapiens
atcctttaacctccc

SEQ ID NO: 1527711 - DNA, 15 bp, Homo sapiens
tcctttaacctcccc

SEQ ID NO: 1527712 - DNA, 15 bp, Homo sapiens
cctttaacctcccca

SEQ ID NO: 1527713 - DNA, 15 bp, Homo sapiens
ctttaacctccccag

SEQ ID NO: 1527714 - DNA, 15 bp, Homo sapiens
tttaacctccccagc

SEQ ID NO: 1527715 - DNA, 15 bp, Homo sapiens
ttaacctccccagcc

SEQ ID NO: 1527716 - DNA, 15 bp, Homo sapiens
taacctccccagcct

SEQ ID NO: 1527717 - DNA, 15 bp, Homo sapiens
aacctccccagcctc

SEQ ID NO: 1527718 - DNA, 15 bp, Homo sapiens
acctccccagcctca

SEQ ID NO: 1527719 - DNA, 15 bp, Homo sapiens
cctccccagcctcag

SEQ ID NO: 1527720 - DNA, 15 bp, Homo sapiens
ctccccagcctcagc

SEQ ID NO: 1527721 - DNA, 15 bp, Homo sapiens
tccccagcctcagcg

SEQ ID NO: 1527722 - DNA, 15 bp, Homo sapiens
ccccagcctcagcga

SEQ ID NO: 1527723 - DNA, 15 bp, Homo sapiens
cccagcctcagcgac

SEQ ID NO: 1527724 - DNA, 15 bp, Homo sapiens
ccagcctcagcgacc

SEQ ID NO: 1527725 - DNA, 15 bp, Homo sapiens
cagcctcagcgacct

SEQ ID NO: 1527726 - DNA, 15 bp, Homo sapiens
agcctcagcgacctc

SEQ ID NO: 1527727 - DNA, 15 bp, Homo sapiens
gcctcagcgacctca

SEQ ID NO: 1527728 - DNA, 15 bp, Homo sapiens
cctcagcgacctcag

SEQ ID NO: 1527729 - DNA, 15 bp, Homo sapiens
ctcagcgacctcagt

SEQ ID NO: 1527730 - DNA, 15 bp, Homo sapiens
tcagcgacctcagtt

SEQ ID NO: 1527731 - DNA, 15 bp, Homo sapiens
cagcgacctcagttg

SEQ ID NO: 1527732 - DNA, 15 bp, Homo sapiens
agcgacctcagttgg

SEQ ID NO: 1527733 - DNA, 15 bp, Homo sapiens
gcgacctcagttgga

SEQ ID NO: 1527734 - DNA, 15 bp, Homo sapiens
cgacctcagttggaa

SEQ ID NO: 1527735 - DNA, 15 bp, Homo sapiens
gacctcagttggaaa

SEQ ID NO: 1527736 - DNA, 15 bp, Homo sapiens
acctcagttggaaag

SEQ ID NO: 1527737 - DNA, 15 bp, Homo sapiens
cctcagttggaaagt

SEQ ID NO: 1527738 - DNA, 15 bp, Homo sapiens
ctcagttggaaagtg

SEQ ID NO: 1527739 - DNA, 15 bp, Homo sapiens
tcagttggaaagtgg

SEQ ID NO: 1527740 - DNA, 15 bp, Homo sapiens
cagttggaaagtggt

SEQ ID NO: 1527741 - DNA, 15 bp, Homo sapiens
agttggaaagtggtg

SEQ ID NO: 1527742 - DNA, 15 bp, Homo sapiens
gttggaaagtggtgg

SEQ ID NO: 1527743 - DNA, 15 bp, Homo sapiens
ttggaaagtggtggt

SEQ ID NO: 1527744 - DNA, 15 bp, Homo sapiens
tggaaagtggtggta

SEQ ID NO: 1527745 - DNA, 15 bp, Homo sapiens
ggaaagtggtggtaa

SEQ ID NO: 1527746 - DNA, 15 bp, Homo sapiens
gaaagtggtggtaat

SEQ ID NO: 1527747 - DNA, 15 bp, Homo sapiens
aaagtggtggtaata

SEQ ID NO: 1527748 - DNA, 15 bp, Homo sapiens
aagtggtggtaataa

SEQ ID NO: 1527749 - DNA, 15 bp, Homo sapiens
agtggtggtaataat

SEQ ID NO: 1527750 - DNA, 15 bp, Homo sapiens
gtggtggtaataata

SEQ ID NO: 1527751 - DNA, 15 bp, Homo sapiens
tggtggtaataatac

SEQ ID NO: 1527752 - DNA, 15 bp, Homo sapiens
ggtggtaataatact

SEQ ID NO: 1527753 - DNA, 15 bp, Homo sapiens
gtggtaataatacta

SEQ ID NO: 1527754 - DNA, 15 bp, Homo sapiens
tggtaataatactac

SEQ ID NO: 1527755 - DNA, 15 bp, Homo sapiens
ggtaataatactacc

SEQ ID NO: 1527756 - DNA, 15 bp, Homo sapiens
gtaataatactacca

SEQ ID NO: 1527757 - DNA, 15 bp, Homo sapiens
taataatactaccac

SEQ ID NO: 1527758 - DNA, 15 bp, Homo sapiens
aataatactaccact

SEQ ID NO: 1527759 - DNA, 15 bp, Homo sapiens
ataatactaccactg

SEQ ID NO: 1527760 - DNA, 15 bp, Homo sapiens
taatactaccactga

SEQ ID NO: 1527761 - DNA, 15 bp, Homo sapiens
aatactaccactgac

SEQ ID NO: 1527762 - DNA, 15 bp, Homo sapiens
atactaccactgacc

SEQ ID NO: 1527763 - DNA, 15 bp, Homo sapiens
tactaccactgacca

SEQ ID NO: 1527764 - DNA, 15 bp, Homo sapiens
actaccactgaccag

SEQ ID NO: 1527765 - DNA, 15 bp, Homo sapiens
ctaccactgaccagg

SEQ ID NO: 1527766 - DNA, 15 bp, Homo sapiens
taccactgaccaggt

SEQ ID NO: 1527767 - DNA, 15 bp, Homo sapiens
accactgaccaggtg

SEQ ID NO: 1527768 - DNA, 15 bp, Homo sapiens
ccactgaccaggtgt

SEQ ID NO: 1527769 - DNA, 15 bp, Homo sapiens
cactgaccaggtgtg

SEQ ID NO: 1527770 - DNA, 15 bp, Homo sapiens
actgaccaggtgtgg

SEQ ID NO: 1527771 - DNA, 15 bp, Homo sapiens
ctgaccaggtgtggt

SEQ ID NO: 1527772 - DNA, 15 bp, Homo sapiens
tgaccaggtgtggtg

SEQ ID NO: 1527773 - DNA, 15 bp, Homo sapiens
ccaggtgtggtggcc

SEQ ID NO: 1527774 - DNA, 15 bp, Homo sapiens
caggtgtggtggcca

SEQ ID NO: 1527775 - DNA, 15 bp, Homo sapiens
aggtgtggtggccag

SEQ ID NO: 1527776 - DNA, 15 bp, Homo sapiens
ggtgtggtggccaga

SEQ ID NO: 1527777 - DNA, 15 bp, Homo sapiens
gtgtggtggccagac

SEQ ID NO: 1527778 - DNA, 15 bp, Homo sapiens
tgtggtggccagaca

SEQ ID NO: 1527779 - DNA, 15 bp, Homo sapiens
gtggtggccagacat

SEQ ID NO: 1527780 - DNA, 15 bp, Homo sapiens
tggtggccagacatt

SEQ ID NO: 1527781 - DNA, 15 bp, Homo sapiens
ggtggccagacattc

SEQ ID NO: 1527782 - DNA, 15 bp, Homo sapiens
gtggccagacattcc

SEQ ID NO: 1527783 - DNA, 15 bp, Homo sapiens
tggccagacattcca

SEQ ID NO: 1527784 - DNA, 15 bp, Homo sapiens
ggccagacattccac

SEQ ID NO: 1527785 - DNA, 15 bp, Homo sapiens
gccagacattccaca

SEQ ID NO: 1527786 - DNA, 15 bp, Homo sapiens
ccagacattccacac

SEQ ID NO: 1527787 - DNA, 15 bp, Homo sapiens
cagacattccacact

SEQ ID NO: 1527788 - DNA, 15 bp, Homo sapiens
agacattccacactt

SEQ ID NO: 1527789 - DNA, 15 bp, Homo sapiens
gacattccacacttt

SEQ ID NO: 1527790 - DNA, 15 bp, Homo sapiens
acattccacactttg

SEQ ID NO: 1527791 - DNA, 15 bp, Homo sapiens
cattccacactttgg

SEQ ID NO: 1527792 - DNA, 15 bp, Homo sapiens
attccacactttggc

SEQ ID NO: 1527793 - DNA, 15 bp, Homo sapiens
ttccacactttggct

SEQ ID NO: 1527794 - DNA, 15 bp, Homo sapiens
tccacactttggctt

SEQ ID NO: 1527795 - DNA, 15 bp, Homo sapiens
ccacactttggcttc

SEQ ID NO: 1527796 - DNA, 15 bp, Homo sapiens
cacactttggcttca

SEQ ID NO: 1527797 - DNA, 15 bp, Homo sapiens
acactttggcttcag

SEQ ID NO: 1527798 - DNA, 15 bp, Homo sapiens
cactttggcttcagc

SEQ ID NO: 1527799 - DNA, 15 bp, Homo sapiens
actttggcttcagcc

SEQ ID NO: 1527800 - DNA, 15 bp, Homo sapiens
ctttggcttcagccg

SEQ ID NO: 1527801 - DNA, 15 bp, Homo sapiens
tttggcttcagccgc

SEQ ID NO: 1527802 - DNA, 15 bp, Homo sapiens
ttggcttcagccgct

SEQ ID NO: 1527803 - DNA, 15 bp, Homo sapiens
tggcttcagccgctc

SEQ ID NO: 1527804 - DNA, 15 bp, Homo sapiens
ggcttcagccgctcc

SEQ ID NO: 1527805 - DNA, 15 bp, Homo sapiens
gcttcagccgctccc

SEQ ID NO: 1527806 - DNA, 15 bp, Homo sapiens
cttcagccgctccct

SEQ ID NO: 1527807 - DNA, 15 bp, Homo sapiens
ttcagccgctccctc

SEQ ID NO: 1527808 - DNA, 15 bp, Homo sapiens
tcagccgctccctcc

SEQ ID NO: 1527809 - DNA, 15 bp, Homo sapiens
cagccgctccctccc

SEQ ID NO: 1527810 - DNA, 15 bp, Homo sapiens
agccgctccctcccc

SEQ ID NO: 1527811 - DNA, 15 bp, Homo sapiens
gccgctccctcccca

SEQ ID NO: 1527812 - DNA, 15 bp, Homo sapiens
ccgctccctccccac

SEQ ID NO: 1527813 - DNA, 15 bp, Homo sapiens
cgctccctccccact

SEQ ID NO: 1527814 - DNA, 15 bp, Homo sapiens
gctccctccccactc

SEQ ID NO: 1527815 - DNA, 15 bp, Homo sapiens
ctccctccccactct

SEQ ID NO: 1527816 - DNA, 15 bp, Homo sapiens
tccctccccactcta

SEQ ID NO: 1527817 - DNA, 15 bp, Homo sapiens
ccctccccactctac

SEQ ID NO: 1527818 - DNA, 15 bp, Homo sapiens
cctccccactctact

SEQ ID NO: 1527819 - DNA, 15 bp, Homo sapiens
ctccccactctactg

SEQ ID NO: 1527820 - DNA, 15 bp, Homo sapiens
tccccactctactgt

SEQ ID NO: 1527821 - DNA, 15 bp, Homo sapiens
ccccactctactgta

SEQ ID NO: 1527822 - DNA, 15 bp, Homo sapiens
cccactctactgtaa

SEQ ID NO: 1527823 - DNA, 15 bp, Homo sapiens
ccactctactgtaat

SEQ ID NO: 1527824 - DNA, 15 bp, Homo sapiens
cactctactgtaatc

SEQ ID NO: 1527825 - DNA, 15 bp, Homo sapiens
actctactgtaatcc

SEQ ID NO: 1527826 - DNA, 15 bp, Homo sapiens
ctctactgtaatccc

SEQ ID NO: 1527827 - DNA, 15 bp, Homo sapiens
tctactgtaatccca

SEQ ID NO: 1527828 - DNA, 15 bp, Homo sapiens
ctactgtaatcccag

SEQ ID NO: 1527829 - DNA, 15 bp, Homo sapiens
tactgtaatcccagc

SEQ ID NO: 1527830 - DNA, 15 bp, Homo sapiens
agcactttgggagga

SEQ ID NO: 1527831 - DNA, 15 bp, Homo sapiens
gcactttgggaggaa

SEQ ID NO: 1527832 - DNA, 15 bp, Homo sapiens
cactttgggaggaag

SEQ ID NO: 1527833 - DNA, 15 bp, Homo sapiens
actttgggaggaaga

SEQ ID NO: 1527834 - DNA, 15 bp, Homo sapiens
ctttgggaggaagag

SEQ ID NO: 1527835 - DNA, 15 bp, Homo sapiens
tttgggaggaagagg

SEQ ID NO: 1527836 - DNA, 15 bp, Homo sapiens
ttgggaggaagaggt

SEQ ID NO: 1527837 - DNA, 15 bp, Homo sapiens
tgggaggaagaggta

SEQ ID NO: 1527838 - DNA, 15 bp, Homo sapiens
gggaggaagaggtag

SEQ ID NO: 1527839 - DNA, 15 bp, Homo sapiens
ggaggaagaggtagg

SEQ ID NO: 1527840 - DNA, 15 bp, Homo sapiens
gaggaagaggtaggc

SEQ ID NO: 1527841 - DNA, 15 bp, Homo sapiens
aggaagaggtaggcg

SEQ ID NO: 1527842 - DNA, 15 bp, Homo sapiens
ggaagaggtaggcgg

SEQ ID NO: 1527843 - DNA, 15 bp, Homo sapiens
gaagaggtaggcgga

SEQ ID NO: 1527844 - DNA, 15 bp, Homo sapiens
aagaggtaggcggaa

SEQ ID NO: 1527845 - DNA, 15 bp, Homo sapiens
agaggtaggcggaac

SEQ ID NO: 1527846 - DNA, 15 bp, Homo sapiens
gaggtaggcggaacc

SEQ ID NO: 1527847 - DNA, 15 bp, Homo sapiens
aggtaggcggaacct

SEQ ID NO: 1527848 - DNA, 15 bp, Homo sapiens
ggtaggcggaacctg

SEQ ID NO: 1527849 - DNA, 15 bp, Homo sapiens
gtaggcggaacctga

SEQ ID NO: 1527850 - DNA, 15 bp, Homo sapiens
taggcggaacctgag

SEQ ID NO: 1527851 - DNA, 15 bp, Homo sapiens
aggcggaacctgagg

SEQ ID NO: 1527852 - DNA, 15 bp, Homo sapiens
ggcggaacctgaggt

SEQ ID NO: 1527853 - DNA, 15 bp, Homo sapiens
gcggaacctgaggtc

SEQ ID NO: 1527854 - DNA, 15 bp, Homo sapiens
cggaacctgaggtct

SEQ ID NO: 1527855 - DNA, 15 bp, Homo sapiens
ggaacctgaggtctg

SEQ ID NO: 1527856 - DNA, 15 bp, Homo sapiens
gaacctgaggtctgg

SEQ ID NO: 1527857 - DNA, 15 bp, Homo sapiens
aacctgaggtctgga

SEQ ID NO: 1527858 - DNA, 15 bp, Homo sapiens
acctgaggtctggag

SEQ ID NO: 1527859 - DNA, 15 bp, Homo sapiens
cctgaggtctggagt

SEQ ID NO: 1527860 - DNA, 15 bp, Homo sapiens
ctgaggtctggagtt

SEQ ID NO: 1527861 - DNA, 15 bp, Homo sapiens
tgaggtctggagttg

SEQ ID NO: 1527862 - DNA, 15 bp, Homo sapiens
gaggtctggagttga

SEQ ID NO: 1527863 - DNA, 15 bp, Homo sapiens
aggtctggagttgag

SEQ ID NO: 1527864 - DNA, 15 bp, Homo sapiens
ggtctggagttgaga

SEQ ID NO: 1527865 - DNA, 15 bp, Homo sapiens
gtctggagttgagac

SEQ ID NO: 1527866 - DNA, 15 bp, Homo sapiens
tctggagttgagacc

SEQ ID NO: 1527867 - DNA, 15 bp, Homo sapiens
ctggagttgagacca

SEQ ID NO: 1527868 - DNA, 15 bp, Homo sapiens
tggagttgagaccag

SEQ ID NO: 1527869 - DNA, 15 bp, Homo sapiens
ggagttgagaccagc

SEQ ID NO: 1527870 - DNA, 15 bp, Homo sapiens
gagttgagaccagcc

SEQ ID NO: 1527871 - DNA, 15 bp, Homo sapiens
agttgagaccagcct

SEQ ID NO: 1527872 - DNA, 15 bp, Homo sapiens
gttgagaccagcctg

SEQ ID NO: 1527873 - DNA, 15 bp, Homo sapiens
cctggtcaacatggt

SEQ ID NO: 1527874 - DNA, 15 bp, Homo sapiens
ctggtcaacatggtg

SEQ ID NO: 1527875 - DNA, 15 bp, Homo sapiens
tggtcaacatggtga

SEQ ID NO: 1527876 - DNA, 15 bp, Homo sapiens
ggtcaacatggtgaa

SEQ ID NO: 1527877 - DNA, 15 bp, Homo sapiens
gtcaacatggtgaaa

SEQ ID NO: 1527878 - DNA, 15 bp, Homo sapiens
tggtgaaaccccata

SEQ ID NO: 1527879 - DNA, 15 bp, Homo sapiens
ggtgaaaccccatat

SEQ ID NO: 1527880 - DNA, 15 bp, Homo sapiens
gtgaaaccccatatc

SEQ ID NO: 1527881 - DNA, 15 bp, Homo sapiens
tgaaaccccatatct

SEQ ID NO: 1527882 - DNA, 15 bp, Homo sapiens
gaaaccccatatcta

SEQ ID NO: 1527883 - DNA, 15 bp, Homo sapiens
aaaccccatatctac

SEQ ID NO: 1527884 - DNA, 15 bp, Homo sapiens
aaccccatatctact

SEQ ID NO: 1527885 - DNA, 15 bp, Homo sapiens
accccatatctacta

SEQ ID NO: 1527886 - DNA, 15 bp, Homo sapiens
ccccatatctactaa

SEQ ID NO: 1527887 - DNA, 15 bp, Homo sapiens
cccatatctactaaa

SEQ ID NO: 1527888 - DNA, 15 bp, Homo sapiens
ccatatctactaaaa

SEQ ID NO: 1527889 - DNA, 15 bp, Homo sapiens
catatctactaaaaa

SEQ ID NO: 1527890 - DNA, 15 bp, Homo sapiens
atatctactaaaaag

SEQ ID NO: 1527891 - DNA, 15 bp, Homo sapiens
tatctactaaaaaga

SEQ ID NO: 1527892 - DNA, 15 bp, Homo sapiens
atctactaaaaagaa

SEQ ID NO: 1527893 - DNA, 15 bp, Homo sapiens
tctactaaaaagaaa

SEQ ID NO: 1527894 - DNA, 15 bp, Homo sapiens
ctactaaaaagaaag

SEQ ID NO: 1527895 - DNA, 15 bp, Homo sapiens
tactaaaaagaaagt

SEQ ID NO: 1527896 - DNA, 15 bp, Homo sapiens
actaaaaagaaagta

SEQ ID NO: 1527897 - DNA, 15 bp, Homo sapiens
ctaaaaagaaagtac

SEQ ID NO: 1527898 - DNA, 15 bp, Homo sapiens
taaaaagaaagtaca

SEQ ID NO: 1527899 - DNA, 15 bp, Homo sapiens
aaaaagaaagtacaa

SEQ ID NO: 1527900 - DNA, 15 bp, Homo sapiens
aaaagaaagtacaaa

SEQ ID NO: 1527901 - DNA, 15 bp, Homo sapiens
aaagaaagtacaaaa

SEQ ID NO: 1527902 - DNA, 15 bp, Homo sapiens
aagaaagtacaaaaa

SEQ ID NO: 1527903 - DNA, 15 bp, Homo sapiens
agaaagtacaaaaaa

SEQ ID NO: 1527904 - DNA, 15 bp, Homo sapiens
gaaagtacaaaaaat

SEQ ID NO: 1527905 - DNA, 15 bp, Homo sapiens
aaattagccaggtgc

SEQ ID NO: 1527906 - DNA, 15 bp, Homo sapiens
aattagccaggtgca

SEQ ID NO: 1527907 - DNA, 15 bp, Homo sapiens
attagccaggtgcag

SEQ ID NO: 1527908 - DNA, 15 bp, Homo sapiens
ttagccaggtgcagt

SEQ ID NO: 1527909 - DNA, 15 bp, Homo sapiens
tagccaggtgcagtg

SEQ ID NO: 1527910 - DNA, 15 bp, Homo sapiens
agccaggtgcagtgg

SEQ ID NO: 1527911 - DNA, 15 bp, Homo sapiens
ccaggtgcagtggca

SEQ ID NO: 1527912 - DNA, 15 bp, Homo sapiens
caggtgcagtggcac

SEQ ID NO: 1527913 - DNA, 15 bp, Homo sapiens
aggtgcagtggcaca

SEQ ID NO: 1527914 - DNA, 15 bp, Homo sapiens
ggtgcagtggcacac

SEQ ID NO: 1527915 - DNA, 15 bp, Homo sapiens
gtgcagtggcacacg

SEQ ID NO: 1527916 - DNA, 15 bp, Homo sapiens
tgcagtggcacacgt

SEQ ID NO: 1527917 - DNA, 15 bp, Homo sapiens
gcagtggcacacgtg

SEQ ID NO: 1527918 - DNA, 15 bp, Homo sapiens
cagtggcacacgtgt

SEQ ID NO: 1527919 - DNA, 15 bp, Homo sapiens
agtggcacacgtgtg

SEQ ID NO: 1527920 - DNA, 15 bp, Homo sapiens
gtggcacacgtgtgt

SEQ ID NO: 1527921 - DNA, 15 bp, Homo sapiens
tggcacacgtgtgtg

SEQ ID NO: 1527922 - DNA, 15 bp, Homo sapiens
ggcacacgtgtgtgg

SEQ ID NO: 1527923 - DNA, 15 bp, Homo sapiens
gcacacgtgtgtggt

SEQ ID NO: 1527924 - DNA, 15 bp, Homo sapiens
cacacgtgtgtggtc

SEQ ID NO: 1527925 - DNA, 15 bp, Homo sapiens
acacgtgtgtggtcc

SEQ ID NO: 1527926 - DNA, 15 bp, Homo sapiens
cacgtgtgtggtccc

SEQ ID NO: 1527927 - DNA, 15 bp, Homo sapiens
acgtgtgtggtccca

SEQ ID NO: 1527928 - DNA, 15 bp, Homo sapiens
cgtgtgtggtcccag

SEQ ID NO: 1527929 - DNA, 15 bp, Homo sapiens
gtgtgtggtcccagc

SEQ ID NO: 1527930 - DNA, 15 bp, Homo sapiens
tgtgtggtcccagct

SEQ ID NO: 1527931 - DNA, 15 bp, Homo sapiens
gtgtggtcccagcta

SEQ ID NO: 1527932 - DNA, 15 bp, Homo sapiens
gtcccagctactcgt

SEQ ID NO: 1527933 - DNA, 15 bp, Homo sapiens
tcccagctactcgtg

SEQ ID NO: 1527934 - DNA, 15 bp, Homo sapiens
cccagctactcgtgg

SEQ ID NO: 1527935 - DNA, 15 bp, Homo sapiens
ccagctactcgtggg

SEQ ID NO: 1527936 - DNA, 15 bp, Homo sapiens
cagctactcgtgggt

SEQ ID NO: 1527937 - DNA, 15 bp, Homo sapiens
agctactcgtgggtc

SEQ ID NO: 1527938 - DNA, 15 bp, Homo sapiens
gctactcgtgggtct

SEQ ID NO: 1527939 - DNA, 15 bp, Homo sapiens
ctactcgtgggtctg

SEQ ID NO: 1527940 - DNA, 15 bp, Homo sapiens
tactcgtgggtctga

SEQ ID NO: 1527941 - DNA, 15 bp, Homo sapiens
actcgtgggtctgag

SEQ ID NO: 1527942 - DNA, 15 bp, Homo sapiens
ctcgtgggtctgagg

SEQ ID NO: 1527943 - DNA, 15 bp, Homo sapiens
tcgtgggtctgaggc

SEQ ID NO: 1527944 - DNA, 15 bp, Homo sapiens
cgtgggtctgaggca

SEQ ID NO: 1527945 - DNA, 15 bp, Homo sapiens
gtgggtctgaggcat

SEQ ID NO: 1527946 - DNA, 15 bp, Homo sapiens
tgggtctgaggcatg

SEQ ID NO: 1527947 - DNA, 15 bp, Homo sapiens
gggtctgaggcatga

SEQ ID NO: 1527948 - DNA, 15 bp, Homo sapiens
ggtctgaggcatgaa

SEQ ID NO: 1527949 - DNA, 15 bp, Homo sapiens
gtctgaggcatgaaa

SEQ ID NO: 1527950 - DNA, 15 bp, Homo sapiens
tctgaggcatgaaaa

SEQ ID NO: 1527951 - DNA, 15 bp, Homo sapiens
ctgaggcatgaaaat

SEQ ID NO: 1527952 - DNA, 15 bp, Homo sapiens
tgaggcatgaaaatt

SEQ ID NO: 1527953 - DNA, 15 bp, Homo sapiens
gaggcatgaaaattg

SEQ ID NO: 1527954 - DNA, 15 bp, Homo sapiens
aggcatgaaaattgt

SEQ ID NO: 1527955 - DNA, 15 bp, Homo sapiens
ggcatgaaaattgtt

SEQ ID NO: 1527956 - DNA, 15 bp, Homo sapiens
gcatgaaaattgttt

SEQ ID NO: 1527957 - DNA, 15 bp, Homo sapiens
catgaaaattgtttg

SEQ ID NO: 1527958 - DNA, 15 bp, Homo sapiens
atgaaaattgtttga

SEQ ID NO: 1527959 - DNA, 15 bp, Homo sapiens
tgaaaattgtttgag

SEQ ID NO: 1527960 - DNA, 15 bp, Homo sapiens
ttgagcctgggaggc

SEQ ID NO: 1527961 - DNA, 15 bp, Homo sapiens
tgagcctgggaggca

SEQ ID NO: 1527962 - DNA, 15 bp, Homo sapiens
gagcctgggaggcag

SEQ ID NO: 1527963 - DNA, 15 bp, Homo sapiens
agcctgggaggcaga

SEQ ID NO: 1527964 - DNA, 15 bp, Homo sapiens
gcctgggaggcagag

SEQ ID NO: 1527965 - DNA, 15 bp, Homo sapiens
gaggttccattgagt

SEQ ID NO: 1527966 - DNA, 15 bp, Homo sapiens
aggttccattgagtg

SEQ ID NO: 1527967 - DNA, 15 bp, Homo sapiens
ggttccattgagtgg

SEQ ID NO: 1527968 - DNA, 15 bp, Homo sapiens
gttccattgagtgga

SEQ ID NO: 1527969 - DNA, 15 bp, Homo sapiens
ttccattgagtggag

SEQ ID NO: 1527970 - DNA, 15 bp, Homo sapiens
tccattgagtggaga

SEQ ID NO: 1527971 - DNA, 15 bp, Homo sapiens
ccattgagtggagat

SEQ ID NO: 1527972 - DNA, 15 bp, Homo sapiens
cattgagtggagatc

SEQ ID NO: 1527973 - DNA, 15 bp, Homo sapiens
attgagtggagatcg

SEQ ID NO: 1527974 - DNA, 15 bp, Homo sapiens
ttgagtggagatcga

SEQ ID NO: 1527975 - DNA, 15 bp, Homo sapiens
tgagtggagatcgag

SEQ ID NO: 1527976 - DNA, 15 bp, Homo sapiens
gagtggagatcgagc

SEQ ID NO: 1527977 - DNA, 15 bp, Homo sapiens
agtggagatcgagcc

SEQ ID NO: 1527978 - DNA, 15 bp, Homo sapiens
gtggagatcgagcca

SEQ ID NO: 1527979 - DNA, 15 bp, Homo sapiens
tggagatcgagccac

SEQ ID NO: 1527980 - DNA, 15 bp, Homo sapiens
ggagatcgagccact

SEQ ID NO: 1527981 - DNA, 15 bp, Homo sapiens
gagatcgagccactg

SEQ ID NO: 1527982 - DNA, 15 bp, Homo sapiens
agatcgagccactgc

SEQ ID NO: 1527983 - DNA, 15 bp, Homo sapiens
gatcgagccactgca

SEQ ID NO: 1527984 - DNA, 15 bp, Homo sapiens
atcgagccactgcac

SEQ ID NO: 1527985 - DNA, 15 bp, Homo sapiens
tcgagccactgcact

SEQ ID NO: 1527986 - DNA, 15 bp, Homo sapiens
cgagccactgcactc

SEQ ID NO: 1527987 - DNA, 15 bp, Homo sapiens
gagccactgcactcc

SEQ ID NO: 1527988 - DNA, 15 bp, Homo sapiens
agccactgcactcca

SEQ ID NO: 1527989 - DNA, 15 bp, Homo sapiens
cctgggtgatagaac

SEQ ID NO: 1527990 - DNA, 15 bp, Homo sapiens
ctgggtgatagaacg

SEQ ID NO: 1527991 - DNA, 15 bp, Homo sapiens
tgggtgatagaacga

SEQ ID NO: 1527992 - DNA, 15 bp, Homo sapiens
gggtgatagaacgag

SEQ ID NO: 1527993 - DNA, 15 bp, Homo sapiens
ggtgatagaacgaga

SEQ ID NO: 1527994 - DNA, 15 bp, Homo sapiens
gtgatagaacgagat

SEQ ID NO: 1527995 - DNA, 15 bp, Homo sapiens
tgatagaacgagatt

SEQ ID NO: 1527996 - DNA, 15 bp, Homo sapiens
gatagaacgagattc

SEQ ID NO: 1527997 - DNA, 15 bp, Homo sapiens
atagaacgagattct

SEQ ID NO: 1527998 - DNA, 15 bp, Homo sapiens
tagaacgagattctg

SEQ ID NO: 1527999 - DNA, 15 bp, Homo sapiens
agaacgagattctgt

SEQ ID NO: 1528000 - DNA, 15 bp, Homo sapiens
gaacgagattctgtc

SEQ ID NO: 1528001 - DNA, 15 bp, Homo sapiens
aacgagattctgtct

SEQ ID NO: 1528002 - DNA, 15 bp, Homo sapiens
acgagattctgtctc

SEQ ID NO: 1528003 - DNA, 15 bp, Homo sapiens
gattctgtctcaaaa

SEQ ID NO: 1528004 - DNA, 15 bp, Homo sapiens
attctgtctcaaaaa

SEQ ID NO: 1528005 - DNA, 15 bp, Homo sapiens
ttctgtctcaaaaaa

SEQ ID NO: 1528006 - DNA, 15 bp, Homo sapiens
aaataaaaataaaat

SEQ ID NO: 1528007 - DNA, 15 bp, Homo sapiens
aataaaaataaaata

SEQ ID NO: 1528008 - DNA, 15 bp, Homo sapiens
ataaaaataaaataa

SEQ ID NO: 1528009 - DNA, 15 bp, Homo sapiens
taaaaataaaataat

SEQ ID NO: 1528010 - DNA, 15 bp, Homo sapiens
aaaaataaaataata

SEQ ID NO: 1528011 - DNA, 15 bp, Homo sapiens
aaaataaaataataa

SEQ ID NO: 1528012 - DNA, 15 bp, Homo sapiens
aaataaaataataat

SEQ ID NO: 1528013 - DNA, 15 bp, Homo sapiens
aataaaataataata

SEQ ID NO: 1528014 - DNA, 15 bp, Homo sapiens
ataaaataataataa

SEQ ID NO: 1528015 - DNA, 15 bp, Homo sapiens
taataataataatac

SEQ ID NO: 1528016 - DNA, 15 bp, Homo sapiens
aataataataatacc

SEQ ID NO: 1528017 - DNA, 15 bp, Homo sapiens
ataataataatacca

SEQ ID NO: 1528018 - DNA, 15 bp, Homo sapiens
taataataataccac

SEQ ID NO: 1528019 - DNA, 15 bp, Homo sapiens
aataataataccact

SEQ ID NO: 1528020 - DNA, 15 bp, Homo sapiens
ataataataccactg

SEQ ID NO: 1528021 - DNA, 15 bp, Homo sapiens
taataataccactgc

SEQ ID NO: 1528022 - DNA, 15 bp, Homo sapiens
aataataccactgcc

SEQ ID NO: 1528023 - DNA, 15 bp, Homo sapiens
ataataccactgcct

SEQ ID NO: 1528024 - DNA, 15 bp, Homo sapiens
taataccactgcctg

SEQ ID NO: 1528025 - DNA, 15 bp, Homo sapiens
aataccactgcctgc

SEQ ID NO: 1528026 - DNA, 15 bp, Homo sapiens
ataccactgcctgcc

SEQ ID NO: 1528027 - DNA, 15 bp, Homo sapiens
taccactgcctgcca

SEQ ID NO: 1528028 - DNA, 15 bp, Homo sapiens
accactgcctgccac

SEQ ID NO: 1528029 - DNA, 15 bp, Homo sapiens
ccactgcctgccaca

SEQ ID NO: 1528030 - DNA, 15 bp, Homo sapiens
cactgcctgccacac

SEQ ID NO: 1528031 - DNA, 15 bp, Homo sapiens
actgcctgccacact

SEQ ID NO: 1528032 - DNA, 15 bp, Homo sapiens
ctgcctgccacacta

SEQ ID NO: 1528033 - DNA, 15 bp, Homo sapiens
tgcctgccacactaa

SEQ ID NO: 1528034 - DNA, 15 bp, Homo sapiens
gcctgccacactaag

SEQ ID NO: 1528035 - DNA, 15 bp, Homo sapiens
cctgccacactaaga

SEQ ID NO: 1528036 - DNA, 15 bp, Homo sapiens
ctgccacactaagat

SEQ ID NO: 1528037 - DNA, 15 bp, Homo sapiens
tgccacactaagatt

SEQ ID NO: 1528038 - DNA, 15 bp, Homo sapiens
gccacactaagattg

SEQ ID NO: 1528039 - DNA, 15 bp, Homo sapiens
ccacactaagattgt

SEQ ID NO: 1528040 - DNA, 15 bp, Homo sapiens
cacactaagattgtc

SEQ ID NO: 1528041 - DNA, 15 bp, Homo sapiens
acactaagattgtct

SEQ ID NO: 1528042 - DNA, 15 bp, Homo sapiens
cactaagattgtctg

SEQ ID NO: 1528043 - DNA, 15 bp, Homo sapiens
actaagattgtctga

SEQ ID NO: 1528044 - DNA, 15 bp, Homo sapiens
ctaagattgtctgat

SEQ ID NO: 1528045 - DNA, 15 bp, Homo sapiens
taagattgtctgatt

SEQ ID NO: 1528046 - DNA, 15 bp, Homo sapiens
aagattgtctgatta

SEQ ID NO: 1528047 - DNA, 15 bp, Homo sapiens
agattgtctgattag

SEQ ID NO: 1528048 - DNA, 15 bp, Homo sapiens
gattgtctgattaga

SEQ ID NO: 1528049 - DNA, 15 bp, Homo sapiens
attgtctgattagat

SEQ ID NO: 1528050 - DNA, 15 bp, Homo sapiens
ttgtctgattagatg

SEQ ID NO: 1528051 - DNA, 15 bp, Homo sapiens
tgtctgattagatga

SEQ ID NO: 1528052 - DNA, 15 bp, Homo sapiens
gtctgattagatgac

SEQ ID NO: 1528053 - DNA, 15 bp, Homo sapiens
tctgattagatgaca

SEQ ID NO: 1528054 - DNA, 15 bp, Homo sapiens
ctgattagatgacag

SEQ ID NO: 1528055 - DNA, 15 bp, Homo sapiens
tgattagatgacaga

SEQ ID NO: 1528056 - DNA, 15 bp, Homo sapiens
gattagatgacagaa

SEQ ID NO: 1528057 - DNA, 15 bp, Homo sapiens
attagatgacagaat

SEQ ID NO: 1528058 - DNA, 15 bp, Homo sapiens
ttagatgacagaatg

SEQ ID NO: 1528059 - DNA, 15 bp, Homo sapiens
tagatgacagaatga

SEQ ID NO: 1528060 - DNA, 15 bp, Homo sapiens
agatgacagaatgaa

SEQ ID NO: 1528061 - DNA, 15 bp, Homo sapiens
gatgacagaatgaat

SEQ ID NO: 1528062 - DNA, 15 bp, Homo sapiens
atgacagaatgaatg

SEQ ID NO: 1528063 - DNA, 15 bp, Homo sapiens
tgacagaatgaatgc

SEQ ID NO: 1528064 - DNA, 15 bp, Homo sapiens
gacagaatgaatgca

SEQ ID NO: 1528065 - DNA, 15 bp, Homo sapiens
acagaatgaatgcaa

SEQ ID NO: 1528066 - DNA, 15 bp, Homo sapiens
cagaatgaatgcaaa

SEQ ID NO: 1528067 - DNA, 15 bp, Homo sapiens
agaatgaatgcaaaa

SEQ ID NO: 1528068 - DNA, 15 bp, Homo sapiens
gaatgaatgcaaaag

SEQ ID NO: 1528069 - DNA, 15 bp, Homo sapiens
aatgaatgcaaaagt

SEQ ID NO: 1528070 - DNA, 15 bp, Homo sapiens
atgaatgcaaaagta

SEQ ID NO: 1528071 - DNA, 15 bp, Homo sapiens
tgaatgcaaaagtac

SEQ ID NO: 1528072 - DNA, 15 bp, Homo sapiens
gaatgcaaaagtact

SEQ ID NO: 1528073 - DNA, 15 bp, Homo sapiens
aatgcaaaagtactt

SEQ ID NO: 1528074 - DNA, 15 bp, Homo sapiens
atgcaaaagtacttt

SEQ ID NO: 1528075 - DNA, 15 bp, Homo sapiens
tgcaaaagtactttg

SEQ ID NO: 1528076 - DNA, 15 bp, Homo sapiens
gcaaaagtactttgt

SEQ ID NO: 1528077 - DNA, 15 bp, Homo sapiens
caaaagtactttgtg

SEQ ID NO: 1528078 - DNA, 15 bp, Homo sapiens
aaaagtactttgtga

SEQ ID NO: 1528079 - DNA, 15 bp, Homo sapiens
aaagtactttgtgaa

SEQ ID NO: 1528080 - DNA, 15 bp, Homo sapiens
aagtactttgtgaat

SEQ ID NO: 1528081 - DNA, 15 bp, Homo sapiens
agtactttgtgaatc

SEQ ID NO: 1528082 - DNA, 15 bp, Homo sapiens
gtactttgtgaatca

SEQ ID NO: 1528083 - DNA, 15 bp, Homo sapiens
tactttgtgaatcat

SEQ ID NO: 1528084 - DNA, 15 bp, Homo sapiens
actttgtgaatcata

SEQ ID NO: 1528085 - DNA, 15 bp, Homo sapiens
ctttgtgaatcataa

SEQ ID NO: 1528086 - DNA, 15 bp, Homo sapiens
tttgtgaatcataaa

SEQ ID NO: 1528087 - DNA, 15 bp, Homo sapiens
ttgtgaatcataaat

SEQ ID NO: 1528088 - DNA, 15 bp, Homo sapiens
tgtgaatcataaatg

SEQ ID NO: 1528089 - DNA, 15 bp, Homo sapiens
gtgaatcataaatgt

SEQ ID NO: 1528090 - DNA, 15 bp, Homo sapiens
tgaatcataaatgtt

SEQ ID NO: 1528091 - DNA, 15 bp, Homo sapiens
atcataaatgttttc

SEQ ID NO: 1528092 - DNA, 15 bp, Homo sapiens
tcataaatgttttca

SEQ ID NO: 1528093 - DNA, 15 bp, Homo sapiens
cataaatgttttcat

SEQ ID NO: 1528094 - DNA, 15 bp, Homo sapiens
ataaatgttttcatc

SEQ ID NO: 1528095 - DNA, 15 bp, Homo sapiens
taaatgttttcatca

SEQ ID NO: 1528096 - DNA, 15 bp, Homo sapiens
aaatgttttcatcaa

SEQ ID NO: 1528097 - DNA, 15 bp, Homo sapiens
aatgttttcatcaat

SEQ ID NO: 1528098 - DNA, 15 bp, Homo sapiens
atgttttcatcaata

SEQ ID NO: 1528099 - DNA, 15 bp, Homo sapiens
tgttttcatcaatat

SEQ ID NO: 1528100 - DNA, 15 bp, Homo sapiens
gttttcatcaatatt

SEQ ID NO: 1528101 - DNA, 15 bp, Homo sapiens
ttttcatcaatatta

SEQ ID NO: 1528102 - DNA, 15 bp, Homo sapiens
tttcatcaatattag

SEQ ID NO: 1528103 - DNA, 15 bp, Homo sapiens
ttcatcaatattagt

SEQ ID NO: 1528104 - DNA, 15 bp, Homo sapiens
tcatcaatattagtt

SEQ ID NO: 1528105 - DNA, 15 bp, Homo sapiens
catcaatattagtta

SEQ ID NO: 1528106 - DNA, 15 bp, Homo sapiens
atcaatattagttat

SEQ ID NO: 1528107 - DNA, 15 bp, Homo sapiens
tcaatattagttata

SEQ ID NO: 1528108 - DNA, 15 bp, Homo sapiens
caatattagttataa

SEQ ID NO: 1528109 - DNA, 15 bp, Homo sapiens
aatattagttataat

SEQ ID NO: 1528110 - DNA, 15 bp, Homo sapiens
atattagttataatg

SEQ ID NO: 1528111 - DNA, 15 bp, Homo sapiens
tattagttataatga

SEQ ID NO: 1528112 - DNA, 15 bp, Homo sapiens
attagttataatgac

SEQ ID NO: 1528113 - DNA, 15 bp, Homo sapiens
ttagttataatgaca

SEQ ID NO: 1528114 - DNA, 15 bp, Homo sapiens
tagttataatgacaa

SEQ ID NO: 1528115 - DNA, 15 bp, Homo sapiens
agttataatgacaat

SEQ ID NO: 1528116 - DNA, 15 bp, Homo sapiens
gttataatgacaatt

SEQ ID NO: 1528117 - DNA, 15 bp, Homo sapiens
ttataatgacaattg

SEQ ID NO: 1528118 - DNA, 15 bp, Homo sapiens
tataatgacaattgc

SEQ ID NO: 1528119 - DNA, 15 bp, Homo sapiens
ataatgacaattgct

SEQ ID NO: 1528120 - DNA, 15 bp, Homo sapiens
taatgacaattgctc

SEQ ID NO: 1528121 - DNA, 15 bp, Homo sapiens
aatgacaattgctcc

SEQ ID NO: 1528122 - DNA, 15 bp, Homo sapiens
atgacaattgctcct

SEQ ID NO: 1528123 - DNA, 15 bp, Homo sapiens
tgacaattgctcctt

SEQ ID NO: 1528124 - DNA, 15 bp, Homo sapiens
gacaattgctccttc

SEQ ID NO: 1528125 - DNA, 15 bp, Homo sapiens
acaattgctccttct

SEQ ID NO: 1528126 - DNA, 15 bp, Homo sapiens
caattgctccttctc

SEQ ID NO: 1528127 - DNA, 15 bp, Homo sapiens
aattgctccttctcc

SEQ ID NO: 1528128 - DNA, 15 bp, Homo sapiens
attgctccttctcct

SEQ ID NO: 1528129 - DNA, 15 bp, Homo sapiens
ttgctccttctccta

SEQ ID NO: 1528130 - DNA, 15 bp, Homo sapiens
tgctccttctcctaa

SEQ ID NO: 1528131 - DNA, 15 bp, Homo sapiens
gctccttctcctaat

SEQ ID NO: 1528132 - DNA, 15 bp, Homo sapiens
ctccttctcctaata

SEQ ID NO: 1528133 - DNA, 15 bp, Homo sapiens
tccttctcctaataa

SEQ ID NO: 1528134 - DNA, 15 bp, Homo sapiens
ccttctcctaataaa

SEQ ID NO: 1528135 - DNA, 15 bp, Homo sapiens
cttctcctaataaat

SEQ ID NO: 1528136 - DNA, 15 bp, Homo sapiens
ttctcctaataaatg

SEQ ID NO: 1528137 - DNA, 15 bp, Homo sapiens
tctcctaataaatgt

SEQ ID NO: 1528138 - DNA, 15 bp, Homo sapiens
ctcctaataaatgta

SEQ ID NO: 1528139 - DNA, 15 bp, Homo sapiens
tcctaataaatgtat

SEQ ID NO: 1528140 - DNA, 15 bp, Homo sapiens
cctaataaatgtatt

SEQ ID NO: 1528141 - DNA, 15 bp, Homo sapiens
ctaataaatgtattg

SEQ ID NO: 1528142 - DNA, 15 bp, Homo sapiens
taataaatgtattgc

SEQ ID NO: 1528143 - DNA, 15 bp, Homo sapiens
aataaatgtattgcc

SEQ ID NO: 1528144 - DNA, 15 bp, Homo sapiens
ataaatgtattgcct

SEQ ID NO: 1528145 - DNA, 15 bp, Homo sapiens
taaatgtattgcctt

SEQ ID NO: 1528146 - DNA, 15 bp, Homo sapiens
aaatgtattgccttt

SEQ ID NO: 1528147 - DNA, 15 bp, Homo sapiens
aatgtattgcctttc

SEQ ID NO: 1528148 - DNA, 15 bp, Homo sapiens
atgtattgcctttct

SEQ ID NO: 1528149 - DNA, 15 bp, Homo sapiens
tgtattgcctttctt

SEQ ID NO: 1528150 - DNA, 15 bp, Homo sapiens
gtattgcctttcttt

SEQ ID NO: 1528151 - DNA, 15 bp, Homo sapiens
tattgcctttcttta

SEQ ID NO: 1528152 - DNA, 15 bp, Homo sapiens
attgcctttctttag

SEQ ID NO: 1528153 - DNA, 15 bp, Homo sapiens
ttgcctttctttagg

SEQ ID NO: 1528154 - DNA, 15 bp, Homo sapiens
tgcctttctttagga

SEQ ID NO: 1528155 - DNA, 15 bp, Homo sapiens
gcctttctttaggaa

SEQ ID NO: 1528156 - DNA, 15 bp, Homo sapiens
cctttctttaggaat

SEQ ID NO: 1528157 - DNA, 15 bp, Homo sapiens
ctttctttaggaata

SEQ ID NO: 1528158 - DNA, 15 bp, Homo sapiens
tttctttaggaataa

SEQ ID NO: 1528159 - DNA, 15 bp, Homo sapiens
ttctttaggaataaa

SEQ ID NO: 1528160 - DNA, 15 bp, Homo sapiens
tctttaggaataaat

SEQ ID NO: 1528161 - DNA, 15 bp, Homo sapiens
ctttaggaataaata

SEQ ID NO: 1528162 - DNA, 15 bp, Homo sapiens
tttaggaataaatat

SEQ ID NO: 1528163 - DNA, 15 bp, Homo sapiens
ttaggaataaatata

SEQ ID NO: 1528164 - DNA, 15 bp, Homo sapiens
taggaataaatataa

SEQ ID NO: 1528165 - DNA, 15 bp, Homo sapiens
aggaataaatataac

SEQ ID NO: 1528166 - DNA, 15 bp, Homo sapiens
ggaataaatataaca

SEQ ID NO: 1528167 - DNA, 15 bp, Homo sapiens
gaataaatataacaa

SEQ ID NO: 1528168 - DNA, 15 bp, Homo sapiens
aataaatataacaag

SEQ ID NO: 1528169 - DNA, 15 bp, Homo sapiens
ataaatataacaaga

SEQ ID NO: 1528170 - DNA, 15 bp, Homo sapiens
taaatataacaagaa

SEQ ID NO: 1528171 - DNA, 15 bp, Homo sapiens
aaatataacaagaaa

SEQ ID NO: 1528172 - DNA, 15 bp, Homo sapiens
aatataacaagaaat

SEQ ID NO: 1528173 - DNA, 15 bp, Homo sapiens
atataacaagaaatg

SEQ ID NO: 1528174 - DNA, 15 bp, Homo sapiens
tataacaagaaatgt

SEQ ID NO: 1528175 - DNA, 15 bp, Homo sapiens
ataacaagaaatgtg

SEQ ID NO: 1528176 - DNA, 15 bp, Homo sapiens
taacaagaaatgtgt

SEQ ID NO: 1528177 - DNA, 15 bp, Homo sapiens
aacaagaaatgtgta

SEQ ID NO: 1528178 - DNA, 15 bp, Homo sapiens
acaagaaatgtgtaa

SEQ ID NO: 1528179 - DNA, 15 bp, Homo sapiens
caagaaatgtgtaag

SEQ ID NO: 1528180 - DNA, 15 bp, Homo sapiens
aagaaatgtgtaaga

SEQ ID NO: 1528181 - DNA, 15 bp, Homo sapiens
agaaatgtgtaagat

SEQ ID NO: 1528182 - DNA, 15 bp, Homo sapiens
gaaatgtgtaagata

SEQ ID NO: 1528183 - DNA, 15 bp, Homo sapiens
aaatgtgtaagatat

SEQ ID NO: 1528184 - DNA, 15 bp, Homo sapiens
aatgtgtaagatata

SEQ ID NO: 1528185 - DNA, 15 bp, Homo sapiens
atgtgtaagatatat

SEQ ID NO: 1528186 - DNA, 15 bp, Homo sapiens
tgtgtaagatatata

SEQ ID NO: 1528187 - DNA, 15 bp, Homo sapiens
gtgtaagatatatat

SEQ ID NO: 1528188 - DNA, 15 bp, Homo sapiens
tgtaagatatatatg

SEQ ID NO: 1528189 - DNA, 15 bp, Homo sapiens
gtaagatatatatga

SEQ ID NO: 1528190 - DNA, 15 bp, Homo sapiens
taagatatatatgag

SEQ ID NO: 1528191 - DNA, 15 bp, Homo sapiens
aagatatatatgaga

SEQ ID NO: 1528192 - DNA, 15 bp, Homo sapiens
agatatatatgagaa

SEQ ID NO: 1528193 - DNA, 15 bp, Homo sapiens
gatatatatgagaaa

SEQ ID NO: 1528194 - DNA, 15 bp, Homo sapiens
atatatatgagaaaa

SEQ ID NO: 1528195 - DNA, 15 bp, Homo sapiens
tatatatgagaaaaa

SEQ ID NO: 1528196 - DNA, 15 bp, Homo sapiens
atatatgagaaaaat

SEQ ID NO: 1528197 - DNA, 15 bp, Homo sapiens
tatatgagaaaaata

SEQ ID NO: 1528198 - DNA, 15 bp, Homo sapiens
atatgagaaaaataa

SEQ ID NO: 1528199 - DNA, 15 bp, Homo sapiens
tatgagaaaaataat

SEQ ID NO: 1528200 - DNA, 15 bp, Homo sapiens
atgagaaaaataata

SEQ ID NO: 1528201 - DNA, 15 bp, Homo sapiens
tgagaaaaataataa

SEQ ID NO: 1528202 - DNA, 15 bp, Homo sapiens
gagaaaaataataaa

SEQ ID NO: 1528203 - DNA, 15 bp, Homo sapiens
agaaaaataataaaa

SEQ ID NO: 1528204 - DNA, 15 bp, Homo sapiens
aaataataaaattca

SEQ ID NO: 1528205 - DNA, 15 bp, Homo sapiens
aataataaaattcac

SEQ ID NO: 1528206 - DNA, 15 bp, Homo sapiens
ataataaaattcacc

SEQ ID NO: 1528207 - DNA, 15 bp, Homo sapiens
taataaaattcacct

SEQ ID NO: 1528208 - DNA, 15 bp, Homo sapiens
aataaaattcacctg

SEQ ID NO: 1528209 - DNA, 15 bp, Homo sapiens
ataaaattcacctga

SEQ ID NO: 1528210 - DNA, 15 bp, Homo sapiens
taaaattcacctgaa

SEQ ID NO: 1528211 - DNA, 15 bp, Homo sapiens
aaaattcacctgaag

SEQ ID NO: 1528212 - DNA, 15 bp, Homo sapiens
aaattcacctgaagg

SEQ ID NO: 1528213 - DNA, 15 bp, Homo sapiens
aattcacctgaagga

SEQ ID NO: 1528214 - DNA, 15 bp, Homo sapiens
attcacctgaaggac

SEQ ID NO: 1528215 - DNA, 15 bp, Homo sapiens
ttcacctgaaggaca

SEQ ID NO: 1528216 - DNA, 15 bp, Homo sapiens
tcacctgaaggacat

SEQ ID NO: 1528217 - DNA, 15 bp, Homo sapiens
cacctgaaggacata

SEQ ID NO: 1528218 - DNA, 15 bp, Homo sapiens
acctgaaggacataa

SEQ ID NO: 1528219 - DNA, 15 bp, Homo sapiens
cctgaaggacataaa

SEQ ID NO: 1528220 - DNA, 15 bp, Homo sapiens
ctgaaggacataaaa

SEQ ID NO: 1528221 - DNA, 15 bp, Homo sapiens
tgaaggacataaaag

SEQ ID NO: 1528222 - DNA, 15 bp, Homo sapiens
gaaggacataaaaga

SEQ ID NO: 1528223 - DNA, 15 bp, Homo sapiens
aaggacataaaagaa

SEQ ID NO: 1528224 - DNA, 15 bp, Homo sapiens
aggacataaaagaag

SEQ ID NO: 1528225 - DNA, 15 bp, Homo sapiens
ggacataaaagaaga

SEQ ID NO: 1528226 - DNA, 15 bp, Homo sapiens
gacataaaagaagac

SEQ ID NO: 1528227 - DNA, 15 bp, Homo sapiens
acataaaagaagacc

SEQ ID NO: 1528228 - DNA, 15 bp, Homo sapiens
cataaaagaagacca

SEQ ID NO: 1528229 - DNA, 15 bp, Homo sapiens
ataaaagaagaccaa

SEQ ID NO: 1528230 - DNA, 15 bp, Homo sapiens
taaaagaagaccaaa

SEQ ID NO: 1528231 - DNA, 15 bp, Homo sapiens
aaaagaagaccaaaa

SEQ ID NO: 1528232 - DNA, 15 bp, Homo sapiens
aaagaagaccaaaat

SEQ ID NO: 1528233 - DNA, 15 bp, Homo sapiens
aagaagaccaaaata

SEQ ID NO: 1528234 - DNA, 15 bp, Homo sapiens
agaagaccaaaataa

SEQ ID NO: 1528235 - DNA, 15 bp, Homo sapiens
gaagaccaaaataaa

SEQ ID NO: 1528236 - DNA, 15 bp, Homo sapiens
aagaccaaaataaat

SEQ ID NO: 1528237 - DNA, 15 bp, Homo sapiens
agaccaaaataaatg

SEQ ID NO: 1528238 - DNA, 15 bp, Homo sapiens
gaccaaaataaatga

SEQ ID NO: 1528239 - DNA, 15 bp, Homo sapiens
accaaaataaatgaa

SEQ ID NO: 1528240 - DNA, 15 bp, Homo sapiens
ccaaaataaatgaaa

SEQ ID NO: 1528241 - DNA, 15 bp, Homo sapiens
caaaataaatgaaac

SEQ ID NO: 1528242 - DNA, 15 bp, Homo sapiens
aaaataaatgaaaca

SEQ ID NO: 1528243 - DNA, 15 bp, Homo sapiens
aaataaatgaaacaa

SEQ ID NO: 1528244 - DNA, 15 bp, Homo sapiens
aataaatgaaacaac

SEQ ID NO: 1528245 - DNA, 15 bp, Homo sapiens
ataaatgaaacaaca

SEQ ID NO: 1528246 - DNA, 15 bp, Homo sapiens
taaatgaaacaacac

SEQ ID NO: 1528247 - DNA, 15 bp, Homo sapiens
aaatgaaacaacaca

SEQ ID NO: 1528248 - DNA, 15 bp, Homo sapiens
aatgaaacaacacat

SEQ ID NO: 1528249 - DNA, 15 bp, Homo sapiens
atgaaacaacacata

SEQ ID NO: 1528250 - DNA, 15 bp, Homo sapiens
tgaaacaacacatac

SEQ ID NO: 1528251 - DNA, 15 bp, Homo sapiens
gaaacaacacatact

SEQ ID NO: 1528252 - DNA, 15 bp, Homo sapiens
aaacaacacatactt

SEQ ID NO: 1528253 - DNA, 15 bp, Homo sapiens
aacaacacatacttc

SEQ ID NO: 1528254 - DNA, 15 bp, Homo sapiens
acaacacatacttct

SEQ ID NO: 1528255 - DNA, 15 bp, Homo sapiens
caacacatacttcta

SEQ ID NO: 1528256 - DNA, 15 bp, Homo sapiens
aacacatacttctag

SEQ ID NO: 1528257 - DNA, 15 bp, Homo sapiens
acacatacttctaga

SEQ ID NO: 1528258 - DNA, 15 bp, Homo sapiens
cacatacttctagat

SEQ ID NO: 1528259 - DNA, 15 bp, Homo sapiens
acatacttctagatg

SEQ ID NO: 1528260 - DNA, 15 bp, Homo sapiens
catacttctagatga

SEQ ID NO: 1528261 - DNA, 15 bp, Homo sapiens
atacttctagatgag

SEQ ID NO: 1528262 - DNA, 15 bp, Homo sapiens
tacttctagatgaga

SEQ ID NO: 1528263 - DNA, 15 bp, Homo sapiens
acttctagatgagaa

SEQ ID NO: 1528264 - DNA, 15 bp, Homo sapiens
cttctagatgagaaa

SEQ ID NO: 1528265 - DNA, 15 bp, Homo sapiens
ttctagatgagaaaa

SEQ ID NO: 1528266 - DNA, 15 bp, Homo sapiens
tctagatgagaaaac

SEQ ID NO: 1528267 - DNA, 15 bp, Homo sapiens
ctagatgagaaaact

SEQ ID NO: 1528268 - DNA, 15 bp, Homo sapiens
tagatgagaaaactc

SEQ ID NO: 1528269 - DNA, 15 bp, Homo sapiens
agatgagaaaactca

SEQ ID NO: 1528270 - DNA, 15 bp, Homo sapiens
gatgagaaaactcaa

SEQ ID NO: 1528271 - DNA, 15 bp, Homo sapiens
atgagaaaactcaat

SEQ ID NO: 1528272 - DNA, 15 bp, Homo sapiens
tgagaaaactcaata

SEQ ID NO: 1528273 - DNA, 15 bp, Homo sapiens
gagaaaactcaatat

SEQ ID NO: 1528274 - DNA, 15 bp, Homo sapiens
agaaaactcaatatt

SEQ ID NO: 1528275 - DNA, 15 bp, Homo sapiens
gaaaactcaatatta

SEQ ID NO: 1528276 - DNA, 15 bp, Homo sapiens
aaaactcaatattat

SEQ ID NO: 1528277 - DNA, 15 bp, Homo sapiens
aaactcaatattata

SEQ ID NO: 1528278 - DNA, 15 bp, Homo sapiens
aactcaatattataa

SEQ ID NO: 1528279 - DNA, 15 bp, Homo sapiens
actcaatattataaa

SEQ ID NO: 1528280 - DNA, 15 bp, Homo sapiens
ctcaatattataaag

SEQ ID NO: 1528281 - DNA, 15 bp, Homo sapiens
tcaatattataaaga

SEQ ID NO: 1528282 - DNA, 15 bp, Homo sapiens
caatattataaagag

SEQ ID NO: 1528283 - DNA, 15 bp, Homo sapiens
aatattataaagagg

SEQ ID NO: 1528284 - DNA, 15 bp, Homo sapiens
atattataaagaggt

SEQ ID NO: 1528285 - DNA, 15 bp, Homo sapiens
tattataaagaggtt

SEQ ID NO: 1528286 - DNA, 15 bp, Homo sapiens
attataaagaggtta

SEQ ID NO: 1528287 - DNA, 15 bp, Homo sapiens
ttataaagaggttag

SEQ ID NO: 1528288 - DNA, 15 bp, Homo sapiens
tataaagaggttagt

SEQ ID NO: 1528289 - DNA, 15 bp, Homo sapiens
ataaagaggttagtt

SEQ ID NO: 1528290 - DNA, 15 bp, Homo sapiens
taaagaggttagttc

SEQ ID NO: 1528291 - DNA, 15 bp, Homo sapiens
aaagaggttagttct

SEQ ID NO: 1528292 - DNA, 15 bp, Homo sapiens
aagaggttagttctc

SEQ ID NO: 1528293 - DNA, 15 bp, Homo sapiens
agaggttagttctct

SEQ ID NO: 1528294 - DNA, 15 bp, Homo sapiens
gaggttagttctcta

SEQ ID NO: 1528295 - DNA, 15 bp, Homo sapiens
aggttagttctctaa

SEQ ID NO: 1528296 - DNA, 15 bp, Homo sapiens
ggttagttctctaaa

SEQ ID NO: 1528297 - DNA, 15 bp, Homo sapiens
gttagttctctaaaa

SEQ ID NO: 1528298 - DNA, 15 bp, Homo sapiens
ttagttctctaaaat

SEQ ID NO: 1528299 - DNA, 15 bp, Homo sapiens
tagttctctaaaatg

SEQ ID NO: 1528300 - DNA, 15 bp, Homo sapiens
agttctctaaaatga

SEQ ID NO: 1528301 - DNA, 15 bp, Homo sapiens
gttctctaaaatgaa

SEQ ID NO: 1528302 - DNA, 15 bp, Homo sapiens
ttctctaaaatgaat

SEQ ID NO: 1528303 - DNA, 15 bp, Homo sapiens
tctctaaaatgaatc

SEQ ID NO: 1528304 - DNA, 15 bp, Homo sapiens
ctctaaaatgaatcc

SEQ ID NO: 1528305 - DNA, 15 bp, Homo sapiens
tctaaaatgaatccc

SEQ ID NO: 1528306 - DNA, 15 bp, Homo sapiens
ctaaaatgaatccct

SEQ ID NO: 1528307 - DNA, 15 bp, Homo sapiens
taaaatgaatcccta

SEQ ID NO: 1528308 - DNA, 15 bp, Homo sapiens
aaaatgaatccctaa

SEQ ID NO: 1528309 - DNA, 15 bp, Homo sapiens
aaatgaatccctaaa

SEQ ID NO: 1528310 - DNA, 15 bp, Homo sapiens
aatgaatccctaaac

SEQ ID NO: 1528311 - DNA, 15 bp, Homo sapiens
atgaatccctaaacc

SEQ ID NO: 1528312 - DNA, 15 bp, Homo sapiens
tgaatccctaaaccc

SEQ ID NO: 1528313 - DNA, 15 bp, Homo sapiens
gaatccctaaaccca

SEQ ID NO: 1528314 - DNA, 15 bp, Homo sapiens
aatccctaaacccac

SEQ ID NO: 1528315 - DNA, 15 bp, Homo sapiens
atccctaaacccaca

SEQ ID NO: 1528316 - DNA, 15 bp, Homo sapiens
tccctaaacccacaa

SEQ ID NO: 1528317 - DNA, 15 bp, Homo sapiens
ccctaaacccacaaa

SEQ ID NO: 1528318 - DNA, 15 bp, Homo sapiens
cctaaacccacaaag

SEQ ID NO: 1528319 - DNA, 15 bp, Homo sapiens
ctaaacccacaaagt

SEQ ID NO: 1528320 - DNA, 15 bp, Homo sapiens
taaacccacaaagtc

SEQ ID NO: 1528321 - DNA, 15 bp, Homo sapiens
aaacccacaaagtca

SEQ ID NO: 1528322 - DNA, 15 bp, Homo sapiens
aacccacaaagtcaa

SEQ ID NO: 1528323 - DNA, 15 bp, Homo sapiens
acccacaaagtcaat

SEQ ID NO: 1528324 - DNA, 15 bp, Homo sapiens
cccacaaagtcaatg

SEQ ID NO: 1528325 - DNA, 15 bp, Homo sapiens
ccacaaagtcaatgt

SEQ ID NO: 1528326 - DNA, 15 bp, Homo sapiens
cacaaagtcaatgta

SEQ ID NO: 1528327 - DNA, 15 bp, Homo sapiens
acaaagtcaatgtat

SEQ ID NO: 1528328 - DNA, 15 bp, Homo sapiens
caaagtcaatgtatt

SEQ ID NO: 1528329 - DNA, 15 bp, Homo sapiens
aaagtcaatgtattt

SEQ ID NO: 1528330 - DNA, 15 bp, Homo sapiens
aagtcaatgtatttc

SEQ ID NO: 1528331 - DNA, 15 bp, Homo sapiens
agtcaatgtatttcc

SEQ ID NO: 1528332 - DNA, 15 bp, Homo sapiens
gtcaatgtatttcca

SEQ ID NO: 1528333 - DNA, 15 bp, Homo sapiens
tcaatgtatttccaa

SEQ ID NO: 1528334 - DNA, 15 bp, Homo sapiens
caatgtatttccaat

SEQ ID NO: 1528335 - DNA, 15 bp, Homo sapiens
aatgtatttccaatg

SEQ ID NO: 1528336 - DNA, 15 bp, Homo sapiens
atgtatttccaatga

SEQ ID NO: 1528337 - DNA, 15 bp, Homo sapiens
tgtatttccaatgaa

SEQ ID NO: 1528338 - DNA, 15 bp, Homo sapiens
gtatttccaatgaaa

SEQ ID NO: 1528339 - DNA, 15 bp, Homo sapiens
tatttccaatgaaat

SEQ ID NO: 1528340 - DNA, 15 bp, Homo sapiens
atttccaatgaaatt

SEQ ID NO: 1528341 - DNA, 15 bp, Homo sapiens
tttccaatgaaattg

SEQ ID NO: 1528342 - DNA, 15 bp, Homo sapiens
ttccaatgaaattgt

SEQ ID NO: 1528343 - DNA, 15 bp, Homo sapiens
tccaatgaaattgtc

SEQ ID NO: 1528344 - DNA, 15 bp, Homo sapiens
ccaatgaaattgtca

SEQ ID NO: 1528345 - DNA, 15 bp, Homo sapiens
caatgaaattgtcaa

SEQ ID NO: 1528346 - DNA, 15 bp, Homo sapiens
aatgaaattgtcaac

SEQ ID NO: 1528347 - DNA, 15 bp, Homo sapiens
atgaaattgtcaaca

SEQ ID NO: 1528348 - DNA, 15 bp, Homo sapiens
tgaaattgtcaacag

SEQ ID NO: 1528349 - DNA, 15 bp, Homo sapiens
gaaattgtcaacagc

SEQ ID NO: 1528350 - DNA, 15 bp, Homo sapiens
aaattgtcaacagca

SEQ ID NO: 1528351 - DNA, 15 bp, Homo sapiens
aattgtcaacagcat

SEQ ID NO: 1528352 - DNA, 15 bp, Homo sapiens
attgtcaacagcatt

SEQ ID NO: 1528353 - DNA, 15 bp, Homo sapiens
ttgtcaacagcatta

SEQ ID NO: 1528354 - DNA, 15 bp, Homo sapiens
tgtcaacagcattat

SEQ ID NO: 1528355 - DNA, 15 bp, Homo sapiens
gtcaacagcattatt

SEQ ID NO: 1528356 - DNA, 15 bp, Homo sapiens
tcaacagcattattt

SEQ ID NO: 1528357 - DNA, 15 bp, Homo sapiens
caacagcattatttt

SEQ ID NO: 1528358 - DNA, 15 bp, Homo sapiens
aacagcattattttc

SEQ ID NO: 1528359 - DNA, 15 bp, Homo sapiens
acagcattattttcc

SEQ ID NO: 1528360 - DNA, 15 bp, Homo sapiens
cagcattattttccg

SEQ ID NO: 1528361 - DNA, 15 bp, Homo sapiens
agcattattttccga

SEQ ID NO: 1528362 - DNA, 15 bp, Homo sapiens
gcattattttccgaa

SEQ ID NO: 1528363 - DNA, 15 bp, Homo sapiens
cattattttccgaag

SEQ ID NO: 1528364 - DNA, 15 bp, Homo sapiens
attattttccgaagt

SEQ ID NO: 1528365 - DNA, 15 bp, Homo sapiens
ttattttccgaagtg

SEQ ID NO: 1528366 - DNA, 15 bp, Homo sapiens
tattttccgaagtgg

SEQ ID NO: 1528367 - DNA, 15 bp, Homo sapiens
attttccgaagtggg

SEQ ID NO: 1528368 - DNA, 15 bp, Homo sapiens
ttttccgaagtggga

SEQ ID NO: 1528369 - DNA, 15 bp, Homo sapiens
tttccgaagtgggat

SEQ ID NO: 1528370 - DNA, 15 bp, Homo sapiens
ttccgaagtgggatg

SEQ ID NO: 1528371 - DNA, 15 bp, Homo sapiens
tccgaagtgggatga

SEQ ID NO: 1528372 - DNA, 15 bp, Homo sapiens
ccgaagtgggatgag

SEQ ID NO: 1528373 - DNA, 15 bp, Homo sapiens
cgaagtgggatgagt

SEQ ID NO: 1528374 - DNA, 15 bp, Homo sapiens
gaagtgggatgagta

SEQ ID NO: 1528375 - DNA, 15 bp, Homo sapiens
aagtgggatgagtag

SEQ ID NO: 1528376 - DNA, 15 bp, Homo sapiens
agtgggatgagtagt

SEQ ID NO: 1528377 - DNA, 15 bp, Homo sapiens
gtgggatgagtagtg

SEQ ID NO: 1528378 - DNA, 15 bp, Homo sapiens
tgggatgagtagtgc

SEQ ID NO: 1528379 - DNA, 15 bp, Homo sapiens
gggatgagtagtgct

SEQ ID NO: 1528380 - DNA, 15 bp, Homo sapiens
ggatgagtagtgcta

SEQ ID NO: 1528381 - DNA, 15 bp, Homo sapiens
gatgagtagtgctaa

SEQ ID NO: 1528382 - DNA, 15 bp, Homo sapiens
atgagtagtgctaag

SEQ ID NO: 1528383 - DNA, 15 bp, Homo sapiens
tgagtagtgctaaga

SEQ ID NO: 1528384 - DNA, 15 bp, Homo sapiens
gagtagtgctaagat

SEQ ID NO: 1528385 - DNA, 15 bp, Homo sapiens
agtagtgctaagatt

SEQ ID NO: 1528386 - DNA, 15 bp, Homo sapiens
gtagtgctaagattt

SEQ ID NO: 1528387 - DNA, 15 bp, Homo sapiens
tagtgctaagattta

SEQ ID NO: 1528388 - DNA, 15 bp, Homo sapiens
agtgctaagatttat

SEQ ID NO: 1528389 - DNA, 15 bp, Homo sapiens
gtgctaagatttata

SEQ ID NO: 1528390 - DNA, 15 bp, Homo sapiens
tgctaagatttataa

SEQ ID NO: 1528391 - DNA, 15 bp, Homo sapiens
gctaagatttataag

SEQ ID NO: 1528392 - DNA, 15 bp, Homo sapiens
ctaagatttataaga

SEQ ID NO: 1528393 - DNA, 15 bp, Homo sapiens
taagatttataagaa

SEQ ID NO: 1528394 - DNA, 15 bp, Homo sapiens
aagatttataagaaa

SEQ ID NO: 1528395 - DNA, 15 bp, Homo sapiens
agatttataagaaag

SEQ ID NO: 1528396 - DNA, 15 bp, Homo sapiens
gatttataagaaagc

SEQ ID NO: 1528397 - DNA, 15 bp, Homo sapiens
atttataagaaagcc

SEQ ID NO: 1528398 - DNA, 15 bp, Homo sapiens
tttataagaaagcca

SEQ ID NO: 1528399 - DNA, 15 bp, Homo sapiens
ttataagaaagccaa

SEQ ID NO: 1528400 - DNA, 15 bp, Homo sapiens
tataagaaagccaac

SEQ ID NO: 1528401 - DNA, 15 bp, Homo sapiens
ataagaaagccaaca

SEQ ID NO: 1528402 - DNA, 15 bp, Homo sapiens
taagaaagccaacat

SEQ ID NO: 1528403 - DNA, 15 bp, Homo sapiens
aagaaagccaacatt

SEQ ID NO: 1528404 - DNA, 15 bp, Homo sapiens
agaaagccaacattc

SEQ ID NO: 1528405 - DNA, 15 bp, Homo sapiens
gaaagccaacattcc

SEQ ID NO: 1528406 - DNA, 15 bp, Homo sapiens
aaagccaacattcca

SEQ ID NO: 1528407 - DNA, 15 bp, Homo sapiens
aagccaacattccag

SEQ ID NO: 1528408 - DNA, 15 bp, Homo sapiens
agccaacattccaga

SEQ ID NO: 1528409 - DNA, 15 bp, Homo sapiens
gccaacattccagag

SEQ ID NO: 1528410 - DNA, 15 bp, Homo sapiens
ccaacattccagagc

SEQ ID NO: 1528411 - DNA, 15 bp, Homo sapiens
caacattccagagca

SEQ ID NO: 1528412 - DNA, 15 bp, Homo sapiens
aacattccagagcag

SEQ ID NO: 1528413 - DNA, 15 bp, Homo sapiens
acattccagagcagt

SEQ ID NO: 1528414 - DNA, 15 bp, Homo sapiens
cattccagagcagtg

SEQ ID NO: 1528415 - DNA, 15 bp, Homo sapiens
attccagagcagtgg

SEQ ID NO: 1528416 - DNA, 15 bp, Homo sapiens
ttccagagcagtggg

SEQ ID NO: 1528417 - DNA, 15 bp, Homo sapiens
cagagcagtggggaa

SEQ ID NO: 1528418 - DNA, 15 bp, Homo sapiens
agagcagtggggaag

SEQ ID NO: 1528419 - DNA, 15 bp, Homo sapiens
gagcagtggggaagg

SEQ ID NO: 1528420 - DNA, 15 bp, Homo sapiens
agcagtggggaaggg

SEQ ID NO: 1528421 - DNA, 15 bp, Homo sapiens
gcagtggggaaggga

SEQ ID NO: 1528422 - DNA, 15 bp, Homo sapiens
cagtggggaagggat

SEQ ID NO: 1528423 - DNA, 15 bp, Homo sapiens
agtggggaagggatt

SEQ ID NO: 1528424 - DNA, 15 bp, Homo sapiens
gtggggaagggattg

SEQ ID NO: 1528425 - DNA, 15 bp, Homo sapiens
tggggaagggattgc

SEQ ID NO: 1528426 - DNA, 15 bp, Homo sapiens
ggggaagggattgct

SEQ ID NO: 1528427 - DNA, 15 bp, Homo sapiens
gggaagggattgctt

SEQ ID NO: 1528428 - DNA, 15 bp, Homo sapiens
ggaagggattgcttc

SEQ ID NO: 1528429 - DNA, 15 bp, Homo sapiens
gaagggattgcttca

SEQ ID NO: 1528430 - DNA, 15 bp, Homo sapiens
aagggattgcttcac

SEQ ID NO: 1528431 - DNA, 15 bp, Homo sapiens
agggattgcttcacc

SEQ ID NO: 1528432 - DNA, 15 bp, Homo sapiens
gggattgcttcacca

SEQ ID NO: 1528433 - DNA, 15 bp, Homo sapiens
ggattgcttcaccac

SEQ ID NO: 1528434 - DNA, 15 bp, Homo sapiens
gattgcttcaccacc

SEQ ID NO: 1528435 - DNA, 15 bp, Homo sapiens
attgcttcaccacca

SEQ ID NO: 1528436 - DNA, 15 bp, Homo sapiens
ttgcttcaccaccaa

SEQ ID NO: 1528437 - DNA, 15 bp, Homo sapiens
tgcttcaccaccaaa

SEQ ID NO: 1528438 - DNA, 15 bp, Homo sapiens
gcttcaccaccaaat

SEQ ID NO: 1528439 - DNA, 15 bp, Homo sapiens
cttcaccaccaaata

SEQ ID NO: 1528440 - DNA, 15 bp, Homo sapiens
ttcaccaccaaatag

SEQ ID NO: 1528441 - DNA, 15 bp, Homo sapiens
tcaccaccaaatagc

SEQ ID NO: 1528442 - DNA, 15 bp, Homo sapiens
caccaccaaatagcc

SEQ ID NO: 1528443 - DNA, 15 bp, Homo sapiens
accaccaaatagcca

SEQ ID NO: 1528444 - DNA, 15 bp, Homo sapiens
ccaccaaatagccat

SEQ ID NO: 1528445 - DNA, 15 bp, Homo sapiens
caccaaatagccata

SEQ ID NO: 1528446 - DNA, 15 bp, Homo sapiens
accaaatagccatat

SEQ ID NO: 1528447 - DNA, 15 bp, Homo sapiens
ccaaatagccatatt

SEQ ID NO: 1528448 - DNA, 15 bp, Homo sapiens
caaatagccatatta

SEQ ID NO: 1528449 - DNA, 15 bp, Homo sapiens
aaatagccatattag

SEQ ID NO: 1528450 - DNA, 15 bp, Homo sapiens
aatagccatattaga

SEQ ID NO: 1528451 - DNA, 15 bp, Homo sapiens
atagccatattagag

SEQ ID NO: 1528452 - DNA, 15 bp, Homo sapiens
tagccatattagaga

SEQ ID NO: 1528453 - DNA, 15 bp, Homo sapiens
agccatattagagat

SEQ ID NO: 1528454 - DNA, 15 bp, Homo sapiens
gccatattagagatt

SEQ ID NO: 1528455 - DNA, 15 bp, Homo sapiens
ccatattagagattc

SEQ ID NO: 1528456 - DNA, 15 bp, Homo sapiens
catattagagattcc

SEQ ID NO: 1528457 - DNA, 15 bp, Homo sapiens
atattagagattccc

SEQ ID NO: 1528458 - DNA, 15 bp, Homo sapiens
tattagagattccct

SEQ ID NO: 1528459 - DNA, 15 bp, Homo sapiens
attagagattccctt

SEQ ID NO: 1528460 - DNA, 15 bp, Homo sapiens
ttagagattcccttg

SEQ ID NO: 1528461 - DNA, 15 bp, Homo sapiens
tagagattcccttgc

SEQ ID NO: 1528462 - DNA, 15 bp, Homo sapiens
agagattcccttgca

SEQ ID NO: 1528463 - DNA, 15 bp, Homo sapiens
gagattcccttgcac

SEQ ID NO: 1528464 - DNA, 15 bp, Homo sapiens
agattcccttgcacc

SEQ ID NO: 1528465 - DNA, 15 bp, Homo sapiens
gattcccttgcacca

SEQ ID NO: 1528466 - DNA, 15 bp, Homo sapiens
attcccttgcaccat

SEQ ID NO: 1528467 - DNA, 15 bp, Homo sapiens
ttcccttgcaccata

SEQ ID NO: 1528468 - DNA, 15 bp, Homo sapiens
tcccttgcaccatac

SEQ ID NO: 1528469 - DNA, 15 bp, Homo sapiens
cccttgcaccatacc

SEQ ID NO: 1528470 - DNA, 15 bp, Homo sapiens
ccttgcaccataccc

SEQ ID NO: 1528471 - DNA, 15 bp, Homo sapiens
cttgcaccataccca

SEQ ID NO: 1528472 - DNA, 15 bp, Homo sapiens
ttgcaccatacccaa

SEQ ID NO: 1528473 - DNA, 15 bp, Homo sapiens
tgcaccatacccaaa

SEQ ID NO: 1528474 - DNA, 15 bp, Homo sapiens
gcaccatacccaaac

SEQ ID NO: 1528475 - DNA, 15 bp, Homo sapiens
caccatacccaaacc

SEQ ID NO: 1528476 - DNA, 15 bp, Homo sapiens
accatacccaaacca

SEQ ID NO: 1528477 - DNA, 15 bp, Homo sapiens
ccatacccaaaccac

SEQ ID NO: 1528478 - DNA, 15 bp, Homo sapiens
catacccaaaccacc

SEQ ID NO: 1528479 - DNA, 15 bp, Homo sapiens
atacccaaaccacca

SEQ ID NO: 1528480 - DNA, 15 bp, Homo sapiens
tacccaaaccaccat

SEQ ID NO: 1528481 - DNA, 15 bp, Homo sapiens
acccaaaccaccatc

SEQ ID NO: 1528482 - DNA, 15 bp, Homo sapiens
cccaaaccaccatct

SEQ ID NO: 1528483 - DNA, 15 bp, Homo sapiens
ccaaaccaccatctc

SEQ ID NO: 1528484 - DNA, 15 bp, Homo sapiens
caaaccaccatctcc

SEQ ID NO: 1528485 - DNA, 15 bp, Homo sapiens
aaaccaccatctccc

SEQ ID NO: 1528486 - DNA, 15 bp, Homo sapiens
aaccaccatctccca

SEQ ID NO: 1528487 - DNA, 15 bp, Homo sapiens
accaccatctcccag

SEQ ID NO: 1528488 - DNA, 15 bp, Homo sapiens
ccaccatctcccagg

SEQ ID NO: 1528489 - DNA, 15 bp, Homo sapiens
caccatctcccagga

SEQ ID NO: 1528490 - DNA, 15 bp, Homo sapiens
accatctcccaggac

SEQ ID NO: 1528491 - DNA, 15 bp, Homo sapiens
ccatctcccaggacc

SEQ ID NO: 1528492 - DNA, 15 bp, Homo sapiens
catctcccaggaccc

SEQ ID NO: 1528493 - DNA, 15 bp, Homo sapiens
atctcccaggacccg

SEQ ID NO: 1528494 - DNA, 15 bp, Homo sapiens
tctcccaggacccgg

SEQ ID NO: 1528495 - DNA, 15 bp, Homo sapiens
ctcccaggacccggg

SEQ ID NO: 1528496 - DNA, 15 bp, Homo sapiens
tcccaggacccggga

SEQ ID NO: 1528497 - DNA, 15 bp, Homo sapiens
cccaggacccgggag

SEQ ID NO: 1528498 - DNA, 15 bp, Homo sapiens
ccaggacccgggaga

SEQ ID NO: 1528499 - DNA, 15 bp, Homo sapiens
caggacccgggagag

SEQ ID NO: 1528500 - DNA, 15 bp, Homo sapiens
aggacccgggagagc

SEQ ID NO: 1528501 - DNA, 15 bp, Homo sapiens
ggacccgggagagca

SEQ ID NO: 1528502 - DNA, 15 bp, Homo sapiens
gacccgggagagcag

SEQ ID NO: 1528503 - DNA, 15 bp, Homo sapiens
acccgggagagcaga

SEQ ID NO: 1528504 - DNA, 15 bp, Homo sapiens
cccgggagagcagaa

SEQ ID NO: 1528505 - DNA, 15 bp, Homo sapiens
ccgggagagcagaaa

SEQ ID NO: 1528506 - DNA, 15 bp, Homo sapiens
cgggagagcagaaaa

SEQ ID NO: 1528507 - DNA, 15 bp, Homo sapiens
gggagagcagaaaag

SEQ ID NO: 1528508 - DNA, 15 bp, Homo sapiens
ggagagcagaaaaga

SEQ ID NO: 1528509 - DNA, 15 bp, Homo sapiens
gagagcagaaaagag

SEQ ID NO: 1528510 - DNA, 15 bp, Homo sapiens
agagcagaaaagagg

SEQ ID NO: 1528511 - DNA, 15 bp, Homo sapiens
gagcagaaaagagga

SEQ ID NO: 1528512 - DNA, 15 bp, Homo sapiens
agcagaaaagaggaa

SEQ ID NO: 1528513 - DNA, 15 bp, Homo sapiens
gcagaaaagaggaat

SEQ ID NO: 1528514 - DNA, 15 bp, Homo sapiens
cagaaaagaggaatg

SEQ ID NO: 1528515 - DNA, 15 bp, Homo sapiens
agaaaagaggaatga

SEQ ID NO: 1528516 - DNA, 15 bp, Homo sapiens
gaaaagaggaatgag

SEQ ID NO: 1528517 - DNA, 15 bp, Homo sapiens
aaaagaggaatgaga

SEQ ID NO: 1528518 - DNA, 15 bp, Homo sapiens
aaagaggaatgagaa

SEQ ID NO: 1528519 - DNA, 15 bp, Homo sapiens
aagaggaatgagaag

SEQ ID NO: 1528520 - DNA, 15 bp, Homo sapiens
agaggaatgagaaga

SEQ ID NO: 1528521 - DNA, 15 bp, Homo sapiens
gaggaatgagaagaa

SEQ ID NO: 1528522 - DNA, 15 bp, Homo sapiens
aggaatgagaagaaa

SEQ ID NO: 1528523 - DNA, 15 bp, Homo sapiens
ggaatgagaagaaag

SEQ ID NO: 1528524 - DNA, 15 bp, Homo sapiens
gaatgagaagaaagg

SEQ ID NO: 1528525 - DNA, 15 bp, Homo sapiens
aatgagaagaaaggc

SEQ ID NO: 1528526 - DNA, 15 bp, Homo sapiens
atgagaagaaaggcg

SEQ ID NO: 1528527 - DNA, 15 bp, Homo sapiens
tgagaagaaaggcga

SEQ ID NO: 1528528 - DNA, 15 bp, Homo sapiens
gagaagaaaggcgag

SEQ ID NO: 1528529 - DNA, 15 bp, Homo sapiens
agaagaaaggcgagg

SEQ ID NO: 1528530 - DNA, 15 bp, Homo sapiens
gaagaaaggcgagga

SEQ ID NO: 1528531 - DNA, 15 bp, Homo sapiens
aagaaaggcgaggat

SEQ ID NO: 1528532 - DNA, 15 bp, Homo sapiens
agaaaggcgaggatg

SEQ ID NO: 1528533 - DNA, 15 bp, Homo sapiens
gaaaggcgaggatgt

SEQ ID NO: 1528534 - DNA, 15 bp, Homo sapiens
aaaggcgaggatgtg

SEQ ID NO: 1528535 - DNA, 15 bp, Homo sapiens
aaggcgaggatgtga

SEQ ID NO: 1528536 - DNA, 15 bp, Homo sapiens
aggcgaggatgtgag

SEQ ID NO: 1528537 - DNA, 15 bp, Homo sapiens
ggcgaggatgtgagg

SEQ ID NO: 1528538 - DNA, 15 bp, Homo sapiens
gcgaggatgtgaggt

SEQ ID NO: 1528539 - DNA, 15 bp, Homo sapiens
cgaggatgtgaggtg

SEQ ID NO: 1528540 - DNA, 15 bp, Homo sapiens
gaggatgtgaggtgt

SEQ ID NO: 1528541 - DNA, 15 bp, Homo sapiens
aggatgtgaggtgtg

SEQ ID NO: 1528542 - DNA, 15 bp, Homo sapiens
ggatgtgaggtgtgc

SEQ ID NO: 1528543 - DNA, 15 bp, Homo sapiens
gatgtgaggtgtgcc

SEQ ID NO: 1528544 - DNA, 15 bp, Homo sapiens
atgtgaggtgtgccc

SEQ ID NO: 1528545 - DNA, 15 bp, Homo sapiens
tgtgaggtgtgccct

SEQ ID NO: 1528546 - DNA, 15 bp, Homo sapiens
gtgaggtgtgccctc

SEQ ID NO: 1528547 - DNA, 15 bp, Homo sapiens
tgaggtgtgccctca

SEQ ID NO: 1528548 - DNA, 15 bp, Homo sapiens
gaggtgtgccctcat

SEQ ID NO: 1528549 - DNA, 15 bp, Homo sapiens
aggtgtgccctcata

SEQ ID NO: 1528550 - DNA, 15 bp, Homo sapiens
ggtgtgccctcataa

SEQ ID NO: 1528551 - DNA, 15 bp, Homo sapiens
gtgtgccctcataat

SEQ ID NO: 1528552 - DNA, 15 bp, Homo sapiens
tgtgccctcataatg

SEQ ID NO: 1528553 - DNA, 15 bp, Homo sapiens
gtgccctcataatgg

SEQ ID NO: 1528554 - DNA, 15 bp, Homo sapiens
tgccctcataatggc

SEQ ID NO: 1528555 - DNA, 15 bp, Homo sapiens
gccctcataatggcg

SEQ ID NO: 1528556 - DNA, 15 bp, Homo sapiens
ccctcataatggcgg

SEQ ID NO: 1528557 - DNA, 15 bp, Homo sapiens
cctcataatggcggt

SEQ ID NO: 1528558 - DNA, 15 bp, Homo sapiens
ctcataatggcggtg

SEQ ID NO: 1528559 - DNA, 15 bp, Homo sapiens
tcataatggcggtgc

SEQ ID NO: 1528560 - DNA, 15 bp, Homo sapiens
cataatggcggtgca

SEQ ID NO: 1528561 - DNA, 15 bp, Homo sapiens
ataatggcggtgcac

SEQ ID NO: 1528562 - DNA, 15 bp, Homo sapiens
taatggcggtgcacg

SEQ ID NO: 1528563 - DNA, 15 bp, Homo sapiens
aatggcggtgcacgc

SEQ ID NO: 1528564 - DNA, 15 bp, Homo sapiens
atggcggtgcacgca

SEQ ID NO: 1528565 - DNA, 15 bp, Homo sapiens
tggcggtgcacgcag

SEQ ID NO: 1528566 - DNA, 15 bp, Homo sapiens
ggcggtgcacgcagc

SEQ ID NO: 1528567 - DNA, 15 bp, Homo sapiens
gcggtgcacgcagca

SEQ ID NO: 1528568 - DNA, 15 bp, Homo sapiens
cggtgcacgcagcac

SEQ ID NO: 1528569 - DNA, 15 bp, Homo sapiens
ggtgcacgcagcaca

SEQ ID NO: 1528570 - DNA, 15 bp, Homo sapiens
gtgcacgcagcacaa

SEQ ID NO: 1528571 - DNA, 15 bp, Homo sapiens
tgcacgcagcacaag

SEQ ID NO: 1528572 - DNA, 15 bp, Homo sapiens
gcacgcagcacaagc

SEQ ID NO: 1528573 - DNA, 15 bp, Homo sapiens
cacgcagcacaagca

SEQ ID NO: 1528574 - DNA, 15 bp, Homo sapiens
acgcagcacaagcaa

SEQ ID NO: 1528575 - DNA, 15 bp, Homo sapiens
cgcagcacaagcaat

SEQ ID NO: 1528576 - DNA, 15 bp, Homo sapiens
gcagcacaagcaatt

SEQ ID NO: 1528577 - DNA, 15 bp, Homo sapiens
cagcacaagcaattg

SEQ ID NO: 1528578 - DNA, 15 bp, Homo sapiens
agcacaagcaattgc

SEQ ID NO: 1528579 - DNA, 15 bp, Homo sapiens
gcacaagcaattgca

SEQ ID NO: 1528580 - DNA, 15 bp, Homo sapiens
cacaagcaattgcag

SEQ ID NO: 1528581 - DNA, 15 bp, Homo sapiens
acaagcaattgcaga

SEQ ID NO: 1528582 - DNA, 15 bp, Homo sapiens
caagcaattgcagaa

SEQ ID NO: 1528583 - DNA, 15 bp, Homo sapiens
aagcaattgcagaaa

SEQ ID NO: 1528584 - DNA, 15 bp, Homo sapiens
agcaattgcagaaag

SEQ ID NO: 1528585 - DNA, 15 bp, Homo sapiens
gcaattgcagaaaga

SEQ ID NO: 1528586 - DNA, 15 bp, Homo sapiens
caattgcagaaagac

SEQ ID NO: 1528587 - DNA, 15 bp, Homo sapiens
aattgcagaaagact

SEQ ID NO: 1528588 - DNA, 15 bp, Homo sapiens
attgcagaaagacta

SEQ ID NO: 1528589 - DNA, 15 bp, Homo sapiens
ttgcagaaagactaa

SEQ ID NO: 1528590 - DNA, 15 bp, Homo sapiens
tgcagaaagactaaa

SEQ ID NO: 1528591 - DNA, 15 bp, Homo sapiens
gcagaaagactaaag

SEQ ID NO: 1528592 - DNA, 15 bp, Homo sapiens
cagaaagactaaagt

SEQ ID NO: 1528593 - DNA, 15 bp, Homo sapiens
agaaagactaaagta

SEQ ID NO: 1528594 - DNA, 15 bp, Homo sapiens
gaaagactaaagtac

SEQ ID NO: 1528595 - DNA, 15 bp, Homo sapiens
aaagactaaagtact

SEQ ID NO: 1528596 - DNA, 15 bp, Homo sapiens
aagactaaagtactg

SEQ ID NO: 1528597 - DNA, 15 bp, Homo sapiens
agactaaagtactga

SEQ ID NO: 1528598 - DNA, 15 bp, Homo sapiens
gactaaagtactgaa

SEQ ID NO: 1528599 - DNA, 15 bp, Homo sapiens
actaaagtactgaac

SEQ ID NO: 1528600 - DNA, 15 bp, Homo sapiens
ctaaagtactgaaca

SEQ ID NO: 1528601 - DNA, 15 bp, Homo sapiens
taaagtactgaacaa

SEQ ID NO: 1528602 - DNA, 15 bp, Homo sapiens
aaagtactgaacaaa

SEQ ID NO: 1528603 - DNA, 15 bp, Homo sapiens
aagtactgaacaaat

SEQ ID NO: 1528604 - DNA, 15 bp, Homo sapiens
agtactgaacaaata

SEQ ID NO: 1528605 - DNA, 15 bp, Homo sapiens
gtactgaacaaatag

SEQ ID NO: 1528606 - DNA, 15 bp, Homo sapiens
tactgaacaaataga

SEQ ID NO: 1528607 - DNA, 15 bp, Homo sapiens
actgaacaaatagaa

SEQ ID NO: 1528608 - DNA, 15 bp, Homo sapiens
ctgaacaaatagaaa

SEQ ID NO: 1528609 - DNA, 15 bp, Homo sapiens
tgaacaaatagaaaa

SEQ ID NO: 1528610 - DNA, 15 bp, Homo sapiens
gaacaaatagaaaac

SEQ ID NO: 1528611 - DNA, 15 bp, Homo sapiens
aacaaatagaaaact

SEQ ID NO: 1528612 - DNA, 15 bp, Homo sapiens
acaaatagaaaactt

SEQ ID NO: 1528613 - DNA, 15 bp, Homo sapiens
caaatagaaaacttg

SEQ ID NO: 1528614 - DNA, 15 bp, Homo sapiens
aaatagaaaacttgg

SEQ ID NO: 1528615 - DNA, 15 bp, Homo sapiens
aatagaaaacttgga

SEQ ID NO: 1528616 - DNA, 15 bp, Homo sapiens
agaaaacttggaaaa

SEQ ID NO: 1528617 - DNA, 15 bp, Homo sapiens
gaaaacttggaaaaa

SEQ ID NO: 1528618 - DNA, 15 bp, Homo sapiens
aaaacttggaaaaat

SEQ ID NO: 1528619 - DNA, 15 bp, Homo sapiens
aaacttggaaaaata

SEQ ID NO: 1528620 - DNA, 15 bp, Homo sapiens
aacttggaaaaatat

SEQ ID NO: 1528621 - DNA, 15 bp, Homo sapiens
acttggaaaaatatt

SEQ ID NO: 1528622 - DNA, 15 bp, Homo sapiens
cttggaaaaatatta

SEQ ID NO: 1528623 - DNA, 15 bp, Homo sapiens
ttggaaaaatattag

SEQ ID NO: 1528624 - DNA, 15 bp, Homo sapiens
tggaaaaatattaga

SEQ ID NO: 1528625 - DNA, 15 bp, Homo sapiens
ggaaaaatattagaa

SEQ ID NO: 1528626 - DNA, 15 bp, Homo sapiens
gaaaaatattagaag

SEQ ID NO: 1528627 - DNA, 15 bp, Homo sapiens
aaaaatattagaagg

SEQ ID NO: 1528628 - DNA, 15 bp, Homo sapiens
aaaatattagaagga

SEQ ID NO: 1528629 - DNA, 15 bp, Homo sapiens
aaatattagaaggaa

SEQ ID NO: 1528630 - DNA, 15 bp, Homo sapiens
aatattagaaggaaa

SEQ ID NO: 1528631 - DNA, 15 bp, Homo sapiens
atattagaaggaaat

SEQ ID NO: 1528632 - DNA, 15 bp, Homo sapiens
tattagaaggaaatg

SEQ ID NO: 1528633 - DNA, 15 bp, Homo sapiens
attagaaggaaatgt

SEQ ID NO: 1528634 - DNA, 15 bp, Homo sapiens
ttagaaggaaatgtg

SEQ ID NO: 1528635 - DNA, 15 bp, Homo sapiens
tagaaggaaatgtgg

SEQ ID NO: 1528636 - DNA, 15 bp, Homo sapiens
agaaggaaatgtggg

SEQ ID NO: 1528637 - DNA, 15 bp, Homo sapiens
gaaggaaatgtggga

SEQ ID NO: 1528638 - DNA, 15 bp, Homo sapiens
aaggaaatgtgggag

SEQ ID NO: 1528639 - DNA, 15 bp, Homo sapiens
aggaaatgtgggaga

SEQ ID NO: 1528640 - DNA, 15 bp, Homo sapiens
ggaaatgtgggagaa

SEQ ID NO: 1528641 - DNA, 15 bp, Homo sapiens
gaaatgtgggagaac

SEQ ID NO: 1528642 - DNA, 15 bp, Homo sapiens
aaatgtgggagaaca

SEQ ID NO: 1528643 - DNA, 15 bp, Homo sapiens
aatgtgggagaacat

SEQ ID NO: 1528644 - DNA, 15 bp, Homo sapiens
atgtgggagaacatt

SEQ ID NO: 1528645 - DNA, 15 bp, Homo sapiens
tgtgggagaacattt

SEQ ID NO: 1528646 - DNA, 15 bp, Homo sapiens
gtgggagaacatttt

SEQ ID NO: 1528647 - DNA, 15 bp, Homo sapiens
tgggagaacattttt

SEQ ID NO: 1528648 - DNA, 15 bp, Homo sapiens
gggagaacatttttg

SEQ ID NO: 1528649 - DNA, 15 bp, Homo sapiens
ggagaacatttttgc

SEQ ID NO: 1528650 - DNA, 15 bp, Homo sapiens
gagaacatttttgca

SEQ ID NO: 1528651 - DNA, 15 bp, Homo sapiens
agaacatttttgcaa

SEQ ID NO: 1528652 - DNA, 15 bp, Homo sapiens
gaacatttttgcaat

SEQ ID NO: 1528653 - DNA, 15 bp, Homo sapiens
aacatttttgcaatt

SEQ ID NO: 1528654 - DNA, 15 bp, Homo sapiens
acatttttgcaattt

SEQ ID NO: 1528655 - DNA, 15 bp, Homo sapiens
catttttgcaatttg

SEQ ID NO: 1528656 - DNA, 15 bp, Homo sapiens
atttttgcaatttgg

SEQ ID NO: 1528657 - DNA, 15 bp, Homo sapiens
tttttgcaatttggg

SEQ ID NO: 1528658 - DNA, 15 bp, Homo sapiens
ttttgcaatttgggg

SEQ ID NO: 1528659 - DNA, 15 bp, Homo sapiens
tttgcaatttgggga

SEQ ID NO: 1528660 - DNA, 15 bp, Homo sapiens
ttgcaatttggggat

SEQ ID NO: 1528661 - DNA, 15 bp, Homo sapiens
tgcaatttggggatt

SEQ ID NO: 1528662 - DNA, 15 bp, Homo sapiens
gcaatttggggattg

SEQ ID NO: 1528663 - DNA, 15 bp, Homo sapiens
caatttggggattgg

SEQ ID NO: 1528664 - DNA, 15 bp, Homo sapiens
aatttggggattgga

SEQ ID NO: 1528665 - DNA, 15 bp, Homo sapiens
atttggggattggaa

SEQ ID NO: 1528666 - DNA, 15 bp, Homo sapiens
tttggggattggaaa

SEQ ID NO: 1528667 - DNA, 15 bp, Homo sapiens
ttggggattggaaac

SEQ ID NO: 1528668 - DNA, 15 bp, Homo sapiens
tggggattggaaacg

SEQ ID NO: 1528669 - DNA, 15 bp, Homo sapiens
ggggattggaaacgg

SEQ ID NO: 1528670 - DNA, 15 bp, Homo sapiens
gggattggaaacggt

SEQ ID NO: 1528671 - DNA, 15 bp, Homo sapiens
ggattggaaacggtt

SEQ ID NO: 1528672 - DNA, 15 bp, Homo sapiens
gattggaaacggttt

SEQ ID NO: 1528673 - DNA, 15 bp, Homo sapiens
attggaaacggtttt

SEQ ID NO: 1528674 - DNA, 15 bp, Homo sapiens
ttggaaacggttttc

SEQ ID NO: 1528675 - DNA, 15 bp, Homo sapiens
tggaaacggttttct

SEQ ID NO: 1528676 - DNA, 15 bp, Homo sapiens
ggaaacggttttctt

SEQ ID NO: 1528677 - DNA, 15 bp, Homo sapiens
gaaacggttttctta

SEQ ID NO: 1528678 - DNA, 15 bp, Homo sapiens
aaacggttttcttaa

SEQ ID NO: 1528679 - DNA, 15 bp, Homo sapiens
aacggttttcttaac

SEQ ID NO: 1528680 - DNA, 15 bp, Homo sapiens
acggttttcttaaca

SEQ ID NO: 1528681 - DNA, 15 bp, Homo sapiens
cggttttcttaacaa

SEQ ID NO: 1528682 - DNA, 15 bp, Homo sapiens
ggttttcttaacaag

SEQ ID NO: 1528683 - DNA, 15 bp, Homo sapiens
gttttcttaacaaga

SEQ ID NO: 1528684 - DNA, 15 bp, Homo sapiens
ttttcttaacaagat

SEQ ID NO: 1528685 - DNA, 15 bp, Homo sapiens
tttcttaacaagata

SEQ ID NO: 1528686 - DNA, 15 bp, Homo sapiens
ttcttaacaagatat

SEQ ID NO: 1528687 - DNA, 15 bp, Homo sapiens
tcttaacaagatata

SEQ ID NO: 1528688 - DNA, 15 bp, Homo sapiens
cttaacaagatataa

SEQ ID NO: 1528689 - DNA, 15 bp, Homo sapiens
ttaacaagatataaa

SEQ ID NO: 1528690 - DNA, 15 bp, Homo sapiens
taacaagatataaaa

SEQ ID NO: 1528691 - DNA, 15 bp, Homo sapiens
aacaagatataaaaa

SEQ ID NO: 1528692 - DNA, 15 bp, Homo sapiens
acaagatataaaaac

SEQ ID NO: 1528693 - DNA, 15 bp, Homo sapiens
caagatataaaaacc

SEQ ID NO: 1528694 - DNA, 15 bp, Homo sapiens
aagatataaaaaccc

SEQ ID NO: 1528695 - DNA, 15 bp, Homo sapiens
agatataaaaacccc

SEQ ID NO: 1528696 - DNA, 15 bp, Homo sapiens
gatataaaaacccca

SEQ ID NO: 1528697 - DNA, 15 bp, Homo sapiens
atataaaaaccccaa

SEQ ID NO: 1528698 - DNA, 15 bp, Homo sapiens
tataaaaaccccaaa

SEQ ID NO: 1528699 - DNA, 15 bp, Homo sapiens
ataaaaaccccaaaa

SEQ ID NO: 1528700 - DNA, 15 bp, Homo sapiens
taaaaaccccaaaac

SEQ ID NO: 1528701 - DNA, 15 bp, Homo sapiens
aaaaaccccaaaaca

SEQ ID NO: 1528702 - DNA, 15 bp, Homo sapiens
aaaaccccaaaacaa

SEQ ID NO: 1528703 - DNA, 15 bp, Homo sapiens
aaaccccaaaacaag

SEQ ID NO: 1528704 - DNA, 15 bp, Homo sapiens
aaccccaaaacaaga

SEQ ID NO: 1528705 - DNA, 15 bp, Homo sapiens
accccaaaacaagaa

SEQ ID NO: 1528706 - DNA, 15 bp, Homo sapiens
ccccaaaacaagaaa

SEQ ID NO: 1528707 - DNA, 15 bp, Homo sapiens
cccaaaacaagaaaa

SEQ ID NO: 1528708 - DNA, 15 bp, Homo sapiens
ccaaaacaagaaaac

SEQ ID NO: 1528709 - DNA, 15 bp, Homo sapiens
caaaacaagaaaaca

SEQ ID NO: 1528710 - DNA, 15 bp, Homo sapiens
aaaacaagaaaacaa

SEQ ID NO: 1528711 - DNA, 15 bp, Homo sapiens
aaacaagaaaacaaa

SEQ ID NO: 1528712 - DNA, 15 bp, Homo sapiens
aacaagaaaacaaag

SEQ ID NO: 1528713 - DNA, 15 bp, Homo sapiens
acaagaaaacaaagg

SEQ ID NO: 1528714 - DNA, 15 bp, Homo sapiens
caagaaaacaaaggt

SEQ ID NO: 1528715 - DNA, 15 bp, Homo sapiens
aagaaaacaaaggtt

SEQ ID NO: 1528716 - DNA, 15 bp, Homo sapiens
agaaaacaaaggttg

SEQ ID NO: 1528717 - DNA, 15 bp, Homo sapiens
gaaaacaaaggttga

SEQ ID NO: 1528718 - DNA, 15 bp, Homo sapiens
aaaacaaaggttgaa

SEQ ID NO: 1528719 - DNA, 15 bp, Homo sapiens
aaacaaaggttgaaa

SEQ ID NO: 1528720 - DNA, 15 bp, Homo sapiens
aacaaaggttgaaat

SEQ ID NO: 1528721 - DNA, 15 bp, Homo sapiens
acaaaggttgaaatt

SEQ ID NO: 1528722 - DNA, 15 bp, Homo sapiens
caaaggttgaaattc

SEQ ID NO: 1528723 - DNA, 15 bp, Homo sapiens
aaaggttgaaattca

SEQ ID NO: 1528724 - DNA, 15 bp, Homo sapiens
aaggttgaaattcat

SEQ ID NO: 1528725 - DNA, 15 bp, Homo sapiens
aggttgaaattcata

SEQ ID NO: 1528726 - DNA, 15 bp, Homo sapiens
ggttgaaattcataa

SEQ ID NO: 1528727 - DNA, 15 bp, Homo sapiens
gttgaaattcataaa

SEQ ID NO: 1528728 - DNA, 15 bp, Homo sapiens
ttgaaattcataaaa

SEQ ID NO: 1528729 - DNA, 15 bp, Homo sapiens
tgaaattcataaaaa

SEQ ID NO: 1528730 - DNA, 15 bp, Homo sapiens
gaaattcataaaaac

SEQ ID NO: 1528731 - DNA, 15 bp, Homo sapiens
aaattcataaaaact

SEQ ID NO: 1528732 - DNA, 15 bp, Homo sapiens
aattcataaaaacta

SEQ ID NO: 1528733 - DNA, 15 bp, Homo sapiens
attcataaaaactag

SEQ ID NO: 1528734 - DNA, 15 bp, Homo sapiens
ttcataaaaactaga

SEQ ID NO: 1528735 - DNA, 15 bp, Homo sapiens
tcataaaaactagat

SEQ ID NO: 1528736 - DNA, 15 bp, Homo sapiens
cataaaaactagata

SEQ ID NO: 1528737 - DNA, 15 bp, Homo sapiens
ataaaaactagatac

SEQ ID NO: 1528738 - DNA, 15 bp, Homo sapiens
taaaaactagatact

SEQ ID NO: 1528739 - DNA, 15 bp, Homo sapiens
aaaaactagatactt

SEQ ID NO: 1528740 - DNA, 15 bp, Homo sapiens
aaaactagatacttc

SEQ ID NO: 1528741 - DNA, 15 bp, Homo sapiens
aaactagatacttct

SEQ ID NO: 1528742 - DNA, 15 bp, Homo sapiens
aactagatacttctg

SEQ ID NO: 1528743 - DNA, 15 bp, Homo sapiens
actagatacttctgt

SEQ ID NO: 1528744 - DNA, 15 bp, Homo sapiens
ctagatacttctgta

SEQ ID NO: 1528745 - DNA, 15 bp, Homo sapiens
tagatacttctgtat

SEQ ID NO: 1528746 - DNA, 15 bp, Homo sapiens
agatacttctgtatg

SEQ ID NO: 1528747 - DNA, 15 bp, Homo sapiens
gatacttctgtatga

SEQ ID NO: 1528748 - DNA, 15 bp, Homo sapiens
atacttctgtatgat

SEQ ID NO: 1528749 - DNA, 15 bp, Homo sapiens
tacttctgtatgatg

SEQ ID NO: 1528750 - DNA, 15 bp, Homo sapiens
acttctgtatgatga

SEQ ID NO: 1528751 - DNA, 15 bp, Homo sapiens
cttctgtatgatgaa

SEQ ID NO: 1528752 - DNA, 15 bp, Homo sapiens
ttctgtatgatgaaa

SEQ ID NO: 1528753 - DNA, 15 bp, Homo sapiens
tctgtatgatgaaag

SEQ ID NO: 1528754 - DNA, 15 bp, Homo sapiens
ctgtatgatgaaaga

SEQ ID NO: 1528755 - DNA, 15 bp, Homo sapiens
tgtatgatgaaagac

SEQ ID NO: 1528756 - DNA, 15 bp, Homo sapiens
gtatgatgaaagaca

SEQ ID NO: 1528757 - DNA, 15 bp, Homo sapiens
tatgatgaaagacac

SEQ ID NO: 1528758 - DNA, 15 bp, Homo sapiens
atgatgaaagacacg

SEQ ID NO: 1528759 - DNA, 15 bp, Homo sapiens
tgatgaaagacacga

SEQ ID NO: 1528760 - DNA, 15 bp, Homo sapiens
gatgaaagacacgat

SEQ ID NO: 1528761 - DNA, 15 bp, Homo sapiens
atgaaagacacgatt

SEQ ID NO: 1528762 - DNA, 15 bp, Homo sapiens
tgaaagacacgatta

SEQ ID NO: 1528763 - DNA, 15 bp, Homo sapiens
gaaagacacgattaa

SEQ ID NO: 1528764 - DNA, 15 bp, Homo sapiens
aaagacacgattaat

SEQ ID NO: 1528765 - DNA, 15 bp, Homo sapiens
aagacacgattaatc

SEQ ID NO: 1528766 - DNA, 15 bp, Homo sapiens
agacacgattaatca

SEQ ID NO: 1528767 - DNA, 15 bp, Homo sapiens
gacacgattaatcaa

SEQ ID NO: 1528768 - DNA, 15 bp, Homo sapiens
acacgattaatcaag

SEQ ID NO: 1528769 - DNA, 15 bp, Homo sapiens
cacgattaatcaagt

SEQ ID NO: 1528770 - DNA, 15 bp, Homo sapiens
acgattaatcaagtt

SEQ ID NO: 1528771 - DNA, 15 bp, Homo sapiens
cgattaatcaagttg

SEQ ID NO: 1528772 - DNA, 15 bp, Homo sapiens
gattaatcaagttgt

SEQ ID NO: 1528773 - DNA, 15 bp, Homo sapiens
attaatcaagttgtt

SEQ ID NO: 1528774 - DNA, 15 bp, Homo sapiens
ttaatcaagttgtta

SEQ ID NO: 1528775 - DNA, 15 bp, Homo sapiens
taatcaagttgttaa

SEQ ID NO: 1528776 - DNA, 15 bp, Homo sapiens
aatcaagttgttaag

SEQ ID NO: 1528777 - DNA, 15 bp, Homo sapiens
atcaagttgttaagt

SEQ ID NO: 1528778 - DNA, 15 bp, Homo sapiens
tcaagttgttaagtt

SEQ ID NO: 1528779 - DNA, 15 bp, Homo sapiens
caagttgttaagttt

SEQ ID NO: 1528780 - DNA, 15 bp, Homo sapiens
aagttgttaagttta

SEQ ID NO: 1528781 - DNA, 15 bp, Homo sapiens
agttgttaagtttag

SEQ ID NO: 1528782 - DNA, 15 bp, Homo sapiens
gttgttaagtttagc

SEQ ID NO: 1528783 - DNA, 15 bp, Homo sapiens
ttgttaagtttagca

SEQ ID NO: 1528784 - DNA, 15 bp, Homo sapiens
tgttaagtttagcaa

SEQ ID NO: 1528785 - DNA, 15 bp, Homo sapiens
gttaagtttagcaat

SEQ ID NO: 1528786 - DNA, 15 bp, Homo sapiens
ttaagtttagcaata

SEQ ID NO: 1528787 - DNA, 15 bp, Homo sapiens
taagtttagcaatag

SEQ ID NO: 1528788 - DNA, 15 bp, Homo sapiens
aagtttagcaataga

SEQ ID NO: 1528789 - DNA, 15 bp, Homo sapiens
agtttagcaatagac

SEQ ID NO: 1528790 - DNA, 15 bp, Homo sapiens
gtttagcaatagact

SEQ ID NO: 1528791 - DNA, 15 bp, Homo sapiens
tttagcaatagacta

SEQ ID NO: 1528792 - DNA, 15 bp, Homo sapiens
ttagcaatagactag

SEQ ID NO: 1528793 - DNA, 15 bp, Homo sapiens
tagcaatagactagg

SEQ ID NO: 1528794 - DNA, 15 bp, Homo sapiens
agcaatagactaggg

SEQ ID NO: 1528795 - DNA, 15 bp, Homo sapiens
gcaatagactagggg

SEQ ID NO: 1528796 - DNA, 15 bp, Homo sapiens
caatagactagggga

SEQ ID NO: 1528797 - DNA, 15 bp, Homo sapiens
aatagactaggggag

SEQ ID NO: 1528798 - DNA, 15 bp, Homo sapiens
atagactaggggaga

SEQ ID NO: 1528799 - DNA, 15 bp, Homo sapiens
tagactaggggagat

SEQ ID NO: 1528800 - DNA, 15 bp, Homo sapiens
agactaggggagata

SEQ ID NO: 1528801 - DNA, 15 bp, Homo sapiens
gactaggggagatat

SEQ ID NO: 1528802 - DNA, 15 bp, Homo sapiens
actaggggagatatc

SEQ ID NO: 1528803 - DNA, 15 bp, Homo sapiens
ctaggggagatatca

SEQ ID NO: 1528804 - DNA, 15 bp, Homo sapiens
taggggagatatcat

SEQ ID NO: 1528805 - DNA, 15 bp, Homo sapiens
aggggagatatcata

SEQ ID NO: 1528806 - DNA, 15 bp, Homo sapiens
ggggagatatcatag

SEQ ID NO: 1528807 - DNA, 15 bp, Homo sapiens
gggagatatcatagt

SEQ ID NO: 1528808 - DNA, 15 bp, Homo sapiens
ggagatatcatagta

SEQ ID NO: 1528809 - DNA, 15 bp, Homo sapiens
gagatatcatagtat

SEQ ID NO: 1528810 - DNA, 15 bp, Homo sapiens
agatatcatagtata

SEQ ID NO: 1528811 - DNA, 15 bp, Homo sapiens
gatatcatagtatat

SEQ ID NO: 1528812 - DNA, 15 bp, Homo sapiens
atatcatagtatatt

SEQ ID NO: 1528813 - DNA, 15 bp, Homo sapiens
tatcatagtatattt

SEQ ID NO: 1528814 - DNA, 15 bp, Homo sapiens
atcatagtatattta

SEQ ID NO: 1528815 - DNA, 15 bp, Homo sapiens
tcatagtatatttaa

SEQ ID NO: 1528816 - DNA, 15 bp, Homo sapiens
catagtatatttaac

SEQ ID NO: 1528817 - DNA, 15 bp, Homo sapiens
atagtatatttaaca

SEQ ID NO: 1528818 - DNA, 15 bp, Homo sapiens
tagtatatttaacag

SEQ ID NO: 1528819 - DNA, 15 bp, Homo sapiens
agtatatttaacaga

SEQ ID NO: 1528820 - DNA, 15 bp, Homo sapiens
gtatatttaacagac

SEQ ID NO: 1528821 - DNA, 15 bp, Homo sapiens
tatatttaacagaca

SEQ ID NO: 1528822 - DNA, 15 bp, Homo sapiens
atatttaacagacaa

SEQ ID NO: 1528823 - DNA, 15 bp, Homo sapiens
tatttaacagacaaa

SEQ ID NO: 1528824 - DNA, 15 bp, Homo sapiens
atttaacagacaaag

SEQ ID NO: 1528825 - DNA, 15 bp, Homo sapiens
tttaacagacaaagg

SEQ ID NO: 1528826 - DNA, 15 bp, Homo sapiens
ttaacagacaaagga

SEQ ID NO: 1528827 - DNA, 15 bp, Homo sapiens
taacagacaaaggat

SEQ ID NO: 1528828 - DNA, 15 bp, Homo sapiens
aacagacaaaggatt

SEQ ID NO: 1528829 - DNA, 15 bp, Homo sapiens
acagacaaaggatta

SEQ ID NO: 1528830 - DNA, 15 bp, Homo sapiens
cagacaaaggattaa

SEQ ID NO: 1528831 - DNA, 15 bp, Homo sapiens
agacaaaggattaat

SEQ ID NO: 1528832 - DNA, 15 bp, Homo sapiens
gacaaaggattaata

SEQ ID NO: 1528833 - DNA, 15 bp, Homo sapiens
acaaaggattaatag

SEQ ID NO: 1528834 - DNA, 15 bp, Homo sapiens
caaaggattaataga

SEQ ID NO: 1528835 - DNA, 15 bp, Homo sapiens
aaaggattaatagat

SEQ ID NO: 1528836 - DNA, 15 bp, Homo sapiens
aaggattaatagata

SEQ ID NO: 1528837 - DNA, 15 bp, Homo sapiens
aggattaatagatac

SEQ ID NO: 1528838 - DNA, 15 bp, Homo sapiens
ggattaatagatact

SEQ ID NO: 1528839 - DNA, 15 bp, Homo sapiens
gattaatagatacta

SEQ ID NO: 1528840 - DNA, 15 bp, Homo sapiens
attaatagatactac

SEQ ID NO: 1528841 - DNA, 15 bp, Homo sapiens
ttaatagatactaca

SEQ ID NO: 1528842 - DNA, 15 bp, Homo sapiens
taatagatactacag

SEQ ID NO: 1528843 - DNA, 15 bp, Homo sapiens
aatagatactacaga

SEQ ID NO: 1528844 - DNA, 15 bp, Homo sapiens
atagatactacagat

SEQ ID NO: 1528845 - DNA, 15 bp, Homo sapiens
tagatactacagatg

SEQ ID NO: 1528846 - DNA, 15 bp, Homo sapiens
agatactacagatga

SEQ ID NO: 1528847 - DNA, 15 bp, Homo sapiens
gatactacagatgaa

SEQ ID NO: 1528848 - DNA, 15 bp, Homo sapiens
atactacagatgaaa

SEQ ID NO: 1528849 - DNA, 15 bp, Homo sapiens
tactacagatgaaat

SEQ ID NO: 1528850 - DNA, 15 bp, Homo sapiens
actacagatgaaata

SEQ ID NO: 1528851 - DNA, 15 bp, Homo sapiens
ctacagatgaaatat

SEQ ID NO: 1528852 - DNA, 15 bp, Homo sapiens
tacagatgaaatata

SEQ ID NO: 1528853 - DNA, 15 bp, Homo sapiens
acagatgaaatataa

SEQ ID NO: 1528854 - DNA, 15 bp, Homo sapiens
cagatgaaatataaa

SEQ ID NO: 1528855 - DNA, 15 bp, Homo sapiens
agatgaaatataaaa

SEQ ID NO: 1528856 - DNA, 15 bp, Homo sapiens
gatgaaatataaaat

SEQ ID NO: 1528857 - DNA, 15 bp, Homo sapiens
atgaaatataaaata

SEQ ID NO: 1528858 - DNA, 15 bp, Homo sapiens
tgaaatataaaatag

SEQ ID NO: 1528859 - DNA, 15 bp, Homo sapiens
gaaatataaaatagt

SEQ ID NO: 1528860 - DNA, 15 bp, Homo sapiens
aaatataaaatagtt

SEQ ID NO: 1528861 - DNA, 15 bp, Homo sapiens
aatataaaatagttt

SEQ ID NO: 1528862 - DNA, 15 bp, Homo sapiens
atataaaatagtttc

SEQ ID NO: 1528863 - DNA, 15 bp, Homo sapiens
tataaaatagtttct

SEQ ID NO: 1528864 - DNA, 15 bp, Homo sapiens
ataaaatagtttctc

SEQ ID NO: 1528865 - DNA, 15 bp, Homo sapiens
taaaatagtttctcc

SEQ ID NO: 1528866 - DNA, 15 bp, Homo sapiens
aaaatagtttctcca

SEQ ID NO: 1528867 - DNA, 15 bp, Homo sapiens
aaatagtttctccaa

SEQ ID NO: 1528868 - DNA, 15 bp, Homo sapiens
aatagtttctccaag

SEQ ID NO: 1528869 - DNA, 15 bp, Homo sapiens
atagtttctccaagt

SEQ ID NO: 1528870 - DNA, 15 bp, Homo sapiens
tagtttctccaagtc

SEQ ID NO: 1528871 - DNA, 15 bp, Homo sapiens
agtttctccaagtcc

SEQ ID NO: 1528872 - DNA, 15 bp, Homo sapiens
gtttctccaagtcca

SEQ ID NO: 1528873 - DNA, 15 bp, Homo sapiens
tttctccaagtccat

SEQ ID NO: 1528874 - DNA, 15 bp, Homo sapiens
ttctccaagtccata

SEQ ID NO: 1528875 - DNA, 15 bp, Homo sapiens
tctccaagtccatag

SEQ ID NO: 1528876 - DNA, 15 bp, Homo sapiens
ctccaagtccatagg

SEQ ID NO: 1528877 - DNA, 15 bp, Homo sapiens
tccaagtccataggc

SEQ ID NO: 1528878 - DNA, 15 bp, Homo sapiens
ccaagtccataggca

SEQ ID NO: 1528879 - DNA, 15 bp, Homo sapiens
caagtccataggcag

SEQ ID NO: 1528880 - DNA, 15 bp, Homo sapiens
aagtccataggcaga

SEQ ID NO: 1528881 - DNA, 15 bp, Homo sapiens
agtccataggcagaa

SEQ ID NO: 1528882 - DNA, 15 bp, Homo sapiens
gtccataggcagaag

SEQ ID NO: 1528883 - DNA, 15 bp, Homo sapiens
tccataggcagaaga

SEQ ID NO: 1528884 - DNA, 15 bp, Homo sapiens
ccataggcagaagat

SEQ ID NO: 1528885 - DNA, 15 bp, Homo sapiens
cataggcagaagata

SEQ ID NO: 1528886 - DNA, 15 bp, Homo sapiens
ataggcagaagataa

SEQ ID NO: 1528887 - DNA, 15 bp, Homo sapiens
taggcagaagataat

SEQ ID NO: 1528888 - DNA, 15 bp, Homo sapiens
aggcagaagataatc

SEQ ID NO: 1528889 - DNA, 15 bp, Homo sapiens
ggcagaagataatcc

SEQ ID NO: 1528890 - DNA, 15 bp, Homo sapiens
gcagaagataatcca

SEQ ID NO: 1528891 - DNA, 15 bp, Homo sapiens
cagaagataatccaa

SEQ ID NO: 1528892 - DNA, 15 bp, Homo sapiens
agaagataatccaat

SEQ ID NO: 1528893 - DNA, 15 bp, Homo sapiens
gaagataatccaata

SEQ ID NO: 1528894 - DNA, 15 bp, Homo sapiens
aagataatccaatag

SEQ ID NO: 1528895 - DNA, 15 bp, Homo sapiens
agataatccaatagc

SEQ ID NO: 1528896 - DNA, 15 bp, Homo sapiens
gataatccaatagca

SEQ ID NO: 1528897 - DNA, 15 bp, Homo sapiens
ataatccaatagcaa

SEQ ID NO: 1528898 - DNA, 15 bp, Homo sapiens
taatccaatagcaac

SEQ ID NO: 1528899 - DNA, 15 bp, Homo sapiens
aatccaatagcaaca

SEQ ID NO: 1528900 - DNA, 15 bp, Homo sapiens
atccaatagcaacat

SEQ ID NO: 1528901 - DNA, 15 bp, Homo sapiens
tccaatagcaacata

SEQ ID NO: 1528902 - DNA, 15 bp, Homo sapiens
ccaatagcaacatag

SEQ ID NO: 1528903 - DNA, 15 bp, Homo sapiens
caatagcaacatagt

SEQ ID NO: 1528904 - DNA, 15 bp, Homo sapiens
aatagcaacatagtt

SEQ ID NO: 1528905 - DNA, 15 bp, Homo sapiens
atagcaacatagtta

SEQ ID NO: 1528906 - DNA, 15 bp, Homo sapiens
tagcaacatagttaa

SEQ ID NO: 1528907 - DNA, 15 bp, Homo sapiens
agcaacatagttaag

SEQ ID NO: 1528908 - DNA, 15 bp, Homo sapiens
gcaacatagttaagt

SEQ ID NO: 1528909 - DNA, 15 bp, Homo sapiens
caacatagttaagta

SEQ ID NO: 1528910 - DNA, 15 bp, Homo sapiens
aacatagttaagtaa

SEQ ID NO: 1528911 - DNA, 15 bp, Homo sapiens
acatagttaagtaat

SEQ ID NO: 1528912 - DNA, 15 bp, Homo sapiens
catagttaagtaatg

SEQ ID NO: 1528913 - DNA, 15 bp, Homo sapiens
atagttaagtaatgt

SEQ ID NO: 1528914 - DNA, 15 bp, Homo sapiens
tagttaagtaatgta

SEQ ID NO: 1528915 - DNA, 15 bp, Homo sapiens
agttaagtaatgtaa

SEQ ID NO: 1528916 - DNA, 15 bp, Homo sapiens
gttaagtaatgtaaa

SEQ ID NO: 1528917 - DNA, 15 bp, Homo sapiens
ttaagtaatgtaaac

SEQ ID NO: 1528918 - DNA, 15 bp, Homo sapiens
taagtaatgtaaaca

SEQ ID NO: 1528919 - DNA, 15 bp, Homo sapiens
aagtaatgtaaacaa

SEQ ID NO: 1528920 - DNA, 15 bp, Homo sapiens
agtaatgtaaacaaa

SEQ ID NO: 1528921 - DNA, 15 bp, Homo sapiens
gtaatgtaaacaaat

SEQ ID NO: 1528922 - DNA, 15 bp, Homo sapiens
taatgtaaacaaatc

SEQ ID NO: 1528923 - DNA, 15 bp, Homo sapiens
aatgtaaacaaatca

SEQ ID NO: 1528924 - DNA, 15 bp, Homo sapiens
atgtaaacaaatcat

SEQ ID NO: 1528925 - DNA, 15 bp, Homo sapiens
tgtaaacaaatcatc

SEQ ID NO: 1528926 - DNA, 15 bp, Homo sapiens
gtaaacaaatcatcc

SEQ ID NO: 1528927 - DNA, 15 bp, Homo sapiens
taaacaaatcatcct

SEQ ID NO: 1528928 - DNA, 15 bp, Homo sapiens
aaacaaatcatcctt

SEQ ID NO: 1528929 - DNA, 15 bp, Homo sapiens
aacaaatcatcctta

SEQ ID NO: 1528930 - DNA, 15 bp, Homo sapiens
acaaatcatccttag

SEQ ID NO: 1528931 - DNA, 15 bp, Homo sapiens
caaatcatccttaga

SEQ ID NO: 1528932 - DNA, 15 bp, Homo sapiens
aaatcatccttagaa

SEQ ID NO: 1528933 - DNA, 15 bp, Homo sapiens
aatcatccttagaag

SEQ ID NO: 1528934 - DNA, 15 bp, Homo sapiens
atcatccttagaaga

SEQ ID NO: 1528935 - DNA, 15 bp, Homo sapiens
tcatccttagaagaa

SEQ ID NO: 1528936 - DNA, 15 bp, Homo sapiens
catccttagaagaag

SEQ ID NO: 1528937 - DNA, 15 bp, Homo sapiens
atccttagaagaaga

SEQ ID NO: 1528938 - DNA, 15 bp, Homo sapiens
tccttagaagaagaa

SEQ ID NO: 1528939 - DNA, 15 bp, Homo sapiens
ccttagaagaagaaa

SEQ ID NO: 1528940 - DNA, 15 bp, Homo sapiens
cttagaagaagaaat

SEQ ID NO: 1528941 - DNA, 15 bp, Homo sapiens
ttagaagaagaaatg

SEQ ID NO: 1528942 - DNA, 15 bp, Homo sapiens
tagaagaagaaatgc

SEQ ID NO: 1528943 - DNA, 15 bp, Homo sapiens
agaagaagaaatgca

SEQ ID NO: 1528944 - DNA, 15 bp, Homo sapiens
gaagaagaaatgcaa

SEQ ID NO: 1528945 - DNA, 15 bp, Homo sapiens
aagaagaaatgcaat

SEQ ID NO: 1528946 - DNA, 15 bp, Homo sapiens
agaagaaatgcaatc

SEQ ID NO: 1528947 - DNA, 15 bp, Homo sapiens
gaagaaatgcaatca

SEQ ID NO: 1528948 - DNA, 15 bp, Homo sapiens
aagaaatgcaatcac

SEQ ID NO: 1528949 - DNA, 15 bp, Homo sapiens
agaaatgcaatcacc

SEQ ID NO: 1528950 - DNA, 15 bp, Homo sapiens
gaaatgcaatcacca

SEQ ID NO: 1528951 - DNA, 15 bp, Homo sapiens
aaatgcaatcaccaa

SEQ ID NO: 1528952 - DNA, 15 bp, Homo sapiens
aatgcaatcaccaag

SEQ ID NO: 1528953 - DNA, 15 bp, Homo sapiens
atgcaatcaccaaga

SEQ ID NO: 1528954 - DNA, 15 bp, Homo sapiens
tgcaatcaccaagaa

SEQ ID NO: 1528955 - DNA, 15 bp, Homo sapiens
gcaatcaccaagaaa

SEQ ID NO: 1528956 - DNA, 15 bp, Homo sapiens
caatcaccaagaaac

SEQ ID NO: 1528957 - DNA, 15 bp, Homo sapiens
aatcaccaagaaaca

SEQ ID NO: 1528958 - DNA, 15 bp, Homo sapiens
atcaccaagaaacac

SEQ ID NO: 1528959 - DNA, 15 bp, Homo sapiens
tcaccaagaaacaca

SEQ ID NO: 1528960 - DNA, 15 bp, Homo sapiens
caccaagaaacacat

SEQ ID NO: 1528961 - DNA, 15 bp, Homo sapiens
accaagaaacacatg

SEQ ID NO: 1528962 - DNA, 15 bp, Homo sapiens
ccaagaaacacatga

SEQ ID NO: 1528963 - DNA, 15 bp, Homo sapiens
caagaaacacatgaa

SEQ ID NO: 1528964 - DNA, 15 bp, Homo sapiens
aagaaacacatgaaa

SEQ ID NO: 1528965 - DNA, 15 bp, Homo sapiens
agaaacacatgaaaa

SEQ ID NO: 1528966 - DNA, 15 bp, Homo sapiens
gaaacacatgaaaag

SEQ ID NO: 1528967 - DNA, 15 bp, Homo sapiens
aaacacatgaaaagg

SEQ ID NO: 1528968 - DNA, 15 bp, Homo sapiens
aacacatgaaaaggt

SEQ ID NO: 1528969 - DNA, 15 bp, Homo sapiens
acacatgaaaaggtg

SEQ ID NO: 1528970 - DNA, 15 bp, Homo sapiens
cacatgaaaaggtgt

SEQ ID NO: 1528971 - DNA, 15 bp, Homo sapiens
acatgaaaaggtgtc

SEQ ID NO: 1528972 - DNA, 15 bp, Homo sapiens
catgaaaaggtgtcc

SEQ ID NO: 1528973 - DNA, 15 bp, Homo sapiens
atgaaaaggtgtcca

SEQ ID NO: 1528974 - DNA, 15 bp, Homo sapiens
tgaaaaggtgtccag

SEQ ID NO: 1528975 - DNA, 15 bp, Homo sapiens
gaaaaggtgtccagc

SEQ ID NO: 1528976 - DNA, 15 bp, Homo sapiens
aaaaggtgtccagca

SEQ ID NO: 1528977 - DNA, 15 bp, Homo sapiens
aaaggtgtccagcat

SEQ ID NO: 1528978 - DNA, 15 bp, Homo sapiens
aaggtgtccagcatt

SEQ ID NO: 1528979 - DNA, 15 bp, Homo sapiens
aggtgtccagcattt

SEQ ID NO: 1528980 - DNA, 15 bp, Homo sapiens
ggtgtccagcatttt

SEQ ID NO: 1528981 - DNA, 15 bp, Homo sapiens
gtgtccagcattttg

SEQ ID NO: 1528982 - DNA, 15 bp, Homo sapiens
tgtccagcattttgc

SEQ ID NO: 1528983 - DNA, 15 bp, Homo sapiens
gtccagcattttgca

SEQ ID NO: 1528984 - DNA, 15 bp, Homo sapiens
tccagcattttgcaa

SEQ ID NO: 1528985 - DNA, 15 bp, Homo sapiens
ccagcattttgcaat

SEQ ID NO: 1528986 - DNA, 15 bp, Homo sapiens
cagcattttgcaatt

SEQ ID NO: 1528987 - DNA, 15 bp, Homo sapiens
agcattttgcaattc

SEQ ID NO: 1528988 - DNA, 15 bp, Homo sapiens
gcattttgcaattca

SEQ ID NO: 1528989 - DNA, 15 bp, Homo sapiens
cattttgcaattcaa

SEQ ID NO: 1528990 - DNA, 15 bp, Homo sapiens
attttgcaattcaag

SEQ ID NO: 1528991 - DNA, 15 bp, Homo sapiens
ttttgcaattcaagc

SEQ ID NO: 1528992 - DNA, 15 bp, Homo sapiens
tttgcaattcaagca

SEQ ID NO: 1528993 - DNA, 15 bp, Homo sapiens
ttgcaattcaagcaa

SEQ ID NO: 1528994 - DNA, 15 bp, Homo sapiens
tgcaattcaagcaac

SEQ ID NO: 1528995 - DNA, 15 bp, Homo sapiens
gcaattcaagcaaca

SEQ ID NO: 1528996 - DNA, 15 bp, Homo sapiens
caattcaagcaacaa

SEQ ID NO: 1528997 - DNA, 15 bp, Homo sapiens
aattcaagcaacaat

SEQ ID NO: 1528998 - DNA, 15 bp, Homo sapiens
attcaagcaacaatg

SEQ ID NO: 1528999 - DNA, 15 bp, Homo sapiens
ttcaagcaacaatga

SEQ ID NO: 1529000 - DNA, 15 bp, Homo sapiens
tcaagcaacaatgag

SEQ ID NO: 1529001 - DNA, 15 bp, Homo sapiens
caagcaacaatgagg

SEQ ID NO: 1529002 - DNA, 15 bp, Homo sapiens
aagcaacaatgaggt

SEQ ID NO: 1529003 - DNA, 15 bp, Homo sapiens
agcaacaatgaggtg

SEQ ID NO: 1529004 - DNA, 15 bp, Homo sapiens
gcaacaatgaggtga

SEQ ID NO: 1529005 - DNA, 15 bp, Homo sapiens
caacaatgaggtgac

SEQ ID NO: 1529006 - DNA, 15 bp, Homo sapiens
aacaatgaggtgaca

SEQ ID NO: 1529007 - DNA, 15 bp, Homo sapiens
acaatgaggtgacag

SEQ ID NO: 1529008 - DNA, 15 bp, Homo sapiens
caatgaggtgacaga

SEQ ID NO: 1529009 - DNA, 15 bp, Homo sapiens
aatgaggtgacagat

SEQ ID NO: 1529010 - DNA, 15 bp, Homo sapiens
atgaggtgacagatc

SEQ ID NO: 1529011 - DNA, 15 bp, Homo sapiens
tgaggtgacagatcg

SEQ ID NO: 1529012 - DNA, 15 bp, Homo sapiens
gaggtgacagatcgg

SEQ ID NO: 1529013 - DNA, 15 bp, Homo sapiens
aggtgacagatcggc

SEQ ID NO: 1529014 - DNA, 15 bp, Homo sapiens
ggtgacagatcggca

SEQ ID NO: 1529015 - DNA, 15 bp, Homo sapiens
gtgacagatcggcaa

SEQ ID NO: 1529016 - DNA, 15 bp, Homo sapiens
tgacagatcggcaaa

SEQ ID NO: 1529017 - DNA, 15 bp, Homo sapiens
gacagatcggcaaaa

SEQ ID NO: 1529018 - DNA, 15 bp, Homo sapiens
acagatcggcaaaaa

SEQ ID NO: 1529019 - DNA, 15 bp, Homo sapiens
cagatcggcaaaaaa

SEQ ID NO: 1529020 - DNA, 15 bp, Homo sapiens
agatcggcaaaaaac

SEQ ID NO: 1529021 - DNA, 15 bp, Homo sapiens
gatcggcaaaaaact

SEQ ID NO: 1529022 - DNA, 15 bp, Homo sapiens
atcggcaaaaaactc

SEQ ID NO: 1529023 - DNA, 15 bp, Homo sapiens
tcggcaaaaaactca

SEQ ID NO: 1529024 - DNA, 15 bp, Homo sapiens
cggcaaaaaactcat

SEQ ID NO: 1529025 - DNA, 15 bp, Homo sapiens
ggcaaaaaactcata

SEQ ID NO: 1529026 - DNA, 15 bp, Homo sapiens
gcaaaaaactcataa

SEQ ID NO: 1529027 - DNA, 15 bp, Homo sapiens
caaaaaactcataaa

SEQ ID NO: 1529028 - DNA, 15 bp, Homo sapiens
aaaaaactcataaag

SEQ ID NO: 1529029 - DNA, 15 bp, Homo sapiens
aaaaactcataaaga

SEQ ID NO: 1529030 - DNA, 15 bp, Homo sapiens
aaaactcataaagat

SEQ ID NO: 1529031 - DNA, 15 bp, Homo sapiens
aaactcataaagatt

SEQ ID NO: 1529032 - DNA, 15 bp, Homo sapiens
aactcataaagattt

SEQ ID NO: 1529033 - DNA, 15 bp, Homo sapiens
actcataaagattta

SEQ ID NO: 1529034 - DNA, 15 bp, Homo sapiens
ctcataaagatttat

SEQ ID NO: 1529035 - DNA, 15 bp, Homo sapiens
tcataaagatttatc

SEQ ID NO: 1529036 - DNA, 15 bp, Homo sapiens
cataaagatttatca

SEQ ID NO: 1529037 - DNA, 15 bp, Homo sapiens
ataaagatttatcat

SEQ ID NO: 1529038 - DNA, 15 bp, Homo sapiens
taaagatttatcatc

SEQ ID NO: 1529039 - DNA, 15 bp, Homo sapiens
aaagatttatcatct

SEQ ID NO: 1529040 - DNA, 15 bp, Homo sapiens
aagatttatcatctg

SEQ ID NO: 1529041 - DNA, 15 bp, Homo sapiens
agatttatcatctga

SEQ ID NO: 1529042 - DNA, 15 bp, Homo sapiens
gatttatcatctgaa

SEQ ID NO: 1529043 - DNA, 15 bp, Homo sapiens
atttatcatctgaag

SEQ ID NO: 1529044 - DNA, 15 bp, Homo sapiens
tttatcatctgaagg

SEQ ID NO: 1529045 - DNA, 15 bp, Homo sapiens
ttatcatctgaagga

SEQ ID NO: 1529046 - DNA, 15 bp, Homo sapiens
tatcatctgaaggat

SEQ ID NO: 1529047 - DNA, 15 bp, Homo sapiens
atcatctgaaggatt

SEQ ID NO: 1529048 - DNA, 15 bp, Homo sapiens
tcatctgaaggattg

SEQ ID NO: 1529049 - DNA, 15 bp, Homo sapiens
catctgaaggattgg

SEQ ID NO: 1529050 - DNA, 15 bp, Homo sapiens
atctgaaggattggc

SEQ ID NO: 1529051 - DNA, 15 bp, Homo sapiens
tctgaaggattggcc

SEQ ID NO: 1529052 - DNA, 15 bp, Homo sapiens
ctgaaggattggcca

SEQ ID NO: 1529053 - DNA, 15 bp, Homo sapiens
tgaaggattggccaa

SEQ ID NO: 1529054 - DNA, 15 bp, Homo sapiens
gaaggattggccaag

SEQ ID NO: 1529055 - DNA, 15 bp, Homo sapiens
aaggattggccaaga

SEQ ID NO: 1529056 - DNA, 15 bp, Homo sapiens
aggattggccaagat

SEQ ID NO: 1529057 - DNA, 15 bp, Homo sapiens
ggattggccaagata

SEQ ID NO: 1529058 - DNA, 15 bp, Homo sapiens
gattggccaagataa

SEQ ID NO: 1529059 - DNA, 15 bp, Homo sapiens
attggccaagataaa

SEQ ID NO: 1529060 - DNA, 15 bp, Homo sapiens
ttggccaagataaag

SEQ ID NO: 1529061 - DNA, 15 bp, Homo sapiens
tggccaagataaagc

SEQ ID NO: 1529062 - DNA, 15 bp, Homo sapiens
ggccaagataaagcc

SEQ ID NO: 1529063 - DNA, 15 bp, Homo sapiens
gccaagataaagcca

SEQ ID NO: 1529064 - DNA, 15 bp, Homo sapiens
ccaagataaagccaa

SEQ ID NO: 1529065 - DNA, 15 bp, Homo sapiens
caagataaagccaaa

SEQ ID NO: 1529066 - DNA, 15 bp, Homo sapiens
aagataaagccaaac

SEQ ID NO: 1529067 - DNA, 15 bp, Homo sapiens
agataaagccaaact

SEQ ID NO: 1529068 - DNA, 15 bp, Homo sapiens
gataaagccaaactt

SEQ ID NO: 1529069 - DNA, 15 bp, Homo sapiens
ataaagccaaacttc

SEQ ID NO: 1529070 - DNA, 15 bp, Homo sapiens
taaagccaaacttct

SEQ ID NO: 1529071 - DNA, 15 bp, Homo sapiens
aaagccaaacttctc

SEQ ID NO: 1529072 - DNA, 15 bp, Homo sapiens
aagccaaacttctcg

SEQ ID NO: 1529073 - DNA, 15 bp, Homo sapiens
agccaaacttctcgt

SEQ ID NO: 1529074 - DNA, 15 bp, Homo sapiens
gccaaacttctcgtg

SEQ ID NO: 1529075 - DNA, 15 bp, Homo sapiens
ccaaacttctcgtgt

SEQ ID NO: 1529076 - DNA, 15 bp, Homo sapiens
caaacttctcgtgtt

SEQ ID NO: 1529077 - DNA, 15 bp, Homo sapiens
aaacttctcgtgttg

SEQ ID NO: 1529078 - DNA, 15 bp, Homo sapiens
aacttctcgtgttgg

SEQ ID NO: 1529079 - DNA, 15 bp, Homo sapiens
acttctcgtgttggc

SEQ ID NO: 1529080 - DNA, 15 bp, Homo sapiens
cttctcgtgttggca

SEQ ID NO: 1529081 - DNA, 15 bp, Homo sapiens
ttctcgtgttggcag

SEQ ID NO: 1529082 - DNA, 15 bp, Homo sapiens
tctcgtgttggcaga

SEQ ID NO: 1529083 - DNA, 15 bp, Homo sapiens
ctcgtgttggcagaa

SEQ ID NO: 1529084 - DNA, 15 bp, Homo sapiens
tcgtgttggcagaag

SEQ ID NO: 1529085 - DNA, 15 bp, Homo sapiens
cgtgttggcagaaga

SEQ ID NO: 1529086 - DNA, 15 bp, Homo sapiens
gtgttggcagaagaa

SEQ ID NO: 1529087 - DNA, 15 bp, Homo sapiens
tgttggcagaagaaa

SEQ ID NO: 1529088 - DNA, 15 bp, Homo sapiens
gttggcagaagaaac

SEQ ID NO: 1529089 - DNA, 15 bp, Homo sapiens
ttggcagaagaaact

SEQ ID NO: 1529090 - DNA, 15 bp, Homo sapiens
tggcagaagaaactg

SEQ ID NO: 1529091 - DNA, 15 bp, Homo sapiens
ggcagaagaaactgg

SEQ ID NO: 1529092 - DNA, 15 bp, Homo sapiens
gcagaagaaactggt

SEQ ID NO: 1529093 - DNA, 15 bp, Homo sapiens
cagaagaaactggtg

SEQ ID NO: 1529094 - DNA, 15 bp, Homo sapiens
agaagaaactggtga

SEQ ID NO: 1529095 - DNA, 15 bp, Homo sapiens
gaagaaactggtgaa

SEQ ID NO: 1529096 - DNA, 15 bp, Homo sapiens
aagaaactggtgaag

SEQ ID NO: 1529097 - DNA, 15 bp, Homo sapiens
agaaactggtgaagc

SEQ ID NO: 1529098 - DNA, 15 bp, Homo sapiens
gaaactggtgaagcc

SEQ ID NO: 1529099 - DNA, 15 bp, Homo sapiens
aaactggtgaagcca

SEQ ID NO: 1529100 - DNA, 15 bp, Homo sapiens
aactggtgaagccat

SEQ ID NO: 1529101 - DNA, 15 bp, Homo sapiens
actggtgaagccatg

SEQ ID NO: 1529102 - DNA, 15 bp, Homo sapiens
ctggtgaagccatgt

SEQ ID NO: 1529103 - DNA, 15 bp, Homo sapiens
tggtgaagccatgtg

SEQ ID NO: 1529104 - DNA, 15 bp, Homo sapiens
ggtgaagccatgtga

SEQ ID NO: 1529105 - DNA, 15 bp, Homo sapiens
gtgaagccatgtgaa

SEQ ID NO: 1529106 - DNA, 15 bp, Homo sapiens
tgaagccatgtgaag

SEQ ID NO: 1529107 - DNA, 15 bp, Homo sapiens
gaagccatgtgaaga

SEQ ID NO: 1529108 - DNA, 15 bp, Homo sapiens
aagccatgtgaagag

SEQ ID NO: 1529109 - DNA, 15 bp, Homo sapiens
agccatgtgaagagg

SEQ ID NO: 1529110 - DNA, 15 bp, Homo sapiens
gccatgtgaagaggc

SEQ ID NO: 1529111 - DNA, 15 bp, Homo sapiens
ccatgtgaagaggcc

SEQ ID NO: 1529112 - DNA, 15 bp, Homo sapiens
catgtgaagaggcca

SEQ ID NO: 1529113 - DNA, 15 bp, Homo sapiens
atgtgaagaggccac

SEQ ID NO: 1529114 - DNA, 15 bp, Homo sapiens
tgtgaagaggccacg

SEQ ID NO: 1529115 - DNA, 15 bp, Homo sapiens
gtgaagaggccacgt

SEQ ID NO: 1529116 - DNA, 15 bp, Homo sapiens
tgaagaggccacgtg

SEQ ID NO: 1529117 - DNA, 15 bp, Homo sapiens
gaagaggccacgtgg

SEQ ID NO: 1529118 - DNA, 15 bp, Homo sapiens
aagaggccacgtggt

SEQ ID NO: 1529119 - DNA, 15 bp, Homo sapiens
agaggccacgtggtc

SEQ ID NO: 1529120 - DNA, 15 bp, Homo sapiens
gaggccacgtggtcc

SEQ ID NO: 1529121 - DNA, 15 bp, Homo sapiens
aggccacgtggtcct

SEQ ID NO: 1529122 - DNA, 15 bp, Homo sapiens
ggccacgtggtcctg

SEQ ID NO: 1529123 - DNA, 15 bp, Homo sapiens
gccacgtggtcctgc

SEQ ID NO: 1529124 - DNA, 15 bp, Homo sapiens
ccacgtggtcctgcc

SEQ ID NO: 1529125 - DNA, 15 bp, Homo sapiens
cacgtggtcctgcct

SEQ ID NO: 1529126 - DNA, 15 bp, Homo sapiens
acgtggtcctgccta

SEQ ID NO: 1529127 - DNA, 15 bp, Homo sapiens
cgtggtcctgcctac

SEQ ID NO: 1529128 - DNA, 15 bp, Homo sapiens
gtggtcctgcctacc

SEQ ID NO: 1529129 - DNA, 15 bp, Homo sapiens
tggtcctgcctacca

SEQ ID NO: 1529130 - DNA, 15 bp, Homo sapiens
ggtcctgcctaccaa

SEQ ID NO: 1529131 - DNA, 15 bp, Homo sapiens
gtcctgcctaccaag

SEQ ID NO: 1529132 - DNA, 15 bp, Homo sapiens
tcctgcctaccaaga

SEQ ID NO: 1529133 - DNA, 15 bp, Homo sapiens
cctgcctaccaagat

SEQ ID NO: 1529134 - DNA, 15 bp, Homo sapiens
ctgcctaccaagatg

SEQ ID NO: 1529135 - DNA, 15 bp, Homo sapiens
tgcctaccaagatgt

SEQ ID NO: 1529136 - DNA, 15 bp, Homo sapiens
gcctaccaagatgta

SEQ ID NO: 1529137 - DNA, 15 bp, Homo sapiens
cctaccaagatgtaa

SEQ ID NO: 1529138 - DNA, 15 bp, Homo sapiens
ctaccaagatgtaaa

SEQ ID NO: 1529139 - DNA, 15 bp, Homo sapiens
taccaagatgtaaaa

SEQ ID NO: 1529140 - DNA, 15 bp, Homo sapiens
accaagatgtaaaat

SEQ ID NO: 1529141 - DNA, 15 bp, Homo sapiens
ccaagatgtaaaatg

SEQ ID NO: 1529142 - DNA, 15 bp, Homo sapiens
caagatgtaaaatgt

SEQ ID NO: 1529143 - DNA, 15 bp, Homo sapiens
aagatgtaaaatgtg

SEQ ID NO: 1529144 - DNA, 15 bp, Homo sapiens
agatgtaaaatgtgt

SEQ ID NO: 1529145 - DNA, 15 bp, Homo sapiens
gatgtaaaatgtgta

SEQ ID NO: 1529146 - DNA, 15 bp, Homo sapiens
atgtaaaatgtgtac

SEQ ID NO: 1529147 - DNA, 15 bp, Homo sapiens
tgtaaaatgtgtaca

SEQ ID NO: 1529148 - DNA, 15 bp, Homo sapiens
gtaaaatgtgtacag

SEQ ID NO: 1529149 - DNA, 15 bp, Homo sapiens
taaaatgtgtacagc

SEQ ID NO: 1529150 - DNA, 15 bp, Homo sapiens
aaaatgtgtacagca

SEQ ID NO: 1529151 - DNA, 15 bp, Homo sapiens
aaatgtgtacagcat

SEQ ID NO: 1529152 - DNA, 15 bp, Homo sapiens
aatgtgtacagcatt

SEQ ID NO: 1529153 - DNA, 15 bp, Homo sapiens
atgtgtacagcattt

SEQ ID NO: 1529154 - DNA, 15 bp, Homo sapiens
tgtgtacagcatttg

SEQ ID NO: 1529155 - DNA, 15 bp, Homo sapiens
gtgtacagcatttga

SEQ ID NO: 1529156 - DNA, 15 bp, Homo sapiens
tgtacagcatttgaa

SEQ ID NO: 1529157 - DNA, 15 bp, Homo sapiens
gtacagcatttgaac

SEQ ID NO: 1529158 - DNA, 15 bp, Homo sapiens
tacagcatttgaact

SEQ ID NO: 1529159 - DNA, 15 bp, Homo sapiens
acagcatttgaacta

SEQ ID NO: 1529160 - DNA, 15 bp, Homo sapiens
cagcatttgaactag

SEQ ID NO: 1529161 - DNA, 15 bp, Homo sapiens
agcatttgaactagc

SEQ ID NO: 1529162 - DNA, 15 bp, Homo sapiens
gcatttgaactagca

SEQ ID NO: 1529163 - DNA, 15 bp, Homo sapiens
catttgaactagcaa

SEQ ID NO: 1529164 - DNA, 15 bp, Homo sapiens
atttgaactagcaat

SEQ ID NO: 1529165 - DNA, 15 bp, Homo sapiens
tttgaactagcaatt

SEQ ID NO: 1529166 - DNA, 15 bp, Homo sapiens
ttgaactagcaattc

SEQ ID NO: 1529167 - DNA, 15 bp, Homo sapiens
tgaactagcaattca

SEQ ID NO: 1529168 - DNA, 15 bp, Homo sapiens
gaactagcaattcag

SEQ ID NO: 1529169 - DNA, 15 bp, Homo sapiens
aactagcaattcagc

SEQ ID NO: 1529170 - DNA, 15 bp, Homo sapiens
actagcaattcagcc

SEQ ID NO: 1529171 - DNA, 15 bp, Homo sapiens
ctagcaattcagcct

SEQ ID NO: 1529172 - DNA, 15 bp, Homo sapiens
tagcaattcagcctc

SEQ ID NO: 1529173 - DNA, 15 bp, Homo sapiens
agcaattcagcctcc

SEQ ID NO: 1529174 - DNA, 15 bp, Homo sapiens
gcaattcagcctcca

SEQ ID NO: 1529175 - DNA, 15 bp, Homo sapiens
caattcagcctccag

SEQ ID NO: 1529176 - DNA, 15 bp, Homo sapiens
aattcagcctccagg

SEQ ID NO: 1529177 - DNA, 15 bp, Homo sapiens
attcagcctccagga

SEQ ID NO: 1529178 - DNA, 15 bp, Homo sapiens
ttcagcctccaggag

SEQ ID NO: 1529179 - DNA, 15 bp, Homo sapiens
tcagcctccaggagc

SEQ ID NO: 1529180 - DNA, 15 bp, Homo sapiens
cagcctccaggagcc

SEQ ID NO: 1529181 - DNA, 15 bp, Homo sapiens
agcctccaggagcca

SEQ ID NO: 1529182 - DNA, 15 bp, Homo sapiens
gcctccaggagccat

SEQ ID NO: 1529183 - DNA, 15 bp, Homo sapiens
cctccaggagccatc

SEQ ID NO: 1529184 - DNA, 15 bp, Homo sapiens
ctccaggagccatcc

SEQ ID NO: 1529185 - DNA, 15 bp, Homo sapiens
tccaggagccatcca

SEQ ID NO: 1529186 - DNA, 15 bp, Homo sapiens
ccaggagccatccag

SEQ ID NO: 1529187 - DNA, 15 bp, Homo sapiens
caggagccatccaga

SEQ ID NO: 1529188 - DNA, 15 bp, Homo sapiens
aggagccatccagaa

SEQ ID NO: 1529189 - DNA, 15 bp, Homo sapiens
ggagccatccagaag

SEQ ID NO: 1529190 - DNA, 15 bp, Homo sapiens
gagccatccagaaga

SEQ ID NO: 1529191 - DNA, 15 bp, Homo sapiens
agccatccagaagaa

SEQ ID NO: 1529192 - DNA, 15 bp, Homo sapiens
gccatccagaagaaa

SEQ ID NO: 1529193 - DNA, 15 bp, Homo sapiens
ccatccagaagaaac

SEQ ID NO: 1529194 - DNA, 15 bp, Homo sapiens
catccagaagaaaca

SEQ ID NO: 1529195 - DNA, 15 bp, Homo sapiens
atccagaagaaacac

SEQ ID NO: 1529196 - DNA, 15 bp, Homo sapiens
tccagaagaaacact

SEQ ID NO: 1529197 - DNA, 15 bp, Homo sapiens
ccagaagaaacactg

SEQ ID NO: 1529198 - DNA, 15 bp, Homo sapiens
cagaagaaacactga

SEQ ID NO: 1529199 - DNA, 15 bp, Homo sapiens
agaagaaacactgac

SEQ ID NO: 1529200 - DNA, 15 bp, Homo sapiens
gaagaaacactgaca

SEQ ID NO: 1529201 - DNA, 15 bp, Homo sapiens
aagaaacactgacac

SEQ ID NO: 1529202 - DNA, 15 bp, Homo sapiens
agaaacactgacaca

SEQ ID NO: 1529203 - DNA, 15 bp, Homo sapiens
gaaacactgacacac

SEQ ID NO: 1529204 - DNA, 15 bp, Homo sapiens
aaacactgacacaca

SEQ ID NO: 1529205 - DNA, 15 bp, Homo sapiens
aacactgacacacac

SEQ ID NO: 1529206 - DNA, 15 bp, Homo sapiens
acactgacacacact

SEQ ID NO: 1529207 - DNA, 15 bp, Homo sapiens
cactgacacacactt

SEQ ID NO: 1529208 - DNA, 15 bp, Homo sapiens
actgacacacactta

SEQ ID NO: 1529209 - DNA, 15 bp, Homo sapiens
ctgacacacacttag

SEQ ID NO: 1529210 - DNA, 15 bp, Homo sapiens
tgacacacacttaga

SEQ ID NO: 1529211 - DNA, 15 bp, Homo sapiens
gacacacacttagac

SEQ ID NO: 1529212 - DNA, 15 bp, Homo sapiens
acacacacttagact

SEQ ID NO: 1529213 - DNA, 15 bp, Homo sapiens
cacacacttagactc

SEQ ID NO: 1529214 - DNA, 15 bp, Homo sapiens
acacacttagactcc

SEQ ID NO: 1529215 - DNA, 15 bp, Homo sapiens
cacacttagactccg

SEQ ID NO: 1529216 - DNA, 15 bp, Homo sapiens
acacttagactccgg

SEQ ID NO: 1529217 - DNA, 15 bp, Homo sapiens
cacttagactccggt

SEQ ID NO: 1529218 - DNA, 15 bp, Homo sapiens
acttagactccggtg

SEQ ID NO: 1529219 - DNA, 15 bp, Homo sapiens
cttagactccggtga

SEQ ID NO: 1529220 - DNA, 15 bp, Homo sapiens
ttagactccggtgaa

SEQ ID NO: 1529221 - DNA, 15 bp, Homo sapiens
tagactccggtgaaa

SEQ ID NO: 1529222 - DNA, 15 bp, Homo sapiens
agactccggtgaaat

SEQ ID NO: 1529223 - DNA, 15 bp, Homo sapiens
gactccggtgaaatt

SEQ ID NO: 1529224 - DNA, 15 bp, Homo sapiens
actccggtgaaattc

SEQ ID NO: 1529225 - DNA, 15 bp, Homo sapiens
ctccggtgaaattca

SEQ ID NO: 1529226 - DNA, 15 bp, Homo sapiens
tccggtgaaattcaa

SEQ ID NO: 1529227 - DNA, 15 bp, Homo sapiens
ccggtgaaattcaag

SEQ ID NO: 1529228 - DNA, 15 bp, Homo sapiens
cggtgaaattcaagg

SEQ ID NO: 1529229 - DNA, 15 bp, Homo sapiens
ggtgaaattcaagga

SEQ ID NO: 1529230 - DNA, 15 bp, Homo sapiens
gtgaaattcaaggac

SEQ ID NO: 1529231 - DNA, 15 bp, Homo sapiens
tgaaattcaaggact

SEQ ID NO: 1529232 - DNA, 15 bp, Homo sapiens
gaaattcaaggactt

SEQ ID NO: 1529233 - DNA, 15 bp, Homo sapiens
aaattcaaggacttc

SEQ ID NO: 1529234 - DNA, 15 bp, Homo sapiens
aattcaaggacttct

SEQ ID NO: 1529235 - DNA, 15 bp, Homo sapiens
attcaaggacttctg

SEQ ID NO: 1529236 - DNA, 15 bp, Homo sapiens
ttcaaggacttctgc

SEQ ID NO: 1529237 - DNA, 15 bp, Homo sapiens
tcaaggacttctgcc

SEQ ID NO: 1529238 - DNA, 15 bp, Homo sapiens
caaggacttctgcca

SEQ ID NO: 1529239 - DNA, 15 bp, Homo sapiens
aaggacttctgccac

SEQ ID NO: 1529240 - DNA, 15 bp, Homo sapiens
aggacttctgccaca

SEQ ID NO: 1529241 - DNA, 15 bp, Homo sapiens
ggacttctgccacag

SEQ ID NO: 1529242 - DNA, 15 bp, Homo sapiens
gacttctgccacagc

SEQ ID NO: 1529243 - DNA, 15 bp, Homo sapiens
acttctgccacagcc

SEQ ID NO: 1529244 - DNA, 15 bp, Homo sapiens
cttctgccacagcct

SEQ ID NO: 1529245 - DNA, 15 bp, Homo sapiens
ttctgccacagcctg

SEQ ID NO: 1529246 - DNA, 15 bp, Homo sapiens
tctgccacagcctgc

SEQ ID NO: 1529247 - DNA, 15 bp, Homo sapiens
ctgccacagcctgct

SEQ ID NO: 1529248 - DNA, 15 bp, Homo sapiens
tgccacagcctgctt

SEQ ID NO: 1529249 - DNA, 15 bp, Homo sapiens
gccacagcctgcttc

SEQ ID NO: 1529250 - DNA, 15 bp, Homo sapiens
ccacagcctgcttcg

SEQ ID NO: 1529251 - DNA, 15 bp, Homo sapiens
cacagcctgcttcgt

SEQ ID NO: 1529252 - DNA, 15 bp, Homo sapiens
acagcctgcttcgta

SEQ ID NO: 1529253 - DNA, 15 bp, Homo sapiens
cagcctgcttcgtaa

SEQ ID NO: 1529254 - DNA, 15 bp, Homo sapiens
agcctgcttcgtaat

SEQ ID NO: 1529255 - DNA, 15 bp, Homo sapiens
gcctgcttcgtaata

SEQ ID NO: 1529256 - DNA, 15 bp, Homo sapiens
cctgcttcgtaatag

SEQ ID NO: 1529257 - DNA, 15 bp, Homo sapiens
ctgcttcgtaatagt

SEQ ID NO: 1529258 - DNA, 15 bp, Homo sapiens
tgcttcgtaatagtg

SEQ ID NO: 1529259 - DNA, 15 bp, Homo sapiens
gcttcgtaatagtga

SEQ ID NO: 1529260 - DNA, 15 bp, Homo sapiens
cttcgtaatagtgaa

SEQ ID NO: 1529261 - DNA, 15 bp, Homo sapiens
ttcgtaatagtgaaa

SEQ ID NO: 1529262 - DNA, 15 bp, Homo sapiens
tcgtaatagtgaaaa

SEQ ID NO: 1529263 - DNA, 15 bp, Homo sapiens
cgtaatagtgaaaat

SEQ ID NO: 1529264 - DNA, 15 bp, Homo sapiens
gtaatagtgaaaatc

SEQ ID NO: 1529265 - DNA, 15 bp, Homo sapiens
taatagtgaaaatct

SEQ ID NO: 1529266 - DNA, 15 bp, Homo sapiens
aatagtgaaaatctg

SEQ ID NO: 1529267 - DNA, 15 bp, Homo sapiens
atagtgaaaatctga

SEQ ID NO: 1529268 - DNA, 15 bp, Homo sapiens
tagtgaaaatctgaa

SEQ ID NO: 1529269 - DNA, 15 bp, Homo sapiens
agtgaaaatctgaaa

SEQ ID NO: 1529270 - DNA, 15 bp, Homo sapiens
gtgaaaatctgaaac

SEQ ID NO: 1529271 - DNA, 15 bp, Homo sapiens
tgaaaatctgaaact

SEQ ID NO: 1529272 - DNA, 15 bp, Homo sapiens
gaaaatctgaaactg

SEQ ID NO: 1529273 - DNA, 15 bp, Homo sapiens
aaaatctgaaactgc

SEQ ID NO: 1529274 - DNA, 15 bp, Homo sapiens
aaatctgaaactgcc

SEQ ID NO: 1529275 - DNA, 15 bp, Homo sapiens
aatctgaaactgcct

SEQ ID NO: 1529276 - DNA, 15 bp, Homo sapiens
atctgaaactgcctc

SEQ ID NO: 1529277 - DNA, 15 bp, Homo sapiens
tctgaaactgcctca

SEQ ID NO: 1529278 - DNA, 15 bp, Homo sapiens
ctgaaactgcctcaa

SEQ ID NO: 1529279 - DNA, 15 bp, Homo sapiens
tgaaactgcctcaat

SEQ ID NO: 1529280 - DNA, 15 bp, Homo sapiens
gaaactgcctcaatg

SEQ ID NO: 1529281 - DNA, 15 bp, Homo sapiens
aaactgcctcaatga

SEQ ID NO: 1529282 - DNA, 15 bp, Homo sapiens
aactgcctcaatgac

SEQ ID NO: 1529283 - DNA, 15 bp, Homo sapiens
actgcctcaatgacc

SEQ ID NO: 1529284 - DNA, 15 bp, Homo sapiens
ctgcctcaatgaccg

SEQ ID NO: 1529285 - DNA, 15 bp, Homo sapiens
tgcctcaatgaccgt

SEQ ID NO: 1529286 - DNA, 15 bp, Homo sapiens
gcctcaatgaccgtc

SEQ ID NO: 1529287 - DNA, 15 bp, Homo sapiens
cctcaatgaccgtca

SEQ ID NO: 1529288 - DNA, 15 bp, Homo sapiens
ctcaatgaccgtcaa

SEQ ID NO: 1529289 - DNA, 15 bp, Homo sapiens
tcaatgaccgtcaat

SEQ ID NO: 1529290 - DNA, 15 bp, Homo sapiens
caatgaccgtcaata

SEQ ID NO: 1529291 - DNA, 15 bp, Homo sapiens
aatgaccgtcaatag

SEQ ID NO: 1529292 - DNA, 15 bp, Homo sapiens
atgaccgtcaatagg

SEQ ID NO: 1529293 - DNA, 15 bp, Homo sapiens
tgaccgtcaatagga

SEQ ID NO: 1529294 - DNA, 15 bp, Homo sapiens
gaccgtcaataggaa

SEQ ID NO: 1529295 - DNA, 15 bp, Homo sapiens
accgtcaataggaag

SEQ ID NO: 1529296 - DNA, 15 bp, Homo sapiens
ccgtcaataggaagt

SEQ ID NO: 1529297 - DNA, 15 bp, Homo sapiens
cgtcaataggaagtt

SEQ ID NO: 1529298 - DNA, 15 bp, Homo sapiens
gtcaataggaagttg

SEQ ID NO: 1529299 - DNA, 15 bp, Homo sapiens
tcaataggaagttga

SEQ ID NO: 1529300 - DNA, 15 bp, Homo sapiens
caataggaagttgat

SEQ ID NO: 1529301 - DNA, 15 bp, Homo sapiens
aataggaagttgatt

SEQ ID NO: 1529302 - DNA, 15 bp, Homo sapiens
ataggaagttgattt

SEQ ID NO: 1529303 - DNA, 15 bp, Homo sapiens
taggaagttgatttt

SEQ ID NO: 1529304 - DNA, 15 bp, Homo sapiens
aggaagttgatttta

SEQ ID NO: 1529305 - DNA, 15 bp, Homo sapiens
ggaagttgattttaa

SEQ ID NO: 1529306 - DNA, 15 bp, Homo sapiens
gaagttgattttaaa

SEQ ID NO: 1529307 - DNA, 15 bp, Homo sapiens
aagttgattttaaag

SEQ ID NO: 1529308 - DNA, 15 bp, Homo sapiens
agttgattttaaagt

SEQ ID NO: 1529309 - DNA, 15 bp, Homo sapiens
gttgattttaaagtg

SEQ ID NO: 1529310 - DNA, 15 bp, Homo sapiens
ttgattttaaagtgt

SEQ ID NO: 1529311 - DNA, 15 bp, Homo sapiens
tgattttaaagtgtt

SEQ ID NO: 1529312 - DNA, 15 bp, Homo sapiens
gattttaaagtgtta

SEQ ID NO: 1529313 - DNA, 15 bp, Homo sapiens
attttaaagtgttac

SEQ ID NO: 1529314 - DNA, 15 bp, Homo sapiens
ttttaaagtgttaca

SEQ ID NO: 1529315 - DNA, 15 bp, Homo sapiens
tttaaagtgttacag

SEQ ID NO: 1529316 - DNA, 15 bp, Homo sapiens
ttaaagtgttacagc

SEQ ID NO: 1529317 - DNA, 15 bp, Homo sapiens
taaagtgttacagca

SEQ ID NO: 1529318 - DNA, 15 bp, Homo sapiens
aaagtgttacagcac

SEQ ID NO: 1529319 - DNA, 15 bp, Homo sapiens
aagtgttacagcaca

SEQ ID NO: 1529320 - DNA, 15 bp, Homo sapiens
agtgttacagcacat

SEQ ID NO: 1529321 - DNA, 15 bp, Homo sapiens
gtgttacagcacatc

SEQ ID NO: 1529322 - DNA, 15 bp, Homo sapiens
tgttacagcacatct

SEQ ID NO: 1529323 - DNA, 15 bp, Homo sapiens
gttacagcacatctg

SEQ ID NO: 1529324 - DNA, 15 bp, Homo sapiens
ttacagcacatctgt

SEQ ID NO: 1529325 - DNA, 15 bp, Homo sapiens
tacagcacatctgtc

SEQ ID NO: 1529326 - DNA, 15 bp, Homo sapiens
acagcacatctgtct

SEQ ID NO: 1529327 - DNA, 15 bp, Homo sapiens
cagcacatctgtctg

SEQ ID NO: 1529328 - DNA, 15 bp, Homo sapiens
agcacatctgtctgg

SEQ ID NO: 1529329 - DNA, 15 bp, Homo sapiens
gcacatctgtctgga

SEQ ID NO: 1529330 - DNA, 15 bp, Homo sapiens
cacatctgtctggag

SEQ ID NO: 1529331 - DNA, 15 bp, Homo sapiens
acatctgtctggaga

SEQ ID NO: 1529332 - DNA, 15 bp, Homo sapiens
catctgtctggagag

SEQ ID NO: 1529333 - DNA, 15 bp, Homo sapiens
atctgtctggagaga

SEQ ID NO: 1529334 - DNA, 15 bp, Homo sapiens
tctgtctggagagat

SEQ ID NO: 1529335 - DNA, 15 bp, Homo sapiens
ctgtctggagagatc

SEQ ID NO: 1529336 - DNA, 15 bp, Homo sapiens
tgtctggagagatcg

SEQ ID NO: 1529337 - DNA, 15 bp, Homo sapiens
gtctggagagatcgc

SEQ ID NO: 1529338 - DNA, 15 bp, Homo sapiens
tctggagagatcgca

SEQ ID NO: 1529339 - DNA, 15 bp, Homo sapiens
ctggagagatcgcac

SEQ ID NO: 1529340 - DNA, 15 bp, Homo sapiens
tggagagatcgcact

SEQ ID NO: 1529341 - DNA, 15 bp, Homo sapiens
ggagagatcgcactg

SEQ ID NO: 1529342 - DNA, 15 bp, Homo sapiens
gagagatcgcactgg

SEQ ID NO: 1529343 - DNA, 15 bp, Homo sapiens
agagatcgcactggc

SEQ ID NO: 1529344 - DNA, 15 bp, Homo sapiens
gagatcgcactggcc

SEQ ID NO: 1529345 - DNA, 15 bp, Homo sapiens
agatcgcactggcca

SEQ ID NO: 1529346 - DNA, 15 bp, Homo sapiens
gatcgcactggccac

SEQ ID NO: 1529347 - DNA, 15 bp, Homo sapiens
atcgcactggccact

SEQ ID NO: 1529348 - DNA, 15 bp, Homo sapiens
tcgcactggccactc

SEQ ID NO: 1529349 - DNA, 15 bp, Homo sapiens
cgcactggccactcc

SEQ ID NO: 1529350 - DNA, 15 bp, Homo sapiens
gcactggccactcct

SEQ ID NO: 1529351 - DNA, 15 bp, Homo sapiens
cactggccactcctc

SEQ ID NO: 1529352 - DNA, 15 bp, Homo sapiens
actggccactcctcc

SEQ ID NO: 1529353 - DNA, 15 bp, Homo sapiens
ctggccactcctcct

SEQ ID NO: 1529354 - DNA, 15 bp, Homo sapiens
tggccactcctcctc

SEQ ID NO: 1529355 - DNA, 15 bp, Homo sapiens
ggccactcctcctca

SEQ ID NO: 1529356 - DNA, 15 bp, Homo sapiens
gccactcctcctcac

SEQ ID NO: 1529357 - DNA, 15 bp, Homo sapiens
ccactcctcctcacc

SEQ ID NO: 1529358 - DNA, 15 bp, Homo sapiens
cactcctcctcaccc

SEQ ID NO: 1529359 - DNA, 15 bp, Homo sapiens
actcctcctcacccc

SEQ ID NO: 1529360 - DNA, 15 bp, Homo sapiens
ctcctcctcaccccc

SEQ ID NO: 1529361 - DNA, 15 bp, Homo sapiens
tcctcctcaccccct

SEQ ID NO: 1529362 - DNA, 15 bp, Homo sapiens
cctcctcaccccctc

SEQ ID NO: 1529363 - DNA, 15 bp, Homo sapiens
ctcctcaccccctct

SEQ ID NO: 1529364 - DNA, 15 bp, Homo sapiens
tcctcaccccctctg

SEQ ID NO: 1529365 - DNA, 15 bp, Homo sapiens
cctcaccccctctgc

SEQ ID NO: 1529366 - DNA, 15 bp, Homo sapiens
ctcaccccctctgct

SEQ ID NO: 1529367 - DNA, 15 bp, Homo sapiens
tcaccccctctgctg

SEQ ID NO: 1529368 - DNA, 15 bp, Homo sapiens
caccccctctgctgg

SEQ ID NO: 1529369 - DNA, 15 bp, Homo sapiens
accccctctgctgga

SEQ ID NO: 1529370 - DNA, 15 bp, Homo sapiens
ccccctctgctggac

SEQ ID NO: 1529371 - DNA, 15 bp, Homo sapiens
cccctctgctggacc

SEQ ID NO: 1529372 - DNA, 15 bp, Homo sapiens
ccctctgctggacct

SEQ ID NO: 1529373 - DNA, 15 bp, Homo sapiens
cctctgctggacctc

SEQ ID NO: 1529374 - DNA, 15 bp, Homo sapiens
ctctgctggacctct

SEQ ID NO: 1529375 - DNA, 15 bp, Homo sapiens
tctgctggacctctg

SEQ ID NO: 1529376 - DNA, 15 bp, Homo sapiens
ctgctggacctctga

SEQ ID NO: 1529377 - DNA, 15 bp, Homo sapiens
tgctggacctctgag

SEQ ID NO: 1529378 - DNA, 15 bp, Homo sapiens
gctggacctctgagc

SEQ ID NO: 1529379 - DNA, 15 bp, Homo sapiens
ctggacctctgagcg

SEQ ID NO: 1529380 - DNA, 15 bp, Homo sapiens
tggacctctgagcgt

SEQ ID NO: 1529381 - DNA, 15 bp, Homo sapiens
ggacctctgagcgta

SEQ ID NO: 1529382 - DNA, 15 bp, Homo sapiens
gacctctgagcgtag

SEQ ID NO: 1529383 - DNA, 15 bp, Homo sapiens
acctctgagcgtagg

SEQ ID NO: 1529384 - DNA, 15 bp, Homo sapiens
cctctgagcgtaggt

SEQ ID NO: 1529385 - DNA, 15 bp, Homo sapiens
ctctgagcgtaggtg

SEQ ID NO: 1529386 - DNA, 15 bp, Homo sapiens
tctgagcgtaggtgg

SEQ ID NO: 1529387 - DNA, 15 bp, Homo sapiens
ctgagcgtaggtggc

SEQ ID NO: 1529388 - DNA, 15 bp, Homo sapiens
tgagcgtaggtggcc

SEQ ID NO: 1529389 - DNA, 15 bp, Homo sapiens
gagcgtaggtggcct

SEQ ID NO: 1529390 - DNA, 15 bp, Homo sapiens
agcgtaggtggcctg

SEQ ID NO: 1529391 - DNA, 15 bp, Homo sapiens
gcgtaggtggcctgg

SEQ ID NO: 1529392 - DNA, 15 bp, Homo sapiens
cgtaggtggcctgga

SEQ ID NO: 1529393 - DNA, 15 bp, Homo sapiens
gtaggtggcctggag

SEQ ID NO: 1529394 - DNA, 15 bp, Homo sapiens
taggtggcctggagc

SEQ ID NO: 1529395 - DNA, 15 bp, Homo sapiens
aggtggcctggagct

SEQ ID NO: 1529396 - DNA, 15 bp, Homo sapiens
ggtggcctggagctg

SEQ ID NO: 1529397 - DNA, 15 bp, Homo sapiens
gtggcctggagctgg

SEQ ID NO: 1529398 - DNA, 15 bp, Homo sapiens
tggcctggagctggg

SEQ ID NO: 1529399 - DNA, 15 bp, Homo sapiens
ggcctggagctgggt

SEQ ID NO: 1529400 - DNA, 15 bp, Homo sapiens
gcctggagctgggtc

SEQ ID NO: 1529401 - DNA, 15 bp, Homo sapiens
cctggagctgggtcc

SEQ ID NO: 1529402 - DNA, 15 bp, Homo sapiens
ctggagctgggtcct

SEQ ID NO: 1529403 - DNA, 15 bp, Homo sapiens
tggagctgggtcctg

SEQ ID NO: 1529404 - DNA, 15 bp, Homo sapiens
ggagctgggtcctga

SEQ ID NO: 1529405 - DNA, 15 bp, Homo sapiens
gagctgggtcctgag

SEQ ID NO: 1529406 - DNA, 15 bp, Homo sapiens
agctgggtcctgagc

SEQ ID NO: 1529407 - DNA, 15 bp, Homo sapiens
gctgggtcctgagcc

SEQ ID NO: 1529408 - DNA, 15 bp, Homo sapiens
ctgggtcctgagccc

SEQ ID NO: 1529409 - DNA, 15 bp, Homo sapiens
tgggtcctgagccct

SEQ ID NO: 1529410 - DNA, 15 bp, Homo sapiens
gggtcctgagccctc

SEQ ID NO: 1529411 - DNA, 15 bp, Homo sapiens
ggtcctgagccctct

SEQ ID NO: 1529412 - DNA, 15 bp, Homo sapiens
gtcctgagccctctt

SEQ ID NO: 1529413 - DNA, 15 bp, Homo sapiens
tcctgagccctcttt

SEQ ID NO: 1529414 - DNA, 15 bp, Homo sapiens
cctgagccctctttg

SEQ ID NO: 1529415 - DNA, 15 bp, Homo sapiens
ctgagccctctttgg

SEQ ID NO: 1529416 - DNA, 15 bp, Homo sapiens
tgagccctctttggt

SEQ ID NO: 1529417 - DNA, 15 bp, Homo sapiens
gagccctctttggtc

SEQ ID NO: 1529418 - DNA, 15 bp, Homo sapiens
agccctctttggtct

SEQ ID NO: 1529419 - DNA, 15 bp, Homo sapiens
gccctctttggtcta

SEQ ID NO: 1529420 - DNA, 15 bp, Homo sapiens
ccctctttggtctat

SEQ ID NO: 1529421 - DNA, 15 bp, Homo sapiens
cctctttggtctata

SEQ ID NO: 1529422 - DNA, 15 bp, Homo sapiens
ctctttggtctatac

SEQ ID NO: 1529423 - DNA, 15 bp, Homo sapiens
tctttggtctatacc

SEQ ID NO: 1529424 - DNA, 15 bp, Homo sapiens
ctttggtctataccg

SEQ ID NO: 1529425 - DNA, 15 bp, Homo sapiens
tttggtctataccga

SEQ ID NO: 1529426 - DNA, 15 bp, Homo sapiens
ttggtctataccgac

SEQ ID NO: 1529427 - DNA, 15 bp, Homo sapiens
tggtctataccgaca

SEQ ID NO: 1529428 - DNA, 15 bp, Homo sapiens
ggtctataccgacac

SEQ ID NO: 1529429 - DNA, 15 bp, Homo sapiens
gtctataccgacact

SEQ ID NO: 1529430 - DNA, 15 bp, Homo sapiens
tctataccgacacta

SEQ ID NO: 1529431 - DNA, 15 bp, Homo sapiens
ctataccgacactac

SEQ ID NO: 1529432 - DNA, 15 bp, Homo sapiens
tataccgacactacc

SEQ ID NO: 1529433 - DNA, 15 bp, Homo sapiens
ataccgacactaccc

SEQ ID NO: 1529434 - DNA, 15 bp, Homo sapiens
taccgacactaccca

SEQ ID NO: 1529435 - DNA, 15 bp, Homo sapiens
accgacactacccaa

SEQ ID NO: 1529436 - DNA, 15 bp, Homo sapiens
ccgacactacccaat

SEQ ID NO: 1529437 - DNA, 15 bp, Homo sapiens
cgacactacccaata

SEQ ID NO: 1529438 - DNA, 15 bp, Homo sapiens
gacactacccaatat

SEQ ID NO: 1529439 - DNA, 15 bp, Homo sapiens
acactacccaatatg

SEQ ID NO: 1529440 - DNA, 15 bp, Homo sapiens
cactacccaatatgg

SEQ ID NO: 1529441 - DNA, 15 bp, Homo sapiens
actacccaatatggt

SEQ ID NO: 1529442 - DNA, 15 bp, Homo sapiens
ctacccaatatggta

SEQ ID NO: 1529443 - DNA, 15 bp, Homo sapiens
tacccaatatggtag

SEQ ID NO: 1529444 - DNA, 15 bp, Homo sapiens
acccaatatggtagc

SEQ ID NO: 1529445 - DNA, 15 bp, Homo sapiens
cccaatatggtagcc

SEQ ID NO: 1529446 - DNA, 15 bp, Homo sapiens
ccaatatggtagcca

SEQ ID NO: 1529447 - DNA, 15 bp, Homo sapiens
caatatggtagccac

SEQ ID NO: 1529448 - DNA, 15 bp, Homo sapiens
aatatggtagccacc

SEQ ID NO: 1529449 - DNA, 15 bp, Homo sapiens
atatggtagccacca

SEQ ID NO: 1529450 - DNA, 15 bp, Homo sapiens
tatggtagccaccag

SEQ ID NO: 1529451 - DNA, 15 bp, Homo sapiens
atggtagccaccagt

SEQ ID NO: 1529452 - DNA, 15 bp, Homo sapiens
tggtagccaccagtc

SEQ ID NO: 1529453 - DNA, 15 bp, Homo sapiens
ggtagccaccagtca

SEQ ID NO: 1529454 - DNA, 15 bp, Homo sapiens
gtagccaccagtcac

SEQ ID NO: 1529455 - DNA, 15 bp, Homo sapiens
tagccaccagtcacg

SEQ ID NO: 1529456 - DNA, 15 bp, Homo sapiens
agccaccagtcacgc

SEQ ID NO: 1529457 - DNA, 15 bp, Homo sapiens
gccaccagtcacgct

SEQ ID NO: 1529458 - DNA, 15 bp, Homo sapiens
ccaccagtcacgctg

SEQ ID NO: 1529459 - DNA, 15 bp, Homo sapiens
caccagtcacgctgg

SEQ ID NO: 1529460 - DNA, 15 bp, Homo sapiens
accagtcacgctgga

SEQ ID NO: 1529461 - DNA, 15 bp, Homo sapiens
ccagtcacgctggac

SEQ ID NO: 1529462 - DNA, 15 bp, Homo sapiens
cagtcacgctggaca

SEQ ID NO: 1529463 - DNA, 15 bp, Homo sapiens
agtcacgctggacac

SEQ ID NO: 1529464 - DNA, 15 bp, Homo sapiens
gtcacgctggacact

SEQ ID NO: 1529465 - DNA, 15 bp, Homo sapiens
tcacgctggacactt

SEQ ID NO: 1529466 - DNA, 15 bp, Homo sapiens
cacgctggacacttg

SEQ ID NO: 1529467 - DNA, 15 bp, Homo sapiens
acgctggacacttga

SEQ ID NO: 1529468 - DNA, 15 bp, Homo sapiens
cgctggacacttgaa

SEQ ID NO: 1529469 - DNA, 15 bp, Homo sapiens
gctggacacttgaaa

SEQ ID NO: 1529470 - DNA, 15 bp, Homo sapiens
ctggacacttgaaaa

SEQ ID NO: 1529471 - DNA, 15 bp, Homo sapiens
tggacacttgaaaag

SEQ ID NO: 1529472 - DNA, 15 bp, Homo sapiens
ggacacttgaaaagt

SEQ ID NO: 1529473 - DNA, 15 bp, Homo sapiens
gacacttgaaaagtg

SEQ ID NO: 1529474 - DNA, 15 bp, Homo sapiens
acacttgaaaagtgg

SEQ ID NO: 1529475 - DNA, 15 bp, Homo sapiens
cacttgaaaagtggc

SEQ ID NO: 1529476 - DNA, 15 bp, Homo sapiens
acttgaaaagtggcc

SEQ ID NO: 1529477 - DNA, 15 bp, Homo sapiens
cttgaaaagtggccg

SEQ ID NO: 1529478 - DNA, 15 bp, Homo sapiens
ttgaaaagtggccga

SEQ ID NO: 1529479 - DNA, 15 bp, Homo sapiens
tgaaaagtggccgat

SEQ ID NO: 1529480 - DNA, 15 bp, Homo sapiens
gaaaagtggccgatc

SEQ ID NO: 1529481 - DNA, 15 bp, Homo sapiens
aaaagtggccgatcc

SEQ ID NO: 1529482 - DNA, 15 bp, Homo sapiens
aaagtggccgatcct

SEQ ID NO: 1529483 - DNA, 15 bp, Homo sapiens
aagtggccgatcctg

SEQ ID NO: 1529484 - DNA, 15 bp, Homo sapiens
agtggccgatcctga

SEQ ID NO: 1529485 - DNA, 15 bp, Homo sapiens
gtggccgatcctgac

SEQ ID NO: 1529486 - DNA, 15 bp, Homo sapiens
tggccgatcctgact

SEQ ID NO: 1529487 - DNA, 15 bp, Homo sapiens
ggccgatcctgactg

SEQ ID NO: 1529488 - DNA, 15 bp, Homo sapiens
gccgatcctgactga

SEQ ID NO: 1529489 - DNA, 15 bp, Homo sapiens
ccgatcctgactgag

SEQ ID NO: 1529490 - DNA, 15 bp, Homo sapiens
cgatcctgactgaga

SEQ ID NO: 1529491 - DNA, 15 bp, Homo sapiens
gatcctgactgagaa

SEQ ID NO: 1529492 - DNA, 15 bp, Homo sapiens
atcctgactgagaag

SEQ ID NO: 1529493 - DNA, 15 bp, Homo sapiens
tcctgactgagaagg

SEQ ID NO: 1529494 - DNA, 15 bp, Homo sapiens
cctgactgagaaggg

SEQ ID NO: 1529495 - DNA, 15 bp, Homo sapiens
ctgactgagaagggc

SEQ ID NO: 1529496 - DNA, 15 bp, Homo sapiens
tgactgagaagggcc

SEQ ID NO: 1529497 - DNA, 15 bp, Homo sapiens
gactgagaagggcca

SEQ ID NO: 1529498 - DNA, 15 bp, Homo sapiens
actgagaagggccac

SEQ ID NO: 1529499 - DNA, 15 bp, Homo sapiens
ctgagaagggccacg

SEQ ID NO: 1529500 - DNA, 15 bp, Homo sapiens
tgagaagggccacga

SEQ ID NO: 1529501 - DNA, 15 bp, Homo sapiens
gagaagggccacgag

SEQ ID NO: 1529502 - DNA, 15 bp, Homo sapiens
agaagggccacgagt

SEQ ID NO: 1529503 - DNA, 15 bp, Homo sapiens
gaagggccacgagtg

SEQ ID NO: 1529504 - DNA, 15 bp, Homo sapiens
aagggccacgagtgg

SEQ ID NO: 1529505 - DNA, 15 bp, Homo sapiens
agggccacgagtggg

SEQ ID NO: 1529506 - DNA, 15 bp, Homo sapiens
gggccacgagtggga

SEQ ID NO: 1529507 - DNA, 15 bp, Homo sapiens
ggccacgagtgggaa

SEQ ID NO: 1529508 - DNA, 15 bp, Homo sapiens
gccacgagtgggaaa

SEQ ID NO: 1529509 - DNA, 15 bp, Homo sapiens
ccacgagtgggaaaa

SEQ ID NO: 1529510 - DNA, 15 bp, Homo sapiens
cacgagtgggaaaaa

SEQ ID NO: 1529511 - DNA, 15 bp, Homo sapiens
acgagtgggaaaaac

SEQ ID NO: 1529512 - DNA, 15 bp, Homo sapiens
cgagtgggaaaaaca

SEQ ID NO: 1529513 - DNA, 15 bp, Homo sapiens
gagtgggaaaaacac

SEQ ID NO: 1529514 - DNA, 15 bp, Homo sapiens
agtgggaaaaacaca

SEQ ID NO: 1529515 - DNA, 15 bp, Homo sapiens
gtgggaaaaacacac

SEQ ID NO: 1529516 - DNA, 15 bp, Homo sapiens
tgggaaaaacacacc

SEQ ID NO: 1529517 - DNA, 15 bp, Homo sapiens
gggaaaaacacacca

SEQ ID NO: 1529518 - DNA, 15 bp, Homo sapiens
ggaaaaacacaccag

SEQ ID NO: 1529519 - DNA, 15 bp, Homo sapiens
gaaaaacacaccaga

SEQ ID NO: 1529520 - DNA, 15 bp, Homo sapiens
aaaaacacaccagac

SEQ ID NO: 1529521 - DNA, 15 bp, Homo sapiens
aaaacacaccagacc

SEQ ID NO: 1529522 - DNA, 15 bp, Homo sapiens
aaacacaccagacct

SEQ ID NO: 1529523 - DNA, 15 bp, Homo sapiens
aacacaccagacctc

SEQ ID NO: 1529524 - DNA, 15 bp, Homo sapiens
acacaccagacctca

SEQ ID NO: 1529525 - DNA, 15 bp, Homo sapiens
cacaccagacctcag

SEQ ID NO: 1529526 - DNA, 15 bp, Homo sapiens
acaccagacctcagt

SEQ ID NO: 1529527 - DNA, 15 bp, Homo sapiens
caccagacctcagtg

SEQ ID NO: 1529528 - DNA, 15 bp, Homo sapiens
accagacctcagtga

SEQ ID NO: 1529529 - DNA, 15 bp, Homo sapiens
ccagacctcagtgac

SEQ ID NO: 1529530 - DNA, 15 bp, Homo sapiens
cagacctcagtgact

SEQ ID NO: 1529531 - DNA, 15 bp, Homo sapiens
agacctcagtgactt

SEQ ID NO: 1529532 - DNA, 15 bp, Homo sapiens
gacctcagtgactta

SEQ ID NO: 1529533 - DNA, 15 bp, Homo sapiens
acctcagtgacttag

SEQ ID NO: 1529534 - DNA, 15 bp, Homo sapiens
cctcagtgacttagg

SEQ ID NO: 1529535 - DNA, 15 bp, Homo sapiens
ctcagtgacttaggc

SEQ ID NO: 1529536 - DNA, 15 bp, Homo sapiens
tcagtgacttaggca

SEQ ID NO: 1529537 - DNA, 15 bp, Homo sapiens
cagtgacttaggcag

SEQ ID NO: 1529538 - DNA, 15 bp, Homo sapiens
agtgacttaggcaga

SEQ ID NO: 1529539 - DNA, 15 bp, Homo sapiens
gtgacttaggcagaa

SEQ ID NO: 1529540 - DNA, 15 bp, Homo sapiens
tgacttaggcagaag

SEQ ID NO: 1529541 - DNA, 15 bp, Homo sapiens
gacttaggcagaagt

SEQ ID NO: 1529542 - DNA, 15 bp, Homo sapiens
acttaggcagaagta

SEQ ID NO: 1529543 - DNA, 15 bp, Homo sapiens
cttaggcagaagtat

SEQ ID NO: 1529544 - DNA, 15 bp, Homo sapiens
ttaggcagaagtatg

SEQ ID NO: 1529545 - DNA, 15 bp, Homo sapiens
taggcagaagtatgt

SEQ ID NO: 1529546 - DNA, 15 bp, Homo sapiens
aggcagaagtatgtt

SEQ ID NO: 1529547 - DNA, 15 bp, Homo sapiens
ggcagaagtatgttt

SEQ ID NO: 1529548 - DNA, 15 bp, Homo sapiens
gcagaagtatgtttt

SEQ ID NO: 1529549 - DNA, 15 bp, Homo sapiens
cagaagtatgttttg

SEQ ID NO: 1529550 - DNA, 15 bp, Homo sapiens
agaagtatgttttgt

SEQ ID NO: 1529551 - DNA, 15 bp, Homo sapiens
gaagtatgttttgtt

SEQ ID NO: 1529552 - DNA, 15 bp, Homo sapiens
aagtatgttttgttc

SEQ ID NO: 1529553 - DNA, 15 bp, Homo sapiens
agtatgttttgttcc

SEQ ID NO: 1529554 - DNA, 15 bp, Homo sapiens
gtatgttttgttcca

SEQ ID NO: 1529555 - DNA, 15 bp, Homo sapiens
tatgttttgttccag

SEQ ID NO: 1529556 - DNA, 15 bp, Homo sapiens
atgttttgttccaga

SEQ ID NO: 1529557 - DNA, 15 bp, Homo sapiens
tgttttgttccagac

SEQ ID NO: 1529558 - DNA, 15 bp, Homo sapiens
gttttgttccagact

SEQ ID NO: 1529559 - DNA, 15 bp, Homo sapiens
ttttgttccagacta

SEQ ID NO: 1529560 - DNA, 15 bp, Homo sapiens
tttgttccagactat

SEQ ID NO: 1529561 - DNA, 15 bp, Homo sapiens
ttgttccagactatt

SEQ ID NO: 1529562 - DNA, 15 bp, Homo sapiens
tgttccagactattg

SEQ ID NO: 1529563 - DNA, 15 bp, Homo sapiens
gttccagactattga

SEQ ID NO: 1529564 - DNA, 15 bp, Homo sapiens
ttccagactattgac

SEQ ID NO: 1529565 - DNA, 15 bp, Homo sapiens
tccagactattgact

SEQ ID NO: 1529566 - DNA, 15 bp, Homo sapiens
ccagactattgactg

SEQ ID NO: 1529567 - DNA, 15 bp, Homo sapiens
cagactattgactga

SEQ ID NO: 1529568 - DNA, 15 bp, Homo sapiens
agactattgactgag

SEQ ID NO: 1529569 - DNA, 15 bp, Homo sapiens
gactattgactgagc

SEQ ID NO: 1529570 - DNA, 15 bp, Homo sapiens
actattgactgagcc

SEQ ID NO: 1529571 - DNA, 15 bp, Homo sapiens
ctattgactgagccc

SEQ ID NO: 1529572 - DNA, 15 bp, Homo sapiens
tattgactgagcccg

SEQ ID NO: 1529573 - DNA, 15 bp, Homo sapiens
attgactgagcccgc

SEQ ID NO: 1529574 - DNA, 15 bp, Homo sapiens
ttgactgagcccgca

SEQ ID NO: 1529575 - DNA, 15 bp, Homo sapiens
tgactgagcccgcag

SEQ ID NO: 1529576 - DNA, 15 bp, Homo sapiens
gactgagcccgcagc

SEQ ID NO: 1529577 - DNA, 15 bp, Homo sapiens
actgagcccgcagct

SEQ ID NO: 1529578 - DNA, 15 bp, Homo sapiens
ctgagcccgcagctg

SEQ ID NO: 1529579 - DNA, 15 bp, Homo sapiens
tgagcccgcagctga

SEQ ID NO: 1529580 - DNA, 15 bp, Homo sapiens
gagcccgcagctgag

SEQ ID NO: 1529581 - DNA, 15 bp, Homo sapiens
agcccgcagctgagt

SEQ ID NO: 1529582 - DNA, 15 bp, Homo sapiens
gcccgcagctgagtt

SEQ ID NO: 1529583 - DNA, 15 bp, Homo sapiens
cccgcagctgagttg

SEQ ID NO: 1529584 - DNA, 15 bp, Homo sapiens
ccgcagctgagttgg

SEQ ID NO: 1529585 - DNA, 15 bp, Homo sapiens
cgcagctgagttggc

SEQ ID NO: 1529586 - DNA, 15 bp, Homo sapiens
gcagctgagttggct

SEQ ID NO: 1529587 - DNA, 15 bp, Homo sapiens
cagctgagttggctc

SEQ ID NO: 1529588 - DNA, 15 bp, Homo sapiens
agctgagttggctcc

SEQ ID NO: 1529589 - DNA, 15 bp, Homo sapiens
gctgagttggctcca

SEQ ID NO: 1529590 - DNA, 15 bp, Homo sapiens
ctgagttggctccag

SEQ ID NO: 1529591 - DNA, 15 bp, Homo sapiens
tgagttggctccagc

SEQ ID NO: 1529592 - DNA, 15 bp, Homo sapiens
gagttggctccagca

SEQ ID NO: 1529593 - DNA, 15 bp, Homo sapiens
agttggctccagcac

SEQ ID NO: 1529594 - DNA, 15 bp, Homo sapiens
gttggctccagcacc

SEQ ID NO: 1529595 - DNA, 15 bp, Homo sapiens
ttggctccagcaccc

SEQ ID NO: 1529596 - DNA, 15 bp, Homo sapiens
tggctccagcaccct

SEQ ID NO: 1529597 - DNA, 15 bp, Homo sapiens
ggctccagcaccctg

SEQ ID NO: 1529598 - DNA, 15 bp, Homo sapiens
gctccagcaccctgg

SEQ ID NO: 1529599 - DNA, 15 bp, Homo sapiens
ctccagcaccctggc

SEQ ID NO: 1529600 - DNA, 15 bp, Homo sapiens
tccagcaccctggcc

SEQ ID NO: 1529601 - DNA, 15 bp, Homo sapiens
ccagcaccctggccc

SEQ ID NO: 1529602 - DNA, 15 bp, Homo sapiens
cagcaccctggcccc

SEQ ID NO: 1529603 - DNA, 15 bp, Homo sapiens
agcaccctggccccc

SEQ ID NO: 1529604 - DNA, 15 bp, Homo sapiens
gcaccctggccccct

SEQ ID NO: 1529605 - DNA, 15 bp, Homo sapiens
caccctggccccctg

SEQ ID NO: 1529606 - DNA, 15 bp, Homo sapiens
accctggccccctgc

SEQ ID NO: 1529607 - DNA, 15 bp, Homo sapiens
ccctggccccctgct

SEQ ID NO: 1529608 - DNA, 15 bp, Homo sapiens
cctggccccctgctc

SEQ ID NO: 1529609 - DNA, 15 bp, Homo sapiens
ctggccccctgctcc

SEQ ID NO: 1529610 - DNA, 15 bp, Homo sapiens
tggccccctgctcca

SEQ ID NO: 1529611 - DNA, 15 bp, Homo sapiens
ggccccctgctccat

SEQ ID NO: 1529612 - DNA, 15 bp, Homo sapiens
gccccctgctccatc

SEQ ID NO: 1529613 - DNA, 15 bp, Homo sapiens
ccccctgctccatcc

SEQ ID NO: 1529614 - DNA, 15 bp, Homo sapiens
cccctgctccatcca

SEQ ID NO: 1529615 - DNA, 15 bp, Homo sapiens
ccctgctccatccac

SEQ ID NO: 1529616 - DNA, 15 bp, Homo sapiens
cctgctccatccact

SEQ ID NO: 1529617 - DNA, 15 bp, Homo sapiens
ctgctccatccactc

SEQ ID NO: 1529618 - DNA, 15 bp, Homo sapiens
tgctccatccactca

SEQ ID NO: 1529619 - DNA, 15 bp, Homo sapiens
gctccatccactcac

SEQ ID NO: 1529620 - DNA, 15 bp, Homo sapiens
ctccatccactcact

SEQ ID NO: 1529621 - DNA, 15 bp, Homo sapiens
tccatccactcactg

SEQ ID NO: 1529622 - DNA, 15 bp, Homo sapiens
ccatccactcactgg

SEQ ID NO: 1529623 - DNA, 15 bp, Homo sapiens
catccactcactggg

SEQ ID NO: 1529624 - DNA, 15 bp, Homo sapiens
atccactcactggga

SEQ ID NO: 1529625 - DNA, 15 bp, Homo sapiens
tccactcactgggac

SEQ ID NO: 1529626 - DNA, 15 bp, Homo sapiens
ccactcactgggact

SEQ ID NO: 1529627 - DNA, 15 bp, Homo sapiens
cactcactgggactc

SEQ ID NO: 1529628 - DNA, 15 bp, Homo sapiens
actcactgggactcc

SEQ ID NO: 1529629 - DNA, 15 bp, Homo sapiens
ctcactgggactccc

SEQ ID NO: 1529630 - DNA, 15 bp, Homo sapiens
tcactgggactcccc

SEQ ID NO: 1529631 - DNA, 15 bp, Homo sapiens
cactgggactcccca

SEQ ID NO: 1529632 - DNA, 15 bp, Homo sapiens
actgggactccccac

SEQ ID NO: 1529633 - DNA, 15 bp, Homo sapiens
ctgggactccccact

SEQ ID NO: 1529634 - DNA, 15 bp, Homo sapiens
tgggactccccactg

SEQ ID NO: 1529635 - DNA, 15 bp, Homo sapiens
gggactccccactgc

SEQ ID NO: 1529636 - DNA, 15 bp, Homo sapiens
ggactccccactgca

SEQ ID NO: 1529637 - DNA, 15 bp, Homo sapiens
gactccccactgcac

SEQ ID NO: 1529638 - DNA, 15 bp, Homo sapiens
actccccactgcaca

SEQ ID NO: 1529639 - DNA, 15 bp, Homo sapiens
ctccccactgcacag

SEQ ID NO: 1529640 - DNA, 15 bp, Homo sapiens
tccccactgcacagg

SEQ ID NO: 1529641 - DNA, 15 bp, Homo sapiens
ccccactgcacaggg

SEQ ID NO: 1529642 - DNA, 15 bp, Homo sapiens
cccactgcacagggc

SEQ ID NO: 1529643 - DNA, 15 bp, Homo sapiens
ccactgcacagggca

SEQ ID NO: 1529644 - DNA, 15 bp, Homo sapiens
cactgcacagggcaa

SEQ ID NO: 1529645 - DNA, 15 bp, Homo sapiens
actgcacagggcaac

SEQ ID NO: 1529646 - DNA, 15 bp, Homo sapiens
ctgcacagggcaacc

SEQ ID NO: 1529647 - DNA, 15 bp, Homo sapiens
tgcacagggcaacct

SEQ ID NO: 1529648 - DNA, 15 bp, Homo sapiens
gcacagggcaacctc

SEQ ID NO: 1529649 - DNA, 15 bp, Homo sapiens
cacagggcaacctct

SEQ ID NO: 1529650 - DNA, 15 bp, Homo sapiens
acagggcaacctctc

SEQ ID NO: 1529651 - DNA, 15 bp, Homo sapiens
cagggcaacctctcc

SEQ ID NO: 1529652 - DNA, 15 bp, Homo sapiens
agggcaacctctcca

SEQ ID NO: 1529653 - DNA, 15 bp, Homo sapiens
gggcaacctctccag

SEQ ID NO: 1529654 - DNA, 15 bp, Homo sapiens
ggcaacctctccagg

SEQ ID NO: 1529655 - DNA, 15 bp, Homo sapiens
gcaacctctccaggg

SEQ ID NO: 1529656 - DNA, 15 bp, Homo sapiens
caacctctccagggg

SEQ ID NO: 1529657 - DNA, 15 bp, Homo sapiens
aacctctccaggggc

SEQ ID NO: 1529658 - DNA, 15 bp, Homo sapiens
acctctccaggggca

SEQ ID NO: 1529659 - DNA, 15 bp, Homo sapiens
cctctccaggggcac

SEQ ID NO: 1529660 - DNA, 15 bp, Homo sapiens
ctctccaggggcact

SEQ ID NO: 1529661 - DNA, 15 bp, Homo sapiens
tctccaggggcactt

SEQ ID NO: 1529662 - DNA, 15 bp, Homo sapiens
ctccaggggcacttg

SEQ ID NO: 1529663 - DNA, 15 bp, Homo sapiens
tccaggggcacttgg

SEQ ID NO: 1529664 - DNA, 15 bp, Homo sapiens
ccaggggcacttggg

SEQ ID NO: 1529665 - DNA, 15 bp, Homo sapiens
caggggcacttgggc

SEQ ID NO: 1529666 - DNA, 15 bp, Homo sapiens
aggggcacttgggct

SEQ ID NO: 1529667 - DNA, 15 bp, Homo sapiens
ggggcacttgggctg

SEQ ID NO: 1529668 - DNA, 15 bp, Homo sapiens
gggcacttgggctgc

SEQ ID NO: 1529669 - DNA, 15 bp, Homo sapiens
ggcacttgggctgcg

SEQ ID NO: 1529670 - DNA, 15 bp, Homo sapiens
gcacttgggctgcga

SEQ ID NO: 1529671 - DNA, 15 bp, Homo sapiens
cacttgggctgcgaa

SEQ ID NO: 1529672 - DNA, 15 bp, Homo sapiens
acttgggctgcgaag

SEQ ID NO: 1529673 - DNA, 15 bp, Homo sapiens
cttgggctgcgaagg

SEQ ID NO: 1529674 - DNA, 15 bp, Homo sapiens
ttgggctgcgaaggg

SEQ ID NO: 1529675 - DNA, 15 bp, Homo sapiens
tgggctgcgaagggg

SEQ ID NO: 1529676 - DNA, 15 bp, Homo sapiens
gggctgcgaagggga

SEQ ID NO: 1529677 - DNA, 15 bp, Homo sapiens
ggctgcgaaggggag

SEQ ID NO: 1529678 - DNA, 15 bp, Homo sapiens
gctgcgaaggggaga

SEQ ID NO: 1529679 - DNA, 15 bp, Homo sapiens
ctgcgaaggggagag

SEQ ID NO: 1529680 - DNA, 15 bp, Homo sapiens
tgcgaaggggagagt

SEQ ID NO: 1529681 - DNA, 15 bp, Homo sapiens
gcgaaggggagagtg

SEQ ID NO: 1529682 - DNA, 15 bp, Homo sapiens
cgaaggggagagtgg

SEQ ID NO: 1529683 - DNA, 15 bp, Homo sapiens
gaaggggagagtggg

SEQ ID NO: 1529684 - DNA, 15 bp, Homo sapiens
aaggggagagtgggt

SEQ ID NO: 1529685 - DNA, 15 bp, Homo sapiens
aggggagagtgggtg

SEQ ID NO: 1529686 - DNA, 15 bp, Homo sapiens
ggggagagtgggtgg

SEQ ID NO: 1529687 - DNA, 15 bp, Homo sapiens
gggagagtgggtggc

SEQ ID NO: 1529688 - DNA, 15 bp, Homo sapiens
ggagagtgggtggca

SEQ ID NO: 1529689 - DNA, 15 bp, Homo sapiens
gagagtgggtggcat

SEQ ID NO: 1529690 - DNA, 15 bp, Homo sapiens
agagtgggtggcatc

SEQ ID NO: 1529691 - DNA, 15 bp, Homo sapiens
gagtgggtggcatcc

SEQ ID NO: 1529692 - DNA, 15 bp, Homo sapiens
agtgggtggcatccc

SEQ ID NO: 1529693 - DNA, 15 bp, Homo sapiens
gtgggtggcatccca

SEQ ID NO: 1529694 - DNA, 15 bp, Homo sapiens
tgggtggcatcccag

SEQ ID NO: 1529695 - DNA, 15 bp, Homo sapiens
gggtggcatcccagg

SEQ ID NO: 1529696 - DNA, 15 bp, Homo sapiens
ggtggcatcccaggc

SEQ ID NO: 1529697 - DNA, 15 bp, Homo sapiens
gtggcatcccaggct

SEQ ID NO: 1529698 - DNA, 15 bp, Homo sapiens
tggcatcccaggctg

SEQ ID NO: 1529699 - DNA, 15 bp, Homo sapiens
ggcatcccaggctga

SEQ ID NO: 1529700 - DNA, 15 bp, Homo sapiens
gcatcccaggctgaa

SEQ ID NO: 1529701 - DNA, 15 bp, Homo sapiens
catcccaggctgaag

SEQ ID NO: 1529702 - DNA, 15 bp, Homo sapiens
atcccaggctgaagc

SEQ ID NO: 1529703 - DNA, 15 bp, Homo sapiens
tcccaggctgaagct

SEQ ID NO: 1529704 - DNA, 15 bp, Homo sapiens
cccaggctgaagctt

SEQ ID NO: 1529705 - DNA, 15 bp, Homo sapiens
ccaggctgaagcttc

SEQ ID NO: 1529706 - DNA, 15 bp, Homo sapiens
caggctgaagcttcc

SEQ ID NO: 1529707 - DNA, 15 bp, Homo sapiens
aggctgaagcttcct

SEQ ID NO: 1529708 - DNA, 15 bp, Homo sapiens
ggctgaagcttcctg

SEQ ID NO: 1529709 - DNA, 15 bp, Homo sapiens
gctgaagcttcctga

SEQ ID NO: 1529710 - DNA, 15 bp, Homo sapiens
ctgaagcttcctgag

SEQ ID NO: 1529711 - DNA, 15 bp, Homo sapiens
tgaagcttcctgagc

SEQ ID NO: 1529712 - DNA, 15 bp, Homo sapiens
gaagcttcctgagca

SEQ ID NO: 1529713 - DNA, 15 bp, Homo sapiens
aagcttcctgagcag

SEQ ID NO: 1529714 - DNA, 15 bp, Homo sapiens
agcttcctgagcagg

SEQ ID NO: 1529715 - DNA, 15 bp, Homo sapiens
gcttcctgagcaggg

SEQ ID NO: 1529716 - DNA, 15 bp, Homo sapiens
cttcctgagcagggc

SEQ ID NO: 1529717 - DNA, 15 bp, Homo sapiens
ttcctgagcagggcc

SEQ ID NO: 1529718 - DNA, 15 bp, Homo sapiens
tcctgagcagggcca

SEQ ID NO: 1529719 - DNA, 15 bp, Homo sapiens
cctgagcagggccag

SEQ ID NO: 1529720 - DNA, 15 bp, Homo sapiens
ctgagcagggccaga

SEQ ID NO: 1529721 - DNA, 15 bp, Homo sapiens
tgagcagggccagag

SEQ ID NO: 1529722 - DNA, 15 bp, Homo sapiens
gagcagggccagagg

SEQ ID NO: 1529723 - DNA, 15 bp, Homo sapiens
agcagggccagagga

SEQ ID NO: 1529724 - DNA, 15 bp, Homo sapiens
gcagggccagaggag

SEQ ID NO: 1529725 - DNA, 15 bp, Homo sapiens
cagggccagaggagg

SEQ ID NO: 1529726 - DNA, 15 bp, Homo sapiens
agggccagaggagga

SEQ ID NO: 1529727 - DNA, 15 bp, Homo sapiens
gggccagaggaggag

SEQ ID NO: 1529728 - DNA, 15 bp, Homo sapiens
ggccagaggaggagc

SEQ ID NO: 1529729 - DNA, 15 bp, Homo sapiens
gccagaggaggagcc

SEQ ID NO: 1529730 - DNA, 15 bp, Homo sapiens
ccagaggaggagcca

SEQ ID NO: 1529731 - DNA, 15 bp, Homo sapiens
cagaggaggagccag

SEQ ID NO: 1529732 - DNA, 15 bp, Homo sapiens
agaggaggagccagt

SEQ ID NO: 1529733 - DNA, 15 bp, Homo sapiens
gaggaggagccagtc

SEQ ID NO: 1529734 - DNA, 15 bp, Homo sapiens
aggaggagccagtcc

SEQ ID NO: 1529735 - DNA, 15 bp, Homo sapiens
ggaggagccagtccc

SEQ ID NO: 1529736 - DNA, 15 bp, Homo sapiens
gaggagccagtccct

SEQ ID NO: 1529737 - DNA, 15 bp, Homo sapiens
aggagccagtccctg

SEQ ID NO: 1529738 - DNA, 15 bp, Homo sapiens
ggagccagtccctgt

SEQ ID NO: 1529739 - DNA, 15 bp, Homo sapiens
gagccagtccctgtg

SEQ ID NO: 1529740 - DNA, 15 bp, Homo sapiens
agccagtccctgtgg

SEQ ID NO: 1529741 - DNA, 15 bp, Homo sapiens
gccagtccctgtggg

SEQ ID NO: 1529742 - DNA, 15 bp, Homo sapiens
ccagtccctgtgggc

SEQ ID NO: 1529743 - DNA, 15 bp, Homo sapiens
cagtccctgtgggcc

SEQ ID NO: 1529744 - DNA, 15 bp, Homo sapiens
agtccctgtgggcct

SEQ ID NO: 1529745 - DNA, 15 bp, Homo sapiens
gtccctgtgggcctc

SEQ ID NO: 1529746 - DNA, 15 bp, Homo sapiens
tccctgtgggcctct

SEQ ID NO: 1529747 - DNA, 15 bp, Homo sapiens
ccctgtgggcctctg

SEQ ID NO: 1529748 - DNA, 15 bp, Homo sapiens
cctgtgggcctctgt

SEQ ID NO: 1529749 - DNA, 15 bp, Homo sapiens
ctgtgggcctctgtt

SEQ ID NO: 1529750 - DNA, 15 bp, Homo sapiens
tgtgggcctctgttc

SEQ ID NO: 1529751 - DNA, 15 bp, Homo sapiens
gtgggcctctgttct

SEQ ID NO: 1529752 - DNA, 15 bp, Homo sapiens
tgggcctctgttctg

SEQ ID NO: 1529753 - DNA, 15 bp, Homo sapiens
gggcctctgttctga

SEQ ID NO: 1529754 - DNA, 15 bp, Homo sapiens
ggcctctgttctgac

SEQ ID NO: 1529755 - DNA, 15 bp, Homo sapiens
gcctctgttctgaca

SEQ ID NO: 1529756 - DNA, 15 bp, Homo sapiens
cctctgttctgacag

SEQ ID NO: 1529757 - DNA, 15 bp, Homo sapiens
ctctgttctgacagt

SEQ ID NO: 1529758 - DNA, 15 bp, Homo sapiens
tctgttctgacagtg

SEQ ID NO: 1529759 - DNA, 15 bp, Homo sapiens
ctgttctgacagtgt

SEQ ID NO: 1529760 - DNA, 15 bp, Homo sapiens
tgttctgacagtgtc

SEQ ID NO: 1529761 - DNA, 15 bp, Homo sapiens
gttctgacagtgtca

SEQ ID NO: 1529762 - DNA, 15 bp, Homo sapiens
ttctgacagtgtcaa

SEQ ID NO: 1529763 - DNA, 15 bp, Homo sapiens
tctgacagtgtcaac

SEQ ID NO: 1529764 - DNA, 15 bp, Homo sapiens
ctgacagtgtcaacc

SEQ ID NO: 1529765 - DNA, 15 bp, Homo sapiens
tgacagtgtcaacct

SEQ ID NO: 1529766 - DNA, 15 bp, Homo sapiens
gacagtgtcaacctc

SEQ ID NO: 1529767 - DNA, 15 bp, Homo sapiens
acagtgtcaacctca

SEQ ID NO: 1529768 - DNA, 15 bp, Homo sapiens
cagtgtcaacctcag

SEQ ID NO: 1529769 - DNA, 15 bp, Homo sapiens
agtgtcaacctcagc

SEQ ID NO: 1529770 - DNA, 15 bp, Homo sapiens
gtgtcaacctcagcc

SEQ ID NO: 1529771 - DNA, 15 bp, Homo sapiens
tgtcaacctcagcca

SEQ ID NO: 1529772 - DNA, 15 bp, Homo sapiens
gtcaacctcagccag

SEQ ID NO: 1529773 - DNA, 15 bp, Homo sapiens
tcaacctcagccagg

SEQ ID NO: 1529774 - DNA, 15 bp, Homo sapiens
caacctcagccaggc

SEQ ID NO: 1529775 - DNA, 15 bp, Homo sapiens
aacctcagccaggct

SEQ ID NO: 1529776 - DNA, 15 bp, Homo sapiens
acctcagccaggctt

SEQ ID NO: 1529777 - DNA, 15 bp, Homo sapiens
cctcagccaggcttg

SEQ ID NO: 1529778 - DNA, 15 bp, Homo sapiens
ctcagccaggcttgt

SEQ ID NO: 1529779 - DNA, 15 bp, Homo sapiens
tcagccaggcttgtg

SEQ ID NO: 1529780 - DNA, 15 bp, Homo sapiens
cagccaggcttgtgt

SEQ ID NO: 1529781 - DNA, 15 bp, Homo sapiens
agccaggcttgtgtg

SEQ ID NO: 1529782 - DNA, 15 bp, Homo sapiens
gccaggcttgtgtgg

SEQ ID NO: 1529783 - DNA, 15 bp, Homo sapiens
ccaggcttgtgtggg

SEQ ID NO: 1529784 - DNA, 15 bp, Homo sapiens
caggcttgtgtgggc

SEQ ID NO: 1529785 - DNA, 15 bp, Homo sapiens
aggcttgtgtgggcc

SEQ ID NO: 1529786 - DNA, 15 bp, Homo sapiens
ggcttgtgtgggcca

SEQ ID NO: 1529787 - DNA, 15 bp, Homo sapiens
gcttgtgtgggccag

SEQ ID NO: 1529788 - DNA, 15 bp, Homo sapiens
cttgtgtgggccagg

SEQ ID NO: 1529789 - DNA, 15 bp, Homo sapiens
ttgtgtgggccaggt

SEQ ID NO: 1529790 - DNA, 15 bp, Homo sapiens
tgtgtgggccaggtg

SEQ ID NO: 1529791 - DNA, 15 bp, Homo sapiens
gtgtgggccaggtgt

SEQ ID NO: 1529792 - DNA, 15 bp, Homo sapiens
tgtgggccaggtgta

SEQ ID NO: 1529793 - DNA, 15 bp, Homo sapiens
gtgggccaggtgtac

SEQ ID NO: 1529794 - DNA, 15 bp, Homo sapiens
tgggccaggtgtact

SEQ ID NO: 1529795 - DNA, 15 bp, Homo sapiens
gggccaggtgtactg

SEQ ID NO: 1529796 - DNA, 15 bp, Homo sapiens
ggccaggtgtactgt

SEQ ID NO: 1529797 - DNA, 15 bp, Homo sapiens
gccaggtgtactgtt

SEQ ID NO: 1529798 - DNA, 15 bp, Homo sapiens
ccaggtgtactgttc

SEQ ID NO: 1529799 - DNA, 15 bp, Homo sapiens
caggtgtactgttct

SEQ ID NO: 1529800 - DNA, 15 bp, Homo sapiens
aggtgtactgttctg

SEQ ID NO: 1529801 - DNA, 15 bp, Homo sapiens
ggtgtactgttctgg

SEQ ID NO: 1529802 - DNA, 15 bp, Homo sapiens
gtgtactgttctggt

SEQ ID NO: 1529803 - DNA, 15 bp, Homo sapiens
tgtactgttctggtt

SEQ ID NO: 1529804 - DNA, 15 bp, Homo sapiens
gtactgttctggttc

SEQ ID NO: 1529805 - DNA, 15 bp, Homo sapiens
tactgttctggttca

SEQ ID NO: 1529806 - DNA, 15 bp, Homo sapiens
actgttctggttcag

SEQ ID NO: 1529807 - DNA, 15 bp, Homo sapiens
ctgttctggttcaga

SEQ ID NO: 1529808 - DNA, 15 bp, Homo sapiens
tgttctggttcagat

SEQ ID NO: 1529809 - DNA, 15 bp, Homo sapiens
gttctggttcagatt

SEQ ID NO: 1529810 - DNA, 15 bp, Homo sapiens
ttctggttcagattt

SEQ ID NO: 1529811 - DNA, 15 bp, Homo sapiens
tctggttcagatttc

SEQ ID NO: 1529812 - DNA, 15 bp, Homo sapiens
ctggttcagatttca

SEQ ID NO: 1529813 - DNA, 15 bp, Homo sapiens
tggttcagatttcaa

SEQ ID NO: 1529814 - DNA, 15 bp, Homo sapiens
ggttcagatttcaag

SEQ ID NO: 1529815 - DNA, 15 bp, Homo sapiens
gttcagatttcaagg

SEQ ID NO: 1529816 - DNA, 15 bp, Homo sapiens
ttcagatttcaagga

SEQ ID NO: 1529817 - DNA, 15 bp, Homo sapiens
tcagatttcaaggag

SEQ ID NO: 1529818 - DNA, 15 bp, Homo sapiens
cagatttcaaggaga

SEQ ID NO: 1529819 - DNA, 15 bp, Homo sapiens
agatttcaaggagat

SEQ ID NO: 1529820 - DNA, 15 bp, Homo sapiens
gatttcaaggagata

SEQ ID NO: 1529821 - DNA, 15 bp, Homo sapiens
atttcaaggagatag

SEQ ID NO: 1529822 - DNA, 15 bp, Homo sapiens
tttcaaggagatagt

SEQ ID NO: 1529823 - DNA, 15 bp, Homo sapiens
ttcaaggagatagtc

SEQ ID NO: 1529824 - DNA, 15 bp, Homo sapiens
tcaaggagatagtca

SEQ ID NO: 1529825 - DNA, 15 bp, Homo sapiens
caaggagatagtcag

SEQ ID NO: 1529826 - DNA, 15 bp, Homo sapiens
aaggagatagtcagg

SEQ ID NO: 1529827 - DNA, 15 bp, Homo sapiens
aggagatagtcaggg

SEQ ID NO: 1529828 - DNA, 15 bp, Homo sapiens
ggagatagtcagggc

SEQ ID NO: 1529829 - DNA, 15 bp, Homo sapiens
gagatagtcagggca

SEQ ID NO: 1529830 - DNA, 15 bp, Homo sapiens
agatagtcagggcag

SEQ ID NO: 1529831 - DNA, 15 bp, Homo sapiens
gatagtcagggcagg

SEQ ID NO: 1529832 - DNA, 15 bp, Homo sapiens
atagtcagggcaggc

SEQ ID NO: 1529833 - DNA, 15 bp, Homo sapiens
tagtcagggcaggcc

SEQ ID NO: 1529834 - DNA, 15 bp, Homo sapiens
agtcagggcaggccg

SEQ ID NO: 1529835 - DNA, 15 bp, Homo sapiens
gtcagggcaggccgc

SEQ ID NO: 1529836 - DNA, 15 bp, Homo sapiens
tcagggcaggccgcg

SEQ ID NO: 1529837 - DNA, 15 bp, Homo sapiens
cagggcaggccgcgc

SEQ ID NO: 1529838 - DNA, 15 bp, Homo sapiens
agggcaggccgcgcc

SEQ ID NO: 1529839 - DNA, 15 bp, Homo sapiens
gggcaggccgcgcca

SEQ ID NO: 1529840 - DNA, 15 bp, Homo sapiens
ggcaggccgcgccaa

SEQ ID NO: 1529841 - DNA, 15 bp, Homo sapiens
gcaggccgcgccaaa

SEQ ID NO: 1529842 - DNA, 15 bp, Homo sapiens
caggccgcgccaaag

SEQ ID NO: 1529843 - DNA, 15 bp, Homo sapiens
aggccgcgccaaagc

SEQ ID NO: 1529844 - DNA, 15 bp, Homo sapiens
ggccgcgccaaagcc

SEQ ID NO: 1529845 - DNA, 15 bp, Homo sapiens
gccgcgccaaagccc

SEQ ID NO: 1529846 - DNA, 15 bp, Homo sapiens
ccgcgccaaagccct

SEQ ID NO: 1529847 - DNA, 15 bp, Homo sapiens
cgcgccaaagccctc

SEQ ID NO: 1529848 - DNA, 15 bp, Homo sapiens
gcgccaaagccctcc

SEQ ID NO: 1529849 - DNA, 15 bp, Homo sapiens
cgccaaagccctccg

SEQ ID NO: 1529850 - DNA, 15 bp, Homo sapiens
gccaaagccctccga

SEQ ID NO: 1529851 - DNA, 15 bp, Homo sapiens
ccaaagccctccgat

SEQ ID NO: 1529852 - DNA, 15 bp, Homo sapiens
caaagccctccgatg

SEQ ID NO: 1529853 - DNA, 15 bp, Homo sapiens
aaagccctccgatgg

SEQ ID NO: 1529854 - DNA, 15 bp, Homo sapiens
aagccctccgatggg

SEQ ID NO: 1529855 - DNA, 15 bp, Homo sapiens
agccctccgatgggc

SEQ ID NO: 1529856 - DNA, 15 bp, Homo sapiens
gccctccgatgggct

SEQ ID NO: 1529857 - DNA, 15 bp, Homo sapiens
ccctccgatgggctc

SEQ ID NO: 1529858 - DNA, 15 bp, Homo sapiens
cctccgatgggctcc

SEQ ID NO: 1529859 - DNA, 15 bp, Homo sapiens
ctccgatgggctccc

SEQ ID NO: 1529860 - DNA, 15 bp, Homo sapiens
tccgatgggctcccc

SEQ ID NO: 1529861 - DNA, 15 bp, Homo sapiens
ccgatgggctcccct

SEQ ID NO: 1529862 - DNA, 15 bp, Homo sapiens
cgatgggctccccta

SEQ ID NO: 1529863 - DNA, 15 bp, Homo sapiens
gatgggctcccctac

SEQ ID NO: 1529864 - DNA, 15 bp, Homo sapiens
atgggctcccctact

SEQ ID NO: 1529865 - DNA, 15 bp, Homo sapiens
tgggctcccctactg

SEQ ID NO: 1529866 - DNA, 15 bp, Homo sapiens
gggctcccctactgc

SEQ ID NO: 1529867 - DNA, 15 bp, Homo sapiens
ggctcccctactgcc

SEQ ID NO: 1529868 - DNA, 15 bp, Homo sapiens
gctcccctactgcct

SEQ ID NO: 1529869 - DNA, 15 bp, Homo sapiens
ctcccctactgcctg

SEQ ID NO: 1529870 - DNA, 15 bp, Homo sapiens
tcccctactgcctgg

SEQ ID NO: 1529871 - DNA, 15 bp, Homo sapiens
cccctactgcctggc

SEQ ID NO: 1529872 - DNA, 15 bp, Homo sapiens
ccctactgcctggca

SEQ ID NO: 1529873 - DNA, 15 bp, Homo sapiens
cctactgcctggcag

SEQ ID NO: 1529874 - DNA, 15 bp, Homo sapiens
ctactgcctggcaga

SEQ ID NO: 1529875 - DNA, 15 bp, Homo sapiens
tactgcctggcagac

SEQ ID NO: 1529876 - DNA, 15 bp, Homo sapiens
actgcctggcagacc

SEQ ID NO: 1529877 - DNA, 15 bp, Homo sapiens
ctgcctggcagacct

SEQ ID NO: 1529878 - DNA, 15 bp, Homo sapiens
tgcctggcagacctg

SEQ ID NO: 1529879 - DNA, 15 bp, Homo sapiens
gcctggcagacctgt

SEQ ID NO: 1529880 - DNA, 15 bp, Homo sapiens
cctggcagacctgtc

SEQ ID NO: 1529881 - DNA, 15 bp, Homo sapiens
ctggcagacctgtcc

SEQ ID NO: 1529882 - DNA, 15 bp, Homo sapiens
tggcagacctgtcca

SEQ ID NO: 1529883 - DNA, 15 bp, Homo sapiens
ggcagacctgtccag

SEQ ID NO: 1529884 - DNA, 15 bp, Homo sapiens
gcagacctgtccagc

SEQ ID NO: 1529885 - DNA, 15 bp, Homo sapiens
cagacctgtccagct

SEQ ID NO: 1529886 - DNA, 15 bp, Homo sapiens
agacctgtccagctt

SEQ ID NO: 1529887 - DNA, 15 bp, Homo sapiens
gacctgtccagcttt

SEQ ID NO: 1529888 - DNA, 15 bp, Homo sapiens
acctgtccagctttg

SEQ ID NO: 1529889 - DNA, 15 bp, Homo sapiens
cctgtccagctttgg

SEQ ID NO: 1529890 - DNA, 15 bp, Homo sapiens
ctgtccagctttgga

SEQ ID NO: 1529891 - DNA, 15 bp, Homo sapiens
tgtccagctttggac

SEQ ID NO: 1529892 - DNA, 15 bp, Homo sapiens
gtccagctttggact

SEQ ID NO: 1529893 - DNA, 15 bp, Homo sapiens
tccagctttggactc

SEQ ID NO: 1529894 - DNA, 15 bp, Homo sapiens
ccagctttggactct

SEQ ID NO: 1529895 - DNA, 15 bp, Homo sapiens
cagctttggactctg

SEQ ID NO: 1529896 - DNA, 15 bp, Homo sapiens
agctttggactctgg

SEQ ID NO: 1529897 - DNA, 15 bp, Homo sapiens
gctttggactctggc

SEQ ID NO: 1529898 - DNA, 15 bp, Homo sapiens
ctttggactctggcc

SEQ ID NO: 1529899 - DNA, 15 bp, Homo sapiens
tttggactctggccc

SEQ ID NO: 1529900 - DNA, 15 bp, Homo sapiens
ttggactctggccct

SEQ ID NO: 1529901 - DNA, 15 bp, Homo sapiens
tggactctggccctg

SEQ ID NO: 1529902 - DNA, 15 bp, Homo sapiens
ggactctggccctgc

SEQ ID NO: 1529903 - DNA, 15 bp, Homo sapiens
gactctggccctgcg

SEQ ID NO: 1529904 - DNA, 15 bp, Homo sapiens
actctggccctgcga

SEQ ID NO: 1529905 - DNA, 15 bp, Homo sapiens
ctctggccctgcgac

SEQ ID NO: 1529906 - DNA, 15 bp, Homo sapiens
tctggccctgcgacc

SEQ ID NO: 1529907 - DNA, 15 bp, Homo sapiens
ctggccctgcgacct

SEQ ID NO: 1529908 - DNA, 15 bp, Homo sapiens
tggccctgcgacctg

SEQ ID NO: 1529909 - DNA, 15 bp, Homo sapiens
ggccctgcgacctgg

SEQ ID NO: 1529910 - DNA, 15 bp, Homo sapiens
gccctgcgacctgga

SEQ ID NO: 1529911 - DNA, 15 bp, Homo sapiens
ccctgcgacctggaa

SEQ ID NO: 1529912 - DNA, 15 bp, Homo sapiens
cctgcgacctggaag

SEQ ID NO: 1529913 - DNA, 15 bp, Homo sapiens
ctgcgacctggaagt

SEQ ID NO: 1529914 - DNA, 15 bp, Homo sapiens
tgcgacctggaagtc

SEQ ID NO: 1529915 - DNA, 15 bp, Homo sapiens
gcgacctggaagtca

SEQ ID NO: 1529916 - DNA, 15 bp, Homo sapiens
cgacctggaagtcag

SEQ ID NO: 1529917 - DNA, 15 bp, Homo sapiens
gacctggaagtcagg

SEQ ID NO: 1529918 - DNA, 15 bp, Homo sapiens
acctggaagtcaggc

SEQ ID NO: 1529919 - DNA, 15 bp, Homo sapiens
cctggaagtcaggct

SEQ ID NO: 1529920 - DNA, 15 bp, Homo sapiens
ctggaagtcaggctg

SEQ ID NO: 1529921 - DNA, 15 bp, Homo sapiens
tggaagtcaggctgc

SEQ ID NO: 1529922 - DNA, 15 bp, Homo sapiens
ggaagtcaggctgcc

SEQ ID NO: 1529923 - DNA, 15 bp, Homo sapiens
gaagtcaggctgcca

SEQ ID NO: 1529924 - DNA, 15 bp, Homo sapiens
aagtcaggctgccaa

SEQ ID NO: 1529925 - DNA, 15 bp, Homo sapiens
agtcaggctgccaag

SEQ ID NO: 1529926 - DNA, 15 bp, Homo sapiens
gtcaggctgccaaga

SEQ ID NO: 1529927 - DNA, 15 bp, Homo sapiens
tcaggctgccaagag

SEQ ID NO: 1529928 - DNA, 15 bp, Homo sapiens
caggctgccaagagg

SEQ ID NO: 1529929 - DNA, 15 bp, Homo sapiens
aggctgccaagaggt

SEQ ID NO: 1529930 - DNA, 15 bp, Homo sapiens
ggctgccaagaggtc

SEQ ID NO: 1529931 - DNA, 15 bp, Homo sapiens
gctgccaagaggtcc

SEQ ID NO: 1529932 - DNA, 15 bp, Homo sapiens
ctgccaagaggtcca

SEQ ID NO: 1529933 - DNA, 15 bp, Homo sapiens
tgccaagaggtccag

SEQ ID NO: 1529934 - DNA, 15 bp, Homo sapiens
gccaagaggtccagg

SEQ ID NO: 1529935 - DNA, 15 bp, Homo sapiens
ccaagaggtccaggc

SEQ ID NO: 1529936 - DNA, 15 bp, Homo sapiens
caagaggtccaggca

SEQ ID NO: 1529937 - DNA, 15 bp, Homo sapiens
aagaggtccaggcag

SEQ ID NO: 1529938 - DNA, 15 bp, Homo sapiens
agaggtccaggcagt

SEQ ID NO: 1529939 - DNA, 15 bp, Homo sapiens
gaggtccaggcagtg

SEQ ID NO: 1529940 - DNA, 15 bp, Homo sapiens
aggtccaggcagtgg

SEQ ID NO: 1529941 - DNA, 15 bp, Homo sapiens
ggtccaggcagtggc

SEQ ID NO: 1529942 - DNA, 15 bp, Homo sapiens
gtccaggcagtggcc

SEQ ID NO: 1529943 - DNA, 15 bp, Homo sapiens
tccaggcagtggcct

SEQ ID NO: 1529944 - DNA, 15 bp, Homo sapiens
ccaggcagtggcctc

SEQ ID NO: 1529945 - DNA, 15 bp, Homo sapiens
caggcagtggcctcc

SEQ ID NO: 1529946 - DNA, 15 bp, Homo sapiens
aggcagtggcctcca

SEQ ID NO: 1529947 - DNA, 15 bp, Homo sapiens
ggcagtggcctccac

SEQ ID NO: 1529948 - DNA, 15 bp, Homo sapiens
gcagtggcctccact

SEQ ID NO: 1529949 - DNA, 15 bp, Homo sapiens
cagtggcctccactg

SEQ ID NO: 1529950 - DNA, 15 bp, Homo sapiens
agtggcctccactgt

SEQ ID NO: 1529951 - DNA, 15 bp, Homo sapiens
gtggcctccactgtg

SEQ ID NO: 1529952 - DNA, 15 bp, Homo sapiens
tggcctccactgtgg

SEQ ID NO: 1529953 - DNA, 15 bp, Homo sapiens
ggcctccactgtgga

SEQ ID NO: 1529954 - DNA, 15 bp, Homo sapiens
gcctccactgtggag

SEQ ID NO: 1529955 - DNA, 15 bp, Homo sapiens
cctccactgtggagg

SEQ ID NO: 1529956 - DNA, 15 bp, Homo sapiens
ctccactgtggaggg

SEQ ID NO: 1529957 - DNA, 15 bp, Homo sapiens
tccactgtggagggt

SEQ ID NO: 1529958 - DNA, 15 bp, Homo sapiens
ccactgtggagggtc

SEQ ID NO: 1529959 - DNA, 15 bp, Homo sapiens
cactgtggagggtct

SEQ ID NO: 1529960 - DNA, 15 bp, Homo sapiens
actgtggagggtctc

SEQ ID NO: 1529961 - DNA, 15 bp, Homo sapiens
ctgtggagggtctct

SEQ ID NO: 1529962 - DNA, 15 bp, Homo sapiens
tgtggagggtctctg

SEQ ID NO: 1529963 - DNA, 15 bp, Homo sapiens
gtggagggtctctgg

SEQ ID NO: 1529964 - DNA, 15 bp, Homo sapiens
tggagggtctctgga

SEQ ID NO: 1529965 - DNA, 15 bp, Homo sapiens
ggagggtctctggag

SEQ ID NO: 1529966 - DNA, 15 bp, Homo sapiens
agggtctctggagag

SEQ ID NO: 1529967 - DNA, 15 bp, Homo sapiens
gggtctctggagagt

SEQ ID NO: 1529968 - DNA, 15 bp, Homo sapiens
ggtctctggagagtt

SEQ ID NO: 1529969 - DNA, 15 bp, Homo sapiens
gtctctggagagttt

SEQ ID NO: 1529970 - DNA, 15 bp, Homo sapiens
tctctggagagttta

SEQ ID NO: 1529971 - DNA, 15 bp, Homo sapiens
ctctggagagtttac

SEQ ID NO: 1529972 - DNA, 15 bp, Homo sapiens
tctggagagtttaca

SEQ ID NO: 1529973 - DNA, 15 bp, Homo sapiens
ctggagagtttacag

SEQ ID NO: 1529974 - DNA, 15 bp, Homo sapiens
tggagagtttacagc

SEQ ID NO: 1529975 - DNA, 15 bp, Homo sapiens
ggagagtttacagcc

SEQ ID NO: 1529976 - DNA, 15 bp, Homo sapiens
gagagtttacagccc

SEQ ID NO: 1529977 - DNA, 15 bp, Homo sapiens
agagtttacagccct

SEQ ID NO: 1529978 - DNA, 15 bp, Homo sapiens
gagtttacagcccta

SEQ ID NO: 1529979 - DNA, 15 bp, Homo sapiens
agtttacagccctag

SEQ ID NO: 1529980 - DNA, 15 bp, Homo sapiens
gtttacagccctaga

SEQ ID NO: 1529981 - DNA, 15 bp, Homo sapiens
tttacagccctagat

SEQ ID NO: 1529982 - DNA, 15 bp, Homo sapiens
ttacagccctagata

SEQ ID NO: 1529983 - DNA, 15 bp, Homo sapiens
tacagccctagatag

SEQ ID NO: 1529984 - DNA, 15 bp, Homo sapiens
acagccctagatagg

SEQ ID NO: 1529985 - DNA, 15 bp, Homo sapiens
cagccctagataggg

SEQ ID NO: 1529986 - DNA, 15 bp, Homo sapiens
agccctagatagggg

SEQ ID NO: 1529987 - DNA, 15 bp, Homo sapiens
gccctagataggggg

SEQ ID NO: 1529988 - DNA, 15 bp, Homo sapiens
ccctagatagggggg

SEQ ID NO: 1529989 - DNA, 15 bp, Homo sapiens
cctagataggggggt

SEQ ID NO: 1529990 - DNA, 15 bp, Homo sapiens
ctagataggggggtt

SEQ ID NO: 1529991 - DNA, 15 bp, Homo sapiens
tagataggggggtta

SEQ ID NO: 1529992 - DNA, 15 bp, Homo sapiens
agataggggggttag

SEQ ID NO: 1529993 - DNA, 15 bp, Homo sapiens
gataggggggttagg

SEQ ID NO: 1529994 - DNA, 15 bp, Homo sapiens
ataggggggttaggg

SEQ ID NO: 1529995 - DNA, 15 bp, Homo sapiens
taggggggttaggga

SEQ ID NO: 1529996 - DNA, 15 bp, Homo sapiens
aggggggttagggat

SEQ ID NO: 1529997 - DNA, 15 bp, Homo sapiens
ggggggttagggatg

SEQ ID NO: 1529998 - DNA, 15 bp, Homo sapiens
gggggttagggatgt

SEQ ID NO: 1529999 - DNA, 15 bp, Homo sapiens
ggggttagggatgtg

SEQ ID NO: 1530000 - DNA, 15 bp, Homo sapiens
gggttagggatgtga

SEQ ID NO: 1530001 - DNA, 15 bp, Homo sapiens
ggttagggatgtgag

SEQ ID NO: 1530002 - DNA, 15 bp, Homo sapiens
gttagggatgtgaga

SEQ ID NO: 1530003 - DNA, 15 bp, Homo sapiens
ttagggatgtgagat

SEQ ID NO: 1530004 - DNA, 15 bp, Homo sapiens
tagggatgtgagatg

SEQ ID NO: 1530005 - DNA, 15 bp, Homo sapiens
agggatgtgagatgg

SEQ ID NO: 1530006 - DNA, 15 bp, Homo sapiens
gggatgtgagatggt

SEQ ID NO: 1530007 - DNA, 15 bp, Homo sapiens
ggatgtgagatggtc

SEQ ID NO: 1530008 - DNA, 15 bp, Homo sapiens
gatgtgagatggtcc

SEQ ID NO: 1530009 - DNA, 15 bp, Homo sapiens
atgtgagatggtccc

SEQ ID NO: 1530010 - DNA, 15 bp, Homo sapiens
tgtgagatggtccca

SEQ ID NO: 1530011 - DNA, 15 bp, Homo sapiens
gtgagatggtcccag

SEQ ID NO: 1530012 - DNA, 15 bp, Homo sapiens
tgagatggtcccagg

SEQ ID NO: 1530013 - DNA, 15 bp, Homo sapiens
gagatggtcccaggg

SEQ ID NO: 1530014 - DNA, 15 bp, Homo sapiens
agatggtcccagggg

SEQ ID NO: 1530015 - DNA, 15 bp, Homo sapiens
gatggtcccaggggc

SEQ ID NO: 1530016 - DNA, 15 bp, Homo sapiens
atggtcccaggggcc

SEQ ID NO: 1530017 - DNA, 15 bp, Homo sapiens
tggtcccaggggcct

SEQ ID NO: 1530018 - DNA, 15 bp, Homo sapiens
ggtcccaggggcctg

SEQ ID NO: 1530019 - DNA, 15 bp, Homo sapiens
gtcccaggggcctgc

SEQ ID NO: 1530020 - DNA, 15 bp, Homo sapiens
tcccaggggcctgct

SEQ ID NO: 1530021 - DNA, 15 bp, Homo sapiens
cccaggggcctgctc

SEQ ID NO: 1530022 - DNA, 15 bp, Homo sapiens
ccaggggcctgctcc

SEQ ID NO: 1530023 - DNA, 15 bp, Homo sapiens
caggggcctgctcct

SEQ ID NO: 1530024 - DNA, 15 bp, Homo sapiens
aggggcctgctcctg

SEQ ID NO: 1530025 - DNA, 15 bp, Homo sapiens
ggggcctgctcctga

SEQ ID NO: 1530026 - DNA, 15 bp, Homo sapiens
gggcctgctcctgag

SEQ ID NO: 1530027 - DNA, 15 bp, Homo sapiens
ggcctgctcctgagc

SEQ ID NO: 1530028 - DNA, 15 bp, Homo sapiens
gcctgctcctgagcc

SEQ ID NO: 1530029 - DNA, 15 bp, Homo sapiens
cctgctcctgagcca

SEQ ID NO: 1530030 - DNA, 15 bp, Homo sapiens
ctgctcctgagccac

SEQ ID NO: 1530031 - DNA, 15 bp, Homo sapiens
tgctcctgagccacg

SEQ ID NO: 1530032 - DNA, 15 bp, Homo sapiens
gctcctgagccacgc

SEQ ID NO: 1530033 - DNA, 15 bp, Homo sapiens
ctcctgagccacgcc

SEQ ID NO: 1530034 - DNA, 15 bp, Homo sapiens
tcctgagccacgcca

SEQ ID NO: 1530035 - DNA, 15 bp, Homo sapiens
cctgagccacgccaa

SEQ ID NO: 1530036 - DNA, 15 bp, Homo sapiens
ctgagccacgccaag

SEQ ID NO: 1530037 - DNA, 15 bp, Homo sapiens
tgagccacgccaagc

SEQ ID NO: 1530038 - DNA, 15 bp, Homo sapiens
gagccacgccaagct

SEQ ID NO: 1530039 - DNA, 15 bp, Homo sapiens
agccacgccaagctg

SEQ ID NO: 1530040 - DNA, 15 bp, Homo sapiens
gccacgccaagctgc

SEQ ID NO: 1530041 - DNA, 15 bp, Homo sapiens
ccacgccaagctgcc

SEQ ID NO: 1530042 - DNA, 15 bp, Homo sapiens
cacgccaagctgcct

SEQ ID NO: 1530043 - DNA, 15 bp, Homo sapiens
acgccaagctgcctg

SEQ ID NO: 1530044 - DNA, 15 bp, Homo sapiens
cgccaagctgcctgc

SEQ ID NO: 1530045 - DNA, 15 bp, Homo sapiens
gccaagctgcctgct

SEQ ID NO: 1530046 - DNA, 15 bp, Homo sapiens
ccaagctgcctgctc

SEQ ID NO: 1530047 - DNA, 15 bp, Homo sapiens
caagctgcctgctcc

SEQ ID NO: 1530048 - DNA, 15 bp, Homo sapiens
aagctgcctgctccc

SEQ ID NO: 1530049 - DNA, 15 bp, Homo sapiens
agctgcctgctccct

SEQ ID NO: 1530050 - DNA, 15 bp, Homo sapiens
gctgcctgctccctt

SEQ ID NO: 1530051 - DNA, 15 bp, Homo sapiens
ctgcctgctcccttt

SEQ ID NO: 1530052 - DNA, 15 bp, Homo sapiens
tgcctgctccctttc

SEQ ID NO: 1530053 - DNA, 15 bp, Homo sapiens
gcctgctccctttcc

SEQ ID NO: 1530054 - DNA, 15 bp, Homo sapiens
cctgctccctttcct

SEQ ID NO: 1530055 - DNA, 15 bp, Homo sapiens
ctgctccctttcctc

SEQ ID NO: 1530056 - DNA, 15 bp, Homo sapiens
tgctccctttcctct

SEQ ID NO: 1530057 - DNA, 15 bp, Homo sapiens
gctccctttcctctg

SEQ ID NO: 1530058 - DNA, 15 bp, Homo sapiens
ctccctttcctctgc

SEQ ID NO: 1530059 - DNA, 15 bp, Homo sapiens
tccctttcctctgct

SEQ ID NO: 1530060 - DNA, 15 bp, Homo sapiens
ccctttcctctgctt

SEQ ID NO: 1530061 - DNA, 15 bp, Homo sapiens
cctttcctctgcttc

SEQ ID NO: 1530062 - DNA, 15 bp, Homo sapiens
ctttcctctgcttcc

SEQ ID NO: 1530063 - DNA, 15 bp, Homo sapiens
tttcctctgcttcca

SEQ ID NO: 1530064 - DNA, 15 bp, Homo sapiens
ttcctctgcttccag

SEQ ID NO: 1530065 - DNA, 15 bp, Homo sapiens
tcctctgcttccaga

SEQ ID NO: 1530066 - DNA, 15 bp, Homo sapiens
cctctgcttccagac

SEQ ID NO: 1530067 - DNA, 15 bp, Homo sapiens
ctctgcttccagact

SEQ ID NO: 1530068 - DNA, 15 bp, Homo sapiens
tctgcttccagactc

SEQ ID NO: 1530069 - DNA, 15 bp, Homo sapiens
ctgcttccagactca

SEQ ID NO: 1530070 - DNA, 15 bp, Homo sapiens
tgcttccagactcac

SEQ ID NO: 1530071 - DNA, 15 bp, Homo sapiens
gcttccagactcacg

SEQ ID NO: 1530072 - DNA, 15 bp, Homo sapiens
cttccagactcacgg

SEQ ID NO: 1530073 - DNA, 15 bp, Homo sapiens
ttccagactcacggg

SEQ ID NO: 1530074 - DNA, 15 bp, Homo sapiens
tccagactcacggga

SEQ ID NO: 1530075 - DNA, 15 bp, Homo sapiens
ccagactcacgggat

SEQ ID NO: 1530076 - DNA, 15 bp, Homo sapiens
cagactcacgggatc

SEQ ID NO: 1530077 - DNA, 15 bp, Homo sapiens
agactcacgggatcc

SEQ ID NO: 1530078 - DNA, 15 bp, Homo sapiens
gactcacgggatcct

SEQ ID NO: 1530079 - DNA, 15 bp, Homo sapiens
actcacgggatcctc

SEQ ID NO: 1530080 - DNA, 15 bp, Homo sapiens
ctcacgggatcctct

SEQ ID NO: 1530081 - DNA, 15 bp, Homo sapiens
tcacgggatcctctg

SEQ ID NO: 1530082 - DNA, 15 bp, Homo sapiens
cacgggatcctctgc

SEQ ID NO: 1530083 - DNA, 15 bp, Homo sapiens
acgggatcctctgct

SEQ ID NO: 1530084 - DNA, 15 bp, Homo sapiens
cgggatcctctgctc

SEQ ID NO: 1530085 - DNA, 15 bp, Homo sapiens
gggatcctctgctca

SEQ ID NO: 1530086 - DNA, 15 bp, Homo sapiens
ggatcctctgctcat

SEQ ID NO: 1530087 - DNA, 15 bp, Homo sapiens
gatcctctgctcatc

SEQ ID NO: 1530088 - DNA, 15 bp, Homo sapiens
atcctctgctcatca

SEQ ID NO: 1530089 - DNA, 15 bp, Homo sapiens
tcctctgctcatcag

SEQ ID NO: 1530090 - DNA, 15 bp, Homo sapiens
cctctgctcatcaga

SEQ ID NO: 1530091 - DNA, 15 bp, Homo sapiens
ctctgctcatcagaa

SEQ ID NO: 1530092 - DNA, 15 bp, Homo sapiens
tctgctcatcagaac

SEQ ID NO: 1530093 - DNA, 15 bp, Homo sapiens
ctgctcatcagaaca

SEQ ID NO: 1530094 - DNA, 15 bp, Homo sapiens
tgctcatcagaacag

SEQ ID NO: 1530095 - DNA, 15 bp, Homo sapiens
gctcatcagaacagg

SEQ ID NO: 1530096 - DNA, 15 bp, Homo sapiens
ctcatcagaacagga

SEQ ID NO: 1530097 - DNA, 15 bp, Homo sapiens
tcatcagaacaggag

SEQ ID NO: 1530098 - DNA, 15 bp, Homo sapiens
catcagaacaggagt

SEQ ID NO: 1530099 - DNA, 15 bp, Homo sapiens
atcagaacaggagtg

SEQ ID NO: 1530100 - DNA, 15 bp, Homo sapiens
tcagaacaggagtgt

SEQ ID NO: 1530101 - DNA, 15 bp, Homo sapiens
cagaacaggagtgtg

SEQ ID NO: 1530102 - DNA, 15 bp, Homo sapiens
agaacaggagtgtgg

SEQ ID NO: 1530103 - DNA, 15 bp, Homo sapiens
gaacaggagtgtggg

SEQ ID NO: 1530104 - DNA, 15 bp, Homo sapiens
aacaggagtgtggga

SEQ ID NO: 1530105 - DNA, 15 bp, Homo sapiens
acaggagtgtgggag

SEQ ID NO: 1530106 - DNA, 15 bp, Homo sapiens
caggagtgtgggaga

SEQ ID NO: 1530107 - DNA, 15 bp, Homo sapiens
aggagtgtgggagac

SEQ ID NO: 1530108 - DNA, 15 bp, Homo sapiens
ggagtgtgggagacc

SEQ ID NO: 1530109 - DNA, 15 bp, Homo sapiens
gagtgtgggagaccc

SEQ ID NO: 1530110 - DNA, 15 bp, Homo sapiens
agtgtgggagaccct

SEQ ID NO: 1530111 - DNA, 15 bp, Homo sapiens
gtgtgggagaccctg

SEQ ID NO: 1530112 - DNA, 15 bp, Homo sapiens
tgtgggagaccctga

SEQ ID NO: 1530113 - DNA, 15 bp, Homo sapiens
gtgggagaccctgag

SEQ ID NO: 1530114 - DNA, 15 bp, Homo sapiens
tgggagaccctgaga

SEQ ID NO: 1530115 - DNA, 15 bp, Homo sapiens
gggagaccctgagac

SEQ ID NO: 1530116 - DNA, 15 bp, Homo sapiens
ggagaccctgagaca
